United States Patent Application Publication US 2014/0004565 A1 - sequence listing, part 84

SEQ ID NO: 2067007 - RNA, 19 nt, Artificial Sequence
  Description of Artificial Sequence: Synthetic oligonucleotide
cggucuguccuguggacag

SEQ ID NO: 2067008 - RNA, 19 nt, Artificial Sequence
  Description of Artificial Sequence: Synthetic oligonucleotide
cacucucugcaacgaucuc

SEQ ID NO: 2067009 - RNA, 19 nt, Artificial Sequence
  Description of Artificial Sequence: Synthetic oligonucleotide
cucacccuccucugucaca

SEQ ID NO: 2067010 - RNA, 19 nt, Artificial Sequence
  Description of Artificial Sequence: Synthetic oligonucleotide
ccacugguuugguccagag

SEQ ID NO: 2067011 - RNA, 19 nt, Artificial Sequence
  Description of Artificial Sequence: Synthetic oligonucleotide
agcgucgccacaagaugaa

SEQ ID NO: 2067012 - RNA, 19 nt, Artificial Sequence
  Description of Artificial Sequence: Synthetic oligonucleotide
guuccucuacugggccuag

SEQ ID NO: 2067013 - RNA, 19 nt, Artificial Sequence
  Description of Artificial Sequence: Synthetic oligonucleotide
gugggagcccacagcgagc

SEQ ID NO: 2067014 - RNA, 19 nt, Artificial Sequence
  Description of Artificial Sequence: Synthetic oligonucleotide
cuucggauucauguugggu

SEQ ID NO: 2067015 - RNA, 19 nt, Artificial Sequence
  Description of Artificial Sequence: Synthetic oligonucleotide
uagcuuuccuuggggugau

SEQ ID NO: 2067016 - RNA, 19 nt, Artificial Sequence
  Description of Artificial Sequence: Synthetic oligonucleotide
gggccguuccucauguuca

SEQ ID NO: 2067017 - RNA, 19 nt, Artificial Sequence
  Description of Artificial Sequence: Synthetic oligonucleotide
gcgccuugguuccucuagc

SEQ ID NO: 2067018 - RNA, 19 nt, Artificial Sequence
  Description of Artificial Sequence: Synthetic oligonucleotide
cgccacaagaugaacuuca

SEQ ID NO: 2067019 - RNA, 19 nt, Artificial Sequence
  Description of Artificial Sequence: Synthetic oligonucleotide
gaguugugaagggcggagu

SEQ ID NO: 2067020 - RNA, 19 nt, Artificial Sequence
  Description of Artificial Sequence: Synthetic oligonucleotide
caucccgacccuggccagc

SEQ ID NO: 2067021 - RNA, 19 nt, Artificial Sequence
  Description of Artificial Sequence: Synthetic oligonucleotide
gcauaguucgggaaggcau

SEQ ID NO: 2067022 - RNA, 19 nt, Artificial Sequence
  Description of Artificial Sequence: Synthetic oligonucleotide
agggcgccuugguuccucu

SEQ ID NO: 2067023 - RNA, 19 nt, Artificial Sequence
  Description of Artificial Sequence: Synthetic oligonucleotide
cagggcuaggcguuccucu

SEQ ID NO: 2067024 - RNA, 19 nt, Artificial Sequence
  Description of Artificial Sequence: Synthetic oligonucleotide
gccuagguguggguuuggg

SEQ ID NO: 2067025 - RNA, 19 nt, Artificial Sequence
  Description of Artificial Sequence: Synthetic oligonucleotide
cugugggagcccacagcga

SEQ ID NO: 2067026 - RNA, 19 nt, Artificial Sequence
  Description of Artificial Sequence: Synthetic oligonucleotide
ggaagcgucgccacaagau

SEQ ID NO: 2067027 - RNA, 19 nt, Artificial Sequence
  Description of Artificial Sequence: Synthetic oligonucleotide
gccaccauccuuucacugu

SEQ ID NO: 2067028 - RNA, 19 nt, Artificial Sequence
  Description of Artificial Sequence: Synthetic oligonucleotide
gggcuguaaagaggccggg

SEQ ID NO: 2067029 - RNA, 19 nt, Artificial Sequence
  Description of Artificial Sequence: Synthetic oligonucleotide
cuguaaagaggccgggauu

SEQ ID NO: 2067030 - RNA, 19 nt, Artificial Sequence
  Description of Artificial Sequence: Synthetic oligonucleotide
gaaccacaggaaagaggua

SEQ ID NO: 2067031 - RNA, 19 nt, Artificial Sequence
  Description of Artificial Sequence: Synthetic oligonucleotide
ccuagguguggguuuggga

SEQ ID NO: 2067032 - RNA, 19 nt, Artificial Sequence
  Description of Artificial Sequence: Synthetic oligonucleotide
cacacaaggccaccauccu

SEQ ID NO: 2067033 - RNA, 19 nt, Artificial Sequence
  Description of Artificial Sequence: Synthetic oligonucleotide
cagcgggccguuccucaug

SEQ ID NO: 2067034 - RNA, 19 nt, Artificial Sequence
  Description of Artificial Sequence: Synthetic oligonucleotide
gugaccccuucuccaagua

SEQ ID NO: 2067035 - RNA, 19 nt, Artificial Sequence
  Description of Artificial Sequence: Synthetic oligonucleotide
cccgacccuggccagcggg

SEQ ID NO: 2067036 - RNA, 19 nt, Artificial Sequence
  Description of Artificial Sequence: Synthetic oligonucleotide
gggcuaggcguuccucuac

SEQ ID NO: 2067037 - RNA, 19 nt, Artificial Sequence
  Description of Artificial Sequence: Synthetic oligonucleotide
aggccccaugggaaaggag

SEQ ID NO: 2067038 - RNA, 19 nt, Artificial Sequence
  Description of Artificial Sequence: Synthetic oligonucleotide
cuccacugguuugguccag

SEQ ID NO: 2067039 - RNA, 19 nt, Artificial Sequence
  Description of Artificial Sequence: Synthetic oligonucleotide
gucuaagaucacaucuuuu

SEQ ID NO: 2067040 - RNA, 19 nt, Artificial Sequence
  Description of Artificial Sequence: Synthetic oligonucleotide
gggaggugaaccacaggaa

SEQ ID NO: 2067041 - RNA, 19 nt, Artificial Sequence
  Description of Artificial Sequence: Synthetic oligonucleotide
cuuuccuuggggugauguu

SEQ ID NO: 2067042 - RNA, 19 nt, Artificial Sequence
  Description of Artificial Sequence: Synthetic oligonucleotide
gggcggaguugaucucucc

SEQ ID NO: 2067043 - RNA, 19 nt, Artificial Sequence
  Description of Artificial Sequence: Synthetic oligonucleotide
agcgagcuccaaacuugga

SEQ ID NO: 2067044 - RNA, 19 nt, Artificial Sequence
  Description of Artificial Sequence: Synthetic oligonucleotide
guguggguuugggaggucu

SEQ ID NO: 2067045 - RNA, 19 nt, Artificial Sequence
  Description of Artificial Sequence: Synthetic oligonucleotide
ggcuguaaagaggccggga

SEQ ID NO: 2067046 - RNA, 19 nt, Artificial Sequence
  Description of Artificial Sequence: Synthetic oligonucleotide
cccaaucuucucguccuug

SEQ ID NO: 2067047 - RNA, 19 nt, Artificial Sequence
  Description of Artificial Sequence: Synthetic oligonucleotide
acccuggccagcgggccgu

SEQ ID NO: 2067048 - RNA, 19 nt, Artificial Sequence
  Description of Artificial Sequence: Synthetic oligonucleotide
ccgacccuggccagcgggc

SEQ ID NO: 2067049 - RNA, 19 nt, Artificial Sequence
  Description of Artificial Sequence: Synthetic oligonucleotide
gucacucggucuguccugu

SEQ ID NO: 2067050 - RNA, 19 nt, Artificial Sequence
  Description of Artificial Sequence: Synthetic oligonucleotide
ccaggccccaugggaaagg

SEQ ID NO: 2067051 - RNA, 19 nt, Artificial Sequence
  Description of Artificial Sequence: Synthetic oligonucleotide
ggaugauggcacaccggaa

SEQ ID NO: 2067052 - RNA, 19 nt, Artificial Sequence
  Description of Artificial Sequence: Synthetic oligonucleotide
cgggccguuccucauguuc

SEQ ID NO: 2067053 - RNA, 19 nt, Artificial Sequence
  Description of Artificial Sequence: Synthetic oligonucleotide
caacgaucuccaaggucau

SEQ ID NO: 2067054 - RNA, 19 nt, Artificial Sequence
  Description of Artificial Sequence: Synthetic oligonucleotide
ggcuaggcguuccucuacu

SEQ ID NO: 2067055 - RNA, 19 nt, Artificial Sequence
  Description of Artificial Sequence: Synthetic oligonucleotide
ucagggcgccuugguuccu

SEQ ID NO: 2067056 - RNA, 19 nt, Artificial Sequence
  Description of Artificial Sequence: Synthetic oligonucleotide
cugcaacgaucuccaaggu

SEQ ID NO: 2067057 - RNA, 19 nt, Artificial Sequence
  Description of Artificial Sequence: Synthetic oligonucleotide
gccagcgggccguuccuca

SEQ ID NO: 2067058 - RNA, 19 nt, Artificial Sequence
  Description of Artificial Sequence: Synthetic oligonucleotide
caccggaagcgucgccaca

SEQ ID NO: 2067059 - RNA, 19 nt, Artificial Sequence
  Description of Artificial Sequence: Synthetic oligonucleotide
guccuguggacaggggccu

SEQ ID NO: 2067060 - RNA, 19 nt, Artificial Sequence
  Description of Artificial Sequence: Synthetic oligonucleotide
ccuuggggugauguuaaaa

SEQ ID NO: 2067061 - RNA, 19 nt, Artificial Sequence
  Description of Artificial Sequence: Synthetic oligonucleotide
gccgggauuccacgugcuc

SEQ ID NO: 2067062 - RNA, 19 nt, Artificial Sequence
  Description of Artificial Sequence: Synthetic oligonucleotide
aagcagcuugugaccccuu

SEQ ID NO: 2067063 - RNA, 19 nt, Artificial Sequence
  Description of Artificial Sequence: Synthetic oligonucleotide
cagggcgccuugguuccuc

SEQ ID NO: 2067064 - RNA, 19 nt, Artificial Sequence
  Description of Artificial Sequence: Synthetic oligonucleotide
cuucuccaaguagagucuu

SEQ ID NO: 2067065 - RNA, 19 nt, Artificial Sequence
  Description of Artificial Sequence: Synthetic oligonucleotide
gcacaccggaagcgucgcc

SEQ ID NO: 2067066 - RNA, 19 nt, Artificial Sequence
  Description of Artificial Sequence: Synthetic oligonucleotide
uccuguggacaggggccuu

SEQ ID NO: 2067067 - RNA, 19 nt, Artificial Sequence
  Description of Artificial Sequence: Synthetic oligonucleotide
ccggaagcgucgccacaag

SEQ ID NO: 2067068 - RNA, 19 nt, Artificial Sequence
  Description of Artificial Sequence: Synthetic oligonucleotide
cgucgccacaagaugaacu

SEQ ID NO: 2067069 - RNA, 19 nt, Artificial Sequence
  Description of Artificial Sequence: Synthetic oligonucleotide
caggggccuugacccugug

SEQ ID NO: 2067070 - RNA, 19 nt, Artificial Sequence
  Description of Artificial Sequence: Synthetic oligonucleotide
cacccuccucugucacaca

SEQ ID NO: 2067071 - RNA, 19 nt, Artificial Sequence
  Description of Artificial Sequence: Synthetic oligonucleotide
gcgucgccacaagaugaac

SEQ ID NO: 2067072 - RNA, 19 nt, Artificial Sequence
  Description of Artificial Sequence: Synthetic oligonucleotide
gcguuccucuacugggccu

SEQ ID NO: 2067073 - RNA, 19 nt, Artificial Sequence
  Description of Artificial Sequence: Synthetic oligonucleotide
ggacaggggccuugacccu

SEQ ID NO: 2067074 - RNA, 19 nt, Artificial Sequence
  Description of Artificial Sequence: Synthetic oligonucleotide
cgucuaagaucacaucuuu

SEQ ID NO: 2067075 - RNA, 19 nt, Artificial Sequence
  Description of Artificial Sequence: Synthetic oligonucleotide
cuggcugcagagggcugua

SEQ ID NO: 2067076 - RNA, 19 nt, Artificial Sequence
  Description of Artificial Sequence: Synthetic oligonucleotide
cugggccuagguguggguu

SEQ ID NO: 2067077 - RNA, 19 nt, Artificial Sequence
  Description of Artificial Sequence: Synthetic oligonucleotide
ggauucauguuggguucau

SEQ ID NO: 2067078 - RNA, 19 nt, Artificial Sequence
  Description of Artificial Sequence: Synthetic oligonucleotide
ccaagaacucagugagcau

SEQ ID NO: 2067079 - RNA, 19 nt, Artificial Sequence
  Description of Artificial Sequence: Synthetic oligonucleotide
gcccgccagcaucuucuuc

SEQ ID NO: 2067080 - RNA, 19 nt, Artificial Sequence
  Description of Artificial Sequence: Synthetic oligonucleotide
cggaagcgucgccacaaga

SEQ ID NO: 2067081 - RNA, 19 nt, Artificial Sequence
  Description of Artificial Sequence: Synthetic oligonucleotide
gccacaagaugaacuucau

SEQ ID NO: 2067082 - RNA, 19 nt, Artificial Sequence
  Description of Artificial Sequence: Synthetic oligonucleotide
ccaggccugcccagaaccu

SEQ ID NO: 2067083 - RNA, 19 nt, Artificial Sequence
  Description of Artificial Sequence: Synthetic oligonucleotide
gggagcccacagcgagcuc

SEQ ID NO: 2067084 - RNA, 19 nt, Artificial Sequence
  Description of Artificial Sequence: Synthetic oligonucleotide
gggcgccuugguuccucua

SEQ ID NO: 2067085 - RNA, 19 nt, Artificial Sequence
  Description of Artificial Sequence: Synthetic oligonucleotide
ggccgggauuccacgugcu

SEQ ID NO: 2067086 - RNA, 19 nt, Artificial Sequence
  Description of Artificial Sequence: Synthetic oligonucleotide
cgugaggcugaggucgucu

SEQ ID NO: 2067087 - RNA, 19 nt, Artificial Sequence
  Description of Artificial Sequence: Synthetic oligonucleotide
cccgugaggcugaggucgu

SEQ ID NO: 2067088 - RNA, 19 nt, Artificial Sequence
  Description of Artificial Sequence: Synthetic oligonucleotide
ccgugaggcugaggucguc

SEQ ID NO: 2067089 - RNA, 19 nt, Artificial Sequence
  Description of Artificial Sequence: Synthetic oligonucleotide
ccucuagcuucggauucau

SEQ ID NO: 2067090 - RNA, 19 nt, Artificial Sequence
  Description of Artificial Sequence: Synthetic oligonucleotide
ccagcgggccguuccucau

SEQ ID NO: 2067091 - RNA, 19 nt, Artificial Sequence
  Description of Artificial Sequence: Synthetic oligonucleotide
ccccaaucuucucguccuu

SEQ ID NO: 2067092 - RNA, 19 nt, Artificial Sequence
  Description of Artificial Sequence: Synthetic oligonucleotide
gcgggccguuccucauguu

SEQ ID NO: 2067093 - RNA, 19 nt, Artificial Sequence
  Description of Artificial Sequence: Synthetic oligonucleotide
aaguucaacaaguaguucc

SEQ ID NO: 2067094 - RNA, 19 nt, Artificial Sequence
  Description of Artificial Sequence: Synthetic oligonucleotide
aaauaugucagauaagcca

SEQ ID NO: 2067095 - RNA, 19 nt, Artificial Sequence
  Description of Artificial Sequence: Synthetic oligonucleotide
uuaaauaugucagauaagc

SEQ ID NO: 2067096 - RNA, 19 nt, Artificial Sequence
  Description of Artificial Sequence: Synthetic oligonucleotide
ucauacuuaaauaugucag

SEQ ID NO: 2067097 - RNA, 19 nt, Artificial Sequence
  Description of Artificial Sequence: Synthetic oligonucleotide
aaaccuaagucccuacugc

SEQ ID NO: 2067098 - RNA, 19 nt, Artificial Sequence
  Description of Artificial Sequence: Synthetic oligonucleotide
uuuaaguuauucauggagc

SEQ ID NO: 2067099 - RNA, 19 nt, Artificial Sequence
  Description of Artificial Sequence: Synthetic oligonucleotide
aacgaaaugcugccaaucc

SEQ ID NO: 2067100 - RNA, 19 nt, Artificial Sequence
  Description of Artificial Sequence: Synthetic oligonucleotide
aauccaacgaaaugcugcc

SEQ ID NO: 2067101 - RNA, 19 nt, Artificial Sequence
  Description of Artificial Sequence: Synthetic oligonucleotide
aaauccaacgaaaugcugc

SEQ ID NO: 2067102 - RNA, 19 nt, Artificial Sequence
  Description of Artificial Sequence: Synthetic oligonucleotide
accaaauccaacgaaaugc

SEQ ID NO: 2067103 - RNA, 19 nt, Artificial Sequence
  Description of Artificial Sequence: Synthetic oligonucleotide
ugucagauaagccagcugc

SEQ ID NO: 2067104 - RNA, 19 nt, Artificial Sequence
  Description of Artificial Sequence: Synthetic oligonucleotide
ucguuuaaguuauucaugg

SEQ ID NO: 2067105 - RNA, 19 nt, Artificial Sequence
  Description of Artificial Sequence: Synthetic oligonucleotide
aaaggaacagaguaaauau

SEQ ID NO: 2067106 - RNA, 19 nt, Artificial Sequence
  Description of Artificial Sequence: Synthetic oligonucleotide
uuaucauacuuaaauaugu

SEQ ID NO: 2067107 - RNA, 19 nt, Artificial Sequence
  Description of Artificial Sequence: Synthetic oligonucleotide
uuuuaaguucaacaaguag

SEQ ID NO: 2067108 - RNA, 19 nt, Artificial Sequence
  Description of Artificial Sequence: Synthetic oligonucleotide
uuugggauucccuagacca

SEQ ID NO: 2067109 - RNA, 19 nt, Artificial Sequence
  Description of Artificial Sequence: Synthetic oligonucleotide
guuuaaguuauucauggag

SEQ ID NO: 2067110 - RNA, 19 nt, Artificial Sequence
  Description of Artificial Sequence: Synthetic oligonucleotide
uuaaguuucauuucauucu

SEQ ID NO: 2067111 - RNA, 19 nt, Artificial Sequence
  Description of Artificial Sequence: Synthetic oligonucleotide
ugaguucucacaaagggca

SEQ ID NO: 2067112 - RNA, 19 nt, Artificial Sequence
  Description of Artificial Sequence: Synthetic oligonucleotide
ugcacuaagucacaccugg

SEQ ID NO: 2067113 - RNA, 19 nt, Artificial Sequence
  Description of Artificial Sequence: Synthetic oligonucleotide
ucuuuuaaguucaaagcca

SEQ ID NO: 2067114 - RNA, 19 nt, Artificial Sequence
  Description of Artificial Sequence: Synthetic oligonucleotide
gaguaaauaucagagagcc

SEQ ID NO: 2067115 - RNA, 19 nt, Artificial Sequence
  Description of Artificial Sequence: Synthetic oligonucleotide
uccacaaugcuuaucauac

SEQ ID NO: 2067116 - RNA, 19 nt, Artificial Sequence
  Description of Artificial Sequence: Synthetic oligonucleotide
agagcauaauuccacuugc

SEQ ID NO: 2067117 - RNA, 19 nt, Artificial Sequence
  Description of Artificial Sequence: Synthetic oligonucleotide
aaaaccuaagucccuacug

SEQ ID NO: 2067118 - RNA, 19 nt, Artificial Sequence
  Description of Artificial Sequence: Synthetic oligonucleotide
aacuaguuguucuauuuug

SEQ ID NO: 2067119 - RNA, 19 nt, Artificial Sequence
  Description of Artificial Sequence: Synthetic oligonucleotide
acuaagucacaccuggugg

SEQ ID NO: 2067120 - RNA, 19 nt, Artificial Sequence
  Description of Artificial Sequence: Synthetic oligonucleotide
ucuaguuccaaagacagcu

SEQ ID NO: 2067121 - RNA, 19 nt, Artificial Sequence
  Description of Artificial Sequence: Synthetic oligonucleotide
uaaauaugucagauaagcc

SEQ ID NO: 2067122 - RNA, 19 nt, Artificial Sequence
  Description of Artificial Sequence: Synthetic oligonucleotide
ucuauuuugcuccuuuucu

SEQ ID NO: 2067123 - RNA, 19 nt, Artificial Sequence
  Description of Artificial Sequence: Synthetic oligonucleotide
gauucccuagaccaaaucc

SEQ ID NO: 2067124 - RNA, 19 nt, Artificial Sequence
  Description of Artificial Sequence: Synthetic oligonucleotide
cuugcuuuaucugagcucg

SEQ ID NO: 2067125 - RNA, 19 nt, Artificial Sequence
  Description of Artificial Sequence: Synthetic oligonucleotide
uuuucuugcuuuaucugag

SEQ ID NO: 2067126 - RNA, 19 nt, Artificial Sequence
  Description of Artificial Sequence: Synthetic oligonucleotide
gauagacacuucuaagagg

SEQ ID NO: 2067127 - RNA, 19 nt, Artificial Sequence
  Description of Artificial Sequence: Synthetic oligonucleotide
ugcagauugauugccaugg

SEQ ID NO: 2067128 - RNA, 19 nt, Artificial Sequence
  Description of Artificial Sequence: Synthetic oligonucleotide
uuucucuacuuucugaaac

SEQ ID NO: 2067129 - RNA, 19 nt, Artificial Sequence
  Description of Artificial Sequence: Synthetic oligonucleotide
ucaagauccuguuggaaag

SEQ ID NO: 2067130 - RNA, 19 nt, Artificial Sequence
  Description of Artificial Sequence: Synthetic oligonucleotide
gaugacaugcuucucuugc

SEQ ID NO: 2067131 - RNA, 19 nt, Artificial Sequence
  Description of Artificial Sequence: Synthetic oligonucleotide
agaaauaagggcuucucga

SEQ ID NO: 2067132 - RNA, 19 nt, Artificial Sequence
  Description of Artificial Sequence: Synthetic oligonucleotide
cuuuuaaguucaaagccag

SEQ ID NO: 2067133 - RNA, 19 nt, Artificial Sequence
  Description of Artificial Sequence: Synthetic oligonucleotide
gagaaauaagggcuucucg

SEQ ID NO: 2067134 - RNA, 19 nt, Artificial Sequence
  Description of Artificial Sequence: Synthetic oligonucleotide
uuaaguucaacaaguaguu

SEQ ID NO: 2067135 - RNA, 19 nt, Artificial Sequence
  Description of Artificial Sequence: Synthetic oligonucleotide
cuuuaucugagcucguucc

SEQ ID NO: 2067136 - RNA, 19 nt, Artificial Sequence
  Description of Artificial Sequence: Synthetic oligonucleotide
aucauacuuaaauauguca

SEQ ID NO: 2067137 - RNA, 19 nt, Artificial Sequence
  Description of Artificial Sequence: Synthetic oligonucleotide
uccuuuucuaguuccaaag

SEQ ID NO: 2067138 - RNA, 19 nt, Artificial Sequence
  Description of Artificial Sequence: Synthetic oligonucleotide
agcaauuguucucugauga

SEQ ID NO: 2067139 - RNA, 19 nt, Artificial Sequence
  Description of Artificial Sequence: Synthetic oligonucleotide
augcuuaucauacuuaaau

SEQ ID NO: 2067140 - RNA, 19 nt, Artificial Sequence
  Description of Artificial Sequence: Synthetic oligonucleotide
aggcagcucagauagacac

SEQ ID NO: 2067141 - RNA, 19 nt, Artificial Sequence
  Description of Artificial Sequence: Synthetic oligonucleotide
ucggcccugagaaauaagg

SEQ ID NO: 2067142 - RNA, 19 nt, Artificial Sequence
  Description of Artificial Sequence: Synthetic oligonucleotide
uucccaauauuugagauac

SEQ ID NO: 2067143 - RNA, 19 nt, Artificial Sequence
  Description of Artificial Sequence: Synthetic oligonucleotide
cuggcguuccacuagagcc

SEQ ID NO: 2067144 - RNA, 19 nt, Artificial Sequence
  Description of Artificial Sequence: Synthetic oligonucleotide
ugagauacauccacaugag

SEQ ID NO: 2067145 - RNA, 19 nt, Artificial Sequence
  Description of Artificial Sequence: Synthetic oligonucleotide
aguaguucccaauauuuga

SEQ ID NO: 2067146 - RNA, 19 nt, Artificial Sequence
  Description of Artificial Sequence: Synthetic oligonucleotide
ucuacuuucugaaacuuuu

SEQ ID NO: 2067147 - RNA, 19 nt, Artificial Sequence
  Description of Artificial Sequence: Synthetic oligonucleotide
uguaguucggggaaggauc

SEQ ID NO: 2067148 - RNA, 19 nt, Artificial Sequence
  Description of Artificial Sequence: Synthetic oligonucleotide
acgaaaugcugccaauccc

SEQ ID NO: 2067149 - RNA, 19 nt, Artificial Sequence
  Description of Artificial Sequence: Synthetic oligonucleotide
uucagcacaagcuuggcuc

SEQ ID NO: 2067150 - RNA, 19 nt, Artificial Sequence
  Description of Artificial Sequence: Synthetic oligonucleotide
ugcaguagauauucuggcg

SEQ ID NO: 2067151 - RNA, 19 nt, Artificial Sequence
  Description of Artificial Sequence: Synthetic oligonucleotide
agaguaaauaucagagagc

SEQ ID NO: 2067152 - RNA, 19 nt, Artificial Sequence
  Description of Artificial Sequence: Synthetic oligonucleotide
ugagaucacagcaugguau

SEQ ID NO: 2067153 - RNA, 19 nt, Artificial Sequence
  Description of Artificial Sequence: Synthetic oligonucleotide
aguucaacaaguaguuccc

SEQ ID NO: 2067154 - RNA, 19 nt, Artificial Sequence
  Description of Artificial Sequence: Synthetic oligonucleotide
agaaugcagauugauugcc

SEQ ID NO: 2067155 - RNA, 19 nt, Artificial Sequence
  Description of Artificial Sequence: Synthetic oligonucleotide
agauacauccacaugagcu

SEQ ID NO: 2067156 - RNA, 19 nt, Artificial Sequence
  Description of Artificial Sequence: Synthetic oligonucleotide
uauuugagauacauccaca

SEQ ID NO: 2067157 - RNA, 19 nt, Artificial Sequence
  Description of Artificial Sequence: Synthetic oligonucleotide
uuuuguaguaugacuuucu

SEQ ID NO: 2067158 - RNA, 19 nt, Artificial Sequence
  Description of Artificial Sequence: Synthetic oligonucleotide
uccagcucuagccuuguag

SEQ ID NO: 2067159 - RNA, 19 nt, Artificial Sequence
  Description of Artificial Sequence: Synthetic oligonucleotide
uucaagauccuguuggaaa

SEQ ID NO: 2067160 - RNA, 19 nt, Artificial Sequence
  Description of Artificial Sequence: Synthetic oligonucleotide
uuauguuuguugguguucc

SEQ ID NO: 2067161 - RNA, 19 nt, Artificial Sequence
  Description of Artificial Sequence: Synthetic oligonucleotide
aacaaguaguucccaauau

SEQ ID NO: 2067162 - RNA, 19 nt, Artificial Sequence
  Description of Artificial Sequence: Synthetic oligonucleotide
uuccuguucaagaagcuuc

SEQ ID NO: 2067163 - RNA, 19 nt, Artificial Sequence
  Description of Artificial Sequence: Synthetic oligonucleotide
aaggaacagaguaaauauc

SEQ ID NO: 2067164 - RNA, 19 nt, Artificial Sequence
  Description of Artificial Sequence: Synthetic oligonucleotide
aauauuugagauacaucca

SEQ ID NO: 2067165 - RNA, 19 nt, Artificial Sequence
  Description of Artificial Sequence: Synthetic oligonucleotide
ucaaaggguggaaagacuu

SEQ ID NO: 2067166 - RNA, 19 nt, Artificial Sequence
  Description of Artificial Sequence: Synthetic oligonucleotide
uuguugguguuccagacau

SEQ ID NO: 2067167 - RNA, 19 nt, Artificial Sequence
  Description of Artificial Sequence: Synthetic oligonucleotide
uaucauacuuaaauauguc

SEQ ID NO: 2067168 - RNA, 19 nt, Artificial Sequence
  Description of Artificial Sequence: Synthetic oligonucleotide
aaugcagauugauugccau

SEQ ID NO: 2067169 - RNA, 19 nt, Artificial Sequence
  Description of Artificial Sequence: Synthetic oligonucleotide
uccacuugcuuccaucgcc

SEQ ID NO: 2067170 - RNA, 19 nt, Artificial Sequence
  Description of Artificial Sequence: Synthetic oligonucleotide
cuaagucacaccugguggc

SEQ ID NO: 2067171 - RNA, 19 nt, Artificial Sequence
  Description of Artificial Sequence: Synthetic oligonucleotide
aaacuaguuguucuauuuu

SEQ ID NO: 2067172 - RNA, 19 nt, Artificial Sequence
  Description of Artificial Sequence: Synthetic oligonucleotide
auaagggcuucucgaaaac

SEQ ID NO: 2067173 - RNA, 19 nt, Artificial Sequence
  Description of Artificial Sequence: Synthetic oligonucleotide
aaauaagggcuucucgaaa

SEQ ID NO: 2067174 - RNA, 19 nt, Artificial Sequence
  Description of Artificial Sequence: Synthetic oligonucleotide
aagcaauuguucucugaug

SEQ ID NO: 2067175 - RNA, 19 nt, Artificial Sequence
  Description of Artificial Sequence: Synthetic oligonucleotide
uuuugggauucccuagacc

SEQ ID NO: 2067176 - RNA, 19 nt, Artificial Sequence
  Description of Artificial Sequence: Synthetic oligonucleotide
uuuguaguaugacuuucuc

SEQ ID NO: 2067177 - RNA, 19 nt, Artificial Sequence
  Description of Artificial Sequence: Synthetic oligonucleotide
agauaagccagcugccauc

SEQ ID NO: 2067178 - RNA, 19 nt, Artificial Sequence
  Description of Artificial Sequence: Synthetic oligonucleotide
aggaacagaguaaauauca

SEQ ID NO: 2067179 - RNA, 19 nt, Artificial Sequence
  Description of Artificial Sequence: Synthetic oligonucleotide
uuuuaaguucaaagccagc

SEQ ID NO: 2067180 - RNA, 19 nt, Artificial Sequence
  Description of Artificial Sequence: Synthetic oligonucleotide
uaggucagcagccacugga

SEQ ID NO: 2067181 - RNA, 19 nt, Artificial Sequence
  Description of Artificial Sequence: Synthetic oligonucleotide
aucacagcaugguauuuag

SEQ ID NO: 2067182 - RNA, 19 nt, Artificial Sequence
  Description of Artificial Sequence: Synthetic oligonucleotide
agauugauugccaugguga

SEQ ID NO: 2067183 - RNA, 19 nt, Artificial Sequence
  Description of Artificial Sequence: Synthetic oligonucleotide
aaccuaagucccuacugca

SEQ ID NO: 2067184 - RNA, 19 nt, Artificial Sequence
  Description of Artificial Sequence: Synthetic oligonucleotide
uguuuguugguguuccaga

SEQ ID NO: 2067185 - RNA, 19 nt, Artificial Sequence
  Description of Artificial Sequence: Synthetic oligonucleotide
aaaggguggaaagacuuga

SEQ ID NO: 2067186 - RNA, 19 nt, Artificial Sequence
  Description of Artificial Sequence: Synthetic oligonucleotide
ugauugggccgaauguucc

SEQ ID NO: 2067187 - RNA, 19 nt, Artificial Sequence
  Description of Artificial Sequence: Synthetic oligonucleotide
uggaucaacagacgagcgc

SEQ ID NO: 2067188 - RNA, 19 nt, Artificial Sequence
  Description of Artificial Sequence: Synthetic oligonucleotide
uuguaguaugacuuucucu

SEQ ID NO: 2067189 - RNA, 19 nt, Artificial Sequence
  Description of Artificial Sequence: Synthetic oligonucleotide
uguaccacagaaugaguuc

SEQ ID NO: 2067190 - RNA, 19 nt, Artificial Sequence
  Description of Artificial Sequence: Synthetic oligonucleotide
uucucuacuuucugaaacu

SEQ ID NO: 2067191 - RNA, 19 nt, Artificial Sequence
  Description of Artificial Sequence: Synthetic oligonucleotide
uuccacuagagccucuccc

SEQ ID NO: 2067192 - RNA, 19 nt, Artificial Sequence
  Description of Artificial Sequence: Synthetic oligonucleotide
uucauuucauucuuauuuu

SEQ ID NO: 2067193 - RNA, 19 nt, Artificial Sequence
  Description of Artificial Sequence: Synthetic oligonucleotide
ggcaguuaaacagagaaac

SEQ ID NO: 2067194 - RNA, 19 nt, Artificial Sequence
  Description of Artificial Sequence: Synthetic oligonucleotide
uucaagaagcuuccuuucu

SEQ ID NO: 2067195 - RNA, 19 nt, Artificial Sequence
  Description of Artificial Sequence: Synthetic oligonucleotide
aaguaguucccaauauuug

SEQ ID NO: 2067196 - RNA, 19 nt, Artificial Sequence
  Description of Artificial Sequence: Synthetic oligonucleotide
agggcagcugcacuaaguc

SEQ ID NO: 2067197 - RNA, 19 nt, Artificial Sequence
  Description of Artificial Sequence: Synthetic oligonucleotide
ucaacagacgagcgcacca

SEQ ID NO: 2067198 - RNA, 19 nt, Artificial Sequence
  Description of Artificial Sequence: Synthetic oligonucleotide
caacagagcauaauuccac

SEQ ID NO: 2067199 - RNA, 19 nt, Artificial Sequence
  Description of Artificial Sequence: Synthetic oligonucleotide
cagaaugcagauugauugc

SEQ ID NO: 2067200 - RNA, 19 nt, Artificial Sequence
  Description of Artificial Sequence: Synthetic oligonucleotide
cagauagacacuucuaaga

SEQ ID NO: 2067201 - RNA, 19 nt, Artificial Sequence
  Description of Artificial Sequence: Synthetic oligonucleotide
agcugcacuaagucacacc

SEQ ID NO: 2067202 - RNA, 19 nt, Artificial Sequence
  Description of Artificial Sequence: Synthetic oligonucleotide
gaaauaagggcuucucgaa

SEQ ID NO: 2067203 - RNA, 19 nt, Artificial Sequence
  Description of Artificial Sequence: Synthetic oligonucleotide
cauacuuaaauaugucaga

SEQ ID NO: 2067204 - RNA, 19 nt, Artificial Sequence
  Description of Artificial Sequence: Synthetic oligonucleotide
agauauucuggcguuccac

SEQ ID NO: 2067205 - RNA, 19 nt, Artificial Sequence
  Description of Artificial Sequence: Synthetic oligonucleotide
caugguauuuagcuucaag

SEQ ID NO: 2067206 - RNA, 19 nt, Artificial Sequence
  Description of Artificial Sequence: Synthetic oligonucleotide
uucaaaggguggaaagacu

SEQ ID NO: 2067207 - RNA, 19 nt, Artificial Sequence
  Description of Artificial Sequence: Synthetic oligonucleotide
uccaacgaaaugcugccaa

SEQ ID NO: 2067208 - RNA, 19 nt, Artificial Sequence
  Description of Artificial Sequence: Synthetic oligonucleotide
aucagagagcccagaaugc

SEQ ID NO: 2067209 - RNA, 19 nt, Artificial Sequence
  Description of Artificial Sequence: Synthetic oligonucleotide
uguucuauuuugcuccuuu

SEQ ID NO: 2067210 - RNA, 19 nt, Artificial Sequence
  Description of Artificial Sequence: Synthetic oligonucleotide
aguucccaauauuugagau

SEQ ID NO: 2067211 - RNA, 19 nt, Artificial Sequence
  Description of Artificial Sequence: Synthetic oligonucleotide
cagagcauaauuccacuug

SEQ ID NO: 2067212 - RNA, 19 nt, Artificial Sequence
  Description of Artificial Sequence: Synthetic oligonucleotide
auacuuaaauaugucagau

SEQ ID NO: 2067213 - RNA, 19 nt, Artificial Sequence
  Description of Artificial Sequence: Synthetic oligonucleotide
agcucagauagacacuucu

SEQ ID NO: 2067214 - RNA, 19 nt, Artificial Sequence
  Description of Artificial Sequence: Synthetic oligonucleotide
ucugagaucacagcauggu

SEQ ID NO: 2067215 - RNA, 19 nt, Artificial Sequence
  Description of Artificial Sequence: Synthetic oligonucleotide
uccagacaucuccacaaug

SEQ ID NO: 2067216 - RNA, 19 nt, Artificial Sequence
  Description of Artificial Sequence: Synthetic oligonucleotide
uccacuagagccucuccca

SEQ ID NO: 2067217 - RNA, 19 nt, Artificial Sequence
  Description of Artificial Sequence: Synthetic oligonucleotide
gacacuucuaagaggcugc

SEQ ID NO: 2067218 - RNA, 19 nt, Artificial Sequence
  Description of Artificial Sequence: Synthetic oligonucleotide
uuuuauguuuguugguguu

SEQ ID NO: 2067219 - RNA, 19 nt, Artificial Sequence
  Description of Artificial Sequence: Synthetic oligonucleotide
guuuguugguguuccagac

SEQ ID NO: 2067220 - RNA, 19 nt, Artificial Sequence
  Description of Artificial Sequence: Synthetic oligonucleotide
uucaacaaguaguucccaa

SEQ ID NO: 2067221 - RNA, 19 nt, Artificial Sequence
  Description of Artificial Sequence: Synthetic oligonucleotide
acuagagccucucccaccu

SEQ ID NO: 2067222 - RNA, 19 nt, Artificial Sequence
  Description of Artificial Sequence: Synthetic oligonucleotide
aguaugacuuucucuacuu

SEQ ID NO: 2067223 - RNA, 19 nt, Artificial Sequence
  Description of Artificial Sequence: Synthetic oligonucleotide
cacuggaucaacagacgag

SEQ ID NO: 2067224 - RNA, 19 nt, Artificial Sequence
  Description of Artificial Sequence: Synthetic oligonucleotide
auccacaugagcuucccau

SEQ ID NO: 2067225 - RNA, 19 nt, Artificial Sequence
  Description of Artificial Sequence: Synthetic oligonucleotide
agacgagcgcaccaguaag

SEQ ID NO: 2067226 - RNA, 19 nt, Artificial Sequence
  Description of Artificial Sequence: Synthetic oligonucleotide
gaaagcaauuguucucuga

SEQ ID NO: 2067227 - RNA, 19 nt, Artificial Sequence
  Description of Artificial Sequence: Synthetic oligonucleotide
uuuauguuuguugguguuc

SEQ ID NO: 2067228 - RNA, 19 nt, Artificial Sequence
  Description of Artificial Sequence: Synthetic oligonucleotide
auacauccacaugagcuuc

SEQ ID NO: 2067229 - RNA, 19 nt, Artificial Sequence
  Description of Artificial Sequence: Synthetic oligonucleotide
cuggaucaacagacgagcg

SEQ ID NO: 2067230 - RNA, 19 nt, Artificial Sequence
  Description of Artificial Sequence: Synthetic oligonucleotide
guucaaaggguggaaagac

SEQ ID NO: 2067231 - RNA, 19 nt, Artificial Sequence
  Description of Artificial Sequence: Synthetic oligonucleotide
uuuugcuccuuuucuaguu

SEQ ID NO: 2067232 - RNA, 19 nt, Artificial Sequence
  Description of Artificial Sequence: Synthetic oligonucleotide
uagccuuguaguucgggga

SEQ ID NO: 2067233 - RNA, 19 nt, Artificial Sequence
  Description of Artificial Sequence: Synthetic oligonucleotide
ucgaaaacuaguuguucua

SEQ ID NO: 2067234 - RNA, 19 nt, Artificial Sequence
  Description of Artificial Sequence: Synthetic oligonucleotide
gucguuuaaguuauucaug

SEQ ID NO: 2067235 - RNA, 19 nt, Artificial Sequence
  Description of Artificial Sequence: Synthetic oligonucleotide
uucucgaaaacuaguuguu

SEQ ID NO: 2067236 - RNA, 19 nt, Artificial Sequence
  Description of Artificial Sequence: Synthetic oligonucleotide
cccuagaccaaauccaacg

SEQ ID NO: 2067237 - RNA, 19 nt, Artificial Sequence
  Description of Artificial Sequence: Synthetic oligonucleotide
uucccuagaccaaauccaa

SEQ ID NO: 2067238 - RNA, 19 nt, Artificial Sequence
  Description of Artificial Sequence: Synthetic oligonucleotide
acaaguaguucccaauauu

SEQ ID NO: 2067239 - RNA, 19 nt, Artificial Sequence
  Description of Artificial Sequence: Synthetic oligonucleotide
agacacuucuaagaggcug

SEQ ID NO: 2067240 - RNA, 19 nt, Artificial Sequence
  Description of Artificial Sequence: Synthetic oligonucleotide
aucaggcugcaguagauau

SEQ ID NO: 2067241 - RNA, 19 nt, Artificial Sequence
  Description of Artificial Sequence: Synthetic oligonucleotide
aucaacagacgagcgcacc

SEQ ID NO: 2067242 - RNA, 19 nt, Artificial Sequence
  Description of Artificial Sequence: Synthetic oligonucleotide
auaucagagagcccagaau

SEQ ID NO: 2067243 - RNA, 19 nt, Artificial Sequence
  Description of Artificial Sequence: Synthetic oligonucleotide
agcucuagccuuguaguuc

SEQ ID NO: 2067244 - RNA, 19 nt, Artificial Sequence
  Description of Artificial Sequence: Synthetic oligonucleotide
caccaguaaguucuucucc

SEQ ID NO: 2067245 - RNA, 19 nt, Artificial Sequence
  Description of Artificial Sequence: Synthetic oligonucleotide
ugauugccauggugaaugg

SEQ ID NO: 2067246 - RNA, 19 nt, Artificial Sequence
  Description of Artificial Sequence: Synthetic oligonucleotide
gcauaauuccacuugcuuc

SEQ ID NO: 2067247 - RNA, 19 nt, Artificial Sequence
  Description of Artificial Sequence: Synthetic oligonucleotide
aaagggcagcugcacuaag

SEQ ID NO: 2067248 - RNA, 19 nt, Artificial Sequence
  Description of Artificial Sequence: Synthetic oligonucleotide
guagauauucuggcguucc

SEQ ID NO: 2067249 - RNA, 19 nt, Artificial Sequence
  Description of Artificial Sequence: Synthetic oligonucleotide
ucuagccuuguaguucggg

SEQ ID NO: 2067250 - RNA, 19 nt, Artificial Sequence
  Description of Artificial Sequence: Synthetic oligonucleotide
uaugucagauaagccagcu

SEQ ID NO: 2067251 - RNA, 19 nt, Artificial Sequence
  Description of Artificial Sequence: Synthetic oligonucleotide
cuucugccagcuuucggcc

SEQ ID NO: 2067252 - RNA, 19 nt, Artificial Sequence
  Description of Artificial Sequence: Synthetic oligonucleotide
uaucugagcucguuccugu

SEQ ID NO: 2067253 - RNA, 19 nt, Artificial Sequence
  Description of Artificial Sequence: Synthetic oligonucleotide
ugagaaauaagggcuucuc

SEQ ID NO: 2067254 - RNA, 19 nt, Artificial Sequence
  Description of Artificial Sequence: Synthetic oligonucleotide
aguagauauucuggcguuc

SEQ ID NO: 2067255 - RNA, 19 nt, Artificial Sequence
  Description of Artificial Sequence: Synthetic oligonucleotide
ucagauaagccagcugcca

SEQ ID NO: 2067256 - RNA, 19 nt, Artificial Sequence
  Description of Artificial Sequence: Synthetic oligonucleotide
ucagcacaagcuuggcucu

SEQ ID NO: 2067257 - RNA, 19 nt, Artificial Sequence
  Description of Artificial Sequence: Synthetic oligonucleotide
agcugagcaacugcacgcc

SEQ ID NO: 2067258 - RNA, 19 nt, Artificial Sequence
  Description of Artificial Sequence: Synthetic oligonucleotide
gcucuagccuuguaguucg

SEQ ID NO: 2067259 - RNA, 19 nt, Artificial Sequence
  Description of Artificial Sequence: Synthetic oligonucleotide
aguucggggaaggaucagg

SEQ ID NO: 2067260 - RNA, 19 nt, Artificial Sequence
  Description of Artificial Sequence: Synthetic oligonucleotide
ugccaaucccagcauuggc

SEQ ID NO: 2067261 - RNA, 19 nt, Artificial Sequence
  Description of Artificial Sequence: Synthetic oligonucleotide
caaaggguggaaagacuug

SEQ ID NO: 2067262 - RNA, 19 nt, Artificial Sequence
  Description of Artificial Sequence: Synthetic oligonucleotide
ggcccugagaaauaagggc

SEQ ID NO: 2067263 - RNA, 19 nt, Artificial Sequence
  Description of Artificial Sequence: Synthetic oligonucleotide
cuaagucccuacugcacug

SEQ ID NO: 2067264 - RNA, 19 nt, Artificial Sequence
  Description of Artificial Sequence: Synthetic oligonucleotide
guuccagacaucuccacaa

SEQ ID NO: 2067265 - RNA, 19 nt, Artificial Sequence
  Description of Artificial Sequence: Synthetic oligonucleotide
aacagacgagcgcaccagu

SEQ ID NO: 2067266 - RNA, 19 nt, Artificial Sequence
  Description of Artificial Sequence: Synthetic oligonucleotide
ugcacgccgauguucugag

SEQ ID NO: 2067267 - RNA, 19 nt, Artificial Sequence
  Description of Artificial Sequence: Synthetic oligonucleotide
cucguuccuguucaagaag

SEQ ID NO: 2067268 - RNA, 19 nt, Artificial Sequence
  Description of Artificial Sequence: Synthetic oligonucleotide
cuacugcacuguucaaagg

SEQ ID NO: 2067269 - RNA, 19 nt, Artificial Sequence
  Description of Artificial Sequence: Synthetic oligonucleotide
acaaagggcagcugcacua

SEQ ID NO: 2067270 - RNA, 19 nt, Artificial Sequence
  Description of Artificial Sequence: Synthetic oligonucleotide
ucugccagucguccucucc

SEQ ID NO: 2067271 - RNA, 19 nt, Artificial Sequence
  Description of Artificial Sequence: Synthetic oligonucleotide
guccucuccuuccaggcag

SEQ ID NO: 2067272 - RNA, 19 nt, Artificial Sequence
  Description of Artificial Sequence: Synthetic oligonucleotide
auuguucucugaugacaug

SEQ ID NO: 2067273 - RNA, 19 nt, Artificial Sequence
  Description of Artificial Sequence: Synthetic oligonucleotide
gucccuacugcacuguuca

SEQ ID NO: 2067274 - RNA, 19 nt, Artificial Sequence
  Description of Artificial Sequence: Synthetic oligonucleotide
ugugauugggccgaauguu

SEQ ID NO: 2067275 - RNA, 19 nt, Artificial Sequence
  Description of Artificial Sequence: Synthetic oligonucleotide
aacugcacgccgauguucu

SEQ ID NO: 2067276 - RNA, 19 nt, Artificial Sequence
  Description of Artificial Sequence: Synthetic oligonucleotide
uggcguuccacuagagccu

SEQ ID NO: 2067277 - RNA, 19 nt, Artificial Sequence
  Description of Artificial Sequence: Synthetic oligonucleotide
gauacauccacaugagcuu

SEQ ID NO: 2067278 - RNA, 19 nt, Artificial Sequence
  Description of Artificial Sequence: Synthetic oligonucleotide
augcagauugauugccaug

SEQ ID NO: 2067279 - RNA, 19 nt, Artificial Sequence
  Description of Artificial Sequence: Synthetic oligonucleotide
cuggacuuaaguuucauuu

SEQ ID NO: 2067280 - RNA, 19 nt, Artificial Sequence
  Description of Artificial Sequence: Synthetic oligonucleotide
cgaauguuccaauuugggg

SEQ ID NO: 2067281 - RNA, 19 nt, Artificial Sequence
  Description of Artificial Sequence: Synthetic oligonucleotide
agcacaagcuuggcucucc

SEQ ID NO: 2067282 - RNA, 19 nt, Artificial Sequence
  Description of Artificial Sequence: Synthetic oligonucleotide
cugcacuguucaaagggug

SEQ ID NO: 2067283 - RNA, 19 nt, Artificial Sequence
  Description of Artificial Sequence: Synthetic oligonucleotide
ucucuaggucagcagccac

SEQ ID NO: 2067284 - RNA, 19 nt, Artificial Sequence
  Description of Artificial Sequence: Synthetic oligonucleotide
uuccaucgccaccaucagc

SEQ ID NO: 2067285 - RNA, 19 nt, Artificial Sequence
  Description of Artificial Sequence: Synthetic oligonucleotide
uaaguucaacaaguaguuc

SEQ ID NO: 2067286 - RNA, 19 nt, Artificial Sequence
  Description of Artificial Sequence: Synthetic oligonucleotide
ucuggacuuaaguuucauu

SEQ ID NO: 2067287 - RNA, 19 nt, Artificial Sequence
  Description of Artificial Sequence: Synthetic oligonucleotide
aagaggcugcaacuggcuu

SEQ ID NO: 2067288 - RNA, 19 nt, Artificial Sequence
  Description of Artificial Sequence: Synthetic oligonucleotide
ugagcaacugcacgccgau

SEQ ID NO: 2067289 - RNA, 19 nt, Artificial Sequence
  Description of Artificial Sequence: Synthetic oligonucleotide
ccgaauguuccaauuuggg

SEQ ID NO: 2067290 - RNA, 19 nt, Artificial Sequence
  Description of Artificial Sequence: Synthetic oligonucleotide
cauuggcaccaacagagca

SEQ ID NO: 2067291 - RNA, 19 nt, Artificial Sequence
  Description of Artificial Sequence: Synthetic oligonucleotide
acagagcauaauuccacuu

SEQ ID NO: 2067292 - RNA, 19 nt, Artificial Sequence
  Description of Artificial Sequence: Synthetic oligonucleotide
gcuucucgaaaacuaguug

SEQ ID NO: 2067293 - RNA, 19 nt, Artificial Sequence
  Description of Artificial Sequence: Synthetic oligonucleotide
ucccuagaccaaauccaac

SEQ ID NO: 2067294 - RNA, 19 nt, Artificial Sequence
  Description of Artificial Sequence: Synthetic oligonucleotide
cucgaaaacuaguuguucu

SEQ ID NO: 2067295 - RNA, 19 nt, Artificial Sequence
  Description of Artificial Sequence: Synthetic oligonucleotide
uucggcccugagaaauaag

SEQ ID NO: 2067296 - RNA, 19 nt, Artificial Sequence
  Description of Artificial Sequence: Synthetic oligonucleotide
acgccgauguucugagauc

SEQ ID NO: 2067297 - RNA, 19 nt, Artificial Sequence
  Description of Artificial Sequence: Synthetic oligonucleotide
gccuguaccacagaaugag

SEQ ID NO: 2067298 - RNA, 19 nt, Artificial Sequence
  Description of Artificial Sequence: Synthetic oligonucleotide
caaguaguucccaauauuu

SEQ ID NO: 2067299 - RNA, 19 nt, Artificial Sequence
  Description of Artificial Sequence: Synthetic oligonucleotide
uuguaguucggggaaggau

SEQ ID NO: 2067300 - RNA, 19 nt, Artificial Sequence
  Description of Artificial Sequence: Synthetic oligonucleotide
cacuagagccucucccacc

SEQ ID NO: 2067301 - RNA, 19 nt, Artificial Sequence
  Description of Artificial Sequence: Synthetic oligonucleotide
cagcuuucggcccugagaa

SEQ ID NO: 2067302 - RNA, 19 nt, Artificial Sequence
  Description of Artificial Sequence: Synthetic oligonucleotide
ggccgaauguuccaauuug

SEQ ID NO: 2067303 - RNA, 19 nt, Artificial Sequence
  Description of Artificial Sequence: Synthetic oligonucleotide
gucagauaagccagcugcc

SEQ ID NO: 2067304 - RNA, 19 nt, Artificial Sequence
  Description of Artificial Sequence: Synthetic oligonucleotide
agggcuucucgaaaacuag

SEQ ID NO: 2067305 - RNA, 19 nt, Artificial Sequence
  Description of Artificial Sequence: Synthetic oligonucleotide
gauugggccgaauguucca

SEQ ID NO: 2067306 - RNA, 19 nt, Artificial Sequence
  Description of Artificial Sequence: Synthetic oligonucleotide
uagacacuucuaagaggcu

SEQ ID NO: 2067307 - RNA, 19 nt, Artificial Sequence
  Description of Artificial Sequence: Synthetic oligonucleotide
gagcgcaccaguaaguucu

SEQ ID NO: 2067308 - RNA, 19 nt, Artificial Sequence
  Description of Artificial Sequence: Synthetic oligonucleotide
cuagaccaaauccaacgaa

SEQ ID NO: 2067309 - RNA, 19 nt, Artificial Sequence
  Description of Artificial Sequence: Synthetic oligonucleotide
ggcagcugcacuaagucac

SEQ ID NO: 2067310 - RNA, 19 nt, Artificial Sequence
  Description of Artificial Sequence: Synthetic oligonucleotide
caacgaaaugcugccaauc

SEQ ID NO: 2067311 - RNA, 19 nt, Artificial Sequence
  Description of Artificial Sequence: Synthetic oligonucleotide
agccuuguaguucggggaa

SEQ ID NO: 2067312 - RNA, 19 nt, Artificial Sequence
  Description of Artificial Sequence: Synthetic oligonucleotide
agaccaaauccaacgaaau

SEQ ID NO: 2067313 - RNA, 19 nt, Artificial Sequence
  Description of Artificial Sequence: Synthetic oligonucleotide
uuggcaccaacagagcaua

SEQ ID NO: 2067314 - RNA, 19 nt, Artificial Sequence
  Description of Artificial Sequence: Synthetic oligonucleotide
ucacaaagggcagcugcac

SEQ ID NO: 2067315 - RNA, 19 nt, Artificial Sequence
  Description of Artificial Sequence: Synthetic oligonucleotide
uucggggaaggaucaggcu

SEQ ID NO: 2067316 - RNA, 19 nt, Artificial Sequence
  Description of Artificial Sequence: Synthetic oligonucleotide
guucccaauauuugagaua

SEQ ID NO: 2067317 - RNA, 19 nt, Artificial Sequence
  Description of Artificial Sequence: Synthetic oligonucleotide
cuuccaucgccaccaucag

SEQ ID NO: 2067318 - RNA, 19 nt, Artificial Sequence
  Description of Artificial Sequence: Synthetic oligonucleotide
ugggauucccuagaccaaa

SEQ ID NO: 2067319 - RNA, 19 nt, Artificial Sequence
  Description of Artificial Sequence: Synthetic oligonucleotide
uuccagacaucuccacaau

SEQ ID NO: 2067320 - RNA, 19 nt, Artificial Sequence
  Description of Artificial Sequence: Synthetic oligonucleotide
cugccaaucccagcauugg

SEQ ID NO: 2067321 - RNA, 19 nt, Artificial Sequence
  Description of Artificial Sequence: Synthetic oligonucleotide
ucaggcugcaguagauauu

SEQ ID NO: 2067322 - RNA, 19 nt, Artificial Sequence
  Description of Artificial Sequence: Synthetic oligonucleotide
caacaaguaguucccaaua

SEQ ID NO: 2067323 - RNA, 19 nt, Artificial Sequence
  Description of Artificial Sequence: Synthetic oligonucleotide
ggucguuuaaguuauucau

SEQ ID NO: 2067324 - RNA, 19 nt, Artificial Sequence
  Description of Artificial Sequence: Synthetic oligonucleotide
gaaaacuaguuguucuauu

SEQ ID NO: 2067325 - RNA, 19 nt, Artificial Sequence
  Description of Artificial Sequence: Synthetic oligonucleotide
gggucguuuaaguuauuca

SEQ ID NO: 2067326 - RNA, 19 nt, Artificial Sequence
  Description of Artificial Sequence: Synthetic oligonucleotide
gaucacagcaugguauuua

SEQ ID NO: 2067327 - RNA, 19 nt, Artificial Sequence
  Description of Artificial Sequence: Synthetic oligonucleotide
acaaugcuuaucauacuua

SEQ ID NO: 2067328 - RNA, 19 nt, Artificial Sequence
  Description of Artificial Sequence: Synthetic oligonucleotide
gccgaauguuccaauuugg

SEQ ID NO: 2067329 - RNA, 19 nt, Artificial Sequence
  Description of Artificial Sequence: Synthetic oligonucleotide
caacagacgagcgcaccag

SEQ ID NO: 2067330 - RNA, 19 nt, Artificial Sequence
  Description of Artificial Sequence: Synthetic oligonucleotide
gauccuguuggaaagcaau

SEQ ID NO: 2067331 - RNA, 19 nt, Artificial Sequence
  Description of Artificial Sequence: Synthetic oligonucleotide
cuucuaagaggcugcaacu

SEQ ID NO: 2067332 - RNA, 19 nt, Artificial Sequence
  Description of Artificial Sequence: Synthetic oligonucleotide
guuccacuagagccucucc

SEQ ID NO: 2067333 - RNA, 19 nt, Artificial Sequence
  Description of Artificial Sequence: Synthetic oligonucleotide
gcugcacuaagucacaccu

SEQ ID NO: 2067334 - RNA, 19 nt, Artificial Sequence
  Description of Artificial Sequence: Synthetic oligonucleotide
agucccuacugcacuguuc

SEQ ID NO: 2067335 - RNA, 19 nt, Artificial Sequence
  Description of Artificial Sequence: Synthetic oligonucleotide
cgauguucugagaucacag

SEQ ID NO: 2067336 - RNA, 19 nt, Artificial Sequence
  Description of Artificial Sequence: Synthetic oligonucleotide
uaauuccacuugcuuccau

SEQ ID NO: 2067337 - RNA, 19 nt, Artificial Sequence
  Description of Artificial Sequence: Synthetic oligonucleotide
ccacagaaugaguuccagg

SEQ ID NO: 2067338 - RNA, 19 nt, Artificial Sequence
  Description of Artificial Sequence: Synthetic oligonucleotide
guaguucggggaaggauca

SEQ ID NO: 2067339 - RNA, 19 nt, Artificial Sequence
  Description of Artificial Sequence: Synthetic oligonucleotide
uuucggcccugagaaauaa

SEQ ID NO: 2067340 - RNA, 19 nt, Artificial Sequence
  Description of Artificial Sequence: Synthetic oligonucleotide
gugauugggccgaauguuc

SEQ ID NO: 2067341 - RNA, 19 nt, Artificial Sequence
  Description of Artificial Sequence: Synthetic oligonucleotide
ucccaauauuugagauaca

SEQ ID NO: 2067342 - RNA, 19 nt, Artificial Sequence
  Description of Artificial Sequence: Synthetic oligonucleotide
auaagccagcugccaucuc

SEQ ID NO: 2067343 - RNA, 19 nt, Artificial Sequence
  Description of Artificial Sequence: Synthetic oligonucleotide
uaagucccuacugcacugu

SEQ ID NO: 2067344 - RNA, 19 nt, Artificial Sequence
  Description of Artificial Sequence: Synthetic oligonucleotide
auugauugccauggugaau

SEQ ID NO: 2067345 - RNA, 19 nt, Artificial Sequence
  Description of Artificial Sequence: Synthetic oligonucleotide
gcuuuaucugagcucguuc

SEQ ID NO: 2067346 - RNA, 19 nt, Artificial Sequence
  Description of Artificial Sequence: Synthetic oligonucleotide
ggcaaaggaacagaguaaa

SEQ ID NO: 2067347 - RNA, 19 nt, Artificial Sequence
  Description of Artificial Sequence: Synthetic oligonucleotide
aagucccuacugcacuguu

SEQ ID NO: 2067348 - RNA, 19 nt, Artificial Sequence
  Description of Artificial Sequence: Synthetic oligonucleotide
ccugugauugggccgaaug

SEQ ID NO: 2067349 - RNA, 19 nt, Artificial Sequence
  Description of Artificial Sequence: Synthetic oligonucleotide
gcaauuguucucugaugac

SEQ ID NO: 2067350 - RNA, 19 nt, Artificial Sequence
  Description of Artificial Sequence: Synthetic oligonucleotide
cacaccugguggcaaagga

SEQ ID NO: 2067351 - RNA, 19 nt, Artificial Sequence
  Description of Artificial Sequence: Synthetic oligonucleotide
gaucaacagacgagcgcac

SEQ ID NO: 2067352 - RNA, 19 nt, Artificial Sequence
  Description of Artificial Sequence: Synthetic oligonucleotide
gcaguagauauucuggcgu

SEQ ID NO: 2067353 - RNA, 19 nt, Artificial Sequence
  Description of Artificial Sequence: Synthetic oligonucleotide
aucgccaccaucagcccug

SEQ ID NO: 2067354 - RNA, 19 nt, Artificial Sequence
  Description of Artificial Sequence: Synthetic oligonucleotide
ggaaagcaauuguucucug

SEQ ID NO: 2067355 - RNA, 19 nt, Artificial Sequence
  Description of Artificial Sequence: Synthetic oligonucleotide
caucagcccugugauuggg

SEQ ID NO: 2067356 - RNA, 19 nt, Artificial Sequence
  Description of Artificial Sequence: Synthetic oligonucleotide
cugagcaacugcacgccga

SEQ ID NO: 2067357 - RNA, 19 nt, Artificial Sequence
  Description of Artificial Sequence: Synthetic oligonucleotide
cacaaugcuuaucauacuu

SEQ ID NO: 2067358 - RNA, 19 nt, Artificial Sequence
  Description of Artificial Sequence: Synthetic oligonucleotide
ccaacagagcauaauucca

SEQ ID NO: 2067359 - RNA, 19 nt, Artificial Sequence
  Description of Artificial Sequence: Synthetic oligonucleotide
aucucuaggucagcagcca

SEQ ID NO: 2067360 - RNA, 19 nt, Artificial Sequence
  Description of Artificial Sequence: Synthetic oligonucleotide
ugggccgaauguuccaauu

SEQ ID NO: 2067361 - RNA, 19 nt, Artificial Sequence
  Description of Artificial Sequence: Synthetic oligonucleotide
agcaugguauuuagcuuca

SEQ ID NO: 2067362 - RNA, 19 nt, Artificial Sequence
  Description of Artificial Sequence: Synthetic oligonucleotide
ugcugccaaucccagcauu

SEQ ID NO: 2067363 - RNA, 19 nt, Artificial Sequence
  Description of Artificial Sequence: Synthetic oligonucleotide
uuggcucuccucugccagu

SEQ ID NO: 2067364 - RNA, 19 nt, Artificial Sequence
  Description of Artificial Sequence: Synthetic oligonucleotide
ccagggcaguuaaacagag

SEQ ID NO: 2067365 - RNA, 19 nt, Artificial Sequence
  Description of Artificial Sequence: Synthetic oligonucleotide
ugcuuuaucugagcucguu

SEQ ID NO: 2067366 - RNA, 19 nt, Artificial Sequence
  Description of Artificial Sequence: Synthetic oligonucleotide
uugcuuuaucugagcucgu

SEQ ID NO: 2067367 - RNA, 19 nt, Artificial Sequence
  Description of Artificial Sequence: Synthetic oligonucleotide
ggaaagacuugaguucuca

SEQ ID NO: 2067368 - RNA, 19 nt, Artificial Sequence
  Description of Artificial Sequence: Synthetic oligonucleotide
gcugagcaacugcacgccg

SEQ ID NO: 2067369 - RNA, 19 nt, Artificial Sequence
  Description of Artificial Sequence: Synthetic oligonucleotide
gcaccaguaaguucuucuc

SEQ ID NO: 2067370 - RNA, 19 nt, Artificial Sequence
  Description of Artificial Sequence: Synthetic oligonucleotide
agcccugugauugggccga

SEQ ID NO: 2067371 - RNA, 19 nt, Artificial Sequence
  Description of Artificial Sequence: Synthetic oligonucleotide
aagucacaccugguggcaa

SEQ ID NO: 2067372 - RNA, 19 nt, Artificial Sequence
  Description of Artificial Sequence: Synthetic oligonucleotide
agacaucuccacaaugcuu

SEQ ID NO: 2067373 - RNA, 19 nt, Artificial Sequence
  Description of Artificial Sequence: Synthetic oligonucleotide
auugggccgaauguuccaa

SEQ ID NO: 2067374 - RNA, 19 nt, Artificial Sequence
  Description of Artificial Sequence: Synthetic oligonucleotide
caacugcacgccgauguuc

SEQ ID NO: 2067375 - RNA, 19 nt, Artificial Sequence
  Description of Artificial Sequence: Synthetic oligonucleotide
cucuagccuuguaguucgg

SEQ ID NO: 2067376 - RNA, 19 nt, Artificial Sequence
  Description of Artificial Sequence: Synthetic oligonucleotide
cuuccaggcagcucagaua

SEQ ID NO: 2067377 - RNA, 19 nt, Artificial Sequence
  Description of Artificial Sequence: Synthetic oligonucleotide
guucaacaaguaguuccca

SEQ ID NO: 2067378 - RNA, 19 nt, Artificial Sequence
  Description of Artificial Sequence: Synthetic oligonucleotide
cugagaucacagcauggua

SEQ ID NO: 2067379 - RNA, 19 nt, Artificial Sequence
  Description of Artificial Sequence: Synthetic oligonucleotide
cucuccucugccagucguc

SEQ ID NO: 2067380 - RNA, 19 nt, Artificial Sequence
  Description of Artificial Sequence: Synthetic oligonucleotide
cacaagcuuggcucuccuc

SEQ ID NO: 2067381 - RNA, 19 nt, Artificial Sequence
  Description of Artificial Sequence: Synthetic oligonucleotide
gcugccaaucccagcauug

SEQ ID NO: 2067382 - RNA, 19 nt, Artificial Sequence
  Description of Artificial Sequence: Synthetic oligonucleotide
cugugauugggccgaaugu

SEQ ID NO: 2067383 - RNA, 19 nt, Artificial Sequence
  Description of Artificial Sequence: Synthetic oligonucleotide
uaguucggggaaggaucag

SEQ ID NO: 2067384 - RNA, 19 nt, Artificial Sequence
  Description of Artificial Sequence: Synthetic oligonucleotide
ccuuguaguucggggaagg

SEQ ID NO: 2067385 - RNA, 19 nt, Artificial Sequence
  Description of Artificial Sequence: Synthetic oligonucleotide
ggauucccuagaccaaauc

SEQ ID NO: 2067386 - RNA, 19 nt, Artificial Sequence
  Description of Artificial Sequence: Synthetic oligonucleotide
cagacgagcgcaccaguaa

SEQ ID NO: 2067387 - RNA, 19 nt, Artificial Sequence
  Description of Artificial Sequence: Synthetic oligonucleotide
cagacaucuccacaaugcu

SEQ ID NO: 2067388 - RNA, 19 nt, Artificial Sequence
  Description of Artificial Sequence: Synthetic oligonucleotide
ccuagaccaaauccaacga

SEQ ID NO: 2067389 - RNA, 19 nt, Artificial Sequence
  Description of Artificial Sequence: Synthetic oligonucleotide
agccuguaccacagaauga

SEQ ID NO: 2067390 - RNA, 19 nt, Artificial Sequence
  Description of Artificial Sequence: Synthetic oligonucleotide
auccuguuggaaagcaauu

SEQ ID NO: 2067391 - RNA, 19 nt, Artificial Sequence
  Description of Artificial Sequence: Synthetic oligonucleotide
auccaacgaaaugcugcca

SEQ ID NO: 2067392 - RNA, 19 nt, Artificial Sequence
  Description of Artificial Sequence: Synthetic oligonucleotide
gguguuccagacaucucca

SEQ ID NO: 2067393 - RNA, 19 nt, Artificial Sequence
  Description of Artificial Sequence: Synthetic oligonucleotide
cugguggcaaaggaacaga

SEQ ID NO: 2067394 - RNA, 19 nt, Artificial Sequence
  Description of Artificial Sequence: Synthetic oligonucleotide
agauccuguuggaaagcaa

SEQ ID NO: 2067395 - RNA, 19 nt, Artificial Sequence
  Description of Artificial Sequence: Synthetic oligonucleotide
cacgccgauguucugagau

SEQ ID NO: 2067396 - RNA, 19 nt, Artificial Sequence
  Description of Artificial Sequence: Synthetic oligonucleotide
cggggaaggaucaggcugc

SEQ ID NO: 2067397 - RNA, 19 nt, Artificial Sequence
  Description of Artificial Sequence: Synthetic oligonucleotide
gagcauaauuccacuugcu

SEQ ID NO: 2067398 - RNA, 19 nt, Artificial Sequence
  Description of Artificial Sequence: Synthetic oligonucleotide
gcucguuccuguucaagaa

SEQ ID NO: 2067399 - RNA, 19 nt, Artificial Sequence
  Description of Artificial Sequence: Synthetic oligonucleotide
agaucacagcaugguauuu

SEQ ID NO: 2067400 - RNA, 19 nt, Artificial Sequence
  Description of Artificial Sequence: Synthetic oligonucleotide
acgagcgcaccaguaaguu

SEQ ID NO: 2067401 - RNA, 19 nt, Artificial Sequence
  Description of Artificial Sequence: Synthetic oligonucleotide
ggggucguuuaaguuauuc

SEQ ID NO: 2067402 - RNA, 19 nt, Artificial Sequence
  Description of Artificial Sequence: Synthetic oligonucleotide
caucuccacaaugcuuauc

SEQ ID NO: 2067403 - RNA, 19 nt, Artificial Sequence
  Description of Artificial Sequence: Synthetic oligonucleotide
cagcucagauagacacuuc

SEQ ID NO: 2067404 - RNA, 19 nt, Artificial Sequence
  Description of Artificial Sequence: Synthetic oligonucleotide
cuuucggcccugagaaaua

SEQ ID NO: 2067405 - RNA, 19 nt, Artificial Sequence
  Description of Artificial Sequence: Synthetic oligonucleotide
augcugccaaucccagcau

SEQ ID NO: 2067406 - RNA, 19 nt, Artificial Sequence
  Description of Artificial Sequence: Synthetic oligonucleotide
acagacgagcgcaccagua

SEQ ID NO: 2067407 - RNA, 19 nt, Artificial Sequence
  Description of Artificial Sequence: Synthetic oligonucleotide
guaugacuuucucuacuuu

SEQ ID NO: 2067408 - RNA, 19 nt, Artificial Sequence
  Description of Artificial Sequence: Synthetic oligonucleotide
gcccugagaaauaagggcu

SEQ ID NO: 2067409 - RNA, 19 nt, Artificial Sequence
  Description of Artificial Sequence: Synthetic oligonucleotide
ucccuacugcacuguucaa

SEQ ID NO: 2067410 - RNA, 19 nt, Artificial Sequence
  Description of Artificial Sequence: Synthetic oligonucleotide
agcuuucggcccugagaaa

SEQ ID NO: 2067411 - RNA, 19 nt, Artificial Sequence
  Description of Artificial Sequence: Synthetic oligonucleotide
ggucagcagccacuggauc

SEQ ID NO: 2067412 - RNA, 19 nt, Artificial Sequence
  Description of Artificial Sequence: Synthetic oligonucleotide
ugccagucguccucuccuu

SEQ ID NO: 2067413 - RNA, 19 nt, Artificial Sequence
  Description of Artificial Sequence: Synthetic oligonucleotide
ccacuggaucaacagacga

SEQ ID NO: 2067414 - RNA, 19 nt, Artificial Sequence
  Description of Artificial Sequence: Synthetic oligonucleotide
cagcugcacuaagucacac

SEQ ID NO: 2067415 - RNA, 19 nt, Artificial Sequence
  Description of Artificial Sequence: Synthetic oligonucleotide
gacgagcgcaccaguaagu

SEQ ID NO: 2067416 - RNA, 19 nt, Artificial Sequence
  Description of Artificial Sequence: Synthetic oligonucleotide
agagcccagaaugcagauu

SEQ ID NO: 2067417 - RNA, 19 nt, Artificial Sequence
  Description of Artificial Sequence: Synthetic oligonucleotide
cagauaagccagcugccau

SEQ ID NO: 2067418 - RNA, 19 nt, Artificial Sequence
  Description of Artificial Sequence: Synthetic oligonucleotide
caguagauauucuggcguu

SEQ ID NO: 2067419 - RNA, 19 nt, Artificial Sequence
  Description of Artificial Sequence: Synthetic oligonucleotide
ccacuagagccucucccac

SEQ ID NO: 2067420 - RNA, 19 nt, Artificial Sequence
  Description of Artificial Sequence: Synthetic oligonucleotide
guucucugaugacaugcuu

SEQ ID NO: 2067421 - RNA, 19 nt, Artificial Sequence
  Description of Artificial Sequence: Synthetic oligonucleotide
ccuguuggaaagcaauugu

SEQ ID NO: 2067422 - RNA, 19 nt, Artificial Sequence
  Description of Artificial Sequence: Synthetic oligonucleotide
cugcacgccgauguucuga

SEQ ID NO: 2067423 - RNA, 19 nt, Artificial Sequence
  Description of Artificial Sequence: Synthetic oligonucleotide
caaagacagcugagcaacu

SEQ ID NO: 2067424 - RNA, 19 nt, Artificial Sequence
  Description of Artificial Sequence: Synthetic oligonucleotide
gcauuggcaccaacagagc

SEQ ID NO: 2067425 - RNA, 19 nt, Artificial Sequence
  Description of Artificial Sequence: Synthetic oligonucleotide
gcacuguucaaagggugga

SEQ ID NO: 2067426 - RNA, 19 nt, Artificial Sequence
  Description of Artificial Sequence: Synthetic oligonucleotide
cugagaaauaagggcuucu

SEQ ID NO: 2067427 - RNA, 19 nt, Artificial Sequence
  Description of Artificial Sequence: Synthetic oligonucleotide
ccuaagucccuacugcacu

SEQ ID NO: 2067428 - RNA, 19 nt, Artificial Sequence
  Description of Artificial Sequence: Synthetic oligonucleotide
cguuuaaguuauucaugga

SEQ ID NO: 2067429 - RNA, 19 nt, Artificial Sequence
  Description of Artificial Sequence: Synthetic oligonucleotide
agcccagaaugcagauuga

SEQ ID NO: 2067430 - RNA, 19 nt, Artificial Sequence
  Description of Artificial Sequence: Synthetic oligonucleotide
gggcaguuaaacagagaaa

SEQ ID NO: 2067431 - RNA, 19 nt, Artificial Sequence
  Description of Artificial Sequence: Synthetic oligonucleotide
gccuuguaguucggggaag

SEQ ID NO: 2067432 - RNA, 19 nt, Artificial Sequence
  Description of Artificial Sequence: Synthetic oligonucleotide
ccaucgccaccaucagccc

SEQ ID NO: 2067433 - RNA, 19 nt, Artificial Sequence
  Description of Artificial Sequence: Synthetic oligonucleotide
gcuuucggcccugagaaau

SEQ ID NO: 2067434 - RNA, 19 nt, Artificial Sequence
  Description of Artificial Sequence: Synthetic oligonucleotide
gcucagauagacacuucua

SEQ ID NO: 2067435 - RNA, 19 nt, Artificial Sequence
  Description of Artificial Sequence: Synthetic oligonucleotide
caucgccaccaucagcccu

SEQ ID NO: 2067436 - RNA, 19 nt, Artificial Sequence
  Description of Artificial Sequence: Synthetic oligonucleotide
gguggcaaaggaacagagu

SEQ ID NO: 2067437 - RNA, 19 nt, Artificial Sequence
  Description of Artificial Sequence: Synthetic oligonucleotide
gccagcuuucggcccugag

SEQ ID NO: 2067438 - RNA, 19 nt, Artificial Sequence
  Description of Artificial Sequence: Synthetic oligonucleotide
ggcguuccacuagagccuc

SEQ ID NO: 2067439 - RNA, 19 nt, Artificial Sequence
  Description of Artificial Sequence: Synthetic oligonucleotide
aggcugcaguagauauucu

SEQ ID NO: 2067440 - RNA, 19 nt, Artificial Sequence
  Description of Artificial Sequence: Synthetic oligonucleotide
ggcuucucgaaaacuaguu

SEQ ID NO: 2067441 - RNA, 19 nt, Artificial Sequence
  Description of Artificial Sequence: Synthetic oligonucleotide
gcagcugcacuaagucaca

SEQ ID NO: 2067442 - RNA, 19 nt, Artificial Sequence
  Description of Artificial Sequence: Synthetic oligonucleotide
ucgccaccaucagcccugu

SEQ ID NO: 2067443 - RNA, 19 nt, Artificial Sequence
  Description of Artificial Sequence: Synthetic oligonucleotide
gcagauugauugccauggu

SEQ ID NO: 2067444 - RNA, 19 nt, Artificial Sequence
  Description of Artificial Sequence: Synthetic oligonucleotide
gggccgaauguuccaauuu

SEQ ID NO: 2067445 - RNA, 19 nt, Artificial Sequence
  Description of Artificial Sequence: Synthetic oligonucleotide
gcucuccucugccagucgu

SEQ ID NO: 2067446 - RNA, 19 nt, Artificial Sequence
  Description of Artificial Sequence: Synthetic oligonucleotide
cccuacugcacuguucaaa

SEQ ID NO: 2067447 - RNA, 19 nt, Artificial Sequence
  Description of Artificial Sequence: Synthetic oligonucleotide
gggcuucucgaaaacuagu

SEQ ID NO: 2067448 - RNA, 19 nt, Artificial Sequence
  Description of Artificial Sequence: Synthetic oligonucleotide
cgccgauguucugagauca

SEQ ID NO: 2067449 - RNA, 19 nt, Artificial Sequence
  Description of Artificial Sequence: Synthetic oligonucleotide
cgcaccaguaaguucuucu

SEQ ID NO: 2067450 - RNA, 19 nt, Artificial Sequence
  Description of Artificial Sequence: Synthetic oligonucleotide
cccagaaugcagauugauu

SEQ ID NO: 2067451 - RNA, 19 nt, Artificial Sequence
  Description of Artificial Sequence: Synthetic oligonucleotide
cguuccacuagagccucuc

SEQ ID NO: 2067452 - RNA, 19 nt, Artificial Sequence
  Description of Artificial Sequence: Synthetic oligonucleotide
gccgauguucugagaucac

SEQ ID NO: 2067453 - RNA, 19 nt, Artificial Sequence
  Description of Artificial Sequence: Synthetic oligonucleotide
agcgcaccaguaaguucuu

SEQ ID NO: 2067454 - RNA, 19 nt, Artificial Sequence
  Description of Artificial Sequence: Synthetic oligonucleotide
ggaucaggcugcaguagau

SEQ ID NO: 2067455 - RNA, 19 nt, Artificial Sequence
  Description of Artificial Sequence: Synthetic oligonucleotide
ccccaucuggacuuaaguu

SEQ ID NO: 2067456 - RNA, 19 nt, Artificial Sequence
  Description of Artificial Sequence: Synthetic oligonucleotide
cccugagaaauaagggcuu

SEQ ID NO: 2067457 - RNA, 19 nt, Artificial Sequence
  Description of Artificial Sequence: Synthetic oligonucleotide
cgaaaacuaguuguucuau

SEQ ID NO: 2067458 - RNA, 19 nt, Artificial Sequence
  Description of Artificial Sequence: Synthetic oligonucleotide
gcaugguauuuagcuucaa

SEQ ID NO: 2067459 - RNA, 19 nt, Artificial Sequence
  Description of Artificial Sequence: Synthetic oligonucleotide
gcacgccgauguucugaga

SEQ ID NO: 2067460 - RNA, 19 nt, Artificial Sequence
  Description of Artificial Sequence: Synthetic oligonucleotide
gcgcaccaguaaguucuuc

SEQ ID NO: 2067461 - RNA, 19 nt, Artificial Sequence
  Description of Artificial Sequence: Synthetic oligonucleotide
ccuguucaagaagcuuccu

SEQ ID NO: 2067462 - RNA, 19 nt, Artificial Sequence
  Description of Artificial Sequence: Synthetic oligonucleotide
gcguuccacuagagccucu

SEQ ID NO: 2067463 - RNA, 19 nt, Artificial Sequence
  Description of Artificial Sequence: Synthetic oligonucleotide
agaucugacacacugaagc

SEQ ID NO: 2067464 - RNA, 19 nt, Artificial Sequence
  Description of Artificial Sequence: Synthetic oligonucleotide
aauuuauacuauuaaaugu

SEQ ID NO: 2067465 - RNA, 19 nt, Artificial Sequence
  Description of Artificial Sequence: Synthetic oligonucleotide
uauuaauagaaacagagaa

SEQ ID NO: 2067466 - RNA, 19 nt, Artificial Sequence
  Description of Artificial Sequence: Synthetic oligonucleotide
uuaauagaaacagagaaag

SEQ ID NO: 2067467 - RNA, 19 nt, Artificial Sequence
  Description of Artificial Sequence: Synthetic oligonucleotide
acaauuuuggaguucaugg

SEQ ID NO: 2067468 - RNA, 19 nt, Artificial Sequence
  Description of Artificial Sequence: Synthetic oligonucleotide
aauggaugugaauucagac

SEQ ID NO: 2067469 - RNA, 19 nt, Artificial Sequence
  Description of Artificial Sequence: Synthetic oligonucleotide
uacaccauugucuacacgg

SEQ ID NO: 2067470 - RNA, 19 nt, Artificial Sequence
  Description of Artificial Sequence: Synthetic oligonucleotide
uaaacaccgacucacagag

SEQ ID NO: 2067471 - RNA, 19 nt, Artificial Sequence
  Description of Artificial Sequence: Synthetic oligonucleotide
aauucagacaugcagcuca

SEQ ID NO: 2067472 - RNA, 19 nt, Artificial Sequence
  Description of Artificial Sequence: Synthetic oligonucleotide
auuuguagccuauuaauag

SEQ ID NO: 2067473 - RNA, 19 nt, Artificial Sequence
  Description of Artificial Sequence: Synthetic oligonucleotide
uuagcauaucauaagaggu

SEQ ID NO: 2067474 - RNA, 19 nt, Artificial Sequence
  Description of Artificial Sequence: Synthetic oligonucleotide
uagaauucucucuucaccg

SEQ ID NO: 2067475 - RNA, 19 nt, Artificial Sequence
  Description of Artificial Sequence: Synthetic oligonucleotide
aacucuaugcagaucaggc

SEQ ID NO: 2067476 - RNA, 19 nt, Artificial Sequence
  Description of Artificial Sequence: Synthetic oligonucleotide
ucuucuaacaucucuccgg

SEQ ID NO: 2067477 - RNA, 19 nt, Artificial Sequence
  Description of Artificial Sequence: Synthetic oligonucleotide
cucacgacgacguagacgc

SEQ ID NO: 2067478 - RNA, 19 nt, Artificial Sequence
  Description of Artificial Sequence: Synthetic oligonucleotide
aauuuuggaguucaugggu

SEQ ID NO: 2067479 - RNA, 19 nt, Artificial Sequence
  Description of Artificial Sequence: Synthetic oligonucleotide
acugugagacuauggaucc

SEQ ID NO: 2067480 - RNA, 19 nt, Artificial Sequence
  Description of Artificial Sequence: Synthetic oligonucleotide
uaaaccgccacucaucagc

SEQ ID NO: 2067481 - RNA, 19 nt, Artificial Sequence
  Description of Artificial Sequence: Synthetic oligonucleotide
ugucuaagaauagaguagg

SEQ ID NO: 2067482 - RNA, 19 nt, Artificial Sequence
  Description of Artificial Sequence: Synthetic oligonucleotide
ugcucgauagguuuaaacc

SEQ ID NO: 2067483 - RNA, 19 nt, Artificial Sequence
  Description of Artificial Sequence: Synthetic oligonucleotide
aacaccgacucacagagga

SEQ ID NO: 2067484 - RNA, 19 nt, Artificial Sequence
  Description of Artificial Sequence: Synthetic oligonucleotide
ccuauuaauagaaacagag

SEQ ID NO: 2067485 - RNA, 19 nt, Artificial Sequence
  Description of Artificial Sequence: Synthetic oligonucleotide
aaagcaacaauggauguga

SEQ ID NO: 2067486 - RNA, 19 nt, Artificial Sequence
  Description of Artificial Sequence: Synthetic oligonucleotide
uggaugugaauucagacau

SEQ ID NO: 2067487 - RNA, 19 nt, Artificial Sequence
  Description of Artificial Sequence: Synthetic oligonucleotide
ucuaagaaugacaggauau

SEQ ID NO: 2067488 - RNA, 19 nt, Artificial Sequence
  Description of Artificial Sequence: Synthetic oligonucleotide
uuuaaaccgccacucauca

SEQ ID NO: 2067489 - RNA, 19 nt, Artificial Sequence
  Description of Artificial Sequence: Synthetic oligonucleotide
ugcucuaagaaugacagga

SEQ ID NO: 2067490 - RNA, 19 nt, Artificial Sequence
  Description of Artificial Sequence: Synthetic oligonucleotide
ucugugaagacaaauguuu

SEQ ID NO: 2067491 - RNA, 19 nt, Artificial Sequence
  Description of Artificial Sequence: Synthetic oligonucleotide
gacaucaaccggaagaggg

SEQ ID NO: 2067492 - RNA, 19 nt, Artificial Sequence
  Description of Artificial Sequence: Synthetic oligonucleotide
uagccuauuaauagaaaca

SEQ ID NO: 2067493 - RNA, 19 nt, Artificial Sequence
  Description of Artificial Sequence: Synthetic oligonucleotide
aaaacgucucugcaacauc

SEQ ID NO: 2067494 - RNA, 19 nt, Artificial Sequence
  Description of Artificial Sequence: Synthetic oligonucleotide
gagacuauggauccugacc

SEQ ID NO: 2067495 - RNA, 19 nt, Artificial Sequence
  Description of Artificial Sequence: Synthetic oligonucleotide
aauguuugggcugcgacug

SEQ ID NO: 2067496 - RNA, 19 nt, Artificial Sequence
  Description of Artificial Sequence: Synthetic oligonucleotide
gaugugaauucagacaugc

SEQ ID NO: 2067497 - RNA, 19 nt, Artificial Sequence
  Description of Artificial Sequence: Synthetic oligonucleotide
uuuguagccuauuaauaga

SEQ ID NO: 2067498 - RNA, 19 nt, Artificial Sequence
  Description of Artificial Sequence: Synthetic oligonucleotide
cacaugagcauuuguagcc

SEQ ID NO: 2067499 - RNA, 19 nt, Artificial Sequence
  Description of Artificial Sequence: Synthetic oligonucleotide
aaauguuugggcugcgacu

SEQ ID NO: 2067500 - RNA, 19 nt, Artificial Sequence
  Description of Artificial Sequence: Synthetic oligonucleotide
uuaaaugucuaagaauaga

SEQ ID NO: 2067501 - RNA, 19 nt, Artificial Sequence
  Description of Artificial Sequence: Synthetic oligonucleotide
uagcauaucauaagaggug

SEQ ID NO: 2067502 - RNA, 19 nt, Artificial Sequence
  Description of Artificial Sequence: Synthetic oligonucleotide
aaggaauuaggucacuuua

SEQ ID NO: 2067503 - RNA, 19 nt, Artificial Sequence
  Description of Artificial Sequence: Synthetic oligonucleotide
caauuuuggaguucauggg

SEQ ID NO: 2067504 - RNA, 19 nt, Artificial Sequence
  Description of Artificial Sequence: Synthetic oligonucleotide
ucuaacaucucuccggcuc

SEQ ID NO: 2067505 - RNA, 19 nt, Artificial Sequence
  Description of Artificial Sequence: Synthetic oligonucleotide
guagaauucucucuucacc

SEQ ID NO: 2067506 - RNA, 19 nt, Artificial Sequence
  Description of Artificial Sequence: Synthetic oligonucleotide
caugcaggcgacaucaacc

SEQ ID NO: 2067507 - RNA, 19 nt, Artificial Sequence
  Description of Artificial Sequence: Synthetic oligonucleotide
guagccuauuaauagaaac

SEQ ID NO: 2067508 - RNA, 19 nt, Artificial Sequence
  Description of Artificial Sequence: Synthetic oligonucleotide
ugggguagcaccauuuagc

SEQ ID NO: 2067509 - RNA, 19 nt, Artificial Sequence
  Description of Artificial Sequence: Synthetic oligonucleotide
uuuuggaguucaugggugg

SEQ ID NO: 2067510 - RNA, 19 nt, Artificial Sequence
  Description of Artificial Sequence: Synthetic oligonucleotide
aguuugugcacucugccug

SEQ ID NO: 2067511 - RNA, 19 nt, Artificial Sequence
  Description of Artificial Sequence: Synthetic oligonucleotide
cuaaaaggaauuaggucac

SEQ ID NO: 2067512 - RNA, 19 nt, Artificial Sequence
  Description of Artificial Sequence: Synthetic oligonucleotide
acuugauagcuaaacaccg

SEQ ID NO: 2067513 - RNA, 19 nt, Artificial Sequence
  Description of Artificial Sequence: Synthetic oligonucleotide
ucacagaggaaccucucag

SEQ ID NO: 2067514 - RNA, 19 nt, Artificial Sequence
  Description of Artificial Sequence: Synthetic oligonucleotide
accuguuuaagcguggacg

SEQ ID NO: 2067515 - RNA, 19 nt, Artificial Sequence
  Description of Artificial Sequence: Synthetic oligonucleotide
ugaagacaaauguuugggc

SEQ ID NO: 2067516 - RNA, 19 nt, Artificial Sequence
  Description of Artificial Sequence: Synthetic oligonucleotide
aacaauuuuggaguucaug

SEQ ID NO: 2067517 - RNA, 19 nt, Artificial Sequence
  Description of Artificial Sequence: Synthetic oligonucleotide
uggauaagaacuucugggu

SEQ ID NO: 2067518 - RNA, 19 nt, Artificial Sequence
  Description of Artificial Sequence: Synthetic oligonucleotide
gauagguuuaaaccgccac

SEQ ID NO: 2067519 - RNA, 19 nt, Artificial Sequence
  Description of Artificial Sequence: Synthetic oligonucleotide
uuuccauccgagcaacuug

SEQ ID NO: 2067520 - RNA, 19 nt, Artificial Sequence
  Description of Artificial Sequence: Synthetic oligonucleotide
acagaggaaccucucagag

SEQ ID NO: 2067521 - RNA, 19 nt, Artificial Sequence
  Description of Artificial Sequence: Synthetic oligonucleotide
cucgauagguuuaaaccgc

SEQ ID NO: 2067522 - RNA, 19 nt, Artificial Sequence
  Description of Artificial Sequence: Synthetic oligonucleotide
gcucgauagguuuaaaccg

SEQ ID NO: 2067523 - RNA, 19 nt, Artificial Sequence
  Description of Artificial Sequence: Synthetic oligonucleotide
aaaugucuaagaauagagu

SEQ ID NO: 2067524 - RNA, 19 nt, Artificial Sequence
  Description of Artificial Sequence: Synthetic oligonucleotide
aguaguuugugcacucugc

SEQ ID NO: 2067525 - RNA, 19 nt, Artificial Sequence
  Description of Artificial Sequence: Synthetic oligonucleotide
uuguagccuauuaauagaa

SEQ ID NO: 2067526 - RNA, 19 nt, Artificial Sequence
  Description of Artificial Sequence: Synthetic oligonucleotide
gaaagaacaccuuaaaauu

SEQ ID NO: 2067527 - RNA, 19 nt, Artificial Sequence
  Description of Artificial Sequence: Synthetic oligonucleotide
ucuaagaauagaguaggaa

SEQ ID NO: 2067528 - RNA, 19 nt, Artificial Sequence
  Description of Artificial Sequence: Synthetic oligonucleotide
uaagcguggacgcuacuug

SEQ ID NO: 2067529 - RNA, 19 nt, Artificial Sequence
  Description of Artificial Sequence: Synthetic oligonucleotide
cugagcagaagucacacuc

SEQ ID NO: 2067530 - RNA, 19 nt, Artificial Sequence
  Description of Artificial Sequence: Synthetic oligonucleotide
ugugcacucugccuggcag

SEQ ID NO: 2067531 - RNA, 19 nt, Artificial Sequence
  Description of Artificial Sequence: Synthetic oligonucleotide
auagguuuaaaccgccacu

SEQ ID NO: 2067532 - RNA, 19 nt, Artificial Sequence
  Description of Artificial Sequence: Synthetic oligonucleotide
ucucucuucaccgaguagu

SEQ ID NO: 2067533 - RNA, 19 nt, Artificial Sequence
  Description of Artificial Sequence: Synthetic oligonucleotide
aucuucuaacaucucuccg

SEQ ID NO: 2067534 - RNA, 19 nt, Artificial Sequence
  Description of Artificial Sequence: Synthetic oligonucleotide
uuccauccgagcaacuugc

SEQ ID NO: 2067535 - RNA, 19 nt, Artificial Sequence
  Description of Artificial Sequence: Synthetic oligonucleotide
uauggauccugaccuuggg

SEQ ID NO: 2067536 - RNA, 19 nt, Artificial Sequence
  Description of Artificial Sequence: Synthetic oligonucleotide
auauacaccauugucuaca

SEQ ID NO: 2067537 - RNA, 19 nt, Artificial Sequence
  Description of Artificial Sequence: Synthetic oligonucleotide
aggauauacaccauugucu

SEQ ID NO: 2067538 - RNA, 19 nt, Artificial Sequence
  Description of Artificial Sequence: Synthetic oligonucleotide
aacaauggaugugaauuca

SEQ ID NO: 2067539 - RNA, 19 nt, Artificial Sequence
  Description of Artificial Sequence: Synthetic oligonucleotide
uuauacuauuaaaugucua

SEQ ID NO: 2067540 - RNA, 19 nt, Artificial Sequence
  Description of Artificial Sequence: Synthetic oligonucleotide
cuucuaacaucucuccggc

SEQ ID NO: 2067541 - RNA, 19 nt, Artificial Sequence
  Description of Artificial Sequence: Synthetic oligonucleotide
gaauagaguaggaaagaac

SEQ ID NO: 2067542 - RNA, 19 nt, Artificial Sequence
  Description of Artificial Sequence: Synthetic oligonucleotide
cuauuaauagaaacagaga

SEQ ID NO: 2067543 - RNA, 19 nt, Artificial Sequence
  Description of Artificial Sequence: Synthetic oligonucleotide
gacaggauauacaccauug

SEQ ID NO: 2067544 - RNA, 19 nt, Artificial Sequence
  Description of Artificial Sequence: Synthetic oligonucleotide
ugacagaacucccacugac

SEQ ID NO: 2067545 - RNA, 19 nt, Artificial Sequence
  Description of Artificial Sequence: Synthetic oligonucleotide
agagaaagcaacaauggau

SEQ ID NO: 2067546 - RNA, 19 nt, Artificial Sequence
  Description of Artificial Sequence: Synthetic oligonucleotide
aaaccgccacucaucagcc

SEQ ID NO: 2067547 - RNA, 19 nt, Artificial Sequence
  Description of Artificial Sequence: Synthetic oligonucleotide
aguaggaaagaacaccuua

SEQ ID NO: 2067548 - RNA, 19 nt, Artificial Sequence
  Description of Artificial Sequence: Synthetic oligonucleotide
accauugucuacacggccc

SEQ ID NO: 2067549 - RNA, 19 nt, Artificial Sequence
  Description of Artificial Sequence: Synthetic oligonucleotide
ugggcugcgacugugagac

SEQ ID NO: 2067550 - RNA, 19 nt, Artificial Sequence
  Description of Artificial Sequence: Synthetic oligonucleotide
cauuuagcauaucauaaga

SEQ ID NO: 2067551 - RNA, 19 nt, Artificial Sequence
  Description of Artificial Sequence: Synthetic oligonucleotide
agugagcuggauaagaacu

SEQ ID NO: 2067552 - RNA, 19 nt, Artificial Sequence
  Description of Artificial Sequence: Synthetic oligonucleotide
aaacgucucugcaacaucu

SEQ ID NO: 2067553 - RNA, 19 nt, Artificial Sequence
  Description of Artificial Sequence: Synthetic oligonucleotide
gucuacacggcccuguuug

SEQ ID NO: 2067554 - RNA, 19 nt, Artificial Sequence
  Description of Artificial Sequence: Synthetic oligonucleotide
auuaauagaaacagagaaa

SEQ ID NO: 2067555 - RNA, 19 nt, Artificial Sequence
  Description of Artificial Sequence: Synthetic oligonucleotide
gacugugagacuauggauc

SEQ ID NO: 2067556 - RNA, 19 nt, Artificial Sequence
  Description of Artificial Sequence: Synthetic oligonucleotide
gauaagaacuucugggucu

SEQ ID NO: 2067557 - RNA, 19 nt, Artificial Sequence
  Description of Artificial Sequence: Synthetic oligonucleotide
uaacucuaugcagaucagg

SEQ ID NO: 2067558 - RNA, 19 nt, Artificial Sequence
  Description of Artificial Sequence: Synthetic oligonucleotide
ugauagcuaaacaccgacu

SEQ ID NO: 2067559 - RNA, 19 nt, Artificial Sequence
  Description of Artificial Sequence: Synthetic oligonucleotide
accucucagagccaucuuc

SEQ ID NO: 2067560 - RNA, 19 nt, Artificial Sequence
  Description of Artificial Sequence: Synthetic oligonucleotide
guaguuugugcacucugcc

SEQ ID NO: 2067561 - RNA, 19 nt, Artificial Sequence
  Description of Artificial Sequence: Synthetic oligonucleotide
ucgauagguuuaaaccgcc

SEQ ID NO: 2067562 - RNA, 19 nt, Artificial Sequence
  Description of Artificial Sequence: Synthetic oligonucleotide
gaaagcaacaauggaugug

SEQ ID NO: 2067563 - RNA, 19 nt, Artificial Sequence
  Description of Artificial Sequence: Synthetic oligonucleotide
uucaccgaguaguuugugc

SEQ ID NO: 2067564 - RNA, 19 nt, Artificial Sequence
  Description of Artificial Sequence: Synthetic oligonucleotide
ugugagacuauggauccug

SEQ ID NO: 2067565 - RNA, 19 nt, Artificial Sequence
  Description of Artificial Sequence: Synthetic oligonucleotide
auaucauaagaggugagaa

SEQ ID NO: 2067566 - RNA, 19 nt, Artificial Sequence
  Description of Artificial Sequence: Synthetic oligonucleotide
caggauauacaccauuguc

SEQ ID NO: 2067567 - RNA, 19 nt, Artificial Sequence
  Description of Artificial Sequence: Synthetic oligonucleotide
agaguaggaaagaacaccu

SEQ ID NO: 2067568 - RNA, 19 nt, Artificial Sequence
  Description of Artificial Sequence: Synthetic oligonucleotide
agaacaccuuaaaauuccc

SEQ ID NO: 2067569 - RNA, 19 nt, Artificial Sequence
  Description of Artificial Sequence: Synthetic oligonucleotide
agaaagcaacaauggaugu

SEQ ID NO: 2067570 - RNA, 19 nt, Artificial Sequence
  Description of Artificial Sequence: Synthetic oligonucleotide
uucaccuguuuaagcgugg

SEQ ID NO: 2067571 - RNA, 19 nt, Artificial Sequence
  Description of Artificial Sequence: Synthetic oligonucleotide
gacgcuacuugauagcuaa

SEQ ID NO: 2067572 - RNA, 19 nt, Artificial Sequence
  Description of Artificial Sequence: Synthetic oligonucleotide
ucucacgacgacguagacg

SEQ ID NO: 2067573 - RNA, 19 nt, Artificial Sequence
  Description of Artificial Sequence: Synthetic oligonucleotide
agcauuuguagccuauuaa

SEQ ID NO: 2067574 - RNA, 19 nt, Artificial Sequence
  Description of Artificial Sequence: Synthetic oligonucleotide
auagcuaaacaccgacuca

SEQ ID NO: 2067575 - RNA, 19 nt, Artificial Sequence
  Description of Artificial Sequence: Synthetic oligonucleotide
uagcuaaacaccgacucac

SEQ ID NO: 2067576 - RNA, 19 nt, Artificial Sequence
  Description of Artificial Sequence: Synthetic oligonucleotide
ugcugaucgugcuucaccu

SEQ ID NO: 2067577 - RNA, 19 nt, Artificial Sequence
  Description of Artificial Sequence: Synthetic oligonucleotide
caaauguuugggcugcgac

SEQ ID NO: 2067578 - RNA, 19 nt, Artificial Sequence
  Description of Artificial Sequence: Synthetic oligonucleotide
agcauaucauaagagguga

SEQ ID NO: 2067579 - RNA, 19 nt, Artificial Sequence
  Description of Artificial Sequence: Synthetic oligonucleotide
cuauggauccugaccuugg

SEQ ID NO: 2067580 - RNA, 19 nt, Artificial Sequence
  Description of Artificial Sequence: Synthetic oligonucleotide
uuugggcugcgacugugag

SEQ ID NO: 2067581 - RNA, 19 nt, Artificial Sequence
  Description of Artificial Sequence: Synthetic oligonucleotide
cuaacaucucuccggcucc

SEQ ID NO: 2067582 - RNA, 19 nt, Artificial Sequence
  Description of Artificial Sequence: Synthetic oligonucleotide
ggugacagaacucccacug

SEQ ID NO: 2067583 - RNA, 19 nt, Artificial Sequence
  Description of Artificial Sequence: Synthetic oligonucleotide
agaggugagaaaauaauuu

SEQ ID NO: 2067584 - RNA, 19 nt, Artificial Sequence
  Description of Artificial Sequence: Synthetic oligonucleotide
cauccgagcaacuugcuga

SEQ ID NO: 2067585 - RNA, 19 nt, Artificial Sequence
  Description of Artificial Sequence: Synthetic oligonucleotide
ucauaagaggugagaaaau

SEQ ID NO: 2067586 - RNA, 19 nt, Artificial Sequence
  Description of Artificial Sequence: Synthetic oligonucleotide
agaacuucugggucuaaaa

SEQ ID NO: 2067587 - RNA, 19 nt, Artificial Sequence
  Description of Artificial Sequence: Synthetic oligonucleotide
gguagcaccauuuagcaua

SEQ ID NO: 2067588 - RNA, 19 nt, Artificial Sequence
  Description of Artificial Sequence: Synthetic oligonucleotide
augcagaucaggcuagccu

SEQ ID NO: 2067589 - RNA, 19 nt, Artificial Sequence
  Description of Artificial Sequence: Synthetic oligonucleotide
uauacaccauugucuacac

SEQ ID NO: 2067590 - RNA, 19 nt, Artificial Sequence
  Description of Artificial Sequence: Synthetic oligonucleotide
ugcagaucaggcuagccuu

SEQ ID NO: 2067591 - RNA, 19 nt, Artificial Sequence
  Description of Artificial Sequence: Synthetic oligonucleotide
uagguuuaaaccgccacuc

SEQ ID NO: 2067592 - RNA, 19 nt, Artificial Sequence
  Description of Artificial Sequence: Synthetic oligonucleotide
gauauacaccauugucuac

SEQ ID NO: 2067593 - RNA, 19 nt, Artificial Sequence
  Description of Artificial Sequence: Synthetic oligonucleotide
gaacagagcuuuccguggc

SEQ ID NO: 2067594 - RNA, 19 nt, Artificial Sequence
  Description of Artificial Sequence: Synthetic oligonucleotide
accgccacucaucagccuc

SEQ ID NO: 2067595 - RNA, 19 nt, Artificial Sequence
  Description of Artificial Sequence: Synthetic oligonucleotide
guuugugcacucugccugg

SEQ ID NO: 2067596 - RNA, 19 nt, Artificial Sequence
  Description of Artificial Sequence: Synthetic oligonucleotide
cuucaccuguuuaagcgug

SEQ ID NO: 2067597 - RNA, 19 nt, Artificial Sequence
  Description of Artificial Sequence: Synthetic oligonucleotide
auuuuggaguucaugggug

SEQ ID NO: 2067598 - RNA, 19 nt, Artificial Sequence
  Description of Artificial Sequence: Synthetic oligonucleotide
gaaugacaggauauacacc

SEQ ID NO: 2067599 - RNA, 19 nt, Artificial Sequence
  Description of Artificial Sequence: Synthetic oligonucleotide
agccauuccuuccaguaga

SEQ ID NO: 2067600 - RNA, 19 nt, Artificial Sequence
  Description of Artificial Sequence: Synthetic oligonucleotide
accauuuagcauaucauaa

SEQ ID NO: 2067601 - RNA, 19 nt, Artificial Sequence
  Description of Artificial Sequence: Synthetic oligonucleotide
ucacaguacagcugugagu

SEQ ID NO: 2067602 - RNA, 19 nt, Artificial Sequence
  Description of Artificial Sequence: Synthetic oligonucleotide
gaacaccuuaaaauucccc

SEQ ID NO: 2067603 - RNA, 19 nt, Artificial Sequence
  Description of Artificial Sequence: Synthetic oligonucleotide
uggguuuggcuggugagag

SEQ ID NO: 2067604 - RNA, 19 nt, Artificial Sequence
  Description of Artificial Sequence: Synthetic oligonucleotide
aagcguggacgcuacuuga

SEQ ID NO: 2067605 - RNA, 19 nt, Artificial Sequence
  Description of Artificial Sequence: Synthetic oligonucleotide
ugcccuaggggccaccaug

SEQ ID NO: 2067606 - RNA, 19 nt, Artificial Sequence
  Description of Artificial Sequence: Synthetic oligonucleotide
uaguuugugcacucugccu

SEQ ID NO: 2067607 - RNA, 19 nt, Artificial Sequence
  Description of Artificial Sequence: Synthetic oligonucleotide
ucuucaccgaguaguuugu

SEQ ID NO: 2067608 - RNA, 19 nt, Artificial Sequence
  Description of Artificial Sequence: Synthetic oligonucleotide
gcgacuucgucucacgacg

SEQ ID NO: 2067609 - RNA, 19 nt, Artificial Sequence
  Description of Artificial Sequence: Synthetic oligonucleotide
uacagcugugagucucugg

SEQ ID NO: 2067610 - RNA, 19 nt, Artificial Sequence
  Description of Artificial Sequence: Synthetic oligonucleotide
acaccauugucuacacggc

SEQ ID NO: 2067611 - RNA, 19 nt, Artificial Sequence
  Description of Artificial Sequence: Synthetic oligonucleotide
agcggcgcgacuucgucuc

SEQ ID NO: 2067612 - RNA, 19 nt, Artificial Sequence
  Description of Artificial Sequence: Synthetic oligonucleotide
acuucgucucacgacgacg

SEQ ID NO: 2067613 - RNA, 19 nt, Artificial Sequence
  Description of Artificial Sequence: Synthetic oligonucleotide
cauuuguagccuauuaaua

SEQ ID NO: 2067614 - RNA, 19 nt, Artificial Sequence
  Description of Artificial Sequence: Synthetic oligonucleotide
aagccagauccggugacag

SEQ ID NO: 2067615 - RNA, 19 nt, Artificial Sequence
  Description of Artificial Sequence: Synthetic oligonucleotide
aacucccacugaccccgcc

SEQ ID NO: 2067616 - RNA, 19 nt, Artificial Sequence
  Description of Artificial Sequence: Synthetic oligonucleotide
ccauuuagcauaucauaag

SEQ ID NO: 2067617 - RNA, 19 nt, Artificial Sequence
  Description of Artificial Sequence: Synthetic oligonucleotide
uuaaaccgccacucaucag

SEQ ID NO: 2067618 - RNA, 19 nt, Artificial Sequence
  Description of Artificial Sequence: Synthetic oligonucleotide
ccuguuuaagcguggacgc

SEQ ID NO: 2067619 - RNA, 19 nt, Artificial Sequence
  Description of Artificial Sequence: Synthetic oligonucleotide
cugcucgauagguuuaaac

SEQ ID NO: 2067620 - RNA, 19 nt, Artificial Sequence
  Description of Artificial Sequence: Synthetic oligonucleotide
augcucuaagaaugacagg

SEQ ID NO: 2067621 - RNA, 19 nt, Artificial Sequence
  Description of Artificial Sequence: Synthetic oligonucleotide
gcagaagucacacucaucu

SEQ ID NO: 2067622 - RNA, 19 nt, Artificial Sequence
  Description of Artificial Sequence: Synthetic oligonucleotide
ugagacuauggauccugac

SEQ ID NO: 2067623 - RNA, 19 nt, Artificial Sequence
  Description of Artificial Sequence: Synthetic oligonucleotide
ucgugcuucaccuguuuaa

SEQ ID NO: 2067624 - RNA, 19 nt, Artificial Sequence
  Description of Artificial Sequence: Synthetic oligonucleotide
auacaccauugucuacacg

SEQ ID NO: 2067625 - RNA, 19 nt, Artificial Sequence
  Description of Artificial Sequence: Synthetic oligonucleotide
cucuccggcuccuuugggg

SEQ ID NO: 2067626 - RNA, 19 nt, Artificial Sequence
  Description of Artificial Sequence: Synthetic oligonucleotide
uucucucuucaccgaguag

SEQ ID NO: 2067627 - RNA, 19 nt, Artificial Sequence
  Description of Artificial Sequence: Synthetic oligonucleotide
cagaggaaccucucagagc

SEQ ID NO: 2067628 - RNA, 19 nt, Artificial Sequence
  Description of Artificial Sequence: Synthetic oligonucleotide
gacagaacucccacugacc

SEQ ID NO: 2067629 - RNA, 19 nt, Artificial Sequence
  Description of Artificial Sequence: Synthetic oligonucleotide
ucgucucacgacgacguag

SEQ ID NO: 2067630 - RNA, 19 nt, Artificial Sequence
  Description of Artificial Sequence: Synthetic oligonucleotide
uguuuaagcguggacgcua

SEQ ID NO: 2067631 - RNA, 19 nt, Artificial Sequence
  Description of Artificial Sequence: Synthetic oligonucleotide
acuauggauccugaccuug

SEQ ID NO: 2067632 - RNA, 19 nt, Artificial Sequence
  Description of Artificial Sequence: Synthetic oligonucleotide
ggauaagaacuucuggguc

SEQ ID NO: 2067633 - RNA, 19 nt, Artificial Sequence
  Description of Artificial Sequence: Synthetic oligonucleotide
ccgagcaacuugcugaucg

SEQ ID NO: 2067634 - RNA, 19 nt, Artificial Sequence
  Description of Artificial Sequence: Synthetic oligonucleotide
cauaucauaagaggugaga

SEQ ID NO: 2067635 - RNA, 19 nt, Artificial Sequence
  Description of Artificial Sequence: Synthetic oligonucleotide
ucuccggcuccuuuggggu

SEQ ID NO: 2067636 - RNA, 19 nt, Artificial Sequence
  Description of Artificial Sequence: Synthetic oligonucleotide
cuugauagcuaaacaccga

SEQ ID NO: 2067637 - RNA, 19 nt, Artificial Sequence
  Description of Artificial Sequence: Synthetic oligonucleotide
aaccccagcagcugcucga

SEQ ID NO: 2067638 - RNA, 19 nt, Artificial Sequence
  Description of Artificial Sequence: Synthetic oligonucleotide
aacgucucugcaacaucuc

SEQ ID NO: 2067639 - RNA, 19 nt, Artificial Sequence
  Description of Artificial Sequence: Synthetic oligonucleotide
gcuaaacaccgacucacag

SEQ ID NO: 2067640 - RNA, 19 nt, Artificial Sequence
  Description of Artificial Sequence: Synthetic oligonucleotide
caccauugucuacacggcc

SEQ ID NO: 2067641 - RNA, 19 nt, Artificial Sequence
  Description of Artificial Sequence: Synthetic oligonucleotide
uggacgcuacuugauagcu

SEQ ID NO: 2067642 - RNA, 19 nt, Artificial Sequence
  Description of Artificial Sequence: Synthetic oligonucleotide
agagcuuuccguggcgggg

SEQ ID NO: 2067643 - RNA, 19 nt, Artificial Sequence
  Description of Artificial Sequence: Synthetic oligonucleotide
gaaccccagcagcugcucg

SEQ ID NO: 2067644 - RNA, 19 nt, Artificial Sequence
  Description of Artificial Sequence: Synthetic oligonucleotide
caucugugaagacaaaugu

SEQ ID NO: 2067645 - RNA, 19 nt, Artificial Sequence
  Description of Artificial Sequence: Synthetic oligonucleotide
uuuuccauccgagcaacuu

SEQ ID NO: 2067646 - RNA, 19 nt, Artificial Sequence
  Description of Artificial Sequence: Synthetic oligonucleotide
ucaaccggaagagggugug

SEQ ID NO: 2067647 - RNA, 19 nt, Artificial Sequence
  Description of Artificial Sequence: Synthetic oligonucleotide
guaggaaagaacaccuuaa

SEQ ID NO: 2067648 - RNA, 19 nt, Artificial Sequence
  Description of Artificial Sequence: Synthetic oligonucleotide
uuaagcguggacgcuacuu

SEQ ID NO: 2067649 - RNA, 19 nt, Artificial Sequence
  Description of Artificial Sequence: Synthetic oligonucleotide
agguuuaaaccgccacuca

SEQ ID NO: 2067650 - RNA, 19 nt, Artificial Sequence
  Description of Artificial Sequence: Synthetic oligonucleotide
cacgacgacguagacgcgg

SEQ ID NO: 2067651 - RNA, 19 nt, Artificial Sequence
  Description of Artificial Sequence: Synthetic oligonucleotide
gacguagacgcggcgugcg

SEQ ID NO: 2067652 - RNA, 19 nt, Artificial Sequence
  Description of Artificial Sequence: Synthetic oligonucleotide
guggacgcuacuugauagc

SEQ ID NO: 2067653 - RNA, 19 nt, Artificial Sequence
  Description of Artificial Sequence: Synthetic oligonucleotide
uuggguuuggcuggugaga

SEQ ID NO: 2067654 - RNA, 19 nt, Artificial Sequence
  Description of Artificial Sequence: Synthetic oligonucleotide
auucucucuucaccgagua

SEQ ID NO: 2067655 - RNA, 19 nt, Artificial Sequence
  Description of Artificial Sequence: Synthetic oligonucleotide
auggauccugaccuugggu

SEQ ID NO: 2067656 - RNA, 19 nt, Artificial Sequence
  Description of Artificial Sequence: Synthetic oligonucleotide
ucucuccggcuccuuuggg

SEQ ID NO: 2067657 - RNA, 19 nt, Artificial Sequence
  Description of Artificial Sequence: Synthetic oligonucleotide
gaggcagccauuccuucca

SEQ ID NO: 2067658 - RNA, 19 nt, Artificial Sequence
  Description of Artificial Sequence: Synthetic oligonucleotide
acgacguagacgcggcgug

SEQ ID NO: 2067659 - RNA, 19 nt, Artificial Sequence
  Description of Artificial Sequence: Synthetic oligonucleotide
gcaacaucucacaugagca

SEQ ID NO: 2067660 - RNA, 19 nt, Artificial Sequence
  Description of Artificial Sequence: Synthetic oligonucleotide
caucuggacagacccugag

SEQ ID NO: 2067661 - RNA, 19 nt, Artificial Sequence
  Description of Artificial Sequence: Synthetic oligonucleotide
aucucacaugagcauuugu

SEQ ID NO: 2067662 - RNA, 19 nt, Artificial Sequence
  Description of Artificial Sequence: Synthetic oligonucleotide
cuucuggaugcucuaagaa

SEQ ID NO: 2067663 - RNA, 19 nt, Artificial Sequence
  Description of Artificial Sequence: Synthetic oligonucleotide
uguuugggcugcgacugug

SEQ ID NO: 2067664 - RNA, 19 nt, Artificial Sequence
  Description of Artificial Sequence: Synthetic oligonucleotide
caucaaccggaagagggug

SEQ ID NO: 2067665 - RNA, 19 nt, Artificial Sequence
  Description of Artificial Sequence: Synthetic oligonucleotide
cauuccuuccaguagaauu

SEQ ID NO: 2067666 - RNA, 19 nt, Artificial Sequence
  Description of Artificial Sequence: Synthetic oligonucleotide
cagccauuccuuccaguag

SEQ ID NO: 2067667 - RNA, 19 nt, Artificial Sequence
  Description of Artificial Sequence: Synthetic oligonucleotide
cagagcuuuccguggcggg

SEQ ID NO: 2067668 - RNA, 19 nt, Artificial Sequence
  Description of Artificial Sequence: Synthetic oligonucleotide
auugucuacacggcccugu

SEQ ID NO: 2067669 - RNA, 19 nt, Artificial Sequence
  Description of Artificial Sequence: Synthetic oligonucleotide
acgacgacguagacgcggc

SEQ ID NO: 2067670 - RNA, 19 nt, Artificial Sequence
  Description of Artificial Sequence: Synthetic oligonucleotide
agcuuuccguggcggggcc

SEQ ID NO: 2067671 - RNA, 19 nt, Artificial Sequence
  Description of Artificial Sequence: Synthetic oligonucleotide
acguagacgcggcgugcgc

SEQ ID NO: 2067672 - RNA, 19 nt, Artificial Sequence
  Description of Artificial Sequence: Synthetic oligonucleotide
guaacucuaugcagaucag

SEQ ID NO: 2067673 - RNA, 19 nt, Artificial Sequence
  Description of Artificial Sequence: Synthetic oligonucleotide
gagcauuuguagccuauua

SEQ ID NO: 2067674 - RNA, 19 nt, Artificial Sequence
  Description of Artificial Sequence: Synthetic oligonucleotide
caccgacucacagaggaac

SEQ ID NO: 2067675 - RNA, 19 nt, Artificial Sequence
  Description of Artificial Sequence: Synthetic oligonucleotide
uuuaagcguggacgcuacu

SEQ ID NO: 2067676 - RNA, 19 nt, Artificial Sequence
  Description of Artificial Sequence: Synthetic oligonucleotide
aagagggugugaaccccag

SEQ ID NO: 2067677 - RNA, 19 nt, Artificial Sequence
  Description of Artificial Sequence: Synthetic oligonucleotide
aggaauuaggucacuuuau

SEQ ID NO: 2067678 - RNA, 19 nt, Artificial Sequence
  Description of Artificial Sequence: Synthetic oligonucleotide
agauccggugacagaacuc

SEQ ID NO: 2067679 - RNA, 19 nt, Artificial Sequence
  Description of Artificial Sequence: Synthetic oligonucleotide
gacaaauguuugggcugcg

SEQ ID NO: 2067680 - RNA, 19 nt, Artificial Sequence
  Description of Artificial Sequence: Synthetic oligonucleotide
gggugugaaccccagcagc

SEQ ID NO: 2067681 - RNA, 19 nt, Artificial Sequence
  Description of Artificial Sequence: Synthetic oligonucleotide
ucuacacggcccuguuugu

SEQ ID NO: 2067682 - RNA, 19 nt, Artificial Sequence
  Description of Artificial Sequence: Synthetic oligonucleotide
ugaccccgccagcugaaga

SEQ ID NO: 2067683 - RNA, 19 nt, Artificial Sequence
  Description of Artificial Sequence: Synthetic oligonucleotide
uucuaacaucucuccggcu

SEQ ID NO: 2067684 - RNA, 19 nt, Artificial Sequence
  Description of Artificial Sequence: Synthetic oligonucleotide
aaacaccgacucacagagg

SEQ ID NO: 2067685 - RNA, 19 nt, Artificial Sequence
  Description of Artificial Sequence: Synthetic oligonucleotide
cugcccaauccuuuuaaaa

SEQ ID NO: 2067686 - RNA, 19 nt, Artificial Sequence
  Description of Artificial Sequence: Synthetic oligonucleotide
ggaguucaugggugggugg

SEQ ID NO: 2067687 - RNA, 19 nt, Artificial Sequence
  Description of Artificial Sequence: Synthetic oligonucleotide
gggguagcaccauuuagca

SEQ ID NO: 2067688 - RNA, 19 nt, Artificial Sequence
  Description of Artificial Sequence: Synthetic oligonucleotide
acaucaaccggaagagggu

SEQ ID NO: 2067689 - RNA, 19 nt, Artificial Sequence
  Description of Artificial Sequence: Synthetic oligonucleotide
cacagaggaaccucucaga

SEQ ID NO: 2067690 - RNA, 19 nt, Artificial Sequence
  Description of Artificial Sequence: Synthetic oligonucleotide
cuggaugcucuaagaauga

SEQ ID NO: 2067691 - RNA, 19 nt, Artificial Sequence
  Description of Artificial Sequence: Synthetic oligonucleotide
caccaugcaggcgacauca

SEQ ID NO: 2067692 - RNA, 19 nt, Artificial Sequence
  Description of Artificial Sequence: Synthetic oligonucleotide
gaauucagacaugcagcuc

SEQ ID NO: 2067693 - RNA, 19 nt, Artificial Sequence
  Description of Artificial Sequence: Synthetic oligonucleotide
aucugugaagacaaauguu

SEQ ID NO: 2067694 - RNA, 19 nt, Artificial Sequence
  Description of Artificial Sequence: Synthetic oligonucleotide
gacccugagcagaagucac

SEQ ID NO: 2067695 - RNA, 19 nt, Artificial Sequence
  Description of Artificial Sequence: Synthetic oligonucleotide
gcgacugugagacuaugga

SEQ ID NO: 2067696 - RNA, 19 nt, Artificial Sequence
  Description of Artificial Sequence: Synthetic oligonucleotide
gacuucgucucacgacgac

SEQ ID NO: 2067697 - RNA, 19 nt, Artificial Sequence
  Description of Artificial Sequence: Synthetic oligonucleotide
agacgcggcgugcgcgugc

SEQ ID NO: 2067698 - RNA, 19 nt, Artificial Sequence
  Description of Artificial Sequence: Synthetic oligonucleotide
guuuaagcguggacgcuac

SEQ ID NO: 2067699 - RNA, 19 nt, Artificial Sequence
  Description of Artificial Sequence: Synthetic oligonucleotide
accgaguaguuugugcacu

SEQ ID NO: 2067700 - RNA, 19 nt, Artificial Sequence
  Description of Artificial Sequence: Synthetic oligonucleotide
uuggcuggugagagcuucu

SEQ ID NO: 2067701 - RNA, 19 nt, Artificial Sequence
  Description of Artificial Sequence: Synthetic oligonucleotide
auaagaacuucugggucua

SEQ ID NO: 2067702 - RNA, 19 nt, Artificial Sequence
  Description of Artificial Sequence: Synthetic oligonucleotide
gcaacaauggaugugaauu

SEQ ID NO: 2067703 - RNA, 19 nt, Artificial Sequence
  Description of Artificial Sequence: Synthetic oligonucleotide
ucacgacgacguagacgcg

SEQ ID NO: 2067704 - RNA, 19 nt, Artificial Sequence
  Description of Artificial Sequence: Synthetic oligonucleotide
uccggcuccuuugggguag

SEQ ID NO: 2067705 - RNA, 19 nt, Artificial Sequence
  Description of Artificial Sequence: Synthetic oligonucleotide
uccauccgagcaacuugcu

SEQ ID NO: 2067706 - RNA, 19 nt, Artificial Sequence
  Description of Artificial Sequence: Synthetic oligonucleotide
gcauuuguagccuauuaau

SEQ ID NO: 2067707 - RNA, 19 nt, Artificial Sequence
  Description of Artificial Sequence: Synthetic oligonucleotide
acaaauguuugggcugcga

SEQ ID NO: 2067708 - RNA, 19 nt, Artificial Sequence
  Description of Artificial Sequence: Synthetic oligonucleotide
cuucgucucacgacgacgu

SEQ ID NO: 2067709 - RNA, 19 nt, Artificial Sequence
  Description of Artificial Sequence: Synthetic oligonucleotide
ugaucgugcuucaccuguu

SEQ ID NO: 2067710 - RNA, 19 nt, Artificial Sequence
  Description of Artificial Sequence: Synthetic oligonucleotide
gaaccucucagagccaucu

SEQ ID NO: 2067711 - RNA, 19 nt, Artificial Sequence
  Description of Artificial Sequence: Synthetic oligonucleotide
uggaccaagcggcgcgacu

SEQ ID NO: 2067712 - RNA, 19 nt, Artificial Sequence
  Description of Artificial Sequence: Synthetic oligonucleotide
cguggacgcuacuugauag

SEQ ID NO: 2067713 - RNA, 19 nt, Artificial Sequence
  Description of Artificial Sequence: Synthetic oligonucleotide
ugagcauuuguagccuauu

SEQ ID NO: 2067714 - RNA, 19 nt, Artificial Sequence
  Description of Artificial Sequence: Synthetic oligonucleotide
cugccuggcagccccgccc

SEQ ID NO: 2067715 - RNA, 19 nt, Artificial Sequence
  Description of Artificial Sequence: Synthetic oligonucleotide
ugucuacacggcccuguuu

SEQ ID NO: 2067716 - RNA, 19 nt, Artificial Sequence
  Description of Artificial Sequence: Synthetic oligonucleotide
uaggggccaccaugcaggc

SEQ ID NO: 2067717 - RNA, 19 nt, Artificial Sequence
  Description of Artificial Sequence: Synthetic oligonucleotide
uugucuacacggcccuguu

SEQ ID NO: 2067718 - RNA, 19 nt, Artificial Sequence
  Description of Artificial Sequence: Synthetic oligonucleotide
aguacagcugugagucucu

SEQ ID NO: 2067719 - RNA, 19 nt, Artificial Sequence
  Description of Artificial Sequence: Synthetic oligonucleotide
caccuguuuaagcguggac

SEQ ID NO: 2067720 - RNA, 19 nt, Artificial Sequence
  Description of Artificial Sequence: Synthetic oligonucleotide
aaccgccacucaucagccu

SEQ ID NO: 2067721 - RNA, 19 nt, Artificial Sequence
  Description of Artificial Sequence: Synthetic oligonucleotide
aucgugcuucaccuguuua

SEQ ID NO: 2067722 - RNA, 19 nt, Artificial Sequence
  Description of Artificial Sequence: Synthetic oligonucleotide
cuuuccguggcggggccag

SEQ ID NO: 2067723 - RNA, 19 nt, Artificial Sequence
  Description of Artificial Sequence: Synthetic oligonucleotide
accaagcggcgcgacuucg

SEQ ID NO: 2067724 - RNA, 19 nt, Artificial Sequence
  Description of Artificial Sequence: Synthetic oligonucleotide
caucucacaugagcauuug

SEQ ID NO: 2067725 - RNA, 19 nt, Artificial Sequence
  Description of Artificial Sequence: Synthetic oligonucleotide
aaccucucagagccaucuu

SEQ ID NO: 2067726 - RNA, 19 nt, Artificial Sequence
  Description of Artificial Sequence: Synthetic oligonucleotide
uucagacaugcagcucaca

SEQ ID NO: 2067727 - RNA, 19 nt, Artificial Sequence
  Description of Artificial Sequence: Synthetic oligonucleotide
cugaucgugcuucaccugu

SEQ ID NO: 2067728 - RNA, 19 nt, Artificial Sequence
  Description of Artificial Sequence: Synthetic oligonucleotide
agcuaaacaccgacucaca

SEQ ID NO: 2067729 - RNA, 19 nt, Artificial Sequence
  Description of Artificial Sequence: Synthetic oligonucleotide
uccuuugggguaggugaac

SEQ ID NO: 2067730 - RNA, 19 nt, Artificial Sequence
  Description of Artificial Sequence: Synthetic oligonucleotide
gcauaucauaagaggugag

SEQ ID NO: 2067731 - RNA, 19 nt, Artificial Sequence
  Description of Artificial Sequence: Synthetic oligonucleotide
caagcggcgcgacuucguc

SEQ ID NO: 2067732 - RNA, 19 nt, Artificial Sequence
  Description of Artificial Sequence: Synthetic oligonucleotide
aucaaccggaagagggugu

SEQ ID NO: 2067733 - RNA, 19 nt, Artificial Sequence
  Description of Artificial Sequence: Synthetic oligonucleotide
gguuuaaaccgccacucau

SEQ ID NO: 2067734 - RNA, 19 nt, Artificial Sequence
  Description of Artificial Sequence: Synthetic oligonucleotide
ggugaacagagcuuuccgu

SEQ ID NO: 2067735 - RNA, 19 nt, Artificial Sequence
  Description of Artificial Sequence: Synthetic oligonucleotide
agcgcugcccaauccuuuu

SEQ ID NO: 2067736 - RNA, 19 nt, Artificial Sequence
  Description of Artificial Sequence: Synthetic oligonucleotide
agccagauccggugacaga

SEQ ID NO: 2067737 - RNA, 19 nt, Artificial Sequence
  Description of Artificial Sequence: Synthetic oligonucleotide
ggaauuaggucacuuuauu

SEQ ID NO: 2067738 - RNA, 19 nt, Artificial Sequence
  Description of Artificial Sequence: Synthetic oligonucleotide
cugcaacaucucacaugag

SEQ ID NO: 2067739 - RNA, 19 nt, Artificial Sequence
  Description of Artificial Sequence: Synthetic oligonucleotide
augagcauuuguagccuau

SEQ ID NO: 2067740 - RNA, 19 nt, Artificial Sequence
  Description of Artificial Sequence: Synthetic oligonucleotide
ccuguuuguccuguaacuc

SEQ ID NO: 2067741 - RNA, 19 nt, Artificial Sequence
  Description of Artificial Sequence: Synthetic oligonucleotide
cuucaccgaguaguuugug

SEQ ID NO: 2067742 - RNA, 19 nt, Artificial Sequence
  Description of Artificial Sequence: Synthetic oligonucleotide
ucucuucaccgaguaguuu

SEQ ID NO: 2067743 - RNA, 19 nt, Artificial Sequence
  Description of Artificial Sequence: Synthetic oligonucleotide
gagcuggauaagaacuucu

SEQ ID NO: 2067744 - RNA, 19 nt, Artificial Sequence
  Description of Artificial Sequence: Synthetic oligonucleotide
caagugcugcaacauucaa

SEQ ID NO: 2067745 - RNA, 19 nt, Artificial Sequence
  Description of Artificial Sequence: Synthetic oligonucleotide
ggcgcgacuucgucucacg

SEQ ID NO: 2067746 - RNA, 19 nt, Artificial Sequence
  Description of Artificial Sequence: Synthetic oligonucleotide
gaccaagcggcgcgacuuc

SEQ ID NO: 2067747 - RNA, 19 nt, Artificial Sequence
  Description of Artificial Sequence: Synthetic oligonucleotide
caugagcauuuguagccua

SEQ ID NO: 2067748 - RNA, 19 nt, Artificial Sequence
  Description of Artificial Sequence: Synthetic oligonucleotide
cuguaacucuaugcagauc

SEQ ID NO: 2067749 - RNA, 19 nt, Artificial Sequence
  Description of Artificial Sequence: Synthetic oligonucleotide
cgucucugcaacaucucac

SEQ ID NO: 2067750 - RNA, 19 nt, Artificial Sequence
  Description of Artificial Sequence: Synthetic oligonucleotide
gcaggcgacaucaaccgga

SEQ ID NO: 2067751 - RNA, 19 nt, Artificial Sequence
  Description of Artificial Sequence: Synthetic oligonucleotide
ggaugugaauucagacaug

SEQ ID NO: 2067752 - RNA, 19 nt, Artificial Sequence
  Description of Artificial Sequence: Synthetic oligonucleotide
caccaagccagccaguuuu

SEQ ID NO: 2067753 - RNA, 19 nt, Artificial Sequence
  Description of Artificial Sequence: Synthetic oligonucleotide
caacaucucacaugagcau

SEQ ID NO: 2067754 - RNA, 19 nt, Artificial Sequence
  Description of Artificial Sequence: Synthetic oligonucleotide
guaggugaacagagcuuuc

SEQ ID NO: 2067755 - RNA, 19 nt, Artificial Sequence
  Description of Artificial Sequence: Synthetic oligonucleotide
ucccgagcgcugcccaauc

SEQ ID NO: 2067756 - RNA, 19 nt, Artificial Sequence
  Description of Artificial Sequence: Synthetic oligonucleotide
gucucacgacgacguagac

SEQ ID NO: 2067757 - RNA, 19 nt, Artificial Sequence
  Description of Artificial Sequence: Synthetic oligonucleotide
gguaggugaacagagcuuu

SEQ ID NO: 2067758 - RNA, 19 nt, Artificial Sequence
  Description of Artificial Sequence: Synthetic oligonucleotide
cacugaccccgccagcuga

SEQ ID NO: 2067759 - RNA, 19 nt, Artificial Sequence
  Description of Artificial Sequence: Synthetic oligonucleotide
gugagacuauggauccuga

SEQ ID NO: 2067760 - RNA, 19 nt, Artificial Sequence
  Description of Artificial Sequence: Synthetic oligonucleotide
gacgacguagacgcggcgu

SEQ ID NO: 2067761 - RNA, 19 nt, Artificial Sequence
  Description of Artificial Sequence: Synthetic oligonucleotide
cugggucuaaaaggaauua

SEQ ID NO: 2067762 - RNA, 19 nt, Artificial Sequence
  Description of Artificial Sequence: Synthetic oligonucleotide
uccguggcggggccagauc

SEQ ID NO: 2067763 - RNA, 19 nt, Artificial Sequence
  Description of Artificial Sequence: Synthetic oligonucleotide
caggcgacaucaaccggaa

SEQ ID NO: 2067764 - RNA, 19 nt, Artificial Sequence
  Description of Artificial Sequence: Synthetic oligonucleotide
agcugcucgauagguuuaa

SEQ ID NO: 2067765 - RNA, 19 nt, Artificial Sequence
  Description of Artificial Sequence: Synthetic oligonucleotide
guuugggcugcgacuguga

SEQ ID NO: 2067766 - RNA, 19 nt, Artificial Sequence
  Description of Artificial Sequence: Synthetic oligonucleotide
gacgcggcgugcgcgugcc

SEQ ID NO: 2067767 - RNA, 19 nt, Artificial Sequence
  Description of Artificial Sequence: Synthetic oligonucleotide
gcggggccagaucugacac

SEQ ID NO: 2067768 - RNA, 19 nt, Artificial Sequence
  Description of Artificial Sequence: Synthetic oligonucleotide
ccauccgagcaacuugcug

SEQ ID NO: 2067769 - RNA, 19 nt, Artificial Sequence
  Description of Artificial Sequence: Synthetic oligonucleotide
acccugagcagaagucaca

SEQ ID NO: 2067770 - RNA, 19 nt, Artificial Sequence
  Description of Artificial Sequence: Synthetic oligonucleotide
gcuucaccuguuuaagcgu

SEQ ID NO: 2067771 - RNA, 19 nt, Artificial Sequence
  Description of Artificial Sequence: Synthetic oligonucleotide
cuggugagagcuucuggau

SEQ ID NO: 2067772 - RNA, 19 nt, Artificial Sequence
  Description of Artificial Sequence: Synthetic oligonucleotide
ccagugagcuggauaagaa

SEQ ID NO: 2067773 - RNA, 19 nt, Artificial Sequence
  Description of Artificial Sequence: Synthetic oligonucleotide
agcguggacgcuacuugau

SEQ ID NO: 2067774 - RNA, 19 nt, Artificial Sequence
  Description of Artificial Sequence: Synthetic oligonucleotide
cucucagagccaucuucua

SEQ ID NO: 2067775 - RNA, 19 nt, Artificial Sequence
  Description of Artificial Sequence: Synthetic oligonucleotide
gaucgugcuucaccuguuu

SEQ ID NO: 2067776 - RNA, 19 nt, Artificial Sequence
  Description of Artificial Sequence: Synthetic oligonucleotide
cugcgacugugagacuaug

SEQ ID NO: 2067777 - RNA, 19 nt, Artificial Sequence
  Description of Artificial Sequence: Synthetic oligonucleotide
gacuauggauccugaccuu

SEQ ID NO: 2067778 - RNA, 19 nt, Artificial Sequence
  Description of Artificial Sequence: Synthetic oligonucleotide
ccgaguaguuugugcacuc

SEQ ID NO: 2067779 - RNA, 19 nt, Artificial Sequence
  Description of Artificial Sequence: Synthetic oligonucleotide
uccugaccuuggguuuggc

SEQ ID NO: 2067780 - RNA, 19 nt, Artificial Sequence
  Description of Artificial Sequence: Synthetic oligonucleotide
ccagauccggugacagaac

SEQ ID NO: 2067781 - RNA, 19 nt, Artificial Sequence
  Description of Artificial Sequence: Synthetic oligonucleotide
cacugaagccagauccggu

SEQ ID NO: 2067782 - RNA, 19 nt, Artificial Sequence
  Description of Artificial Sequence: Synthetic oligonucleotide
aggggccaccaugcaggcg

SEQ ID NO: 2067783 - RNA, 19 nt, Artificial Sequence
  Description of Artificial Sequence: Synthetic oligonucleotide
uuccguggcggggccagau

SEQ ID NO: 2067784 - RNA, 19 nt, Artificial Sequence
  Description of Artificial Sequence: Synthetic oligonucleotide
uagacgcggcgugcgcgug

SEQ ID NO: 2067785 - RNA, 19 nt, Artificial Sequence
  Description of Artificial Sequence: Synthetic oligonucleotide
guagacgcggcgugcgcgu

SEQ ID NO: 2067786 - RNA, 19 nt, Artificial Sequence
  Description of Artificial Sequence: Synthetic oligonucleotide
ccgccacucaucagccucc

SEQ ID NO: 2067787 - RNA, 19 nt, Artificial Sequence
  Description of Artificial Sequence: Synthetic oligonucleotide
guagcaccauuuagcauau

SEQ ID NO: 2067788 - RNA, 19 nt, Artificial Sequence
  Description of Artificial Sequence: Synthetic oligonucleotide
cgcgacuucgucucacgac

SEQ ID NO: 2067789 - RNA, 19 nt, Artificial Sequence
  Description of Artificial Sequence: Synthetic oligonucleotide
cacggcccuguuuguccug

SEQ ID NO: 2067790 - RNA, 19 nt, Artificial Sequence
  Description of Artificial Sequence: Synthetic oligonucleotide
ccgccagcugaagaugagg

SEQ ID NO: 2067791 - RNA, 19 nt, Artificial Sequence
  Description of Artificial Sequence: Synthetic oligonucleotide
gcugcccaauccuuuuaaa

SEQ ID NO: 2067792 - RNA, 19 nt, Artificial Sequence
  Description of Artificial Sequence: Synthetic oligonucleotide
cucucuucaccgaguaguu

SEQ ID NO: 2067793 - RNA, 19 nt, Artificial Sequence
  Description of Artificial Sequence: Synthetic oligonucleotide
uccgagcaacuugcugauc

SEQ ID NO: 2067794 - RNA, 19 nt, Artificial Sequence
  Description of Artificial Sequence: Synthetic oligonucleotide
gaacucccacugaccccgc

SEQ ID NO: 2067795 - RNA, 19 nt, Artificial Sequence
  Description of Artificial Sequence: Synthetic oligonucleotide
cugaccccgccagcugaag

SEQ ID NO: 2067796 - RNA, 19 nt, Artificial Sequence
  Description of Artificial Sequence: Synthetic oligonucleotide
guggcggggccagaucuga

SEQ ID NO: 2067797 - RNA, 19 nt, Artificial Sequence
  Description of Artificial Sequence: Synthetic oligonucleotide
cguagacgcggcgugcgcg

SEQ ID NO: 2067798 - RNA, 19 nt, Artificial Sequence
  Description of Artificial Sequence: Synthetic oligonucleotide
cuggaccaagcggcgcgac

SEQ ID NO: 2067799 - RNA, 19 nt, Artificial Sequence
  Description of Artificial Sequence: Synthetic oligonucleotide
cgccagcugaagaugagga

SEQ ID NO: 2067800 - RNA, 19 nt, Artificial Sequence
  Description of Artificial Sequence: Synthetic oligonucleotide
cgucucacgacgacguaga

SEQ ID NO: 2067801 - RNA, 19 nt, Artificial Sequence
  Description of Artificial Sequence: Synthetic oligonucleotide
cagcugcucgauagguuua

SEQ ID NO: 2067802 - RNA, 19 nt, Artificial Sequence
  Description of Artificial Sequence: Synthetic oligonucleotide
acugaccccgccagcugaa

SEQ ID NO: 2067803 - RNA, 19 nt, Artificial Sequence
  Description of Artificial Sequence: Synthetic oligonucleotide
ggauccugaccuuggguuu

SEQ ID NO: 2067804 - RNA, 19 nt, Artificial Sequence
  Description of Artificial Sequence: Synthetic oligonucleotide
ggcccuguuuguccuguaa

SEQ ID NO: 2067805 - RNA, 19 nt, Artificial Sequence
  Description of Artificial Sequence: Synthetic oligonucleotide
cgacaucaaccggaagagg

SEQ ID NO: 2067806 - RNA, 19 nt, Artificial Sequence
  Description of Artificial Sequence: Synthetic oligonucleotide
cuguuuaagcguggacgcu

SEQ ID NO: 2067807 - RNA, 19 nt, Artificial Sequence
  Description of Artificial Sequence: Synthetic oligonucleotide
ccuguaacucuaugcagau

SEQ ID NO: 2067808 - RNA, 19 nt, Artificial Sequence
  Description of Artificial Sequence: Synthetic oligonucleotide
cccgccagcugaagaugag

SEQ ID NO: 2067809 - RNA, 19 nt, Artificial Sequence
  Description of Artificial Sequence: Synthetic oligonucleotide
cagagccaucuucuaacau

SEQ ID NO: 2067810 - RNA, 19 nt, Artificial Sequence
  Description of Artificial Sequence: Synthetic oligonucleotide
cgauagguuuaaaccgcca

SEQ ID NO: 2067811 - RNA, 19 nt, Artificial Sequence
  Description of Artificial Sequence: Synthetic oligonucleotide
cccgagcgcugcccaaucc

SEQ ID NO: 2067812 - RNA, 19 nt, Artificial Sequence
  Description of Artificial Sequence: Synthetic oligonucleotide
gcguggacgcuacuugaua

SEQ ID NO: 2067813 - RNA, 19 nt, Artificial Sequence
  Description of Artificial Sequence: Synthetic oligonucleotide
gccacucaucagccuccag

SEQ ID NO: 2067814 - RNA, 19 nt, Artificial Sequence
  Description of Artificial Sequence: Synthetic oligonucleotide
gugaaccccagcagcugcu

SEQ ID NO: 2067815 - RNA, 19 nt, Artificial Sequence
  Description of Artificial Sequence: Synthetic oligonucleotide
gcgcgacuucgucucacga

SEQ ID NO: 2067816 - RNA, 19 nt, Artificial Sequence
  Description of Artificial Sequence: Synthetic oligonucleotide
acgcuacuugauagcuaaa

SEQ ID NO: 2067817 - RNA, 19 nt, Artificial Sequence
  Description of Artificial Sequence: Synthetic oligonucleotide
accaugcaggcgacaucaa

SEQ ID NO: 2067818 - RNA, 19 nt, Artificial Sequence
  Description of Artificial Sequence: Synthetic oligonucleotide
ccacugaccccgccagcug

SEQ ID NO: 2067819 - RNA, 19 nt, Artificial Sequence
  Description of Artificial Sequence: Synthetic oligonucleotide
ggaaccucucagagccauc

SEQ ID NO: 2067820 - RNA, 19 nt, Artificial Sequence
  Description of Artificial Sequence: Synthetic oligonucleotide
cugugcccuaggggccacc

SEQ ID NO: 2067821 - RNA, 19 nt, Artificial Sequence
  Description of Artificial Sequence: Synthetic oligonucleotide
gugagagcuucuggaugcu

SEQ ID NO: 2067822 - RNA, 19 nt, Artificial Sequence
  Description of Artificial Sequence: Synthetic oligonucleotide
ggguagcaccauuuagcau

SEQ ID NO: 2067823 - RNA, 19 nt, Artificial Sequence
  Description of Artificial Sequence: Synthetic oligonucleotide
cuccggcuccuuuggggua

SEQ ID NO: 2067824 - RNA, 19 nt, Artificial Sequence
  Description of Artificial Sequence: Synthetic oligonucleotide
ggacgcuacuugauagcua

SEQ ID NO: 2067825 - RNA, 19 nt, Artificial Sequence
  Description of Artificial Sequence: Synthetic oligonucleotide
ccccgccagcugaagauga

SEQ ID NO: 2067826 - RNA, 19 nt, Artificial Sequence
  Description of Artificial Sequence: Synthetic oligonucleotide
ggaccaagcggcgcgacuu

SEQ ID NO: 2067827 - RNA, 19 nt, Artificial Sequence
  Description of Artificial Sequence: Synthetic oligonucleotide
gaccuuggguuuggcuggu

SEQ ID NO: 2067828 - RNA, 19 nt, Artificial Sequence
  Description of Artificial Sequence: Synthetic oligonucleotide
cugugagacuauggauccu

SEQ ID NO: 2067829 - RNA, 19 nt, Artificial Sequence
  Description of Artificial Sequence: Synthetic oligonucleotide
cgacgacguagacgcggcg

SEQ ID NO: 2067830 - RNA, 19 nt, Artificial Sequence
  Description of Artificial Sequence: Synthetic oligonucleotide
gagcgcugcccaauccuuu

SEQ ID NO: 2067831 - RNA, 19 nt, Artificial Sequence
  Description of Artificial Sequence: Synthetic oligonucleotide
cguggcggggccagaucug

SEQ ID NO: 2067832 - RNA, 19 nt, Artificial Sequence
  Description of Artificial Sequence: Synthetic oligonucleotide
cgacguagacgcggcgugc

SEQ ID NO: 2067833 - RNA, 19 nt, Artificial Sequence
  Description of Artificial Sequence: Synthetic oligonucleotide
cgcggcgugcgcgugcccg

SEQ ID NO: 2067834 - RNA, 19 nt, Artificial Sequence
  Description of Artificial Sequence: Synthetic oligonucleotide
cgacuucgucucacgacga

SEQ ID NO: 2067835 - RNA, 19 nt, Artificial Sequence
  Description of Artificial Sequence: Synthetic oligonucleotide
gcacucugccuggcagccc

SEQ ID NO: 2067836 - RNA, 19 nt, Artificial Sequence
  Description of Artificial Sequence: Synthetic oligonucleotide
gcugcucgauagguuuaaa

SEQ ID NO: 2067837 - RNA, 19 nt, Artificial Sequence
  Description of Artificial Sequence: Synthetic oligonucleotide
ccccuggaccaagcggcgc

SEQ ID NO: 2067838 - RNA, 19 nt, Artificial Sequence
  Description of Artificial Sequence: Synthetic oligonucleotide
ccgagcgcugcccaauccu

SEQ ID NO: 2067839 - RNA, 19 nt, Artificial Sequence
  Description of Artificial Sequence: Synthetic oligonucleotide
gcgcugcccaauccuuuua

SEQ ID NO: 2067840 - RNA, 19 nt, Artificial Sequence
  Description of Artificial Sequence: Synthetic oligonucleotide
gugcccuaggggccaccau

SEQ ID NO: 2067841 - RNA, 19 nt, Artificial Sequence
  Description of Artificial Sequence: Synthetic oligonucleotide
gcugcgacugugagacuau

SEQ ID NO: 2067842 - RNA, 19 nt, Artificial Sequence
  Description of Artificial Sequence: Synthetic oligonucleotide
cgagcaacuugcugaucgu

SEQ ID NO: 2067843 - RNA, 19 nt, Artificial Sequence
  Description of Artificial Sequence: Synthetic oligonucleotide
ccuggaccaagcggcgcga

SEQ ID NO: 2067844 - RNA, 19 nt, Artificial Sequence
  Description of Artificial Sequence: Synthetic oligonucleotide
ccggcuccuuugggguagg

SEQ ID NO: 2067845 - RNA, 19 nt, Artificial Sequence
  Description of Artificial Sequence: Synthetic oligonucleotide
gcugugcccuaggggccac

SEQ ID NO: 2067846 - RNA, 19 nt, Artificial Sequence
  Description of Artificial Sequence: Synthetic oligonucleotide
ccaagcggcgcgacuucgu

SEQ ID NO: 2067847 - RNA, 19 nt, Artificial Sequence
  Description of Artificial Sequence: Synthetic oligonucleotide
gcggcgcgacuucgucuca

SEQ ID NO: 2067848 - RNA, 19 nt, Artificial Sequence
  Description of Artificial Sequence: Synthetic oligonucleotide
cggggccagaucugacaca

SEQ ID NO: 2067849 - RNA, 19 nt, Artificial Sequence
  Description of Artificial Sequence: Synthetic oligonucleotide
ccccaucuggacagacccu

SEQ ID NO: 2067850 - RNA, 19 nt, Artificial Sequence
  Description of Artificial Sequence: Synthetic oligonucleotide
cgaguaguuugugcacucu

SEQ ID NO: 2067851 - RNA, 19 nt, Artificial Sequence
  Description of Artificial Sequence: Synthetic oligonucleotide
cggugacagaacucccacu

SEQ ID NO: 2067852 - RNA, 19 nt, Artificial Sequence
  Description of Artificial Sequence: Synthetic oligonucleotide
cggcgcgacuucgucucac

SEQ ID NO: 2067853 - RNA, 19 nt, Artificial Sequence
  Description of Artificial Sequence: Synthetic oligonucleotide
ccauuccuuccaguagaau

SEQ ID NO: 2067854 - RNA, 19 nt, Artificial Sequence
  Description of Artificial Sequence: Synthetic oligonucleotide
cgagcgcugcccaauccuu

SEQ ID NO: 2067855 - RNA, 19 nt, Artificial Sequence
  Description of Artificial Sequence: Synthetic oligonucleotide
cggcccuguuuguccugua

SEQ ID NO: 2067856 - RNA, 19 nt, Artificial Sequence
  Description of Artificial Sequence: Synthetic oligonucleotide
aauuauagaaacuccccag

SEQ ID NO: 2067857 - RNA, 19 nt, Artificial Sequence
  Description of Artificial Sequence: Synthetic oligonucleotide
gagaugaccagcuucauag

SEQ ID NO: 2067858 - RNA, 19 nt, Artificial Sequence
  Description of Artificial Sequence: Synthetic oligonucleotide
agcuucauaguccagaaag

SEQ ID NO: 2067859 - RNA, 19 nt, Artificial Sequence
  Description of Artificial Sequence: Synthetic oligonucleotide
uguagaaugagagaugacc

SEQ ID NO: 2067860 - RNA, 19 nt, Artificial Sequence
  Description of Artificial Sequence: Synthetic oligonucleotide
aaacucacccagcacauuc

SEQ ID NO: 2067861 - RNA, 19 nt, Artificial Sequence
  Description of Artificial Sequence: Synthetic oligonucleotide
uguacucccacucuuacug

SEQ ID NO: 2067862 - RNA, 19 nt, Artificial Sequence
  Description of Artificial Sequence: Synthetic oligonucleotide
aguggaauuauagaaacuc

SEQ ID NO: 2067863 - RNA, 19 nt, Artificial Sequence
  Description of Artificial Sequence: Synthetic oligonucleotide
uggaauuauagaaacuccc

SEQ ID NO: 2067864 - RNA, 19 nt, Artificial Sequence
  Description of Artificial Sequence: Synthetic oligonucleotide
ucuccuaaugcucacagga

SEQ ID NO: 2067865 - RNA, 19 nt, Artificial Sequence
  Description of Artificial Sequence: Synthetic oligonucleotide
auuucugccaucuuggcga

SEQ ID NO: 2067866 - RNA, 19 nt, Artificial Sequence
  Description of Artificial Sequence: Synthetic oligonucleotide
aacagcagcgacucauucg

SEQ ID NO: 2067867 - RNA, 19 nt, Artificial Sequence
  Description of Artificial Sequence: Synthetic oligonucleotide
cagaaagaugccuacacgc

SEQ ID NO: 2067868 - RNA, 19 nt, Artificial Sequence
  Description of Artificial Sequence: Synthetic oligonucleotide
uaagugacaucaguggugg

SEQ ID NO: 2067869 - RNA, 19 nt, Artificial Sequence
  Description of Artificial Sequence: Synthetic oligonucleotide
aaccaagagaggugaaggg

SEQ ID NO: 2067870 - RNA, 19 nt, Artificial Sequence
  Description of Artificial Sequence: Synthetic oligonucleotide
agaaugagagaugaccagc

SEQ ID NO: 2067871 - RNA, 19 nt, Artificial Sequence
  Description of Artificial Sequence: Synthetic oligonucleotide
cacuaagugacaucagugg

SEQ ID NO: 2067872 - RNA, 19 nt, Artificial Sequence
  Description of Artificial Sequence: Synthetic oligonucleotide
augagagaugaccagcuuc

SEQ ID NO: 2067873 - RNA, 19 nt, Artificial Sequence
  Description of Artificial Sequence: Synthetic oligonucleotide
gacacaugggacuuagugc

SEQ ID NO: 2067874 - RNA, 19 nt, Artificial Sequence
  Description of Artificial Sequence: Synthetic oligonucleotide
agauaaacagcagcgacuc

SEQ ID NO: 2067875 - RNA, 19 nt, Artificial Sequence
  Description of Artificial Sequence: Synthetic oligonucleotide
acacaugggacuuagugcu

SEQ ID NO: 2067876 - RNA, 19 nt, Artificial Sequence
  Description of Artificial Sequence: Synthetic oligonucleotide
ucuucugccaacaggcggc

SEQ ID NO: 2067877 - RNA, 19 nt, Artificial Sequence
  Description of Artificial Sequence: Synthetic oligonucleotide
cucgagggaagauaaacag

SEQ ID NO: 2067878 - RNA, 19 nt, Artificial Sequence
  Description of Artificial Sequence: Synthetic oligonucleotide
gaugccuacacgcuuagga

SEQ ID NO: 2067879 - RNA, 19 nt, Artificial Sequence
  Description of Artificial Sequence: Synthetic oligonucleotide
cauucgucacuguagaaug

SEQ ID NO: 2067880 - RNA, 19 nt, Artificial Sequence
  Description of Artificial Sequence: Synthetic oligonucleotide
uccuaaugcucacaggaca

SEQ ID NO: 2067881 - RNA, 19 nt, Artificial Sequence
  Description of Artificial Sequence: Synthetic oligonucleotide
gacuacuagacaaagguga

SEQ ID NO: 2067882 - RNA, 19 nt, Artificial Sequence
  Description of Artificial Sequence: Synthetic oligonucleotide
uagaaugagagaugaccag

SEQ ID NO: 2067883 - RNA, 19 nt, Artificial Sequence
  Description of Artificial Sequence: Synthetic oligonucleotide
ugccuacacgcuuaggagg

SEQ ID NO: 2067884 - RNA, 19 nt, Artificial Sequence
  Description of Artificial Sequence: Synthetic oligonucleotide
ucucgagggaagauaaaca

SEQ ID NO: 2067885 - RNA, 19 nt, Artificial Sequence
  Description of Artificial Sequence: Synthetic oligonucleotide
acuaagugacaucaguggu

SEQ ID NO: 2067886 - RNA, 19 nt, Artificial Sequence
  Description of Artificial Sequence: Synthetic oligonucleotide
ucacuguagaaugagagau

SEQ ID NO: 2067887 - RNA, 19 nt, Artificial Sequence
  Description of Artificial Sequence: Synthetic oligonucleotide
aguguacucccacucuuac

SEQ ID NO: 2067888 - RNA, 19 nt, Artificial Sequence
  Description of Artificial Sequence: Synthetic oligonucleotide
uacuagacaaaggugagaa

SEQ ID NO: 2067889 - RNA, 19 nt, Artificial Sequence
  Description of Artificial Sequence: Synthetic oligonucleotide
augaccagcuucauagucc

SEQ ID NO: 2067890 - RNA, 19 nt, Artificial Sequence
  Description of Artificial Sequence: Synthetic oligonucleotide
aagauaaacagcagcgacu

SEQ ID NO: 2067891 - RNA, 19 nt, Artificial Sequence
  Description of Artificial Sequence: Synthetic oligonucleotide
aaggugagaagaggguucg

SEQ ID NO: 2067892 - RNA, 19 nt, Artificial Sequence
  Description of Artificial Sequence: Synthetic oligonucleotide
agaggguucggagugugcc

SEQ ID NO: 2067893 - RNA, 19 nt, Artificial Sequence
  Description of Artificial Sequence: Synthetic oligonucleotide
cuuagugcuuuggugaggg

SEQ ID NO: 2067894 - RNA, 19 nt, Artificial Sequence
  Description of Artificial Sequence: Synthetic oligonucleotide
ucgagggaagauaaacagc

SEQ ID NO: 2067895 - RNA, 19 nt, Artificial Sequence
  Description of Artificial Sequence: Synthetic oligonucleotide
gaagggauucuuguagagg

SEQ ID NO: 2067896 - RNA, 19 nt, Artificial Sequence
  Description of Artificial Sequence: Synthetic oligonucleotide
acuguagaaugagagauga

SEQ ID NO: 2067897 - RNA, 19 nt, Artificial Sequence
  Description of Artificial Sequence: Synthetic oligonucleotide
uuggaacagcaucgcaucg

SEQ ID NO: 2067898 - RNA, 19 nt, Artificial Sequence
  Description of Artificial Sequence: Synthetic oligonucleotide
auuuguuuccgcaagugcu

SEQ ID NO: 2067899 - RNA, 19 nt, Artificial Sequence
  Description of Artificial Sequence: Synthetic oligonucleotide
aggucgucgccgcagaagg

SEQ ID NO: 2067900 - RNA, 19 nt, Artificial Sequence
  Description of Artificial Sequence: Synthetic oligonucleotide
uuuguuuccgcaagugcuc

SEQ ID NO: 2067901 - RNA, 19 nt, Artificial Sequence
  Description of Artificial Sequence: Synthetic oligonucleotide
ucggacuacuagacaaagg

SEQ ID NO: 2067902 - RNA, 19 nt, Artificial Sequence
  Description of Artificial Sequence: Synthetic oligonucleotide
acgccuaucagccugcaga

SEQ ID NO: 2067903 - RNA, 19 nt, Artificial Sequence
  Description of Artificial Sequence: Synthetic oligonucleotide
aggagggucccguaguggg

SEQ ID NO: 2067904 - RNA, 19 nt, Artificial Sequence
  Description of Artificial Sequence: Synthetic oligonucleotide
cuuguagagggucuggguc

SEQ ID NO: 2067905 - RNA, 19 nt, Artificial Sequence
  Description of Artificial Sequence: Synthetic oligonucleotide
ucuagccugggcuuggaac

SEQ ID NO: 2067906 - RNA, 19 nt, Artificial Sequence
  Description of Artificial Sequence: Synthetic oligonucleotide
gacucauucgucacuguag

SEQ ID NO: 2067907 - RNA, 19 nt, Artificial Sequence
  Description of Artificial Sequence: Synthetic oligonucleotide
cuuggaacagcaucgcauc

SEQ ID NO: 2067908 - RNA, 19 nt, Artificial Sequence
  Description of Artificial Sequence: Synthetic oligonucleotide
gagagcuuguguucccacg

SEQ ID NO: 2067909 - RNA, 19 nt, Artificial Sequence
  Description of Artificial Sequence: Synthetic oligonucleotide
augccuacacgcuuaggag

SEQ ID NO: 2067910 - RNA, 19 nt, Artificial Sequence
  Description of Artificial Sequence: Synthetic oligonucleotide
acugagagcuuguguuccc

SEQ ID NO: 2067911 - RNA, 19 nt, Artificial Sequence
  Description of Artificial Sequence: Synthetic oligonucleotide
gaugaccagcuucauaguc

SEQ ID NO: 2067912 - RNA, 19 nt, Artificial Sequence
  Description of Artificial Sequence: Synthetic oligonucleotide
acucauucgucacuguaga

SEQ ID NO: 2067913 - RNA, 19 nt, Artificial Sequence
  Description of Artificial Sequence: Synthetic oligonucleotide
ugaccagcuucauagucca

SEQ ID NO: 2067914 - RNA, 19 nt, Artificial Sequence
  Description of Artificial Sequence: Synthetic oligonucleotide
guagaaugagagaugacca

SEQ ID NO: 2067915 - RNA, 19 nt, Artificial Sequence
  Description of Artificial Sequence: Synthetic oligonucleotide
cucaguauggucaggacaa

SEQ ID NO: 2067916 - RNA, 19 nt, Artificial Sequence
  Description of Artificial Sequence: Synthetic oligonucleotide
augcucacaggacacuguc

SEQ ID NO: 2067917 - RNA, 19 nt, Artificial Sequence
  Description of Artificial Sequence: Synthetic oligonucleotide
ucaaacucacccagcacau

SEQ ID NO: 2067918 - RNA, 19 nt, Artificial Sequence
  Description of Artificial Sequence: Synthetic oligonucleotide
gugagaagaggguucggag

SEQ ID NO: 2067919 - RNA, 19 nt, Artificial Sequence
  Description of Artificial Sequence: Synthetic oligonucleotide
auaaacagcagcgacucau

SEQ ID NO: 2067920 - RNA, 19 nt, Artificial Sequence
  Description of Artificial Sequence: Synthetic oligonucleotide
ucauucgucacuguagaau

SEQ ID NO: 2067921 - RNA, 19 nt, Artificial Sequence
  Description of Artificial Sequence: Synthetic oligonucleotide
ucccguaguggggagaagg

SEQ ID NO: 2067922 - RNA, 19 nt, Artificial Sequence
  Description of Artificial Sequence: Synthetic oligonucleotide
cucuucugccaacaggcgg

SEQ ID NO: 2067923 - RNA, 19 nt, Artificial Sequence
  Description of Artificial Sequence: Synthetic oligonucleotide
uucgucacuguagaaugag

SEQ ID NO: 2067924 - RNA, 19 nt, Artificial Sequence
  Description of Artificial Sequence: Synthetic oligonucleotide
uuaggagggucccguagug

SEQ ID NO: 2067925 - RNA, 19 nt, Artificial Sequence
  Description of Artificial Sequence: Synthetic oligonucleotide
aagaugccuacacgcuuag

SEQ ID NO: 2067926 - RNA, 19 nt, Artificial Sequence
  Description of Artificial Sequence: Synthetic oligonucleotide
agaaacuccccaggaacac

SEQ ID NO: 2067927 - RNA, 19 nt, Artificial Sequence
  Description of Artificial Sequence: Synthetic oligonucleotide
gagaaggcccgcucagugg

SEQ ID NO: 2067928 - RNA, 19 nt, Artificial Sequence
  Description of Artificial Sequence: Synthetic oligonucleotide
ggaauuauagaaacucccc

SEQ ID NO: 2067929 - RNA, 19 nt, Artificial Sequence
  Description of Artificial Sequence: Synthetic oligonucleotide
cacucuuacugucacugag

SEQ ID NO: 2067930 - RNA, 19 nt, Artificial Sequence
  Description of Artificial Sequence: Synthetic oligonucleotide
uucuccuaaugcucacagg

SEQ ID NO: 2067931 - RNA, 19 nt, Artificial Sequence
  Description of Artificial Sequence: Synthetic oligonucleotide
aucuucugccacaaggcac

SEQ ID NO: 2067932 - RNA, 19 nt, Artificial Sequence
  Description of Artificial Sequence: Synthetic oligonucleotide
uaguccagaaagaugccua

SEQ ID NO: 2067933 - RNA, 19 nt, Artificial Sequence
  Description of Artificial Sequence: Synthetic oligonucleotide
ggaaccucaagucagaggu

SEQ ID NO: 2067934 - RNA, 19 nt, Artificial Sequence
  Description of Artificial Sequence: Synthetic oligonucleotide
guaggggucggacuacuag

SEQ ID NO: 2067935 - RNA, 19 nt, Artificial Sequence
  Description of Artificial Sequence: Synthetic oligonucleotide
cucaagucagaggugcugg

SEQ ID NO: 2067936 - RNA, 19 nt, Artificial Sequence
  Description of Artificial Sequence: Synthetic oligonucleotide
uaaugcucacaggacacug

SEQ ID NO: 2067937 - RNA, 19 nt, Artificial Sequence
  Description of Artificial Sequence: Synthetic oligonucleotide
ccagguacgccuaucagcc

SEQ ID NO: 2067938 - RNA, 19 nt, Artificial Sequence
  Description of Artificial Sequence: Synthetic oligonucleotide
cuuguguucccacgugugc

SEQ ID NO: 2067939 - RNA, 19 nt, Artificial Sequence
  Description of Artificial Sequence: Synthetic oligonucleotide
uacacgcuuaggagggucc

SEQ ID NO: 2067940 - RNA, 19 nt, Artificial Sequence
  Description of Artificial Sequence: Synthetic oligonucleotide
uucggagugugccgugagg

SEQ ID NO: 2067941 - RNA, 19 nt, Artificial Sequence
  Description of Artificial Sequence: Synthetic oligonucleotide
acuacuagacaaaggugag

SEQ ID NO: 2067942 - RNA, 19 nt, Artificial Sequence
  Description of Artificial Sequence: Synthetic oligonucleotide
gagugugccgugaggaagg

SEQ ID NO: 2067943 - RNA, 19 nt, Artificial Sequence
  Description of Artificial Sequence: Synthetic oligonucleotide
uaggggucggacuacuaga

SEQ ID NO: 2067944 - RNA, 19 nt, Artificial Sequence
  Description of Artificial Sequence: Synthetic oligonucleotide
cagauggucaguagggguc

SEQ ID NO: 2067945 - RNA, 19 nt, Artificial Sequence
  Description of Artificial Sequence: Synthetic oligonucleotide
uguugcuccucuucugcca

SEQ ID NO: 2067946 - RNA, 19 nt, Artificial Sequence
  Description of Artificial Sequence: Synthetic oligonucleotide
ugggacuuagugcuuuggu

SEQ ID NO: 2067947 - RNA, 19 nt, Artificial Sequence
  Description of Artificial Sequence: Synthetic oligonucleotide
ggacuuagugcuuugguga

SEQ ID NO: 2067948 - RNA, 19 nt, Artificial Sequence
  Description of Artificial Sequence: Synthetic oligonucleotide
agaaggcccgcucagugga

SEQ ID NO: 2067949 - RNA, 19 nt, Artificial Sequence
  Description of Artificial Sequence: Synthetic oligonucleotide
aaugagagaugaccagcuu

SEQ ID NO: 2067950 - RNA, 19 nt, Artificial Sequence
  Description of Artificial Sequence: Synthetic oligonucleotide
ugacaucagugguggagag

SEQ ID NO: 2067951 - RNA, 19 nt, Artificial Sequence
  Description of Artificial Sequence: Synthetic oligonucleotide
uccgcaagugcuccaguga

SEQ ID NO: 2067952 - RNA, 19 nt, Artificial Sequence
  Description of Artificial Sequence: Synthetic oligonucleotide
uagugcuuuggugagggcu

SEQ ID NO: 2067953 - RNA, 19 nt, Artificial Sequence
  Description of Artificial Sequence: Synthetic oligonucleotide
agguacgccuaucagccug

SEQ ID NO: 2067954 - RNA, 19 nt, Artificial Sequence
  Description of Artificial Sequence: Synthetic oligonucleotide
agcagcgacucauucguca

SEQ ID NO: 2067955 - RNA, 19 nt, Artificial Sequence
  Description of Artificial Sequence: Synthetic oligonucleotide
uccgagcgcucgcaggugg

SEQ ID NO: 2067956 - RNA, 19 nt, Artificial Sequence
  Description of Artificial Sequence: Synthetic oligonucleotide
uccccuugaggucuucggc

SEQ ID NO: 2067957 - RNA, 19 nt, Artificial Sequence
  Description of Artificial Sequence: Synthetic oligonucleotide
uacccggugagcccagugc

SEQ ID NO: 2067958 - RNA, 19 nt, Artificial Sequence
  Description of Artificial Sequence: Synthetic oligonucleotide
agugguguccccagguacg

SEQ ID NO: 2067959 - RNA, 19 nt, Artificial Sequence
  Description of Artificial Sequence: Synthetic oligonucleotide
aaagaugccuacacgcuua

SEQ ID NO: 2067960 - RNA, 19 nt, Artificial Sequence
  Description of Artificial Sequence: Synthetic oligonucleotide
uuccgcaagugcuccagug

SEQ ID NO: 2067961 - RNA, 19 nt, Artificial Sequence
  Description of Artificial Sequence: Synthetic oligonucleotide
ugggacacagcaggcagag

SEQ ID NO: 2067962 - RNA, 19 nt, Artificial Sequence
  Description of Artificial Sequence: Synthetic oligonucleotide
cacuguagaaugagagaug

SEQ ID NO: 2067963 - RNA, 19 nt, Artificial Sequence
  Description of Artificial Sequence: Synthetic oligonucleotide
ucgucacuguagaaugaga

SEQ ID NO: 2067964 - RNA, 19 nt, Artificial Sequence
  Description of Artificial Sequence: Synthetic oligonucleotide
aagaggguucggagugugc

SEQ ID NO: 2067965 - RNA, 19 nt, Artificial Sequence
  Description of Artificial Sequence: Synthetic oligonucleotide
cuccuaaugcucacaggac

SEQ ID NO: 2067966 - RNA, 19 nt, Artificial Sequence
  Description of Artificial Sequence: Synthetic oligonucleotide
ucggccgcguccugcagcg

SEQ ID NO: 2067967 - RNA, 19 nt, Artificial Sequence
  Description of Artificial Sequence: Synthetic oligonucleotide
accaagagaggugaaggga

SEQ ID NO: 2067968 - RNA, 19 nt, Artificial Sequence
  Description of Artificial Sequence: Synthetic oligonucleotide
gggacuuagugcuuuggug

SEQ ID NO: 2067969 - RNA, 19 nt, Artificial Sequence
  Description of Artificial Sequence: Synthetic oligonucleotide
aaugcucacaggacacugu

SEQ ID NO: 2067970 - RNA, 19 nt, Artificial Sequence
  Description of Artificial Sequence: Synthetic oligonucleotide
cacgugugcucagaaaggc

SEQ ID NO: 2067971 - RNA, 19 nt, Artificial Sequence
  Description of Artificial Sequence: Synthetic oligonucleotide
gagggcuuuuggcacuaag

SEQ ID NO: 2067972 - RNA, 19 nt, Artificial Sequence
  Description of Artificial Sequence: Synthetic oligonucleotide
uccccagguacgccuauca

SEQ ID NO: 2067973 - RNA, 19 nt, Artificial Sequence
  Description of Artificial Sequence: Synthetic oligonucleotide
ucuuacugucacugagacu

SEQ ID NO: 2067974 - RNA, 19 nt, Artificial Sequence
  Description of Artificial Sequence: Synthetic oligonucleotide
uguccagcggcucgcggug

SEQ ID NO: 2067975 - RNA, 19 nt, Artificial Sequence
  Description of Artificial Sequence: Synthetic oligonucleotide
acaaaggugagaagagggu

SEQ ID NO: 2067976 - RNA, 19 nt, Artificial Sequence
  Description of Artificial Sequence: Synthetic oligonucleotide
agcuuguguucccacgugu

SEQ ID NO: 2067977 - RNA, 19 nt, Artificial Sequence
  Description of Artificial Sequence: Synthetic oligonucleotide
gugaagggauucuuguaga

SEQ ID NO: 2067978 - RNA, 19 nt, Artificial Sequence
  Description of Artificial Sequence: Synthetic oligonucleotide
aggcagaggucgucgccgc

SEQ ID NO: 2067979 - RNA, 19 nt, Artificial Sequence
  Description of Artificial Sequence: Synthetic oligonucleotide
ugcuccgagcgcucgcagg

SEQ ID NO: 2067980 - RNA, 19 nt, Artificial Sequence
  Description of Artificial Sequence: Synthetic oligonucleotide
cuccccuugaggucuucgg

SEQ ID NO: 2067981 - RNA, 19 nt, Artificial Sequence
  Description of Artificial Sequence: Synthetic oligonucleotide
cccacgugugcucagaaag

SEQ ID NO: 2067982 - RNA, 19 nt, Artificial Sequence
  Description of Artificial Sequence: Synthetic oligonucleotide
aggggucggacuacuagac

SEQ ID NO: 2067983 - RNA, 19 nt, Artificial Sequence
  Description of Artificial Sequence: Synthetic oligonucleotide
acacgcuuaggaggguccc

SEQ ID NO: 2067984 - RNA, 19 nt, Artificial Sequence
  Description of Artificial Sequence: Synthetic oligonucleotide
cuguugcuccucuucugcc

SEQ ID NO: 2067985 - RNA, 19 nt, Artificial Sequence
  Description of Artificial Sequence: Synthetic oligonucleotide
acucacccagcacauucug

SEQ ID NO: 2067986 - RNA, 19 nt, Artificial Sequence
  Description of Artificial Sequence: Synthetic oligonucleotide
uagagggucugggucacug

SEQ ID NO: 2067987 - RNA, 19 nt, Artificial Sequence
  Description of Artificial Sequence: Synthetic oligonucleotide
agcgacucauucgucacug

SEQ ID NO: 2067988 - RNA, 19 nt, Artificial Sequence
  Description of Artificial Sequence: Synthetic oligonucleotide
gucggacuacuagacaaag

SEQ ID NO: 2067989 - RNA, 19 nt, Artificial Sequence
  Description of Artificial Sequence: Synthetic oligonucleotide
agcccagugcuccgagcgc

SEQ ID NO: 2067990 - RNA, 19 nt, Artificial Sequence
  Description of Artificial Sequence: Synthetic oligonucleotide
uggaacagcaucgcaucgu

SEQ ID NO: 2067991 - RNA, 19 nt, Artificial Sequence
  Description of Artificial Sequence: Synthetic oligonucleotide
uggcacuaagugacaucag

SEQ ID NO: 2067992 - RNA, 19 nt, Artificial Sequence
  Description of Artificial Sequence: Synthetic oligonucleotide
ccuaaugcucacaggacac

SEQ ID NO: 2067993 - RNA, 19 nt, Artificial Sequence
  Description of Artificial Sequence: Synthetic oligonucleotide
uugggucgcagguuccucu

SEQ ID NO: 2067994 - RNA, 19 nt, Artificial Sequence
  Description of Artificial Sequence: Synthetic oligonucleotide
agaugaccagcuucauagu

SEQ ID NO: 2067995 - RNA, 19 nt, Artificial Sequence
  Description of Artificial Sequence: Synthetic oligonucleotide
gaagaggguucggagugug

SEQ ID NO: 2067996 - RNA, 19 nt, Artificial Sequence
  Description of Artificial Sequence: Synthetic oligonucleotide
caucuuggcgagcgggcgg

SEQ ID NO: 2067997 - RNA, 19 nt, Artificial Sequence
  Description of Artificial Sequence: Synthetic oligonucleotide
aacucacccagcacauucu

SEQ ID NO: 2067998 - RNA, 19 nt, Artificial Sequence
  Description of Artificial Sequence: Synthetic oligonucleotide
gaacccgcaguaccuccag

SEQ ID NO: 2067999 - RNA, 19 nt, Artificial Sequence
  Description of Artificial Sequence: Synthetic oligonucleotide
cagaacccgcaguaccucc

SEQ ID NO: 2068000 - RNA, 19 nt, Artificial Sequence
  Description of Artificial Sequence: Synthetic oligonucleotide
gaaugagagaugaccagcu

SEQ ID NO: 2068001 - RNA, 19 nt, Artificial Sequence
  Description of Artificial Sequence: Synthetic oligonucleotide
cagugguguccccagguac

SEQ ID NO: 2068002 - RNA, 19 nt, Artificial Sequence
  Description of Artificial Sequence: Synthetic oligonucleotide
ggaaccaagagaggugaag

SEQ ID NO: 2068003 - RNA, 19 nt, Artificial Sequence
  Description of Artificial Sequence: Synthetic oligonucleotide
gucaguaggggucggacua

SEQ ID NO: 2068004 - RNA, 19 nt, Artificial Sequence
  Description of Artificial Sequence: Synthetic oligonucleotide
ucuucggccgcguccugca

SEQ ID NO: 2068005 - RNA, 19 nt, Artificial Sequence
  Description of Artificial Sequence: Synthetic oligonucleotide
uacugucacugagacugag

SEQ ID NO: 2068006 - RNA, 19 nt, Artificial Sequence
  Description of Artificial Sequence: Synthetic oligonucleotide
cgagggaagauaaacagca

SEQ ID NO: 2068007 - RNA, 19 nt, Artificial Sequence
  Description of Artificial Sequence: Synthetic oligonucleotide
cuguagaaugagagaugac

SEQ ID NO: 2068008 - RNA, 19 nt, Artificial Sequence
  Description of Artificial Sequence: Synthetic oligonucleotide
ugcgggaccggcgacggug

SEQ ID NO: 2068009 - RNA, 19 nt, Artificial Sequence
  Description of Artificial Sequence: Synthetic oligonucleotide
uggagaggauccccgccac

SEQ ID NO: 2068010 - RNA, 19 nt, Artificial Sequence
  Description of Artificial Sequence: Synthetic oligonucleotide
ggagaaggcccgcucagug

SEQ ID NO: 2068011 - RNA, 19 nt, Artificial Sequence
  Description of Artificial Sequence: Synthetic oligonucleotide
gauaaacagcagcgacuca

SEQ ID NO: 2068012 - RNA, 19 nt, Artificial Sequence
  Description of Artificial Sequence: Synthetic oligonucleotide
cuugaggucuucggccgcg

SEQ ID NO: 2068013 - RNA, 19 nt, Artificial Sequence
  Description of Artificial Sequence: Synthetic oligonucleotide
uacgccuaucagccugcag

SEQ ID NO: 2068014 - RNA, 19 nt, Artificial Sequence
  Description of Artificial Sequence: Synthetic oligonucleotide
cguaguggggagaaggccc

SEQ ID NO: 2068015 - RNA, 19 nt, Artificial Sequence
  Description of Artificial Sequence: Synthetic oligonucleotide
acucuuacugucacugaga

SEQ ID NO: 2068016 - RNA, 19 nt, Artificial Sequence
  Description of Artificial Sequence: Synthetic oligonucleotide
cacugagacugagagcuug

SEQ ID NO: 2068017 - RNA, 19 nt, Artificial Sequence
  Description of Artificial Sequence: Synthetic oligonucleotide
cuggggaccaguggugucc

SEQ ID NO: 2068018 - RNA, 19 nt, Artificial Sequence
  Description of Artificial Sequence: Synthetic oligonucleotide
aggcacagguuuccucuag

SEQ ID NO: 2068019 - RNA, 19 nt, Artificial Sequence
  Description of Artificial Sequence: Synthetic oligonucleotide
gagaggauccccgccacga

SEQ ID NO: 2068020 - RNA, 19 nt, Artificial Sequence
  Description of Artificial Sequence: Synthetic oligonucleotide
gaggucgucgccgcagaag

SEQ ID NO: 2068021 - RNA, 19 nt, Artificial Sequence
  Description of Artificial Sequence: Synthetic oligonucleotide
uuagugcuuuggugagggc

SEQ ID NO: 2068022 - RNA, 19 nt, Artificial Sequence
  Description of Artificial Sequence: Synthetic oligonucleotide
uguagagggucugggucac

SEQ ID NO: 2068023 - RNA, 19 nt, Artificial Sequence
  Description of Artificial Sequence: Synthetic oligonucleotide
ggugacacaugggacuuag

SEQ ID NO: 2068024 - RNA, 19 nt, Artificial Sequence
  Description of Artificial Sequence: Synthetic oligonucleotide
gccuacacgcuuaggaggg

SEQ ID NO: 2068025 - RNA, 19 nt, Artificial Sequence
  Description of Artificial Sequence: Synthetic oligonucleotide
ggucgcagguuccucugcg

SEQ ID NO: 2068026 - RNA, 19 nt, Artificial Sequence
  Description of Artificial Sequence: Synthetic oligonucleotide
ucgucgccgcagaaggugu

SEQ ID NO: 2068027 - RNA, 19 nt, Artificial Sequence
  Description of Artificial Sequence: Synthetic oligonucleotide
caucgcaucguccauuugu

SEQ ID NO: 2068028 - RNA, 19 nt, Artificial Sequence
  Description of Artificial Sequence: Synthetic oligonucleotide
ugggucgcagguuccucug

SEQ ID NO: 2068029 - RNA, 19 nt, Artificial Sequence
  Description of Artificial Sequence: Synthetic oligonucleotide
ggacuacuagacaaaggug

SEQ ID NO: 2068030 - RNA, 19 nt, Artificial Sequence
  Description of Artificial Sequence: Synthetic oligonucleotide
cagcucgcggcacucgggg

SEQ ID NO: 2068031 - RNA, 19 nt, Artificial Sequence
  Description of Artificial Sequence: Synthetic oligonucleotide
agcaucgcaucguccauuu

SEQ ID NO: 2068032 - RNA, 19 nt, Artificial Sequence
  Description of Artificial Sequence: Synthetic oligonucleotide
caucguccauuuguuuccg

SEQ ID NO: 2068033 - RNA, 19 nt, Artificial Sequence
  Description of Artificial Sequence: Synthetic oligonucleotide
gcacagguuuccucuagcc

SEQ ID NO: 2068034 - RNA, 19 nt, Artificial Sequence
  Description of Artificial Sequence: Synthetic oligonucleotide
aaggcacagguuuccucua

SEQ ID NO: 2068035 - RNA, 19 nt, Artificial Sequence
  Description of Artificial Sequence: Synthetic oligonucleotide
guucggagugugccgugag

SEQ ID NO: 2068036 - RNA, 19 nt, Artificial Sequence
  Description of Artificial Sequence: Synthetic oligonucleotide
gaaccucaagucagaggug

SEQ ID NO: 2068037 - RNA, 19 nt, Artificial Sequence
  Description of Artificial Sequence: Synthetic oligonucleotide
caacaggcggcgcagccuc

SEQ ID NO: 2068038 - RNA, 19 nt, Artificial Sequence
  Description of Artificial Sequence: Synthetic oligonucleotide
caagucagaggugcuggug

SEQ ID NO: 2068039 - RNA, 19 nt, Artificial Sequence
  Description of Artificial Sequence: Synthetic oligonucleotide
gugcgccgcgcauacaccc

SEQ ID NO: 2068040 - RNA, 19 nt, Artificial Sequence
  Description of Artificial Sequence: Synthetic oligonucleotide
gggucggacuacuagacaa

SEQ ID NO: 2068041 - RNA, 19 nt, Artificial Sequence
  Description of Artificial Sequence: Synthetic oligonucleotide
agcggucguacccggugag

SEQ ID NO: 2068042 - RNA, 19 nt, Artificial Sequence
  Description of Artificial Sequence: Synthetic oligonucleotide
gcuuaggagggucccguag

SEQ ID NO: 2068043 - RNA, 19 nt, Artificial Sequence
  Description of Artificial Sequence: Synthetic oligonucleotide
aagugacaucaguggugga

SEQ ID NO: 2068044 - RNA, 19 nt, Artificial Sequence
  Description of Artificial Sequence: Synthetic oligonucleotide
cgugugcucagaaaggcac

SEQ ID NO: 2068045 - RNA, 19 nt, Artificial Sequence
  Description of Artificial Sequence: Synthetic oligonucleotide
gauggucaguaggggucgg

SEQ ID NO: 2068046 - RNA, 19 nt, Artificial Sequence
  Description of Artificial Sequence: Synthetic oligonucleotide
gucgucgccgcagaaggug

SEQ ID NO: 2068047 - RNA, 19 nt, Artificial Sequence
  Description of Artificial Sequence: Synthetic oligonucleotide
auccccgccacgaggacag

SEQ ID NO: 2068048 - RNA, 19 nt, Artificial Sequence
  Description of Artificial Sequence: Synthetic oligonucleotide
ccacgugugcucagaaagg

SEQ ID NO: 2068049 - RNA, 19 nt, Artificial Sequence
  Description of Artificial Sequence: Synthetic oligonucleotide
uucccacgugugcucagaa

SEQ ID NO: 2068050 - RNA, 19 nt, Artificial Sequence
  Description of Artificial Sequence: Synthetic oligonucleotide
ucaguaggggucggacuac

SEQ ID NO: 2068051 - RNA, 19 nt, Artificial Sequence
  Description of Artificial Sequence: Synthetic oligonucleotide
agugcuuuggugagggcuu

SEQ ID NO: 2068052 - RNA, 19 nt, Artificial Sequence
  Description of Artificial Sequence: Synthetic oligonucleotide
ccgcucaguggaauuauag

SEQ ID NO: 2068053 - RNA, 19 nt, Artificial Sequence
  Description of Artificial Sequence: Synthetic oligonucleotide
agcccaguguacucccacu

SEQ ID NO: 2068054 - RNA, 19 nt, Artificial Sequence
  Description of Artificial Sequence: Synthetic oligonucleotide
cuucugccaacaggcggcg

SEQ ID NO: 2068055 - RNA, 19 nt, Artificial Sequence
  Description of Artificial Sequence: Synthetic oligonucleotide
gucgcagguuccucugcgc

SEQ ID NO: 2068056 - RNA, 19 nt, Artificial Sequence
  Description of Artificial Sequence: Synthetic oligonucleotide
guaugggcccucgggcugg

SEQ ID NO: 2068057 - RNA, 19 nt, Artificial Sequence
  Description of Artificial Sequence: Synthetic oligonucleotide
agugugccgugaggaaggg

SEQ ID NO: 2068058 - RNA, 19 nt, Artificial Sequence
  Description of Artificial Sequence: Synthetic oligonucleotide
cccacucuuacugucacug

SEQ ID NO: 2068059 - RNA, 19 nt, Artificial Sequence
  Description of Artificial Sequence: Synthetic oligonucleotide
ccccuugaggucuucggcc

SEQ ID NO: 2068060 - RNA, 19 nt, Artificial Sequence
  Description of Artificial Sequence: Synthetic oligonucleotide
agcgcucgcaggugggaca

SEQ ID NO: 2068061 - RNA, 19 nt, Artificial Sequence
  Description of Artificial Sequence: Synthetic oligonucleotide
ucccacgugugcucagaaa

SEQ ID NO: 2068062 - RNA, 19 nt, Artificial Sequence
  Description of Artificial Sequence: Synthetic oligonucleotide
agaugccuacacgcuuagg

SEQ ID NO: 2068063 - RNA, 19 nt, Artificial Sequence
  Description of Artificial Sequence: Synthetic oligonucleotide
cuacuagacaaaggugaga

SEQ ID NO: 2068064 - RNA, 19 nt, Artificial Sequence
  Description of Artificial Sequence: Synthetic oligonucleotide
ggugagaagaggguucgga

SEQ ID NO: 2068065 - RNA, 19 nt, Artificial Sequence
  Description of Artificial Sequence: Synthetic oligonucleotide
acugagacugagagcuugu

SEQ ID NO: 2068066 - RNA, 19 nt, Artificial Sequence
  Description of Artificial Sequence: Synthetic oligonucleotide
gcauacacccugcgggacc

SEQ ID NO: 2068067 - RNA, 19 nt, Artificial Sequence
  Description of Artificial Sequence: Synthetic oligonucleotide
cugagacugagagcuugug

SEQ ID NO: 2068068 - RNA, 19 nt, Artificial Sequence
  Description of Artificial Sequence: Synthetic oligonucleotide
cuacacgcuuaggaggguc

SEQ ID NO: 2068069 - RNA, 19 nt, Artificial Sequence
  Description of Artificial Sequence: Synthetic oligonucleotide
aggguucggagugugccgu

SEQ ID NO: 2068070 - RNA, 19 nt, Artificial Sequence
  Description of Artificial Sequence: Synthetic oligonucleotide
gggauucuuguagaggguc

SEQ ID NO: 2068071 - RNA, 19 nt, Artificial Sequence
  Description of Artificial Sequence: Synthetic oligonucleotide
ggcacuaagugacaucagu

SEQ ID NO: 2068072 - RNA, 19 nt, Artificial Sequence
  Description of Artificial Sequence: Synthetic oligonucleotide
cacgaggacagagcccagc

SEQ ID NO: 2068073 - RNA, 19 nt, Artificial Sequence
  Description of Artificial Sequence: Synthetic oligonucleotide
cuuaggagggucccguagu

SEQ ID NO: 2068074 - RNA, 19 nt, Artificial Sequence
  Description of Artificial Sequence: Synthetic oligonucleotide
ggcgccgagccauuucugc

SEQ ID NO: 2068075 - RNA, 19 nt, Artificial Sequence
  Description of Artificial Sequence: Synthetic oligonucleotide
gugagcccagugcuccgag

SEQ ID NO: 2068076 - RNA, 19 nt, Artificial Sequence
  Description of Artificial Sequence: Synthetic oligonucleotide
ugcgccgcgcauacacccu

SEQ ID NO: 2068077 - RNA, 19 nt, Artificial Sequence
  Description of Artificial Sequence: Synthetic oligonucleotide
guacccggugagcccagug

SEQ ID NO: 2068078 - RNA, 19 nt, Artificial Sequence
  Description of Artificial Sequence: Synthetic oligonucleotide
ucccacucuuacugucacu

SEQ ID NO: 2068079 - RNA, 19 nt, Artificial Sequence
  Description of Artificial Sequence: Synthetic oligonucleotide
uggggaccagugguguccc

SEQ ID NO: 2068080 - RNA, 19 nt, Artificial Sequence
  Description of Artificial Sequence: Synthetic oligonucleotide
aucgcaucguccauuuguu

SEQ ID NO: 2068081 - RNA, 19 nt, Artificial Sequence
  Description of Artificial Sequence: Synthetic oligonucleotide
ccauuucugccaucuuggc

SEQ ID NO: 2068082 - RNA, 19 nt, Artificial Sequence
  Description of Artificial Sequence: Synthetic oligonucleotide
cucgcaggugggacacagc

SEQ ID NO: 2068083 - RNA, 19 nt, Artificial Sequence
  Description of Artificial Sequence: Synthetic oligonucleotide
gcagcgacucauucgucac

SEQ ID NO: 2068084 - RNA, 19 nt, Artificial Sequence
  Description of Artificial Sequence: Synthetic oligonucleotide
uacacccugcgggaccggc

SEQ ID NO: 2068085 - RNA, 19 nt, Artificial Sequence
  Description of Artificial Sequence: Synthetic oligonucleotide
ggagaggauccccgccacg

SEQ ID NO: 2068086 - RNA, 19 nt, Artificial Sequence
  Description of Artificial Sequence: Synthetic oligonucleotide
agugcuccgagcgcucgca

SEQ ID NO: 2068087 - RNA, 19 nt, Artificial Sequence
  Description of Artificial Sequence: Synthetic oligonucleotide
ccgcaguaccuccagcucc

SEQ ID NO: 2068088 - RNA, 19 nt, Artificial Sequence
  Description of Artificial Sequence: Synthetic oligonucleotide
aggugagaagaggguucgg

SEQ ID NO: 2068089 - RNA, 19 nt, Artificial Sequence
  Description of Artificial Sequence: Synthetic oligonucleotide
aggugggacacagcaggca

SEQ ID NO: 2068090 - RNA, 19 nt, Artificial Sequence
  Description of Artificial Sequence: Synthetic oligonucleotide
agaacccgcaguaccucca

SEQ ID NO: 2068091 - RNA, 19 nt, Artificial Sequence
  Description of Artificial Sequence: Synthetic oligonucleotide
cugcagcggucguacccgg

SEQ ID NO: 2068092 - RNA, 19 nt, Artificial Sequence
  Description of Artificial Sequence: Synthetic oligonucleotide
acgcuuaggagggucccgu

SEQ ID NO: 2068093 - RNA, 19 nt, Artificial Sequence
  Description of Artificial Sequence: Synthetic oligonucleotide
aucuuggcgagcgggcggu

SEQ ID NO: 2068094 - RNA, 19 nt, Artificial Sequence
  Description of Artificial Sequence: Synthetic oligonucleotide
gcuuguguucccacgugug

SEQ ID NO: 2068095 - RNA, 19 nt, Artificial Sequence
  Description of Artificial Sequence: Synthetic oligonucleotide
cccguaguggggagaaggc

SEQ ID NO: 2068096 - RNA, 19 nt, Artificial Sequence
  Description of Artificial Sequence: Synthetic oligonucleotide
cacgcguaugggcccucgg

SEQ ID NO: 2068097 - RNA, 19 nt, Artificial Sequence
  Description of Artificial Sequence: Synthetic oligonucleotide
ggucguacccggugagccc

SEQ ID NO: 2068098 - RNA, 19 nt, Artificial Sequence
  Description of Artificial Sequence: Synthetic oligonucleotide
ucguacccggugagcccag

SEQ ID NO: 2068099 - RNA, 19 nt, Artificial Sequence
  Description of Artificial Sequence: Synthetic oligonucleotide
acgugugcucagaaaggca

SEQ ID NO: 2068100 - RNA, 19 nt, Artificial Sequence
  Description of Artificial Sequence: Synthetic oligonucleotide
ucacugagacugagagcuu

SEQ ID NO: 2068101 - RNA, 19 nt, Artificial Sequence
  Description of Artificial Sequence: Synthetic oligonucleotide
ucgcaucguccauuuguuu

SEQ ID NO: 2068102 - RNA, 19 nt, Artificial Sequence
  Description of Artificial Sequence: Synthetic oligonucleotide
cucauucgucacuguagaa

SEQ ID NO: 2068103 - RNA, 19 nt, Artificial Sequence
  Description of Artificial Sequence: Synthetic oligonucleotide
gauccccgccacgaggaca

SEQ ID NO: 2068104 - RNA, 19 nt, Artificial Sequence
  Description of Artificial Sequence: Synthetic oligonucleotide
gucguacccggugagccca

SEQ ID NO: 2068105 - RNA, 19 nt, Artificial Sequence
  Description of Artificial Sequence: Synthetic oligonucleotide
caguggaauuauagaaacu

SEQ ID NO: 2068106 - RNA, 19 nt, Artificial Sequence
  Description of Artificial Sequence: Synthetic oligonucleotide
cacagguuuccucuagccu

SEQ ID NO: 2068107 - RNA, 19 nt, Artificial Sequence
  Description of Artificial Sequence: Synthetic oligonucleotide
gcagcggucguacccggug

SEQ ID NO: 2068108 - RNA, 19 nt, Artificial Sequence
  Description of Artificial Sequence: Synthetic oligonucleotide
ccgcaagugcuccagugac

SEQ ID NO: 2068109 - RNA, 19 nt, Artificial Sequence
  Description of Artificial Sequence: Synthetic oligonucleotide
gucgccgcagaaggugucc

SEQ ID NO: 2068110 - RNA, 19 nt, Artificial Sequence
  Description of Artificial Sequence: Synthetic oligonucleotide
gguacgccuaucagccugc

SEQ ID NO: 2068111 - RNA, 19 nt, Artificial Sequence
  Description of Artificial Sequence: Synthetic oligonucleotide
cggacuacuagacaaaggu

SEQ ID NO: 2068112 - RNA, 19 nt, Artificial Sequence
  Description of Artificial Sequence: Synthetic oligonucleotide
ggaccggcgacggugggug

SEQ ID NO: 2068113 - RNA, 19 nt, Artificial Sequence
  Description of Artificial Sequence: Synthetic oligonucleotide
ccgccacgaggacagagcc

SEQ ID NO: 2068114 - RNA, 19 nt, Artificial Sequence
  Description of Artificial Sequence: Synthetic oligonucleotide
caguguacucccacucuua

SEQ ID NO: 2068115 - RNA, 19 nt, Artificial Sequence
  Description of Artificial Sequence: Synthetic oligonucleotide
gcgguugggucgcagguuc

SEQ ID NO: 2068116 - RNA, 19 nt, Artificial Sequence
  Description of Artificial Sequence: Synthetic oligonucleotide
caaaggugagaagaggguu

SEQ ID NO: 2068117 - RNA, 19 nt, Artificial Sequence
  Description of Artificial Sequence: Synthetic oligonucleotide
cagugcuccgagcgcucgc

SEQ ID NO: 2068118 - RNA, 19 nt, Artificial Sequence
  Description of Artificial Sequence: Synthetic oligonucleotide
cuucugccacaaggcacag

SEQ ID NO: 2068119 - RNA, 19 nt, Artificial Sequence
  Description of Artificial Sequence: Synthetic oligonucleotide
cuuggcgagcgggcgguug

SEQ ID NO: 2068120 - RNA, 19 nt, Artificial Sequence
  Description of Artificial Sequence: Synthetic oligonucleotide
gucuucggccgcguccugc

SEQ ID NO: 2068121 - RNA, 19 nt, Artificial Sequence
  Description of Artificial Sequence: Synthetic oligonucleotide
gugggugcaggcgccgagc

SEQ ID NO: 2068122 - RNA, 19 nt, Artificial Sequence
  Description of Artificial Sequence: Synthetic oligonucleotide
cccgccacgaggacagagc

SEQ ID NO: 2068123 - RNA, 19 nt, Artificial Sequence
  Description of Artificial Sequence: Synthetic oligonucleotide
gcagaggucgucgccgcag

SEQ ID NO: 2068124 - RNA, 19 nt, Artificial Sequence
  Description of Artificial Sequence: Synthetic oligonucleotide
guguacucccacucuuacu

SEQ ID NO: 2068125 - RNA, 19 nt, Artificial Sequence
  Description of Artificial Sequence: Synthetic oligonucleotide
ccaucuuggcgagcgggcg

SEQ ID NO: 2068126 - RNA, 19 nt, Artificial Sequence
  Description of Artificial Sequence: Synthetic oligonucleotide
gagcgcucgcaggugggac

SEQ ID NO: 2068127 - RNA, 19 nt, Artificial Sequence
  Description of Artificial Sequence: Synthetic oligonucleotide
gugugccgugaggaagggg

SEQ ID NO: 2068128 - RNA, 19 nt, Artificial Sequence
  Description of Artificial Sequence: Synthetic oligonucleotide
gcucgcaggugggacacag

SEQ ID NO: 2068129 - RNA, 19 nt, Artificial Sequence
  Description of Artificial Sequence: Synthetic oligonucleotide
gcgacggugggugcaggcg

SEQ ID NO: 2068130 - RNA, 19 nt, Artificial Sequence
  Description of Artificial Sequence: Synthetic oligonucleotide
uaguggggagaaggcccgc

SEQ ID NO: 2068131 - RNA, 19 nt, Artificial Sequence
  Description of Artificial Sequence: Synthetic oligonucleotide
gugcuccgagcgcucgcag

SEQ ID NO: 2068132 - RNA, 19 nt, Artificial Sequence
  Description of Artificial Sequence: Synthetic oligonucleotide
cuaucagccugcagauggu

SEQ ID NO: 2068133 - RNA, 19 nt, Artificial Sequence
  Description of Artificial Sequence: Synthetic oligonucleotide
gucagaggugcuggugaca

SEQ ID NO: 2068134 - RNA, 19 nt, Artificial Sequence
  Description of Artificial Sequence: Synthetic oligonucleotide
gcccaguguacucccacuc

SEQ ID NO: 2068135 - RNA, 19 nt, Artificial Sequence
  Description of Artificial Sequence: Synthetic oligonucleotide
auggucaguaggggucgga

SEQ ID NO: 2068136 - RNA, 19 nt, Artificial Sequence
  Description of Artificial Sequence: Synthetic oligonucleotide
uucugccaacaggcggcgc

SEQ ID NO: 2068137 - RNA, 19 nt, Artificial Sequence
  Description of Artificial Sequence: Synthetic oligonucleotide
guugggucgcagguuccuc

SEQ ID NO: 2068138 - RNA, 19 nt, Artificial Sequence
  Description of Artificial Sequence: Synthetic oligonucleotide
ccguaguggggagaaggcc

SEQ ID NO: 2068139 - RNA, 19 nt, Artificial Sequence
  Description of Artificial Sequence: Synthetic oligonucleotide
cgcguaugggcccucgggc

SEQ ID NO: 2068140 - RNA, 19 nt, Artificial Sequence
  Description of Artificial Sequence: Synthetic oligonucleotide
gccucaguauggucaggac

SEQ ID NO: 2068141 - RNA, 19 nt, Artificial Sequence
  Description of Artificial Sequence: Synthetic oligonucleotide
ggggcacgcguaugggccc

SEQ ID NO: 2068142 - RNA, 19 nt, Artificial Sequence
  Description of Artificial Sequence: Synthetic oligonucleotide
gcuuggaacagcaucgcau

SEQ ID NO: 2068143 - RNA, 19 nt, Artificial Sequence
  Description of Artificial Sequence: Synthetic oligonucleotide
gccgcagaagguguccagc

SEQ ID NO: 2068144 - RNA, 19 nt, Artificial Sequence
  Description of Artificial Sequence: Synthetic oligonucleotide
guucccacgugugcucaga

SEQ ID NO: 2068145 - RNA, 19 nt, Artificial Sequence
  Description of Artificial Sequence: Synthetic oligonucleotide
cuucggccgcguccugcag

SEQ ID NO: 2068146 - RNA, 19 nt, Artificial Sequence
  Description of Artificial Sequence: Synthetic oligonucleotide
ggcgacggugggugcaggc

SEQ ID NO: 2068147 - RNA, 19 nt, Artificial Sequence
  Description of Artificial Sequence: Synthetic oligonucleotide
gccgcgcauacacccugcg

SEQ ID NO: 2068148 - RNA, 19 nt, Artificial Sequence
  Description of Artificial Sequence: Synthetic oligonucleotide
ccggugagcccagugcucc

SEQ ID NO: 2068149 - RNA, 19 nt, Artificial Sequence
  Description of Artificial Sequence: Synthetic oligonucleotide
cagcagcgacucauucguc

SEQ ID NO: 2068150 - RNA, 19 nt, Artificial Sequence
  Description of Artificial Sequence: Synthetic oligonucleotide
caagagaggugaagggauu

SEQ ID NO: 2068151 - RNA, 19 nt, Artificial Sequence
  Description of Artificial Sequence: Synthetic oligonucleotide
cagaggucgucgccgcaga

SEQ ID NO: 2068152 - RNA, 19 nt, Artificial Sequence
  Description of Artificial Sequence: Synthetic oligonucleotide
auacacccugcgggaccgg

SEQ ID NO: 2068153 - RNA, 19 nt, Artificial Sequence
  Description of Artificial Sequence: Synthetic oligonucleotide
ggggucggacuacuagaca

SEQ ID NO: 2068154 - RNA, 19 nt, Artificial Sequence
  Description of Artificial Sequence: Synthetic oligonucleotide
ggucaguaggggucggacu

SEQ ID NO: 2068155 - RNA, 19 nt, Artificial Sequence
  Description of Artificial Sequence: Synthetic oligonucleotide
cucgggcuggccccaacaa

SEQ ID NO: 2068156 - RNA, 19 nt, Artificial Sequence
  Description of Artificial Sequence: Synthetic oligonucleotide
gagcccagcccaguguacu

SEQ ID NO: 2068157 - RNA, 19 nt, Artificial Sequence
  Description of Artificial Sequence: Synthetic oligonucleotide
gcgcauacacccugcggga

SEQ ID NO: 2068158 - RNA, 19 nt, Artificial Sequence
  Description of Artificial Sequence: Synthetic oligonucleotide
cagcggucguacccgguga

SEQ ID NO: 2068159 - RNA, 19 nt, Artificial Sequence
  Description of Artificial Sequence: Synthetic oligonucleotide
ggauucuuguagagggucu

SEQ ID NO: 2068160 - RNA, 19 nt, Artificial Sequence
  Description of Artificial Sequence: Synthetic oligonucleotide
ccuugaggucuucggccgc

SEQ ID NO: 2068161 - RNA, 19 nt, Artificial Sequence
  Description of Artificial Sequence: Synthetic oligonucleotide
gaccggcgacggugggugc

SEQ ID NO: 2068162 - RNA, 19 nt, Artificial Sequence
  Description of Artificial Sequence: Synthetic oligonucleotide
gcggcgcagccucucaaac

SEQ ID NO: 2068163 - RNA, 19 nt, Artificial Sequence
  Description of Artificial Sequence: Synthetic oligonucleotide
accggcgacggugggugca

SEQ ID NO: 2068164 - RNA, 19 nt, Artificial Sequence
  Description of Artificial Sequence: Synthetic oligonucleotide
cucgcggcacucggggcac

SEQ ID NO: 2068165 - RNA, 19 nt, Artificial Sequence
  Description of Artificial Sequence: Synthetic oligonucleotide
ccgcgcauacacccugcgg

SEQ ID NO: 2068166 - RNA, 19 nt, Artificial Sequence
  Description of Artificial Sequence: Synthetic oligonucleotide
uggugacacaugggacuua

SEQ ID NO: 2068167 - RNA, 19 nt, Artificial Sequence
  Description of Artificial Sequence: Synthetic oligonucleotide
ggucggacuacuagacaaa

SEQ ID NO: 2068168 - RNA, 19 nt, Artificial Sequence
  Description of Artificial Sequence: Synthetic oligonucleotide
aguaggggucggacuacua

SEQ ID NO: 2068169 - RNA, 19 nt, Artificial Sequence
  Description of Artificial Sequence: Synthetic oligonucleotide
ggugcgccgcgcauacacc

SEQ ID NO: 2068170 - RNA, 19 nt, Artificial Sequence
  Description of Artificial Sequence: Synthetic oligonucleotide
ccccagguacgccuaucag

SEQ ID NO: 2068171 - RNA, 19 nt, Artificial Sequence
  Description of Artificial Sequence: Synthetic oligonucleotide
cugcgccgacagcucgcgg

SEQ ID NO: 2068172 - RNA, 19 nt, Artificial Sequence
  Description of Artificial Sequence: Synthetic oligonucleotide
cgacggugggugcaggcgc

SEQ ID NO: 2068173 - RNA, 19 nt, Artificial Sequence
  Description of Artificial Sequence: Synthetic oligonucleotide
aggcggcgcagccucucaa

SEQ ID NO: 2068174 - RNA, 19 nt, Artificial Sequence
  Description of Artificial Sequence: Synthetic oligonucleotide
gggaccaguggugucccca

SEQ ID NO: 2068175 - RNA, 19 nt, Artificial Sequence
  Description of Artificial Sequence: Synthetic oligonucleotide
cggucguacccggugagcc

SEQ ID NO: 2068176 - RNA, 19 nt, Artificial Sequence
  Description of Artificial Sequence: Synthetic oligonucleotide
agguuccucugcgccgaca

SEQ ID NO: 2068177 - RNA, 19 nt, Artificial Sequence
  Description of Artificial Sequence: Synthetic oligonucleotide
gguucggagugugccguga

SEQ ID NO: 2068178 - RNA, 19 nt, Artificial Sequence
  Description of Artificial Sequence: Synthetic oligonucleotide
ggguucggagugugccgug

SEQ ID NO: 2068179 - RNA, 19 nt, Artificial Sequence
  Description of Artificial Sequence: Synthetic oligonucleotide
cggugcgccgcgcauacac

SEQ ID NO: 2068180 - RNA, 19 nt, Artificial Sequence
  Description of Artificial Sequence: Synthetic oligonucleotide
ggucccguaguggggagaa

SEQ ID NO: 2068181 - RNA, 19 nt, Artificial Sequence
  Description of Artificial Sequence: Synthetic oligonucleotide
cguaugggcccucgggcug

SEQ ID NO: 2068182 - RNA, 19 nt, Artificial Sequence
  Description of Artificial Sequence: Synthetic oligonucleotide
ccgagcgcucgcagguggg

SEQ ID NO: 2068183 - RNA, 19 nt, Artificial Sequence
  Description of Artificial Sequence: Synthetic oligonucleotide
ccagugcuccgagcgcucg

SEQ ID NO: 2068184 - RNA, 19 nt, Artificial Sequence
  Description of Artificial Sequence: Synthetic oligonucleotide
gucccguaguggggagaag

SEQ ID NO: 2068185 - RNA, 19 nt, Artificial Sequence
  Description of Artificial Sequence: Synthetic oligonucleotide
gcuccgagcgcucgcaggu

SEQ ID NO: 2068186 - RNA, 19 nt, Artificial Sequence
  Description of Artificial Sequence: Synthetic oligonucleotide
aggcgccgagccauuucug

SEQ ID NO: 2068187 - RNA, 19 nt, Artificial Sequence
  Description of Artificial Sequence: Synthetic oligonucleotide
ggugcaggcgccgagccau

SEQ ID NO: 2068188 - RNA, 19 nt, Artificial Sequence
  Description of Artificial Sequence: Synthetic oligonucleotide
ccuccccuugaggucuucg

SEQ ID NO: 2068189 - RNA, 19 nt, Artificial Sequence
  Description of Artificial Sequence: Synthetic oligonucleotide
ggggucucgagggaagaua

SEQ ID NO: 2068190 - RNA, 19 nt, Artificial Sequence
  Description of Artificial Sequence: Synthetic oligonucleotide
ccagaacccgcaguaccuc

SEQ ID NO: 2068191 - RNA, 19 nt, Artificial Sequence
  Description of Artificial Sequence: Synthetic oligonucleotide
ucgcggcacucggggcacg

SEQ ID NO: 2068192 - RNA, 19 nt, Artificial Sequence
  Description of Artificial Sequence: Synthetic oligonucleotide
gcgagcgggcgguuggguc

SEQ ID NO: 2068193 - RNA, 19 nt, Artificial Sequence
  Description of Artificial Sequence: Synthetic oligonucleotide
ccacucuuacugucacuga

SEQ ID NO: 2068194 - RNA, 19 nt, Artificial Sequence
  Description of Artificial Sequence: Synthetic oligonucleotide
gcgccgcgcauacacccug

SEQ ID NO: 2068195 - RNA, 19 nt, Artificial Sequence
  Description of Artificial Sequence: Synthetic oligonucleotide
ggauccccgccacgaggac

SEQ ID NO: 2068196 - RNA, 19 nt, Artificial Sequence
  Description of Artificial Sequence: Synthetic oligonucleotide
gugagggcuuuuggcacua

SEQ ID NO: 2068197 - RNA, 19 nt, Artificial Sequence
  Description of Artificial Sequence: Synthetic oligonucleotide
ucgcggugcgccgcgcaua

SEQ ID NO: 2068198 - RNA, 19 nt, Artificial Sequence
  Description of Artificial Sequence: Synthetic oligonucleotide
gccuaucagccugcagaug

SEQ ID NO: 2068199 - RNA, 19 nt, Artificial Sequence
  Description of Artificial Sequence: Synthetic oligonucleotide
guacgccuaucagccugca

SEQ ID NO: 2068200 - RNA, 19 nt, Artificial Sequence
  Description of Artificial Sequence: Synthetic oligonucleotide
cagcgacucauucgucacu

SEQ ID NO: 2068201 - RNA, 19 nt, Artificial Sequence
  Description of Artificial Sequence: Synthetic oligonucleotide
guccccagguacgccuauc

SEQ ID NO: 2068202 - RNA, 19 nt, Artificial Sequence
  Description of Artificial Sequence: Synthetic oligonucleotide
cacuggggaccaguggugu

SEQ ID NO: 2068203 - RNA, 19 nt, Artificial Sequence
  Description of Artificial Sequence: Synthetic oligonucleotide
ggcggcgcagccucucaaa

SEQ ID NO: 2068204 - RNA, 19 nt, Artificial Sequence
  Description of Artificial Sequence: Synthetic oligonucleotide
cccggugagcccagugcuc

SEQ ID NO: 2068205 - RNA, 19 nt, Artificial Sequence
  Description of Artificial Sequence: Synthetic oligonucleotide
gcggucguacccggugagc

SEQ ID NO: 2068206 - RNA, 19 nt, Artificial Sequence
  Description of Artificial Sequence: Synthetic oligonucleotide
gcgcucgcaggugggacac

SEQ ID NO: 2068207 - RNA, 19 nt, Artificial Sequence
  Description of Artificial Sequence: Synthetic oligonucleotide
cacaugggacuuagugcuu

SEQ ID NO: 2068208 - RNA, 19 nt, Artificial Sequence
  Description of Artificial Sequence: Synthetic oligonucleotide
gggcgguugggucgcaggu

SEQ ID NO: 2068209 - RNA, 19 nt, Artificial Sequence
  Description of Artificial Sequence: Synthetic oligonucleotide
cagguacgccuaucagccu

SEQ ID NO: 2068210 - RNA, 19 nt, Artificial Sequence
  Description of Artificial Sequence: Synthetic oligonucleotide
ucuuggcgagcgggcgguu

SEQ ID NO: 2068211 - RNA, 19 nt, Artificial Sequence
  Description of Artificial Sequence: Synthetic oligonucleotide
cgccgagccauuucugcca

SEQ ID NO: 2068212 - RNA, 19 nt, Artificial Sequence
  Description of Artificial Sequence: Synthetic oligonucleotide
cgacucauucgucacugua

SEQ ID NO: 2068213 - RNA, 19 nt, Artificial Sequence
  Description of Artificial Sequence: Synthetic oligonucleotide
cgguugggucgcagguucc

SEQ ID NO: 2068214 - RNA, 19 nt, Artificial Sequence
  Description of Artificial Sequence: Synthetic oligonucleotide
ggucuucggccgcguccug

SEQ ID NO: 2068215 - RNA, 19 nt, Artificial Sequence
  Description of Artificial Sequence: Synthetic oligonucleotide
gguugggucgcagguuccu

SEQ ID NO: 2068216 - RNA, 19 nt, Artificial Sequence
  Description of Artificial Sequence: Synthetic oligonucleotide
cggugagcccagugcuccg

SEQ ID NO: 2068217 - RNA, 19 nt, Artificial Sequence
  Description of Artificial Sequence: Synthetic oligonucleotide
gcggcacucggggcacgcg

SEQ ID NO: 2068218 - RNA, 19 nt, Artificial Sequence
  Description of Artificial Sequence: Synthetic oligonucleotide
caguaggggucggacuacu

SEQ ID NO: 2068219 - RNA, 19 nt, Artificial Sequence
  Description of Artificial Sequence: Synthetic oligonucleotide
gugacacaugggacuuagu

SEQ ID NO: 2068220 - RNA, 19 nt, Artificial Sequence
  Description of Artificial Sequence: Synthetic oligonucleotide
ccccgccacgaggacagag

SEQ ID NO: 2068221 - RNA, 19 nt, Artificial Sequence
  Description of Artificial Sequence: Synthetic oligonucleotide
ccagugguguccccaggua

SEQ ID NO: 2068222 - RNA, 19 nt, Artificial Sequence
  Description of Artificial Sequence: Synthetic oligonucleotide
cgcauacacccugcgggac

SEQ ID NO: 2068223 - RNA, 19 nt, Artificial Sequence
  Description of Artificial Sequence: Synthetic oligonucleotide
ggccgcguccugcagcggu

SEQ ID NO: 2068224 - RNA, 19 nt, Artificial Sequence
  Description of Artificial Sequence: Synthetic oligonucleotide
cgcggugcgccgcgcauac

SEQ ID NO: 2068225 - RNA, 19 nt, Artificial Sequence
  Description of Artificial Sequence: Synthetic oligonucleotide
ccgcuggcucuccaccauc

SEQ ID NO: 2068226 - RNA, 19 nt, Artificial Sequence
  Description of Artificial Sequence: Synthetic oligonucleotide
caaacucacccagcacauu

SEQ ID NO: 2068227 - RNA, 19 nt, Artificial Sequence
  Description of Artificial Sequence: Synthetic oligonucleotide
cgacagcucgcggcacucg

SEQ ID NO: 2068228 - RNA, 19 nt, Artificial Sequence
  Description of Artificial Sequence: Synthetic oligonucleotide
ccgacagcucgcggcacuc

SEQ ID NO: 2068229 - RNA, 19 nt, Artificial Sequence
  Description of Artificial Sequence: Synthetic oligonucleotide
uccccgccacgaggacaga

SEQ ID NO: 2068230 - RNA, 19 nt, Artificial Sequence
  Description of Artificial Sequence: Synthetic oligonucleotide
gcgacucauucgucacugu

SEQ ID NO: 2068231 - RNA, 19 nt, Artificial Sequence
  Description of Artificial Sequence: Synthetic oligonucleotide
gcggcucgcggugcgccgc

SEQ ID NO: 2068232 - RNA, 19 nt, Artificial Sequence
  Description of Artificial Sequence: Synthetic oligonucleotide
gcccagugcuccgagcgcu

SEQ ID NO: 2068233 - RNA, 19 nt, Artificial Sequence
  Description of Artificial Sequence: Synthetic oligonucleotide
gccgacagcucgcggcacu

SEQ ID NO: 2068234 - RNA, 19 nt, Artificial Sequence
  Description of Artificial Sequence: Synthetic oligonucleotide
cgcaguaccuccagcuccu

SEQ ID NO: 2068235 - RNA, 19 nt, Artificial Sequence
  Description of Artificial Sequence: Synthetic oligonucleotide
guagagggucugggucacu

SEQ ID NO: 2068236 - RNA, 19 nt, Artificial Sequence
  Description of Artificial Sequence: Synthetic oligonucleotide
gccgcguccugcagcgguc

SEQ ID NO: 2068237 - RNA, 19 nt, Artificial Sequence
  Description of Artificial Sequence: Synthetic oligonucleotide
cucgcggugcgccgcgcau

SEQ ID NO: 2068238 - RNA, 19 nt, Artificial Sequence
  Description of Artificial Sequence: Synthetic oligonucleotide
gcgggcgguugggucgcag

SEQ ID NO: 2068239 - RNA, 19 nt, Artificial Sequence
  Description of Artificial Sequence: Synthetic oligonucleotide
ggucgucgccgcagaaggu

SEQ ID NO: 2068240 - RNA, 19 nt, Artificial Sequence
  Description of Artificial Sequence: Synthetic oligonucleotide
ccaacaggcggcgcagccu

SEQ ID NO: 2068241 - RNA, 19 nt, Artificial Sequence
  Description of Artificial Sequence: Synthetic oligonucleotide
gccgcuggcucuccaccau

SEQ ID NO: 2068242 - RNA, 19 nt, Artificial Sequence
  Description of Artificial Sequence: Synthetic oligonucleotide
agcgggcgguugggucgca

SEQ ID NO: 2068243 - RNA, 19 nt, Artificial Sequence
  Description of Artificial Sequence: Synthetic oligonucleotide
gggaccggcgacggugggu

SEQ ID NO: 2068244 - RNA, 19 nt, Artificial Sequence
  Description of Artificial Sequence: Synthetic oligonucleotide
cccucgggcuggccccaac

SEQ ID NO: 2068245 - RNA, 19 nt, Artificial Sequence
  Description of Artificial Sequence: Synthetic oligonucleotide
cgggaccggcgacgguggg

SEQ ID NO: 2068246 - RNA, 19 nt, Artificial Sequence
  Description of Artificial Sequence: Synthetic oligonucleotide
ggcgguugggucgcagguu

SEQ ID NO: 2068247 - RNA, 19 nt, Artificial Sequence
  Description of Artificial Sequence: Synthetic oligonucleotide
ccucuagccugggcuugga

SEQ ID NO: 2068248 - RNA, 19 nt, Artificial Sequence
  Description of Artificial Sequence: Synthetic oligonucleotide
cgcggcacucggggcacgc

SEQ ID NO: 2068249 - RNA, 19 nt, Artificial Sequence
  Description of Artificial Sequence: Synthetic oligonucleotide
gggcacgcguaugggcccu

SEQ ID NO: 2068250 - RNA, 19 nt, Artificial Sequence
  Description of Artificial Sequence: Synthetic oligonucleotide
cgcuuaggagggucccgua

SEQ ID NO: 2068251 - RNA, 19 nt, Artificial Sequence
  Description of Artificial Sequence: Synthetic oligonucleotide
cgagcgcucgcagguggga

SEQ ID NO: 2068252 - RNA, 19 nt, Artificial Sequence
  Description of Artificial Sequence: Synthetic oligonucleotide
cugcgggaccggcgacggu

SEQ ID NO: 2068253 - RNA, 19 nt, Artificial Sequence
  Description of Artificial Sequence: Synthetic oligonucleotide
gugcaggcgccgagccauu

SEQ ID NO: 2068254 - RNA, 19 nt, Artificial Sequence
  Description of Artificial Sequence: Synthetic oligonucleotide
gcggugcgccgcgcauaca

SEQ ID NO: 2068255 - RNA, 19 nt, Artificial Sequence
  Description of Artificial Sequence: Synthetic oligonucleotide
cgcguccugcagcggucgu

SEQ ID NO: 2068256 - RNA, 19 nt, Artificial Sequence
  Description of Artificial Sequence: Synthetic oligonucleotide
aauaacauugcaaaauucc

SEQ ID NO: 2068257 - RNA, 19 nt, Artificial Sequence
  Description of Artificial Sequence: Synthetic oligonucleotide
auuacaaucaauaacauug

SEQ ID NO: 2068258 - RNA, 19 nt, Artificial Sequence
  Description of Artificial Sequence: Synthetic oligonucleotide
uuuaauuaaagacuggagu

SEQ ID NO: 2068259 - RNA, 19 nt, Artificial Sequence
  Description of Artificial Sequence: Synthetic oligonucleotide
aacucuagaaaccuuuacg

SEQ ID NO: 2068260 - RNA, 19 nt, Artificial Sequence
  Description of Artificial Sequence: Synthetic oligonucleotide
cagugaauaguuuugaggg

SEQ ID NO: 2068261 - RNA, 19 nt, Artificial Sequence
  Description of Artificial Sequence: Synthetic oligonucleotide
ucgauuguaauuuucacca

SEQ ID NO: 2068262 - RNA, 19 nt, Artificial Sequence
  Description of Artificial Sequence: Synthetic oligonucleotide
aauuucggcuuuuccagcc

SEQ ID NO: 2068263 - RNA, 19 nt, Artificial Sequence
  Description of Artificial Sequence: Synthetic oligonucleotide
uauguauucacaacucuag

SEQ ID NO: 2068264 - RNA, 19 nt, Artificial Sequence
  Description of Artificial Sequence: Synthetic oligonucleotide
uuaauuaauggugaguugc

SEQ ID NO: 2068265 - RNA, 19 nt, Artificial Sequence
  Description of Artificial Sequence: Synthetic oligonucleotide
aaucgauuguaauuuucac

SEQ ID NO: 2068266 - RNA, 19 nt, Artificial Sequence
  Description of Artificial Sequence: Synthetic oligonucleotide
uuacgugacuuuuaaaucc

SEQ ID NO: 2068267 - RNA, 19 nt, Artificial Sequence
  Description of Artificial Sequence: Synthetic oligonucleotide
uuaauucucugauaaaugu

SEQ ID NO: 2068268 - RNA, 19 nt, Artificial Sequence
  Description of Artificial Sequence: Synthetic oligonucleotide
aauuccuucgggucuaguc

SEQ ID NO: 2068269 - RNA, 19 nt, Artificial Sequence
  Description of Artificial Sequence: Synthetic oligonucleotide
ucuagaaaccuuuacguga

SEQ ID NO: 2068270 - RNA, 19 nt, Artificial Sequence
  Description of Artificial Sequence: Synthetic oligonucleotide
uuauuugaacuacuucugg

SEQ ID NO: 2068271 - RNA, 19 nt, Artificial Sequence
  Description of Artificial Sequence: Synthetic oligonucleotide
ucaauuucggcuuuuccag

SEQ ID NO: 2068272 - RNA, 19 nt, Artificial Sequence
  Description of Artificial Sequence: Synthetic oligonucleotide
cuugauuacaaucaauaac

SEQ ID NO: 2068273 - RNA, 19 nt, Artificial Sequence
  Description of Artificial Sequence: Synthetic oligonucleotide
uuaauuaaagacuggaguu

SEQ ID NO: 2068274 - RNA, 19 nt, Artificial Sequence
  Description of Artificial Sequence: Synthetic oligonucleotide
uccauauguauucacaacu

SEQ ID NO: 2068275 - RNA, 19 nt, Artificial Sequence
  Description of Artificial Sequence: Synthetic oligonucleotide
ugucuuaucucuucaacag

SEQ ID NO: 2068276 - RNA, 19 nt, Artificial Sequence
  Description of Artificial Sequence: Synthetic oligonucleotide
auaacauugcaaaauuccc

SEQ ID NO: 2068277 - RNA, 19 nt, Artificial Sequence
  Description of Artificial Sequence: Synthetic oligonucleotide
ucuuaucucuucaacagca

SEQ ID NO: 2068278 - RNA, 19 nt, Artificial Sequence
  Description of Artificial Sequence: Synthetic oligonucleotide
cagauugaaaauauucagg

SEQ ID NO: 2068279 - RNA, 19 nt, Artificial Sequence
  Description of Artificial Sequence: Synthetic oligonucleotide
aacgaaagagcucgcagag

SEQ ID NO: 2068280 - RNA, 19 nt, Artificial Sequence
  Description of Artificial Sequence: Synthetic oligonucleotide
uagucugugguccauaugu

SEQ ID NO: 2068281 - RNA, 19 nt, Artificial Sequence
  Description of Artificial Sequence: Synthetic oligonucleotide
ucacaucuaagucacagac

SEQ ID NO: 2068282 - RNA, 19 nt, Artificial Sequence
  Description of Artificial Sequence: Synthetic oligonucleotide
ugagcuuuccuucaucuug

SEQ ID NO: 2068283 - RNA, 19 nt, Artificial Sequence
  Description of Artificial Sequence: Synthetic oligonucleotide
ugcacaacuauuuucuuga

SEQ ID NO: 2068284 - RNA, 19 nt, Artificial Sequence
  Description of Artificial Sequence: Synthetic oligonucleotide
cuuuaauuaaagacuggag

SEQ ID NO: 2068285 - RNA, 19 nt, Artificial Sequence
  Description of Artificial Sequence: Synthetic oligonucleotide
aaauucacagauugaaaau

SEQ ID NO: 2068286 - RNA, 19 nt, Artificial Sequence
  Description of Artificial Sequence: Synthetic oligonucleotide
uaaggagcaaugcaggcug

SEQ ID NO: 2068287 - RNA, 19 nt, Artificial Sequence
  Description of Artificial Sequence: Synthetic oligonucleotide
gauugaaaauauucaggag

SEQ ID NO: 2068288 - RNA, 19 nt, Artificial Sequence
  Description of Artificial Sequence: Synthetic oligonucleotide
uucaagugcuguaaggagc

SEQ ID NO: 2068289 - RNA, 19 nt, Artificial Sequence
  Description of Artificial Sequence: Synthetic oligonucleotide
acucuagaaaccuuuacgu

SEQ ID NO: 2068290 - RNA, 19 nt, Artificial Sequence
  Description of Artificial Sequence: Synthetic oligonucleotide
auugcaaaauucccugacg

SEQ ID NO: 2068291 - RNA, 19 nt, Artificial Sequence
  Description of Artificial Sequence: Synthetic oligonucleotide
uguaaauacaaaacguguu

SEQ ID NO: 2068292 - RNA, 19 nt, Artificial Sequence
  Description of Artificial Sequence: Synthetic oligonucleotide
auacaaaacguguuguuca

SEQ ID NO: 2068293 - RNA, 19 nt, Artificial Sequence
  Description of Artificial Sequence: Synthetic oligonucleotide
ugugcagggaacgaaagag

SEQ ID NO: 2068294 - RNA, 19 nt, Artificial Sequence
  Description of Artificial Sequence: Synthetic oligonucleotide
uaacauugcaaaauucccu

SEQ ID NO: 2068295 - RNA, 19 nt, Artificial Sequence
  Description of Artificial Sequence: Synthetic oligonucleotide
ugauaaaugucucuuggua

SEQ ID NO: 2068296 - RNA, 19 nt, Artificial Sequence
  Description of Artificial Sequence: Synthetic oligonucleotide
ugucucuugguacugggcc

SEQ ID NO: 2068297 - RNA, 19 nt, Artificial Sequence
  Description of Artificial Sequence: Synthetic oligonucleotide
auaaaugucucuugguacu

SEQ ID NO: 2068298 - RNA, 19 nt, Artificial Sequence
  Description of Artificial Sequence: Synthetic oligonucleotide
uccaggauaaggaguaaag

SEQ ID NO: 2068299 - RNA, 19 nt, Artificial Sequence
  Description of Artificial Sequence: Synthetic oligonucleotide
uuuacgugacuuuuaaauc

SEQ ID NO: 2068300 - RNA, 19 nt, Artificial Sequence
  Description of Artificial Sequence: Synthetic oligonucleotide
aaaugcagauauucuucuc

SEQ ID NO: 2068301 - RNA, 19 nt, Artificial Sequence
  Description of Artificial Sequence: Synthetic oligonucleotide
uguauucacaacucuagaa

SEQ ID NO: 2068302 - RNA, 19 nt, Artificial Sequence
  Description of Artificial Sequence: Synthetic oligonucleotide
acagucucgaagcaugccg

SEQ ID NO: 2068303 - RNA, 19 nt, Artificial Sequence
  Description of Artificial Sequence: Synthetic oligonucleotide
aaggaguaaagacggcauc

SEQ ID NO: 2068304 - RNA, 19 nt, Artificial Sequence
  Description of Artificial Sequence: Synthetic oligonucleotide
uauuugaacuacuucugga

SEQ ID NO: 2068305 - RNA, 19 nt, Artificial Sequence
  Description of Artificial Sequence: Synthetic oligonucleotide
aggauuuuaucuucaagcu

SEQ ID NO: 2068306 - RNA, 19 nt, Artificial Sequence
  Description of Artificial Sequence: Synthetic oligonucleotide
uugcaaaauucccugacgu

SEQ ID NO: 2068307 - RNA, 19 nt, Artificial Sequence
  Description of Artificial Sequence: Synthetic oligonucleotide
ucuggaucaaauuggauuu

SEQ ID NO: 2068308 - RNA, 19 nt, Artificial Sequence
  Description of Artificial Sequence: Synthetic oligonucleotide
guugccacagucucgaagc

SEQ ID NO: 2068309 - RNA, 19 nt, Artificial Sequence
  Description of Artificial Sequence: Synthetic oligonucleotide
guaaagacggcaucagucc

SEQ ID NO: 2068310 - RNA, 19 nt, Artificial Sequence
  Description of Artificial Sequence: Synthetic oligonucleotide
agugaauaguuuugagggg

SEQ ID NO: 2068311 - RNA, 19 nt, Artificial Sequence
  Description of Artificial Sequence: Synthetic oligonucleotide
uucuggaucaaauuggauu

SEQ ID NO: 2068312 - RNA, 19 nt, Artificial Sequence
  Description of Artificial Sequence: Synthetic oligonucleotide
uaaaugcagauauucuucu

SEQ ID NO: 2068313 - RNA, 19 nt, Artificial Sequence
  Description of Artificial Sequence: Synthetic oligonucleotide
auucacaacucuagaaacc

SEQ ID NO: 2068314 - RNA, 19 nt, Artificial Sequence
  Description of Artificial Sequence: Synthetic oligonucleotide
uuguucaagugcuguaagg

SEQ ID NO: 2068315 - RNA, 19 nt, Artificial Sequence
  Description of Artificial Sequence: Synthetic oligonucleotide
ugaauucucuuuaauuaaa

SEQ ID NO: 2068316 - RNA, 19 nt, Artificial Sequence
  Description of Artificial Sequence: Synthetic oligonucleotide
gauuguaauuuucaccaca

SEQ ID NO: 2068317 - RNA, 19 nt, Artificial Sequence
  Description of Artificial Sequence: Synthetic oligonucleotide
agcagggaucguuugaggg

SEQ ID NO: 2068318 - RNA, 19 nt, Artificial Sequence
  Description of Artificial Sequence: Synthetic oligonucleotide
ggauaaggaguaaagacgg

SEQ ID NO: 2068319 - RNA, 19 nt, Artificial Sequence
  Description of Artificial Sequence: Synthetic oligonucleotide
aguuaauuaauggugaguu

SEQ ID NO: 2068320 - RNA, 19 nt, Artificial Sequence
  Description of Artificial Sequence: Synthetic oligonucleotide
uuugaacuacuucuggauc

SEQ ID NO: 2068321 - RNA, 19 nt, Artificial Sequence
  Description of Artificial Sequence: Synthetic oligonucleotide
uguucaagugcuguaagga

SEQ ID NO: 2068322 - RNA, 19 nt, Artificial Sequence
  Description of Artificial Sequence: Synthetic oligonucleotide
uccaauucaaggauuuuau

SEQ ID NO: 2068323 - RNA, 19 nt, Artificial Sequence
  Description of Artificial Sequence: Synthetic oligonucleotide
aauucccugacguuguuuu

SEQ ID NO: 2068324 - RNA, 19 nt, Artificial Sequence
  Description of Artificial Sequence: Synthetic oligonucleotide
ucucgaagcaugccgguag

SEQ ID NO: 2068325 - RNA, 19 nt, Artificial Sequence
  Description of Artificial Sequence: Synthetic oligonucleotide
aguugaauucucuuuaauu

SEQ ID NO: 2068326 - RNA, 19 nt, Artificial Sequence
  Description of Artificial Sequence: Synthetic oligonucleotide
ucugucuuaucucuucaac

SEQ ID NO: 2068327 - RNA, 19 nt, Artificial Sequence
  Description of Artificial Sequence: Synthetic oligonucleotide
ugacuuuuaaauccaggau

SEQ ID NO: 2068328 - RNA, 19 nt, Artificial Sequence
  Description of Artificial Sequence: Synthetic oligonucleotide
gugacuuuuaaauccagga

SEQ ID NO: 2068329 - RNA, 19 nt, Artificial Sequence
  Description of Artificial Sequence: Synthetic oligonucleotide
ugcagggaacgaaagagcu

SEQ ID NO: 2068330 - RNA, 19 nt, Artificial Sequence
  Description of Artificial Sequence: Synthetic oligonucleotide
aucaauaacauugcaaaau

SEQ ID NO: 2068331 - RNA, 19 nt, Artificial Sequence
  Description of Artificial Sequence: Synthetic oligonucleotide
ugaguugccacagaaucug

SEQ ID NO: 2068332 - RNA, 19 nt, Artificial Sequence
  Description of Artificial Sequence: Synthetic oligonucleotide
acaccuucgcagcagcccc

SEQ ID NO: 2068333 - RNA, 19 nt, Artificial Sequence
  Description of Artificial Sequence: Synthetic oligonucleotide
caccacaucaucucugagg

SEQ ID NO: 2068334 - RNA, 19 nt, Artificial Sequence
  Description of Artificial Sequence: Synthetic oligonucleotide
uuaucucuucaacagcagu

SEQ ID NO: 2068335 - RNA, 19 nt, Artificial Sequence
  Description of Artificial Sequence: Synthetic oligonucleotide
uucacaacucuagaaaccu

SEQ ID NO: 2068336 - RNA, 19 nt, Artificial Sequence
  Description of Artificial Sequence: Synthetic oligonucleotide
ugcuguaaggagcaaugca

SEQ ID NO: 2068337 - RNA, 19 nt, Artificial Sequence
  Description of Artificial Sequence: Synthetic oligonucleotide
ucuuuucccagagaaauuc

SEQ ID NO: 2068338 - RNA, 19 nt, Artificial Sequence
  Description of Artificial Sequence: Synthetic oligonucleotide
ugugaccugacccuggaau

SEQ ID NO: 2068339 - RNA, 19 nt, Artificial Sequence
  Description of Artificial Sequence: Synthetic oligonucleotide
augccgguagguuugugac

SEQ ID NO: 2068340 - RNA, 19 nt, Artificial Sequence
  Description of Artificial Sequence: Synthetic oligonucleotide
aaguuaauuaauggugagu

SEQ ID NO: 2068341 - RNA, 19 nt, Artificial Sequence
  Description of Artificial Sequence: Synthetic oligonucleotide
uugcacaacuauuuucuug

SEQ ID NO: 2068342 - RNA, 19 nt, Artificial Sequence
  Description of Artificial Sequence: Synthetic oligonucleotide
uuucaccacaucaucucug

SEQ ID NO: 2068343 - RNA, 19 nt, Artificial Sequence
  Description of Artificial Sequence: Synthetic oligonucleotide
cucaauuucggcuuuucca

SEQ ID NO: 2068344 - RNA, 19 nt, Artificial Sequence
  Description of Artificial Sequence: Synthetic oligonucleotide
acggcaucaguccuugcac

SEQ ID NO: 2068345 - RNA, 19 nt, Artificial Sequence
  Description of Artificial Sequence: Synthetic oligonucleotide
ugguccauauguauucaca

SEQ ID NO: 2068346 - RNA, 19 nt, Artificial Sequence
  Description of Artificial Sequence: Synthetic oligonucleotide
gaaaauauucaggagagau

SEQ ID NO: 2068347 - RNA, 19 nt, Artificial Sequence
  Description of Artificial Sequence: Synthetic oligonucleotide
aauuaauggugaguugcca

SEQ ID NO: 2068348 - RNA, 19 nt, Artificial Sequence
  Description of Artificial Sequence: Synthetic oligonucleotide
aaauccaggauaaggagua

SEQ ID NO: 2068349 - RNA, 19 nt, Artificial Sequence
  Description of Artificial Sequence: Synthetic oligonucleotide
auaaggaguaaagacggca

SEQ ID NO: 2068350 - RNA, 19 nt, Artificial Sequence
  Description of Artificial Sequence: Synthetic oligonucleotide
uuugagggcacugauuuuc

SEQ ID NO: 2068351 - RNA, 19 nt, Artificial Sequence
  Description of Artificial Sequence: Synthetic oligonucleotide
gaacgaaagagcucgcaga

SEQ ID NO: 2068352 - RNA, 19 nt, Artificial Sequence
  Description of Artificial Sequence: Synthetic oligonucleotide
ucgcagagcaccucgcggg

SEQ ID NO: 2068353 - RNA, 19 nt, Artificial Sequence
  Description of Artificial Sequence: Synthetic oligonucleotide
uaaagacggcaucaguccu

SEQ ID NO: 2068354 - RNA, 19 nt, Artificial Sequence
  Description of Artificial Sequence: Synthetic oligonucleotide
cuuuacgugacuuuuaaau

SEQ ID NO: 2068355 - RNA, 19 nt, Artificial Sequence
  Description of Artificial Sequence: Synthetic oligonucleotide
cucuagaaaccuuuacgug

SEQ ID NO: 2068356 - RNA, 19 nt, Artificial Sequence
  Description of Artificial Sequence: Synthetic oligonucleotide
augacaccuucgcagcagc

SEQ ID NO: 2068357 - RNA, 19 nt, Artificial Sequence
  Description of Artificial Sequence: Synthetic oligonucleotide
ucagccagugaauaguuuu

SEQ ID NO: 2068358 - RNA, 19 nt, Artificial Sequence
  Description of Artificial Sequence: Synthetic oligonucleotide
uccagccuuuauuugaacu

SEQ ID NO: 2068359 - RNA, 19 nt, Artificial Sequence
  Description of Artificial Sequence: Synthetic oligonucleotide
acuuuuaaauccaggauaa

SEQ ID NO: 2068360 - RNA, 19 nt, Artificial Sequence
  Description of Artificial Sequence: Synthetic oligonucleotide
ccagugaauaguuuugagg

SEQ ID NO: 2068361 - RNA, 19 nt, Artificial Sequence
  Description of Artificial Sequence: Synthetic oligonucleotide
cauugcaaaauucccugac

SEQ ID NO: 2068362 - RNA, 19 nt, Artificial Sequence
  Description of Artificial Sequence: Synthetic oligonucleotide
uucauugauuucagucuug

SEQ ID NO: 2068363 - RNA, 19 nt, Artificial Sequence
  Description of Artificial Sequence: Synthetic oligonucleotide
uaauuaaagacuggaguuu

SEQ ID NO: 2068364 - RNA, 19 nt, Artificial Sequence
  Description of Artificial Sequence: Synthetic oligonucleotide
caagugggccucaauauuc

SEQ ID NO: 2068365 - RNA, 19 nt, Artificial Sequence
  Description of Artificial Sequence: Synthetic oligonucleotide
guuguucaagugcuguaag

SEQ ID NO: 2068366 - RNA, 19 nt, Artificial Sequence
  Description of Artificial Sequence: Synthetic oligonucleotide
cuggauuuucugagcaggg

SEQ ID NO: 2068367 - RNA, 19 nt, Artificial Sequence
  Description of Artificial Sequence: Synthetic oligonucleotide
ggugaguugccacagaauc

SEQ ID NO: 2068368 - RNA, 19 nt, Artificial Sequence
  Description of Artificial Sequence: Synthetic oligonucleotide
acguuguuuucauugauuu

SEQ ID NO: 2068369 - RNA, 19 nt, Artificial Sequence
  Description of Artificial Sequence: Synthetic oligonucleotide
cuuaucucuucaacagcag

SEQ ID NO: 2068370 - RNA, 19 nt, Artificial Sequence
  Description of Artificial Sequence: Synthetic oligonucleotide
ugagcagggaucguuugag

SEQ ID NO: 2068371 - RNA, 19 nt, Artificial Sequence
  Description of Artificial Sequence: Synthetic oligonucleotide
uuccaaucgauuguaauuu

SEQ ID NO: 2068372 - RNA, 19 nt, Artificial Sequence
  Description of Artificial Sequence: Synthetic oligonucleotide
ucugaagccuguuccaauc

SEQ ID NO: 2068373 - RNA, 19 nt, Artificial Sequence
  Description of Artificial Sequence: Synthetic oligonucleotide
ugggccucaauauucugga

SEQ ID NO: 2068374 - RNA, 19 nt, Artificial Sequence
  Description of Artificial Sequence: Synthetic oligonucleotide
aauuggauuuguugucuuu

SEQ ID NO: 2068375 - RNA, 19 nt, Artificial Sequence
  Description of Artificial Sequence: Synthetic oligonucleotide
uguuccaaucgauuguaau

SEQ ID NO: 2068376 - RNA, 19 nt, Artificial Sequence
  Description of Artificial Sequence: Synthetic oligonucleotide
ucuaagucacagacuuuga

SEQ ID NO: 2068377 - RNA, 19 nt, Artificial Sequence
  Description of Artificial Sequence: Synthetic oligonucleotide
acaaucaauaacauugcaa

SEQ ID NO: 2068378 - RNA, 19 nt, Artificial Sequence
  Description of Artificial Sequence: Synthetic oligonucleotide
agccuguuccaaucgauug

SEQ ID NO: 2068379 - RNA, 19 nt, Artificial Sequence
  Description of Artificial Sequence: Synthetic oligonucleotide
ucugugguccauauguauu

SEQ ID NO: 2068380 - RNA, 19 nt, Artificial Sequence
  Description of Artificial Sequence: Synthetic oligonucleotide
agcaguugaauucucuuua

SEQ ID NO: 2068381 - RNA, 19 nt, Artificial Sequence
  Description of Artificial Sequence: Synthetic oligonucleotide
ugucugucuuaucucuuca

SEQ ID NO: 2068382 - RNA, 19 nt, Artificial Sequence
  Description of Artificial Sequence: Synthetic oligonucleotide
aaauuggauuuguugucuu

SEQ ID NO: 2068383 - RNA, 19 nt, Artificial Sequence
  Description of Artificial Sequence: Synthetic oligonucleotide
ucucuucaacagcaguuga

SEQ ID NO: 2068384 - RNA, 19 nt, Artificial Sequence
  Description of Artificial Sequence: Synthetic oligonucleotide
auguauucacaacucuaga

SEQ ID NO: 2068385 - RNA, 19 nt, Artificial Sequence
  Description of Artificial Sequence: Synthetic oligonucleotide
ugagaggcucugaagccug

SEQ ID NO: 2068386 - RNA, 19 nt, Artificial Sequence
  Description of Artificial Sequence: Synthetic oligonucleotide
ugaagccuguuccaaucga

SEQ ID NO: 2068387 - RNA, 19 nt, Artificial Sequence
  Description of Artificial Sequence: Synthetic oligonucleotide
uaauggugaguugccacag

SEQ ID NO: 2068388 - RNA, 19 nt, Artificial Sequence
  Description of Artificial Sequence: Synthetic oligonucleotide
gcuguaaauacaaaacgug

SEQ ID NO: 2068389 - RNA, 19 nt, Artificial Sequence
  Description of Artificial Sequence: Synthetic oligonucleotide
aaaccuuuacgugacuuuu

SEQ ID NO: 2068390 - RNA, 19 nt, Artificial Sequence
  Description of Artificial Sequence: Synthetic oligonucleotide
uguuguucaagugcuguaa

SEQ ID NO: 2068391 - RNA, 19 nt, Artificial Sequence
  Description of Artificial Sequence: Synthetic oligonucleotide
ucauugauuucagucuugu

SEQ ID NO: 2068392 - RNA, 19 nt, Artificial Sequence
  Description of Artificial Sequence: Synthetic oligonucleotide
uuugugaccugacccugga

SEQ ID NO: 2068393 - RNA, 19 nt, Artificial Sequence
  Description of Artificial Sequence: Synthetic oligonucleotide
uacaaaacguguuguucaa

SEQ ID NO: 2068394 - RNA, 19 nt, Artificial Sequence
  Description of Artificial Sequence: Synthetic oligonucleotide
agugcuguaaggagcaaug

SEQ ID NO: 2068395 - RNA, 19 nt, Artificial Sequence
  Description of Artificial Sequence: Synthetic oligonucleotide
cugucuuaucucuucaaca

SEQ ID NO: 2068396 - RNA, 19 nt, Artificial Sequence
  Description of Artificial Sequence: Synthetic oligonucleotide
ucaaggauuuuaucuucaa

SEQ ID NO: 2068397 - RNA, 19 nt, Artificial Sequence
  Description of Artificial Sequence: Synthetic oligonucleotide
cugaagccuguuccaaucg

SEQ ID NO: 2068398 - RNA, 19 nt, Artificial Sequence
  Description of Artificial Sequence: Synthetic oligonucleotide
ccugacguuguuuucauug

SEQ ID NO: 2068399 - RNA, 19 nt, Artificial Sequence
  Description of Artificial Sequence: Synthetic oligonucleotide
cugagguuaagcugcccag

SEQ ID NO: 2068400 - RNA, 19 nt, Artificial Sequence
  Description of Artificial Sequence: Synthetic oligonucleotide
gagggcacugauuuucuca

SEQ ID NO: 2068401 - RNA, 19 nt, Artificial Sequence
  Description of Artificial Sequence: Synthetic oligonucleotide
uaaaugucucuugguacug

SEQ ID NO: 2068402 - RNA, 19 nt, Artificial Sequence
  Description of Artificial Sequence: Synthetic oligonucleotide
gcaaaauucccugacguug

SEQ ID NO: 2068403 - RNA, 19 nt, Artificial Sequence
  Description of Artificial Sequence: Synthetic oligonucleotide
auucuucucucaauuucgg

SEQ ID NO: 2068404 - RNA, 19 nt, Artificial Sequence
  Description of Artificial Sequence: Synthetic oligonucleotide
aauggugaguugccacaga

SEQ ID NO: 2068405 - RNA, 19 nt, Artificial Sequence
  Description of Artificial Sequence: Synthetic oligonucleotide
cuguaaauacaaaacgugu

SEQ ID NO: 2068406 - RNA, 19 nt, Artificial Sequence
  Description of Artificial Sequence: Synthetic oligonucleotide
aggaguaaagacggcauca

SEQ ID NO: 2068407 - RNA, 19 nt, Artificial Sequence
  Description of Artificial Sequence: Synthetic oligonucleotide
gaugcugagaggcucugaa

SEQ ID NO: 2068408 - RNA, 19 nt, Artificial Sequence
  Description of Artificial Sequence: Synthetic oligonucleotide
ucgcaagugggccucaaua

SEQ ID NO: 2068409 - RNA, 19 nt, Artificial Sequence
  Description of Artificial Sequence: Synthetic oligonucleotide
caauuucggcuuuuccagc

SEQ ID NO: 2068410 - RNA, 19 nt, Artificial Sequence
  Description of Artificial Sequence: Synthetic oligonucleotide
uuguaauuuucaccacauc

SEQ ID NO: 2068411 - RNA, 19 nt, Artificial Sequence
  Description of Artificial Sequence: Synthetic oligonucleotide
gacggcaucaguccuugca

SEQ ID NO: 2068412 - RNA, 19 nt, Artificial Sequence
  Description of Artificial Sequence: Synthetic oligonucleotide
ucaguccuugcacaacuau

SEQ ID NO: 2068413 - RNA, 19 nt, Artificial Sequence
  Description of Artificial Sequence: Synthetic oligonucleotide
acauugcaaaauucccuga

SEQ ID NO: 2068414 - RNA, 19 nt, Artificial Sequence
  Description of Artificial Sequence: Synthetic oligonucleotide
gauaaggaguaaagacggc

SEQ ID NO: 2068415 - RNA, 19 nt, Artificial Sequence
  Description of Artificial Sequence: Synthetic oligonucleotide
accuuuacgugacuuuuaa

SEQ ID NO: 2068416 - RNA, 19 nt, Artificial Sequence
  Description of Artificial Sequence: Synthetic oligonucleotide
cuugguacugggccacccg

SEQ ID NO: 2068417 - RNA, 19 nt, Artificial Sequence
  Description of Artificial Sequence: Synthetic oligonucleotide
uccaguucagccagugaau

SEQ ID NO: 2068418 - RNA, 19 nt, Artificial Sequence
  Description of Artificial Sequence: Synthetic oligonucleotide
aagacggcaucaguccuug

SEQ ID NO: 2068419 - RNA, 19 nt, Artificial Sequence
  Description of Artificial Sequence: Synthetic oligonucleotide
ugacguuguuuucauugau

SEQ ID NO: 2068420 - RNA, 19 nt, Artificial Sequence
  Description of Artificial Sequence: Synthetic oligonucleotide
uggaucaaauuggauuugu

SEQ ID NO: 2068421 - RNA, 19 nt, Artificial Sequence
  Description of Artificial Sequence: Synthetic oligonucleotide
aacagcaguugaauucucu

SEQ ID NO: 2068422 - RNA, 19 nt, Artificial Sequence
  Description of Artificial Sequence: Synthetic oligonucleotide
auggugaguugccacagaa

SEQ ID NO: 2068423 - RNA, 19 nt, Artificial Sequence
  Description of Artificial Sequence: Synthetic oligonucleotide
uugguacugggccacccgu

SEQ ID NO: 2068424 - RNA, 19 nt, Artificial Sequence
  Description of Artificial Sequence: Synthetic oligonucleotide
ugcccuccaauucaaggau

SEQ ID NO: 2068425 - RNA, 19 nt, Artificial Sequence
  Description of Artificial Sequence: Synthetic oligonucleotide
ugcaaucgcaagugggccu

SEQ ID NO: 2068426 - RNA, 19 nt, Artificial Sequence
  Description of Artificial Sequence: Synthetic oligonucleotide
uucccugacguuguuuuca

SEQ ID NO: 2068427 - RNA, 19 nt, Artificial Sequence
  Description of Artificial Sequence: Synthetic oligonucleotide
auauguauucacaacucua

SEQ ID NO: 2068428 - RNA, 19 nt, Artificial Sequence
  Description of Artificial Sequence: Synthetic oligonucleotide
caccucgcgggugagaagg

SEQ ID NO: 2068429 - RNA, 19 nt, Artificial Sequence
  Description of Artificial Sequence: Synthetic oligonucleotide
uggagucguucuuccacag

SEQ ID NO: 2068430 - RNA, 19 nt, Artificial Sequence
  Description of Artificial Sequence: Synthetic oligonucleotide
ggauguuuagcauugaguu

SEQ ID NO: 2068431 - RNA, 19 nt, Artificial Sequence
  Description of Artificial Sequence: Synthetic oligonucleotide
cuucgggucuagucugugg

SEQ ID NO: 2068432 - RNA, 19 nt, Artificial Sequence
  Description of Artificial Sequence: Synthetic oligonucleotide
ggagcuucgcuccagguuc

SEQ ID NO: 2068433 - RNA, 19 nt, Artificial Sequence
  Description of Artificial Sequence: Synthetic oligonucleotide
uucaggagagaugcccucc

SEQ ID NO: 2068434 - RNA, 19 nt, Artificial Sequence
  Description of Artificial Sequence: Synthetic oligonucleotide
acgaaagagcucgcagagc

SEQ ID NO: 2068435 - RNA, 19 nt, Artificial Sequence
  Description of Artificial Sequence: Synthetic oligonucleotide
cucgcagagcaccucgcgg

SEQ ID NO: 2068436 - RNA, 19 nt, Artificial Sequence
  Description of Artificial Sequence: Synthetic oligonucleotide
cagccagugaauaguuuug

SEQ ID NO: 2068437 - RNA, 19 nt, Artificial Sequence
  Description of Artificial Sequence: Synthetic oligonucleotide
aagcaugccgguagguuug

SEQ ID NO: 2068438 - RNA, 19 nt, Artificial Sequence
  Description of Artificial Sequence: Synthetic oligonucleotide
caguucagccagugaauag

SEQ ID NO: 2068439 - RNA, 19 nt, Artificial Sequence
  Description of Artificial Sequence: Synthetic oligonucleotide
uuuucucauccaguucagc

SEQ ID NO: 2068440 - RNA, 19 nt, Artificial Sequence
  Description of Artificial Sequence: Synthetic oligonucleotide
gauuacaaucaauaacauu

SEQ ID NO: 2068441 - RNA, 19 nt, Artificial Sequence
  Description of Artificial Sequence: Synthetic oligonucleotide
cuuuuaaauccaggauaag

SEQ ID NO: 2068442 - RNA, 19 nt, Artificial Sequence
  Description of Artificial Sequence: Synthetic oligonucleotide
caaaacguguuguucaagu

SEQ ID NO: 2068443 - RNA, 19 nt, Artificial Sequence
  Description of Artificial Sequence: Synthetic oligonucleotide
gucguucuuccacagccug

SEQ ID NO: 2068444 - RNA, 19 nt, Artificial Sequence
  Description of Artificial Sequence: Synthetic oligonucleotide
acuucuggaucaaauugga

SEQ ID NO: 2068445 - RNA, 19 nt, Artificial Sequence
  Description of Artificial Sequence: Synthetic oligonucleotide
cugucugucuuaucucuuc

SEQ ID NO: 2068446 - RNA, 19 nt, Artificial Sequence
  Description of Artificial Sequence: Synthetic oligonucleotide
aguccuugcacaacuauuu

SEQ ID NO: 2068447 - RNA, 19 nt, Artificial Sequence
  Description of Artificial Sequence: Synthetic oligonucleotide
aucguuugagggcacugau

SEQ ID NO: 2068448 - RNA, 19 nt, Artificial Sequence
  Description of Artificial Sequence: Synthetic oligonucleotide
agguuaagcugcccaguca

SEQ ID NO: 2068449 - RNA, 19 nt, Artificial Sequence
  Description of Artificial Sequence: Synthetic oligonucleotide
cucgaagcaugccgguagg

SEQ ID NO: 2068450 - RNA, 19 nt, Artificial Sequence
  Description of Artificial Sequence: Synthetic oligonucleotide
ugagguuaagcugcccagu

SEQ ID NO: 2068451 - RNA, 19 nt, Artificial Sequence
  Description of Artificial Sequence: Synthetic oligonucleotide
aagugcuguaaggagcaau

SEQ ID NO: 2068452 - RNA, 19 nt, Artificial Sequence
  Description of Artificial Sequence: Synthetic oligonucleotide
aagugggccucaauauucu

SEQ ID NO: 2068453 - RNA, 19 nt, Artificial Sequence
  Description of Artificial Sequence: Synthetic oligonucleotide
cugcaaucgcaagugggcc

SEQ ID NO: 2068454 - RNA, 19 nt, Artificial Sequence
  Description of Artificial Sequence: Synthetic oligonucleotide
uggagcuucgcuccagguu

SEQ ID NO: 2068455 - RNA, 19 nt, Artificial Sequence
  Description of Artificial Sequence: Synthetic oligonucleotide
ccauauguauucacaacuc

SEQ ID NO: 2068456 - RNA, 19 nt, Artificial Sequence
  Description of Artificial Sequence: Synthetic oligonucleotide
guuugugaccugacccugg

SEQ ID NO: 2068457 - RNA, 19 nt, Artificial Sequence
  Description of Artificial Sequence: Synthetic oligonucleotide
ugcccagucagggugugca

SEQ ID NO: 2068458 - RNA, 19 nt, Artificial Sequence
  Description of Artificial Sequence: Synthetic oligonucleotide
ugggccacccgucugcaau

SEQ ID NO: 2068459 - RNA, 19 nt, Artificial Sequence
  Description of Artificial Sequence: Synthetic oligonucleotide
guuccaaucgauuguaauu

SEQ ID NO: 2068460 - RNA, 19 nt, Artificial Sequence
  Description of Artificial Sequence: Synthetic oligonucleotide
auuucggcuuuuccagccu

SEQ ID NO: 2068461 - RNA, 19 nt, Artificial Sequence
  Description of Artificial Sequence: Synthetic oligonucleotide
gguugccacagucucgaag

SEQ ID NO: 2068462 - RNA, 19 nt, Artificial Sequence
  Description of Artificial Sequence: Synthetic oligonucleotide
uggugaguugccacagaau

SEQ ID NO: 2068463 - RNA, 19 nt, Artificial Sequence
  Description of Artificial Sequence: Synthetic oligonucleotide
gaggcacugggcuccgcag

SEQ ID NO: 2068464 - RNA, 19 nt, Artificial Sequence
  Description of Artificial Sequence: Synthetic oligonucleotide
agaaaccuuuacgugacuu

SEQ ID NO: 2068465 - RNA, 19 nt, Artificial Sequence
  Description of Artificial Sequence: Synthetic oligonucleotide
caugacaccuucgcagcag

SEQ ID NO: 2068466 - RNA, 19 nt, Artificial Sequence
  Description of Artificial Sequence: Synthetic oligonucleotide
cauauguauucacaacucu

SEQ ID NO: 2068467 - RNA, 19 nt, Artificial Sequence
  Description of Artificial Sequence: Synthetic oligonucleotide
uccaaucgauuguaauuuu

SEQ ID NO: 2068468 - RNA, 19 nt, Artificial Sequence
  Description of Artificial Sequence: Synthetic oligonucleotide
ugccgguagguuugugacc

SEQ ID NO: 2068469 - RNA, 19 nt, Artificial Sequence
  Description of Artificial Sequence: Synthetic oligonucleotide
auauucuggagucguucuu

SEQ ID NO: 2068470 - RNA, 19 nt, Artificial Sequence
  Description of Artificial Sequence: Synthetic oligonucleotide
caugccgguagguuuguga

SEQ ID NO: 2068471 - RNA, 19 nt, Artificial Sequence
  Description of Artificial Sequence: Synthetic oligonucleotide
gcagggaucguuugagggc

SEQ ID NO: 2068472 - RNA, 19 nt, Artificial Sequence
  Description of Artificial Sequence: Synthetic oligonucleotide
gaggcucugaagccuguuc

SEQ ID NO: 2068473 - RNA, 19 nt, Artificial Sequence
  Description of Artificial Sequence: Synthetic oligonucleotide
ucucuugguacugggccac

SEQ ID NO: 2068474 - RNA, 19 nt, Artificial Sequence
  Description of Artificial Sequence: Synthetic oligonucleotide
gaucguuugagggcacuga

SEQ ID NO: 2068475 - RNA, 19 nt, Artificial Sequence
  Description of Artificial Sequence: Synthetic oligonucleotide
aaauucccugacguuguuu

SEQ ID NO: 2068476 - RNA, 19 nt, Artificial Sequence
  Description of Artificial Sequence: Synthetic oligonucleotide
gaaaccuuuacgugacuuu

SEQ ID NO: 2068477 - RNA, 19 nt, Artificial Sequence
  Description of Artificial Sequence: Synthetic oligonucleotide
ucguuugagggcacugauu

SEQ ID NO: 2068478 - RNA, 19 nt, Artificial Sequence
  Description of Artificial Sequence: Synthetic oligonucleotide
cccaaugggauguuuagca

SEQ ID NO: 2068479 - RNA, 19 nt, Artificial Sequence
  Description of Artificial Sequence: Synthetic oligonucleotide
agcauugaguucacucuug

SEQ ID NO: 2068480 - RNA, 19 nt, Artificial Sequence
  Description of Artificial Sequence: Synthetic oligonucleotide
ugaccugacccuggaauuc

SEQ ID NO: 2068481 - RNA, 19 nt, Artificial Sequence
  Description of Artificial Sequence: Synthetic oligonucleotide
caaaauucccugacguugu

SEQ ID NO: 2068482 - RNA, 19 nt, Artificial Sequence
  Description of Artificial Sequence: Synthetic oligonucleotide
cuagucugugguccauaug

SEQ ID NO: 2068483 - RNA, 19 nt, Artificial Sequence
  Description of Artificial Sequence: Synthetic oligonucleotide
uuucggcuuuuccagccuu

SEQ ID NO: 2068484 - RNA, 19 nt, Artificial Sequence
  Description of Artificial Sequence: Synthetic oligonucleotide
gccagugaauaguuuugag

SEQ ID NO: 2068485 - RNA, 19 nt, Artificial Sequence
  Description of Artificial Sequence: Synthetic oligonucleotide
aaagacggcaucaguccuu

SEQ ID NO: 2068486 - RNA, 19 nt, Artificial Sequence
  Description of Artificial Sequence: Synthetic oligonucleotide
ggcugggaugcugagaggc

SEQ ID NO: 2068487 - RNA, 19 nt, Artificial Sequence
  Description of Artificial Sequence: Synthetic oligonucleotide
agccagugaauaguuuuga

SEQ ID NO: 2068488 - RNA, 19 nt, Artificial Sequence
  Description of Artificial Sequence: Synthetic oligonucleotide
gccaugacaccuucgcagc

SEQ ID NO: 2068489 - RNA, 19 nt, Artificial Sequence
  Description of Artificial Sequence: Synthetic oligonucleotide
uucucucaauuucggcuuu

SEQ ID NO: 2068490 - RNA, 19 nt, Artificial Sequence
  Description of Artificial Sequence: Synthetic oligonucleotide
ccaaucgauuguaauuuuc

SEQ ID NO: 2068491 - RNA, 19 nt, Artificial Sequence
  Description of Artificial Sequence: Synthetic oligonucleotide
cuggagucguucuuccaca

SEQ ID NO: 2068492 - RNA, 19 nt, Artificial Sequence
  Description of Artificial Sequence: Synthetic oligonucleotide
uuccagccuuuauuugaac

SEQ ID NO: 2068493 - RNA, 19 nt, Artificial Sequence
  Description of Artificial Sequence: Synthetic oligonucleotide
cugauaaaugucucuuggu

SEQ ID NO: 2068494 - RNA, 19 nt, Artificial Sequence
  Description of Artificial Sequence: Synthetic oligonucleotide
cucucgcugcagcuugagg

SEQ ID NO: 2068495 - RNA, 19 nt, Artificial Sequence
  Description of Artificial Sequence: Synthetic oligonucleotide
gaguaaagacggcaucagu

SEQ ID NO: 2068496 - RNA, 19 nt, Artificial Sequence
  Description of Artificial Sequence: Synthetic oligonucleotide
cuccagguuccucucgcug

SEQ ID NO: 2068497 - RNA, 19 nt, Artificial Sequence
  Description of Artificial Sequence: Synthetic oligonucleotide
ugguacugggccacccguc

SEQ ID NO: 2068498 - RNA, 19 nt, Artificial Sequence
  Description of Artificial Sequence: Synthetic oligonucleotide
gugcuguaaggagcaaugc

SEQ ID NO: 2068499 - RNA, 19 nt, Artificial Sequence
  Description of Artificial Sequence: Synthetic oligonucleotide
ugagggcacugauuuucuc

SEQ ID NO: 2068500 - RNA, 19 nt, Artificial Sequence
  Description of Artificial Sequence: Synthetic oligonucleotide
agucacagacuuugagcuu

SEQ ID NO: 2068501 - RNA, 19 nt, Artificial Sequence
  Description of Artificial Sequence: Synthetic oligonucleotide
gugugcagggaacgaaaga

SEQ ID NO: 2068502 - RNA, 19 nt, Artificial Sequence
  Description of Artificial Sequence: Synthetic oligonucleotide
cucaauauucuggagucgu

SEQ ID NO: 2068503 - RNA, 19 nt, Artificial Sequence
  Description of Artificial Sequence: Synthetic oligonucleotide
uccuucgggucuagucugu

SEQ ID NO: 2068504 - RNA, 19 nt, Artificial Sequence
  Description of Artificial Sequence: Synthetic oligonucleotide
cuccaauucaaggauuuua

SEQ ID NO: 2068505 - RNA, 19 nt, Artificial Sequence
  Description of Artificial Sequence: Synthetic oligonucleotide
cacagucucgaagcaugcc

SEQ ID NO: 2068506 - RNA, 19 nt, Artificial Sequence
  Description of Artificial Sequence: Synthetic oligonucleotide
agacggcaucaguccuugc

SEQ ID NO: 2068507 - RNA, 19 nt, Artificial Sequence
  Description of Artificial Sequence: Synthetic oligonucleotide
caaauuggauuuguugucu

SEQ ID NO: 2068508 - RNA, 19 nt, Artificial Sequence
  Description of Artificial Sequence: Synthetic oligonucleotide
ucgggucuagucugugguc

SEQ ID NO: 2068509 - RNA, 19 nt, Artificial Sequence
  Description of Artificial Sequence: Synthetic oligonucleotide
ggcuguaaauacaaaacgu

SEQ ID NO: 2068510 - RNA, 19 nt, Artificial Sequence
  Description of Artificial Sequence: Synthetic oligonucleotide
acccgucugcaaucgcaag

SEQ ID NO: 2068511 - RNA, 19 nt, Artificial Sequence
  Description of Artificial Sequence: Synthetic oligonucleotide
aaccuuuacgugacuuuua

SEQ ID NO: 2068512 - RNA, 19 nt, Artificial Sequence
  Description of Artificial Sequence: Synthetic oligonucleotide
gagcaaugcaggcugggau

SEQ ID NO: 2068513 - RNA, 19 nt, Artificial Sequence
  Description of Artificial Sequence: Synthetic oligonucleotide
ggugugcagggaacgaaag

SEQ ID NO: 2068514 - RNA, 19 nt, Artificial Sequence
  Description of Artificial Sequence: Synthetic oligonucleotide
ucccugacguuguuuucau

SEQ ID NO: 2068515 - RNA, 19 nt, Artificial Sequence
  Description of Artificial Sequence: Synthetic oligonucleotide
cagggaucguuugagggca

SEQ ID NO: 2068516 - RNA, 19 nt, Artificial Sequence
  Description of Artificial Sequence: Synthetic oligonucleotide
cugguugccacagucucga

SEQ ID NO: 2068517 - RNA, 19 nt, Artificial Sequence
  Description of Artificial Sequence: Synthetic oligonucleotide
guaaggagcaaugcaggcu

SEQ ID NO: 2068518 - RNA, 19 nt, Artificial Sequence
  Description of Artificial Sequence: Synthetic oligonucleotide
uucggcuuuuccagccuuu

SEQ ID NO: 2068519 - RNA, 19 nt, Artificial Sequence
  Description of Artificial Sequence: Synthetic oligonucleotide
agggaacgaaagagcucgc

SEQ ID NO: 2068520 - RNA, 19 nt, Artificial Sequence
  Description of Artificial Sequence: Synthetic oligonucleotide
agcucgcagagcaccucgc

SEQ ID NO: 2068521 - RNA, 19 nt, Artificial Sequence
  Description of Artificial Sequence: Synthetic oligonucleotide
cugggaugcugagaggcuc

SEQ ID NO: 2068522 - RNA, 19 nt, Artificial Sequence
  Description of Artificial Sequence: Synthetic oligonucleotide
cacagccugguugccacag

SEQ ID NO: 2068523 - RNA, 19 nt, Artificial Sequence
  Description of Artificial Sequence: Synthetic oligonucleotide
ccuugcacaacuauuuucu

SEQ ID NO: 2068524 - RNA, 19 nt, Artificial Sequence
  Description of Artificial Sequence: Synthetic oligonucleotide
agcaccucgcgggugagaa

SEQ ID NO: 2068525 - RNA, 19 nt, Artificial Sequence
  Description of Artificial Sequence: Synthetic oligonucleotide
gcaaugcaggcugggaugc

SEQ ID NO: 2068526 - RNA, 19 nt, Artificial Sequence
  Description of Artificial Sequence: Synthetic oligonucleotide
cacaucuaagucacagacu

SEQ ID NO: 2068527 - RNA, 19 nt, Artificial Sequence
  Description of Artificial Sequence: Synthetic oligonucleotide
cugagcagggaucguuuga

SEQ ID NO: 2068528 - RNA, 19 nt, Artificial Sequence
  Description of Artificial Sequence: Synthetic oligonucleotide
agacuggaguuuugcuaaa

SEQ ID NO: 2068529 - RNA, 19 nt, Artificial Sequence
  Description of Artificial Sequence: Synthetic oligonucleotide
agcagccaugacaccuucg

SEQ ID NO: 2068530 - RNA, 19 nt, Artificial Sequence
  Description of Artificial Sequence: Synthetic oligonucleotide
ucgaagcaugccgguaggu

SEQ ID NO: 2068531 - RNA, 19 nt, Artificial Sequence
  Description of Artificial Sequence: Synthetic oligonucleotide
agucguucuuccacagccu

SEQ ID NO: 2068532 - RNA, 19 nt, Artificial Sequence
  Description of Artificial Sequence: Synthetic oligonucleotide
gcucgcagagcaccucgcg

SEQ ID NO: 2068533 - RNA, 19 nt, Artificial Sequence
  Description of Artificial Sequence: Synthetic oligonucleotide
gucagggugugcagggaac

SEQ ID NO: 2068534 - RNA, 19 nt, Artificial Sequence
  Description of Artificial Sequence: Synthetic oligonucleotide
gagaugcccuccaauucaa

SEQ ID NO: 2068535 - RNA, 19 nt, Artificial Sequence
  Description of Artificial Sequence: Synthetic oligonucleotide
gagcuucgcuccagguucc

SEQ ID NO: 2068536 - RNA, 19 nt, Artificial Sequence
  Description of Artificial Sequence: Synthetic oligonucleotide
aucgcaagugggccucaau

SEQ ID NO: 2068537 - RNA, 19 nt, Artificial Sequence
  Description of Artificial Sequence: Synthetic oligonucleotide
caucaucucugagguuaag

SEQ ID NO: 2068538 - RNA, 19 nt, Artificial Sequence
  Description of Artificial Sequence: Synthetic oligonucleotide
agaugcccuccaauucaag

SEQ ID NO: 2068539 - RNA, 19 nt, Artificial Sequence
  Description of Artificial Sequence: Synthetic oligonucleotide
cacagacuuugagcuuucc

SEQ ID NO: 2068540 - RNA, 19 nt, Artificial Sequence
  Description of Artificial Sequence: Synthetic oligonucleotide
ggauuuuaucuucaagcuu

SEQ ID NO: 2068541 - RNA, 19 nt, Artificial Sequence
  Description of Artificial Sequence: Synthetic oligonucleotide
cagauauucuucucucaau

SEQ ID NO: 2068542 - RNA, 19 nt, Artificial Sequence
  Description of Artificial Sequence: Synthetic oligonucleotide
ccucaauauucuggagucg

SEQ ID NO: 2068543 - RNA, 19 nt, Artificial Sequence
  Description of Artificial Sequence: Synthetic oligonucleotide
gugaguugccacagaaucu

SEQ ID NO: 2068544 - RNA, 19 nt, Artificial Sequence
  Description of Artificial Sequence: Synthetic oligonucleotide
gggauguuuagcauugagu

SEQ ID NO: 2068545 - RNA, 19 nt, Artificial Sequence
  Description of Artificial Sequence: Synthetic oligonucleotide
ucggcuuuuccagccuuua

SEQ ID NO: 2068546 - RNA, 19 nt, Artificial Sequence
  Description of Artificial Sequence: Synthetic oligonucleotide
ggagagaugcccuccaauu

SEQ ID NO: 2068547 - RNA, 19 nt, Artificial Sequence
  Description of Artificial Sequence: Synthetic oligonucleotide
aaucgcaagugggccucaa

SEQ ID NO: 2068548 - RNA, 19 nt, Artificial Sequence
  Description of Artificial Sequence: Synthetic oligonucleotide
gucacagacuuugagcuuu

SEQ ID NO: 2068549 - RNA, 19 nt, Artificial Sequence
  Description of Artificial Sequence: Synthetic oligonucleotide
ggaucguuugagggcacug

SEQ ID NO: 2068550 - RNA, 19 nt, Artificial Sequence
  Description of Artificial Sequence: Synthetic oligonucleotide
gguagguuugugaccugac

SEQ ID NO: 2068551 - RNA, 19 nt, Artificial Sequence
  Description of Artificial Sequence: Synthetic oligonucleotide
ggcaucaguccuugcacaa

SEQ ID NO: 2068552 - RNA, 19 nt, Artificial Sequence
  Description of Artificial Sequence: Synthetic oligonucleotide
ucgcugcagcuugaggcac

SEQ ID NO: 2068553 - RNA, 19 nt, Artificial Sequence
  Description of Artificial Sequence: Synthetic oligonucleotide
cguuguuuucauugauuuc

SEQ ID NO: 2068554 - RNA, 19 nt, Artificial Sequence
  Description of Artificial Sequence: Synthetic oligonucleotide
gcacugauuuucucaucca

SEQ ID NO: 2068555 - RNA, 19 nt, Artificial Sequence
  Description of Artificial Sequence: Synthetic oligonucleotide
cuguuccaaucgauuguaa

SEQ ID NO: 2068556 - RNA, 19 nt, Artificial Sequence
  Description of Artificial Sequence: Synthetic oligonucleotide
ccgucugcaaucgcaagug

SEQ ID NO: 2068557 - RNA, 19 nt, Artificial Sequence
  Description of Artificial Sequence: Synthetic oligonucleotide
agggaucguuugagggcac

SEQ ID NO: 2068558 - RNA, 19 nt, Artificial Sequence
  Description of Artificial Sequence: Synthetic oligonucleotide
gugaccugacccuggaauu

SEQ ID NO: 2068559 - RNA, 19 nt, Artificial Sequence
  Description of Artificial Sequence: Synthetic oligonucleotide
cacccgucugcaaucgcaa

SEQ ID NO: 2068560 - RNA, 19 nt, Artificial Sequence
  Description of Artificial Sequence: Synthetic oligonucleotide
acguguuguucaagugcug

SEQ ID NO: 2068561 - RNA, 19 nt, Artificial Sequence
  Description of Artificial Sequence: Synthetic oligonucleotide
cgauuguaauuuucaccac

SEQ ID NO: 2068562 - RNA, 19 nt, Artificial Sequence
  Description of Artificial Sequence: Synthetic oligonucleotide
gcagguccccaaugggaug

SEQ ID NO: 2068563 - RNA, 19 nt, Artificial Sequence
  Description of Artificial Sequence: Synthetic oligonucleotide
agagcaccucgcgggugag

SEQ ID NO: 2068564 - RNA, 19 nt, Artificial Sequence
  Description of Artificial Sequence: Synthetic oligonucleotide
gcaaucgcaagugggccuc

SEQ ID NO: 2068565 - RNA, 19 nt, Artificial Sequence
  Description of Artificial Sequence: Synthetic oligonucleotide
accucgcgggugagaaggg

SEQ ID NO: 2068566 - RNA, 19 nt, Artificial Sequence
  Description of Artificial Sequence: Synthetic oligonucleotide
caguccuugcacaacuauu

SEQ ID NO: 2068567 - RNA, 19 nt, Artificial Sequence
  Description of Artificial Sequence: Synthetic oligonucleotide
cgggucuagucuguggucc

SEQ ID NO: 2068568 - RNA, 19 nt, Artificial Sequence
  Description of Artificial Sequence: Synthetic oligonucleotide
gguacugggccacccgucu

SEQ ID NO: 2068569 - RNA, 19 nt, Artificial Sequence
  Description of Artificial Sequence: Synthetic oligonucleotide
cuugcacaacuauuuucuu

SEQ ID NO: 2068570 - RNA, 19 nt, Artificial Sequence
  Description of Artificial Sequence: Synthetic oligonucleotide
gggaacgaaagagcucgca

SEQ ID NO: 2068571 - RNA, 19 nt, Artificial Sequence
  Description of Artificial Sequence: Synthetic oligonucleotide
gcaucaguccuugcacaac

SEQ ID NO: 2068572 - RNA, 19 nt, Artificial Sequence
  Description of Artificial Sequence: Synthetic oligonucleotide
gccgguagguuugugaccu

SEQ ID NO: 2068573 - RNA, 19 nt, Artificial Sequence
  Description of Artificial Sequence: Synthetic oligonucleotide
ggccacccgucugcaaucg

SEQ ID NO: 2068574 - RNA, 19 nt, Artificial Sequence
  Description of Artificial Sequence: Synthetic oligonucleotide
gccuguuccaaucgauugu

SEQ ID NO: 2068575 - RNA, 19 nt, Artificial Sequence
  Description of Artificial Sequence: Synthetic oligonucleotide
cgucugcaaucgcaagugg

SEQ ID NO: 2068576 - RNA, 19 nt, Artificial Sequence
  Description of Artificial Sequence: Synthetic oligonucleotide
ugguugccacagucucgaa

SEQ ID NO: 2068577 - RNA, 19 nt, Artificial Sequence
  Description of Artificial Sequence: Synthetic oligonucleotide
agcaugccgguagguuugu

SEQ ID NO: 2068578 - RNA, 19 nt, Artificial Sequence
  Description of Artificial Sequence: Synthetic oligonucleotide
cauugauuucagucuuguu

SEQ ID NO: 2068579 - RNA, 19 nt, Artificial Sequence
  Description of Artificial Sequence: Synthetic oligonucleotide
ccacccgucugcaaucgca

SEQ ID NO: 2068580 - RNA, 19 nt, Artificial Sequence
  Description of Artificial Sequence: Synthetic oligonucleotide
guuugagggcacugauuuu

SEQ ID NO: 2068581 - RNA, 19 nt, Artificial Sequence
  Description of Artificial Sequence: Synthetic oligonucleotide
cguuugagggcacugauuu

SEQ ID NO: 2068582 - RNA, 19 nt, Artificial Sequence
  Description of Artificial Sequence: Synthetic oligonucleotide
gcaagugggccucaauauu

SEQ ID NO: 2068583 - RNA, 19 nt, Artificial Sequence
  Description of Artificial Sequence: Synthetic oligonucleotide
cagguccccaaugggaugu

SEQ ID NO: 2068584 - RNA, 19 nt, Artificial Sequence
  Description of Artificial Sequence: Synthetic oligonucleotide
ccuuuacgugacuuuuaaa

SEQ ID NO: 2068585 - RNA, 19 nt, Artificial Sequence
  Description of Artificial Sequence: Synthetic oligonucleotide
caucuugcagguccccaau

SEQ ID NO: 2068586 - RNA, 19 nt, Artificial Sequence
  Description of Artificial Sequence: Synthetic oligonucleotide
caucuaagucacagacuuu

SEQ ID NO: 2068587 - RNA, 19 nt, Artificial Sequence
  Description of Artificial Sequence: Synthetic oligonucleotide
cugcccagucagggugugc

SEQ ID NO: 2068588 - RNA, 19 nt, Artificial Sequence
  Description of Artificial Sequence: Synthetic oligonucleotide
gggaugcugagaggcucug

SEQ ID NO: 2068589 - RNA, 19 nt, Artificial Sequence
  Description of Artificial Sequence: Synthetic oligonucleotide
gggccacccgucugcaauc

SEQ ID NO: 2068590 - RNA, 19 nt, Artificial Sequence
  Description of Artificial Sequence: Synthetic oligonucleotide
agcuucgcuccagguuccu

SEQ ID NO: 2068591 - RNA, 19 nt, Artificial Sequence
  Description of Artificial Sequence: Synthetic oligonucleotide
ccucgcgggugagaagggg

SEQ ID NO: 2068592 - RNA, 19 nt, Artificial Sequence
  Description of Artificial Sequence: Synthetic oligonucleotide
gcaccucgcgggugagaag

SEQ ID NO: 2068593 - RNA, 19 nt, Artificial Sequence
  Description of Artificial Sequence: Synthetic oligonucleotide
ccagguuccucucgcugca

SEQ ID NO: 2068594 - RNA, 19 nt, Artificial Sequence
  Description of Artificial Sequence: Synthetic oligonucleotide
ggaucaaauuggauuuguu

SEQ ID NO: 2068595 - RNA, 19 nt, Artificial Sequence
  Description of Artificial Sequence: Synthetic oligonucleotide
ccaugacaccuucgcagca

SEQ ID NO: 2068596 - RNA, 19 nt, Artificial Sequence
  Description of Artificial Sequence: Synthetic oligonucleotide
gggcuccgcagcagcagcc

SEQ ID NO: 2068597 - RNA, 19 nt, Artificial Sequence
  Description of Artificial Sequence: Synthetic oligonucleotide
gcagagcaccucgcgggug

SEQ ID NO: 2068598 - RNA, 19 nt, Artificial Sequence
  Description of Artificial Sequence: Synthetic oligonucleotide
ccaaugggauguuuagcau

SEQ ID NO: 2068599 - RNA, 19 nt, Artificial Sequence
  Description of Artificial Sequence: Synthetic oligonucleotide
gagcaccucgcgggugaga

SEQ ID NO: 2068600 - RNA, 19 nt, Artificial Sequence
  Description of Artificial Sequence: Synthetic oligonucleotide
gccacccgucugcaaucgc

SEQ ID NO: 2068601 - RNA, 19 nt, Artificial Sequence
  Description of Artificial Sequence: Synthetic oligonucleotide
caaucgcaagugggccuca

SEQ ID NO: 2068602 - RNA, 19 nt, Artificial Sequence
  Description of Artificial Sequence: Synthetic oligonucleotide
ccuucgggucuagucugug

SEQ ID NO: 2068603 - RNA, 19 nt, Artificial Sequence
  Description of Artificial Sequence: Synthetic oligonucleotide
cccgucugcaaucgcaagu

SEQ ID NO: 2068604 - RNA, 19 nt, Artificial Sequence
  Description of Artificial Sequence: Synthetic oligonucleotide
cggcaucaguccuugcaca

SEQ ID NO: 2068605 - RNA, 19 nt, Artificial Sequence
  Description of Artificial Sequence: Synthetic oligonucleotide
cgcaagugggccucaauau

SEQ ID NO: 2068606 - RNA, 19 nt, Artificial Sequence
  Description of Artificial Sequence: Synthetic oligonucleotide
cguguuguucaagugcugu

SEQ ID NO: 2068607 - RNA, 19 nt, Artificial Sequence
  Description of Artificial Sequence: Synthetic oligonucleotide
gcuucgcuccagguuccuc

SEQ ID NO: 2068608 - RNA, 19 nt, Artificial Sequence
  Description of Artificial Sequence: Synthetic oligonucleotide
agguccccaaugggauguu

SEQ ID NO: 2068609 - RNA, 19 nt, Artificial Sequence
  Description of Artificial Sequence: Synthetic oligonucleotide
ccgguagguuugugaccug

SEQ ID NO: 2068610 - RNA, 19 nt, Artificial Sequence
  Description of Artificial Sequence: Synthetic oligonucleotide
gcaugccgguagguuugug

SEQ ID NO: 2068611 - RNA, 19 nt, Artificial Sequence
  Description of Artificial Sequence: Synthetic oligonucleotide
ggguuggacuuuucuucuu

SEQ ID NO: 2068612 - RNA, 19 nt, Artificial Sequence
  Description of Artificial Sequence: Synthetic oligonucleotide
cgguagguuugugaccuga

SEQ ID NO: 2068613 - RNA, 19 nt, Artificial Sequence
  Description of Artificial Sequence: Synthetic oligonucleotide
caaugcaggcugggaugcu

SEQ ID NO: 2068614 - RNA, 19 nt, Artificial Sequence
  Description of Artificial Sequence: Synthetic oligonucleotide
gggaucguuugagggcacu

SEQ ID NO: 2068615 - RNA, 19 nt, Artificial Sequence
  Description of Artificial Sequence: Synthetic oligonucleotide
ggucuagucugugguccau

SEQ ID NO: 2068616 - RNA, 19 nt, Artificial Sequence
  Description of Artificial Sequence: Synthetic oligonucleotide
gcuccgcagcagcagccau

SEQ ID NO: 2068617 - RNA, 19 nt, Artificial Sequence
  Description of Artificial Sequence: Synthetic oligonucleotide
cgaagcaugccgguagguu

SEQ ID NO: 2068618 - RNA, 19 nt, Artificial Sequence
  Description of Artificial Sequence: Synthetic oligonucleotide
cgcagagcaccucgcgggu

SEQ ID NO: 2068619 - RNA, 19 nt, Artificial Sequence
  Description of Artificial Sequence: Synthetic oligonucleotide
cccugacguuguuuucauu

SEQ ID NO: 2068620 - RNA, 19 nt, Artificial Sequence
  Description of Artificial Sequence: Synthetic oligonucleotide
uuugccuuugcccagagga

SEQ ID NO: 2068621 - RNA, 19 nt, Artificial Sequence
  Description of Artificial Sequence: Synthetic oligonucleotide
aucaaguagauccuacgcc

SEQ ID NO: 2068622 - RNA, 19 nt, Artificial Sequence
  Description of Artificial Sequence: Synthetic oligonucleotide
aagucgucaauagugaagg

SEQ ID NO: 2068623 - RNA, 19 nt, Artificial Sequence
  Description of Artificial Sequence: Synthetic oligonucleotide
uagaaguaguuguagagcc

SEQ ID NO: 2068624 - RNA, 19 nt, Artificial Sequence
  Description of Artificial Sequence: Synthetic oligonucleotide
ucaaggaaaagccggagga

SEQ ID NO: 2068625 - RNA, 19 nt, Artificial Sequence
  Description of Artificial Sequence: Synthetic oligonucleotide
gacauuuucagccaacuuc

SEQ ID NO: 2068626 - RNA, 19 nt, Artificial Sequence
  Description of Artificial Sequence: Synthetic oligonucleotide
uccaaauuugccuuugccc

SEQ ID NO: 2068627 - RNA, 19 nt, Artificial Sequence
  Description of Artificial Sequence: Synthetic oligonucleotide
accauuucguuaugcaugc

SEQ ID NO: 2068628 - RNA, 19 nt, Artificial Sequence
  Description of Artificial Sequence: Synthetic oligonucleotide
uaucaaguagauccuacgc

SEQ ID NO: 2068629 - RNA, 19 nt, Artificial Sequence
  Description of Artificial Sequence: Synthetic oligonucleotide
uucagguccaccuugacaa

SEQ ID NO: 2068630 - RNA, 19 nt, Artificial Sequence
  Description of Artificial Sequence: Synthetic oligonucleotide
cauagaaguaguuguagag

SEQ ID NO: 2068631 - RNA, 19 nt, Artificial Sequence
  Description of Artificial Sequence: Synthetic oligonucleotide
uuaugcuugagcagcuugg

SEQ ID NO: 2068632 - RNA, 19 nt, Artificial Sequence
  Description of Artificial Sequence: Synthetic oligonucleotide
aaaugaagaaagcagucua

SEQ ID NO: 2068633 - RNA, 19 nt, Artificial Sequence
  Description of Artificial Sequence: Synthetic oligonucleotide
cagucuaaagggcagaggg

SEQ ID NO: 2068634 - RNA, 19 nt, Artificial Sequence
  Description of Artificial Sequence: Synthetic oligonucleotide
uaccauuucguuaugcaug

SEQ ID NO: 2068635 - RNA, 19 nt, Artificial Sequence
  Description of Artificial Sequence: Synthetic oligonucleotide
ugugccuggauuucgaucu

SEQ ID NO: 2068636 - RNA, 19 nt, Artificial Sequence
  Description of Artificial Sequence: Synthetic oligonucleotide
uugagugccacgaugaaau

SEQ ID NO: 2068637 - RNA, 19 nt, Artificial Sequence
  Description of Artificial Sequence: Synthetic oligonucleotide
caucucaaggaaaagccgg

SEQ ID NO: 2068638 - RNA, 19 nt, Artificial Sequence
  Description of Artificial Sequence: Synthetic oligonucleotide
ugaagaaagcagucuaaag

SEQ ID NO: 2068639 - RNA, 19 nt, Artificial Sequence
  Description of Artificial Sequence: Synthetic oligonucleotide
ucaaagucgucaauaguga

SEQ ID NO: 2068640 - RNA, 19 nt, Artificial Sequence
  Description of Artificial Sequence: Synthetic oligonucleotide
uguaguuccuuguagaguu

SEQ ID NO: 2068641 - RNA, 19 nt, Artificial Sequence
  Description of Artificial Sequence: Synthetic oligonucleotide
aucaguucauagcagagca

SEQ ID NO: 2068642 - RNA, 19 nt, Artificial Sequence
  Description of Artificial Sequence: Synthetic oligonucleotide
cucagguacagaaggaggg

SEQ ID NO: 2068643 - RNA, 19 nt, Artificial Sequence
  Description of Artificial Sequence: Synthetic oligonucleotide
aaggagggaacuucagguc

SEQ ID NO: 2068644 - RNA, 19 nt, Artificial Sequence
  Description of Artificial Sequence: Synthetic oligonucleotide
acuucugcgagccguaggg

SEQ ID NO: 2068645 - RNA, 19 nt, Artificial Sequence
  Description of Artificial Sequence: Synthetic oligonucleotide
guaucaaguagauccuacg

SEQ ID NO: 2068646 - RNA, 19 nt, Artificial Sequence
  Description of Artificial Sequence: Synthetic oligonucleotide
cuggauuucgaucucucgg

SEQ ID NO: 2068647 - RNA, 19 nt, Artificial Sequence
  Description of Artificial Sequence: Synthetic oligonucleotide
aaagucgucaauagugaag

SEQ ID NO: 2068648 - RNA, 19 nt, Artificial Sequence
  Description of Artificial Sequence: Synthetic oligonucleotide
gacgguaugucucacugug

SEQ ID NO: 2068649 - RNA, 19 nt, Artificial Sequence
  Description of Artificial Sequence: Synthetic oligonucleotide
uagagccgaagaauguugg

SEQ ID NO: 2068650 - RNA, 19 nt, Artificial Sequence
  Description of Artificial Sequence: Synthetic oligonucleotide
uagguguucuccuucuggg

SEQ ID NO: 2068651 - RNA, 19 nt, Artificial Sequence
  Description of Artificial Sequence: Synthetic oligonucleotide
ugaggguuuaugcuugagc

SEQ ID NO: 2068652 - RNA, 19 nt, Artificial Sequence
  Description of Artificial Sequence: Synthetic oligonucleotide
uggacuggccauuggaccg

SEQ ID NO: 2068653 - RNA, 19 nt, Artificial Sequence
  Description of Artificial Sequence: Synthetic oligonucleotide
ucgucaauagugaaggcau

SEQ ID NO: 2068654 - RNA, 19 nt, Artificial Sequence
  Description of Artificial Sequence: Synthetic oligonucleotide
ucuguucuucuguaguucc

SEQ ID NO: 2068655 - RNA, 19 nt, Artificial Sequence
  Description of Artificial Sequence: Synthetic oligonucleotide
guggcuagggcucucaaag

SEQ ID NO: 2068656 - RNA, 19 nt, Artificial Sequence
  Description of Artificial Sequence: Synthetic oligonucleotide
uuccaaauuugccuuugcc

SEQ ID NO: 2068657 - RNA, 19 nt, Artificial Sequence
  Description of Artificial Sequence: Synthetic oligonucleotide
cauuucguuaugcaugcgc

SEQ ID NO: 2068658 - RNA, 19 nt, Artificial Sequence
  Description of Artificial Sequence: Synthetic oligonucleotide
caccuugacaauccgacgg

SEQ ID NO: 2068659 - RNA, 19 nt, Artificial Sequence
  Description of Artificial Sequence: Synthetic oligonucleotide
cucaaucugagacuugaag

SEQ ID NO: 2068660 - RNA, 19 nt, Artificial Sequence
  Description of Artificial Sequence: Synthetic oligonucleotide
ucuuguggcaguacaucag

SEQ ID NO: 2068661 - RNA, 19 nt, Artificial Sequence
  Description of Artificial Sequence: Synthetic oligonucleotide
agugccacgaugaaaugac

SEQ ID NO: 2068662 - RNA, 19 nt, Artificial Sequence
  Description of Artificial Sequence: Synthetic oligonucleotide
cuaacagcagguucucagg

SEQ ID NO: 2068663 - RNA, 19 nt, Artificial Sequence
  Description of Artificial Sequence: Synthetic oligonucleotide
aaggcauuggagccccgac

SEQ ID NO: 2068664 - RNA, 19 nt, Artificial Sequence
  Description of Artificial Sequence: Synthetic oligonucleotide
agaaagcagucuaaagggc

SEQ ID NO: 2068665 - RNA, 19 nt, Artificial Sequence
  Description of Artificial Sequence: Synthetic oligonucleotide
uucaguucgcccuggagac

SEQ ID NO: 2068666 - RNA, 19 nt, Artificial Sequence
  Description of Artificial Sequence: Synthetic oligonucleotide
aguaucaaguagauccuac

SEQ ID NO: 2068667 - RNA, 19 nt, Artificial Sequence
  Description of Artificial Sequence: Synthetic oligonucleotide
aguucuguucuucuguagu

SEQ ID NO: 2068668 - RNA, 19 nt, Artificial Sequence
  Description of Artificial Sequence: Synthetic oligonucleotide
aggucuaccauuucguuau

SEQ ID NO: 2068669 - RNA, 19 nt, Artificial Sequence
  Description of Artificial Sequence: Synthetic oligonucleotide
aguacaucagugcauccga

SEQ ID NO: 2068670 - RNA, 19 nt, Artificial Sequence
  Description of Artificial Sequence: Synthetic oligonucleotide
aaagcagucuaaagggcag

SEQ ID NO: 2068671 - RNA, 19 nt, Artificial Sequence
  Description of Artificial Sequence: Synthetic oligonucleotide
guuguagagccgaagaaug

SEQ ID NO: 2068672 - RNA, 19 nt, Artificial Sequence
  Description of Artificial Sequence: Synthetic oligonucleotide
uucaugagggcaagugcag

SEQ ID NO: 2068673 - RNA, 19 nt, Artificial Sequence
  Description of Artificial Sequence: Synthetic oligonucleotide
ccgacugacauuuucagcc

SEQ ID NO: 2068674 - RNA, 19 nt, Artificial Sequence
  Description of Artificial Sequence: Synthetic oligonucleotide
gauccuacgccggucauag

SEQ ID NO: 2068675 - RNA, 19 nt, Artificial Sequence
  Description of Artificial Sequence: Synthetic oligonucleotide
aauccgacgguaugucuca

SEQ ID NO: 2068676 - RNA, 19 nt, Artificial Sequence
  Description of Artificial Sequence: Synthetic oligonucleotide
ugagggcaagugcagaugu

SEQ ID NO: 2068677 - RNA, 19 nt, Artificial Sequence
  Description of Artificial Sequence: Synthetic oligonucleotide
cucaaggaaaagccggagg

SEQ ID NO: 2068678 - RNA, 19 nt, Artificial Sequence
  Description of Artificial Sequence: Synthetic oligonucleotide
caguucauagcagagcacc

SEQ ID NO: 2068679 - RNA, 19 nt, Artificial Sequence
  Description of Artificial Sequence: Synthetic oligonucleotide
uucucaaucugagacuuga

SEQ ID NO: 2068680 - RNA, 19 nt, Artificial Sequence
  Description of Artificial Sequence: Synthetic oligonucleotide
auuucgaucucucggcgca

SEQ ID NO: 2068681 - RNA, 19 nt, Artificial Sequence
  Description of Artificial Sequence: Synthetic oligonucleotide
augcaugcgccccucaauc

SEQ ID NO: 2068682 - RNA, 19 nt, Artificial Sequence
  Description of Artificial Sequence: Synthetic oligonucleotide
ucucacuguggcuagggcu

SEQ ID NO: 2068683 - RNA, 19 nt, Artificial Sequence
  Description of Artificial Sequence: Synthetic oligonucleotide
uuucucccgagccaaguac

SEQ ID NO: 2068684 - RNA, 19 nt, Artificial Sequence
  Description of Artificial Sequence: Synthetic oligonucleotide
uguggacuggccauuggac

SEQ ID NO: 2068685 - RNA, 19 nt, Artificial Sequence
  Description of Artificial Sequence: Synthetic oligonucleotide
ucagccaacuucuggccag

SEQ ID NO: 2068686 - RNA, 19 nt, Artificial Sequence
  Description of Artificial Sequence: Synthetic oligonucleotide
uuucguuaugcaugcgccc

SEQ ID NO: 2068687 - RNA, 19 nt, Artificial Sequence
  Description of Artificial Sequence: Synthetic oligonucleotide
guccgcaaucuucaguucg

SEQ ID NO: 2068688 - RNA, 19 nt, Artificial Sequence
  Description of Artificial Sequence: Synthetic oligonucleotide
uguucaggccugaaugaga

SEQ ID NO: 2068689 - RNA, 19 nt, Artificial Sequence
  Description of Artificial Sequence: Synthetic oligonucleotide
agacaguacccuccuagag

SEQ ID NO: 2068690 - RNA, 19 nt, Artificial Sequence
  Description of Artificial Sequence: Synthetic oligonucleotide
ucugcaggacucucugggg

SEQ ID NO: 2068691 - RNA, 19 nt, Artificial Sequence
  Description of Artificial Sequence: Synthetic oligonucleotide
gauuucgaucucucggcgc

SEQ ID NO: 2068692 - RNA, 19 nt, Artificial Sequence
  Description of Artificial Sequence: Synthetic oligonucleotide
uaugucucacuguggcuag

SEQ ID NO: 2068693 - RNA, 19 nt, Artificial Sequence
  Description of Artificial Sequence: Synthetic oligonucleotide
accaucaguucauagcaga

SEQ ID NO: 2068694 - RNA, 19 nt, Artificial Sequence
  Description of Artificial Sequence: Synthetic oligonucleotide
aaugaagaaagcagucuaa

SEQ ID NO: 2068695 - RNA, 19 nt, Artificial Sequence
  Description of Artificial Sequence: Synthetic oligonucleotide
gaacuucagguccaccuug

SEQ ID NO: 2068696 - RNA, 19 nt, Artificial Sequence
  Description of Artificial Sequence: Synthetic oligonucleotide
aguucauagcagagcaccc

SEQ ID NO: 2068697 - RNA, 19 nt, Artificial Sequence
  Description of Artificial Sequence: Synthetic oligonucleotide
aguacacauuuccaaauuu

SEQ ID NO: 2068698 - RNA, 19 nt, Artificial Sequence
  Description of Artificial Sequence: Synthetic oligonucleotide
gaagaggaucuugagugcc

SEQ ID NO: 2068699 - RNA, 19 nt, Artificial Sequence
  Description of Artificial Sequence: Synthetic oligonucleotide
ugggccaucucaaggaaaa

SEQ ID NO: 2068700 - RNA, 19 nt, Artificial Sequence
  Description of Artificial Sequence: Synthetic oligonucleotide
ucuucuguaguuccuugua

SEQ ID NO: 2068701 - RNA, 19 nt, Artificial Sequence
  Description of Artificial Sequence: Synthetic oligonucleotide
gagaccuaacagcagguuc

SEQ ID NO: 2068702 - RNA, 19 nt, Artificial Sequence
  Description of Artificial Sequence: Synthetic oligonucleotide
agucgucaauagugaaggc

SEQ ID NO: 2068703 - RNA, 19 nt, Artificial Sequence
  Description of Artificial Sequence: Synthetic oligonucleotide
uacaucagugcauccgaca

SEQ ID NO: 2068704 - RNA, 19 nt, Artificial Sequence
  Description of Artificial Sequence: Synthetic oligonucleotide
ucgaaaguucuguucuucu

SEQ ID NO: 2068705 - RNA, 19 nt, Artificial Sequence
  Description of Artificial Sequence: Synthetic oligonucleotide
ggagacaguacccuccuag

SEQ ID NO: 2068706 - RNA, 19 nt, Artificial Sequence
  Description of Artificial Sequence: Synthetic oligonucleotide
aauuugccuuugcccagag

SEQ ID NO: 2068707 - RNA, 19 nt, Artificial Sequence
  Description of Artificial Sequence: Synthetic oligonucleotide
caaauuugccuuugcccag

SEQ ID NO: 2068708 - RNA, 19 nt, Artificial Sequence
  Description of Artificial Sequence: Synthetic oligonucleotide
uucugcgagccguagggcc

SEQ ID NO: 2068709 - RNA, 19 nt, Artificial Sequence
  Description of Artificial Sequence: Synthetic oligonucleotide
agagccgaagaauguuggg

SEQ ID NO: 2068710 - RNA, 19 nt, Artificial Sequence
  Description of Artificial Sequence: Synthetic oligonucleotide
uccgcaaucuucaguucgc

SEQ ID NO: 2068711 - RNA, 19 nt, Artificial Sequence
  Description of Artificial Sequence: Synthetic oligonucleotide
uccgacagcuccuccauga

SEQ ID NO: 2068712 - RNA, 19 nt, Artificial Sequence
  Description of Artificial Sequence: Synthetic oligonucleotide
aggguuuaugcuugagcag

SEQ ID NO: 2068713 - RNA, 19 nt, Artificial Sequence
  Description of Artificial Sequence: Synthetic oligonucleotide
cauuggaccgguucaugag

SEQ ID NO: 2068714 - RNA, 19 nt, Artificial Sequence
  Description of Artificial Sequence: Synthetic oligonucleotide
uuguagagccgaagaaugu

SEQ ID NO: 2068715 - RNA, 19 nt, Artificial Sequence
  Description of Artificial Sequence: Synthetic oligonucleotide
aguacccuccuagaguggg

SEQ ID NO: 2068716 - RNA, 19 nt, Artificial Sequence
  Description of Artificial Sequence: Synthetic oligonucleotide
ucuaaagggcagagggaga

SEQ ID NO: 2068717 - RNA, 19 nt, Artificial Sequence
  Description of Artificial Sequence: Synthetic oligonucleotide
cucacuguggcuagggcuc

SEQ ID NO: 2068718 - RNA, 19 nt, Artificial Sequence
  Description of Artificial Sequence: Synthetic oligonucleotide
cuagggcucucaaagggug

SEQ ID NO: 2068719 - RNA, 19 nt, Artificial Sequence
  Description of Artificial Sequence: Synthetic oligonucleotide
aucgaaaguucuguucuuc

SEQ ID NO: 2068720 - RNA, 19 nt, Artificial Sequence
  Description of Artificial Sequence: Synthetic oligonucleotide
aucagugcauccgacagcu

SEQ ID NO: 2068721 - RNA, 19 nt, Artificial Sequence
  Description of Artificial Sequence: Synthetic oligonucleotide
ugagacuucugcgagccgu

SEQ ID NO: 2068722 - RNA, 19 nt, Artificial Sequence
  Description of Artificial Sequence: Synthetic oligonucleotide
caauccgacgguaugucuc

SEQ ID NO: 2068723 - RNA, 19 nt, Artificial Sequence
  Description of Artificial Sequence: Synthetic oligonucleotide
cuaaagggcagagggagac

SEQ ID NO: 2068724 - RNA, 19 nt, Artificial Sequence
  Description of Artificial Sequence: Synthetic oligonucleotide
uucucccgagccaaguaca

SEQ ID NO: 2068725 - RNA, 19 nt, Artificial Sequence
  Description of Artificial Sequence: Synthetic oligonucleotide
uagggcucucaaagggugg

SEQ ID NO: 2068726 - RNA, 19 nt, Artificial Sequence
  Description of Artificial Sequence: Synthetic oligonucleotide
cagaugucacagcagacuc

SEQ ID NO: 2068727 - RNA, 19 nt, Artificial Sequence
  Description of Artificial Sequence: Synthetic oligonucleotide
uuguggcaguacaucagug

SEQ ID NO: 2068728 - RNA, 19 nt, Artificial Sequence
  Description of Artificial Sequence: Synthetic oligonucleotide
ugcucaucgaaaguucugu

SEQ ID NO: 2068729 - RNA, 19 nt, Artificial Sequence
  Description of Artificial Sequence: Synthetic oligonucleotide
cuagagugggcccgcaccc

SEQ ID NO: 2068730 - RNA, 19 nt, Artificial Sequence
  Description of Artificial Sequence: Synthetic oligonucleotide
aguuguagagccgaagaau

SEQ ID NO: 2068731 - RNA, 19 nt, Artificial Sequence
  Description of Artificial Sequence: Synthetic oligonucleotide
ucaggccugaaugagacuu

SEQ ID NO: 2068732 - RNA, 19 nt, Artificial Sequence
  Description of Artificial Sequence: Synthetic oligonucleotide
uacagaaggagggaacuuc

SEQ ID NO: 2068733 - RNA, 19 nt, Artificial Sequence
  Description of Artificial Sequence: Synthetic oligonucleotide
cccucaaucaucucugggg

SEQ ID NO: 2068734 - RNA, 19 nt, Artificial Sequence
  Description of Artificial Sequence: Synthetic oligonucleotide
ugucucacuguggcuaggg

SEQ ID NO: 2068735 - RNA, 19 nt, Artificial Sequence
  Description of Artificial Sequence: Synthetic oligonucleotide
accccgaugcaccacaggu

SEQ ID NO: 2068736 - RNA, 19 nt, Artificial Sequence
  Description of Artificial Sequence: Synthetic oligonucleotide
caucaguucauagcagagc

SEQ ID NO: 2068737 - RNA, 19 nt, Artificial Sequence
  Description of Artificial Sequence: Synthetic oligonucleotide
agaccuaacagcagguucu

SEQ ID NO: 2068738 - RNA, 19 nt, Artificial Sequence
  Description of Artificial Sequence: Synthetic oligonucleotide
ggcuagggcucucaaaggg

SEQ ID NO: 2068739 - RNA, 19 nt, Artificial Sequence
  Description of Artificial Sequence: Synthetic oligonucleotide
agccgaagaauguugggau

SEQ ID NO: 2068740 - RNA, 19 nt, Artificial Sequence
  Description of Artificial Sequence: Synthetic oligonucleotide
ucucaaggaaaagccggag

SEQ ID NO: 2068741 - RNA, 19 nt, Artificial Sequence
  Description of Artificial Sequence: Synthetic oligonucleotide
ucaguucauagcagagcac

SEQ ID NO: 2068742 - RNA, 19 nt, Artificial Sequence
  Description of Artificial Sequence: Synthetic oligonucleotide
uccaugaucguggcugucc

SEQ ID NO: 2068743 - RNA, 19 nt, Artificial Sequence
  Description of Artificial Sequence: Synthetic oligonucleotide
uggcuagggcucucaaagg

SEQ ID NO: 2068744 - RNA, 19 nt, Artificial Sequence
  Description of Artificial Sequence: Synthetic oligonucleotide
ucugcgagccguagggcca

SEQ ID NO: 2068745 - RNA, 19 nt, Artificial Sequence
  Description of Artificial Sequence: Synthetic oligonucleotide
ugacaauccgacgguaugu

SEQ ID NO: 2068746 - RNA, 19 nt, Artificial Sequence
  Description of Artificial Sequence: Synthetic oligonucleotide
ggcagagggagacaguacc

SEQ ID NO: 2068747 - RNA, 19 nt, Artificial Sequence
  Description of Artificial Sequence: Synthetic oligonucleotide
ugccacgaugaaaugacuu

SEQ ID NO: 2068748 - RNA, 19 nt, Artificial Sequence
  Description of Artificial Sequence: Synthetic oligonucleotide
cacagcagacuccuucugc

SEQ ID NO: 2068749 - RNA, 19 nt, Artificial Sequence
  Description of Artificial Sequence: Synthetic oligonucleotide
uggagaccuaacagcaggu

SEQ ID NO: 2068750 - RNA, 19 nt, Artificial Sequence
  Description of Artificial Sequence: Synthetic oligonucleotide
uaugcaugcgccccucaau

SEQ ID NO: 2068751 - RNA, 19 nt, Artificial Sequence
  Description of Artificial Sequence: Synthetic oligonucleotide
aggaucuugagugccacga

SEQ ID NO: 2068752 - RNA, 19 nt, Artificial Sequence
  Description of Artificial Sequence: Synthetic oligonucleotide
ccuaacagcagguucucag

SEQ ID NO: 2068753 - RNA, 19 nt, Artificial Sequence
  Description of Artificial Sequence: Synthetic oligonucleotide
guagagccgaagaauguug

SEQ ID NO: 2068754 - RNA, 19 nt, Artificial Sequence
  Description of Artificial Sequence: Synthetic oligonucleotide
cucucaaaggguggguucc

SEQ ID NO: 2068755 - RNA, 19 nt, Artificial Sequence
  Description of Artificial Sequence: Synthetic oligonucleotide
guucaggccugaaugagac

SEQ ID NO: 2068756 - RNA, 19 nt, Artificial Sequence
  Description of Artificial Sequence: Synthetic oligonucleotide
agugggcccgcacccaagg

SEQ ID NO: 2068757 - RNA, 19 nt, Artificial Sequence
  Description of Artificial Sequence: Synthetic oligonucleotide
gacgcccaaucucaaaguc

SEQ ID NO: 2068758 - RNA, 19 nt, Artificial Sequence
  Description of Artificial Sequence: Synthetic oligonucleotide
gccaucucaaggaaaagcc

SEQ ID NO: 2068759 - RNA, 19 nt, Artificial Sequence
  Description of Artificial Sequence: Synthetic oligonucleotide
aguuccuuguagaguuccc

SEQ ID NO: 2068760 - RNA, 19 nt, Artificial Sequence
  Description of Artificial Sequence: Synthetic oligonucleotide
acagaccagccaaaguccg

SEQ ID NO: 2068761 - RNA, 19 nt, Artificial Sequence
  Description of Artificial Sequence: Synthetic oligonucleotide
ggauuucgaucucucggcg

SEQ ID NO: 2068762 - RNA, 19 nt, Artificial Sequence
  Description of Artificial Sequence: Synthetic oligonucleotide
uguagagccgaagaauguu

SEQ ID NO: 2068763 - RNA, 19 nt, Artificial Sequence
  Description of Artificial Sequence: Synthetic oligonucleotide
agggagggagcaugcacag

SEQ ID NO: 2068764 - RNA, 19 nt, Artificial Sequence
  Description of Artificial Sequence: Synthetic oligonucleotide
gagacaguacccuccuaga

SEQ ID NO: 2068765 - RNA, 19 nt, Artificial Sequence
  Description of Artificial Sequence: Synthetic oligonucleotide
ugcaggacucucuggggca

SEQ ID NO: 2068766 - RNA, 19 nt, Artificial Sequence
  Description of Artificial Sequence: Synthetic oligonucleotide
gucgucaauagugaaggca

SEQ ID NO: 2068767 - RNA, 19 nt, Artificial Sequence
  Description of Artificial Sequence: Synthetic oligonucleotide
aggaaaagccggaggagag

SEQ ID NO: 2068768 - RNA, 19 nt, Artificial Sequence
  Description of Artificial Sequence: Synthetic oligonucleotide
augaagaaagcagucuaaa

SEQ ID NO: 2068769 - RNA, 19 nt, Artificial Sequence
  Description of Artificial Sequence: Synthetic oligonucleotide
auuugccuuugcccagagg

SEQ ID NO: 2068770 - RNA, 19 nt, Artificial Sequence
  Description of Artificial Sequence: Synthetic oligonucleotide
guuccuuguagaguucccc

SEQ ID NO: 2068771 - RNA, 19 nt, Artificial Sequence
  Description of Artificial Sequence: Synthetic oligonucleotide
ccaucucaaggaaaagccg

SEQ ID NO: 2068772 - RNA, 19 nt, Artificial Sequence
  Description of Artificial Sequence: Synthetic oligonucleotide
ggcauuggagccccgacug

SEQ ID NO: 2068773 - RNA, 19 nt, Artificial Sequence
  Description of Artificial Sequence: Synthetic oligonucleotide
ucugagacuugaagaggau

SEQ ID NO: 2068774 - RNA, 19 nt, Artificial Sequence
  Description of Artificial Sequence: Synthetic oligonucleotide
agccccgacugacauuuuc

SEQ ID NO: 2068775 - RNA, 19 nt, Artificial Sequence
  Description of Artificial Sequence: Synthetic oligonucleotide
ugcaggugugccuggauuu

SEQ ID NO: 2068776 - RNA, 19 nt, Artificial Sequence
  Description of Artificial Sequence: Synthetic oligonucleotide
accuugacaauccgacggu

SEQ ID NO: 2068777 - RNA, 19 nt, Artificial Sequence
  Description of Artificial Sequence: Synthetic oligonucleotide
acgcccaaucucaaagucg

SEQ ID NO: 2068778 - RNA, 19 nt, Artificial Sequence
  Description of Artificial Sequence: Synthetic oligonucleotide
acaauccgacgguaugucu

SEQ ID NO: 2068779 - RNA, 19 nt, Artificial Sequence
  Description of Artificial Sequence: Synthetic oligonucleotide
ugggauguugcaggugugc

SEQ ID NO: 2068780 - RNA, 19 nt, Artificial Sequence
  Description of Artificial Sequence: Synthetic oligonucleotide
ucucccgagccaaguacac

SEQ ID NO: 2068781 - RNA, 19 nt, Artificial Sequence
  Description of Artificial Sequence: Synthetic oligonucleotide
gagccgaagaauguuggga

SEQ ID NO: 2068782 - RNA, 19 nt, Artificial Sequence
  Description of Artificial Sequence: Synthetic oligonucleotide
uccgcugcucaucgaaagu

SEQ ID NO: 2068783 - RNA, 19 nt, Artificial Sequence
  Description of Artificial Sequence: Synthetic oligonucleotide
augaucguggcuguccgcu

SEQ ID NO: 2068784 - RNA, 19 nt, Artificial Sequence
  Description of Artificial Sequence: Synthetic oligonucleotide
uugggauguugcaggugug

SEQ ID NO: 2068785 - RNA, 19 nt, Artificial Sequence
  Description of Artificial Sequence: Synthetic oligonucleotide
uuggagccccgacugacau

SEQ ID NO: 2068786 - RNA, 19 nt, Artificial Sequence
  Description of Artificial Sequence: Synthetic oligonucleotide
uacccuccuagagugggcc

SEQ ID NO: 2068787 - RNA, 19 nt, Artificial Sequence
  Description of Artificial Sequence: Synthetic oligonucleotide
caccaucaguucauagcag

SEQ ID NO: 2068788 - RNA, 19 nt, Artificial Sequence
  Description of Artificial Sequence: Synthetic oligonucleotide
uguggcuagggcucucaaa

SEQ ID NO: 2068789 - RNA, 19 nt, Artificial Sequence
  Description of Artificial Sequence: Synthetic oligonucleotide
uagggccacggguaggugu

SEQ ID NO: 2068790 - RNA, 19 nt, Artificial Sequence
  Description of Artificial Sequence: Synthetic oligonucleotide
agggugagcugcgaccugg

SEQ ID NO: 2068791 - RNA, 19 nt, Artificial Sequence
  Description of Artificial Sequence: Synthetic oligonucleotide
acccuccuagagugggccc

SEQ ID NO: 2068792 - RNA, 19 nt, Artificial Sequence
  Description of Artificial Sequence: Synthetic oligonucleotide
agggcucucaaaggguggg

SEQ ID NO: 2068793 - RNA, 19 nt, Artificial Sequence
  Description of Artificial Sequence: Synthetic oligonucleotide
ucaugagggcaagugcaga

SEQ ID NO: 2068794 - RNA, 19 nt, Artificial Sequence
  Description of Artificial Sequence: Synthetic oligonucleotide
cauuuucagccaacuucug

SEQ ID NO: 2068795 - RNA, 19 nt, Artificial Sequence
  Description of Artificial Sequence: Synthetic oligonucleotide
gaaaagccggaggagagcu

SEQ ID NO: 2068796 - RNA, 19 nt, Artificial Sequence
  Description of Artificial Sequence: Synthetic oligonucleotide
guaugucucacuguggcua

SEQ ID NO: 2068797 - RNA, 19 nt, Artificial Sequence
  Description of Artificial Sequence: Synthetic oligonucleotide
ccgaucugaggguuuaugc

SEQ ID NO: 2068798 - RNA, 19 nt, Artificial Sequence
  Description of Artificial Sequence: Synthetic oligonucleotide
uggcaguacaucagugcau

SEQ ID NO: 2068799 - RNA, 19 nt, Artificial Sequence
  Description of Artificial Sequence: Synthetic oligonucleotide
cugcucaucgaaaguucug

SEQ ID NO: 2068800 - RNA, 19 nt, Artificial Sequence
  Description of Artificial Sequence: Synthetic oligonucleotide
uggguuccccaccaucagu

SEQ ID NO: 2068801 - RNA, 19 nt, Artificial Sequence
  Description of Artificial Sequence: Synthetic oligonucleotide
ucguuaugcaugcgccccu

SEQ ID NO: 2068802 - RNA, 19 nt, Artificial Sequence
  Description of Artificial Sequence: Synthetic oligonucleotide
ccacaggucuaccauuucg

SEQ ID NO: 2068803 - RNA, 19 nt, Artificial Sequence
  Description of Artificial Sequence: Synthetic oligonucleotide
aggggcagccgaucugagg

SEQ ID NO: 2068804 - RNA, 19 nt, Artificial Sequence
  Description of Artificial Sequence: Synthetic oligonucleotide
aggcauuggagccccgacu

SEQ ID NO: 2068805 - RNA, 19 nt, Artificial Sequence
  Description of Artificial Sequence: Synthetic oligonucleotide
gacaauccgacgguauguc

SEQ ID NO: 2068806 - RNA, 19 nt, Artificial Sequence
  Description of Artificial Sequence: Synthetic oligonucleotide
cuucagguccaccuugaca

SEQ ID NO: 2068807 - RNA, 19 nt, Artificial Sequence
  Description of Artificial Sequence: Synthetic oligonucleotide
agggagacaguacccuccu

SEQ ID NO: 2068808 - RNA, 19 nt, Artificial Sequence
  Description of Artificial Sequence: Synthetic oligonucleotide
aagcagucuaaagggcaga

SEQ ID NO: 2068809 - RNA, 19 nt, Artificial Sequence
  Description of Artificial Sequence: Synthetic oligonucleotide
cauuggagccccgacugac

SEQ ID NO: 2068810 - RNA, 19 nt, Artificial Sequence
  Description of Artificial Sequence: Synthetic oligonucleotide
ucucagguuuuaugucccu

SEQ ID NO: 2068811 - RNA, 19 nt, Artificial Sequence
  Description of Artificial Sequence: Synthetic oligonucleotide
acuucuggccaggggcagc

SEQ ID NO: 2068812 - RNA, 19 nt, Artificial Sequence
  Description of Artificial Sequence: Synthetic oligonucleotide
agcaccccgaugcaccaca

SEQ ID NO: 2068813 - RNA, 19 nt, Artificial Sequence
  Description of Artificial Sequence: Synthetic oligonucleotide
caaagucgucaauagugaa

SEQ ID NO: 2068814 - RNA, 19 nt, Artificial Sequence
  Description of Artificial Sequence: Synthetic oligonucleotide
ggccaucucaaggaaaagc

SEQ ID NO: 2068815 - RNA, 19 nt, Artificial Sequence
  Description of Artificial Sequence: Synthetic oligonucleotide
gucuaccauuucguuaugc

SEQ ID NO: 2068816 - RNA, 19 nt, Artificial Sequence
  Description of Artificial Sequence: Synthetic oligonucleotide
cagaccagccaaaguccgc

SEQ ID NO: 2068817 - RNA, 19 nt, Artificial Sequence
  Description of Artificial Sequence: Synthetic oligonucleotide
ugaucguggcuguccgcug

SEQ ID NO: 2068818 - RNA, 19 nt, Artificial Sequence
  Description of Artificial Sequence: Synthetic oligonucleotide
ugcauccgacagcuccucc

SEQ ID NO: 2068819 - RNA, 19 nt, Artificial Sequence
  Description of Artificial Sequence: Synthetic oligonucleotide
caugaucguggcuguccgc

SEQ ID NO: 2068820 - RNA, 19 nt, Artificial Sequence
  Description of Artificial Sequence: Synthetic oligonucleotide
agucuaaagggcagaggga

SEQ ID NO: 2068821 - RNA, 19 nt, Artificial Sequence
  Description of Artificial Sequence: Synthetic oligonucleotide
augagacuucugcgagccg

SEQ ID NO: 2068822 - RNA, 19 nt, Artificial Sequence
  Description of Artificial Sequence: Synthetic oligonucleotide
ucucaaaggguggguuccc

SEQ ID NO: 2068823 - RNA, 19 nt, Artificial Sequence
  Description of Artificial Sequence: Synthetic oligonucleotide
gccaaguacacauuuccaa

SEQ ID NO: 2068824 - RNA, 19 nt, Artificial Sequence
  Description of Artificial Sequence: Synthetic oligonucleotide
ucgaucucucggcgcagcu

SEQ ID NO: 2068825 - RNA, 19 nt, Artificial Sequence
  Description of Artificial Sequence: Synthetic oligonucleotide
gacugacauuuucagccaa

SEQ ID NO: 2068826 - RNA, 19 nt, Artificial Sequence
  Description of Artificial Sequence: Synthetic oligonucleotide
ccuagagugggcccgcacc

SEQ ID NO: 2068827 - RNA, 19 nt, Artificial Sequence
  Description of Artificial Sequence: Synthetic oligonucleotide
caugcgccccucaaucauc

SEQ ID NO: 2068828 - RNA, 19 nt, Artificial Sequence
  Description of Artificial Sequence: Synthetic oligonucleotide
aaaagccggaggagagcug

SEQ ID NO: 2068829 - RNA, 19 nt, Artificial Sequence
  Description of Artificial Sequence: Synthetic oligonucleotide
gaugcaccacaggucuacc

SEQ ID NO: 2068830 - RNA, 19 nt, Artificial Sequence
  Description of Artificial Sequence: Synthetic oligonucleotide
gcccuggagaccuaacagc

SEQ ID NO: 2068831 - RNA, 19 nt, Artificial Sequence
  Description of Artificial Sequence: Synthetic oligonucleotide
ggcuguccgcugcucaucg

SEQ ID NO: 2068832 - RNA, 19 nt, Artificial Sequence
  Description of Artificial Sequence: Synthetic oligonucleotide
uccgacgguaugucucacu

SEQ ID NO: 2068833 - RNA, 19 nt, Artificial Sequence
  Description of Artificial Sequence: Synthetic oligonucleotide
agugcauccgacagcuccu

SEQ ID NO: 2068834 - RNA, 19 nt, Artificial Sequence
  Description of Artificial Sequence: Synthetic oligonucleotide
agccaaguacacauuucca

SEQ ID NO: 2068835 - RNA, 19 nt, Artificial Sequence
  Description of Artificial Sequence: Synthetic oligonucleotide
uucaggccugaaugagacu

SEQ ID NO: 2068836 - RNA, 19 nt, Artificial Sequence
  Description of Artificial Sequence: Synthetic oligonucleotide
uccuagagugggcccgcac

SEQ ID NO: 2068837 - RNA, 19 nt, Artificial Sequence
  Description of Artificial Sequence: Synthetic oligonucleotide
cuguggacuggccauugga

SEQ ID NO: 2068838 - RNA, 19 nt, Artificial Sequence
  Description of Artificial Sequence: Synthetic oligonucleotide
ccaugaucguggcuguccg

SEQ ID NO: 2068839 - RNA, 19 nt, Artificial Sequence
  Description of Artificial Sequence: Synthetic oligonucleotide
caggucuaccauuucguua

SEQ ID NO: 2068840 - RNA, 19 nt, Artificial Sequence
  Description of Artificial Sequence: Synthetic oligonucleotide
cuuguggcaguacaucagu

SEQ ID NO: 2068841 - RNA, 19 nt, Artificial Sequence
  Description of Artificial Sequence: Synthetic oligonucleotide
uuccaguaucaaguagauc

SEQ ID NO: 2068842 - RNA, 19 nt, Artificial Sequence
  Description of Artificial Sequence: Synthetic oligonucleotide
uacgccggucauagaagua

SEQ ID NO: 2068843 - RNA, 19 nt, Artificial Sequence
  Description of Artificial Sequence: Synthetic oligonucleotide
cgguaugucucacuguggc

SEQ ID NO: 2068844 - RNA, 19 nt, Artificial Sequence
  Description of Artificial Sequence: Synthetic oligonucleotide
uagauccuacgccggucau

SEQ ID NO: 2068845 - RNA, 19 nt, Artificial Sequence
  Description of Artificial Sequence: Synthetic oligonucleotide
gccaacuucuggccagggg

SEQ ID NO: 2068846 - RNA, 19 nt, Artificial Sequence
  Description of Artificial Sequence: Synthetic oligonucleotide
gaaggcauuggagccccga

SEQ ID NO: 2068847 - RNA, 19 nt, Artificial Sequence
  Description of Artificial Sequence: Synthetic oligonucleotide
ucggggcauauuccaguau

SEQ ID NO: 2068848 - RNA, 19 nt, Artificial Sequence
  Description of Artificial Sequence: Synthetic oligonucleotide
uucgcccuggagaccuaac

SEQ ID NO: 2068849 - RNA, 19 nt, Artificial Sequence
  Description of Artificial Sequence: Synthetic oligonucleotide
ucaguucgcccuggagacc

SEQ ID NO: 2068850 - RNA, 19 nt, Artificial Sequence
  Description of Artificial Sequence: Synthetic oligonucleotide
ggaaaagccggaggagagc

SEQ ID NO: 2068851 - RNA, 19 nt, Artificial Sequence
  Description of Artificial Sequence: Synthetic oligonucleotide
gccgaagaauguugggaug

SEQ ID NO: 2068852 - RNA, 19 nt, Artificial Sequence
  Description of Artificial Sequence: Synthetic oligonucleotide
cuucugcgagccguagggc

SEQ ID NO: 2068853 - RNA, 19 nt, Artificial Sequence
  Description of Artificial Sequence: Synthetic oligonucleotide
gcagucuaaagggcagagg

SEQ ID NO: 2068854 - RNA, 19 nt, Artificial Sequence
  Description of Artificial Sequence: Synthetic oligonucleotide
ccgacgguaugucucacug

SEQ ID NO: 2068855 - RNA, 19 nt, Artificial Sequence
  Description of Artificial Sequence: Synthetic oligonucleotide
ccaccuugacaauccgacg

SEQ ID NO: 2068856 - RNA, 19 nt, Artificial Sequence
  Description of Artificial Sequence: Synthetic oligonucleotide
aaguaguuguagagccgaa

SEQ ID NO: 2068857 - RNA, 19 nt, Artificial Sequence
  Description of Artificial Sequence: Synthetic oligonucleotide
ucucucggcgcagcuggug

SEQ ID NO: 2068858 - RNA, 19 nt, Artificial Sequence
  Description of Artificial Sequence: Synthetic oligonucleotide
gcagcuggugcuccacucc

SEQ ID NO: 2068859 - RNA, 19 nt, Artificial Sequence
  Description of Artificial Sequence: Synthetic oligonucleotide
agagugggcccgcacccaa

SEQ ID NO: 2068860 - RNA, 19 nt, Artificial Sequence
  Description of Artificial Sequence: Synthetic oligonucleotide
agacuucugcgagccguag

SEQ ID NO: 2068861 - RNA, 19 nt, Artificial Sequence
  Description of Artificial Sequence: Synthetic oligonucleotide
gaccuaacagcagguucuc

SEQ ID NO: 2068862 - RNA, 19 nt, Artificial Sequence
  Description of Artificial Sequence: Synthetic oligonucleotide
cuugacaauccgacgguau

SEQ ID NO: 2068863 - RNA, 19 nt, Artificial Sequence
  Description of Artificial Sequence: Synthetic oligonucleotide
cccgacugacauuuucagc

SEQ ID NO: 2068864 - RNA, 19 nt, Artificial Sequence
  Description of Artificial Sequence: Synthetic oligonucleotide
guuaugcaugcgccccuca

SEQ ID NO: 2068865 - RNA, 19 nt, Artificial Sequence
  Description of Artificial Sequence: Synthetic oligonucleotide
accgguucaugagggcaag

SEQ ID NO: 2068866 - RNA, 19 nt, Artificial Sequence
  Description of Artificial Sequence: Synthetic oligonucleotide
ccggucauagaaguaguug

SEQ ID NO: 2068867 - RNA, 19 nt, Artificial Sequence
  Description of Artificial Sequence: Synthetic oligonucleotide
augucucacuguggcuagg

SEQ ID NO: 2068868 - RNA, 19 nt, Artificial Sequence
  Description of Artificial Sequence: Synthetic oligonucleotide
cccuggagaccuaacagca

SEQ ID NO: 2068869 - RNA, 19 nt, Artificial Sequence
  Description of Artificial Sequence: Synthetic oligonucleotide
caccccgaugcaccacagg

SEQ ID NO: 2068870 - RNA, 19 nt, Artificial Sequence
  Description of Artificial Sequence: Synthetic oligonucleotide
gcucucaaaggguggguuc

SEQ ID NO: 2068871 - RNA, 19 nt, Artificial Sequence
  Description of Artificial Sequence: Synthetic oligonucleotide
ccccgacugacauuuucag

SEQ ID NO: 2068872 - RNA, 19 nt, Artificial Sequence
  Description of Artificial Sequence: Synthetic oligonucleotide
acuguggcuagggcucuca

SEQ ID NO: 2068873 - RNA, 19 nt, Artificial Sequence
  Description of Artificial Sequence: Synthetic oligonucleotide
cuguccgcugcucaucgaa

SEQ ID NO: 2068874 - RNA, 19 nt, Artificial Sequence
  Description of Artificial Sequence: Synthetic oligonucleotide
gaccgguucaugagggcaa

SEQ ID NO: 2068875 - RNA, 19 nt, Artificial Sequence
  Description of Artificial Sequence: Synthetic oligonucleotide
caugagggcaagugcagau

SEQ ID NO: 2068876 - RNA, 19 nt, Artificial Sequence
  Description of Artificial Sequence: Synthetic oligonucleotide
auccgacgguaugucucac

SEQ ID NO: 2068877 - RNA, 19 nt, Artificial Sequence
  Description of Artificial Sequence: Synthetic oligonucleotide
ccaaucucaaagucgucaa

SEQ ID NO: 2068878 - RNA, 19 nt, Artificial Sequence
  Description of Artificial Sequence: Synthetic oligonucleotide
agccaacuucuggccaggg

SEQ ID NO: 2068879 - RNA, 19 nt, Artificial Sequence
  Description of Artificial Sequence: Synthetic oligonucleotide
ccggaggagagcugggcag

SEQ ID NO: 2068880 - RNA, 19 nt, Artificial Sequence
  Description of Artificial Sequence: Synthetic oligonucleotide
cagccaacuucuggccagg

SEQ ID NO: 2068881 - RNA, 19 nt, Artificial Sequence
  Description of Artificial Sequence: Synthetic oligonucleotide
cugacauuuucagccaacu

SEQ ID NO: 2068882 - RNA, 19 nt, Artificial Sequence
  Description of Artificial Sequence: Synthetic oligonucleotide
guaguuccuuguagaguuc

SEQ ID NO: 2068883 - RNA, 19 nt, Artificial Sequence
  Description of Artificial Sequence: Synthetic oligonucleotide
ccauuggaccgguucauga

SEQ ID NO: 2068884 - RNA, 19 nt, Artificial Sequence
  Description of Artificial Sequence: Synthetic oligonucleotide
augcgccccucaaucaucu

SEQ ID NO: 2068885 - RNA, 19 nt, Artificial Sequence
  Description of Artificial Sequence: Synthetic oligonucleotide
gcugcgaccugggccaggg

SEQ ID NO: 2068886 - RNA, 19 nt, Artificial Sequence
  Description of Artificial Sequence: Synthetic oligonucleotide
gagggcaagugcagauguc

SEQ ID NO: 2068887 - RNA, 19 nt, Artificial Sequence
  Description of Artificial Sequence: Synthetic oligonucleotide
cucggggcauauuccagua

SEQ ID NO: 2068888 - RNA, 19 nt, Artificial Sequence
  Description of Artificial Sequence: Synthetic oligonucleotide
ggggcaggguguucaggcc

SEQ ID NO: 2068889 - RNA, 19 nt, Artificial Sequence
  Description of Artificial Sequence: Synthetic oligonucleotide
gagugggcccgcacccaag

SEQ ID NO: 2068890 - RNA, 19 nt, Artificial Sequence
  Description of Artificial Sequence: Synthetic oligonucleotide
accuaacagcagguucuca

SEQ ID NO: 2068891 - RNA, 19 nt, Artificial Sequence
  Description of Artificial Sequence: Synthetic oligonucleotide
agauccuacgccggucaua

SEQ ID NO: 2068892 - RNA, 19 nt, Artificial Sequence
  Description of Artificial Sequence: Synthetic oligonucleotide
gccccucaaucaucucugg

SEQ ID NO: 2068893 - RNA, 19 nt, Artificial Sequence
  Description of Artificial Sequence: Synthetic oligonucleotide
caagggugagcugcgaccu

SEQ ID NO: 2068894 - RNA, 19 nt, Artificial Sequence
  Description of Artificial Sequence: Synthetic oligonucleotide
gccguagggccacggguag

SEQ ID NO: 2068895 - RNA, 19 nt, Artificial Sequence
  Description of Artificial Sequence: Synthetic oligonucleotide
cggggcauauuccaguauc

SEQ ID NO: 2068896 - RNA, 19 nt, Artificial Sequence
  Description of Artificial Sequence: Synthetic oligonucleotide
ggauguugcaggugugccu

SEQ ID NO: 2068897 - RNA, 19 nt, Artificial Sequence
  Description of Artificial Sequence: Synthetic oligonucleotide
gagacuucugcgagccgua

SEQ ID NO: 2068898 - RNA, 19 nt, Artificial Sequence
  Description of Artificial Sequence: Synthetic oligonucleotide
gguaugucucacuguggcu

SEQ ID NO: 2068899 - RNA, 19 nt, Artificial Sequence
  Description of Artificial Sequence: Synthetic oligonucleotide
agcagguucucagguuuua

SEQ ID NO: 2068900 - RNA, 19 nt, Artificial Sequence
  Description of Artificial Sequence: Synthetic oligonucleotide
ccacggguagguguucucc

SEQ ID NO: 2068901 - RNA, 19 nt, Artificial Sequence
  Description of Artificial Sequence: Synthetic oligonucleotide
agccguagggccacgggua

SEQ ID NO: 2068902 - RNA, 19 nt, Artificial Sequence
  Description of Artificial Sequence: Synthetic oligonucleotide
gggcaagugcagaugucac

SEQ ID NO: 2068903 - RNA, 19 nt, Artificial Sequence
  Description of Artificial Sequence: Synthetic oligonucleotide
cauagcagagcaccccgau

SEQ ID NO: 2068904 - RNA, 19 nt, Artificial Sequence
  Description of Artificial Sequence: Synthetic oligonucleotide
gccgaucugaggguuuaug

SEQ ID NO: 2068905 - RNA, 19 nt, Artificial Sequence
  Description of Artificial Sequence: Synthetic oligonucleotide
gguuccccaccaucaguuc

SEQ ID NO: 2068906 - RNA, 19 nt, Artificial Sequence
  Description of Artificial Sequence: Synthetic oligonucleotide
ggucuaccauuucguuaug

SEQ ID NO: 2068907 - RNA, 19 nt, Artificial Sequence
  Description of Artificial Sequence: Synthetic oligonucleotide
cccuccuagagugggcccg

SEQ ID NO: 2068908 - RNA, 19 nt, Artificial Sequence
  Description of Artificial Sequence: Synthetic oligonucleotide
caguaucaaguagauccua

SEQ ID NO: 2068909 - RNA, 19 nt, Artificial Sequence
  Description of Artificial Sequence: Synthetic oligonucleotide
caaucucaaagucgucaau

SEQ ID NO: 2068910 - RNA, 19 nt, Artificial Sequence
  Description of Artificial Sequence: Synthetic oligonucleotide
gagacuugaagaggaucuu

SEQ ID NO: 2068911 - RNA, 19 nt, Artificial Sequence
  Description of Artificial Sequence: Synthetic oligonucleotide
uggagccccgacugacauu

SEQ ID NO: 2068912 - RNA, 19 nt, Artificial Sequence
  Description of Artificial Sequence: Synthetic oligonucleotide
cacggguagguguucuccu

SEQ ID NO: 2068913 - RNA, 19 nt, Artificial Sequence
  Description of Artificial Sequence: Synthetic oligonucleotide
gccggaggagagcugggca

SEQ ID NO: 2068914 - RNA, 19 nt, Artificial Sequence
  Description of Artificial Sequence: Synthetic oligonucleotide
ggcaggguguucaggccug

SEQ ID NO: 2068915 - RNA, 19 nt, Artificial Sequence
  Description of Artificial Sequence: Synthetic oligonucleotide
cgccccucaaucaucucug

SEQ ID NO: 2068916 - RNA, 19 nt, Artificial Sequence
  Description of Artificial Sequence: Synthetic oligonucleotide
agggccacggguagguguu

SEQ ID NO: 2068917 - RNA, 19 nt, Artificial Sequence
  Description of Artificial Sequence: Synthetic oligonucleotide
caccacaggucuaccauuu

SEQ ID NO: 2068918 - RNA, 19 nt, Artificial Sequence
  Description of Artificial Sequence: Synthetic oligonucleotide
gccacacauggucuuccuc

SEQ ID NO: 2068919 - RNA, 19 nt, Artificial Sequence
  Description of Artificial Sequence: Synthetic oligonucleotide
cccucggggcauauuccag

SEQ ID NO: 2068920 - RNA, 19 nt, Artificial Sequence
  Description of Artificial Sequence: Synthetic oligonucleotide
gggccaucucaaggaaaag

SEQ ID NO: 2068921 - RNA, 19 nt, Artificial Sequence
  Description of Artificial Sequence: Synthetic oligonucleotide
caguucgcccuggagaccu

SEQ ID NO: 2068922 - RNA, 19 nt, Artificial Sequence
  Description of Artificial Sequence: Synthetic oligonucleotide
ugcgagccguagggccacg

SEQ ID NO: 2068923 - RNA, 19 nt, Artificial Sequence
  Description of Artificial Sequence: Synthetic oligonucleotide
ggacgcccaaucucaaagu

SEQ ID NO: 2068924 - RNA, 19 nt, Artificial Sequence
  Description of Artificial Sequence: Synthetic oligonucleotide
ccccgaugcaccacagguc

SEQ ID NO: 2068925 - RNA, 19 nt, Artificial Sequence
  Description of Artificial Sequence: Synthetic oligonucleotide
gguuuaugcuugagcagcu

SEQ ID NO: 2068926 - RNA, 19 nt, Artificial Sequence
  Description of Artificial Sequence: Synthetic oligonucleotide
cugcgagccguagggccac

SEQ ID NO: 2068927 - RNA, 19 nt, Artificial Sequence
  Description of Artificial Sequence: Synthetic oligonucleotide
gccauuggaccgguucaug

SEQ ID NO: 2068928 - RNA, 19 nt, Artificial Sequence
  Description of Artificial Sequence: Synthetic oligonucleotide
cugcgaccugggccagggg

SEQ ID NO: 2068929 - RNA, 19 nt, Artificial Sequence
  Description of Artificial Sequence: Synthetic oligonucleotide
cccgaugcaccacaggucu

SEQ ID NO: 2068930 - RNA, 19 nt, Artificial Sequence
  Description of Artificial Sequence: Synthetic oligonucleotide
ugcgccccucaaucaucuc

SEQ ID NO: 2068931 - RNA, 19 nt, Artificial Sequence
  Description of Artificial Sequence: Synthetic oligonucleotide
caucgaaaguucuguucuu

SEQ ID NO: 2068932 - RNA, 19 nt, Artificial Sequence
  Description of Artificial Sequence: Synthetic oligonucleotide
cgcugcucaucgaaaguuc

SEQ ID NO: 2068933 - RNA, 19 nt, Artificial Sequence
  Description of Artificial Sequence: Synthetic oligonucleotide
auccuacgccggucauaga

SEQ ID NO: 2068934 - RNA, 19 nt, Artificial Sequence
  Description of Artificial Sequence: Synthetic oligonucleotide
ggagccccgacugacauuu

SEQ ID NO: 2068935 - RNA, 19 nt, Artificial Sequence
  Description of Artificial Sequence: Synthetic oligonucleotide
gccccgacugacauuuuca

SEQ ID NO: 2068936 - RNA, 19 nt, Artificial Sequence
  Description of Artificial Sequence: Synthetic oligonucleotide
agcugcgaccugggccagg

SEQ ID NO: 2068937 - RNA, 19 nt, Artificial Sequence
  Description of Artificial Sequence: Synthetic oligonucleotide
gugcauccgacagcuccuc

SEQ ID NO: 2068938 - RNA, 19 nt, Artificial Sequence
  Description of Artificial Sequence: Synthetic oligonucleotide
ggguagguguucuccuucu

SEQ ID NO: 2068939 - RNA, 19 nt, Artificial Sequence
  Description of Artificial Sequence: Synthetic oligonucleotide
cgaugcaccacaggucuac

SEQ ID NO: 2068940 - RNA, 19 nt, Artificial Sequence
  Description of Artificial Sequence: Synthetic oligonucleotide
ccgcaaucuucaguucgcc

SEQ ID NO: 2068941 - RNA, 19 nt, Artificial Sequence
  Description of Artificial Sequence: Synthetic oligonucleotide
uccccaccaucaguucaua

SEQ ID NO: 2068942 - RNA, 19 nt, Artificial Sequence
  Description of Artificial Sequence: Synthetic oligonucleotide
ccauuucguuaugcaugcg

SEQ ID NO: 2068943 - RNA, 19 nt, Artificial Sequence
  Description of Artificial Sequence: Synthetic oligonucleotide
cuccaugaucguggcuguc

SEQ ID NO: 2068944 - RNA, 19 nt, Artificial Sequence
  Description of Artificial Sequence: Synthetic oligonucleotide
cgaucugaggguuuaugcu

SEQ ID NO: 2068945 - RNA, 19 nt, Artificial Sequence
  Description of Artificial Sequence: Synthetic oligonucleotide
ggggcagauaguccagggu

SEQ ID NO: 2068946 - RNA, 19 nt, Artificial Sequence
  Description of Artificial Sequence: Synthetic oligonucleotide
gcugcucaucgaaaguucu

SEQ ID NO: 2068947 - RNA, 19 nt, Artificial Sequence
  Description of Artificial Sequence: Synthetic oligonucleotide
guacagaaggagggaacuu

SEQ ID NO: 2068948 - RNA, 19 nt, Artificial Sequence
  Description of Artificial Sequence: Synthetic oligonucleotide
gagcugcgaccugggccag

SEQ ID NO: 2068949 - RNA, 19 nt, Artificial Sequence
  Description of Artificial Sequence: Synthetic oligonucleotide
gcuagggcucucaaagggu

SEQ ID NO: 2068950 - RNA, 19 nt, Artificial Sequence
  Description of Artificial Sequence: Synthetic oligonucleotide
ccgaagaauguugggaugu

SEQ ID NO: 2068951 - RNA, 19 nt, Artificial Sequence
  Description of Artificial Sequence: Synthetic oligonucleotide
cgacugacauuuucagcca

SEQ ID NO: 2068952 - RNA, 19 nt, Artificial Sequence
  Description of Artificial Sequence: Synthetic oligonucleotide
cuguggcuagggcucucaa

SEQ ID NO: 2068953 - RNA, 19 nt, Artificial Sequence
  Description of Artificial Sequence: Synthetic oligonucleotide
cgagccguagggccacggg

SEQ ID NO: 2068954 - RNA, 19 nt, Artificial Sequence
  Description of Artificial Sequence: Synthetic oligonucleotide
acccaagggugagcugcga

SEQ ID NO: 2068955 - RNA, 19 nt, Artificial Sequence
  Description of Artificial Sequence: Synthetic oligonucleotide
guucgcccuggagaccuaa

SEQ ID NO: 2068956 - RNA, 19 nt, Artificial Sequence
  Description of Artificial Sequence: Synthetic oligonucleotide
agccgaucugaggguuuau

SEQ ID NO: 2068957 - RNA, 19 nt, Artificial Sequence
  Description of Artificial Sequence: Synthetic oligonucleotide
gcaugcgccccucaaucau

SEQ ID NO: 2068958 - RNA, 19 nt, Artificial Sequence
  Description of Artificial Sequence: Synthetic oligonucleotide
ccccucagguacagaagga

SEQ ID NO: 2068959 - RNA, 19 nt, Artificial Sequence
  Description of Artificial Sequence: Synthetic oligonucleotide
ccuccuagagugggcccgc

SEQ ID NO: 2068960 - RNA, 19 nt, Artificial Sequence
  Description of Artificial Sequence: Synthetic oligonucleotide
gcucaucgaaaguucuguu

SEQ ID NO: 2068961 - RNA, 19 nt, Artificial Sequence
  Description of Artificial Sequence: Synthetic oligonucleotide
gccacggguagguguucuc

SEQ ID NO: 2068962 - RNA, 19 nt, Artificial Sequence
  Description of Artificial Sequence: Synthetic oligonucleotide
gugccacgaugaaaugacu

SEQ ID NO: 2068963 - RNA, 19 nt, Artificial Sequence
  Description of Artificial Sequence: Synthetic oligonucleotide
ggugugccuggauuucgau

SEQ ID NO: 2068964 - RNA, 19 nt, Artificial Sequence
  Description of Artificial Sequence: Synthetic oligonucleotide
cagccgaucugaggguuua

SEQ ID NO: 2068965 - RNA, 19 nt, Artificial Sequence
  Description of Artificial Sequence: Synthetic oligonucleotide
gcgagccguagggccacgg

SEQ ID NO: 2068966 - RNA, 19 nt, Artificial Sequence
  Description of Artificial Sequence: Synthetic oligonucleotide
gcaccccgaugcaccacag

SEQ ID NO: 2068967 - RNA, 19 nt, Artificial Sequence
  Description of Artificial Sequence: Synthetic oligonucleotide
ccucggggcauauuccagu

SEQ ID NO: 2068968 - RNA, 19 nt, Artificial Sequence
  Description of Artificial Sequence: Synthetic oligonucleotide
gcaccacaggucuaccauu

SEQ ID NO: 2068969 - RNA, 19 nt, Artificial Sequence
  Description of Artificial Sequence: Synthetic oligonucleotide
gcuguccgcugcucaucga

SEQ ID NO: 2068970 - RNA, 19 nt, Artificial Sequence
  Description of Artificial Sequence: Synthetic oligonucleotide
ccguagggccacggguagg

SEQ ID NO: 2068971 - RNA, 19 nt, Artificial Sequence
  Description of Artificial Sequence: Synthetic oligonucleotide
gacuggccauuggaccggu

SEQ ID NO: 2068972 - RNA, 19 nt, Artificial Sequence
  Description of Artificial Sequence: Synthetic oligonucleotide
cgaucucucggcgcagcug

SEQ ID NO: 2068973 - RNA, 19 nt, Artificial Sequence
  Description of Artificial Sequence: Synthetic oligonucleotide
ggagaccuaacagcagguu

SEQ ID NO: 2068974 - RNA, 19 nt, Artificial Sequence
  Description of Artificial Sequence: Synthetic oligonucleotide
cguuaugcaugcgccccuc

SEQ ID NO: 2068975 - RNA, 19 nt, Artificial Sequence
  Description of Artificial Sequence: Synthetic oligonucleotide
ggcucucaaaggguggguu

SEQ ID NO: 2068976 - RNA, 19 nt, Artificial Sequence
  Description of Artificial Sequence: Synthetic oligonucleotide
caggguguucaggccugaa

SEQ ID NO: 2068977 - RNA, 19 nt, Artificial Sequence
  Description of Artificial Sequence: Synthetic oligonucleotide
ccgagccaaguacacauuu

SEQ ID NO: 2068978 - RNA, 19 nt, Artificial Sequence
  Description of Artificial Sequence: Synthetic oligonucleotide
gggcagccgaucugagggu

SEQ ID NO: 2068979 - RNA, 19 nt, Artificial Sequence
  Description of Artificial Sequence: Synthetic oligonucleotide
aguucgcccuggagaccua

SEQ ID NO: 2068980 - RNA, 19 nt, Artificial Sequence
  Description of Artificial Sequence: Synthetic oligonucleotide
acuggccauuggaccgguu

SEQ ID NO: 2068981 - RNA, 19 nt, Artificial Sequence
  Description of Artificial Sequence: Synthetic oligonucleotide
ggcccgcacccaaggguga

SEQ ID NO: 2068982 - RNA, 19 nt, Artificial Sequence
  Description of Artificial Sequence: Synthetic oligonucleotide
ggcagccgaucugaggguu

SEQ ID NO: 2068983 - RNA, 19 nt, Artificial Sequence
  Description of Artificial Sequence: Synthetic oligonucleotide
ggccacggguagguguucu

SEQ ID NO: 2068984 - RNA, 19 nt, Artificial Sequence
  Description of Artificial Sequence: Synthetic oligonucleotide
gccggucauagaaguaguu

SEQ ID NO: 2068985 - RNA, 19 nt, Artificial Sequence
  Description of Artificial Sequence: Synthetic oligonucleotide
cguagggccacggguaggu

SEQ ID NO: 2068986 - RNA, 19 nt, Artificial Sequence
  Description of Artificial Sequence: Synthetic oligonucleotide
ccgaugcaccacaggucua

SEQ ID NO: 2068987 - RNA, 19 nt, Artificial Sequence
  Description of Artificial Sequence: Synthetic oligonucleotide
ccgcugcucaucgaaaguu

SEQ ID NO: 2068988 - RNA, 19 nt, Artificial Sequence
  Description of Artificial Sequence: Synthetic oligonucleotide
cgacgguaugucucacugu

SEQ ID NO: 2068989 - RNA, 19 nt, Artificial Sequence
  Description of Artificial Sequence: Synthetic oligonucleotide
gggccacggguagguguuc

SEQ ID NO: 2068990 - RNA, 19 nt, Artificial Sequence
  Description of Artificial Sequence: Synthetic oligonucleotide
cgccggucauagaaguagu

SEQ ID NO: 2068991 - RNA, 19 nt, Artificial Sequence
  Description of Artificial Sequence: Synthetic oligonucleotide
ccgacagcuccuccaugau

SEQ ID NO: 2068992 - RNA, 19 nt, Artificial Sequence
  Description of Artificial Sequence: Synthetic oligonucleotide
gcagccgaucugaggguuu

SEQ ID NO: 2068993 - RNA, 19 nt, Artificial Sequence
  Description of Artificial Sequence: Synthetic oligonucleotide
cgaagaauguugggauguu

SEQ ID NO: 2068994 - RNA, 19 nt, Artificial Sequence
  Description of Artificial Sequence: Synthetic oligonucleotide
gagccccgacugacauuuu

SEQ ID NO: 2068995 - RNA, 19 nt, Artificial Sequence
  Description of Artificial Sequence: Synthetic oligonucleotide
gaugauggaguuuagcucg

SEQ ID NO: 2068996 - RNA, 19 nt, Artificial Sequence
  Description of Artificial Sequence: Synthetic oligonucleotide
ugacaaauagggcagaacc

SEQ ID NO: 2068997 - RNA, 19 nt, Artificial Sequence
  Description of Artificial Sequence: Synthetic oligonucleotide
agaaccugggcgcaaaucc

SEQ ID NO: 2068998 - RNA, 19 nt, Artificial Sequence
  Description of Artificial Sequence: Synthetic oligonucleotide
gaaacuuggguagugaccg

SEQ ID NO: 2068999 - RNA, 19 nt, Artificial Sequence
  Description of Artificial Sequence: Synthetic oligonucleotide
ucuggaguccccuagaccc

SEQ ID NO: 2069000 - RNA, 19 nt, Artificial Sequence
  Description of Artificial Sequence: Synthetic oligonucleotide
agagagguggguuugagag

SEQ ID NO: 2069001 - RNA, 19 nt, Artificial Sequence
  Description of Artificial Sequence: Synthetic oligonucleotide
uucaucuuugauccggucg

SEQ ID NO: 2069002 - RNA, 19 nt, Artificial Sequence
  Description of Artificial Sequence: Synthetic oligonucleotide
uuaugcaucucaauguuca

SEQ ID NO: 2069003 - RNA, 19 nt, Artificial Sequence
  Description of Artificial Sequence: Synthetic oligonucleotide
aauagggcagaaccugggc

SEQ ID NO: 2069004 - RNA, 19 nt, Artificial Sequence
  Description of Artificial Sequence: Synthetic oligonucleotide
ugcggaaacaucaugucag

SEQ ID NO: 2069005 - RNA, 19 nt, Artificial Sequence
  Description of Artificial Sequence: Synthetic oligonucleotide
aauguucaauccauaagac

SEQ ID NO: 2069006 - RNA, 19 nt, Artificial Sequence
  Description of Artificial Sequence: Synthetic oligonucleotide
gaaacaucaugucagucgc

SEQ ID NO: 2069007 - RNA, 19 nt, Artificial Sequence
  Description of Artificial Sequence: Synthetic oligonucleotide
uaagacaucucguaguaca

SEQ ID NO: 2069008 - RNA, 19 nt, Artificial Sequence
  Description of Artificial Sequence: Synthetic oligonucleotide
uguuuaugcaucucaaugu

SEQ ID NO: 2069009 - RNA, 19 nt, Artificial Sequence
  Description of Artificial Sequence: Synthetic oligonucleotide
gauuucagccuguuuaugc

SEQ ID NO: 2069010 - RNA, 19 nt, Artificial Sequence
  Description of Artificial Sequence: Synthetic oligonucleotide
uccugugacaaauagggca

SEQ ID NO: 2069011 - RNA, 19 nt, Artificial Sequence
  Description of Artificial Sequence: Synthetic oligonucleotide
aacccucacguuuauuugg

SEQ ID NO: 2069012 - RNA, 19 nt, Artificial Sequence
  Description of Artificial Sequence: Synthetic oligonucleotide
ugcguuguguacauucugg

SEQ ID NO: 2069013 - RNA, 19 nt, Artificial Sequence
  Description of Artificial Sequence: Synthetic oligonucleotide
agagguggguuugagagcc

SEQ ID NO: 2069014 - RNA, 19 nt, Artificial Sequence
  Description of Artificial Sequence: Synthetic oligonucleotide
caauguucaauccauaaga

SEQ ID NO: 2069015 - RNA, 19 nt, Artificial Sequence
  Description of Artificial Sequence: Synthetic oligonucleotide
accgugaccuaucugugcc

SEQ ID NO: 2069016 - RNA, 19 nt, Artificial Sequence
  Description of Artificial Sequence: Synthetic oligonucleotide
agcgauggcggcuggagcc

SEQ ID NO: 2069017 - RNA, 19 nt, Artificial Sequence
  Description of Artificial Sequence: Synthetic oligonucleotide
ucucugauuucucacuggc

SEQ ID NO: 2069018 - RNA, 19 nt, Artificial Sequence
  Description of Artificial Sequence: Synthetic oligonucleotide
uggaguuuagcucgggagc

SEQ ID NO: 2069019 - RNA, 19 nt, Artificial Sequence
  Description of Artificial Sequence: Synthetic oligonucleotide
agcuaguccgacuucucgc

SEQ ID NO: 2069020 - RNA, 19 nt, Artificial Sequence
  Description of Artificial Sequence: Synthetic oligonucleotide
auagggcagaaccugggcg

SEQ ID NO: 2069021 - RNA, 19 nt, Artificial Sequence
  Description of Artificial Sequence: Synthetic oligonucleotide
ugcaucucaauguucaauc

SEQ ID NO: 2069022 - RNA, 19 nt, Artificial Sequence
  Description of Artificial Sequence: Synthetic oligonucleotide
ugcacagcaagaaggccgg

SEQ ID NO: 2069023 - RNA, 19 nt, Artificial Sequence
  Description of Artificial Sequence: Synthetic oligonucleotide
uaaauguggagguggggcc

SEQ ID NO: 2069024 - RNA, 19 nt, Artificial Sequence
  Description of Artificial Sequence: Synthetic oligonucleotide
caucucguaguacaugacg

SEQ ID NO: 2069025 - RNA, 19 nt, Artificial Sequence
  Description of Artificial Sequence: Synthetic oligonucleotide
aguacaugacguaaugccg

SEQ ID NO: 2069026 - RNA, 19 nt, Artificial Sequence
  Description of Artificial Sequence: Synthetic oligonucleotide
ucgcacuccagcuucaggc

SEQ ID NO: 2069027 - RNA, 19 nt, Artificial Sequence
  Description of Artificial Sequence: Synthetic oligonucleotide
ugaacuugagcugcugggg

SEQ ID NO: 2069028 - RNA, 19 nt, Artificial Sequence
  Description of Artificial Sequence: Synthetic oligonucleotide
guaaauguggagguggggc

SEQ ID NO: 2069029 - RNA, 19 nt, Artificial Sequence
  Description of Artificial Sequence: Synthetic oligonucleotide
aacuggugagccuggagcu

SEQ ID NO: 2069030 - RNA, 19 nt, Artificial Sequence
  Description of Artificial Sequence: Synthetic oligonucleotide
gacaucucguaguacauga

SEQ ID NO: 2069031 - RNA, 19 nt, Artificial Sequence
  Description of Artificial Sequence: Synthetic oligonucleotide
acaaauagggcagaaccug

SEQ ID NO: 2069032 - RNA, 19 nt, Artificial Sequence
  Description of Artificial Sequence: Synthetic oligonucleotide
caucaugucagucgcgggg

SEQ ID NO: 2069033 - RNA, 19 nt, Artificial Sequence
  Description of Artificial Sequence: Synthetic oligonucleotide
ugggguaccucucuggagu

SEQ ID NO: 2069034 - RNA, 19 nt, Artificial Sequence
  Description of Artificial Sequence: Synthetic oligonucleotide
ugcuuggcucucucgaugg

SEQ ID NO: 2069035 - RNA, 19 nt, Artificial Sequence
  Description of Artificial Sequence: Synthetic oligonucleotide
auuucagccuguuuaugca

SEQ ID NO: 2069036 - RNA, 19 nt, Artificial Sequence
  Description of Artificial Sequence: Synthetic oligonucleotide
caugacguaaugccgcugc

SEQ ID NO: 2069037 - RNA, 19 nt, Artificial Sequence
  Description of Artificial Sequence: Synthetic oligonucleotide
uugcggaaacaucauguca

SEQ ID NO: 2069038 - RNA, 19 nt, Artificial Sequence
  Description of Artificial Sequence: Synthetic oligonucleotide
auguucaauccauaagaca

SEQ ID NO: 2069039 - RNA, 19 nt, Artificial Sequence
  Description of Artificial Sequence: Synthetic oligonucleotide
aauccauaagacaucucgu

SEQ ID NO: 2069040 - RNA, 19 nt, Artificial Sequence
  Description of Artificial Sequence: Synthetic oligonucleotide
cucgauggcucccaggacc

SEQ ID NO: 2069041 - RNA, 19 nt, Artificial Sequence
  Description of Artificial Sequence: Synthetic oligonucleotide
gugccuucgagucacuucc

SEQ ID NO: 2069042 - RNA, 19 nt, Artificial Sequence
  Description of Artificial Sequence: Synthetic oligonucleotide
gagcuaguccgacuucucg

SEQ ID NO: 2069043 - RNA, 19 nt, Artificial Sequence
  Description of Artificial Sequence: Synthetic oligonucleotide
uuugcggaaacaucauguc

SEQ ID NO: 2069044 - RNA, 19 nt, Artificial Sequence
  Description of Artificial Sequence: Synthetic oligonucleotide
aaugccgcugcaucucuga

SEQ ID NO: 2069045 - RNA, 19 nt, Artificial Sequence
  Description of Artificial Sequence: Synthetic oligonucleotide
gugcacagcaagaaggccg

SEQ ID NO: 2069046 - RNA, 19 nt, Artificial Sequence
  Description of Artificial Sequence: Synthetic oligonucleotide
guagugaccgagcugugug

SEQ ID NO: 2069047 - RNA, 19 nt, Artificial Sequence
  Description of Artificial Sequence: Synthetic oligonucleotide
aacuuggguagugaccgag

SEQ ID NO: 2069048 - RNA, 19 nt, Artificial Sequence
  Description of Artificial Sequence: Synthetic oligonucleotide
guacaugacguaaugccgc

SEQ ID NO: 2069049 - RNA, 19 nt, Artificial Sequence
  Description of Artificial Sequence: Synthetic oligonucleotide
caagauugguggcuguggc

SEQ ID NO: 2069050 - RNA, 19 nt, Artificial Sequence
  Description of Artificial Sequence: Synthetic oligonucleotide
ucggagguggugaacuuga

SEQ ID NO: 2069051 - RNA, 19 nt, Artificial Sequence
  Description of Artificial Sequence: Synthetic oligonucleotide
cuggugaguguccccaucg

SEQ ID NO: 2069052 - RNA, 19 nt, Artificial Sequence
  Description of Artificial Sequence: Synthetic oligonucleotide
gacguaaugccgcugcauc

SEQ ID NO: 2069053 - RNA, 19 nt, Artificial Sequence
  Description of Artificial Sequence: Synthetic oligonucleotide
accuaucugugccugucuc

SEQ ID NO: 2069054 - RNA, 19 nt, Artificial Sequence
  Description of Artificial Sequence: Synthetic oligonucleotide
auaagacaucucguaguac

SEQ ID NO: 2069055 - RNA, 19 nt, Artificial Sequence
  Description of Artificial Sequence: Synthetic oligonucleotide
uguggcccucggaacaccg

SEQ ID NO: 2069056 - RNA, 19 nt, Artificial Sequence
  Description of Artificial Sequence: Synthetic oligonucleotide
acgggaagcggugucaagg

SEQ ID NO: 2069057 - RNA, 19 nt, Artificial Sequence
  Description of Artificial Sequence: Synthetic oligonucleotide
uugcguuguguacauucug

SEQ ID NO: 2069058 - RNA, 19 nt, Artificial Sequence
  Description of Artificial Sequence: Synthetic oligonucleotide
guaguacaugacguaaugc

SEQ ID NO: 2069059 - RNA, 19 nt, Artificial Sequence
  Description of Artificial Sequence: Synthetic oligonucleotide
augcuccugugacaaauag

SEQ ID NO: 2069060 - RNA, 19 nt, Artificial Sequence
  Description of Artificial Sequence: Synthetic oligonucleotide
ugucggaugauggaguuua

SEQ ID NO: 2069061 - RNA, 19 nt, Artificial Sequence
  Description of Artificial Sequence: Synthetic oligonucleotide
cuucgagucacuuccucuc

SEQ ID NO: 2069062 - RNA, 19 nt, Artificial Sequence
  Description of Artificial Sequence: Synthetic oligonucleotide
ugguacugggcuugcagca

SEQ ID NO: 2069063 - RNA, 19 nt, Artificial Sequence
  Description of Artificial Sequence: Synthetic oligonucleotide
cacgauuucagccuguuua

SEQ ID NO: 2069064 - RNA, 19 nt, Artificial Sequence
  Description of Artificial Sequence: Synthetic oligonucleotide
uguagccugggguaccucu

SEQ ID NO: 2069065 - RNA, 19 nt, Artificial Sequence
  Description of Artificial Sequence: Synthetic oligonucleotide
cuugucgcacuccagcuuc

SEQ ID NO: 2069066 - RNA, 19 nt, Artificial Sequence
  Description of Artificial Sequence: Synthetic oligonucleotide
gcgcaaaucccauucagcc

SEQ ID NO: 2069067 - RNA, 19 nt, Artificial Sequence
  Description of Artificial Sequence: Synthetic oligonucleotide
agccuguuuaugcaucuca

SEQ ID NO: 2069068 - RNA, 19 nt, Artificial Sequence
  Description of Artificial Sequence: Synthetic oligonucleotide
aaacaucaugucagucgcg

SEQ ID NO: 2069069 - RNA, 19 nt, Artificial Sequence
  Description of Artificial Sequence: Synthetic oligonucleotide
cuuucgugggcaaggggac

SEQ ID NO: 2069070 - RNA, 19 nt, Artificial Sequence
  Description of Artificial Sequence: Synthetic oligonucleotide
cucaauguucaauccauaa

SEQ ID NO: 2069071 - RNA, 19 nt, Artificial Sequence
  Description of Artificial Sequence: Synthetic oligonucleotide
ggagccgugaccugcuugg

SEQ ID NO: 2069072 - RNA, 19 nt, Artificial Sequence
  Description of Artificial Sequence: Synthetic oligonucleotide
cuagcguugcguuguguac

SEQ ID NO: 2069073 - RNA, 19 nt, Artificial Sequence
  Description of Artificial Sequence: Synthetic oligonucleotide
aucucguaguacaugacgu

SEQ ID NO: 2069074 - RNA, 19 nt, Artificial Sequence
  Description of Artificial Sequence: Synthetic oligonucleotide
uuagagagguggguuugag

SEQ ID NO: 2069075 - RNA, 19 nt, Artificial Sequence
  Description of Artificial Sequence: Synthetic oligonucleotide
cuuugcggaaacaucaugu

SEQ ID NO: 2069076 - RNA, 19 nt, Artificial Sequence
  Description of Artificial Sequence: Synthetic oligonucleotide
uuggguagugaccgagcug

SEQ ID NO: 2069077 - RNA, 19 nt, Artificial Sequence
  Description of Artificial Sequence: Synthetic oligonucleotide
ucguaguacaugacguaau

SEQ ID NO: 2069078 - RNA, 19 nt, Artificial Sequence
  Description of Artificial Sequence: Synthetic oligonucleotide
gagcccagcgcugacagug

SEQ ID NO: 2069079 - RNA, 19 nt, Artificial Sequence
  Description of Artificial Sequence: Synthetic oligonucleotide
uacaugacguaaugccgcu

SEQ ID NO: 2069080 - RNA, 19 nt, Artificial Sequence
  Description of Artificial Sequence: Synthetic oligonucleotide
acgauuucagccuguuuau

SEQ ID NO: 2069081 - RNA, 19 nt, Artificial Sequence
  Description of Artificial Sequence: Synthetic oligonucleotide
gauggaguuuagcucggga

SEQ ID NO: 2069082 - RNA, 19 nt, Artificial Sequence
  Description of Artificial Sequence: Synthetic oligonucleotide
uuugauccggucgcaggag

SEQ ID NO: 2069083 - RNA, 19 nt, Artificial Sequence
  Description of Artificial Sequence: Synthetic oligonucleotide
gaagcggugucaagggcag

SEQ ID NO: 2069084 - RNA, 19 nt, Artificial Sequence
  Description of Artificial Sequence: Synthetic oligonucleotide
cucacguuuauuuggggaa

SEQ ID NO: 2069085 - RNA, 19 nt, Artificial Sequence
  Description of Artificial Sequence: Synthetic oligonucleotide
gauccggucgcaggagucg

SEQ ID NO: 2069086 - RNA, 19 nt, Artificial Sequence
  Description of Artificial Sequence: Synthetic oligonucleotide
uuucagccuguuuaugcau

SEQ ID NO: 2069087 - RNA, 19 nt, Artificial Sequence
  Description of Artificial Sequence: Synthetic oligonucleotide
uucgagucacuuccucucu

SEQ ID NO: 2069088 - RNA, 19 nt, Artificial Sequence
  Description of Artificial Sequence: Synthetic oligonucleotide
agaaggccggaaccaggac

SEQ ID NO: 2069089 - RNA, 19 nt, Artificial Sequence
  Description of Artificial Sequence: Synthetic oligonucleotide
caggaccagacucugggug

SEQ ID NO: 2069090 - RNA, 19 nt, Artificial Sequence
  Description of Artificial Sequence: Synthetic oligonucleotide
ucgauggcucccaggaccu

SEQ ID NO: 2069091 - RNA, 19 nt, Artificial Sequence
  Description of Artificial Sequence: Synthetic oligonucleotide
aaggggagaaaggaaguuu

SEQ ID NO: 2069092 - RNA, 19 nt, Artificial Sequence
  Description of Artificial Sequence: Synthetic oligonucleotide
gggguggaaacuuggguag

SEQ ID NO: 2069093 - RNA, 19 nt, Artificial Sequence
  Description of Artificial Sequence: Synthetic oligonucleotide
acuuggguagugaccgagc

SEQ ID NO: 2069094 - RNA, 19 nt, Artificial Sequence
  Description of Artificial Sequence: Synthetic oligonucleotide
ucgagucacuuccucucug

SEQ ID NO: 2069095 - RNA, 19 nt, Artificial Sequence
  Description of Artificial Sequence: Synthetic oligonucleotide
acguaaugccgcugcaucu

SEQ ID NO: 2069096 - RNA, 19 nt, Artificial Sequence
  Description of Artificial Sequence: Synthetic oligonucleotide
uagugaccgagcugugugc

SEQ ID NO: 2069097 - RNA, 19 nt, Artificial Sequence
  Description of Artificial Sequence: Synthetic oligonucleotide
uguacauucuggggccaag

SEQ ID NO: 2069098 - RNA, 19 nt, Artificial Sequence
  Description of Artificial Sequence: Synthetic oligonucleotide
aggaccagacucugggugu

SEQ ID NO: 2069099 - RNA, 19 nt, Artificial Sequence
  Description of Artificial Sequence: Synthetic oligonucleotide
ugaguguccccaucguguc

SEQ ID NO: 2069100 - RNA, 19 nt, Artificial Sequence
  Description of Artificial Sequence: Synthetic oligonucleotide
cuugcagcagcuggaauuc

SEQ ID NO: 2069101 - RNA, 19 nt, Artificial Sequence
  Description of Artificial Sequence: Synthetic oligonucleotide
cauaagacaucucguagua

SEQ ID NO: 2069102 - RNA, 19 nt, Artificial Sequence
  Description of Artificial Sequence: Synthetic oligonucleotide
ucucguaguacaugacgua

SEQ ID NO: 2069103 - RNA, 19 nt, Artificial Sequence
  Description of Artificial Sequence: Synthetic oligonucleotide
agcuugucgcacuccagcu

SEQ ID NO: 2069104 - RNA, 19 nt, Artificial Sequence
  Description of Artificial Sequence: Synthetic oligonucleotide
gaaccugggcgcaaauccc

SEQ ID NO: 2069105 - RNA, 19 nt, Artificial Sequence
  Description of Artificial Sequence: Synthetic oligonucleotide
uaugcaucucaauguucaa

SEQ ID NO: 2069106 - RNA, 19 nt, Artificial Sequence
  Description of Artificial Sequence: Synthetic oligonucleotide
cuccugugacaaauagggc

SEQ ID NO: 2069107 - RNA, 19 nt, Artificial Sequence
  Description of Artificial Sequence: Synthetic oligonucleotide
acauucuggggccaagauu

SEQ ID NO: 2069108 - RNA, 19 nt, Artificial Sequence
  Description of Artificial Sequence: Synthetic oligonucleotide
cugggcgcaaaucccauuc

SEQ ID NO: 2069109 - RNA, 19 nt, Artificial Sequence
  Description of Artificial Sequence: Synthetic oligonucleotide
uagcguugcguuguguaca

SEQ ID NO: 2069110 - RNA, 19 nt, Artificial Sequence
  Description of Artificial Sequence: Synthetic oligonucleotide
uugauccggucgcaggagu

SEQ ID NO: 2069111 - RNA, 19 nt, Artificial Sequence
  Description of Artificial Sequence: Synthetic oligonucleotide
aaacuuggguagugaccga

SEQ ID NO: 2069112 - RNA, 19 nt, Artificial Sequence
  Description of Artificial Sequence: Synthetic oligonucleotide
agacccggggugcacagca

SEQ ID NO: 2069113 - RNA, 19 nt, Artificial Sequence
  Description of Artificial Sequence: Synthetic oligonucleotide
gcguuguguacauucuggg

SEQ ID NO: 2069114 - RNA, 19 nt, Artificial Sequence
  Description of Artificial Sequence: Synthetic oligonucleotide
ugaccgcagggagcgaugg

SEQ ID NO: 2069115 - RNA, 19 nt, Artificial Sequence
  Description of Artificial Sequence: Synthetic oligonucleotide
uccuuagagagguggguuu

SEQ ID NO: 2069116 - RNA, 19 nt, Artificial Sequence
  Description of Artificial Sequence: Synthetic oligonucleotide
gaguuuagcucgggagccg

SEQ ID NO: 2069117 - RNA, 19 nt, Artificial Sequence
  Description of Artificial Sequence: Synthetic oligonucleotide
aguccgacuucucgccauc

SEQ ID NO: 2069118 - RNA, 19 nt, Artificial Sequence
  Description of Artificial Sequence: Synthetic oligonucleotide
cuggaguccccuagacccg

SEQ ID NO: 2069119 - RNA, 19 nt, Artificial Sequence
  Description of Artificial Sequence: Synthetic oligonucleotide
acaucucguaguacaugac

SEQ ID NO: 2069120 - RNA, 19 nt, Artificial Sequence
  Description of Artificial Sequence: Synthetic oligonucleotide
ugcugaugcuccugugaca

SEQ ID NO: 2069121 - RNA, 19 nt, Artificial Sequence
  Description of Artificial Sequence: Synthetic oligonucleotide
ucguguccguucuuguccu

SEQ ID NO: 2069122 - RNA, 19 nt, Artificial Sequence
  Description of Artificial Sequence: Synthetic oligonucleotide
uaaugccgcugcaucucug

SEQ ID NO: 2069123 - RNA, 19 nt, Artificial Sequence
  Description of Artificial Sequence: Synthetic oligonucleotide
ugauggaguuuagcucggg

SEQ ID NO: 2069124 - RNA, 19 nt, Artificial Sequence
  Description of Artificial Sequence: Synthetic oligonucleotide
gacaaauagggcagaaccu

SEQ ID NO: 2069125 - RNA, 19 nt, Artificial Sequence
  Description of Artificial Sequence: Synthetic oligonucleotide
ugauccggucgcaggaguc

SEQ ID NO: 2069126 - RNA, 19 nt, Artificial Sequence
  Description of Artificial Sequence: Synthetic oligonucleotide
acccucacguuuauuuggg

SEQ ID NO: 2069127 - RNA, 19 nt, Artificial Sequence
  Description of Artificial Sequence: Synthetic oligonucleotide
agcuggaauucaucuuuga

SEQ ID NO: 2069128 - RNA, 19 nt, Artificial Sequence
  Description of Artificial Sequence: Synthetic oligonucleotide
ggaguuuagcucgggagcc

SEQ ID NO: 2069129 - RNA, 19 nt, Artificial Sequence
  Description of Artificial Sequence: Synthetic oligonucleotide
uccccaucguguccguucu

SEQ ID NO: 2069130 - RNA, 19 nt, Artificial Sequence
  Description of Artificial Sequence: Synthetic oligonucleotide
ugggcgcaaaucccauuca

SEQ ID NO: 2069131 - RNA, 19 nt, Artificial Sequence
  Description of Artificial Sequence: Synthetic oligonucleotide
gcuaguccgacuucucgcc

SEQ ID NO: 2069132 - RNA, 19 nt, Artificial Sequence
  Description of Artificial Sequence: Synthetic oligonucleotide
ugaccgagcugugugcugu

SEQ ID NO: 2069133 - RNA, 19 nt, Artificial Sequence
  Description of Artificial Sequence: Synthetic oligonucleotide
gaaggccggaaccaggacu

SEQ ID NO: 2069134 - RNA, 19 nt, Artificial Sequence
  Description of Artificial Sequence: Synthetic oligonucleotide
guucaauccauaagacauc

SEQ ID NO: 2069135 - RNA, 19 nt, Artificial Sequence
  Description of Artificial Sequence: Synthetic oligonucleotide
ucauccuccuggugagugu

SEQ ID NO: 2069136 - RNA, 19 nt, Artificial Sequence
  Description of Artificial Sequence: Synthetic oligonucleotide
aauguggagguggggcccu

SEQ ID NO: 2069137 - RNA, 19 nt, Artificial Sequence
  Description of Artificial Sequence: Synthetic oligonucleotide
gaguccccuagacccgggg

SEQ ID NO: 2069138 - RNA, 19 nt, Artificial Sequence
  Description of Artificial Sequence: Synthetic oligonucleotide
guccccuagacccggggug

SEQ ID NO: 2069139 - RNA, 19 nt, Artificial Sequence
  Description of Artificial Sequence: Synthetic oligonucleotide
caucguguccguucuuguc

SEQ ID NO: 2069140 - RNA, 19 nt, Artificial Sequence
  Description of Artificial Sequence: Synthetic oligonucleotide
uggugaguguccccaucgu

SEQ ID NO: 2069141 - RNA, 19 nt, Artificial Sequence
  Description of Artificial Sequence: Synthetic oligonucleotide
ucucgauggcucccaggac

SEQ ID NO: 2069142 - RNA, 19 nt, Artificial Sequence
  Description of Artificial Sequence: Synthetic oligonucleotide
gaacaccgugaccuaucug

SEQ ID NO: 2069143 - RNA, 19 nt, Artificial Sequence
  Description of Artificial Sequence: Synthetic oligonucleotide
uguccguucuuguccuccu

SEQ ID NO: 2069144 - RNA, 19 nt, Artificial Sequence
  Description of Artificial Sequence: Synthetic oligonucleotide
aggagcuaguccgacuucu

SEQ ID NO: 2069145 - RNA, 19 nt, Artificial Sequence
  Description of Artificial Sequence: Synthetic oligonucleotide
gguaaauguggaggugggg

SEQ ID NO: 2069146 - RNA, 19 nt, Artificial Sequence
  Description of Artificial Sequence: Synthetic oligonucleotide
uggagccccacgggaagcg

SEQ ID NO: 2069147 - RNA, 19 nt, Artificial Sequence
  Description of Artificial Sequence: Synthetic oligonucleotide
cuagacccggggugcacag

SEQ ID NO: 2069148 - RNA, 19 nt, Artificial Sequence
  Description of Artificial Sequence: Synthetic oligonucleotide
cugcuuggcucucucgaug

SEQ ID NO: 2069149 - RNA, 19 nt, Artificial Sequence
  Description of Artificial Sequence: Synthetic oligonucleotide
uuucgugggcaaggggacc

SEQ ID NO: 2069150 - RNA, 19 nt, Artificial Sequence
  Description of Artificial Sequence: Synthetic oligonucleotide
gguuugagagcccagcgcu

SEQ ID NO: 2069151 - RNA, 19 nt, Artificial Sequence
  Description of Artificial Sequence: Synthetic oligonucleotide
gagucacuuccucucuguc

SEQ ID NO: 2069152 - RNA, 19 nt, Artificial Sequence
  Description of Artificial Sequence: Synthetic oligonucleotide
augacguaaugccgcugca

SEQ ID NO: 2069153 - RNA, 19 nt, Artificial Sequence
  Description of Artificial Sequence: Synthetic oligonucleotide
gagcgauggcggcuggagc

SEQ ID NO: 2069154 - RNA, 19 nt, Artificial Sequence
  Description of Artificial Sequence: Synthetic oligonucleotide
guggcccggguaaaugugg

SEQ ID NO: 2069155 - RNA, 19 nt, Artificial Sequence
  Description of Artificial Sequence: Synthetic oligonucleotide
ccgagugccggcuuugcgg

SEQ ID NO: 2069156 - RNA, 19 nt, Artificial Sequence
  Description of Artificial Sequence: Synthetic oligonucleotide
guccccgugccuucgaguc

SEQ ID NO: 2069157 - RNA, 19 nt, Artificial Sequence
  Description of Artificial Sequence: Synthetic oligonucleotide
ggugaguguccccaucgug

SEQ ID NO: 2069158 - RNA, 19 nt, Artificial Sequence
  Description of Artificial Sequence: Synthetic oligonucleotide
agugaccgagcugugugcu

SEQ ID NO: 2069159 - RNA, 19 nt, Artificial Sequence
  Description of Artificial Sequence: Synthetic oligonucleotide
ggguuugagagcccagcgc

SEQ ID NO: 2069160 - RNA, 19 nt, Artificial Sequence
  Description of Artificial Sequence: Synthetic oligonucleotide
aguccccuagacccggggu

SEQ ID NO: 2069161 - RNA, 19 nt, Artificial Sequence
  Description of Artificial Sequence: Synthetic oligonucleotide
cugggacaacuggugagcc

SEQ ID NO: 2069162 - RNA, 19 nt, Artificial Sequence
  Description of Artificial Sequence: Synthetic oligonucleotide
aguuuagcucgggagccgu

SEQ ID NO: 2069163 - RNA, 19 nt, Artificial Sequence
  Description of Artificial Sequence: Synthetic oligonucleotide
uccccuagacccggggugc

SEQ ID NO: 2069164 - RNA, 19 nt, Artificial Sequence
  Description of Artificial Sequence: Synthetic oligonucleotide
uaguccgacuucucgccau

SEQ ID NO: 2069165 - RNA, 19 nt, Artificial Sequence
  Description of Artificial Sequence: Synthetic oligonucleotide
agcguugcguuguguacau

SEQ ID NO: 2069166 - RNA, 19 nt, Artificial Sequence
  Description of Artificial Sequence: Synthetic oligonucleotide
ugacguaaugccgcugcau

SEQ ID NO: 2069167 - RNA, 19 nt, Artificial Sequence
  Description of Artificial Sequence: Synthetic oligonucleotide
ccagcgcugacagugacag

SEQ ID NO: 2069168 - RNA, 19 nt, Artificial Sequence
  Description of Artificial Sequence: Synthetic oligonucleotide
cagcuucaggcugugguac

SEQ ID NO: 2069169 - RNA, 19 nt, Artificial Sequence
  Description of Artificial Sequence: Synthetic oligonucleotide
gcccggguaaauguggagg

SEQ ID NO: 2069170 - RNA, 19 nt, Artificial Sequence
  Description of Artificial Sequence: Synthetic oligonucleotide
gcuuugcggaaacaucaug

SEQ ID NO: 2069171 - RNA, 19 nt, Artificial Sequence
  Description of Artificial Sequence: Synthetic oligonucleotide
cucguaguacaugacguaa

SEQ ID NO: 2069172 - RNA, 19 nt, Artificial Sequence
  Description of Artificial Sequence: Synthetic oligonucleotide
uugucgcacuccagcuuca

SEQ ID NO: 2069173 - RNA, 19 nt, Artificial Sequence
  Description of Artificial Sequence: Synthetic oligonucleotide
uggcucucucgauggcucc

SEQ ID NO: 2069174 - RNA, 19 nt, Artificial Sequence
  Description of Artificial Sequence: Synthetic oligonucleotide
ucacgauuucagccuguuu

SEQ ID NO: 2069175 - RNA, 19 nt, Artificial Sequence
  Description of Artificial Sequence: Synthetic oligonucleotide
gggcgcaaaucccauucag

SEQ ID NO: 2069176 - RNA, 19 nt, Artificial Sequence
  Description of Artificial Sequence: Synthetic oligonucleotide
guuugagagcccagcgcug

SEQ ID NO: 2069177 - RNA, 19 nt, Artificial Sequence
  Description of Artificial Sequence: Synthetic oligonucleotide
gguaccucucuggaguccc

SEQ ID NO: 2069178 - RNA, 19 nt, Artificial Sequence
  Description of Artificial Sequence: Synthetic oligonucleotide
uccgacuucucgccaucau

SEQ ID NO: 2069179 - RNA, 19 nt, Artificial Sequence
  Description of Artificial Sequence: Synthetic oligonucleotide
cguugcguuguguacauuc

SEQ ID NO: 2069180 - RNA, 19 nt, Artificial Sequence
  Description of Artificial Sequence: Synthetic oligonucleotide
ccaagauugguggcugugg

SEQ ID NO: 2069181 - RNA, 19 nt, Artificial Sequence
  Description of Artificial Sequence: Synthetic oligonucleotide
cguaguacaugacguaaug

SEQ ID NO: 2069182 - RNA, 19 nt, Artificial Sequence
  Description of Artificial Sequence: Synthetic oligonucleotide
cguuuauuuggggaagggg

SEQ ID NO: 2069183 - RNA, 19 nt, Artificial Sequence
  Description of Artificial Sequence: Synthetic oligonucleotide
auccggucgcaggagucgg

SEQ ID NO: 2069184 - RNA, 19 nt, Artificial Sequence
  Description of Artificial Sequence: Synthetic oligonucleotide
agcaggccggugcccgcgc

SEQ ID NO: 2069185 - RNA, 19 nt, Artificial Sequence
  Description of Artificial Sequence: Synthetic oligonucleotide
ggaagcggugucaagggca

SEQ ID NO: 2069186 - RNA, 19 nt, Artificial Sequence
  Description of Artificial Sequence: Synthetic oligonucleotide
aguccccgugccuucgagu

SEQ ID NO: 2069187 - RNA, 19 nt, Artificial Sequence
  Description of Artificial Sequence: Synthetic oligonucleotide
uguccuccuuagagaggug

SEQ ID NO: 2069188 - RNA, 19 nt, Artificial Sequence
  Description of Artificial Sequence: Synthetic oligonucleotide
agccgugaccugcuuggcu

SEQ ID NO: 2069189 - RNA, 19 nt, Artificial Sequence
  Description of Artificial Sequence: Synthetic oligonucleotide
ggcgcaaaucccauucagc

SEQ ID NO: 2069190 - RNA, 19 nt, Artificial Sequence
  Description of Artificial Sequence: Synthetic oligonucleotide
auucagccucuucacgauu

SEQ ID NO: 2069191 - RNA, 19 nt, Artificial Sequence
  Description of Artificial Sequence: Synthetic oligonucleotide
ugucuccccuguguccucc

SEQ ID NO: 2069192 - RNA, 19 nt, Artificial Sequence
  Description of Artificial Sequence: Synthetic oligonucleotide
uccccgugccuucgaguca

SEQ ID NO: 2069193 - RNA, 19 nt, Artificial Sequence
  Description of Artificial Sequence: Synthetic oligonucleotide
cuuggguagugaccgagcu

SEQ ID NO: 2069194 - RNA, 19 nt, Artificial Sequence
  Description of Artificial Sequence: Synthetic oligonucleotide
gggugcacagcaagaaggc

SEQ ID NO: 2069195 - RNA, 19 nt, Artificial Sequence
  Description of Artificial Sequence: Synthetic oligonucleotide
gcugggacaacuggugagc

SEQ ID NO: 2069196 - RNA, 19 nt, Artificial Sequence
  Description of Artificial Sequence: Synthetic oligonucleotide
cggguaaauguggaggugg

SEQ ID NO: 2069197 - RNA, 19 nt, Artificial Sequence
  Description of Artificial Sequence: Synthetic oligonucleotide
guacauucuggggccaaga

SEQ ID NO: 2069198 - RNA, 19 nt, Artificial Sequence
  Description of Artificial Sequence: Synthetic oligonucleotide
cugaccgcagggagcgaug

SEQ ID NO: 2069199 - RNA, 19 nt, Artificial Sequence
  Description of Artificial Sequence: Synthetic oligonucleotide
gcugaugcuccugugacaa

SEQ ID NO: 2069200 - RNA, 19 nt, Artificial Sequence
  Description of Artificial Sequence: Synthetic oligonucleotide
ugccgcugcaucucugauu

SEQ ID NO: 2069201 - RNA, 19 nt, Artificial Sequence
  Description of Artificial Sequence: Synthetic oligonucleotide
ggugcacagcaagaaggcc

SEQ ID NO: 2069202 - RNA, 19 nt, Artificial Sequence
  Description of Artificial Sequence: Synthetic oligonucleotide
agguggguuugagagccca

SEQ ID NO: 2069203 - RNA, 19 nt, Artificial Sequence
  Description of Artificial Sequence: Synthetic oligonucleotide
acaugacguaaugccgcug

SEQ ID NO: 2069204 - RNA, 19 nt, Artificial Sequence
  Description of Artificial Sequence: Synthetic oligonucleotide
gggaggugggaggagcccg

SEQ ID NO: 2069205 - RNA, 19 nt, Artificial Sequence
  Description of Artificial Sequence: Synthetic oligonucleotide
cagcagcuggaauucaucu

SEQ ID NO: 2069206 - RNA, 19 nt, Artificial Sequence
  Description of Artificial Sequence: Synthetic oligonucleotide
gugaccgagcugugugcug

SEQ ID NO: 2069207 - RNA, 19 nt, Artificial Sequence
  Description of Artificial Sequence: Synthetic oligonucleotide
ggagcgauggcggcuggag

SEQ ID NO: 2069208 - RNA, 19 nt, Artificial Sequence
  Description of Artificial Sequence: Synthetic oligonucleotide
aggagucggagguggugaa

SEQ ID NO: 2069209 - RNA, 19 nt, Artificial Sequence
  Description of Artificial Sequence: Synthetic oligonucleotide
cagaaccugggcgcaaauc

SEQ ID NO: 2069210 - RNA, 19 nt, Artificial Sequence
  Description of Artificial Sequence: Synthetic oligonucleotide
gauuucucacuggccagcu

SEQ ID NO: 2069211 - RNA, 19 nt, Artificial Sequence
  Description of Artificial Sequence: Synthetic oligonucleotide
ggcagcuagcguugcguug

SEQ ID NO: 2069212 - RNA, 19 nt, Artificial Sequence
  Description of Artificial Sequence: Synthetic oligonucleotide
gaugcuccugugacaaaua

SEQ ID NO: 2069213 - RNA, 19 nt, Artificial Sequence
  Description of Artificial Sequence: Synthetic oligonucleotide
ucggaacaccgugaccuau

SEQ ID NO: 2069214 - RNA, 19 nt, Artificial Sequence
  Description of Artificial Sequence: Synthetic oligonucleotide
gaccgagcugugugcugug

SEQ ID NO: 2069215 - RNA, 19 nt, Artificial Sequence
  Description of Artificial Sequence: Synthetic oligonucleotide
gcuguguggcccucggaac

SEQ ID NO: 2069216 - RNA, 19 nt, Artificial Sequence
  Description of Artificial Sequence: Synthetic oligonucleotide
gcuagcguugcguugugua

SEQ ID NO: 2069217 - RNA, 19 nt, Artificial Sequence
  Description of Artificial Sequence: Synthetic oligonucleotide
ccguucuuguccuccuuag

SEQ ID NO: 2069218 - RNA, 19 nt, Artificial Sequence
  Description of Artificial Sequence: Synthetic oligonucleotide
uccggucgcaggagucgga

SEQ ID NO: 2069219 - RNA, 19 nt, Artificial Sequence
  Description of Artificial Sequence: Synthetic oligonucleotide
gacuucucgccaucauccu

SEQ ID NO: 2069220 - RNA, 19 nt, Artificial Sequence
  Description of Artificial Sequence: Synthetic oligonucleotide
cuaguccgacuucucgcca

SEQ ID NO: 2069221 - RNA, 19 nt, Artificial Sequence
  Description of Artificial Sequence: Synthetic oligonucleotide
cugcgccccggcucgggcg

SEQ ID NO: 2069222 - RNA, 19 nt, Artificial Sequence
  Description of Artificial Sequence: Synthetic oligonucleotide
guugcguuguguacauucu

SEQ ID NO: 2069223 - RNA, 19 nt, Artificial Sequence
  Description of Artificial Sequence: Synthetic oligonucleotide
gcgcugaccgcagggagcg

SEQ ID NO: 2069224 - RNA, 19 nt, Artificial Sequence
  Description of Artificial Sequence: Synthetic oligonucleotide
ccauaagacaucucguagu

SEQ ID NO: 2069225 - RNA, 19 nt, Artificial Sequence
  Description of Artificial Sequence: Synthetic oligonucleotide
ugacagcaggccggugccc

SEQ ID NO: 2069226 - RNA, 19 nt, Artificial Sequence
  Description of Artificial Sequence: Synthetic oligonucleotide
guaaugccgcugcaucucu

SEQ ID NO: 2069227 - RNA, 19 nt, Artificial Sequence
  Description of Artificial Sequence: Synthetic oligonucleotide
cgggaagcggugucaaggg

SEQ ID NO: 2069228 - RNA, 19 nt, Artificial Sequence
  Description of Artificial Sequence: Synthetic oligonucleotide
ccuguguccuccuccccag

SEQ ID NO: 2069229 - RNA, 19 nt, Artificial Sequence
  Description of Artificial Sequence: Synthetic oligonucleotide
caggagcuaguccgacuuc

SEQ ID NO: 2069230 - RNA, 19 nt, Artificial Sequence
  Description of Artificial Sequence: Synthetic oligonucleotide
gaaggggagaaaggaaguu

SEQ ID NO: 2069231 - RNA, 19 nt, Artificial Sequence
  Description of Artificial Sequence: Synthetic oligonucleotide
agugccggcuuugcggaaa

SEQ ID NO: 2069232 - RNA, 19 nt, Artificial Sequence
  Description of Artificial Sequence: Synthetic oligonucleotide
ccucucuggaguccccuag

SEQ ID NO: 2069233 - RNA, 19 nt, Artificial Sequence
  Description of Artificial Sequence: Synthetic oligonucleotide
caguccccgugccuucgag

SEQ ID NO: 2069234 - RNA, 19 nt, Artificial Sequence
  Description of Artificial Sequence: Synthetic oligonucleotide
cccucacguuuauuugggg

SEQ ID NO: 2069235 - RNA, 19 nt, Artificial Sequence
  Description of Artificial Sequence: Synthetic oligonucleotide
ggucaggaccagacucugg

SEQ ID NO: 2069236 - RNA, 19 nt, Artificial Sequence
  Description of Artificial Sequence: Synthetic oligonucleotide
agagcccagcgcugacagu

SEQ ID NO: 2069237 - RNA, 19 nt, Artificial Sequence
  Description of Artificial Sequence: Synthetic oligonucleotide
gggagccgugaccugcuug

SEQ ID NO: 2069238 - RNA, 19 nt, Artificial Sequence
  Description of Artificial Sequence: Synthetic oligonucleotide
cggcuuugcggaaacauca

SEQ ID NO: 2069239 - RNA, 19 nt, Artificial Sequence
  Description of Artificial Sequence: Synthetic oligonucleotide
ucucacuggccagcuuguc

SEQ ID NO: 2069240 - RNA, 19 nt, Artificial Sequence
  Description of Artificial Sequence: Synthetic oligonucleotide
gcggcuggagccccacggg

SEQ ID NO: 2069241 - RNA, 19 nt, Artificial Sequence
  Description of Artificial Sequence: Synthetic oligonucleotide
ccggcuuugcggaaacauc

SEQ ID NO: 2069242 - RNA, 19 nt, Artificial Sequence
  Description of Artificial Sequence: Synthetic oligonucleotide
ggcccggguaaauguggag

SEQ ID NO: 2069243 - RNA, 19 nt, Artificial Sequence
  Description of Artificial Sequence: Synthetic oligonucleotide
ccgcagggagcgauggcgg

SEQ ID NO: 2069244 - RNA, 19 nt, Artificial Sequence
  Description of Artificial Sequence: Synthetic oligonucleotide
uagacccggggugcacagc

SEQ ID NO: 2069245 - RNA, 19 nt, Artificial Sequence
  Description of Artificial Sequence: Synthetic oligonucleotide
gccaagauugguggcugug

SEQ ID NO: 2069246 - RNA, 19 nt, Artificial Sequence
  Description of Artificial Sequence: Synthetic oligonucleotide
gguggguuugagagcccag

SEQ ID NO: 2069247 - RNA, 19 nt, Artificial Sequence
  Description of Artificial Sequence: Synthetic oligonucleotide
gccgcugcaucucugauuu

SEQ ID NO: 2069248 - RNA, 19 nt, Artificial Sequence
  Description of Artificial Sequence: Synthetic oligonucleotide
gagccgugaccugcuuggc

SEQ ID NO: 2069249 - RNA, 19 nt, Artificial Sequence
  Description of Artificial Sequence: Synthetic oligonucleotide
aaaucccauucagccucuu

SEQ ID NO: 2069250 - RNA, 19 nt, Artificial Sequence
  Description of Artificial Sequence: Synthetic oligonucleotide
ggaacaccgugaccuaucu

SEQ ID NO: 2069251 - RNA, 19 nt, Artificial Sequence
  Description of Artificial Sequence: Synthetic oligonucleotide
gugccggcuuugcggaaac

SEQ ID NO: 2069252 - RNA, 19 nt, Artificial Sequence
  Description of Artificial Sequence: Synthetic oligonucleotide
uccuccccaggagcuaguc

SEQ ID NO: 2069253 - RNA, 19 nt, Artificial Sequence
  Description of Artificial Sequence: Synthetic oligonucleotide
gagguggguuugagagccc

SEQ ID NO: 2069254 - RNA, 19 nt, Artificial Sequence
  Description of Artificial Sequence: Synthetic oligonucleotide
ggccggaaccaggacuggg

SEQ ID NO: 2069255 - RNA, 19 nt, Artificial Sequence
  Description of Artificial Sequence: Synthetic oligonucleotide
cugugacaaauagggcaga

SEQ ID NO: 2069256 - RNA, 19 nt, Artificial Sequence
  Description of Artificial Sequence: Synthetic oligonucleotide
ccucggaacaccgugaccu

SEQ ID NO: 2069257 - RNA, 19 nt, Artificial Sequence
  Description of Artificial Sequence: Synthetic oligonucleotide
aggccggaaccaggacugg

SEQ ID NO: 2069258 - RNA, 19 nt, Artificial Sequence
  Description of Artificial Sequence: Synthetic oligonucleotide
cagcaggccggugcccgcg

SEQ ID NO: 2069259 - RNA, 19 nt, Artificial Sequence
  Description of Artificial Sequence: Synthetic oligonucleotide
cccaucguguccguucuug

SEQ ID NO: 2069260 - RNA, 19 nt, Artificial Sequence
  Description of Artificial Sequence: Synthetic oligonucleotide
gggguaccucucuggaguc

SEQ ID NO: 2069261 - RNA, 19 nt, Artificial Sequence
  Description of Artificial Sequence: Synthetic oligonucleotide
agccccacgggaagcggug

SEQ ID NO: 2069262 - RNA, 19 nt, Artificial Sequence
  Description of Artificial Sequence: Synthetic oligonucleotide
ggcccuguagccuggggua

SEQ ID NO: 2069263 - RNA, 19 nt, Artificial Sequence
  Description of Artificial Sequence: Synthetic oligonucleotide
gggucaggaccagacucug

SEQ ID NO: 2069264 - RNA, 19 nt, Artificial Sequence
  Description of Artificial Sequence: Synthetic oligonucleotide
cagcgcugacagugacagc

SEQ ID NO: 2069265 - RNA, 19 nt, Artificial Sequence
  Description of Artificial Sequence: Synthetic oligonucleotide
agcuagcguugcguugugu

SEQ ID NO: 2069266 - RNA, 19 nt, Artificial Sequence
  Description of Artificial Sequence: Synthetic oligonucleotide
caaaucccauucagccucu

SEQ ID NO: 2069267 - RNA, 19 nt, Artificial Sequence
  Description of Artificial Sequence: Synthetic oligonucleotide
gcaggagucggagguggug

SEQ ID NO: 2069268 - RNA, 19 nt, Artificial Sequence
  Description of Artificial Sequence: Synthetic oligonucleotide
ccuccccaggagcuagucc

SEQ ID NO: 2069269 - RNA, 19 nt, Artificial Sequence
  Description of Artificial Sequence: Synthetic oligonucleotide
cagccucuucacgauuuca

SEQ ID NO: 2069270 - RNA, 19 nt, Artificial Sequence
  Description of Artificial Sequence: Synthetic oligonucleotide
accgagcugugugcugugu

SEQ ID NO: 2069271 - RNA, 19 nt, Artificial Sequence
  Description of Artificial Sequence: Synthetic oligonucleotide
cagcuagcguugcguugug

SEQ ID NO: 2069272 - RNA, 19 nt, Artificial Sequence
  Description of Artificial Sequence: Synthetic oligonucleotide
agcccgagugccggcuuug

SEQ ID NO: 2069273 - RNA, 19 nt, Artificial Sequence
  Description of Artificial Sequence: Synthetic oligonucleotide
cuucacgauuucagccugu

SEQ ID NO: 2069274 - RNA, 19 nt, Artificial Sequence
  Description of Artificial Sequence: Synthetic oligonucleotide
gcccucggaacaccgugac

SEQ ID NO: 2069275 - RNA, 19 nt, Artificial Sequence
  Description of Artificial Sequence: Synthetic oligonucleotide
ccgagcugugugcugugug

SEQ ID NO: 2069276 - RNA, 19 nt, Artificial Sequence
  Description of Artificial Sequence: Synthetic oligonucleotide
gcagcuagcguugcguugu

SEQ ID NO: 2069277 - RNA, 19 nt, Artificial Sequence
  Description of Artificial Sequence: Synthetic oligonucleotide
cccgagugccggcuuugcg

SEQ ID NO: 2069278 - RNA, 19 nt, Artificial Sequence
  Description of Artificial Sequence: Synthetic oligonucleotide
cacuggccagcuugucgca

SEQ ID NO: 2069279 - RNA, 19 nt, Artificial Sequence
  Description of Artificial Sequence: Synthetic oligonucleotide
cucggaacaccgugaccua

SEQ ID NO: 2069280 - RNA, 19 nt, Artificial Sequence
  Description of Artificial Sequence: Synthetic oligonucleotide
cguaaugccgcugcaucuc

SEQ ID NO: 2069281 - RNA, 19 nt, Artificial Sequence
  Description of Artificial Sequence: Synthetic oligonucleotide
caggccggugcccgcgcug

SEQ ID NO: 2069282 - RNA, 19 nt, Artificial Sequence
  Description of Artificial Sequence: Synthetic oligonucleotide
ggaaaggggcagcuagcgu

SEQ ID NO: 2069283 - RNA, 19 nt, Artificial Sequence
  Description of Artificial Sequence: Synthetic oligonucleotide
guguacauucuggggccaa

SEQ ID NO: 2069284 - RNA, 19 nt, Artificial Sequence
  Description of Artificial Sequence: Synthetic oligonucleotide
ugccggcuuugcggaaaca

SEQ ID NO: 2069285 - RNA, 19 nt, Artificial Sequence
  Description of Artificial Sequence: Synthetic oligonucleotide
gugaccuaucugugccugu

SEQ ID NO: 2069286 - RNA, 19 nt, Artificial Sequence
  Description of Artificial Sequence: Synthetic oligonucleotide
guccgacuucucgccauca

SEQ ID NO: 2069287 - RNA, 19 nt, Artificial Sequence
  Description of Artificial Sequence: Synthetic oligonucleotide
aggccggugcccgcgcuga

SEQ ID NO: 2069288 - RNA, 19 nt, Artificial Sequence
  Description of Artificial Sequence: Synthetic oligonucleotide
ggagucggagguggugaac

SEQ ID NO: 2069289 - RNA, 19 nt, Artificial Sequence
  Description of Artificial Sequence: Synthetic oligonucleotide
gacucugggugugcagggu

SEQ ID NO: 2069290 - RNA, 19 nt, Artificial Sequence
  Description of Artificial Sequence: Synthetic oligonucleotide
ggggaggugggaggagccc

SEQ ID NO: 2069291 - RNA, 19 nt, Artificial Sequence
  Description of Artificial Sequence: Synthetic oligonucleotide
accugggcgcaaaucccau

SEQ ID NO: 2069292 - RNA, 19 nt, Artificial Sequence
  Description of Artificial Sequence: Synthetic oligonucleotide
cgugaccuaucugugccug

SEQ ID NO: 2069293 - RNA, 19 nt, Artificial Sequence
  Description of Artificial Sequence: Synthetic oligonucleotide
gcggaaacaucaugucagu

SEQ ID NO: 2069294 - RNA, 19 nt, Artificial Sequence
  Description of Artificial Sequence: Synthetic oligonucleotide
cgcgcugaccgcagggagc

SEQ ID NO: 2069295 - RNA, 19 nt, Artificial Sequence
  Description of Artificial Sequence: Synthetic oligonucleotide
cugaugcuccugugacaaa

SEQ ID NO: 2069296 - RNA, 19 nt, Artificial Sequence
  Description of Artificial Sequence: Synthetic oligonucleotide
cucuguccccuucuuucgu

SEQ ID NO: 2069297 - RNA, 19 nt, Artificial Sequence
  Description of Artificial Sequence: Synthetic oligonucleotide
ccuucgagucacuuccucu

SEQ ID NO: 2069298 - RNA, 19 nt, Artificial Sequence
  Description of Artificial Sequence: Synthetic oligonucleotide
cuccuuagagagguggguu

SEQ ID NO: 2069299 - RNA, 19 nt, Artificial Sequence
  Description of Artificial Sequence: Synthetic oligonucleotide
cggaacaccgugaccuauc

SEQ ID NO: 2069300 - RNA, 19 nt, Artificial Sequence
  Description of Artificial Sequence: Synthetic oligonucleotide
gcggugucaagggcagagc

SEQ ID NO: 2069301 - RNA, 19 nt, Artificial Sequence
  Description of Artificial Sequence: Synthetic oligonucleotide
agcccagcgcugacaguga

SEQ ID NO: 2069302 - RNA, 19 nt, Artificial Sequence
  Description of Artificial Sequence: Synthetic oligonucleotide
gguagugaccgagcugugu

SEQ ID NO: 2069303 - RNA, 19 nt, Artificial Sequence
  Description of Artificial Sequence: Synthetic oligonucleotide
gagugccggcuuugcggaa

SEQ ID NO: 2069304 - RNA, 19 nt, Artificial Sequence
  Description of Artificial Sequence: Synthetic oligonucleotide
cccucggaacaccgugacc

SEQ ID NO: 2069305 - RNA, 19 nt, Artificial Sequence
  Description of Artificial Sequence: Synthetic oligonucleotide
gcgauggcggcuggagccc

SEQ ID NO: 2069306 - RNA, 19 nt, Artificial Sequence
  Description of Artificial Sequence: Synthetic oligonucleotide
ggugcccgcgcugaccgca

SEQ ID NO: 2069307 - RNA, 19 nt, Artificial Sequence
  Description of Artificial Sequence: Synthetic oligonucleotide
cgauuucagccuguuuaug

SEQ ID NO: 2069308 - RNA, 19 nt, Artificial Sequence
  Description of Artificial Sequence: Synthetic oligonucleotide
cccggguaaauguggaggu

SEQ ID NO: 2069309 - RNA, 19 nt, Artificial Sequence
  Description of Artificial Sequence: Synthetic oligonucleotide
ccgcgcugaccgcagggag

SEQ ID NO: 2069310 - RNA, 19 nt, Artificial Sequence
  Description of Artificial Sequence: Synthetic oligonucleotide
ccggguaaauguggaggug

SEQ ID NO: 2069311 - RNA, 19 nt, Artificial Sequence
  Description of Artificial Sequence: Synthetic oligonucleotide
ccggucgcaggagucggag

SEQ ID NO: 2069312 - RNA, 19 nt, Artificial Sequence
  Description of Artificial Sequence: Synthetic oligonucleotide
ccccacugcaguccccgug

SEQ ID NO: 2069313 - RNA, 19 nt, Artificial Sequence
  Description of Artificial Sequence: Synthetic oligonucleotide
gcugcgccccggcucgggc

SEQ ID NO: 2069314 - RNA, 19 nt, Artificial Sequence
  Description of Artificial Sequence: Synthetic oligonucleotide
guggugaacuugagcugcu

SEQ ID NO: 2069315 - RNA, 19 nt, Artificial Sequence
  Description of Artificial Sequence: Synthetic oligonucleotide
ggaggugggaggagcccga

SEQ ID NO: 2069316 - RNA, 19 nt, Artificial Sequence
  Description of Artificial Sequence: Synthetic oligonucleotide
caaggggaccaggcuggga

SEQ ID NO: 2069317 - RNA, 19 nt, Artificial Sequence
  Description of Artificial Sequence: Synthetic oligonucleotide
gugcccgcgcugaccgcag

SEQ ID NO: 2069318 - RNA, 19 nt, Artificial Sequence
  Description of Artificial Sequence: Synthetic oligonucleotide
cccuguagccugggguacc

SEQ ID NO: 2069319 - RNA, 19 nt, Artificial Sequence
  Description of Artificial Sequence: Synthetic oligonucleotide
ccaggagcuaguccgacuu

SEQ ID NO: 2069320 - RNA, 19 nt, Artificial Sequence
  Description of Artificial Sequence: Synthetic oligonucleotide
ggguagugaccgagcugug

SEQ ID NO: 2069321 - RNA, 19 nt, Artificial Sequence
  Description of Artificial Sequence: Synthetic oligonucleotide
ggggcagcuagcguugcgu

SEQ ID NO: 2069322 - RNA, 19 nt, Artificial Sequence
  Description of Artificial Sequence: Synthetic oligonucleotide
ggcccucggaacaccguga

SEQ ID NO: 2069323 - RNA, 19 nt, Artificial Sequence
  Description of Artificial Sequence: Synthetic oligonucleotide
gcucucucgauggcuccca

SEQ ID NO: 2069324 - RNA, 19 nt, Artificial Sequence
  Description of Artificial Sequence: Synthetic oligonucleotide
cccggggugcacagcaaga

SEQ ID NO: 2069325 - RNA, 19 nt, Artificial Sequence
  Description of Artificial Sequence: Synthetic oligonucleotide
gacccggggugcacagcaa

SEQ ID NO: 2069326 - RNA, 19 nt, Artificial Sequence
  Description of Artificial Sequence: Synthetic oligonucleotide
cugggugugcaggguggaa

SEQ ID NO: 2069327 - RNA, 19 nt, Artificial Sequence
  Description of Artificial Sequence: Synthetic oligonucleotide
cgcaaaucccauucagccu

SEQ ID NO: 2069328 - RNA, 19 nt, Artificial Sequence
  Description of Artificial Sequence: Synthetic oligonucleotide
ccuagacccggggugcaca

SEQ ID NO: 2069329 - RNA, 19 nt, Artificial Sequence
  Description of Artificial Sequence: Synthetic oligonucleotide
gcuugucgcacuccagcuu

SEQ ID NO: 2069330 - RNA, 19 nt, Artificial Sequence
  Description of Artificial Sequence: Synthetic oligonucleotide
gccggcuuugcggaaacau

SEQ ID NO: 2069331 - RNA, 19 nt, Artificial Sequence
  Description of Artificial Sequence: Synthetic oligonucleotide
gagcccgagugccggcuuu

SEQ ID NO: 2069332 - RNA, 19 nt, Artificial Sequence
  Description of Artificial Sequence: Synthetic oligonucleotide
ggcuuugcggaaacaucau

SEQ ID NO: 2069333 - RNA, 19 nt, Artificial Sequence
  Description of Artificial Sequence: Synthetic oligonucleotide
ggccaagauugguggcugu

SEQ ID NO: 2069334 - RNA, 19 nt, Artificial Sequence
  Description of Artificial Sequence: Synthetic oligonucleotide
ccaucguguccguucuugu

SEQ ID NO: 2069335 - RNA, 19 nt, Artificial Sequence
  Description of Artificial Sequence: Synthetic oligonucleotide
guccguucuuguccuccuu

SEQ ID NO: 2069336 - RNA, 19 nt, Artificial Sequence
  Description of Artificial Sequence: Synthetic oligonucleotide
ggguggaaacuuggguagu

SEQ ID NO: 2069337 - RNA, 19 nt, Artificial Sequence
  Description of Artificial Sequence: Synthetic oligonucleotide
ccccacgggaagcgguguc

SEQ ID NO: 2069338 - RNA, 19 nt, Artificial Sequence
  Description of Artificial Sequence: Synthetic oligonucleotide
cccacgggaagcgguguca

SEQ ID NO: 2069339 - RNA, 19 nt, Artificial Sequence
  Description of Artificial Sequence: Synthetic oligonucleotide
gcccgagugccggcuuugc

SEQ ID NO: 2069340 - RNA, 19 nt, Artificial Sequence
  Description of Artificial Sequence: Synthetic oligonucleotide
gggcagcuagcguugcguu

SEQ ID NO: 2069341 - RNA, 19 nt, Artificial Sequence
  Description of Artificial Sequence: Synthetic oligonucleotide
ccggggugcacagcaagaa

SEQ ID NO: 2069342 - RNA, 19 nt, Artificial Sequence
  Description of Artificial Sequence: Synthetic oligonucleotide
ccccaggagcuaguccgac

SEQ ID NO: 2069343 - RNA, 19 nt, Artificial Sequence
  Description of Artificial Sequence: Synthetic oligonucleotide
ccuccuuagagaggugggu

SEQ ID NO: 2069344 - RNA, 19 nt, Artificial Sequence
  Description of Artificial Sequence: Synthetic oligonucleotide
guggcccucggaacaccgu

SEQ ID NO: 2069345 - RNA, 19 nt, Artificial Sequence
  Description of Artificial Sequence: Synthetic oligonucleotide
gcugaccgcagggagcgau

SEQ ID NO: 2069346 - RNA, 19 nt, Artificial Sequence
  Description of Artificial Sequence: Synthetic oligonucleotide
gcagaaccugggcgcaaau

SEQ ID NO: 2069347 - RNA, 19 nt, Artificial Sequence
  Description of Artificial Sequence: Synthetic oligonucleotide
guguccccaucguguccgu

SEQ ID NO: 2069348 - RNA, 19 nt, Artificial Sequence
  Description of Artificial Sequence: Synthetic oligonucleotide
cuccuccccaggagcuagu

SEQ ID NO: 2069349 - RNA, 19 nt, Artificial Sequence
  Description of Artificial Sequence: Synthetic oligonucleotide
gggagcgauggcggcugga

SEQ ID NO: 2069350 - RNA, 19 nt, Artificial Sequence
  Description of Artificial Sequence: Synthetic oligonucleotide
cccuagacccggggugcac

SEQ ID NO: 2069351 - RNA, 19 nt, Artificial Sequence
  Description of Artificial Sequence: Synthetic oligonucleotide
ggguggaaaggggcagcua

SEQ ID NO: 2069352 - RNA, 19 nt, Artificial Sequence
  Description of Artificial Sequence: Synthetic oligonucleotide
cccggcucgggcggcucgg

SEQ ID NO: 2069353 - RNA, 19 nt, Artificial Sequence
  Description of Artificial Sequence: Synthetic oligonucleotide
ccgugaccuaucugugccu

SEQ ID NO: 2069354 - RNA, 19 nt, Artificial Sequence
  Description of Artificial Sequence: Synthetic oligonucleotide
ccgugaccugcuuggcucu

SEQ ID NO: 2069355 - RNA, 19 nt, Artificial Sequence
  Description of Artificial Sequence: Synthetic oligonucleotide
cggcucgggcggcucgggg

SEQ ID NO: 2069356 - RNA, 19 nt, Artificial Sequence
  Description of Artificial Sequence: Synthetic oligonucleotide
ccgcugcaucucugauuuc

SEQ ID NO: 2069357 - RNA, 19 nt, Artificial Sequence
  Description of Artificial Sequence: Synthetic oligonucleotide
cccgcgcugaccgcaggga

SEQ ID NO: 2069358 - RNA, 19 nt, Artificial Sequence
  Description of Artificial Sequence: Synthetic oligonucleotide
ccggcucgggcggcucggg

SEQ ID NO: 2069359 - RNA, 19 nt, Artificial Sequence
  Description of Artificial Sequence: Synthetic oligonucleotide
ggagcccgagugccggcuu

SEQ ID NO: 2069360 - RNA, 19 nt, Artificial Sequence
  Description of Artificial Sequence: Synthetic oligonucleotide
gcaggccggugcccgcgcu

SEQ ID NO: 2069361 - RNA, 19 nt, Artificial Sequence
  Description of Artificial Sequence: Synthetic oligonucleotide
ccugggcgcaaaucccauu

SEQ ID NO: 2069362 - RNA, 19 nt, Artificial Sequence
  Description of Artificial Sequence: Synthetic oligonucleotide
ccccuagacccggggugca

SEQ ID NO: 2069363 - RNA, 19 nt, Artificial Sequence
  Description of Artificial Sequence: Synthetic oligonucleotide
gcgccccggcucgggcggc

SEQ ID NO: 2069364 - RNA, 19 nt, Artificial Sequence
  Description of Artificial Sequence: Synthetic oligonucleotide
gcguugcguuguguacauu

SEQ ID NO: 2069365 - RNA, 19 nt, Artificial Sequence
  Description of Artificial Sequence: Synthetic oligonucleotide
ccgugccuucgagucacuu

SEQ ID NO: 2069366 - RNA, 19 nt, Artificial Sequence
  Description of Artificial Sequence: Synthetic oligonucleotide
cccgugccuucgagucacu

SEQ ID NO: 2069367 - RNA, 19 nt, Artificial Sequence
  Description of Artificial Sequence: Synthetic oligonucleotide
ccccaucguguccguucuu

SEQ ID NO: 2069368 - RNA, 19 nt, Artificial Sequence
  Description of Artificial Sequence: Synthetic oligonucleotide
cgcugaccgcagggagcga

SEQ ID NO: 2069369 - RNA, 19 nt, Artificial Sequence
  Description of Artificial Sequence: Synthetic oligonucleotide
ugaauuucaacaaugauuc

SEQ ID NO: 2069370 - RNA, 19 nt, Artificial Sequence
  Description of Artificial Sequence: Synthetic oligonucleotide
ucucuguggaucaagaugg

SEQ ID NO: 2069371 - RNA, 19 nt, Artificial Sequence
  Description of Artificial Sequence: Synthetic oligonucleotide
ugaugcucaacuuagcucg

SEQ ID NO: 2069372 - RNA, 19 nt, Artificial Sequence
  Description of Artificial Sequence: Synthetic oligonucleotide
uauuucuugacaaaucugc

SEQ ID NO: 2069373 - RNA, 19 nt, Artificial Sequence
  Description of Artificial Sequence: Synthetic oligonucleotide
aaugauucgaaccacugcu

SEQ ID NO: 2069374 - RNA, 19 nt, Artificial Sequence
  Description of Artificial Sequence: Synthetic oligonucleotide
agcuuaacaaaauuaaguc

SEQ ID NO: 2069375 - RNA, 19 nt, Artificial Sequence
  Description of Artificial Sequence: Synthetic oligonucleotide
aucaugcaaaauuagcucc

SEQ ID NO: 2069376 - RNA, 19 nt, Artificial Sequence
  Description of Artificial Sequence: Synthetic oligonucleotide
ucaacaaugauucgaacca

SEQ ID NO: 2069377 - RNA, 19 nt, Artificial Sequence
  Description of Artificial Sequence: Synthetic oligonucleotide
aaguaaacuaaauuuagaa

SEQ ID NO: 2069378 - RNA, 19 nt, Artificial Sequence
  Description of Artificial Sequence: Synthetic oligonucleotide
aagaaagcugaauuucaac

SEQ ID NO: 2069379 - RNA, 19 nt, Artificial Sequence
  Description of Artificial Sequence: Synthetic oligonucleotide
aacagucacucuuuugggc

SEQ ID NO: 2069380 - RNA, 19 nt, Artificial Sequence
  Description of Artificial Sequence: Synthetic oligonucleotide
uucaacaaugauucgaacc

SEQ ID NO: 2069381 - RNA, 19 nt, Artificial Sequence
  Description of Artificial Sequence: Synthetic oligonucleotide
ucuuucaugaugcucaacu

SEQ ID NO: 2069382 - RNA, 19 nt, Artificial Sequence
  Description of Artificial Sequence: Synthetic oligonucleotide
uaaguuggccaucaagucg

SEQ ID NO: 2069383 - RNA, 19 nt, Artificial Sequence
  Description of Artificial Sequence: Synthetic oligonucleotide
uauguaggcgucaucaaag

SEQ ID NO: 2069384 - RNA, 19 nt, Artificial Sequence
  Description of Artificial Sequence: Synthetic oligonucleotide
aaugaacuuacauagcuua

SEQ ID NO: 2069385 - RNA, 19 nt, Artificial Sequence
  Description of Artificial Sequence: Synthetic oligonucleotide
uucaugaugcucaacuuag

SEQ ID NO: 2069386 - RNA, 19 nt, Artificial Sequence
  Description of Artificial Sequence: Synthetic oligonucleotide
uagcuuaacaaaauuaagu

SEQ ID NO: 2069387 - RNA, 19 nt, Artificial Sequence
  Description of Artificial Sequence: Synthetic oligonucleotide
caagaaucuaagcacaugc

SEQ ID NO: 2069388 - RNA, 19 nt, Artificial Sequence
  Description of Artificial Sequence: Synthetic oligonucleotide
aguguauacaacuuguccu

SEQ ID NO: 2069389 - RNA, 19 nt, Artificial Sequence
  Description of Artificial Sequence: Synthetic oligonucleotide
aauuucaacaaugauucga

SEQ ID NO: 2069390 - RNA, 19 nt, Artificial Sequence
  Description of Artificial Sequence: Synthetic oligonucleotide
uucugagcagcauagauac

SEQ ID NO: 2069391 - RNA, 19 nt, Artificial Sequence
  Description of Artificial Sequence: Synthetic oligonucleotide
agaaagcugaauuucaaca

SEQ ID NO: 2069392 - RNA, 19 nt, Artificial Sequence
  Description of Artificial Sequence: Synthetic oligonucleotide
ucguaaguguaagagaugg

SEQ ID NO: 2069393 - RNA, 19 nt, Artificial Sequence
  Description of Artificial Sequence: Synthetic oligonucleotide
uaagcacaugccaaggagg

SEQ ID NO: 2069394 - RNA, 19 nt, Artificial Sequence
  Description of Artificial Sequence: Synthetic oligonucleotide
ucuagagucgaaaugcaga

SEQ ID NO: 2069395 - RNA, 19 nt, Artificial Sequence
  Description of Artificial Sequence: Synthetic oligonucleotide
aaucuaagcacaugccaag

SEQ ID NO: 2069396 - RNA, 19 nt, Artificial Sequence
  Description of Artificial Sequence: Synthetic oligonucleotide
auucauagccagcaagggc

SEQ ID NO: 2069397 - RNA, 19 nt, Artificial Sequence
  Description of Artificial Sequence: Synthetic oligonucleotide
ucgauuauugcauuguccu

SEQ ID NO: 2069398 - RNA, 19 nt, Artificial Sequence
  Description of Artificial Sequence: Synthetic oligonucleotide
aaaguggcccugugcaucc

SEQ ID NO: 2069399 - RNA, 19 nt, Artificial Sequence
  Description of Artificial Sequence: Synthetic oligonucleotide
ucguauaaaugcuaaguug

SEQ ID NO: 2069400 - RNA, 19 nt, Artificial Sequence
  Description of Artificial Sequence: Synthetic oligonucleotide
ugcauuuucaagcugcccu

SEQ ID NO: 2069401 - RNA, 19 nt, Artificial Sequence
  Description of Artificial Sequence: Synthetic oligonucleotide
ucaugcaaaauuagcuccg

SEQ ID NO: 2069402 - RNA, 19 nt, Artificial Sequence
  Description of Artificial Sequence: Synthetic oligonucleotide
uucucuguggaucaagaug

SEQ ID NO: 2069403 - RNA, 19 nt, Artificial Sequence
  Description of Artificial Sequence: Synthetic oligonucleotide
aagaaucuaagcacaugcc

SEQ ID NO: 2069404 - RNA, 19 nt, Artificial Sequence
  Description of Artificial Sequence: Synthetic oligonucleotide
ugcauauauauguaggcgu

SEQ ID NO: 2069405 - RNA, 19 nt, Artificial Sequence
  Description of Artificial Sequence: Synthetic oligonucleotide
aucacucugauaugcaagg

SEQ ID NO: 2069406 - RNA, 19 nt, Artificial Sequence
  Description of Artificial Sequence: Synthetic oligonucleotide
aguaaacuaaauuuagaaa

SEQ ID NO: 2069407 - RNA, 19 nt, Artificial Sequence
  Description of Artificial Sequence: Synthetic oligonucleotide
cuuguuaucacucugauau

SEQ ID NO: 2069408 - RNA, 19 nt, Artificial Sequence
  Description of Artificial Sequence: Synthetic oligonucleotide
uuucuugacaaaucugcag

SEQ ID NO: 2069409 - RNA, 19 nt, Artificial Sequence
  Description of Artificial Sequence: Synthetic oligonucleotide
aaaucugcagggcuuucuc

SEQ ID NO: 2069410 - RNA, 19 nt, Artificial Sequence
  Description of Artificial Sequence: Synthetic oligonucleotide
ugauaugcaaggcgaagag

SEQ ID NO: 2069411 - RNA, 19 nt, Artificial Sequence
  Description of Artificial Sequence: Synthetic oligonucleotide
uucucauacauccucugug

SEQ ID NO: 2069412 - RNA, 19 nt, Artificial Sequence
  Description of Artificial Sequence: Synthetic oligonucleotide
ugauugaucucucucgcca

SEQ ID NO: 2069413 - RNA, 19 nt, Artificial Sequence
  Description of Artificial Sequence: Synthetic oligonucleotide
ucuuccacugacauaauau

SEQ ID NO: 2069414 - RNA, 19 nt, Artificial Sequence
  Description of Artificial Sequence: Synthetic oligonucleotide
cucugcauauauauguagg

SEQ ID NO: 2069415 - RNA, 19 nt, Artificial Sequence
  Description of Artificial Sequence: Synthetic oligonucleotide
uguguaucguucucugugg

SEQ ID NO: 2069416 - RNA, 19 nt, Artificial Sequence
  Description of Artificial Sequence: Synthetic oligonucleotide
acugacauaauaucuucug

SEQ ID NO: 2069417 - RNA, 19 nt, Artificial Sequence
  Description of Artificial Sequence: Synthetic oligonucleotide
acaacaaaugaacuuacau

SEQ ID NO: 2069418 - RNA, 19 nt, Artificial Sequence
  Description of Artificial Sequence: Synthetic oligonucleotide
guaggcgucaucaaagugg

SEQ ID NO: 2069419 - RNA, 19 nt, Artificial Sequence
  Description of Artificial Sequence: Synthetic oligonucleotide
uguuaucacucugauaugc

SEQ ID NO: 2069420 - RNA, 19 nt, Artificial Sequence
  Description of Artificial Sequence: Synthetic oligonucleotide
agaaucuaagcacaugcca

SEQ ID NO: 2069421 - RNA, 19 nt, Artificial Sequence
  Description of Artificial Sequence: Synthetic oligonucleotide
auauauguaggcgucauca

SEQ ID NO: 2069422 - RNA, 19 nt, Artificial Sequence
  Description of Artificial Sequence: Synthetic oligonucleotide
aaagcugaauuucaacaau

SEQ ID NO: 2069423 - RNA, 19 nt, Artificial Sequence
  Description of Artificial Sequence: Synthetic oligonucleotide
agaaaccucaucucuuuuc

SEQ ID NO: 2069424 - RNA, 19 nt, Artificial Sequence
  Description of Artificial Sequence: Synthetic oligonucleotide
ugcaaaauuagcuccgccu

SEQ ID NO: 2069425 - RNA, 19 nt, Artificial Sequence
  Description of Artificial Sequence: Synthetic oligonucleotide
augaugcucaacuuagcuc

SEQ ID NO: 2069426 - RNA, 19 nt, Artificial Sequence
  Description of Artificial Sequence: Synthetic oligonucleotide
cucccuacaacaaaugaac

SEQ ID NO: 2069427 - RNA, 19 nt, Artificial Sequence
  Description of Artificial Sequence: Synthetic oligonucleotide
aucaaaguggcccugugca

SEQ ID NO: 2069428 - RNA, 19 nt, Artificial Sequence
  Description of Artificial Sequence: Synthetic oligonucleotide
uauaaaugcuaaguuggcc

SEQ ID NO: 2069429 - RNA, 19 nt, Artificial Sequence
  Description of Artificial Sequence: Synthetic oligonucleotide
uuguccuccaccgaggcgg

SEQ ID NO: 2069430 - RNA, 19 nt, Artificial Sequence
  Description of Artificial Sequence: Synthetic oligonucleotide
aacuuacauagcuuaacaa

SEQ ID NO: 2069431 - RNA, 19 nt, Artificial Sequence
  Description of Artificial Sequence: Synthetic oligonucleotide
cguauaaaugcuaaguugg

SEQ ID NO: 2069432 - RNA, 19 nt, Artificial Sequence
  Description of Artificial Sequence: Synthetic oligonucleotide
agcaucaugcaaaauuagc

SEQ ID NO: 2069433 - RNA, 19 nt, Artificial Sequence
  Description of Artificial Sequence: Synthetic oligonucleotide
agagaucucgauuauugca

SEQ ID NO: 2069434 - RNA, 19 nt, Artificial Sequence
  Description of Artificial Sequence: Synthetic oligonucleotide
aacuuagcucgcuucagca

SEQ ID NO: 2069435 - RNA, 19 nt, Artificial Sequence
  Description of Artificial Sequence: Synthetic oligonucleotide
ugcuaaguuggccaucaag

SEQ ID NO: 2069436 - RNA, 19 nt, Artificial Sequence
  Description of Artificial Sequence: Synthetic oligonucleotide
gauucgaaccacugcuugg

SEQ ID NO: 2069437 - RNA, 19 nt, Artificial Sequence
  Description of Artificial Sequence: Synthetic oligonucleotide
uucuugacagcucagccaa

SEQ ID NO: 2069438 - RNA, 19 nt, Artificial Sequence
  Description of Artificial Sequence: Synthetic oligonucleotide
cuuacauagcuuaacaaaa

SEQ ID NO: 2069439 - RNA, 19 nt, Artificial Sequence
  Description of Artificial Sequence: Synthetic oligonucleotide
uauucugagcagcauagau

SEQ ID NO: 2069440 - RNA, 19 nt, Artificial Sequence
  Description of Artificial Sequence: Synthetic oligonucleotide
aagucguaaguguaagaga

SEQ ID NO: 2069441 - RNA, 19 nt, Artificial Sequence
  Description of Artificial Sequence: Synthetic oligonucleotide
caagucguaaguguaagag

SEQ ID NO: 2069442 - RNA, 19 nt, Artificial Sequence
  Description of Artificial Sequence: Synthetic oligonucleotide
uuagcuccgccucuucugg

SEQ ID NO: 2069443 - RNA, 19 nt, Artificial Sequence
  Description of Artificial Sequence: Synthetic oligonucleotide
uguucugcauuuucaagcu

SEQ ID NO: 2069444 - RNA, 19 nt, Artificial Sequence
  Description of Artificial Sequence: Synthetic oligonucleotide
cucgauuauugcauugucc

SEQ ID NO: 2069445 - RNA, 19 nt, Artificial Sequence
  Description of Artificial Sequence: Synthetic oligonucleotide
gaacuuacauagcuuaaca

SEQ ID NO: 2069446 - RNA, 19 nt, Artificial Sequence
  Description of Artificial Sequence: Synthetic oligonucleotide
caucaugcaaaauuagcuc

SEQ ID NO: 2069447 - RNA, 19 nt, Artificial Sequence
  Description of Artificial Sequence: Synthetic oligonucleotide
uguacagaaaccucaucuc

SEQ ID NO: 2069448 - RNA, 19 nt, Artificial Sequence
  Description of Artificial Sequence: Synthetic oligonucleotide
auaugcaaggcgaagagca

SEQ ID NO: 2069449 - RNA, 19 nt, Artificial Sequence
  Description of Artificial Sequence: Synthetic oligonucleotide
ugcgauagcugcuuggaga

SEQ ID NO: 2069450 - RNA, 19 nt, Artificial Sequence
  Description of Artificial Sequence: Synthetic oligonucleotide
acucuuuugggcuacuaga

SEQ ID NO: 2069451 - RNA, 19 nt, Artificial Sequence
  Description of Artificial Sequence: Synthetic oligonucleotide
agagucgaaaugcagaauu

SEQ ID NO: 2069452 - RNA, 19 nt, Artificial Sequence
  Description of Artificial Sequence: Synthetic oligonucleotide
aaucacccucccuacaaca

SEQ ID NO: 2069453 - RNA, 19 nt, Artificial Sequence
  Description of Artificial Sequence: Synthetic oligonucleotide
cugacauaauaucuucugc

SEQ ID NO: 2069454 - RNA, 19 nt, Artificial Sequence
  Description of Artificial Sequence: Synthetic oligonucleotide
agagagaucucgauuauug

SEQ ID NO: 2069455 - RNA, 19 nt, Artificial Sequence
  Description of Artificial Sequence: Synthetic oligonucleotide
uuacauagcuuaacaaaau

SEQ ID NO: 2069456 - RNA, 19 nt, Artificial Sequence
  Description of Artificial Sequence: Synthetic oligonucleotide
cuacuagaaaucacccucc

SEQ ID NO: 2069457 - RNA, 19 nt, Artificial Sequence
  Description of Artificial Sequence: Synthetic oligonucleotide
cacucugauaugcaaggcg

SEQ ID NO: 2069458 - RNA, 19 nt, Artificial Sequence
  Description of Artificial Sequence: Synthetic oligonucleotide
acaaaugaacuuacauagc

SEQ ID NO: 2069459 - RNA, 19 nt, Artificial Sequence
  Description of Artificial Sequence: Synthetic oligonucleotide
gaaaccucaucucuuuuca

SEQ ID NO: 2069460 - RNA, 19 nt, Artificial Sequence
  Description of Artificial Sequence: Synthetic oligonucleotide
uuuugggcuacuagaaauc

SEQ ID NO: 2069461 - RNA, 19 nt, Artificial Sequence
  Description of Artificial Sequence: Synthetic oligonucleotide
aagcagguaacucauuguu

SEQ ID NO: 2069462 - RNA, 19 nt, Artificial Sequence
  Description of Artificial Sequence: Synthetic oligonucleotide
guaagagauggcuuucuug

SEQ ID NO: 2069463 - RNA, 19 nt, Artificial Sequence
  Description of Artificial Sequence: Synthetic oligonucleotide
ucuaagcacaugccaagga

SEQ ID NO: 2069464 - RNA, 19 nt, Artificial Sequence
  Description of Artificial Sequence: Synthetic oligonucleotide
aauuagcuccgccucuucu

SEQ ID NO: 2069465 - RNA, 19 nt, Artificial Sequence
  Description of Artificial Sequence: Synthetic oligonucleotide
acagucacucuuuugggcu

SEQ ID NO: 2069466 - RNA, 19 nt, Artificial Sequence
  Description of Artificial Sequence: Synthetic oligonucleotide
aaauuagcuccgccucuuc

SEQ ID NO: 2069467 - RNA, 19 nt, Artificial Sequence
  Description of Artificial Sequence: Synthetic oligonucleotide
guguguaucguucucugug

SEQ ID NO: 2069468 - RNA, 19 nt, Artificial Sequence
  Description of Artificial Sequence: Synthetic oligonucleotide
cugcauauauauguaggcg

SEQ ID NO: 2069469 - RNA, 19 nt, Artificial Sequence
  Description of Artificial Sequence: Synthetic oligonucleotide
aaaccucaucucuuuucag

SEQ ID NO: 2069470 - RNA, 19 nt, Artificial Sequence
  Description of Artificial Sequence: Synthetic oligonucleotide
gugcacaagaaucuaagca

SEQ ID NO: 2069471 - RNA, 19 nt, Artificial Sequence
  Description of Artificial Sequence: Synthetic oligonucleotide
guagccaagucacucauca

SEQ ID NO: 2069472 - RNA, 19 nt, Artificial Sequence
  Description of Artificial Sequence: Synthetic oligonucleotide
guuguucugcauuuucaag

SEQ ID NO: 2069473 - RNA, 19 nt, Artificial Sequence
  Description of Artificial Sequence: Synthetic oligonucleotide
ugcaaggcgaagagcauca

SEQ ID NO: 2069474 - RNA, 19 nt, Artificial Sequence
  Description of Artificial Sequence: Synthetic oligonucleotide
aagcugaauuucaacaaug

SEQ ID NO: 2069475 - RNA, 19 nt, Artificial Sequence
  Description of Artificial Sequence: Synthetic oligonucleotide
ugaacuuacauagcuuaac

SEQ ID NO: 2069476 - RNA, 19 nt, Artificial Sequence
  Description of Artificial Sequence: Synthetic oligonucleotide
ucgaaaugcagaauucaua

SEQ ID NO: 2069477 - RNA, 19 nt, Artificial Sequence
  Description of Artificial Sequence: Synthetic oligonucleotide
ucugcauuuucaagcugcc

SEQ ID NO: 2069478 - RNA, 19 nt, Artificial Sequence
  Description of Artificial Sequence: Synthetic oligonucleotide
caaugauucgaaccacugc

SEQ ID NO: 2069479 - RNA, 19 nt, Artificial Sequence
  Description of Artificial Sequence: Synthetic oligonucleotide
uguaggcgucaucaaagug

SEQ ID NO: 2069480 - RNA, 19 nt, Artificial Sequence
  Description of Artificial Sequence: Synthetic oligonucleotide
cuacaacaaaugaacuuac

SEQ ID NO: 2069481 - RNA, 19 nt, Artificial Sequence
  Description of Artificial Sequence: Synthetic oligonucleotide
agcucagggugauugaucu

SEQ ID NO: 2069482 - RNA, 19 nt, Artificial Sequence
  Description of Artificial Sequence: Synthetic oligonucleotide
cauacauccucugugcuug

SEQ ID NO: 2069483 - RNA, 19 nt, Artificial Sequence
  Description of Artificial Sequence: Synthetic oligonucleotide
cuuccacugacauaauauc

SEQ ID NO: 2069484 - RNA, 19 nt, Artificial Sequence
  Description of Artificial Sequence: Synthetic oligonucleotide
uuaucacucugauaugcaa

SEQ ID NO: 2069485 - RNA, 19 nt, Artificial Sequence
  Description of Artificial Sequence: Synthetic oligonucleotide
ucugauaugcaaggcgaag

SEQ ID NO: 2069486 - RNA, 19 nt, Artificial Sequence
  Description of Artificial Sequence: Synthetic oligonucleotide
auucgaaccacugcuuggg

SEQ ID NO: 2069487 - RNA, 19 nt, Artificial Sequence
  Description of Artificial Sequence: Synthetic oligonucleotide
auugcauuguccuccugcu

SEQ ID NO: 2069488 - RNA, 19 nt, Artificial Sequence
  Description of Artificial Sequence: Synthetic oligonucleotide
cgaaaugcagaauucauag

SEQ ID NO: 2069489 - RNA, 19 nt, Artificial Sequence
  Description of Artificial Sequence: Synthetic oligonucleotide
agcaagggcaaauuccugu

SEQ ID NO: 2069490 - RNA, 19 nt, Artificial Sequence
  Description of Artificial Sequence: Synthetic oligonucleotide
uccucugugcuugcgauag

SEQ ID NO: 2069491 - RNA, 19 nt, Artificial Sequence
  Description of Artificial Sequence: Synthetic oligonucleotide
gcagguaacucauuguugc

SEQ ID NO: 2069492 - RNA, 19 nt, Artificial Sequence
  Description of Artificial Sequence: Synthetic oligonucleotide
agucguaaguguaagagau

SEQ ID NO: 2069493 - RNA, 19 nt, Artificial Sequence
  Description of Artificial Sequence: Synthetic oligonucleotide
uaucguucucuguggauca

SEQ ID NO: 2069494 - RNA, 19 nt, Artificial Sequence
  Description of Artificial Sequence: Synthetic oligonucleotide
uacuagaaaucacccuccc

SEQ ID NO: 2069495 - RNA, 19 nt, Artificial Sequence
  Description of Artificial Sequence: Synthetic oligonucleotide
agaagagcagguagcgugc

SEQ ID NO: 2069496 - RNA, 19 nt, Artificial Sequence
  Description of Artificial Sequence: Synthetic oligonucleotide
uccuguuuauucugagcag

SEQ ID NO: 2069497 - RNA, 19 nt, Artificial Sequence
  Description of Artificial Sequence: Synthetic oligonucleotide
aacucauuguugcuuuaaa

SEQ ID NO: 2069498 - RNA, 19 nt, Artificial Sequence
  Description of Artificial Sequence: Synthetic oligonucleotide
cucucgccagaucugaugc

SEQ ID NO: 2069499 - RNA, 19 nt, Artificial Sequence
  Description of Artificial Sequence: Synthetic oligonucleotide
gcuacuagaaaucacccuc

SEQ ID NO: 2069500 - RNA, 19 nt, Artificial Sequence
  Description of Artificial Sequence: Synthetic oligonucleotide
uuugggcuacuagaaauca

SEQ ID NO: 2069501 - RNA, 19 nt, Artificial Sequence
  Description of Artificial Sequence: Synthetic oligonucleotide
agaucugaugcccucugca

SEQ ID NO: 2069502 - RNA, 19 nt, Artificial Sequence
  Description of Artificial Sequence: Synthetic oligonucleotide
aguuguucugcauuuucaa

SEQ ID NO: 2069503 - RNA, 19 nt, Artificial Sequence
  Description of Artificial Sequence: Synthetic oligonucleotide
uagaaaucacccucccuac

SEQ ID NO: 2069504 - RNA, 19 nt, Artificial Sequence
  Description of Artificial Sequence: Synthetic oligonucleotide
uaaaugcuaaguuggccau

SEQ ID NO: 2069505 - RNA, 19 nt, Artificial Sequence
  Description of Artificial Sequence: Synthetic oligonucleotide
ucaugccuccuccaagcag

SEQ ID NO: 2069506 - RNA, 19 nt, Artificial Sequence
  Description of Artificial Sequence: Synthetic oligonucleotide
cagaguaguagccaaguca

SEQ ID NO: 2069507 - RNA, 19 nt, Artificial Sequence
  Description of Artificial Sequence: Synthetic oligonucleotide
uuguguguaucguucucug

SEQ ID NO: 2069508 - RNA, 19 nt, Artificial Sequence
  Description of Artificial Sequence: Synthetic oligonucleotide
aacaaugauucgaaccacu

SEQ ID NO: 2069509 - RNA, 19 nt, Artificial Sequence
  Description of Artificial Sequence: Synthetic oligonucleotide
gcuuaacaaaauuaaguca

SEQ ID NO: 2069510 - RNA, 19 nt, Artificial Sequence
  Description of Artificial Sequence: Synthetic oligonucleotide
gggugauugaucucucucg

SEQ ID NO: 2069511 - RNA, 19 nt, Artificial Sequence
  Description of Artificial Sequence: Synthetic oligonucleotide
auauguaggcgucaucaaa

SEQ ID NO: 2069512 - RNA, 19 nt, Artificial Sequence
  Description of Artificial Sequence: Synthetic oligonucleotide
ucugaugcccucugcauau

SEQ ID NO: 2069513 - RNA, 19 nt, Artificial Sequence
  Description of Artificial Sequence: Synthetic oligonucleotide
uagguauuggcuuucucuu

SEQ ID NO: 2069514 - RNA, 19 nt, Artificial Sequence
  Description of Artificial Sequence: Synthetic oligonucleotide
aaaugcuaaguuggccauc

SEQ ID NO: 2069515 - RNA, 19 nt, Artificial Sequence
  Description of Artificial Sequence: Synthetic oligonucleotide
ucuuuugggcuacuagaaa

SEQ ID NO: 2069516 - RNA, 19 nt, Artificial Sequence
  Description of Artificial Sequence: Synthetic oligonucleotide
acucauuguugcuuuaaaa

SEQ ID NO: 2069517 - RNA, 19 nt, Artificial Sequence
  Description of Artificial Sequence: Synthetic oligonucleotide
acuuagcucgcuucagcag

SEQ ID NO: 2069518 - RNA, 19 nt, Artificial Sequence
  Description of Artificial Sequence: Synthetic oligonucleotide
gaggcgggguuaaagaaag

SEQ ID NO: 2069519 - RNA, 19 nt, Artificial Sequence
  Description of Artificial Sequence: Synthetic oligonucleotide
gaaucuaagcacaugccaa

SEQ ID NO: 2069520 - RNA, 19 nt, Artificial Sequence
  Description of Artificial Sequence: Synthetic oligonucleotide
ugguagaucucuuuugcuu

SEQ ID NO: 2069521 - RNA, 19 nt, Artificial Sequence
  Description of Artificial Sequence: Synthetic oligonucleotide
ugugcuugcgauagcugcu

SEQ ID NO: 2069522 - RNA, 19 nt, Artificial Sequence
  Description of Artificial Sequence: Synthetic oligonucleotide
agguauuggcuuucucuuc

SEQ ID NO: 2069523 - RNA, 19 nt, Artificial Sequence
  Description of Artificial Sequence: Synthetic oligonucleotide
ucaugaugcucaacuuagc

SEQ ID NO: 2069524 - RNA, 19 nt, Artificial Sequence
  Description of Artificial Sequence: Synthetic oligonucleotide
agcauagauacuggccagc

SEQ ID NO: 2069525 - RNA, 19 nt, Artificial Sequence
  Description of Artificial Sequence: Synthetic oligonucleotide
ucucgauuauugcauuguc

SEQ ID NO: 2069526 - RNA, 19 nt, Artificial Sequence
  Description of Artificial Sequence: Synthetic oligonucleotide
cugcuugggguccagacac

SEQ ID NO: 2069527 - RNA, 19 nt, Artificial Sequence
  Description of Artificial Sequence: Synthetic oligonucleotide
uuucaacaaugauucgaac

SEQ ID NO: 2069528 - RNA, 19 nt, Artificial Sequence
  Description of Artificial Sequence: Synthetic oligonucleotide
accauaugcagcucagggu

SEQ ID NO: 2069529 - RNA, 19 nt, Artificial Sequence
  Description of Artificial Sequence: Synthetic oligonucleotide
gauagcugcuuggagaaga

SEQ ID NO: 2069530 - RNA, 19 nt, Artificial Sequence
  Description of Artificial Sequence: Synthetic oligonucleotide
uucgaaccacugcuugggg

SEQ ID NO: 2069531 - RNA, 19 nt, Artificial Sequence
  Description of Artificial Sequence: Synthetic oligonucleotide
cagcacaauggucuguggg

SEQ ID NO: 2069532 - RNA, 19 nt, Artificial Sequence
  Description of Artificial Sequence: Synthetic oligonucleotide
ucaagucguaaguguaaga

SEQ ID NO: 2069533 - RNA, 19 nt, Artificial Sequence
  Description of Artificial Sequence: Synthetic oligonucleotide
ucccuacaacaaaugaacu

SEQ ID NO: 2069534 - RNA, 19 nt, Artificial Sequence
  Description of Artificial Sequence: Synthetic oligonucleotide
uauauguaggcgucaucaa

SEQ ID NO: 2069535 - RNA, 19 nt, Artificial Sequence
  Description of Artificial Sequence: Synthetic oligonucleotide
cucuagagucgaaaugcag

SEQ ID NO: 2069536 - RNA, 19 nt, Artificial Sequence
  Description of Artificial Sequence: Synthetic oligonucleotide
guauaaaugcuaaguuggc

SEQ ID NO: 2069537 - RNA, 19 nt, Artificial Sequence
  Description of Artificial Sequence: Synthetic oligonucleotide
ucaagcugcccucguauaa

SEQ ID NO: 2069538 - RNA, 19 nt, Artificial Sequence
  Description of Artificial Sequence: Synthetic oligonucleotide
augcccucugcauauauau

SEQ ID NO: 2069539 - RNA, 19 nt, Artificial Sequence
  Description of Artificial Sequence: Synthetic oligonucleotide
uggccaucaagucguaagu

SEQ ID NO: 2069540 - RNA, 19 nt, Artificial Sequence
  Description of Artificial Sequence: Synthetic oligonucleotide
ucagccaauucuucccuga

SEQ ID NO: 2069541 - RNA, 19 nt, Artificial Sequence
  Description of Artificial Sequence: Synthetic oligonucleotide
aguguaagagauggcuuuc

SEQ ID NO: 2069542 - RNA, 19 nt, Artificial Sequence
  Description of Artificial Sequence: Synthetic oligonucleotide
aucaagucguaaguguaag

SEQ ID NO: 2069543 - RNA, 19 nt, Artificial Sequence
  Description of Artificial Sequence: Synthetic oligonucleotide
aaauuccuguuuauucuga

SEQ ID NO: 2069544 - RNA, 19 nt, Artificial Sequence
  Description of Artificial Sequence: Synthetic oligonucleotide
uagauacuggccagcuuca

SEQ ID NO: 2069545 - RNA, 19 nt, Artificial Sequence
  Description of Artificial Sequence: Synthetic oligonucleotide
guagguauuggcuuucucu

SEQ ID NO: 2069546 - RNA, 19 nt, Artificial Sequence
  Description of Artificial Sequence: Synthetic oligonucleotide
aucuaagcacaugccaagg

SEQ ID NO: 2069547 - RNA, 19 nt, Artificial Sequence
  Description of Artificial Sequence: Synthetic oligonucleotide
ugacaaaucugcagggcuu

SEQ ID NO: 2069548 - RNA, 19 nt, Artificial Sequence
  Description of Artificial Sequence: Synthetic oligonucleotide
ucaucaaaguggcccugug

SEQ ID NO: 2069549 - RNA, 19 nt, Artificial Sequence
  Description of Artificial Sequence: Synthetic oligonucleotide
caucaaaguggcccugugc

SEQ ID NO: 2069550 - RNA, 19 nt, Artificial Sequence
  Description of Artificial Sequence: Synthetic oligonucleotide
cacucuuuugggcuacuag

SEQ ID NO: 2069551 - RNA, 19 nt, Artificial Sequence
  Description of Artificial Sequence: Synthetic oligonucleotide
acucugauaugcaaggcga

SEQ ID NO: 2069552 - RNA, 19 nt, Artificial Sequence
  Description of Artificial Sequence: Synthetic oligonucleotide
cuagagucgaaaugcagaa

SEQ ID NO: 2069553 - RNA, 19 nt, Artificial Sequence
  Description of Artificial Sequence: Synthetic oligonucleotide
agucgaaaugcagaauuca

SEQ ID NO: 2069554 - RNA, 19 nt, Artificial Sequence
  Description of Artificial Sequence: Synthetic oligonucleotide
guaaguguaagagauggcu

SEQ ID NO: 2069555 - RNA, 19 nt, Artificial Sequence
  Description of Artificial Sequence: Synthetic oligonucleotide
acaaugauucgaaccacug

SEQ ID NO: 2069556 - RNA, 19 nt, Artificial Sequence
  Description of Artificial Sequence: Synthetic oligonucleotide
gauugcugagcaccauaug

SEQ ID NO: 2069557 - RNA, 19 nt, Artificial Sequence
  Description of Artificial Sequence: Synthetic oligonucleotide
ucagcacaauggucugugg

SEQ ID NO: 2069558 - RNA, 19 nt, Artificial Sequence
  Description of Artificial Sequence: Synthetic oligonucleotide
ccauaugcagcucagggug

SEQ ID NO: 2069559 - RNA, 19 nt, Artificial Sequence
  Description of Artificial Sequence: Synthetic oligonucleotide
ggugauugaucucucucgc

SEQ ID NO: 2069560 - RNA, 19 nt, Artificial Sequence
  Description of Artificial Sequence: Synthetic oligonucleotide
agagcaucaugcaaaauua

SEQ ID NO: 2069561 - RNA, 19 nt, Artificial Sequence
  Description of Artificial Sequence: Synthetic oligonucleotide
uugcgauagcugcuuggag

SEQ ID NO: 2069562 - RNA, 19 nt, Artificial Sequence
  Description of Artificial Sequence: Synthetic oligonucleotide
uuuugcuuguguguaucgu

SEQ ID NO: 2069563 - RNA, 19 nt, Artificial Sequence
  Description of Artificial Sequence: Synthetic oligonucleotide
cuguacagaaaccucaucu

SEQ ID NO: 2069564 - RNA, 19 nt, Artificial Sequence
  Description of Artificial Sequence: Synthetic oligonucleotide
agccagcaagggcaaauuc

SEQ ID NO: 2069565 - RNA, 19 nt, Artificial Sequence
  Description of Artificial Sequence: Synthetic oligonucleotide
uauuggcuuucucuuccac

SEQ ID NO: 2069566 - RNA, 19 nt, Artificial Sequence
  Description of Artificial Sequence: Synthetic oligonucleotide
ggcgucaucaaaguggccc

SEQ ID NO: 2069567 - RNA, 19 nt, Artificial Sequence
  Description of Artificial Sequence: Synthetic oligonucleotide
uugggcuacuagaaaucac

SEQ ID NO: 2069568 - RNA, 19 nt, Artificial Sequence
  Description of Artificial Sequence: Synthetic oligonucleotide
gaugugcuguacagaaacc

SEQ ID NO: 2069569 - RNA, 19 nt, Artificial Sequence
  Description of Artificial Sequence: Synthetic oligonucleotide
guaucguucucuguggauc

SEQ ID NO: 2069570 - RNA, 19 nt, Artificial Sequence
  Description of Artificial Sequence: Synthetic oligonucleotide
auguaggcgucaucaaagu

SEQ ID NO: 2069571 - RNA, 19 nt, Artificial Sequence
  Description of Artificial Sequence: Synthetic oligonucleotide
uccagaguaguagccaagu

SEQ ID NO: 2069572 - RNA, 19 nt, Artificial Sequence
  Description of Artificial Sequence: Synthetic oligonucleotide
gguagcgugcacaagaauc

SEQ ID NO: 2069573 - RNA, 19 nt, Artificial Sequence
  Description of Artificial Sequence: Synthetic oligonucleotide
gucacucaucagcacaaug

SEQ ID NO: 2069574 - RNA, 19 nt, Artificial Sequence
  Description of Artificial Sequence: Synthetic oligonucleotide
uguguguaucguucucugu

SEQ ID NO: 2069575 - RNA, 19 nt, Artificial Sequence
  Description of Artificial Sequence: Synthetic oligonucleotide
ugcuguacagaaaccucau

SEQ ID NO: 2069576 - RNA, 19 nt, Artificial Sequence
  Description of Artificial Sequence: Synthetic oligonucleotide
agaaaucacccucccuaca

SEQ ID NO: 2069577 - RNA, 19 nt, Artificial Sequence
  Description of Artificial Sequence: Synthetic oligonucleotide
ucgaaccacugcuuggggu

SEQ ID NO: 2069578 - RNA, 19 nt, Artificial Sequence
  Description of Artificial Sequence: Synthetic oligonucleotide
auacauccucugugcuugc

SEQ ID NO: 2069579 - RNA, 19 nt, Artificial Sequence
  Description of Artificial Sequence: Synthetic oligonucleotide
agcugaauuucaacaauga

SEQ ID NO: 2069580 - RNA, 19 nt, Artificial Sequence
  Description of Artificial Sequence: Synthetic oligonucleotide
gugauugaucucucucgcc

SEQ ID NO: 2069581 - RNA, 19 nt, Artificial Sequence
  Description of Artificial Sequence: Synthetic oligonucleotide
uguaucguucucuguggau

SEQ ID NO: 2069582 - RNA, 19 nt, Artificial Sequence
  Description of Artificial Sequence: Synthetic oligonucleotide
auauauauguaggcgucau

SEQ ID NO: 2069583 - RNA, 19 nt, Artificial Sequence
  Description of Artificial Sequence: Synthetic oligonucleotide
uucaugccuccuccaagca

SEQ ID NO: 2069584 - RNA, 19 nt, Artificial Sequence
  Description of Artificial Sequence: Synthetic oligonucleotide
aucucgauuauugcauugu

SEQ ID NO: 2069585 - RNA, 19 nt, Artificial Sequence
  Description of Artificial Sequence: Synthetic oligonucleotide
aagucacucaucagcacaa

SEQ ID NO: 2069586 - RNA, 19 nt, Artificial Sequence
  Description of Artificial Sequence: Synthetic oligonucleotide
gugcauccagaguaguagc

SEQ ID NO: 2069587 - RNA, 19 nt, Artificial Sequence
  Description of Artificial Sequence: Synthetic oligonucleotide
gguuaaagaaagcugaauu

SEQ ID NO: 2069588 - RNA, 19 nt, Artificial Sequence
  Description of Artificial Sequence: Synthetic oligonucleotide
ugcccucugcauauauaug

SEQ ID NO: 2069589 - RNA, 19 nt, Artificial Sequence
  Description of Artificial Sequence: Synthetic oligonucleotide
caugcaaaauuagcuccgc

SEQ ID NO: 2069590 - RNA, 19 nt, Artificial Sequence
  Description of Artificial Sequence: Synthetic oligonucleotide
agcucgcuucagcagcugg

SEQ ID NO: 2069591 - RNA, 19 nt, Artificial Sequence
  Description of Artificial Sequence: Synthetic oligonucleotide
accgaggcgggguuaaaga

SEQ ID NO: 2069592 - RNA, 19 nt, Artificial Sequence
  Description of Artificial Sequence: Synthetic oligonucleotide
cucgccagaucugaugccc

SEQ ID NO: 2069593 - RNA, 19 nt, Artificial Sequence
  Description of Artificial Sequence: Synthetic oligonucleotide
ucacccucccuacaacaaa

SEQ ID NO: 2069594 - RNA, 19 nt, Artificial Sequence
  Description of Artificial Sequence: Synthetic oligonucleotide
cuuuugggcuacuagaaau

SEQ ID NO: 2069595 - RNA, 19 nt, Artificial Sequence
  Description of Artificial Sequence: Synthetic oligonucleotide
augcagcucagggugauug

SEQ ID NO: 2069596 - RNA, 19 nt, Artificial Sequence
  Description of Artificial Sequence: Synthetic oligonucleotide
guacagaaaccucaucucu

SEQ ID NO: 2069597 - RNA, 19 nt, Artificial Sequence
  Description of Artificial Sequence: Synthetic oligonucleotide
acaacuuguccuccaccga

SEQ ID NO: 2069598 - RNA, 19 nt, Artificial Sequence
  Description of Artificial Sequence: Synthetic oligonucleotide
ucacucugauaugcaaggc

SEQ ID NO: 2069599 - RNA, 19 nt, Artificial Sequence
  Description of Artificial Sequence: Synthetic oligonucleotide
aaguggcaguguauacaac

SEQ ID NO: 2069600 - RNA, 19 nt, Artificial Sequence
  Description of Artificial Sequence: Synthetic oligonucleotide
acauccucugugcuugcga

SEQ ID NO: 2069601 - RNA, 19 nt, Artificial Sequence
  Description of Artificial Sequence: Synthetic oligonucleotide
ugggguccagacacugaag

SEQ ID NO: 2069602 - RNA, 19 nt, Artificial Sequence
  Description of Artificial Sequence: Synthetic oligonucleotide
auuuucaagcugcccucgu

SEQ ID NO: 2069603 - RNA, 19 nt, Artificial Sequence
  Description of Artificial Sequence: Synthetic oligonucleotide
caaggcgaagagcaucaug

SEQ ID NO: 2069604 - RNA, 19 nt, Artificial Sequence
  Description of Artificial Sequence: Synthetic oligonucleotide
cugcagggcuuucucauac

SEQ ID NO: 2069605 - RNA, 19 nt, Artificial Sequence
  Description of Artificial Sequence: Synthetic oligonucleotide
gagucgaaaugcagaauuc

SEQ ID NO: 2069606 - RNA, 19 nt, Artificial Sequence
  Description of Artificial Sequence: Synthetic oligonucleotide
guauacaacuuguccucca

SEQ ID NO: 2069607 - RNA, 19 nt, Artificial Sequence
  Description of Artificial Sequence: Synthetic oligonucleotide
ucaaaguggcccugugcau

SEQ ID NO: 2069608 - RNA, 19 nt, Artificial Sequence
  Description of Artificial Sequence: Synthetic oligonucleotide
ucucucucgccagaucuga

SEQ ID NO: 2069609 - RNA, 19 nt, Artificial Sequence
  Description of Artificial Sequence: Synthetic oligonucleotide
agucacucuuuugggcuac

SEQ ID NO: 2069610 - RNA, 19 nt, Artificial Sequence
  Description of Artificial Sequence: Synthetic oligonucleotide
cacugcuugggguccagac

SEQ ID NO: 2069611 - RNA, 19 nt, Artificial Sequence
  Description of Artificial Sequence: Synthetic oligonucleotide
cugauaugcaaggcgaaga

SEQ ID NO: 2069612 - RNA, 19 nt, Artificial Sequence
  Description of Artificial Sequence: Synthetic oligonucleotide
ccaagcagguaacucauug

SEQ ID NO: 2069613 - RNA, 19 nt, Artificial Sequence
  Description of Artificial Sequence: Synthetic oligonucleotide
guuaucacucugauaugca

SEQ ID NO: 2069614 - RNA, 19 nt, Artificial Sequence
  Description of Artificial Sequence: Synthetic oligonucleotide
gcagaauucauagccagca

SEQ ID NO: 2069615 - RNA, 19 nt, Artificial Sequence
  Description of Artificial Sequence: Synthetic oligonucleotide
gguccagacacugaagaac

SEQ ID NO: 2069616 - RNA, 19 nt, Artificial Sequence
  Description of Artificial Sequence: Synthetic oligonucleotide
caacaaugauucgaaccac

SEQ ID NO: 2069617 - RNA, 19 nt, Artificial Sequence
  Description of Artificial Sequence: Synthetic oligonucleotide
gcagguagcgugcacaaga

SEQ ID NO: 2069618 - RNA, 19 nt, Artificial Sequence
  Description of Artificial Sequence: Synthetic oligonucleotide
caaaguggcccugugcauc

SEQ ID NO: 2069619 - RNA, 19 nt, Artificial Sequence
  Description of Artificial Sequence: Synthetic oligonucleotide
aucugaugcccucugcaua

SEQ ID NO: 2069620 - RNA, 19 nt, Artificial Sequence
  Description of Artificial Sequence: Synthetic oligonucleotide
ucguucucuguggaucaag

SEQ ID NO: 2069621 - RNA, 19 nt, Artificial Sequence
  Description of Artificial Sequence: Synthetic oligonucleotide
ucucgccagaucugaugcc

SEQ ID NO: 2069622 - RNA, 19 nt, Artificial Sequence
  Description of Artificial Sequence: Synthetic oligonucleotide
caugaugcucaacuuagcu

SEQ ID NO: 2069623 - RNA, 19 nt, Artificial Sequence
  Description of Artificial Sequence: Synthetic oligonucleotide
cugagcaccauaugcagcu

SEQ ID NO: 2069624 - RNA, 19 nt, Artificial Sequence
  Description of Artificial Sequence: Synthetic oligonucleotide
caucaagucguaaguguaa

SEQ ID NO: 2069625 - RNA, 19 nt, Artificial Sequence
  Description of Artificial Sequence: Synthetic oligonucleotide
gagaucucgauuauugcau

SEQ ID NO: 2069626 - RNA, 19 nt, Artificial Sequence
  Description of Artificial Sequence: Synthetic oligonucleotide
agauugcugagcaccauau

SEQ ID NO: 2069627 - RNA, 19 nt, Artificial Sequence
  Description of Artificial Sequence: Synthetic oligonucleotide
ugaucucucucgccagauc

SEQ ID NO: 2069628 - RNA, 19 nt, Artificial Sequence
  Description of Artificial Sequence: Synthetic oligonucleotide
cauauauauguaggcguca

SEQ ID NO: 2069629 - RNA, 19 nt, Artificial Sequence
  Description of Artificial Sequence: Synthetic oligonucleotide
ugcucaacuuagcucgcuu

SEQ ID NO: 2069630 - RNA, 19 nt, Artificial Sequence
  Description of Artificial Sequence: Synthetic oligonucleotide
ugcccucguauaaaugcua

SEQ ID NO: 2069631 - RNA, 19 nt, Artificial Sequence
  Description of Artificial Sequence: Synthetic oligonucleotide
gugcuguacagaaaccuca

SEQ ID NO: 2069632 - RNA, 19 nt, Artificial Sequence
  Description of Artificial Sequence: Synthetic oligonucleotide
gcuugcgauagcugcuugg

SEQ ID NO: 2069633 - RNA, 19 nt, Artificial Sequence
  Description of Artificial Sequence: Synthetic oligonucleotide
ugcuugcgauagcugcuug

SEQ ID NO: 2069634 - RNA, 19 nt, Artificial Sequence
  Description of Artificial Sequence: Synthetic oligonucleotide
auagccagcaagggcaaau

SEQ ID NO: 2069635 - RNA, 19 nt, Artificial Sequence
  Description of Artificial Sequence: Synthetic oligonucleotide
gaugcucaacuuagcucgc

SEQ ID NO: 2069636 - RNA, 19 nt, Artificial Sequence
  Description of Artificial Sequence: Synthetic oligonucleotide
gccagcaagggcaaauucc

SEQ ID NO: 2069637 - RNA, 19 nt, Artificial Sequence
  Description of Artificial Sequence: Synthetic oligonucleotide
gcuaaguuggccaucaagu

SEQ ID NO: 2069638 - RNA, 19 nt, Artificial Sequence
  Description of Artificial Sequence: Synthetic oligonucleotide
uggccagcuucagagagau

SEQ ID NO: 2069639 - RNA, 19 nt, Artificial Sequence
  Description of Artificial Sequence: Synthetic oligonucleotide
agcaccauaugcagcucag

SEQ ID NO: 2069640 - RNA, 19 nt, Artificial Sequence
  Description of Artificial Sequence: Synthetic oligonucleotide
cuugcgauagcugcuugga

SEQ ID NO: 2069641 - RNA, 19 nt, Artificial Sequence
  Description of Artificial Sequence: Synthetic oligonucleotide
cugaagaacagucacucuu

SEQ ID NO: 2069642 - RNA, 19 nt, Artificial Sequence
  Description of Artificial Sequence: Synthetic oligonucleotide
aguagccaagucacucauc

SEQ ID NO: 2069643 - RNA, 19 nt, Artificial Sequence
  Description of Artificial Sequence: Synthetic oligonucleotide
cauccagaguaguagccaa

SEQ ID NO: 2069644 - RNA, 19 nt, Artificial Sequence
  Description of Artificial Sequence: Synthetic oligonucleotide
gucguaaguguaagagaug

SEQ ID NO: 2069645 - RNA, 19 nt, Artificial Sequence
  Description of Artificial Sequence: Synthetic oligonucleotide
agguaacucauuguugcuu

SEQ ID NO: 2069646 - RNA, 19 nt, Artificial Sequence
  Description of Artificial Sequence: Synthetic oligonucleotide
cucguauaaaugcuaaguu

SEQ ID NO: 2069647 - RNA, 19 nt, Artificial Sequence
  Description of Artificial Sequence: Synthetic oligonucleotide
gcaucaugcaaaauuagcu

SEQ ID NO: 2069648 - RNA, 19 nt, Artificial Sequence
  Description of Artificial Sequence: Synthetic oligonucleotide
guagcgugcacaagaaucu

SEQ ID NO: 2069649 - RNA, 19 nt, Artificial Sequence
  Description of Artificial Sequence: Synthetic oligonucleotide
ucgccagaucugaugcccu

SEQ ID NO: 2069650 - RNA, 19 nt, Artificial Sequence
  Description of Artificial Sequence: Synthetic oligonucleotide
cauaugcagcucaggguga

SEQ ID NO: 2069651 - RNA, 19 nt, Artificial Sequence
  Description of Artificial Sequence: Synthetic oligonucleotide
ccugaugugcuguacagaa

SEQ ID NO: 2069652 - RNA, 19 nt, Artificial Sequence
  Description of Artificial Sequence: Synthetic oligonucleotide
augaacuuacauagcuuaa

SEQ ID NO: 2069653 - RNA, 19 nt, Artificial Sequence
  Description of Artificial Sequence: Synthetic oligonucleotide
ccuacaacaaaugaacuua

SEQ ID NO: 2069654 - RNA, 19 nt, Artificial Sequence
  Description of Artificial Sequence: Synthetic oligonucleotide
cagcucagggugauugauc

SEQ ID NO: 2069655 - RNA, 19 nt, Artificial Sequence
  Description of Artificial Sequence: Synthetic oligonucleotide
guguaucguucucugugga

SEQ ID NO: 2069656 - RNA, 19 nt, Artificial Sequence
  Description of Artificial Sequence: Synthetic oligonucleotide
guauuggcuuucucuucca

SEQ ID NO: 2069657 - RNA, 19 nt, Artificial Sequence
  Description of Artificial Sequence: Synthetic oligonucleotide
auccagaguaguagccaag

SEQ ID NO: 2069658 - RNA, 19 nt, Artificial Sequence
  Description of Artificial Sequence: Synthetic oligonucleotide
uagagucgaaaugcagaau

SEQ ID NO: 2069659 - RNA, 19 nt, Artificial Sequence
  Description of Artificial Sequence: Synthetic oligonucleotide
gggcuacuagaaaucaccc

SEQ ID NO: 2069660 - RNA, 19 nt, Artificial Sequence
  Description of Artificial Sequence: Synthetic oligonucleotide
gcgugcacaagaaucuaag

SEQ ID NO: 2069661 - RNA, 19 nt, Artificial Sequence
  Description of Artificial Sequence: Synthetic oligonucleotide
gcacaagaaucuaagcaca

SEQ ID NO: 2069662 - RNA, 19 nt, Artificial Sequence
  Description of Artificial Sequence: Synthetic oligonucleotide
cucagggugauugaucucu

SEQ ID NO: 2069663 - RNA, 19 nt, Artificial Sequence
  Description of Artificial Sequence: Synthetic oligonucleotide
ccuccaagcagguaacuca

SEQ ID NO: 2069664 - RNA, 19 nt, Artificial Sequence
  Description of Artificial Sequence: Synthetic oligonucleotide
uugcauuguccuccugcuu

SEQ ID NO: 2069665 - RNA, 19 nt, Artificial Sequence
  Description of Artificial Sequence: Synthetic oligonucleotide
gcgggguuaaagaaagcug

SEQ ID NO: 2069666 - RNA, 19 nt, Artificial Sequence
  Description of Artificial Sequence: Synthetic oligonucleotide
gucugugggugucuuucuc

SEQ ID NO: 2069667 - RNA, 19 nt, Artificial Sequence
  Description of Artificial Sequence: Synthetic oligonucleotide
caagcagguaacucauugu

SEQ ID NO: 2069668 - RNA, 19 nt, Artificial Sequence
  Description of Artificial Sequence: Synthetic oligonucleotide
cgugcacaagaaucuaagc

SEQ ID NO: 2069669 - RNA, 19 nt, Artificial Sequence
  Description of Artificial Sequence: Synthetic oligonucleotide
cucugauaugcaaggcgaa

SEQ ID NO: 2069670 - RNA, 19 nt, Artificial Sequence
  Description of Artificial Sequence: Synthetic oligonucleotide
gcccucugcauauauaugu

SEQ ID NO: 2069671 - RNA, 19 nt, Artificial Sequence
  Description of Artificial Sequence: Synthetic oligonucleotide
agguagcgugcacaagaau

SEQ ID NO: 2069672 - RNA, 19 nt, Artificial Sequence
  Description of Artificial Sequence: Synthetic oligonucleotide
gcgaagagcaucaugcaaa

SEQ ID NO: 2069673 - RNA, 19 nt, Artificial Sequence
  Description of Artificial Sequence: Synthetic oligonucleotide
gcgauagcugcuuggagaa

SEQ ID NO: 2069674 - RNA, 19 nt, Artificial Sequence
  Description of Artificial Sequence: Synthetic oligonucleotide
cgggguuaaagaaagcuga

SEQ ID NO: 2069675 - RNA, 19 nt, Artificial Sequence
  Description of Artificial Sequence: Synthetic oligonucleotide
gccaagucacucaucagca

SEQ ID NO: 2069676 - RNA, 19 nt, Artificial Sequence
  Description of Artificial Sequence: Synthetic oligonucleotide
ucuugacagcucagccaau

SEQ ID NO: 2069677 - RNA, 19 nt, Artificial Sequence
  Description of Artificial Sequence: Synthetic oligonucleotide
uccaagcagguaacucauu

SEQ ID NO: 2069678 - RNA, 19 nt, Artificial Sequence
  Description of Artificial Sequence: Synthetic oligonucleotide
aucucucucgccagaucug

SEQ ID NO: 2069679 - RNA, 19 nt, Artificial Sequence
  Description of Artificial Sequence: Synthetic oligonucleotide
cugcuugcuucagugcuuc

SEQ ID NO: 2069680 - RNA, 19 nt, Artificial Sequence
  Description of Artificial Sequence: Synthetic oligonucleotide
cuuguguguaucguucucu

SEQ ID NO: 2069681 - RNA, 19 nt, Artificial Sequence
  Description of Artificial Sequence: Synthetic oligonucleotide
gcccugugcauccagagua

SEQ ID NO: 2069682 - RNA, 19 nt, Artificial Sequence
  Description of Artificial Sequence: Synthetic oligonucleotide
auaugcagcucagggugau

SEQ ID NO: 2069683 - RNA, 19 nt, Artificial Sequence
  Description of Artificial Sequence: Synthetic oligonucleotide
cagguagcgugcacaagaa

SEQ ID NO: 2069684 - RNA, 19 nt, Artificial Sequence
  Description of Artificial Sequence: Synthetic oligonucleotide
caucuuucaugaugcucaa

SEQ ID NO: 2069685 - RNA, 19 nt, Artificial Sequence
  Description of Artificial Sequence: Synthetic oligonucleotide
cuucccugaugugcuguac

SEQ ID NO: 2069686 - RNA, 19 nt, Artificial Sequence
  Description of Artificial Sequence: Synthetic oligonucleotide
augauucgaaccacugcuu

SEQ ID NO: 2069687 - RNA, 19 nt, Artificial Sequence
  Description of Artificial Sequence: Synthetic oligonucleotide
ccucccuacaacaaaugaa

SEQ ID NO: 2069688 - RNA, 19 nt, Artificial Sequence
  Description of Artificial Sequence: Synthetic oligonucleotide
aucacccucccuacaacaa

SEQ ID NO: 2069689 - RNA, 19 nt, Artificial Sequence
  Description of Artificial Sequence: Synthetic oligonucleotide
caccgaggcgggguuaaag

SEQ ID NO: 2069690 - RNA, 19 nt, Artificial Sequence
  Description of Artificial Sequence: Synthetic oligonucleotide
agcagguagcgugcacaag

SEQ ID NO: 2069691 - RNA, 19 nt, Artificial Sequence
  Description of Artificial Sequence: Synthetic oligonucleotide
aggcgggguuaaagaaagc

SEQ ID NO: 2069692 - RNA, 19 nt, Artificial Sequence
  Description of Artificial Sequence: Synthetic oligonucleotide
gucgaaaugcagaauucau

SEQ ID NO: 2069693 - RNA, 19 nt, Artificial Sequence
  Description of Artificial Sequence: Synthetic oligonucleotide
cugaugugcuguacagaaa

SEQ ID NO: 2069694 - RNA, 19 nt, Artificial Sequence
  Description of Artificial Sequence: Synthetic oligonucleotide
agcgugcacaagaaucuaa

SEQ ID NO: 2069695 - RNA, 19 nt, Artificial Sequence
  Description of Artificial Sequence: Synthetic oligonucleotide
gaugcccucugcauauaua

SEQ ID NO: 2069696 - RNA, 19 nt, Artificial Sequence
  Description of Artificial Sequence: Synthetic oligonucleotide
cccucguauaaaugcuaag

SEQ ID NO: 2069697 - RNA, 19 nt, Artificial Sequence
  Description of Artificial Sequence: Synthetic oligonucleotide
cacaagaaucuaagcacau

SEQ ID NO: 2069698 - RNA, 19 nt, Artificial Sequence
  Description of Artificial Sequence: Synthetic oligonucleotide
uagcgugcacaagaaucua

SEQ ID NO: 2069699 - RNA, 19 nt, Artificial Sequence
  Description of Artificial Sequence: Synthetic oligonucleotide
uccaccgaggcgggguuaa

SEQ ID NO: 2069700 - RNA, 19 nt, Artificial Sequence
  Description of Artificial Sequence: Synthetic oligonucleotide
cuggccagcuucagagaga

SEQ ID NO: 2069701 - RNA, 19 nt, Artificial Sequence
  Description of Artificial Sequence: Synthetic oligonucleotide
ccaaggaggagguagguau

SEQ ID NO: 2069702 - RNA, 19 nt, Artificial Sequence
  Description of Artificial Sequence: Synthetic oligonucleotide
cagccagauugcugagcac

SEQ ID NO: 2069703 - RNA, 19 nt, Artificial Sequence
  Description of Artificial Sequence: Synthetic oligonucleotide
gcuguacagaaaccucauc

SEQ ID NO: 2069704 - RNA, 19 nt, Artificial Sequence
  Description of Artificial Sequence: Synthetic oligonucleotide
gcuuguguguaucguucuc

SEQ ID NO: 2069705 - RNA, 19 nt, Artificial Sequence
  Description of Artificial Sequence: Synthetic oligonucleotide
acccucccuacaacaaaug

SEQ ID NO: 2069706 - RNA, 19 nt, Artificial Sequence
  Description of Artificial Sequence: Synthetic oligonucleotide
auccucugugcuugcgaua

SEQ ID NO: 2069707 - RNA, 19 nt, Artificial Sequence
  Description of Artificial Sequence: Synthetic oligonucleotide
gcauuguccuccugcuuca

SEQ ID NO: 2069708 - RNA, 19 nt, Artificial Sequence
  Description of Artificial Sequence: Synthetic oligonucleotide
agguagguauuggcuuucu

SEQ ID NO: 2069709 - RNA, 19 nt, Artificial Sequence
  Description of Artificial Sequence: Synthetic oligonucleotide
gcuaauuccuuuucucuuu

SEQ ID NO: 2069710 - RNA, 19 nt, Artificial Sequence
  Description of Artificial Sequence: Synthetic oligonucleotide
gcaguguauacaacuuguc

SEQ ID NO: 2069711 - RNA, 19 nt, Artificial Sequence
  Description of Artificial Sequence: Synthetic oligonucleotide
augcucaacuuagcucgcu

SEQ ID NO: 2069712 - RNA, 19 nt, Artificial Sequence
  Description of Artificial Sequence: Synthetic oligonucleotide
caagcugcccucguauaaa

SEQ ID NO: 2069713 - RNA, 19 nt, Artificial Sequence
  Description of Artificial Sequence: Synthetic oligonucleotide
cuccaagcagguaacucau

SEQ ID NO: 2069714 - RNA, 19 nt, Artificial Sequence
  Description of Artificial Sequence: Synthetic oligonucleotide
aggcgucaucaaaguggcc

SEQ ID NO: 2069715 - RNA, 19 nt, Artificial Sequence
  Description of Artificial Sequence: Synthetic oligonucleotide
gacaaaucugcagggcuuu

SEQ ID NO: 2069716 - RNA, 19 nt, Artificial Sequence
  Description of Artificial Sequence: Synthetic oligonucleotide
ggcgggguuaaagaaagcu

SEQ ID NO: 2069717 - RNA, 19 nt, Artificial Sequence
  Description of Artificial Sequence: Synthetic oligonucleotide
ccuuguauuucuugacaaa

SEQ ID NO: 2069718 - RNA, 19 nt, Artificial Sequence
  Description of Artificial Sequence: Synthetic oligonucleotide
cccugugcauccagaguag

SEQ ID NO: 2069719 - RNA, 19 nt, Artificial Sequence
  Description of Artificial Sequence: Synthetic oligonucleotide
cugcccucguauaaaugcu

SEQ ID NO: 2069720 - RNA, 19 nt, Artificial Sequence
  Description of Artificial Sequence: Synthetic oligonucleotide
ccagaguaguagccaaguc

SEQ ID NO: 2069721 - RNA, 19 nt, Artificial Sequence
  Description of Artificial Sequence: Synthetic oligonucleotide
agucacucaucagcacaau

SEQ ID NO: 2069722 - RNA, 19 nt, Artificial Sequence
  Description of Artificial Sequence: Synthetic oligonucleotide
cgauuauugcauuguccuc

SEQ ID NO: 2069723 - RNA, 19 nt, Artificial Sequence
  Description of Artificial Sequence: Synthetic oligonucleotide
cauccucugugcuugcgau

SEQ ID NO: 2069724 - RNA, 19 nt, Artificial Sequence
  Description of Artificial Sequence: Synthetic oligonucleotide
ccucguauaaaugcuaagu

SEQ ID NO: 2069725 - RNA, 19 nt, Artificial Sequence
  Description of Artificial Sequence: Synthetic oligonucleotide
ggguccagacacugaagaa

SEQ ID NO: 2069726 - RNA, 19 nt, Artificial Sequence
  Description of Artificial Sequence: Synthetic oligonucleotide
ccucuagagucgaaaugca

SEQ ID NO: 2069727 - RNA, 19 nt, Artificial Sequence
  Description of Artificial Sequence: Synthetic oligonucleotide
augcuaaguuggccaucaa

SEQ ID NO: 2069728 - RNA, 19 nt, Artificial Sequence
  Description of Artificial Sequence: Synthetic oligonucleotide
cagucacucuuuugggcua

SEQ ID NO: 2069729 - RNA, 19 nt, Artificial Sequence
  Description of Artificial Sequence: Synthetic oligonucleotide
gggguuaaagaaagcugaa

SEQ ID NO: 2069730 - RNA, 19 nt, Artificial Sequence
  Description of Artificial Sequence: Synthetic oligonucleotide
uaugcagcucagggugauu

SEQ ID NO: 2069731 - RNA, 19 nt, Artificial Sequence
  Description of Artificial Sequence: Synthetic oligonucleotide
cacccucccuacaacaaau

SEQ ID NO: 2069732 - RNA, 19 nt, Artificial Sequence
  Description of Artificial Sequence: Synthetic oligonucleotide
cccauucucaaaguaaacu

SEQ ID NO: 2069733 - RNA, 19 nt, Artificial Sequence
  Description of Artificial Sequence: Synthetic oligonucleotide
cccucccuacaacaaauga

SEQ ID NO: 2069734 - RNA, 19 nt, Artificial Sequence
  Description of Artificial Sequence: Synthetic oligonucleotide
cguucucuguggaucaaga

SEQ ID NO: 2069735 - RNA, 19 nt, Artificial Sequence
  Description of Artificial Sequence: Synthetic oligonucleotide
aucguucucuguggaucaa

SEQ ID NO: 2069736 - RNA, 19 nt, Artificial Sequence
  Description of Artificial Sequence: Synthetic oligonucleotide
cuugacagcucagccaauu

SEQ ID NO: 2069737 - RNA, 19 nt, Artificial Sequence
  Description of Artificial Sequence: Synthetic oligonucleotide
gcauagauacuggccagcu

SEQ ID NO: 2069738 - RNA, 19 nt, Artificial Sequence
  Description of Artificial Sequence: Synthetic oligonucleotide
cauagauacuggccagcuu

SEQ ID NO: 2069739 - RNA, 19 nt, Artificial Sequence
  Description of Artificial Sequence: Synthetic oligonucleotide
cccuacaacaaaugaacuu

SEQ ID NO: 2069740 - RNA, 19 nt, Artificial Sequence
  Description of Artificial Sequence: Synthetic oligonucleotide
gcucgcuucagcagcugga

SEQ ID NO: 2069741 - RNA, 19 nt, Artificial Sequence
  Description of Artificial Sequence: Synthetic oligonucleotide
gcagggcuuucucauacau

SEQ ID NO: 2069742 - RNA, 19 nt, Artificial Sequence
  Description of Artificial Sequence: Synthetic oligonucleotide
gcccucguauaaaugcuaa

SEQ ID NO: 2069743 - RNA, 19 nt, Artificial Sequence
  Description of Artificial Sequence: Synthetic oligonucleotide
gcuugcuucagugcuuccu

SEQ ID NO: 2069744 - RNA, 19 nt, Artificial Sequence
  Description of Artificial Sequence: Synthetic oligonucleotide
ccgaggcgggguuaaagaa

SEQ ID NO: 2069745 - RNA, 19 nt, Artificial Sequence
  Description of Artificial Sequence: Synthetic oligonucleotide
cagaaaccucaucucuuuu

SEQ ID NO: 2069746 - RNA, 19 nt, Artificial Sequence
  Description of Artificial Sequence: Synthetic oligonucleotide
ggucugugggugucuuucu

SEQ ID NO: 2069747 - RNA, 19 nt, Artificial Sequence
  Description of Artificial Sequence: Synthetic oligonucleotide
aguuggccaucaagucgua

SEQ ID NO: 2069748 - RNA, 19 nt, Artificial Sequence
  Description of Artificial Sequence: Synthetic oligonucleotide
cagagagaucucgauuauu

SEQ ID NO: 2069749 - RNA, 19 nt, Artificial Sequence
  Description of Artificial Sequence: Synthetic oligonucleotide
ggcccugugcauccagagu

SEQ ID NO: 2069750 - RNA, 19 nt, Artificial Sequence
  Description of Artificial Sequence: Synthetic oligonucleotide
caauggucugugggugucu

SEQ ID NO: 2069751 - RNA, 19 nt, Artificial Sequence
  Description of Artificial Sequence: Synthetic oligonucleotide
cucucucgccagaucugau

SEQ ID NO: 2069752 - RNA, 19 nt, Artificial Sequence
  Description of Artificial Sequence: Synthetic oligonucleotide
gugcuugcgauagcugcuu

SEQ ID NO: 2069753 - RNA, 19 nt, Artificial Sequence
  Description of Artificial Sequence: Synthetic oligonucleotide
gggugucuuucuccuugua

SEQ ID NO: 2069754 - RNA, 19 nt, Artificial Sequence
  Description of Artificial Sequence: Synthetic oligonucleotide
cugggucaucuuucaugau

SEQ ID NO: 2069755 - RNA, 19 nt, Artificial Sequence
  Description of Artificial Sequence: Synthetic oligonucleotide
cgccagaucugaugcccuc

SEQ ID NO: 2069756 - RNA, 19 nt, Artificial Sequence
  Description of Artificial Sequence: Synthetic oligonucleotide
cgauagcugcuuggagaag

SEQ ID NO: 2069757 - RNA, 19 nt, Artificial Sequence
  Description of Artificial Sequence: Synthetic oligonucleotide
gccagaucugaugcccucu

SEQ ID NO: 2069758 - RNA, 19 nt, Artificial Sequence
  Description of Artificial Sequence: Synthetic oligonucleotide
ccucuucugggucaucuuu

SEQ ID NO: 2069759 - RNA, 19 nt, Artificial Sequence
  Description of Artificial Sequence: Synthetic oligonucleotide
cugaugcccucugcauaua

SEQ ID NO: 2069760 - RNA, 19 nt, Artificial Sequence
  Description of Artificial Sequence: Synthetic oligonucleotide
gucacucuuuugggcuacu

SEQ ID NO: 2069761 - RNA, 19 nt, Artificial Sequence
  Description of Artificial Sequence: Synthetic oligonucleotide
gggcuuucucauacauccu

SEQ ID NO: 2069762 - RNA, 19 nt, Artificial Sequence
  Description of Artificial Sequence: Synthetic oligonucleotide
cuccaccgaggcgggguua

SEQ ID NO: 2069763 - RNA, 19 nt, Artificial Sequence
  Description of Artificial Sequence: Synthetic oligonucleotide
ccugugcauccagaguagu

SEQ ID NO: 2069764 - RNA, 19 nt, Artificial Sequence
  Description of Artificial Sequence: Synthetic oligonucleotide
ccagauugcugagcaccau

SEQ ID NO: 2069765 - RNA, 19 nt, Artificial Sequence
  Description of Artificial Sequence: Synthetic oligonucleotide
ccuccaccgaggcgggguu

SEQ ID NO: 2069766 - RNA, 19 nt, Artificial Sequence
  Description of Artificial Sequence: Synthetic oligonucleotide
ccaccgaggcgggguuaaa

SEQ ID NO: 2069767 - RNA, 19 nt, Artificial Sequence
  Description of Artificial Sequence: Synthetic oligonucleotide
uuugaagccagaaugaaug

SEQ ID NO: 2069768 - RNA, 19 nt, Artificial Sequence
  Description of Artificial Sequence: Synthetic oligonucleotide
auugauaggacuuccaguc

SEQ ID NO: 2069769 - RNA, 19 nt, Artificial Sequence
  Description of Artificial Sequence: Synthetic oligonucleotide
ugugccuccagccacaucg

SEQ ID NO: 2069770 - RNA, 19 nt, Artificial Sequence
  Description of Artificial Sequence: Synthetic oligonucleotide
uuggcuaaauuccagacag

SEQ ID NO: 2069771 - RNA, 19 nt, Artificial Sequence
  Description of Artificial Sequence: Synthetic oligonucleotide
guaaacaucaaauugguca

SEQ ID NO: 2069772 - RNA, 19 nt, Artificial Sequence
  Description of Artificial Sequence: Synthetic oligonucleotide
accugauaaacuuugcccc

SEQ ID NO: 2069773 - RNA, 19 nt, Artificial Sequence
  Description of Artificial Sequence: Synthetic oligonucleotide
aaauuggucaucaucaaag

SEQ ID NO: 2069774 - RNA, 19 nt, Artificial Sequence
  Description of Artificial Sequence: Synthetic oligonucleotide
uucucuugggacaagagcc

SEQ ID NO: 2069775 - RNA, 19 nt, Artificial Sequence
  Description of Artificial Sequence: Synthetic oligonucleotide
aauuggucaucaucaaagg

SEQ ID NO: 2069776 - RNA, 19 nt, Artificial Sequence
  Description of Artificial Sequence: Synthetic oligonucleotide
gaaugaauggccacgaucc

SEQ ID NO: 2069777 - RNA, 19 nt, Artificial Sequence
  Description of Artificial Sequence: Synthetic oligonucleotide
aagugaaccacccaaggga

SEQ ID NO: 2069778 - RNA, 19 nt, Artificial Sequence
  Description of Artificial Sequence: Synthetic oligonucleotide
acaucgagcaguugggucc

SEQ ID NO: 2069779 - RNA, 19 nt, Artificial Sequence
  Description of Artificial Sequence: Synthetic oligonucleotide
aaugacagggaugaccugg

SEQ ID NO: 2069780 - RNA, 19 nt, Artificial Sequence
  Description of Artificial Sequence: Synthetic oligonucleotide
agagaaaccguccuccugg

SEQ ID NO: 2069781 - RNA, 19 nt, Artificial Sequence
  Description of Artificial Sequence: Synthetic oligonucleotide
auucacuuggcuaaauucc

SEQ ID NO: 2069782 - RNA, 19 nt, Artificial Sequence
  Description of Artificial Sequence: Synthetic oligonucleotide
aaagccuggauaugagggg

SEQ ID NO: 2069783 - RNA, 19 nt, Artificial Sequence
  Description of Artificial Sequence: Synthetic oligonucleotide
ugcacauaaguaaggaacc

SEQ ID NO: 2069784 - RNA, 19 nt, Artificial Sequence
  Description of Artificial Sequence: Synthetic oligonucleotide
aaugaauggccacgauccc

SEQ ID NO: 2069785 - RNA, 19 nt, Artificial Sequence
  Description of Artificial Sequence: Synthetic oligonucleotide
aaguaaggaaccggaaggc

SEQ ID NO: 2069786 - RNA, 19 nt, Artificial Sequence
  Description of Artificial Sequence: Synthetic oligonucleotide
acaccugauaaacuuugcc

SEQ ID NO: 2069787 - RNA, 19 nt, Artificial Sequence
  Description of Artificial Sequence: Synthetic oligonucleotide
ucauaagucaccuucugaa

SEQ ID NO: 2069788 - RNA, 19 nt, Artificial Sequence
  Description of Artificial Sequence: Synthetic oligonucleotide
acuguacagaucauaaagc

SEQ ID NO: 2069789 - RNA, 19 nt, Artificial Sequence
  Description of Artificial Sequence: Synthetic oligonucleotide
uacacucucaaacaccuga

SEQ ID NO: 2069790 - RNA, 19 nt, Artificial Sequence
  Description of Artificial Sequence: Synthetic oligonucleotide
auaugaggggaucauucac

SEQ ID NO: 2069791 - RNA, 19 nt, Artificial Sequence
  Description of Artificial Sequence: Synthetic oligonucleotide
gaugccgagacucaucaug

SEQ ID NO: 2069792 - RNA, 19 nt, Artificial Sequence
  Description of Artificial Sequence: Synthetic oligonucleotide
auaaagccuggauaugagg

SEQ ID NO: 2069793 - RNA, 19 nt, Artificial Sequence
  Description of Artificial Sequence: Synthetic oligonucleotide
acagaagggagcuagaguu

SEQ ID NO: 2069794 - RNA, 19 nt, Artificial Sequence
  Description of Artificial Sequence: Synthetic oligonucleotide
caccugauaaacuuugccc

SEQ ID NO: 2069795 - RNA, 19 nt, Artificial Sequence
  Description of Artificial Sequence: Synthetic oligonucleotide
ugugccugcacauaaguaa

SEQ ID NO: 2069796 - RNA, 19 nt, Artificial Sequence
  Description of Artificial Sequence: Synthetic oligonucleotide
aucacgucauacuucuugg

SEQ ID NO: 2069797 - RNA, 19 nt, Artificial Sequence
  Description of Artificial Sequence: Synthetic oligonucleotide
agccacaucgagcaguugg

SEQ ID NO: 2069798 - RNA, 19 nt, Artificial Sequence
  Description of Artificial Sequence: Synthetic oligonucleotide
uaagucaccuucugaaagc

SEQ ID NO: 2069799 - RNA, 19 nt, Artificial Sequence
  Description of Artificial Sequence: Synthetic oligonucleotide
uugaucagcagaucuuucc

SEQ ID NO: 2069800 - RNA, 19 nt, Artificial Sequence
  Description of Artificial Sequence: Synthetic oligonucleotide
gaucccaaaagcaauggug

SEQ ID NO: 2069801 - RNA, 19 nt, Artificial Sequence
  Description of Artificial Sequence: Synthetic oligonucleotide
aacucuuccugauuaggga

SEQ ID NO: 2069802 - RNA, 19 nt, Artificial Sequence
  Description of Artificial Sequence: Synthetic oligonucleotide
uauugauaggacuuccagu

SEQ ID NO: 2069803 - RNA, 19 nt, Artificial Sequence
  Description of Artificial Sequence: Synthetic oligonucleotide
agcaguagcgccauagacc

SEQ ID NO: 2069804 - RNA, 19 nt, Artificial Sequence
  Description of Artificial Sequence: Synthetic oligonucleotide
guauugauaggacuuccag

SEQ ID NO: 2069805 - RNA, 19 nt, Artificial Sequence
  Description of Artificial Sequence: Synthetic oligonucleotide
uccugauuagggaacuucc

SEQ ID NO: 2069806 - RNA, 19 nt, Artificial Sequence
  Description of Artificial Sequence: Synthetic oligonucleotide
aacaucaaauuggucauca

SEQ ID NO: 2069807 - RNA, 19 nt, Artificial Sequence
  Description of Artificial Sequence: Synthetic oligonucleotide
cuggaaacuguacagauca

SEQ ID NO: 2069808 - RNA, 19 nt, Artificial Sequence
  Description of Artificial Sequence: Synthetic oligonucleotide
ucucuugggacaagagccg

SEQ ID NO: 2069809 - RNA, 19 nt, Artificial Sequence
  Description of Artificial Sequence: Synthetic oligonucleotide
uucacuuggcuaaauucca

SEQ ID NO: 2069810 - RNA, 19 nt, Artificial Sequence
  Description of Artificial Sequence: Synthetic oligonucleotide
cauucacuuggcuaaauuc

SEQ ID NO: 2069811 - RNA, 19 nt, Artificial Sequence
  Description of Artificial Sequence: Synthetic oligonucleotide
agcagaucuuuccaagcac

SEQ ID NO: 2069812 - RNA, 19 nt, Artificial Sequence
  Description of Artificial Sequence: Synthetic oligonucleotide
ugaucagcagaucuuucca

SEQ ID NO: 2069813 - RNA, 19 nt, Artificial Sequence
  Description of Artificial Sequence: Synthetic oligonucleotide
aagguauugauaggacuuc

SEQ ID NO: 2069814 - RNA, 19 nt, Artificial Sequence
  Description of Artificial Sequence: Synthetic oligonucleotide
uuucauaagucaccuucug

SEQ ID NO: 2069815 - RNA, 19 nt, Artificial Sequence
  Description of Artificial Sequence: Synthetic oligonucleotide
uucauaagucaccuucuga

SEQ ID NO: 2069816 - RNA, 19 nt, Artificial Sequence
  Description of Artificial Sequence: Synthetic oligonucleotide
caugacaagugaaccaccc

SEQ ID NO: 2069817 - RNA, 19 nt, Artificial Sequence
  Description of Artificial Sequence: Synthetic oligonucleotide
aacacgaccacccgcggca

SEQ ID NO: 2069818 - RNA, 19 nt, Artificial Sequence
  Description of Artificial Sequence: Synthetic oligonucleotide
gaaugacuggcucaugcug

SEQ ID NO: 2069819 - RNA, 19 nt, Artificial Sequence
  Description of Artificial Sequence: Synthetic oligonucleotide
aaacccgaagugcguuucc

SEQ ID NO: 2069820 - RNA, 19 nt, Artificial Sequence
  Description of Artificial Sequence: Synthetic oligonucleotide
uuagggaacuuccgaauac

SEQ ID NO: 2069821 - RNA, 19 nt, Artificial Sequence
  Description of Artificial Sequence: Synthetic oligonucleotide
acuuccgaauacuuuccac

SEQ ID NO: 2069822 - RNA, 19 nt, Artificial Sequence
  Description of Artificial Sequence: Synthetic oligonucleotide
ucaugcugcacaacagaag

SEQ ID NO: 2069823 - RNA, 19 nt, Artificial Sequence
  Description of Artificial Sequence: Synthetic oligonucleotide
aagagccgcgcacugggcg

SEQ ID NO: 2069824 - RNA, 19 nt, Artificial Sequence
  Description of Artificial Sequence: Synthetic oligonucleotide
uuuccaagcacgguggaug

SEQ ID NO: 2069825 - RNA, 19 nt, Artificial Sequence
  Description of Artificial Sequence: Synthetic oligonucleotide
acaagguauugauaggacu

SEQ ID NO: 2069826 - RNA, 19 nt, Artificial Sequence
  Description of Artificial Sequence: Synthetic oligonucleotide
aagccugcaucuucaauca

SEQ ID NO: 2069827 - RNA, 19 nt, Artificial Sequence
  Description of Artificial Sequence: Synthetic oligonucleotide
acaagagccgcgcacuggg

SEQ ID NO: 2069828 - RNA, 19 nt, Artificial Sequence
  Description of Artificial Sequence: Synthetic oligonucleotide
aaacaccugauaaacuuug

SEQ ID NO: 2069829 - RNA, 19 nt, Artificial Sequence
  Description of Artificial Sequence: Synthetic oligonucleotide
acucucaaacaccugauaa

SEQ ID NO: 2069830 - RNA, 19 nt, Artificial Sequence
  Description of Artificial Sequence: Synthetic oligonucleotide
augugugugacauuccgga

SEQ ID NO: 2069831 - RNA, 19 nt, Artificial Sequence
  Description of Artificial Sequence: Synthetic oligonucleotide
ucucccguggaacacgacc

SEQ ID NO: 2069832 - RNA, 19 nt, Artificial Sequence
  Description of Artificial Sequence: Synthetic oligonucleotide
cuucccaggacaaauucug

SEQ ID NO: 2069833 - RNA, 19 nt, Artificial Sequence
  Description of Artificial Sequence: Synthetic oligonucleotide
agugggugcauuuucuuga

SEQ ID NO: 2069834 - RNA, 19 nt, Artificial Sequence
  Description of Artificial Sequence: Synthetic oligonucleotide
gaucauaaagccuggauau

SEQ ID NO: 2069835 - RNA, 19 nt, Artificial Sequence
  Description of Artificial Sequence: Synthetic oligonucleotide
ugauuagggaacuuccgaa

SEQ ID NO: 2069836 - RNA, 19 nt, Artificial Sequence
  Description of Artificial Sequence: Synthetic oligonucleotide
ugcuucccaaccuuuagca

SEQ ID NO: 2069837 - RNA, 19 nt, Artificial Sequence
  Description of Artificial Sequence: Synthetic oligonucleotide
ugaaccacccaagggaucc

SEQ ID NO: 2069838 - RNA, 19 nt, Artificial Sequence
  Description of Artificial Sequence: Synthetic oligonucleotide
aucagcagaucuuuccaag

SEQ ID NO: 2069839 - RNA, 19 nt, Artificial Sequence
  Description of Artificial Sequence: Synthetic oligonucleotide
aaccggaaggcgauguccc

SEQ ID NO: 2069840 - RNA, 19 nt, Artificial Sequence
  Description of Artificial Sequence: Synthetic oligonucleotide
aacaccugauaaacuuugc

SEQ ID NO: 2069841 - RNA, 19 nt, Artificial Sequence
  Description of Artificial Sequence: Synthetic oligonucleotide
uggaugccgagacucauca

SEQ ID NO: 2069842 - RNA, 19 nt, Artificial Sequence
  Description of Artificial Sequence: Synthetic oligonucleotide
cagaaugacuggcucaugc

SEQ ID NO: 2069843 - RNA, 19 nt, Artificial Sequence
  Description of Artificial Sequence: Synthetic oligonucleotide
caucaaauuggucaucauc

SEQ ID NO: 2069844 - RNA, 19 nt, Artificial Sequence
  Description of Artificial Sequence: Synthetic oligonucleotide
gacccgaugugcuuccugg

SEQ ID NO: 2069845 - RNA, 19 nt, Artificial Sequence
  Description of Artificial Sequence: Synthetic oligonucleotide
ugauaggacuuccagucuc

SEQ ID NO: 2069846 - RNA, 19 nt, Artificial Sequence
  Description of Artificial Sequence: Synthetic oligonucleotide
ugucucgucagggagauuc

SEQ ID NO: 2069847 - RNA, 19 nt, Artificial Sequence
  Description of Artificial Sequence: Synthetic oligonucleotide
uggucaggcuuucauaagu

SEQ ID NO: 2069848 - RNA, 19 nt, Artificial Sequence
  Description of Artificial Sequence: Synthetic oligonucleotide
caucacgucauacuucuug

SEQ ID NO: 2069849 - RNA, 19 nt, Artificial Sequence
  Description of Artificial Sequence: Synthetic oligonucleotide
gucucaaacccgaagugcg

SEQ ID NO: 2069850 - RNA, 19 nt, Artificial Sequence
  Description of Artificial Sequence: Synthetic oligonucleotide
gauaugaggggaucauuca

SEQ ID NO: 2069851 - RNA, 19 nt, Artificial Sequence
  Description of Artificial Sequence: Synthetic oligonucleotide
gucagggagauucucuucc

SEQ ID NO: 2069852 - RNA, 19 nt, Artificial Sequence
  Description of Artificial Sequence: Synthetic oligonucleotide
cagaccaugacaagugaac

SEQ ID NO: 2069853 - RNA, 19 nt, Artificial Sequence
  Description of Artificial Sequence: Synthetic oligonucleotide
acaaauucugcugggcccg

SEQ ID NO: 2069854 - RNA, 19 nt, Artificial Sequence
  Description of Artificial Sequence: Synthetic oligonucleotide
uccguuuucucugaugcug

SEQ ID NO: 2069855 - RNA, 19 nt, Artificial Sequence
  Description of Artificial Sequence: Synthetic oligonucleotide
auagaccacagcuccuggg

SEQ ID NO: 2069856 - RNA, 19 nt, Artificial Sequence
  Description of Artificial Sequence: Synthetic oligonucleotide
agacucaucaugucauuca

SEQ ID NO: 2069857 - RNA, 19 nt, Artificial Sequence
  Description of Artificial Sequence: Synthetic oligonucleotide
ucuugggacaagagccgcg

SEQ ID NO: 2069858 - RNA, 19 nt, Artificial Sequence
  Description of Artificial Sequence: Synthetic oligonucleotide
aguuccaggccucagcaga

SEQ ID NO: 2069859 - RNA, 19 nt, Artificial Sequence
  Description of Artificial Sequence: Synthetic oligonucleotide
ggagcuagaguuugaagcc

SEQ ID NO: 2069860 - RNA, 19 nt, Artificial Sequence
  Description of Artificial Sequence: Synthetic oligonucleotide
ggaacuuccgaauacuuuc

SEQ ID NO: 2069861 - RNA, 19 nt, Artificial Sequence
  Description of Artificial Sequence: Synthetic oligonucleotide
agguauugauaggacuucc

SEQ ID NO: 2069862 - RNA, 19 nt, Artificial Sequence
  Description of Artificial Sequence: Synthetic oligonucleotide
uguaaacaucaaauugguc

SEQ ID NO: 2069863 - RNA, 19 nt, Artificial Sequence
  Description of Artificial Sequence: Synthetic oligonucleotide
cacauaaguaaggaaccgg

SEQ ID NO: 2069864 - RNA, 19 nt, Artificial Sequence
  Description of Artificial Sequence: Synthetic oligonucleotide
cacaacagaagggagcuag

SEQ ID NO: 2069865 - RNA, 19 nt, Artificial Sequence
  Description of Artificial Sequence: Synthetic oligonucleotide
uagaguuugaagccagaau

SEQ ID NO: 2069866 - RNA, 19 nt, Artificial Sequence
  Description of Artificial Sequence: Synthetic oligonucleotide
gucaaugugugugacauuc

SEQ ID NO: 2069867 - RNA, 19 nt, Artificial Sequence
  Description of Artificial Sequence: Synthetic oligonucleotide
uggcucaugcugcacaaca

SEQ ID NO: 2069868 - RNA, 19 nt, Artificial Sequence
  Description of Artificial Sequence: Synthetic oligonucleotide
accuuuagcaucucccugu

SEQ ID NO: 2069869 - RNA, 19 nt, Artificial Sequence
  Description of Artificial Sequence: Synthetic oligonucleotide
ccgaauacuuuccacaagg

SEQ ID NO: 2069870 - RNA, 19 nt, Artificial Sequence
  Description of Artificial Sequence: Synthetic oligonucleotide
uugaacucuuccugauuag

SEQ ID NO: 2069871 - RNA, 19 nt, Artificial Sequence
  Description of Artificial Sequence: Synthetic oligonucleotide
uccgaauacuuuccacaag

SEQ ID NO: 2069872 - RNA, 19 nt, Artificial Sequence
  Description of Artificial Sequence: Synthetic oligonucleotide
gcuuucauaagucaccuuc

SEQ ID NO: 2069873 - RNA, 19 nt, Artificial Sequence
  Description of Artificial Sequence: Synthetic oligonucleotide
ucaaugugugugacauucc

SEQ ID NO: 2069874 - RNA, 19 nt, Artificial Sequence
  Description of Artificial Sequence: Synthetic oligonucleotide
cugcacaacagaagggagc

SEQ ID NO: 2069875 - RNA, 19 nt, Artificial Sequence
  Description of Artificial Sequence: Synthetic oligonucleotide
cuuccgaauacuuuccaca

SEQ ID NO: 2069876 - RNA, 19 nt, Artificial Sequence
  Description of Artificial Sequence: Synthetic oligonucleotide
uuccgaauacuuuccacaa

SEQ ID NO: 2069877 - RNA, 19 nt, Artificial Sequence
  Description of Artificial Sequence: Synthetic oligonucleotide
aacuuccgaauacuuucca

SEQ ID NO: 2069878 - RNA, 19 nt, Artificial Sequence
  Description of Artificial Sequence: Synthetic oligonucleotide
ugccugcacauaaguaagg

SEQ ID NO: 2069879 - RNA, 19 nt, Artificial Sequence
  Description of Artificial Sequence: Synthetic oligonucleotide
agaaugacuggcucaugcu

SEQ ID NO: 2069880 - RNA, 19 nt, Artificial Sequence
  Description of Artificial Sequence: Synthetic oligonucleotide
acauaaguaaggaaccgga

SEQ ID NO: 2069881 - RNA, 19 nt, Artificial Sequence
  Description of Artificial Sequence: Synthetic oligonucleotide
uuccagacagagaaaccgu

SEQ ID NO: 2069882 - RNA, 19 nt, Artificial Sequence
  Description of Artificial Sequence: Synthetic oligonucleotide
uaaggaaccggaaggcgau

SEQ ID NO: 2069883 - RNA, 19 nt, Artificial Sequence
  Description of Artificial Sequence: Synthetic oligonucleotide
gaauacuuuccacaaggua

SEQ ID NO: 2069884 - RNA, 19 nt, Artificial Sequence
  Description of Artificial Sequence: Synthetic oligonucleotide
uugauaggacuuccagucu

SEQ ID NO: 2069885 - RNA, 19 nt, Artificial Sequence
  Description of Artificial Sequence: Synthetic oligonucleotide
agccagaaugaauggccac

SEQ ID NO: 2069886 - RNA, 19 nt, Artificial Sequence
  Description of Artificial Sequence: Synthetic oligonucleotide
auuagggaacuuccgaaua

SEQ ID NO: 2069887 - RNA, 19 nt, Artificial Sequence
  Description of Artificial Sequence: Synthetic oligonucleotide
gagcaguugggucccaggc

SEQ ID NO: 2069888 - RNA, 19 nt, Artificial Sequence
  Description of Artificial Sequence: Synthetic oligonucleotide
cuacugucucgucagggag

SEQ ID NO: 2069889 - RNA, 19 nt, Artificial Sequence
  Description of Artificial Sequence: Synthetic oligonucleotide
cacaagguauugauaggac

SEQ ID NO: 2069890 - RNA, 19 nt, Artificial Sequence
  Description of Artificial Sequence: Synthetic oligonucleotide
ucccaggacaaauucugcu

SEQ ID NO: 2069891 - RNA, 19 nt, Artificial Sequence
  Description of Artificial Sequence: Synthetic oligonucleotide
uccagacagagaaaccguc

SEQ ID NO: 2069892 - RNA, 19 nt, Artificial Sequence
  Description of Artificial Sequence: Synthetic oligonucleotide
ucauucacuuggcuaaauu

SEQ ID NO: 2069893 - RNA, 19 nt, Artificial Sequence
  Description of Artificial Sequence: Synthetic oligonucleotide
acccgaagugcguuuccgc

SEQ ID NO: 2069894 - RNA, 19 nt, Artificial Sequence
  Description of Artificial Sequence: Synthetic oligonucleotide
aauucugcugggcccguaa

SEQ ID NO: 2069895 - RNA, 19 nt, Artificial Sequence
  Description of Artificial Sequence: Synthetic oligonucleotide
gauaggacuuccagucucc

SEQ ID NO: 2069896 - RNA, 19 nt, Artificial Sequence
  Description of Artificial Sequence: Synthetic oligonucleotide
gaacuuccgaauacuuucc

SEQ ID NO: 2069897 - RNA, 19 nt, Artificial Sequence
  Description of Artificial Sequence: Synthetic oligonucleotide
uuccaagcacgguggaugc

SEQ ID NO: 2069898 - RNA, 19 nt, Artificial Sequence
  Description of Artificial Sequence: Synthetic oligonucleotide
aacccgaagugcguuuccg

SEQ ID NO: 2069899 - RNA, 19 nt, Artificial Sequence
  Description of Artificial Sequence: Synthetic oligonucleotide
acgguggaugccgagacuc

SEQ ID NO: 2069900 - RNA, 19 nt, Artificial Sequence
  Description of Artificial Sequence: Synthetic oligonucleotide
uccggaucccaaaagcaau

SEQ ID NO: 2069901 - RNA, 19 nt, Artificial Sequence
  Description of Artificial Sequence: Synthetic oligonucleotide
uacugucucgucagggaga

SEQ ID NO: 2069902 - RNA, 19 nt, Artificial Sequence
  Description of Artificial Sequence: Synthetic oligonucleotide
ggacaaauucugcugggcc

SEQ ID NO: 2069903 - RNA, 19 nt, Artificial Sequence
  Description of Artificial Sequence: Synthetic oligonucleotide
aucaugucauucaucacgu

SEQ ID NO: 2069904 - RNA, 19 nt, Artificial Sequence
  Description of Artificial Sequence: Synthetic oligonucleotide
aguagcgccauagaccaca

SEQ ID NO: 2069905 - RNA, 19 nt, Artificial Sequence
  Description of Artificial Sequence: Synthetic oligonucleotide
ucacgucauacuucuuggc

SEQ ID NO: 2069906 - RNA, 19 nt, Artificial Sequence
  Description of Artificial Sequence: Synthetic oligonucleotide
accuggaaacuguacagau

SEQ ID NO: 2069907 - RNA, 19 nt, Artificial Sequence
  Description of Artificial Sequence: Synthetic oligonucleotide
gacacagucucaaacccga

SEQ ID NO: 2069908 - RNA, 19 nt, Artificial Sequence
  Description of Artificial Sequence: Synthetic oligonucleotide
ucucaaacccgaagugcgu

SEQ ID NO: 2069909 - RNA, 19 nt, Artificial Sequence
  Description of Artificial Sequence: Synthetic oligonucleotide
gaugaccucuccaaugaca

SEQ ID NO: 2069910 - RNA, 19 nt, Artificial Sequence
  Description of Artificial Sequence: Synthetic oligonucleotide
ugcagucucccguggaaca

SEQ ID NO: 2069911 - RNA, 19 nt, Artificial Sequence
  Description of Artificial Sequence: Synthetic oligonucleotide
cucuuccugauuagggaac

SEQ ID NO: 2069912 - RNA, 19 nt, Artificial Sequence
  Description of Artificial Sequence: Synthetic oligonucleotide
gcaguagcgccauagacca

SEQ ID NO: 2069913 - RNA, 19 nt, Artificial Sequence
  Description of Artificial Sequence: Synthetic oligonucleotide
cauagaccacagcuccugg

SEQ ID NO: 2069914 - RNA, 19 nt, Artificial Sequence
  Description of Artificial Sequence: Synthetic oligonucleotide
cuuggcuaaauuccagaca

SEQ ID NO: 2069915 - RNA, 19 nt, Artificial Sequence
  Description of Artificial Sequence: Synthetic oligonucleotide
cugauuagggaacuuccga

SEQ ID NO: 2069916 - RNA, 19 nt, Artificial Sequence
  Description of Artificial Sequence: Synthetic oligonucleotide
acgucauacuucuuggcua

SEQ ID NO: 2069917 - RNA, 19 nt, Artificial Sequence
  Description of Artificial Sequence: Synthetic oligonucleotide
ucaucaugucauucaucac

SEQ ID NO: 2069918 - RNA, 19 nt, Artificial Sequence
  Description of Artificial Sequence: Synthetic oligonucleotide
augacaagugaaccaccca

SEQ ID NO: 2069919 - RNA, 19 nt, Artificial Sequence
  Description of Artificial Sequence: Synthetic oligonucleotide
ucagggagauucucuucca

SEQ ID NO: 2069920 - RNA, 19 nt, Artificial Sequence
  Description of Artificial Sequence: Synthetic oligonucleotide
agcuacugucucgucaggg

SEQ ID NO: 2069921 - RNA, 19 nt, Artificial Sequence
  Description of Artificial Sequence: Synthetic oligonucleotide
accggaaggcgaugucccc

SEQ ID NO: 2069922 - RNA, 19 nt, Artificial Sequence
  Description of Artificial Sequence: Synthetic oligonucleotide
cagucucaaacccgaagug

SEQ ID NO: 2069923 - RNA, 19 nt, Artificial Sequence
  Description of Artificial Sequence: Synthetic oligonucleotide
uuccugauuagggaacuuc

SEQ ID NO: 2069924 - RNA, 19 nt, Artificial Sequence
  Description of Artificial Sequence: Synthetic oligonucleotide
guaaggaaccggaaggcga

SEQ ID NO: 2069925 - RNA, 19 nt, Artificial Sequence
  Description of Artificial Sequence: Synthetic oligonucleotide
cuugggacaagagccgcgc

SEQ ID NO: 2069926 - RNA, 19 nt, Artificial Sequence
  Description of Artificial Sequence: Synthetic oligonucleotide
uggagugcccggucaaugu

SEQ ID NO: 2069927 - RNA, 19 nt, Artificial Sequence
  Description of Artificial Sequence: Synthetic oligonucleotide
cagcaguagcgccauagac

SEQ ID NO: 2069928 - RNA, 19 nt, Artificial Sequence
  Description of Artificial Sequence: Synthetic oligonucleotide
gaucagcagaucuuuccaa

SEQ ID NO: 2069929 - RNA, 19 nt, Artificial Sequence
  Description of Artificial Sequence: Synthetic oligonucleotide
auuccggaucccaaaagca

SEQ ID NO: 2069930 - RNA, 19 nt, Artificial Sequence
  Description of Artificial Sequence: Synthetic oligonucleotide
uagggaacuuccgaauacu

SEQ ID NO: 2069931 - RNA, 19 nt, Artificial Sequence
  Description of Artificial Sequence: Synthetic oligonucleotide
gaugaccuggaaacuguac

SEQ ID NO: 2069932 - RNA, 19 nt, Artificial Sequence
  Description of Artificial Sequence: Synthetic oligonucleotide
aagugcguuuccgcggcuc

SEQ ID NO: 2069933 - RNA, 19 nt, Artificial Sequence
  Description of Artificial Sequence: Synthetic oligonucleotide
ccugauuagggaacuuccg

SEQ ID NO: 2069934 - RNA, 19 nt, Artificial Sequence
  Description of Artificial Sequence: Synthetic oligonucleotide
gagaaaccguccuccuggc

SEQ ID NO: 2069935 - RNA, 19 nt, Artificial Sequence
  Description of Artificial Sequence: Synthetic oligonucleotide
uuaggacccgaugugcuuc

SEQ ID NO: 2069936 - RNA, 19 nt, Artificial Sequence
  Description of Artificial Sequence: Synthetic oligonucleotide
agggaugaccuggaaacug

SEQ ID NO: 2069937 - RNA, 19 nt, Artificial Sequence
  Description of Artificial Sequence: Synthetic oligonucleotide
gaacacgaccacccgcggc

SEQ ID NO: 2069938 - RNA, 19 nt, Artificial Sequence
  Description of Artificial Sequence: Synthetic oligonucleotide
gacaagagccgcgcacugg

SEQ ID NO: 2069939 - RNA, 19 nt, Artificial Sequence
  Description of Artificial Sequence: Synthetic oligonucleotide
cauaaguaaggaaccggaa

SEQ ID NO: 2069940 - RNA, 19 nt, Artificial Sequence
  Description of Artificial Sequence: Synthetic oligonucleotide
cacaucgagcaguuggguc

SEQ ID NO: 2069941 - RNA, 19 nt, Artificial Sequence
  Description of Artificial Sequence: Synthetic oligonucleotide
aguuugaagccagaaugaa

SEQ ID NO: 2069942 - RNA, 19 nt, Artificial Sequence
  Description of Artificial Sequence: Synthetic oligonucleotide
uguguguccuugguccaag

SEQ ID NO: 2069943 - RNA, 19 nt, Artificial Sequence
  Description of Artificial Sequence: Synthetic oligonucleotide
cauaagucaccuucugaaa

SEQ ID NO: 2069944 - RNA, 19 nt, Artificial Sequence
  Description of Artificial Sequence: Synthetic oligonucleotide
gauuagggaacuuccgaau

SEQ ID NO: 2069945 - RNA, 19 nt, Artificial Sequence
  Description of Artificial Sequence: Synthetic oligonucleotide
uccugcgaugaccucucca

SEQ ID NO: 2069946 - RNA, 19 nt, Artificial Sequence
  Description of Artificial Sequence: Synthetic oligonucleotide
ugaugcugugccugcacau

SEQ ID NO: 2069947 - RNA, 19 nt, Artificial Sequence
  Description of Artificial Sequence: Synthetic oligonucleotide
uaggacuuccagucuccug

SEQ ID NO: 2069948 - RNA, 19 nt, Artificial Sequence
  Description of Artificial Sequence: Synthetic oligonucleotide
ggauaugaggggaucauuc

SEQ ID NO: 2069949 - RNA, 19 nt, Artificial Sequence
  Description of Artificial Sequence: Synthetic oligonucleotide
ugugugugacauuccggau

SEQ ID NO: 2069950 - RNA, 19 nt, Artificial Sequence
  Description of Artificial Sequence: Synthetic oligonucleotide
ugucauucaucacgucaua

SEQ ID NO: 2069951 - RNA, 19 nt, Artificial Sequence
  Description of Artificial Sequence: Synthetic oligonucleotide
ccuucugaaagccugcauc

SEQ ID NO: 2069952 - RNA, 19 nt, Artificial Sequence
  Description of Artificial Sequence: Synthetic oligonucleotide
gacuggcucaugcugcaca

SEQ ID NO: 2069953 - RNA, 19 nt, Artificial Sequence
  Description of Artificial Sequence: Synthetic oligonucleotide
caagguauugauaggacuu

SEQ ID NO: 2069954 - RNA, 19 nt, Artificial Sequence
  Description of Artificial Sequence: Synthetic oligonucleotide
aagggagcuagaguuugaa

SEQ ID NO: 2069955 - RNA, 19 nt, Artificial Sequence
  Description of Artificial Sequence: Synthetic oligonucleotide
aggggaucauucacuuggc

SEQ ID NO: 2069956 - RNA, 19 nt, Artificial Sequence
  Description of Artificial Sequence: Synthetic oligonucleotide
gcacauaaguaaggaaccg

SEQ ID NO: 2069957 - RNA, 19 nt, Artificial Sequence
  Description of Artificial Sequence: Synthetic oligonucleotide
cuuucauaagucaccuucu

SEQ ID NO: 2069958 - RNA, 19 nt, Artificial Sequence
  Description of Artificial Sequence: Synthetic oligonucleotide
ucgucagggagauucucuu

SEQ ID NO: 2069959 - RNA, 19 nt, Artificial Sequence
  Description of Artificial Sequence: Synthetic oligonucleotide
agugaaccacccaagggau

SEQ ID NO: 2069960 - RNA, 19 nt, Artificial Sequence
  Description of Artificial Sequence: Synthetic oligonucleotide
cucccguggaacacgacca

SEQ ID NO: 2069961 - RNA, 19 nt, Artificial Sequence
  Description of Artificial Sequence: Synthetic oligonucleotide
uacuuuccacaagguauug

SEQ ID NO: 2069962 - RNA, 19 nt, Artificial Sequence
  Description of Artificial Sequence: Synthetic oligonucleotide
ugaaagccugcaucuucaa

SEQ ID NO: 2069963 - RNA, 19 nt, Artificial Sequence
  Description of Artificial Sequence: Synthetic oligonucleotide
ucccaaaagcaauggugua

SEQ ID NO: 2069964 - RNA, 19 nt, Artificial Sequence
  Description of Artificial Sequence: Synthetic oligonucleotide
caggaccgauguaaccggg

SEQ ID NO: 2069965 - RNA, 19 nt, Artificial Sequence
  Description of Artificial Sequence: Synthetic oligonucleotide
ggcuuuaggacccgaugug

SEQ ID NO: 2069966 - RNA, 19 nt, Artificial Sequence
  Description of Artificial Sequence: Synthetic oligonucleotide
cagagaaaccguccuccug

SEQ ID NO: 2069967 - RNA, 19 nt, Artificial Sequence
  Description of Artificial Sequence: Synthetic oligonucleotide
augcugugccugcacauaa

SEQ ID NO: 2069968 - RNA, 19 nt, Artificial Sequence
  Description of Artificial Sequence: Synthetic oligonucleotide
cugggcguggcucgggccc

SEQ ID NO: 2069969 - RNA, 19 nt, Artificial Sequence
  Description of Artificial Sequence: Synthetic oligonucleotide
augccgagacucaucaugu

SEQ ID NO: 2069970 - RNA, 19 nt, Artificial Sequence
  Description of Artificial Sequence: Synthetic oligonucleotide
uggaaacuguacagaucau

SEQ ID NO: 2069971 - RNA, 19 nt, Artificial Sequence
  Description of Artificial Sequence: Synthetic oligonucleotide
ccgacacagucucaaaccc

SEQ ID NO: 2069972 - RNA, 19 nt, Artificial Sequence
  Description of Artificial Sequence: Synthetic oligonucleotide
guaacugucuccuccguuu

SEQ ID NO: 2069973 - RNA, 19 nt, Artificial Sequence
  Description of Artificial Sequence: Synthetic oligonucleotide
cucuugggacaagagccgc

SEQ ID NO: 2069974 - RNA, 19 nt, Artificial Sequence
  Description of Artificial Sequence: Synthetic oligonucleotide
ucgggcccaggaccgaugu

SEQ ID NO: 2069975 - RNA, 19 nt, Artificial Sequence
  Description of Artificial Sequence: Synthetic oligonucleotide
cccgaagugcguuuccgcg

SEQ ID NO: 2069976 - RNA, 19 nt, Artificial Sequence
  Description of Artificial Sequence: Synthetic oligonucleotide
gagcuagaguuugaagcca

SEQ ID NO: 2069977 - RNA, 19 nt, Artificial Sequence
  Description of Artificial Sequence: Synthetic oligonucleotide
aggaccgauguaaccgggg

SEQ ID NO: 2069978 - RNA, 19 nt, Artificial Sequence
  Description of Artificial Sequence: Synthetic oligonucleotide
ggacuuccagucuccugcg

SEQ ID NO: 2069979 - RNA, 19 nt, Artificial Sequence
  Description of Artificial Sequence: Synthetic oligonucleotide
ccguggaacacgaccaccc

SEQ ID NO: 2069980 - RNA, 19 nt, Artificial Sequence
  Description of Artificial Sequence: Synthetic oligonucleotide
cuagaguuugaagccagaa

SEQ ID NO: 2069981 - RNA, 19 nt, Artificial Sequence
  Description of Artificial Sequence: Synthetic oligonucleotide
caucgagcaguuggguccc

SEQ ID NO: 2069982 - RNA, 19 nt, Artificial Sequence
  Description of Artificial Sequence: Synthetic oligonucleotide
ucccguggaacacgaccac

SEQ ID NO: 2069983 - RNA, 19 nt, Artificial Sequence
  Description of Artificial Sequence: Synthetic oligonucleotide
gaugugcuuccuggagugc

SEQ ID NO: 2069984 - RNA, 19 nt, Artificial Sequence
  Description of Artificial Sequence: Synthetic oligonucleotide
acugucucgucagggagau

SEQ ID NO: 2069985 - RNA, 19 nt, Artificial Sequence
  Description of Artificial Sequence: Synthetic oligonucleotide
cuuuaggacccgaugugcu

SEQ ID NO: 2069986 - RNA, 19 nt, Artificial Sequence
  Description of Artificial Sequence: Synthetic oligonucleotide
agaaaccguccuccuggcu

SEQ ID NO: 2069987 - RNA, 19 nt, Artificial Sequence
  Description of Artificial Sequence: Synthetic oligonucleotide
uccuggagugcccggucaa

SEQ ID NO: 2069988 - RNA, 19 nt, Artificial Sequence
  Description of Artificial Sequence: Synthetic oligonucleotide
aaggaaccggaaggcgaug

SEQ ID NO: 2069989 - RNA, 19 nt, Artificial Sequence
  Description of Artificial Sequence: Synthetic oligonucleotide
caaugacagggaugaccug

SEQ ID NO: 2069990 - RNA, 19 nt, Artificial Sequence
  Description of Artificial Sequence: Synthetic oligonucleotide
uggauaugaggggaucauu

SEQ ID NO: 2069991 - RNA, 19 nt, Artificial Sequence
  Description of Artificial Sequence: Synthetic oligonucleotide
caaacccgaagugcguuuc

SEQ ID NO: 2069992 - RNA, 19 nt, Artificial Sequence
  Description of Artificial Sequence: Synthetic oligonucleotide
cacgucauacuucuuggcu

SEQ ID NO: 2069993 - RNA, 19 nt, Artificial Sequence
  Description of Artificial Sequence: Synthetic oligonucleotide
gcuacugucucgucaggga

SEQ ID NO: 2069994 - RNA, 19 nt, Artificial Sequence
  Description of Artificial Sequence: Synthetic oligonucleotide
cacagaccaugacaaguga

SEQ ID NO: 2069995 - RNA, 19 nt, Artificial Sequence
  Description of Artificial Sequence: Synthetic oligonucleotide
caagagccgcgcacugggc

SEQ ID NO: 2069996 - RNA, 19 nt, Artificial Sequence
  Description of Artificial Sequence: Synthetic oligonucleotide
uggccacgaucccuguggu

SEQ ID NO: 2069997 - RNA, 19 nt, Artificial Sequence
  Description of Artificial Sequence: Synthetic oligonucleotide
ccaugacaagugaaccacc

SEQ ID NO: 2069998 - RNA, 19 nt, Artificial Sequence
  Description of Artificial Sequence: Synthetic oligonucleotide
gccgagacucaucauguca

SEQ ID NO: 2069999 - RNA, 19 nt, Artificial Sequence
  Description of Artificial Sequence: Synthetic oligonucleotide
ccgaagugcguuuccgcgg

SEQ ID NO: 2070000 - RNA, 19 nt, Artificial Sequence
  Description of Artificial Sequence: Synthetic oligonucleotide
ggagugcccggucaaugug

SEQ ID NO: 2070001 - RNA, 19 nt, Artificial Sequence
  Description of Artificial Sequence: Synthetic oligonucleotide
gguauugauaggacuucca

SEQ ID NO: 2070002 - RNA, 19 nt, Artificial Sequence
  Description of Artificial Sequence: Synthetic oligonucleotide
auaggacuuccagucuccu

SEQ ID NO: 2070003 - RNA, 19 nt, Artificial Sequence
  Description of Artificial Sequence: Synthetic oligonucleotide
cgccauagaccacagcucc

SEQ ID NO: 2070004 - RNA, 19 nt, Artificial Sequence
  Description of Artificial Sequence: Synthetic oligonucleotide
gaucccuguggucaggcuu

SEQ ID NO: 2070005 - RNA, 19 nt, Artificial Sequence
  Description of Artificial Sequence: Synthetic oligonucleotide
ucucgucagggagauucuc

SEQ ID NO: 2070006 - RNA, 19 nt, Artificial Sequence
  Description of Artificial Sequence: Synthetic oligonucleotide
ggaacacgaccacccgcgg

SEQ ID NO: 2070007 - RNA, 19 nt, Artificial Sequence
  Description of Artificial Sequence: Synthetic oligonucleotide
agcacgguggaugccgaga

SEQ ID NO: 2070008 - RNA, 19 nt, Artificial Sequence
  Description of Artificial Sequence: Synthetic oligonucleotide
ggaaacuguacagaucaua

SEQ ID NO: 2070009 - RNA, 19 nt, Artificial Sequence
  Description of Artificial Sequence: Synthetic oligonucleotide
agugcccggucaaugugug

SEQ ID NO: 2070010 - RNA, 19 nt, Artificial Sequence
  Description of Artificial Sequence: Synthetic oligonucleotide
acaacagaagggagcuaga

SEQ ID NO: 2070011 - RNA, 19 nt, Artificial Sequence
  Description of Artificial Sequence: Synthetic oligonucleotide
ucgagcaguugggucccag

SEQ ID NO: 2070012 - RNA, 19 nt, Artificial Sequence
  Description of Artificial Sequence: Synthetic oligonucleotide
gaucauucacuuggcuaaa

SEQ ID NO: 2070013 - RNA, 19 nt, Artificial Sequence
  Description of Artificial Sequence: Synthetic oligonucleotide
cauacuucuuggcuacacu

SEQ ID NO: 2070014 - RNA, 19 nt, Artificial Sequence
  Description of Artificial Sequence: Synthetic oligonucleotide
gugcuuccuggagugcccg

SEQ ID NO: 2070015 - RNA, 19 nt, Artificial Sequence
  Description of Artificial Sequence: Synthetic oligonucleotide
acacucucaaacaccugau

SEQ ID NO: 2070016 - RNA, 19 nt, Artificial Sequence
  Description of Artificial Sequence: Synthetic oligonucleotide
ugcguuuccgcggcucgcu

SEQ ID NO: 2070017 - RNA, 19 nt, Artificial Sequence
  Description of Artificial Sequence: Synthetic oligonucleotide
uagcgccauagaccacagc

SEQ ID NO: 2070018 - RNA, 19 nt, Artificial Sequence
  Description of Artificial Sequence: Synthetic oligonucleotide
acccgaugugcuuccugga

SEQ ID NO: 2070019 - RNA, 19 nt, Artificial Sequence
  Description of Artificial Sequence: Synthetic oligonucleotide
gaagggagcuagaguuuga

SEQ ID NO: 2070020 - RNA, 19 nt, Artificial Sequence
  Description of Artificial Sequence: Synthetic oligonucleotide
uccaagcacgguggaugcc

SEQ ID NO: 2070021 - RNA, 19 nt, Artificial Sequence
  Description of Artificial Sequence: Synthetic oligonucleotide
guagcgccauagaccacag

SEQ ID NO: 2070022 - RNA, 19 nt, Artificial Sequence
  Description of Artificial Sequence: Synthetic oligonucleotide
gcuacacucucaaacaccu

SEQ ID NO: 2070023 - RNA, 19 nt, Artificial Sequence
  Description of Artificial Sequence: Synthetic oligonucleotide
guuugaagccagaaugaau

SEQ ID NO: 2070024 - RNA, 19 nt, Artificial Sequence
  Description of Artificial Sequence: Synthetic oligonucleotide
gcuucucuugggacaagag

SEQ ID NO: 2070025 - RNA, 19 nt, Artificial Sequence
  Description of Artificial Sequence: Synthetic oligonucleotide
aucauucacuuggcuaaau

SEQ ID NO: 2070026 - RNA, 19 nt, Artificial Sequence
  Description of Artificial Sequence: Synthetic oligonucleotide
ccggaucccaaaagcaaug

SEQ ID NO: 2070027 - RNA, 19 nt, Artificial Sequence
  Description of Artificial Sequence: Synthetic oligonucleotide
ccacaagguauugauagga

SEQ ID NO: 2070028 - RNA, 19 nt, Artificial Sequence
  Description of Artificial Sequence: Synthetic oligonucleotide
acgaccacccgcggcagca

SEQ ID NO: 2070029 - RNA, 19 nt, Artificial Sequence
  Description of Artificial Sequence: Synthetic oligonucleotide
gacuuccagucuccugcga

SEQ ID NO: 2070030 - RNA, 19 nt, Artificial Sequence
  Description of Artificial Sequence: Synthetic oligonucleotide
gcacgguggaugccgagac

SEQ ID NO: 2070031 - RNA, 19 nt, Artificial Sequence
  Description of Artificial Sequence: Synthetic oligonucleotide
ggacaagagccgcgcacug

SEQ ID NO: 2070032 - RNA, 19 nt, Artificial Sequence
  Description of Artificial Sequence: Synthetic oligonucleotide
cugugccugcacauaagua

SEQ ID NO: 2070033 - RNA, 19 nt, Artificial Sequence
  Description of Artificial Sequence: Synthetic oligonucleotide
agggaacuuccgaauacuu

SEQ ID NO: 2070034 - RNA, 19 nt, Artificial Sequence
  Description of Artificial Sequence: Synthetic oligonucleotide
ggcucgcuucucuugggac

SEQ ID NO: 2070035 - RNA, 19 nt, Artificial Sequence
  Description of Artificial Sequence: Synthetic oligonucleotide
ccauagaccacagcuccug

SEQ ID NO: 2070036 - RNA, 19 nt, Artificial Sequence
  Description of Artificial Sequence: Synthetic oligonucleotide
guuuccgcggcucgcuucu

SEQ ID NO: 2070037 - RNA, 19 nt, Artificial Sequence
  Description of Artificial Sequence: Synthetic oligonucleotide
gccugcaucuucaaucauc

SEQ ID NO: 2070038 - RNA, 19 nt, Artificial Sequence
  Description of Artificial Sequence: Synthetic oligonucleotide
cccaaccuuuagcaucucc

SEQ ID NO: 2070039 - RNA, 19 nt, Artificial Sequence
  Description of Artificial Sequence: Synthetic oligonucleotide
cgaagugcguuuccgcggc

SEQ ID NO: 2070040 - RNA, 19 nt, Artificial Sequence
  Description of Artificial Sequence: Synthetic oligonucleotide
aaauucugcugggcccgua

SEQ ID NO: 2070041 - RNA, 19 nt, Artificial Sequence
  Description of Artificial Sequence: Synthetic oligonucleotide
caagcacgguggaugccga

SEQ ID NO: 2070042 - RNA, 19 nt, Artificial Sequence
  Description of Artificial Sequence: Synthetic oligonucleotide
cacucucaaacaccugaua

SEQ ID NO: 2070043 - RNA, 19 nt, Artificial Sequence
  Description of Artificial Sequence: Synthetic oligonucleotide
ccaguuccaggccucagca

SEQ ID NO: 2070044 - RNA, 19 nt, Artificial Sequence
  Description of Artificial Sequence: Synthetic oligonucleotide
ugacuggcucaugcugcac

SEQ ID NO: 2070045 - RNA, 19 nt, Artificial Sequence
  Description of Artificial Sequence: Synthetic oligonucleotide
cucgcuucucuugggacaa

SEQ ID NO: 2070046 - RNA, 19 nt, Artificial Sequence
  Description of Artificial Sequence: Synthetic oligonucleotide
guggaugccgagacucauc

SEQ ID NO: 2070047 - RNA, 19 nt, Artificial Sequence
  Description of Artificial Sequence: Synthetic oligonucleotide
ccugcacauaaguaaggaa

SEQ ID NO: 2070048 - RNA, 19 nt, Artificial Sequence
  Description of Artificial Sequence: Synthetic oligonucleotide
cugggcccguaacugucuc

SEQ ID NO: 2070049 - RNA, 19 nt, Artificial Sequence
  Description of Artificial Sequence: Synthetic oligonucleotide
uccgcggcucgcuucucuu

SEQ ID NO: 2070050 - RNA, 19 nt, Artificial Sequence
  Description of Artificial Sequence: Synthetic oligonucleotide
gcagcaguagcgccauaga

SEQ ID NO: 2070051 - RNA, 19 nt, Artificial Sequence
  Description of Artificial Sequence: Synthetic oligonucleotide
ggacccgaugugcuuccug

SEQ ID NO: 2070052 - RNA, 19 nt, Artificial Sequence
  Description of Artificial Sequence: Synthetic oligonucleotide
ggagccugcagucucccgu

SEQ ID NO: 2070053 - RNA, 19 nt, Artificial Sequence
  Description of Artificial Sequence: Synthetic oligonucleotide
gagugcccggucaaugugu

SEQ ID NO: 2070054 - RNA, 19 nt, Artificial Sequence
  Description of Artificial Sequence: Synthetic oligonucleotide
gcgcacugggcguggcucg

SEQ ID NO: 2070055 - RNA, 19 nt, Artificial Sequence
  Description of Artificial Sequence: Synthetic oligonucleotide
guuccaggccucagcagaa

SEQ ID NO: 2070056 - RNA, 19 nt, Artificial Sequence
  Description of Artificial Sequence: Synthetic oligonucleotide
gugaaccacccaagggauc

SEQ ID NO: 2070057 - RNA, 19 nt, Artificial Sequence
  Description of Artificial Sequence: Synthetic oligonucleotide
acacgaccacccgcggcag

SEQ ID NO: 2070058 - RNA, 19 nt, Artificial Sequence
  Description of Artificial Sequence: Synthetic oligonucleotide
cuggcucaugcugcacaac

SEQ ID NO: 2070059 - RNA, 19 nt, Artificial Sequence
  Description of Artificial Sequence: Synthetic oligonucleotide
gcugugccugcacauaagu

SEQ ID NO: 2070060 - RNA, 19 nt, Artificial Sequence
  Description of Artificial Sequence: Synthetic oligonucleotide
cacccgcggcagcaguagc

SEQ ID NO: 2070061 - RNA, 19 nt, Artificial Sequence
  Description of Artificial Sequence: Synthetic oligonucleotide
caguagcgccauagaccac

SEQ ID NO: 2070062 - RNA, 19 nt, Artificial Sequence
  Description of Artificial Sequence: Synthetic oligonucleotide
gggcccaggaccgauguaa

SEQ ID NO: 2070063 - RNA, 19 nt, Artificial Sequence
  Description of Artificial Sequence: Synthetic oligonucleotide
ucgcuucucuugggacaag

SEQ ID NO: 2070064 - RNA, 19 nt, Artificial Sequence
  Description of Artificial Sequence: Synthetic oligonucleotide
gucauacuucuuggcuaca

SEQ ID NO: 2070065 - RNA, 19 nt, Artificial Sequence
  Description of Artificial Sequence: Synthetic oligonucleotide
caccuucugaaagccugca

SEQ ID NO: 2070066 - RNA, 19 nt, Artificial Sequence
  Description of Artificial Sequence: Synthetic oligonucleotide
cuccugcgaugaccucucc

SEQ ID NO: 2070067 - RNA, 19 nt, Artificial Sequence
  Description of Artificial Sequence: Synthetic oligonucleotide
gagccgcgcacugggcgug

SEQ ID NO: 2070068 - RNA, 19 nt, Artificial Sequence
  Description of Artificial Sequence: Synthetic oligonucleotide
cgcggcucgcuucucuugg

SEQ ID NO: 2070069 - RNA, 19 nt, Artificial Sequence
  Description of Artificial Sequence: Synthetic oligonucleotide
cguuuucucugaugcugug

SEQ ID NO: 2070070 - RNA, 19 nt, Artificial Sequence
  Description of Artificial Sequence: Synthetic oligonucleotide
gcaaugguguaaacaucaa

SEQ ID NO: 2070071 - RNA, 19 nt, Artificial Sequence
  Description of Artificial Sequence: Synthetic oligonucleotide
gggaugaccuggaaacugu

SEQ ID NO: 2070072 - RNA, 19 nt, Artificial Sequence
  Description of Artificial Sequence: Synthetic oligonucleotide
gcuagaguuugaagccaga

SEQ ID NO: 2070073 - RNA, 19 nt, Artificial Sequence
  Description of Artificial Sequence: Synthetic oligonucleotide
gcgccauagaccacagcuc

SEQ ID NO: 2070074 - RNA, 19 nt, Artificial Sequence
  Description of Artificial Sequence: Synthetic oligonucleotide
cccguggaacacgaccacc

SEQ ID NO: 2070075 - RNA, 19 nt, Artificial Sequence
  Description of Artificial Sequence: Synthetic oligonucleotide
gaagugcguuuccgcggcu

SEQ ID NO: 2070076 - RNA, 19 nt, Artificial Sequence
  Description of Artificial Sequence: Synthetic oligonucleotide
cgucagggagauucucuuc

SEQ ID NO: 2070077 - RNA, 19 nt, Artificial Sequence
  Description of Artificial Sequence: Synthetic oligonucleotide
ucccuguggucaggcuuuc

SEQ ID NO: 2070078 - RNA, 19 nt, Artificial Sequence
  Description of Artificial Sequence: Synthetic oligonucleotide
cucaaacccgaagugcguu

SEQ ID NO: 2070079 - RNA, 19 nt, Artificial Sequence
  Description of Artificial Sequence: Synthetic oligonucleotide
ggcagugggugcauuuucu

SEQ ID NO: 2070080 - RNA, 19 nt, Artificial Sequence
  Description of Artificial Sequence: Synthetic oligonucleotide
ggcccaggaccgauguaac

SEQ ID NO: 2070081 - RNA, 19 nt, Artificial Sequence
  Description of Artificial Sequence: Synthetic oligonucleotide
cuuuccaagcacgguggau

SEQ ID NO: 2070082 - RNA, 19 nt, Artificial Sequence
  Description of Artificial Sequence: Synthetic oligonucleotide
cccgcggcagcaguagcgc

SEQ ID NO: 2070083 - RNA, 19 nt, Artificial Sequence
  Description of Artificial Sequence: Synthetic oligonucleotide
cgaugaccucuccaaugac

SEQ ID NO: 2070084 - RNA, 19 nt, Artificial Sequence
  Description of Artificial Sequence: Synthetic oligonucleotide
ggaugaccuggaaacugua

SEQ ID NO: 2070085 - RNA, 19 nt, Artificial Sequence
  Description of Artificial Sequence: Synthetic oligonucleotide
gugccuccagccacaucga

SEQ ID NO: 2070086 - RNA, 19 nt, Artificial Sequence
  Description of Artificial Sequence: Synthetic oligonucleotide
aaccguccuccuggcuuua

SEQ ID NO: 2070087 - RNA, 19 nt, Artificial Sequence
  Description of Artificial Sequence: Synthetic oligonucleotide
ccaaggcuuucugcuuccc

SEQ ID NO: 2070088 - RNA, 19 nt, Artificial Sequence
  Description of Artificial Sequence: Synthetic oligonucleotide
cagggaugaccuggaaacu

SEQ ID NO: 2070089 - RNA, 19 nt, Artificial Sequence
  Description of Artificial Sequence: Synthetic oligonucleotide
aggacccgaugugcuuccu

SEQ ID NO: 2070090 - RNA, 19 nt, Artificial Sequence
  Description of Artificial Sequence: Synthetic oligonucleotide
cgaauacuuuccacaaggu

SEQ ID NO: 2070091 - RNA, 19 nt, Artificial Sequence
  Description of Artificial Sequence: Synthetic oligonucleotide
uuuccgcggcucgcuucuc

SEQ ID NO: 2070092 - RNA, 19 nt, Artificial Sequence
  Description of Artificial Sequence: Synthetic oligonucleotide
gucucgucagggagauucu

SEQ ID NO: 2070093 - RNA, 19 nt, Artificial Sequence
  Description of Artificial Sequence: Synthetic oligonucleotide
cugcgaugaccucuccaau

SEQ ID NO: 2070094 - RNA, 19 nt, Artificial Sequence
  Description of Artificial Sequence: Synthetic oligonucleotide
gccugcagucucccgugga

SEQ ID NO: 2070095 - RNA, 19 nt, Artificial Sequence
  Description of Artificial Sequence: Synthetic oligonucleotide
accacccgcggcagcagua

SEQ ID NO: 2070096 - RNA, 19 nt, Artificial Sequence
  Description of Artificial Sequence: Synthetic oligonucleotide
gucucccguggaacacgac

SEQ ID NO: 2070097 - RNA, 19 nt, Artificial Sequence
  Description of Artificial Sequence: Synthetic oligonucleotide
cguuuccgcggcucgcuuc

SEQ ID NO: 2070098 - RNA, 19 nt, Artificial Sequence
  Description of Artificial Sequence: Synthetic oligonucleotide
ccgaugugcuuccuggagu

SEQ ID NO: 2070099 - RNA, 19 nt, Artificial Sequence
  Description of Artificial Sequence: Synthetic oligonucleotide
aucgagcaguuggguccca

SEQ ID NO: 2070100 - RNA, 19 nt, Artificial Sequence
  Description of Artificial Sequence: Synthetic oligonucleotide
ggcccguaacugucuccuc

SEQ ID NO: 2070101 - RNA, 19 nt, Artificial Sequence
  Description of Artificial Sequence: Synthetic oligonucleotide
gcacugggcguggcucggg

SEQ ID NO: 2070102 - RNA, 19 nt, Artificial Sequence
  Description of Artificial Sequence: Synthetic oligonucleotide
cacgguggaugccgagacu

SEQ ID NO: 2070103 - RNA, 19 nt, Artificial Sequence
  Description of Artificial Sequence: Synthetic oligonucleotide
ccgcggcucgcuucucuug

SEQ ID NO: 2070104 - RNA, 19 nt, Artificial Sequence
  Description of Artificial Sequence: Synthetic oligonucleotide
gguggaugccgagacucau

SEQ ID NO: 2070105 - RNA, 19 nt, Artificial Sequence
  Description of Artificial Sequence: Synthetic oligonucleotide
cggucaaugugugugacau

SEQ ID NO: 2070106 - RNA, 19 nt, Artificial Sequence
  Description of Artificial Sequence: Synthetic oligonucleotide
gugcccggucaaugugugu

SEQ ID NO: 2070107 - RNA, 19 nt, Artificial Sequence
  Description of Artificial Sequence: Synthetic oligonucleotide
gcguggcucgggcccagga

SEQ ID NO: 2070108 - RNA, 19 nt, Artificial Sequence
  Description of Artificial Sequence: Synthetic oligonucleotide
ggaaggcgauguccccugu

SEQ ID NO: 2070109 - RNA, 19 nt, Artificial Sequence
  Description of Artificial Sequence: Synthetic oligonucleotide
ggaugccgagacucaucau

SEQ ID NO: 2070110 - RNA, 19 nt, Artificial Sequence
  Description of Artificial Sequence: Synthetic oligonucleotide
cgcgcacugggcguggcuc

SEQ ID NO: 2070111 - RNA, 19 nt, Artificial Sequence
  Description of Artificial Sequence: Synthetic oligonucleotide
ccuggcuuuaggacccgau

SEQ ID NO: 2070112 - RNA, 19 nt, Artificial Sequence
  Description of Artificial Sequence: Synthetic oligonucleotide
ggcguggcucgggcccagg

SEQ ID NO: 2070113 - RNA, 19 nt, Artificial Sequence
  Description of Artificial Sequence: Synthetic oligonucleotide
cgcuucucuugggacaaga

SEQ ID NO: 2070114 - RNA, 19 nt, Artificial Sequence
  Description of Artificial Sequence: Synthetic oligonucleotide
cgguggaugccgagacuca

SEQ ID NO: 2070115 - RNA, 19 nt, Artificial Sequence
  Description of Artificial Sequence: Synthetic oligonucleotide
ccucuccaaugacagggau

SEQ ID NO: 2070116 - RNA, 19 nt, Artificial Sequence
  Description of Artificial Sequence: Synthetic oligonucleotide
gcugggcccguaacugucu

SEQ ID NO: 2070117 - RNA, 19 nt, Artificial Sequence
  Description of Artificial Sequence: Synthetic oligonucleotide
cuccuccguuuucucugau

SEQ ID NO: 2070118 - RNA, 19 nt, Artificial Sequence
  Description of Artificial Sequence: Synthetic oligonucleotide
ccacaucgagcaguugggu

SEQ ID NO: 2070119 - RNA, 19 nt, Artificial Sequence
  Description of Artificial Sequence: Synthetic oligonucleotide
cggcucgcuucucuuggga

SEQ ID NO: 2070120 - RNA, 19 nt, Artificial Sequence
  Description of Artificial Sequence: Synthetic oligonucleotide
ccggaaggcgauguccccu

SEQ ID NO: 2070121 - RNA, 19 nt, Artificial Sequence
  Description of Artificial Sequence: Synthetic oligonucleotide
cguaacugucuccuccguu

SEQ ID NO: 2070122 - RNA, 19 nt, Artificial Sequence
  Description of Artificial Sequence: Synthetic oligonucleotide
ccguaacugucuccuccgu

SEQ ID NO: 2070123 - RNA, 19 nt, Artificial Sequence
  Description of Artificial Sequence: Synthetic oligonucleotide
cgaccacccgcggcagcag

SEQ ID NO: 2070124 - RNA, 19 nt, Artificial Sequence
  Description of Artificial Sequence: Synthetic oligonucleotide
cccuguggucaggcuuuca

SEQ ID NO: 2070125 - RNA, 19 nt, Artificial Sequence
  Description of Artificial Sequence: Synthetic oligonucleotide
gcguuuccgcggcucgcuu

SEQ ID NO: 2070126 - RNA, 19 nt, Artificial Sequence
  Description of Artificial Sequence: Synthetic oligonucleotide
cgaucccuguggucaggcu

SEQ ID NO: 2070127 - RNA, 19 nt, Artificial Sequence
  Description of Artificial Sequence: Synthetic oligonucleotide
ccuggagugcccggucaau

SEQ ID NO: 2070128 - RNA, 19 nt, Artificial Sequence
  Description of Artificial Sequence: Synthetic oligonucleotide
gcucgggcccaggaccgau

SEQ ID NO: 2070129 - RNA, 19 nt, Artificial Sequence
  Description of Artificial Sequence: Synthetic oligonucleotide
cugucucgucagggagauu

SEQ ID NO: 2070130 - RNA, 19 nt, Artificial Sequence
  Description of Artificial Sequence: Synthetic oligonucleotide
ccgcgcacugggcguggcu

SEQ ID NO: 2070131 - RNA, 19 nt, Artificial Sequence
  Description of Artificial Sequence: Synthetic oligonucleotide
cgggcccaggaccgaugua

SEQ ID NO: 2070132 - RNA, 19 nt, Artificial Sequence
  Description of Artificial Sequence: Synthetic oligonucleotide
uuacaugucgaucagaugg

SEQ ID NO: 2070133 - RNA, 19 nt, Artificial Sequence
  Description of Artificial Sequence: Synthetic oligonucleotide
ucacuuaacaugaaaaugg

SEQ ID NO: 2070134 - RNA, 19 nt, Artificial Sequence
  Description of Artificial Sequence: Synthetic oligonucleotide
aacuacuuuggcuucaagc

SEQ ID NO: 2070135 - RNA, 19 nt, Artificial Sequence
  Description of Artificial Sequence: Synthetic oligonucleotide
ucaauugugauaaacucag

SEQ ID NO: 2070136 - RNA, 19 nt, Artificial Sequence
  Description of Artificial Sequence: Synthetic oligonucleotide
uuuuguuugagcaucucgg

SEQ ID NO: 2070137 - RNA, 19 nt, Artificial Sequence
  Description of Artificial Sequence: Synthetic oligonucleotide
ucuuacaauaucuaaacga

SEQ ID NO: 2070138 - RNA, 19 nt, Artificial Sequence
  Description of Artificial Sequence: Synthetic oligonucleotide
agugaguauaaagugaucc

SEQ ID NO: 2070139 - RNA, 19 nt, Artificial Sequence
  Description of Artificial Sequence: Synthetic oligonucleotide
agcaaagcuuuucagaccc

SEQ ID NO: 2070140 - RNA, 19 nt, Artificial Sequence
  Description of Artificial Sequence: Synthetic oligonucleotide
cuuacaauaucuaaacgag

SEQ ID NO: 2070141 - RNA, 19 nt, Artificial Sequence
  Description of Artificial Sequence: Synthetic oligonucleotide
uucauuuugaaguuugagc

SEQ ID NO: 2070142 - RNA, 19 nt, Artificial Sequence
  Description of Artificial Sequence: Synthetic oligonucleotide
aaagauuuggcaaagcucu

SEQ ID NO: 2070143 - RNA, 19 nt, Artificial Sequence
  Description of Artificial Sequence: Synthetic oligonucleotide
aaugguuccauaugcuuuc

SEQ ID NO: 2070144 - RNA, 19 nt, Artificial Sequence
  Description of Artificial Sequence: Synthetic oligonucleotide
uaugcaguagugaagaccu

SEQ ID NO: 2070145 - RNA, 19 nt, Artificial Sequence
  Description of Artificial Sequence: Synthetic oligonucleotide
uguugagugaguauaaagu

SEQ ID NO: 2070146 - RNA, 19 nt, Artificial Sequence
  Description of Artificial Sequence: Synthetic oligonucleotide
aaauuuggggucucgguag

SEQ ID NO: 2070147 - RNA, 19 nt, Artificial Sequence
  Description of Artificial Sequence: Synthetic oligonucleotide
aacgagauggauaaucugg

SEQ ID NO: 2070148 - RNA, 19 nt, Artificial Sequence
  Description of Artificial Sequence: Synthetic oligonucleotide
uggauuucacuuaacauga

SEQ ID NO: 2070149 - RNA, 19 nt, Artificial Sequence
  Description of Artificial Sequence: Synthetic oligonucleotide
ucggaaaaccucuagaucu

SEQ ID NO: 2070150 - RNA, 19 nt, Artificial Sequence
  Description of Artificial Sequence: Synthetic oligonucleotide
aacaugaaaauggaaaugu

SEQ ID NO: 2070151 - RNA, 19 nt, Artificial Sequence
  Description of Artificial Sequence: Synthetic oligonucleotide
uaaagcuuugccaugaaau

SEQ ID NO: 2070152 - RNA, 19 nt, Artificial Sequence
  Description of Artificial Sequence: Synthetic oligonucleotide
uacaauaucuaaacgagau

SEQ ID NO: 2070153 - RNA, 19 nt, Artificial Sequence
  Description of Artificial Sequence: Synthetic oligonucleotide
caaagguucaacuacuuug

SEQ ID NO: 2070154 - RNA, 19 nt, Artificial Sequence
  Description of Artificial Sequence: Synthetic oligonucleotide
aaagguucaacuacuuugg

SEQ ID NO: 2070155 - RNA, 19 nt, Artificial Sequence
  Description of Artificial Sequence: Synthetic oligonucleotide
uucaauugugauaaacuca

SEQ ID NO: 2070156 - RNA, 19 nt, Artificial Sequence
  Description of Artificial Sequence: Synthetic oligonucleotide
uuugagaucaucccguuuc

SEQ ID NO: 2070157 - RNA, 19 nt, Artificial Sequence
  Description of Artificial Sequence: Synthetic oligonucleotide
gauaaucugguagauacag

SEQ ID NO: 2070158 - RNA, 19 nt, Artificial Sequence
  Description of Artificial Sequence: Synthetic oligonucleotide
cuggauuucacuuaacaug

SEQ ID NO: 2070159 - RNA, 19 nt, Artificial Sequence
  Description of Artificial Sequence: Synthetic oligonucleotide
uuaacaugaaaauggaaau

SEQ ID NO: 2070160 - RNA, 19 nt, Artificial Sequence
  Description of Artificial Sequence: Synthetic oligonucleotide
ucgaguagcaucaauugug

SEQ ID NO: 2070161 - RNA, 19 nt, Artificial Sequence
  Description of Artificial Sequence: Synthetic oligonucleotide
aaguuugagcuguugagug

SEQ ID NO: 2070162 - RNA, 19 nt, Artificial Sequence
  Description of Artificial Sequence: Synthetic oligonucleotide
uguugcuuugagaucaucc

SEQ ID NO: 2070163 - RNA, 19 nt, Artificial Sequence
  Description of Artificial Sequence: Synthetic oligonucleotide
uuucaauugugauaaacuc

SEQ ID NO: 2070164 - RNA, 19 nt, Artificial Sequence
  Description of Artificial Sequence: Synthetic oligonucleotide
uuucuaacugugauaacug

SEQ ID NO: 2070165 - RNA, 19 nt, Artificial Sequence
  Description of Artificial Sequence: Synthetic oligonucleotide
uuggcgguaaucuugaagu

SEQ ID NO: 2070166 - RNA, 19 nt, Artificial Sequence
  Description of Artificial Sequence: Synthetic oligonucleotide
ugaaguuugagcuguugag

SEQ ID NO: 2070167 - RNA, 19 nt, Artificial Sequence
  Description of Artificial Sequence: Synthetic oligonucleotide
gaucagauggguuucguug

SEQ ID NO: 2070168 - RNA, 19 nt, Artificial Sequence
  Description of Artificial Sequence: Synthetic oligonucleotide
guagauacagagaauuucg

SEQ ID NO: 2070169 - RNA, 19 nt, Artificial Sequence
  Description of Artificial Sequence: Synthetic oligonucleotide
auaagcagcaaagauuugg

SEQ ID NO: 2070170 - RNA, 19 nt, Artificial Sequence
  Description of Artificial Sequence: Synthetic oligonucleotide
aauuugcucuuacaauauc

SEQ ID NO: 2070171 - RNA, 19 nt, Artificial Sequence
  Description of Artificial Sequence: Synthetic oligonucleotide
guugagugaguauaaagug

SEQ ID NO: 2070172 - RNA, 19 nt, Artificial Sequence
  Description of Artificial Sequence: Synthetic oligonucleotide
uugucucucagucuggcag

SEQ ID NO: 2070173 - RNA, 19 nt, Artificial Sequence
  Description of Artificial Sequence: Synthetic oligonucleotide
uuugccaugaaauaacauu

SEQ ID NO: 2070174 - RNA, 19 nt, Artificial Sequence
  Description of Artificial Sequence: Synthetic oligonucleotide
uacaaguugauuucauuca

SEQ ID NO: 2070175 - RNA, 19 nt, Artificial Sequence
  Description of Artificial Sequence: Synthetic oligonucleotide
aaaccucuagaucuucauc

SEQ ID NO: 2070176 - RNA, 19 nt, Artificial Sequence
  Description of Artificial Sequence: Synthetic oligonucleotide
ugauaaacucagaaaauau

SEQ ID NO: 2070177 - RNA, 19 nt, Artificial Sequence
  Description of Artificial Sequence: Synthetic oligonucleotide
uaaacgagauggauaaucu

SEQ ID NO: 2070178 - RNA, 19 nt, Artificial Sequence
  Description of Artificial Sequence: Synthetic oligonucleotide
ugcgucucaaccauguugc

SEQ ID NO: 2070179 - RNA, 19 nt, Artificial Sequence
  Description of Artificial Sequence: Synthetic oligonucleotide
uuugguaugcaguagugaa

SEQ ID NO: 2070180 - RNA, 19 nt, Artificial Sequence
  Description of Artificial Sequence: Synthetic oligonucleotide
uauuuugguaugcaguagu

SEQ ID NO: 2070181 - RNA, 19 nt, Artificial Sequence
  Description of Artificial Sequence: Synthetic oligonucleotide
uucacuuaacaugaaaaug

SEQ ID NO: 2070182 - RNA, 19 nt, Artificial Sequence
  Description of Artificial Sequence: Synthetic oligonucleotide
uagauacagagaauuucgg

SEQ ID NO: 2070183 - RNA, 19 nt, Artificial Sequence
  Description of Artificial Sequence: Synthetic oligonucleotide
uugagugaguauaaaguga

SEQ ID NO: 2070184 - RNA, 19 nt, Artificial Sequence
  Description of Artificial Sequence: Synthetic oligonucleotide
uguuugagcaucucggucu

SEQ ID NO: 2070185 - RNA, 19 nt, Artificial Sequence
  Description of Artificial Sequence: Synthetic oligonucleotide
uuuaaauuuggggucucgg

SEQ ID NO: 2070186 - RNA, 19 nt, Artificial Sequence
  Description of Artificial Sequence: Synthetic oligonucleotide
auaacuguuuggcuucucg

SEQ ID NO: 2070187 - RNA, 19 nt, Artificial Sequence
  Description of Artificial Sequence: Synthetic oligonucleotide
uugcuuugagaucaucccg

SEQ ID NO: 2070188 - RNA, 19 nt, Artificial Sequence
  Description of Artificial Sequence: Synthetic oligonucleotide
aucuaaacgagauggauaa

SEQ ID NO: 2070189 - RNA, 19 nt, Artificial Sequence
  Description of Artificial Sequence: Synthetic oligonucleotide
uacauaagcagcaaagauu

SEQ ID NO: 2070190 - RNA, 19 nt, Artificial Sequence
  Description of Artificial Sequence: Synthetic oligonucleotide
uucauucaccaggagaucg

SEQ ID NO: 2070191 - RNA, 19 nt, Artificial Sequence
  Description of Artificial Sequence: Synthetic oligonucleotide
gauuucauucaccaggaga

SEQ ID NO: 2070192 - RNA, 19 nt, Artificial Sequence
  Description of Artificial Sequence: Synthetic oligonucleotide
ugagugaguauaaagugau

SEQ ID NO: 2070193 - RNA, 19 nt, Artificial Sequence
  Description of Artificial Sequence: Synthetic oligonucleotide
gaguauaaagugauccugg

SEQ ID NO: 2070194 - RNA, 19 nt, Artificial Sequence
  Description of Artificial Sequence: Synthetic oligonucleotide
aggagaucggcuuugucuc

SEQ ID NO: 2070195 - RNA, 19 nt, Artificial Sequence
  Description of Artificial Sequence: Synthetic oligonucleotide
ugugauaacuguuuggcuu

SEQ ID NO: 2070196 - RNA, 19 nt, Artificial Sequence
  Description of Artificial Sequence: Synthetic oligonucleotide
uugauuucauucaccagga

SEQ ID NO: 2070197 - RNA, 19 nt, Artificial Sequence
  Description of Artificial Sequence: Synthetic oligonucleotide
uuucaaagguucaacuacu

SEQ ID NO: 2070198 - RNA, 19 nt, Artificial Sequence
  Description of Artificial Sequence: Synthetic oligonucleotide
uacaugucgaucagauggg

SEQ ID NO: 2070199 - RNA, 19 nt, Artificial Sequence
  Description of Artificial Sequence: Synthetic oligonucleotide
guuaauguugcuuugagau

SEQ ID NO: 2070200 - RNA, 19 nt, Artificial Sequence
  Description of Artificial Sequence: Synthetic oligonucleotide
aauugucaauaguuuccuc

SEQ ID NO: 2070201 - RNA, 19 nt, Artificial Sequence
  Description of Artificial Sequence: Synthetic oligonucleotide
agaccucuaaagcuuugcc

SEQ ID NO: 2070202 - RNA, 19 nt, Artificial Sequence
  Description of Artificial Sequence: Synthetic oligonucleotide
uuacaauaucuaaacgaga

SEQ ID NO: 2070203 - RNA, 19 nt, Artificial Sequence
  Description of Artificial Sequence: Synthetic oligonucleotide
ugaguauaaagugauccug

SEQ ID NO: 2070204 - RNA, 19 nt, Artificial Sequence
  Description of Artificial Sequence: Synthetic oligonucleotide
uucaaccucugcuuggcgg

SEQ ID NO: 2070205 - RNA, 19 nt, Artificial Sequence
  Description of Artificial Sequence: Synthetic oligonucleotide
aagaccucuaaagcuuugc

SEQ ID NO: 2070206 - RNA, 19 nt, Artificial Sequence
  Description of Artificial Sequence: Synthetic oligonucleotide
aauuacaugucgaucagau

SEQ ID NO: 2070207 - RNA, 19 nt, Artificial Sequence
  Description of Artificial Sequence: Synthetic oligonucleotide
ugucacaucuaacucuuca

SEQ ID NO: 2070208 - RNA, 19 nt, Artificial Sequence
  Description of Artificial Sequence: Synthetic oligonucleotide
uugccaugaaauaacauuu

SEQ ID NO: 2070209 - RNA, 19 nt, Artificial Sequence
  Description of Artificial Sequence: Synthetic oligonucleotide
aaagcuuugccaugaaaua

SEQ ID NO: 2070210 - RNA, 19 nt, Artificial Sequence
  Description of Artificial Sequence: Synthetic oligonucleotide
aaacgagauggauaaucug

SEQ ID NO: 2070211 - RNA, 19 nt, Artificial Sequence
  Description of Artificial Sequence: Synthetic oligonucleotide
ccaaaugacgacuuguucg

SEQ ID NO: 2070212 - RNA, 19 nt, Artificial Sequence
  Description of Artificial Sequence: Synthetic oligonucleotide
ugcucuuacaauaucuaaa

SEQ ID NO: 2070213 - RNA, 19 nt, Artificial Sequence
  Description of Artificial Sequence: Synthetic oligonucleotide
caaagauuuggcaaagcuc

SEQ ID NO: 2070214 - RNA, 19 nt, Artificial Sequence
  Description of Artificial Sequence: Synthetic oligonucleotide
uuaaauuuggggucucggu

SEQ ID NO: 2070215 - RNA, 19 nt, Artificial Sequence
  Description of Artificial Sequence: Synthetic oligonucleotide
aauuguggcucucuguaau

SEQ ID NO: 2070216 - RNA, 19 nt, Artificial Sequence
  Description of Artificial Sequence: Synthetic oligonucleotide
uaucuaaacgagauggaua

SEQ ID NO: 2070217 - RNA, 19 nt, Artificial Sequence
  Description of Artificial Sequence: Synthetic oligonucleotide
uuucggaaaaccucuagau

SEQ ID NO: 2070218 - RNA, 19 nt, Artificial Sequence
  Description of Artificial Sequence: Synthetic oligonucleotide
uccagguugcgucucaacc

SEQ ID NO: 2070219 - RNA, 19 nt, Artificial Sequence
  Description of Artificial Sequence: Synthetic oligonucleotide
agauggauaaucugguaga

SEQ ID NO: 2070220 - RNA, 19 nt, Artificial Sequence
  Description of Artificial Sequence: Synthetic oligonucleotide
uaaauuuggggucucggua

SEQ ID NO: 2070221 - RNA, 19 nt, Artificial Sequence
  Description of Artificial Sequence: Synthetic oligonucleotide
uguucgaguagcaucaauu

SEQ ID NO: 2070222 - RNA, 19 nt, Artificial Sequence
  Description of Artificial Sequence: Synthetic oligonucleotide
ucauucaccaggagaucgg

SEQ ID NO: 2070223 - RNA, 19 nt, Artificial Sequence
  Description of Artificial Sequence: Synthetic oligonucleotide
ucgguagaggcauacaagu

SEQ ID NO: 2070224 - RNA, 19 nt, Artificial Sequence
  Description of Artificial Sequence: Synthetic oligonucleotide
aaugacgacuuguucgagu

SEQ ID NO: 2070225 - RNA, 19 nt, Artificial Sequence
  Description of Artificial Sequence: Synthetic oligonucleotide
uuuaccuccgccccugccc

SEQ ID NO: 2070226 - RNA, 19 nt, Artificial Sequence
  Description of Artificial Sequence: Synthetic oligonucleotide
acuuugaauuugcucuuac

SEQ ID NO: 2070227 - RNA, 19 nt, Artificial Sequence
  Description of Artificial Sequence: Synthetic oligonucleotide
uccuggauuucacuuaaca

SEQ ID NO: 2070228 - RNA, 19 nt, Artificial Sequence
  Description of Artificial Sequence: Synthetic oligonucleotide
augugcacuuagcugacac

SEQ ID NO: 2070229 - RNA, 19 nt, Artificial Sequence
  Description of Artificial Sequence: Synthetic oligonucleotide
auuucauucaccaggagau

SEQ ID NO: 2070230 - RNA, 19 nt, Artificial Sequence
  Description of Artificial Sequence: Synthetic oligonucleotide
aggcauacaaguugauuuc

SEQ ID NO: 2070231 - RNA, 19 nt, Artificial Sequence
  Description of Artificial Sequence: Synthetic oligonucleotide
aaauuaguuuucaucuucu

SEQ ID NO: 2070232 - RNA, 19 nt, Artificial Sequence
  Description of Artificial Sequence: Synthetic oligonucleotide
uugguaugcaguagugaag

SEQ ID NO: 2070233 - RNA, 19 nt, Artificial Sequence
  Description of Artificial Sequence: Synthetic oligonucleotide
uggcuaucuguccaguucc

SEQ ID NO: 2070234 - RNA, 19 nt, Artificial Sequence
  Description of Artificial Sequence: Synthetic oligonucleotide
agcaucucggucuuccagg

SEQ ID NO: 2070235 - RNA, 19 nt, Artificial Sequence
  Description of Artificial Sequence: Synthetic oligonucleotide
acaauaucuaaacgagaug

SEQ ID NO: 2070236 - RNA, 19 nt, Artificial Sequence
  Description of Artificial Sequence: Synthetic oligonucleotide
ucaucgaucuuuuguauau

SEQ ID NO: 2070237 - RNA, 19 nt, Artificial Sequence
  Description of Artificial Sequence: Synthetic oligonucleotide
ucggcuuugucucucaguc

SEQ ID NO: 2070238 - RNA, 19 nt, Artificial Sequence
  Description of Artificial Sequence: Synthetic oligonucleotide
auuucggaaaaccucuaga

SEQ ID NO: 2070239 - RNA, 19 nt, Artificial Sequence
  Description of Artificial Sequence: Synthetic oligonucleotide
uguuaauguugcuuugaga

SEQ ID NO: 2070240 - RNA, 19 nt, Artificial Sequence
  Description of Artificial Sequence: Synthetic oligonucleotide
uuuguauauuuugguaugc

SEQ ID NO: 2070241 - RNA, 19 nt, Artificial Sequence
  Description of Artificial Sequence: Synthetic oligonucleotide
agauacagagaauuucgga

SEQ ID NO: 2070242 - RNA, 19 nt, Artificial Sequence
  Description of Artificial Sequence: Synthetic oligonucleotide
guucgaguagcaucaauug

SEQ ID NO: 2070243 - RNA, 19 nt, Artificial Sequence
  Description of Artificial Sequence: Synthetic oligonucleotide
cucuuacaauaucuaaacg

SEQ ID NO: 2070244 - RNA, 19 nt, Artificial Sequence
  Description of Artificial Sequence: Synthetic oligonucleotide
ugcuuugagaucaucccgu

SEQ ID NO: 2070245 - RNA, 19 nt, Artificial Sequence
  Description of Artificial Sequence: Synthetic oligonucleotide
agaauuucggaaaaccucu

SEQ ID NO: 2070246 - RNA, 19 nt, Artificial Sequence
  Description of Artificial Sequence: Synthetic oligonucleotide
uuugcucuuacaauaucua

SEQ ID NO: 2070247 - RNA, 19 nt, Artificial Sequence
  Description of Artificial Sequence: Synthetic oligonucleotide
accucuaaagcuuugccau

SEQ ID NO: 2070248 - RNA, 19 nt, Artificial Sequence
  Description of Artificial Sequence: Synthetic oligonucleotide
ugguaugcaguagugaaga

SEQ ID NO: 2070249 - RNA, 19 nt, Artificial Sequence
  Description of Artificial Sequence: Synthetic oligonucleotide
auaaagugauccuggauuu

SEQ ID NO: 2070250 - RNA, 19 nt, Artificial Sequence
  Description of Artificial Sequence: Synthetic oligonucleotide
uucgaguagcaucaauugu

SEQ ID NO: 2070251 - RNA, 19 nt, Artificial Sequence
  Description of Artificial Sequence: Synthetic oligonucleotide
uuuguuugagcaucucggu

SEQ ID NO: 2070252 - RNA, 19 nt, Artificial Sequence
  Description of Artificial Sequence: Synthetic oligonucleotide
acacugaucucugaagagg

SEQ ID NO: 2070253 - RNA, 19 nt, Artificial Sequence
  Description of Artificial Sequence: Synthetic oligonucleotide
ucuaacugugauaacuguu

SEQ ID NO: 2070254 - RNA, 19 nt, Artificial Sequence
  Description of Artificial Sequence: Synthetic oligonucleotide
gguagaggcauacaaguug

SEQ ID NO: 2070255 - RNA, 19 nt, Artificial Sequence
  Description of Artificial Sequence: Synthetic oligonucleotide
acauaagcagcaaagauuu

SEQ ID NO: 2070256 - RNA, 19 nt, Artificial Sequence
  Description of Artificial Sequence: Synthetic oligonucleotide
guuuuccguacauaagcag

SEQ ID NO: 2070257 - RNA, 19 nt, Artificial Sequence
  Description of Artificial Sequence: Synthetic oligonucleotide
gacuuguucgaguagcauc

SEQ ID NO: 2070258 - RNA, 19 nt, Artificial Sequence
  Description of Artificial Sequence: Synthetic oligonucleotide
ucucgguagaggcauacaa

SEQ ID NO: 2070259 - RNA, 19 nt, Artificial Sequence
  Description of Artificial Sequence: Synthetic oligonucleotide
aauaucuaaacgagaugga

SEQ ID NO: 2070260 - RNA, 19 nt, Artificial Sequence
  Description of Artificial Sequence: Synthetic oligonucleotide
uacagagaauuucggaaaa

SEQ ID NO: 2070261 - RNA, 19 nt, Artificial Sequence
  Description of Artificial Sequence: Synthetic oligonucleotide
aguugauuucauucaccag

SEQ ID NO: 2070262 - RNA, 19 nt, Artificial Sequence
  Description of Artificial Sequence: Synthetic oligonucleotide
cauuuugaaguuugagcug

SEQ ID NO: 2070263 - RNA, 19 nt, Artificial Sequence
  Description of Artificial Sequence: Synthetic oligonucleotide
agcuuugccaugaaauaac

SEQ ID NO: 2070264 - RNA, 19 nt, Artificial Sequence
  Description of Artificial Sequence: Synthetic oligonucleotide
aguagugaagaccucuaaa

SEQ ID NO: 2070265 - RNA, 19 nt, Artificial Sequence
  Description of Artificial Sequence: Synthetic oligonucleotide
uucuaacugugauaacugu

SEQ ID NO: 2070266 - RNA, 19 nt, Artificial Sequence
  Description of Artificial Sequence: Synthetic oligonucleotide
ugcgaaauuacaugucgau

SEQ ID NO: 2070267 - RNA, 19 nt, Artificial Sequence
  Description of Artificial Sequence: Synthetic oligonucleotide
guagcaucaauuguggcuc

SEQ ID NO: 2070268 - RNA, 19 nt, Artificial Sequence
  Description of Artificial Sequence: Synthetic oligonucleotide
guaugcaguagugaagacc

SEQ ID NO: 2070269 - RNA, 19 nt, Artificial Sequence
  Description of Artificial Sequence: Synthetic oligonucleotide
uccaaaugacgacuuguuc

SEQ ID NO: 2070270 - RNA, 19 nt, Artificial Sequence
  Description of Artificial Sequence: Synthetic oligonucleotide
agguucaacuacuuuggcu

SEQ ID NO: 2070271 - RNA, 19 nt, Artificial Sequence
  Description of Artificial Sequence: Synthetic oligonucleotide
gcucuuacaauaucuaaac

SEQ ID NO: 2070272 - RNA, 19 nt, Artificial Sequence
  Description of Artificial Sequence: Synthetic oligonucleotide
cucgguagaggcauacaag

SEQ ID NO: 2070273 - RNA, 19 nt, Artificial Sequence
  Description of Artificial Sequence: Synthetic oligonucleotide
cuguuaauguugcuuugag

SEQ ID NO: 2070274 - RNA, 19 nt, Artificial Sequence
  Description of Artificial Sequence: Synthetic oligonucleotide
gacgacuuguucgaguagc

SEQ ID NO: 2070275 - RNA, 19 nt, Artificial Sequence
  Description of Artificial Sequence: Synthetic oligonucleotide
auuacaugucgaucagaug

SEQ ID NO: 2070276 - RNA, 19 nt, Artificial Sequence
  Description of Artificial Sequence: Synthetic oligonucleotide
ugaucucugaagaggugac

SEQ ID NO: 2070277 - RNA, 19 nt, Artificial Sequence
  Description of Artificial Sequence: Synthetic oligonucleotide
uuucaaccucugcuuggcg

SEQ ID NO: 2070278 - RNA, 19 nt, Artificial Sequence
  Description of Artificial Sequence: Synthetic oligonucleotide
cugcuuuaaauuugggguc

SEQ ID NO: 2070279 - RNA, 19 nt, Artificial Sequence
  Description of Artificial Sequence: Synthetic oligonucleotide
ugccugcgaaauuacaugu

SEQ ID NO: 2070280 - RNA, 19 nt, Artificial Sequence
  Description of Artificial Sequence: Synthetic oligonucleotide
uccucaucgaucuuuugua

SEQ ID NO: 2070281 - RNA, 19 nt, Artificial Sequence
  Description of Artificial Sequence: Synthetic oligonucleotide
acuuguucgaguagcauca

SEQ ID NO: 2070282 - RNA, 19 nt, Artificial Sequence
  Description of Artificial Sequence: Synthetic oligonucleotide
gaggcauacaaguugauuu

SEQ ID NO: 2070283 - RNA, 19 nt, Artificial Sequence
  Description of Artificial Sequence: Synthetic oligonucleotide
aagcuuugccaugaaauaa

SEQ ID NO: 2070284 - RNA, 19 nt, Artificial Sequence
  Description of Artificial Sequence: Synthetic oligonucleotide
uuguuugagcaucucgguc

SEQ ID NO: 2070285 - RNA, 19 nt, Artificial Sequence
  Description of Artificial Sequence: Synthetic oligonucleotide
agagaauuucggaaaaccu

SEQ ID NO: 2070286 - RNA, 19 nt, Artificial Sequence
  Description of Artificial Sequence: Synthetic oligonucleotide
auaacugccuuuaccuccg

SEQ ID NO: 2070287 - RNA, 19 nt, Artificial Sequence
  Description of Artificial Sequence: Synthetic oligonucleotide
gaccucuaaagcuuugcca

SEQ ID NO: 2070288 - RNA, 19 nt, Artificial Sequence
  Description of Artificial Sequence: Synthetic oligonucleotide
augucgaucagauggguuu

SEQ ID NO: 2070289 - RNA, 19 nt, Artificial Sequence
  Description of Artificial Sequence: Synthetic oligonucleotide
aaacucgucagcaaagcuu

SEQ ID NO: 2070290 - RNA, 19 nt, Artificial Sequence
  Description of Artificial Sequence: Synthetic oligonucleotide
caaaugacgacuuguucga

SEQ ID NO: 2070291 - RNA, 19 nt, Artificial Sequence
  Description of Artificial Sequence: Synthetic oligonucleotide
ucaaccauguugccuugcu

SEQ ID NO: 2070292 - RNA, 19 nt, Artificial Sequence
  Description of Artificial Sequence: Synthetic oligonucleotide
acagagaauuucggaaaac

SEQ ID NO: 2070293 - RNA, 19 nt, Artificial Sequence
  Description of Artificial Sequence: Synthetic oligonucleotide
ucgacugguggcuaucugu

SEQ ID NO: 2070294 - RNA, 19 nt, Artificial Sequence
  Description of Artificial Sequence: Synthetic oligonucleotide
aaauuacaugucgaucaga

SEQ ID NO: 2070295 - RNA, 19 nt, Artificial Sequence
  Description of Artificial Sequence: Synthetic oligonucleotide
ucaaagguucaacuacuuu

SEQ ID NO: 2070296 - RNA, 19 nt, Artificial Sequence
  Description of Artificial Sequence: Synthetic oligonucleotide
ucaaccucugcuuggcggu

SEQ ID NO: 2070297 - RNA, 19 nt, Artificial Sequence
  Description of Artificial Sequence: Synthetic oligonucleotide
cuguuuggcuucucgauuc

SEQ ID NO: 2070298 - RNA, 19 nt, Artificial Sequence
  Description of Artificial Sequence: Synthetic oligonucleotide
uugcucuuacaauaucuaa

SEQ ID NO: 2070299 - RNA, 19 nt, Artificial Sequence
  Description of Artificial Sequence: Synthetic oligonucleotide
aucaauuguggcucucugu

SEQ ID NO: 2070300 - RNA, 19 nt, Artificial Sequence
  Description of Artificial Sequence: Synthetic oligonucleotide
auaucuaaacgagauggau

SEQ ID NO: 2070301 - RNA, 19 nt, Artificial Sequence
  Description of Artificial Sequence: Synthetic oligonucleotide
auauuuugguaugcaguag

SEQ ID NO: 2070302 - RNA, 19 nt, Artificial Sequence
  Description of Artificial Sequence: Synthetic oligonucleotide
agcaaagauuuggcaaagc

SEQ ID NO: 2070303 - RNA, 19 nt, Artificial Sequence
  Description of Artificial Sequence: Synthetic oligonucleotide
uguggcucucuguaauuca

SEQ ID NO: 2070304 - RNA, 19 nt, Artificial Sequence
  Description of Artificial Sequence: Synthetic oligonucleotide
ugcuuuaaauuuggggucu

SEQ ID NO: 2070305 - RNA, 19 nt, Artificial Sequence
  Description of Artificial Sequence: Synthetic oligonucleotide
uuccagaugugcacuuagc

SEQ ID NO: 2070306 - RNA, 19 nt, Artificial Sequence
  Description of Artificial Sequence: Synthetic oligonucleotide
acugguggcuaucugucca

SEQ ID NO: 2070307 - RNA, 19 nt, Artificial Sequence
  Description of Artificial Sequence: Synthetic oligonucleotide
ccugcgaaauuacaugucg

SEQ ID NO: 2070308 - RNA, 19 nt, Artificial Sequence
  Description of Artificial Sequence: Synthetic oligonucleotide
guuuccuccaaaugacgac

SEQ ID NO: 2070309 - RNA, 19 nt, Artificial Sequence
  Description of Artificial Sequence: Synthetic oligonucleotide
cuuuaaauuuggggucucg

SEQ ID NO: 2070310 - RNA, 19 nt, Artificial Sequence
  Description of Artificial Sequence: Synthetic oligonucleotide
aacucgucagcaaagcuuu

SEQ ID NO: 2070311 - RNA, 19 nt, Artificial Sequence
  Description of Artificial Sequence: Synthetic oligonucleotide
aucgaucuuuuguauauuu

SEQ ID NO: 2070312 - RNA, 19 nt, Artificial Sequence
  Description of Artificial Sequence: Synthetic oligonucleotide
gugcacuuagcugacacug

SEQ ID NO: 2070313 - RNA, 19 nt, Artificial Sequence
  Description of Artificial Sequence: Synthetic oligonucleotide
aguuugagcuguugaguga

SEQ ID NO: 2070314 - RNA, 19 nt, Artificial Sequence
  Description of Artificial Sequence: Synthetic oligonucleotide
cugccugcgaaauuacaug

SEQ ID NO: 2070315 - RNA, 19 nt, Artificial Sequence
  Description of Artificial Sequence: Synthetic oligonucleotide
ucuggcaguuuuccguaca

SEQ ID NO: 2070316 - RNA, 19 nt, Artificial Sequence
  Description of Artificial Sequence: Synthetic oligonucleotide
uuucagacccugcuuuaaa

SEQ ID NO: 2070317 - RNA, 19 nt, Artificial Sequence
  Description of Artificial Sequence: Synthetic oligonucleotide
ggcuuugucucucagucug

SEQ ID NO: 2070318 - RNA, 19 nt, Artificial Sequence
  Description of Artificial Sequence: Synthetic oligonucleotide
ugauccuggauuucacuua

SEQ ID NO: 2070319 - RNA, 19 nt, Artificial Sequence
  Description of Artificial Sequence: Synthetic oligonucleotide
cacauuggugacagcagac

SEQ ID NO: 2070320 - RNA, 19 nt, Artificial Sequence
  Description of Artificial Sequence: Synthetic oligonucleotide
ugcuguuaauguugcuuug

SEQ ID NO: 2070321 - RNA, 19 nt, Artificial Sequence
  Description of Artificial Sequence: Synthetic oligonucleotide
uucagacccugcuuuaaau

SEQ ID NO: 2070322 - RNA, 19 nt, Artificial Sequence
  Description of Artificial Sequence: Synthetic oligonucleotide
uggaaaugugaaguuuucu

SEQ ID NO: 2070323 - RNA, 19 nt, Artificial Sequence
  Description of Artificial Sequence: Synthetic oligonucleotide
augacgacuuguucgagua

SEQ ID NO: 2070324 - RNA, 19 nt, Artificial Sequence
  Description of Artificial Sequence: Synthetic oligonucleotide
cuuucaaccucugcuuggc

SEQ ID NO: 2070325 - RNA, 19 nt, Artificial Sequence
  Description of Artificial Sequence: Synthetic oligonucleotide
cacuuaacaugaaaaugga

SEQ ID NO: 2070326 - RNA, 19 nt, Artificial Sequence
  Description of Artificial Sequence: Synthetic oligonucleotide
cuuucuaacugugauaacu

SEQ ID NO: 2070327 - RNA, 19 nt, Artificial Sequence
  Description of Artificial Sequence: Synthetic oligonucleotide
ugcacuuagcugacacuga

SEQ ID NO: 2070328 - RNA, 19 nt, Artificial Sequence
  Description of Artificial Sequence: Synthetic oligonucleotide
ucagacccugcuuuaaauu

SEQ ID NO: 2070329 - RNA, 19 nt, Artificial Sequence
  Description of Artificial Sequence: Synthetic oligonucleotide
uccguacauaagcagcaaa

SEQ ID NO: 2070330 - RNA, 19 nt, Artificial Sequence
  Description of Artificial Sequence: Synthetic oligonucleotide
gcaaagcucuccaaaaugc

SEQ ID NO: 2070331 - RNA, 19 nt, Artificial Sequence
  Description of Artificial Sequence: Synthetic oligonucleotide
gguagauacagagaauuuc

SEQ ID NO: 2070332 - RNA, 19 nt, Artificial Sequence
  Description of Artificial Sequence: Synthetic oligonucleotide
aaaugacgacuuguucgag

SEQ ID NO: 2070333 - RNA, 19 nt, Artificial Sequence
  Description of Artificial Sequence: Synthetic oligonucleotide
cgaaauuacaugucgauca

SEQ ID NO: 2070334 - RNA, 19 nt, Artificial Sequence
  Description of Artificial Sequence: Synthetic oligonucleotide
gaguagcaucaauuguggc

SEQ ID NO: 2070335 - RNA, 19 nt, Artificial Sequence
  Description of Artificial Sequence: Synthetic oligonucleotide
auuuugguaugcaguagug

SEQ ID NO: 2070336 - RNA, 19 nt, Artificial Sequence
  Description of Artificial Sequence: Synthetic oligonucleotide
cuccaaaaugcuucuccac

SEQ ID NO: 2070337 - RNA, 19 nt, Artificial Sequence
  Description of Artificial Sequence: Synthetic oligonucleotide
ugacgacuuguucgaguag

SEQ ID NO: 2070338 - RNA, 19 nt, Artificial Sequence
  Description of Artificial Sequence: Synthetic oligonucleotide
ucucuguaauucaguuucu

SEQ ID NO: 2070339 - RNA, 19 nt, Artificial Sequence
  Description of Artificial Sequence: Synthetic oligonucleotide
ugugcacuuagcugacacu

SEQ ID NO: 2070340 - RNA, 19 nt, Artificial Sequence
  Description of Artificial Sequence: Synthetic oligonucleotide
ggugacuuugaauuugcuc

SEQ ID NO: 2070341 - RNA, 19 nt, Artificial Sequence
  Description of Artificial Sequence: Synthetic oligonucleotide
uuugucucucagucuggca

SEQ ID NO: 2070342 - RNA, 19 nt, Artificial Sequence
  Description of Artificial Sequence: Synthetic oligonucleotide
guagaggcauacaaguuga

SEQ ID NO: 2070343 - RNA, 19 nt, Artificial Sequence
  Description of Artificial Sequence: Synthetic oligonucleotide
aguuuccuccaaaugacga

SEQ ID NO: 2070344 - RNA, 19 nt, Artificial Sequence
  Description of Artificial Sequence: Synthetic oligonucleotide
uggcguguccuuucuaacu

SEQ ID NO: 2070345 - RNA, 19 nt, Artificial Sequence
  Description of Artificial Sequence: Synthetic oligonucleotide
uuucugccugcgaaauuac

SEQ ID NO: 2070346 - RNA, 19 nt, Artificial Sequence
  Description of Artificial Sequence: Synthetic oligonucleotide
ugucucucagucuggcagu

SEQ ID NO: 2070347 - RNA, 19 nt, Artificial Sequence
  Description of Artificial Sequence: Synthetic oligonucleotide
ccguacauaagcagcaaag

SEQ ID NO: 2070348 - RNA, 19 nt, Artificial Sequence
  Description of Artificial Sequence: Synthetic oligonucleotide
accucuagaucuucauccu

SEQ ID NO: 2070349 - RNA, 19 nt, Artificial Sequence
  Description of Artificial Sequence: Synthetic oligonucleotide
ucuacuuguuggucuuuuc

SEQ ID NO: 2070350 - RNA, 19 nt, Artificial Sequence
  Description of Artificial Sequence: Synthetic oligonucleotide
ucuggggcgccacggcgcg

SEQ ID NO: 2070351 - RNA, 19 nt, Artificial Sequence
  Description of Artificial Sequence: Synthetic oligonucleotide
ugcccucuuucauaguagu

SEQ ID NO: 2070352 - RNA, 19 nt, Artificial Sequence
  Description of Artificial Sequence: Synthetic oligonucleotide
caucaauuguggcucucug

SEQ ID NO: 2070353 - RNA, 19 nt, Artificial Sequence
  Description of Artificial Sequence: Synthetic oligonucleotide
ucuaaagcuuugccaugaa

SEQ ID NO: 2070354 - RNA, 19 nt, Artificial Sequence
  Description of Artificial Sequence: Synthetic oligonucleotide
uuaccuccgccccugcccu

SEQ ID NO: 2070355 - RNA, 19 nt, Artificial Sequence
  Description of Artificial Sequence: Synthetic oligonucleotide
uccuccaaaugacgacuug

SEQ ID NO: 2070356 - RNA, 19 nt, Artificial Sequence
  Description of Artificial Sequence: Synthetic oligonucleotide
guggcuaucuguccaguuc

SEQ ID NO: 2070357 - RNA, 19 nt, Artificial Sequence
  Description of Artificial Sequence: Synthetic oligonucleotide
uagcugacacugaucucug

SEQ ID NO: 2070358 - RNA, 19 nt, Artificial Sequence
  Description of Artificial Sequence: Synthetic oligonucleotide
guacauaagcagcaaagau

SEQ ID NO: 2070359 - RNA, 19 nt, Artificial Sequence
  Description of Artificial Sequence: Synthetic oligonucleotide
ggcaguuuuccguacauaa

SEQ ID NO: 2070360 - RNA, 19 nt, Artificial Sequence
  Description of Artificial Sequence: Synthetic oligonucleotide
ccugcuuuaaauuuggggu

SEQ ID NO: 2070361 - RNA, 19 nt, Artificial Sequence
  Description of Artificial Sequence: Synthetic oligonucleotide
uguugccuugcuccccgcc

SEQ ID NO: 2070362 - RNA, 19 nt, Artificial Sequence
  Description of Artificial Sequence: Synthetic oligonucleotide
uucgacugguggcuaucug

SEQ ID NO: 2070363 - RNA, 19 nt, Artificial Sequence
  Description of Artificial Sequence: Synthetic oligonucleotide
gaaguuugagcuguugagu

SEQ ID NO: 2070364 - RNA, 19 nt, Artificial Sequence
  Description of Artificial Sequence: Synthetic oligonucleotide
acauuggugacagcagacu

SEQ ID NO: 2070365 - RNA, 19 nt, Artificial Sequence
  Description of Artificial Sequence: Synthetic oligonucleotide
gguucaacuacuuuggcuu

SEQ ID NO: 2070366 - RNA, 19 nt, Artificial Sequence
  Description of Artificial Sequence: Synthetic oligonucleotide
uuuucagacccugcuuuaa

SEQ ID NO: 2070367 - RNA, 19 nt, Artificial Sequence
  Description of Artificial Sequence: Synthetic oligonucleotide
gugaguauaaagugauccu

SEQ ID NO: 2070368 - RNA, 19 nt, Artificial Sequence
  Description of Artificial Sequence: Synthetic oligonucleotide
uuggcguguccuuucuaac

SEQ ID NO: 2070369 - RNA, 19 nt, Artificial Sequence
  Description of Artificial Sequence: Synthetic oligonucleotide
guuggcguguccuuucuaa

SEQ ID NO: 2070370 - RNA, 19 nt, Artificial Sequence
  Description of Artificial Sequence: Synthetic oligonucleotide
uggcuucaagccuuucaac

SEQ ID NO: 2070371 - RNA, 19 nt, Artificial Sequence
  Description of Artificial Sequence: Synthetic oligonucleotide
acgagauggauaaucuggu

SEQ ID NO: 2070372 - RNA, 19 nt, Artificial Sequence
  Description of Artificial Sequence: Synthetic oligonucleotide
agccuuucaaccucugcuu

SEQ ID NO: 2070373 - RNA, 19 nt, Artificial Sequence
  Description of Artificial Sequence: Synthetic oligonucleotide
uuguucgaguagcaucaau

SEQ ID NO: 2070374 - RNA, 19 nt, Artificial Sequence
  Description of Artificial Sequence: Synthetic oligonucleotide
agcccaacgagcgcggcuc

SEQ ID NO: 2070375 - RNA, 19 nt, Artificial Sequence
  Description of Artificial Sequence: Synthetic oligonucleotide
uggcucucuguaauucagu

SEQ ID NO: 2070376 - RNA, 19 nt, Artificial Sequence
  Description of Artificial Sequence: Synthetic oligonucleotide
cauaagcagcaaagauuug

SEQ ID NO: 2070377 - RNA, 19 nt, Artificial Sequence
  Description of Artificial Sequence: Synthetic oligonucleotide
cucuguaauucaguuucug

SEQ ID NO: 2070378 - RNA, 19 nt, Artificial Sequence
  Description of Artificial Sequence: Synthetic oligonucleotide
caggagaucggcuuugucu

SEQ ID NO: 2070379 - RNA, 19 nt, Artificial Sequence
  Description of Artificial Sequence: Synthetic oligonucleotide
ggcguguccuuucuaacug

SEQ ID NO: 2070380 - RNA, 19 nt, Artificial Sequence
  Description of Artificial Sequence: Synthetic oligonucleotide
cgaguagcaucaauugugg

SEQ ID NO: 2070381 - RNA, 19 nt, Artificial Sequence
  Description of Artificial Sequence: Synthetic oligonucleotide
guucaacuacuuuggcuuc

SEQ ID NO: 2070382 - RNA, 19 nt, Artificial Sequence
  Description of Artificial Sequence: Synthetic oligonucleotide
aucggcuuugucucucagu

SEQ ID NO: 2070383 - RNA, 19 nt, Artificial Sequence
  Description of Artificial Sequence: Synthetic oligonucleotide
gaucggcuuugucucucag

SEQ ID NO: 2070384 - RNA, 19 nt, Artificial Sequence
  Description of Artificial Sequence: Synthetic oligonucleotide
acuuaacaugaaaauggaa

SEQ ID NO: 2070385 - RNA, 19 nt, Artificial Sequence
  Description of Artificial Sequence: Synthetic oligonucleotide
gcgguaaucuugaaguuug

SEQ ID NO: 2070386 - RNA, 19 nt, Artificial Sequence
  Description of Artificial Sequence: Synthetic oligonucleotide
uuguggcucucuguaauuc

SEQ ID NO: 2070387 - RNA, 19 nt, Artificial Sequence
  Description of Artificial Sequence: Synthetic oligonucleotide
cuugcuccccgccggagac

SEQ ID NO: 2070388 - RNA, 19 nt, Artificial Sequence
  Description of Artificial Sequence: Synthetic oligonucleotide
agucuggcaguuuuccgua

SEQ ID NO: 2070389 - RNA, 19 nt, Artificial Sequence
  Description of Artificial Sequence: Synthetic oligonucleotide
auaaucugguagauacaga

SEQ ID NO: 2070390 - RNA, 19 nt, Artificial Sequence
  Description of Artificial Sequence: Synthetic oligonucleotide
ucucaaccauguugccuug

SEQ ID NO: 2070391 - RNA, 19 nt, Artificial Sequence
  Description of Artificial Sequence: Synthetic oligonucleotide
gagcuguugagugaguaua

SEQ ID NO: 2070392 - RNA, 19 nt, Artificial Sequence
  Description of Artificial Sequence: Synthetic oligonucleotide
cugguggcuaucuguccag

SEQ ID NO: 2070393 - RNA, 19 nt, Artificial Sequence
  Description of Artificial Sequence: Synthetic oligonucleotide
cugcgaaauuacaugucga

SEQ ID NO: 2070394 - RNA, 19 nt, Artificial Sequence
  Description of Artificial Sequence: Synthetic oligonucleotide
uuucauucaccaggagauc

SEQ ID NO: 2070395 - RNA, 19 nt, Artificial Sequence
  Description of Artificial Sequence: Synthetic oligonucleotide
uucguuggcguguccuuuc

SEQ ID NO: 2070396 - RNA, 19 nt, Artificial Sequence
  Description of Artificial Sequence: Synthetic oligonucleotide
ugucgaucagauggguuuc

SEQ ID NO: 2070397 - RNA, 19 nt, Artificial Sequence
  Description of Artificial Sequence: Synthetic oligonucleotide
uuccuccaaaugacgacuu

SEQ ID NO: 2070398 - RNA, 19 nt, Artificial Sequence
  Description of Artificial Sequence: Synthetic oligonucleotide
cucgauuccuugcuguuaa

SEQ ID NO: 2070399 - RNA, 19 nt, Artificial Sequence
  Description of Artificial Sequence: Synthetic oligonucleotide
auggguuucguuggcgugu

SEQ ID NO: 2070400 - RNA, 19 nt, Artificial Sequence
  Description of Artificial Sequence: Synthetic oligonucleotide
ugauaacuguuuggcuucu

SEQ ID NO: 2070401 - RNA, 19 nt, Artificial Sequence
  Description of Artificial Sequence: Synthetic oligonucleotide
cagcaaagauuuggcaaag

SEQ ID NO: 2070402 - RNA, 19 nt, Artificial Sequence
  Description of Artificial Sequence: Synthetic oligonucleotide
cagauggguuucguuggcg

SEQ ID NO: 2070403 - RNA, 19 nt, Artificial Sequence
  Description of Artificial Sequence: Synthetic oligonucleotide
gaauuugcucuuacaauau

SEQ ID NO: 2070404 - RNA, 19 nt, Artificial Sequence
  Description of Artificial Sequence: Synthetic oligonucleotide
agaggcauacaaguugauu

SEQ ID NO: 2070405 - RNA, 19 nt, Artificial Sequence
  Description of Artificial Sequence: Synthetic oligonucleotide
gucgaucagauggguuucg

SEQ ID NO: 2070406 - RNA, 19 nt, Artificial Sequence
  Description of Artificial Sequence: Synthetic oligonucleotide
auguugccuugcuccccgc

SEQ ID NO: 2070407 - RNA, 19 nt, Artificial Sequence
  Description of Artificial Sequence: Synthetic oligonucleotide
ggugacagcagacugcagu

SEQ ID NO: 2070408 - RNA, 19 nt, Artificial Sequence
  Description of Artificial Sequence: Synthetic oligonucleotide
gcuuucaaagguucaacua

SEQ ID NO: 2070409 - RNA, 19 nt, Artificial Sequence
  Description of Artificial Sequence: Synthetic oligonucleotide
ucguuggcguguccuuucu

SEQ ID NO: 2070410 - RNA, 19 nt, Artificial Sequence
  Description of Artificial Sequence: Synthetic oligonucleotide
guauaaagugauccuggau

SEQ ID NO: 2070411 - RNA, 19 nt, Artificial Sequence
  Description of Artificial Sequence: Synthetic oligonucleotide
cucaucgaucuuuuguaua

SEQ ID NO: 2070412 - RNA, 19 nt, Artificial Sequence
  Description of Artificial Sequence: Synthetic oligonucleotide
agcaucaauuguggcucuc

SEQ ID NO: 2070413 - RNA, 19 nt, Artificial Sequence
  Description of Artificial Sequence: Synthetic oligonucleotide
caaccauguugccuugcuc

SEQ ID NO: 2070414 - RNA, 19 nt, Artificial Sequence
  Description of Artificial Sequence: Synthetic oligonucleotide
cucgucagcaaagcuuuuc

SEQ ID NO: 2070415 - RNA, 19 nt, Artificial Sequence
  Description of Artificial Sequence: Synthetic oligonucleotide
uagaggcauacaaguugau

SEQ ID NO: 2070416 - RNA, 19 nt, Artificial Sequence
  Description of Artificial Sequence: Synthetic oligonucleotide
cacugaucucugaagaggu

SEQ ID NO: 2070417 - RNA, 19 nt, Artificial Sequence
  Description of Artificial Sequence: Synthetic oligonucleotide
caaagcucuccaaaaugcu

SEQ ID NO: 2070418 - RNA, 19 nt, Artificial Sequence
  Description of Artificial Sequence: Synthetic oligonucleotide
uucuacuuguuggucuuuu

SEQ ID NO: 2070419 - RNA, 19 nt, Artificial Sequence
  Description of Artificial Sequence: Synthetic oligonucleotide
ucucgauuccuugcuguua

SEQ ID NO: 2070420 - RNA, 19 nt, Artificial Sequence
  Description of Artificial Sequence: Synthetic oligonucleotide
agaucggcuuugucucuca

SEQ ID NO: 2070421 - RNA, 19 nt, Artificial Sequence
  Description of Artificial Sequence: Synthetic oligonucleotide
auguugcuuugagaucauc

SEQ ID NO: 2070422 - RNA, 19 nt, Artificial Sequence
  Description of Artificial Sequence: Synthetic oligonucleotide
ugccuuuaccuccgccccu

SEQ ID NO: 2070423 - RNA, 19 nt, Artificial Sequence
  Description of Artificial Sequence: Synthetic oligonucleotide
gagugaguauaaagugauc

SEQ ID NO: 2070424 - RNA, 19 nt, Artificial Sequence
  Description of Artificial Sequence: Synthetic oligonucleotide
aauguugcuuugagaucau

SEQ ID NO: 2070425 - RNA, 19 nt, Artificial Sequence
  Description of Artificial Sequence: Synthetic oligonucleotide
caauugugauaaacucaga

SEQ ID NO: 2070426 - RNA, 19 nt, Artificial Sequence
  Description of Artificial Sequence: Synthetic oligonucleotide
caacgagcgcggcucuggg

SEQ ID NO: 2070427 - RNA, 19 nt, Artificial Sequence
  Description of Artificial Sequence: Synthetic oligonucleotide
acaugucgaucagaugggu

SEQ ID NO: 2070428 - RNA, 19 nt, Artificial Sequence
  Description of Artificial Sequence: Synthetic oligonucleotide
ucuaaacgagauggauaau

SEQ ID NO: 2070429 - RNA, 19 nt, Artificial Sequence
  Description of Artificial Sequence: Synthetic oligonucleotide
aguuucugccugcgaaauu

SEQ ID NO: 2070430 - RNA, 19 nt, Artificial Sequence
  Description of Artificial Sequence: Synthetic oligonucleotide
cuacuuuggcuucaagccu

SEQ ID NO: 2070431 - RNA, 19 nt, Artificial Sequence
  Description of Artificial Sequence: Synthetic oligonucleotide
gauggauaaucugguagau

SEQ ID NO: 2070432 - RNA, 19 nt, Artificial Sequence
  Description of Artificial Sequence: Synthetic oligonucleotide
ucgaucagauggguuucgu

SEQ ID NO: 2070433 - RNA, 19 nt, Artificial Sequence
  Description of Artificial Sequence: Synthetic oligonucleotide
cugaagaggugacuuugaa

SEQ ID NO: 2070434 - RNA, 19 nt, Artificial Sequence
  Description of Artificial Sequence: Synthetic oligonucleotide
uuguucgacugguggcuau

SEQ ID NO: 2070435 - RNA, 19 nt, Artificial Sequence
  Description of Artificial Sequence: Synthetic oligonucleotide
gccuuucaaccucugcuug

SEQ ID NO: 2070436 - RNA, 19 nt, Artificial Sequence
  Description of Artificial Sequence: Synthetic oligonucleotide
uuucguuggcguguccuuu

SEQ ID NO: 2070437 - RNA, 19 nt, Artificial Sequence
  Description of Artificial Sequence: Synthetic oligonucleotide
uguucgacugguggcuauc

SEQ ID NO: 2070438 - RNA, 19 nt, Artificial Sequence
  Description of Artificial Sequence: Synthetic oligonucleotide
uggcgguaaucuugaaguu

SEQ ID NO: 2070439 - RNA, 19 nt, Artificial Sequence
  Description of Artificial Sequence: Synthetic oligonucleotide
cuucucgauuccuugcugu

SEQ ID NO: 2070440 - RNA, 19 nt, Artificial Sequence
  Description of Artificial Sequence: Synthetic oligonucleotide
auggauaaucugguagaua

SEQ ID NO: 2070441 - RNA, 19 nt, Artificial Sequence
  Description of Artificial Sequence: Synthetic oligonucleotide
caauuguggcucucuguaa

SEQ ID NO: 2070442 - RNA, 19 nt, Artificial Sequence
  Description of Artificial Sequence: Synthetic oligonucleotide
uaacugccuuuaccuccgc

SEQ ID NO: 2070443 - RNA, 19 nt, Artificial Sequence
  Description of Artificial Sequence: Synthetic oligonucleotide
ggucuuuucuuguucgacu

SEQ ID NO: 2070444 - RNA, 19 nt, Artificial Sequence
  Description of Artificial Sequence: Synthetic oligonucleotide
cugcaguuguuuuguuuga

SEQ ID NO: 2070445 - RNA, 19 nt, Artificial Sequence
  Description of Artificial Sequence: Synthetic oligonucleotide
cagucuggcaguuuuccgu

SEQ ID NO: 2070446 - RNA, 19 nt, Artificial Sequence
  Description of Artificial Sequence: Synthetic oligonucleotide
gagaucggcuuugucucuc

SEQ ID NO: 2070447 - RNA, 19 nt, Artificial Sequence
  Description of Artificial Sequence: Synthetic oligonucleotide
gguaugcaguagugaagac

SEQ ID NO: 2070448 - RNA, 19 nt, Artificial Sequence
  Description of Artificial Sequence: Synthetic oligonucleotide
gcgaaauuacaugucgauc

SEQ ID NO: 2070449 - RNA, 19 nt, Artificial Sequence
  Description of Artificial Sequence: Synthetic oligonucleotide
gaauuucggaaaaccucua

SEQ ID NO: 2070450 - RNA, 19 nt, Artificial Sequence
  Description of Artificial Sequence: Synthetic oligonucleotide
acgacuuguucgaguagca

SEQ ID NO: 2070451 - RNA, 19 nt, Artificial Sequence
  Description of Artificial Sequence: Synthetic oligonucleotide
ggcauacaaguugauuuca

SEQ ID NO: 2070452 - RNA, 19 nt, Artificial Sequence
  Description of Artificial Sequence: Synthetic oligonucleotide
gcuguuaauguugcuuuga

SEQ ID NO: 2070453 - RNA, 19 nt, Artificial Sequence
  Description of Artificial Sequence: Synthetic oligonucleotide
gacugcaguuguuuuguuu

SEQ ID NO: 2070454 - RNA, 19 nt, Artificial Sequence
  Description of Artificial Sequence: Synthetic oligonucleotide
caaacucgucagcaaagcu

SEQ ID NO: 2070455 - RNA, 19 nt, Artificial Sequence
  Description of Artificial Sequence: Synthetic oligonucleotide
ccagguugcgucucaacca

SEQ ID NO: 2070456 - RNA, 19 nt, Artificial Sequence
  Description of Artificial Sequence: Synthetic oligonucleotide
acccugcuuuaaauuuggg

SEQ ID NO: 2070457 - RNA, 19 nt, Artificial Sequence
  Description of Artificial Sequence: Synthetic oligonucleotide
ccucuaaagcuuugccaug

SEQ ID NO: 2070458 - RNA, 19 nt, Artificial Sequence
  Description of Artificial Sequence: Synthetic oligonucleotide
ucgauuccuugcuguuaau

SEQ ID NO: 2070459 - RNA, 19 nt, Artificial Sequence
  Description of Artificial Sequence: Synthetic oligonucleotide
ggauaaucugguagauaca

SEQ ID NO: 2070460 - RNA, 19 nt, Artificial Sequence
  Description of Artificial Sequence: Synthetic oligonucleotide
gaugugcacuuagcugaca

SEQ ID NO: 2070461 - RNA, 19 nt, Artificial Sequence
  Description of Artificial Sequence: Synthetic oligonucleotide
uggcaguuuuccguacaua

SEQ ID NO: 2070462 - RNA, 19 nt, Artificial Sequence
  Description of Artificial Sequence: Synthetic oligonucleotide
cucuuucauaguaguauuu

SEQ ID NO: 2070463 - RNA, 19 nt, Artificial Sequence
  Description of Artificial Sequence: Synthetic oligonucleotide
augcaguagugaagaccuc

SEQ ID NO: 2070464 - RNA, 19 nt, Artificial Sequence
  Description of Artificial Sequence: Synthetic oligonucleotide
ccccugcccucuuucauag

SEQ ID NO: 2070465 - RNA, 19 nt, Artificial Sequence
  Description of Artificial Sequence: Synthetic oligonucleotide
cucggucuuccagguugcg

SEQ ID NO: 2070466 - RNA, 19 nt, Artificial Sequence
  Description of Artificial Sequence: Synthetic oligonucleotide
cguacauaagcagcaaaga

SEQ ID NO: 2070467 - RNA, 19 nt, Artificial Sequence
  Description of Artificial Sequence: Synthetic oligonucleotide
ggagacccggggugggagc

SEQ ID NO: 2070468 - RNA, 19 nt, Artificial Sequence
  Description of Artificial Sequence: Synthetic oligonucleotide
ccaacgagcgcggcucugg

SEQ ID NO: 2070469 - RNA, 19 nt, Artificial Sequence
  Description of Artificial Sequence: Synthetic oligonucleotide
ggucucgguagaggcauac

SEQ ID NO: 2070470 - RNA, 19 nt, Artificial Sequence
  Description of Artificial Sequence: Synthetic oligonucleotide
cgauuccuugcuguuaaug

SEQ ID NO: 2070471 - RNA, 19 nt, Artificial Sequence
  Description of Artificial Sequence: Synthetic oligonucleotide
caugucgaucagauggguu

SEQ ID NO: 2070472 - RNA, 19 nt, Artificial Sequence
  Description of Artificial Sequence: Synthetic oligonucleotide
gguugcgucucaaccaugu

SEQ ID NO: 2070473 - RNA, 19 nt, Artificial Sequence
  Description of Artificial Sequence: Synthetic oligonucleotide
cagguugcgucucaaccau

SEQ ID NO: 2070474 - RNA, 19 nt, Artificial Sequence
  Description of Artificial Sequence: Synthetic oligonucleotide
ggcuucucgauuccuugcu

SEQ ID NO: 2070475 - RNA, 19 nt, Artificial Sequence
  Description of Artificial Sequence: Synthetic oligonucleotide
uugcuccccgccggagacc

SEQ ID NO: 2070476 - RNA, 19 nt, Artificial Sequence
  Description of Artificial Sequence: Synthetic oligonucleotide
agguugcgucucaaccaug

SEQ ID NO: 2070477 - RNA, 19 nt, Artificial Sequence
  Description of Artificial Sequence: Synthetic oligonucleotide
gcuuuaaauuuggggucuc

SEQ ID NO: 2070478 - RNA, 19 nt, Artificial Sequence
  Description of Artificial Sequence: Synthetic oligonucleotide
gcgucucaaccauguugcc

SEQ ID NO: 2070479 - RNA, 19 nt, Artificial Sequence
  Description of Artificial Sequence: Synthetic oligonucleotide
gagcccaacgagcgcggcu

SEQ ID NO: 2070480 - RNA, 19 nt, Artificial Sequence
  Description of Artificial Sequence: Synthetic oligonucleotide
guucgacugguggcuaucu

SEQ ID NO: 2070481 - RNA, 19 nt, Artificial Sequence
  Description of Artificial Sequence: Synthetic oligonucleotide
gcacuuagcugacacugau

SEQ ID NO: 2070482 - RNA, 19 nt, Artificial Sequence
  Description of Artificial Sequence: Synthetic oligonucleotide
cuuguucgaguagcaucaa

SEQ ID NO: 2070483 - RNA, 19 nt, Artificial Sequence
  Description of Artificial Sequence: Synthetic oligonucleotide
gccugcgaaauuacauguc

SEQ ID NO: 2070484 - RNA, 19 nt, Artificial Sequence
  Description of Artificial Sequence: Synthetic oligonucleotide
gcaguagugaagaccucua

SEQ ID NO: 2070485 - RNA, 19 nt, Artificial Sequence
  Description of Artificial Sequence: Synthetic oligonucleotide
gcaucucggucuuccaggu

SEQ ID NO: 2070486 - RNA, 19 nt, Artificial Sequence
  Description of Artificial Sequence: Synthetic oligonucleotide
cuuccagguugcgucucaa

SEQ ID NO: 2070487 - RNA, 19 nt, Artificial Sequence
  Description of Artificial Sequence: Synthetic oligonucleotide
gcaucaauuguggcucucu

SEQ ID NO: 2070488 - RNA, 19 nt, Artificial Sequence
  Description of Artificial Sequence: Synthetic oligonucleotide
ggcuaucuguccaguucca

SEQ ID NO: 2070489 - RNA, 19 nt, Artificial Sequence
  Description of Artificial Sequence: Synthetic oligonucleotide
ggcgguaaucuugaaguuu

SEQ ID NO: 2070490 - RNA, 19 nt, Artificial Sequence
  Description of Artificial Sequence: Synthetic oligonucleotide
guugcgucucaaccauguu

SEQ ID NO: 2070491 - RNA, 19 nt, Artificial Sequence
  Description of Artificial Sequence: Synthetic oligonucleotide
ggguuucguuggcgugucc

SEQ ID NO: 2070492 - RNA, 19 nt, Artificial Sequence
  Description of Artificial Sequence: Synthetic oligonucleotide
ccuuuaccuccgccccugc

SEQ ID NO: 2070493 - RNA, 19 nt, Artificial Sequence
  Description of Artificial Sequence: Synthetic oligonucleotide
uaccuccgccccugcccuc

SEQ ID NO: 2070494 - RNA, 19 nt, Artificial Sequence
  Description of Artificial Sequence: Synthetic oligonucleotide
caguuccagaugugcacuu

SEQ ID NO: 2070495 - RNA, 19 nt, Artificial Sequence
  Description of Artificial Sequence: Synthetic oligonucleotide
gcguguccuuucuaacugu

SEQ ID NO: 2070496 - RNA, 19 nt, Artificial Sequence
  Description of Artificial Sequence: Synthetic oligonucleotide
ggagcccaacgagcgcggc

SEQ ID NO: 2070497 - RNA, 19 nt, Artificial Sequence
  Description of Artificial Sequence: Synthetic oligonucleotide
gguggcuaucuguccaguu

SEQ ID NO: 2070498 - RNA, 19 nt, Artificial Sequence
  Description of Artificial Sequence: Synthetic oligonucleotide
caucgaucuuuuguauauu

SEQ ID NO: 2070499 - RNA, 19 nt, Artificial Sequence
  Description of Artificial Sequence: Synthetic oligonucleotide
ccucaucgaucuuuuguau

SEQ ID NO: 2070500 - RNA, 19 nt, Artificial Sequence
  Description of Artificial Sequence: Synthetic oligonucleotide
caaccucugcuuggcggua

SEQ ID NO: 2070501 - RNA, 19 nt, Artificial Sequence
  Description of Artificial Sequence: Synthetic oligonucleotide
gucucucagucuggcaguu

SEQ ID NO: 2070502 - RNA, 19 nt, Artificial Sequence
  Description of Artificial Sequence: Synthetic oligonucleotide
ccucugcuuggcgguaauc

SEQ ID NO: 2070503 - RNA, 19 nt, Artificial Sequence
  Description of Artificial Sequence: Synthetic oligonucleotide
cuggggcgccacggcgcgc

SEQ ID NO: 2070504 - RNA, 19 nt, Artificial Sequence
  Description of Artificial Sequence: Synthetic oligonucleotide
ccccgccggagacccgggg

SEQ ID NO: 2070505 - RNA, 19 nt, Artificial Sequence
  Description of Artificial Sequence: Synthetic oligonucleotide
cccaacgagcgcggcucug

SEQ ID NO: 2070506 - RNA, 19 nt, Artificial Sequence
  Description of Artificial Sequence: Synthetic oligonucleotide
cgucucaaccauguugccu

SEQ ID NO: 2070507 - RNA, 19 nt, Artificial Sequence
  Description of Artificial Sequence: Synthetic oligonucleotide
cccggggugggagcccaac

SEQ ID NO: 2070508 - RNA, 19 nt, Artificial Sequence
  Description of Artificial Sequence: Synthetic oligonucleotide
cgguagaggcauacaaguu

SEQ ID NO: 2070509 - RNA, 19 nt, Artificial Sequence
  Description of Artificial Sequence: Synthetic oligonucleotide
ccgccccugcccucuuuca

SEQ ID NO: 2070510 - RNA, 19 nt, Artificial Sequence
  Description of Artificial Sequence: Synthetic oligonucleotide
gcccaacgagcgcggcucu

SEQ ID NO: 2070511 - RNA, 19 nt, Artificial Sequence
  Description of Artificial Sequence: Synthetic oligonucleotide
cggcuuugucucucagucu

SEQ ID NO: 2070512 - RNA, 19 nt, Artificial Sequence
  Description of Artificial Sequence: Synthetic oligonucleotide
cguuggcguguccuuucua

SEQ ID NO: 2070513 - RNA, 19 nt, Artificial Sequence
  Description of Artificial Sequence: Synthetic oligonucleotide
cuccgccccugcccucuuu

SEQ ID NO: 2070514 - RNA, 19 nt, Artificial Sequence
  Description of Artificial Sequence: Synthetic oligonucleotide
cgccccugcccucuuucau

SEQ ID NO: 2070515 - RNA, 19 nt, Artificial Sequence
  Description of Artificial Sequence: Synthetic oligonucleotide
ccuccgccccugcccucuu

SEQ ID NO: 2070516 - RNA, 19 nt, Artificial Sequence
  Description of Artificial Sequence: Synthetic oligonucleotide
aaagcagccgaucauaugc

SEQ ID NO: 2070517 - RNA, 19 nt, Artificial Sequence
  Description of Artificial Sequence: Synthetic oligonucleotide
aaauuccuuacguaaauac

SEQ ID NO: 2070518 - RNA, 19 nt, Artificial Sequence
  Description of Artificial Sequence: Synthetic oligonucleotide
aguacuuuuaacaaugugc

SEQ ID NO: 2070519 - RNA, 19 nt, Artificial Sequence
  Description of Artificial Sequence: Synthetic oligonucleotide
aacacuuagcaaccuaucc

SEQ ID NO: 2070520 - RNA, 19 nt, Artificial Sequence
  Description of Artificial Sequence: Synthetic oligonucleotide
aagcacaaagcuuucuucc

SEQ ID NO: 2070521 - RNA, 19 nt, Artificial Sequence
  Description of Artificial Sequence: Synthetic oligonucleotide
acucuagccaaauagcucc

SEQ ID NO: 2070522 - RNA, 19 nt, Artificial Sequence
  Description of Artificial Sequence: Synthetic oligonucleotide
uauuagaugacacuucacc

SEQ ID NO: 2070523 - RNA, 19 nt, Artificial Sequence
  Description of Artificial Sequence: Synthetic oligonucleotide
ucauaugcagaaauguugg

SEQ ID NO: 2070524 - RNA, 19 nt, Artificial Sequence
  Description of Artificial Sequence: Synthetic oligonucleotide
aauguuggcaacuucaaau

SEQ ID NO: 2070525 - RNA, 19 nt, Artificial Sequence
  Description of Artificial Sequence: Synthetic oligonucleotide
aaaagccaggcccagacuc

SEQ ID NO: 2070526 - RNA, 19 nt, Artificial Sequence
  Description of Artificial Sequence: Synthetic oligonucleotide
uuucaagaccuucugaucc

SEQ ID NO: 2070527 - RNA, 19 nt, Artificial Sequence
  Description of Artificial Sequence: Synthetic oligonucleotide
aauuccuuacguaaauacc

SEQ ID NO: 2070528 - RNA, 19 nt, Artificial Sequence
  Description of Artificial Sequence: Synthetic oligonucleotide
acacuuagcaaccuauccc

SEQ ID NO: 2070529 - RNA, 19 nt, Artificial Sequence
  Description of Artificial Sequence: Synthetic oligonucleotide
gauucuggcuauuagauga

SEQ ID NO: 2070530 - RNA, 19 nt, Artificial Sequence
  Description of Artificial Sequence: Synthetic oligonucleotide
ggaugaaugagauuuagag

SEQ ID NO: 2070531 - RNA, 19 nt, Artificial Sequence
  Description of Artificial Sequence: Synthetic oligonucleotide
cucuguacuacuuugcugc

SEQ ID NO: 2070532 - RNA, 19 nt, Artificial Sequence
  Description of Artificial Sequence: Synthetic oligonucleotide
ucuccagaaacguaaaccc

SEQ ID NO: 2070533 - RNA, 19 nt, Artificial Sequence
  Description of Artificial Sequence: Synthetic oligonucleotide
cuucugauaacaucggugc

SEQ ID NO: 2070534 - RNA, 19 nt, Artificial Sequence
  Description of Artificial Sequence: Synthetic oligonucleotide
cuucucaacacuuagcaac

SEQ ID NO: 2070535 - RNA, 19 nt, Artificial Sequence
  Description of Artificial Sequence: Synthetic oligonucleotide
acuuuagaaucacuggugg

SEQ ID NO: 2070536 - RNA, 19 nt, Artificial Sequence
  Description of Artificial Sequence: Synthetic oligonucleotide
aacccuucugauaacaucg

SEQ ID NO: 2070537 - RNA, 19 nt, Artificial Sequence
  Description of Artificial Sequence: Synthetic oligonucleotide
acuucaaaucuacuugccc

SEQ ID NO: 2070538 - RNA, 19 nt, Artificial Sequence
  Description of Artificial Sequence: Synthetic oligonucleotide
aaugugcucugauucuggc

SEQ ID NO: 2070539 - RNA, 19 nt, Artificial Sequence
  Description of Artificial Sequence: Synthetic oligonucleotide
ucaaauucuguagaggaag

SEQ ID NO: 2070540 - RNA, 19 nt, Artificial Sequence
  Description of Artificial Sequence: Synthetic oligonucleotide
uugccuucgaauuuucugg

SEQ ID NO: 2070541 - RNA, 19 nt, Artificial Sequence
  Description of Artificial Sequence: Synthetic oligonucleotide
aaacccuucugauaacauc

SEQ ID NO: 2070542 - RNA, 19 nt, Artificial Sequence
  Description of Artificial Sequence: Synthetic oligonucleotide
auuccuuacguaaauaccg

SEQ ID NO: 2070543 - RNA, 19 nt, Artificial Sequence
  Description of Artificial Sequence: Synthetic oligonucleotide
ucucugaugacccacggcu

SEQ ID NO: 2070544 - RNA, 19 nt, Artificial Sequence
  Description of Artificial Sequence: Synthetic oligonucleotide
uccagaaacguaaacccag

SEQ ID NO: 2070545 - RNA, 19 nt, Artificial Sequence
  Description of Artificial Sequence: Synthetic oligonucleotide
uuuagaaucacugguggug

SEQ ID NO: 2070546 - RNA, 19 nt, Artificial Sequence
  Description of Artificial Sequence: Synthetic oligonucleotide
ugacuuuagaaucacuggu

SEQ ID NO: 2070547 - RNA, 19 nt, Artificial Sequence
  Description of Artificial Sequence: Synthetic oligonucleotide
acuuuuaacaaugugcucu

SEQ ID NO: 2070548 - RNA, 19 nt, Artificial Sequence
  Description of Artificial Sequence: Synthetic oligonucleotide
acuacuuugcugcugaagu

SEQ ID NO: 2070549 - RNA, 19 nt, Artificial Sequence
  Description of Artificial Sequence: Synthetic oligonucleotide
aaauagcuccuccacccac

SEQ ID NO: 2070550 - RNA, 19 nt, Artificial Sequence
  Description of Artificial Sequence: Synthetic oligonucleotide
ugcagugguaagcacaaag

SEQ ID NO: 2070551 - RNA, 19 nt, Artificial Sequence
  Description of Artificial Sequence: Synthetic oligonucleotide
acaaggaugaaugagauuu

SEQ ID NO: 2070552 - RNA, 19 nt, Artificial Sequence
  Description of Artificial Sequence: Synthetic oligonucleotide
uguacuacuuugcugcuga

SEQ ID NO: 2070553 - RNA, 19 nt, Artificial Sequence
  Description of Artificial Sequence: Synthetic oligonucleotide
ugagauuuagagccacagg

SEQ ID NO: 2070554 - RNA, 19 nt, Artificial Sequence
  Description of Artificial Sequence: Synthetic oligonucleotide
uuacguaaauaccggaucu

SEQ ID NO: 2070555 - RNA, 19 nt, Artificial Sequence
  Description of Artificial Sequence: Synthetic oligonucleotide
uacagaauggccugcacug

SEQ ID NO: 2070556 - RNA, 19 nt, Artificial Sequence
  Description of Artificial Sequence: Synthetic oligonucleotide
uagaugacacuucaccucc

SEQ ID NO: 2070557 - RNA, 19 nt, Artificial Sequence
  Description of Artificial Sequence: Synthetic oligonucleotide
aaagccuucugccaaccug

SEQ ID NO: 2070558 - RNA, 19 nt, Artificial Sequence
  Description of Artificial Sequence: Synthetic oligonucleotide
ucugauucuggcuauuaga

SEQ ID NO: 2070559 - RNA, 19 nt, Artificial Sequence
  Description of Artificial Sequence: Synthetic oligonucleotide
aaucuacuugcccagcugu

SEQ ID NO: 2070560 - RNA, 19 nt, Artificial Sequence
  Description of Artificial Sequence: Synthetic oligonucleotide
uaaauaccggaucugcucu

SEQ ID NO: 2070561 - RNA, 19 nt, Artificial Sequence
  Description of Artificial Sequence: Synthetic oligonucleotide
uucaaaucuacuugcccag

SEQ ID NO: 2070562 - RNA, 19 nt, Artificial Sequence
  Description of Artificial Sequence: Synthetic oligonucleotide
gacccuaguacuuuuaaca

SEQ ID NO: 2070563 - RNA, 19 nt, Artificial Sequence
  Description of Artificial Sequence: Synthetic oligonucleotide
uuccuuacguaaauaccgg

SEQ ID NO: 2070564 - RNA, 19 nt, Artificial Sequence
  Description of Artificial Sequence: Synthetic oligonucleotide
auaacaucggugcugacau

SEQ ID NO: 2070565 - RNA, 19 nt, Artificial Sequence
  Description of Artificial Sequence: Synthetic oligonucleotide
uucucaacacuuagcaacc

SEQ ID NO: 2070566 - RNA, 19 nt, Artificial Sequence
  Description of Artificial Sequence: Synthetic oligonucleotide
ugcugugagugucugaccc

SEQ ID NO: 2070567 - RNA, 19 nt, Artificial Sequence
  Description of Artificial Sequence: Synthetic oligonucleotide
caacuucaaaucuacuugc

SEQ ID NO: 2070568 - RNA, 19 nt, Artificial Sequence
  Description of Artificial Sequence: Synthetic oligonucleotide
aacaaugugcucugauucu

SEQ ID NO: 2070569 - RNA, 19 nt, Artificial Sequence
  Description of Artificial Sequence: Synthetic oligonucleotide
agaggcucaggguaagcgc

SEQ ID NO: 2070570 - RNA, 19 nt, Artificial Sequence
  Description of Artificial Sequence: Synthetic oligonucleotide
ucuauggcuucccauguca

SEQ ID NO: 2070571 - RNA, 19 nt, Artificial Sequence
  Description of Artificial Sequence: Synthetic oligonucleotide
aaaucuacuugcccagcug

SEQ ID NO: 2070572 - RNA, 19 nt, Artificial Sequence
  Description of Artificial Sequence: Synthetic oligonucleotide
acgaccgccaaacaagagg

SEQ ID NO: 2070573 - RNA, 19 nt, Artificial Sequence
  Description of Artificial Sequence: Synthetic oligonucleotide
acaaagcuuucuuccaaac

SEQ ID NO: 2070574 - RNA, 19 nt, Artificial Sequence
  Description of Artificial Sequence: Synthetic oligonucleotide
agcuucucaacacuuagca

SEQ ID NO: 2070575 - RNA, 19 nt, Artificial Sequence
  Description of Artificial Sequence: Synthetic oligonucleotide
uuagaugacacuucaccuc

SEQ ID NO: 2070576 - RNA, 19 nt, Artificial Sequence
  Description of Artificial Sequence: Synthetic oligonucleotide
ugacucuagccaaauagcu

SEQ ID NO: 2070577 - RNA, 19 nt, Artificial Sequence
  Description of Artificial Sequence: Synthetic oligonucleotide
aacguggguacaaacuuac

SEQ ID NO: 2070578 - RNA, 19 nt, Artificial Sequence
  Description of Artificial Sequence: Synthetic oligonucleotide
uuucugccguuucagagug

SEQ ID NO: 2070579 - RNA, 19 nt, Artificial Sequence
  Description of Artificial Sequence: Synthetic oligonucleotide
cacaggaucuccagaaacg

SEQ ID NO: 2070580 - RNA, 19 nt, Artificial Sequence
  Description of Artificial Sequence: Synthetic oligonucleotide
ucaacacuuagcaaccuau

SEQ ID NO: 2070581 - RNA, 19 nt, Artificial Sequence
  Description of Artificial Sequence: Synthetic oligonucleotide
uuuaacaaugugcucugau

SEQ ID NO: 2070582 - RNA, 19 nt, Artificial Sequence
  Description of Artificial Sequence: Synthetic oligonucleotide
ugggucagauacagaaugg

SEQ ID NO: 2070583 - RNA, 19 nt, Artificial Sequence
  Description of Artificial Sequence: Synthetic oligonucleotide
uaccggaucugcucuaugg

SEQ ID NO: 2070584 - RNA, 19 nt, Artificial Sequence
  Description of Artificial Sequence: Synthetic oligonucleotide
uuggcaacuucaaaucuac

SEQ ID NO: 2070585 - RNA, 19 nt, Artificial Sequence
  Description of Artificial Sequence: Synthetic oligonucleotide
acguaaauaccggaucugc

SEQ ID NO: 2070586 - RNA, 19 nt, Artificial Sequence
  Description of Artificial Sequence: Synthetic oligonucleotide
aagaggcucaggguaagcg

SEQ ID NO: 2070587 - RNA, 19 nt, Artificial Sequence
  Description of Artificial Sequence: Synthetic oligonucleotide
cugacucuagccaaauagc

SEQ ID NO: 2070588 - RNA, 19 nt, Artificial Sequence
  Description of Artificial Sequence: Synthetic oligonucleotide
ucccaugucaguguucugg

SEQ ID NO: 2070589 - RNA, 19 nt, Artificial Sequence
  Description of Artificial Sequence: Synthetic oligonucleotide
cacauccuagccuugauuc

SEQ ID NO: 2070590 - RNA, 19 nt, Artificial Sequence
  Description of Artificial Sequence: Synthetic oligonucleotide
aacaucggugcugacauca

SEQ ID NO: 2070591 - RNA, 19 nt, Artificial Sequence
  Description of Artificial Sequence: Synthetic oligonucleotide
cuuacguaaauaccggauc

SEQ ID NO: 2070592 - RNA, 19 nt, Artificial Sequence
  Description of Artificial Sequence: Synthetic oligonucleotide
cacaggguuccaaugaggc

SEQ ID NO: 2070593 - RNA, 19 nt, Artificial Sequence
  Description of Artificial Sequence: Synthetic oligonucleotide
accuuggauucuuuuaguc

SEQ ID NO: 2070594 - RNA, 19 nt, Artificial Sequence
  Description of Artificial Sequence: Synthetic oligonucleotide
ucuggcuauuagaugacac

SEQ ID NO: 2070595 - RNA, 19 nt, Artificial Sequence
  Description of Artificial Sequence: Synthetic oligonucleotide
uguuggcaacuucaaaucu

SEQ ID NO: 2070596 - RNA, 19 nt, Artificial Sequence
  Description of Artificial Sequence: Synthetic oligonucleotide
uuuucugccguuucagagu

SEQ ID NO: 2070597 - RNA, 19 nt, Artificial Sequence
  Description of Artificial Sequence: Synthetic oligonucleotide
gacacgaccgccaaacaag

SEQ ID NO: 2070598 - RNA, 19 nt, Artificial Sequence
  Description of Artificial Sequence: Synthetic oligonucleotide
agccaaauagcuccuccac

SEQ ID NO: 2070599 - RNA, 19 nt, Artificial Sequence
  Description of Artificial Sequence: Synthetic oligonucleotide
ugcucuauggcuucccaug

SEQ ID NO: 2070600 - RNA, 19 nt, Artificial Sequence
  Description of Artificial Sequence: Synthetic oligonucleotide
agaaauguuggcaacuuca

SEQ ID NO: 2070601 - RNA, 19 nt, Artificial Sequence
  Description of Artificial Sequence: Synthetic oligonucleotide
uccaacguggguacaaacu

SEQ ID NO: 2070602 - RNA, 19 nt, Artificial Sequence
  Description of Artificial Sequence: Synthetic oligonucleotide
agacucaaauucuguagag

SEQ ID NO: 2070603 - RNA, 19 nt, Artificial Sequence
  Description of Artificial Sequence: Synthetic oligonucleotide
gcaacuucaaaucuacuug

SEQ ID NO: 2070604 - RNA, 19 nt, Artificial Sequence
  Description of Artificial Sequence: Synthetic oligonucleotide
ugcaaauuccuuacguaaa

SEQ ID NO: 2070605 - RNA, 19 nt, Artificial Sequence
  Description of Artificial Sequence: Synthetic oligonucleotide
uuaacaaugugcucugauu

SEQ ID NO: 2070606 - RNA, 19 nt, Artificial Sequence
  Description of Artificial Sequence: Synthetic oligonucleotide
accuggagccuccauuugc

SEQ ID NO: 2070607 - RNA, 19 nt, Artificial Sequence
  Description of Artificial Sequence: Synthetic oligonucleotide
agugucugacccuaguacu

SEQ ID NO: 2070608 - RNA, 19 nt, Artificial Sequence
  Description of Artificial Sequence: Synthetic oligonucleotide
ccuaguacuuuuaacaaug

SEQ ID NO: 2070609 - RNA, 19 nt, Artificial Sequence
  Description of Artificial Sequence: Synthetic oligonucleotide
aaauguuggcaacuucaaa

SEQ ID NO: 2070610 - RNA, 19 nt, Artificial Sequence
  Description of Artificial Sequence: Synthetic oligonucleotide
gaaacguaaacccagcuuu

SEQ ID NO: 2070611 - RNA, 19 nt, Artificial Sequence
  Description of Artificial Sequence: Synthetic oligonucleotide
guagaggaaguucccauug

SEQ ID NO: 2070612 - RNA, 19 nt, Artificial Sequence
  Description of Artificial Sequence: Synthetic oligonucleotide
aguuucugcuccaacgugg

SEQ ID NO: 2070613 - RNA, 19 nt, Artificial Sequence
  Description of Artificial Sequence: Synthetic oligonucleotide
ugugcugugagugucugac

SEQ ID NO: 2070614 - RNA, 19 nt, Artificial Sequence
  Description of Artificial Sequence: Synthetic oligonucleotide
auacagaauggccugcacu

SEQ ID NO: 2070615 - RNA, 19 nt, Artificial Sequence
  Description of Artificial Sequence: Synthetic oligonucleotide
ugauucuggcuauuagaug

SEQ ID NO: 2070616 - RNA, 19 nt, Artificial Sequence
  Description of Artificial Sequence: Synthetic oligonucleotide
aaccugggaacugaccagg

SEQ ID NO: 2070617 - RNA, 19 nt, Artificial Sequence
  Description of Artificial Sequence: Synthetic oligonucleotide
ucucgaaaagccaggccca

SEQ ID NO: 2070618 - RNA, 19 nt, Artificial Sequence
  Description of Artificial Sequence: Synthetic oligonucleotide
cuuacuucagaagucugac

SEQ ID NO: 2070619 - RNA, 19 nt, Artificial Sequence
  Description of Artificial Sequence: Synthetic oligonucleotide
augagauuuagagccacag

SEQ ID NO: 2070620 - RNA, 19 nt, Artificial Sequence
  Description of Artificial Sequence: Synthetic oligonucleotide
gaauggccugcacugagug

SEQ ID NO: 2070621 - RNA, 19 nt, Artificial Sequence
  Description of Artificial Sequence: Synthetic oligonucleotide
aagaccuucugauccugcu

SEQ ID NO: 2070622 - RNA, 19 nt, Artificial Sequence
  Description of Artificial Sequence: Synthetic oligonucleotide
uuagaaucacugguggugu

SEQ ID NO: 2070623 - RNA, 19 nt, Artificial Sequence
  Description of Artificial Sequence: Synthetic oligonucleotide
gauaacaucggugcugaca

SEQ ID NO: 2070624 - RNA, 19 nt, Artificial Sequence
  Description of Artificial Sequence: Synthetic oligonucleotide
ucucucugaugacccacgg

SEQ ID NO: 2070625 - RNA, 19 nt, Artificial Sequence
  Description of Artificial Sequence: Synthetic oligonucleotide
ugggaacugaccaggacuc

SEQ ID NO: 2070626 - RNA, 19 nt, Artificial Sequence
  Description of Artificial Sequence: Synthetic oligonucleotide
cuagccaaauagcuccucc

SEQ ID NO: 2070627 - RNA, 19 nt, Artificial Sequence
  Description of Artificial Sequence: Synthetic oligonucleotide
aaccuuggauucuuuuagu

SEQ ID NO: 2070628 - RNA, 19 nt, Artificial Sequence
  Description of Artificial Sequence: Synthetic oligonucleotide
augacacuucaccuccugg

SEQ ID NO: 2070629 - RNA, 19 nt, Artificial Sequence
  Description of Artificial Sequence: Synthetic oligonucleotide
agaggaaguucccauugcu

SEQ ID NO: 2070630 - RNA, 19 nt, Artificial Sequence
  Description of Artificial Sequence: Synthetic oligonucleotide
ucggugcugacaucaaagc

SEQ ID NO: 2070631 - RNA, 19 nt, Artificial Sequence
  Description of Artificial Sequence: Synthetic oligonucleotide
cauaugcagaaauguuggc

SEQ ID NO: 2070632 - RNA, 19 nt, Artificial Sequence
  Description of Artificial Sequence: Synthetic oligonucleotide
ugaguggcuucacaggauc

SEQ ID NO: 2070633 - RNA, 19 nt, Artificial Sequence
  Description of Artificial Sequence: Synthetic oligonucleotide
ccaaauagcuccuccaccc

SEQ ID NO: 2070634 - RNA, 19 nt, Artificial Sequence
  Description of Artificial Sequence: Synthetic oligonucleotide
agaaacguaaacccagcuu

SEQ ID NO: 2070635 - RNA, 19 nt, Artificial Sequence
  Description of Artificial Sequence: Synthetic oligonucleotide
agcaaccuaucccugucag

SEQ ID NO: 2070636 - RNA, 19 nt, Artificial Sequence
  Description of Artificial Sequence: Synthetic oligonucleotide
aagcaacaaggaugaauga

SEQ ID NO: 2070637 - RNA, 19 nt, Artificial Sequence
  Description of Artificial Sequence: Synthetic oligonucleotide
gucgcgaacccacagcgag

SEQ ID NO: 2070638 - RNA, 19 nt, Artificial Sequence
  Description of Artificial Sequence: Synthetic oligonucleotide
aaccuaucccugucagcuc

SEQ ID NO: 2070639 - RNA, 19 nt, Artificial Sequence
  Description of Artificial Sequence: Synthetic oligonucleotide
cagcaucucgaaaagccag

SEQ ID NO: 2070640 - RNA, 19 nt, Artificial Sequence
  Description of Artificial Sequence: Synthetic oligonucleotide
ucugcuccaacguggguac

SEQ ID NO: 2070641 - RNA, 19 nt, Artificial Sequence
  Description of Artificial Sequence: Synthetic oligonucleotide
cuuggauucuuuuaguccu

SEQ ID NO: 2070642 - RNA, 19 nt, Artificial Sequence
  Description of Artificial Sequence: Synthetic oligonucleotide
guacuuuuaacaaugugcu

SEQ ID NO: 2070643 - RNA, 19 nt, Artificial Sequence
  Description of Artificial Sequence: Synthetic oligonucleotide
ugccguuucagagugcucu

SEQ ID NO: 2070644 - RNA, 19 nt, Artificial Sequence
  Description of Artificial Sequence: Synthetic oligonucleotide
gaagucugacucuagccaa

SEQ ID NO: 2070645 - RNA, 19 nt, Artificial Sequence
  Description of Artificial Sequence: Synthetic oligonucleotide
uggguacaaacuuacuuuu

SEQ ID NO: 2070646 - RNA, 19 nt, Artificial Sequence
  Description of Artificial Sequence: Synthetic oligonucleotide
agccuugauucuuccaaag

SEQ ID NO: 2070647 - RNA, 19 nt, Artificial Sequence
  Description of Artificial Sequence: Synthetic oligonucleotide
agcacaaagcuuucuucca

SEQ ID NO: 2070648 - RNA, 19 nt, Artificial Sequence
  Description of Artificial Sequence: Synthetic oligonucleotide
uucugauaacaucggugcu

SEQ ID NO: 2070649 - RNA, 19 nt, Artificial Sequence
  Description of Artificial Sequence: Synthetic oligonucleotide
cuauuagaugacacuucac

SEQ ID NO: 2070650 - RNA, 19 nt, Artificial Sequence
  Description of Artificial Sequence: Synthetic oligonucleotide
gaugacacuucaccuccug

SEQ ID NO: 2070651 - RNA, 19 nt, Artificial Sequence
  Description of Artificial Sequence: Synthetic oligonucleotide
uucugugcagcugugcugu

SEQ ID NO: 2070652 - RNA, 19 nt, Artificial Sequence
  Description of Artificial Sequence: Synthetic oligonucleotide
uuccaaugaggcuuacuuc

SEQ ID NO: 2070653 - RNA, 19 nt, Artificial Sequence
  Description of Artificial Sequence: Synthetic oligonucleotide
acucugcaaauuccuuacg

SEQ ID NO: 2070654 - RNA, 19 nt, Artificial Sequence
  Description of Artificial Sequence: Synthetic oligonucleotide
aucggugcugacaucaaag

SEQ ID NO: 2070655 - RNA, 19 nt, Artificial Sequence
  Description of Artificial Sequence: Synthetic oligonucleotide
uagccaaauagcuccucca

SEQ ID NO: 2070656 - RNA, 19 nt, Artificial Sequence
  Description of Artificial Sequence: Synthetic oligonucleotide
uccuuacguaaauaccgga

SEQ ID NO: 2070657 - RNA, 19 nt, Artificial Sequence
  Description of Artificial Sequence: Synthetic oligonucleotide
ucaguguucuggguggagc

SEQ ID NO: 2070658 - RNA, 19 nt, Artificial Sequence
  Description of Artificial Sequence: Synthetic oligonucleotide
acccuaguacuuuuaacaa

SEQ ID NO: 2070659 - RNA, 19 nt, Artificial Sequence
  Description of Artificial Sequence: Synthetic oligonucleotide
uuacuucagaagucugacu

SEQ ID NO: 2070660 - RNA, 19 nt, Artificial Sequence
  Description of Artificial Sequence: Synthetic oligonucleotide
ugacccuaguacuuuuaac

SEQ ID NO: 2070661 - RNA, 19 nt, Artificial Sequence
  Description of Artificial Sequence: Synthetic oligonucleotide
ccuuggauucuuuuagucc

SEQ ID NO: 2070662 - RNA, 19 nt, Artificial Sequence
  Description of Artificial Sequence: Synthetic oligonucleotide
ugcagaaauguuggcaacu

SEQ ID NO: 2070663 - RNA, 19 nt, Artificial Sequence
  Description of Artificial Sequence: Synthetic oligonucleotide
ugacccacggcugcagugg

SEQ ID NO: 2070664 - RNA, 19 nt, Artificial Sequence
  Description of Artificial Sequence: Synthetic oligonucleotide
ucaggguaagcgccauugc

SEQ ID NO: 2070665 - RNA, 19 nt, Artificial Sequence
  Description of Artificial Sequence: Synthetic oligonucleotide
ugagugucugacccuagua

SEQ ID NO: 2070666 - RNA, 19 nt, Artificial Sequence
  Description of Artificial Sequence: Synthetic oligonucleotide
uacguaaauaccggaucug

SEQ ID NO: 2070667 - RNA, 19 nt, Artificial Sequence
  Description of Artificial Sequence: Synthetic oligonucleotide
gaucuccagaaacguaaac

SEQ ID NO: 2070668 - RNA, 19 nt, Artificial Sequence
  Description of Artificial Sequence: Synthetic oligonucleotide
cugcaaauuccuuacguaa

SEQ ID NO: 2070669 - RNA, 19 nt, Artificial Sequence
  Description of Artificial Sequence: Synthetic oligonucleotide
uguagaggaaguucccauu

SEQ ID NO: 2070670 - RNA, 19 nt, Artificial Sequence
  Description of Artificial Sequence: Synthetic oligonucleotide
accgccaaacaagaggcuc

SEQ ID NO: 2070671 - RNA, 19 nt, Artificial Sequence
  Description of Artificial Sequence: Synthetic oligonucleotide
gaggaaguucccauugcug

SEQ ID NO: 2070672 - RNA, 19 nt, Artificial Sequence
  Description of Artificial Sequence: Synthetic oligonucleotide
ucugccguuucagagugcu

SEQ ID NO: 2070673 - RNA, 19 nt, Artificial Sequence
  Description of Artificial Sequence: Synthetic oligonucleotide
cagagugcucuccaccucc

SEQ ID NO: 2070674 - RNA, 19 nt, Artificial Sequence
  Description of Artificial Sequence: Synthetic oligonucleotide
aacugaccaggacucugca

SEQ ID NO: 2070675 - RNA, 19 nt, Artificial Sequence
  Description of Artificial Sequence: Synthetic oligonucleotide
gcuauuagaugacacuuca

SEQ ID NO: 2070676 - RNA, 19 nt, Artificial Sequence
  Description of Artificial Sequence: Synthetic oligonucleotide
uggcuauuagaugacacuu

SEQ ID NO: 2070677 - RNA, 19 nt, Artificial Sequence
  Description of Artificial Sequence: Synthetic oligonucleotide
uacuuuuaacaaugugcuc

SEQ ID NO: 2070678 - RNA, 19 nt, Artificial Sequence
  Description of Artificial Sequence: Synthetic oligonucleotide
acagcgagcaacagcggcg

SEQ ID NO: 2070679 - RNA, 19 nt, Artificial Sequence
  Description of Artificial Sequence: Synthetic oligonucleotide
cuagccuugauucuuccaa

SEQ ID NO: 2070680 - RNA, 19 nt, Artificial Sequence
  Description of Artificial Sequence: Synthetic oligonucleotide
cuauggcuucccaugucag

SEQ ID NO: 2070681 - RNA, 19 nt, Artificial Sequence
  Description of Artificial Sequence: Synthetic oligonucleotide
ucuggguggagcaccugga

SEQ ID NO: 2070682 - RNA, 19 nt, Artificial Sequence
  Description of Artificial Sequence: Synthetic oligonucleotide
ucgaauuuucuggaauuuc

SEQ ID NO: 2070683 - RNA, 19 nt, Artificial Sequence
  Description of Artificial Sequence: Synthetic oligonucleotide
acaaugugcucugauucug

SEQ ID NO: 2070684 - RNA, 19 nt, Artificial Sequence
  Description of Artificial Sequence: Synthetic oligonucleotide
aauagcuccuccacccaca

SEQ ID NO: 2070685 - RNA, 19 nt, Artificial Sequence
  Description of Artificial Sequence: Synthetic oligonucleotide
agauuuagagccacagggu

SEQ ID NO: 2070686 - RNA, 19 nt, Artificial Sequence
  Description of Artificial Sequence: Synthetic oligonucleotide
aaguucuggucaccuggcu

SEQ ID NO: 2070687 - RNA, 19 nt, Artificial Sequence
  Description of Artificial Sequence: Synthetic oligonucleotide
gaacugaccaggacucugc

SEQ ID NO: 2070688 - RNA, 19 nt, Artificial Sequence
  Description of Artificial Sequence: Synthetic oligonucleotide
aaugagauuuagagccaca

SEQ ID NO: 2070689 - RNA, 19 nt, Artificial Sequence
  Description of Artificial Sequence: Synthetic oligonucleotide
cacagcgagcaacagcggc

SEQ ID NO: 2070690 - RNA, 19 nt, Artificial Sequence
  Description of Artificial Sequence: Synthetic oligonucleotide
ccuucugauaacaucggug

SEQ ID NO: 2070691 - RNA, 19 nt, Artificial Sequence
  Description of Artificial Sequence: Synthetic oligonucleotide
aacagcggcgcggacacga

SEQ ID NO: 2070692 - RNA, 19 nt, Artificial Sequence
  Description of Artificial Sequence: Synthetic oligonucleotide
ucaaaucuacuugcccagc

SEQ ID NO: 2070693 - RNA, 19 nt, Artificial Sequence
  Description of Artificial Sequence: Synthetic oligonucleotide
uguucuggguggagcaccu

SEQ ID NO: 2070694 - RNA, 19 nt, Artificial Sequence
  Description of Artificial Sequence: Synthetic oligonucleotide
ugauccugcuucaguuucu

SEQ ID NO: 2070695 - RNA, 19 nt, Artificial Sequence
  Description of Artificial Sequence: Synthetic oligonucleotide
gauuuagagccacaggguu

SEQ ID NO: 2070696 - RNA, 19 nt, Artificial Sequence
  Description of Artificial Sequence: Synthetic oligonucleotide
acauccuagccuugauucu

SEQ ID NO: 2070697 - RNA, 19 nt, Artificial Sequence
  Description of Artificial Sequence: Synthetic oligonucleotide
agcaucucgaaaagccagg

SEQ ID NO: 2070698 - RNA, 19 nt, Artificial Sequence
  Description of Artificial Sequence: Synthetic oligonucleotide
gacucuagccaaauagcuc

SEQ ID NO: 2070699 - RNA, 19 nt, Artificial Sequence
  Description of Artificial Sequence: Synthetic oligonucleotide
gaaauguuggcaacuucaa

SEQ ID NO: 2070700 - RNA, 19 nt, Artificial Sequence
  Description of Artificial Sequence: Synthetic oligonucleotide
cagaauggccugcacugag

SEQ ID NO: 2070701 - RNA, 19 nt, Artificial Sequence
  Description of Artificial Sequence: Synthetic oligonucleotide
gggucgcgaacccacagcg

SEQ ID NO: 2070702 - RNA, 19 nt, Artificial Sequence
  Description of Artificial Sequence: Synthetic oligonucleotide
ucuguacuacuuugcugcu

SEQ ID NO: 2070703 - RNA, 19 nt, Artificial Sequence
  Description of Artificial Sequence: Synthetic oligonucleotide
uagcaaccuaucccuguca

SEQ ID NO: 2070704 - RNA, 19 nt, Artificial Sequence
  Description of Artificial Sequence: Synthetic oligonucleotide
cuucugccaaccugggaac

SEQ ID NO: 2070705 - RNA, 19 nt, Artificial Sequence
  Description of Artificial Sequence: Synthetic oligonucleotide
ugggucgcgaacccacagc

SEQ ID NO: 2070706 - RNA, 19 nt, Artificial Sequence
  Description of Artificial Sequence: Synthetic oligonucleotide
uaucccugucagcucuuug

SEQ ID NO: 2070707 - RNA, 19 nt, Artificial Sequence
  Description of Artificial Sequence: Synthetic oligonucleotide
agagccacaggguuccaau

SEQ ID NO: 2070708 - RNA, 19 nt, Artificial Sequence
  Description of Artificial Sequence: Synthetic oligonucleotide
uucgaauuuucuggaauuu

SEQ ID NO: 2070709 - RNA, 19 nt, Artificial Sequence
  Description of Artificial Sequence: Synthetic oligonucleotide
aaauaccggaucugcucua

SEQ ID NO: 2070710 - RNA, 19 nt, Artificial Sequence
  Description of Artificial Sequence: Synthetic oligonucleotide
guuccaaugaggcuuacuu

SEQ ID NO: 2070711 - RNA, 19 nt, Artificial Sequence
  Description of Artificial Sequence: Synthetic oligonucleotide
uccaaagcagccgaucaua

SEQ ID NO: 2070712 - RNA, 19 nt, Artificial Sequence
  Description of Artificial Sequence: Synthetic oligonucleotide
gucaaagaacucacgcccc

SEQ ID NO: 2070713 - RNA, 19 nt, Artificial Sequence
  Description of Artificial Sequence: Synthetic oligonucleotide
uagaaucacugguggugug

SEQ ID NO: 2070714 - RNA, 19 nt, Artificial Sequence
  Description of Artificial Sequence: Synthetic oligonucleotide
aguguucuggguggagcac

SEQ ID NO: 2070715 - RNA, 19 nt, Artificial Sequence
  Description of Artificial Sequence: Synthetic oligonucleotide
ggucagauacagaauggcc

SEQ ID NO: 2070716 - RNA, 19 nt, Artificial Sequence
  Description of Artificial Sequence: Synthetic oligonucleotide
caagaccuucugauccugc

SEQ ID NO: 2070717 - RNA, 19 nt, Artificial Sequence
  Description of Artificial Sequence: Synthetic oligonucleotide
acaggguuccaaugaggcu

SEQ ID NO: 2070718 - RNA, 19 nt, Artificial Sequence
  Description of Artificial Sequence: Synthetic oligonucleotide
ucuuccaaagcagccgauc

SEQ ID NO: 2070719 - RNA, 19 nt, Artificial Sequence
  Description of Artificial Sequence: Synthetic oligonucleotide
gaggcuuacuucagaaguc

SEQ ID NO: 2070720 - RNA, 19 nt, Artificial Sequence
  Description of Artificial Sequence: Synthetic oligonucleotide
ccuugauucuuccaaagca

SEQ ID NO: 2070721 - RNA, 19 nt, Artificial Sequence
  Description of Artificial Sequence: Synthetic oligonucleotide
ggaaucgggguccggcucg

SEQ ID NO: 2070722 - RNA, 19 nt, Artificial Sequence
  Description of Artificial Sequence: Synthetic oligonucleotide
aauaccggaucugcucuau

SEQ ID NO: 2070723 - RNA, 19 nt, Artificial Sequence
  Description of Artificial Sequence: Synthetic oligonucleotide
augacccacggcugcagug

SEQ ID NO: 2070724 - RNA, 19 nt, Artificial Sequence
  Description of Artificial Sequence: Synthetic oligonucleotide
cacuuagcaaccuaucccu

SEQ ID NO: 2070725 - RNA, 19 nt, Artificial Sequence
  Description of Artificial Sequence: Synthetic oligonucleotide
aggcuuacuucagaagucu

SEQ ID NO: 2070726 - RNA, 19 nt, Artificial Sequence
  Description of Artificial Sequence: Synthetic oligonucleotide
cucugaugacccacggcug

SEQ ID NO: 2070727 - RNA, 19 nt, Artificial Sequence
  Description of Artificial Sequence: Synthetic oligonucleotide
agaaucacugguggugugu

SEQ ID NO: 2070728 - RNA, 19 nt, Artificial Sequence
  Description of Artificial Sequence: Synthetic oligonucleotide
cugauucuggcuauuagau

SEQ ID NO: 2070729 - RNA, 19 nt, Artificial Sequence
  Description of Artificial Sequence: Synthetic oligonucleotide
ucccagucggaaucggggu

SEQ ID NO: 2070730 - RNA, 19 nt, Artificial Sequence
  Description of Artificial Sequence: Synthetic oligonucleotide
cucucugaugacccacggc

SEQ ID NO: 2070731 - RNA, 19 nt, Artificial Sequence
  Description of Artificial Sequence: Synthetic oligonucleotide
cagaaauguuggcaacuuc

SEQ ID NO: 2070732 - RNA, 19 nt, Artificial Sequence
  Description of Artificial Sequence: Synthetic oligonucleotide
uccuagccuugauucuucc

SEQ ID NO: 2070733 - RNA, 19 nt, Artificial Sequence
  Description of Artificial Sequence: Synthetic oligonucleotide
ucugccaaccugggaacug

SEQ ID NO: 2070734 - RNA, 19 nt, Artificial Sequence
  Description of Artificial Sequence: Synthetic oligonucleotide
aucgggguccggcucgcgg

SEQ ID NO: 2070735 - RNA, 19 nt, Artificial Sequence
  Description of Artificial Sequence: Synthetic oligonucleotide
guggguacaaacuuacuuu

SEQ ID NO: 2070736 - RNA, 19 nt, Artificial Sequence
  Description of Artificial Sequence: Synthetic oligonucleotide
caucaaagccuucugccaa

SEQ ID NO: 2070737 - RNA, 19 nt, Artificial Sequence
  Description of Artificial Sequence: Synthetic oligonucleotide
cugauaacaucggugcuga

SEQ ID NO: 2070738 - RNA, 19 nt, Artificial Sequence
  Description of Artificial Sequence: Synthetic oligonucleotide
aaacguaaacccagcuuuu

SEQ ID NO: 2070739 - RNA, 19 nt, Artificial Sequence
  Description of Artificial Sequence: Synthetic oligonucleotide
cagccgaucauaugcagaa

SEQ ID NO: 2070740 - RNA, 19 nt, Artificial Sequence
  Description of Artificial Sequence: Synthetic oligonucleotide
agcggcgcggacacgaccg

SEQ ID NO: 2070741 - RNA, 19 nt, Artificial Sequence
  Description of Artificial Sequence: Synthetic oligonucleotide
cuccaacguggguacaaac

SEQ ID NO: 2070742 - RNA, 19 nt, Artificial Sequence
  Description of Artificial Sequence: Synthetic oligonucleotide
cauugcugucaaagaacuc

SEQ ID NO: 2070743 - RNA, 19 nt, Artificial Sequence
  Description of Artificial Sequence: Synthetic oligonucleotide
aagcagccgaucauaugca

SEQ ID NO: 2070744 - RNA, 19 nt, Artificial Sequence
  Description of Artificial Sequence: Synthetic oligonucleotide
uggagcgcccgcuccuccg

SEQ ID NO: 2070745 - RNA, 19 nt, Artificial Sequence
  Description of Artificial Sequence: Synthetic oligonucleotide
ucggaaucgggguccggcu

SEQ ID NO: 2070746 - RNA, 19 nt, Artificial Sequence
  Description of Artificial Sequence: Synthetic oligonucleotide
uggcaacuucaaaucuacu

SEQ ID NO: 2070747 - RNA, 19 nt, Artificial Sequence
  Description of Artificial Sequence: Synthetic oligonucleotide
ucgcgaacccacagcgagc

SEQ ID NO: 2070748 - RNA, 19 nt, Artificial Sequence
  Description of Artificial Sequence: Synthetic oligonucleotide
gaacccacagcgagcaaca

SEQ ID NO: 2070749 - RNA, 19 nt, Artificial Sequence
  Description of Artificial Sequence: Synthetic oligonucleotide
ucgggguccggcucgcggc

SEQ ID NO: 2070750 - RNA, 19 nt, Artificial Sequence
  Description of Artificial Sequence: Synthetic oligonucleotide
cgaccgccaaacaagaggc

SEQ ID NO: 2070751 - RNA, 19 nt, Artificial Sequence
  Description of Artificial Sequence: Synthetic oligonucleotide
cagauacagaauggccugc

SEQ ID NO: 2070752 - RNA, 19 nt, Artificial Sequence
  Description of Artificial Sequence: Synthetic oligonucleotide
caaccuaucccugucagcu

SEQ ID NO: 2070753 - RNA, 19 nt, Artificial Sequence
  Description of Artificial Sequence: Synthetic oligonucleotide
ccagaaacguaaacccagc

SEQ ID NO: 2070754 - RNA, 19 nt, Artificial Sequence
  Description of Artificial Sequence: Synthetic oligonucleotide
ccaggacucugcaaauucc

SEQ ID NO: 2070755 - RNA, 19 nt, Artificial Sequence
  Description of Artificial Sequence: Synthetic oligonucleotide
cuggguggagcaccuggag

SEQ ID NO: 2070756 - RNA, 19 nt, Artificial Sequence
  Description of Artificial Sequence: Synthetic oligonucleotide
gucggaaucgggguccggc

SEQ ID NO: 2070757 - RNA, 19 nt, Artificial Sequence
  Description of Artificial Sequence: Synthetic oligonucleotide
uuucugcuccaacgugggu

SEQ ID NO: 2070758 - RNA, 19 nt, Artificial Sequence
  Description of Artificial Sequence: Synthetic oligonucleotide
ucucaacacuuagcaaccu

SEQ ID NO: 2070759 - RNA, 19 nt, Artificial Sequence
  Description of Artificial Sequence: Synthetic oligonucleotide
auccuagccuugauucuuc

SEQ ID NO: 2070760 - RNA, 19 nt, Artificial Sequence
  Description of Artificial Sequence: Synthetic oligonucleotide
cacaaagcuuucuuccaaa

SEQ ID NO: 2070761 - RNA, 19 nt, Artificial Sequence
  Description of Artificial Sequence: Synthetic oligonucleotide
ccgaucauaugcagaaaug

SEQ ID NO: 2070762 - RNA, 19 nt, Artificial Sequence
  Description of Artificial Sequence: Synthetic oligonucleotide
guaagcacaaagcuuucuu

SEQ ID NO: 2070763 - RNA, 19 nt, Artificial Sequence
  Description of Artificial Sequence: Synthetic oligonucleotide
caguguucuggguggagca

SEQ ID NO: 2070764 - RNA, 19 nt, Artificial Sequence
  Description of Artificial Sequence: Synthetic oligonucleotide
cuggcagcagcaguggguc

SEQ ID NO: 2070765 - RNA, 19 nt, Artificial Sequence
  Description of Artificial Sequence: Synthetic oligonucleotide
cacggcugcagugguaagc

SEQ ID NO: 2070766 - RNA, 19 nt, Artificial Sequence
  Description of Artificial Sequence: Synthetic oligonucleotide
auaccggaucugcucuaug

SEQ ID NO: 2070767 - RNA, 19 nt, Artificial Sequence
  Description of Artificial Sequence: Synthetic oligonucleotide
uggagccuccauuugccuu

SEQ ID NO: 2070768 - RNA, 19 nt, Artificial Sequence
  Description of Artificial Sequence: Synthetic oligonucleotide
ccaaccugggaacugacca

SEQ ID NO: 2070769 - RNA, 19 nt, Artificial Sequence
  Description of Artificial Sequence: Synthetic oligonucleotide
uucuuccaaagcagccgau

SEQ ID NO: 2070770 - RNA, 19 nt, Artificial Sequence
  Description of Artificial Sequence: Synthetic oligonucleotide
ggcuucacaggaucuccag

SEQ ID NO: 2070771 - RNA, 19 nt, Artificial Sequence
  Description of Artificial Sequence: Synthetic oligonucleotide
cuuuagaaucacugguggu

SEQ ID NO: 2070772 - RNA, 19 nt, Artificial Sequence
  Description of Artificial Sequence: Synthetic oligonucleotide
aagucugacucuagccaaa

SEQ ID NO: 2070773 - RNA, 19 nt, Artificial Sequence
  Description of Artificial Sequence: Synthetic oligonucleotide
acuuagcaaccuaucccug

SEQ ID NO: 2070774 - RNA, 19 nt, Artificial Sequence
  Description of Artificial Sequence: Synthetic oligonucleotide
cuuagcaaccuaucccugu

SEQ ID NO: 2070775 - RNA, 19 nt, Artificial Sequence
  Description of Artificial Sequence: Synthetic oligonucleotide
caaauagcuccuccaccca

SEQ ID NO: 2070776 - RNA, 19 nt, Artificial Sequence
  Description of Artificial Sequence: Synthetic oligonucleotide
cacgaccgccaaacaagag

SEQ ID NO: 2070777 - RNA, 19 nt, Artificial Sequence
  Description of Artificial Sequence: Synthetic oligonucleotide
caaugaggcuuacuucaga

SEQ ID NO: 2070778 - RNA, 19 nt, Artificial Sequence
  Description of Artificial Sequence: Synthetic oligonucleotide
aacccacagcgagcaacag

SEQ ID NO: 2070779 - RNA, 19 nt, Artificial Sequence
  Description of Artificial Sequence: Synthetic oligonucleotide
ugucugacccuaguacuuu

SEQ ID NO: 2070780 - RNA, 19 nt, Artificial Sequence
  Description of Artificial Sequence: Synthetic oligonucleotide
cuucgaauuuucuggaauu

SEQ ID NO: 2070781 - RNA, 19 nt, Artificial Sequence
  Description of Artificial Sequence: Synthetic oligonucleotide
ugccaaccugggaacugac

SEQ ID NO: 2070782 - RNA, 19 nt, Artificial Sequence
  Description of Artificial Sequence: Synthetic oligonucleotide
gcaacagcggcgcggacac

SEQ ID NO: 2070783 - RNA, 19 nt, Artificial Sequence
  Description of Artificial Sequence: Synthetic oligonucleotide
uuccaaaccuuggauucuu

SEQ ID NO: 2070784 - RNA, 19 nt, Artificial Sequence
  Description of Artificial Sequence: Synthetic oligonucleotide
cugggucgcgaacccacag

SEQ ID NO: 2070785 - RNA, 19 nt, Artificial Sequence
  Description of Artificial Sequence: Synthetic oligonucleotide
ccuucugccaaccugggaa

SEQ ID NO: 2070786 - RNA, 19 nt, Artificial Sequence
  Description of Artificial Sequence: Synthetic oligonucleotide
ucuagccaaauagcuccuc

SEQ ID NO: 2070787 - RNA, 19 nt, Artificial Sequence
  Description of Artificial Sequence: Synthetic oligonucleotide
ccaaugaggcuuacuucag

SEQ ID NO: 2070788 - RNA, 19 nt, Artificial Sequence
  Description of Artificial Sequence: Synthetic oligonucleotide
cucgaaaagccaggcccag

SEQ ID NO: 2070789 - RNA, 19 nt, Artificial Sequence
  Description of Artificial Sequence: Synthetic oligonucleotide
ugcuccaacguggguacaa

SEQ ID NO: 2070790 - RNA, 19 nt, Artificial Sequence
  Description of Artificial Sequence: Synthetic oligonucleotide
ggaacugaccaggacucug

SEQ ID NO: 2070791 - RNA, 19 nt, Artificial Sequence
  Description of Artificial Sequence: Synthetic oligonucleotide
gaucugcucuauggcuucc

SEQ ID NO: 2070792 - RNA, 19 nt, Artificial Sequence
  Description of Artificial Sequence: Synthetic oligonucleotide
ccucuguacuacuuugcug

SEQ ID NO: 2070793 - RNA, 19 nt, Artificial Sequence
  Description of Artificial Sequence: Synthetic oligonucleotide
agaauggccugcacugagu

SEQ ID NO: 2070794 - RNA, 19 nt, Artificial Sequence
  Description of Artificial Sequence: Synthetic oligonucleotide
ucgaaaagccaggcccaga

SEQ ID NO: 2070795 - RNA, 19 nt, Artificial Sequence
  Description of Artificial Sequence: Synthetic oligonucleotide
agugggucagauacagaau

SEQ ID NO: 2070796 - RNA, 19 nt, Artificial Sequence
  Description of Artificial Sequence: Synthetic oligonucleotide
acacgaccgccaaacaaga

SEQ ID NO: 2070797 - RNA, 19 nt, Artificial Sequence
  Description of Artificial Sequence: Synthetic oligonucleotide
uucugccguuucagagugc

SEQ ID NO: 2070798 - RNA, 19 nt, Artificial Sequence
  Description of Artificial Sequence: Synthetic oligonucleotide
cuguacuacuuugcugcug

SEQ ID NO: 2070799 - RNA, 19 nt, Artificial Sequence
  Description of Artificial Sequence: Synthetic oligonucleotide
uucugccaaccugggaacu

SEQ ID NO: 2070800 - RNA, 19 nt, Artificial Sequence
  Description of Artificial Sequence: Synthetic oligonucleotide
caaggaugaaugagauuua

SEQ ID NO: 2070801 - RNA, 19 nt, Artificial Sequence
  Description of Artificial Sequence: Synthetic oligonucleotide
ugauaacaucggugcugac

SEQ ID NO: 2070802 - RNA, 19 nt, Artificial Sequence
  Description of Artificial Sequence: Synthetic oligonucleotide
cgaaaagccaggcccagac

SEQ ID NO: 2070803 - RNA, 19 nt, Artificial Sequence
  Description of Artificial Sequence: Synthetic oligonucleotide
caaaucuacuugcccagcu

SEQ ID NO: 2070804 - RNA, 19 nt, Artificial Sequence
  Description of Artificial Sequence: Synthetic oligonucleotide
cugacccuaguacuuuuaa

SEQ ID NO: 2070805 - RNA, 19 nt, Artificial Sequence
  Description of Artificial Sequence: Synthetic oligonucleotide
ggacucugcaaauuccuua

SEQ ID NO: 2070806 - RNA, 19 nt, Artificial Sequence
  Description of Artificial Sequence: Synthetic oligonucleotide
ugcccagcugugucacagc

SEQ ID NO: 2070807 - RNA, 19 nt, Artificial Sequence
  Description of Artificial Sequence: Synthetic oligonucleotide
caacguggguacaaacuua

SEQ ID NO: 2070808 - RNA, 19 nt, Artificial Sequence
  Description of Artificial Sequence: Synthetic oligonucleotide
caaauuccuuacguaaaua

SEQ ID NO: 2070809 - RNA, 19 nt, Artificial Sequence
  Description of Artificial Sequence: Synthetic oligonucleotide
cucaacacuuagcaaccua

SEQ ID NO: 2070810 - RNA, 19 nt, Artificial Sequence
  Description of Artificial Sequence: Synthetic oligonucleotide
agcgagcaacagcggcgcg

SEQ ID NO: 2070811 - RNA, 19 nt, Artificial Sequence
  Description of Artificial Sequence: Synthetic oligonucleotide
ggcuauuagaugacacuuc

SEQ ID NO: 2070812 - RNA, 19 nt, Artificial Sequence
  Description of Artificial Sequence: Synthetic oligonucleotide
uucccaugucaguguucug

SEQ ID NO: 2070813 - RNA, 19 nt, Artificial Sequence
  Description of Artificial Sequence: Synthetic oligonucleotide
ggacacgaccgccaaacaa

SEQ ID NO: 2070814 - RNA, 19 nt, Artificial Sequence
  Description of Artificial Sequence: Synthetic oligonucleotide
uaacaucggugcugacauc

SEQ ID NO: 2070815 - RNA, 19 nt, Artificial Sequence
  Description of Artificial Sequence: Synthetic oligonucleotide
agucugacucuagccaaau

SEQ ID NO: 2070816 - RNA, 19 nt, Artificial Sequence
  Description of Artificial Sequence: Synthetic oligonucleotide
aaucgggguccggcucgcg

SEQ ID NO: 2070817 - RNA, 19 nt, Artificial Sequence
  Description of Artificial Sequence: Synthetic oligonucleotide
gucaguguucuggguggag

SEQ ID NO: 2070818 - RNA, 19 nt, Artificial Sequence
  Description of Artificial Sequence: Synthetic oligonucleotide
uggccugcacugaguggcu

SEQ ID NO: 2070819 - RNA, 19 nt, Artificial Sequence
  Description of Artificial Sequence: Synthetic oligonucleotide
uccggcucccagucggaau

SEQ ID NO: 2070820 - RNA, 19 nt, Artificial Sequence
  Description of Artificial Sequence: Synthetic oligonucleotide
gcaaauuccuuacguaaau

SEQ ID NO: 2070821 - RNA, 19 nt, Artificial Sequence
  Description of Artificial Sequence: Synthetic oligonucleotide
acuucaccuccuggcagca

SEQ ID NO: 2070822 - RNA, 19 nt, Artificial Sequence
  Description of Artificial Sequence: Synthetic oligonucleotide
cggugcugacaucaaagcc

SEQ ID NO: 2070823 - RNA, 19 nt, Artificial Sequence
  Description of Artificial Sequence: Synthetic oligonucleotide
uagagccacaggguuccaa

SEQ ID NO: 2070824 - RNA, 19 nt, Artificial Sequence
  Description of Artificial Sequence: Synthetic oligonucleotide
gcggacacgaccgccaaac

SEQ ID NO: 2070825 - RNA, 19 nt, Artificial Sequence
  Description of Artificial Sequence: Synthetic oligonucleotide
cagaaacguaaacccagcu

SEQ ID NO: 2070826 - RNA, 19 nt, Artificial Sequence
  Description of Artificial Sequence: Synthetic oligonucleotide
gaaucgggguccggcucgc

SEQ ID NO: 2070827 - RNA, 19 nt, Artificial Sequence
  Description of Artificial Sequence: Synthetic oligonucleotide
gcgagcaacagcggcgcgg

SEQ ID NO: 2070828 - RNA, 19 nt, Artificial Sequence
  Description of Artificial Sequence: Synthetic oligonucleotide
guguguuucugaagcucuc

SEQ ID NO: 2070829 - RNA, 19 nt, Artificial Sequence
  Description of Artificial Sequence: Synthetic oligonucleotide
caggguuccaaugaggcuu

SEQ ID NO: 2070830 - RNA, 19 nt, Artificial Sequence
  Description of Artificial Sequence: Synthetic oligonucleotide
ccagucggaaucggggucc

SEQ ID NO: 2070831 - RNA, 19 nt, Artificial Sequence
  Description of Artificial Sequence: Synthetic oligonucleotide
acccacauccuagccuuga

SEQ ID NO: 2070832 - RNA, 19 nt, Artificial Sequence
  Description of Artificial Sequence: Synthetic oligonucleotide
ggcccagacucaaauucug

SEQ ID NO: 2070833 - RNA, 19 nt, Artificial Sequence
  Description of Artificial Sequence: Synthetic oligonucleotide
caggaucuccagaaacgua

SEQ ID NO: 2070834 - RNA, 19 nt, Artificial Sequence
  Description of Artificial Sequence: Synthetic oligonucleotide
gccgaucauaugcagaaau

SEQ ID NO: 2070835 - RNA, 19 nt, Artificial Sequence
  Description of Artificial Sequence: Synthetic oligonucleotide
agaugacacuucaccuccu

SEQ ID NO: 2070836 - RNA, 19 nt, Artificial Sequence
  Description of Artificial Sequence: Synthetic oligonucleotide
cagucggaaucgggguccg

SEQ ID NO: 2070837 - RNA, 19 nt, Artificial Sequence
  Description of Artificial Sequence: Synthetic oligonucleotide
ggagcgcccgcuccuccgg

SEQ ID NO: 2070838 - RNA, 19 nt, Artificial Sequence
  Description of Artificial Sequence: Synthetic oligonucleotide
caucggugcugacaucaaa

SEQ ID NO: 2070839 - RNA, 19 nt, Artificial Sequence
  Description of Artificial Sequence: Synthetic oligonucleotide
gcugcagugguaagcacaa

SEQ ID NO: 2070840 - RNA, 19 nt, Artificial Sequence
  Description of Artificial Sequence: Synthetic oligonucleotide
cuccuccggcucccagucg

SEQ ID NO: 2070841 - RNA, 19 nt, Artificial Sequence
  Description of Artificial Sequence: Synthetic oligonucleotide
cugccaaccugggaacuga

SEQ ID NO: 2070842 - RNA, 19 nt, Artificial Sequence
  Description of Artificial Sequence: Synthetic oligonucleotide
uuagagccacaggguucca

SEQ ID NO: 2070843 - RNA, 19 nt, Artificial Sequence
  Description of Artificial Sequence: Synthetic oligonucleotide
agucggaaucgggguccgg

SEQ ID NO: 2070844 - RNA, 19 nt, Artificial Sequence
  Description of Artificial Sequence: Synthetic oligonucleotide
ccugggaacugaccaggac

SEQ ID NO: 2070845 - RNA, 19 nt, Artificial Sequence
  Description of Artificial Sequence: Synthetic oligonucleotide
cugugagugucugacccua

SEQ ID NO: 2070846 - RNA, 19 nt, Artificial Sequence
  Description of Artificial Sequence: Synthetic oligonucleotide
cacgcccugggucgcgaac

SEQ ID NO: 2070847 - RNA, 19 nt, Artificial Sequence
  Description of Artificial Sequence: Synthetic oligonucleotide
gucugacucuagccaaaua

SEQ ID NO: 2070848 - RNA, 19 nt, Artificial Sequence
  Description of Artificial Sequence: Synthetic oligonucleotide
cugccguuucagagugcuc

SEQ ID NO: 2070849 - RNA, 19 nt, Artificial Sequence
  Description of Artificial Sequence: Synthetic oligonucleotide
ccuuacguaaauaccggau

SEQ ID NO: 2070850 - RNA, 19 nt, Artificial Sequence
  Description of Artificial Sequence: Synthetic oligonucleotide
gcagccgaucauaugcaga

SEQ ID NO: 2070851 - RNA, 19 nt, Artificial Sequence
  Description of Artificial Sequence: Synthetic oligonucleotide
cuuccaaaccuuggauucu

SEQ ID NO: 2070852 - RNA, 19 nt, Artificial Sequence
  Description of Artificial Sequence: Synthetic oligonucleotide
ccgccaaacaagaggcuca

SEQ ID NO: 2070853 - RNA, 19 nt, Artificial Sequence
  Description of Artificial Sequence: Synthetic oligonucleotide
cucuagccaaauagcuccu

SEQ ID NO: 2070854 - RNA, 19 nt, Artificial Sequence
  Description of Artificial Sequence: Synthetic oligonucleotide
cccagacucaaauucugua

SEQ ID NO: 2070855 - RNA, 19 nt, Artificial Sequence
  Description of Artificial Sequence: Synthetic oligonucleotide
aggguuccaaugaggcuua

SEQ ID NO: 2070856 - RNA, 19 nt, Artificial Sequence
  Description of Artificial Sequence: Synthetic oligonucleotide
cugugcugugagugucuga

SEQ ID NO: 2070857 - RNA, 19 nt, Artificial Sequence
  Description of Artificial Sequence: Synthetic oligonucleotide
agccgaucauaugcagaaa

SEQ ID NO: 2070858 - RNA, 19 nt, Artificial Sequence
  Description of Artificial Sequence: Synthetic oligonucleotide
gccaaccugggaacugacc

SEQ ID NO: 2070859 - RNA, 19 nt, Artificial Sequence
  Description of Artificial Sequence: Synthetic oligonucleotide
gccuccauuugccuucgaa

SEQ ID NO: 2070860 - RNA, 19 nt, Artificial Sequence
  Description of Artificial Sequence: Synthetic oligonucleotide
ggaucuccagaaacguaaa

SEQ ID NO: 2070861 - RNA, 19 nt, Artificial Sequence
  Description of Artificial Sequence: Synthetic oligonucleotide
gcucuauggcuucccaugu

SEQ ID NO: 2070862 - RNA, 19 nt, Artificial Sequence
  Description of Artificial Sequence: Synthetic oligonucleotide
gguaagcacaaagcuuucu

SEQ ID NO: 2070863 - RNA, 19 nt, Artificial Sequence
  Description of Artificial Sequence: Synthetic oligonucleotide
ccacagcgagcaacagcgg

SEQ ID NO: 2070864 - RNA, 19 nt, Artificial Sequence
  Description of Artificial Sequence: Synthetic oligonucleotide
gccguuucagagugcucuc

SEQ ID NO: 2070865 - RNA, 19 nt, Artificial Sequence
  Description of Artificial Sequence: Synthetic oligonucleotide
cgaucauaugcagaaaugu

SEQ ID NO: 2070866 - RNA, 19 nt, Artificial Sequence
  Description of Artificial Sequence: Synthetic oligonucleotide
cugaguggcuucacaggau

SEQ ID NO: 2070867 - RNA, 19 nt, Artificial Sequence
  Description of Artificial Sequence: Synthetic oligonucleotide
cauccuagccuugauucuu

SEQ ID NO: 2070868 - RNA, 19 nt, Artificial Sequence
  Description of Artificial Sequence: Synthetic oligonucleotide
ccuucgaauuuucuggaau

SEQ ID NO: 2070869 - RNA, 19 nt, Artificial Sequence
  Description of Artificial Sequence: Synthetic oligonucleotide
gagcaacagcggcgcggac

SEQ ID NO: 2070870 - RNA, 19 nt, Artificial Sequence
  Description of Artificial Sequence: Synthetic oligonucleotide
ccaacguggguacaaacuu

SEQ ID NO: 2070871 - RNA, 19 nt, Artificial Sequence
  Description of Artificial Sequence: Synthetic oligonucleotide
ggcucccagucggaaucgg

SEQ ID NO: 2070872 - RNA, 19 nt, Artificial Sequence
  Description of Artificial Sequence: Synthetic oligonucleotide
gugucugacccuaguacuu

SEQ ID NO: 2070873 - RNA, 19 nt, Artificial Sequence
  Description of Artificial Sequence: Synthetic oligonucleotide
gacccacggcugcaguggu

SEQ ID NO: 2070874 - RNA, 19 nt, Artificial Sequence
  Description of Artificial Sequence: Synthetic oligonucleotide
cggcucgcggcccacgagg

SEQ ID NO: 2070875 - RNA, 19 nt, Artificial Sequence
  Description of Artificial Sequence: Synthetic oligonucleotide
cguaaauaccggaucugcu

SEQ ID NO: 2070876 - RNA, 19 nt, Artificial Sequence
  Description of Artificial Sequence: Synthetic oligonucleotide
gcugugagugucugacccu

SEQ ID NO: 2070877 - RNA, 19 nt, Artificial Sequence
  Description of Artificial Sequence: Synthetic oligonucleotide
caacagcggcgcggacacg

SEQ ID NO: 2070878 - RNA, 19 nt, Artificial Sequence
  Description of Artificial Sequence: Synthetic oligonucleotide
gaccgccaaacaagaggcu

SEQ ID NO: 2070879 - RNA, 19 nt, Artificial Sequence
  Description of Artificial Sequence: Synthetic oligonucleotide
cccuaguacuuuuaacaau

SEQ ID NO: 2070880 - RNA, 19 nt, Artificial Sequence
  Description of Artificial Sequence: Synthetic oligonucleotide
cguggguacaaacuuacuu

SEQ ID NO: 2070881 - RNA, 19 nt, Artificial Sequence
  Description of Artificial Sequence: Synthetic oligonucleotide
guccggcucgcggcccacg

SEQ ID NO: 2070882 - RNA, 19 nt, Artificial Sequence
  Description of Artificial Sequence: Synthetic oligonucleotide
ccaaagcagccgaucauau

SEQ ID NO: 2070883 - RNA, 19 nt, Artificial Sequence
  Description of Artificial Sequence: Synthetic oligonucleotide
gcucugauucuggcuauua

SEQ ID NO: 2070884 - RNA, 19 nt, Artificial Sequence
  Description of Artificial Sequence: Synthetic oligonucleotide
agccuccauuugccuucga

SEQ ID NO: 2070885 - RNA, 19 nt, Artificial Sequence
  Description of Artificial Sequence: Synthetic oligonucleotide
gcuucccaugucaguguuc

SEQ ID NO: 2070886 - RNA, 19 nt, Artificial Sequence
  Description of Artificial Sequence: Synthetic oligonucleotide
gguuccaaugaggcuuacu

SEQ ID NO: 2070887 - RNA, 19 nt, Artificial Sequence
  Description of Artificial Sequence: Synthetic oligonucleotide
ggucgcgaacccacagcga

SEQ ID NO: 2070888 - RNA, 19 nt, Artificial Sequence
  Description of Artificial Sequence: Synthetic oligonucleotide
gcuccaacguggguacaaa

SEQ ID NO: 2070889 - RNA, 19 nt, Artificial Sequence
  Description of Artificial Sequence: Synthetic oligonucleotide
cccacggcugcagugguaa

SEQ ID NO: 2070890 - RNA, 19 nt, Artificial Sequence
  Description of Artificial Sequence: Synthetic oligonucleotide
ccacggcugcagugguaag

SEQ ID NO: 2070891 - RNA, 19 nt, Artificial Sequence
  Description of Artificial Sequence: Synthetic oligonucleotide
cgcgaacccacagcgagca

SEQ ID NO: 2070892 - RNA, 19 nt, Artificial Sequence
  Description of Artificial Sequence: Synthetic oligonucleotide
ccugggucgcgaacccaca

SEQ ID NO: 2070893 - RNA, 19 nt, Artificial Sequence
  Description of Artificial Sequence: Synthetic oligonucleotide
cggcccacgaggccagggc

SEQ ID NO: 2070894 - RNA, 19 nt, Artificial Sequence
  Description of Artificial Sequence: Synthetic oligonucleotide
cccuucugauaacaucggu

SEQ ID NO: 2070895 - RNA, 19 nt, Artificial Sequence
  Description of Artificial Sequence: Synthetic oligonucleotide
cugcagugguaagcacaaa

SEQ ID NO: 2070896 - RNA, 19 nt, Artificial Sequence
  Description of Artificial Sequence: Synthetic oligonucleotide
gggugacuuuagaaucacu

SEQ ID NO: 2070897 - RNA, 19 nt, Artificial Sequence
  Description of Artificial Sequence: Synthetic oligonucleotide
ggagcaccuggagccucca

SEQ ID NO: 2070898 - RNA, 19 nt, Artificial Sequence
  Description of Artificial Sequence: Synthetic oligonucleotide
cuccggcucccagucggaa

SEQ ID NO: 2070899 - RNA, 19 nt, Artificial Sequence
  Description of Artificial Sequence: Synthetic oligonucleotide
cugcuccaacguggguaca

SEQ ID NO: 2070900 - RNA, 19 nt, Artificial Sequence
  Description of Artificial Sequence: Synthetic oligonucleotide
ggguccggcucgcggccca

SEQ ID NO: 2070901 - RNA, 19 nt, Artificial Sequence
  Description of Artificial Sequence: Synthetic oligonucleotide
cggcucccagucggaaucg

SEQ ID NO: 2070902 - RNA, 19 nt, Artificial Sequence
  Description of Artificial Sequence: Synthetic oligonucleotide
cuaucccugucagcucuuu

SEQ ID NO: 2070903 - RNA, 19 nt, Artificial Sequence
  Description of Artificial Sequence: Synthetic oligonucleotide
cgggguccggcucgcggcc

SEQ ID NO: 2070904 - RNA, 19 nt, Artificial Sequence
  Description of Artificial Sequence: Synthetic oligonucleotide
ccacauccuagccuugauu

SEQ ID NO: 2070905 - RNA, 19 nt, Artificial Sequence
  Description of Artificial Sequence: Synthetic oligonucleotide
cggcugcagugguaagcac

SEQ ID NO: 2070906 - RNA, 19 nt, Artificial Sequence
  Description of Artificial Sequence: Synthetic oligonucleotide
gcgcggacacgaccgccaa

SEQ ID NO: 2070907 - RNA, 19 nt, Artificial Sequence
  Description of Artificial Sequence: Synthetic oligonucleotide
gcgaacccacagcgagcaa

SEQ ID NO: 2070908 - RNA, 19 nt, Artificial Sequence
  Description of Artificial Sequence: Synthetic oligonucleotide
gguccggcucgcggcccac

SEQ ID NO: 2070909 - RNA, 19 nt, Artificial Sequence
  Description of Artificial Sequence: Synthetic oligonucleotide
gcucaggguaagcgccauu

SEQ ID NO: 2070910 - RNA, 19 nt, Artificial Sequence
  Description of Artificial Sequence: Synthetic oligonucleotide
ggccugcacugaguggcuu

SEQ ID NO: 2070911 - RNA, 19 nt, Artificial Sequence
  Description of Artificial Sequence: Synthetic oligonucleotide
cgcggacacgaccgccaaa

SEQ ID NO: 2070912 - RNA, 19 nt, Artificial Sequence
  Description of Artificial Sequence: Synthetic oligonucleotide
aaacaauggauauuucucc

SEQ ID NO: 2070913 - RNA, 19 nt, Artificial Sequence
  Description of Artificial Sequence: Synthetic oligonucleotide
aacuaagauaaugacagcc

SEQ ID NO: 2070914 - RNA, 19 nt, Artificial Sequence
  Description of Artificial Sequence: Synthetic oligonucleotide
uauccaaauacauaaaccc

SEQ ID NO: 2070915 - RNA, 19 nt, Artificial Sequence
  Description of Artificial Sequence: Synthetic oligonucleotide
cauauuauuaaguauugcc

SEQ ID NO: 2070916 - RNA, 19 nt, Artificial Sequence
  Description of Artificial Sequence: Synthetic oligonucleotide
aaugugagcaaccacagcu

SEQ ID NO: 2070917 - RNA, 19 nt, Artificial Sequence
  Description of Artificial Sequence: Synthetic oligonucleotide
aacauaaauaguuauuccu

SEQ ID NO: 2070918 - RNA, 19 nt, Artificial Sequence
  Description of Artificial Sequence: Synthetic oligonucleotide
aaguauugccuuaaaaucc

SEQ ID NO: 2070919 - RNA, 19 nt, Artificial Sequence
  Description of Artificial Sequence: Synthetic oligonucleotide
uaaaaugugagcaaccaca

SEQ ID NO: 2070920 - RNA, 19 nt, Artificial Sequence
  Description of Artificial Sequence: Synthetic oligonucleotide
aauccuauuguacaacuag

SEQ ID NO: 2070921 - RNA, 19 nt, Artificial Sequence
  Description of Artificial Sequence: Synthetic oligonucleotide
gauaaugacagccuugucc

SEQ ID NO: 2070922 - RNA, 19 nt, Artificial Sequence
  Description of Artificial Sequence: Synthetic oligonucleotide
aaaagaaaagaaaagaaaa

SEQ ID NO: 2070923 - RNA, 19 nt, Artificial Sequence
  Description of Artificial Sequence: Synthetic oligonucleotide
agaauuguaaacuguacag

SEQ ID NO: 2070924 - RNA, 19 nt, Artificial Sequence
  Description of Artificial Sequence: Synthetic oligonucleotide
aauccagcaaaguaauagg

SEQ ID NO: 2070925 - RNA, 19 nt, Artificial Sequence
  Description of Artificial Sequence: Synthetic oligonucleotide
uuauccaaauacauaaacc

SEQ ID NO: 2070926 - RNA, 19 nt, Artificial Sequence
  Description of Artificial Sequence: Synthetic oligonucleotide
cuguuuaucaauuacauca

SEQ ID NO: 2070927 - RNA, 19 nt, Artificial Sequence
  Description of Artificial Sequence: Synthetic oligonucleotide
aauaacucaaggaaggaag

SEQ ID NO: 2070928 - RNA, 19 nt, Artificial Sequence
  Description of Artificial Sequence: Synthetic oligonucleotide
auauucaaggcuuaaaaca

SEQ ID NO: 2070929 - RNA, 19 nt, Artificial Sequence
  Description of Artificial Sequence: Synthetic oligonucleotide
aaauccagcaaaguaauag

SEQ ID NO: 2070930 - RNA, 19 nt, Artificial Sequence
  Description of Artificial Sequence: Synthetic oligonucleotide
aaacuguacaguccugugc

SEQ ID NO: 2070931 - RNA, 19 nt, Artificial Sequence
  Description of Artificial Sequence: Synthetic oligonucleotide
aaaaccauauuauuaagua

SEQ ID NO: 2070932 - RNA, 19 nt, Artificial Sequence
  Description of Artificial Sequence: Synthetic oligonucleotide
uccugugcaacauaaauag

SEQ ID NO: 2070933 - RNA, 19 nt, Artificial Sequence
  Description of Artificial Sequence: Synthetic oligonucleotide
aaaucaaagucucuggagu

SEQ ID NO: 2070934 - RNA, 19 nt, Artificial Sequence
  Description of Artificial Sequence: Synthetic oligonucleotide
accuacacaauauucaagg

SEQ ID NO: 2070935 - RNA, 19 nt, Artificial Sequence
  Description of Artificial Sequence: Synthetic oligonucleotide
uaaaacacccuucacaaac

SEQ ID NO: 2070936 - RNA, 19 nt, Artificial Sequence
  Description of Artificial Sequence: Synthetic oligonucleotide
cauuuaguuauccaaauac

SEQ ID NO: 2070937 - RNA, 19 nt, Artificial Sequence
  Description of Artificial Sequence: Synthetic oligonucleotide
aauaggacuguuuagguuu

SEQ ID NO: 2070938 - RNA, 19 nt, Artificial Sequence
  Description of Artificial Sequence: Synthetic oligonucleotide
uuuucaauaucuuagugau

SEQ ID NO: 2070939 - RNA, 19 nt, Artificial Sequence
  Description of Artificial Sequence: Synthetic oligonucleotide
aaaaggcagaaugaguagc

SEQ ID NO: 2070940 - RNA, 19 nt, Artificial Sequence
  Description of Artificial Sequence: Synthetic oligonucleotide
uuuauuaacccuggcaugg

SEQ ID NO: 2070941 - RNA, 19 nt, Artificial Sequence
  Description of Artificial Sequence: Synthetic oligonucleotide
aguggaaugucucaagagg

SEQ ID NO: 2070942 - RNA, 19 nt, Artificial Sequence
  Description of Artificial Sequence: Synthetic oligonucleotide
uauucaaggcuuaaaacac

SEQ ID NO: 2070943 - RNA, 19 nt, Artificial Sequence
  Description of Artificial Sequence: Synthetic oligonucleotide
uaaguauugccuuaaaauc

SEQ ID NO: 2070944 - RNA, 19 nt, Artificial Sequence
  Description of Artificial Sequence: Synthetic oligonucleotide
uaguuauccaaauacauaa

SEQ ID NO: 2070945 - RNA, 19 nt, Artificial Sequence
  Description of Artificial Sequence: Synthetic oligonucleotide
aguaauaggacuguuuagg

SEQ ID NO: 2070946 - RNA, 19 nt, Artificial Sequence
  Description of Artificial Sequence: Synthetic oligonucleotide
acaucuacaaaagacuggc

SEQ ID NO: 2070947 - RNA, 19 nt, Artificial Sequence
  Description of Artificial Sequence: Synthetic oligonucleotide
uagacguaaaaucaaaguc

SEQ ID NO: 2070948 - RNA, 19 nt, Artificial Sequence
  Description of Artificial Sequence: Synthetic oligonucleotide
auuuucaauaucuuaguga

SEQ ID NO: 2070949 - RNA, 19 nt, Artificial Sequence
  Description of Artificial Sequence: Synthetic oligonucleotide
uacaaaaguaaacaaugga

SEQ ID NO: 2070950 - RNA, 19 nt, Artificial Sequence
  Description of Artificial Sequence: Synthetic oligonucleotide
aauaguuauuccuuguaaa

SEQ ID NO: 2070951 - RNA, 19 nt, Artificial Sequence
  Description of Artificial Sequence: Synthetic oligonucleotide
ugcaguagacguaaaauca

SEQ ID NO: 2070952 - RNA, 19 nt, Artificial Sequence
  Description of Artificial Sequence: Synthetic oligonucleotide
uuuaguuauccaaauacau

SEQ ID NO: 2070953 - RNA, 19 nt, Artificial Sequence
  Description of Artificial Sequence: Synthetic oligonucleotide
aacccaaugcauucucugc

SEQ ID NO: 2070954 - RNA, 19 nt, Artificial Sequence
  Description of Artificial Sequence: Synthetic oligonucleotide
uggguaguucuaaagaucc

SEQ ID NO: 2070955 - RNA, 19 nt, Artificial Sequence
  Description of Artificial Sequence: Synthetic oligonucleotide
aaaauccuauuguacaacu

SEQ ID NO: 2070956 - RNA, 19 nt, Artificial Sequence
  Description of Artificial Sequence: Synthetic oligonucleotide
uguuuaucaauuacaucag

SEQ ID NO: 2070957 - RNA, 19 nt, Artificial Sequence
  Description of Artificial Sequence: Synthetic oligonucleotide
ugguaauaacucaaggaag

SEQ ID NO: 2070958 - RNA, 19 nt, Artificial Sequence
  Description of Artificial Sequence: Synthetic oligonucleotide
aaaucagacugucaucuug

SEQ ID NO: 2070959 - RNA, 19 nt, Artificial Sequence
  Description of Artificial Sequence: Synthetic oligonucleotide
uuagaggaaauuuucaaua

SEQ ID NO: 2070960 - RNA, 19 nt, Artificial Sequence
  Description of Artificial Sequence: Synthetic oligonucleotide
uuugccgccgauaauaccu

SEQ ID NO: 2070961 - RNA, 19 nt, Artificial Sequence
  Description of Artificial Sequence: Synthetic oligonucleotide
ugacaucuacaaaagacug

SEQ ID NO: 2070962 - RNA, 19 nt, Artificial Sequence
  Description of Artificial Sequence: Synthetic oligonucleotide
aaauaguuauuccuuguaa

SEQ ID NO: 2070963 - RNA, 19 nt, Artificial Sequence
  Description of Artificial Sequence: Synthetic oligonucleotide
uuaaaauccugcuuacaug

SEQ ID NO: 2070964 - RNA, 19 nt, Artificial Sequence
  Description of Artificial Sequence: Synthetic oligonucleotide
agauagucaguguugguuc

SEQ ID NO: 2070965 - RNA, 19 nt, Artificial Sequence
  Description of Artificial Sequence: Synthetic oligonucleotide
acauaaacccaaugcauuc

SEQ ID NO: 2070966 - RNA, 19 nt, Artificial Sequence
  Description of Artificial Sequence: Synthetic oligonucleotide
aaaugugagcaaccacagc

SEQ ID NO: 2070967 - RNA, 19 nt, Artificial Sequence
  Description of Artificial Sequence: Synthetic oligonucleotide
aauuagucuguuuaucaau

SEQ ID NO: 2070968 - RNA, 19 nt, Artificial Sequence
  Description of Artificial Sequence: Synthetic oligonucleotide
gucgauguaagccaaagac

SEQ ID NO: 2070969 - RNA, 19 nt, Artificial Sequence
  Description of Artificial Sequence: Synthetic oligonucleotide
ucuccaccaagucuaacgg

SEQ ID NO: 2070970 - RNA, 19 nt, Artificial Sequence
  Description of Artificial Sequence: Synthetic oligonucleotide
agaauuagucuguuuauca

SEQ ID NO: 2070971 - RNA, 19 nt, Artificial Sequence
  Description of Artificial Sequence: Synthetic oligonucleotide
uucaaggcuuaaaacaccc

SEQ ID NO: 2070972 - RNA, 19 nt, Artificial Sequence
  Description of Artificial Sequence: Synthetic oligonucleotide
acuguuuagguuugccgcc

SEQ ID NO: 2070973 - RNA, 19 nt, Artificial Sequence
  Description of Artificial Sequence: Synthetic oligonucleotide
aaguaauaggacuguuuag

SEQ ID NO: 2070974 - RNA, 19 nt, Artificial Sequence
  Description of Artificial Sequence: Synthetic oligonucleotide
uuauuccuuguaaaucagg

SEQ ID NO: 2070975 - RNA, 19 nt, Artificial Sequence
  Description of Artificial Sequence: Synthetic oligonucleotide
gacuguuuagguuugccgc

SEQ ID NO: 2070976 - RNA, 19 nt, Artificial Sequence
  Description of Artificial Sequence: Synthetic oligonucleotide
aggucgaagaauuagucug

SEQ ID NO: 2070977 - RNA, 19 nt, Artificial Sequence
  Description of Artificial Sequence: Synthetic oligonucleotide
ugaguagcugcuauaaaac

SEQ ID NO: 2070978 - RNA, 19 nt, Artificial Sequence
  Description of Artificial Sequence: Synthetic oligonucleotide
aagaauuagucuguuuauc

SEQ ID NO: 2070979 - RNA, 19 nt, Artificial Sequence
  Description of Artificial Sequence: Synthetic oligonucleotide
cuaacgggaacuaagauaa

SEQ ID NO: 2070980 - RNA, 19 nt, Artificial Sequence
  Description of Artificial Sequence: Synthetic oligonucleotide
uuaucaauuacaucagaau

SEQ ID NO: 2070981 - RNA, 19 nt, Artificial Sequence
  Description of Artificial Sequence: Synthetic oligonucleotide
aaaccauauuauuaaguau

SEQ ID NO: 2070982 - RNA, 19 nt, Artificial Sequence
  Description of Artificial Sequence: Synthetic oligonucleotide
aauggauauuucuccuuag

SEQ ID NO: 2070983 - RNA, 19 nt, Artificial Sequence
  Description of Artificial Sequence: Synthetic oligonucleotide
guuauccaaauacauaaac

SEQ ID NO: 2070984 - RNA, 19 nt, Artificial Sequence
  Description of Artificial Sequence: Synthetic oligonucleotide
uuuuauuaacccuggcaug

SEQ ID NO: 2070985 - RNA, 19 nt, Artificial Sequence
  Description of Artificial Sequence: Synthetic oligonucleotide
agaggaaauuuucaauauc

SEQ ID NO: 2070986 - RNA, 19 nt, Artificial Sequence
  Description of Artificial Sequence: Synthetic oligonucleotide
uuaggagaaggacagugga

SEQ ID NO: 2070987 - RNA, 19 nt, Artificial Sequence
  Description of Artificial Sequence: Synthetic oligonucleotide
ucuacugcuuuucuuaaaa

SEQ ID NO: 2070988 - RNA, 19 nt, Artificial Sequence
  Description of Artificial Sequence: Synthetic oligonucleotide
aaaagacuggcaguaauga

SEQ ID NO: 2070989 - RNA, 19 nt, Artificial Sequence
  Description of Artificial Sequence: Synthetic oligonucleotide
aaacccaaugcauucucug

SEQ ID NO: 2070990 - RNA, 19 nt, Artificial Sequence
  Description of Artificial Sequence: Synthetic oligonucleotide
uuaguuauccaaauacaua

SEQ ID NO: 2070991 - RNA, 19 nt, Artificial Sequence
  Description of Artificial Sequence: Synthetic oligonucleotide
ucuacaaaagacuggcagu

SEQ ID NO: 2070992 - RNA, 19 nt, Artificial Sequence
  Description of Artificial Sequence: Synthetic oligonucleotide
auauuauuaaguauugccu

SEQ ID NO: 2070993 - RNA, 19 nt, Artificial Sequence
  Description of Artificial Sequence: Synthetic oligonucleotide
gguaauaacucaaggaagg

SEQ ID NO: 2070994 - RNA, 19 nt, Artificial Sequence
  Description of Artificial Sequence: Synthetic oligonucleotide
aaaaugugagcaaccacag

SEQ ID NO: 2070995 - RNA, 19 nt, Artificial Sequence
  Description of Artificial Sequence: Synthetic oligonucleotide
caacauaaauaguuauucc

SEQ ID NO: 2070996 - RNA, 19 nt, Artificial Sequence
  Description of Artificial Sequence: Synthetic oligonucleotide
ugugagcaaccacagcugg

SEQ ID NO: 2070997 - RNA, 19 nt, Artificial Sequence
  Description of Artificial Sequence: Synthetic oligonucleotide
guucuaaagauccagucuc

SEQ ID NO: 2070998 - RNA, 19 nt, Artificial Sequence
  Description of Artificial Sequence: Synthetic oligonucleotide
uacguguccauuuaguuau

SEQ ID NO: 2070999 - RNA, 19 nt, Artificial Sequence
  Description of Artificial Sequence: Synthetic oligonucleotide
aaccauauuauuaaguauu

SEQ ID NO: 2071000 - RNA, 19 nt, Artificial Sequence
  Description of Artificial Sequence: Synthetic oligonucleotide
aguucuaaagauccagucu

SEQ ID NO: 2071001 - RNA, 19 nt, Artificial Sequence
  Description of Artificial Sequence: Synthetic oligonucleotide
aaacacccuucacaaacuc

SEQ ID NO: 2071002 - RNA, 19 nt, Artificial Sequence
  Description of Artificial Sequence: Synthetic oligonucleotide
uccuauuguacaacuagga

SEQ ID NO: 2071003 - RNA, 19 nt, Artificial Sequence
  Description of Artificial Sequence: Synthetic oligonucleotide
auaaacccaaugcauucuc

SEQ ID NO: 2071004 - RNA, 19 nt, Artificial Sequence
  Description of Artificial Sequence: Synthetic oligonucleotide
uauugccuuaaaauccugc

SEQ ID NO: 2071005 - RNA, 19 nt, Artificial Sequence
  Description of Artificial Sequence: Synthetic oligonucleotide
uuuuacguguccauuuagu

SEQ ID NO: 2071006 - RNA, 19 nt, Artificial Sequence
  Description of Artificial Sequence: Synthetic oligonucleotide
uguccauuuaguuauccaa

SEQ ID NO: 2071007 - RNA, 19 nt, Artificial Sequence
  Description of Artificial Sequence: Synthetic oligonucleotide
ucuaacgggaacuaagaua

SEQ ID NO: 2071008 - RNA, 19 nt, Artificial Sequence
  Description of Artificial Sequence: Synthetic oligonucleotide
ucuggaguggccauuuaca

SEQ ID NO: 2071009 - RNA, 19 nt, Artificial Sequence
  Description of Artificial Sequence: Synthetic oligonucleotide
ucagaauuguaaacuguac

SEQ ID NO: 2071010 - RNA, 19 nt, Artificial Sequence
  Description of Artificial Sequence: Synthetic oligonucleotide
uuagguuugccgccgauaa

SEQ ID NO: 2071011 - RNA, 19 nt, Artificial Sequence
  Description of Artificial Sequence: Synthetic oligonucleotide
agacguaaaaucaaagucu

SEQ ID NO: 2071012 - RNA, 19 nt, Artificial Sequence
  Description of Artificial Sequence: Synthetic oligonucleotide
auugccuuaaaauccugcu

SEQ ID NO: 2071013 - RNA, 19 nt, Artificial Sequence
  Description of Artificial Sequence: Synthetic oligonucleotide
caugguaauaacucaagga

SEQ ID NO: 2071014 - RNA, 19 nt, Artificial Sequence
  Description of Artificial Sequence: Synthetic oligonucleotide
aacagcaggagacugggua

SEQ ID NO: 2071015 - RNA, 19 nt, Artificial Sequence
  Description of Artificial Sequence: Synthetic oligonucleotide
uagucuguuuaucaauuac

SEQ ID NO: 2071016 - RNA, 19 nt, Artificial Sequence
  Description of Artificial Sequence: Synthetic oligonucleotide
aacgggaacuaagauaaug

SEQ ID NO: 2071017 - RNA, 19 nt, Artificial Sequence
  Description of Artificial Sequence: Synthetic oligonucleotide
gcuuacaugauuuuacgug

SEQ ID NO: 2071018 - RNA, 19 nt, Artificial Sequence
  Description of Artificial Sequence: Synthetic oligonucleotide
uacauaaacccaaugcauu

SEQ ID NO: 2071019 - RNA, 19 nt, Artificial Sequence
  Description of Artificial Sequence: Synthetic oligonucleotide
aaacucuaucagucgaugu

SEQ ID NO: 2071020 - RNA, 19 nt, Artificial Sequence
  Description of Artificial Sequence: Synthetic oligonucleotide
uacaugauuuuacgugucc

SEQ ID NO: 2071021 - RNA, 19 nt, Artificial Sequence
  Description of Artificial Sequence: Synthetic oligonucleotide
aacucuaucagucgaugua

SEQ ID NO: 2071022 - RNA, 19 nt, Artificial Sequence
  Description of Artificial Sequence: Synthetic oligonucleotide
gaugucuugcuucuucuac

SEQ ID NO: 2071023 - RNA, 19 nt, Artificial Sequence
  Description of Artificial Sequence: Synthetic oligonucleotide
gacaucuacaaaagacugg

SEQ ID NO: 2071024 - RNA, 19 nt, Artificial Sequence
  Description of Artificial Sequence: Synthetic oligonucleotide
uccuuagaggaaauuuuca

SEQ ID NO: 2071025 - RNA, 19 nt, Artificial Sequence
  Description of Artificial Sequence: Synthetic oligonucleotide
guccauaccaaucuccagc

SEQ ID NO: 2071026 - RNA, 19 nt, Artificial Sequence
  Description of Artificial Sequence: Synthetic oligonucleotide
ucuaucagucgauguaagc

SEQ ID NO: 2071027 - RNA, 19 nt, Artificial Sequence
  Description of Artificial Sequence: Synthetic oligonucleotide
auaacucaaggaaggaagg

SEQ ID NO: 2071028 - RNA, 19 nt, Artificial Sequence
  Description of Artificial Sequence: Synthetic oligonucleotide
uaccuacacaauauucaag

SEQ ID NO: 2071029 - RNA, 19 nt, Artificial Sequence
  Description of Artificial Sequence: Synthetic oligonucleotide
auuuuacguguccauuuag

SEQ ID NO: 2071030 - RNA, 19 nt, Artificial Sequence
  Description of Artificial Sequence: Synthetic oligonucleotide
uguacaguccugugcaaca

SEQ ID NO: 2071031 - RNA, 19 nt, Artificial Sequence
  Description of Artificial Sequence: Synthetic oligonucleotide
uucuuaaaaugugagcaac

SEQ ID NO: 2071032 - RNA, 19 nt, Artificial Sequence
  Description of Artificial Sequence: Synthetic oligonucleotide
ugucucaagagggaagucc

SEQ ID NO: 2071033 - RNA, 19 nt, Artificial Sequence
  Description of Artificial Sequence: Synthetic oligonucleotide
cugcuuacaugauuuuacg

SEQ ID NO: 2071034 - RNA, 19 nt, Artificial Sequence
  Description of Artificial Sequence: Synthetic oligonucleotide
uucgacaguaaaauccuau

SEQ ID NO: 2071035 - RNA, 19 nt, Artificial Sequence
  Description of Artificial Sequence: Synthetic oligonucleotide
uguaaaucagacugucauc

SEQ ID NO: 2071036 - RNA, 19 nt, Artificial Sequence
  Description of Artificial Sequence: Synthetic oligonucleotide
ugcaacauaaauaguuauu

SEQ ID NO: 2071037 - RNA, 19 nt, Artificial Sequence
  Description of Artificial Sequence: Synthetic oligonucleotide
uaguucuaaagauccaguc

SEQ ID NO: 2071038 - RNA, 19 nt, Artificial Sequence
  Description of Artificial Sequence: Synthetic oligonucleotide
uuuacguguccauuuaguu

SEQ ID NO: 2071039 - RNA, 19 nt, Artificial Sequence
  Description of Artificial Sequence: Synthetic oligonucleotide
auuuaguuauccaaauaca

SEQ ID NO: 2071040 - RNA, 19 nt, Artificial Sequence
  Description of Artificial Sequence: Synthetic oligonucleotide
cugcaguagacguaaaauc

SEQ ID NO: 2071041 - RNA, 19 nt, Artificial Sequence
  Description of Artificial Sequence: Synthetic oligonucleotide
acuggguaguucuaaagau

SEQ ID NO: 2071042 - RNA, 19 nt, Artificial Sequence
  Description of Artificial Sequence: Synthetic oligonucleotide
ucuccuuagaggaaauuuu

SEQ ID NO: 2071043 - RNA, 19 nt, Artificial Sequence
  Description of Artificial Sequence: Synthetic oligonucleotide
agacugucaucuugaaauc

SEQ ID NO: 2071044 - RNA, 19 nt, Artificial Sequence
  Description of Artificial Sequence: Synthetic oligonucleotide
uuucgaaaugacaucuuuu

SEQ ID NO: 2071045 - RNA, 19 nt, Artificial Sequence
  Description of Artificial Sequence: Synthetic oligonucleotide
uaaaauccuauuguacaac

SEQ ID NO: 2071046 - RNA, 19 nt, Artificial Sequence
  Description of Artificial Sequence: Synthetic oligonucleotide
aguccugugcaacauaaau

SEQ ID NO: 2071047 - RNA, 19 nt, Artificial Sequence
  Description of Artificial Sequence: Synthetic oligonucleotide
auuaacagcaggagacugg

SEQ ID NO: 2071048 - RNA, 19 nt, Artificial Sequence
  Description of Artificial Sequence: Synthetic oligonucleotide
aaacuccagauagucagug

SEQ ID NO: 2071049 - RNA, 19 nt, Artificial Sequence
  Description of Artificial Sequence: Synthetic oligonucleotide
uccauguaaaucagacugu

SEQ ID NO: 2071050 - RNA, 19 nt, Artificial Sequence
  Description of Artificial Sequence: Synthetic oligonucleotide
cguuucgacaguaaaaucc

SEQ ID NO: 2071051 - RNA, 19 nt, Artificial Sequence
  Description of Artificial Sequence: Synthetic oligonucleotide
aguagacguaaaaucaaag

SEQ ID NO: 2071052 - RNA, 19 nt, Artificial Sequence
  Description of Artificial Sequence: Synthetic oligonucleotide
gacguaaaaucaaagucuc

SEQ ID NO: 2071053 - RNA, 19 nt, Artificial Sequence
  Description of Artificial Sequence: Synthetic oligonucleotide
auaccuacacaauauucaa

SEQ ID NO: 2071054 - RNA, 19 nt, Artificial Sequence
  Description of Artificial Sequence: Synthetic oligonucleotide
ucccaaacucuaucagucg

SEQ ID NO: 2071055 - RNA, 19 nt, Artificial Sequence
  Description of Artificial Sequence: Synthetic oligonucleotide
aaucagacugucaucuuga

SEQ ID NO: 2071056 - RNA, 19 nt, Artificial Sequence
  Description of Artificial Sequence: Synthetic oligonucleotide
ugguucuuucuccaccaag

SEQ ID NO: 2071057 - RNA, 19 nt, Artificial Sequence
  Description of Artificial Sequence: Synthetic oligonucleotide
uuacguguccauuuaguua

SEQ ID NO: 2071058 - RNA, 19 nt, Artificial Sequence
  Description of Artificial Sequence: Synthetic oligonucleotide
gaauuagucuguuuaucaa

SEQ ID NO: 2071059 - RNA, 19 nt, Artificial Sequence
  Description of Artificial Sequence: Synthetic oligonucleotide
uaaugaggguccauguaaa

SEQ ID NO: 2071060 - RNA, 19 nt, Artificial Sequence
  Description of Artificial Sequence: Synthetic oligonucleotide
uggaaugucucaagaggga

SEQ ID NO: 2071061 - RNA, 19 nt, Artificial Sequence
  Description of Artificial Sequence: Synthetic oligonucleotide
uccauuuaguuauccaaau

SEQ ID NO: 2071062 - RNA, 19 nt, Artificial Sequence
  Description of Artificial Sequence: Synthetic oligonucleotide
aaaggcagaaugaguagcu

SEQ ID NO: 2071063 - RNA, 19 nt, Artificial Sequence
  Description of Artificial Sequence: Synthetic oligonucleotide
guaaugaggguccauguaa

SEQ ID NO: 2071064 - RNA, 19 nt, Artificial Sequence
  Description of Artificial Sequence: Synthetic oligonucleotide
ugguccauaccaaucucca

SEQ ID NO: 2071065 - RNA, 19 nt, Artificial Sequence
  Description of Artificial Sequence: Synthetic oligonucleotide
aaaguaaacaauggauauu

SEQ ID NO: 2071066 - RNA, 19 nt, Artificial Sequence
  Description of Artificial Sequence: Synthetic oligonucleotide
aaugaguagcugcuauaaa

SEQ ID NO: 2071067 - RNA, 19 nt, Artificial Sequence
  Description of Artificial Sequence: Synthetic oligonucleotide
uaguuauuccuuguaaauc

SEQ ID NO: 2071068 - RNA, 19 nt, Artificial Sequence
  Description of Artificial Sequence: Synthetic oligonucleotide
uaauaacucaaggaaggaa

SEQ ID NO: 2071069 - RNA, 19 nt, Artificial Sequence
  Description of Artificial Sequence: Synthetic oligonucleotide
ugcuuacaugauuuuacgu

SEQ ID NO: 2071070 - RNA, 19 nt, Artificial Sequence
  Description of Artificial Sequence: Synthetic oligonucleotide
uucuaaagauccagucucu

SEQ ID NO: 2071071 - RNA, 19 nt, Artificial Sequence
  Description of Artificial Sequence: Synthetic oligonucleotide
agacuggguaguucuaaag

SEQ ID NO: 2071072 - RNA, 19 nt, Artificial Sequence
  Description of Artificial Sequence: Synthetic oligonucleotide
acuaagauaaugacagccu

SEQ ID NO: 2071073 - RNA, 19 nt, Artificial Sequence
  Description of Artificial Sequence: Synthetic oligonucleotide
aaugcauucucugcuucca

SEQ ID NO: 2071074 - RNA, 19 nt, Artificial Sequence
  Description of Artificial Sequence: Synthetic oligonucleotide
cuaaagauccagucucuuc

SEQ ID NO: 2071075 - RNA, 19 nt, Artificial Sequence
  Description of Artificial Sequence: Synthetic oligonucleotide
cagaauuguaaacuguaca

SEQ ID NO: 2071076 - RNA, 19 nt, Artificial Sequence
  Description of Artificial Sequence: Synthetic oligonucleotide
uguaaacuguacaguccug

SEQ ID NO: 2071077 - RNA, 19 nt, Artificial Sequence
  Description of Artificial Sequence: Synthetic oligonucleotide
uuauuaaguauugccuuaa

SEQ ID NO: 2071078 - RNA, 19 nt, Artificial Sequence
  Description of Artificial Sequence: Synthetic oligonucleotide
acaaaagacuggcaguaau

SEQ ID NO: 2071079 - RNA, 19 nt, Artificial Sequence
  Description of Artificial Sequence: Synthetic oligonucleotide
gaaugucucaagagggaag

SEQ ID NO: 2071080 - RNA, 19 nt, Artificial Sequence
  Description of Artificial Sequence: Synthetic oligonucleotide
gaacuaagauaaugacagc

SEQ ID NO: 2071081 - RNA, 19 nt, Artificial Sequence
  Description of Artificial Sequence: Synthetic oligonucleotide
auccuauuguacaacuagg

SEQ ID NO: 2071082 - RNA, 19 nt, Artificial Sequence
  Description of Artificial Sequence: Synthetic oligonucleotide
uuacaugauuuuacguguc

SEQ ID NO: 2071083 - RNA, 19 nt, Artificial Sequence
  Description of Artificial Sequence: Synthetic oligonucleotide
cugguccauaccaaucucc

SEQ ID NO: 2071084 - RNA, 19 nt, Artificial Sequence
  Description of Artificial Sequence: Synthetic oligonucleotide
guaaaucaggaugucuugc

SEQ ID NO: 2071085 - RNA, 19 nt, Artificial Sequence
  Description of Artificial Sequence: Synthetic oligonucleotide
aggcuuaaaacacccuuca

SEQ ID NO: 2071086 - RNA, 19 nt, Artificial Sequence
  Description of Artificial Sequence: Synthetic oligonucleotide
aaugaggguccauguaaau

SEQ ID NO: 2071087 - RNA, 19 nt, Artificial Sequence
  Description of Artificial Sequence: Synthetic oligonucleotide
aguauugccuuaaaauccu

SEQ ID NO: 2071088 - RNA, 19 nt, Artificial Sequence
  Description of Artificial Sequence: Synthetic oligonucleotide
acguuucgacaguaaaauc

SEQ ID NO: 2071089 - RNA, 19 nt, Artificial Sequence
  Description of Artificial Sequence: Synthetic oligonucleotide
uucacuggcugcaguagac

SEQ ID NO: 2071090 - RNA, 19 nt, Artificial Sequence
  Description of Artificial Sequence: Synthetic oligonucleotide
aaaacacccuucacaaacu

SEQ ID NO: 2071091 - RNA, 19 nt, Artificial Sequence
  Description of Artificial Sequence: Synthetic oligonucleotide
caguggaaugucucaagag

SEQ ID NO: 2071092 - RNA, 19 nt, Artificial Sequence
  Description of Artificial Sequence: Synthetic oligonucleotide
caguguugguucuuucucc

SEQ ID NO: 2071093 - RNA, 19 nt, Artificial Sequence
  Description of Artificial Sequence: Synthetic oligonucleotide
gcaacauaaauaguuauuc

SEQ ID NO: 2071094 - RNA, 19 nt, Artificial Sequence
  Description of Artificial Sequence: Synthetic oligonucleotide
uauuaaguauugccuuaaa

SEQ ID NO: 2071095 - RNA, 19 nt, Artificial Sequence
  Description of Artificial Sequence: Synthetic oligonucleotide
gccgauaauaccuacacaa

SEQ ID NO: 2071096 - RNA, 19 nt, Artificial Sequence
  Description of Artificial Sequence: Synthetic oligonucleotide
uggacguuucgacaguaaa

SEQ ID NO: 2071097 - RNA, 19 nt, Artificial Sequence
  Description of Artificial Sequence: Synthetic oligonucleotide
ggacuguuuagguuugccg

SEQ ID NO: 2071098 - RNA, 19 nt, Artificial Sequence
  Description of Artificial Sequence: Synthetic oligonucleotide
guagacguaaaaucaaagu

SEQ ID NO: 2071099 - RNA, 19 nt, Artificial Sequence
  Description of Artificial Sequence: Synthetic oligonucleotide
ucaaagucucuggaguggc

SEQ ID NO: 2071100 - RNA, 19 nt, Artificial Sequence
  Description of Artificial Sequence: Synthetic oligonucleotide
caucuugaaauccagcaaa

SEQ ID NO: 2071101 - RNA, 19 nt, Artificial Sequence
  Description of Artificial Sequence: Synthetic oligonucleotide
uaauaggacuguuuagguu

SEQ ID NO: 2071102 - RNA, 19 nt, Artificial Sequence
  Description of Artificial Sequence: Synthetic oligonucleotide
cuuacaugauuuuacgugu

SEQ ID NO: 2071103 - RNA, 19 nt, Artificial Sequence
  Description of Artificial Sequence: Synthetic oligonucleotide
cugcuauaaaaccauauua

SEQ ID NO: 2071104 - RNA, 19 nt, Artificial Sequence
  Description of Artificial Sequence: Synthetic oligonucleotide
aggacuguuuagguuugcc

SEQ ID NO: 2071105 - RNA, 19 nt, Artificial Sequence
  Description of Artificial Sequence: Synthetic oligonucleotide
augucuugcuucuucuacu

SEQ ID NO: 2071106 - RNA, 19 nt, Artificial Sequence
  Description of Artificial Sequence: Synthetic oligonucleotide
gacugucaucuugaaaucc

SEQ ID NO: 2071107 - RNA, 19 nt, Artificial Sequence
  Description of Artificial Sequence: Synthetic oligonucleotide
uuagucuguuuaucaauua

SEQ ID NO: 2071108 - RNA, 19 nt, Artificial Sequence
  Description of Artificial Sequence: Synthetic oligonucleotide
guccuggacguuucgacag

SEQ ID NO: 2071109 - RNA, 19 nt, Artificial Sequence
  Description of Artificial Sequence: Synthetic oligonucleotide
auccaaauacauaaaccca

SEQ ID NO: 2071110 - RNA, 19 nt, Artificial Sequence
  Description of Artificial Sequence: Synthetic oligonucleotide
agauaaugacagccuuguc

SEQ ID NO: 2071111 - RNA, 19 nt, Artificial Sequence
  Description of Artificial Sequence: Synthetic oligonucleotide
cuuaaaauccugcuuacau

SEQ ID NO: 2071112 - RNA, 19 nt, Artificial Sequence
  Description of Artificial Sequence: Synthetic oligonucleotide
ucagacugucaucuugaaa

SEQ ID NO: 2071113 - RNA, 19 nt, Artificial Sequence
  Description of Artificial Sequence: Synthetic oligonucleotide
ucgacaguaaaauccuauu

SEQ ID NO: 2071114 - RNA, 19 nt, Artificial Sequence
  Description of Artificial Sequence: Synthetic oligonucleotide
acgggaacuaagauaauga

SEQ ID NO: 2071115 - RNA, 19 nt, Artificial Sequence
  Description of Artificial Sequence: Synthetic oligonucleotide
uacaacuaggauccauuuu

SEQ ID NO: 2071116 - RNA, 19 nt, Artificial Sequence
  Description of Artificial Sequence: Synthetic oligonucleotide
aacccuggcaugguaauaa

SEQ ID NO: 2071117 - RNA, 19 nt, Artificial Sequence
  Description of Artificial Sequence: Synthetic oligonucleotide
cucuaucagucgauguaag

SEQ ID NO: 2071118 - RNA, 19 nt, Artificial Sequence
  Description of Artificial Sequence: Synthetic oligonucleotide
guuuaucaauuacaucaga

SEQ ID NO: 2071119 - RNA, 19 nt, Artificial Sequence
  Description of Artificial Sequence: Synthetic oligonucleotide
gauuuuacguguccauuua

SEQ ID NO: 2071120 - RNA, 19 nt, Artificial Sequence
  Description of Artificial Sequence: Synthetic oligonucleotide
cugacaucuacaaaagacu

SEQ ID NO: 2071121 - RNA, 19 nt, Artificial Sequence
  Description of Artificial Sequence: Synthetic oligonucleotide
uaggagaaggacaguggaa

SEQ ID NO: 2071122 - RNA, 19 nt, Artificial Sequence
  Description of Artificial Sequence: Synthetic oligonucleotide
aggagaaggacaguggaau

SEQ ID NO: 2071123 - RNA, 19 nt, Artificial Sequence
  Description of Artificial Sequence: Synthetic oligonucleotide
aguaaugaggguccaugua

SEQ ID NO: 2071124 - RNA, 19 nt, Artificial Sequence
  Description of Artificial Sequence: Synthetic oligonucleotide
ccugcuuacaugauuuuac

SEQ ID NO: 2071125 - RNA, 19 nt, Artificial Sequence
  Description of Artificial Sequence: Synthetic oligonucleotide
cuuucaaaguccuggacgu

SEQ ID NO: 2071126 - RNA, 19 nt, Artificial Sequence
  Description of Artificial Sequence: Synthetic oligonucleotide
gaagaauuagucuguuuau

SEQ ID NO: 2071127 - RNA, 19 nt, Artificial Sequence
  Description of Artificial Sequence: Synthetic oligonucleotide
cauuaacagcaggagacug

SEQ ID NO: 2071128 - RNA, 19 nt, Artificial Sequence
  Description of Artificial Sequence: Synthetic oligonucleotide
uuaacccuggcaugguaau

SEQ ID NO: 2071129 - RNA, 19 nt, Artificial Sequence
  Description of Artificial Sequence: Synthetic oligonucleotide
ucaauaucuuagugauuuc

SEQ ID NO: 2071130 - RNA, 19 nt, Artificial Sequence
  Description of Artificial Sequence: Synthetic oligonucleotide
agucgauguaagccaaaga

SEQ ID NO: 2071131 - RNA, 19 nt, Artificial Sequence
  Description of Artificial Sequence: Synthetic oligonucleotide
cuacacaauauucaaggcu

SEQ ID NO: 2071132 - RNA, 19 nt, Artificial Sequence
  Description of Artificial Sequence: Synthetic oligonucleotide
aguggccauuuacaaaagu

SEQ ID NO: 2071133 - RNA, 19 nt, Artificial Sequence
  Description of Artificial Sequence: Synthetic oligonucleotide
aguccuggacguuucgaca

SEQ ID NO: 2071134 - RNA, 19 nt, Artificial Sequence
  Description of Artificial Sequence: Synthetic oligonucleotide
acugucaucuugaaaucca

SEQ ID NO: 2071135 - RNA, 19 nt, Artificial Sequence
  Description of Artificial Sequence: Synthetic oligonucleotide
gaauuguaaacuguacagu

SEQ ID NO: 2071136 - RNA, 19 nt, Artificial Sequence
  Description of Artificial Sequence: Synthetic oligonucleotide
agcaaaguaauaggacugu

SEQ ID NO: 2071137 - RNA, 19 nt, Artificial Sequence
  Description of Artificial Sequence: Synthetic oligonucleotide
ucaagagggaaguccuuua

SEQ ID NO: 2071138 - RNA, 19 nt, Artificial Sequence
  Description of Artificial Sequence: Synthetic oligonucleotide
acaauggauauuucuccuu

SEQ ID NO: 2071139 - RNA, 19 nt, Artificial Sequence
  Description of Artificial Sequence: Synthetic oligonucleotide
caaacucuaucagucgaug

SEQ ID NO: 2071140 - RNA, 19 nt, Artificial Sequence
  Description of Artificial Sequence: Synthetic oligonucleotide
agucuaacgggaacuaaga

SEQ ID NO: 2071141 - RNA, 19 nt, Artificial Sequence
  Description of Artificial Sequence: Synthetic oligonucleotide
guaauaggacuguuuaggu

SEQ ID NO: 2071142 - RNA, 19 nt, Artificial Sequence
  Description of Artificial Sequence: Synthetic oligonucleotide
uuucaauaucuuagugauu

SEQ ID NO: 2071143 - RNA, 19 nt, Artificial Sequence
  Description of Artificial Sequence: Synthetic oligonucleotide
uggaguggccauuuacaaa

SEQ ID NO: 2071144 - RNA, 19 nt, Artificial Sequence
  Description of Artificial Sequence: Synthetic oligonucleotide
agaaugaguagcugcuaua

SEQ ID NO: 2071145 - RNA, 19 nt, Artificial Sequence
  Description of Artificial Sequence: Synthetic oligonucleotide
acucuaucagucgauguaa

SEQ ID NO: 2071146 - RNA, 19 nt, Artificial Sequence
  Description of Artificial Sequence: Synthetic oligonucleotide
auccagcaaaguaauagga

SEQ ID NO: 2071147 - RNA, 19 nt, Artificial Sequence
  Description of Artificial Sequence: Synthetic oligonucleotide
cucuggaguggccauuuac

SEQ ID NO: 2071148 - RNA, 19 nt, Artificial Sequence
  Description of Artificial Sequence: Synthetic oligonucleotide
guaauaacucaaggaagga

SEQ ID NO: 2071149 - RNA, 19 nt, Artificial Sequence
  Description of Artificial Sequence: Synthetic oligonucleotide
gacguuucgacaguaaaau

SEQ ID NO: 2071150 - RNA, 19 nt, Artificial Sequence
  Description of Artificial Sequence: Synthetic oligonucleotide
aaauccuauuguacaacua

SEQ ID NO: 2071151 - RNA, 19 nt, Artificial Sequence
  Description of Artificial Sequence: Synthetic oligonucleotide
gaggucgaagaauuagucu

SEQ ID NO: 2071152 - RNA, 19 nt, Artificial Sequence
  Description of Artificial Sequence: Synthetic oligonucleotide
cuggcaugguaauaacuca

SEQ ID NO: 2071153 - RNA, 19 nt, Artificial Sequence
  Description of Artificial Sequence: Synthetic oligonucleotide
uguuuagguuugccgccga

SEQ ID NO: 2071154 - RNA, 19 nt, Artificial Sequence
  Description of Artificial Sequence: Synthetic oligonucleotide
cuguuuagguuugccgccg

SEQ ID NO: 2071155 - RNA, 19 nt, Artificial Sequence
  Description of Artificial Sequence: Synthetic oligonucleotide
ccuacacaauauucaaggc

SEQ ID NO: 2071156 - RNA, 19 nt, Artificial Sequence
  Description of Artificial Sequence: Synthetic oligonucleotide
uuucgacaguaaaauccua

SEQ ID NO: 2071157 - RNA, 19 nt, Artificial Sequence
  Description of Artificial Sequence: Synthetic oligonucleotide
uccuuuaugcugacaucua

SEQ ID NO: 2071158 - RNA, 19 nt, Artificial Sequence
  Description of Artificial Sequence: Synthetic oligonucleotide
uucuacugcuuuucuuaaa

SEQ ID NO: 2071159 - RNA, 19 nt, Artificial Sequence
  Description of Artificial Sequence: Synthetic oligonucleotide
uuauuaacccuggcauggu

SEQ ID NO: 2071160 - RNA, 19 nt, Artificial Sequence
  Description of Artificial Sequence: Synthetic oligonucleotide
cagucgauguaagccaaag

SEQ ID NO: 2071161 - RNA, 19 nt, Artificial Sequence
  Description of Artificial Sequence: Synthetic oligonucleotide
uuuagguuugccgccgaua

SEQ ID NO: 2071162 - RNA, 19 nt, Artificial Sequence
  Description of Artificial Sequence: Synthetic oligonucleotide
agguuugccgccgauaaua

SEQ ID NO: 2071163 - RNA, 19 nt, Artificial Sequence
  Description of Artificial Sequence: Synthetic oligonucleotide
gggaacuaagauaaugaca

SEQ ID NO: 2071164 - RNA, 19 nt, Artificial Sequence
  Description of Artificial Sequence: Synthetic oligonucleotide
ucccuggcauccccagagg

SEQ ID NO: 2071165 - RNA, 19 nt, Artificial Sequence
  Description of Artificial Sequence: Synthetic oligonucleotide
guuugccgccgauaauacc

SEQ ID NO: 2071166 - RNA, 19 nt, Artificial Sequence
  Description of Artificial Sequence: Synthetic oligonucleotide
caauggauauuucuccuua

SEQ ID NO: 2071167 - RNA, 19 nt, Artificial Sequence
  Description of Artificial Sequence: Synthetic oligonucleotide
gauagucaguguugguucu

SEQ ID NO: 2071168 - RNA, 19 nt, Artificial Sequence
  Description of Artificial Sequence: Synthetic oligonucleotide
ucuaaagauccagucucuu

SEQ ID NO: 2071169 - RNA, 19 nt, Artificial Sequence
  Description of Artificial Sequence: Synthetic oligonucleotide
guuucgacaguaaaauccu

SEQ ID NO: 2071170 - RNA, 19 nt, Artificial Sequence
  Description of Artificial Sequence: Synthetic oligonucleotide
ggagaaggacaguggaaug

SEQ ID NO: 2071171 - RNA, 19 nt, Artificial Sequence
  Description of Artificial Sequence: Synthetic oligonucleotide
ucgaagaauuagucuguuu

SEQ ID NO: 2071172 - RNA, 19 nt, Artificial Sequence
  Description of Artificial Sequence: Synthetic oligonucleotide
uacaaaagacuggcaguaa

SEQ ID NO: 2071173 - RNA, 19 nt, Artificial Sequence
  Description of Artificial Sequence: Synthetic oligonucleotide
augugagcaaccacagcug

SEQ ID NO: 2071174 - RNA, 19 nt, Artificial Sequence
  Description of Artificial Sequence: Synthetic oligonucleotide
augauuuuacguguccauu

SEQ ID NO: 2071175 - RNA, 19 nt, Artificial Sequence
  Description of Artificial Sequence: Synthetic oligonucleotide
ggguccauguaaaucagac

SEQ ID NO: 2071176 - RNA, 19 nt, Artificial Sequence
  Description of Artificial Sequence: Synthetic oligonucleotide
aguuauccaaauacauaaa

SEQ ID NO: 2071177 - RNA, 19 nt, Artificial Sequence
  Description of Artificial Sequence: Synthetic oligonucleotide
cuuagugauuuccucagau

SEQ ID NO: 2071178 - RNA, 19 nt, Artificial Sequence
  Description of Artificial Sequence: Synthetic oligonucleotide
caguagacguaaaaucaaa

SEQ ID NO: 2071179 - RNA, 19 nt, Artificial Sequence
  Description of Artificial Sequence: Synthetic oligonucleotide
gcaguaaugaggguccaug

SEQ ID NO: 2071180 - RNA, 19 nt, Artificial Sequence
  Description of Artificial Sequence: Synthetic oligonucleotide
ggcaugguaauaacucaag

SEQ ID NO: 2071181 - RNA, 19 nt, Artificial Sequence
  Description of Artificial Sequence: Synthetic oligonucleotide
uccugcuuacaugauuuua

SEQ ID NO: 2071182 - RNA, 19 nt, Artificial Sequence
  Description of Artificial Sequence: Synthetic oligonucleotide
acaguccugugcaacauaa

SEQ ID NO: 2071183 - RNA, 19 nt, Artificial Sequence
  Description of Artificial Sequence: Synthetic oligonucleotide
gagacuggguaguucuaaa

SEQ ID NO: 2071184 - RNA, 19 nt, Artificial Sequence
  Description of Artificial Sequence: Synthetic oligonucleotide
uacaguccugugcaacaua

SEQ ID NO: 2071185 - RNA, 19 nt, Artificial Sequence
  Description of Artificial Sequence: Synthetic oligonucleotide
caccaagucuaacgggaac

SEQ ID NO: 2071186 - RNA, 19 nt, Artificial Sequence
  Description of Artificial Sequence: Synthetic oligonucleotide
gcuuccauuaacagcagga

SEQ ID NO: 2071187 - RNA, 19 nt, Artificial Sequence
  Description of Artificial Sequence: Synthetic oligonucleotide
cuguacaguccugugcaac

SEQ ID NO: 2071188 - RNA, 19 nt, Artificial Sequence
  Description of Artificial Sequence: Synthetic oligonucleotide
agcugcuauaaaaccauau

SEQ ID NO: 2071189 - RNA, 19 nt, Artificial Sequence
  Description of Artificial Sequence: Synthetic oligonucleotide
agugagggagggaggaaug

SEQ ID NO: 2071190 - RNA, 19 nt, Artificial Sequence
  Description of Artificial Sequence: Synthetic oligonucleotide
cuggaguggccauuuacaa

SEQ ID NO: 2071191 - RNA, 19 nt, Artificial Sequence
  Description of Artificial Sequence: Synthetic oligonucleotide
ccauauuauuaaguauugc

SEQ ID NO: 2071192 - RNA, 19 nt, Artificial Sequence
  Description of Artificial Sequence: Synthetic oligonucleotide
guaaacuguacaguccugu

SEQ ID NO: 2071193 - RNA, 19 nt, Artificial Sequence
  Description of Artificial Sequence: Synthetic oligonucleotide
gagggaaguccuuuaugcu

SEQ ID NO: 2071194 - RNA, 19 nt, Artificial Sequence
  Description of Artificial Sequence: Synthetic oligonucleotide
cuucuacugcuuuucuuaa

SEQ ID NO: 2071195 - RNA, 19 nt, Artificial Sequence
  Description of Artificial Sequence: Synthetic oligonucleotide
ccuuuaugcugacaucuac

SEQ ID NO: 2071196 - RNA, 19 nt, Artificial Sequence
  Description of Artificial Sequence: Synthetic oligonucleotide
aucagacugucaucuugaa

SEQ ID NO: 2071197 - RNA, 19 nt, Artificial Sequence
  Description of Artificial Sequence: Synthetic oligonucleotide
augucucaagagggaaguc

SEQ ID NO: 2071198 - RNA, 19 nt, Artificial Sequence
  Description of Artificial Sequence: Synthetic oligonucleotide
uccuggacguuucgacagu

SEQ ID NO: 2071199 - RNA, 19 nt, Artificial Sequence
  Description of Artificial Sequence: Synthetic oligonucleotide
cgacaguaaaauccuauug

SEQ ID NO: 2071200 - RNA, 19 nt, Artificial Sequence
  Description of Artificial Sequence: Synthetic oligonucleotide
cagcugguccauaccaauc

SEQ ID NO: 2071201 - RNA, 19 nt, Artificial Sequence
  Description of Artificial Sequence: Synthetic oligonucleotide
gucaguguugguucuuucu

SEQ ID NO: 2071202 - RNA, 19 nt, Artificial Sequence
  Description of Artificial Sequence: Synthetic oligonucleotide
caaaguaauaggacuguuu

SEQ ID NO: 2071203 - RNA, 19 nt, Artificial Sequence
  Description of Artificial Sequence: Synthetic oligonucleotide
caucuacaaaagacuggca

SEQ ID NO: 2071204 - RNA, 19 nt, Artificial Sequence
  Description of Artificial Sequence: Synthetic oligonucleotide
ccagaggucgaagaauuag

SEQ ID NO: 2071205 - RNA, 19 nt, Artificial Sequence
  Description of Artificial Sequence: Synthetic oligonucleotide
cuaagauaaugacagccuu

SEQ ID NO: 2071206 - RNA, 19 nt, Artificial Sequence
  Description of Artificial Sequence: Synthetic oligonucleotide
guauugccuuaaaauccug

SEQ ID NO: 2071207 - RNA, 19 nt, Artificial Sequence
  Description of Artificial Sequence: Synthetic oligonucleotide
cgaagaauuagucuguuua

SEQ ID NO: 2071208 - RNA, 19 nt, Artificial Sequence
  Description of Artificial Sequence: Synthetic oligonucleotide
gugcaacauaaauaguuau

SEQ ID NO: 2071209 - RNA, 19 nt, Artificial Sequence
  Description of Artificial Sequence: Synthetic oligonucleotide
caugauuuuacguguccau

SEQ ID NO: 2071210 - RNA, 19 nt, Artificial Sequence
  Description of Artificial Sequence: Synthetic oligonucleotide
guccugugcaacauaaaua

SEQ ID NO: 2071211 - RNA, 19 nt, Artificial Sequence
  Description of Artificial Sequence: Synthetic oligonucleotide
cauccccagaggucgaaga

SEQ ID NO: 2071212 - RNA, 19 nt, Artificial Sequence
  Description of Artificial Sequence: Synthetic oligonucleotide
gccuuaaaauccugcuuac

SEQ ID NO: 2071213 - RNA, 19 nt, Artificial Sequence
  Description of Artificial Sequence: Synthetic oligonucleotide
guaguucuaaagauccagu

SEQ ID NO: 2071214 - RNA, 19 nt, Artificial Sequence
  Description of Artificial Sequence: Synthetic oligonucleotide
uagguuugccgccgauaau

SEQ ID NO: 2071215 - RNA, 19 nt, Artificial Sequence
  Description of Artificial Sequence: Synthetic oligonucleotide
cagaggucgaagaauuagu

SEQ ID NO: 2071216 - RNA, 19 nt, Artificial Sequence
  Description of Artificial Sequence: Synthetic oligonucleotide
uccccagaggucgaagaau

SEQ ID NO: 2071217 - RNA, 19 nt, Artificial Sequence
  Description of Artificial Sequence: Synthetic oligonucleotide
acguaaaaucaaagucucu

SEQ ID NO: 2071218 - RNA, 19 nt, Artificial Sequence
  Description of Artificial Sequence: Synthetic oligonucleotide
uugccgccgauaauaccua

SEQ ID NO: 2071219 - RNA, 19 nt, Artificial Sequence
  Description of Artificial Sequence: Synthetic oligonucleotide
auauuucuccuuagaggaa

SEQ ID NO: 2071220 - RNA, 19 nt, Artificial Sequence
  Description of Artificial Sequence: Synthetic oligonucleotide
auaccaaucuccagccuuu

SEQ ID NO: 2071221 - RNA, 19 nt, Artificial Sequence
  Description of Artificial Sequence: Synthetic oligonucleotide
ggcuuaaaacacccuucac

SEQ ID NO: 2071222 - RNA, 19 nt, Artificial Sequence
  Description of Artificial Sequence: Synthetic oligonucleotide
uuucuccuuagaggaaauu

SEQ ID NO: 2071223 - RNA, 19 nt, Artificial Sequence
  Description of Artificial Sequence: Synthetic oligonucleotide
cauaccaaucuccagccuu

SEQ ID NO: 2071224 - RNA, 19 nt, Artificial Sequence
  Description of Artificial Sequence: Synthetic oligonucleotide
uaacgggaacuaagauaau

SEQ ID NO: 2071225 - RNA, 19 nt, Artificial Sequence
  Description of Artificial Sequence: Synthetic oligonucleotide
ccgccgauaauaccuacac

SEQ ID NO: 2071226 - RNA, 19 nt, Artificial Sequence
  Description of Artificial Sequence: Synthetic oligonucleotide
cgggaacuaagauaaugac

SEQ ID NO: 2071227 - RNA, 19 nt, Artificial Sequence
  Description of Artificial Sequence: Synthetic oligonucleotide
gucucaagagggaaguccu

SEQ ID NO: 2071228 - RNA, 19 nt, Artificial Sequence
  Description of Artificial Sequence: Synthetic oligonucleotide
cuggcugcaguagacguaa

SEQ ID NO: 2071229 - RNA, 19 nt, Artificial Sequence
  Description of Artificial Sequence: Synthetic oligonucleotide
ggaaugucucaagagggaa

SEQ ID NO: 2071230 - RNA, 19 nt, Artificial Sequence
  Description of Artificial Sequence: Synthetic oligonucleotide
caguaaugaggguccaugu

SEQ ID NO: 2071231 - RNA, 19 nt, Artificial Sequence
  Description of Artificial Sequence: Synthetic oligonucleotide
guacaacuaggauccauuu

SEQ ID NO: 2071232 - RNA, 19 nt, Artificial Sequence
  Description of Artificial Sequence: Synthetic oligonucleotide
cacaauauucaaggcuuaa

SEQ ID NO: 2071233 - RNA, 19 nt, Artificial Sequence
  Description of Artificial Sequence: Synthetic oligonucleotide
ugccgccgauaauaccuac

SEQ ID NO: 2071234 - RNA, 19 nt, Artificial Sequence
  Description of Artificial Sequence: Synthetic oligonucleotide
uuucaaaguccuggacguu

SEQ ID NO: 2071235 - RNA, 19 nt, Artificial Sequence
  Description of Artificial Sequence: Synthetic oligonucleotide
cauaaacccaaugcauucu

SEQ ID NO: 2071236 - RNA, 19 nt, Artificial Sequence
  Description of Artificial Sequence: Synthetic oligonucleotide
ggacguuucgacaguaaaa

SEQ ID NO: 2071237 - RNA, 19 nt, Artificial Sequence
  Description of Artificial Sequence: Synthetic oligonucleotide
gcugcuauaaaaccauauu

SEQ ID NO: 2071238 - RNA, 19 nt, Artificial Sequence
  Description of Artificial Sequence: Synthetic oligonucleotide
gucuaacgggaacuaagau

SEQ ID NO: 2071239 - RNA, 19 nt, Artificial Sequence
  Description of Artificial Sequence: Synthetic oligonucleotide
uaacccuggcaugguaaua

SEQ ID NO: 2071240 - RNA, 19 nt, Artificial Sequence
  Description of Artificial Sequence: Synthetic oligonucleotide
cacagcugguccauaccaa

SEQ ID NO: 2071241 - RNA, 19 nt, Artificial Sequence
  Description of Artificial Sequence: Synthetic oligonucleotide
gguuugccgccgauaauac

SEQ ID NO: 2071242 - RNA, 19 nt, Artificial Sequence
  Description of Artificial Sequence: Synthetic oligonucleotide
ucucuggaguggccauuua

SEQ ID NO: 2071243 - RNA, 19 nt, Artificial Sequence
  Description of Artificial Sequence: Synthetic oligonucleotide
cagauagucaguguugguu

SEQ ID NO: 2071244 - RNA, 19 nt, Artificial Sequence
  Description of Artificial Sequence: Synthetic oligonucleotide
cccaaacucuaucagucga

SEQ ID NO: 2071245 - RNA, 19 nt, Artificial Sequence
  Description of Artificial Sequence: Synthetic oligonucleotide
caaacuccagauagucagu

SEQ ID NO: 2071246 - RNA, 19 nt, Artificial Sequence
  Description of Artificial Sequence: Synthetic oligonucleotide
gguccauguaaaucagacu

SEQ ID NO: 2071247 - RNA, 19 nt, Artificial Sequence
  Description of Artificial Sequence: Synthetic oligonucleotide
auagucaguguugguucuu

SEQ ID NO: 2071248 - RNA, 19 nt, Artificial Sequence
  Description of Artificial Sequence: Synthetic oligonucleotide
uggcauccccagaggucga

SEQ ID NO: 2071249 - RNA, 19 nt, Artificial Sequence
  Description of Artificial Sequence: Synthetic oligonucleotide
caagucuaacgggaacuaa

SEQ ID NO: 2071250 - RNA, 19 nt, Artificial Sequence
  Description of Artificial Sequence: Synthetic oligonucleotide
cacuggcugcaguagacgu

SEQ ID NO: 2071251 - RNA, 19 nt, Artificial Sequence
  Description of Artificial Sequence: Synthetic oligonucleotide
ggcagaaugaguagcugcu

SEQ ID NO: 2071252 - RNA, 19 nt, Artificial Sequence
  Description of Artificial Sequence: Synthetic oligonucleotide
acguguccauuuaguuauc

SEQ ID NO: 2071253 - RNA, 19 nt, Artificial Sequence
  Description of Artificial Sequence: Synthetic oligonucleotide
cuggacguuucgacaguaa

SEQ ID NO: 2071254 - RNA, 19 nt, Artificial Sequence
  Description of Artificial Sequence: Synthetic oligonucleotide
ggcugcaguagacguaaaa

SEQ ID NO: 2071255 - RNA, 19 nt, Artificial Sequence
  Description of Artificial Sequence: Synthetic oligonucleotide
caagagggaaguccuuuau

SEQ ID NO: 2071256 - RNA, 19 nt, Artificial Sequence
  Description of Artificial Sequence: Synthetic oligonucleotide
ccauuuaguuauccaaaua

SEQ ID NO: 2071257 - RNA, 19 nt, Artificial Sequence
  Description of Artificial Sequence: Synthetic oligonucleotide
ggaugucuugcuucuucua

SEQ ID NO: 2071258 - RNA, 19 nt, Artificial Sequence
  Description of Artificial Sequence: Synthetic oligonucleotide
ggucgaagaauuagucugu

SEQ ID NO: 2071259 - RNA, 19 nt, Artificial Sequence
  Description of Artificial Sequence: Synthetic oligonucleotide
caguccugugcaacauaaa

SEQ ID NO: 2071260 - RNA, 19 nt, Artificial Sequence
  Description of Artificial Sequence: Synthetic oligonucleotide
cccagacuucuucccaaac

SEQ ID NO: 2071261 - RNA, 19 nt, Artificial Sequence
  Description of Artificial Sequence: Synthetic oligonucleotide
ccaaauacauaaacccaau

SEQ ID NO: 2071262 - RNA, 19 nt, Artificial Sequence
  Description of Artificial Sequence: Synthetic oligonucleotide
ccuuaaaauccugcuuaca

SEQ ID NO: 2071263 - RNA, 19 nt, Artificial Sequence
  Description of Artificial Sequence: Synthetic oligonucleotide
gugagcaaccacagcuggu

SEQ ID NO: 2071264 - RNA, 19 nt, Artificial Sequence
  Description of Artificial Sequence: Synthetic oligonucleotide
gucgaagaauuagucuguu

SEQ ID NO: 2071265 - RNA, 19 nt, Artificial Sequence
  Description of Artificial Sequence: Synthetic oligonucleotide
gccgccgauaauaccuaca

SEQ ID NO: 2071266 - RNA, 19 nt, Artificial Sequence
  Description of Artificial Sequence: Synthetic oligonucleotide
gcagaaugaguagcugcua

SEQ ID NO: 2071267 - RNA, 19 nt, Artificial Sequence
  Description of Artificial Sequence: Synthetic oligonucleotide
ccugugcaacauaaauagu

SEQ ID NO: 2071268 - RNA, 19 nt, Artificial Sequence
  Description of Artificial Sequence: Synthetic oligonucleotide
ccaagucuaacgggaacua

SEQ ID NO: 2071269 - RNA, 19 nt, Artificial Sequence
  Description of Artificial Sequence: Synthetic oligonucleotide
ccauuaacagcaggagacu

SEQ ID NO: 2071270 - RNA, 19 nt, Artificial Sequence
  Description of Artificial Sequence: Synthetic oligonucleotide
ccagauagucaguguuggu

SEQ ID NO: 2071271 - RNA, 19 nt, Artificial Sequence
  Description of Artificial Sequence: Synthetic oligonucleotide
cgccgauaauaccuacaca

SEQ ID NO: 2071272 - RNA, 19 nt, Artificial Sequence
  Description of Artificial Sequence: Synthetic oligonucleotide
cccaaugcauucucugcuu

SEQ ID NO: 2071273 - RNA, 19 nt, Artificial Sequence
  Description of Artificial Sequence: Synthetic oligonucleotide
ccuggacguuucgacagua

SEQ ID NO: 2071274 - RNA, 19 nt, Artificial Sequence
  Description of Artificial Sequence: Synthetic oligonucleotide
ggcauccccagaggucgaa

SEQ ID NO: 2071275 - RNA, 19 nt, Artificial Sequence
  Description of Artificial Sequence: Synthetic oligonucleotide
ccauaccaaucuccagccu

SEQ ID NO: 2071276 - RNA, 19 nt, Artificial Sequence
  Description of Artificial Sequence: Synthetic oligonucleotide
aauugggaguaauugaagg

SEQ ID NO: 2071277 - RNA, 19 nt, Artificial Sequence
  Description of Artificial Sequence: Synthetic oligonucleotide
aaaucuuccuccuuguaag

SEQ ID NO: 2071278 - RNA, 19 nt, Artificial Sequence
  Description of Artificial Sequence: Synthetic oligonucleotide
auauccaucaaguucacag

SEQ ID NO: 2071279 - RNA, 19 nt, Artificial Sequence
  Description of Artificial Sequence: Synthetic oligonucleotide
ugcaguacgucucagauug

SEQ ID NO: 2071280 - RNA, 19 nt, Artificial Sequence
  Description of Artificial Sequence: Synthetic oligonucleotide
agugcagcagaacaggugc

SEQ ID NO: 2071281 - RNA, 19 nt, Artificial Sequence
  Description of Artificial Sequence: Synthetic oligonucleotide
aggucuacaucccugaugg

SEQ ID NO: 2071282 - RNA, 19 nt, Artificial Sequence
  Description of Artificial Sequence: Synthetic oligonucleotide
uuucagaacagucuucaag

SEQ ID NO: 2071283 - RNA, 19 nt, Artificial Sequence
  Description of Artificial Sequence: Synthetic oligonucleotide
cagaguauggccaucagag

SEQ ID NO: 2071284 - RNA, 19 nt, Artificial Sequence
  Description of Artificial Sequence: Synthetic oligonucleotide
uaagucauguuguacagga

SEQ ID NO: 2071285 - RNA, 19 nt, Artificial Sequence
  Description of Artificial Sequence: Synthetic oligonucleotide
uuguaagucauguuguaca

SEQ ID NO: 2071286 - RNA, 19 nt, Artificial Sequence
  Description of Artificial Sequence: Synthetic oligonucleotide
gaguaugagguccacuugg

SEQ ID NO: 2071287 - RNA, 19 nt, Artificial Sequence
  Description of Artificial Sequence: Synthetic oligonucleotide
uuagaggucccuaaguaac

SEQ ID NO: 2071288 - RNA, 19 nt, Artificial Sequence
  Description of Artificial Sequence: Synthetic oligonucleotide
uguacaggauguaagggga

SEQ ID NO: 2071289 - RNA, 19 nt, Artificial Sequence
  Description of Artificial Sequence: Synthetic oligonucleotide
guuacgguccuuuggaagg

SEQ ID NO: 2071290 - RNA, 19 nt, Artificial Sequence
  Description of Artificial Sequence: Synthetic oligonucleotide
uaaccucaggucuacaucc

SEQ ID NO: 2071291 - RNA, 19 nt, Artificial Sequence
  Description of Artificial Sequence: Synthetic oligonucleotide
uggcaaucugcccaggugg

SEQ ID NO: 2071292 - RNA, 19 nt, Artificial Sequence
  Description of Artificial Sequence: Synthetic oligonucleotide
ucaaagggcgagaauuggg

SEQ ID NO: 2071293 - RNA, 19 nt, Artificial Sequence
  Description of Artificial Sequence: Synthetic oligonucleotide
uguaagucauguuguacag

SEQ ID NO: 2071294 - RNA, 19 nt, Artificial Sequence
  Description of Artificial Sequence: Synthetic oligonucleotide
ugaguuacgguccuuugga

SEQ ID NO: 2071295 - RNA, 19 nt, Artificial Sequence
  Description of Artificial Sequence: Synthetic oligonucleotide
guaaucagugagcugaagc

SEQ ID NO: 2071296 - RNA, 19 nt, Artificial Sequence
  Description of Artificial Sequence: Synthetic oligonucleotide
guuguaaucagugagcuga

SEQ ID NO: 2071297 - RNA, 19 nt, Artificial Sequence
  Description of Artificial Sequence: Synthetic oligonucleotide
uguaaggggagucuucccc

SEQ ID NO: 2071298 - RNA, 19 nt, Artificial Sequence
  Description of Artificial Sequence: Synthetic oligonucleotide
ugcacugguggaauggccg

SEQ ID NO: 2071299 - RNA, 19 nt, Artificial Sequence
  Description of Artificial Sequence: Synthetic oligonucleotide
uguguguccucauaugacc

SEQ ID NO: 2071300 - RNA, 19 nt, Artificial Sequence
  Description of Artificial Sequence: Synthetic oligonucleotide
gaaaauguugcuccaugug

SEQ ID NO: 2071301 - RNA, 19 nt, Artificial Sequence
  Description of Artificial Sequence: Synthetic oligonucleotide
uaauugaaggagaguauga

SEQ ID NO: 2071302 - RNA, 19 nt, Artificial Sequence
  Description of Artificial Sequence: Synthetic oligonucleotide
ugugagauccaccaacccu

SEQ ID NO: 2071303 - RNA, 19 nt, Artificial Sequence
  Description of Artificial Sequence: Synthetic oligonucleotide
aucagagccuuagaggucc

SEQ ID NO: 2071304 - RNA, 19 nt, Artificial Sequence
  Description of Artificial Sequence: Synthetic oligonucleotide
aggagguuccugcuaaggc

SEQ ID NO: 2071305 - RNA, 19 nt, Artificial Sequence
  Description of Artificial Sequence: Synthetic oligonucleotide
uaccagauauccaucaagu

SEQ ID NO: 2071306 - RNA, 19 nt, Artificial Sequence
  Description of Artificial Sequence: Synthetic oligonucleotide
ugggaagugcagcagaaca

SEQ ID NO: 2071307 - RNA, 19 nt, Artificial Sequence
  Description of Artificial Sequence: Synthetic oligonucleotide
auaccagauauccaucaag

SEQ ID NO: 2071308 - RNA, 19 nt, Artificial Sequence
  Description of Artificial Sequence: Synthetic oligonucleotide
uaguggaagcugaagguag

SEQ ID NO: 2071309 - RNA, 19 nt, Artificial Sequence
  Description of Artificial Sequence: Synthetic oligonucleotide
ucugguuacgguagucccg

SEQ ID NO: 2071310 - RNA, 19 nt, Artificial Sequence
  Description of Artificial Sequence: Synthetic oligonucleotide
aaucagugagcugaagcag

SEQ ID NO: 2071311 - RNA, 19 nt, Artificial Sequence
  Description of Artificial Sequence: Synthetic oligonucleotide
agagguaacaucauaccag

SEQ ID NO: 2071312 - RNA, 19 nt, Artificial Sequence
  Description of Artificial Sequence: Synthetic oligonucleotide
aagcagacggucaaaaucu

SEQ ID NO: 2071313 - RNA, 19 nt, Artificial Sequence
  Description of Artificial Sequence: Synthetic oligonucleotide
cauaggaggagguuccugc

SEQ ID NO: 2071314 - RNA, 19 nt, Artificial Sequence
  Description of Artificial Sequence: Synthetic oligonucleotide
aguaguggaagcugaaggu

SEQ ID NO: 2071315 - RNA, 19 nt, Artificial Sequence
  Description of Artificial Sequence: Synthetic oligonucleotide
auccaucaaguucacagag

SEQ ID NO: 2071316 - RNA, 19 nt, Artificial Sequence
  Description of Artificial Sequence: Synthetic oligonucleotide
gaagguagaggcugugucc

SEQ ID NO: 2071317 - RNA, 19 nt, Artificial Sequence
  Description of Artificial Sequence: Synthetic oligonucleotide
ucccuaaguaaccucaggu

SEQ ID NO: 2071318 - RNA, 19 nt, Artificial Sequence
  Description of Artificial Sequence: Synthetic oligonucleotide
ucauaccagauauccauca

SEQ ID NO: 2071319 - RNA, 19 nt, Artificial Sequence
  Description of Artificial Sequence: Synthetic oligonucleotide
uccagucuuucccagaggu

SEQ ID NO: 2071320 - RNA, 19 nt, Artificial Sequence
  Description of Artificial Sequence: Synthetic oligonucleotide
cuaaaggagccauugacca

SEQ ID NO: 2071321 - RNA, 19 nt, Artificial Sequence
  Description of Artificial Sequence: Synthetic oligonucleotide
cagaaagcccuuaaaugcc

SEQ ID NO: 2071322 - RNA, 19 nt, Artificial Sequence
  Description of Artificial Sequence: Synthetic oligonucleotide
ggagccauugaccaguggg

SEQ ID NO: 2071323 - RNA, 19 nt, Artificial Sequence
  Description of Artificial Sequence: Synthetic oligonucleotide
aguuacgguccuuuggaag

SEQ ID NO: 2071324 - RNA, 19 nt, Artificial Sequence
  Description of Artificial Sequence: Synthetic oligonucleotide
aagucuuucugguuacggu

SEQ ID NO: 2071325 - RNA, 19 nt, Artificial Sequence
  Description of Artificial Sequence: Synthetic oligonucleotide
guaauugaaggagaguaug

SEQ ID NO: 2071326 - RNA, 19 nt, Artificial Sequence
  Description of Artificial Sequence: Synthetic oligonucleotide
guuacgguagucccggugc

SEQ ID NO: 2071327 - RNA, 19 nt, Artificial Sequence
  Description of Artificial Sequence: Synthetic oligonucleotide
gggugguuagucuaggugg

SEQ ID NO: 2071328 - RNA, 19 nt, Artificial Sequence
  Description of Artificial Sequence: Synthetic oligonucleotide
guacgucucagauugcugc

SEQ ID NO: 2071329 - RNA, 19 nt, Artificial Sequence
  Description of Artificial Sequence: Synthetic oligonucleotide
ugaagguagaggcuguguc

SEQ ID NO: 2071330 - RNA, 19 nt, Artificial Sequence
  Description of Artificial Sequence: Synthetic oligonucleotide
ugaguucuggacauccaca

SEQ ID NO: 2071331 - RNA, 19 nt, Artificial Sequence
  Description of Artificial Sequence: Synthetic oligonucleotide
ucagaguauggccaucaga

SEQ ID NO: 2071332 - RNA, 19 nt, Artificial Sequence
  Description of Artificial Sequence: Synthetic oligonucleotide
aggaaguuggcacugcacu

SEQ ID NO: 2071333 - RNA, 19 nt, Artificial Sequence
  Description of Artificial Sequence: Synthetic oligonucleotide
gaagggcaggcccugagcc

SEQ ID NO: 2071334 - RNA, 19 nt, Artificial Sequence
  Description of Artificial Sequence: Synthetic oligonucleotide
ugacccuuucagcacaagc

SEQ ID NO: 2071335 - RNA, 19 nt, Artificial Sequence
  Description of Artificial Sequence: Synthetic oligonucleotide
uugaccagugggaagugca

SEQ ID NO: 2071336 - RNA, 19 nt, Artificial Sequence
  Description of Artificial Sequence: Synthetic oligonucleotide
gauguaaggggagucuucc

SEQ ID NO: 2071337 - RNA, 19 nt, Artificial Sequence
  Description of Artificial Sequence: Synthetic oligonucleotide
guuguacaggauguaaggg

SEQ ID NO: 2071338 - RNA, 19 nt, Artificial Sequence
  Description of Artificial Sequence: Synthetic oligonucleotide
ugaaguaggcagcaucccu

SEQ ID NO: 2071339 - RNA, 19 nt, Artificial Sequence
  Description of Artificial Sequence: Synthetic oligonucleotide
ugcagccccucaaagggcg

SEQ ID NO: 2071340 - RNA, 19 nt, Artificial Sequence
  Description of Artificial Sequence: Synthetic oligonucleotide
gaguaauugaaggagagua

SEQ ID NO: 2071341 - RNA, 19 nt, Artificial Sequence
  Description of Artificial Sequence: Synthetic oligonucleotide
uucugguuacgguaguccc

SEQ ID NO: 2071342 - RNA, 19 nt, Artificial Sequence
  Description of Artificial Sequence: Synthetic oligonucleotide
ugggaguaauugaaggaga

SEQ ID NO: 2071343 - RNA, 19 nt, Artificial Sequence
  Description of Artificial Sequence: Synthetic oligonucleotide
gagguaacaucauaccaga

SEQ ID NO: 2071344 - RNA, 19 nt, Artificial Sequence
  Description of Artificial Sequence: Synthetic oligonucleotide
uuucugguuacgguagucc

SEQ ID NO: 2071345 - RNA, 19 nt, Artificial Sequence
  Description of Artificial Sequence: Synthetic oligonucleotide
cucagauugcugcagcccc

SEQ ID NO: 2071346 - RNA, 19 nt, Artificial Sequence
  Description of Artificial Sequence: Synthetic oligonucleotide
gaauugggaguaauugaag

SEQ ID NO: 2071347 - RNA, 19 nt, Artificial Sequence
  Description of Artificial Sequence: Synthetic oligonucleotide
cauaugacccuuucagcac

SEQ ID NO: 2071348 - RNA, 19 nt, Artificial Sequence
  Description of Artificial Sequence: Synthetic oligonucleotide
cugaguuacgguccuuugg

SEQ ID NO: 2071349 - RNA, 19 nt, Artificial Sequence
  Description of Artificial Sequence: Synthetic oligonucleotide
cagaacagucuucaaggcc

SEQ ID NO: 2071350 - RNA, 19 nt, Artificial Sequence
  Description of Artificial Sequence: Synthetic oligonucleotide
ugcguuucagaacagucuu

SEQ ID NO: 2071351 - RNA, 19 nt, Artificial Sequence
  Description of Artificial Sequence: Synthetic oligonucleotide
agauccaccaacccugccu

SEQ ID NO: 2071352 - RNA, 19 nt, Artificial Sequence
  Description of Artificial Sequence: Synthetic oligonucleotide
aguaugagguccacuuggc

SEQ ID NO: 2071353 - RNA, 19 nt, Artificial Sequence
  Description of Artificial Sequence: Synthetic oligonucleotide
aagcccuuaaaugccuggg

SEQ ID NO: 2071354 - RNA, 19 nt, Artificial Sequence
  Description of Artificial Sequence: Synthetic oligonucleotide
uagaggucccuaaguaacc

SEQ ID NO: 2071355 - RNA, 19 nt, Artificial Sequence
  Description of Artificial Sequence: Synthetic oligonucleotide
auguaaggggagucuuccc

SEQ ID NO: 2071356 - RNA, 19 nt, Artificial Sequence
  Description of Artificial Sequence: Synthetic oligonucleotide
aagguagaggcugugucca

SEQ ID NO: 2071357 - RNA, 19 nt, Artificial Sequence
  Description of Artificial Sequence: Synthetic oligonucleotide
agucuagguggcaaucugc

SEQ ID NO: 2071358 - RNA, 19 nt, Artificial Sequence
  Description of Artificial Sequence: Synthetic oligonucleotide
uccaucaaguucacagaga

SEQ ID NO: 2071359 - RNA, 19 nt, Artificial Sequence
  Description of Artificial Sequence: Synthetic oligonucleotide
gugagauccaccaacccug

SEQ ID NO: 2071360 - RNA, 19 nt, Artificial Sequence
  Description of Artificial Sequence: Synthetic oligonucleotide
agaauugggaguaauugaa

SEQ ID NO: 2071361 - RNA, 19 nt, Artificial Sequence
  Description of Artificial Sequence: Synthetic oligonucleotide
ccucauaugacccuuucag

SEQ ID NO: 2071362 - RNA, 19 nt, Artificial Sequence
  Description of Artificial Sequence: Synthetic oligonucleotide
caggauaguguccuggcug

SEQ ID NO: 2071363 - RNA, 19 nt, Artificial Sequence
  Description of Artificial Sequence: Synthetic oligonucleotide
agcauggagggacagcugu

SEQ ID NO: 2071364 - RNA, 19 nt, Artificial Sequence
  Description of Artificial Sequence: Synthetic oligonucleotide
guaugagguccacuuggcg

SEQ ID NO: 2071365 - RNA, 19 nt, Artificial Sequence
  Description of Artificial Sequence: Synthetic oligonucleotide
auaugacccuuucagcaca

SEQ ID NO: 2071366 - RNA, 19 nt, Artificial Sequence
  Description of Artificial Sequence: Synthetic oligonucleotide
ugagaaaagguggcauucc

SEQ ID NO: 2071367 - RNA, 19 nt, Artificial Sequence
  Description of Artificial Sequence: Synthetic oligonucleotide
aguaaccucaggucuacau

SEQ ID NO: 2071368 - RNA, 19 nt, Artificial Sequence
  Description of Artificial Sequence: Synthetic oligonucleotide
agcccuuaaaugccugggg

SEQ ID NO: 2071369 - RNA, 19 nt, Artificial Sequence
  Description of Artificial Sequence: Synthetic oligonucleotide
uguuguaaucagugagcug

SEQ ID NO: 2071370 - RNA, 19 nt, Artificial Sequence
  Description of Artificial Sequence: Synthetic oligonucleotide
guggggucgagcuggauug

SEQ ID NO: 2071371 - RNA, 19 nt, Artificial Sequence
  Description of Artificial Sequence: Synthetic oligonucleotide
agaguaugagguccacuug

SEQ ID NO: 2071372 - RNA, 19 nt, Artificial Sequence
  Description of Artificial Sequence: Synthetic oligonucleotide
ugcaggauaguguccuggc

SEQ ID NO: 2071373 - RNA, 19 nt, Artificial Sequence
  Description of Artificial Sequence: Synthetic oligonucleotide
uccacauaggaggagguuc

SEQ ID NO: 2071374 - RNA, 19 nt, Artificial Sequence
  Description of Artificial Sequence: Synthetic oligonucleotide
ccuaaaggagccauugacc

SEQ ID NO: 2071375 - RNA, 19 nt, Artificial Sequence
  Description of Artificial Sequence: Synthetic oligonucleotide
uccgaauguuguaaucagu

SEQ ID NO: 2071376 - RNA, 19 nt, Artificial Sequence
  Description of Artificial Sequence: Synthetic oligonucleotide
cuuguaagucauguuguac

SEQ ID NO: 2071377 - RNA, 19 nt, Artificial Sequence
  Description of Artificial Sequence: Synthetic oligonucleotide
cacuuggcgaccugggcgg

SEQ ID NO: 2071378 - RNA, 19 nt, Artificial Sequence
  Description of Artificial Sequence: Synthetic oligonucleotide
ugaguguccuguggggucg

SEQ ID NO: 2071379 - RNA, 19 nt, Artificial Sequence
  Description of Artificial Sequence: Synthetic oligonucleotide
aaccucaggucuacauccc

SEQ ID NO: 2071380 - RNA, 19 nt, Artificial Sequence
  Description of Artificial Sequence: Synthetic oligonucleotide
ucuggacauccacaauggc

SEQ ID NO: 2071381 - RNA, 19 nt, Artificial Sequence
  Description of Artificial Sequence: Synthetic oligonucleotide
aaucugcccagguggagaa

SEQ ID NO: 2071382 - RNA, 19 nt, Artificial Sequence
  Description of Artificial Sequence: Synthetic oligonucleotide
ucuagguggcaaucugccc

SEQ ID NO: 2071383 - RNA, 19 nt, Artificial Sequence
  Description of Artificial Sequence: Synthetic oligonucleotide
gcugaguggucccuaaagg

SEQ ID NO: 2071384 - RNA, 19 nt, Artificial Sequence
  Description of Artificial Sequence: Synthetic oligonucleotide
aggauaguguccuggcugu

SEQ ID NO: 2071385 - RNA, 19 nt, Artificial Sequence
  Description of Artificial Sequence: Synthetic oligonucleotide
auugaccagugggaagugc

SEQ ID NO: 2071386 - RNA, 19 nt, Artificial Sequence
  Description of Artificial Sequence: Synthetic oligonucleotide
uuagucuagguggcaaucu

SEQ ID NO: 2071387 - RNA, 19 nt, Artificial Sequence
  Description of Artificial Sequence: Synthetic oligonucleotide
agcugaguguccugugggg

SEQ ID NO: 2071388 - RNA, 19 nt, Artificial Sequence
  Description of Artificial Sequence: Synthetic oligonucleotide
guaaccucaggucuacauc

SEQ ID NO: 2071389 - RNA, 19 nt, Artificial Sequence
  Description of Artificial Sequence: Synthetic oligonucleotide
ucaaguaguggaagcugaa

SEQ ID NO: 2071390 - RNA, 19 nt, Artificial Sequence
  Description of Artificial Sequence: Synthetic oligonucleotide
uguuccgaauguuguaauc

SEQ ID NO: 2071391 - RNA, 19 nt, Artificial Sequence
  Description of Artificial Sequence: Synthetic oligonucleotide
guaagucauguuguacagg

SEQ ID NO: 2071392 - RNA, 19 nt, Artificial Sequence
  Description of Artificial Sequence: Synthetic oligonucleotide
ucucagauugcugcagccc

SEQ ID NO: 2071393 - RNA, 19 nt, Artificial Sequence
  Description of Artificial Sequence: Synthetic oligonucleotide
cugaguucuggacauccac

SEQ ID NO: 2071394 - RNA, 19 nt, Artificial Sequence
  Description of Artificial Sequence: Synthetic oligonucleotide
cugguuacgguagucccgg

SEQ ID NO: 2071395 - RNA, 19 nt, Artificial Sequence
  Description of Artificial Sequence: Synthetic oligonucleotide
caaagggcgagaauuggga

SEQ ID NO: 2071396 - RNA, 19 nt, Artificial Sequence
  Description of Artificial Sequence: Synthetic oligonucleotide
ccgaauguuguaaucagug

SEQ ID NO: 2071397 - RNA, 19 nt, Artificial Sequence
  Description of Artificial Sequence: Synthetic oligonucleotide
cagagguaacaucauacca

SEQ ID NO: 2071398 - RNA, 19 nt, Artificial Sequence
  Description of Artificial Sequence: Synthetic oligonucleotide
cugaguggucccuaaagga

SEQ ID NO: 2071399 - RNA, 19 nt, Artificial Sequence
  Description of Artificial Sequence: Synthetic oligonucleotide
aaggccgaggacuccucug

SEQ ID NO: 2071400 - RNA, 19 nt, Artificial Sequence
  Description of Artificial Sequence: Synthetic oligonucleotide
aucauaccagauauccauc

SEQ ID NO: 2071401 - RNA, 19 nt, Artificial Sequence
  Description of Artificial Sequence: Synthetic oligonucleotide
gaggagguuccugcuaagg

SEQ ID NO: 2071402 - RNA, 19 nt, Artificial Sequence
  Description of Artificial Sequence: Synthetic oligonucleotide
uguggggucgagcuggauu

SEQ ID NO: 2071403 - RNA, 19 nt, Artificial Sequence
  Description of Artificial Sequence: Synthetic oligonucleotide
agggcaaaugucugugugu

SEQ ID NO: 2071404 - RNA, 19 nt, Artificial Sequence
  Description of Artificial Sequence: Synthetic oligonucleotide
cuuagaggucccuaaguaa

SEQ ID NO: 2071405 - RNA, 19 nt, Artificial Sequence
  Description of Artificial Sequence: Synthetic oligonucleotide
cucaaguaguggaagcuga

SEQ ID NO: 2071406 - RNA, 19 nt, Artificial Sequence
  Description of Artificial Sequence: Synthetic oligonucleotide
gacggucaaaaucuuccuc

SEQ ID NO: 2071407 - RNA, 19 nt, Artificial Sequence
  Description of Artificial Sequence: Synthetic oligonucleotide
uaacaucauaccagauauc

SEQ ID NO: 2071408 - RNA, 19 nt, Artificial Sequence
  Description of Artificial Sequence: Synthetic oligonucleotide
uaaguaaccucaggucuac

SEQ ID NO: 2071409 - RNA, 19 nt, Artificial Sequence
  Description of Artificial Sequence: Synthetic oligonucleotide
uacgucucagauugcugca

SEQ ID NO: 2071410 - RNA, 19 nt, Artificial Sequence
  Description of Artificial Sequence: Synthetic oligonucleotide
uguaaucagugagcugaag

SEQ ID NO: 2071411 - RNA, 19 nt, Artificial Sequence
  Description of Artificial Sequence: Synthetic oligonucleotide
cagcagaacaggugccucg

SEQ ID NO: 2071412 - RNA, 19 nt, Artificial Sequence
  Description of Artificial Sequence: Synthetic oligonucleotide
aucccuuaggcagagcuga

SEQ ID NO: 2071413 - RNA, 19 nt, Artificial Sequence
  Description of Artificial Sequence: Synthetic oligonucleotide
caucauaccagauauccau

SEQ ID NO: 2071414 - RNA, 19 nt, Artificial Sequence
  Description of Artificial Sequence: Synthetic oligonucleotide
aaggccugcaggauagugu

SEQ ID NO: 2071415 - RNA, 19 nt, Artificial Sequence
  Description of Artificial Sequence: Synthetic oligonucleotide
gagaguaugagguccacuu

SEQ ID NO: 2071416 - RNA, 19 nt, Artificial Sequence
  Description of Artificial Sequence: Synthetic oligonucleotide
ucuuucugguuacgguagu

SEQ ID NO: 2071417 - RNA, 19 nt, Artificial Sequence
  Description of Artificial Sequence: Synthetic oligonucleotide
cugagaaaagguggcauuc

SEQ ID NO: 2071418 - RNA, 19 nt, Artificial Sequence
  Description of Artificial Sequence: Synthetic oligonucleotide
gucccuaaguaaccucagg

SEQ ID NO: 2071419 - RNA, 19 nt, Artificial Sequence
  Description of Artificial Sequence: Synthetic oligonucleotide
ggugccucggggcagguag

SEQ ID NO: 2071420 - RNA, 19 nt, Artificial Sequence
  Description of Artificial Sequence: Synthetic oligonucleotide
acgguagucccggugcagc

SEQ ID NO: 2071421 - RNA, 19 nt, Artificial Sequence
  Description of Artificial Sequence: Synthetic oligonucleotide
ucagauugcugcagccccu

SEQ ID NO: 2071422 - RNA, 19 nt, Artificial Sequence
  Description of Artificial Sequence: Synthetic oligonucleotide
gguaacaucauaccagaua

SEQ ID NO: 2071423 - RNA, 19 nt, Artificial Sequence
  Description of Artificial Sequence: Synthetic oligonucleotide
gucuagguggcaaucugcc

SEQ ID NO: 2071424 - RNA, 19 nt, Artificial Sequence
  Description of Artificial Sequence: Synthetic oligonucleotide
caaguaguggaagcugaag

SEQ ID NO: 2071425 - RNA, 19 nt, Artificial Sequence
  Description of Artificial Sequence: Synthetic oligonucleotide
uuacgguagucccggugca

SEQ ID NO: 2071426 - RNA, 19 nt, Artificial Sequence
  Description of Artificial Sequence: Synthetic oligonucleotide
aaguaggcagcaucccuua

SEQ ID NO: 2071427 - RNA, 19 nt, Artificial Sequence
  Description of Artificial Sequence: Synthetic oligonucleotide
uggccccucaaguagugga

SEQ ID NO: 2071428 - RNA, 19 nt, Artificial Sequence
  Description of Artificial Sequence: Synthetic oligonucleotide
agccuuagaggucccuaag

SEQ ID NO: 2071429 - RNA, 19 nt, Artificial Sequence
  Description of Artificial Sequence: Synthetic oligonucleotide
ggaauggccggccacucag

SEQ ID NO: 2071430 - RNA, 19 nt, Artificial Sequence
  Description of Artificial Sequence: Synthetic oligonucleotide
uaaggggagucuuccccug

SEQ ID NO: 2071431 - RNA, 19 nt, Artificial Sequence
  Description of Artificial Sequence: Synthetic oligonucleotide
agcagaacaggugccucgg

SEQ ID NO: 2071432 - RNA, 19 nt, Artificial Sequence
  Description of Artificial Sequence: Synthetic oligonucleotide
ccagagguaacaucauacc

SEQ ID NO: 2071433 - RNA, 19 nt, Artificial Sequence
  Description of Artificial Sequence: Synthetic oligonucleotide
uuguaaucagugagcugaa

SEQ ID NO: 2071434 - RNA, 19 nt, Artificial Sequence
  Description of Artificial Sequence: Synthetic oligonucleotide
cccagagguaacaucauac

SEQ ID NO: 2071435 - RNA, 19 nt, Artificial Sequence
  Description of Artificial Sequence: Synthetic oligonucleotide
ggccaucagagccuuagag

SEQ ID NO: 2071436 - RNA, 19 nt, Artificial Sequence
  Description of Artificial Sequence: Synthetic oligonucleotide
uacaggauguaaggggagu

SEQ ID NO: 2071437 - RNA, 19 nt, Artificial Sequence
  Description of Artificial Sequence: Synthetic oligonucleotide
uaaaugccuggggccaggg

SEQ ID NO: 2071438 - RNA, 19 nt, Artificial Sequence
  Description of Artificial Sequence: Synthetic oligonucleotide
cugugagauccaccaaccc

SEQ ID NO: 2071439 - RNA, 19 nt, Artificial Sequence
  Description of Artificial Sequence: Synthetic oligonucleotide
aguauggccaucagagccu

SEQ ID NO: 2071440 - RNA, 19 nt, Artificial Sequence
  Description of Artificial Sequence: Synthetic oligonucleotide
guguguccucauaugaccc

SEQ ID NO: 2071441 - RNA, 19 nt, Artificial Sequence
  Description of Artificial Sequence: Synthetic oligonucleotide
agccaugaggccuccacau

SEQ ID NO: 2071442 - RNA, 19 nt, Artificial Sequence
  Description of Artificial Sequence: Synthetic oligonucleotide
cuaaguaaccucaggucua

SEQ ID NO: 2071443 - RNA, 19 nt, Artificial Sequence
  Description of Artificial Sequence: Synthetic oligonucleotide
augaggccuccacauagga

SEQ ID NO: 2071444 - RNA, 19 nt, Artificial Sequence
  Description of Artificial Sequence: Synthetic oligonucleotide
accagauauccaucaaguu

SEQ ID NO: 2071445 - RNA, 19 nt, Artificial Sequence
  Description of Artificial Sequence: Synthetic oligonucleotide
caucccuuaggcagagcug

SEQ ID NO: 2071446 - RNA, 19 nt, Artificial Sequence
  Description of Artificial Sequence: Synthetic oligonucleotide
aguaggcagcaucccuuag

SEQ ID NO: 2071447 - RNA, 19 nt, Artificial Sequence
  Description of Artificial Sequence: Synthetic oligonucleotide
gcuccaugugccuuggccc

SEQ ID NO: 2071448 - RNA, 19 nt, Artificial Sequence
  Description of Artificial Sequence: Synthetic oligonucleotide
agguugcagccaugaggcc

SEQ ID NO: 2071449 - RNA, 19 nt, Artificial Sequence
  Description of Artificial Sequence: Synthetic oligonucleotide
uaugacccuuucagcacaa

SEQ ID NO: 2071450 - RNA, 19 nt, Artificial Sequence
  Description of Artificial Sequence: Synthetic oligonucleotide
gacccuuucagcacaagcu

SEQ ID NO: 2071451 - RNA, 19 nt, Artificial Sequence
  Description of Artificial Sequence: Synthetic oligonucleotide
accugggcggagcauggag

SEQ ID NO: 2071452 - RNA, 19 nt, Artificial Sequence
  Description of Artificial Sequence: Synthetic oligonucleotide
uaaggccgaggacuccucu

SEQ ID NO: 2071453 - RNA, 19 nt, Artificial Sequence
  Description of Artificial Sequence: Synthetic oligonucleotide
ccugugagauccaccaacc

SEQ ID NO: 2071454 - RNA, 19 nt, Artificial Sequence
  Description of Artificial Sequence: Synthetic oligonucleotide
aacaggugccucggggcag

SEQ ID NO: 2071455 - RNA, 19 nt, Artificial Sequence
  Description of Artificial Sequence: Synthetic oligonucleotide
cugcacugguggaauggcc

SEQ ID NO: 2071456 - RNA, 19 nt, Artificial Sequence
  Description of Artificial Sequence: Synthetic oligonucleotide
cccuaaaggagccauugac

SEQ ID NO: 2071457 - RNA, 19 nt, Artificial Sequence
  Description of Artificial Sequence: Synthetic oligonucleotide
gacuccucugaguucugga

SEQ ID NO: 2071458 - RNA, 19 nt, Artificial Sequence
  Description of Artificial Sequence: Synthetic oligonucleotide
acaucccugauggcuucgc

SEQ ID NO: 2071459 - RNA, 19 nt, Artificial Sequence
  Description of Artificial Sequence: Synthetic oligonucleotide
ccuuaggcagagcugagug

SEQ ID NO: 2071460 - RNA, 19 nt, Artificial Sequence
  Description of Artificial Sequence: Synthetic oligonucleotide
cuuaaaugccuggggccag

SEQ ID NO: 2071461 - RNA, 19 nt, Artificial Sequence
  Description of Artificial Sequence: Synthetic oligonucleotide
ccaugaggccuccacauag

SEQ ID NO: 2071462 - RNA, 19 nt, Artificial Sequence
  Description of Artificial Sequence: Synthetic oligonucleotide
cauggagggacagcuguug

SEQ ID NO: 2071463 - RNA, 19 nt, Artificial Sequence
  Description of Artificial Sequence: Synthetic oligonucleotide
guuagucuagguggcaauc

SEQ ID NO: 2071464 - RNA, 19 nt, Artificial Sequence
  Description of Artificial Sequence: Synthetic oligonucleotide
gcccuuaaaugccuggggc

SEQ ID NO: 2071465 - RNA, 19 nt, Artificial Sequence
  Description of Artificial Sequence: Synthetic oligonucleotide
ggggugguuagucuaggug

SEQ ID NO: 2071466 - RNA, 19 nt, Artificial Sequence
  Description of Artificial Sequence: Synthetic oligonucleotide
ugguuagucuagguggcaa

SEQ ID NO: 2071467 - RNA, 19 nt, Artificial Sequence
  Description of Artificial Sequence: Synthetic oligonucleotide
cccuuaaaugccuggggcc

SEQ ID NO: 2071468 - RNA, 19 nt, Artificial Sequence
  Description of Artificial Sequence: Synthetic oligonucleotide
aggucccuaaguaaccuca

SEQ ID NO: 2071469 - RNA, 19 nt, Artificial Sequence
  Description of Artificial Sequence: Synthetic oligonucleotide
cucaggucuacaucccuga

SEQ ID NO: 2071470 - RNA, 19 nt, Artificial Sequence
  Description of Artificial Sequence: Synthetic oligonucleotide
gagccauugaccaguggga

SEQ ID NO: 2071471 - RNA, 19 nt, Artificial Sequence
  Description of Artificial Sequence: Synthetic oligonucleotide
ucccagagguaacaucaua

SEQ ID NO: 2071472 - RNA, 19 nt, Artificial Sequence
  Description of Artificial Sequence: Synthetic oligonucleotide
uggaauggccggccacuca

SEQ ID NO: 2071473 - RNA, 19 nt, Artificial Sequence
  Description of Artificial Sequence: Synthetic oligonucleotide
agaggucccuaaguaaccu

SEQ ID NO: 2071474 - RNA, 19 nt, Artificial Sequence
  Description of Artificial Sequence: Synthetic oligonucleotide
agagaaaauguugcuccau

SEQ ID NO: 2071475 - RNA, 19 nt, Artificial Sequence
  Description of Artificial Sequence: Synthetic oligonucleotide
guacaggauguaaggggag

SEQ ID NO: 2071476 - RNA, 19 nt, Artificial Sequence
  Description of Artificial Sequence: Synthetic oligonucleotide
guaggaucugagaaaaggu

SEQ ID NO: 2071477 - RNA, 19 nt, Artificial Sequence
  Description of Artificial Sequence: Synthetic oligonucleotide
uccaccaacccugccuuga

SEQ ID NO: 2071478 - RNA, 19 nt, Artificial Sequence
  Description of Artificial Sequence: Synthetic oligonucleotide
ucccuuaggcagagcugag

SEQ ID NO: 2071479 - RNA, 19 nt, Artificial Sequence
  Description of Artificial Sequence: Synthetic oligonucleotide
aguucacagagaaaauguu

SEQ ID NO: 2071480 - RNA, 19 nt, Artificial Sequence
  Description of Artificial Sequence: Synthetic oligonucleotide
caucagagccuuagagguc

SEQ ID NO: 2071481 - RNA, 19 nt, Artificial Sequence
  Description of Artificial Sequence: Synthetic oligonucleotide
gauugcugcagccccucaa

SEQ ID NO: 2071482 - RNA, 19 nt, Artificial Sequence
  Description of Artificial Sequence: Synthetic oligonucleotide
guggaagcugaagguagag

SEQ ID NO: 2071483 - RNA, 19 nt, Artificial Sequence
  Description of Artificial Sequence: Synthetic oligonucleotide
aguucuggacauccacaau

SEQ ID NO: 2071484 - RNA, 19 nt, Artificial Sequence
  Description of Artificial Sequence: Synthetic oligonucleotide
gaggucccuaaguaaccuc

SEQ ID NO: 2071485 - RNA, 19 nt, Artificial Sequence
  Description of Artificial Sequence: Synthetic oligonucleotide
cauguuguacaggauguaa

SEQ ID NO: 2071486 - RNA, 19 nt, Artificial Sequence
  Description of Artificial Sequence: Synthetic oligonucleotide
ugguggaauggccggccac

SEQ ID NO: 2071487 - RNA, 19 nt, Artificial Sequence
  Description of Artificial Sequence: Synthetic oligonucleotide
uaggaggagguuccugcua

SEQ ID NO: 2071488 - RNA, 19 nt, Artificial Sequence
  Description of Artificial Sequence: Synthetic oligonucleotide
cagagaaaauguugcucca

SEQ ID NO: 2071489 - RNA, 19 nt, Artificial Sequence
  Description of Artificial Sequence: Synthetic oligonucleotide
ucaggucuacaucccugau

SEQ ID NO: 2071490 - RNA, 19 nt, Artificial Sequence
  Description of Artificial Sequence: Synthetic oligonucleotide
cuuggccccucaaguagug

SEQ ID NO: 2071491 - RNA, 19 nt, Artificial Sequence
  Description of Artificial Sequence: Synthetic oligonucleotide
uggcguugguccucagggc

SEQ ID NO: 2071492 - RNA, 19 nt, Artificial Sequence
  Description of Artificial Sequence: Synthetic oligonucleotide
cgagaauugggaguaauug

SEQ ID NO: 2071493 - RNA, 19 nt, Artificial Sequence
  Description of Artificial Sequence: Synthetic oligonucleotide
uuacgguccuuuggaaggu

SEQ ID NO: 2071494 - RNA, 19 nt, Artificial Sequence
  Description of Artificial Sequence: Synthetic oligonucleotide
gucauguuguacaggaugu

SEQ ID NO: 2071495 - RNA, 19 nt, Artificial Sequence
  Description of Artificial Sequence: Synthetic oligonucleotide
cccuaaguaaccucagguc

SEQ ID NO: 2071496 - RNA, 19 nt, Artificial Sequence
  Description of Artificial Sequence: Synthetic oligonucleotide
cugcuaaggccgaggacuc

SEQ ID NO: 2071497 - RNA, 19 nt, Artificial Sequence
  Description of Artificial Sequence: Synthetic oligonucleotide
ucuuucccagagguaacau

SEQ ID NO: 2071498 - RNA, 19 nt, Artificial Sequence
  Description of Artificial Sequence: Synthetic oligonucleotide
ggugguuagucuagguggc

SEQ ID NO: 2071499 - RNA, 19 nt, Artificial Sequence
  Description of Artificial Sequence: Synthetic oligonucleotide
aggagaguaugagguccac

SEQ ID NO: 2071500 - RNA, 19 nt, Artificial Sequence
  Description of Artificial Sequence: Synthetic oligonucleotide
gagccuuagaggucccuaa

SEQ ID NO: 2071501 - RNA, 19 nt, Artificial Sequence
  Description of Artificial Sequence: Synthetic oligonucleotide
ucagagccuuagagguccc

SEQ ID NO: 2071502 - RNA, 19 nt, Artificial Sequence
  Description of Artificial Sequence: Synthetic oligonucleotide
cugcagccccucaaagggc

SEQ ID NO: 2071503 - RNA, 19 nt, Artificial Sequence
  Description of Artificial Sequence: Synthetic oligonucleotide
ccugcguuucagaacaguc

SEQ ID NO: 2071504 - RNA, 19 nt, Artificial Sequence
  Description of Artificial Sequence: Synthetic oligonucleotide
uuggccccucaaguagugg

SEQ ID NO: 2071505 - RNA, 19 nt, Artificial Sequence
  Description of Artificial Sequence: Synthetic oligonucleotide
gcugcaggcugaguuacgg

SEQ ID NO: 2071506 - RNA, 19 nt, Artificial Sequence
  Description of Artificial Sequence: Synthetic oligonucleotide
caucccugauggcuucgcc

SEQ ID NO: 2071507 - RNA, 19 nt, Artificial Sequence
  Description of Artificial Sequence: Synthetic oligonucleotide
cagguaggaucugagaaaa

SEQ ID NO: 2071508 - RNA, 19 nt, Artificial Sequence
  Description of Artificial Sequence: Synthetic oligonucleotide
ggcugcgccgaacaccagg

SEQ ID NO: 2071509 - RNA, 19 nt, Artificial Sequence
  Description of Artificial Sequence: Synthetic oligonucleotide
cuacaucccugauggcuuc

SEQ ID NO: 2071510 - RNA, 19 nt, Artificial Sequence
  Description of Artificial Sequence: Synthetic oligonucleotide
ucauguuguacaggaugua

SEQ ID NO: 2071511 - RNA, 19 nt, Artificial Sequence
  Description of Artificial Sequence: Synthetic oligonucleotide
gguuacgguagucccggug

SEQ ID NO: 2071512 - RNA, 19 nt, Artificial Sequence
  Description of Artificial Sequence: Synthetic oligonucleotide
cuuucugguuacgguaguc

SEQ ID NO: 2071513 - RNA, 19 nt, Artificial Sequence
  Description of Artificial Sequence: Synthetic oligonucleotide
gucuacaucccugauggcu

SEQ ID NO: 2071514 - RNA, 19 nt, Artificial Sequence
  Description of Artificial Sequence: Synthetic oligonucleotide
uacgguagucccggugcag

SEQ ID NO: 2071515 - RNA, 19 nt, Artificial Sequence
  Description of Artificial Sequence: Synthetic oligonucleotide
gaguuacgguccuuuggaa

SEQ ID NO: 2071516 - RNA, 19 nt, Artificial Sequence
  Description of Artificial Sequence: Synthetic oligonucleotide
agggcgagaauugggagua

SEQ ID NO: 2071517 - RNA, 19 nt, Artificial Sequence
  Description of Artificial Sequence: Synthetic oligonucleotide
gccuuggccccucaaguag

SEQ ID NO: 2071518 - RNA, 19 nt, Artificial Sequence
  Description of Artificial Sequence: Synthetic oligonucleotide
acgucucagauugcugcag

SEQ ID NO: 2071519 - RNA, 19 nt, Artificial Sequence
  Description of Artificial Sequence: Synthetic oligonucleotide
gcacugguggaauggccgg

SEQ ID NO: 2071520 - RNA, 19 nt, Artificial Sequence
  Description of Artificial Sequence: Synthetic oligonucleotide
aguguccuggcuguuccga

SEQ ID NO: 2071521 - RNA, 19 nt, Artificial Sequence
  Description of Artificial Sequence: Synthetic oligonucleotide
cauaccagauauccaucaa

SEQ ID NO: 2071522 - RNA, 19 nt, Artificial Sequence
  Description of Artificial Sequence: Synthetic oligonucleotide
gccauugaccagugggaag

SEQ ID NO: 2071523 - RNA, 19 nt, Artificial Sequence
  Description of Artificial Sequence: Synthetic oligonucleotide
agcuguuguugaugaagua

SEQ ID NO: 2071524 - RNA, 19 nt, Artificial Sequence
  Description of Artificial Sequence: Synthetic oligonucleotide
ucuggggcccugcguuuca

SEQ ID NO: 2071525 - RNA, 19 nt, Artificial Sequence
  Description of Artificial Sequence: Synthetic oligonucleotide
cugcguuucagaacagucu

SEQ ID NO: 2071526 - RNA, 19 nt, Artificial Sequence
  Description of Artificial Sequence: Synthetic oligonucleotide
ccuaaguaaccucaggucu

SEQ ID NO: 2071527 - RNA, 19 nt, Artificial Sequence
  Description of Artificial Sequence: Synthetic oligonucleotide
ggcaaaugucugugugucc

SEQ ID NO: 2071528 - RNA, 19 nt, Artificial Sequence
  Description of Artificial Sequence: Synthetic oligonucleotide
ucgccucuggggcccugcg

SEQ ID NO: 2071529 - RNA, 19 nt, Artificial Sequence
  Description of Artificial Sequence: Synthetic oligonucleotide
cagggcugcgccgaacacc

SEQ ID NO: 2071530 - RNA, 19 nt, Artificial Sequence
  Description of Artificial Sequence: Synthetic oligonucleotide
caccaacccugccuugagc

SEQ ID NO: 2071531 - RNA, 19 nt, Artificial Sequence
  Description of Artificial Sequence: Synthetic oligonucleotide
ccaucagagccuuagaggu

SEQ ID NO: 2071532 - RNA, 19 nt, Artificial Sequence
  Description of Artificial Sequence: Synthetic oligonucleotide
acggaggaaguuggcacug

SEQ ID NO: 2071533 - RNA, 19 nt, Artificial Sequence
  Description of Artificial Sequence: Synthetic oligonucleotide
agcccugcaguacgucuca

SEQ ID NO: 2071534 - RNA, 19 nt, Artificial Sequence
  Description of Artificial Sequence: Synthetic oligonucleotide
cagagcugaguguccugug

SEQ ID NO: 2071535 - RNA, 19 nt, Artificial Sequence
  Description of Artificial Sequence: Synthetic oligonucleotide
aggauguaaggggagucuu

SEQ ID NO: 2071536 - RNA, 19 nt, Artificial Sequence
  Description of Artificial Sequence: Synthetic oligonucleotide
guguccagggcaaaugucu

SEQ ID NO: 2071537 - RNA, 19 nt, Artificial Sequence
  Description of Artificial Sequence: Synthetic oligonucleotide
agccauugaccagugggaa

SEQ ID NO: 2071538 - RNA, 19 nt, Artificial Sequence
  Description of Artificial Sequence: Synthetic oligonucleotide
aaguaaccucaggucuaca

SEQ ID NO: 2071539 - RNA, 19 nt, Artificial Sequence
  Description of Artificial Sequence: Synthetic oligonucleotide
gcugcgccgaacaccaggg

SEQ ID NO: 2071540 - RNA, 19 nt, Artificial Sequence
  Description of Artificial Sequence: Synthetic oligonucleotide
caaucugcccagguggaga

SEQ ID NO: 2071541 - RNA, 19 nt, Artificial Sequence
  Description of Artificial Sequence: Synthetic oligonucleotide
uggggucgagcuggauugg

SEQ ID NO: 2071542 - RNA, 19 nt, Artificial Sequence
  Description of Artificial Sequence: Synthetic oligonucleotide
gcugaguuacgguccuuug

SEQ ID NO: 2071543 - RNA, 19 nt, Artificial Sequence
  Description of Artificial Sequence: Synthetic oligonucleotide
guggagggucagaguaugg

SEQ ID NO: 2071544 - RNA, 19 nt, Artificial Sequence
  Description of Artificial Sequence: Synthetic oligonucleotide
ucuuccccugugagaucca

SEQ ID NO: 2071545 - RNA, 19 nt, Artificial Sequence
  Description of Artificial Sequence: Synthetic oligonucleotide
cuaaggccgaggacuccuc

SEQ ID NO: 2071546 - RNA, 19 nt, Artificial Sequence
  Description of Artificial Sequence: Synthetic oligonucleotide
uggcuucgccucuggggcc

SEQ ID NO: 2071547 - RNA, 19 nt, Artificial Sequence
  Description of Artificial Sequence: Synthetic oligonucleotide
uacgguccuuuggaaggug

SEQ ID NO: 2071548 - RNA, 19 nt, Artificial Sequence
  Description of Artificial Sequence: Synthetic oligonucleotide
gcuggcguugguccucagg

SEQ ID NO: 2071549 - RNA, 19 nt, Artificial Sequence
  Description of Artificial Sequence: Synthetic oligonucleotide
gaaguaggcagcaucccuu

SEQ ID NO: 2071550 - RNA, 19 nt, Artificial Sequence
  Description of Artificial Sequence: Synthetic oligonucleotide
agauugcugcagccccuca

SEQ ID NO: 2071551 - RNA, 19 nt, Artificial Sequence
  Description of Artificial Sequence: Synthetic oligonucleotide
gagcccugcaguacgucuc

SEQ ID NO: 2071552 - RNA, 19 nt, Artificial Sequence
  Description of Artificial Sequence: Synthetic oligonucleotide
gaagugcagcagaacaggu

SEQ ID NO: 2071553 - RNA, 19 nt, Artificial Sequence
  Description of Artificial Sequence: Synthetic oligonucleotide
cacucagaaagcccuuaaa

SEQ ID NO: 2071554 - RNA, 19 nt, Artificial Sequence
  Description of Artificial Sequence: Synthetic oligonucleotide
aggcagcaucccuuaggca

SEQ ID NO: 2071555 - RNA, 19 nt, Artificial Sequence
  Description of Artificial Sequence: Synthetic oligonucleotide
cauugaccagugggaagug

SEQ ID NO: 2071556 - RNA, 19 nt, Artificial Sequence
  Description of Artificial Sequence: Synthetic oligonucleotide
agagccuuagaggucccua

SEQ ID NO: 2071557 - RNA, 19 nt, Artificial Sequence
  Description of Artificial Sequence: Synthetic oligonucleotide
gcaucccuuaggcagagcu

SEQ ID NO: 2071558 - RNA, 19 nt, Artificial Sequence
  Description of Artificial Sequence: Synthetic oligonucleotide
ccucaggucuacaucccug

SEQ ID NO: 2071559 - RNA, 19 nt, Artificial Sequence
  Description of Artificial Sequence: Synthetic oligonucleotide
ggucagaguauggccauca

SEQ ID NO: 2071560 - RNA, 19 nt, Artificial Sequence
  Description of Artificial Sequence: Synthetic oligonucleotide
ggaggagguuccugcuaag

SEQ ID NO: 2071561 - RNA, 19 nt, Artificial Sequence
  Description of Artificial Sequence: Synthetic oligonucleotide
ggucccuaaguaaccucag

SEQ ID NO: 2071562 - RNA, 19 nt, Artificial Sequence
  Description of Artificial Sequence: Synthetic oligonucleotide
cucggggcagguaggaucu

SEQ ID NO: 2071563 - RNA, 19 nt, Artificial Sequence
  Description of Artificial Sequence: Synthetic oligonucleotide
gggucgagcuggauugggg

SEQ ID NO: 2071564 - RNA, 19 nt, Artificial Sequence
  Description of Artificial Sequence: Synthetic oligonucleotide
ggagcauggagggacagcu

SEQ ID NO: 2071565 - RNA, 19 nt, Artificial Sequence
  Description of Artificial Sequence: Synthetic oligonucleotide
agcaucccuuaggcagagc

SEQ ID NO: 2071566 - RNA, 19 nt, Artificial Sequence
  Description of Artificial Sequence: Synthetic oligonucleotide
ccucaaguaguggaagcug

SEQ ID NO: 2071567 - RNA, 19 nt, Artificial Sequence
  Description of Artificial Sequence: Synthetic oligonucleotide
gugccuuggccccucaagu

SEQ ID NO: 2071568 - RNA, 19 nt, Artificial Sequence
  Description of Artificial Sequence: Synthetic oligonucleotide
cuuccccugugagauccac

SEQ ID NO: 2071569 - RNA, 19 nt, Artificial Sequence
  Description of Artificial Sequence: Synthetic oligonucleotide
cuguguccagggcaaaugu

SEQ ID NO: 2071570 - RNA, 19 nt, Artificial Sequence
  Description of Artificial Sequence: Synthetic oligonucleotide
auggccggccacucagaaa

SEQ ID NO: 2071571 - RNA, 19 nt, Artificial Sequence
  Description of Artificial Sequence: Synthetic oligonucleotide
ccuuagaggucccuaagua

SEQ ID NO: 2071572 - RNA, 19 nt, Artificial Sequence
  Description of Artificial Sequence: Synthetic oligonucleotide
ccucggggcagguaggauc

SEQ ID NO: 2071573 - RNA, 19 nt, Artificial Sequence
  Description of Artificial Sequence: Synthetic oligonucleotide
ccggccacucagaaagccc

SEQ ID NO: 2071574 - RNA, 19 nt, Artificial Sequence
  Description of Artificial Sequence: Synthetic oligonucleotide
uucgccucuggggcccugc

SEQ ID NO: 2071575 - RNA, 19 nt, Artificial Sequence
  Description of Artificial Sequence: Synthetic oligonucleotide
ggacuccucugaguucugg

SEQ ID NO: 2071576 - RNA, 19 nt, Artificial Sequence
  Description of Artificial Sequence: Synthetic oligonucleotide
ggauguaaggggagucuuc

SEQ ID NO: 2071577 - RNA, 19 nt, Artificial Sequence
  Description of Artificial Sequence: Synthetic oligonucleotide
cagauugcugcagccccuc

SEQ ID NO: 2071578 - RNA, 19 nt, Artificial Sequence
  Description of Artificial Sequence: Synthetic oligonucleotide
ccuuaaaugccuggggcca

SEQ ID NO: 2071579 - RNA, 19 nt, Artificial Sequence
  Description of Artificial Sequence: Synthetic oligonucleotide
agguccacuuggcgaccug

SEQ ID NO: 2071580 - RNA, 19 nt, Artificial Sequence
  Description of Artificial Sequence: Synthetic oligonucleotide
gaauggccggccacucaga

SEQ ID NO: 2071581 - RNA, 19 nt, Artificial Sequence
  Description of Artificial Sequence: Synthetic oligonucleotide
cagcaucccuuaggcagag

SEQ ID NO: 2071582 - RNA, 19 nt, Artificial Sequence
  Description of Artificial Sequence: Synthetic oligonucleotide
ucaaggccugcaggauagu

SEQ ID NO: 2071583 - RNA, 19 nt, Artificial Sequence
  Description of Artificial Sequence: Synthetic oligonucleotide
ugguuacgguagucccggu

SEQ ID NO: 2071584 - RNA, 19 nt, Artificial Sequence
  Description of Artificial Sequence: Synthetic oligonucleotide
ggcguugguccucagggcu

SEQ ID NO: 2071585 - RNA, 19 nt, Artificial Sequence
  Description of Artificial Sequence: Synthetic oligonucleotide
gugguuagucuagguggca

SEQ ID NO: 2071586 - RNA, 19 nt, Artificial Sequence
  Description of Artificial Sequence: Synthetic oligonucleotide
ggucuacaucccugauggc

SEQ ID NO: 2071587 - RNA, 19 nt, Artificial Sequence
  Description of Artificial Sequence: Synthetic oligonucleotide
uauggccaucagagccuua

SEQ ID NO: 2071588 - RNA, 19 nt, Artificial Sequence
  Description of Artificial Sequence: Synthetic oligonucleotide
cgucucagauugcugcagc

SEQ ID NO: 2071589 - RNA, 19 nt, Artificial Sequence
  Description of Artificial Sequence: Synthetic oligonucleotide
uagucccggugcagcugga

SEQ ID NO: 2071590 - RNA, 19 nt, Artificial Sequence
  Description of Artificial Sequence: Synthetic oligonucleotide
ggccgaggacuccucugag

SEQ ID NO: 2071591 - RNA, 19 nt, Artificial Sequence
  Description of Artificial Sequence: Synthetic oligonucleotide
ggggucgagcuggauuggg

SEQ ID NO: 2071592 - RNA, 19 nt, Artificial Sequence
  Description of Artificial Sequence: Synthetic oligonucleotide
gugccucggggcagguagg

SEQ ID NO: 2071593 - RNA, 19 nt, Artificial Sequence
  Description of Artificial Sequence: Synthetic oligonucleotide
cuuggcgaccugggcggag

SEQ ID NO: 2071594 - RNA, 19 nt, Artificial Sequence
  Description of Artificial Sequence: Synthetic oligonucleotide
gcaaucugcccagguggag

SEQ ID NO: 2071595 - RNA, 19 nt, Artificial Sequence
  Description of Artificial Sequence: Synthetic oligonucleotide
ugggcggagcauggaggga

SEQ ID NO: 2071596 - RNA, 19 nt, Artificial Sequence
  Description of Artificial Sequence: Synthetic oligonucleotide
ggcauucuuccagucuuuc

SEQ ID NO: 2071597 - RNA, 19 nt, Artificial Sequence
  Description of Artificial Sequence: Synthetic oligonucleotide
gccccucaaguaguggaag

SEQ ID NO: 2071598 - RNA, 19 nt, Artificial Sequence
  Description of Artificial Sequence: Synthetic oligonucleotide
ggaguaauugaaggagagu

SEQ ID NO: 2071599 - RNA, 19 nt, Artificial Sequence
  Description of Artificial Sequence: Synthetic oligonucleotide
agcagacggucaaaaucuu

SEQ ID NO: 2071600 - RNA, 19 nt, Artificial Sequence
  Description of Artificial Sequence: Synthetic oligonucleotide
gcgaccugggcggagcaug

SEQ ID NO: 2071601 - RNA, 19 nt, Artificial Sequence
  Description of Artificial Sequence: Synthetic oligonucleotide
gguuagucuagguggcaau

SEQ ID NO: 2071602 - RNA, 19 nt, Artificial Sequence
  Description of Artificial Sequence: Synthetic oligonucleotide
gggcccugcguuucagaac

SEQ ID NO: 2071603 - RNA, 19 nt, Artificial Sequence
  Description of Artificial Sequence: Synthetic oligonucleotide
cugguggaauggccggcca

SEQ ID NO: 2071604 - RNA, 19 nt, Artificial Sequence
  Description of Artificial Sequence: Synthetic oligonucleotide
aacccugccuugagcucau

SEQ ID NO: 2071605 - RNA, 19 nt, Artificial Sequence
  Description of Artificial Sequence: Synthetic oligonucleotide
gccuuagaggucccuaagu

SEQ ID NO: 2071606 - RNA, 19 nt, Artificial Sequence
  Description of Artificial Sequence: Synthetic oligonucleotide
cugagcccugcaguacguc

SEQ ID NO: 2071607 - RNA, 19 nt, Artificial Sequence
  Description of Artificial Sequence: Synthetic oligonucleotide
ggcaaucugcccaggugga

SEQ ID NO: 2071608 - RNA, 19 nt, Artificial Sequence
  Description of Artificial Sequence: Synthetic oligonucleotide
cucuggggcccugcguuuc

SEQ ID NO: 2071609 - RNA, 19 nt, Artificial Sequence
  Description of Artificial Sequence: Synthetic oligonucleotide
agccccucaaagggcgaga

SEQ ID NO: 2071610 - RNA, 19 nt, Artificial Sequence
  Description of Artificial Sequence: Synthetic oligonucleotide
ccaccaacccugccuugag

SEQ ID NO: 2071611 - RNA, 19 nt, Artificial Sequence
  Description of Artificial Sequence: Synthetic oligonucleotide
ccauugaccagugggaagu

SEQ ID NO: 2071612 - RNA, 19 nt, Artificial Sequence
  Description of Artificial Sequence: Synthetic oligonucleotide
ggcauuccuggggcuggcg

SEQ ID NO: 2071613 - RNA, 19 nt, Artificial Sequence
  Description of Artificial Sequence: Synthetic oligonucleotide
gccacggaggaaguuggca

SEQ ID NO: 2071614 - RNA, 19 nt, Artificial Sequence
  Description of Artificial Sequence: Synthetic oligonucleotide
cugaagguagaggcugugu

SEQ ID NO: 2071615 - RNA, 19 nt, Artificial Sequence
  Description of Artificial Sequence: Synthetic oligonucleotide
gugagcugaagcagacggu

SEQ ID NO: 2071616 - RNA, 19 nt, Artificial Sequence
  Description of Artificial Sequence: Synthetic oligonucleotide
ccgaacaccaggggcugag

SEQ ID NO: 2071617 - RNA, 19 nt, Artificial Sequence
  Description of Artificial Sequence: Synthetic oligonucleotide
agguuccugcuaaggccga

SEQ ID NO: 2071618 - RNA, 19 nt, Artificial Sequence
  Description of Artificial Sequence: Synthetic oligonucleotide
gcguugguccucagggcug

SEQ ID NO: 2071619 - RNA, 19 nt, Artificial Sequence
  Description of Artificial Sequence: Synthetic oligonucleotide
gguggaauggccggccacu

SEQ ID NO: 2071620 - RNA, 19 nt, Artificial Sequence
  Description of Artificial Sequence: Synthetic oligonucleotide
gcguuucagaacagucuuc

SEQ ID NO: 2071621 - RNA, 19 nt, Artificial Sequence
  Description of Artificial Sequence: Synthetic oligonucleotide
cguugguccucagggcugg

SEQ ID NO: 2071622 - RNA, 19 nt, Artificial Sequence
  Description of Artificial Sequence: Synthetic oligonucleotide
cacaagcuccagcucuagu

SEQ ID NO: 2071623 - RNA, 19 nt, Artificial Sequence
  Description of Artificial Sequence: Synthetic oligonucleotide
acuuggcgaccugggcgga

SEQ ID NO: 2071624 - RNA, 19 nt, Artificial Sequence
  Description of Artificial Sequence: Synthetic oligonucleotide
cugcaggcugaguuacggu

SEQ ID NO: 2071625 - RNA, 19 nt, Artificial Sequence
  Description of Artificial Sequence: Synthetic oligonucleotide
caccaggggcugagugguc

SEQ ID NO: 2071626 - RNA, 19 nt, Artificial Sequence
  Description of Artificial Sequence: Synthetic oligonucleotide
gaguguccuguggggucga

SEQ ID NO: 2071627 - RNA, 19 nt, Artificial Sequence
  Description of Artificial Sequence: Synthetic oligonucleotide
ggagaguaugagguccacu

SEQ ID NO: 2071628 - RNA, 19 nt, Artificial Sequence
  Description of Artificial Sequence: Synthetic oligonucleotide
gaccugggcggagcaugga

SEQ ID NO: 2071629 - RNA, 19 nt, Artificial Sequence
  Description of Artificial Sequence: Synthetic oligonucleotide
gcauuccuggggcuggcgu

SEQ ID NO: 2071630 - RNA, 19 nt, Artificial Sequence
  Description of Artificial Sequence: Synthetic oligonucleotide
caugugccuuggccccuca

SEQ ID NO: 2071631 - RNA, 19 nt, Artificial Sequence
  Description of Artificial Sequence: Synthetic oligonucleotide
gcaguacgucucagauugc

SEQ ID NO: 2071632 - RNA, 19 nt, Artificial Sequence
  Description of Artificial Sequence: Synthetic oligonucleotide
cgaggacuccucugaguuc

SEQ ID NO: 2071633 - RNA, 19 nt, Artificial Sequence
  Description of Artificial Sequence: Synthetic oligonucleotide
cccugccuugagcucauca

SEQ ID NO: 2071634 - RNA, 19 nt, Artificial Sequence
  Description of Artificial Sequence: Synthetic oligonucleotide
ccacucagaaagcccuuaa

SEQ ID NO: 2071635 - RNA, 19 nt, Artificial Sequence
  Description of Artificial Sequence: Synthetic oligonucleotide
gccaugaggccuccacaua

SEQ ID NO: 2071636 - RNA, 19 nt, Artificial Sequence
  Description of Artificial Sequence: Synthetic oligonucleotide
ggccccucaaguaguggaa

SEQ ID NO: 2071637 - RNA, 19 nt, Artificial Sequence
  Description of Artificial Sequence: Synthetic oligonucleotide
guauggccaucagagccuu

SEQ ID NO: 2071638 - RNA, 19 nt, Artificial Sequence
  Description of Artificial Sequence: Synthetic oligonucleotide
ccgaggacuccucugaguu

SEQ ID NO: 2071639 - RNA, 19 nt, Artificial Sequence
  Description of Artificial Sequence: Synthetic oligonucleotide
cacauaggaggagguuccu

SEQ ID NO: 2071640 - RNA, 19 nt, Artificial Sequence
  Description of Artificial Sequence: Synthetic oligonucleotide
ggcgagaauugggaguaau

SEQ ID NO: 2071641 - RNA, 19 nt, Artificial Sequence
  Description of Artificial Sequence: Synthetic oligonucleotide
acccugccuugagcucauc

SEQ ID NO: 2071642 - RNA, 19 nt, Artificial Sequence
  Description of Artificial Sequence: Synthetic oligonucleotide
ggcggagcauggagggaca

SEQ ID NO: 2071643 - RNA, 19 nt, Artificial Sequence
  Description of Artificial Sequence: Synthetic oligonucleotide
gggcugaguggucccuaaa

SEQ ID NO: 2071644 - RNA, 19 nt, Artificial Sequence
  Description of Artificial Sequence: Synthetic oligonucleotide
gccucuggggcccugcguu

SEQ ID NO: 2071645 - RNA, 19 nt, Artificial Sequence
  Description of Artificial Sequence: Synthetic oligonucleotide
gccacucagaaagcccuua

SEQ ID NO: 2071646 - RNA, 19 nt, Artificial Sequence
  Description of Artificial Sequence: Synthetic oligonucleotide
gcgagaauugggaguaauu

SEQ ID NO: 2071647 - RNA, 19 nt, Artificial Sequence
  Description of Artificial Sequence: Synthetic oligonucleotide
ccuuggccccucaaguagu

SEQ ID NO: 2071648 - RNA, 19 nt, Artificial Sequence
  Description of Artificial Sequence: Synthetic oligonucleotide
cccucaaguaguggaagcu

SEQ ID NO: 2071649 - RNA, 19 nt, Artificial Sequence
  Description of Artificial Sequence: Synthetic oligonucleotide
cggagcauggagggacagc

SEQ ID NO: 2071650 - RNA, 19 nt, Artificial Sequence
  Description of Artificial Sequence: Synthetic oligonucleotide
cgguccuuuggaaggugga

SEQ ID NO: 2071651 - RNA, 19 nt, Artificial Sequence
  Description of Artificial Sequence: Synthetic oligonucleotide
cuucgccucuggggcccug

SEQ ID NO: 2071652 - RNA, 19 nt, Artificial Sequence
  Description of Artificial Sequence: Synthetic oligonucleotide
gcccugcaguacgucucag

SEQ ID NO: 2071653 - RNA, 19 nt, Artificial Sequence
  Description of Artificial Sequence: Synthetic oligonucleotide
aggcugaguuacgguccuu

SEQ ID NO: 2071654 - RNA, 19 nt, Artificial Sequence
  Description of Artificial Sequence: Synthetic oligonucleotide
aggugccucggggcaggua

SEQ ID NO: 2071655 - RNA, 19 nt, Artificial Sequence
  Description of Artificial Sequence: Synthetic oligonucleotide
cagagccuuagaggucccu

SEQ ID NO: 2071656 - RNA, 19 nt, Artificial Sequence
  Description of Artificial Sequence: Synthetic oligonucleotide
ccaugugccuuggccccuc

SEQ ID NO: 2071657 - RNA, 19 nt, Artificial Sequence
  Description of Artificial Sequence: Synthetic oligonucleotide
gcccagguggagaagucuu

SEQ ID NO: 2071658 - RNA, 19 nt, Artificial Sequence
  Description of Artificial Sequence: Synthetic oligonucleotide
gccgaacaccaggggcuga

SEQ ID NO: 2071659 - RNA, 19 nt, Artificial Sequence
  Description of Artificial Sequence: Synthetic oligonucleotide
gggcgagaauugggaguaa

SEQ ID NO: 2071660 - RNA, 19 nt, Artificial Sequence
  Description of Artificial Sequence: Synthetic oligonucleotide
cccuuaggcagagcugagu

SEQ ID NO: 2071661 - RNA, 19 nt, Artificial Sequence
  Description of Artificial Sequence: Synthetic oligonucleotide
gggcugcgccgaacaccag

SEQ ID NO: 2071662 - RNA, 19 nt, Artificial Sequence
  Description of Artificial Sequence: Synthetic oligonucleotide
cccugauggcuucgccucu

SEQ ID NO: 2071663 - RNA, 19 nt, Artificial Sequence
  Description of Artificial Sequence: Synthetic oligonucleotide
ccuggcuguuccgaauguu

SEQ ID NO: 2071664 - RNA, 19 nt, Artificial Sequence
  Description of Artificial Sequence: Synthetic oligonucleotide
cuguggggucgagcuggau

SEQ ID NO: 2071665 - RNA, 19 nt, Artificial Sequence
  Description of Artificial Sequence: Synthetic oligonucleotide
ggcgaccugggcggagcau

SEQ ID NO: 2071666 - RNA, 19 nt, Artificial Sequence
  Description of Artificial Sequence: Synthetic oligonucleotide
ccucuggggcccugcguuu

SEQ ID NO: 2071667 - RNA, 19 nt, Artificial Sequence
  Description of Artificial Sequence: Synthetic oligonucleotide
cgaacaccaggggcugagu

SEQ ID NO: 2071668 - RNA, 19 nt, Artificial Sequence
  Description of Artificial Sequence: Synthetic oligonucleotide
gcuucgccucuggggcccu

SEQ ID NO: 2071669 - RNA, 19 nt, Artificial Sequence
  Description of Artificial Sequence: Synthetic oligonucleotide
cgccucuggggcccugcgu

SEQ ID NO: 2071670 - RNA, 19 nt, Artificial Sequence
  Description of Artificial Sequence: Synthetic oligonucleotide
auagaauuuucucuguucc

SEQ ID NO: 2071671 - RNA, 19 nt, Artificial Sequence
  Description of Artificial Sequence: Synthetic oligonucleotide
auagccaugauauuggguc

SEQ ID NO: 2071672 - RNA, 19 nt, Artificial Sequence
  Description of Artificial Sequence: Synthetic oligonucleotide
uuuuguuucgaccggaucc

SEQ ID NO: 2071673 - RNA, 19 nt, Artificial Sequence
  Description of Artificial Sequence: Synthetic oligonucleotide
uugaguuuuguuucgaccg

SEQ ID NO: 2071674 - RNA, 19 nt, Artificial Sequence
  Description of Artificial Sequence: Synthetic oligonucleotide
aaugucaucaucagauacc

SEQ ID NO: 2071675 - RNA, 19 nt, Artificial Sequence
  Description of Artificial Sequence: Synthetic oligonucleotide
uucauuagaaauaucccug

SEQ ID NO: 2071676 - RNA, 19 nt, Artificial Sequence
  Description of Artificial Sequence: Synthetic oligonucleotide
gaugccaugauacauuuug

SEQ ID NO: 2071677 - RNA, 19 nt, Artificial Sequence
  Description of Artificial Sequence: Synthetic oligonucleotide
uuuuaugacaagaaaucca

SEQ ID NO: 2071678 - RNA, 19 nt, Artificial Sequence
  Description of Artificial Sequence: Synthetic oligonucleotide
aauccuguuuugcaauggc

SEQ ID NO: 2071679 - RNA, 19 nt, Artificial Sequence
  Description of Artificial Sequence: Synthetic oligonucleotide
uauacuggaauuguugagg

SEQ ID NO: 2071680 - RNA, 19 nt, Artificial Sequence
  Description of Artificial Sequence: Synthetic oligonucleotide
aaugcgaucgcugggacgg

SEQ ID NO: 2071681 - RNA, 19 nt, Artificial Sequence
  Description of Artificial Sequence: Synthetic oligonucleotide
uuuugcaauggccacaucu

SEQ ID NO: 2071682 - RNA, 19 nt, Artificial Sequence
  Description of Artificial Sequence: Synthetic oligonucleotide
uguuuaucagcauugugug

SEQ ID NO: 2071683 - RNA, 19 nt, Artificial Sequence
  Description of Artificial Sequence: Synthetic oligonucleotide
aagacgaagcucccgggcc

SEQ ID NO: 2071684 - RNA, 19 nt, Artificial Sequence
  Description of Artificial Sequence: Synthetic oligonucleotide
ugcuuuggauuccauagcg

SEQ ID NO: 2071685 - RNA, 19 nt, Artificial Sequence
  Description of Artificial Sequence: Synthetic oligonucleotide
cuuucauuagaaauauccc

SEQ ID NO: 2071686 - RNA, 19 nt, Artificial Sequence
  Description of Artificial Sequence: Synthetic oligonucleotide
ugcauagccaugauauugg

SEQ ID NO: 2071687 - RNA, 19 nt, Artificial Sequence
  Description of Artificial Sequence: Synthetic oligonucleotide
uaaucauguggcuucagag

SEQ ID NO: 2071688 - RNA, 19 nt, Artificial Sequence
  Description of Artificial Sequence: Synthetic oligonucleotide
uauaguggcagucggaacu

SEQ ID NO: 2071689 - RNA, 19 nt, Artificial Sequence
  Description of Artificial Sequence: Synthetic oligonucleotide
cauauuucagaaucugggg

SEQ ID NO: 2071690 - RNA, 19 nt, Artificial Sequence
  Description of Artificial Sequence: Synthetic oligonucleotide
uuaacuucauucccgauau

SEQ ID NO: 2071691 - RNA, 19 nt, Artificial Sequence
  Description of Artificial Sequence: Synthetic oligonucleotide
ucaacgugcuccauggcgg

SEQ ID NO: 2071692 - RNA, 19 nt, Artificial Sequence
  Description of Artificial Sequence: Synthetic oligonucleotide
guaucuaaagagcuccucg

SEQ ID NO: 2071693 - RNA, 19 nt, Artificial Sequence
  Description of Artificial Sequence: Synthetic oligonucleotide
cucucgaaaacguugaaug

SEQ ID NO: 2071694 - RNA, 19 nt, Artificial Sequence
  Description of Artificial Sequence: Synthetic oligonucleotide
aaauccuggaucuucguaa

SEQ ID NO: 2071695 - RNA, 19 nt, Artificial Sequence
  Description of Artificial Sequence: Synthetic oligonucleotide
uucguaaucacuuucucau

SEQ ID NO: 2071696 - RNA, 19 nt, Artificial Sequence
  Description of Artificial Sequence: Synthetic oligonucleotide
uguacaauccuguuuugca

SEQ ID NO: 2071697 - RNA, 19 nt, Artificial Sequence
  Description of Artificial Sequence: Synthetic oligonucleotide
aaucauguggcuucagagu

SEQ ID NO: 2071698 - RNA, 19 nt, Artificial Sequence
  Description of Artificial Sequence: Synthetic oligonucleotide
uaugacaagaaauccauuu

SEQ ID NO: 2071699 - RNA, 19 nt, Artificial Sequence
  Description of Artificial Sequence: Synthetic oligonucleotide
uccaagcacaaacaaugcg

SEQ ID NO: 2071700 - RNA, 19 nt, Artificial Sequence
  Description of Artificial Sequence: Synthetic oligonucleotide
uuuaacuucauucccgaua

SEQ ID NO: 2071701 - RNA, 19 nt, Artificial Sequence
  Description of Artificial Sequence: Synthetic oligonucleotide
guuucgaccggauccaugg

SEQ ID NO: 2071702 - RNA, 19 nt, Artificial Sequence
  Description of Artificial Sequence: Synthetic oligonucleotide
ugugcuaacucuuuaacuu

SEQ ID NO: 2071703 - RNA, 19 nt, Artificial Sequence
  Description of Artificial Sequence: Synthetic oligonucleotide
uaaucacuuucucauuuag

SEQ ID NO: 2071704 - RNA, 19 nt, Artificial Sequence
  Description of Artificial Sequence: Synthetic oligonucleotide
cauaguggcaggaaauugc

SEQ ID NO: 2071705 - RNA, 19 nt, Artificial Sequence
  Description of Artificial Sequence: Synthetic oligonucleotide
ucgaaaacguugaauguca

SEQ ID NO: 2071706 - RNA, 19 nt, Artificial Sequence
  Description of Artificial Sequence: Synthetic oligonucleotide
uucuuucaaacuccucucg

SEQ ID NO: 2071707 - RNA, 19 nt, Artificial Sequence
  Description of Artificial Sequence: Synthetic oligonucleotide
cucuuuaacuucauucccg

SEQ ID NO: 2071708 - RNA, 19 nt, Artificial Sequence
  Description of Artificial Sequence: Synthetic oligonucleotide
ucauuuaguguacaauccu

SEQ ID NO: 2071709 - RNA, 19 nt, Artificial Sequence
  Description of Artificial Sequence: Synthetic oligonucleotide
uuuguuaaucccucccucc

SEQ ID NO: 2071710 - RNA, 19 nt, Artificial Sequence
  Description of Artificial Sequence: Synthetic oligonucleotide
ucggcuucgaaacauccag

SEQ ID NO: 2071711 - RNA, 19 nt, Artificial Sequence
  Description of Artificial Sequence: Synthetic oligonucleotide
uacaagucggcuucgaaac

SEQ ID NO: 2071712 - RNA, 19 nt, Artificial Sequence
  Description of Artificial Sequence: Synthetic oligonucleotide
cuagcuuacuaaucgcugg

SEQ ID NO: 2071713 - RNA, 19 nt, Artificial Sequence
  Description of Artificial Sequence: Synthetic oligonucleotide
uggaaauccuggaucuucg

SEQ ID NO: 2071714 - RNA, 19 nt, Artificial Sequence
  Description of Artificial Sequence: Synthetic oligonucleotide
aucauguggcuucagagug

SEQ ID NO: 2071715 - RNA, 19 nt, Artificial Sequence
  Description of Artificial Sequence: Synthetic oligonucleotide
aaucgcuggggaccgaggg

SEQ ID NO: 2071716 - RNA, 19 nt, Artificial Sequence
  Description of Artificial Sequence: Synthetic oligonucleotide
guagugcagauccugaugc

SEQ ID NO: 2071717 - RNA, 19 nt, Artificial Sequence
  Description of Artificial Sequence: Synthetic oligonucleotide
ucuuggaaauccuggaucu

SEQ ID NO: 2071718 - RNA, 19 nt, Artificial Sequence
  Description of Artificial Sequence: Synthetic oligonucleotide
cuugaguuuuguuucgacc

SEQ ID NO: 2071719 - RNA, 19 nt, Artificial Sequence
  Description of Artificial Sequence: Synthetic oligonucleotide
gaauuuucucuguuccagg

SEQ ID NO: 2071720 - RNA, 19 nt, Artificial Sequence
  Description of Artificial Sequence: Synthetic oligonucleotide
gaagcuggccaugauaccg

SEQ ID NO: 2071721 - RNA, 19 nt, Artificial Sequence
  Description of Artificial Sequence: Synthetic oligonucleotide
uaguguacaauccuguuuu

SEQ ID NO: 2071722 - RNA, 19 nt, Artificial Sequence
  Description of Artificial Sequence: Synthetic oligonucleotide
acauuuuguuaaucccucc

SEQ ID NO: 2071723 - RNA, 19 nt, Artificial Sequence
  Description of Artificial Sequence: Synthetic oligonucleotide
cacauauuucagaaucugg

SEQ ID NO: 2071724 - RNA, 19 nt, Artificial Sequence
  Description of Artificial Sequence: Synthetic oligonucleotide
auucacuuugauauagugg

SEQ ID NO: 2071725 - RNA, 19 nt, Artificial Sequence
  Description of Artificial Sequence: Synthetic oligonucleotide
aucaucagauaccagauuu

SEQ ID NO: 2071726 - RNA, 19 nt, Artificial Sequence
  Description of Artificial Sequence: Synthetic oligonucleotide
auuauccaaaguauacugg

SEQ ID NO: 2071727 - RNA, 19 nt, Artificial Sequence
  Description of Artificial Sequence: Synthetic oligonucleotide
acuggaauuguugaggaug

SEQ ID NO: 2071728 - RNA, 19 nt, Artificial Sequence
  Description of Artificial Sequence: Synthetic oligonucleotide
agaauuuucucuguuccag

SEQ ID NO: 2071729 - RNA, 19 nt, Artificial Sequence
  Description of Artificial Sequence: Synthetic oligonucleotide
ucugaagguuuguuuauca

SEQ ID NO: 2071730 - RNA, 19 nt, Artificial Sequence
  Description of Artificial Sequence: Synthetic oligonucleotide
uagcuuacuaaucgcuggg

SEQ ID NO: 2071731 - RNA, 19 nt, Artificial Sequence
  Description of Artificial Sequence: Synthetic oligonucleotide
uacauuuuguuaaucccuc

SEQ ID NO: 2071732 - RNA, 19 nt, Artificial Sequence
  Description of Artificial Sequence: Synthetic oligonucleotide
agcacaaccagacaaccgu

SEQ ID NO: 2071733 - RNA, 19 nt, Artificial Sequence
  Description of Artificial Sequence: Synthetic oligonucleotide
cauuuaguguacaauccug

SEQ ID NO: 2071734 - RNA, 19 nt, Artificial Sequence
  Description of Artificial Sequence: Synthetic oligonucleotide
guuguuucugucaacgugc

SEQ ID NO: 2071735 - RNA, 19 nt, Artificial Sequence
  Description of Artificial Sequence: Synthetic oligonucleotide
uuagucuuucuccuuuuac

SEQ ID NO: 2071736 - RNA, 19 nt, Artificial Sequence
  Description of Artificial Sequence: Synthetic oligonucleotide
aauccauuuucuucauaga

SEQ ID NO: 2071737 - RNA, 19 nt, Artificial Sequence
  Description of Artificial Sequence: Synthetic oligonucleotide
uucauucccgauauuuucu

SEQ ID NO: 2071738 - RNA, 19 nt, Artificial Sequence
  Description of Artificial Sequence: Synthetic oligonucleotide
uuacuaaucgcuggggacc

SEQ ID NO: 2071739 - RNA, 19 nt, Artificial Sequence
  Description of Artificial Sequence: Synthetic oligonucleotide
auuuuguuaaucccucccu

SEQ ID NO: 2071740 - RNA, 19 nt, Artificial Sequence
  Description of Artificial Sequence: Synthetic oligonucleotide
uauuuucuugacuggugcc

SEQ ID NO: 2071741 - RNA, 19 nt, Artificial Sequence
  Description of Artificial Sequence: Synthetic oligonucleotide
gucaacgugcuccauggcg

SEQ ID NO: 2071742 - RNA, 19 nt, Artificial Sequence
  Description of Artificial Sequence: Synthetic oligonucleotide
ucugugcuaacucuuuaac

SEQ ID NO: 2071743 - RNA, 19 nt, Artificial Sequence
  Description of Artificial Sequence: Synthetic oligonucleotide
uuccauagcguuucugugc

SEQ ID NO: 2071744 - RNA, 19 nt, Artificial Sequence
  Description of Artificial Sequence: Synthetic oligonucleotide
cuuacuaaucgcuggggac

SEQ ID NO: 2071745 - RNA, 19 nt, Artificial Sequence
  Description of Artificial Sequence: Synthetic oligonucleotide
uuuuguuaaucccucccuc

SEQ ID NO: 2071746 - RNA, 19 nt, Artificial Sequence
  Description of Artificial Sequence: Synthetic oligonucleotide
cugucaacgugcuccaugg

SEQ ID NO: 2071747 - RNA, 19 nt, Artificial Sequence
  Description of Artificial Sequence: Synthetic oligonucleotide
uuguuaaucccucccuccc

SEQ ID NO: 2071748 - RNA, 19 nt, Artificial Sequence
  Description of Artificial Sequence: Synthetic oligonucleotide
ucuucuugccagaaucuga

SEQ ID NO: 2071749 - RNA, 19 nt, Artificial Sequence
  Description of Artificial Sequence: Synthetic oligonucleotide
cauucacuuugauauagug

SEQ ID NO: 2071750 - RNA, 19 nt, Artificial Sequence
  Description of Artificial Sequence: Synthetic oligonucleotide
agcguuucugugcuaacuc

SEQ ID NO: 2071751 - RNA, 19 nt, Artificial Sequence
  Description of Artificial Sequence: Synthetic oligonucleotide
uuacaagucggcuucgaaa

SEQ ID NO: 2071752 - RNA, 19 nt, Artificial Sequence
  Description of Artificial Sequence: Synthetic oligonucleotide
ucggaacuggcauaguggc

SEQ ID NO: 2071753 - RNA, 19 nt, Artificial Sequence
  Description of Artificial Sequence: Synthetic oligonucleotide
aucuaaagagcuccucguc

SEQ ID NO: 2071754 - RNA, 19 nt, Artificial Sequence
  Description of Artificial Sequence: Synthetic oligonucleotide
ucugucaacgugcuccaug

SEQ ID NO: 2071755 - RNA, 19 nt, Artificial Sequence
  Description of Artificial Sequence: Synthetic oligonucleotide
ugggagcacaaccagacaa

SEQ ID NO: 2071756 - RNA, 19 nt, Artificial Sequence
  Description of Artificial Sequence: Synthetic oligonucleotide
aaucugaagguuuguuuau

SEQ ID NO: 2071757 - RNA, 19 nt, Artificial Sequence
  Description of Artificial Sequence: Synthetic oligonucleotide
gagggugcaguaucuaaag

SEQ ID NO: 2071758 - RNA, 19 nt, Artificial Sequence
  Description of Artificial Sequence: Synthetic oligonucleotide
auauaguggcagucggaac

SEQ ID NO: 2071759 - RNA, 19 nt, Artificial Sequence
  Description of Artificial Sequence: Synthetic oligonucleotide
aaguccaugguggaggaca

SEQ ID NO: 2071760 - RNA, 19 nt, Artificial Sequence
  Description of Artificial Sequence: Synthetic oligonucleotide
auccagacauccuuaaagu

SEQ ID NO: 2071761 - RNA, 19 nt, Artificial Sequence
  Description of Artificial Sequence: Synthetic oligonucleotide
uccauagcguuucugugcu

SEQ ID NO: 2071762 - RNA, 19 nt, Artificial Sequence
  Description of Artificial Sequence: Synthetic oligonucleotide
uuugcaauggccacaucuu

SEQ ID NO: 2071763 - RNA, 19 nt, Artificial Sequence
  Description of Artificial Sequence: Synthetic oligonucleotide
auucccgauauuuucuuga

SEQ ID NO: 2071764 - RNA, 19 nt, Artificial Sequence
  Description of Artificial Sequence: Synthetic oligonucleotide
aggaaauugccuuucggaa

SEQ ID NO: 2071765 - RNA, 19 nt, Artificial Sequence
  Description of Artificial Sequence: Synthetic oligonucleotide
auauuggguccagugaaac

SEQ ID NO: 2071766 - RNA, 19 nt, Artificial Sequence
  Description of Artificial Sequence: Synthetic oligonucleotide
auacuggaauuguugagga

SEQ ID NO: 2071767 - RNA, 19 nt, Artificial Sequence
  Description of Artificial Sequence: Synthetic oligonucleotide
ucucgaaaacguugaaugu

SEQ ID NO: 2071768 - RNA, 19 nt, Artificial Sequence
  Description of Artificial Sequence: Synthetic oligonucleotide
accguuguuucugucaacg

SEQ ID NO: 2071769 - RNA, 19 nt, Artificial Sequence
  Description of Artificial Sequence: Synthetic oligonucleotide
auccaaaguauacuggaau

SEQ ID NO: 2071770 - RNA, 19 nt, Artificial Sequence
  Description of Artificial Sequence: Synthetic oligonucleotide
auacauuuuguuaaucccu

SEQ ID NO: 2071771 - RNA, 19 nt, Artificial Sequence
  Description of Artificial Sequence: Synthetic oligonucleotide
aacaaugcgaucgcuggga

SEQ ID NO: 2071772 - RNA, 19 nt, Artificial Sequence
  Description of Artificial Sequence: Synthetic oligonucleotide
gguccaagcacaaacaaug

SEQ ID NO: 2071773 - RNA, 19 nt, Artificial Sequence
  Description of Artificial Sequence: Synthetic oligonucleotide
uauccaaaguauacuggaa

SEQ ID NO: 2071774 - RNA, 19 nt, Artificial Sequence
  Description of Artificial Sequence: Synthetic oligonucleotide
uugacuggugccauucacu

SEQ ID NO: 2071775 - RNA, 19 nt, Artificial Sequence
  Description of Artificial Sequence: Synthetic oligonucleotide
accggauccauggaugagc

SEQ ID NO: 2071776 - RNA, 19 nt, Artificial Sequence
  Description of Artificial Sequence: Synthetic oligonucleotide
uccuggaucuucguaauca

SEQ ID NO: 2071777 - RNA, 19 nt, Artificial Sequence
  Description of Artificial Sequence: Synthetic oligonucleotide
acaaccguuguuucuguca

SEQ ID NO: 2071778 - RNA, 19 nt, Artificial Sequence
  Description of Artificial Sequence: Synthetic oligonucleotide
ugaggugucccaguaagac

SEQ ID NO: 2071779 - RNA, 19 nt, Artificial Sequence
  Description of Artificial Sequence: Synthetic oligonucleotide
agucggaacuggcauagug

SEQ ID NO: 2071780 - RNA, 19 nt, Artificial Sequence
  Description of Artificial Sequence: Synthetic oligonucleotide
gaagacgaagcucccgggc

SEQ ID NO: 2071781 - RNA, 19 nt, Artificial Sequence
  Description of Artificial Sequence: Synthetic oligonucleotide
aauccuggaucuucguaau

SEQ ID NO: 2071782 - RNA, 19 nt, Artificial Sequence
  Description of Artificial Sequence: Synthetic oligonucleotide
uuuguuucgaccggaucca

SEQ ID NO: 2071783 - RNA, 19 nt, Artificial Sequence
  Description of Artificial Sequence: Synthetic oligonucleotide
gauuccauagcguuucugu

SEQ ID NO: 2071784 - RNA, 19 nt, Artificial Sequence
  Description of Artificial Sequence: Synthetic oligonucleotide
auggccacaucuuucauua

SEQ ID NO: 2071785 - RNA, 19 nt, Artificial Sequence
  Description of Artificial Sequence: Synthetic oligonucleotide
uuuacaagucggcuucgaa

SEQ ID NO: 2071786 - RNA, 19 nt, Artificial Sequence
  Description of Artificial Sequence: Synthetic oligonucleotide
aggcuuaggacauuauuau

SEQ ID NO: 2071787 - RNA, 19 nt, Artificial Sequence
  Description of Artificial Sequence: Synthetic oligonucleotide
guuaaucccucccucccag

SEQ ID NO: 2071788 - RNA, 19 nt, Artificial Sequence
  Description of Artificial Sequence: Synthetic oligonucleotide
agaaauaucccugguggcu

SEQ ID NO: 2071789 - RNA, 19 nt, Artificial Sequence
  Description of Artificial Sequence: Synthetic oligonucleotide
ugcaguaucuaaagagcuc

SEQ ID NO: 2071790 - RNA, 19 nt, Artificial Sequence
  Description of Artificial Sequence: Synthetic oligonucleotide
cacuuugauauaguggcag

SEQ ID NO: 2071791 - RNA, 19 nt, Artificial Sequence
  Description of Artificial Sequence: Synthetic oligonucleotide
caugguggaggacagaaga

SEQ ID NO: 2071792 - RNA, 19 nt, Artificial Sequence
  Description of Artificial Sequence: Synthetic oligonucleotide
uguuaaucccucccuccca

SEQ ID NO: 2071793 - RNA, 19 nt, Artificial Sequence
  Description of Artificial Sequence: Synthetic oligonucleotide
aguaucuaaagagcuccuc

SEQ ID NO: 2071794 - RNA, 19 nt, Artificial Sequence
  Description of Artificial Sequence: Synthetic oligonucleotide
uaagaccugcagccggacg

SEQ ID NO: 2071795 - RNA, 19 nt, Artificial Sequence
  Description of Artificial Sequence: Synthetic oligonucleotide
gaauuguugaggauggcaa

SEQ ID NO: 2071796 - RNA, 19 nt, Artificial Sequence
  Description of Artificial Sequence: Synthetic oligonucleotide
ucgaccggauccauggaug

SEQ ID NO: 2071797 - RNA, 19 nt, Artificial Sequence
  Description of Artificial Sequence: Synthetic oligonucleotide
agaagacgaagcucccggg

SEQ ID NO: 2071798 - RNA, 19 nt, Artificial Sequence
  Description of Artificial Sequence: Synthetic oligonucleotide
gaucuucguaaucacuuuc

SEQ ID NO: 2071799 - RNA, 19 nt, Artificial Sequence
  Description of Artificial Sequence: Synthetic oligonucleotide
cuucgaaacauccagacau

SEQ ID NO: 2071800 - RNA, 19 nt, Artificial Sequence
  Description of Artificial Sequence: Synthetic oligonucleotide
gauggcaacuggcagggga

SEQ ID NO: 2071801 - RNA, 19 nt, Artificial Sequence
  Description of Artificial Sequence: Synthetic oligonucleotide
cuuaggacauuauuaucca

SEQ ID NO: 2071802 - RNA, 19 nt, Artificial Sequence
  Description of Artificial Sequence: Synthetic oligonucleotide
ucuucguaaucacuuucuc

SEQ ID NO: 2071803 - RNA, 19 nt, Artificial Sequence
  Description of Artificial Sequence: Synthetic oligonucleotide
cccgauauuuucuugacug

SEQ ID NO: 2071804 - RNA, 19 nt, Artificial Sequence
  Description of Artificial Sequence: Synthetic oligonucleotide
gauauaguggcagucggaa

SEQ ID NO: 2071805 - RNA, 19 nt, Artificial Sequence
  Description of Artificial Sequence: Synthetic oligonucleotide
gaaaacguugaaugucauc

SEQ ID NO: 2071806 - RNA, 19 nt, Artificial Sequence
  Description of Artificial Sequence: Synthetic oligonucleotide
cagcauugugugcauagcc

SEQ ID NO: 2071807 - RNA, 19 nt, Artificial Sequence
  Description of Artificial Sequence: Synthetic oligonucleotide
gauccauggaugagcagag

SEQ ID NO: 2071808 - RNA, 19 nt, Artificial Sequence
  Description of Artificial Sequence: Synthetic oligonucleotide
ucauagaauuuucucuguu

SEQ ID NO: 2071809 - RNA, 19 nt, Artificial Sequence
  Description of Artificial Sequence: Synthetic oligonucleotide
gaggugucccaguaagacc

SEQ ID NO: 2071810 - RNA, 19 nt, Artificial Sequence
  Description of Artificial Sequence: Synthetic oligonucleotide
uacuaaucgcuggggaccg

SEQ ID NO: 2071811 - RNA, 19 nt, Artificial Sequence
  Description of Artificial Sequence: Synthetic oligonucleotide
acaaugcgaucgcugggac

SEQ ID NO: 2071812 - RNA, 19 nt, Artificial Sequence
  Description of Artificial Sequence: Synthetic oligonucleotide
aaccguuguuucugucaac

SEQ ID NO: 2071813 - RNA, 19 nt, Artificial Sequence
  Description of Artificial Sequence: Synthetic oligonucleotide
gugcauagccaugauauug

SEQ ID NO: 2071814 - RNA, 19 nt, Artificial Sequence
  Description of Artificial Sequence: Synthetic oligonucleotide
uuuaguguacaauccuguu

SEQ ID NO: 2071815 - RNA, 19 nt, Artificial Sequence
  Description of Artificial Sequence: Synthetic oligonucleotide
uggcgguccaagcacaaac

SEQ ID NO: 2071816 - RNA, 19 nt, Artificial Sequence
  Description of Artificial Sequence: Synthetic oligonucleotide
cccaguaagaccugcagcc

SEQ ID NO: 2071817 - RNA, 19 nt, Artificial Sequence
  Description of Artificial Sequence: Synthetic oligonucleotide
ucauguggcuucagagugc

SEQ ID NO: 2071818 - RNA, 19 nt, Artificial Sequence
  Description of Artificial Sequence: Synthetic oligonucleotide
aaucacuuucucauuuagu

SEQ ID NO: 2071819 - RNA, 19 nt, Artificial Sequence
  Description of Artificial Sequence: Synthetic oligonucleotide
acaagaaauccauuuucuu

SEQ ID NO: 2071820 - RNA, 19 nt, Artificial Sequence
  Description of Artificial Sequence: Synthetic oligonucleotide
acuuugauauaguggcagu

SEQ ID NO: 2071821 - RNA, 19 nt, Artificial Sequence
  Description of Artificial Sequence: Synthetic oligonucleotide
augauacauuuuguuaauc

SEQ ID NO: 2071822 - RNA, 19 nt, Artificial Sequence
  Description of Artificial Sequence: Synthetic oligonucleotide
guuuaucagcauugugugc

SEQ ID NO: 2071823 - RNA, 19 nt, Artificial Sequence
  Description of Artificial Sequence: Synthetic oligonucleotide
ccuguuauuguccugcuug

SEQ ID NO: 2071824 - RNA, 19 nt, Artificial Sequence
  Description of Artificial Sequence: Synthetic oligonucleotide
aaccagacaaccguuguuu

SEQ ID NO: 2071825 - RNA, 19 nt, Artificial Sequence
  Description of Artificial Sequence: Synthetic oligonucleotide
ggaacuggcauaguggcag

SEQ ID NO: 2071826 - RNA, 19 nt, Artificial Sequence
  Description of Artificial Sequence: Synthetic oligonucleotide
uucggaauccuugaguuuu

SEQ ID NO: 2071827 - RNA, 19 nt, Artificial Sequence
  Description of Artificial Sequence: Synthetic oligonucleotide
uagccaugauauugggucc

SEQ ID NO: 2071828 - RNA, 19 nt, Artificial Sequence
  Description of Artificial Sequence: Synthetic oligonucleotide
caggaaauugccuuucgga

SEQ ID NO: 2071829 - RNA, 19 nt, Artificial Sequence
  Description of Artificial Sequence: Synthetic oligonucleotide
ggcuuuaccuccuuucugc

SEQ ID NO: 2071830 - RNA, 19 nt, Artificial Sequence
  Description of Artificial Sequence: Synthetic oligonucleotide
cucgaaaacguugaauguc

SEQ ID NO: 2071831 - RNA, 19 nt, Artificial Sequence
  Description of Artificial Sequence: Synthetic oligonucleotide
caguaagaccugcagccgg

SEQ ID NO: 2071832 - RNA, 19 nt, Artificial Sequence
  Description of Artificial Sequence: Synthetic oligonucleotide
accaggugcacccuguuau

SEQ ID NO: 2071833 - RNA, 19 nt, Artificial Sequence
  Description of Artificial Sequence: Synthetic oligonucleotide
uccuuuuacaagucggcuu

SEQ ID NO: 2071834 - RNA, 19 nt, Artificial Sequence
  Description of Artificial Sequence: Synthetic oligonucleotide
agucggcuucgaaacaucc

SEQ ID NO: 2071835 - RNA, 19 nt, Artificial Sequence
  Description of Artificial Sequence: Synthetic oligonucleotide
auagcguuucugugcuaac

SEQ ID NO: 2071836 - RNA, 19 nt, Artificial Sequence
  Description of Artificial Sequence: Synthetic oligonucleotide
uaaucccucccucccagcu

SEQ ID NO: 2071837 - RNA, 19 nt, Artificial Sequence
  Description of Artificial Sequence: Synthetic oligonucleotide
acaaccagacaaccguugu

SEQ ID NO: 2071838 - RNA, 19 nt, Artificial Sequence
  Description of Artificial Sequence: Synthetic oligonucleotide
uuucugucaacgugcucca

SEQ ID NO: 2071839 - RNA, 19 nt, Artificial Sequence
  Description of Artificial Sequence: Synthetic oligonucleotide
gcaguaucuaaagagcucc

SEQ ID NO: 2071840 - RNA, 19 nt, Artificial Sequence
  Description of Artificial Sequence: Synthetic oligonucleotide
ucaucagauaccagauuuu

SEQ ID NO: 2071841 - RNA, 19 nt, Artificial Sequence
  Description of Artificial Sequence: Synthetic oligonucleotide
gguuuguuuaucagcauug

SEQ ID NO: 2071842 - RNA, 19 nt, Artificial Sequence
  Description of Artificial Sequence: Synthetic oligonucleotide
ggugcaguaucuaaagagc

SEQ ID NO: 2071843 - RNA, 19 nt, Artificial Sequence
  Description of Artificial Sequence: Synthetic oligonucleotide
uucgaaacauccagacauc

SEQ ID NO: 2071844 - RNA, 19 nt, Artificial Sequence
  Description of Artificial Sequence: Synthetic oligonucleotide
uggcuuuaccuccuuucug

SEQ ID NO: 2071845 - RNA, 19 nt, Artificial Sequence
  Description of Artificial Sequence: Synthetic oligonucleotide
uaaucgcuggggaccgagg

SEQ ID NO: 2071846 - RNA, 19 nt, Artificial Sequence
  Description of Artificial Sequence: Synthetic oligonucleotide
ugugugcauagccaugaua

SEQ ID NO: 2071847 - RNA, 19 nt, Artificial Sequence
  Description of Artificial Sequence: Synthetic oligonucleotide
guaaucauguggcuucaga

SEQ ID NO: 2071848 - RNA, 19 nt, Artificial Sequence
  Description of Artificial Sequence: Synthetic oligonucleotide
uguuucgaccggauccaug

SEQ ID NO: 2071849 - RNA, 19 nt, Artificial Sequence
  Description of Artificial Sequence: Synthetic oligonucleotide
cuuuaccuccuuucugcag

SEQ ID NO: 2071850 - RNA, 19 nt, Artificial Sequence
  Description of Artificial Sequence: Synthetic oligonucleotide
aaaguauacuggaauuguu

SEQ ID NO: 2071851 - RNA, 19 nt, Artificial Sequence
  Description of Artificial Sequence: Synthetic oligonucleotide
agguuuguuuaucagcauu

SEQ ID NO: 2071852 - RNA, 19 nt, Artificial Sequence
  Description of Artificial Sequence: Synthetic oligonucleotide
aagcuggccaugauaccgg

SEQ ID NO: 2071853 - RNA, 19 nt, Artificial Sequence
  Description of Artificial Sequence: Synthetic oligonucleotide
uguuuugcaauggccacau

SEQ ID NO: 2071854 - RNA, 19 nt, Artificial Sequence
  Description of Artificial Sequence: Synthetic oligonucleotide
gcugaggugucccaguaag

SEQ ID NO: 2071855 - RNA, 19 nt, Artificial Sequence
  Description of Artificial Sequence: Synthetic oligonucleotide
ugccgagaugucuucuugc

SEQ ID NO: 2071856 - RNA, 19 nt, Artificial Sequence
  Description of Artificial Sequence: Synthetic oligonucleotide
aagguuuguuuaucagcau

SEQ ID NO: 2071857 - RNA, 19 nt, Artificial Sequence
  Description of Artificial Sequence: Synthetic oligonucleotide
caggcuuaggacauuauua

SEQ ID NO: 2071858 - RNA, 19 nt, Artificial Sequence
  Description of Artificial Sequence: Synthetic oligonucleotide
uuaugacaagaaauccauu

SEQ ID NO: 2071859 - RNA, 19 nt, Artificial Sequence
  Description of Artificial Sequence: Synthetic oligonucleotide
aucugaagguuuguuuauc

SEQ ID NO: 2071860 - RNA, 19 nt, Artificial Sequence
  Description of Artificial Sequence: Synthetic oligonucleotide
guugaggauggcaacuggc

SEQ ID NO: 2071861 - RNA, 19 nt, Artificial Sequence
  Description of Artificial Sequence: Synthetic oligonucleotide
augauaccgggcuagcuua

SEQ ID NO: 2071862 - RNA, 19 nt, Artificial Sequence
  Description of Artificial Sequence: Synthetic oligonucleotide
uucccgauauuuucuugac

SEQ ID NO: 2071863 - RNA, 19 nt, Artificial Sequence
  Description of Artificial Sequence: Synthetic oligonucleotide
gagcacaaccagacaaccg

SEQ ID NO: 2071864 - RNA, 19 nt, Artificial Sequence
  Description of Artificial Sequence: Synthetic oligonucleotide
ugcacccuguuauuguccu

SEQ ID NO: 2071865 - RNA, 19 nt, Artificial Sequence
  Description of Artificial Sequence: Synthetic oligonucleotide
aaggggaaguagugcagau

SEQ ID NO: 2071866 - RNA, 19 nt, Artificial Sequence
  Description of Artificial Sequence: Synthetic oligonucleotide
gaaaguccaugguggagga

SEQ ID NO: 2071867 - RNA, 19 nt, Artificial Sequence
  Description of Artificial Sequence: Synthetic oligonucleotide
ugaugcaaggggugccgag

SEQ ID NO: 2071868 - RNA, 19 nt, Artificial Sequence
  Description of Artificial Sequence: Synthetic oligonucleotide
uucgaccggauccauggau

SEQ ID NO: 2071869 - RNA, 19 nt, Artificial Sequence
  Description of Artificial Sequence: Synthetic oligonucleotide
cauugugugcauagccaug

SEQ ID NO: 2071870 - RNA, 19 nt, Artificial Sequence
  Description of Artificial Sequence: Synthetic oligonucleotide
ucccgauauuuucuugacu

SEQ ID NO: 2071871 - RNA, 19 nt, Artificial Sequence
  Description of Artificial Sequence: Synthetic oligonucleotide
cauguggcuucagagugcc

SEQ ID NO: 2071872 - RNA, 19 nt, Artificial Sequence
  Description of Artificial Sequence: Synthetic oligonucleotide
aguguacaauccuguuuug

SEQ ID NO: 2071873 - RNA, 19 nt, Artificial Sequence
  Description of Artificial Sequence: Synthetic oligonucleotide
acgugcuccauggcggucc

SEQ ID NO: 2071874 - RNA, 19 nt, Artificial Sequence
  Description of Artificial Sequence: Synthetic oligonucleotide
acuccucucgaaaacguug

SEQ ID NO: 2071875 - RNA, 19 nt, Artificial Sequence
  Description of Artificial Sequence: Synthetic oligonucleotide
agcuuacuaaucgcugggg

SEQ ID NO: 2071876 - RNA, 19 nt, Artificial Sequence
  Description of Artificial Sequence: Synthetic oligonucleotide
ggugccugggagcacaacc

SEQ ID NO: 2071877 - RNA, 19 nt, Artificial Sequence
  Description of Artificial Sequence: Synthetic oligonucleotide
cuucuugccagaaucugaa

SEQ ID NO: 2071878 - RNA, 19 nt, Artificial Sequence
  Description of Artificial Sequence: Synthetic oligonucleotide
caaugcgaucgcugggacg

SEQ ID NO: 2071879 - RNA, 19 nt, Artificial Sequence
  Description of Artificial Sequence: Synthetic oligonucleotide
cagacauccuuaaagucaa

SEQ ID NO: 2071880 - RNA, 19 nt, Artificial Sequence
  Description of Artificial Sequence: Synthetic oligonucleotide
uaucccugguggcuuuacc

SEQ ID NO: 2071881 - RNA, 19 nt, Artificial Sequence
  Description of Artificial Sequence: Synthetic oligonucleotide
guacaauccuguuuugcaa

SEQ ID NO: 2071882 - RNA, 19 nt, Artificial Sequence
  Description of Artificial Sequence: Synthetic oligonucleotide
gaaauccuggaucuucgua

SEQ ID NO: 2071883 - RNA, 19 nt, Artificial Sequence
  Description of Artificial Sequence: Synthetic oligonucleotide
cuugccagaaucugaaggu

SEQ ID NO: 2071884 - RNA, 19 nt, Artificial Sequence
  Description of Artificial Sequence: Synthetic oligonucleotide
cauucccgauauuuucuug

SEQ ID NO: 2071885 - RNA, 19 nt, Artificial Sequence
  Description of Artificial Sequence: Synthetic oligonucleotide
aagucggcuucgaaacauc

SEQ ID NO: 2071886 - RNA, 19 nt, Artificial Sequence
  Description of Artificial Sequence: Synthetic oligonucleotide
gaucgcugggacggaaggg

SEQ ID NO: 2071887 - RNA, 19 nt, Artificial Sequence
  Description of Artificial Sequence: Synthetic oligonucleotide
uucuugacuggugccauuc

SEQ ID NO: 2071888 - RNA, 19 nt, Artificial Sequence
  Description of Artificial Sequence: Synthetic oligonucleotide
uuuuacaagucggcuucga

SEQ ID NO: 2071889 - RNA, 19 nt, Artificial Sequence
  Description of Artificial Sequence: Synthetic oligonucleotide
uccucgucuucuuggaaau

SEQ ID NO: 2071890 - RNA, 19 nt, Artificial Sequence
  Description of Artificial Sequence: Synthetic oligonucleotide
ccuuuuacaagucggcuuc

SEQ ID NO: 2071891 - RNA, 19 nt, Artificial Sequence
  Description of Artificial Sequence: Synthetic oligonucleotide
uggcagucggaacuggcau

SEQ ID NO: 2071892 - RNA, 19 nt, Artificial Sequence
  Description of Artificial Sequence: Synthetic oligonucleotide
cuuuuacaagucggcuucg

SEQ ID NO: 2071893 - RNA, 19 nt, Artificial Sequence
  Description of Artificial Sequence: Synthetic oligonucleotide
uuaaucccucccucccagc

SEQ ID NO: 2071894 - RNA, 19 nt, Artificial Sequence
  Description of Artificial Sequence: Synthetic oligonucleotide
gugugcauagccaugauau

SEQ ID NO: 2071895 - RNA, 19 nt, Artificial Sequence
  Description of Artificial Sequence: Synthetic oligonucleotide
gcacgcugaaaguccaugg

SEQ ID NO: 2071896 - RNA, 19 nt, Artificial Sequence
  Description of Artificial Sequence: Synthetic oligonucleotide
ggauccauggaugagcaga

SEQ ID NO: 2071897 - RNA, 19 nt, Artificial Sequence
  Description of Artificial Sequence: Synthetic oligonucleotide
gggguaaucauguggcuuc

SEQ ID NO: 2071898 - RNA, 19 nt, Artificial Sequence
  Description of Artificial Sequence: Synthetic oligonucleotide
uggguccagugaaacacuc

SEQ ID NO: 2071899 - RNA, 19 nt, Artificial Sequence
  Description of Artificial Sequence: Synthetic oligonucleotide
acaagucggcuucgaaaca

SEQ ID NO: 2071900 - RNA, 19 nt, Artificial Sequence
  Description of Artificial Sequence: Synthetic oligonucleotide
uagcguuucugugcuaacu

SEQ ID NO: 2071901 - RNA, 19 nt, Artificial Sequence
  Description of Artificial Sequence: Synthetic oligonucleotide
agggugcaguaucuaaaga

SEQ ID NO: 2071902 - RNA, 19 nt, Artificial Sequence
  Description of Artificial Sequence: Synthetic oligonucleotide
aggugcacccuguuauugu

SEQ ID NO: 2071903 - RNA, 19 nt, Artificial Sequence
  Description of Artificial Sequence: Synthetic oligonucleotide
aggggaaguagugcagauc

SEQ ID NO: 2071904 - RNA, 19 nt, Artificial Sequence
  Description of Artificial Sequence: Synthetic oligonucleotide
uuucgaccggauccaugga

SEQ ID NO: 2071905 - RNA, 19 nt, Artificial Sequence
  Description of Artificial Sequence: Synthetic oligonucleotide
aaggggugccgagaugucu

SEQ ID NO: 2071906 - RNA, 19 nt, Artificial Sequence
  Description of Artificial Sequence: Synthetic oligonucleotide
uaccgggcuagcuuacuaa

SEQ ID NO: 2071907 - RNA, 19 nt, Artificial Sequence
  Description of Artificial Sequence: Synthetic oligonucleotide
agaaaacagugucucccuu

SEQ ID NO: 2071908 - RNA, 19 nt, Artificial Sequence
  Description of Artificial Sequence: Synthetic oligonucleotide
ccaaaguauacuggaauug

SEQ ID NO: 2071909 - RNA, 19 nt, Artificial Sequence
  Description of Artificial Sequence: Synthetic oligonucleotide
ccgauauuuucuugacugg

SEQ ID NO: 2071910 - RNA, 19 nt, Artificial Sequence
  Description of Artificial Sequence: Synthetic oligonucleotide
ugccuuugugggugccugg

SEQ ID NO: 2071911 - RNA, 19 nt, Artificial Sequence
  Description of Artificial Sequence: Synthetic oligonucleotide
cuaaucgcuggggaccgag

SEQ ID NO: 2071912 - RNA, 19 nt, Artificial Sequence
  Description of Artificial Sequence: Synthetic oligonucleotide
ggaauuguugaggauggca

SEQ ID NO: 2071913 - RNA, 19 nt, Artificial Sequence
  Description of Artificial Sequence: Synthetic oligonucleotide
gaugcaaggggugccgaga

SEQ ID NO: 2071914 - RNA, 19 nt, Artificial Sequence
  Description of Artificial Sequence: Synthetic oligonucleotide
cgggcuagcuuacuaaucg

SEQ ID NO: 2071915 - RNA, 19 nt, Artificial Sequence
  Description of Artificial Sequence: Synthetic oligonucleotide
gauauuggguccagugaaa

SEQ ID NO: 2071916 - RNA, 19 nt, Artificial Sequence
  Description of Artificial Sequence: Synthetic oligonucleotide
uuguccugcuuguagccuu

SEQ ID NO: 2071917 - RNA, 19 nt, Artificial Sequence
  Description of Artificial Sequence: Synthetic oligonucleotide
agacaaccguuguuucugu

SEQ ID NO: 2071918 - RNA, 19 nt, Artificial Sequence
  Description of Artificial Sequence: Synthetic oligonucleotide
uccugaugcaaggggugcc

SEQ ID NO: 2071919 - RNA, 19 nt, Artificial Sequence
  Description of Artificial Sequence: Synthetic oligonucleotide
agugcagauccugaugcaa

SEQ ID NO: 2071920 - RNA, 19 nt, Artificial Sequence
  Description of Artificial Sequence: Synthetic oligonucleotide
ucguaaucacuuucucauu

SEQ ID NO: 2071921 - RNA, 19 nt, Artificial Sequence
  Description of Artificial Sequence: Synthetic oligonucleotide
auaucccugguggcuuuac

SEQ ID NO: 2071922 - RNA, 19 nt, Artificial Sequence
  Description of Artificial Sequence: Synthetic oligonucleotide
caaaguauacuggaauugu

SEQ ID NO: 2071923 - RNA, 19 nt, Artificial Sequence
  Description of Artificial Sequence: Synthetic oligonucleotide
agcacgcugaaaguccaug

SEQ ID NO: 2071924 - RNA, 19 nt, Artificial Sequence
  Description of Artificial Sequence: Synthetic oligonucleotide
ugggguaaucauguggcuu

SEQ ID NO: 2071925 - RNA, 19 nt, Artificial Sequence
  Description of Artificial Sequence: Synthetic oligonucleotide
uacuggaauuguugaggau

SEQ ID NO: 2071926 - RNA, 19 nt, Artificial Sequence
  Description of Artificial Sequence: Synthetic oligonucleotide
uuaccuccuuucugcagau

SEQ ID NO: 2071927 - RNA, 19 nt, Artificial Sequence
  Description of Artificial Sequence: Synthetic oligonucleotide
acauccagacauccuuaaa

SEQ ID NO: 2071928 - RNA, 19 nt, Artificial Sequence
  Description of Artificial Sequence: Synthetic oligonucleotide
ggagcacaaccagacaacc

SEQ ID NO: 2071929 - RNA, 19 nt, Artificial Sequence
  Description of Artificial Sequence: Synthetic oligonucleotide
gccaugauacauuuuguua

SEQ ID NO: 2071930 - RNA, 19 nt, Artificial Sequence
  Description of Artificial Sequence: Synthetic oligonucleotide
gugccgagaugucuucuug

SEQ ID NO: 2071931 - RNA, 19 nt, Artificial Sequence
  Description of Artificial Sequence: Synthetic oligonucleotide
accgggcuagcuuacuaau

SEQ ID NO: 2071932 - RNA, 19 nt, Artificial Sequence
  Description of Artificial Sequence: Synthetic oligonucleotide
gaguuuuguuucgaccgga

SEQ ID NO: 2071933 - RNA, 19 nt, Artificial Sequence
  Description of Artificial Sequence: Synthetic oligonucleotide
gccgagaugucuucuugcc

SEQ ID NO: 2071934 - RNA, 19 nt, Artificial Sequence
  Description of Artificial Sequence: Synthetic oligonucleotide
ugcugaggugucccaguaa

SEQ ID NO: 2071935 - RNA, 19 nt, Artificial Sequence
  Description of Artificial Sequence: Synthetic oligonucleotide
gacaaccguuguuucuguc

SEQ ID NO: 2071936 - RNA, 19 nt, Artificial Sequence
  Description of Artificial Sequence: Synthetic oligonucleotide
uccucucgaaaacguugaa

SEQ ID NO: 2071937 - RNA, 19 nt, Artificial Sequence
  Description of Artificial Sequence: Synthetic oligonucleotide
gcuuacuaaucgcugggga

SEQ ID NO: 2071938 - RNA, 19 nt, Artificial Sequence
  Description of Artificial Sequence: Synthetic oligonucleotide
augcaaggggugccgagau

SEQ ID NO: 2071939 - RNA, 19 nt, Artificial Sequence
  Description of Artificial Sequence: Synthetic oligonucleotide
caaccguuguuucugucaa

SEQ ID NO: 2071940 - RNA, 19 nt, Artificial Sequence
  Description of Artificial Sequence: Synthetic oligonucleotide
aacgugcuccauggcgguc

SEQ ID NO: 2071941 - RNA, 19 nt, Artificial Sequence
  Description of Artificial Sequence: Synthetic oligonucleotide
cauagcguuucugugcuaa

SEQ ID NO: 2071942 - RNA, 19 nt, Artificial Sequence
  Description of Artificial Sequence: Synthetic oligonucleotide
uggauuccauagcguuucu

SEQ ID NO: 2071943 - RNA, 19 nt, Artificial Sequence
  Description of Artificial Sequence: Synthetic oligonucleotide
gcacaaacaaugcgaucgc

SEQ ID NO: 2071944 - RNA, 19 nt, Artificial Sequence
  Description of Artificial Sequence: Synthetic oligonucleotide
gccuuggaugccaugauac

SEQ ID NO: 2071945 - RNA, 19 nt, Artificial Sequence
  Description of Artificial Sequence: Synthetic oligonucleotide
cagccggacgccagcacgc

SEQ ID NO: 2071946 - RNA, 19 nt, Artificial Sequence
  Description of Artificial Sequence: Synthetic oligonucleotide
uggaugagcagaggaugaa

SEQ ID NO: 2071947 - RNA, 19 nt, Artificial Sequence
  Description of Artificial Sequence: Synthetic oligonucleotide
gcagccggacgccagcacg

SEQ ID NO: 2071948 - RNA, 19 nt, Artificial Sequence
  Description of Artificial Sequence: Synthetic oligonucleotide
ugccauucacuuugauaua

SEQ ID NO: 2071949 - RNA, 19 nt, Artificial Sequence
  Description of Artificial Sequence: Synthetic oligonucleotide
ucgcuggggaccgaggguc

SEQ ID NO: 2071950 - RNA, 19 nt, Artificial Sequence
  Description of Artificial Sequence: Synthetic oligonucleotide
gcagucggaacuggcauag

SEQ ID NO: 2071951 - RNA, 19 nt, Artificial Sequence
  Description of Artificial Sequence: Synthetic oligonucleotide
cuggccaugauaccgggcu

SEQ ID NO: 2071952 - RNA, 19 nt, Artificial Sequence
  Description of Artificial Sequence: Synthetic oligonucleotide
uggccacaucuuucauuag

SEQ ID NO: 2071953 - RNA, 19 nt, Artificial Sequence
  Description of Artificial Sequence: Synthetic oligonucleotide
auaccgggcuagcuuacua

SEQ ID NO: 2071954 - RNA, 19 nt, Artificial Sequence
  Description of Artificial Sequence: Synthetic oligonucleotide
augccaugauacauuuugu

SEQ ID NO: 2071955 - RNA, 19 nt, Artificial Sequence
  Description of Artificial Sequence: Synthetic oligonucleotide
gggcuagcuuacuaaucgc

SEQ ID NO: 2071956 - RNA, 19 nt, Artificial Sequence
  Description of Artificial Sequence: Synthetic oligonucleotide
gaccggauccauggaugag

SEQ ID NO: 2071957 - RNA, 19 nt, Artificial Sequence
  Description of Artificial Sequence: Synthetic oligonucleotide
ggugcacccuguuauuguc

SEQ ID NO: 2071958 - RNA, 19 nt, Artificial Sequence
  Description of Artificial Sequence: Synthetic oligonucleotide
gugcaguaucuaaagagcu

SEQ ID NO: 2071959 - RNA, 19 nt, Artificial Sequence
  Description of Artificial Sequence: Synthetic oligonucleotide
ggaagcuggccaugauacc

SEQ ID NO: 2071960 - RNA, 19 nt, Artificial Sequence
  Description of Artificial Sequence: Synthetic oligonucleotide
ggaaauugccuuucggaau

SEQ ID NO: 2071961 - RNA, 19 nt, Artificial Sequence
  Description of Artificial Sequence: Synthetic oligonucleotide
cauuagaaauaucccuggu

SEQ ID NO: 2071962 - RNA, 19 nt, Artificial Sequence
  Description of Artificial Sequence: Synthetic oligonucleotide
aguuuuguuucgaccggau

SEQ ID NO: 2071963 - RNA, 19 nt, Artificial Sequence
  Description of Artificial Sequence: Synthetic oligonucleotide
gggaccgagggucugcuga

SEQ ID NO: 2071964 - RNA, 19 nt, Artificial Sequence
  Description of Artificial Sequence: Synthetic oligonucleotide
cagauucuuucaaacuccu

SEQ ID NO: 2071965 - RNA, 19 nt, Artificial Sequence
  Description of Artificial Sequence: Synthetic oligonucleotide
cauagccaugauauugggu

SEQ ID NO: 2071966 - RNA, 19 nt, Artificial Sequence
  Description of Artificial Sequence: Synthetic oligonucleotide
agaugucuucuugccagaa

SEQ ID NO: 2071967 - RNA, 19 nt, Artificial Sequence
  Description of Artificial Sequence: Synthetic oligonucleotide
gggacggaaggggaaguag

SEQ ID NO: 2071968 - RNA, 19 nt, Artificial Sequence
  Description of Artificial Sequence: Synthetic oligonucleotide
gugccugggagcacaacca

SEQ ID NO: 2071969 - RNA, 19 nt, Artificial Sequence
  Description of Artificial Sequence: Synthetic oligonucleotide
uggccaugauaccgggcua

SEQ ID NO: 2071970 - RNA, 19 nt, Artificial Sequence
  Description of Artificial Sequence: Synthetic oligonucleotide
ugcagccggacgccagcac

SEQ ID NO: 2071971 - RNA, 19 nt, Artificial Sequence
  Description of Artificial Sequence: Synthetic oligonucleotide
ugucucccuucuccaucac

SEQ ID NO: 2071972 - RNA, 19 nt, Artificial Sequence
  Description of Artificial Sequence: Synthetic oligonucleotide
ccaguaagaccugcagccg

SEQ ID NO: 2071973 - RNA, 19 nt, Artificial Sequence
  Description of Artificial Sequence: Synthetic oligonucleotide
gggagcacaaccagacaac

SEQ ID NO: 2071974 - RNA, 19 nt, Artificial Sequence
  Description of Artificial Sequence: Synthetic oligonucleotide
cuggaucuucguaaucacu

SEQ ID NO: 2071975 - RNA, 19 nt, Artificial Sequence
  Description of Artificial Sequence: Synthetic oligonucleotide
caaggggugccgagauguc

SEQ ID NO: 2071976 - RNA, 19 nt, Artificial Sequence
  Description of Artificial Sequence: Synthetic oligonucleotide
gucggcuucgaaacaucca

SEQ ID NO: 2071977 - RNA, 19 nt, Artificial Sequence
  Description of Artificial Sequence: Synthetic oligonucleotide
gcagaggaugaaagaaaac

SEQ ID NO: 2071978 - RNA, 19 nt, Artificial Sequence
  Description of Artificial Sequence: Synthetic oligonucleotide
gcuuuaccuccuuucugca

SEQ ID NO: 2071979 - RNA, 19 nt, Artificial Sequence
  Description of Artificial Sequence: Synthetic oligonucleotide
gccuuugugggugccuggg

SEQ ID NO: 2071980 - RNA, 19 nt, Artificial Sequence
  Description of Artificial Sequence: Synthetic oligonucleotide
ggauuccauagcguuucug

SEQ ID NO: 2071981 - RNA, 19 nt, Artificial Sequence
  Description of Artificial Sequence: Synthetic oligonucleotide
gguaaucauguggcuucag

SEQ ID NO: 2071982 - RNA, 19 nt, Artificial Sequence
  Description of Artificial Sequence: Synthetic oligonucleotide
cacgcugaaaguccauggu

SEQ ID NO: 2071983 - RNA, 19 nt, Artificial Sequence
  Description of Artificial Sequence: Synthetic oligonucleotide
ugggacggaaggggaagua

SEQ ID NO: 2071984 - RNA, 19 nt, Artificial Sequence
  Description of Artificial Sequence: Synthetic oligonucleotide
uuguuucgaccggauccau

SEQ ID NO: 2071985 - RNA, 19 nt, Artificial Sequence
  Description of Artificial Sequence: Synthetic oligonucleotide
cucccagcugggguaauca

SEQ ID NO: 2071986 - RNA, 19 nt, Artificial Sequence
  Description of Artificial Sequence: Synthetic oligonucleotide
cuggggaccgagggucugc

SEQ ID NO: 2071987 - RNA, 19 nt, Artificial Sequence
  Description of Artificial Sequence: Synthetic oligonucleotide
cgaucgcugggacggaagg

SEQ ID NO: 2071988 - RNA, 19 nt, Artificial Sequence
  Description of Artificial Sequence: Synthetic oligonucleotide
cagcugggguaaucaugug

SEQ ID NO: 2071989 - RNA, 19 nt, Artificial Sequence
  Description of Artificial Sequence: Synthetic oligonucleotide
cugggagcacaaccagaca

SEQ ID NO: 2071990 - RNA, 19 nt, Artificial Sequence
  Description of Artificial Sequence: Synthetic oligonucleotide
ggcaacuggcaggggaagc

SEQ ID NO: 2071991 - RNA, 19 nt, Artificial Sequence
  Description of Artificial Sequence: Synthetic oligonucleotide
ggaugagcagaggaugaaa

SEQ ID NO: 2071992 - RNA, 19 nt, Artificial Sequence
  Description of Artificial Sequence: Synthetic oligonucleotide
caguaucuaaagagcuccu

SEQ ID NO: 2071993 - RNA, 19 nt, Artificial Sequence
  Description of Artificial Sequence: Synthetic oligonucleotide
ugcgaucgcugggacggaa

SEQ ID NO: 2071994 - RNA, 19 nt, Artificial Sequence
  Description of Artificial Sequence: Synthetic oligonucleotide
aggggaagcuggccaugau

SEQ ID NO: 2071995 - RNA, 19 nt, Artificial Sequence
  Description of Artificial Sequence: Synthetic oligonucleotide
cauggcgguccaagcacaa

SEQ ID NO: 2071996 - RNA, 19 nt, Artificial Sequence
  Description of Artificial Sequence: Synthetic oligonucleotide
ugggugccugggagcacaa

SEQ ID NO: 2071997 - RNA, 19 nt, Artificial Sequence
  Description of Artificial Sequence: Synthetic oligonucleotide
guuuugcaauggccacauc

SEQ ID NO: 2071998 - RNA, 19 nt, Artificial Sequence
  Description of Artificial Sequence: Synthetic oligonucleotide
ggcgguccaagcacaaaca

SEQ ID NO: 2071999 - RNA, 19 nt, Artificial Sequence
  Description of Artificial Sequence: Synthetic oligonucleotide
ccuuggaugccaugauaca

SEQ ID NO: 2072000 - RNA, 19 nt, Artificial Sequence
  Description of Artificial Sequence: Synthetic oligonucleotide
gcgguccaagcacaaacaa

SEQ ID NO: 2072001 - RNA, 19 nt, Artificial Sequence
  Description of Artificial Sequence: Synthetic oligonucleotide
guggaggacagaagacgaa

SEQ ID NO: 2072002 - RNA, 19 nt, Artificial Sequence
  Description of Artificial Sequence: Synthetic oligonucleotide
caagucggcuucgaaacau

SEQ ID NO: 2072003 - RNA, 19 nt, Artificial Sequence
  Description of Artificial Sequence: Synthetic oligonucleotide
ggcuagcuuacuaaucgcu

SEQ ID NO: 2072004 - RNA, 19 nt, Artificial Sequence
  Description of Artificial Sequence: Synthetic oligonucleotide
ccggauccauggaugagca

SEQ ID NO: 2072005 - RNA, 19 nt, Artificial Sequence
  Description of Artificial Sequence: Synthetic oligonucleotide
gauaccgggcuagcuuacu

SEQ ID NO: 2072006 - RNA, 19 nt, Artificial Sequence
  Description of Artificial Sequence: Synthetic oligonucleotide
ccgggcuagcuuacuaauc

SEQ ID NO: 2072007 - RNA, 19 nt, Artificial Sequence
  Description of Artificial Sequence: Synthetic oligonucleotide
cucccucccagcuggggua

SEQ ID NO: 2072008 - RNA, 19 nt, Artificial Sequence
  Description of Artificial Sequence: Synthetic oligonucleotide
gcguuucugugcuaacucu

SEQ ID NO: 2072009 - RNA, 19 nt, Artificial Sequence
  Description of Artificial Sequence: Synthetic oligonucleotide
gagggucugcugagguguc

SEQ ID NO: 2072010 - RNA, 19 nt, Artificial Sequence
  Description of Artificial Sequence: Synthetic oligonucleotide
ggaucuucguaaucacuuu

SEQ ID NO: 2072011 - RNA, 19 nt, Artificial Sequence
  Description of Artificial Sequence: Synthetic oligonucleotide
uucugucaacgugcuccau

SEQ ID NO: 2072012 - RNA, 19 nt, Artificial Sequence
  Description of Artificial Sequence: Synthetic oligonucleotide
cugggguaaucauguggcu

SEQ ID NO: 2072013 - RNA, 19 nt, Artificial Sequence
  Description of Artificial Sequence: Synthetic oligonucleotide
caucaucagauaccagauu

SEQ ID NO: 2072014 - RNA, 19 nt, Artificial Sequence
  Description of Artificial Sequence: Synthetic oligonucleotide
acuaaucgcuggggaccga

SEQ ID NO: 2072015 - RNA, 19 nt, Artificial Sequence
  Description of Artificial Sequence: Synthetic oligonucleotide
cacaaacaaugcgaucgcu

SEQ ID NO: 2072016 - RNA, 19 nt, Artificial Sequence
  Description of Artificial Sequence: Synthetic oligonucleotide
gacuggugccauucacuuu

SEQ ID NO: 2072017 - RNA, 19 nt, Artificial Sequence
  Description of Artificial Sequence: Synthetic oligonucleotide
cugaugcaaggggugccga

SEQ ID NO: 2072018 - RNA, 19 nt, Artificial Sequence
  Description of Artificial Sequence: Synthetic oligonucleotide
ggcagucggaacuggcaua

SEQ ID NO: 2072019 - RNA, 19 nt, Artificial Sequence
  Description of Artificial Sequence: Synthetic oligonucleotide
ggacggaaggggaaguagu

SEQ ID NO: 2072020 - RNA, 19 nt, Artificial Sequence
  Description of Artificial Sequence: Synthetic oligonucleotide
gcgaucgcugggacggaag

SEQ ID NO: 2072021 - RNA, 19 nt, Artificial Sequence
  Description of Artificial Sequence: Synthetic oligonucleotide
ggguaaucauguggcuuca

SEQ ID NO: 2072022 - RNA, 19 nt, Artificial Sequence
  Description of Artificial Sequence: Synthetic oligonucleotide
caaccagacaaccguuguu

SEQ ID NO: 2072023 - RNA, 19 nt, Artificial Sequence
  Description of Artificial Sequence: Synthetic oligonucleotide
ccggacgccagcacgcuga

SEQ ID NO: 2072024 - RNA, 19 nt, Artificial Sequence
  Description of Artificial Sequence: Synthetic oligonucleotide
caacgugcuccauggcggu

SEQ ID NO: 2072025 - RNA, 19 nt, Artificial Sequence
  Description of Artificial Sequence: Synthetic oligonucleotide
ccgagaugucuucuugcca

SEQ ID NO: 2072026 - RNA, 19 nt, Artificial Sequence
  Description of Artificial Sequence: Synthetic oligonucleotide
ccugcuuguagccuuggau

SEQ ID NO: 2072027 - RNA, 19 nt, Artificial Sequence
  Description of Artificial Sequence: Synthetic oligonucleotide
gccugggccucacuuaacu

SEQ ID NO: 2072028 - RNA, 19 nt, Artificial Sequence
  Description of Artificial Sequence: Synthetic oligonucleotide
gcaacuggcaggggaagcu

SEQ ID NO: 2072029 - RNA, 19 nt, Artificial Sequence
  Description of Artificial Sequence: Synthetic oligonucleotide
ggggugccgagaugucuuc

SEQ ID NO: 2072030 - RNA, 19 nt, Artificial Sequence
  Description of Artificial Sequence: Synthetic oligonucleotide
ccauggaugagcagaggau

SEQ ID NO: 2072031 - RNA, 19 nt, Artificial Sequence
  Description of Artificial Sequence: Synthetic oligonucleotide
gcuuuggauuccauagcgu

SEQ ID NO: 2072032 - RNA, 19 nt, Artificial Sequence
  Description of Artificial Sequence: Synthetic oligonucleotide
gaccugcagccggacgcca

SEQ ID NO: 2072033 - RNA, 19 nt, Artificial Sequence
  Description of Artificial Sequence: Synthetic oligonucleotide
agccggacgccagcacgcu

SEQ ID NO: 2072034 - RNA, 19 nt, Artificial Sequence
  Description of Artificial Sequence: Synthetic oligonucleotide
ggauggcaacuggcagggg

SEQ ID NO: 2072035 - RNA, 19 nt, Artificial Sequence
  Description of Artificial Sequence: Synthetic oligonucleotide
ggcauaguggcaggaaauu

SEQ ID NO: 2072036 - RNA, 19 nt, Artificial Sequence
  Description of Artificial Sequence: Synthetic oligonucleotide
caauggccacaucuuucau

SEQ ID NO: 2072037 - RNA, 19 nt, Artificial Sequence
  Description of Artificial Sequence: Synthetic oligonucleotide
cgaccggauccauggauga

SEQ ID NO: 2072038 - RNA, 19 nt, Artificial Sequence
  Description of Artificial Sequence: Synthetic oligonucleotide
gccugggagcacaaccaga

SEQ ID NO: 2072039 - RNA, 19 nt, Artificial Sequence
  Description of Artificial Sequence: Synthetic oligonucleotide
cugcagccggacgccagca

SEQ ID NO: 2072040 - RNA, 19 nt, Artificial Sequence
  Description of Artificial Sequence: Synthetic oligonucleotide
augcgaucgcugggacgga

SEQ ID NO: 2072041 - RNA, 19 nt, Artificial Sequence
  Description of Artificial Sequence: Synthetic oligonucleotide
gcuggggaccgagggucug

SEQ ID NO: 2072042 - RNA, 19 nt, Artificial Sequence
  Description of Artificial Sequence: Synthetic oligonucleotide
cggauccauggaugagcag

SEQ ID NO: 2072043 - RNA, 19 nt, Artificial Sequence
  Description of Artificial Sequence: Synthetic oligonucleotide
gcuaacucuuuaacuucau

SEQ ID NO: 2072044 - RNA, 19 nt, Artificial Sequence
  Description of Artificial Sequence: Synthetic oligonucleotide
ccucgucuucuuggaaauc

SEQ ID NO: 2072045 - RNA, 19 nt, Artificial Sequence
  Description of Artificial Sequence: Synthetic oligonucleotide
cugggacggaaggggaagu

SEQ ID NO: 2072046 - RNA, 19 nt, Artificial Sequence
  Description of Artificial Sequence: Synthetic oligonucleotide
ccguuguuucugucaacgu

SEQ ID NO: 2072047 - RNA, 19 nt, Artificial Sequence
  Description of Artificial Sequence: Synthetic oligonucleotide
ccucucgaaaacguugaau

SEQ ID NO: 2072048 - RNA, 19 nt, Artificial Sequence
  Description of Artificial Sequence: Synthetic oligonucleotide
ccucccagcugggguaauc

SEQ ID NO: 2072049 - RNA, 19 nt, Artificial Sequence
  Description of Artificial Sequence: Synthetic oligonucleotide
ggggagggugcaguaucua

SEQ ID NO: 2072050 - RNA, 19 nt, Artificial Sequence
  Description of Artificial Sequence: Synthetic oligonucleotide
cgaaaacguugaaugucau

SEQ ID NO: 2072051 - RNA, 19 nt, Artificial Sequence
  Description of Artificial Sequence: Synthetic oligonucleotide
gggugccgagaugucuucu

SEQ ID NO: 2072052 - RNA, 19 nt, Artificial Sequence
  Description of Artificial Sequence: Synthetic oligonucleotide
ccaugauauuggguccagu

SEQ ID NO: 2072053 - RNA, 19 nt, Artificial Sequence
  Description of Artificial Sequence: Synthetic oligonucleotide
ccauagcguuucugugcua

SEQ ID NO: 2072054 - RNA, 19 nt, Artificial Sequence
  Description of Artificial Sequence: Synthetic oligonucleotide
ggacgccagcacgcugaaa

SEQ ID NO: 2072055 - RNA, 19 nt, Artificial Sequence
  Description of Artificial Sequence: Synthetic oligonucleotide
cccuguuauuguccugcuu

SEQ ID NO: 2072056 - RNA, 19 nt, Artificial Sequence
  Description of Artificial Sequence: Synthetic oligonucleotide
ccgggccugggccucacuu

SEQ ID NO: 2072057 - RNA, 19 nt, Artificial Sequence
  Description of Artificial Sequence: Synthetic oligonucleotide
cggaauccuugaguuuugu

SEQ ID NO: 2072058 - RNA, 19 nt, Artificial Sequence
  Description of Artificial Sequence: Synthetic oligonucleotide
cggacgccagcacgcugaa

SEQ ID NO: 2072059 - RNA, 19 nt, Artificial Sequence
  Description of Artificial Sequence: Synthetic oligonucleotide
cccucccagcugggguaau

SEQ ID NO: 2072060 - RNA, 19 nt, Artificial Sequence
  Description of Artificial Sequence: Synthetic oligonucleotide
auguuaaaguuauagaucc

SEQ ID NO: 2072061 - RNA, 19 nt, Artificial Sequence
  Description of Artificial Sequence: Synthetic oligonucleotide
aaauguuaaccuuccaggc

SEQ ID NO: 2072062 - RNA, 19 nt, Artificial Sequence
  Description of Artificial Sequence: Synthetic oligonucleotide
uaucuaauaaauuucaugu

SEQ ID NO: 2072063 - RNA, 19 nt, Artificial Sequence
  Description of Artificial Sequence: Synthetic oligonucleotide
gacaauaucacaauuaaag

SEQ ID NO: 2072064 - RNA, 19 nt, Artificial Sequence
  Description of Artificial Sequence: Synthetic oligonucleotide
aaguuauagauccaccggc

SEQ ID NO: 2072065 - RNA, 19 nt, Artificial Sequence
  Description of Artificial Sequence: Synthetic oligonucleotide
uuuaauguuaaaguuauag

SEQ ID NO: 2072066 - RNA, 19 nt, Artificial Sequence
  Description of Artificial Sequence: Synthetic oligonucleotide
ucuaauaaauuucauguca

SEQ ID NO: 2072067 - RNA, 19 nt, Artificial Sequence
  Description of Artificial Sequence: Synthetic oligonucleotide
aauguuaaccuuccaggcc

SEQ ID NO: 2072068 - RNA, 19 nt, Artificial Sequence
  Description of Artificial Sequence: Synthetic oligonucleotide
ugaaccaucauaaaugucu

SEQ ID NO: 2072069 - RNA, 19 nt, Artificial Sequence
  Description of Artificial Sequence: Synthetic oligonucleotide
uguagaaaaguuuuauggg

SEQ ID NO: 2072070 - RNA, 19 nt, Artificial Sequence
  Description of Artificial Sequence: Synthetic oligonucleotide
ucaaauaacugcuaugaag

SEQ ID NO: 2072071 - RNA, 19 nt, Artificial Sequence
  Description of Artificial Sequence: Synthetic oligonucleotide
uuaaaguuuggacauagca

SEQ ID NO: 2072072 - RNA, 19 nt, Artificial Sequence
  Description of Artificial Sequence: Synthetic oligonucleotide
ucagcaacagccaugggcg

SEQ ID NO: 2072073 - RNA, 19 nt, Artificial Sequence
  Description of Artificial Sequence: Synthetic oligonucleotide
uaaaguuuggacauagcag

SEQ ID NO: 2072074 - RNA, 19 nt, Artificial Sequence
  Description of Artificial Sequence: Synthetic oligonucleotide
aauugaaccaucauaaaug

SEQ ID NO: 2072075 - RNA, 19 nt, Artificial Sequence
  Description of Artificial Sequence: Synthetic oligonucleotide
aauguuaaaguuauagauc

SEQ ID NO: 2072076 - RNA, 19 nt, Artificial Sequence
  Description of Artificial Sequence: Synthetic oligonucleotide
uuuuaucuaauaaauuuca

SEQ ID NO: 2072077 - RNA, 19 nt, Artificial Sequence
  Description of Artificial Sequence: Synthetic oligonucleotide
uuucguaugagguagaguc

SEQ ID NO: 2072078 - RNA, 19 nt, Artificial Sequence
  Description of Artificial Sequence: Synthetic oligonucleotide
uaugaagacaauaucacaa

SEQ ID NO: 2072079 - RNA, 19 nt, Artificial Sequence
  Description of Artificial Sequence: Synthetic oligonucleotide
uuaucuaauaaauuucaug

SEQ ID NO: 2072080 - RNA, 19 nt, Artificial Sequence
  Description of Artificial Sequence: Synthetic oligonucleotide
uuucugaugauccuccagg

SEQ ID NO: 2072081 - RNA, 19 nt, Artificial Sequence
  Description of Artificial Sequence: Synthetic oligonucleotide
caaauguuaaccuuccagg

SEQ ID NO: 2072082 - RNA, 19 nt, Artificial Sequence
  Description of Artificial Sequence: Synthetic oligonucleotide
auguuaaccuuccaggccc

SEQ ID NO: 2072083 - RNA, 19 nt, Artificial Sequence
  Description of Artificial Sequence: Synthetic oligonucleotide
aacuaauaaauccccaugu

SEQ ID NO: 2072084 - RNA, 19 nt, Artificial Sequence
  Description of Artificial Sequence: Synthetic oligonucleotide
ugcuaugaagacaauauca

SEQ ID NO: 2072085 - RNA, 19 nt, Artificial Sequence
  Description of Artificial Sequence: Synthetic oligonucleotide
aaauugaaccaucauaaau

SEQ ID NO: 2072086 - RNA, 19 nt, Artificial Sequence
  Description of Artificial Sequence: Synthetic oligonucleotide
uuuaugggaaaguugaagu

SEQ ID NO: 2072087 - RNA, 19 nt, Artificial Sequence
  Description of Artificial Sequence: Synthetic oligonucleotide
aaauaacugcuaugaagac

SEQ ID NO: 2072088 - RNA, 19 nt, Artificial Sequence
  Description of Artificial Sequence: Synthetic oligonucleotide
uuaaauggcaacuaauaaa

SEQ ID NO: 2072089 - RNA, 19 nt, Artificial Sequence
  Description of Artificial Sequence: Synthetic oligonucleotide
ucauaaaugucuucuguag

SEQ ID NO: 2072090 - RNA, 19 nt, Artificial Sequence
  Description of Artificial Sequence: Synthetic oligonucleotide
uaaucuucaaucauccaca

SEQ ID NO: 2072091 - RNA, 19 nt, Artificial Sequence
  Description of Artificial Sequence: Synthetic oligonucleotide
uuaauguuaaaguuauaga

SEQ ID NO: 2072092 - RNA, 19 nt, Artificial Sequence
  Description of Artificial Sequence: Synthetic oligonucleotide
aauuaaaguuuggacauag

SEQ ID NO: 2072093 - RNA, 19 nt, Artificial Sequence
  Description of Artificial Sequence: Synthetic oligonucleotide
cauuaaucuucaaucaucc

SEQ ID NO: 2072094 - RNA, 19 nt, Artificial Sequence
  Description of Artificial Sequence: Synthetic oligonucleotide
gaaaguugaaguuucuuac

SEQ ID NO: 2072095 - RNA, 19 nt, Artificial Sequence
  Description of Artificial Sequence: Synthetic oligonucleotide
uuuaaauggcaacuaauaa

SEQ ID NO: 2072096 - RNA, 19 nt, Artificial Sequence
  Description of Artificial Sequence: Synthetic oligonucleotide
uguagucauaaucuuuccg

SEQ ID NO: 2072097 - RNA, 19 nt, Artificial Sequence
  Description of Artificial Sequence: Synthetic oligonucleotide
aagacaauaucacaauuaa

SEQ ID NO: 2072098 - RNA, 19 nt, Artificial Sequence
  Description of Artificial Sequence: Synthetic oligonucleotide
acaaaauucacaaauagau

SEQ ID NO: 2072099 - RNA, 19 nt, Artificial Sequence
  Description of Artificial Sequence: Synthetic oligonucleotide
uccgguaucgcuuccaccg

SEQ ID NO: 2072100 - RNA, 19 nt, Artificial Sequence
  Description of Artificial Sequence: Synthetic oligonucleotide
acaauuaaaguuuggacau

SEQ ID NO: 2072101 - RNA, 19 nt, Artificial Sequence
  Description of Artificial Sequence: Synthetic oligonucleotide
uuaaaguuauagauccacc

SEQ ID NO: 2072102 - RNA, 19 nt, Artificial Sequence
  Description of Artificial Sequence: Synthetic oligonucleotide
cauuauucuguuuaaucag

SEQ ID NO: 2072103 - RNA, 19 nt, Artificial Sequence
  Description of Artificial Sequence: Synthetic oligonucleotide
ucucaaauaacugcuauga

SEQ ID NO: 2072104 - RNA, 19 nt, Artificial Sequence
  Description of Artificial Sequence: Synthetic oligonucleotide
ucguaauuuuccuuuaccc

SEQ ID NO: 2072105 - RNA, 19 nt, Artificial Sequence
  Description of Artificial Sequence: Synthetic oligonucleotide
ucuucauagauuuucguau

SEQ ID NO: 2072106 - RNA, 19 nt, Artificial Sequence
  Description of Artificial Sequence: Synthetic oligonucleotide
uuuaaucagguaucuugcg

SEQ ID NO: 2072107 - RNA, 19 nt, Artificial Sequence
  Description of Artificial Sequence: Synthetic oligonucleotide
guauucuuugccuuuaaug

SEQ ID NO: 2072108 - RNA, 19 nt, Artificial Sequence
  Description of Artificial Sequence: Synthetic oligonucleotide
auggcaacuaauaaauccc

SEQ ID NO: 2072109 - RNA, 19 nt, Artificial Sequence
  Description of Artificial Sequence: Synthetic oligonucleotide
aaucagguaucuugcgaac

SEQ ID NO: 2072110 - RNA, 19 nt, Artificial Sequence
  Description of Artificial Sequence: Synthetic oligonucleotide
auucuguuuaaucagguau

SEQ ID NO: 2072111 - RNA, 19 nt, Artificial Sequence
  Description of Artificial Sequence: Synthetic oligonucleotide
cacaauuaaaguuuggaca

SEQ ID NO: 2072112 - RNA, 19 nt, Artificial Sequence
  Description of Artificial Sequence: Synthetic oligonucleotide
ucacaauuaaaguuuggac

SEQ ID NO: 2072113 - RNA, 19 nt, Artificial Sequence
  Description of Artificial Sequence: Synthetic oligonucleotide
cuuuaguuacugcugagag

SEQ ID NO: 2072114 - RNA, 19 nt, Artificial Sequence
  Description of Artificial Sequence: Synthetic oligonucleotide
uuccuuuacccaaagcucc

SEQ ID NO: 2072115 - RNA, 19 nt, Artificial Sequence
  Description of Artificial Sequence: Synthetic oligonucleotide
aaucuuuccgugucucuuc

SEQ ID NO: 2072116 - RNA, 19 nt, Artificial Sequence
  Description of Artificial Sequence: Synthetic oligonucleotide
uacauuauucuguuuaauc

SEQ ID NO: 2072117 - RNA, 19 nt, Artificial Sequence
  Description of Artificial Sequence: Synthetic oligonucleotide
uuaaucagguaucuugcga

SEQ ID NO: 2072118 - RNA, 19 nt, Artificial Sequence
  Description of Artificial Sequence: Synthetic oligonucleotide
auugaaccaucauaaaugu

SEQ ID NO: 2072119 - RNA, 19 nt, Artificial Sequence
  Description of Artificial Sequence: Synthetic oligonucleotide
aguuuuaugggaaaguuga

SEQ ID NO: 2072120 - RNA, 19 nt, Artificial Sequence
  Description of Artificial Sequence: Synthetic oligonucleotide
uucacaaauagauuauaaa

SEQ ID NO: 2072121 - RNA, 19 nt, Artificial Sequence
  Description of Artificial Sequence: Synthetic oligonucleotide
auggcuauaguauucuucu

SEQ ID NO: 2072122 - RNA, 19 nt, Artificial Sequence
  Description of Artificial Sequence: Synthetic oligonucleotide
cauguagucauaaucuuuc

SEQ ID NO: 2072123 - RNA, 19 nt, Artificial Sequence
  Description of Artificial Sequence: Synthetic oligonucleotide
cauucuucauccaucuccg

SEQ ID NO: 2072124 - RNA, 19 nt, Artificial Sequence
  Description of Artificial Sequence: Synthetic oligonucleotide
aagaaauguuucuuucuga

SEQ ID NO: 2072125 - RNA, 19 nt, Artificial Sequence
  Description of Artificial Sequence: Synthetic oligonucleotide
ugucaaauuuuaacuaaac

SEQ ID NO: 2072126 - RNA, 19 nt, Artificial Sequence
  Description of Artificial Sequence: Synthetic oligonucleotide
uugagcgucucguaggcgg

SEQ ID NO: 2072127 - RNA, 19 nt, Artificial Sequence
  Description of Artificial Sequence: Synthetic oligonucleotide
aaaaguuuuaugggaaagu

SEQ ID NO: 2072128 - RNA, 19 nt, Artificial Sequence
  Description of Artificial Sequence: Synthetic oligonucleotide
uaucuugcgaacuuuaguu

SEQ ID NO: 2072129 - RNA, 19 nt, Artificial Sequence
  Description of Artificial Sequence: Synthetic oligonucleotide
agauuuucguaugagguag

SEQ ID NO: 2072130 - RNA, 19 nt, Artificial Sequence
  Description of Artificial Sequence: Synthetic oligonucleotide
uucaaucauccacaaaugu

SEQ ID NO: 2072131 - RNA, 19 nt, Artificial Sequence
  Description of Artificial Sequence: Synthetic oligonucleotide
uccacaaauguuaaccuuc

SEQ ID NO: 2072132 - RNA, 19 nt, Artificial Sequence
  Description of Artificial Sequence: Synthetic oligonucleotide
guagaaaaguuuuauggga

SEQ ID NO: 2072133 - RNA, 19 nt, Artificial Sequence
  Description of Artificial Sequence: Synthetic oligonucleotide
aaguugaaguuucuuacau

SEQ ID NO: 2072134 - RNA, 19 nt, Artificial Sequence
  Description of Artificial Sequence: Synthetic oligonucleotide
gaaaaguuuuaugggaaag

SEQ ID NO: 2072135 - RNA, 19 nt, Artificial Sequence
  Description of Artificial Sequence: Synthetic oligonucleotide
aaagcucccgcuuaagaaa

SEQ ID NO: 2072136 - RNA, 19 nt, Artificial Sequence
  Description of Artificial Sequence: Synthetic oligonucleotide
auuauucuguuuaaucagg

SEQ ID NO: 2072137 - RNA, 19 nt, Artificial Sequence
  Description of Artificial Sequence: Synthetic oligonucleotide
uuuaguuacugcugagagc

SEQ ID NO: 2072138 - RNA, 19 nt, Artificial Sequence
  Description of Artificial Sequence: Synthetic oligonucleotide
aucgcuuccaccgaggguc

SEQ ID NO: 2072139 - RNA, 19 nt, Artificial Sequence
  Description of Artificial Sequence: Synthetic oligonucleotide
ucauccaucuccgguaucg

SEQ ID NO: 2072140 - RNA, 19 nt, Artificial Sequence
  Description of Artificial Sequence: Synthetic oligonucleotide
uaugagcacaggugaaacg

SEQ ID NO: 2072141 - RNA, 19 nt, Artificial Sequence
  Description of Artificial Sequence: Synthetic oligonucleotide
uuauucuguuuaaucaggu

SEQ ID NO: 2072142 - RNA, 19 nt, Artificial Sequence
  Description of Artificial Sequence: Synthetic oligonucleotide
auaguauucuucuggguga

SEQ ID NO: 2072143 - RNA, 19 nt, Artificial Sequence
  Description of Artificial Sequence: Synthetic oligonucleotide
agcggcgucagcaacagcc

SEQ ID NO: 2072144 - RNA, 19 nt, Artificial Sequence
  Description of Artificial Sequence: Synthetic oligonucleotide
uaucacaauuaaaguuugg

SEQ ID NO: 2072145 - RNA, 19 nt, Artificial Sequence
  Description of Artificial Sequence: Synthetic oligonucleotide
uguuccugcuuguagaccu

SEQ ID NO: 2072146 - RNA, 19 nt, Artificial Sequence
  Description of Artificial Sequence: Synthetic oligonucleotide
uaaucagguaucuugcgaa

SEQ ID NO: 2072147 - RNA, 19 nt, Artificial Sequence
  Description of Artificial Sequence: Synthetic oligonucleotide
gucagcaacagccaugggc

SEQ ID NO: 2072148 - RNA, 19 nt, Artificial Sequence
  Description of Artificial Sequence: Synthetic oligonucleotide
agcaccucauagcagucgc

SEQ ID NO: 2072149 - RNA, 19 nt, Artificial Sequence
  Description of Artificial Sequence: Synthetic oligonucleotide
ucuugcgaacuuuaguuac

SEQ ID NO: 2072150 - RNA, 19 nt, Artificial Sequence
  Description of Artificial Sequence: Synthetic oligonucleotide
guugaaguuucuuacauua

SEQ ID NO: 2072151 - RNA, 19 nt, Artificial Sequence
  Description of Artificial Sequence: Synthetic oligonucleotide
agaaauguuucuuucugau

SEQ ID NO: 2072152 - RNA, 19 nt, Artificial Sequence
  Description of Artificial Sequence: Synthetic oligonucleotide
ugggugauccagcauguag

SEQ ID NO: 2072153 - RNA, 19 nt, Artificial Sequence
  Description of Artificial Sequence: Synthetic oligonucleotide
uuuccgugucucuucaucc

SEQ ID NO: 2072154 - RNA, 19 nt, Artificial Sequence
  Description of Artificial Sequence: Synthetic oligonucleotide
aguaccaagcuauguauga

SEQ ID NO: 2072155 - RNA, 19 nt, Artificial Sequence
  Description of Artificial Sequence: Synthetic oligonucleotide
guuuaaucagguaucuugc

SEQ ID NO: 2072156 - RNA, 19 nt, Artificial Sequence
  Description of Artificial Sequence: Synthetic oligonucleotide
ggcuauaguauucuucugg

SEQ ID NO: 2072157 - RNA, 19 nt, Artificial Sequence
  Description of Artificial Sequence: Synthetic oligonucleotide
uucauagauuuucguauga

SEQ ID NO: 2072158 - RNA, 19 nt, Artificial Sequence
  Description of Artificial Sequence: Synthetic oligonucleotide
ugauccagcauguagucau

SEQ ID NO: 2072159 - RNA, 19 nt, Artificial Sequence
  Description of Artificial Sequence: Synthetic oligonucleotide
ucaaacugagacugggaca

SEQ ID NO: 2072160 - RNA, 19 nt, Artificial Sequence
  Description of Artificial Sequence: Synthetic oligonucleotide
uggcaacuaauaaaucccc

SEQ ID NO: 2072161 - RNA, 19 nt, Artificial Sequence
  Description of Artificial Sequence: Synthetic oligonucleotide
aguaauggcuauaguauuc

SEQ ID NO: 2072162 - RNA, 19 nt, Artificial Sequence
  Description of Artificial Sequence: Synthetic oligonucleotide
uuauagauccaccggcagu

SEQ ID NO: 2072163 - RNA, 19 nt, Artificial Sequence
  Description of Artificial Sequence: Synthetic oligonucleotide
uagucauaaucuuuccgug

SEQ ID NO: 2072164 - RNA, 19 nt, Artificial Sequence
  Description of Artificial Sequence: Synthetic oligonucleotide
aguuacugcugagagcagc

SEQ ID NO: 2072165 - RNA, 19 nt, Artificial Sequence
  Description of Artificial Sequence: Synthetic oligonucleotide
uaccaagcuauguaugagc

SEQ ID NO: 2072166 - RNA, 19 nt, Artificial Sequence
  Description of Artificial Sequence: Synthetic oligonucleotide
uaugagguagagucucucc

SEQ ID NO: 2072167 - RNA, 19 nt, Artificial Sequence
  Description of Artificial Sequence: Synthetic oligonucleotide
aaguuuuaugggaaaguug

SEQ ID NO: 2072168 - RNA, 19 nt, Artificial Sequence
  Description of Artificial Sequence: Synthetic oligonucleotide
aggugaaacggagcgaggc

SEQ ID NO: 2072169 - RNA, 19 nt, Artificial Sequence
  Description of Artificial Sequence: Synthetic oligonucleotide
ucauagauuuucguaugag

SEQ ID NO: 2072170 - RNA, 19 nt, Artificial Sequence
  Description of Artificial Sequence: Synthetic oligonucleotide
aguacaaccccuccaccag

SEQ ID NO: 2072171 - RNA, 19 nt, Artificial Sequence
  Description of Artificial Sequence: Synthetic oligonucleotide
aucacaauuaaaguuugga

SEQ ID NO: 2072172 - RNA, 19 nt, Artificial Sequence
  Description of Artificial Sequence: Synthetic oligonucleotide
cucguaauuuuccuuuacc

SEQ ID NO: 2072173 - RNA, 19 nt, Artificial Sequence
  Description of Artificial Sequence: Synthetic oligonucleotide
cuucaaucauccacaaaug

SEQ ID NO: 2072174 - RNA, 19 nt, Artificial Sequence
  Description of Artificial Sequence: Synthetic oligonucleotide
cuucauagauuuucguaug

SEQ ID NO: 2072175 - RNA, 19 nt, Artificial Sequence
  Description of Artificial Sequence: Synthetic oligonucleotide
guauucuucugggugaucc

SEQ ID NO: 2072176 - RNA, 19 nt, Artificial Sequence
  Description of Artificial Sequence: Synthetic oligonucleotide
gucaaacugagacugggac

SEQ ID NO: 2072177 - RNA, 19 nt, Artificial Sequence
  Description of Artificial Sequence: Synthetic oligonucleotide
aucucaaauaacugcuaug

SEQ ID NO: 2072178 - RNA, 19 nt, Artificial Sequence
  Description of Artificial Sequence: Synthetic oligonucleotide
uguuaaaguuauagaucca

SEQ ID NO: 2072179 - RNA, 19 nt, Artificial Sequence
  Description of Artificial Sequence: Synthetic oligonucleotide
uccaccggcaguaccaagc

SEQ ID NO: 2072180 - RNA, 19 nt, Artificial Sequence
  Description of Artificial Sequence: Synthetic oligonucleotide
uacaaccccuccaccaggg

SEQ ID NO: 2072181 - RNA, 19 nt, Artificial Sequence
  Description of Artificial Sequence: Synthetic oligonucleotide
uucugaugauccuccaggc

SEQ ID NO: 2072182 - RNA, 19 nt, Artificial Sequence
  Description of Artificial Sequence: Synthetic oligonucleotide
auuaaaguuuggacauagc

SEQ ID NO: 2072183 - RNA, 19 nt, Artificial Sequence
  Description of Artificial Sequence: Synthetic oligonucleotide
uuucuuacauuauucuguu

SEQ ID NO: 2072184 - RNA, 19 nt, Artificial Sequence
  Description of Artificial Sequence: Synthetic oligonucleotide
guuauagauccaccggcag

SEQ ID NO: 2072185 - RNA, 19 nt, Artificial Sequence
  Description of Artificial Sequence: Synthetic oligonucleotide
agucauaaucuuuccgugu

SEQ ID NO: 2072186 - RNA, 19 nt, Artificial Sequence
  Description of Artificial Sequence: Synthetic oligonucleotide
auagcagucgcgcgugccg

SEQ ID NO: 2072187 - RNA, 19 nt, Artificial Sequence
  Description of Artificial Sequence: Synthetic oligonucleotide
ugccuuuaauguuaaaguu

SEQ ID NO: 2072188 - RNA, 19 nt, Artificial Sequence
  Description of Artificial Sequence: Synthetic oligonucleotide
guagucauaaucuuuccgu

SEQ ID NO: 2072189 - RNA, 19 nt, Artificial Sequence
  Description of Artificial Sequence: Synthetic oligonucleotide
uagauuuucguaugaggua

SEQ ID NO: 2072190 - RNA, 19 nt, Artificial Sequence
  Description of Artificial Sequence: Synthetic oligonucleotide
augggaaaguugaaguuuc

SEQ ID NO: 2072191 - RNA, 19 nt, Artificial Sequence
  Description of Artificial Sequence: Synthetic oligonucleotide
uaugggaaaguugaaguuu

SEQ ID NO: 2072192 - RNA, 19 nt, Artificial Sequence
  Description of Artificial Sequence: Synthetic oligonucleotide
gucauaaucuuuccguguc

SEQ ID NO: 2072193 - RNA, 19 nt, Artificial Sequence
  Description of Artificial Sequence: Synthetic oligonucleotide
cuaugaagacaauaucaca

SEQ ID NO: 2072194 - RNA, 19 nt, Artificial Sequence
  Description of Artificial Sequence: Synthetic oligonucleotide
uucguaugagguagagucu

SEQ ID NO: 2072195 - RNA, 19 nt, Artificial Sequence
  Description of Artificial Sequence: Synthetic oligonucleotide
ucccgcuuaagaaauguuu

SEQ ID NO: 2072196 - RNA, 19 nt, Artificial Sequence
  Description of Artificial Sequence: Synthetic oligonucleotide
uuggacauagcagccuucc

SEQ ID NO: 2072197 - RNA, 19 nt, Artificial Sequence
  Description of Artificial Sequence: Synthetic oligonucleotide
uaguaauggcuauaguauu

SEQ ID NO: 2072198 - RNA, 19 nt, Artificial Sequence
  Description of Artificial Sequence: Synthetic oligonucleotide
ugggacaucuucauagauu

SEQ ID NO: 2072199 - RNA, 19 nt, Artificial Sequence
  Description of Artificial Sequence: Synthetic oligonucleotide
guuucuuacauuauucugu

SEQ ID NO: 2072200 - RNA, 19 nt, Artificial Sequence
  Description of Artificial Sequence: Synthetic oligonucleotide
uguagaccucguaauuuuc

SEQ ID NO: 2072201 - RNA, 19 nt, Artificial Sequence
  Description of Artificial Sequence: Synthetic oligonucleotide
gugguaguaauggcuauag

SEQ ID NO: 2072202 - RNA, 19 nt, Artificial Sequence
  Description of Artificial Sequence: Synthetic oligonucleotide
guaucgcuuccaccgaggg

SEQ ID NO: 2072203 - RNA, 19 nt, Artificial Sequence
  Description of Artificial Sequence: Synthetic oligonucleotide
gcgaucuccgccuugcugg

SEQ ID NO: 2072204 - RNA, 19 nt, Artificial Sequence
  Description of Artificial Sequence: Synthetic oligonucleotide
auagcagccuuccauuaau

SEQ ID NO: 2072205 - RNA, 19 nt, Artificial Sequence
  Description of Artificial Sequence: Synthetic oligonucleotide
aucuccgccuugcuggccg

SEQ ID NO: 2072206 - RNA, 19 nt, Artificial Sequence
  Description of Artificial Sequence: Synthetic oligonucleotide
uuguagaccucguaauuuu

SEQ ID NO: 2072207 - RNA, 19 nt, Artificial Sequence
  Description of Artificial Sequence: Synthetic oligonucleotide
ugaaacggagcgaggccug

SEQ ID NO: 2072208 - RNA, 19 nt, Artificial Sequence
  Description of Artificial Sequence: Synthetic oligonucleotide
uguaugagcacaggugaaa

SEQ ID NO: 2072209 - RNA, 19 nt, Artificial Sequence
  Description of Artificial Sequence: Synthetic oligonucleotide
accucauagcagucgcgcg

SEQ ID NO: 2072210 - RNA, 19 nt, Artificial Sequence
  Description of Artificial Sequence: Synthetic oligonucleotide
guagaccucguaauuuucc

SEQ ID NO: 2072211 - RNA, 19 nt, Artificial Sequence
  Description of Artificial Sequence: Synthetic oligonucleotide
cuuuacccaaagcucccgc

SEQ ID NO: 2072212 - RNA, 19 nt, Artificial Sequence
  Description of Artificial Sequence: Synthetic oligonucleotide
aacugcuaugaagacaaua

SEQ ID NO: 2072213 - RNA, 19 nt, Artificial Sequence
  Description of Artificial Sequence: Synthetic oligonucleotide
gcuaugaagacaauaucac

SEQ ID NO: 2072214 - RNA, 19 nt, Artificial Sequence
  Description of Artificial Sequence: Synthetic oligonucleotide
aacggagcgaggccugcug

SEQ ID NO: 2072215 - RNA, 19 nt, Artificial Sequence
  Description of Artificial Sequence: Synthetic oligonucleotide
uagauccaccggcaguacc

SEQ ID NO: 2072216 - RNA, 19 nt, Artificial Sequence
  Description of Artificial Sequence: Synthetic oligonucleotide
aagcuauguaugagcacag

SEQ ID NO: 2072217 - RNA, 19 nt, Artificial Sequence
  Description of Artificial Sequence: Synthetic oligonucleotide
cuuuccgugucucuucauc

SEQ ID NO: 2072218 - RNA, 19 nt, Artificial Sequence
  Description of Artificial Sequence: Synthetic oligonucleotide
uugaaccaucauaaauguc

SEQ ID NO: 2072219 - RNA, 19 nt, Artificial Sequence
  Description of Artificial Sequence: Synthetic oligonucleotide
uugcgaacuuuaguuacug

SEQ ID NO: 2072220 - RNA, 19 nt, Artificial Sequence
  Description of Artificial Sequence: Synthetic oligonucleotide
ucguaugagguagagucuc

SEQ ID NO: 2072221 - RNA, 19 nt, Artificial Sequence
  Description of Artificial Sequence: Synthetic oligonucleotide
guaguaauggcuauaguau

SEQ ID NO: 2072222 - RNA, 19 nt, Artificial Sequence
  Description of Artificial Sequence: Synthetic oligonucleotide
aguuauagauccaccggca

SEQ ID NO: 2072223 - RNA, 19 nt, Artificial Sequence
  Description of Artificial Sequence: Synthetic oligonucleotide
ggaaaguugaaguuucuua

SEQ ID NO: 2072224 - RNA, 19 nt, Artificial Sequence
  Description of Artificial Sequence: Synthetic oligonucleotide
uagagucucuccuccuccc

SEQ ID NO: 2072225 - RNA, 19 nt, Artificial Sequence
  Description of Artificial Sequence: Synthetic oligonucleotide
gcccuuucauucuucaucc

SEQ ID NO: 2072226 - RNA, 19 nt, Artificial Sequence
  Description of Artificial Sequence: Synthetic oligonucleotide
aguugaaguuucuuacauu

SEQ ID NO: 2072227 - RNA, 19 nt, Artificial Sequence
  Description of Artificial Sequence: Synthetic oligonucleotide
guacaaccccuccaccagg

SEQ ID NO: 2072228 - RNA, 19 nt, Artificial Sequence
  Description of Artificial Sequence: Synthetic oligonucleotide
caaagcucccgcuuaagaa

SEQ ID NO: 2072229 - RNA, 19 nt, Artificial Sequence
  Description of Artificial Sequence: Synthetic oligonucleotide
accaagcuauguaugagca

SEQ ID NO: 2072230 - RNA, 19 nt, Artificial Sequence
  Description of Artificial Sequence: Synthetic oligonucleotide
aagcuucggcgcucggcgg

SEQ ID NO: 2072231 - RNA, 19 nt, Artificial Sequence
  Description of Artificial Sequence: Synthetic oligonucleotide
guaccaagcuauguaugag

SEQ ID NO: 2072232 - RNA, 19 nt, Artificial Sequence
  Description of Artificial Sequence: Synthetic oligonucleotide
guagcggucggggugguag

SEQ ID NO: 2072233 - RNA, 19 nt, Artificial Sequence
  Description of Artificial Sequence: Synthetic oligonucleotide
uuuggacauagcagccuuc

SEQ ID NO: 2072234 - RNA, 19 nt, Artificial Sequence
  Description of Artificial Sequence: Synthetic oligonucleotide
guaugagcacaggugaaac

SEQ ID NO: 2072235 - RNA, 19 nt, Artificial Sequence
  Description of Artificial Sequence: Synthetic oligonucleotide
aucuugcgaacuuuaguua

SEQ ID NO: 2072236 - RNA, 19 nt, Artificial Sequence
  Description of Artificial Sequence: Synthetic oligonucleotide
auccacaaauguuaaccuu

SEQ ID NO: 2072237 - RNA, 19 nt, Artificial Sequence
  Description of Artificial Sequence: Synthetic oligonucleotide
uguuaaccuuccaggcccu

SEQ ID NO: 2072238 - RNA, 19 nt, Artificial Sequence
  Description of Artificial Sequence: Synthetic oligonucleotide
uggcuauaguauucuucug

SEQ ID NO: 2072239 - RNA, 19 nt, Artificial Sequence
  Description of Artificial Sequence: Synthetic oligonucleotide
ugggaaaguugaaguuucu

SEQ ID NO: 2072240 - RNA, 19 nt, Artificial Sequence
  Description of Artificial Sequence: Synthetic oligonucleotide
cugagacugggacaucuuc

SEQ ID NO: 2072241 - RNA, 19 nt, Artificial Sequence
  Description of Artificial Sequence: Synthetic oligonucleotide
uaucgcuuccaccgagggu

SEQ ID NO: 2072242 - RNA, 19 nt, Artificial Sequence
  Description of Artificial Sequence: Synthetic oligonucleotide
caccucauagcagucgcgc

SEQ ID NO: 2072243 - RNA, 19 nt, Artificial Sequence
  Description of Artificial Sequence: Synthetic oligonucleotide
aacagccaugggcgccggc

SEQ ID NO: 2072244 - RNA, 19 nt, Artificial Sequence
  Description of Artificial Sequence: Synthetic oligonucleotide
agcuauguaugagcacagg

SEQ ID NO: 2072245 - RNA, 19 nt, Artificial Sequence
  Description of Artificial Sequence: Synthetic oligonucleotide
ucuccgguaucgcuuccac

SEQ ID NO: 2072246 - RNA, 19 nt, Artificial Sequence
  Description of Artificial Sequence: Synthetic oligonucleotide
caguacaaccccuccacca

SEQ ID NO: 2072247 - RNA, 19 nt, Artificial Sequence
  Description of Artificial Sequence: Synthetic oligonucleotide
uggacauagcagccuucca

SEQ ID NO: 2072248 - RNA, 19 nt, Artificial Sequence
  Description of Artificial Sequence: Synthetic oligonucleotide
agagcagcagacacaucuc

SEQ ID NO: 2072249 - RNA, 19 nt, Artificial Sequence
  Description of Artificial Sequence: Synthetic oligonucleotide
aguuuggacauagcagccu

SEQ ID NO: 2072250 - RNA, 19 nt, Artificial Sequence
  Description of Artificial Sequence: Synthetic oligonucleotide
ccacaaauguuaaccuucc

SEQ ID NO: 2072251 - RNA, 19 nt, Artificial Sequence
  Description of Artificial Sequence: Synthetic oligonucleotide
agauccaccggcaguacca

SEQ ID NO: 2072252 - RNA, 19 nt, Artificial Sequence
  Description of Artificial Sequence: Synthetic oligonucleotide
aucagguaucuugcgaacu

SEQ ID NO: 2072253 - RNA, 19 nt, Artificial Sequence
  Description of Artificial Sequence: Synthetic oligonucleotide
ggugaaacggagcgaggcc

SEQ ID NO: 2072254 - RNA, 19 nt, Artificial Sequence
  Description of Artificial Sequence: Synthetic oligonucleotide
guaucuugcgaacuuuagu

SEQ ID NO: 2072255 - RNA, 19 nt, Artificial Sequence
  Description of Artificial Sequence: Synthetic oligonucleotide
uaguuacugcugagagcag

SEQ ID NO: 2072256 - RNA, 19 nt, Artificial Sequence
  Description of Artificial Sequence: Synthetic oligonucleotide
auagauccaccggcaguac

SEQ ID NO: 2072257 - RNA, 19 nt, Artificial Sequence
  Description of Artificial Sequence: Synthetic oligonucleotide
cuggcgguaggcccgcgcg

SEQ ID NO: 2072258 - RNA, 19 nt, Artificial Sequence
  Description of Artificial Sequence: Synthetic oligonucleotide
guagugguaguaauggcua

SEQ ID NO: 2072259 - RNA, 19 nt, Artificial Sequence
  Description of Artificial Sequence: Synthetic oligonucleotide
uuguuccugcuuguagacc

SEQ ID NO: 2072260 - RNA, 19 nt, Artificial Sequence
  Description of Artificial Sequence: Synthetic oligonucleotide
cgaacuuuaguuacugcug

SEQ ID NO: 2072261 - RNA, 19 nt, Artificial Sequence
  Description of Artificial Sequence: Synthetic oligonucleotide
guaggcggucgccaccagg

SEQ ID NO: 2072262 - RNA, 19 nt, Artificial Sequence
  Description of Artificial Sequence: Synthetic oligonucleotide
ugagcgucucguaggcggu

SEQ ID NO: 2072263 - RNA, 19 nt, Artificial Sequence
  Description of Artificial Sequence: Synthetic oligonucleotide
gguaucuugcgaacuuuag

SEQ ID NO: 2072264 - RNA, 19 nt, Artificial Sequence
  Description of Artificial Sequence: Synthetic oligonucleotide
accggcaguaccaagcuau

SEQ ID NO: 2072265 - RNA, 19 nt, Artificial Sequence
  Description of Artificial Sequence: Synthetic oligonucleotide
cccgcuuaagaaauguuuc

SEQ ID NO: 2072266 - RNA, 19 nt, Artificial Sequence
  Description of Artificial Sequence: Synthetic oligonucleotide
uaauggcuauaguauucuu

SEQ ID NO: 2072267 - RNA, 19 nt, Artificial Sequence
  Description of Artificial Sequence: Synthetic oligonucleotide
aagcucccgcuuaagaaau

SEQ ID NO: 2072268 - RNA, 19 nt, Artificial Sequence
  Description of Artificial Sequence: Synthetic oligonucleotide
auccaucuccgguaucgcu

SEQ ID NO: 2072269 - RNA, 19 nt, Artificial Sequence
  Description of Artificial Sequence: Synthetic oligonucleotide
uagcagccuuccauuaauc

SEQ ID NO: 2072270 - RNA, 19 nt, Artificial Sequence
  Description of Artificial Sequence: Synthetic oligonucleotide
acauagcagccuuccauua

SEQ ID NO: 2072271 - RNA, 19 nt, Artificial Sequence
  Description of Artificial Sequence: Synthetic oligonucleotide
aaacugagacugggacauc

SEQ ID NO: 2072272 - RNA, 19 nt, Artificial Sequence
  Description of Artificial Sequence: Synthetic oligonucleotide
agacaauaucacaauuaaa

SEQ ID NO: 2072273 - RNA, 19 nt, Artificial Sequence
  Description of Artificial Sequence: Synthetic oligonucleotide
ucauagcagucgcgcgugc

SEQ ID NO: 2072274 - RNA, 19 nt, Artificial Sequence
  Description of Artificial Sequence: Synthetic oligonucleotide
caggugaaacggagcgagg

SEQ ID NO: 2072275 - RNA, 19 nt, Artificial Sequence
  Description of Artificial Sequence: Synthetic oligonucleotide
ucgcgcgugccgcaguaca

SEQ ID NO: 2072276 - RNA, 19 nt, Artificial Sequence
  Description of Artificial Sequence: Synthetic oligonucleotide
ggugauccagcauguaguc

SEQ ID NO: 2072277 - RNA, 19 nt, Artificial Sequence
  Description of Artificial Sequence: Synthetic oligonucleotide
cucauagcagucgcgcgug

SEQ ID NO: 2072278 - RNA, 19 nt, Artificial Sequence
  Description of Artificial Sequence: Synthetic oligonucleotide
cauccacaaauguuaaccu

SEQ ID NO: 2072279 - RNA, 19 nt, Artificial Sequence
  Description of Artificial Sequence: Synthetic oligonucleotide
agaccucguaauuuuccuu

SEQ ID NO: 2072280 - RNA, 19 nt, Artificial Sequence
  Description of Artificial Sequence: Synthetic oligonucleotide
gcgucagcaacagccaugg

SEQ ID NO: 2072281 - RNA, 19 nt, Artificial Sequence
  Description of Artificial Sequence: Synthetic oligonucleotide
gaccucguaauuuuccuuu

SEQ ID NO: 2072282 - RNA, 19 nt, Artificial Sequence
  Description of Artificial Sequence: Synthetic oligonucleotide
aucuucaaucauccacaaa

SEQ ID NO: 2072283 - RNA, 19 nt, Artificial Sequence
  Description of Artificial Sequence: Synthetic oligonucleotide
cauagcagucgcgcgugcc

SEQ ID NO: 2072284 - RNA, 19 nt, Artificial Sequence
  Description of Artificial Sequence: Synthetic oligonucleotide
aguauucuucugggugauc

SEQ ID NO: 2072285 - RNA, 19 nt, Artificial Sequence
  Description of Artificial Sequence: Synthetic oligonucleotide
caaacugagacugggacau

SEQ ID NO: 2072286 - RNA, 19 nt, Artificial Sequence
  Description of Artificial Sequence: Synthetic oligonucleotide
gauuuucguaugagguaga

SEQ ID NO: 2072287 - RNA, 19 nt, Artificial Sequence
  Description of Artificial Sequence: Synthetic oligonucleotide
gcgaacuuuaguuacugcu

SEQ ID NO: 2072288 - RNA, 19 nt, Artificial Sequence
  Description of Artificial Sequence: Synthetic oligonucleotide
cguaauuuuccuuuaccca

SEQ ID NO: 2072289 - RNA, 19 nt, Artificial Sequence
  Description of Artificial Sequence: Synthetic oligonucleotide
uucuuacauuauucuguuu

SEQ ID NO: 2072290 - RNA, 19 nt, Artificial Sequence
  Description of Artificial Sequence: Synthetic oligonucleotide
cuucuguagaaaaguuuua

SEQ ID NO: 2072291 - RNA, 19 nt, Artificial Sequence
  Description of Artificial Sequence: Synthetic oligonucleotide
cuccgguaucgcuuccacc

SEQ ID NO: 2072292 - RNA, 19 nt, Artificial Sequence
  Description of Artificial Sequence: Synthetic oligonucleotide
uaguauucuucugggugau

SEQ ID NO: 2072293 - RNA, 19 nt, Artificial Sequence
  Description of Artificial Sequence: Synthetic oligonucleotide
agcgucucguaggcggucg

SEQ ID NO: 2072294 - RNA, 19 nt, Artificial Sequence
  Description of Artificial Sequence: Synthetic oligonucleotide
gagacugggacaucuucau

SEQ ID NO: 2072295 - RNA, 19 nt, Artificial Sequence
  Description of Artificial Sequence: Synthetic oligonucleotide
cuugagcgucucguaggcg

SEQ ID NO: 2072296 - RNA, 19 nt, Artificial Sequence
  Description of Artificial Sequence: Synthetic oligonucleotide
ucguaggcggucgccacca

SEQ ID NO: 2072297 - RNA, 19 nt, Artificial Sequence
  Description of Artificial Sequence: Synthetic oligonucleotide
uccuccccguauucuuugc

SEQ ID NO: 2072298 - RNA, 19 nt, Artificial Sequence
  Description of Artificial Sequence: Synthetic oligonucleotide
uccccguauucuuugccuu

SEQ ID NO: 2072299 - RNA, 19 nt, Artificial Sequence
  Description of Artificial Sequence: Synthetic oligonucleotide
gaaacggagcgaggccugc

SEQ ID NO: 2072300 - RNA, 19 nt, Artificial Sequence
  Description of Artificial Sequence: Synthetic oligonucleotide
gguaucgcuuccaccgagg

SEQ ID NO: 2072301 - RNA, 19 nt, Artificial Sequence
  Description of Artificial Sequence: Synthetic oligonucleotide
gcuauguaugagcacaggu

SEQ ID NO: 2072302 - RNA, 19 nt, Artificial Sequence
  Description of Artificial Sequence: Synthetic oligonucleotide
ggcaguaccaagcuaugua

SEQ ID NO: 2072303 - RNA, 19 nt, Artificial Sequence
  Description of Artificial Sequence: Synthetic oligonucleotide
guaugagguagagucucuc

SEQ ID NO: 2072304 - RNA, 19 nt, Artificial Sequence
  Description of Artificial Sequence: Synthetic oligonucleotide
cuauaguauucuucugggu

SEQ ID NO: 2072305 - RNA, 19 nt, Artificial Sequence
  Description of Artificial Sequence: Synthetic oligonucleotide
agugguaguaauggcuaua

SEQ ID NO: 2072306 - RNA, 19 nt, Artificial Sequence
  Description of Artificial Sequence: Synthetic oligonucleotide
uuaaccuuccaggcccuuu

SEQ ID NO: 2072307 - RNA, 19 nt, Artificial Sequence
  Description of Artificial Sequence: Synthetic oligonucleotide
uagcagucgcgcgugccgc

SEQ ID NO: 2072308 - RNA, 19 nt, Artificial Sequence
  Description of Artificial Sequence: Synthetic oligonucleotide
accucguaauuuuccuuua

SEQ ID NO: 2072309 - RNA, 19 nt, Artificial Sequence
  Description of Artificial Sequence: Synthetic oligonucleotide
ggcggucgccaccaggagg

SEQ ID NO: 2072310 - RNA, 19 nt, Artificial Sequence
  Description of Artificial Sequence: Synthetic oligonucleotide
cauagcagccuuccauuaa

SEQ ID NO: 2072311 - RNA, 19 nt, Artificial Sequence
  Description of Artificial Sequence: Synthetic oligonucleotide
aauccccaugucaaaucuu

SEQ ID NO: 2072312 - RNA, 19 nt, Artificial Sequence
  Description of Artificial Sequence: Synthetic oligonucleotide
ugccgcaguacaaccccuc

SEQ ID NO: 2072313 - RNA, 19 nt, Artificial Sequence
  Description of Artificial Sequence: Synthetic oligonucleotide
aaacggagcgaggccugcu

SEQ ID NO: 2072314 - RNA, 19 nt, Artificial Sequence
  Description of Artificial Sequence: Synthetic oligonucleotide
cauccaucuccgguaucgc

SEQ ID NO: 2072315 - RNA, 19 nt, Artificial Sequence
  Description of Artificial Sequence: Synthetic oligonucleotide
agccaugggcgccggccgg

SEQ ID NO: 2072316 - RNA, 19 nt, Artificial Sequence
  Description of Artificial Sequence: Synthetic oligonucleotide
acggagcgaggccugcugu

SEQ ID NO: 2072317 - RNA, 19 nt, Artificial Sequence
  Description of Artificial Sequence: Synthetic oligonucleotide
cuugcgaacuuuaguuacu

SEQ ID NO: 2072318 - RNA, 19 nt, Artificial Sequence
  Description of Artificial Sequence: Synthetic oligonucleotide
uagcggucggggugguagc

SEQ ID NO: 2072319 - RNA, 19 nt, Artificial Sequence
  Description of Artificial Sequence: Synthetic oligonucleotide
caucgcccggcucgggccg

SEQ ID NO: 2072320 - RNA, 19 nt, Artificial Sequence
  Description of Artificial Sequence: Synthetic oligonucleotide
gcaacuaauaaauccccau

SEQ ID NO: 2072321 - RNA, 19 nt, Artificial Sequence
  Description of Artificial Sequence: Synthetic oligonucleotide
cacaaauguuaaccuucca

SEQ ID NO: 2072322 - RNA, 19 nt, Artificial Sequence
  Description of Artificial Sequence: Synthetic oligonucleotide
ucucuccuccuccccguau

SEQ ID NO: 2072323 - RNA, 19 nt, Artificial Sequence
  Description of Artificial Sequence: Synthetic oligonucleotide
aggcccgcgcgaucuccgc

SEQ ID NO: 2072324 - RNA, 19 nt, Artificial Sequence
  Description of Artificial Sequence: Synthetic oligonucleotide
ucgcuuccaccgaggguca

SEQ ID NO: 2072325 - RNA, 19 nt, Artificial Sequence
  Description of Artificial Sequence: Synthetic oligonucleotide
auccaccggcaguaccaag

SEQ ID NO: 2072326 - RNA, 19 nt, Artificial Sequence
  Description of Artificial Sequence: Synthetic oligonucleotide
ccagcuggcgguaggcccg

SEQ ID NO: 2072327 - RNA, 19 nt, Artificial Sequence
  Description of Artificial Sequence: Synthetic oligonucleotide
ggugguagcgccgggccag

SEQ ID NO: 2072328 - RNA, 19 nt, Artificial Sequence
  Description of Artificial Sequence: Synthetic oligonucleotide
agcgaggccugcuguagua

SEQ ID NO: 2072329 - RNA, 19 nt, Artificial Sequence
  Description of Artificial Sequence: Synthetic oligonucleotide
guuuggacauagcagccuu

SEQ ID NO: 2072330 - RNA, 19 nt, Artificial Sequence
  Description of Artificial Sequence: Synthetic oligonucleotide
gcaguacaaccccuccacc

SEQ ID NO: 2072331 - RNA, 19 nt, Artificial Sequence
  Description of Artificial Sequence: Synthetic oligonucleotide
ucuuuccgugucucuucau

SEQ ID NO: 2072332 - RNA, 19 nt, Artificial Sequence
  Description of Artificial Sequence: Synthetic oligonucleotide
auguaugagcacaggugaa

SEQ ID NO: 2072333 - RNA, 19 nt, Artificial Sequence
  Description of Artificial Sequence: Synthetic oligonucleotide
agacugggacaucuucaua

SEQ ID NO: 2072334 - RNA, 19 nt, Artificial Sequence
  Description of Artificial Sequence: Synthetic oligonucleotide
agcggucggggugguagcg

SEQ ID NO: 2072335 - RNA, 19 nt, Artificial Sequence
  Description of Artificial Sequence: Synthetic oligonucleotide
gcagcagacacaucucaaa

SEQ ID NO: 2072336 - RNA, 19 nt, Artificial Sequence
  Description of Artificial Sequence: Synthetic oligonucleotide
gagcggcucacgcccagca

SEQ ID NO: 2072337 - RNA, 19 nt, Artificial Sequence
  Description of Artificial Sequence: Synthetic oligonucleotide
ggcaacuaauaaaucccca

SEQ ID NO: 2072338 - RNA, 19 nt, Artificial Sequence
  Description of Artificial Sequence: Synthetic oligonucleotide
gugaaacggagcgaggccu

SEQ ID NO: 2072339 - RNA, 19 nt, Artificial Sequence
  Description of Artificial Sequence: Synthetic oligonucleotide
ccaagcuauguaugagcac

SEQ ID NO: 2072340 - RNA, 19 nt, Artificial Sequence
  Description of Artificial Sequence: Synthetic oligonucleotide
agguaucuugcgaacuuua

SEQ ID NO: 2072341 - RNA, 19 nt, Artificial Sequence
  Description of Artificial Sequence: Synthetic oligonucleotide
ggaagcuucggcgcucggc

SEQ ID NO: 2072342 - RNA, 19 nt, Artificial Sequence
  Description of Artificial Sequence: Synthetic oligonucleotide
auccagcauguagucauaa

SEQ ID NO: 2072343 - RNA, 19 nt, Artificial Sequence
  Description of Artificial Sequence: Synthetic oligonucleotide
gcaguaccaagcuauguau

SEQ ID NO: 2072344 - RNA, 19 nt, Artificial Sequence
  Description of Artificial Sequence: Synthetic oligonucleotide
caggcccuuucauucuuca

SEQ ID NO: 2072345 - RNA, 19 nt, Artificial Sequence
  Description of Artificial Sequence: Synthetic oligonucleotide
ccucguaauuuuccuuuac

SEQ ID NO: 2072346 - RNA, 19 nt, Artificial Sequence
  Description of Artificial Sequence: Synthetic oligonucleotide
aggaagcuucggcgcucgg

SEQ ID NO: 2072347 - RNA, 19 nt, Artificial Sequence
  Description of Artificial Sequence: Synthetic oligonucleotide
aggcggucgccaccaggag

SEQ ID NO: 2072348 - RNA, 19 nt, Artificial Sequence
  Description of Artificial Sequence: Synthetic oligonucleotide
cuguaguagugguaguaau

SEQ ID NO: 2072349 - RNA, 19 nt, Artificial Sequence
  Description of Artificial Sequence: Synthetic oligonucleotide
caucuccgguaucgcuucc

SEQ ID NO: 2072350 - RNA, 19 nt, Artificial Sequence
  Description of Artificial Sequence: Synthetic oligonucleotide
cgugccgcaguacaacccc

SEQ ID NO: 2072351 - RNA, 19 nt, Artificial Sequence
  Description of Artificial Sequence: Synthetic oligonucleotide
cucgggccgguagcggucg

SEQ ID NO: 2072352 - RNA, 19 nt, Artificial Sequence
  Description of Artificial Sequence: Synthetic oligonucleotide
aucuccgguaucgcuucca

SEQ ID NO: 2072353 - RNA, 19 nt, Artificial Sequence
  Description of Artificial Sequence: Synthetic oligonucleotide
caauuaaaguuuggacaua

SEQ ID NO: 2072354 - RNA, 19 nt, Artificial Sequence
  Description of Artificial Sequence: Synthetic oligonucleotide
ccuuuacccaaagcucccg

SEQ ID NO: 2072355 - RNA, 19 nt, Artificial Sequence
  Description of Artificial Sequence: Synthetic oligonucleotide
gccgcaguacaaccccucc

SEQ ID NO: 2072356 - RNA, 19 nt, Artificial Sequence
  Description of Artificial Sequence: Synthetic oligonucleotide
gucucguaggcggucgcca

SEQ ID NO: 2072357 - RNA, 19 nt, Artificial Sequence
  Description of Artificial Sequence: Synthetic oligonucleotide
agcagucgcgcgugccgca

SEQ ID NO: 2072358 - RNA, 19 nt, Artificial Sequence
  Description of Artificial Sequence: Synthetic oligonucleotide
ccaucuccgguaucgcuuc

SEQ ID NO: 2072359 - RNA, 19 nt, Artificial Sequence
  Description of Artificial Sequence: Synthetic oligonucleotide
gaucuccgccuugcuggcc

SEQ ID NO: 2072360 - RNA, 19 nt, Artificial Sequence
  Description of Artificial Sequence: Synthetic oligonucleotide
gauccaccggcaguaccaa

SEQ ID NO: 2072361 - RNA, 19 nt, Artificial Sequence
  Description of Artificial Sequence: Synthetic oligonucleotide
cuccccguauucuuugccu

SEQ ID NO: 2072362 - RNA, 19 nt, Artificial Sequence
  Description of Artificial Sequence: Synthetic oligonucleotide
ccaaagcucccgcuuaaga

SEQ ID NO: 2072363 - RNA, 19 nt, Artificial Sequence
  Description of Artificial Sequence: Synthetic oligonucleotide
cacaggugaaacggagcga

SEQ ID NO: 2072364 - RNA, 19 nt, Artificial Sequence
  Description of Artificial Sequence: Synthetic oligonucleotide
agucgcgcgugccgcagua

SEQ ID NO: 2072365 - RNA, 19 nt, Artificial Sequence
  Description of Artificial Sequence: Synthetic oligonucleotide
ccuccccguauucuuugcc

SEQ ID NO: 2072366 - RNA, 19 nt, Artificial Sequence
  Description of Artificial Sequence: Synthetic oligonucleotide
gauccagcauguagucaua

SEQ ID NO: 2072367 - RNA, 19 nt, Artificial Sequence
  Description of Artificial Sequence: Synthetic oligonucleotide
gcaccucauagcagucgcg

SEQ ID NO: 2072368 - RNA, 19 nt, Artificial Sequence
  Description of Artificial Sequence: Synthetic oligonucleotide
ccaucgcccggcucgggcc

SEQ ID NO: 2072369 - RNA, 19 nt, Artificial Sequence
  Description of Artificial Sequence: Synthetic oligonucleotide
acugagacugggacaucuu

SEQ ID NO: 2072370 - RNA, 19 nt, Artificial Sequence
  Description of Artificial Sequence: Synthetic oligonucleotide
gcggucgccaccaggagga

SEQ ID NO: 2072371 - RNA, 19 nt, Artificial Sequence
  Description of Artificial Sequence: Synthetic oligonucleotide
ucgccaccaggaggaagcu

SEQ ID NO: 2072372 - RNA, 19 nt, Artificial Sequence
  Description of Artificial Sequence: Synthetic oligonucleotide
ccgccuugcuggccgagcg

SEQ ID NO: 2072373 - RNA, 19 nt, Artificial Sequence
  Description of Artificial Sequence: Synthetic oligonucleotide
agcgagccgcgccgccauc

SEQ ID NO: 2072374 - RNA, 19 nt, Artificial Sequence
  Description of Artificial Sequence: Synthetic oligonucleotide
agcucccgcuuaagaaaug

SEQ ID NO: 2072375 - RNA, 19 nt, Artificial Sequence
  Description of Artificial Sequence: Synthetic oligonucleotide
ucggcgggccgcgccagca

SEQ ID NO: 2072376 - RNA, 19 nt, Artificial Sequence
  Description of Artificial Sequence: Synthetic oligonucleotide
cugcugagagcagcagaca

SEQ ID NO: 2072377 - RNA, 19 nt, Artificial Sequence
  Description of Artificial Sequence: Synthetic oligonucleotide
caugggcgccggccggcag

SEQ ID NO: 2072378 - RNA, 19 nt, Artificial Sequence
  Description of Artificial Sequence: Synthetic oligonucleotide
gagcgaggccugcuguagu

SEQ ID NO: 2072379 - RNA, 19 nt, Artificial Sequence
  Description of Artificial Sequence: Synthetic oligonucleotide
ggucgccaccaggaggaag

SEQ ID NO: 2072380 - RNA, 19 nt, Artificial Sequence
  Description of Artificial Sequence: Synthetic oligonucleotide
gcgaggccugcuguaguag

SEQ ID NO: 2072381 - RNA, 19 nt, Artificial Sequence
  Description of Artificial Sequence: Synthetic oligonucleotide
ccggcaguaccaagcuaug

SEQ ID NO: 2072382 - RNA, 19 nt, Artificial Sequence
  Description of Artificial Sequence: Synthetic oligonucleotide
gagcgucucguaggcgguc

SEQ ID NO: 2072383 - RNA, 19 nt, Artificial Sequence
  Description of Artificial Sequence: Synthetic oligonucleotide
cgcgugccgcaguacaacc

SEQ ID NO: 2072384 - RNA, 19 nt, Artificial Sequence
  Description of Artificial Sequence: Synthetic oligonucleotide
ccgcuuaagaaauguuucu

SEQ ID NO: 2072385 - RNA, 19 nt, Artificial Sequence
  Description of Artificial Sequence: Synthetic oligonucleotide
ccuuucauucuucauccau

SEQ ID NO: 2072386 - RNA, 19 nt, Artificial Sequence
  Description of Artificial Sequence: Synthetic oligonucleotide
gcauguagucauaaucuuu

SEQ ID NO: 2072387 - RNA, 19 nt, Artificial Sequence
  Description of Artificial Sequence: Synthetic oligonucleotide
gcuucggcgcucggcggcg

SEQ ID NO: 2072388 - RNA, 19 nt, Artificial Sequence
  Description of Artificial Sequence: Synthetic oligonucleotide
aucgcccggcucgggccgg

SEQ ID NO: 2072389 - RNA, 19 nt, Artificial Sequence
  Description of Artificial Sequence: Synthetic oligonucleotide
cuuccaccgagggucauuu

SEQ ID NO: 2072390 - RNA, 19 nt, Artificial Sequence
  Description of Artificial Sequence: Synthetic oligonucleotide
gcagcggagccagcagcag

SEQ ID NO: 2072391 - RNA, 19 nt, Artificial Sequence
  Description of Artificial Sequence: Synthetic oligonucleotide
cgaucuccgccuugcuggc

SEQ ID NO: 2072392 - RNA, 19 nt, Artificial Sequence
  Description of Artificial Sequence: Synthetic oligonucleotide
cccaaagcucccgcuuaag

SEQ ID NO: 2072393 - RNA, 19 nt, Artificial Sequence
  Description of Artificial Sequence: Synthetic oligonucleotide
ccucauagcagucgcgcgu

SEQ ID NO: 2072394 - RNA, 19 nt, Artificial Sequence
  Description of Artificial Sequence: Synthetic oligonucleotide
gcucccgcuuaagaaaugu

SEQ ID NO: 2072395 - RNA, 19 nt, Artificial Sequence
  Description of Artificial Sequence: Synthetic oligonucleotide
cuucggcgcucggcggcgc

SEQ ID NO: 2072396 - RNA, 19 nt, Artificial Sequence
  Description of Artificial Sequence: Synthetic oligonucleotide
cucccgcuuaagaaauguu

SEQ ID NO: 2072397 - RNA, 19 nt, Artificial Sequence
  Description of Artificial Sequence: Synthetic oligonucleotide
gcgucucguaggcggucgc

SEQ ID NO: 2072398 - RNA, 19 nt, Artificial Sequence
  Description of Artificial Sequence: Synthetic oligonucleotide
cccggcucgggccgguagc

SEQ ID NO: 2072399 - RNA, 19 nt, Artificial Sequence
  Description of Artificial Sequence: Synthetic oligonucleotide
caccagggccucggcgggc

SEQ ID NO: 2072400 - RNA, 19 nt, Artificial Sequence
  Description of Artificial Sequence: Synthetic oligonucleotide
cgugucucuucauccuuga

SEQ ID NO: 2072401 - RNA, 19 nt, Artificial Sequence
  Description of Artificial Sequence: Synthetic oligonucleotide
cucacgcccagcaccucau

SEQ ID NO: 2072402 - RNA, 19 nt, Artificial Sequence
  Description of Artificial Sequence: Synthetic oligonucleotide
ggcagcgagccgcgccgcc

SEQ ID NO: 2072403 - RNA, 19 nt, Artificial Sequence
  Description of Artificial Sequence: Synthetic oligonucleotide
gucucuccuccuccccgua

SEQ ID NO: 2072404 - RNA, 19 nt, Artificial Sequence
  Description of Artificial Sequence: Synthetic oligonucleotide
cuccgccuugcuggccgag

SEQ ID NO: 2072405 - RNA, 19 nt, Artificial Sequence
  Description of Artificial Sequence: Synthetic oligonucleotide
gguaggcccgcgcgaucuc

SEQ ID NO: 2072406 - RNA, 19 nt, Artificial Sequence
  Description of Artificial Sequence: Synthetic oligonucleotide
cagguaucuugcgaacuuu

SEQ ID NO: 2072407 - RNA, 19 nt, Artificial Sequence
  Description of Artificial Sequence: Synthetic oligonucleotide
gucgcgcgugccgcaguac

SEQ ID NO: 2072408 - RNA, 19 nt, Artificial Sequence
  Description of Artificial Sequence: Synthetic oligonucleotide
gcgcgugccgcaguacaac

SEQ ID NO: 2072409 - RNA, 19 nt, Artificial Sequence
  Description of Artificial Sequence: Synthetic oligonucleotide
ccgcaguacaaccccucca

SEQ ID NO: 2072410 - RNA, 19 nt, Artificial Sequence
  Description of Artificial Sequence: Synthetic oligonucleotide
ggccugcuguaguaguggu

SEQ ID NO: 2072411 - RNA, 19 nt, Artificial Sequence
  Description of Artificial Sequence: Synthetic oligonucleotide
gcggcgucagcaacagcca

SEQ ID NO: 2072412 - RNA, 19 nt, Artificial Sequence
  Description of Artificial Sequence: Synthetic oligonucleotide
gggccaucgcccggcucgg

SEQ ID NO: 2072413 - RNA, 19 nt, Artificial Sequence
  Description of Artificial Sequence: Synthetic oligonucleotide
caccggcaguaccaagcua

SEQ ID NO: 2072414 - RNA, 19 nt, Artificial Sequence
  Description of Artificial Sequence: Synthetic oligonucleotide
gcccggcucgggccgguag

SEQ ID NO: 2072415 - RNA, 19 nt, Artificial Sequence
  Description of Artificial Sequence: Synthetic oligonucleotide
gcggucggggugguagcgc

SEQ ID NO: 2072416 - RNA, 19 nt, Artificial Sequence
  Description of Artificial Sequence: Synthetic oligonucleotide
cgucucguaggcggucgcc

SEQ ID NO: 2072417 - RNA, 19 nt, Artificial Sequence
  Description of Artificial Sequence: Synthetic oligonucleotide
ccgguaucgcuuccaccga

SEQ ID NO: 2072418 - RNA, 19 nt, Artificial Sequence
  Description of Artificial Sequence: Synthetic oligonucleotide
gugccgcaguacaaccccu

SEQ ID NO: 2072419 - RNA, 19 nt, Artificial Sequence
  Description of Artificial Sequence: Synthetic oligonucleotide
ccgagcggcucacgcccag

SEQ ID NO: 2072420 - RNA, 19 nt, Artificial Sequence
  Description of Artificial Sequence: Synthetic oligonucleotide
gcagcgagccgcgccgcca

SEQ ID NO: 2072421 - RNA, 19 nt, Artificial Sequence
  Description of Artificial Sequence: Synthetic oligonucleotide
ccaccggcaguaccaagcu

SEQ ID NO: 2072422 - RNA, 19 nt, Artificial Sequence
  Description of Artificial Sequence: Synthetic oligonucleotide
ccgcgggcagcgagccgcg

SEQ ID NO: 2072423 - RNA, 19 nt, Artificial Sequence
  Description of Artificial Sequence: Synthetic oligonucleotide
guuaaccuuccaggcccuu

SEQ ID NO: 2072424 - RNA, 19 nt, Artificial Sequence
  Description of Artificial Sequence: Synthetic oligonucleotide
cguaugagguagagucucu

SEQ ID NO: 2072425 - RNA, 19 nt, Artificial Sequence
  Description of Artificial Sequence: Synthetic oligonucleotide
gcucgggccgguagcgguc

SEQ ID NO: 2072426 - RNA, 19 nt, Artificial Sequence
  Description of Artificial Sequence: Synthetic oligonucleotide
cguauucuuugccuuuaau

SEQ ID NO: 2072427 - RNA, 19 nt, Artificial Sequence
  Description of Artificial Sequence: Synthetic oligonucleotide
gccugcuguaguaguggua

SEQ ID NO: 2072428 - RNA, 19 nt, Artificial Sequence
  Description of Artificial Sequence: Synthetic oligonucleotide
ccgcgccagcagcggagcc

SEQ ID NO: 2072429 - RNA, 19 nt, Artificial Sequence
  Description of Artificial Sequence: Synthetic oligonucleotide
cggccggcagccuccgguc

SEQ ID NO: 2072430 - RNA, 19 nt, Artificial Sequence
  Description of Artificial Sequence: Synthetic oligonucleotide
cagcgagccgcgccgccau

SEQ ID NO: 2072431 - RNA, 19 nt, Artificial Sequence
  Description of Artificial Sequence: Synthetic oligonucleotide
cagucgcgcgugccgcagu

SEQ ID NO: 2072432 - RNA, 19 nt, Artificial Sequence
  Description of Artificial Sequence: Synthetic oligonucleotide
gccggccggcagccuccgg

SEQ ID NO: 2072433 - RNA, 19 nt, Artificial Sequence
  Description of Artificial Sequence: Synthetic oligonucleotide
ccccguauucuuugccuuu

SEQ ID NO: 2072434 - RNA, 19 nt, Artificial Sequence
  Description of Artificial Sequence: Synthetic oligonucleotide
cgggccgguagcggucggg

SEQ ID NO: 2072435 - RNA, 19 nt, Artificial Sequence
  Description of Artificial Sequence: Synthetic oligonucleotide
ggcucacgcccagcaccuc

SEQ ID NO: 2072436 - RNA, 19 nt, Artificial Sequence
  Description of Artificial Sequence: Synthetic oligonucleotide
ccucggcgggccgcgccag

SEQ ID NO: 2072437 - RNA, 19 nt, Artificial Sequence
  Description of Artificial Sequence: Synthetic oligonucleotide
cgcgcgugccgcaguacaa

SEQ ID NO: 2072438 - RNA, 19 nt, Artificial Sequence
  Description of Artificial Sequence: Synthetic oligonucleotide
ccgcgcgaucuccgccuug

SEQ ID NO: 2072439 - RNA, 19 nt, Artificial Sequence
  Description of Artificial Sequence: Synthetic oligonucleotide
ccaugggcgccggccggca

SEQ ID NO: 2072440 - RNA, 19 nt, Artificial Sequence
  Description of Artificial Sequence: Synthetic oligonucleotide
cgguaggcccgcgcgaucu

SEQ ID NO: 2072441 - RNA, 19 nt, Artificial Sequence
  Description of Artificial Sequence: Synthetic oligonucleotide
cggcaguaccaagcuaugu

SEQ ID NO: 2072442 - RNA, 19 nt, Artificial Sequence
  Description of Artificial Sequence: Synthetic oligonucleotide
cgcgccccggggccaucgc

SEQ ID NO: 2072443 - RNA, 19 nt, Artificial Sequence
  Description of Artificial Sequence: Synthetic oligonucleotide
gcggcgcgccccggggcca

SEQ ID NO: 2072444 - RNA, 19 nt, Artificial Sequence
  Description of Artificial Sequence: Synthetic oligonucleotide
cggcgucagcaacagccau

SEQ ID NO: 2072445 - RNA, 19 nt, Artificial Sequence
  Description of Artificial Sequence: Synthetic oligonucleotide
cccgcgcgaucuccgccuu

SEQ ID NO: 2072446 - RNA, 19 nt, Artificial Sequence
  Description of Artificial Sequence: Synthetic oligonucleotide
ccggggccaucgcccggcu

SEQ ID NO: 2072447 - RNA, 19 nt, Artificial Sequence
  Description of Artificial Sequence: Synthetic oligonucleotide
cggucgccaccaggaggaa

SEQ ID NO: 2072448 - RNA, 19 nt, Artificial Sequence
  Description of Artificial Sequence: Synthetic oligonucleotide
cgguagcggucgggguggu

SEQ ID NO: 2072449 - RNA, 19 nt, Artificial Sequence
  Description of Artificial Sequence: Synthetic oligonucleotide
cggcgcgccccggggccau

SEQ ID NO: 2072450 - RNA, 19 nt, Artificial Sequence
  Description of Artificial Sequence: Synthetic oligonucleotide
aacacuugcaccucagcac

SEQ ID NO: 2072451 - RNA, 19 nt, Artificial Sequence
  Description of Artificial Sequence: Synthetic oligonucleotide
aauugguuugguaaagacc

SEQ ID NO: 2072452 - RNA, 19 nt, Artificial Sequence
  Description of Artificial Sequence: Synthetic oligonucleotide
acuagguaagcugaggucc

SEQ ID NO: 2072453 - RNA, 19 nt, Artificial Sequence
  Description of Artificial Sequence: Synthetic oligonucleotide
agucacacugguuuggggc

SEQ ID NO: 2072454 - RNA, 19 nt, Artificial Sequence
  Description of Artificial Sequence: Synthetic oligonucleotide
uuuucagucacacugguuu

SEQ ID NO: 2072455 - RNA, 19 nt, Artificial Sequence
  Description of Artificial Sequence: Synthetic oligonucleotide
gaagguggagcucaugccg

SEQ ID NO: 2072456 - RNA, 19 nt, Artificial Sequence
  Description of Artificial Sequence: Synthetic oligonucleotide
uugguaaagaccacucucc

SEQ ID NO: 2072457 - RNA, 19 nt, Artificial Sequence
  Description of Artificial Sequence: Synthetic oligonucleotide
ucuacaaauagcccacagc

SEQ ID NO: 2072458 - RNA, 19 nt, Artificial Sequence
  Description of Artificial Sequence: Synthetic oligonucleotide
acacuugcaccucagcacc

SEQ ID NO: 2072459 - RNA, 19 nt, Artificial Sequence
  Description of Artificial Sequence: Synthetic oligonucleotide
gaugugacacauaaucggg

SEQ ID NO: 2072460 - RNA, 19 nt, Artificial Sequence
  Description of Artificial Sequence: Synthetic oligonucleotide
ugguccaacgcucaggaug

SEQ ID NO: 2072461 - RNA, 19 nt, Artificial Sequence
  Description of Artificial Sequence: Synthetic oligonucleotide
cauaaucgggcacaggagg

SEQ ID NO: 2072462 - RNA, 19 nt, Artificial Sequence
  Description of Artificial Sequence: Synthetic oligonucleotide
aacgcucaggaugugacac

SEQ ID NO: 2072463 - RNA, 19 nt, Artificial Sequence
  Description of Artificial Sequence: Synthetic oligonucleotide
caggaugugacacauaauc

SEQ ID NO: 2072464 - RNA, 19 nt, Artificial Sequence
  Description of Artificial Sequence: Synthetic oligonucleotide
ggaugugacacauaaucgg

SEQ ID NO: 2072465 - RNA, 19 nt, Artificial Sequence
  Description of Artificial Sequence: Synthetic oligonucleotide
gaaaccaacagccuccauc

SEQ ID NO: 2072466 - RNA, 19 nt, Artificial Sequence
  Description of Artificial Sequence: Synthetic oligonucleotide
gcugcgagaacccagaaag

SEQ ID NO: 2072467 - RNA, 19 nt, Artificial Sequence
  Description of Artificial Sequence: Synthetic oligonucleotide
ugcucacugacuucagucg

SEQ ID NO: 2072468 - RNA, 19 nt, Artificial Sequence
  Description of Artificial Sequence: Synthetic oligonucleotide
uucagucgcaucuuccagg

SEQ ID NO: 2072469 - RNA, 19 nt, Artificial Sequence
  Description of Artificial Sequence: Synthetic oligonucleotide
agaugccucacucacagca

SEQ ID NO: 2072470 - RNA, 19 nt, Artificial Sequence
  Description of Artificial Sequence: Synthetic oligonucleotide
cagcauuugacacaucccc

SEQ ID NO: 2072471 - RNA, 19 nt, Artificial Sequence
  Description of Artificial Sequence: Synthetic oligonucleotide
agcacgauugcucugcuca

SEQ ID NO: 2072472 - RNA, 19 nt, Artificial Sequence
  Description of Artificial Sequence: Synthetic oligonucleotide
cagacaaucaaagaugcug

SEQ ID NO: 2072473 - RNA, 19 nt, Artificial Sequence
  Description of Artificial Sequence: Synthetic oligonucleotide
aaggcagggugucaucuuc

SEQ ID NO: 2072474 - RNA, 19 nt, Artificial Sequence
  Description of Artificial Sequence: Synthetic oligonucleotide
ugugacacauaaucgggca

SEQ ID NO: 2072475 - RNA, 19 nt, Artificial Sequence
  Description of Artificial Sequence: Synthetic oligonucleotide
agguacauagucugugggg

SEQ ID NO: 2072476 - RNA, 19 nt, Artificial Sequence
  Description of Artificial Sequence: Synthetic oligonucleotide
uucuacaaauagcccacag

SEQ ID NO: 2072477 - RNA, 19 nt, Artificial Sequence
  Description of Artificial Sequence: Synthetic oligonucleotide
ucacucacagcauuugaca

SEQ ID NO: 2072478 - RNA, 19 nt, Artificial Sequence
  Description of Artificial Sequence: Synthetic oligonucleotide
aaucaaagaugcugugacu

SEQ ID NO: 2072479 - RNA, 19 nt, Artificial Sequence
  Description of Artificial Sequence: Synthetic oligonucleotide
aaauagcccacagcuuccc

SEQ ID NO: 2072480 - RNA, 19 nt, Artificial Sequence
  Description of Artificial Sequence: Synthetic oligonucleotide
uaagcugagguccgagucc

SEQ ID NO: 2072481 - RNA, 19 nt, Artificial Sequence
  Description of Artificial Sequence: Synthetic oligonucleotide
agggaggcucaucagggcc

SEQ ID NO: 2072482 - RNA, 19 nt, Artificial Sequence
  Description of Artificial Sequence: Synthetic oligonucleotide
acaggagguacccugguug

SEQ ID NO: 2072483 - RNA, 19 nt, Artificial Sequence
  Description of Artificial Sequence: Synthetic oligonucleotide
ugggaucugaugaggaccc

SEQ ID NO: 2072484 - RNA, 19 nt, Artificial Sequence
  Description of Artificial Sequence: Synthetic oligonucleotide
aacggcugaacugcggugg

SEQ ID NO: 2072485 - RNA, 19 nt, Artificial Sequence
  Description of Artificial Sequence: Synthetic oligonucleotide
acugccucgaauugguuug

SEQ ID NO: 2072486 - RNA, 19 nt, Artificial Sequence
  Description of Artificial Sequence: Synthetic oligonucleotide
ucagaguugcuucccagac

SEQ ID NO: 2072487 - RNA, 19 nt, Artificial Sequence
  Description of Artificial Sequence: Synthetic oligonucleotide
agcaccacuagguaagcug

SEQ ID NO: 2072488 - RNA, 19 nt, Artificial Sequence
  Description of Artificial Sequence: Synthetic oligonucleotide
gaguccgagucgcugaggg

SEQ ID NO: 2072489 - RNA, 19 nt, Artificial Sequence
  Description of Artificial Sequence: Synthetic oligonucleotide
ugguaaagaccacucuccc

SEQ ID NO: 2072490 - RNA, 19 nt, Artificial Sequence
  Description of Artificial Sequence: Synthetic oligonucleotide
aaacugaggguccccucuc

SEQ ID NO: 2072491 - RNA, 19 nt, Artificial Sequence
  Description of Artificial Sequence: Synthetic oligonucleotide
cacauaaucgggcacagga

SEQ ID NO: 2072492 - RNA, 19 nt, Artificial Sequence
  Description of Artificial Sequence: Synthetic oligonucleotide
ugggcuuccccagaaaucc

SEQ ID NO: 2072493 - RNA, 19 nt, Artificial Sequence
  Description of Artificial Sequence: Synthetic oligonucleotide
ucuucgguggguuccucgg

SEQ ID NO: 2072494 - RNA, 19 nt, Artificial Sequence
  Description of Artificial Sequence: Synthetic oligonucleotide
aggaugugacacauaaucg

SEQ ID NO: 2072495 - RNA, 19 nt, Artificial Sequence
  Description of Artificial Sequence: Synthetic oligonucleotide
ugcgagaacccagaaaggc

SEQ ID NO: 2072496 - RNA, 19 nt, Artificial Sequence
  Description of Artificial Sequence: Synthetic oligonucleotide
gauugcucugcucacugac

SEQ ID NO: 2072497 - RNA, 19 nt, Artificial Sequence
  Description of Artificial Sequence: Synthetic oligonucleotide
ugaggguccccucucagac

SEQ ID NO: 2072498 - RNA, 19 nt, Artificial Sequence
  Description of Artificial Sequence: Synthetic oligonucleotide
aaucgggcacaggagguac

SEQ ID NO: 2072499 - RNA, 19 nt, Artificial Sequence
  Description of Artificial Sequence: Synthetic oligonucleotide
ucagucgcaucuuccaggc

SEQ ID NO: 2072500 - RNA, 19 nt, Artificial Sequence
  Description of Artificial Sequence: Synthetic oligonucleotide
agguaucacugccucuugc

SEQ ID NO: 2072501 - RNA, 19 nt, Artificial Sequence
  Description of Artificial Sequence: Synthetic oligonucleotide
cauggaaaccaacagccuc

SEQ ID NO: 2072502 - RNA, 19 nt, Artificial Sequence
  Description of Artificial Sequence: Synthetic oligonucleotide
gucacacugguuuggggcg

SEQ ID NO: 2072503 - RNA, 19 nt, Artificial Sequence
  Description of Artificial Sequence: Synthetic oligonucleotide
cuagguaagcugagguccg

SEQ ID NO: 2072504 - RNA, 19 nt, Artificial Sequence
  Description of Artificial Sequence: Synthetic oligonucleotide
acugguuuggggcgcagag

SEQ ID NO: 2072505 - RNA, 19 nt, Artificial Sequence
  Description of Artificial Sequence: Synthetic oligonucleotide
gaucugaugaggacccagg

SEQ ID NO: 2072506 - RNA, 19 nt, Artificial Sequence
  Description of Artificial Sequence: Synthetic oligonucleotide
acaauucccacaguccuag

SEQ ID NO: 2072507 - RNA, 19 nt, Artificial Sequence
  Description of Artificial Sequence: Synthetic oligonucleotide
augugacacauaaucgggc

SEQ ID NO: 2072508 - RNA, 19 nt, Artificial Sequence
  Description of Artificial Sequence: Synthetic oligonucleotide
agaaauccucuccggggac

SEQ ID NO: 2072509 - RNA, 19 nt, Artificial Sequence
  Description of Artificial Sequence: Synthetic oligonucleotide
aaccaacagccuccauccc

SEQ ID NO: 2072510 - RNA, 19 nt, Artificial Sequence
  Description of Artificial Sequence: Synthetic oligonucleotide
cucaggcccugccagaugg

SEQ ID NO: 2072511 - RNA, 19 nt, Artificial Sequence
  Description of Artificial Sequence: Synthetic oligonucleotide
caaagaugcugugacugcg

SEQ ID NO: 2072512 - RNA, 19 nt, Artificial Sequence
  Description of Artificial Sequence: Synthetic oligonucleotide
guaaagaccacucuccccu

SEQ ID NO: 2072513 - RNA, 19 nt, Artificial Sequence
  Description of Artificial Sequence: Synthetic oligonucleotide
ugcaccucagcaccacuag

SEQ ID NO: 2072514 - RNA, 19 nt, Artificial Sequence
  Description of Artificial Sequence: Synthetic oligonucleotide
ugacacauaaucgggcaca

SEQ ID NO: 2072515 - RNA, 19 nt, Artificial Sequence
  Description of Artificial Sequence: Synthetic oligonucleotide
uaucacugccucuugcagu

SEQ ID NO: 2072516 - RNA, 19 nt, Artificial Sequence
  Description of Artificial Sequence: Synthetic oligonucleotide
ugcagucaaacugaggguc

SEQ ID NO: 2072517 - RNA, 19 nt, Artificial Sequence
  Description of Artificial Sequence: Synthetic oligonucleotide
agacaaucaaagaugcugu

SEQ ID NO: 2072518 - RNA, 19 nt, Artificial Sequence
  Description of Artificial Sequence: Synthetic oligonucleotide
ugaacugcgguggugggga

SEQ ID NO: 2072519 - RNA, 19 nt, Artificial Sequence
  Description of Artificial Sequence: Synthetic oligonucleotide
ucgaauugguuugguaaag

SEQ ID NO: 2072520 - RNA, 19 nt, Artificial Sequence
  Description of Artificial Sequence: Synthetic oligonucleotide
cacucacagcauuugacac

SEQ ID NO: 2072521 - RNA, 19 nt, Artificial Sequence
  Description of Artificial Sequence: Synthetic oligonucleotide
ucucacugccucgaauugg

SEQ ID NO: 2072522 - RNA, 19 nt, Artificial Sequence
  Description of Artificial Sequence: Synthetic oligonucleotide
ucugaugaggacccaggau

SEQ ID NO: 2072523 - RNA, 19 nt, Artificial Sequence
  Description of Artificial Sequence: Synthetic oligonucleotide
guaucacugccucuugcag

SEQ ID NO: 2072524 - RNA, 19 nt, Artificial Sequence
  Description of Artificial Sequence: Synthetic oligonucleotide
acaccccuucuacaaauag

SEQ ID NO: 2072525 - RNA, 19 nt, Artificial Sequence
  Description of Artificial Sequence: Synthetic oligonucleotide
guuuggggcgcagagggcg

SEQ ID NO: 2072526 - RNA, 19 nt, Artificial Sequence
  Description of Artificial Sequence: Synthetic oligonucleotide
uugaaggaagguacauagu

SEQ ID NO: 2072527 - RNA, 19 nt, Artificial Sequence
  Description of Artificial Sequence: Synthetic oligonucleotide
uccuagucagaguugcuuc

SEQ ID NO: 2072528 - RNA, 19 nt, Artificial Sequence
  Description of Artificial Sequence: Synthetic oligonucleotide
ucagucacacugguuuggg

SEQ ID NO: 2072529 - RNA, 19 nt, Artificial Sequence
  Description of Artificial Sequence: Synthetic oligonucleotide
guaagcugagguccgaguc

SEQ ID NO: 2072530 - RNA, 19 nt, Artificial Sequence
  Description of Artificial Sequence: Synthetic oligonucleotide
uucgguggguuccucggcc

SEQ ID NO: 2072531 - RNA, 19 nt, Artificial Sequence
  Description of Artificial Sequence: Synthetic oligonucleotide
agggccggagucuucuugg

SEQ ID NO: 2072532 - RNA, 19 nt, Artificial Sequence
  Description of Artificial Sequence: Synthetic oligonucleotide
cucaggaugugacacauaa

SEQ ID NO: 2072533 - RNA, 19 nt, Artificial Sequence
  Description of Artificial Sequence: Synthetic oligonucleotide
uccggaaguguucucugcu

SEQ ID NO: 2072534 - RNA, 19 nt, Artificial Sequence
  Description of Artificial Sequence: Synthetic oligonucleotide
agucagaguugcuucccag

SEQ ID NO: 2072535 - RNA, 19 nt, Artificial Sequence
  Description of Artificial Sequence: Synthetic oligonucleotide
agucucacugccucgaauu

SEQ ID NO: 2072536 - RNA, 19 nt, Artificial Sequence
  Description of Artificial Sequence: Synthetic oligonucleotide
acagcuagagggguccugg

SEQ ID NO: 2072537 - RNA, 19 nt, Artificial Sequence
  Description of Artificial Sequence: Synthetic oligonucleotide
uguuccggaaguguucucu

SEQ ID NO: 2072538 - RNA, 19 nt, Artificial Sequence
  Description of Artificial Sequence: Synthetic oligonucleotide
acgauugcucugcucacug

SEQ ID NO: 2072539 - RNA, 19 nt, Artificial Sequence
  Description of Artificial Sequence: Synthetic oligonucleotide
uggaacggcugaacugcgg

SEQ ID NO: 2072540 - RNA, 19 nt, Artificial Sequence
  Description of Artificial Sequence: Synthetic oligonucleotide
cugaagguaucacugccuc

SEQ ID NO: 2072541 - RNA, 19 nt, Artificial Sequence
  Description of Artificial Sequence: Synthetic oligonucleotide
aucuucgguggguuccucg

SEQ ID NO: 2072542 - RNA, 19 nt, Artificial Sequence
  Description of Artificial Sequence: Synthetic oligonucleotide
accaacagccuccaucccu

SEQ ID NO: 2072543 - RNA, 19 nt, Artificial Sequence
  Description of Artificial Sequence: Synthetic oligonucleotide
agguggaacggcugaacug

SEQ ID NO: 2072544 - RNA, 19 nt, Artificial Sequence
  Description of Artificial Sequence: Synthetic oligonucleotide
aaguguucucugcuccgcu

SEQ ID NO: 2072545 - RNA, 19 nt, Artificial Sequence
  Description of Artificial Sequence: Synthetic oligonucleotide
acaggucgcuugaaguugc

SEQ ID NO: 2072546 - RNA, 19 nt, Artificial Sequence
  Description of Artificial Sequence: Synthetic oligonucleotide
ucuccggggacaacacuug

SEQ ID NO: 2072547 - RNA, 19 nt, Artificial Sequence
  Description of Artificial Sequence: Synthetic oligonucleotide
ucuugcagucccugguggc

SEQ ID NO: 2072548 - RNA, 19 nt, Artificial Sequence
  Description of Artificial Sequence: Synthetic oligonucleotide
gugggaucugaugaggacc

SEQ ID NO: 2072549 - RNA, 19 nt, Artificial Sequence
  Description of Artificial Sequence: Synthetic oligonucleotide
auagcacugcagucaaacu

SEQ ID NO: 2072550 - RNA, 19 nt, Artificial Sequence
  Description of Artificial Sequence: Synthetic oligonucleotide
uucuugcugccauggaaac

SEQ ID NO: 2072551 - RNA, 19 nt, Artificial Sequence
  Description of Artificial Sequence: Synthetic oligonucleotide
ucagcccuagucucacugc

SEQ ID NO: 2072552 - RNA, 19 nt, Artificial Sequence
  Description of Artificial Sequence: Synthetic oligonucleotide
gagguggagagauagcacu

SEQ ID NO: 2072553 - RNA, 19 nt, Artificial Sequence
  Description of Artificial Sequence: Synthetic oligonucleotide
ccagaaauccucuccgggg

SEQ ID NO: 2072554 - RNA, 19 nt, Artificial Sequence
  Description of Artificial Sequence: Synthetic oligonucleotide
ucccagacaccccuucuac

SEQ ID NO: 2072555 - RNA, 19 nt, Artificial Sequence
  Description of Artificial Sequence: Synthetic oligonucleotide
gacacauaaucgggcacag

SEQ ID NO: 2072556 - RNA, 19 nt, Artificial Sequence
  Description of Artificial Sequence: Synthetic oligonucleotide
acauaaucgggcacaggag

SEQ ID NO: 2072557 - RNA, 19 nt, Artificial Sequence
  Description of Artificial Sequence: Synthetic oligonucleotide
agaccacucuccccucccc

SEQ ID NO: 2072558 - RNA, 19 nt, Artificial Sequence
  Description of Artificial Sequence: Synthetic oligonucleotide
uccuuucagcccuagucuc

SEQ ID NO: 2072559 - RNA, 19 nt, Artificial Sequence
  Description of Artificial Sequence: Synthetic oligonucleotide
ugguuugguaaagaccacu

SEQ ID NO: 2072560 - RNA, 19 nt, Artificial Sequence
  Description of Artificial Sequence: Synthetic oligonucleotide
gguggaacggcugaacugc

SEQ ID NO: 2072561 - RNA, 19 nt, Artificial Sequence
  Description of Artificial Sequence: Synthetic oligonucleotide
gguuccucggccuccaagc

SEQ ID NO: 2072562 - RNA, 19 nt, Artificial Sequence
  Description of Artificial Sequence: Synthetic oligonucleotide
gggagacggugucagaagg

SEQ ID NO: 2072563 - RNA, 19 nt, Artificial Sequence
  Description of Artificial Sequence: Synthetic oligonucleotide
ugaagguaucacugccucu

SEQ ID NO: 2072564 - RNA, 19 nt, Artificial Sequence
  Description of Artificial Sequence: Synthetic oligonucleotide
caguccuagucagaguugc

SEQ ID NO: 2072565 - RNA, 19 nt, Artificial Sequence
  Description of Artificial Sequence: Synthetic oligonucleotide
cacuagguaagcugagguc

SEQ ID NO: 2072566 - RNA, 19 nt, Artificial Sequence
  Description of Artificial Sequence: Synthetic oligonucleotide
uccggggacaacacuugca

SEQ ID NO: 2072567 - RNA, 19 nt, Artificial Sequence
  Description of Artificial Sequence: Synthetic oligonucleotide
gagguacccugguugggcc

SEQ ID NO: 2072568 - RNA, 19 nt, Artificial Sequence
  Description of Artificial Sequence: Synthetic oligonucleotide
ggaaguguucucugcuccg

SEQ ID NO: 2072569 - RNA, 19 nt, Artificial Sequence
  Description of Artificial Sequence: Synthetic oligonucleotide
uacuugguccaacgcucag

SEQ ID NO: 2072570 - RNA, 19 nt, Artificial Sequence
  Description of Artificial Sequence: Synthetic oligonucleotide
cugcgagaacccagaaagg

SEQ ID NO: 2072571 - RNA, 19 nt, Artificial Sequence
  Description of Artificial Sequence: Synthetic oligonucleotide
agacaccccuucuacaaau

SEQ ID NO: 2072572 - RNA, 19 nt, Artificial Sequence
  Description of Artificial Sequence: Synthetic oligonucleotide
ugggcccguacucccaugc

SEQ ID NO: 2072573 - RNA, 19 nt, Artificial Sequence
  Description of Artificial Sequence: Synthetic oligonucleotide
cuagucagaguugcuuccc

SEQ ID NO: 2072574 - RNA, 19 nt, Artificial Sequence
  Description of Artificial Sequence: Synthetic oligonucleotide
cucgaauugguuugguaaa

SEQ ID NO: 2072575 - RNA, 19 nt, Artificial Sequence
  Description of Artificial Sequence: Synthetic oligonucleotide
gaacggcugaacugcggug

SEQ ID NO: 2072576 - RNA, 19 nt, Artificial Sequence
  Description of Artificial Sequence: Synthetic oligonucleotide
cuccccuccccacagcuag

SEQ ID NO: 2072577 - RNA, 19 nt, Artificial Sequence
  Description of Artificial Sequence: Synthetic oligonucleotide
cucccaugcacccugcuca

SEQ ID NO: 2072578 - RNA, 19 nt, Artificial Sequence
  Description of Artificial Sequence: Synthetic oligonucleotide
gaaggaagguacauagucu

SEQ ID NO: 2072579 - RNA, 19 nt, Artificial Sequence
  Description of Artificial Sequence: Synthetic oligonucleotide
ggcuguacuugguccaacg

SEQ ID NO: 2072580 - RNA, 19 nt, Artificial Sequence
  Description of Artificial Sequence: Synthetic oligonucleotide
aagccagucuccgccuccg

SEQ ID NO: 2072581 - RNA, 19 nt, Artificial Sequence
  Description of Artificial Sequence: Synthetic oligonucleotide
ugacugcgcugggagaagg

SEQ ID NO: 2072582 - RNA, 19 nt, Artificial Sequence
  Description of Artificial Sequence: Synthetic oligonucleotide
ucaggaugugacacauaau

SEQ ID NO: 2072583 - RNA, 19 nt, Artificial Sequence
  Description of Artificial Sequence: Synthetic oligonucleotide
uucccaccuggacugggca

SEQ ID NO: 2072584 - RNA, 19 nt, Artificial Sequence
  Description of Artificial Sequence: Synthetic oligonucleotide
auaaucgggcacaggaggu

SEQ ID NO: 2072585 - RNA, 19 nt, Artificial Sequence
  Description of Artificial Sequence: Synthetic oligonucleotide
cuugcagucccugguggcc

SEQ ID NO: 2072586 - RNA, 19 nt, Artificial Sequence
  Description of Artificial Sequence: Synthetic oligonucleotide
gagacggugucagaaggca

SEQ ID NO: 2072587 - RNA, 19 nt, Artificial Sequence
  Description of Artificial Sequence: Synthetic oligonucleotide
ucagacccuggccccuccg

SEQ ID NO: 2072588 - RNA, 19 nt, Artificial Sequence
  Description of Artificial Sequence: Synthetic oligonucleotide
gucucacugccucgaauug

SEQ ID NO: 2072589 - RNA, 19 nt, Artificial Sequence
  Description of Artificial Sequence: Synthetic oligonucleotide
cagcccuagucucacugcc

SEQ ID NO: 2072590 - RNA, 19 nt, Artificial Sequence
  Description of Artificial Sequence: Synthetic oligonucleotide
cagaaauccucuccgggga

SEQ ID NO: 2072591 - RNA, 19 nt, Artificial Sequence
  Description of Artificial Sequence: Synthetic oligonucleotide
cagucacacugguuugggg

SEQ ID NO: 2072592 - RNA, 19 nt, Artificial Sequence
  Description of Artificial Sequence: Synthetic oligonucleotide
gcucaugccgcggaggugg

SEQ ID NO: 2072593 - RNA, 19 nt, Artificial Sequence
  Description of Artificial Sequence: Synthetic oligonucleotide
ucaaacugaggguccccuc

SEQ ID NO: 2072594 - RNA, 19 nt, Artificial Sequence
  Description of Artificial Sequence: Synthetic oligonucleotide
ucuuccuuucagcccuagu

SEQ ID NO: 2072595 - RNA, 19 nt, Artificial Sequence
  Description of Artificial Sequence: Synthetic oligonucleotide
cacugcagucaaacugagg

SEQ ID NO: 2072596 - RNA, 19 nt, Artificial Sequence
  Description of Artificial Sequence: Synthetic oligonucleotide
acuugcaccucagcaccac

SEQ ID NO: 2072597 - RNA, 19 nt, Artificial Sequence
  Description of Artificial Sequence: Synthetic oligonucleotide
uuaggacccucuuccuuuc

SEQ ID NO: 2072598 - RNA, 19 nt, Artificial Sequence
  Description of Artificial Sequence: Synthetic oligonucleotide
gguaucacugccucuugca

SEQ ID NO: 2072599 - RNA, 19 nt, Artificial Sequence
  Description of Artificial Sequence: Synthetic oligonucleotide
uccugguugaaggaaggua

SEQ ID NO: 2072600 - RNA, 19 nt, Artificial Sequence
  Description of Artificial Sequence: Synthetic oligonucleotide
ggagagauagcacugcagu

SEQ ID NO: 2072601 - RNA, 19 nt, Artificial Sequence
  Description of Artificial Sequence: Synthetic oligonucleotide
augccgcggagguggaacg

SEQ ID NO: 2072602 - RNA, 19 nt, Artificial Sequence
  Description of Artificial Sequence: Synthetic oligonucleotide
ugguugggcccguacuccc

SEQ ID NO: 2072603 - RNA, 19 nt, Artificial Sequence
  Description of Artificial Sequence: Synthetic oligonucleotide
uucccagacaccccuucua

SEQ ID NO: 2072604 - RNA, 19 nt, Artificial Sequence
  Description of Artificial Sequence: Synthetic oligonucleotide
cacaggucgcuugaaguug

SEQ ID NO: 2072605 - RNA, 19 nt, Artificial Sequence
  Description of Artificial Sequence: Synthetic oligonucleotide
ggcugaacugcgguggugg

SEQ ID NO: 2072606 - RNA, 19 nt, Artificial Sequence
  Description of Artificial Sequence: Synthetic oligonucleotide
ggguuacugucccuguucc

SEQ ID NO: 2072607 - RNA, 19 nt, Artificial Sequence
  Description of Artificial Sequence: Synthetic oligonucleotide
cucaagcucaggcccugcc

SEQ ID NO: 2072608 - RNA, 19 nt, Artificial Sequence
  Description of Artificial Sequence: Synthetic oligonucleotide
aaauccucuccggggacaa

SEQ ID NO: 2072609 - RNA, 19 nt, Artificial Sequence
  Description of Artificial Sequence: Synthetic oligonucleotide
uagucucacugccucgaau

SEQ ID NO: 2072610 - RNA, 19 nt, Artificial Sequence
  Description of Artificial Sequence: Synthetic oligonucleotide
ccuagucagaguugcuucc

SEQ ID NO: 2072611 - RNA, 19 nt, Artificial Sequence
  Description of Artificial Sequence: Synthetic oligonucleotide
ucccaccuggacugggcag

SEQ ID NO: 2072612 - RNA, 19 nt, Artificial Sequence
  Description of Artificial Sequence: Synthetic oligonucleotide
ugccauuuucagucacacu

SEQ ID NO: 2072613 - RNA, 19 nt, Artificial Sequence
  Description of Artificial Sequence: Synthetic oligonucleotide
uccaacgcucaggauguga

SEQ ID NO: 2072614 - RNA, 19 nt, Artificial Sequence
  Description of Artificial Sequence: Synthetic oligonucleotide
ugccaggcugcgagaaccc

SEQ ID NO: 2072615 - RNA, 19 nt, Artificial Sequence
  Description of Artificial Sequence: Synthetic oligonucleotide
cacagcuucccaccuggac

SEQ ID NO: 2072616 - RNA, 19 nt, Artificial Sequence
  Description of Artificial Sequence: Synthetic oligonucleotide
gguuacugucccuguuccg

SEQ ID NO: 2072617 - RNA, 19 nt, Artificial Sequence
  Description of Artificial Sequence: Synthetic oligonucleotide
gcucacugacuucagucgc

SEQ ID NO: 2072618 - RNA, 19 nt, Artificial Sequence
  Description of Artificial Sequence: Synthetic oligonucleotide
cagccuccaucccuguggg

SEQ ID NO: 2072619 - RNA, 19 nt, Artificial Sequence
  Description of Artificial Sequence: Synthetic oligonucleotide
agagggcggugccugccgg

SEQ ID NO: 2072620 - RNA, 19 nt, Artificial Sequence
  Description of Artificial Sequence: Synthetic oligonucleotide
cugguugaaggaagguaca

SEQ ID NO: 2072621 - RNA, 19 nt, Artificial Sequence
  Description of Artificial Sequence: Synthetic oligonucleotide
guuugguaaagaccacucu

SEQ ID NO: 2072622 - RNA, 19 nt, Artificial Sequence
  Description of Artificial Sequence: Synthetic oligonucleotide
ucgggcacaggagguaccc

SEQ ID NO: 2072623 - RNA, 19 nt, Artificial Sequence
  Description of Artificial Sequence: Synthetic oligonucleotide
ugguugaaggaagguacau

SEQ ID NO: 2072624 - RNA, 19 nt, Artificial Sequence
  Description of Artificial Sequence: Synthetic oligonucleotide
uccgagucgcugagggaga

SEQ ID NO: 2072625 - RNA, 19 nt, Artificial Sequence
  Description of Artificial Sequence: Synthetic oligonucleotide
aauccucuccggggacaac

SEQ ID NO: 2072626 - RNA, 19 nt, Artificial Sequence
  Description of Artificial Sequence: Synthetic oligonucleotide
ucccuguuccggaaguguu

SEQ ID NO: 2072627 - RNA, 19 nt, Artificial Sequence
  Description of Artificial Sequence: Synthetic oligonucleotide
ugguggggacgcccguggg

SEQ ID NO: 2072628 - RNA, 19 nt, Artificial Sequence
  Description of Artificial Sequence: Synthetic oligonucleotide
cugaacugcgguggugggg

SEQ ID NO: 2072629 - RNA, 19 nt, Artificial Sequence
  Description of Artificial Sequence: Synthetic oligonucleotide
cccuucuacaaauagccca

SEQ ID NO: 2072630 - RNA, 19 nt, Artificial Sequence
  Description of Artificial Sequence: Synthetic oligonucleotide
ucuugggcuuccccagaaa

SEQ ID NO: 2072631 - RNA, 19 nt, Artificial Sequence
  Description of Artificial Sequence: Synthetic oligonucleotide
caccacuagguaagcugag

SEQ ID NO: 2072632 - RNA, 19 nt, Artificial Sequence
  Description of Artificial Sequence: Synthetic oligonucleotide
cagucaaacugaggguccc

SEQ ID NO: 2072633 - RNA, 19 nt, Artificial Sequence
  Description of Artificial Sequence: Synthetic oligonucleotide
cccagaaauccucuccggg

SEQ ID NO: 2072634 - RNA, 19 nt, Artificial Sequence
  Description of Artificial Sequence: Synthetic oligonucleotide
gaagguaucacugccucuu

SEQ ID NO: 2072635 - RNA, 19 nt, Artificial Sequence
  Description of Artificial Sequence: Synthetic oligonucleotide
cugguuuggggcgcagagg

SEQ ID NO: 2072636 - RNA, 19 nt, Artificial Sequence
  Description of Artificial Sequence: Synthetic oligonucleotide
acacauaaucgggcacagg

SEQ ID NO: 2072637 - RNA, 19 nt, Artificial Sequence
  Description of Artificial Sequence: Synthetic oligonucleotide
cugguugggcccguacucc

SEQ ID NO: 2072638 - RNA, 19 nt, Artificial Sequence
  Description of Artificial Sequence: Synthetic oligonucleotide
cuucgguggguuccucggc

SEQ ID NO: 2072639 - RNA, 19 nt, Artificial Sequence
  Description of Artificial Sequence: Synthetic oligonucleotide
caugccgcggagguggaac

SEQ ID NO: 2072640 - RNA, 19 nt, Artificial Sequence
  Description of Artificial Sequence: Synthetic oligonucleotide
ccaacgcucaggaugugac

SEQ ID NO: 2072641 - RNA, 19 nt, Artificial Sequence
  Description of Artificial Sequence: Synthetic oligonucleotide
agguggagagauagcacug

SEQ ID NO: 2072642 - RNA, 19 nt, Artificial Sequence
  Description of Artificial Sequence: Synthetic oligonucleotide
ccucgaauugguuugguaa

SEQ ID NO: 2072643 - RNA, 19 nt, Artificial Sequence
  Description of Artificial Sequence: Synthetic oligonucleotide
cugcuccgcuucuugcugc

SEQ ID NO: 2072644 - RNA, 19 nt, Artificial Sequence
  Description of Artificial Sequence: Synthetic oligonucleotide
aguguucucugcuccgcuu

SEQ ID NO: 2072645 - RNA, 19 nt, Artificial Sequence
  Description of Artificial Sequence: Synthetic oligonucleotide
ucacacugguuuggggcgc

SEQ ID NO: 2072646 - RNA, 19 nt, Artificial Sequence
  Description of Artificial Sequence: Synthetic oligonucleotide
gagguggaacggcugaacu

SEQ ID NO: 2072647 - RNA, 19 nt, Artificial Sequence
  Description of Artificial Sequence: Synthetic oligonucleotide
ugccucacucacagcauuu

SEQ ID NO: 2072648 - RNA, 19 nt, Artificial Sequence
  Description of Artificial Sequence: Synthetic oligonucleotide
ucccugguggccacuccac

SEQ ID NO: 2072649 - RNA, 19 nt, Artificial Sequence
  Description of Artificial Sequence: Synthetic oligonucleotide
acccugguugggcccguac

SEQ ID NO: 2072650 - RNA, 19 nt, Artificial Sequence
  Description of Artificial Sequence: Synthetic oligonucleotide
cccucucagacccuggccc

SEQ ID NO: 2072651 - RNA, 19 nt, Artificial Sequence
  Description of Artificial Sequence: Synthetic oligonucleotide
ggggacaacacuugcaccu

SEQ ID NO: 2072652 - RNA, 19 nt, Artificial Sequence
  Description of Artificial Sequence: Synthetic oligonucleotide
agguaagcugagguccgag

SEQ ID NO: 2072653 - RNA, 19 nt, Artificial Sequence
  Description of Artificial Sequence: Synthetic oligonucleotide
aucgggcacaggagguacc

SEQ ID NO: 2072654 - RNA, 19 nt, Artificial Sequence
  Description of Artificial Sequence: Synthetic oligonucleotide
ccaacagccuccaucccug

SEQ ID NO: 2072655 - RNA, 19 nt, Artificial Sequence
  Description of Artificial Sequence: Synthetic oligonucleotide
ggacccucuuccuuucagc

SEQ ID NO: 2072656 - RNA, 19 nt, Artificial Sequence
  Description of Artificial Sequence: Synthetic oligonucleotide
ucgcuugaaguugccauuu

SEQ ID NO: 2072657 - RNA, 19 nt, Artificial Sequence
  Description of Artificial Sequence: Synthetic oligonucleotide
cuccggggacaacacuugc

SEQ ID NO: 2072658 - RNA, 19 nt, Artificial Sequence
  Description of Artificial Sequence: Synthetic oligonucleotide
agacggugucagaaggcag

SEQ ID NO: 2072659 - RNA, 19 nt, Artificial Sequence
  Description of Artificial Sequence: Synthetic oligonucleotide
uccggguuacugucccugu

SEQ ID NO: 2072660 - RNA, 19 nt, Artificial Sequence
  Description of Artificial Sequence: Synthetic oligonucleotide
acccugcucagguucccug

SEQ ID NO: 2072661 - RNA, 19 nt, Artificial Sequence
  Description of Artificial Sequence: Synthetic oligonucleotide
cagacccuggccccuccgg

SEQ ID NO: 2072662 - RNA, 19 nt, Artificial Sequence
  Description of Artificial Sequence: Synthetic oligonucleotide
aggagguacccugguuggg

SEQ ID NO: 2072663 - RNA, 19 nt, Artificial Sequence
  Description of Artificial Sequence: Synthetic oligonucleotide
uaaucgggcacaggaggua

SEQ ID NO: 2072664 - RNA, 19 nt, Artificial Sequence
  Description of Artificial Sequence: Synthetic oligonucleotide
acaguccuagucagaguug

SEQ ID NO: 2072665 - RNA, 19 nt, Artificial Sequence
  Description of Artificial Sequence: Synthetic oligonucleotide
gcgagaacccagaaaggcc

SEQ ID NO: 2072666 - RNA, 19 nt, Artificial Sequence
  Description of Artificial Sequence: Synthetic oligonucleotide
ggccacuccacuccucaag

SEQ ID NO: 2072667 - RNA, 19 nt, Artificial Sequence
  Description of Artificial Sequence: Synthetic oligonucleotide
agcuagagggguccugguu

SEQ ID NO: 2072668 - RNA, 19 nt, Artificial Sequence
  Description of Artificial Sequence: Synthetic oligonucleotide
gggcacaggagguacccug

SEQ ID NO: 2072669 - RNA, 19 nt, Artificial Sequence
  Description of Artificial Sequence: Synthetic oligonucleotide
cagagggcggugccugccg

SEQ ID NO: 2072670 - RNA, 19 nt, Artificial Sequence
  Description of Artificial Sequence: Synthetic oligonucleotide
guggaacggcugaacugcg

SEQ ID NO: 2072671 - RNA, 19 nt, Artificial Sequence
  Description of Artificial Sequence: Synthetic oligonucleotide
aggacccaggauggucagc

SEQ ID NO: 2072672 - RNA, 19 nt, Artificial Sequence
  Description of Artificial Sequence: Synthetic oligonucleotide
ggagguacccugguugggc

SEQ ID NO: 2072673 - RNA, 19 nt, Artificial Sequence
  Description of Artificial Sequence: Synthetic oligonucleotide
gcaccucagcaccacuagg

SEQ ID NO: 2072674 - RNA, 19 nt, Artificial Sequence
  Description of Artificial Sequence: Synthetic oligonucleotide
acgcucaggaugugacaca

SEQ ID NO: 2072675 - RNA, 19 nt, Artificial Sequence
  Description of Artificial Sequence: Synthetic oligonucleotide
cucacugccucgaauuggu

SEQ ID NO: 2072676 - RNA, 19 nt, Artificial Sequence
  Description of Artificial Sequence: Synthetic oligonucleotide
ggcacaggagguacccugg

SEQ ID NO: 2072677 - RNA, 19 nt, Artificial Sequence
  Description of Artificial Sequence: Synthetic oligonucleotide
caaacugaggguccccucu

SEQ ID NO: 2072678 - RNA, 19 nt, Artificial Sequence
  Description of Artificial Sequence: Synthetic oligonucleotide
gaugggccagcuccacaga

SEQ ID NO: 2072679 - RNA, 19 nt, Artificial Sequence
  Description of Artificial Sequence: Synthetic oligonucleotide
caccucagcaccacuaggu

SEQ ID NO: 2072680 - RNA, 19 nt, Artificial Sequence
  Description of Artificial Sequence: Synthetic oligonucleotide
gguacccugguugggcccg

SEQ ID NO: 2072681 - RNA, 19 nt, Artificial Sequence
  Description of Artificial Sequence: Synthetic oligonucleotide
cuccggguuacugucccug

SEQ ID NO: 2072682 - RNA, 19 nt, Artificial Sequence
  Description of Artificial Sequence: Synthetic oligonucleotide
gcugaacugcggugguggg

SEQ ID NO: 2072683 - RNA, 19 nt, Artificial Sequence
  Description of Artificial Sequence: Synthetic oligonucleotide
ccggggacaacacuugcac

SEQ ID NO: 2072684 - RNA, 19 nt, Artificial Sequence
  Description of Artificial Sequence: Synthetic oligonucleotide
cauuuucagucacacuggu

SEQ ID NO: 2072685 - RNA, 19 nt, Artificial Sequence
  Description of Artificial Sequence: Synthetic oligonucleotide
gcagucaaacugagggucc

SEQ ID NO: 2072686 - RNA, 19 nt, Artificial Sequence
  Description of Artificial Sequence: Synthetic oligonucleotide
cugccucgaauugguuugg

SEQ ID NO: 2072687 - RNA, 19 nt, Artificial Sequence
  Description of Artificial Sequence: Synthetic oligonucleotide
ugccgcggagguggaacgg

SEQ ID NO: 2072688 - RNA, 19 nt, Artificial Sequence
  Description of Artificial Sequence: Synthetic oligonucleotide
cagggccggagucuucuug

SEQ ID NO: 2072689 - RNA, 19 nt, Artificial Sequence
  Description of Artificial Sequence: Synthetic oligonucleotide
agggcggugccugccggac

SEQ ID NO: 2072690 - RNA, 19 nt, Artificial Sequence
  Description of Artificial Sequence: Synthetic oligonucleotide
ggagacggugucagaaggc

SEQ ID NO: 2072691 - RNA, 19 nt, Artificial Sequence
  Description of Artificial Sequence: Synthetic oligonucleotide
cagaugccucacucacagc

SEQ ID NO: 2072692 - RNA, 19 nt, Artificial Sequence
  Description of Artificial Sequence: Synthetic oligonucleotide
caggucgcuugaaguugcc

SEQ ID NO: 2072693 - RNA, 19 nt, Artificial Sequence
  Description of Artificial Sequence: Synthetic oligonucleotide
gagcucaugccgcggaggu

SEQ ID NO: 2072694 - RNA, 19 nt, Artificial Sequence
  Description of Artificial Sequence: Synthetic oligonucleotide
caacgcucaggaugugaca

SEQ ID NO: 2072695 - RNA, 19 nt, Artificial Sequence
  Description of Artificial Sequence: Synthetic oligonucleotide
cugaggguccccucucaga

SEQ ID NO: 2072696 - RNA, 19 nt, Artificial Sequence
  Description of Artificial Sequence: Synthetic oligonucleotide
acggcugaacugcgguggu

SEQ ID NO: 2072697 - RNA, 19 nt, Artificial Sequence
  Description of Artificial Sequence: Synthetic oligonucleotide
guacuugguccaacgcuca

SEQ ID NO: 2072698 - RNA, 19 nt, Artificial Sequence
  Description of Artificial Sequence: Synthetic oligonucleotide
cacaauucccacaguccua

SEQ ID NO: 2072699 - RNA, 19 nt, Artificial Sequence
  Description of Artificial Sequence: Synthetic oligonucleotide
agcccacagcuucccaccu

SEQ ID NO: 2072700 - RNA, 19 nt, Artificial Sequence
  Description of Artificial Sequence: Synthetic oligonucleotide
cggaaguguucucugcucc

SEQ ID NO: 2072701 - RNA, 19 nt, Artificial Sequence
  Description of Artificial Sequence: Synthetic oligonucleotide
gcaccacuagguaagcuga

SEQ ID NO: 2072702 - RNA, 19 nt, Artificial Sequence
  Description of Artificial Sequence: Synthetic oligonucleotide
ggcggugccugccggacug

SEQ ID NO: 2072703 - RNA, 19 nt, Artificial Sequence
  Description of Artificial Sequence: Synthetic oligonucleotide
ggguuccucggccuccaag

SEQ ID NO: 2072704 - RNA, 19 nt, Artificial Sequence
  Description of Artificial Sequence: Synthetic oligonucleotide
ccccuucuacaaauagccc

SEQ ID NO: 2072705 - RNA, 19 nt, Artificial Sequence
  Description of Artificial Sequence: Synthetic oligonucleotide
uugggcccguacucccaug

SEQ ID NO: 2072706 - RNA, 19 nt, Artificial Sequence
  Description of Artificial Sequence: Synthetic oligonucleotide
ggcccguacucccaugcac

SEQ ID NO: 2072707 - RNA, 19 nt, Artificial Sequence
  Description of Artificial Sequence: Synthetic oligonucleotide
uugguccaacgcucaggau

SEQ ID NO: 2072708 - RNA, 19 nt, Artificial Sequence
  Description of Artificial Sequence: Synthetic oligonucleotide
ucacugccucgaauugguu

SEQ ID NO: 2072709 - RNA, 19 nt, Artificial Sequence
  Description of Artificial Sequence: Synthetic oligonucleotide
ccccagaaauccucuccgg

SEQ ID NO: 2072710 - RNA, 19 nt, Artificial Sequence
  Description of Artificial Sequence: Synthetic oligonucleotide
ccagacaccccuucuacaa

SEQ ID NO: 2072711 - RNA, 19 nt, Artificial Sequence
  Description of Artificial Sequence: Synthetic oligonucleotide
cguacucccaugcacccug

SEQ ID NO: 2072712 - RNA, 19 nt, Artificial Sequence
  Description of Artificial Sequence: Synthetic oligonucleotide
gaguugcuucccagacacc

SEQ ID NO: 2072713 - RNA, 19 nt, Artificial Sequence
  Description of Artificial Sequence: Synthetic oligonucleotide
ggucgcuugaaguugccau

SEQ ID NO: 2072714 - RNA, 19 nt, Artificial Sequence
  Description of Artificial Sequence: Synthetic oligonucleotide
ggaacggcugaacugcggu

SEQ ID NO: 2072715 - RNA, 19 nt, Artificial Sequence
  Description of Artificial Sequence: Synthetic oligonucleotide
aggucgcuugaaguugcca

SEQ ID NO: 2072716 - RNA, 19 nt, Artificial Sequence
  Description of Artificial Sequence: Synthetic oligonucleotide
gugacugcgcugggagaag

SEQ ID NO: 2072717 - RNA, 19 nt, Artificial Sequence
  Description of Artificial Sequence: Synthetic oligonucleotide
ccucucagacccuggcccc

SEQ ID NO: 2072718 - RNA, 19 nt, Artificial Sequence
  Description of Artificial Sequence: Synthetic oligonucleotide
gcccguacucccaugcacc

SEQ ID NO: 2072719 - RNA, 19 nt, Artificial Sequence
  Description of Artificial Sequence: Synthetic oligonucleotide
gguugaaggaagguacaua

SEQ ID NO: 2072720 - RNA, 19 nt, Artificial Sequence
  Description of Artificial Sequence: Synthetic oligonucleotide
cccguacucccaugcaccc

SEQ ID NO: 2072721 - RNA, 19 nt, Artificial Sequence
  Description of Artificial Sequence: Synthetic oligonucleotide
gggccggagucuucuuggg

SEQ ID NO: 2072722 - RNA, 19 nt, Artificial Sequence
  Description of Artificial Sequence: Synthetic oligonucleotide
ggaggcucaucagggccgg

SEQ ID NO: 2072723 - RNA, 19 nt, Artificial Sequence
  Description of Artificial Sequence: Synthetic oligonucleotide
gaacugcggugguggggac

SEQ ID NO: 2072724 - RNA, 19 nt, Artificial Sequence
  Description of Artificial Sequence: Synthetic oligonucleotide
cucuccggggacaacacuu

SEQ ID NO: 2072725 - RNA, 19 nt, Artificial Sequence
  Description of Artificial Sequence: Synthetic oligonucleotide
aguccuagucagaguugcu

SEQ ID NO: 2072726 - RNA, 19 nt, Artificial Sequence
  Description of Artificial Sequence: Synthetic oligonucleotide
gcccuagucucacugccuc

SEQ ID NO: 2072727 - RNA, 19 nt, Artificial Sequence
  Description of Artificial Sequence: Synthetic oligonucleotide
cccuagucucacugccucg

SEQ ID NO: 2072728 - RNA, 19 nt, Artificial Sequence
  Description of Artificial Sequence: Synthetic oligonucleotide
uccccuccccacagcuaga

SEQ ID NO: 2072729 - RNA, 19 nt, Artificial Sequence
  Description of Artificial Sequence: Synthetic oligonucleotide
ggccggagucuucuugggc

SEQ ID NO: 2072730 - RNA, 19 nt, Artificial Sequence
  Description of Artificial Sequence: Synthetic oligonucleotide
ugccucgaauugguuuggu

SEQ ID NO: 2072731 - RNA, 19 nt, Artificial Sequence
  Description of Artificial Sequence: Synthetic oligonucleotide
ggagucuucuugggcuucc

SEQ ID NO: 2072732 - RNA, 19 nt, Artificial Sequence
  Description of Artificial Sequence: Synthetic oligonucleotide
cacuugcaccucagcacca

SEQ ID NO: 2072733 - RNA, 19 nt, Artificial Sequence
  Description of Artificial Sequence: Synthetic oligonucleotide
gguccaacgcucaggaugu

SEQ ID NO: 2072734 - RNA, 19 nt, Artificial Sequence
  Description of Artificial Sequence: Synthetic oligonucleotide
cagcacgauugcucugcuc

SEQ ID NO: 2072735 - RNA, 19 nt, Artificial Sequence
  Description of Artificial Sequence: Synthetic oligonucleotide
cuguuccggaaguguucuc

SEQ ID NO: 2072736 - RNA, 19 nt, Artificial Sequence
  Description of Artificial Sequence: Synthetic oligonucleotide
gacaccccuucuacaaaua

SEQ ID NO: 2072737 - RNA, 19 nt, Artificial Sequence
  Description of Artificial Sequence: Synthetic oligonucleotide
gguaagcugagguccgagu

SEQ ID NO: 2072738 - RNA, 19 nt, Artificial Sequence
  Description of Artificial Sequence: Synthetic oligonucleotide
gucaaacugaggguccccu

SEQ ID NO: 2072739 - RNA, 19 nt, Artificial Sequence
  Description of Artificial Sequence: Synthetic oligonucleotide
ggagguggaacggcugaac

SEQ ID NO: 2072740 - RNA, 19 nt, Artificial Sequence
  Description of Artificial Sequence: Synthetic oligonucleotide
cagacaccccuucuacaaa

SEQ ID NO: 2072741 - RNA, 19 nt, Artificial Sequence
  Description of Artificial Sequence: Synthetic oligonucleotide
gcacgauugcucugcucac

SEQ ID NO: 2072742 - RNA, 19 nt, Artificial Sequence
  Description of Artificial Sequence: Synthetic oligonucleotide
agcccuagucucacugccu

SEQ ID NO: 2072743 - RNA, 19 nt, Artificial Sequence
  Description of Artificial Sequence: Synthetic oligonucleotide
uggccccuccggguuacug

SEQ ID NO: 2072744 - RNA, 19 nt, Artificial Sequence
  Description of Artificial Sequence: Synthetic oligonucleotide
agcucaugccgcggaggug

SEQ ID NO: 2072745 - RNA, 19 nt, Artificial Sequence
  Description of Artificial Sequence: Synthetic oligonucleotide
ccacaauucccacaguccu

SEQ ID NO: 2072746 - RNA, 19 nt, Artificial Sequence
  Description of Artificial Sequence: Synthetic oligonucleotide
gaaggcagggugucaucuu

SEQ ID NO: 2072747 - RNA, 19 nt, Artificial Sequence
  Description of Artificial Sequence: Synthetic oligonucleotide
ccggaaguguucucugcuc

SEQ ID NO: 2072748 - RNA, 19 nt, Artificial Sequence
  Description of Artificial Sequence: Synthetic oligonucleotide
cacugccucgaauugguuu

SEQ ID NO: 2072749 - RNA, 19 nt, Artificial Sequence
  Description of Artificial Sequence: Synthetic oligonucleotide
ccuccaagccagucuccgc

SEQ ID NO: 2072750 - RNA, 19 nt, Artificial Sequence
  Description of Artificial Sequence: Synthetic oligonucleotide
gcuucccagacaccccuuc

SEQ ID NO: 2072751 - RNA, 19 nt, Artificial Sequence
  Description of Artificial Sequence: Synthetic oligonucleotide
gccucacucacagcauuug

SEQ ID NO: 2072752 - RNA, 19 nt, Artificial Sequence
  Description of Artificial Sequence: Synthetic oligonucleotide
gcacugcagucaaacugag

SEQ ID NO: 2072753 - RNA, 19 nt, Artificial Sequence
  Description of Artificial Sequence: Synthetic oligonucleotide
guacucccaugcacccugc

SEQ ID NO: 2072754 - RNA, 19 nt, Artificial Sequence
  Description of Artificial Sequence: Synthetic oligonucleotide
guccccucucagacccugg

SEQ ID NO: 2072755 - RNA, 19 nt, Artificial Sequence
  Description of Artificial Sequence: Synthetic oligonucleotide
ccgcuucuugcugccaugg

SEQ ID NO: 2072756 - RNA, 19 nt, Artificial Sequence
  Description of Artificial Sequence: Synthetic oligonucleotide
ggcugcgagaacccagaaa

SEQ ID NO: 2072757 - RNA, 19 nt, Artificial Sequence
  Description of Artificial Sequence: Synthetic oligonucleotide
guccuagucagaguugcuu

SEQ ID NO: 2072758 - RNA, 19 nt, Artificial Sequence
  Description of Artificial Sequence: Synthetic oligonucleotide
gggacaacacuugcaccuc

SEQ ID NO: 2072759 - RNA, 19 nt, Artificial Sequence
  Description of Artificial Sequence: Synthetic oligonucleotide
ucagggccggagucuucuu

SEQ ID NO: 2072760 - RNA, 19 nt, Artificial Sequence
  Description of Artificial Sequence: Synthetic oligonucleotide
gcggagguggaacggcuga

SEQ ID NO: 2072761 - RNA, 19 nt, Artificial Sequence
  Description of Artificial Sequence: Synthetic oligonucleotide
acacugguuuggggcgcag

SEQ ID NO: 2072762 - RNA, 19 nt, Artificial Sequence
  Description of Artificial Sequence: Synthetic oligonucleotide
cuucccagacaccccuucu

SEQ ID NO: 2072763 - RNA, 19 nt, Artificial Sequence
  Description of Artificial Sequence: Synthetic oligonucleotide
ccacuagguaagcugaggu

SEQ ID NO: 2072764 - RNA, 19 nt, Artificial Sequence
  Description of Artificial Sequence: Synthetic oligonucleotide
agccuccaucccuguggga

SEQ ID NO: 2072765 - RNA, 19 nt, Artificial Sequence
  Description of Artificial Sequence: Synthetic oligonucleotide
gucgcaucuuccaggcugu

SEQ ID NO: 2072766 - RNA, 19 nt, Artificial Sequence
  Description of Artificial Sequence: Synthetic oligonucleotide
cggguuacugucccuguuc

SEQ ID NO: 2072767 - RNA, 19 nt, Artificial Sequence
  Description of Artificial Sequence: Synthetic oligonucleotide
uccaucccugugggaucug

SEQ ID NO: 2072768 - RNA, 19 nt, Artificial Sequence
  Description of Artificial Sequence: Synthetic oligonucleotide
gucccuguuccggaagugu

SEQ ID NO: 2072769 - RNA, 19 nt, Artificial Sequence
  Description of Artificial Sequence: Synthetic oligonucleotide
cuugcaccucagcaccacu

SEQ ID NO: 2072770 - RNA, 19 nt, Artificial Sequence
  Description of Artificial Sequence: Synthetic oligonucleotide
gccccuccggguuacuguc

SEQ ID NO: 2072771 - RNA, 19 nt, Artificial Sequence
  Description of Artificial Sequence: Synthetic oligonucleotide
ucaugccgcggagguggaa

SEQ ID NO: 2072772 - RNA, 19 nt, Artificial Sequence
  Description of Artificial Sequence: Synthetic oligonucleotide
ggugucaucuucggugggu

SEQ ID NO: 2072773 - RNA, 19 nt, Artificial Sequence
  Description of Artificial Sequence: Synthetic oligonucleotide
caucuucgguggguuccuc

SEQ ID NO: 2072774 - RNA, 19 nt, Artificial Sequence
  Description of Artificial Sequence: Synthetic oligonucleotide
gccucgaauugguuuggua

SEQ ID NO: 2072775 - RNA, 19 nt, Artificial Sequence
  Description of Artificial Sequence: Synthetic oligonucleotide
guugggcccguacucccau

SEQ ID NO: 2072776 - RNA, 19 nt, Artificial Sequence
  Description of Artificial Sequence: Synthetic oligonucleotide
cucaugccgcggaggugga

SEQ ID NO: 2072777 - RNA, 19 nt, Artificial Sequence
  Description of Artificial Sequence: Synthetic oligonucleotide
gcucaggcccugccagaug

SEQ ID NO: 2072778 - RNA, 19 nt, Artificial Sequence
  Description of Artificial Sequence: Synthetic oligonucleotide
cccagacaccccuucuaca

SEQ ID NO: 2072779 - RNA, 19 nt, Artificial Sequence
  Description of Artificial Sequence: Synthetic oligonucleotide
gcugagggagacgguguca

SEQ ID NO: 2072780 - RNA, 19 nt, Artificial Sequence
  Description of Artificial Sequence: Synthetic oligonucleotide
cgaauugguuugguaaaga

SEQ ID NO: 2072781 - RNA, 19 nt, Artificial Sequence
  Description of Artificial Sequence: Synthetic oligonucleotide
cacugguuuggggcgcaga

SEQ ID NO: 2072782 - RNA, 19 nt, Artificial Sequence
  Description of Artificial Sequence: Synthetic oligonucleotide
gggguccugguugaaggaa

SEQ ID NO: 2072783 - RNA, 19 nt, Artificial Sequence
  Description of Artificial Sequence: Synthetic oligonucleotide
cacgauugcucugcucacu

SEQ ID NO: 2072784 - RNA, 19 nt, Artificial Sequence
  Description of Artificial Sequence: Synthetic oligonucleotide
gccgcggagguggaacggc

SEQ ID NO: 2072785 - RNA, 19 nt, Artificial Sequence
  Description of Artificial Sequence: Synthetic oligonucleotide
caucccugugggaucugau

SEQ ID NO: 2072786 - RNA, 19 nt, Artificial Sequence
  Description of Artificial Sequence: Synthetic oligonucleotide
ccugccggacugcacucuc

SEQ ID NO: 2072787 - RNA, 19 nt, Artificial Sequence
  Description of Artificial Sequence: Synthetic oligonucleotide
ccaagccagucuccgccuc

SEQ ID NO: 2072788 - RNA, 19 nt, Artificial Sequence
  Description of Artificial Sequence: Synthetic oligonucleotide
gcgcagagggcggugccug

SEQ ID NO: 2072789 - RNA, 19 nt, Artificial Sequence
  Description of Artificial Sequence: Synthetic oligonucleotide
ccaugcacccugcucaggu

SEQ ID NO: 2072790 - RNA, 19 nt, Artificial Sequence
  Description of Artificial Sequence: Synthetic oligonucleotide
guccaacgcucaggaugug

SEQ ID NO: 2072791 - RNA, 19 nt, Artificial Sequence
  Description of Artificial Sequence: Synthetic oligonucleotide
ccccuccggguuacugucc

SEQ ID NO: 2072792 - RNA, 19 nt, Artificial Sequence
  Description of Artificial Sequence: Synthetic oligonucleotide
gguugggcccguacuccca

SEQ ID NO: 2072793 - RNA, 19 nt, Artificial Sequence
  Description of Artificial Sequence: Synthetic oligonucleotide
gagccacaggucgcuugaa

SEQ ID NO: 2072794 - RNA, 19 nt, Artificial Sequence
  Description of Artificial Sequence: Synthetic oligonucleotide
ggucagcuccugaagguau

SEQ ID NO: 2072795 - RNA, 19 nt, Artificial Sequence
  Description of Artificial Sequence: Synthetic oligonucleotide
caccuggacugggcaggug

SEQ ID NO: 2072796 - RNA, 19 nt, Artificial Sequence
  Description of Artificial Sequence: Synthetic oligonucleotide
caugcacccugcucagguu

SEQ ID NO: 2072797 - RNA, 19 nt, Artificial Sequence
  Description of Artificial Sequence: Synthetic oligonucleotide
gggcccguacucccaugca

SEQ ID NO: 2072798 - RNA, 19 nt, Artificial Sequence
  Description of Artificial Sequence: Synthetic oligonucleotide
gcagggugucaucuucggu

SEQ ID NO: 2072799 - RNA, 19 nt, Artificial Sequence
  Description of Artificial Sequence: Synthetic oligonucleotide
ccagacaaucaaagaugcu

SEQ ID NO: 2072800 - RNA, 19 nt, Artificial Sequence
  Description of Artificial Sequence: Synthetic oligonucleotide
cacaggagguacccugguu

SEQ ID NO: 2072801 - RNA, 19 nt, Artificial Sequence
  Description of Artificial Sequence: Synthetic oligonucleotide
cagcuagagggguccuggu

SEQ ID NO: 2072802 - RNA, 19 nt, Artificial Sequence
  Description of Artificial Sequence: Synthetic oligonucleotide
ccuguuccggaaguguucu

SEQ ID NO: 2072803 - RNA, 19 nt, Artificial Sequence
  Description of Artificial Sequence: Synthetic oligonucleotide
cccaugcacccugcucagg

SEQ ID NO: 2072804 - RNA, 19 nt, Artificial Sequence
  Description of Artificial Sequence: Synthetic oligonucleotide
ccgagucgcugagggagac

SEQ ID NO: 2072805 - RNA, 19 nt, Artificial Sequence
  Description of Artificial Sequence: Synthetic oligonucleotide
ccuucuuuaggacccucuu

SEQ ID NO: 2072806 - RNA, 19 nt, Artificial Sequence
  Description of Artificial Sequence: Synthetic oligonucleotide
cgauugcucugcucacuga

SEQ ID NO: 2072807 - RNA, 19 nt, Artificial Sequence
  Description of Artificial Sequence: Synthetic oligonucleotide
cugcggugguggggacgcc

SEQ ID NO: 2072808 - RNA, 19 nt, Artificial Sequence
  Description of Artificial Sequence: Synthetic oligonucleotide
cucucagacccuggccccu

SEQ ID NO: 2072809 - RNA, 19 nt, Artificial Sequence
  Description of Artificial Sequence: Synthetic oligonucleotide
gccaggcugcgagaaccca

SEQ ID NO: 2072810 - RNA, 19 nt, Artificial Sequence
  Description of Artificial Sequence: Synthetic oligonucleotide
gcagcacgauugcucugcu

SEQ ID NO: 2072811 - RNA, 19 nt, Artificial Sequence
  Description of Artificial Sequence: Synthetic oligonucleotide
cagucuccgccuccgccau

SEQ ID NO: 2072812 - RNA, 19 nt, Artificial Sequence
  Description of Artificial Sequence: Synthetic oligonucleotide
cagucgcaucuuccaggcu

SEQ ID NO: 2072813 - RNA, 19 nt, Artificial Sequence
  Description of Artificial Sequence: Synthetic oligonucleotide
ccaucccugugggaucuga

SEQ ID NO: 2072814 - RNA, 19 nt, Artificial Sequence
  Description of Artificial Sequence: Synthetic oligonucleotide
ggggcgagggaggcucauc

SEQ ID NO: 2072815 - RNA, 19 nt, Artificial Sequence
  Description of Artificial Sequence: Synthetic oligonucleotide
ccuggccccuccggguuac

SEQ ID NO: 2072816 - RNA, 19 nt, Artificial Sequence
  Description of Artificial Sequence: Synthetic oligonucleotide
ccacagcuucccaccugga

SEQ ID NO: 2072817 - RNA, 19 nt, Artificial Sequence
  Description of Artificial Sequence: Synthetic oligonucleotide
cacccugcucagguucccu

SEQ ID NO: 2072818 - RNA, 19 nt, Artificial Sequence
  Description of Artificial Sequence: Synthetic oligonucleotide
gggcagcagcacgauugcu

SEQ ID NO: 2072819 - RNA, 19 nt, Artificial Sequence
  Description of Artificial Sequence: Synthetic oligonucleotide
cggcugaacugcgguggug

SEQ ID NO: 2072820 - RNA, 19 nt, Artificial Sequence
  Description of Artificial Sequence: Synthetic oligonucleotide
ccggagucuucuugggcuu

SEQ ID NO: 2072821 - RNA, 19 nt, Artificial Sequence
  Description of Artificial Sequence: Synthetic oligonucleotide
gggcggugccugccggacu

SEQ ID NO: 2072822 - RNA, 19 nt, Artificial Sequence
  Description of Artificial Sequence: Synthetic oligonucleotide
ccggguuacugucccuguu

SEQ ID NO: 2072823 - RNA, 19 nt, Artificial Sequence
  Description of Artificial Sequence: Synthetic oligonucleotide
ccguacucccaugcacccu

SEQ ID NO: 2072824 - RNA, 19 nt, Artificial Sequence
  Description of Artificial Sequence: Synthetic oligonucleotide
cgcuugaaguugccauuuu

SEQ ID NO: 2072825 - RNA, 19 nt, Artificial Sequence
  Description of Artificial Sequence: Synthetic oligonucleotide
ccacagcuagagggguccu

SEQ ID NO: 2072826 - RNA, 19 nt, Artificial Sequence
  Description of Artificial Sequence: Synthetic oligonucleotide
cggugccugccggacugca

SEQ ID NO: 2072827 - RNA, 19 nt, Artificial Sequence
  Description of Artificial Sequence: Synthetic oligonucleotide
cggugucagaaggcagggu

SEQ ID NO: 2072828 - RNA, 19 nt, Artificial Sequence
  Description of Artificial Sequence: Synthetic oligonucleotide
aaauuugugacucaguagg

SEQ ID NO: 2072829 - RNA, 19 nt, Artificial Sequence
  Description of Artificial Sequence: Synthetic oligonucleotide
aaagggauuuuaugcaggc

SEQ ID NO: 2072830 - RNA, 19 nt, Artificial Sequence
  Description of Artificial Sequence: Synthetic oligonucleotide
agcgagaggagacauaugc

SEQ ID NO: 2072831 - RNA, 19 nt, Artificial Sequence
  Description of Artificial Sequence: Synthetic oligonucleotide
aucgugguugccuacaucc

SEQ ID NO: 2072832 - RNA, 19 nt, Artificial Sequence
  Description of Artificial Sequence: Synthetic oligonucleotide
aaaauuugugacucaguag

SEQ ID NO: 2072833 - RNA, 19 nt, Artificial Sequence
  Description of Artificial Sequence: Synthetic oligonucleotide
aaguucaauaaauaguaga

SEQ ID NO: 2072834 - RNA, 19 nt, Artificial Sequence
  Description of Artificial Sequence: Synthetic oligonucleotide
uuugagaugcaucauucag

SEQ ID NO: 2072835 - RNA, 19 nt, Artificial Sequence
  Description of Artificial Sequence: Synthetic oligonucleotide
cuuagaaauuuugagaugc

SEQ ID NO: 2072836 - RNA, 19 nt, Artificial Sequence
  Description of Artificial Sequence: Synthetic oligonucleotide
aaaguuugaaaguucaaua

SEQ ID NO: 2072837 - RNA, 19 nt, Artificial Sequence
  Description of Artificial Sequence: Synthetic oligonucleotide
aaagaaacacgucaucaca

SEQ ID NO: 2072838 - RNA, 19 nt, Artificial Sequence
  Description of Artificial Sequence: Synthetic oligonucleotide
ugagaugcaucauucagag

SEQ ID NO: 2072839 - RNA, 19 nt, Artificial Sequence
  Description of Artificial Sequence: Synthetic oligonucleotide
ucuuccugcggacucaugg

SEQ ID NO: 2072840 - RNA, 19 nt, Artificial Sequence
  Description of Artificial Sequence: Synthetic oligonucleotide
agggauuuuaugcaggcuc

SEQ ID NO: 2072841 - RNA, 19 nt, Artificial Sequence
  Description of Artificial Sequence: Synthetic oligonucleotide
uccuuaaucaaagaaacac

SEQ ID NO: 2072842 - RNA, 19 nt, Artificial Sequence
  Description of Artificial Sequence: Synthetic oligonucleotide
ucauucagagcucaaggug

SEQ ID NO: 2072843 - RNA, 19 nt, Artificial Sequence
  Description of Artificial Sequence: Synthetic oligonucleotide
ucugguucagcucucuucc

SEQ ID NO: 2072844 - RNA, 19 nt, Artificial Sequence
  Description of Artificial Sequence: Synthetic oligonucleotide
aagaaacacgucaucacac

SEQ ID NO: 2072845 - RNA, 19 nt, Artificial Sequence
  Description of Artificial Sequence: Synthetic oligonucleotide
ugaaagggauuuuaugcag

SEQ ID NO: 2072846 - RNA, 19 nt, Artificial Sequence
  Description of Artificial Sequence: Synthetic oligonucleotide
ugacauuucuugagcagcg

SEQ ID NO: 2072847 - RNA, 19 nt, Artificial Sequence
  Description of Artificial Sequence: Synthetic oligonucleotide
uuccgugcaguuauguugg

SEQ ID NO: 2072848 - RNA, 19 nt, Artificial Sequence
  Description of Artificial Sequence: Synthetic oligonucleotide
acuguuagcacucggcauc

SEQ ID NO: 2072849 - RNA, 19 nt, Artificial Sequence
  Description of Artificial Sequence: Synthetic oligonucleotide
uaugaaccgaguauugcug

SEQ ID NO: 2072850 - RNA, 19 nt, Artificial Sequence
  Description of Artificial Sequence: Synthetic oligonucleotide
uuagcacucggcauccacg

SEQ ID NO: 2072851 - RNA, 19 nt, Artificial Sequence
  Description of Artificial Sequence: Synthetic oligonucleotide
agaaauuuugagaugcauc

SEQ ID NO: 2072852 - RNA, 19 nt, Artificial Sequence
  Description of Artificial Sequence: Synthetic oligonucleotide
caucauucagagcucaagg

SEQ ID NO: 2072853 - RNA, 19 nt, Artificial Sequence
  Description of Artificial Sequence: Synthetic oligonucleotide
uucuugagcagcgagagga

SEQ ID NO: 2072854 - RNA, 19 nt, Artificial Sequence
  Description of Artificial Sequence: Synthetic oligonucleotide
uugagaugcaucauucaga

SEQ ID NO: 2072855 - RNA, 19 nt, Artificial Sequence
  Description of Artificial Sequence: Synthetic oligonucleotide
aacacgucaucacacacaa

SEQ ID NO: 2072856 - RNA, 19 nt, Artificial Sequence
  Description of Artificial Sequence: Synthetic oligonucleotide
ugucacggcugccugaagg

SEQ ID NO: 2072857 - RNA, 19 nt, Artificial Sequence
  Description of Artificial Sequence: Synthetic oligonucleotide
auuuugagaugcaucauuc

SEQ ID NO: 2072858 - RNA, 19 nt, Artificial Sequence
  Description of Artificial Sequence: Synthetic oligonucleotide
uuuccaagcaucucugcug

SEQ ID NO: 2072859 - RNA, 19 nt, Artificial Sequence
  Description of Artificial Sequence: Synthetic oligonucleotide
uggcgguaagcauacacgg

SEQ ID NO: 2072860 - RNA, 19 nt, Artificial Sequence
  Description of Artificial Sequence: Synthetic oligonucleotide
uuugugacucaguagggcu

SEQ ID NO: 2072861 - RNA, 19 nt, Artificial Sequence
  Description of Artificial Sequence: Synthetic oligonucleotide
aaccgaguauugcugauga

SEQ ID NO: 2072862 - RNA, 19 nt, Artificial Sequence
  Description of Artificial Sequence: Synthetic oligonucleotide
ucuuucaucucugucauuc

SEQ ID NO: 2072863 - RNA, 19 nt, Artificial Sequence
  Description of Artificial Sequence: Synthetic oligonucleotide
aucaaagaaacacgucauc

SEQ ID NO: 2072864 - RNA, 19 nt, Artificial Sequence
  Description of Artificial Sequence: Synthetic oligonucleotide
uuaaucaaagaaacacguc

SEQ ID NO: 2072865 - RNA, 19 nt, Artificial Sequence
  Description of Artificial Sequence: Synthetic oligonucleotide
auuugugacucaguagggc

SEQ ID NO: 2072866 - RNA, 19 nt, Artificial Sequence
  Description of Artificial Sequence: Synthetic oligonucleotide
guagugguaaaauuuguga

SEQ ID NO: 2072867 - RNA, 19 nt, Artificial Sequence
  Description of Artificial Sequence: Synthetic oligonucleotide
aaaguucaauaaauaguag

SEQ ID NO: 2072868 - RNA, 19 nt, Artificial Sequence
  Description of Artificial Sequence: Synthetic oligonucleotide
aggguuucggccgagaauc

SEQ ID NO: 2072869 - RNA, 19 nt, Artificial Sequence
  Description of Artificial Sequence: Synthetic oligonucleotide
cacgucaucacacacaaca

SEQ ID NO: 2072870 - RNA, 19 nt, Artificial Sequence
  Description of Artificial Sequence: Synthetic oligonucleotide
guuccgugcaguuauguug

SEQ ID NO: 2072871 - RNA, 19 nt, Artificial Sequence
  Description of Artificial Sequence: Synthetic oligonucleotide
aguucaauaaauaguagaa

SEQ ID NO: 2072872 - RNA, 19 nt, Artificial Sequence
  Description of Artificial Sequence: Synthetic oligonucleotide
aguagcgucgccuccuuuc

SEQ ID NO: 2072873 - RNA, 19 nt, Artificial Sequence
  Description of Artificial Sequence: Synthetic oligonucleotide
uacgcacugacauuucuug

SEQ ID NO: 2072874 - RNA, 19 nt, Artificial Sequence
  Description of Artificial Sequence: Synthetic oligonucleotide
gaagcaagcgugucugucc

SEQ ID NO: 2072875 - RNA, 19 nt, Artificial Sequence
  Description of Artificial Sequence: Synthetic oligonucleotide
agcauacacggcaaggacc

SEQ ID NO: 2072876 - RNA, 19 nt, Artificial Sequence
  Description of Artificial Sequence: Synthetic oligonucleotide
aguuauguugguguccagg

SEQ ID NO: 2072877 - RNA, 19 nt, Artificial Sequence
  Description of Artificial Sequence: Synthetic oligonucleotide
ccuuaaucaaagaaacacg

SEQ ID NO: 2072878 - RNA, 19 nt, Artificial Sequence
  Description of Artificial Sequence: Synthetic oligonucleotide
acugacauuucuugagcag

SEQ ID NO: 2072879 - RNA, 19 nt, Artificial Sequence
  Description of Artificial Sequence: Synthetic oligonucleotide
augugaaagggauuuuaug

SEQ ID NO: 2072880 - RNA, 19 nt, Artificial Sequence
  Description of Artificial Sequence: Synthetic oligonucleotide
gaugccccggucuucgugg

SEQ ID NO: 2072881 - RNA, 19 nt, Artificial Sequence
  Description of Artificial Sequence: Synthetic oligonucleotide
cuuaaucaaagaaacacgu

SEQ ID NO: 2072882 - RNA, 19 nt, Artificial Sequence
  Description of Artificial Sequence: Synthetic oligonucleotide
uggcguaccucauuccugg

SEQ ID NO: 2072883 - RNA, 19 nt, Artificial Sequence
  Description of Artificial Sequence: Synthetic oligonucleotide
aagcgugucuguccagugg

SEQ ID NO: 2072884 - RNA, 19 nt, Artificial Sequence
  Description of Artificial Sequence: Synthetic oligonucleotide
uuuuaugcaggcucauuuc

SEQ ID NO: 2072885 - RNA, 19 nt, Artificial Sequence
  Description of Artificial Sequence: Synthetic oligonucleotide
uuuugagaugcaucauuca

SEQ ID NO: 2072886 - RNA, 19 nt, Artificial Sequence
  Description of Artificial Sequence: Synthetic oligonucleotide
acauuucuugagcagcgag

SEQ ID NO: 2072887 - RNA, 19 nt, Artificial Sequence
  Description of Artificial Sequence: Synthetic oligonucleotide
aucauucagagcucaaggu

SEQ ID NO: 2072888 - RNA, 19 nt, Artificial Sequence
  Description of Artificial Sequence: Synthetic oligonucleotide
guacccaugaucacuuucg

SEQ ID NO: 2072889 - RNA, 19 nt, Artificial Sequence
  Description of Artificial Sequence: Synthetic oligonucleotide
gcggcgaugaaucuggugg

SEQ ID NO: 2072890 - RNA, 19 nt, Artificial Sequence
  Description of Artificial Sequence: Synthetic oligonucleotide
uccagguuggacauacgca

SEQ ID NO: 2072891 - RNA, 19 nt, Artificial Sequence
  Description of Artificial Sequence: Synthetic oligonucleotide
uaagcauacacggcaagga

SEQ ID NO: 2072892 - RNA, 19 nt, Artificial Sequence
  Description of Artificial Sequence: Synthetic oligonucleotide
acacacaacagccaggguu

SEQ ID NO: 2072893 - RNA, 19 nt, Artificial Sequence
  Description of Artificial Sequence: Synthetic oligonucleotide
uccaguuccgugcaguuau

SEQ ID NO: 2072894 - RNA, 19 nt, Artificial Sequence
  Description of Artificial Sequence: Synthetic oligonucleotide
gaaacacgucaucacacac

SEQ ID NO: 2072895 - RNA, 19 nt, Artificial Sequence
  Description of Artificial Sequence: Synthetic oligonucleotide
gugaaagggauuuuaugca

SEQ ID NO: 2072896 - RNA, 19 nt, Artificial Sequence
  Description of Artificial Sequence: Synthetic oligonucleotide
guaagcauacacggcaagg

SEQ ID NO: 2072897 - RNA, 19 nt, Artificial Sequence
  Description of Artificial Sequence: Synthetic oligonucleotide
uuaugcaggcucauuuccu

SEQ ID NO: 2072898 - RNA, 19 nt, Artificial Sequence
  Description of Artificial Sequence: Synthetic oligonucleotide
uacccaugaucacuuucgg

SEQ ID NO: 2072899 - RNA, 19 nt, Artificial Sequence
  Description of Artificial Sequence: Synthetic oligonucleotide
ucuggcguaccucauuccu

SEQ ID NO: 2072900 - RNA, 19 nt, Artificial Sequence
  Description of Artificial Sequence: Synthetic oligonucleotide
gaugaugccccggucuucg

SEQ ID NO: 2072901 - RNA, 19 nt, Artificial Sequence
  Description of Artificial Sequence: Synthetic oligonucleotide
uagggcugcggucugaggu

SEQ ID NO: 2072902 - RNA, 19 nt, Artificial Sequence
  Description of Artificial Sequence: Synthetic oligonucleotide
uuccauuauggcaggucag

SEQ ID NO: 2072903 - RNA, 19 nt, Artificial Sequence
  Description of Artificial Sequence: Synthetic oligonucleotide
ugaguguuucuggugcugg

SEQ ID NO: 2072904 - RNA, 19 nt, Artificial Sequence
  Description of Artificial Sequence: Synthetic oligonucleotide
agaaacacgucaucacaca

SEQ ID NO: 2072905 - RNA, 19 nt, Artificial Sequence
  Description of Artificial Sequence: Synthetic oligonucleotide
gguaaaauuugugacucag

SEQ ID NO: 2072906 - RNA, 19 nt, Artificial Sequence
  Description of Artificial Sequence: Synthetic oligonucleotide
cugacauuucuugagcagc

SEQ ID NO: 2072907 - RNA, 19 nt, Artificial Sequence
  Description of Artificial Sequence: Synthetic oligonucleotide
uuauguugguguccaggca

SEQ ID NO: 2072908 - RNA, 19 nt, Artificial Sequence
  Description of Artificial Sequence: Synthetic oligonucleotide
uugugacucaguagggcug

SEQ ID NO: 2072909 - RNA, 19 nt, Artificial Sequence
  Description of Artificial Sequence: Synthetic oligonucleotide
cacuuucgguuccugagcg

SEQ ID NO: 2072910 - RNA, 19 nt, Artificial Sequence
  Description of Artificial Sequence: Synthetic oligonucleotide
cacggcaaggaccagcacc

SEQ ID NO: 2072911 - RNA, 19 nt, Artificial Sequence
  Description of Artificial Sequence: Synthetic oligonucleotide
aagcaagcgugucugucca

SEQ ID NO: 2072912 - RNA, 19 nt, Artificial Sequence
  Description of Artificial Sequence: Synthetic oligonucleotide
ccaguuaagggguugagug

SEQ ID NO: 2072913 - RNA, 19 nt, Artificial Sequence
  Description of Artificial Sequence: Synthetic oligonucleotide
uguacccaugaucacuuuc

SEQ ID NO: 2072914 - RNA, 19 nt, Artificial Sequence
  Description of Artificial Sequence: Synthetic oligonucleotide
uuuccucucaggagcauuc

SEQ ID NO: 2072915 - RNA, 19 nt, Artificial Sequence
  Description of Artificial Sequence: Synthetic oligonucleotide
ucaccuagggccccucugc

SEQ ID NO: 2072916 - RNA, 19 nt, Artificial Sequence
  Description of Artificial Sequence: Synthetic oligonucleotide
uccauuccauuauggcagg

SEQ ID NO: 2072917 - RNA, 19 nt, Artificial Sequence
  Description of Artificial Sequence: Synthetic oligonucleotide
cauuauggcaggucaguuc

SEQ ID NO: 2072918 - RNA, 19 nt, Artificial Sequence
  Description of Artificial Sequence: Synthetic oligonucleotide
aaacacgucaucacacaca

SEQ ID NO: 2072919 - RNA, 19 nt, Artificial Sequence
  Description of Artificial Sequence: Synthetic oligonucleotide
agcgucgccuccuuucugg

SEQ ID NO: 2072920 - RNA, 19 nt, Artificial Sequence
  Description of Artificial Sequence: Synthetic oligonucleotide
uucguggcugucaucgucu

SEQ ID NO: 2072921 - RNA, 19 nt, Artificial Sequence
  Description of Artificial Sequence: Synthetic oligonucleotide
gugguaaaauuugugacuc

SEQ ID NO: 2072922 - RNA, 19 nt, Artificial Sequence
  Description of Artificial Sequence: Synthetic oligonucleotide
gacucauggugcuguaccc

SEQ ID NO: 2072923 - RNA, 19 nt, Artificial Sequence
  Description of Artificial Sequence: Synthetic oligonucleotide
cacuccucaugugaaaggg

SEQ ID NO: 2072924 - RNA, 19 nt, Artificial Sequence
  Description of Artificial Sequence: Synthetic oligonucleotide
caagcaucucugcuggagc

SEQ ID NO: 2072925 - RNA, 19 nt, Artificial Sequence
  Description of Artificial Sequence: Synthetic oligonucleotide
cucaaggugaguccaguuc

SEQ ID NO: 2072926 - RNA, 19 nt, Artificial Sequence
  Description of Artificial Sequence: Synthetic oligonucleotide
caugaucacuuucgguucc

SEQ ID NO: 2072927 - RNA, 19 nt, Artificial Sequence
  Description of Artificial Sequence: Synthetic oligonucleotide
aucuggcguaccucauucc

SEQ ID NO: 2072928 - RNA, 19 nt, Artificial Sequence
  Description of Artificial Sequence: Synthetic oligonucleotide
agacauaugcugguggcug

SEQ ID NO: 2072929 - RNA, 19 nt, Artificial Sequence
  Description of Artificial Sequence: Synthetic oligonucleotide
uaugcaggcucauuuccuc

SEQ ID NO: 2072930 - RNA, 19 nt, Artificial Sequence
  Description of Artificial Sequence: Synthetic oligonucleotide
ggugaguccaguuccgugc

SEQ ID NO: 2072931 - RNA, 19 nt, Artificial Sequence
  Description of Artificial Sequence: Synthetic oligonucleotide
uccugcggacucauggugc

SEQ ID NO: 2072932 - RNA, 19 nt, Artificial Sequence
  Description of Artificial Sequence: Synthetic oligonucleotide
gacauaugcugguggcugc

SEQ ID NO: 2072933 - RNA, 19 nt, Artificial Sequence
  Description of Artificial Sequence: Synthetic oligonucleotide
uagaaauuuugagaugcau

SEQ ID NO: 2072934 - RNA, 19 nt, Artificial Sequence
  Description of Artificial Sequence: Synthetic oligonucleotide
uccacgguguguacuguca

SEQ ID NO: 2072935 - RNA, 19 nt, Artificial Sequence
  Description of Artificial Sequence: Synthetic oligonucleotide
ugcagcuaugaaccgagua

SEQ ID NO: 2072936 - RNA, 19 nt, Artificial Sequence
  Description of Artificial Sequence: Synthetic oligonucleotide
uuccugcggacucauggug

SEQ ID NO: 2072937 - RNA, 19 nt, Artificial Sequence
  Description of Artificial Sequence: Synthetic oligonucleotide
guccaaguccucaucgugg

SEQ ID NO: 2072938 - RNA, 19 nt, Artificial Sequence
  Description of Artificial Sequence: Synthetic oligonucleotide
acaacuccuuaaucaaaga

SEQ ID NO: 2072939 - RNA, 19 nt, Artificial Sequence
  Description of Artificial Sequence: Synthetic oligonucleotide
agguuggacauacgcacug

SEQ ID NO: 2072940 - RNA, 19 nt, Artificial Sequence
  Description of Artificial Sequence: Synthetic oligonucleotide
ugaaucugguggcgguaag

SEQ ID NO: 2072941 - RNA, 19 nt, Artificial Sequence
  Description of Artificial Sequence: Synthetic oligonucleotide
aguuuccuuuccaagcauc

SEQ ID NO: 2072942 - RNA, 19 nt, Artificial Sequence
  Description of Artificial Sequence: Synthetic oligonucleotide
ugggaaggucaccaguuaa

SEQ ID NO: 2072943 - RNA, 19 nt, Artificial Sequence
  Description of Artificial Sequence: Synthetic oligonucleotide
guauugcugaugaugcccc

SEQ ID NO: 2072944 - RNA, 19 nt, Artificial Sequence
  Description of Artificial Sequence: Synthetic oligonucleotide
acugcagcuaugaaccgag

SEQ ID NO: 2072945 - RNA, 19 nt, Artificial Sequence
  Description of Artificial Sequence: Synthetic oligonucleotide
ucaugugaaagggauuuua

SEQ ID NO: 2072946 - RNA, 19 nt, Artificial Sequence
  Description of Artificial Sequence: Synthetic oligonucleotide
cagagcucaaggugagucc

SEQ ID NO: 2072947 - RNA, 19 nt, Artificial Sequence
  Description of Artificial Sequence: Synthetic oligonucleotide
agcgugucuguccaguggu

SEQ ID NO: 2072948 - RNA, 19 nt, Artificial Sequence
  Description of Artificial Sequence: Synthetic oligonucleotide
cauuucuugagcagcgaga

SEQ ID NO: 2072949 - RNA, 19 nt, Artificial Sequence
  Description of Artificial Sequence: Synthetic oligonucleotide
ugacugcagcuaugaaccg

SEQ ID NO: 2072950 - RNA, 19 nt, Artificial Sequence
  Description of Artificial Sequence: Synthetic oligonucleotide
uccauuauggcaggucagu

SEQ ID NO: 2072951 - RNA, 19 nt, Artificial Sequence
  Description of Artificial Sequence: Synthetic oligonucleotide
ugguaaaauuugugacuca

SEQ ID NO: 2072952 - RNA, 19 nt, Artificial Sequence
  Description of Artificial Sequence: Synthetic oligonucleotide
ugcuguacccaugaucacu

SEQ ID NO: 2072953 - RNA, 19 nt, Artificial Sequence
  Description of Artificial Sequence: Synthetic oligonucleotide
ggagacauaugcugguggc

SEQ ID NO: 2072954 - RNA, 19 nt, Artificial Sequence
  Description of Artificial Sequence: Synthetic oligonucleotide
ggacucauggugcuguacc

SEQ ID NO: 2072955 - RNA, 19 nt, Artificial Sequence
  Description of Artificial Sequence: Synthetic oligonucleotide
uccucucaggagcauucug

SEQ ID NO: 2072956 - RNA, 19 nt, Artificial Sequence
  Description of Artificial Sequence: Synthetic oligonucleotide
acuuucgguuccugagcgg

SEQ ID NO: 2072957 - RNA, 19 nt, Artificial Sequence
  Description of Artificial Sequence: Synthetic oligonucleotide
ccagguuggacauacgcac

SEQ ID NO: 2072958 - RNA, 19 nt, Artificial Sequence
  Description of Artificial Sequence: Synthetic oligonucleotide
cacgguguguacugucacg

SEQ ID NO: 2072959 - RNA, 19 nt, Artificial Sequence
  Description of Artificial Sequence: Synthetic oligonucleotide
gaucacuuucgguuccuga

SEQ ID NO: 2072960 - RNA, 19 nt, Artificial Sequence
  Description of Artificial Sequence: Synthetic oligonucleotide
ugagcgguagugguaaaau

SEQ ID NO: 2072961 - RNA, 19 nt, Artificial Sequence
  Description of Artificial Sequence: Synthetic oligonucleotide
caacuccuuaaucaaagaa

SEQ ID NO: 2072962 - RNA, 19 nt, Artificial Sequence
  Description of Artificial Sequence: Synthetic oligonucleotide
uggagcuuugccgacugcu

SEQ ID NO: 2072963 - RNA, 19 nt, Artificial Sequence
  Description of Artificial Sequence: Synthetic oligonucleotide
ugcuuggggaggugugggg

SEQ ID NO: 2072964 - RNA, 19 nt, Artificial Sequence
  Description of Artificial Sequence: Synthetic oligonucleotide
aguuaagggguugaguguu

SEQ ID NO: 2072965 - RNA, 19 nt, Artificial Sequence
  Description of Artificial Sequence: Synthetic oligonucleotide
guuagcacucggcauccac

SEQ ID NO: 2072966 - RNA, 19 nt, Artificial Sequence
  Description of Artificial Sequence: Synthetic oligonucleotide
agcgguagugguaaaauuu

SEQ ID NO: 2072967 - RNA, 19 nt, Artificial Sequence
  Description of Artificial Sequence: Synthetic oligonucleotide
agagcucaaggugagucca

SEQ ID NO: 2072968 - RNA, 19 nt, Artificial Sequence
  Description of Artificial Sequence: Synthetic oligonucleotide
uccaguuaagggguugagu

SEQ ID NO: 2072969 - RNA, 19 nt, Artificial Sequence
  Description of Artificial Sequence: Synthetic oligonucleotide
gaaccgaguauugcugaug

SEQ ID NO: 2072970 - RNA, 19 nt, Artificial Sequence
  Description of Artificial Sequence: Synthetic oligonucleotide
ucauggugcuguacccaug

SEQ ID NO: 2072971 - RNA, 19 nt, Artificial Sequence
  Description of Artificial Sequence: Synthetic oligonucleotide
cugguggcgguaagcauac

SEQ ID NO: 2072972 - RNA, 19 nt, Artificial Sequence
  Description of Artificial Sequence: Synthetic oligonucleotide
caccccagcugacaagggg

SEQ ID NO: 2072973 - RNA, 19 nt, Artificial Sequence
  Description of Artificial Sequence: Synthetic oligonucleotide
aggugaguccaguuccgug

SEQ ID NO: 2072974 - RNA, 19 nt, Artificial Sequence
  Description of Artificial Sequence: Synthetic oligonucleotide
gaaggucaccaguuaaaua

SEQ ID NO: 2072975 - RNA, 19 nt, Artificial Sequence
  Description of Artificial Sequence: Synthetic oligonucleotide
gguguccagguccaagucc

SEQ ID NO: 2072976 - RNA, 19 nt, Artificial Sequence
  Description of Artificial Sequence: Synthetic oligonucleotide
ucgugguugccuacaucca

SEQ ID NO: 2072977 - RNA, 19 nt, Artificial Sequence
  Description of Artificial Sequence: Synthetic oligonucleotide
uugaguguuucuggugcug

SEQ ID NO: 2072978 - RNA, 19 nt, Artificial Sequence
  Description of Artificial Sequence: Synthetic oligonucleotide
gguaagcauacacggcaag

SEQ ID NO: 2072979 - RNA, 19 nt, Artificial Sequence
  Description of Artificial Sequence: Synthetic oligonucleotide
ugaaccgaguauugcugau

SEQ ID NO: 2072980 - RNA, 19 nt, Artificial Sequence
  Description of Artificial Sequence: Synthetic oligonucleotide
gagaugcaucauucagagc

SEQ ID NO: 2072981 - RNA, 19 nt, Artificial Sequence
  Description of Artificial Sequence: Synthetic oligonucleotide
ucuaggaagcaagcguguc

SEQ ID NO: 2072982 - RNA, 19 nt, Artificial Sequence
  Description of Artificial Sequence: Synthetic oligonucleotide
cauuccauuauggcagguc

SEQ ID NO: 2072983 - RNA, 19 nt, Artificial Sequence
  Description of Artificial Sequence: Synthetic oligonucleotide
gggucguuguugcaugggg

SEQ ID NO: 2072984 - RNA, 19 nt, Artificial Sequence
  Description of Artificial Sequence: Synthetic oligonucleotide
caugucgcuccaugacugc

SEQ ID NO: 2072985 - RNA, 19 nt, Artificial Sequence
  Description of Artificial Sequence: Synthetic oligonucleotide
gaugcaucauucagagcuc

SEQ ID NO: 2072986 - RNA, 19 nt, Artificial Sequence
  Description of Artificial Sequence: Synthetic oligonucleotide
ggcucauuuccucucagga

SEQ ID NO: 2072987 - RNA, 19 nt, Artificial Sequence
  Description of Artificial Sequence: Synthetic oligonucleotide
uaccucauuccuggcaucu

SEQ ID NO: 2072988 - RNA, 19 nt, Artificial Sequence
  Description of Artificial Sequence: Synthetic oligonucleotide
aggggucguuguugcaugg

SEQ ID NO: 2072989 - RNA, 19 nt, Artificial Sequence
  Description of Artificial Sequence: Synthetic oligonucleotide
acgucaucacacacaacag

SEQ ID NO: 2072990 - RNA, 19 nt, Artificial Sequence
  Description of Artificial Sequence: Synthetic oligonucleotide
guggcugcggcgaugaauc

SEQ ID NO: 2072991 - RNA, 19 nt, Artificial Sequence
  Description of Artificial Sequence: Synthetic oligonucleotide
cuggcguaccucauuccug

SEQ ID NO: 2072992 - RNA, 19 nt, Artificial Sequence
  Description of Artificial Sequence: Synthetic oligonucleotide
aggucaccaguuaaauaag

SEQ ID NO: 2072993 - RNA, 19 nt, Artificial Sequence
  Description of Artificial Sequence: Synthetic oligonucleotide
uuccaguuaagggguugag

SEQ ID NO: 2072994 - RNA, 19 nt, Artificial Sequence
  Description of Artificial Sequence: Synthetic oligonucleotide
uuucggccgagaaucccuc

SEQ ID NO: 2072995 - RNA, 19 nt, Artificial Sequence
  Description of Artificial Sequence: Synthetic oligonucleotide
uggagggucggguggugug

SEQ ID NO: 2072996 - RNA, 19 nt, Artificial Sequence
  Description of Artificial Sequence: Synthetic oligonucleotide
acccaugaucacuuucggu

SEQ ID NO: 2072997 - RNA, 19 nt, Artificial Sequence
  Description of Artificial Sequence: Synthetic oligonucleotide
caccucuaggaagcaagcg

SEQ ID NO: 2072998 - RNA, 19 nt, Artificial Sequence
  Description of Artificial Sequence: Synthetic oligonucleotide
gcgguaagcauacacggca

SEQ ID NO: 2072999 - RNA, 19 nt, Artificial Sequence
  Description of Artificial Sequence: Synthetic oligonucleotide
gcugcggcgaugaaucugg

SEQ ID NO: 2073000 - RNA, 19 nt, Artificial Sequence
  Description of Artificial Sequence: Synthetic oligonucleotide
cuguuagcacucggcaucc

SEQ ID NO: 2073001 - RNA, 19 nt, Artificial Sequence
  Description of Artificial Sequence: Synthetic oligonucleotide
acggcaaggaccagcacca

SEQ ID NO: 2073002 - RNA, 19 nt, Artificial Sequence
  Description of Artificial Sequence: Synthetic oligonucleotide
agcuaugaaccgaguauug

SEQ ID NO: 2073003 - RNA, 19 nt, Artificial Sequence
  Description of Artificial Sequence: Synthetic oligonucleotide
guggugugagcgguagugg

SEQ ID NO: 2073004 - RNA, 19 nt, Artificial Sequence
  Description of Artificial Sequence: Synthetic oligonucleotide
gguggugugagcgguagug

SEQ ID NO: 2073005 - RNA, 19 nt, Artificial Sequence
  Description of Artificial Sequence: Synthetic oligonucleotide
gcacugacauuucuugagc

SEQ ID NO: 2073006 - RNA, 19 nt, Artificial Sequence
  Description of Artificial Sequence: Synthetic oligonucleotide
ugcaucauucagagcucaa

SEQ ID NO: 2073007 - RNA, 19 nt, Artificial Sequence
  Description of Artificial Sequence: Synthetic oligonucleotide
ugcggacucauggugcugu

SEQ ID NO: 2073008 - RNA, 19 nt, Artificial Sequence
  Description of Artificial Sequence: Synthetic oligonucleotide
acgcacugacauuucuuga

SEQ ID NO: 2073009 - RNA, 19 nt, Artificial Sequence
  Description of Artificial Sequence: Synthetic oligonucleotide
ugcggcgaugaaucuggug

SEQ ID NO: 2073010 - RNA, 19 nt, Artificial Sequence
  Description of Artificial Sequence: Synthetic oligonucleotide
gcuaugaaccgaguauugc

SEQ ID NO: 2073011 - RNA, 19 nt, Artificial Sequence
  Description of Artificial Sequence: Synthetic oligonucleotide
ggagcauuccccuggcuca

SEQ ID NO: 2073012 - RNA, 19 nt, Artificial Sequence
  Description of Artificial Sequence: Synthetic oligonucleotide
uccucaugugaaagggauu

SEQ ID NO: 2073013 - RNA, 19 nt, Artificial Sequence
  Description of Artificial Sequence: Synthetic oligonucleotide
gacauacgcacugacauuu

SEQ ID NO: 2073014 - RNA, 19 nt, Artificial Sequence
  Description of Artificial Sequence: Synthetic oligonucleotide
aaggugaguccaguuccgu

SEQ ID NO: 2073015 - RNA, 19 nt, Artificial Sequence
  Description of Artificial Sequence: Synthetic oligonucleotide
caagcgugucuguccagug

SEQ ID NO: 2073016 - RNA, 19 nt, Artificial Sequence
  Description of Artificial Sequence: Synthetic oligonucleotide
caaaguuugaaaguucaau

SEQ ID NO: 2073017 - RNA, 19 nt, Artificial Sequence
  Description of Artificial Sequence: Synthetic oligonucleotide
ucgucucuuucaucucugu

SEQ ID NO: 2073018 - RNA, 19 nt, Artificial Sequence
  Description of Artificial Sequence: Synthetic oligonucleotide
cccaaaguuugaaaguuca

SEQ ID NO: 2073019 - RNA, 19 nt, Artificial Sequence
  Description of Artificial Sequence: Synthetic oligonucleotide
agugggaaggucaccaguu

SEQ ID NO: 2073020 - RNA, 19 nt, Artificial Sequence
  Description of Artificial Sequence: Synthetic oligonucleotide
ugggguguccagguccaag

SEQ ID NO: 2073021 - RNA, 19 nt, Artificial Sequence
  Description of Artificial Sequence: Synthetic oligonucleotide
acucauggugcuguaccca

SEQ ID NO: 2073022 - RNA, 19 nt, Artificial Sequence
  Description of Artificial Sequence: Synthetic oligonucleotide
gcauccacgguguguacug

SEQ ID NO: 2073023 - RNA, 19 nt, Artificial Sequence
  Description of Artificial Sequence: Synthetic oligonucleotide
gcgguagugguaaaauuug

SEQ ID NO: 2073024 - RNA, 19 nt, Artificial Sequence
  Description of Artificial Sequence: Synthetic oligonucleotide
ucgccuccuuucuggacug

SEQ ID NO: 2073025 - RNA, 19 nt, Artificial Sequence
  Description of Artificial Sequence: Synthetic oligonucleotide
caggucaguuccucagcac

SEQ ID NO: 2073026 - RNA, 19 nt, Artificial Sequence
  Description of Artificial Sequence: Synthetic oligonucleotide
agggucggguggugugagc

SEQ ID NO: 2073027 - RNA, 19 nt, Artificial Sequence
  Description of Artificial Sequence: Synthetic oligonucleotide
uuugguggaugagggcagu

SEQ ID NO: 2073028 - RNA, 19 nt, Artificial Sequence
  Description of Artificial Sequence: Synthetic oligonucleotide
acauacgcacugacauuuc

SEQ ID NO: 2073029 - RNA, 19 nt, Artificial Sequence
  Description of Artificial Sequence: Synthetic oligonucleotide
ucuucguggcugucaucgu

SEQ ID NO: 2073030 - RNA, 19 nt, Artificial Sequence
  Description of Artificial Sequence: Synthetic oligonucleotide
gcacucggcauccacggug

SEQ ID NO: 2073031 - RNA, 19 nt, Artificial Sequence
  Description of Artificial Sequence: Synthetic oligonucleotide
acacggcaaggaccagcac

SEQ ID NO: 2073032 - RNA, 19 nt, Artificial Sequence
  Description of Artificial Sequence: Synthetic oligonucleotide
gggucggguggugugagcg

SEQ ID NO: 2073033 - RNA, 19 nt, Artificial Sequence
  Description of Artificial Sequence: Synthetic oligonucleotide
ugagcggccccaguagcgu

SEQ ID NO: 2073034 - RNA, 19 nt, Artificial Sequence
  Description of Artificial Sequence: Synthetic oligonucleotide
agcacccacuccucaugug

SEQ ID NO: 2073035 - RNA, 19 nt, Artificial Sequence
  Description of Artificial Sequence: Synthetic oligonucleotide
guaaaauuugugacucagu

SEQ ID NO: 2073036 - RNA, 19 nt, Artificial Sequence
  Description of Artificial Sequence: Synthetic oligonucleotide
accccagcugacaaggggu

SEQ ID NO: 2073037 - RNA, 19 nt, Artificial Sequence
  Description of Artificial Sequence: Synthetic oligonucleotide
gacuguuagcacucggcau

SEQ ID NO: 2073038 - RNA, 19 nt, Artificial Sequence
  Description of Artificial Sequence: Synthetic oligonucleotide
ggguugaguguuucuggug

SEQ ID NO: 2073039 - RNA, 19 nt, Artificial Sequence
  Description of Artificial Sequence: Synthetic oligonucleotide
aucugguggcgguaagcau

SEQ ID NO: 2073040 - RNA, 19 nt, Artificial Sequence
  Description of Artificial Sequence: Synthetic oligonucleotide
gcaguuauguuggugucca

SEQ ID NO: 2073041 - RNA, 19 nt, Artificial Sequence
  Description of Artificial Sequence: Synthetic oligonucleotide
agcaagcgugucuguccag

SEQ ID NO: 2073042 - RNA, 19 nt, Artificial Sequence
  Description of Artificial Sequence: Synthetic oligonucleotide
acauccaccccagcugaca

SEQ ID NO: 2073043 - RNA, 19 nt, Artificial Sequence
  Description of Artificial Sequence: Synthetic oligonucleotide
gagcauuccccuggcucag

SEQ ID NO: 2073044 - RNA, 19 nt, Artificial Sequence
  Description of Artificial Sequence: Synthetic oligonucleotide
gucauucuccagguuggac

SEQ ID NO: 2073045 - RNA, 19 nt, Artificial Sequence
  Description of Artificial Sequence: Synthetic oligonucleotide
acaaggggucguuguugca

SEQ ID NO: 2073046 - RNA, 19 nt, Artificial Sequence
  Description of Artificial Sequence: Synthetic oligonucleotide
gcaugucgcuccaugacug

SEQ ID NO: 2073047 - RNA, 19 nt, Artificial Sequence
  Description of Artificial Sequence: Synthetic oligonucleotide
uagcgucgccuccuuucug

SEQ ID NO: 2073048 - RNA, 19 nt, Artificial Sequence
  Description of Artificial Sequence: Synthetic oligonucleotide
cuccucaugugaaagggau

SEQ ID NO: 2073049 - RNA, 19 nt, Artificial Sequence
  Description of Artificial Sequence: Synthetic oligonucleotide
auuuccucucaggagcauu

SEQ ID NO: 2073050 - RNA, 19 nt, Artificial Sequence
  Description of Artificial Sequence: Synthetic oligonucleotide
gagcucaaggugaguccag

SEQ ID NO: 2073051 - RNA, 19 nt, Artificial Sequence
  Description of Artificial Sequence: Synthetic oligonucleotide
gagcauucugcaucaccua

SEQ ID NO: 2073052 - RNA, 19 nt, Artificial Sequence
  Description of Artificial Sequence: Synthetic oligonucleotide
cacacaacagccaggguuu

SEQ ID NO: 2073053 - RNA, 19 nt, Artificial Sequence
  Description of Artificial Sequence: Synthetic oligonucleotide
acugucacggcugccugaa

SEQ ID NO: 2073054 - RNA, 19 nt, Artificial Sequence
  Description of Artificial Sequence: Synthetic oligonucleotide
ggcgaugaaucugguggcg

SEQ ID NO: 2073055 - RNA, 19 nt, Artificial Sequence
  Description of Artificial Sequence: Synthetic oligonucleotide
gcgaugaaucugguggcgg

SEQ ID NO: 2073056 - RNA, 19 nt, Artificial Sequence
  Description of Artificial Sequence: Synthetic oligonucleotide
ggggacuguuagcacucgg

SEQ ID NO: 2073057 - RNA, 19 nt, Artificial Sequence
  Description of Artificial Sequence: Synthetic oligonucleotide
gagggucggguggugugag

SEQ ID NO: 2073058 - RNA, 19 nt, Artificial Sequence
  Description of Artificial Sequence: Synthetic oligonucleotide
ggcaggucaguuccucagc

SEQ ID NO: 2073059 - RNA, 19 nt, Artificial Sequence
  Description of Artificial Sequence: Synthetic oligonucleotide
gugugagcgguagugguaa

SEQ ID NO: 2073060 - RNA, 19 nt, Artificial Sequence
  Description of Artificial Sequence: Synthetic oligonucleotide
uccaagcaucucugcugga

SEQ ID NO: 2073061 - RNA, 19 nt, Artificial Sequence
  Description of Artificial Sequence: Synthetic oligonucleotide
caguuauguugguguccag

SEQ ID NO: 2073062 - RNA, 19 nt, Artificial Sequence
  Description of Artificial Sequence: Synthetic oligonucleotide
guugaguguuucuggugcu

SEQ ID NO: 2073063 - RNA, 19 nt, Artificial Sequence
  Description of Artificial Sequence: Synthetic oligonucleotide
augaucacuuucgguuccu

SEQ ID NO: 2073064 - RNA, 19 nt, Artificial Sequence
  Description of Artificial Sequence: Synthetic oligonucleotide
ugaugaugccccggucuuc

SEQ ID NO: 2073065 - RNA, 19 nt, Artificial Sequence
  Description of Artificial Sequence: Synthetic oligonucleotide
gcaggucaguuccucagca

SEQ ID NO: 2073066 - RNA, 19 nt, Artificial Sequence
  Description of Artificial Sequence: Synthetic oligonucleotide
gguguccaggcaccucuag

SEQ ID NO: 2073067 - RNA, 19 nt, Artificial Sequence
  Description of Artificial Sequence: Synthetic oligonucleotide
gcuggagcuuugccgacug

SEQ ID NO: 2073068 - RNA, 19 nt, Artificial Sequence
  Description of Artificial Sequence: Synthetic oligonucleotide
uccagugguugguggcauc

SEQ ID NO: 2073069 - RNA, 19 nt, Artificial Sequence
  Description of Artificial Sequence: Synthetic oligonucleotide
agcggccccaguagcgucg

SEQ ID NO: 2073070 - RNA, 19 nt, Artificial Sequence
  Description of Artificial Sequence: Synthetic oligonucleotide
gggcaugucgcuccaugac

SEQ ID NO: 2073071 - RNA, 19 nt, Artificial Sequence
  Description of Artificial Sequence: Synthetic oligonucleotide
ugugagcgguagugguaaa

SEQ ID NO: 2073072 - RNA, 19 nt, Artificial Sequence
  Description of Artificial Sequence: Synthetic oligonucleotide
cucaguagggcugcggucu

SEQ ID NO: 2073073 - RNA, 19 nt, Artificial Sequence
  Description of Artificial Sequence: Synthetic oligonucleotide
gagacauaugcugguggcu

SEQ ID NO: 2073074 - RNA, 19 nt, Artificial Sequence
  Description of Artificial Sequence: Synthetic oligonucleotide
guaccucauuccuggcauc

SEQ ID NO: 2073075 - RNA, 19 nt, Artificial Sequence
  Description of Artificial Sequence: Synthetic oligonucleotide
cauacgcacugacauuucu

SEQ ID NO: 2073076 - RNA, 19 nt, Artificial Sequence
  Description of Artificial Sequence: Synthetic oligonucleotide
ucguggcugucaucgucuc

SEQ ID NO: 2073077 - RNA, 19 nt, Artificial Sequence
  Description of Artificial Sequence: Synthetic oligonucleotide
augcugguggcugcggcga

SEQ ID NO: 2073078 - RNA, 19 nt, Artificial Sequence
  Description of Artificial Sequence: Synthetic oligonucleotide
gauggagggucggguggug

SEQ ID NO: 2073079 - RNA, 19 nt, Artificial Sequence
  Description of Artificial Sequence: Synthetic oligonucleotide
gccgagaaucccucauccc

SEQ ID NO: 2073080 - RNA, 19 nt, Artificial Sequence
  Description of Artificial Sequence: Synthetic oligonucleotide
ggaagcaagcgugucuguc

SEQ ID NO: 2073081 - RNA, 19 nt, Artificial Sequence
  Description of Artificial Sequence: Synthetic oligonucleotide
acccacuccucaugugaaa

SEQ ID NO: 2073082 - RNA, 19 nt, Artificial Sequence
  Description of Artificial Sequence: Synthetic oligonucleotide
ugccuacauccaccccagc

SEQ ID NO: 2073083 - RNA, 19 nt, Artificial Sequence
  Description of Artificial Sequence: Synthetic oligonucleotide
cauccaccccagcugacaa

SEQ ID NO: 2073084 - RNA, 19 nt, Artificial Sequence
  Description of Artificial Sequence: Synthetic oligonucleotide
ggcucaguuuccuuuccaa

SEQ ID NO: 2073085 - RNA, 19 nt, Artificial Sequence
  Description of Artificial Sequence: Synthetic oligonucleotide
gguuucggccgagaauccc

SEQ ID NO: 2073086 - RNA, 19 nt, Artificial Sequence
  Description of Artificial Sequence: Synthetic oligonucleotide
ugcaucaccuagggccccu

SEQ ID NO: 2073087 - RNA, 19 nt, Artificial Sequence
  Description of Artificial Sequence: Synthetic oligonucleotide
acacgucaucacacacaac

SEQ ID NO: 2073088 - RNA, 19 nt, Artificial Sequence
  Description of Artificial Sequence: Synthetic oligonucleotide
gucaguuccucagcaccca

SEQ ID NO: 2073089 - RNA, 19 nt, Artificial Sequence
  Description of Artificial Sequence: Synthetic oligonucleotide
cuggagcuuugccgacugc

SEQ ID NO: 2073090 - RNA, 19 nt, Artificial Sequence
  Description of Artificial Sequence: Synthetic oligonucleotide
cccaugaucacuuucgguu

SEQ ID NO: 2073091 - RNA, 19 nt, Artificial Sequence
  Description of Artificial Sequence: Synthetic oligonucleotide
guagcgucgccuccuuucu

SEQ ID NO: 2073092 - RNA, 19 nt, Artificial Sequence
  Description of Artificial Sequence: Synthetic oligonucleotide
guuucggccgagaaucccu

SEQ ID NO: 2073093 - RNA, 19 nt, Artificial Sequence
  Description of Artificial Sequence: Synthetic oligonucleotide
ccccaaaguuugaaaguuc

SEQ ID NO: 2073094 - RNA, 19 nt, Artificial Sequence
  Description of Artificial Sequence: Synthetic oligonucleotide
gagcgguagugguaaaauu

SEQ ID NO: 2073095 - RNA, 19 nt, Artificial Sequence
  Description of Artificial Sequence: Synthetic oligonucleotide
gugggaaggucaccaguua

SEQ ID NO: 2073096 - RNA, 19 nt, Artificial Sequence
  Description of Artificial Sequence: Synthetic oligonucleotide
cucuaggaagcaagcgugu

SEQ ID NO: 2073097 - RNA, 19 nt, Artificial Sequence
  Description of Artificial Sequence: Synthetic oligonucleotide
uucuggugcugggagcauu

SEQ ID NO: 2073098 - RNA, 19 nt, Artificial Sequence
  Description of Artificial Sequence: Synthetic oligonucleotide
cugcuggagcuuugccgac

SEQ ID NO: 2073099 - RNA, 19 nt, Artificial Sequence
  Description of Artificial Sequence: Synthetic oligonucleotide
cacccacuccucaugugaa

SEQ ID NO: 2073100 - RNA, 19 nt, Artificial Sequence
  Description of Artificial Sequence: Synthetic oligonucleotide
auggugcuguacccaugau

SEQ ID NO: 2073101 - RNA, 19 nt, Artificial Sequence
  Description of Artificial Sequence: Synthetic oligonucleotide
ggcaugucgcuccaugacu

SEQ ID NO: 2073102 - RNA, 19 nt, Artificial Sequence
  Description of Artificial Sequence: Synthetic oligonucleotide
cauacacggcaaggaccag

SEQ ID NO: 2073103 - RNA, 19 nt, Artificial Sequence
  Description of Artificial Sequence: Synthetic oligonucleotide
cugguucagcucucuucca

SEQ ID NO: 2073104 - RNA, 19 nt, Artificial Sequence
  Description of Artificial Sequence: Synthetic oligonucleotide
ggggucguuguugcauggg

SEQ ID NO: 2073105 - RNA, 19 nt, Artificial Sequence
  Description of Artificial Sequence: Synthetic oligonucleotide
uggcugcggcgaugaaucu

SEQ ID NO: 2073106 - RNA, 19 nt, Artificial Sequence
  Description of Artificial Sequence: Synthetic oligonucleotide
gggaaggucaccaguuaaa

SEQ ID NO: 2073107 - RNA, 19 nt, Artificial Sequence
  Description of Artificial Sequence: Synthetic oligonucleotide
cucauggugcuguacccau

SEQ ID NO: 2073108 - RNA, 19 nt, Artificial Sequence
  Description of Artificial Sequence: Synthetic oligonucleotide
ggcugugauggagggucgg

SEQ ID NO: 2073109 - RNA, 19 nt, Artificial Sequence
  Description of Artificial Sequence: Synthetic oligonucleotide
augaugccccggucuucgu

SEQ ID NO: 2073110 - RNA, 19 nt, Artificial Sequence
  Description of Artificial Sequence: Synthetic oligonucleotide
accuagggccccucugcuu

SEQ ID NO: 2073111 - RNA, 19 nt, Artificial Sequence
  Description of Artificial Sequence: Synthetic oligonucleotide
gugagcgguagugguaaaa

SEQ ID NO: 2073112 - RNA, 19 nt, Artificial Sequence
  Description of Artificial Sequence: Synthetic oligonucleotide
acucggcauccacggugug

SEQ ID NO: 2073113 - RNA, 19 nt, Artificial Sequence
  Description of Artificial Sequence: Synthetic oligonucleotide
gcguaccucauuccuggca

SEQ ID NO: 2073114 - RNA, 19 nt, Artificial Sequence
  Description of Artificial Sequence: Synthetic oligonucleotide
gccuacauccaccccagcu

SEQ ID NO: 2073115 - RNA, 19 nt, Artificial Sequence
  Description of Artificial Sequence: Synthetic oligonucleotide
cagguuggacauacgcacu

SEQ ID NO: 2073116 - RNA, 19 nt, Artificial Sequence
  Description of Artificial Sequence: Synthetic oligonucleotide
gggguugaguguuucuggu

SEQ ID NO: 2073117 - RNA, 19 nt, Artificial Sequence
  Description of Artificial Sequence: Synthetic oligonucleotide
ugccccggucuucguggcu

SEQ ID NO: 2073118 - RNA, 19 nt, Artificial Sequence
  Description of Artificial Sequence: Synthetic oligonucleotide
acggcugccugaagguggu

SEQ ID NO: 2073119 - RNA, 19 nt, Artificial Sequence
  Description of Artificial Sequence: Synthetic oligonucleotide
cugcaucaccuagggcccc

SEQ ID NO: 2073120 - RNA, 19 nt, Artificial Sequence
  Description of Artificial Sequence: Synthetic oligonucleotide
gguuggacauacgcacuga

SEQ ID NO: 2073121 - RNA, 19 nt, Artificial Sequence
  Description of Artificial Sequence: Synthetic oligonucleotide
gcugcggucugaggugggg

SEQ ID NO: 2073122 - RNA, 19 nt, Artificial Sequence
  Description of Artificial Sequence: Synthetic oligonucleotide
ggaaggucaccaguuaaau

SEQ ID NO: 2073123 - RNA, 19 nt, Artificial Sequence
  Description of Artificial Sequence: Synthetic oligonucleotide
cugucacggcugccugaag

SEQ ID NO: 2073124 - RNA, 19 nt, Artificial Sequence
  Description of Artificial Sequence: Synthetic oligonucleotide
ggcugcggcgaugaaucug

SEQ ID NO: 2073125 - RNA, 19 nt, Artificial Sequence
  Description of Artificial Sequence: Synthetic oligonucleotide
ccacgguguguacugucac

SEQ ID NO: 2073126 - RNA, 19 nt, Artificial Sequence
  Description of Artificial Sequence: Synthetic oligonucleotide
gguggcaucuggcguaccu

SEQ ID NO: 2073127 - RNA, 19 nt, Artificial Sequence
  Description of Artificial Sequence: Synthetic oligonucleotide
cugucuuccugcggacuca

SEQ ID NO: 2073128 - RNA, 19 nt, Artificial Sequence
  Description of Artificial Sequence: Synthetic oligonucleotide
cagcuaugaaccgaguauu

SEQ ID NO: 2073129 - RNA, 19 nt, Artificial Sequence
  Description of Artificial Sequence: Synthetic oligonucleotide
ccgagaaucccucaucccu

SEQ ID NO: 2073130 - RNA, 19 nt, Artificial Sequence
  Description of Artificial Sequence: Synthetic oligonucleotide
ggcguaccucauuccuggc

SEQ ID NO: 2073131 - RNA, 19 nt, Artificial Sequence
  Description of Artificial Sequence: Synthetic oligonucleotide
cccagcugacaaggggucg

SEQ ID NO: 2073132 - RNA, 19 nt, Artificial Sequence
  Description of Artificial Sequence: Synthetic oligonucleotide
ggguuucggccgagaaucc

SEQ ID NO: 2073133 - RNA, 19 nt, Artificial Sequence
  Description of Artificial Sequence: Synthetic oligonucleotide
gccuccuuucuggacugug

SEQ ID NO: 2073134 - RNA, 19 nt, Artificial Sequence
  Description of Artificial Sequence: Synthetic oligonucleotide
agcauuccccuggcucagu

SEQ ID NO: 2073135 - RNA, 19 nt, Artificial Sequence
  Description of Artificial Sequence: Synthetic oligonucleotide
caggguuucggccgagaau

SEQ ID NO: 2073136 - RNA, 19 nt, Artificial Sequence
  Description of Artificial Sequence: Synthetic oligonucleotide
cugugauggagggucgggu

SEQ ID NO: 2073137 - RNA, 19 nt, Artificial Sequence
  Description of Artificial Sequence: Synthetic oligonucleotide
cugcggacucauggugcug

SEQ ID NO: 2073138 - RNA, 19 nt, Artificial Sequence
  Description of Artificial Sequence: Synthetic oligonucleotide
ccaguuccgugcaguuaug

SEQ ID NO: 2073139 - RNA, 19 nt, Artificial Sequence
  Description of Artificial Sequence: Synthetic oligonucleotide
ggucugagguggggugucc

SEQ ID NO: 2073140 - RNA, 19 nt, Artificial Sequence
  Description of Artificial Sequence: Synthetic oligonucleotide
ugguggcaucuggcguacc

SEQ ID NO: 2073141 - RNA, 19 nt, Artificial Sequence
  Description of Artificial Sequence: Synthetic oligonucleotide
gccccggucuucguggcug

SEQ ID NO: 2073142 - RNA, 19 nt, Artificial Sequence
  Description of Artificial Sequence: Synthetic oligonucleotide
gucggguggugugagcggu

SEQ ID NO: 2073143 - RNA, 19 nt, Artificial Sequence
  Description of Artificial Sequence: Synthetic oligonucleotide
gcuccaugacugcagcuau

SEQ ID NO: 2073144 - RNA, 19 nt, Artificial Sequence
  Description of Artificial Sequence: Synthetic oligonucleotide
ggagggucgggugguguga

SEQ ID NO: 2073145 - RNA, 19 nt, Artificial Sequence
  Description of Artificial Sequence: Synthetic oligonucleotide
ccucaugugaaagggauuu

SEQ ID NO: 2073146 - RNA, 19 nt, Artificial Sequence
  Description of Artificial Sequence: Synthetic oligonucleotide
ggacauacgcacugacauu

SEQ ID NO: 2073147 - RNA, 19 nt, Artificial Sequence
  Description of Artificial Sequence: Synthetic oligonucleotide
gcuguacccaugaucacuu

SEQ ID NO: 2073148 - RNA, 19 nt, Artificial Sequence
  Description of Artificial Sequence: Synthetic oligonucleotide
ccgugcaguuauguuggug

SEQ ID NO: 2073149 - RNA, 19 nt, Artificial Sequence
  Description of Artificial Sequence: Synthetic oligonucleotide
ugguggcgguaagcauaca

SEQ ID NO: 2073150 - RNA, 19 nt, Artificial Sequence
  Description of Artificial Sequence: Synthetic oligonucleotide
caguuccgugcaguuaugu

SEQ ID NO: 2073151 - RNA, 19 nt, Artificial Sequence
  Description of Artificial Sequence: Synthetic oligonucleotide
gccccucugcuuggggagg

SEQ ID NO: 2073152 - RNA, 19 nt, Artificial Sequence
  Description of Artificial Sequence: Synthetic oligonucleotide
guuaagggguugaguguuu

SEQ ID NO: 2073153 - RNA, 19 nt, Artificial Sequence
  Description of Artificial Sequence: Synthetic oligonucleotide
gcaagcgugucuguccagu

SEQ ID NO: 2073154 - RNA, 19 nt, Artificial Sequence
  Description of Artificial Sequence: Synthetic oligonucleotide
gcgagaggagacauaugcu

SEQ ID NO: 2073155 - RNA, 19 nt, Artificial Sequence
  Description of Artificial Sequence: Synthetic oligonucleotide
ggacugugggcaugucgcu

SEQ ID NO: 2073156 - RNA, 19 nt, Artificial Sequence
  Description of Artificial Sequence: Synthetic oligonucleotide
caccuagggccccucugcu

SEQ ID NO: 2073157 - RNA, 19 nt, Artificial Sequence
  Description of Artificial Sequence: Synthetic oligonucleotide
ccccaguagcgucgccucc

SEQ ID NO: 2073158 - RNA, 19 nt, Artificial Sequence
  Description of Artificial Sequence: Synthetic oligonucleotide
ggcauccacgguguguacu

SEQ ID NO: 2073159 - RNA, 19 nt, Artificial Sequence
  Description of Artificial Sequence: Synthetic oligonucleotide
cauuccccuggcucaguuu

SEQ ID NO: 2073160 - RNA, 19 nt, Artificial Sequence
  Description of Artificial Sequence: Synthetic oligonucleotide
ccaggguuucggccgagaa

SEQ ID NO: 2073161 - RNA, 19 nt, Artificial Sequence
  Description of Artificial Sequence: Synthetic oligonucleotide
ggauuuuaugcaggcucau

SEQ ID NO: 2073162 - RNA, 19 nt, Artificial Sequence
  Description of Artificial Sequence: Synthetic oligonucleotide
caggcaccucuaggaagca

SEQ ID NO: 2073163 - RNA, 19 nt, Artificial Sequence
  Description of Artificial Sequence: Synthetic oligonucleotide
caucaccuagggccccucu

SEQ ID NO: 2073164 - RNA, 19 nt, Artificial Sequence
  Description of Artificial Sequence: Synthetic oligonucleotide
cucaugugaaagggauuuu

SEQ ID NO: 2073165 - RNA, 19 nt, Artificial Sequence
  Description of Artificial Sequence: Synthetic oligonucleotide
gcgucgccuccuuucugga

SEQ ID NO: 2073166 - RNA, 19 nt, Artificial Sequence
  Description of Artificial Sequence: Synthetic oligonucleotide
cugcagcuaugaaccgagu

SEQ ID NO: 2073167 - RNA, 19 nt, Artificial Sequence
  Description of Artificial Sequence: Synthetic oligonucleotide
cgguaagcauacacggcaa

SEQ ID NO: 2073168 - RNA, 19 nt, Artificial Sequence
  Description of Artificial Sequence: Synthetic oligonucleotide
gcucaaggugaguccaguu

SEQ ID NO: 2073169 - RNA, 19 nt, Artificial Sequence
  Description of Artificial Sequence: Synthetic oligonucleotide
caguagggcugcggucuga

SEQ ID NO: 2073170 - RNA, 19 nt, Artificial Sequence
  Description of Artificial Sequence: Synthetic oligonucleotide
cgucgccuccuuucuggac

SEQ ID NO: 2073171 - RNA, 19 nt, Artificial Sequence
  Description of Artificial Sequence: Synthetic oligonucleotide
cauccacgguguguacugu

SEQ ID NO: 2073172 - RNA, 19 nt, Artificial Sequence
  Description of Artificial Sequence: Synthetic oligonucleotide
ccugcggacucauggugcu

SEQ ID NO: 2073173 - RNA, 19 nt, Artificial Sequence
  Description of Artificial Sequence: Synthetic oligonucleotide
guccagugguugguggcau

SEQ ID NO: 2073174 - RNA, 19 nt, Artificial Sequence
  Description of Artificial Sequence: Synthetic oligonucleotide
cgaugaaucugguggcggu

SEQ ID NO: 2073175 - RNA, 19 nt, Artificial Sequence
  Description of Artificial Sequence: Synthetic oligonucleotide
cggccgagaaucccucauc

SEQ ID NO: 2073176 - RNA, 19 nt, Artificial Sequence
  Description of Artificial Sequence: Synthetic oligonucleotide
cugcggucugagguggggu

SEQ ID NO: 2073177 - RNA, 19 nt, Artificial Sequence
  Description of Artificial Sequence: Synthetic oligonucleotide
cucuuucaucucugucauu

SEQ ID NO: 2073178 - RNA, 19 nt, Artificial Sequence
  Description of Artificial Sequence: Synthetic oligonucleotide
ggccccaguagcgucgccu

SEQ ID NO: 2073179 - RNA, 19 nt, Artificial Sequence
  Description of Artificial Sequence: Synthetic oligonucleotide
ccagugguugguggcaucu

SEQ ID NO: 2073180 - RNA, 19 nt, Artificial Sequence
  Description of Artificial Sequence: Synthetic oligonucleotide
cggacucauggugcuguac

SEQ ID NO: 2073181 - RNA, 19 nt, Artificial Sequence
  Description of Artificial Sequence: Synthetic oligonucleotide
ccggucuucguggcuguca

SEQ ID NO: 2073182 - RNA, 19 nt, Artificial Sequence
  Description of Artificial Sequence: Synthetic oligonucleotide
cgacugcuccauuccauua

SEQ ID NO: 2073183 - RNA, 19 nt, Artificial Sequence
  Description of Artificial Sequence: Synthetic oligonucleotide
gcauuccccuggcucaguu

SEQ ID NO: 2073184 - RNA, 19 nt, Artificial Sequence
  Description of Artificial Sequence: Synthetic oligonucleotide
cgcuccaugacugcagcua

SEQ ID NO: 2073185 - RNA, 19 nt, Artificial Sequence
  Description of Artificial Sequence: Synthetic oligonucleotide
cugcggcgaugaaucuggu

SEQ ID NO: 2073186 - RNA, 19 nt, Artificial Sequence
  Description of Artificial Sequence: Synthetic oligonucleotide
ccgacugcuccauuccauu

SEQ ID NO: 2073187 - RNA, 19 nt, Artificial Sequence
  Description of Artificial Sequence: Synthetic oligonucleotide
gcggacucauggugcugua

SEQ ID NO: 2073188 - RNA, 19 nt, Artificial Sequence
  Description of Artificial Sequence: Synthetic oligonucleotide
gccgacugcuccauuccau

SEQ ID NO: 2073189 - RNA, 19 nt, Artificial Sequence
  Description of Artificial Sequence: Synthetic oligonucleotide
ccauuauggcaggucaguu

SEQ ID NO: 2073190 - RNA, 19 nt, Artificial Sequence
  Description of Artificial Sequence: Synthetic oligonucleotide
gugggguguccagguccaa

SEQ ID NO: 2073191 - RNA, 19 nt, Artificial Sequence
  Description of Artificial Sequence: Synthetic oligonucleotide
gcggucugagguggggugu

SEQ ID NO: 2073192 - RNA, 19 nt, Artificial Sequence
  Description of Artificial Sequence: Synthetic oligonucleotide
gcuuugccgacugcuccau

SEQ ID NO: 2073193 - RNA, 19 nt, Artificial Sequence
  Description of Artificial Sequence: Synthetic oligonucleotide
cccaguagcgucgccuccu

SEQ ID NO: 2073194 - RNA, 19 nt, Artificial Sequence
  Description of Artificial Sequence: Synthetic oligonucleotide
cggucugaggugggguguc

SEQ ID NO: 2073195 - RNA, 19 nt, Artificial Sequence
  Description of Artificial Sequence: Synthetic oligonucleotide
caguagcgucgccuccuuu

SEQ ID NO: 2073196 - RNA, 19 nt, Artificial Sequence
  Description of Artificial Sequence: Synthetic oligonucleotide
cagcugacaaggggucguu

SEQ ID NO: 2073197 - RNA, 19 nt, Artificial Sequence
  Description of Artificial Sequence: Synthetic oligonucleotide
ccauuccauuauggcaggu

SEQ ID NO: 2073198 - RNA, 19 nt, Artificial Sequence
  Description of Artificial Sequence: Synthetic oligonucleotide
gcgugucuguccagugguu

SEQ ID NO: 2073199 - RNA, 19 nt, Artificial Sequence
  Description of Artificial Sequence: Synthetic oligonucleotide
ccaguagcgucgccuccuu

SEQ ID NO: 2073200 - RNA, 19 nt, Artificial Sequence
  Description of Artificial Sequence: Synthetic oligonucleotide
cgccuccuuucuggacugu

SEQ ID NO: 2073201 - RNA, 19 nt, Artificial Sequence
  Description of Artificial Sequence: Synthetic oligonucleotide
agaagaaugauucaagacc

SEQ ID NO: 2073202 - RNA, 19 nt, Artificial Sequence
  Description of Artificial Sequence: Synthetic oligonucleotide
aaacuucacaccuagggac

SEQ ID NO: 2073203 - RNA, 19 nt, Artificial Sequence
  Description of Artificial Sequence: Synthetic oligonucleotide
uauuucaggaaacagagac

SEQ ID NO: 2073204 - RNA, 19 nt, Artificial Sequence
  Description of Artificial Sequence: Synthetic oligonucleotide
acuuguaauaaauauccac

SEQ ID NO: 2073205 - RNA, 19 nt, Artificial Sequence
  Description of Artificial Sequence: Synthetic oligonucleotide
cauauuucaggaaacagag

SEQ ID NO: 2073206 - RNA, 19 nt, Artificial Sequence
  Description of Artificial Sequence: Synthetic oligonucleotide
ugauucaagaccuucacug

SEQ ID NO: 2073207 - RNA, 19 nt, Artificial Sequence
  Description of Artificial Sequence: Synthetic oligonucleotide
aaugucaucugaaggaccc

SEQ ID NO: 2073208 - RNA, 19 nt, Artificial Sequence
  Description of Artificial Sequence: Synthetic oligonucleotide
agcagauguacccaaacac

SEQ ID NO: 2073209 - RNA, 19 nt, Artificial Sequence
  Description of Artificial Sequence: Synthetic oligonucleotide
uacaauucauauuucagga

SEQ ID NO: 2073210 - RNA, 19 nt, Artificial Sequence
  Description of Artificial Sequence: Synthetic oligonucleotide
uuggugaguauccaguggg

SEQ ID NO: 2073211 - RNA, 19 nt, Artificial Sequence
  Description of Artificial Sequence: Synthetic oligonucleotide
aaagaucccaggcagugag

SEQ ID NO: 2073212 - RNA, 19 nt, Artificial Sequence
  Description of Artificial Sequence: Synthetic oligonucleotide
agcaacaacacccaucauc

SEQ ID NO: 2073213 - RNA, 19 nt, Artificial Sequence
  Description of Artificial Sequence: Synthetic oligonucleotide
agucugcaaaagcagaggc

SEQ ID NO: 2073214 - RNA, 19 nt, Artificial Sequence
  Description of Artificial Sequence: Synthetic oligonucleotide
uggacauugucauucggcg

SEQ ID NO: 2073215 - RNA, 19 nt, Artificial Sequence
  Description of Artificial Sequence: Synthetic oligonucleotide
aucaucaccaaucuggaca

SEQ ID NO: 2073216 - RNA, 19 nt, Artificial Sequence
  Description of Artificial Sequence: Synthetic oligonucleotide
uaaaacacgcaugagaggu

SEQ ID NO: 2073217 - RNA, 19 nt, Artificial Sequence
  Description of Artificial Sequence: Synthetic oligonucleotide
auucaagaccuucacuggc

SEQ ID NO: 2073218 - RNA, 19 nt, Artificial Sequence
  Description of Artificial Sequence: Synthetic oligonucleotide
uuucaggaaacagagacac

SEQ ID NO: 2073219 - RNA, 19 nt, Artificial Sequence
  Description of Artificial Sequence: Synthetic oligonucleotide
aaagcagucugcaaaagca

SEQ ID NO: 2073220 - RNA, 19 nt, Artificial Sequence
  Description of Artificial Sequence: Synthetic oligonucleotide
ugaacucuagaacuggccu

SEQ ID NO: 2073221 - RNA, 19 nt, Artificial Sequence
  Description of Artificial Sequence: Synthetic oligonucleotide
gacauugucauucggcggc

SEQ ID NO: 2073222 - RNA, 19 nt, Artificial Sequence
  Description of Artificial Sequence: Synthetic oligonucleotide
uccaguagcgucucuaugc

SEQ ID NO: 2073223 - RNA, 19 nt, Artificial Sequence
  Description of Artificial Sequence: Synthetic oligonucleotide
acagguaaaacacgcauga

SEQ ID NO: 2073224 - RNA, 19 nt, Artificial Sequence
  Description of Artificial Sequence: Synthetic oligonucleotide
auggugugaacucuagaac

SEQ ID NO: 2073225 - RNA, 19 nt, Artificial Sequence
  Description of Artificial Sequence: Synthetic oligonucleotide
gagaagaaugauucaagac

SEQ ID NO: 2073226 - RNA, 19 nt, Artificial Sequence
  Description of Artificial Sequence: Synthetic oligonucleotide
uaauaaauauccacuuaaa

SEQ ID NO: 2073227 - RNA, 19 nt, Artificial Sequence
  Description of Artificial Sequence: Synthetic oligonucleotide
agguaaagaucccaggcag

SEQ ID NO: 2073228 - RNA, 19 nt, Artificial Sequence
  Description of Artificial Sequence: Synthetic oligonucleotide
agcgucucuaugcucaucg

SEQ ID NO: 2073229 - RNA, 19 nt, Artificial Sequence
  Description of Artificial Sequence: Synthetic oligonucleotide
aucucuacagucugggguc

SEQ ID NO: 2073230 - RNA, 19 nt, Artificial Sequence
  Description of Artificial Sequence: Synthetic oligonucleotide
cuggccucaagacagagag

SEQ ID NO: 2073231 - RNA, 19 nt, Artificial Sequence
  Description of Artificial Sequence: Synthetic oligonucleotide
gguaaaacacgcaugagag

SEQ ID NO: 2073232 - RNA, 19 nt, Artificial Sequence
  Description of Artificial Sequence: Synthetic oligonucleotide
gcaaacuucacaccuaggg

SEQ ID NO: 2073233 - RNA, 19 nt, Artificial Sequence
  Description of Artificial Sequence: Synthetic oligonucleotide
aaaucucuacagucugggg

SEQ ID NO: 2073234 - RNA, 19 nt, Artificial Sequence
  Description of Artificial Sequence: Synthetic oligonucleotide
uucauauuucaggaaacag

SEQ ID NO: 2073235 - RNA, 19 nt, Artificial Sequence
  Description of Artificial Sequence: Synthetic oligonucleotide
gauggugugaacucuagaa

SEQ ID NO: 2073236 - RNA, 19 nt, Artificial Sequence
  Description of Artificial Sequence: Synthetic oligonucleotide
agguaaaacacgcaugaga

SEQ ID NO: 2073237 - RNA, 19 nt, Artificial Sequence
  Description of Artificial Sequence: Synthetic oligonucleotide
gaugagguaucugugcagg

SEQ ID NO: 2073238 - RNA, 19 nt, Artificial Sequence
  Description of Artificial Sequence: Synthetic oligonucleotide
gauguacccaaacacauaa

SEQ ID NO: 2073239 - RNA, 19 nt, Artificial Sequence
  Description of Artificial Sequence: Synthetic oligonucleotide
gagauuucaagggagaaga

SEQ ID NO: 2073240 - RNA, 19 nt, Artificial Sequence
  Description of Artificial Sequence: Synthetic oligonucleotide
uaccugaugagccuugucu

SEQ ID NO: 2073241 - RNA, 19 nt, Artificial Sequence
  Description of Artificial Sequence: Synthetic oligonucleotide
ugaugugguccuaacagcu

SEQ ID NO: 2073242 - RNA, 19 nt, Artificial Sequence
  Description of Artificial Sequence: Synthetic oligonucleotide
acaaggugaggacugaugu

SEQ ID NO: 2073243 - RNA, 19 nt, Artificial Sequence
  Description of Artificial Sequence: Synthetic oligonucleotide
cuagagagaggcuauggug

SEQ ID NO: 2073244 - RNA, 19 nt, Artificial Sequence
  Description of Artificial Sequence: Synthetic oligonucleotide
cuccccgagguaaagaucc

SEQ ID NO: 2073245 - RNA, 19 nt, Artificial Sequence
  Description of Artificial Sequence: Synthetic oligonucleotide
aagggauaggaagggaagg

SEQ ID NO: 2073246 - RNA, 19 nt, Artificial Sequence
  Description of Artificial Sequence: Synthetic oligonucleotide
agaaugauucaagaccuuc

SEQ ID NO: 2073247 - RNA, 19 nt, Artificial Sequence
  Description of Artificial Sequence: Synthetic oligonucleotide
cucaaugucaucugaagga

SEQ ID NO: 2073248 - RNA, 19 nt, Artificial Sequence
  Description of Artificial Sequence: Synthetic oligonucleotide
aacagcaacaacacccauc

SEQ ID NO: 2073249 - RNA, 19 nt, Artificial Sequence
  Description of Artificial Sequence: Synthetic oligonucleotide
ugcccauucgggcacacag

SEQ ID NO: 2073250 - RNA, 19 nt, Artificial Sequence
  Description of Artificial Sequence: Synthetic oligonucleotide
caucccuaagcacaggacc

SEQ ID NO: 2073251 - RNA, 19 nt, Artificial Sequence
  Description of Artificial Sequence: Synthetic oligonucleotide
agggacacuugcuuccugc

SEQ ID NO: 2073252 - RNA, 19 nt, Artificial Sequence
  Description of Artificial Sequence: Synthetic oligonucleotide
cucaaaacagcacagguaa

SEQ ID NO: 2073253 - RNA, 19 nt, Artificial Sequence
  Description of Artificial Sequence: Synthetic oligonucleotide
ucacuguaaacaagggcca

SEQ ID NO: 2073254 - RNA, 19 nt, Artificial Sequence
  Description of Artificial Sequence: Synthetic oligonucleotide
guaaaacacgcaugagagg

SEQ ID NO: 2073255 - RNA, 19 nt, Artificial Sequence
  Description of Artificial Sequence: Synthetic oligonucleotide
cuggacauugucauucggc

SEQ ID NO: 2073256 - RNA, 19 nt, Artificial Sequence
  Description of Artificial Sequence: Synthetic oligonucleotide
uaacagcucucaaagggga

SEQ ID NO: 2073257 - RNA, 19 nt, Artificial Sequence
  Description of Artificial Sequence: Synthetic oligonucleotide
uucaagaccuucacuggca

SEQ ID NO: 2073258 - RNA, 19 nt, Artificial Sequence
  Description of Artificial Sequence: Synthetic oligonucleotide
cagagagauuucaagggag

SEQ ID NO: 2073259 - RNA, 19 nt, Artificial Sequence
  Description of Artificial Sequence: Synthetic oligonucleotide
ucuggggucgcuacaauuc

SEQ ID NO: 2073260 - RNA, 19 nt, Artificial Sequence
  Description of Artificial Sequence: Synthetic oligonucleotide
gcuauggugacccaacucc

SEQ ID NO: 2073261 - RNA, 19 nt, Artificial Sequence
  Description of Artificial Sequence: Synthetic oligonucleotide
acuguaaacaagggccacc

SEQ ID NO: 2073262 - RNA, 19 nt, Artificial Sequence
  Description of Artificial Sequence: Synthetic oligonucleotide
agacacagugaccgagucc

SEQ ID NO: 2073263 - RNA, 19 nt, Artificial Sequence
  Description of Artificial Sequence: Synthetic oligonucleotide
acuagaucuggaggaaccc

SEQ ID NO: 2073264 - RNA, 19 nt, Artificial Sequence
  Description of Artificial Sequence: Synthetic oligonucleotide
uccucacuguaaacaaggg

SEQ ID NO: 2073265 - RNA, 19 nt, Artificial Sequence
  Description of Artificial Sequence: Synthetic oligonucleotide
acagagagauuucaaggga

SEQ ID NO: 2073266 - RNA, 19 nt, Artificial Sequence
  Description of Artificial Sequence: Synthetic oligonucleotide
aggccugcaagccaacacg

SEQ ID NO: 2073267 - RNA, 19 nt, Artificial Sequence
  Description of Artificial Sequence: Synthetic oligonucleotide
auguguguguguguguccc

SEQ ID NO: 2073268 - RNA, 19 nt, Artificial Sequence
  Description of Artificial Sequence: Synthetic oligonucleotide
ucuggacauugucauucgg

SEQ ID NO: 2073269 - RNA, 19 nt, Artificial Sequence
  Description of Artificial Sequence: Synthetic oligonucleotide
gaugagccuugucuggccg

SEQ ID NO: 2073270 - RNA, 19 nt, Artificial Sequence
  Description of Artificial Sequence: Synthetic oligonucleotide
cacuagaucuggaggaacc

SEQ ID NO: 2073271 - RNA, 19 nt, Artificial Sequence
  Description of Artificial Sequence: Synthetic oligonucleotide
gaagggauaggaagggaag

SEQ ID NO: 2073272 - RNA, 19 nt, Artificial Sequence
  Description of Artificial Sequence: Synthetic oligonucleotide
ucaagggagaagaaugauu

SEQ ID NO: 2073273 - RNA, 19 nt, Artificial Sequence
  Description of Artificial Sequence: Synthetic oligonucleotide
ugaguauccaguggggagc

SEQ ID NO: 2073274 - RNA, 19 nt, Artificial Sequence
  Description of Artificial Sequence: Synthetic oligonucleotide
guccucacuguaaacaagg

SEQ ID NO: 2073275 - RNA, 19 nt, Artificial Sequence
  Description of Artificial Sequence: Synthetic oligonucleotide
agggaaccacucuuccucc

SEQ ID NO: 2073276 - RNA, 19 nt, Artificial Sequence
  Description of Artificial Sequence: Synthetic oligonucleotide
aacugagugucugacacaa

SEQ ID NO: 2073277 - RNA, 19 nt, Artificial Sequence
  Description of Artificial Sequence: Synthetic oligonucleotide
agccacucaaaacagcaca

SEQ ID NO: 2073278 - RNA, 19 nt, Artificial Sequence
  Description of Artificial Sequence: Synthetic oligonucleotide
uguaacugagugucugaca

SEQ ID NO: 2073279 - RNA, 19 nt, Artificial Sequence
  Description of Artificial Sequence: Synthetic oligonucleotide
uagaucuggaggaaccccu

SEQ ID NO: 2073280 - RNA, 19 nt, Artificial Sequence
  Description of Artificial Sequence: Synthetic oligonucleotide
uuuggggauugagaguggg

SEQ ID NO: 2073281 - RNA, 19 nt, Artificial Sequence
  Description of Artificial Sequence: Synthetic oligonucleotide
ugcaaaagcagaggcagga

SEQ ID NO: 2073282 - RNA, 19 nt, Artificial Sequence
  Description of Artificial Sequence: Synthetic oligonucleotide
cagcacagguaaaacacgc

SEQ ID NO: 2073283 - RNA, 19 nt, Artificial Sequence
  Description of Artificial Sequence: Synthetic oligonucleotide
uccuucuagccccucagac

SEQ ID NO: 2073284 - RNA, 19 nt, Artificial Sequence
  Description of Artificial Sequence: Synthetic oligonucleotide
gugaguauccaguggggag

SEQ ID NO: 2073285 - RNA, 19 nt, Artificial Sequence
  Description of Artificial Sequence: Synthetic oligonucleotide
uauggugacccaacucccc

SEQ ID NO: 2073286 - RNA, 19 nt, Artificial Sequence
  Description of Artificial Sequence: Synthetic oligonucleotide
ucucaaaggggagacgccc

SEQ ID NO: 2073287 - RNA, 19 nt, Artificial Sequence
  Description of Artificial Sequence: Synthetic oligonucleotide
uucccaaguaccugaugag

SEQ ID NO: 2073288 - RNA, 19 nt, Artificial Sequence
  Description of Artificial Sequence: Synthetic oligonucleotide
gucgcuacaauucauauuu

SEQ ID NO: 2073289 - RNA, 19 nt, Artificial Sequence
  Description of Artificial Sequence: Synthetic oligonucleotide
cagugagccacucaaaaca

SEQ ID NO: 2073290 - RNA, 19 nt, Artificial Sequence
  Description of Artificial Sequence: Synthetic oligonucleotide
cacaccuagggacacuugc

SEQ ID NO: 2073291 - RNA, 19 nt, Artificial Sequence
  Description of Artificial Sequence: Synthetic oligonucleotide
acagugaccgaguccucac

SEQ ID NO: 2073292 - RNA, 19 nt, Artificial Sequence
  Description of Artificial Sequence: Synthetic oligonucleotide
accugaugagccuugucug

SEQ ID NO: 2073293 - RNA, 19 nt, Artificial Sequence
  Description of Artificial Sequence: Synthetic oligonucleotide
ugugcacacguguaacuga

SEQ ID NO: 2073294 - RNA, 19 nt, Artificial Sequence
  Description of Artificial Sequence: Synthetic oligonucleotide
uguuccuagagagaggcua

SEQ ID NO: 2073295 - RNA, 19 nt, Artificial Sequence
  Description of Artificial Sequence: Synthetic oligonucleotide
cacacugaaaggccauugg

SEQ ID NO: 2073296 - RNA, 19 nt, Artificial Sequence
  Description of Artificial Sequence: Synthetic oligonucleotide
ugagguaucugugcaggcc

SEQ ID NO: 2073297 - RNA, 19 nt, Artificial Sequence
  Description of Artificial Sequence: Synthetic oligonucleotide
ucucuaugcucaucgcgcc

SEQ ID NO: 2073298 - RNA, 19 nt, Artificial Sequence
  Description of Artificial Sequence: Synthetic oligonucleotide
guaaagaucccaggcagug

SEQ ID NO: 2073299 - RNA, 19 nt, Artificial Sequence
  Description of Artificial Sequence: Synthetic oligonucleotide
uggggauugagagugggac

SEQ ID NO: 2073300 - RNA, 19 nt, Artificial Sequence
  Description of Artificial Sequence: Synthetic oligonucleotide
aagcagucugcaaaagcag

SEQ ID NO: 2073301 - RNA, 19 nt, Artificial Sequence
  Description of Artificial Sequence: Synthetic oligonucleotide
uccuagagagaggcuaugg

SEQ ID NO: 2073302 - RNA, 19 nt, Artificial Sequence
  Description of Artificial Sequence: Synthetic oligonucleotide
gaaugauucaagaccuuca

SEQ ID NO: 2073303 - RNA, 19 nt, Artificial Sequence
  Description of Artificial Sequence: Synthetic oligonucleotide
aagccaacacgauggugug

SEQ ID NO: 2073304 - RNA, 19 nt, Artificial Sequence
  Description of Artificial Sequence: Synthetic oligonucleotide
auucauauuucaggaaaca

SEQ ID NO: 2073305 - RNA, 19 nt, Artificial Sequence
  Description of Artificial Sequence: Synthetic oligonucleotide
acacgcaugagagguaagg

SEQ ID NO: 2073306 - RNA, 19 nt, Artificial Sequence
  Description of Artificial Sequence: Synthetic oligonucleotide
agagguaaggugugugugu

SEQ ID NO: 2073307 - RNA, 19 nt, Artificial Sequence
  Description of Artificial Sequence: Synthetic oligonucleotide
cuucacuggcaucaaugcc

SEQ ID NO: 2073308 - RNA, 19 nt, Artificial Sequence
  Description of Artificial Sequence: Synthetic oligonucleotide
gaucuggaggaaccccugg

SEQ ID NO: 2073309 - RNA, 19 nt, Artificial Sequence
  Description of Artificial Sequence: Synthetic oligonucleotide
acccaacuccccuccaggc

SEQ ID NO: 2073310 - RNA, 19 nt, Artificial Sequence
  Description of Artificial Sequence: Synthetic oligonucleotide
aucuggacauugucauucg

SEQ ID NO: 2073311 - RNA, 19 nt, Artificial Sequence
  Description of Artificial Sequence: Synthetic oligonucleotide
guaaacaagggccaccucu

SEQ ID NO: 2073312 - RNA, 19 nt, Artificial Sequence
  Description of Artificial Sequence: Synthetic oligonucleotide
aucaccaaucuggacauug

SEQ ID NO: 2073313 - RNA, 19 nt, Artificial Sequence
  Description of Artificial Sequence: Synthetic oligonucleotide
gucucuaugcucaucgcgc

SEQ ID NO: 2073314 - RNA, 19 nt, Artificial Sequence
  Description of Artificial Sequence: Synthetic oligonucleotide
augugguccuaacagcucu

SEQ ID NO: 2073315 - RNA, 19 nt, Artificial Sequence
  Description of Artificial Sequence: Synthetic oligonucleotide
uaugugugugugugugucc

SEQ ID NO: 2073316 - RNA, 19 nt, Artificial Sequence
  Description of Artificial Sequence: Synthetic oligonucleotide
gacccaacuccccuccagg

SEQ ID NO: 2073317 - RNA, 19 nt, Artificial Sequence
  Description of Artificial Sequence: Synthetic oligonucleotide
auucggcggcacuagaucu

SEQ ID NO: 2073318 - RNA, 19 nt, Artificial Sequence
  Description of Artificial Sequence: Synthetic oligonucleotide
agccccucagacuugccuc

SEQ ID NO: 2073319 - RNA, 19 nt, Artificial Sequence
  Description of Artificial Sequence: Synthetic oligonucleotide
aucccaggcagugagccac

SEQ ID NO: 2073320 - RNA, 19 nt, Artificial Sequence
  Description of Artificial Sequence: Synthetic oligonucleotide
augagccuugucuggccgc

SEQ ID NO: 2073321 - RNA, 19 nt, Artificial Sequence
  Description of Artificial Sequence: Synthetic oligonucleotide
caaacuucacaccuaggga

SEQ ID NO: 2073322 - RNA, 19 nt, Artificial Sequence
  Description of Artificial Sequence: Synthetic oligonucleotide
aaacacgcaugagagguaa

SEQ ID NO: 2073323 - RNA, 19 nt, Artificial Sequence
  Description of Artificial Sequence: Synthetic oligonucleotide
agcaucccuaagcacagga

SEQ ID NO: 2073324 - RNA, 19 nt, Artificial Sequence
  Description of Artificial Sequence: Synthetic oligonucleotide
gacacagugaccgaguccu

SEQ ID NO: 2073325 - RNA, 19 nt, Artificial Sequence
  Description of Artificial Sequence: Synthetic oligonucleotide
ugugugugugugucccagg

SEQ ID NO: 2073326 - RNA, 19 nt, Artificial Sequence
  Description of Artificial Sequence: Synthetic oligonucleotide
caagccaacacgauggugu

SEQ ID NO: 2073327 - RNA, 19 nt, Artificial Sequence
  Description of Artificial Sequence: Synthetic oligonucleotide
uguguguguaugugugugu

SEQ ID NO: 2073328 - RNA, 19 nt, Artificial Sequence
  Description of Artificial Sequence: Synthetic oligonucleotide
ucccaaguaccugaugagc

SEQ ID NO: 2073329 - RNA, 19 nt, Artificial Sequence
  Description of Artificial Sequence: Synthetic oligonucleotide
aacuucacaccuagggaca

SEQ ID NO: 2073330 - RNA, 19 nt, Artificial Sequence
  Description of Artificial Sequence: Synthetic oligonucleotide
gauaggaagggaagggcca

SEQ ID NO: 2073331 - RNA, 19 nt, Artificial Sequence
  Description of Artificial Sequence: Synthetic oligonucleotide
ggagacgcccaagagaggg

SEQ ID NO: 2073332 - RNA, 19 nt, Artificial Sequence
  Description of Artificial Sequence: Synthetic oligonucleotide
guguguaugugugugugug

SEQ ID NO: 2073333 - RNA, 19 nt, Artificial Sequence
  Description of Artificial Sequence: Synthetic oligonucleotide
ugacccaacuccccuccag

SEQ ID NO: 2073334 - RNA, 19 nt, Artificial Sequence
  Description of Artificial Sequence: Synthetic oligonucleotide
cagcuguuccuagagagag

SEQ ID NO: 2073335 - RNA, 19 nt, Artificial Sequence
  Description of Artificial Sequence: Synthetic oligonucleotide
gaagccaaagcagucugca

SEQ ID NO: 2073336 - RNA, 19 nt, Artificial Sequence
  Description of Artificial Sequence: Synthetic oligonucleotide
agcacaggacccucucuuc

SEQ ID NO: 2073337 - RNA, 19 nt, Artificial Sequence
  Description of Artificial Sequence: Synthetic oligonucleotide
uguaugugugugugugugu

SEQ ID NO: 2073338 - RNA, 19 nt, Artificial Sequence
  Description of Artificial Sequence: Synthetic oligonucleotide
aagaucccaggcagugagc

SEQ ID NO: 2073339 - RNA, 19 nt, Artificial Sequence
  Description of Artificial Sequence: Synthetic oligonucleotide
agaagccaaagcagucugc

SEQ ID NO: 2073340 - RNA, 19 nt, Artificial Sequence
  Description of Artificial Sequence: Synthetic oligonucleotide
uguguaugugugugugugu

SEQ ID NO: 2073341 - RNA, 19 nt, Artificial Sequence
  Description of Artificial Sequence: Synthetic oligonucleotide
ugaugagccuugucuggcc

SEQ ID NO: 2073342 - RNA, 19 nt, Artificial Sequence
  Description of Artificial Sequence: Synthetic oligonucleotide
ucaagaccuucacuggcau

SEQ ID NO: 2073343 - RNA, 19 nt, Artificial Sequence
  Description of Artificial Sequence: Synthetic oligonucleotide
cuagaucuggaggaacccc

SEQ ID NO: 2073344 - RNA, 19 nt, Artificial Sequence
  Description of Artificial Sequence: Synthetic oligonucleotide
aggggagacgcccaagaga

SEQ ID NO: 2073345 - RNA, 19 nt, Artificial Sequence
  Description of Artificial Sequence: Synthetic oligonucleotide
gcaacaacacccaucauca

SEQ ID NO: 2073346 - RNA, 19 nt, Artificial Sequence
  Description of Artificial Sequence: Synthetic oligonucleotide
ucauucggcggcacuagau

SEQ ID NO: 2073347 - RNA, 19 nt, Artificial Sequence
  Description of Artificial Sequence: Synthetic oligonucleotide
ucccacacagcagauguac

SEQ ID NO: 2073348 - RNA, 19 nt, Artificial Sequence
  Description of Artificial Sequence: Synthetic oligonucleotide
ggggagacgcccaagagag

SEQ ID NO: 2073349 - RNA, 19 nt, Artificial Sequence
  Description of Artificial Sequence: Synthetic oligonucleotide
ucuaugcucaucgcgccga

SEQ ID NO: 2073350 - RNA, 19 nt, Artificial Sequence
  Description of Artificial Sequence: Synthetic oligonucleotide
uguguguaugugugugugu

SEQ ID NO: 2073351 - RNA, 19 nt, Artificial Sequence
  Description of Artificial Sequence: Synthetic oligonucleotide
gugugugugugucccaggc

SEQ ID NO: 2073352 - RNA, 19 nt, Artificial Sequence
  Description of Artificial Sequence: Synthetic oligonucleotide
agugucugacacaaggcca

SEQ ID NO: 2073353 - RNA, 19 nt, Artificial Sequence
  Description of Artificial Sequence: Synthetic oligonucleotide
ugaggacugaugugguccu

SEQ ID NO: 2073354 - RNA, 19 nt, Artificial Sequence
  Description of Artificial Sequence: Synthetic oligonucleotide
guguaugugugugugugug

SEQ ID NO: 2073355 - RNA, 19 nt, Artificial Sequence
  Description of Artificial Sequence: Synthetic oligonucleotide
ugacacaaggccacuugua

SEQ ID NO: 2073356 - RNA, 19 nt, Artificial Sequence
  Description of Artificial Sequence: Synthetic oligonucleotide
agggagaagaaugauucaa

SEQ ID NO: 2073357 - RNA, 19 nt, Artificial Sequence
  Description of Artificial Sequence: Synthetic oligonucleotide
ggacauugucauucggcgg

SEQ ID NO: 2073358 - RNA, 19 nt, Artificial Sequence
  Description of Artificial Sequence: Synthetic oligonucleotide
ucugaaggacccugagccu

SEQ ID NO: 2073359 - RNA, 19 nt, Artificial Sequence
  Description of Artificial Sequence: Synthetic oligonucleotide
caaggugaggacugaugug

SEQ ID NO: 2073360 - RNA, 19 nt, Artificial Sequence
  Description of Artificial Sequence: Synthetic oligonucleotide
uaacugagugucugacaca

SEQ ID NO: 2073361 - RNA, 19 nt, Artificial Sequence
  Description of Artificial Sequence: Synthetic oligonucleotide
aaacagcaacaacacccau

SEQ ID NO: 2073362 - RNA, 19 nt, Artificial Sequence
  Description of Artificial Sequence: Synthetic oligonucleotide
ucuggccgccuccaguagc

SEQ ID NO: 2073363 - RNA, 19 nt, Artificial Sequence
  Description of Artificial Sequence: Synthetic oligonucleotide
gugaacucuagaacuggcc

SEQ ID NO: 2073364 - RNA, 19 nt, Artificial Sequence
  Description of Artificial Sequence: Synthetic oligonucleotide
uccucccuuuuccuccccg

SEQ ID NO: 2073365 - RNA, 19 nt, Artificial Sequence
  Description of Artificial Sequence: Synthetic oligonucleotide
ucucuacagucuggggucg

SEQ ID NO: 2073366 - RNA, 19 nt, Artificial Sequence
  Description of Artificial Sequence: Synthetic oligonucleotide
gacugaugugguccuaaca

SEQ ID NO: 2073367 - RNA, 19 nt, Artificial Sequence
  Description of Artificial Sequence: Synthetic oligonucleotide
cucucaaaggggagacgcc

SEQ ID NO: 2073368 - RNA, 19 nt, Artificial Sequence
  Description of Artificial Sequence: Synthetic oligonucleotide
gcacacguguaacugagug

SEQ ID NO: 2073369 - RNA, 19 nt, Artificial Sequence
  Description of Artificial Sequence: Synthetic oligonucleotide
uucggcggcacuagaucug

SEQ ID NO: 2073370 - RNA, 19 nt, Artificial Sequence
  Description of Artificial Sequence: Synthetic oligonucleotide
uuuuccuccccgagguaaa

SEQ ID NO: 2073371 - RNA, 19 nt, Artificial Sequence
  Description of Artificial Sequence: Synthetic oligonucleotide
acacaaggccacuuguaau

SEQ ID NO: 2073372 - RNA, 19 nt, Artificial Sequence
  Description of Artificial Sequence: Synthetic oligonucleotide
cauucggcggcacuagauc

SEQ ID NO: 2073373 - RNA, 19 nt, Artificial Sequence
  Description of Artificial Sequence: Synthetic oligonucleotide
uaaagaucccaggcaguga

SEQ ID NO: 2073374 - RNA, 19 nt, Artificial Sequence
  Description of Artificial Sequence: Synthetic oligonucleotide
ucaaaggggagacgcccaa

SEQ ID NO: 2073375 - RNA, 19 nt, Artificial Sequence
  Description of Artificial Sequence: Synthetic oligonucleotide
gggauugagagugggaccc

SEQ ID NO: 2073376 - RNA, 19 nt, Artificial Sequence
  Description of Artificial Sequence: Synthetic oligonucleotide
uccuccccgagguaaagau

SEQ ID NO: 2073377 - RNA, 19 nt, Artificial Sequence
  Description of Artificial Sequence: Synthetic oligonucleotide
agagagauuucaagggaga

SEQ ID NO: 2073378 - RNA, 19 nt, Artificial Sequence
  Description of Artificial Sequence: Synthetic oligonucleotide
guguguguguaugugugug

SEQ ID NO: 2073379 - RNA, 19 nt, Artificial Sequence
  Description of Artificial Sequence: Synthetic oligonucleotide
guauguguguguguguguc

SEQ ID NO: 2073380 - RNA, 19 nt, Artificial Sequence
  Description of Artificial Sequence: Synthetic oligonucleotide
ggauaggaagggaagggcc

SEQ ID NO: 2073381 - RNA, 19 nt, Artificial Sequence
  Description of Artificial Sequence: Synthetic oligonucleotide
cucuaugcucaucgcgccg

SEQ ID NO: 2073382 - RNA, 19 nt, Artificial Sequence
  Description of Artificial Sequence: Synthetic oligonucleotide
auugagagugggacccugg

SEQ ID NO: 2073383 - RNA, 19 nt, Artificial Sequence
  Description of Artificial Sequence: Synthetic oligonucleotide
agguguguguguaugugug

SEQ ID NO: 2073384 - RNA, 19 nt, Artificial Sequence
  Description of Artificial Sequence: Synthetic oligonucleotide
acguguaacugagugucug

SEQ ID NO: 2073385 - RNA, 19 nt, Artificial Sequence
  Description of Artificial Sequence: Synthetic oligonucleotide
guguguguaugugugugug

SEQ ID NO: 2073386 - RNA, 19 nt, Artificial Sequence
  Description of Artificial Sequence: Synthetic oligonucleotide
cuaagcacaggacccucuc

SEQ ID NO: 2073387 - RNA, 19 nt, Artificial Sequence
  Description of Artificial Sequence: Synthetic oligonucleotide
ccuagggacacuugcuucc

SEQ ID NO: 2073388 - RNA, 19 nt, Artificial Sequence
  Description of Artificial Sequence: Synthetic oligonucleotide
cucugcccuucuuuggccc

SEQ ID NO: 2073389 - RNA, 19 nt, Artificial Sequence
  Description of Artificial Sequence: Synthetic oligonucleotide
cugaugagccuugucuggc

SEQ ID NO: 2073390 - RNA, 19 nt, Artificial Sequence
  Description of Artificial Sequence: Synthetic oligonucleotide
ucggcggcacuagaucugg

SEQ ID NO: 2073391 - RNA, 19 nt, Artificial Sequence
  Description of Artificial Sequence: Synthetic oligonucleotide
uuccuucuagccccucaga

SEQ ID NO: 2073392 - RNA, 19 nt, Artificial Sequence
  Description of Artificial Sequence: Synthetic oligonucleotide
uaucugugcaggccugcaa

SEQ ID NO: 2073393 - RNA, 19 nt, Artificial Sequence
  Description of Artificial Sequence: Synthetic oligonucleotide
ugcaagccaacacgauggu

SEQ ID NO: 2073394 - RNA, 19 nt, Artificial Sequence
  Description of Artificial Sequence: Synthetic oligonucleotide
gcggcacuagaucuggagg

SEQ ID NO: 2073395 - RNA, 19 nt, Artificial Sequence
  Description of Artificial Sequence: Synthetic oligonucleotide
gauugagagugggacccug

SEQ ID NO: 2073396 - RNA, 19 nt, Artificial Sequence
  Description of Artificial Sequence: Synthetic oligonucleotide
ugaccgaguccucacugua

SEQ ID NO: 2073397 - RNA, 19 nt, Artificial Sequence
  Description of Artificial Sequence: Synthetic oligonucleotide
ugaaggacccugagccuuc

SEQ ID NO: 2073398 - RNA, 19 nt, Artificial Sequence
  Description of Artificial Sequence: Synthetic oligonucleotide
accgaguccucacuguaaa

SEQ ID NO: 2073399 - RNA, 19 nt, Artificial Sequence
  Description of Artificial Sequence: Synthetic oligonucleotide
gugcacacguguaacugag

SEQ ID NO: 2073400 - RNA, 19 nt, Artificial Sequence
  Description of Artificial Sequence: Synthetic oligonucleotide
gagguaucugugcaggccu

SEQ ID NO: 2073401 - RNA, 19 nt, Artificial Sequence
  Description of Artificial Sequence: Synthetic oligonucleotide
ggugugaacucuagaacug

SEQ ID NO: 2073402 - RNA, 19 nt, Artificial Sequence
  Description of Artificial Sequence: Synthetic oligonucleotide
gauuucaagggagaagaau

SEQ ID NO: 2073403 - RNA, 19 nt, Artificial Sequence
  Description of Artificial Sequence: Synthetic oligonucleotide
aagggaagggccaggcggu

SEQ ID NO: 2073404 - RNA, 19 nt, Artificial Sequence
  Description of Artificial Sequence: Synthetic oligonucleotide
ccaagagagggcugggagg

SEQ ID NO: 2073405 - RNA, 19 nt, Artificial Sequence
  Description of Artificial Sequence: Synthetic oligonucleotide
ugugguccuaacagcucuc

SEQ ID NO: 2073406 - RNA, 19 nt, Artificial Sequence
  Description of Artificial Sequence: Synthetic oligonucleotide
uugccucagugcaaacuuc

SEQ ID NO: 2073407 - RNA, 19 nt, Artificial Sequence
  Description of Artificial Sequence: Synthetic oligonucleotide
acuugccucagugcaaacu

SEQ ID NO: 2073408 - RNA, 19 nt, Artificial Sequence
  Description of Artificial Sequence: Synthetic oligonucleotide
ccucacuguaaacaagggc

SEQ ID NO: 2073409 - RNA, 19 nt, Artificial Sequence
  Description of Artificial Sequence: Synthetic oligonucleotide
acucaaaacagcacaggua

SEQ ID NO: 2073410 - RNA, 19 nt, Artificial Sequence
  Description of Artificial Sequence: Synthetic oligonucleotide
acagcucucaaaggggaga

SEQ ID NO: 2073411 - RNA, 19 nt, Artificial Sequence
  Description of Artificial Sequence: Synthetic oligonucleotide
gcucucaaaggggagacgc

SEQ ID NO: 2073412 - RNA, 19 nt, Artificial Sequence
  Description of Artificial Sequence: Synthetic oligonucleotide
gugucugacacaaggccac

SEQ ID NO: 2073413 - RNA, 19 nt, Artificial Sequence
  Description of Artificial Sequence: Synthetic oligonucleotide
gagagauuucaagggagaa

SEQ ID NO: 2073414 - RNA, 19 nt, Artificial Sequence
  Description of Artificial Sequence: Synthetic oligonucleotide
ccugaugagccuugucugg

SEQ ID NO: 2073415 - RNA, 19 nt, Artificial Sequence
  Description of Artificial Sequence: Synthetic oligonucleotide
aggacccucucuucccaag

SEQ ID NO: 2073416 - RNA, 19 nt, Artificial Sequence
  Description of Artificial Sequence: Synthetic oligonucleotide
guguaacugagugucugac

SEQ ID NO: 2073417 - RNA, 19 nt, Artificial Sequence
  Description of Artificial Sequence: Synthetic oligonucleotide
agcagucugcaaaagcaga

SEQ ID NO: 2073418 - RNA, 19 nt, Artificial Sequence
  Description of Artificial Sequence: Synthetic oligonucleotide
aaguaccugaugagccuug

SEQ ID NO: 2073419 - RNA, 19 nt, Artificial Sequence
  Description of Artificial Sequence: Synthetic oligonucleotide
uugucauucggcggcacua

SEQ ID NO: 2073420 - RNA, 19 nt, Artificial Sequence
  Description of Artificial Sequence: Synthetic oligonucleotide
ugagccuugucuggccgcc

SEQ ID NO: 2073421 - RNA, 19 nt, Artificial Sequence
  Description of Artificial Sequence: Synthetic oligonucleotide
uucacaccuagggacacuu

SEQ ID NO: 2073422 - RNA, 19 nt, Artificial Sequence
  Description of Artificial Sequence: Synthetic oligonucleotide
uguguguguguguguccca

SEQ ID NO: 2073423 - RNA, 19 nt, Artificial Sequence
  Description of Artificial Sequence: Synthetic oligonucleotide
gaugugguccuaacagcuc

SEQ ID NO: 2073424 - RNA, 19 nt, Artificial Sequence
  Description of Artificial Sequence: Synthetic oligonucleotide
acagagacacagugaccga

SEQ ID NO: 2073425 - RNA, 19 nt, Artificial Sequence
  Description of Artificial Sequence: Synthetic oligonucleotide
ucgcuacaauucauauuuc

SEQ ID NO: 2073426 - RNA, 19 nt, Artificial Sequence
  Description of Artificial Sequence: Synthetic oligonucleotide
acgcccaagagagggcugg

SEQ ID NO: 2073427 - RNA, 19 nt, Artificial Sequence
  Description of Artificial Sequence: Synthetic oligonucleotide
cugaaugugcacacgugua

SEQ ID NO: 2073428 - RNA, 19 nt, Artificial Sequence
  Description of Artificial Sequence: Synthetic oligonucleotide
cauucgggcacacagcagu

SEQ ID NO: 2073429 - RNA, 19 nt, Artificial Sequence
  Description of Artificial Sequence: Synthetic oligonucleotide
cucuagaacuggccucaag

SEQ ID NO: 2073430 - RNA, 19 nt, Artificial Sequence
  Description of Artificial Sequence: Synthetic oligonucleotide
ugcacacguguaacugagu

SEQ ID NO: 2073431 - RNA, 19 nt, Artificial Sequence
  Description of Artificial Sequence: Synthetic oligonucleotide
cacucaaaacagcacaggu

SEQ ID NO: 2073432 - RNA, 19 nt, Artificial Sequence
  Description of Artificial Sequence: Synthetic oligonucleotide
gugugugugugugucccag

SEQ ID NO: 2073433 - RNA, 19 nt, Artificial Sequence
  Description of Artificial Sequence: Synthetic oligonucleotide
cagauguacccaaacacau

SEQ ID NO: 2073434 - RNA, 19 nt, Artificial Sequence
  Description of Artificial Sequence: Synthetic oligonucleotide
ugguccuaacagcucucaa

SEQ ID NO: 2073435 - RNA, 19 nt, Artificial Sequence
  Description of Artificial Sequence: Synthetic oligonucleotide
aacuccccuccaggcauuc

SEQ ID NO: 2073436 - RNA, 19 nt, Artificial Sequence
  Description of Artificial Sequence: Synthetic oligonucleotide
ggcggcacuagaucuggag

SEQ ID NO: 2073437 - RNA, 19 nt, Artificial Sequence
  Description of Artificial Sequence: Synthetic oligonucleotide
guauccaguggggagcuga

SEQ ID NO: 2073438 - RNA, 19 nt, Artificial Sequence
  Description of Artificial Sequence: Synthetic oligonucleotide
uucuagccccucagacuug

SEQ ID NO: 2073439 - RNA, 19 nt, Artificial Sequence
  Description of Artificial Sequence: Synthetic oligonucleotide
aaaacacgcaugagaggua

SEQ ID NO: 2073440 - RNA, 19 nt, Artificial Sequence
  Description of Artificial Sequence: Synthetic oligonucleotide
aacacgcaugagagguaag

SEQ ID NO: 2073441 - RNA, 19 nt, Artificial Sequence
  Description of Artificial Sequence: Synthetic oligonucleotide
auucgggcacacagcaguc

SEQ ID NO: 2073442 - RNA, 19 nt, Artificial Sequence
  Description of Artificial Sequence: Synthetic oligonucleotide
gcagauguacccaaacaca

SEQ ID NO: 2073443 - RNA, 19 nt, Artificial Sequence
  Description of Artificial Sequence: Synthetic oligonucleotide
ccugcaagccaacacgaug

SEQ ID NO: 2073444 - RNA, 19 nt, Artificial Sequence
  Description of Artificial Sequence: Synthetic oligonucleotide
uuccuagagagaggcuaug

SEQ ID NO: 2073445 - RNA, 19 nt, Artificial Sequence
  Description of Artificial Sequence: Synthetic oligonucleotide
cagugcaaacuucacaccu

SEQ ID NO: 2073446 - RNA, 19 nt, Artificial Sequence
  Description of Artificial Sequence: Synthetic oligonucleotide
aagaaugauucaagaccuu

SEQ ID NO: 2073447 - RNA, 19 nt, Artificial Sequence
  Description of Artificial Sequence: Synthetic oligonucleotide
gggauaggaagggaagggc

SEQ ID NO: 2073448 - RNA, 19 nt, Artificial Sequence
  Description of Artificial Sequence: Synthetic oligonucleotide
uccccgagguaaagauccc

SEQ ID NO: 2073449 - RNA, 19 nt, Artificial Sequence
  Description of Artificial Sequence: Synthetic oligonucleotide
gucugcaaaagcagaggca

SEQ ID NO: 2073450 - RNA, 19 nt, Artificial Sequence
  Description of Artificial Sequence: Synthetic oligonucleotide
acacgauggugugaacucu

SEQ ID NO: 2073451 - RNA, 19 nt, Artificial Sequence
  Description of Artificial Sequence: Synthetic oligonucleotide
agacgcccaagagagggcu

SEQ ID NO: 2073452 - RNA, 19 nt, Artificial Sequence
  Description of Artificial Sequence: Synthetic oligonucleotide
ccgagguaaagaucccagg

SEQ ID NO: 2073453 - RNA, 19 nt, Artificial Sequence
  Description of Artificial Sequence: Synthetic oligonucleotide
uggccucaagacagagaga

SEQ ID NO: 2073454 - RNA, 19 nt, Artificial Sequence
  Description of Artificial Sequence: Synthetic oligonucleotide
uggggucgcuacaauucau

SEQ ID NO: 2073455 - RNA, 19 nt, Artificial Sequence
  Description of Artificial Sequence: Synthetic oligonucleotide
agugggacccugggauugg

SEQ ID NO: 2073456 - RNA, 19 nt, Artificial Sequence
  Description of Artificial Sequence: Synthetic oligonucleotide
cuuuuccuccccgagguaa

SEQ ID NO: 2073457 - RNA, 19 nt, Artificial Sequence
  Description of Artificial Sequence: Synthetic oligonucleotide
acaccuagggacacuugcu

SEQ ID NO: 2073458 - RNA, 19 nt, Artificial Sequence
  Description of Artificial Sequence: Synthetic oligonucleotide
agcucucaaaggggagacg

SEQ ID NO: 2073459 - RNA, 19 nt, Artificial Sequence
  Description of Artificial Sequence: Synthetic oligonucleotide
cccgagguaaagaucccag

SEQ ID NO: 2073460 - RNA, 19 nt, Artificial Sequence
  Description of Artificial Sequence: Synthetic oligonucleotide
ucccuaagcacaggacccu

SEQ ID NO: 2073461 - RNA, 19 nt, Artificial Sequence
  Description of Artificial Sequence: Synthetic oligonucleotide
caagaccuucacuggcauc

SEQ ID NO: 2073462 - RNA, 19 nt, Artificial Sequence
  Description of Artificial Sequence: Synthetic oligonucleotide
gagguaaggugugugugua

SEQ ID NO: 2073463 - RNA, 19 nt, Artificial Sequence
  Description of Artificial Sequence: Synthetic oligonucleotide
cuaugcucaucgcgccgag

SEQ ID NO: 2073464 - RNA, 19 nt, Artificial Sequence
  Description of Artificial Sequence: Synthetic oligonucleotide
gggagcugaaugugcacac

SEQ ID NO: 2073465 - RNA, 19 nt, Artificial Sequence
  Description of Artificial Sequence: Synthetic oligonucleotide
aaaggccauuggugaguau

SEQ ID NO: 2073466 - RNA, 19 nt, Artificial Sequence
  Description of Artificial Sequence: Synthetic oligonucleotide
cgucucuaugcucaucgcg

SEQ ID NO: 2073467 - RNA, 19 nt, Artificial Sequence
  Description of Artificial Sequence: Synthetic oligonucleotide
cucaucgcgccgagagcag

SEQ ID NO: 2073468 - RNA, 19 nt, Artificial Sequence
  Description of Artificial Sequence: Synthetic oligonucleotide
ggagcugaaugugcacacg

SEQ ID NO: 2073469 - RNA, 19 nt, Artificial Sequence
  Description of Artificial Sequence: Synthetic oligonucleotide
cugcucaaugucaucugaa

SEQ ID NO: 2073470 - RNA, 19 nt, Artificial Sequence
  Description of Artificial Sequence: Synthetic oligonucleotide
agaggcuauggugacccaa

SEQ ID NO: 2073471 - RNA, 19 nt, Artificial Sequence
  Description of Artificial Sequence: Synthetic oligonucleotide
cuugucuggccgccuccag

SEQ ID NO: 2073472 - RNA, 19 nt, Artificial Sequence
  Description of Artificial Sequence: Synthetic oligonucleotide
gaaaggccauuggugagua

SEQ ID NO: 2073473 - RNA, 19 nt, Artificial Sequence
  Description of Artificial Sequence: Synthetic oligonucleotide
cuggggucgcuacaauuca

SEQ ID NO: 2073474 - RNA, 19 nt, Artificial Sequence
  Description of Artificial Sequence: Synthetic oligonucleotide
caccucuuuggggauugag

SEQ ID NO: 2073475 - RNA, 19 nt, Artificial Sequence
  Description of Artificial Sequence: Synthetic oligonucleotide
gagacgcccaagagagggc

SEQ ID NO: 2073476 - RNA, 19 nt, Artificial Sequence
  Description of Artificial Sequence: Synthetic oligonucleotide
agguaagguguguguguau

SEQ ID NO: 2073477 - RNA, 19 nt, Artificial Sequence
  Description of Artificial Sequence: Synthetic oligonucleotide
ggccacuuguaauaaauau

SEQ ID NO: 2073478 - RNA, 19 nt, Artificial Sequence
  Description of Artificial Sequence: Synthetic oligonucleotide
uucccacacagcagaugua

SEQ ID NO: 2073479 - RNA, 19 nt, Artificial Sequence
  Description of Artificial Sequence: Synthetic oligonucleotide
aggcggucccacaagguga

SEQ ID NO: 2073480 - RNA, 19 nt, Artificial Sequence
  Description of Artificial Sequence: Synthetic oligonucleotide
uuccuccccgagguaaaga

SEQ ID NO: 2073481 - RNA, 19 nt, Artificial Sequence
  Description of Artificial Sequence: Synthetic oligonucleotide
ggacccugagccuuccuuc

SEQ ID NO: 2073482 - RNA, 19 nt, Artificial Sequence
  Description of Artificial Sequence: Synthetic oligonucleotide
caguggggagcugaaugug

SEQ ID NO: 2073483 - RNA, 19 nt, Artificial Sequence
  Description of Artificial Sequence: Synthetic oligonucleotide
agauguacccaaacacaua

SEQ ID NO: 2073484 - RNA, 19 nt, Artificial Sequence
  Description of Artificial Sequence: Synthetic oligonucleotide
agauuucaagggagaagaa

SEQ ID NO: 2073485 - RNA, 19 nt, Artificial Sequence
  Description of Artificial Sequence: Synthetic oligonucleotide
ugucugacacaaggccacu

SEQ ID NO: 2073486 - RNA, 19 nt, Artificial Sequence
  Description of Artificial Sequence: Synthetic oligonucleotide
caguagcgucucuaugcuc

SEQ ID NO: 2073487 - RNA, 19 nt, Artificial Sequence
  Description of Artificial Sequence: Synthetic oligonucleotide
ggcuauggugacccaacuc

SEQ ID NO: 2073488 - RNA, 19 nt, Artificial Sequence
  Description of Artificial Sequence: Synthetic oligonucleotide
uaugcucaucgcgccgaga

SEQ ID NO: 2073489 - RNA, 19 nt, Artificial Sequence
  Description of Artificial Sequence: Synthetic oligonucleotide
gucaucugaaggacccuga

SEQ ID NO: 2073490 - RNA, 19 nt, Artificial Sequence
  Description of Artificial Sequence: Synthetic oligonucleotide
ggugaguauccagugggga

SEQ ID NO: 2073491 - RNA, 19 nt, Artificial Sequence
  Description of Artificial Sequence: Synthetic oligonucleotide
gacuugccucagugcaaac

SEQ ID NO: 2073492 - RNA, 19 nt, Artificial Sequence
  Description of Artificial Sequence: Synthetic oligonucleotide
aggcauucucugcccuucu

SEQ ID NO: 2073493 - RNA, 19 nt, Artificial Sequence
  Description of Artificial Sequence: Synthetic oligonucleotide
caacacgauggugugaacu

SEQ ID NO: 2073494 - RNA, 19 nt, Artificial Sequence
  Description of Artificial Sequence: Synthetic oligonucleotide
gacccucucuucccaagua

SEQ ID NO: 2073495 - RNA, 19 nt, Artificial Sequence
  Description of Artificial Sequence: Synthetic oligonucleotide
gcucaucgcgccgagagca

SEQ ID NO: 2073496 - RNA, 19 nt, Artificial Sequence
  Description of Artificial Sequence: Synthetic oligonucleotide
cacacguguaacugagugu

SEQ ID NO: 2073497 - RNA, 19 nt, Artificial Sequence
  Description of Artificial Sequence: Synthetic oligonucleotide
ggccucaagacagagagau

SEQ ID NO: 2073498 - RNA, 19 nt, Artificial Sequence
  Description of Artificial Sequence: Synthetic oligonucleotide
gacccugagccuuccuucu

SEQ ID NO: 2073499 - RNA, 19 nt, Artificial Sequence
  Description of Artificial Sequence: Synthetic oligonucleotide
agucuggggucgcuacaau

SEQ ID NO: 2073500 - RNA, 19 nt, Artificial Sequence
  Description of Artificial Sequence: Synthetic oligonucleotide
cugacacaaggccacuugu

SEQ ID NO: 2073501 - RNA, 19 nt, Artificial Sequence
  Description of Artificial Sequence: Synthetic oligonucleotide
ggacugaugugguccuaac

SEQ ID NO: 2073502 - RNA, 19 nt, Artificial Sequence
  Description of Artificial Sequence: Synthetic oligonucleotide
ugcaggccugcaagccaac

SEQ ID NO: 2073503 - RNA, 19 nt, Artificial Sequence
  Description of Artificial Sequence: Synthetic oligonucleotide
cacgauggugugaacucua

SEQ ID NO: 2073504 - RNA, 19 nt, Artificial Sequence
  Description of Artificial Sequence: Synthetic oligonucleotide
gucauucggcggcacuaga

SEQ ID NO: 2073505 - RNA, 19 nt, Artificial Sequence
  Description of Artificial Sequence: Synthetic oligonucleotide
agguaucugugcaggccug

SEQ ID NO: 2073506 - RNA, 19 nt, Artificial Sequence
  Description of Artificial Sequence: Synthetic oligonucleotide
gucuggccgccuccaguag

SEQ ID NO: 2073507 - RNA, 19 nt, Artificial Sequence
  Description of Artificial Sequence: Synthetic oligonucleotide
gguaucugugcaggccugc

SEQ ID NO: 2073508 - RNA, 19 nt, Artificial Sequence
  Description of Artificial Sequence: Synthetic oligonucleotide
gccaacacgauggugugaa

SEQ ID NO: 2073509 - RNA, 19 nt, Artificial Sequence
  Description of Artificial Sequence: Synthetic oligonucleotide
aggccacuuguaauaaaua

SEQ ID NO: 2073510 - RNA, 19 nt, Artificial Sequence
  Description of Artificial Sequence: Synthetic oligonucleotide
cauugucauucggcggcac

SEQ ID NO: 2073511 - RNA, 19 nt, Artificial Sequence
  Description of Artificial Sequence: Synthetic oligonucleotide
cucuacagucuggggucgc

SEQ ID NO: 2073512 - RNA, 19 nt, Artificial Sequence
  Description of Artificial Sequence: Synthetic oligonucleotide
gaccgaguccucacuguaa

SEQ ID NO: 2073513 - RNA, 19 nt, Artificial Sequence
  Description of Artificial Sequence: Synthetic oligonucleotide
caggaaacagagacacagu

SEQ ID NO: 2073514 - RNA, 19 nt, Artificial Sequence
  Description of Artificial Sequence: Synthetic oligonucleotide
gacgcccaagagagggcug

SEQ ID NO: 2073515 - RNA, 19 nt, Artificial Sequence
  Description of Artificial Sequence: Synthetic oligonucleotide
cccauucgggcacacagca

SEQ ID NO: 2073516 - RNA, 19 nt, Artificial Sequence
  Description of Artificial Sequence: Synthetic oligonucleotide
ggggagcugaaugugcaca

SEQ ID NO: 2073517 - RNA, 19 nt, Artificial Sequence
  Description of Artificial Sequence: Synthetic oligonucleotide
gugguccuaacagcucuca

SEQ ID NO: 2073518 - RNA, 19 nt, Artificial Sequence
  Description of Artificial Sequence: Synthetic oligonucleotide
ggcggucccacaaggugag

SEQ ID NO: 2073519 - RNA, 19 nt, Artificial Sequence
  Description of Artificial Sequence: Synthetic oligonucleotide
gaguauccaguggggagcu

SEQ ID NO: 2073520 - RNA, 19 nt, Artificial Sequence
  Description of Artificial Sequence: Synthetic oligonucleotide
gugaccgaguccucacugu

SEQ ID NO: 2073521 - RNA, 19 nt, Artificial Sequence
  Description of Artificial Sequence: Synthetic oligonucleotide
gagaggcuauggugaccca

SEQ ID NO: 2073522 - RNA, 19 nt, Artificial Sequence
  Description of Artificial Sequence: Synthetic oligonucleotide
gcaucccuaagcacaggac

SEQ ID NO: 2073523 - RNA, 19 nt, Artificial Sequence
  Description of Artificial Sequence: Synthetic oligonucleotide
ccugcucaaugucaucuga

SEQ ID NO: 2073524 - RNA, 19 nt, Artificial Sequence
  Description of Artificial Sequence: Synthetic oligonucleotide
gcacuagaucuggaggaac

SEQ ID NO: 2073525 - RNA, 19 nt, Artificial Sequence
  Description of Artificial Sequence: Synthetic oligonucleotide
cagcaucccuaagcacagg

SEQ ID NO: 2073526 - RNA, 19 nt, Artificial Sequence
  Description of Artificial Sequence: Synthetic oligonucleotide
guuccuagagagaggcuau

SEQ ID NO: 2073527 - RNA, 19 nt, Artificial Sequence
  Description of Artificial Sequence: Synthetic oligonucleotide
ccauucgggcacacagcag

SEQ ID NO: 2073528 - RNA, 19 nt, Artificial Sequence
  Description of Artificial Sequence: Synthetic oligonucleotide
cgcaugagagguaaggugu

SEQ ID NO: 2073529 - RNA, 19 nt, Artificial Sequence
  Description of Artificial Sequence: Synthetic oligonucleotide
cacgcaugagagguaaggu

SEQ ID NO: 2073530 - RNA, 19 nt, Artificial Sequence
  Description of Artificial Sequence: Synthetic oligonucleotide
ccucaagacagagagauuu

SEQ ID NO: 2073531 - RNA, 19 nt, Artificial Sequence
  Description of Artificial Sequence: Synthetic oligonucleotide
cgaguccucacuguaaaca

SEQ ID NO: 2073532 - RNA, 19 nt, Artificial Sequence
  Description of Artificial Sequence: Synthetic oligonucleotide
gguguguguguaugugugu

SEQ ID NO: 2073533 - RNA, 19 nt, Artificial Sequence
  Description of Artificial Sequence: Synthetic oligonucleotide
ggccugcaagccaacacga

SEQ ID NO: 2073534 - RNA, 19 nt, Artificial Sequence
  Description of Artificial Sequence: Synthetic oligonucleotide
uagcgucucuaugcucauc

SEQ ID NO: 2073535 - RNA, 19 nt, Artificial Sequence
  Description of Artificial Sequence: Synthetic oligonucleotide
gguaaagaucccaggcagu

SEQ ID NO: 2073536 - RNA, 19 nt, Artificial Sequence
  Description of Artificial Sequence: Synthetic oligonucleotide
cggcacuagaucuggagga

SEQ ID NO: 2073537 - RNA, 19 nt, Artificial Sequence
  Description of Artificial Sequence: Synthetic oligonucleotide
gccaccucuuuggggauug

SEQ ID NO: 2073538 - RNA, 19 nt, Artificial Sequence
  Description of Artificial Sequence: Synthetic oligonucleotide
gucuggggucgcuacaauu

SEQ ID NO: 2073539 - RNA, 19 nt, Artificial Sequence
  Description of Artificial Sequence: Synthetic oligonucleotide
ccgaguccucacuguaaac

SEQ ID NO: 2073540 - RNA, 19 nt, Artificial Sequence
  Description of Artificial Sequence: Synthetic oligonucleotide
gggucgcuacaauucauau

SEQ ID NO: 2073541 - RNA, 19 nt, Artificial Sequence
  Description of Artificial Sequence: Synthetic oligonucleotide
ggcacuagaucuggaggaa

SEQ ID NO: 2073542 - RNA, 19 nt, Artificial Sequence
  Description of Artificial Sequence: Synthetic oligonucleotide
ccuccccgagguaaagauc

SEQ ID NO: 2073543 - RNA, 19 nt, Artificial Sequence
  Description of Artificial Sequence: Synthetic oligonucleotide
caugagagguaaggugugu

SEQ ID NO: 2073544 - RNA, 19 nt, Artificial Sequence
  Description of Artificial Sequence: Synthetic oligonucleotide
ccuagagagaggcuauggu

SEQ ID NO: 2073545 - RNA, 19 nt, Artificial Sequence
  Description of Artificial Sequence: Synthetic oligonucleotide
gcccauucgggcacacagc

SEQ ID NO: 2073546 - RNA, 19 nt, Artificial Sequence
  Description of Artificial Sequence: Synthetic oligonucleotide
cacguguaacugagugucu

SEQ ID NO: 2073547 - RNA, 19 nt, Artificial Sequence
  Description of Artificial Sequence: Synthetic oligonucleotide
caccuagggacacuugcuu

SEQ ID NO: 2073548 - RNA, 19 nt, Artificial Sequence
  Description of Artificial Sequence: Synthetic oligonucleotide
caacacccaucaucaccaa

SEQ ID NO: 2073549 - RNA, 19 nt, Artificial Sequence
  Description of Artificial Sequence: Synthetic oligonucleotide
gccccucagacuugccuca

SEQ ID NO: 2073550 - RNA, 19 nt, Artificial Sequence
  Description of Artificial Sequence: Synthetic oligonucleotide
cguguaacugagugucuga

SEQ ID NO: 2073551 - RNA, 19 nt, Artificial Sequence
  Description of Artificial Sequence: Synthetic oligonucleotide
gggagacgcccaagagagg

SEQ ID NO: 2073552 - RNA, 19 nt, Artificial Sequence
  Description of Artificial Sequence: Synthetic oligonucleotide
gccucagugcaaacuucac

SEQ ID NO: 2073553 - RNA, 19 nt, Artificial Sequence
  Description of Artificial Sequence: Synthetic oligonucleotide
ggggucgcuacaauucaua

SEQ ID NO: 2073554 - RNA, 19 nt, Artificial Sequence
  Description of Artificial Sequence: Synthetic oligonucleotide
cuagggacacuugcuuccu

SEQ ID NO: 2073555 - RNA, 19 nt, Artificial Sequence
  Description of Artificial Sequence: Synthetic oligonucleotide
caaguaccugaugagccuu

SEQ ID NO: 2073556 - RNA, 19 nt, Artificial Sequence
  Description of Artificial Sequence: Synthetic oligonucleotide
ccaacacgauggugugaac

SEQ ID NO: 2073557 - RNA, 19 nt, Artificial Sequence
  Description of Artificial Sequence: Synthetic oligonucleotide
cuacagucuggggucgcua

SEQ ID NO: 2073558 - RNA, 19 nt, Artificial Sequence
  Description of Artificial Sequence: Synthetic oligonucleotide
gggguggaugaugagguau

SEQ ID NO: 2073559 - RNA, 19 nt, Artificial Sequence
  Description of Artificial Sequence: Synthetic oligonucleotide
ggacccucucuucccaagu

SEQ ID NO: 2073560 - RNA, 19 nt, Artificial Sequence
  Description of Artificial Sequence: Synthetic oligonucleotide
cccaacuccccuccaggca

SEQ ID NO: 2073561 - RNA, 19 nt, Artificial Sequence
  Description of Artificial Sequence: Synthetic oligonucleotide
ccaguagcgucucuaugcu

SEQ ID NO: 2073562 - RNA, 19 nt, Artificial Sequence
  Description of Artificial Sequence: Synthetic oligonucleotide
ggccgccuccaguagcguc

SEQ ID NO: 2073563 - RNA, 19 nt, Artificial Sequence
  Description of Artificial Sequence: Synthetic oligonucleotide
cagugaccgaguccucacu

SEQ ID NO: 2073564 - RNA, 19 nt, Artificial Sequence
  Description of Artificial Sequence: Synthetic oligonucleotide
ccaacuccccuccaggcau

SEQ ID NO: 2073565 - RNA, 19 nt, Artificial Sequence
  Description of Artificial Sequence: Synthetic oligonucleotide
cccuaagcacaggacccuc

SEQ ID NO: 2073566 - RNA, 19 nt, Artificial Sequence
  Description of Artificial Sequence: Synthetic oligonucleotide
ccuaagcacaggacccucu

SEQ ID NO: 2073567 - RNA, 19 nt, Artificial Sequence
  Description of Artificial Sequence: Synthetic oligonucleotide
cuucacaccuagggacacu

SEQ ID NO: 2073568 - RNA, 19 nt, Artificial Sequence
  Description of Artificial Sequence: Synthetic oligonucleotide
gccuccaguagcgucucua

SEQ ID NO: 2073569 - RNA, 19 nt, Artificial Sequence
  Description of Artificial Sequence: Synthetic oligonucleotide
gucugacacaaggccacuu

SEQ ID NO: 2073570 - RNA, 19 nt, Artificial Sequence
  Description of Artificial Sequence: Synthetic oligonucleotide
gccgccuccaguagcgucu

SEQ ID NO: 2073571 - RNA, 19 nt, Artificial Sequence
  Description of Artificial Sequence: Synthetic oligonucleotide
cugcccauucgggcacaca

SEQ ID NO: 2073572 - RNA, 19 nt, Artificial Sequence
  Description of Artificial Sequence: Synthetic oligonucleotide
ggauugagagugggacccu

SEQ ID NO: 2073573 - RNA, 19 nt, Artificial Sequence
  Description of Artificial Sequence: Synthetic oligonucleotide
ccccgagguaaagauccca

SEQ ID NO: 2073574 - RNA, 19 nt, Artificial Sequence
  Description of Artificial Sequence: Synthetic oligonucleotide
ccccucagacuugccucag

SEQ ID NO: 2073575 - RNA, 19 nt, Artificial Sequence
  Description of Artificial Sequence: Synthetic oligonucleotide
gagccuugucuggccgccu

SEQ ID NO: 2073576 - RNA, 19 nt, Artificial Sequence
  Description of Artificial Sequence: Synthetic oligonucleotide
cccacaaggugaggacuga

SEQ ID NO: 2073577 - RNA, 19 nt, Artificial Sequence
  Description of Artificial Sequence: Synthetic oligonucleotide
ccuuuuccuccccgaggua

SEQ ID NO: 2073578 - RNA, 19 nt, Artificial Sequence
  Description of Artificial Sequence: Synthetic oligonucleotide
ccacaaggugaggacugau

SEQ ID NO: 2073579 - RNA, 19 nt, Artificial Sequence
  Description of Artificial Sequence: Synthetic oligonucleotide
ccaccucuuuggggauuga

SEQ ID NO: 2073580 - RNA, 19 nt, Artificial Sequence
  Description of Artificial Sequence: Synthetic oligonucleotide
ggccaccucuuuggggauu

SEQ ID NO: 2073581 - RNA, 19 nt, Artificial Sequence
  Description of Artificial Sequence: Synthetic oligonucleotide
uguacuuaaacaauggggu

SEQ ID NO: 2073582 - RNA, 19 nt, Artificial Sequence
  Description of Artificial Sequence: Synthetic oligonucleotide
uucucggucaccauuaucc

SEQ ID NO: 2073583 - RNA, 19 nt, Artificial Sequence
  Description of Artificial Sequence: Synthetic oligonucleotide
gauaccaugcuuaugggcg

SEQ ID NO: 2073584 - RNA, 19 nt, Artificial Sequence
  Description of Artificial Sequence: Synthetic oligonucleotide
uugaauucggugcaggucc

SEQ ID NO: 2073585 - RNA, 19 nt, Artificial Sequence
  Description of Artificial Sequence: Synthetic oligonucleotide
ugaguuacggacaauccag

SEQ ID NO: 2073586 - RNA, 19 nt, Artificial Sequence
  Description of Artificial Sequence: Synthetic oligonucleotide
aaacuugucacagucuugg

SEQ ID NO: 2073587 - RNA, 19 nt, Artificial Sequence
  Description of Artificial Sequence: Synthetic oligonucleotide
guaguuauccaucuucucg

SEQ ID NO: 2073588 - RNA, 19 nt, Artificial Sequence
  Description of Artificial Sequence: Synthetic oligonucleotide
cuugucacagucuuggucc

SEQ ID NO: 2073589 - RNA, 19 nt, Artificial Sequence
  Description of Artificial Sequence: Synthetic oligonucleotide
gagacgaugugguugauag

SEQ ID NO: 2073590 - RNA, 19 nt, Artificial Sequence
  Description of Artificial Sequence: Synthetic oligonucleotide
uaguuauccaucuucucgg

SEQ ID NO: 2073591 - RNA, 19 nt, Artificial Sequence
  Description of Artificial Sequence: Synthetic oligonucleotide
guaguugacacccuucacg

SEQ ID NO: 2073592 - RNA, 19 nt, Artificial Sequence
  Description of Artificial Sequence: Synthetic oligonucleotide
acacccuucacguuucucc

SEQ ID NO: 2073593 - RNA, 19 nt, Artificial Sequence
  Description of Artificial Sequence: Synthetic oligonucleotide
uuacggacaauccaguacu

SEQ ID NO: 2073594 - RNA, 19 nt, Artificial Sequence
  Description of Artificial Sequence: Synthetic oligonucleotide
uguguaguuauccaucuuc

SEQ ID NO: 2073595 - RNA, 19 nt, Artificial Sequence
  Description of Artificial Sequence: Synthetic oligonucleotide
acgauccucauccagcccc

SEQ ID NO: 2073596 - RNA, 19 nt, Artificial Sequence
  Description of Artificial Sequence: Synthetic oligonucleotide
gacgaugugguugauagag

SEQ ID NO: 2073597 - RNA, 19 nt, Artificial Sequence
  Description of Artificial Sequence: Synthetic oligonucleotide
gaugguguggcacacuuug

SEQ ID NO: 2073598 - RNA, 19 nt, Artificial Sequence
  Description of Artificial Sequence: Synthetic oligonucleotide
guguacuuaaacaaugggg

SEQ ID NO: 2073599 - RNA, 19 nt, Artificial Sequence
  Description of Artificial Sequence: Synthetic oligonucleotide
ucuuggggauauccgaugg

SEQ ID NO: 2073600 - RNA, 19 nt, Artificial Sequence
  Description of Artificial Sequence: Synthetic oligonucleotide
ugggcguaugcccacaccg

SEQ ID NO: 2073601 - RNA, 19 nt, Artificial Sequence
  Description of Artificial Sequence: Synthetic oligonucleotide
acaauccaguacucaaugc

SEQ ID NO: 2073602 - RNA, 19 nt, Artificial Sequence
  Description of Artificial Sequence: Synthetic oligonucleotide
ucgaugacguucuggacgg

SEQ ID NO: 2073603 - RNA, 19 nt, Artificial Sequence
  Description of Artificial Sequence: Synthetic oligonucleotide
acuggugcugccgugagcc

SEQ ID NO: 2073604 - RNA, 19 nt, Artificial Sequence
  Description of Artificial Sequence: Synthetic oligonucleotide
uacuuaaacaauggggucc

SEQ ID NO: 2073605 - RNA, 19 nt, Artificial Sequence
  Description of Artificial Sequence: Synthetic oligonucleotide
uugaccugacccaaggacc

SEQ ID NO: 2073606 - RNA, 19 nt, Artificial Sequence
  Description of Artificial Sequence: Synthetic oligonucleotide
ucaauggcgagguuguagc

SEQ ID NO: 2073607 - RNA, 19 nt, Artificial Sequence
  Description of Artificial Sequence: Synthetic oligonucleotide
acuuaaacaaugggguccc

SEQ ID NO: 2073608 - RNA, 19 nt, Artificial Sequence
  Description of Artificial Sequence: Synthetic oligonucleotide
uggacggaaagcagggugg

SEQ ID NO: 2073609 - RNA, 19 nt, Artificial Sequence
  Description of Artificial Sequence: Synthetic oligonucleotide
agagacguguacuuaaaca

SEQ ID NO: 2073610 - RNA, 19 nt, Artificial Sequence
  Description of Artificial Sequence: Synthetic oligonucleotide
augggguccccauaugugc

SEQ ID NO: 2073611 - RNA, 19 nt, Artificial Sequence
  Description of Artificial Sequence: Synthetic oligonucleotide
auugccacagucgaugacg

SEQ ID NO: 2073612 - RNA, 19 nt, Artificial Sequence
  Description of Artificial Sequence: Synthetic oligonucleotide
uucuggacggaaagcaggg

SEQ ID NO: 2073613 - RNA, 19 nt, Artificial Sequence
  Description of Artificial Sequence: Synthetic oligonucleotide
gagacguguacuuaaacaa

SEQ ID NO: 2073614 - RNA, 19 nt, Artificial Sequence
  Description of Artificial Sequence: Synthetic oligonucleotide
ucacguuucuccaauccca

SEQ ID NO: 2073615 - RNA, 19 nt, Artificial Sequence
  Description of Artificial Sequence: Synthetic oligonucleotide
acaccggaaggucauugcc

SEQ ID NO: 2073616 - RNA, 19 nt, Artificial Sequence
  Description of Artificial Sequence: Synthetic oligonucleotide
auccgauggggacagguac

SEQ ID NO: 2073617 - RNA, 19 nt, Artificial Sequence
  Description of Artificial Sequence: Synthetic oligonucleotide
uccaaucccaguucuuggg

SEQ ID NO: 2073618 - RNA, 19 nt, Artificial Sequence
  Description of Artificial Sequence: Synthetic oligonucleotide
auagaugccuccuguguag

SEQ ID NO: 2073619 - RNA, 19 nt, Artificial Sequence
  Description of Artificial Sequence: Synthetic oligonucleotide
aguccugcgccccagcugg

SEQ ID NO: 2073620 - RNA, 19 nt, Artificial Sequence
  Description of Artificial Sequence: Synthetic oligonucleotide
caugaguuacggacaaucc

SEQ ID NO: 2073621 - RNA, 19 nt, Artificial Sequence
  Description of Artificial Sequence: Synthetic oligonucleotide
augcuuaugggcguaugcc

SEQ ID NO: 2073622 - RNA, 19 nt, Artificial Sequence
  Description of Artificial Sequence: Synthetic oligonucleotide
uaguugacacccuucacgu

SEQ ID NO: 2073623 - RNA, 19 nt, Artificial Sequence
  Description of Artificial Sequence: Synthetic oligonucleotide
uugauguugaugcggucug

SEQ ID NO: 2073624 - RNA, 19 nt, Artificial Sequence
  Description of Artificial Sequence: Synthetic oligonucleotide
acugguuaaacuugucaca

SEQ ID NO: 2073625 - RNA, 19 nt, Artificial Sequence
  Description of Artificial Sequence: Synthetic oligonucleotide
gacccaaggacccacgcgc

SEQ ID NO: 2073626 - RNA, 19 nt, Artificial Sequence
  Description of Artificial Sequence: Synthetic oligonucleotide
augaguuacggacaaucca

SEQ ID NO: 2073627 - RNA, 19 nt, Artificial Sequence
  Description of Artificial Sequence: Synthetic oligonucleotide
aguucuuggggauauccga

SEQ ID NO: 2073628 - RNA, 19 nt, Artificial Sequence
  Description of Artificial Sequence: Synthetic oligonucleotide
caccccaugaguuacggac

SEQ ID NO: 2073629 - RNA, 19 nt, Artificial Sequence
  Description of Artificial Sequence: Synthetic oligonucleotide
ugaccugacccaaggaccc

SEQ ID NO: 2073630 - RNA, 19 nt, Artificial Sequence
  Description of Artificial Sequence: Synthetic oligonucleotide
uaggugcuggucacgaucc

SEQ ID NO: 2073631 - RNA, 19 nt, Artificial Sequence
  Description of Artificial Sequence: Synthetic oligonucleotide
ugcuuaugggcguaugccc

SEQ ID NO: 2073632 - RNA, 19 nt, Artificial Sequence
  Description of Artificial Sequence: Synthetic oligonucleotide
aauccaguacucaaugcca

SEQ ID NO: 2073633 - RNA, 19 nt, Artificial Sequence
  Description of Artificial Sequence: Synthetic oligonucleotide
uaaacuugucacagucuug

SEQ ID NO: 2073634 - RNA, 19 nt, Artificial Sequence
  Description of Artificial Sequence: Synthetic oligonucleotide
guuacggacaauccaguac

SEQ ID NO: 2073635 - RNA, 19 nt, Artificial Sequence
  Description of Artificial Sequence: Synthetic oligonucleotide
cucgucagggauaccaugc

SEQ ID NO: 2073636 - RNA, 19 nt, Artificial Sequence
  Description of Artificial Sequence: Synthetic oligonucleotide
gacguguacuuaaacaaug

SEQ ID NO: 2073637 - RNA, 19 nt, Artificial Sequence
  Description of Artificial Sequence: Synthetic oligonucleotide
acgcgcugcaccuucgacc

SEQ ID NO: 2073638 - RNA, 19 nt, Artificial Sequence
  Description of Artificial Sequence: Synthetic oligonucleotide
augugguugauagaggucu

SEQ ID NO: 2073639 - RNA, 19 nt, Artificial Sequence
  Description of Artificial Sequence: Synthetic oligonucleotide
cugguuaaacuugucacag

SEQ ID NO: 2073640 - RNA, 19 nt, Artificial Sequence
  Description of Artificial Sequence: Synthetic oligonucleotide
ugacccaaggacccacgcg

SEQ ID NO: 2073641 - RNA, 19 nt, Artificial Sequence
  Description of Artificial Sequence: Synthetic oligonucleotide
accuucgacccuuugaccu

SEQ ID NO: 2073642 - RNA, 19 nt, Artificial Sequence
  Description of Artificial Sequence: Synthetic oligonucleotide
ucacgauccucauccagcc

SEQ ID NO: 2073643 - RNA, 19 nt, Artificial Sequence
  Description of Artificial Sequence: Synthetic oligonucleotide
ucaccauuaucccgcagcu

SEQ ID NO: 2073644 - RNA, 19 nt, Artificial Sequence
  Description of Artificial Sequence: Synthetic oligonucleotide
gguuaaacuugucacaguc

SEQ ID NO: 2073645 - RNA, 19 nt, Artificial Sequence
  Description of Artificial Sequence: Synthetic oligonucleotide
uagucacccacucuccagc

SEQ ID NO: 2073646 - RNA, 19 nt, Artificial Sequence
  Description of Artificial Sequence: Synthetic oligonucleotide
aggucauugccucccucgc

SEQ ID NO: 2073647 - RNA, 19 nt, Artificial Sequence
  Description of Artificial Sequence: Synthetic oligonucleotide
guacucaugcggccgaggg

SEQ ID NO: 2073648 - RNA, 19 nt, Artificial Sequence
  Description of Artificial Sequence: Synthetic oligonucleotide
uguggcacacuuugaauuc

SEQ ID NO: 2073649 - RNA, 19 nt, Artificial Sequence
  Description of Artificial Sequence: Synthetic oligonucleotide
aauucggugcaggucccac

SEQ ID NO: 2073650 - RNA, 19 nt, Artificial Sequence
  Description of Artificial Sequence: Synthetic oligonucleotide
aauggcgagguuguagcug

SEQ ID NO: 2073651 - RNA, 19 nt, Artificial Sequence
  Description of Artificial Sequence: Synthetic oligonucleotide
caugcuuaugggcguaugc

SEQ ID NO: 2073652 - RNA, 19 nt, Artificial Sequence
  Description of Artificial Sequence: Synthetic oligonucleotide
acggaaagcaggguggagg

SEQ ID NO: 2073653 - RNA, 19 nt, Artificial Sequence
  Description of Artificial Sequence: Synthetic oligonucleotide
guacucaaugccaucacug

SEQ ID NO: 2073654 - RNA, 19 nt, Artificial Sequence
  Description of Artificial Sequence: Synthetic oligonucleotide
ugcugcaccgaccccgacg

SEQ ID NO: 2073655 - RNA, 19 nt, Artificial Sequence
  Description of Artificial Sequence: Synthetic oligonucleotide
uggcacacuuugaauucgg

SEQ ID NO: 2073656 - RNA, 19 nt, Artificial Sequence
  Description of Artificial Sequence: Synthetic oligonucleotide
aguacucaaugccaucacu

SEQ ID NO: 2073657 - RNA, 19 nt, Artificial Sequence
  Description of Artificial Sequence: Synthetic oligonucleotide
acacuuugaauucggugca

SEQ ID NO: 2073658 - RNA, 19 nt, Artificial Sequence
  Description of Artificial Sequence: Synthetic oligonucleotide
gggacagguacucaugcgg

SEQ ID NO: 2073659 - RNA, 19 nt, Artificial Sequence
  Description of Artificial Sequence: Synthetic oligonucleotide
aaugggguccccauaugug

SEQ ID NO: 2073660 - RNA, 19 nt, Artificial Sequence
  Description of Artificial Sequence: Synthetic oligonucleotide
uuugaauucggugcagguc

SEQ ID NO: 2073661 - RNA, 19 nt, Artificial Sequence
  Description of Artificial Sequence: Synthetic oligonucleotide
gaugcggucugccauggca

SEQ ID NO: 2073662 - RNA, 19 nt, Artificial Sequence
  Description of Artificial Sequence: Synthetic oligonucleotide
uggcguauaucucugccau

SEQ ID NO: 2073663 - RNA, 19 nt, Artificial Sequence
  Description of Artificial Sequence: Synthetic oligonucleotide
uuggcguauaucucugcca

SEQ ID NO: 2073664 - RNA, 19 nt, Artificial Sequence
  Description of Artificial Sequence: Synthetic oligonucleotide
uccagagacguguacuuaa

SEQ ID NO: 2073665 - RNA, 19 nt, Artificial Sequence
  Description of Artificial Sequence: Synthetic oligonucleotide
aaucaccccaucccuggca

SEQ ID NO: 2073666 - RNA, 19 nt, Artificial Sequence
  Description of Artificial Sequence: Synthetic oligonucleotide
acuuugaauucggugcagg

SEQ ID NO: 2073667 - RNA, 19 nt, Artificial Sequence
  Description of Artificial Sequence: Synthetic oligonucleotide
aaucccaguucuuggggau

SEQ ID NO: 2073668 - RNA, 19 nt, Artificial Sequence
  Description of Artificial Sequence: Synthetic oligonucleotide
gcugaugggaccauuggcg

SEQ ID NO: 2073669 - RNA, 19 nt, Artificial Sequence
  Description of Artificial Sequence: Synthetic oligonucleotide
uuaucccgcagcugauggg

SEQ ID NO: 2073670 - RNA, 19 nt, Artificial Sequence
  Description of Artificial Sequence: Synthetic oligonucleotide
gagguuguagcuggcaccc

SEQ ID NO: 2073671 - RNA, 19 nt, Artificial Sequence
  Description of Artificial Sequence: Synthetic oligonucleotide
uguaguuauccaucuucuc

SEQ ID NO: 2073672 - RNA, 19 nt, Artificial Sequence
  Description of Artificial Sequence: Synthetic oligonucleotide
acguguacuuaaacaaugg

SEQ ID NO: 2073673 - RNA, 19 nt, Artificial Sequence
  Description of Artificial Sequence: Synthetic oligonucleotide
cuuuguaggugcuggucac

SEQ ID NO: 2073674 - RNA, 19 nt, Artificial Sequence
  Description of Artificial Sequence: Synthetic oligonucleotide
guacuuaaacaaugggguc

SEQ ID NO: 2073675 - RNA, 19 nt, Artificial Sequence
  Description of Artificial Sequence: Synthetic oligonucleotide
ugguguggcacacuuugaa

SEQ ID NO: 2073676 - RNA, 19 nt, Artificial Sequence
  Description of Artificial Sequence: Synthetic oligonucleotide
caucaucuucucccgaccc

SEQ ID NO: 2073677 - RNA, 19 nt, Artificial Sequence
  Description of Artificial Sequence: Synthetic oligonucleotide
uccgagccugcuaggaucc

SEQ ID NO: 2073678 - RNA, 19 nt, Artificial Sequence
  Description of Artificial Sequence: Synthetic oligonucleotide
agcagguccggcccggacg

SEQ ID NO: 2073679 - RNA, 19 nt, Artificial Sequence
  Description of Artificial Sequence: Synthetic oligonucleotide
agccacagagacgaugugg

SEQ ID NO: 2073680 - RNA, 19 nt, Artificial Sequence
  Description of Artificial Sequence: Synthetic oligonucleotide
ugcaccgaccccgacgacg

SEQ ID NO: 2073681 - RNA, 19 nt, Artificial Sequence
  Description of Artificial Sequence: Synthetic oligonucleotide
ugugguugauagaggucug

SEQ ID NO: 2073682 - RNA, 19 nt, Artificial Sequence
  Description of Artificial Sequence: Synthetic oligonucleotide
augguuuacaacauuguuu

SEQ ID NO: 2073683 - RNA, 19 nt, Artificial Sequence
  Description of Artificial Sequence: Synthetic oligonucleotide
uuuccagagacguguacuu

SEQ ID NO: 2073684 - RNA, 19 nt, Artificial Sequence
  Description of Artificial Sequence: Synthetic oligonucleotide
cuggacggaaagcagggug

SEQ ID NO: 2073685 - RNA, 19 nt, Artificial Sequence
  Description of Artificial Sequence: Synthetic oligonucleotide
ugaauucggugcagguccc

SEQ ID NO: 2073686 - RNA, 19 nt, Artificial Sequence
  Description of Artificial Sequence: Synthetic oligonucleotide
uucaccccaugaguuacgg

SEQ ID NO: 2073687 - RNA, 19 nt, Artificial Sequence
  Description of Artificial Sequence: Synthetic oligonucleotide
guagucacccacucuccag

SEQ ID NO: 2073688 - RNA, 19 nt, Artificial Sequence
  Description of Artificial Sequence: Synthetic oligonucleotide
ucucgucagggauaccaug

SEQ ID NO: 2073689 - RNA, 19 nt, Artificial Sequence
  Description of Artificial Sequence: Synthetic oligonucleotide
uggggauauccgaugggga

SEQ ID NO: 2073690 - RNA, 19 nt, Artificial Sequence
  Description of Artificial Sequence: Synthetic oligonucleotide
aaguccugcgccccagcug

SEQ ID NO: 2073691 - RNA, 19 nt, Artificial Sequence
  Description of Artificial Sequence: Synthetic oligonucleotide
uguuuccagagacguguac

SEQ ID NO: 2073692 - RNA, 19 nt, Artificial Sequence
  Description of Artificial Sequence: Synthetic oligonucleotide
guauaucucugccaucauc

SEQ ID NO: 2073693 - RNA, 19 nt, Artificial Sequence
  Description of Artificial Sequence: Synthetic oligonucleotide
gacagggagccguagucac

SEQ ID NO: 2073694 - RNA, 19 nt, Artificial Sequence
  Description of Artificial Sequence: Synthetic oligonucleotide
cuuggggauauccgauggg

SEQ ID NO: 2073695 - RNA, 19 nt, Artificial Sequence
  Description of Artificial Sequence: Synthetic oligonucleotide
gacccuuugaccugaccca

SEQ ID NO: 2073696 - RNA, 19 nt, Artificial Sequence
  Description of Artificial Sequence: Synthetic oligonucleotide
acccgugccuccuuuguag

SEQ ID NO: 2073697 - RNA, 19 nt, Artificial Sequence
  Description of Artificial Sequence: Synthetic oligonucleotide
cacguuucuccaaucccag

SEQ ID NO: 2073698 - RNA, 19 nt, Artificial Sequence
  Description of Artificial Sequence: Synthetic oligonucleotide
cucaauggcgagguuguag

SEQ ID NO: 2073699 - RNA, 19 nt, Artificial Sequence
  Description of Artificial Sequence: Synthetic oligonucleotide
augggcguaugcccacacc

SEQ ID NO: 2073700 - RNA, 19 nt, Artificial Sequence
  Description of Artificial Sequence: Synthetic oligonucleotide
ucggcauagaugccuccug

SEQ ID NO: 2073701 - RNA, 19 nt, Artificial Sequence
  Description of Artificial Sequence: Synthetic oligonucleotide
ggauaccaugcuuaugggc

SEQ ID NO: 2073702 - RNA, 19 nt, Artificial Sequence
  Description of Artificial Sequence: Synthetic oligonucleotide
aguuauccaucuucucggu

SEQ ID NO: 2073703 - RNA, 19 nt, Artificial Sequence
  Description of Artificial Sequence: Synthetic oligonucleotide
cucgcaggagccagcauug

SEQ ID NO: 2073704 - RNA, 19 nt, Artificial Sequence
  Description of Artificial Sequence: Synthetic oligonucleotide
uccgauggggacagguacu

SEQ ID NO: 2073705 - RNA, 19 nt, Artificial Sequence
  Description of Artificial Sequence: Synthetic oligonucleotide
aggacccacgcgcucuggc

SEQ ID NO: 2073706 - RNA, 19 nt, Artificial Sequence
  Description of Artificial Sequence: Synthetic oligonucleotide
ggcaugguuuacaacauug

SEQ ID NO: 2073707 - RNA, 19 nt, Artificial Sequence
  Description of Artificial Sequence: Synthetic oligonucleotide
aaacaaugggguccccaua

SEQ ID NO: 2073708 - RNA, 19 nt, Artificial Sequence
  Description of Artificial Sequence: Synthetic oligonucleotide
acggaaguagaggcuggcc

SEQ ID NO: 2073709 - RNA, 19 nt, Artificial Sequence
  Description of Artificial Sequence: Synthetic oligonucleotide
ccugcuaggauccuggguc

SEQ ID NO: 2073710 - RNA, 19 nt, Artificial Sequence
  Description of Artificial Sequence: Synthetic oligonucleotide
uaaucaccccaucccuggc

SEQ ID NO: 2073711 - RNA, 19 nt, Artificial Sequence
  Description of Artificial Sequence: Synthetic oligonucleotide
guaugcccacaccggaagg

SEQ ID NO: 2073712 - RNA, 19 nt, Artificial Sequence
  Description of Artificial Sequence: Synthetic oligonucleotide
auaccaugcuuaugggcgu

SEQ ID NO: 2073713 - RNA, 19 nt, Artificial Sequence
  Description of Artificial Sequence: Synthetic oligonucleotide
ucugguccccgcgaagggg

SEQ ID NO: 2073714 - RNA, 19 nt, Artificial Sequence
  Description of Artificial Sequence: Synthetic oligonucleotide
uagaggcuggcccgcgccg

SEQ ID NO: 2073715 - RNA, 19 nt, Artificial Sequence
  Description of Artificial Sequence: Synthetic oligonucleotide
acguucuggacggaaagca

SEQ ID NO: 2073716 - RNA, 19 nt, Artificial Sequence
  Description of Artificial Sequence: Synthetic oligonucleotide
ggugguagcagguccggcc

SEQ ID NO: 2073717 - RNA, 19 nt, Artificial Sequence
  Description of Artificial Sequence: Synthetic oligonucleotide
cuuaugggcguaugcccac

SEQ ID NO: 2073718 - RNA, 19 nt, Artificial Sequence
  Description of Artificial Sequence: Synthetic oligonucleotide
uugacacccuucacguuuc

SEQ ID NO: 2073719 - RNA, 19 nt, Artificial Sequence
  Description of Artificial Sequence: Synthetic oligonucleotide
aggguaaguccugcgcccc

SEQ ID NO: 2073720 - RNA, 19 nt, Artificial Sequence
  Description of Artificial Sequence: Synthetic oligonucleotide
cacaccggaaggucauugc

SEQ ID NO: 2073721 - RNA, 19 nt, Artificial Sequence
  Description of Artificial Sequence: Synthetic oligonucleotide
ugguugauagaggucugcu

SEQ ID NO: 2073722 - RNA, 19 nt, Artificial Sequence
  Description of Artificial Sequence: Synthetic oligonucleotide
uuguaggugcuggucacga

SEQ ID NO: 2073723 - RNA, 19 nt, Artificial Sequence
  Description of Artificial Sequence: Synthetic oligonucleotide
uauccgauggggacaggua

SEQ ID NO: 2073724 - RNA, 19 nt, Artificial Sequence
  Description of Artificial Sequence: Synthetic oligonucleotide
gugguagcagguccggccc

SEQ ID NO: 2073725 - RNA, 19 nt, Artificial Sequence
  Description of Artificial Sequence: Synthetic oligonucleotide
ugguagcagguccggcccg

SEQ ID NO: 2073726 - RNA, 19 nt, Artificial Sequence
  Description of Artificial Sequence: Synthetic oligonucleotide
cauuggcguauaucucugc

SEQ ID NO: 2073727 - RNA, 19 nt, Artificial Sequence
  Description of Artificial Sequence: Synthetic oligonucleotide
uaugcccacaccggaaggu

SEQ ID NO: 2073728 - RNA, 19 nt, Artificial Sequence
  Description of Artificial Sequence: Synthetic oligonucleotide
cagagacguguacuuaaac

SEQ ID NO: 2073729 - RNA, 19 nt, Artificial Sequence
  Description of Artificial Sequence: Synthetic oligonucleotide
aguuacggacaauccagua

SEQ ID NO: 2073730 - RNA, 19 nt, Artificial Sequence
  Description of Artificial Sequence: Synthetic oligonucleotide
cuggagcucggcauagaug

SEQ ID NO: 2073731 - RNA, 19 nt, Artificial Sequence
  Description of Artificial Sequence: Synthetic oligonucleotide
gcacacuuugaauucggug

SEQ ID NO: 2073732 - RNA, 19 nt, Artificial Sequence
  Description of Artificial Sequence: Synthetic oligonucleotide
uacucaugcggccgagggu

SEQ ID NO: 2073733 - RNA, 19 nt, Artificial Sequence
  Description of Artificial Sequence: Synthetic oligonucleotide
augcggucugccauggcac

SEQ ID NO: 2073734 - RNA, 19 nt, Artificial Sequence
  Description of Artificial Sequence: Synthetic oligonucleotide
gcuggcguaguugacaccc

SEQ ID NO: 2073735 - RNA, 19 nt, Artificial Sequence
  Description of Artificial Sequence: Synthetic oligonucleotide
uaggauccugggucacgcg

SEQ ID NO: 2073736 - RNA, 19 nt, Artificial Sequence
  Description of Artificial Sequence: Synthetic oligonucleotide
cuccgagccugcuaggauc

SEQ ID NO: 2073737 - RNA, 19 nt, Artificial Sequence
  Description of Artificial Sequence: Synthetic oligonucleotide
agucuugguccuuggccug

SEQ ID NO: 2073738 - RNA, 19 nt, Artificial Sequence
  Description of Artificial Sequence: Synthetic oligonucleotide
uaugggcguaugcccacac

SEQ ID NO: 2073739 - RNA, 19 nt, Artificial Sequence
  Description of Artificial Sequence: Synthetic oligonucleotide
acaaugggguccccauaug

SEQ ID NO: 2073740 - RNA, 19 nt, Artificial Sequence
  Description of Artificial Sequence: Synthetic oligonucleotide
gcaccuuuccucuugaugu

SEQ ID NO: 2073741 - RNA, 19 nt, Artificial Sequence
  Description of Artificial Sequence: Synthetic oligonucleotide
cguguacuuaaacaauggg

SEQ ID NO: 2073742 - RNA, 19 nt, Artificial Sequence
  Description of Artificial Sequence: Synthetic oligonucleotide
guuauccaucuucucgguc

SEQ ID NO: 2073743 - RNA, 19 nt, Artificial Sequence
  Description of Artificial Sequence: Synthetic oligonucleotide
gcaccuucgacccuuugac

SEQ ID NO: 2073744 - RNA, 19 nt, Artificial Sequence
  Description of Artificial Sequence: Synthetic oligonucleotide
ucuccagcggguguaguuc

SEQ ID NO: 2073745 - RNA, 19 nt, Artificial Sequence
  Description of Artificial Sequence: Synthetic oligonucleotide
cauaugugcaggccuccuc

SEQ ID NO: 2073746 - RNA, 19 nt, Artificial Sequence
  Description of Artificial Sequence: Synthetic oligonucleotide
acucaugcggccgagggua

SEQ ID NO: 2073747 - RNA, 19 nt, Artificial Sequence
  Description of Artificial Sequence: Synthetic oligonucleotide
ugauguugaugcggucugc

SEQ ID NO: 2073748 - RNA, 19 nt, Artificial Sequence
  Description of Artificial Sequence: Synthetic oligonucleotide
caccuucgacccuuugacc

SEQ ID NO: 2073749 - RNA, 19 nt, Artificial Sequence
  Description of Artificial Sequence: Synthetic oligonucleotide
uacggacaauccaguacuc

SEQ ID NO: 2073750 - RNA, 19 nt, Artificial Sequence
  Description of Artificial Sequence: Synthetic oligonucleotide
guugacacccuucacguuu

SEQ ID NO: 2073751 - RNA, 19 nt, Artificial Sequence
  Description of Artificial Sequence: Synthetic oligonucleotide
agggccacgcaccuuuccu

SEQ ID NO: 2073752 - RNA, 19 nt, Artificial Sequence
  Description of Artificial Sequence: Synthetic oligonucleotide
cauagaugccuccugugua

SEQ ID NO: 2073753 - RNA, 19 nt, Artificial Sequence
  Description of Artificial Sequence: Synthetic oligonucleotide
gguuuacaacauuguuucc

SEQ ID NO: 2073754 - RNA, 19 nt, Artificial Sequence
  Description of Artificial Sequence: Synthetic oligonucleotide
uccuuuguaggugcugguc

SEQ ID NO: 2073755 - RNA, 19 nt, Artificial Sequence
  Description of Artificial Sequence: Synthetic oligonucleotide
agacguguacuuaaacaau

SEQ ID NO: 2073756 - RNA, 19 nt, Artificial Sequence
  Description of Artificial Sequence: Synthetic oligonucleotide
auucggugcaggucccaca

SEQ ID NO: 2073757 - RNA, 19 nt, Artificial Sequence
  Description of Artificial Sequence: Synthetic oligonucleotide
gucacccacucuccagcgg

SEQ ID NO: 2073758 - RNA, 19 nt, Artificial Sequence
  Description of Artificial Sequence: Synthetic oligonucleotide
ggucacgauccucauccag

SEQ ID NO: 2073759 - RNA, 19 nt, Artificial Sequence
  Description of Artificial Sequence: Synthetic oligonucleotide
ggauauccgauggggacag

SEQ ID NO: 2073760 - RNA, 19 nt, Artificial Sequence
  Description of Artificial Sequence: Synthetic oligonucleotide
cccgacgacgccaugcucc

SEQ ID NO: 2073761 - RNA, 19 nt, Artificial Sequence
  Description of Artificial Sequence: Synthetic oligonucleotide
ucgacccuuugaccugacc

SEQ ID NO: 2073762 - RNA, 19 nt, Artificial Sequence
  Description of Artificial Sequence: Synthetic oligonucleotide
ugaugggaccauuggcgua

SEQ ID NO: 2073763 - RNA, 19 nt, Artificial Sequence
  Description of Artificial Sequence: Synthetic oligonucleotide
cccggacggaaguagaggc

SEQ ID NO: 2073764 - RNA, 19 nt, Artificial Sequence
  Description of Artificial Sequence: Synthetic oligonucleotide
gacggaaguagaggcuggc

SEQ ID NO: 2073765 - RNA, 19 nt, Artificial Sequence
  Description of Artificial Sequence: Synthetic oligonucleotide
cugugggaugugcugguuc

SEQ ID NO: 2073766 - RNA, 19 nt, Artificial Sequence
  Description of Artificial Sequence: Synthetic oligonucleotide
aaagcaggguggagggcca

SEQ ID NO: 2073767 - RNA, 19 nt, Artificial Sequence
  Description of Artificial Sequence: Synthetic oligonucleotide
ucccgcagcugaugggacc

SEQ ID NO: 2073768 - RNA, 19 nt, Artificial Sequence
  Description of Artificial Sequence: Synthetic oligonucleotide
agacgaugugguugauaga

SEQ ID NO: 2073769 - RNA, 19 nt, Artificial Sequence
  Description of Artificial Sequence: Synthetic oligonucleotide
ggcauagaugccuccugug

SEQ ID NO: 2073770 - RNA, 19 nt, Artificial Sequence
  Description of Artificial Sequence: Synthetic oligonucleotide
gaccccgacgacgccaugc

SEQ ID NO: 2073771 - RNA, 19 nt, Artificial Sequence
  Description of Artificial Sequence: Synthetic oligonucleotide
agaggcuggcccgcgccgc

SEQ ID NO: 2073772 - RNA, 19 nt, Artificial Sequence
  Description of Artificial Sequence: Synthetic oligonucleotide
gcugccgugagcccagcag

SEQ ID NO: 2073773 - RNA, 19 nt, Artificial Sequence
  Description of Artificial Sequence: Synthetic oligonucleotide
ccucuugauguugaugcgg

SEQ ID NO: 2073774 - RNA, 19 nt, Artificial Sequence
  Description of Artificial Sequence: Synthetic oligonucleotide
gaugacguucuggacggaa

SEQ ID NO: 2073775 - RNA, 19 nt, Artificial Sequence
  Description of Artificial Sequence: Synthetic oligonucleotide
gccugguaguuguugcagg

SEQ ID NO: 2073776 - RNA, 19 nt, Artificial Sequence
  Description of Artificial Sequence: Synthetic oligonucleotide
gugguugauagaggucugc

SEQ ID NO: 2073777 - RNA, 19 nt, Artificial Sequence
  Description of Artificial Sequence: Synthetic oligonucleotide
gaccauuggcguauaucuc

SEQ ID NO: 2073778 - RNA, 19 nt, Artificial Sequence
  Description of Artificial Sequence: Synthetic oligonucleotide
cuuugaauucggugcaggu

SEQ ID NO: 2073779 - RNA, 19 nt, Artificial Sequence
  Description of Artificial Sequence: Synthetic oligonucleotide
cuucucggucaccauuauc

SEQ ID NO: 2073780 - RNA, 19 nt, Artificial Sequence
  Description of Artificial Sequence: Synthetic oligonucleotide
caggucucgucagggauac

SEQ ID NO: 2073781 - RNA, 19 nt, Artificial Sequence
  Description of Artificial Sequence: Synthetic oligonucleotide
acggacaauccaguacuca

SEQ ID NO: 2073782 - RNA, 19 nt, Artificial Sequence
  Description of Artificial Sequence: Synthetic oligonucleotide
uaguuguugcaggucucgu

SEQ ID NO: 2073783 - RNA, 19 nt, Artificial Sequence
  Description of Artificial Sequence: Synthetic oligonucleotide
guguggcacacuuugaauu

SEQ ID NO: 2073784 - RNA, 19 nt, Artificial Sequence
  Description of Artificial Sequence: Synthetic oligonucleotide
gcagguccggcccggacgg

SEQ ID NO: 2073785 - RNA, 19 nt, Artificial Sequence
  Description of Artificial Sequence: Synthetic oligonucleotide
agcggguguaguucuggau

SEQ ID NO: 2073786 - RNA, 19 nt, Artificial Sequence
  Description of Artificial Sequence: Synthetic oligonucleotide
guucaccccaugaguuacg

SEQ ID NO: 2073787 - RNA, 19 nt, Artificial Sequence
  Description of Artificial Sequence: Synthetic oligonucleotide
uuaugggcguaugcccaca

SEQ ID NO: 2073788 - RNA, 19 nt, Artificial Sequence
  Description of Artificial Sequence: Synthetic oligonucleotide
ucaccccaugaguuacgga

SEQ ID NO: 2073789 - RNA, 19 nt, Artificial Sequence
  Description of Artificial Sequence: Synthetic oligonucleotide
gacggaaagcaggguggag

SEQ ID NO: 2073790 - RNA, 19 nt, Artificial Sequence
  Description of Artificial Sequence: Synthetic oligonucleotide
ucccgacccgacagggagc

SEQ ID NO: 2073791 - RNA, 19 nt, Artificial Sequence
  Description of Artificial Sequence: Synthetic oligonucleotide
gguguaguucuggauggug

SEQ ID NO: 2073792 - RNA, 19 nt, Artificial Sequence
  Description of Artificial Sequence: Synthetic oligonucleotide
cacccuucacguuucucca

SEQ ID NO: 2073793 - RNA, 19 nt, Artificial Sequence
  Description of Artificial Sequence: Synthetic oligonucleotide
acguuucuccaaucccagu

SEQ ID NO: 2073794 - RNA, 19 nt, Artificial Sequence
  Description of Artificial Sequence: Synthetic oligonucleotide
aaggacccacgcgcucugg

SEQ ID NO: 2073795 - RNA, 19 nt, Artificial Sequence
  Description of Artificial Sequence: Synthetic oligonucleotide
uagaugccuccuguguagu

SEQ ID NO: 2073796 - RNA, 19 nt, Artificial Sequence
  Description of Artificial Sequence: Synthetic oligonucleotide
caugguuuacaacauuguu

SEQ ID NO: 2073797 - RNA, 19 nt, Artificial Sequence
  Description of Artificial Sequence: Synthetic oligonucleotide
agccgcaguacugugggau

SEQ ID NO: 2073798 - RNA, 19 nt, Artificial Sequence
  Description of Artificial Sequence: Synthetic oligonucleotide
gccaucaucuucucccgac

SEQ ID NO: 2073799 - RNA, 19 nt, Artificial Sequence
  Description of Artificial Sequence: Synthetic oligonucleotide
cuuaaacaauggggucccc

SEQ ID NO: 2073800 - RNA, 19 nt, Artificial Sequence
  Description of Artificial Sequence: Synthetic oligonucleotide
cacgauccucauccagccc

SEQ ID NO: 2073801 - RNA, 19 nt, Artificial Sequence
  Description of Artificial Sequence: Synthetic oligonucleotide
uggcguaguugacacccuu

SEQ ID NO: 2073802 - RNA, 19 nt, Artificial Sequence
  Description of Artificial Sequence: Synthetic oligonucleotide
auccaguacucaaugccau

SEQ ID NO: 2073803 - RNA, 19 nt, Artificial Sequence
  Description of Artificial Sequence: Synthetic oligonucleotide
gcggcugcugcaccgaccc

SEQ ID NO: 2073804 - RNA, 19 nt, Artificial Sequence
  Description of Artificial Sequence: Synthetic oligonucleotide
ugcuggcguaguugacacc

SEQ ID NO: 2073805 - RNA, 19 nt, Artificial Sequence
  Description of Artificial Sequence: Synthetic oligonucleotide
gaugggaccauuggcguau

SEQ ID NO: 2073806 - RNA, 19 nt, Artificial Sequence
  Description of Artificial Sequence: Synthetic oligonucleotide
gcugcaccgaccccgacga

SEQ ID NO: 2073807 - RNA, 19 nt, Artificial Sequence
  Description of Artificial Sequence: Synthetic oligonucleotide
gaggcuggcccgcgccgcg

SEQ ID NO: 2073808 - RNA, 19 nt, Artificial Sequence
  Description of Artificial Sequence: Synthetic oligonucleotide
gcguaguugacacccuuca

SEQ ID NO: 2073809 - RNA, 19 nt, Artificial Sequence
  Description of Artificial Sequence: Synthetic oligonucleotide
aguugacacccuucacguu

SEQ ID NO: 2073810 - RNA, 19 nt, Artificial Sequence
  Description of Artificial Sequence: Synthetic oligonucleotide
cgaggguaaguccugcgcc

SEQ ID NO: 2073811 - RNA, 19 nt, Artificial Sequence
  Description of Artificial Sequence: Synthetic oligonucleotide
ccuuuguaggugcugguca

SEQ ID NO: 2073812 - RNA, 19 nt, Artificial Sequence
  Description of Artificial Sequence: Synthetic oligonucleotide
augcggccgaggguaaguc

SEQ ID NO: 2073813 - RNA, 19 nt, Artificial Sequence
  Description of Artificial Sequence: Synthetic oligonucleotide
caaugggguccccauaugu

SEQ ID NO: 2073814 - RNA, 19 nt, Artificial Sequence
  Description of Artificial Sequence: Synthetic oligonucleotide
cugcuaggauccuggguca

SEQ ID NO: 2073815 - RNA, 19 nt, Artificial Sequence
  Description of Artificial Sequence: Synthetic oligonucleotide
accccaugaguuacggaca

SEQ ID NO: 2073816 - RNA, 19 nt, Artificial Sequence
  Description of Artificial Sequence: Synthetic oligonucleotide
gauauccgauggggacagg

SEQ ID NO: 2073817 - RNA, 19 nt, Artificial Sequence
  Description of Artificial Sequence: Synthetic oligonucleotide
gccuccuguguaguuaucc

SEQ ID NO: 2073818 - RNA, 19 nt, Artificial Sequence
  Description of Artificial Sequence: Synthetic oligonucleotide
guguaguucuggauggugu

SEQ ID NO: 2073819 - RNA, 19 nt, Artificial Sequence
  Description of Artificial Sequence: Synthetic oligonucleotide
ugacacccuucacguuucu

SEQ ID NO: 2073820 - RNA, 19 nt, Artificial Sequence
  Description of Artificial Sequence: Synthetic oligonucleotide
ccauuggcguauaucucug

SEQ ID NO: 2073821 - RNA, 19 nt, Artificial Sequence
  Description of Artificial Sequence: Synthetic oligonucleotide
cugaugggaccauuggcgu

SEQ ID NO: 2073822 - RNA, 19 nt, Artificial Sequence
  Description of Artificial Sequence: Synthetic oligonucleotide
ucaugcggccgaggguaag

SEQ ID NO: 2073823 - RNA, 19 nt, Artificial Sequence
  Description of Artificial Sequence: Synthetic oligonucleotide
augacguucuggacggaaa

SEQ ID NO: 2073824 - RNA, 19 nt, Artificial Sequence
  Description of Artificial Sequence: Synthetic oligonucleotide
ggucugcuccuggagcucg

SEQ ID NO: 2073825 - RNA, 19 nt, Artificial Sequence
  Description of Artificial Sequence: Synthetic oligonucleotide
agcaggguggagggccacg

SEQ ID NO: 2073826 - RNA, 19 nt, Artificial Sequence
  Description of Artificial Sequence: Synthetic oligonucleotide
cauugccucccucgcagga

SEQ ID NO: 2073827 - RNA, 19 nt, Artificial Sequence
  Description of Artificial Sequence: Synthetic oligonucleotide
caaggacccacgcgcucug

SEQ ID NO: 2073828 - RNA, 19 nt, Artificial Sequence
  Description of Artificial Sequence: Synthetic oligonucleotide
ggccugguaguuguugcag

SEQ ID NO: 2073829 - RNA, 19 nt, Artificial Sequence
  Description of Artificial Sequence: Synthetic oligonucleotide
gcuuaugggcguaugccca

SEQ ID NO: 2073830 - RNA, 19 nt, Artificial Sequence
  Description of Artificial Sequence: Synthetic oligonucleotide
ggacggaaguagaggcugg

SEQ ID NO: 2073831 - RNA, 19 nt, Artificial Sequence
  Description of Artificial Sequence: Synthetic oligonucleotide
gguuccuggugaugcuggc

SEQ ID NO: 2073832 - RNA, 19 nt, Artificial Sequence
  Description of Artificial Sequence: Synthetic oligonucleotide
gguacucaugcggccgagg

SEQ ID NO: 2073833 - RNA, 19 nt, Artificial Sequence
  Description of Artificial Sequence: Synthetic oligonucleotide
gaguuacggacaauccagu

SEQ ID NO: 2073834 - RNA, 19 nt, Artificial Sequence
  Description of Artificial Sequence: Synthetic oligonucleotide
ugcugccgugagcccagca

SEQ ID NO: 2073835 - RNA, 19 nt, Artificial Sequence
  Description of Artificial Sequence: Synthetic oligonucleotide
cguaugcccacaccggaag

SEQ ID NO: 2073836 - RNA, 19 nt, Artificial Sequence
  Description of Artificial Sequence: Synthetic oligonucleotide
cacgcgcugcaccuucgac

SEQ ID NO: 2073837 - RNA, 19 nt, Artificial Sequence
  Description of Artificial Sequence: Synthetic oligonucleotide
gggauauccgauggggaca

SEQ ID NO: 2073838 - RNA, 19 nt, Artificial Sequence
  Description of Artificial Sequence: Synthetic oligonucleotide
ugcuggucacgauccucau

SEQ ID NO: 2073839 - RNA, 19 nt, Artificial Sequence
  Description of Artificial Sequence: Synthetic oligonucleotide
gccgaggguaaguccugcg

SEQ ID NO: 2073840 - RNA, 19 nt, Artificial Sequence
  Description of Artificial Sequence: Synthetic oligonucleotide
uggcgagguuguagcuggc

SEQ ID NO: 2073841 - RNA, 19 nt, Artificial Sequence
  Description of Artificial Sequence: Synthetic oligonucleotide
uggcacuggugcugccgug

SEQ ID NO: 2073842 - RNA, 19 nt, Artificial Sequence
  Description of Artificial Sequence: Synthetic oligonucleotide
gggaccauuggcguauauc

SEQ ID NO: 2073843 - RNA, 19 nt, Artificial Sequence
  Description of Artificial Sequence: Synthetic oligonucleotide
gggcguaugcccacaccgg

SEQ ID NO: 2073844 - RNA, 19 nt, Artificial Sequence
  Description of Artificial Sequence: Synthetic oligonucleotide
acccuucacguuucuccaa

SEQ ID NO: 2073845 - RNA, 19 nt, Artificial Sequence
  Description of Artificial Sequence: Synthetic oligonucleotide
uccuggugaugcuggcgua

SEQ ID NO: 2073846 - RNA, 19 nt, Artificial Sequence
  Description of Artificial Sequence: Synthetic oligonucleotide
ggcguaugcccacaccgga

SEQ ID NO: 2073847 - RNA, 19 nt, Artificial Sequence
  Description of Artificial Sequence: Synthetic oligonucleotide
uucgacccuuugaccugac

SEQ ID NO: 2073848 - RNA, 19 nt, Artificial Sequence
  Description of Artificial Sequence: Synthetic oligonucleotide
cugcuccgagccugcuagg

SEQ ID NO: 2073849 - RNA, 19 nt, Artificial Sequence
  Description of Artificial Sequence: Synthetic oligonucleotide
gucacgcgcugcaccuucg

SEQ ID NO: 2073850 - RNA, 19 nt, Artificial Sequence
  Description of Artificial Sequence: Synthetic oligonucleotide
caccauuaucccgcagcug

SEQ ID NO: 2073851 - RNA, 19 nt, Artificial Sequence
  Description of Artificial Sequence: Synthetic oligonucleotide
acccuuugaccugacccaa

SEQ ID NO: 2073852 - RNA, 19 nt, Artificial Sequence
  Description of Artificial Sequence: Synthetic oligonucleotide
gguagcagguccggcccgg

SEQ ID NO: 2073853 - RNA, 19 nt, Artificial Sequence
  Description of Artificial Sequence: Synthetic oligonucleotide
caccggaaggucauugccu

SEQ ID NO: 2073854 - RNA, 19 nt, Artificial Sequence
  Description of Artificial Sequence: Synthetic oligonucleotide
ccuucgacccuuugaccug

SEQ ID NO: 2073855 - RNA, 19 nt, Artificial Sequence
  Description of Artificial Sequence: Synthetic oligonucleotide
ccguagucacccacucucc

SEQ ID NO: 2073856 - RNA, 19 nt, Artificial Sequence
  Description of Artificial Sequence: Synthetic oligonucleotide
agguacucaugcggccgag

SEQ ID NO: 2073857 - RNA, 19 nt, Artificial Sequence
  Description of Artificial Sequence: Synthetic oligonucleotide
uagcuggcacccgugccuc

SEQ ID NO: 2073858 - RNA, 19 nt, Artificial Sequence
  Description of Artificial Sequence: Synthetic oligonucleotide
ugggaccauuggcguauau

SEQ ID NO: 2073859 - RNA, 19 nt, Artificial Sequence
  Description of Artificial Sequence: Synthetic oligonucleotide
ccugacccaaggacccacg

SEQ ID NO: 2073860 - RNA, 19 nt, Artificial Sequence
  Description of Artificial Sequence: Synthetic oligonucleotide
aggugcuggucacgauccu

SEQ ID NO: 2073861 - RNA, 19 nt, Artificial Sequence
  Description of Artificial Sequence: Synthetic oligonucleotide
cagguacucaugcggccga

SEQ ID NO: 2073862 - RNA, 19 nt, Artificial Sequence
  Description of Artificial Sequence: Synthetic oligonucleotide
gccgcaguacugugggaug

SEQ ID NO: 2073863 - RNA, 19 nt, Artificial Sequence
  Description of Artificial Sequence: Synthetic oligonucleotide
ggucauugccucccucgca

SEQ ID NO: 2073864 - RNA, 19 nt, Artificial Sequence
  Description of Artificial Sequence: Synthetic oligonucleotide
uaccaugcuuaugggcgua

SEQ ID NO: 2073865 - RNA, 19 nt, Artificial Sequence
  Description of Artificial Sequence: Synthetic oligonucleotide
cuucgacccuuugaccuga

SEQ ID NO: 2073866 - RNA, 19 nt, Artificial Sequence
  Description of Artificial Sequence: Synthetic oligonucleotide
guucuuggggauauccgau

SEQ ID NO: 2073867 - RNA, 19 nt, Artificial Sequence
  Description of Artificial Sequence: Synthetic oligonucleotide
gcccggacggaaguagagg

SEQ ID NO: 2073868 - RNA, 19 nt, Artificial Sequence
  Description of Artificial Sequence: Synthetic oligonucleotide
cccgugccuccuuuguagg

SEQ ID NO: 2073869 - RNA, 19 nt, Artificial Sequence
  Description of Artificial Sequence: Synthetic oligonucleotide
caguacugugggaugugcu

SEQ ID NO: 2073870 - RNA, 19 nt, Artificial Sequence
  Description of Artificial Sequence: Synthetic oligonucleotide
ccgacagggagccguaguc

SEQ ID NO: 2073871 - RNA, 19 nt, Artificial Sequence
  Description of Artificial Sequence: Synthetic oligonucleotide
gcaccgaccccgacgacgc

SEQ ID NO: 2073872 - RNA, 19 nt, Artificial Sequence
  Description of Artificial Sequence: Synthetic oligonucleotide
caucccuggcaugguuuac

SEQ ID NO: 2073873 - RNA, 19 nt, Artificial Sequence
  Description of Artificial Sequence: Synthetic oligonucleotide
gggagccguagucacccac

SEQ ID NO: 2073874 - RNA, 19 nt, Artificial Sequence
  Description of Artificial Sequence: Synthetic oligonucleotide
cacagucgaugacguucug

SEQ ID NO: 2073875 - RNA, 19 nt, Artificial Sequence
  Description of Artificial Sequence: Synthetic oligonucleotide
cacgcaccuuuccucuuga

SEQ ID NO: 2073876 - RNA, 19 nt, Artificial Sequence
  Description of Artificial Sequence: Synthetic oligonucleotide
gguguggcacacuuugaau

SEQ ID NO: 2073877 - RNA, 19 nt, Artificial Sequence
  Description of Artificial Sequence: Synthetic oligonucleotide
gacaccccagccagccaca

SEQ ID NO: 2073878 - RNA, 19 nt, Artificial Sequence
  Description of Artificial Sequence: Synthetic oligonucleotide
acccacucuccagcgggug

SEQ ID NO: 2073879 - RNA, 19 nt, Artificial Sequence
  Description of Artificial Sequence: Synthetic oligonucleotide
ccuggugaugcuggcguag

SEQ ID NO: 2073880 - RNA, 19 nt, Artificial Sequence
  Description of Artificial Sequence: Synthetic oligonucleotide
cagcggguguaguucugga

SEQ ID NO: 2073881 - RNA, 19 nt, Artificial Sequence
  Description of Artificial Sequence: Synthetic oligonucleotide
caauggcgagguuguagcu

SEQ ID NO: 2073882 - RNA, 19 nt, Artificial Sequence
  Description of Artificial Sequence: Synthetic oligonucleotide
aggucucgucagggauacc

SEQ ID NO: 2073883 - RNA, 19 nt, Artificial Sequence
  Description of Artificial Sequence: Synthetic oligonucleotide
accaugcuuaugggcguau

SEQ ID NO: 2073884 - RNA, 19 nt, Artificial Sequence
  Description of Artificial Sequence: Synthetic oligonucleotide
ggcccggacggaaguagag

SEQ ID NO: 2073885 - RNA, 19 nt, Artificial Sequence
  Description of Artificial Sequence: Synthetic oligonucleotide
gggccacgcaccuuuccuc

SEQ ID NO: 2073886 - RNA, 19 nt, Artificial Sequence
  Description of Artificial Sequence: Synthetic oligonucleotide
gcaugguuuacaacauugu

SEQ ID NO: 2073887 - RNA, 19 nt, Artificial Sequence
  Description of Artificial Sequence: Synthetic oligonucleotide
uggcacccgugccuccuuu

SEQ ID NO: 2073888 - RNA, 19 nt, Artificial Sequence
  Description of Artificial Sequence: Synthetic oligonucleotide
cggacaauccaguacucaa

SEQ ID NO: 2073889 - RNA, 19 nt, Artificial Sequence
  Description of Artificial Sequence: Synthetic oligonucleotide
gagccgcaguacuguggga

SEQ ID NO: 2073890 - RNA, 19 nt, Artificial Sequence
  Description of Artificial Sequence: Synthetic oligonucleotide
cccuuugaccugacccaag

SEQ ID NO: 2073891 - RNA, 19 nt, Artificial Sequence
  Description of Artificial Sequence: Synthetic oligonucleotide
acgcaccuuuccucuugau

SEQ ID NO: 2073892 - RNA, 19 nt, Artificial Sequence
  Description of Artificial Sequence: Synthetic oligonucleotide
ggaugugcugguuccuggu

SEQ ID NO: 2073893 - RNA, 19 nt, Artificial Sequence
  Description of Artificial Sequence: Synthetic oligonucleotide
ggguucaccccaugaguua

SEQ ID NO: 2073894 - RNA, 19 nt, Artificial Sequence
  Description of Artificial Sequence: Synthetic oligonucleotide
ccacgcaccuuuccucuug

SEQ ID NO: 2073895 - RNA, 19 nt, Artificial Sequence
  Description of Artificial Sequence: Synthetic oligonucleotide
cugcaccuucgacccuuug

SEQ ID NO: 2073896 - RNA, 19 nt, Artificial Sequence
  Description of Artificial Sequence: Synthetic oligonucleotide
cuccagcggguguaguucu

SEQ ID NO: 2073897 - RNA, 19 nt, Artificial Sequence
  Description of Artificial Sequence: Synthetic oligonucleotide
gugcugguuccuggugaug

SEQ ID NO: 2073898 - RNA, 19 nt, Artificial Sequence
  Description of Artificial Sequence: Synthetic oligonucleotide
cccgacccgacagggagcc

SEQ ID NO: 2073899 - RNA, 19 nt, Artificial Sequence
  Description of Artificial Sequence: Synthetic oligonucleotide
ccacaccggaaggucauug

SEQ ID NO: 2073900 - RNA, 19 nt, Artificial Sequence
  Description of Artificial Sequence: Synthetic oligonucleotide
acccgacagggagccguag

SEQ ID NO: 2073901 - RNA, 19 nt, Artificial Sequence
  Description of Artificial Sequence: Synthetic oligonucleotide
cgccgcgccagccagcacc

SEQ ID NO: 2073902 - RNA, 19 nt, Artificial Sequence
  Description of Artificial Sequence: Synthetic oligonucleotide
ccagagacguguacuuaaa

SEQ ID NO: 2073903 - RNA, 19 nt, Artificial Sequence
  Description of Artificial Sequence: Synthetic oligonucleotide
cucggcauagaugccuccu

SEQ ID NO: 2073904 - RNA, 19 nt, Artificial Sequence
  Description of Artificial Sequence: Synthetic oligonucleotide
cucaugcggccgaggguaa

SEQ ID NO: 2073905 - RNA, 19 nt, Artificial Sequence
  Description of Artificial Sequence: Synthetic oligonucleotide
agguccggcccggacggaa

SEQ ID NO: 2073906 - RNA, 19 nt, Artificial Sequence
  Description of Artificial Sequence: Synthetic oligonucleotide
ccgauggggacagguacuc

SEQ ID NO: 2073907 - RNA, 19 nt, Artificial Sequence
  Description of Artificial Sequence: Synthetic oligonucleotide
caggguggagggccacgca

SEQ ID NO: 2073908 - RNA, 19 nt, Artificial Sequence
  Description of Artificial Sequence: Synthetic oligonucleotide
uccggcccggacggaagua

SEQ ID NO: 2073909 - RNA, 19 nt, Artificial Sequence
  Description of Artificial Sequence: Synthetic oligonucleotide
ccacagucgaugacguucu

SEQ ID NO: 2073910 - RNA, 19 nt, Artificial Sequence
  Description of Artificial Sequence: Synthetic oligonucleotide
gguggagggccacgcaccu

SEQ ID NO: 2073911 - RNA, 19 nt, Artificial Sequence
  Description of Artificial Sequence: Synthetic oligonucleotide
ccaugcuuaugggcguaug

SEQ ID NO: 2073912 - RNA, 19 nt, Artificial Sequence
  Description of Artificial Sequence: Synthetic oligonucleotide
caccgaccccgacgacgcc

SEQ ID NO: 2073913 - RNA, 19 nt, Artificial Sequence
  Description of Artificial Sequence: Synthetic oligonucleotide
cuggcccgcgccgcgccag

SEQ ID NO: 2073914 - RNA, 19 nt, Artificial Sequence
  Description of Artificial Sequence: Synthetic oligonucleotide
ggagccguagucacccacu

SEQ ID NO: 2073915 - RNA, 19 nt, Artificial Sequence
  Description of Artificial Sequence: Synthetic oligonucleotide
gucucgucagggauaccau

SEQ ID NO: 2073916 - RNA, 19 nt, Artificial Sequence
  Description of Artificial Sequence: Synthetic oligonucleotide
caugcggccgaggguaagu

SEQ ID NO: 2073917 - RNA, 19 nt, Artificial Sequence
  Description of Artificial Sequence: Synthetic oligonucleotide
cacccgugccuccuuugua

SEQ ID NO: 2073918 - RNA, 19 nt, Artificial Sequence
  Description of Artificial Sequence: Synthetic oligonucleotide
cuggcguaguugacacccu

SEQ ID NO: 2073919 - RNA, 19 nt, Artificial Sequence
  Description of Artificial Sequence: Synthetic oligonucleotide
guccugcgccccagcuggg

SEQ ID NO: 2073920 - RNA, 19 nt, Artificial Sequence
  Description of Artificial Sequence: Synthetic oligonucleotide
cugcugcaccgaccccgac

SEQ ID NO: 2073921 - RNA, 19 nt, Artificial Sequence
  Description of Artificial Sequence: Synthetic oligonucleotide
ccccaugaguuacggacaa

SEQ ID NO: 2073922 - RNA, 19 nt, Artificial Sequence
  Description of Artificial Sequence: Synthetic oligonucleotide
cugcaccgaccccgacgac

SEQ ID NO: 2073923 - RNA, 19 nt, Artificial Sequence
  Description of Artificial Sequence: Synthetic oligonucleotide
gacccgacagggagccgua

SEQ ID NO: 2073924 - RNA, 19 nt, Artificial Sequence
  Description of Artificial Sequence: Synthetic oligonucleotide
ccaucccuggcaugguuua

SEQ ID NO: 2073925 - RNA, 19 nt, Artificial Sequence
  Description of Artificial Sequence: Synthetic oligonucleotide
gcggccgaggguaaguccu

SEQ ID NO: 2073926 - RNA, 19 nt, Artificial Sequence
  Description of Artificial Sequence: Synthetic oligonucleotide
cucucaccccaggguucac

SEQ ID NO: 2073927 - RNA, 19 nt, Artificial Sequence
  Description of Artificial Sequence: Synthetic oligonucleotide
ggcacacuuugaauucggu

SEQ ID NO: 2073928 - RNA, 19 nt, Artificial Sequence
  Description of Artificial Sequence: Synthetic oligonucleotide
cagcauugccacagucgau

SEQ ID NO: 2073929 - RNA, 19 nt, Artificial Sequence
  Description of Artificial Sequence: Synthetic oligonucleotide
augggaccauuggcguaua

SEQ ID NO: 2073930 - RNA, 19 nt, Artificial Sequence
  Description of Artificial Sequence: Synthetic oligonucleotide
ccucgcaggagccagcauu

SEQ ID NO: 2073931 - RNA, 19 nt, Artificial Sequence
  Description of Artificial Sequence: Synthetic oligonucleotide
cacccacucuccagcgggu

SEQ ID NO: 2073932 - RNA, 19 nt, Artificial Sequence
  Description of Artificial Sequence: Synthetic oligonucleotide
gcugggcaaucuggucccc

SEQ ID NO: 2073933 - RNA, 19 nt, Artificial Sequence
  Description of Artificial Sequence: Synthetic oligonucleotide
cgagccugcuaggauccug

SEQ ID NO: 2073934 - RNA, 19 nt, Artificial Sequence
  Description of Artificial Sequence: Synthetic oligonucleotide
gcuccgagccugcuaggau

SEQ ID NO: 2073935 - RNA, 19 nt, Artificial Sequence
  Description of Artificial Sequence: Synthetic oligonucleotide
cuggaugguguggcacacu

SEQ ID NO: 2073936 - RNA, 19 nt, Artificial Sequence
  Description of Artificial Sequence: Synthetic oligonucleotide
ccaaggacccacgcgcucu

SEQ ID NO: 2073937 - RNA, 19 nt, Artificial Sequence
  Description of Artificial Sequence: Synthetic oligonucleotide
gugcugccgugagcccagc

SEQ ID NO: 2073938 - RNA, 19 nt, Artificial Sequence
  Description of Artificial Sequence: Synthetic oligonucleotide
ccggacggaaguagaggcu

SEQ ID NO: 2073939 - RNA, 19 nt, Artificial Sequence
  Description of Artificial Sequence: Synthetic oligonucleotide
cccuucacguuucuccaau

SEQ ID NO: 2073940 - RNA, 19 nt, Artificial Sequence
  Description of Artificial Sequence: Synthetic oligonucleotide
gccgcgccagccagcacca

SEQ ID NO: 2073941 - RNA, 19 nt, Artificial Sequence
  Description of Artificial Sequence: Synthetic oligonucleotide
ccccgacgacgccaugcuc

SEQ ID NO: 2073942 - RNA, 19 nt, Artificial Sequence
  Description of Artificial Sequence: Synthetic oligonucleotide
ccgacgacgccaugcuccu

SEQ ID NO: 2073943 - RNA, 19 nt, Artificial Sequence
  Description of Artificial Sequence: Synthetic oligonucleotide
ccacucuccagcgggugua

SEQ ID NO: 2073944 - RNA, 19 nt, Artificial Sequence
  Description of Artificial Sequence: Synthetic oligonucleotide
ccccaggguucaccccaug

SEQ ID NO: 2073945 - RNA, 19 nt, Artificial Sequence
  Description of Artificial Sequence: Synthetic oligonucleotide
gcuggcacccgugccuccu

SEQ ID NO: 2073946 - RNA, 19 nt, Artificial Sequence
  Description of Artificial Sequence: Synthetic oligonucleotide
cccgacagggagccguagu

SEQ ID NO: 2073947 - RNA, 19 nt, Artificial Sequence
  Description of Artificial Sequence: Synthetic oligonucleotide
ccgcggcugcugcaccgac

SEQ ID NO: 2073948 - RNA, 19 nt, Artificial Sequence
  Description of Artificial Sequence: Synthetic oligonucleotide
ccgugccuccuuuguaggu

SEQ ID NO: 2073949 - RNA, 19 nt, Artificial Sequence
  Description of Artificial Sequence: Synthetic oligonucleotide
gcuggcccgcgccgcgcca

SEQ ID NO: 2073950 - RNA, 19 nt, Artificial Sequence
  Description of Artificial Sequence: Synthetic oligonucleotide
ccgcaguacugugggaugu

SEQ ID NO: 2073951 - RNA, 19 nt, Artificial Sequence
  Description of Artificial Sequence: Synthetic oligonucleotide
cgauccucauccagccccu

SEQ ID NO: 2073952 - RNA, 19 nt, Artificial Sequence
  Description of Artificial Sequence: Synthetic oligonucleotide
gcccacaccggaaggucau

SEQ ID NO: 2073953 - RNA, 19 nt, Artificial Sequence
  Description of Artificial Sequence: Synthetic oligonucleotide
cggcccggacggaaguaga

SEQ ID NO: 2073954 - RNA, 19 nt, Artificial Sequence
  Description of Artificial Sequence: Synthetic oligonucleotide
ccacagagacgaugugguu

SEQ ID NO: 2073955 - RNA, 19 nt, Artificial Sequence
  Description of Artificial Sequence: Synthetic oligonucleotide
cguauaucucugccaucau

SEQ ID NO: 2073956 - RNA, 19 nt, Artificial Sequence
  Description of Artificial Sequence: Synthetic oligonucleotide
ccgacccgacagggagccg

SEQ ID NO: 2073957 - RNA, 19 nt, Artificial Sequence
  Description of Artificial Sequence: Synthetic oligonucleotide
cuggcacccgugccuccuu

SEQ ID NO: 2073958 - RNA, 19 nt, Artificial Sequence
  Description of Artificial Sequence: Synthetic oligonucleotide
cagguccggcccggacgga

SEQ ID NO: 2073959 - RNA, 19 nt, Artificial Sequence
  Description of Artificial Sequence: Synthetic oligonucleotide
cgacccgacagggagccgu

SEQ ID NO: 2073960 - RNA, 19 nt, Artificial Sequence
  Description of Artificial Sequence: Synthetic oligonucleotide
guggagggccacgcaccuu

SEQ ID NO: 2073961 - RNA, 19 nt, Artificial Sequence
  Description of Artificial Sequence: Synthetic oligonucleotide
cgacgacgccaugcuccug

SEQ ID NO: 2073962 - RNA, 19 nt, Artificial Sequence
  Description of Artificial Sequence: Synthetic oligonucleotide
gcugcaccuucgacccuuu

SEQ ID NO: 2073963 - RNA, 19 nt, Artificial Sequence
  Description of Artificial Sequence: Synthetic oligonucleotide
cgccaugcuccugcuccga

SEQ ID NO: 2073964 - RNA, 19 nt, Artificial Sequence
  Description of Artificial Sequence: Synthetic oligonucleotide
cccaugaguuacggacaau

SEQ ID NO: 2073965 - RNA, 19 nt, Artificial Sequence
  Description of Artificial Sequence: Synthetic oligonucleotide
gcgcugcaccuucgacccu

SEQ ID NO: 2073966 - RNA, 19 nt, Artificial Sequence
  Description of Artificial Sequence: Synthetic oligonucleotide
cgaugacguucuggacgga

SEQ ID NO: 2073967 - RNA, 19 nt, Artificial Sequence
  Description of Artificial Sequence: Synthetic oligonucleotide
ccgcgccagccagcaccag

SEQ ID NO: 2073968 - RNA, 19 nt, Artificial Sequence
  Description of Artificial Sequence: Synthetic oligonucleotide
gggucacgcgcugcaccuu

SEQ ID NO: 2073969 - RNA, 19 nt, Artificial Sequence
  Description of Artificial Sequence: Synthetic oligonucleotide
cccucgcaggagccagcau

SEQ ID NO: 2073970 - RNA, 19 nt, Artificial Sequence
  Description of Artificial Sequence: Synthetic oligonucleotide
ccgagccugcuaggauccu

SEQ ID NO: 2073971 - RNA, 19 nt, Artificial Sequence
  Description of Artificial Sequence: Synthetic oligonucleotide
ucaaauacgauuuucacag

SEQ ID NO: 2073972 - RNA, 19 nt, Artificial Sequence
  Description of Artificial Sequence: Synthetic oligonucleotide
aagguauaggaauagaagg

SEQ ID NO: 2073973 - RNA, 19 nt, Artificial Sequence
  Description of Artificial Sequence: Synthetic oligonucleotide
guaacuuucacucagguag

SEQ ID NO: 2073974 - RNA, 19 nt, Artificial Sequence
  Description of Artificial Sequence: Synthetic oligonucleotide
aaguaaaagggcuuuggac

SEQ ID NO: 2073975 - RNA, 19 nt, Artificial Sequence
  Description of Artificial Sequence: Synthetic oligonucleotide
uggaaauaguugaacaugg

SEQ ID NO: 2073976 - RNA, 19 nt, Artificial Sequence
  Description of Artificial Sequence: Synthetic oligonucleotide
uccccuuggaacaagaccg

SEQ ID NO: 2073977 - RNA, 19 nt, Artificial Sequence
  Description of Artificial Sequence: Synthetic oligonucleotide
aaagucccuauacaggugg

SEQ ID NO: 2073978 - RNA, 19 nt, Artificial Sequence
  Description of Artificial Sequence: Synthetic oligonucleotide
aaaucggccccucaacucc

SEQ ID NO: 2073979 - RNA, 19 nt, Artificial Sequence
  Description of Artificial Sequence: Synthetic oligonucleotide
gauuacguaacuuucacuc

SEQ ID NO: 2073980 - RNA, 19 nt, Artificial Sequence
  Description of Artificial Sequence: Synthetic oligonucleotide
ucuaucaggagccucaaug

SEQ ID NO: 2073981 - RNA, 19 nt, Artificial Sequence
  Description of Artificial Sequence: Synthetic oligonucleotide
aguuuaagcagggugaagc

SEQ ID NO: 2073982 - RNA, 19 nt, Artificial Sequence
  Description of Artificial Sequence: Synthetic oligonucleotide
uuuaucaaagucccuauac

SEQ ID NO: 2073983 - RNA, 19 nt, Artificial Sequence
  Description of Artificial Sequence: Synthetic oligonucleotide
uuggauuuaucaaaguccc

SEQ ID NO: 2073984 - RNA, 19 nt, Artificial Sequence
  Description of Artificial Sequence: Synthetic oligonucleotide
gaaauaguugaacauggcc

SEQ ID NO: 2073985 - RNA, 19 nt, Artificial Sequence
  Description of Artificial Sequence: Synthetic oligonucleotide
ugugaaauccagaaggcug

SEQ ID NO: 2073986 - RNA, 19 nt, Artificial Sequence
  Description of Artificial Sequence: Synthetic oligonucleotide
acagcuuugugugaaaucc

SEQ ID NO: 2073987 - RNA, 19 nt, Artificial Sequence
  Description of Artificial Sequence: Synthetic oligonucleotide
uuaagcagggugaagcggg

SEQ ID NO: 2073988 - RNA, 19 nt, Artificial Sequence
  Description of Artificial Sequence: Synthetic oligonucleotide
cuugacauagccaauauca

SEQ ID NO: 2073989 - RNA, 19 nt, Artificial Sequence
  Description of Artificial Sequence: Synthetic oligonucleotide
aauaucaugaggagcugcc

SEQ ID NO: 2073990 - RNA, 19 nt, Artificial Sequence
  Description of Artificial Sequence: Synthetic oligonucleotide
uaucaaagucccuauacag

SEQ ID NO: 2073991 - RNA, 19 nt, Artificial Sequence
  Description of Artificial Sequence: Synthetic oligonucleotide
aaauacgauuuucacagcu

SEQ ID NO: 2073992 - RNA, 19 nt, Artificial Sequence
  Description of Artificial Sequence: Synthetic oligonucleotide
uugaccagccuacaguugg

SEQ ID NO: 2073993 - RNA, 19 nt, Artificial Sequence
  Description of Artificial Sequence: Synthetic oligonucleotide
agucaaauacgauuuucac

SEQ ID NO: 2073994 - RNA, 19 nt, Artificial Sequence
  Description of Artificial Sequence: Synthetic oligonucleotide
ugucgauggagucaaauac

SEQ ID NO: 2073995 - RNA, 19 nt, Artificial Sequence
  Description of Artificial Sequence: Synthetic oligonucleotide
aacuccucuaucaggagcc

SEQ ID NO: 2073996 - RNA, 19 nt, Artificial Sequence
  Description of Artificial Sequence: Synthetic oligonucleotide
uuacguaacuuucacucag

SEQ ID NO: 2073997 - RNA, 19 nt, Artificial Sequence
  Description of Artificial Sequence: Synthetic oligonucleotide
gaagguauaggaauagaag

SEQ ID NO: 2073998 - RNA, 19 nt, Artificial Sequence
  Description of Artificial Sequence: Synthetic oligonucleotide
aaggugguauccaaugugc

SEQ ID NO: 2073999 - RNA, 19 nt, Artificial Sequence
  Description of Artificial Sequence: Synthetic oligonucleotide
ucuggcaaaacccagcaaa

SEQ ID NO: 2074000 - RNA, 19 nt, Artificial Sequence
  Description of Artificial Sequence: Synthetic oligonucleotide
guaaaagggcuuuggaccg

SEQ ID NO: 2074001 - RNA, 19 nt, Artificial Sequence
  Description of Artificial Sequence: Synthetic oligonucleotide
agguauaggaauagaaggc

SEQ ID NO: 2074002 - RNA, 19 nt, Artificial Sequence
  Description of Artificial Sequence: Synthetic oligonucleotide
aucaugaggagcugccucc

SEQ ID NO: 2074003 - RNA, 19 nt, Artificial Sequence
  Description of Artificial Sequence: Synthetic oligonucleotide
ucagguagggaaaucggcc

SEQ ID NO: 2074004 - RNA, 19 nt, Artificial Sequence
  Description of Artificial Sequence: Synthetic oligonucleotide
auagccaauaucaugagga

SEQ ID NO: 2074005 - RNA, 19 nt, Artificial Sequence
  Description of Artificial Sequence: Synthetic oligonucleotide
cuugucuguaccaaucagc

SEQ ID NO: 2074006 - RNA, 19 nt, Artificial Sequence
  Description of Artificial Sequence: Synthetic oligonucleotide
augugcuuggcucccaggc

SEQ ID NO: 2074007 - RNA, 19 nt, Artificial Sequence
  Description of Artificial Sequence: Synthetic oligonucleotide
uauaggaauagaaggcaac

SEQ ID NO: 2074008 - RNA, 19 nt, Artificial Sequence
  Description of Artificial Sequence: Synthetic oligonucleotide
acugccacgauguguuugc

SEQ ID NO: 2074009 - RNA, 19 nt, Artificial Sequence
  Description of Artificial Sequence: Synthetic oligonucleotide
aagauguaccgggaaaggg

SEQ ID NO: 2074010 - RNA, 19 nt, Artificial Sequence
  Description of Artificial Sequence: Synthetic oligonucleotide
cuaucaggagccucaaugc

SEQ ID NO: 2074011 - RNA, 19 nt, Artificial Sequence
  Description of Artificial Sequence: Synthetic oligonucleotide
uauccaaugugcuuggcuc

SEQ ID NO: 2074012 - RNA, 19 nt, Artificial Sequence
  Description of Artificial Sequence: Synthetic oligonucleotide
aaacccagcaaacuuggau

SEQ ID NO: 2074013 - RNA, 19 nt, Artificial Sequence
  Description of Artificial Sequence: Synthetic oligonucleotide
guuuaagcagggugaagcg

SEQ ID NO: 2074014 - RNA, 19 nt, Artificial Sequence
  Description of Artificial Sequence: Synthetic oligonucleotide
uccacgccgccauagagcg

SEQ ID NO: 2074015 - RNA, 19 nt, Artificial Sequence
  Description of Artificial Sequence: Synthetic oligonucleotide
gaaggugguauccaaugug

SEQ ID NO: 2074016 - RNA, 19 nt, Artificial Sequence
  Description of Artificial Sequence: Synthetic oligonucleotide
acagcauugaugcuguagu

SEQ ID NO: 2074017 - RNA, 19 nt, Artificial Sequence
  Description of Artificial Sequence: Synthetic oligonucleotide
ucaguggugauuacguaac

SEQ ID NO: 2074018 - RNA, 19 nt, Artificial Sequence
  Description of Artificial Sequence: Synthetic oligonucleotide
ucgauggagucaaauacga

SEQ ID NO: 2074019 - RNA, 19 nt, Artificial Sequence
  Description of Artificial Sequence: Synthetic oligonucleotide
uguaccaaucagccagugg

SEQ ID NO: 2074020 - RNA, 19 nt, Artificial Sequence
  Description of Artificial Sequence: Synthetic oligonucleotide
uuucuggcaaaacccagca

SEQ ID NO: 2074021 - RNA, 19 nt, Artificial Sequence
  Description of Artificial Sequence: Synthetic oligonucleotide
gaaggcaacagcauugaug

SEQ ID NO: 2074022 - RNA, 19 nt, Artificial Sequence
  Description of Artificial Sequence: Synthetic oligonucleotide
uuuaagcagggugaagcgg

SEQ ID NO: 2074023 - RNA, 19 nt, Artificial Sequence
  Description of Artificial Sequence: Synthetic oligonucleotide
ucuccuagcauauggcccc

SEQ ID NO: 2074024 - RNA, 19 nt, Artificial Sequence
  Description of Artificial Sequence: Synthetic oligonucleotide
ucgaagggguaccagagga

SEQ ID NO: 2074025 - RNA, 19 nt, Artificial Sequence
  Description of Artificial Sequence: Synthetic oligonucleotide
aaaacugccacgauguguu

SEQ ID NO: 2074026 - RNA, 19 nt, Artificial Sequence
  Description of Artificial Sequence: Synthetic oligonucleotide
uacguaacuuucacucagg

SEQ ID NO: 2074027 - RNA, 19 nt, Artificial Sequence
  Description of Artificial Sequence: Synthetic oligonucleotide
ucaucuccuagcauauggc

SEQ ID NO: 2074028 - RNA, 19 nt, Artificial Sequence
  Description of Artificial Sequence: Synthetic oligonucleotide
agauguaccgggaaagggg

SEQ ID NO: 2074029 - RNA, 19 nt, Artificial Sequence
  Description of Artificial Sequence: Synthetic oligonucleotide
aggacaaucccaccauccg

SEQ ID NO: 2074030 - RNA, 19 nt, Artificial Sequence
  Description of Artificial Sequence: Synthetic oligonucleotide
uaccagaggauccacucca

SEQ ID NO: 2074031 - RNA, 19 nt, Artificial Sequence
  Description of Artificial Sequence: Synthetic oligonucleotide
aucuccuagcauauggccc

SEQ ID NO: 2074032 - RNA, 19 nt, Artificial Sequence
  Description of Artificial Sequence: Synthetic oligonucleotide
auuacguaacuuucacuca

SEQ ID NO: 2074033 - RNA, 19 nt, Artificial Sequence
  Description of Artificial Sequence: Synthetic oligonucleotide
cagaggauccacuccagcc

SEQ ID NO: 2074034 - RNA, 19 nt, Artificial Sequence
  Description of Artificial Sequence: Synthetic oligonucleotide
uggcaaaacugccacgaug

SEQ ID NO: 2074035 - RNA, 19 nt, Artificial Sequence
  Description of Artificial Sequence: Synthetic oligonucleotide
gaagauguaccgggaaagg

SEQ ID NO: 2074036 - RNA, 19 nt, Artificial Sequence
  Description of Artificial Sequence: Synthetic oligonucleotide
agccaauaucaugaggagc

SEQ ID NO: 2074037 - RNA, 19 nt, Artificial Sequence
  Description of Artificial Sequence: Synthetic oligonucleotide
ucagccagugguuugugcu

SEQ ID NO: 2074038 - RNA, 19 nt, Artificial Sequence
  Description of Artificial Sequence: Synthetic oligonucleotide
agguagggaaaucggcccc

SEQ ID NO: 2074039 - RNA, 19 nt, Artificial Sequence
  Description of Artificial Sequence: Synthetic oligonucleotide
accuggaaauaguugaaca

SEQ ID NO: 2074040 - RNA, 19 nt, Artificial Sequence
  Description of Artificial Sequence: Synthetic oligonucleotide
aaugccaggagaaagccuu

SEQ ID NO: 2074041 - RNA, 19 nt, Artificial Sequence
  Description of Artificial Sequence: Synthetic oligonucleotide
uguuugcccagcaucuccc

SEQ ID NO: 2074042 - RNA, 19 nt, Artificial Sequence
  Description of Artificial Sequence: Synthetic oligonucleotide
uaggaauagaaggcaacag

SEQ ID NO: 2074043 - RNA, 19 nt, Artificial Sequence
  Description of Artificial Sequence: Synthetic oligonucleotide
cuuggaacaagaccggguc

SEQ ID NO: 2074044 - RNA, 19 nt, Artificial Sequence
  Description of Artificial Sequence: Synthetic oligonucleotide
uggcgauggaaccugcugc

SEQ ID NO: 2074045 - RNA, 19 nt, Artificial Sequence
  Description of Artificial Sequence: Synthetic oligonucleotide
uucgaagggguaccagagg

SEQ ID NO: 2074046 - RNA, 19 nt, Artificial Sequence
  Description of Artificial Sequence: Synthetic oligonucleotide
caucuccuagcauauggcc

SEQ ID NO: 2074047 - RNA, 19 nt, Artificial Sequence
  Description of Artificial Sequence: Synthetic oligonucleotide
cuucgaagggguaccagag

SEQ ID NO: 2074048 - RNA, 19 nt, Artificial Sequence
  Description of Artificial Sequence: Synthetic oligonucleotide
aggauuugcccauccuugg

SEQ ID NO: 2074049 - RNA, 19 nt, Artificial Sequence
  Description of Artificial Sequence: Synthetic oligonucleotide
cuggaaauaguugaacaug

SEQ ID NO: 2074050 - RNA, 19 nt, Artificial Sequence
  Description of Artificial Sequence: Synthetic oligonucleotide
uggugauuacguaacuuuc

SEQ ID NO: 2074051 - RNA, 19 nt, Artificial Sequence
  Description of Artificial Sequence: Synthetic oligonucleotide
ucaaugccaggagaaagcc

SEQ ID NO: 2074052 - RNA, 19 nt, Artificial Sequence
  Description of Artificial Sequence: Synthetic oligonucleotide
cucagguagggaaaucggc

SEQ ID NO: 2074053 - RNA, 19 nt, Artificial Sequence
  Description of Artificial Sequence: Synthetic oligonucleotide
uacgauuuucacagcuuug

SEQ ID NO: 2074054 - RNA, 19 nt, Artificial Sequence
  Description of Artificial Sequence: Synthetic oligonucleotide
uuccuagccgaucuggcac

SEQ ID NO: 2074055 - RNA, 19 nt, Artificial Sequence
  Description of Artificial Sequence: Synthetic oligonucleotide
uagccaauaucaugaggag

SEQ ID NO: 2074056 - RNA, 19 nt, Artificial Sequence
  Description of Artificial Sequence: Synthetic oligonucleotide
aucaguggugauuacguaa

SEQ ID NO: 2074057 - RNA, 19 nt, Artificial Sequence
  Description of Artificial Sequence: Synthetic oligonucleotide
acaagaccgggucaaucuc

SEQ ID NO: 2074058 - RNA, 19 nt, Artificial Sequence
  Description of Artificial Sequence: Synthetic oligonucleotide
gucgauggagucaaauacg

SEQ ID NO: 2074059 - RNA, 19 nt, Artificial Sequence
  Description of Artificial Sequence: Synthetic oligonucleotide
uaucaugaggagcugccuc

SEQ ID NO: 2074060 - RNA, 19 nt, Artificial Sequence
  Description of Artificial Sequence: Synthetic oligonucleotide
agacugccguaguuuaagc

SEQ ID NO: 2074061 - RNA, 19 nt, Artificial Sequence
  Description of Artificial Sequence: Synthetic oligonucleotide
ucaggagccucaaugcuuc

SEQ ID NO: 2074062 - RNA, 19 nt, Artificial Sequence
  Description of Artificial Sequence: Synthetic oligonucleotide
ggugaagcgggauaaggag

SEQ ID NO: 2074063 - RNA, 19 nt, Artificial Sequence
  Description of Artificial Sequence: Synthetic oligonucleotide
accagccuacaguuggagc

SEQ ID NO: 2074064 - RNA, 19 nt, Artificial Sequence
  Description of Artificial Sequence: Synthetic oligonucleotide
caggauuugcccauccuug

SEQ ID NO: 2074065 - RNA, 19 nt, Artificial Sequence
  Description of Artificial Sequence: Synthetic oligonucleotide
ugauuacguaacuuucacu

SEQ ID NO: 2074066 - RNA, 19 nt, Artificial Sequence
  Description of Artificial Sequence: Synthetic oligonucleotide
auaggaauagaaggcaaca

SEQ ID NO: 2074067 - RNA, 19 nt, Artificial Sequence
  Description of Artificial Sequence: Synthetic oligonucleotide
guaccaaucagccaguggu

SEQ ID NO: 2074068 - RNA, 19 nt, Artificial Sequence
  Description of Artificial Sequence: Synthetic oligonucleotide
uugacauagccaauaucau

SEQ ID NO: 2074069 - RNA, 19 nt, Artificial Sequence
  Description of Artificial Sequence: Synthetic oligonucleotide
cucaacuccucuaucagga

SEQ ID NO: 2074070 - RNA, 19 nt, Artificial Sequence
  Description of Artificial Sequence: Synthetic oligonucleotide
ugaagcgggauaaggaguu

SEQ ID NO: 2074071 - RNA, 19 nt, Artificial Sequence
  Description of Artificial Sequence: Synthetic oligonucleotide
gauggagucaaauacgauu

SEQ ID NO: 2074072 - RNA, 19 nt, Artificial Sequence
  Description of Artificial Sequence: Synthetic oligonucleotide
gugauuacguaacuuucac

SEQ ID NO: 2074073 - RNA, 19 nt, Artificial Sequence
  Description of Artificial Sequence: Synthetic oligonucleotide
auaguugaacauggccugc

SEQ ID NO: 2074074 - RNA, 19 nt, Artificial Sequence
  Description of Artificial Sequence: Synthetic oligonucleotide
ugucccagcgaugaggaca

SEQ ID NO: 2074075 - RNA, 19 nt, Artificial Sequence
  Description of Artificial Sequence: Synthetic oligonucleotide
ugccguaguuuaagcaggg

SEQ ID NO: 2074076 - RNA, 19 nt, Artificial Sequence
  Description of Artificial Sequence: Synthetic oligonucleotide
ucguugauccucuccacac

SEQ ID NO: 2074077 - RNA, 19 nt, Artificial Sequence
  Description of Artificial Sequence: Synthetic oligonucleotide
cacucagguagggaaaucg

SEQ ID NO: 2074078 - RNA, 19 nt, Artificial Sequence
  Description of Artificial Sequence: Synthetic oligonucleotide
ugggucaaugccaggagaa

SEQ ID NO: 2074079 - RNA, 19 nt, Artificial Sequence
  Description of Artificial Sequence: Synthetic oligonucleotide
uuggaaaguaaaagggcuu

SEQ ID NO: 2074080 - RNA, 19 nt, Artificial Sequence
  Description of Artificial Sequence: Synthetic oligonucleotide
auacgauuuucacagcuuu

SEQ ID NO: 2074081 - RNA, 19 nt, Artificial Sequence
  Description of Artificial Sequence: Synthetic oligonucleotide
auugaugcuguaguccaag

SEQ ID NO: 2074082 - RNA, 19 nt, Artificial Sequence
  Description of Artificial Sequence: Synthetic oligonucleotide
guugaacauggccugcuug

SEQ ID NO: 2074083 - RNA, 19 nt, Artificial Sequence
  Description of Artificial Sequence: Synthetic oligonucleotide
gaccgggucaaucucuggc

SEQ ID NO: 2074084 - RNA, 19 nt, Artificial Sequence
  Description of Artificial Sequence: Synthetic oligonucleotide
cuccccuuggaacaagacc

SEQ ID NO: 2074085 - RNA, 19 nt, Artificial Sequence
  Description of Artificial Sequence: Synthetic oligonucleotide
ugaggagcugccuccaagu

SEQ ID NO: 2074086 - RNA, 19 nt, Artificial Sequence
  Description of Artificial Sequence: Synthetic oligonucleotide
gaggacaaucccaccaucc

SEQ ID NO: 2074087 - RNA, 19 nt, Artificial Sequence
  Description of Artificial Sequence: Synthetic oligonucleotide
ucccuccguagcaacgucg

SEQ ID NO: 2074088 - RNA, 19 nt, Artificial Sequence
  Description of Artificial Sequence: Synthetic oligonucleotide
gaaaucggccccucaacuc

SEQ ID NO: 2074089 - RNA, 19 nt, Artificial Sequence
  Description of Artificial Sequence: Synthetic oligonucleotide
guagcuguggcgauggaac

SEQ ID NO: 2074090 - RNA, 19 nt, Artificial Sequence
  Description of Artificial Sequence: Synthetic oligonucleotide
caacuccucuaucaggagc

SEQ ID NO: 2074091 - RNA, 19 nt, Artificial Sequence
  Description of Artificial Sequence: Synthetic oligonucleotide
uuggaacaagaccggguca

SEQ ID NO: 2074092 - RNA, 19 nt, Artificial Sequence
  Description of Artificial Sequence: Synthetic oligonucleotide
aguuggagccugucccagc

SEQ ID NO: 2074093 - RNA, 19 nt, Artificial Sequence
  Description of Artificial Sequence: Synthetic oligonucleotide
uugucgauggagucaaaua

SEQ ID NO: 2074094 - RNA, 19 nt, Artificial Sequence
  Description of Artificial Sequence: Synthetic oligonucleotide
aaguugucgauggagucaa

SEQ ID NO: 2074095 - RNA, 19 nt, Artificial Sequence
  Description of Artificial Sequence: Synthetic oligonucleotide
agcgcagccauccuaugcu

SEQ ID NO: 2074096 - RNA, 19 nt, Artificial Sequence
  Description of Artificial Sequence: Synthetic oligonucleotide
uccgguguagcuguggcga

SEQ ID NO: 2074097 - RNA, 19 nt, Artificial Sequence
  Description of Artificial Sequence: Synthetic oligonucleotide
gggauaaggaguucugggc

SEQ ID NO: 2074098 - RNA, 19 nt, Artificial Sequence
  Description of Artificial Sequence: Synthetic oligonucleotide
acucucggagccaucaggg

SEQ ID NO: 2074099 - RNA, 19 nt, Artificial Sequence
  Description of Artificial Sequence: Synthetic oligonucleotide
ucugcgauuuucuggcaaa

SEQ ID NO: 2074100 - RNA, 19 nt, Artificial Sequence
  Description of Artificial Sequence: Synthetic oligonucleotide
cuuuggaccgugugccucc

SEQ ID NO: 2074101 - RNA, 19 nt, Artificial Sequence
  Description of Artificial Sequence: Synthetic oligonucleotide
cucggagccaucaggguug

SEQ ID NO: 2074102 - RNA, 19 nt, Artificial Sequence
  Description of Artificial Sequence: Synthetic oligonucleotide
ccagccuacaguuggagcc

SEQ ID NO: 2074103 - RNA, 19 nt, Artificial Sequence
  Description of Artificial Sequence: Synthetic oligonucleotide
aauacgauuuucacagcuu

SEQ ID NO: 2074104 - RNA, 19 nt, Artificial Sequence
  Description of Artificial Sequence: Synthetic oligonucleotide
ccagcgaugaggacaaucc

SEQ ID NO: 2074105 - RNA, 19 nt, Artificial Sequence
  Description of Artificial Sequence: Synthetic oligonucleotide
caauaucaugaggagcugc

SEQ ID NO: 2074106 - RNA, 19 nt, Artificial Sequence
  Description of Artificial Sequence: Synthetic oligonucleotide
aagggaaggugguauccaa

SEQ ID NO: 2074107 - RNA, 19 nt, Artificial Sequence
  Description of Artificial Sequence: Synthetic oligonucleotide
cuacaguuggagccugucc

SEQ ID NO: 2074108 - RNA, 19 nt, Artificial Sequence
  Description of Artificial Sequence: Synthetic oligonucleotide
agggugaagcgggauaagg

SEQ ID NO: 2074109 - RNA, 19 nt, Artificial Sequence
  Description of Artificial Sequence: Synthetic oligonucleotide
uuggcucccaggcuggcac

SEQ ID NO: 2074110 - RNA, 19 nt, Artificial Sequence
  Description of Artificial Sequence: Synthetic oligonucleotide
auuccuagccgaucuggca

SEQ ID NO: 2074111 - RNA, 19 nt, Artificial Sequence
  Description of Artificial Sequence: Synthetic oligonucleotide
uagagcgcagccauccuau

SEQ ID NO: 2074112 - RNA, 19 nt, Artificial Sequence
  Description of Artificial Sequence: Synthetic oligonucleotide
cacucucggagccaucagg

SEQ ID NO: 2074113 - RNA, 19 nt, Artificial Sequence
  Description of Artificial Sequence: Synthetic oligonucleotide
uucugcgauuuucuggcaa

SEQ ID NO: 2074114 - RNA, 19 nt, Artificial Sequence
  Description of Artificial Sequence: Synthetic oligonucleotide
acguaacuuucacucaggu

SEQ ID NO: 2074115 - RNA, 19 nt, Artificial Sequence
  Description of Artificial Sequence: Synthetic oligonucleotide
agcuuugugugaaauccag

SEQ ID NO: 2074116 - RNA, 19 nt, Artificial Sequence
  Description of Artificial Sequence: Synthetic oligonucleotide
auuuaucaaagucccuaua

SEQ ID NO: 2074117 - RNA, 19 nt, Artificial Sequence
  Description of Artificial Sequence: Synthetic oligonucleotide
gauuccuagccgaucuggc

SEQ ID NO: 2074118 - RNA, 19 nt, Artificial Sequence
  Description of Artificial Sequence: Synthetic oligonucleotide
gacugccguaguuuaagca

SEQ ID NO: 2074119 - RNA, 19 nt, Artificial Sequence
  Description of Artificial Sequence: Synthetic oligonucleotide
acucagguagggaaaucgg

SEQ ID NO: 2074120 - RNA, 19 nt, Artificial Sequence
  Description of Artificial Sequence: Synthetic oligonucleotide
ugcuugacauagccaauau

SEQ ID NO: 2074121 - RNA, 19 nt, Artificial Sequence
  Description of Artificial Sequence: Synthetic oligonucleotide
gaagggguaccagaggauc

SEQ ID NO: 2074122 - RNA, 19 nt, Artificial Sequence
  Description of Artificial Sequence: Synthetic oligonucleotide
cauccuaugcugccgccgc

SEQ ID NO: 2074123 - RNA, 19 nt, Artificial Sequence
  Description of Artificial Sequence: Synthetic oligonucleotide
gguauaggaauagaaggca

SEQ ID NO: 2074124 - RNA, 19 nt, Artificial Sequence
  Description of Artificial Sequence: Synthetic oligonucleotide
auuugcccauccuuggaaa

SEQ ID NO: 2074125 - RNA, 19 nt, Artificial Sequence
  Description of Artificial Sequence: Synthetic oligonucleotide
ucggcccugggucaaugcc

SEQ ID NO: 2074126 - RNA, 19 nt, Artificial Sequence
  Description of Artificial Sequence: Synthetic oligonucleotide
cuccaaguugucgauggag

SEQ ID NO: 2074127 - RNA, 19 nt, Artificial Sequence
  Description of Artificial Sequence: Synthetic oligonucleotide
aagcgggauaaggaguucu

SEQ ID NO: 2074128 - RNA, 19 nt, Artificial Sequence
  Description of Artificial Sequence: Synthetic oligonucleotide
ugaggacaaucccaccauc

SEQ ID NO: 2074129 - RNA, 19 nt, Artificial Sequence
  Description of Artificial Sequence: Synthetic oligonucleotide
aggguugaccagccuacag

SEQ ID NO: 2074130 - RNA, 19 nt, Artificial Sequence
  Description of Artificial Sequence: Synthetic oligonucleotide
gggaaggugguauccaaug

SEQ ID NO: 2074131 - RNA, 19 nt, Artificial Sequence
  Description of Artificial Sequence: Synthetic oligonucleotide
cuuccacgccgccauagag

SEQ ID NO: 2074132 - RNA, 19 nt, Artificial Sequence
  Description of Artificial Sequence: Synthetic oligonucleotide
gauaaggaguucugggccu

SEQ ID NO: 2074133 - RNA, 19 nt, Artificial Sequence
  Description of Artificial Sequence: Synthetic oligonucleotide
caaagucccuauacaggug

SEQ ID NO: 2074134 - RNA, 19 nt, Artificial Sequence
  Description of Artificial Sequence: Synthetic oligonucleotide
gagcgcagccauccuaugc

SEQ ID NO: 2074135 - RNA, 19 nt, Artificial Sequence
  Description of Artificial Sequence: Synthetic oligonucleotide
ugcaccuucugcgauuuuc

SEQ ID NO: 2074136 - RNA, 19 nt, Artificial Sequence
  Description of Artificial Sequence: Synthetic oligonucleotide
uccuagccgaucuggcacc

SEQ ID NO: 2074137 - RNA, 19 nt, Artificial Sequence
  Description of Artificial Sequence: Synthetic oligonucleotide
uagcuguggcgauggaacc

SEQ ID NO: 2074138 - RNA, 19 nt, Artificial Sequence
  Description of Artificial Sequence: Synthetic oligonucleotide
cauccgguguagcuguggc

SEQ ID NO: 2074139 - RNA, 19 nt, Artificial Sequence
  Description of Artificial Sequence: Synthetic oligonucleotide
auccgguguagcuguggcg

SEQ ID NO: 2074140 - RNA, 19 nt, Artificial Sequence
  Description of Artificial Sequence: Synthetic oligonucleotide
accgggucaaucucuggca

SEQ ID NO: 2074141 - RNA, 19 nt, Artificial Sequence
  Description of Artificial Sequence: Synthetic oligonucleotide
cagacugccguaguuuaag

SEQ ID NO: 2074142 - RNA, 19 nt, Artificial Sequence
  Description of Artificial Sequence: Synthetic oligonucleotide
ggucaaugccaggagaaag

SEQ ID NO: 2074143 - RNA, 19 nt, Artificial Sequence
  Description of Artificial Sequence: Synthetic oligonucleotide
gaggauuccuagccgaucu

SEQ ID NO: 2074144 - RNA, 19 nt, Artificial Sequence
  Description of Artificial Sequence: Synthetic oligonucleotide
agcgaugaggacaauccca

SEQ ID NO: 2074145 - RNA, 19 nt, Artificial Sequence
  Description of Artificial Sequence: Synthetic oligonucleotide
aagucccuauacagguggg

SEQ ID NO: 2074146 - RNA, 19 nt, Artificial Sequence
  Description of Artificial Sequence: Synthetic oligonucleotide
cacagcuuugugugaaauc

SEQ ID NO: 2074147 - RNA, 19 nt, Artificial Sequence
  Description of Artificial Sequence: Synthetic oligonucleotide
auguguuugcccagcaucu

SEQ ID NO: 2074148 - RNA, 19 nt, Artificial Sequence
  Description of Artificial Sequence: Synthetic oligonucleotide
uaguuuaagcagggugaag

SEQ ID NO: 2074149 - RNA, 19 nt, Artificial Sequence
  Description of Artificial Sequence: Synthetic oligonucleotide
ggugggugaggauuccuag

SEQ ID NO: 2074150 - RNA, 19 nt, Artificial Sequence
  Description of Artificial Sequence: Synthetic oligonucleotide
gugggugaggauuccuagc

SEQ ID NO: 2074151 - RNA, 19 nt, Artificial Sequence
  Description of Artificial Sequence: Synthetic oligonucleotide
ggagccaucaggguugacc

SEQ ID NO: 2074152 - RNA, 19 nt, Artificial Sequence
  Description of Artificial Sequence: Synthetic oligonucleotide
aagaccgggucaaucucug

SEQ ID NO: 2074153 - RNA, 19 nt, Artificial Sequence
  Description of Artificial Sequence: Synthetic oligonucleotide
guggcgauggaaccugcug

SEQ ID NO: 2074154 - RNA, 19 nt, Artificial Sequence
  Description of Artificial Sequence: Synthetic oligonucleotide
uggcaaaacccagcaaacu

SEQ ID NO: 2074155 - RNA, 19 nt, Artificial Sequence
  Description of Artificial Sequence: Synthetic oligonucleotide
gguguagcuguggcgaugg

SEQ ID NO: 2074156 - RNA, 19 nt, Artificial Sequence
  Description of Artificial Sequence: Synthetic oligonucleotide
agggaaaucggccccucaa

SEQ ID NO: 2074157 - RNA, 19 nt, Artificial Sequence
  Description of Artificial Sequence: Synthetic oligonucleotide
cagugguuugugcucaguc

SEQ ID NO: 2074158 - RNA, 19 nt, Artificial Sequence
  Description of Artificial Sequence: Synthetic oligonucleotide
ggauuccuagccgaucugg

SEQ ID NO: 2074159 - RNA, 19 nt, Artificial Sequence
  Description of Artificial Sequence: Synthetic oligonucleotide
cagcgaugaggacaauccc

SEQ ID NO: 2074160 - RNA, 19 nt, Artificial Sequence
  Description of Artificial Sequence: Synthetic oligonucleotide
gucccuauacaggugggug

SEQ ID NO: 2074161 - RNA, 19 nt, Artificial Sequence
  Description of Artificial Sequence: Synthetic oligonucleotide
uggagccugucccagcgau

SEQ ID NO: 2074162 - RNA, 19 nt, Artificial Sequence
  Description of Artificial Sequence: Synthetic oligonucleotide
uuccuucaacagcucccag

SEQ ID NO: 2074163 - RNA, 19 nt, Artificial Sequence
  Description of Artificial Sequence: Synthetic oligonucleotide
uggaaccugcugcaucagu

SEQ ID NO: 2074164 - RNA, 19 nt, Artificial Sequence
  Description of Artificial Sequence: Synthetic oligonucleotide
acacagaauggggaggcca

SEQ ID NO: 2074165 - RNA, 19 nt, Artificial Sequence
  Description of Artificial Sequence: Synthetic oligonucleotide
ugaccagccuacaguugga

SEQ ID NO: 2074166 - RNA, 19 nt, Artificial Sequence
  Description of Artificial Sequence: Synthetic oligonucleotide
uucacucagguagggaaau

SEQ ID NO: 2074167 - RNA, 19 nt, Artificial Sequence
  Description of Artificial Sequence: Synthetic oligonucleotide
uguggcgauggaaccugcu

SEQ ID NO: 2074168 - RNA, 19 nt, Artificial Sequence
  Description of Artificial Sequence: Synthetic oligonucleotide
uaguugaacauggccugcu

SEQ ID NO: 2074169 - RNA, 19 nt, Artificial Sequence
  Description of Artificial Sequence: Synthetic oligonucleotide
uccacuccagccuucuguu

SEQ ID NO: 2074170 - RNA, 19 nt, Artificial Sequence
  Description of Artificial Sequence: Synthetic oligonucleotide
ggauuuaucaaagucccua

SEQ ID NO: 2074171 - RNA, 19 nt, Artificial Sequence
  Description of Artificial Sequence: Synthetic oligonucleotide
auagagcgcagccauccua

SEQ ID NO: 2074172 - RNA, 19 nt, Artificial Sequence
  Description of Artificial Sequence: Synthetic oligonucleotide
uaccaaucagccagugguu

SEQ ID NO: 2074173 - RNA, 19 nt, Artificial Sequence
  Description of Artificial Sequence: Synthetic oligonucleotide
guauaggaauagaaggcaa

SEQ ID NO: 2074174 - RNA, 19 nt, Artificial Sequence
  Description of Artificial Sequence: Synthetic oligonucleotide
cuccccagccuucuugaag

SEQ ID NO: 2074175 - RNA, 19 nt, Artificial Sequence
  Description of Artificial Sequence: Synthetic oligonucleotide
caucuccccagccuucuug

SEQ ID NO: 2074176 - RNA, 19 nt, Artificial Sequence
  Description of Artificial Sequence: Synthetic oligonucleotide
ggugaggauuccuagccga

SEQ ID NO: 2074177 - RNA, 19 nt, Artificial Sequence
  Description of Artificial Sequence: Synthetic oligonucleotide
ccguaguuuaagcagggug

SEQ ID NO: 2074178 - RNA, 19 nt, Artificial Sequence
  Description of Artificial Sequence: Synthetic oligonucleotide
ggaaauaguugaacauggc

SEQ ID NO: 2074179 - RNA, 19 nt, Artificial Sequence
  Description of Artificial Sequence: Synthetic oligonucleotide
uucuggcaaaacccagcaa

SEQ ID NO: 2074180 - RNA, 19 nt, Artificial Sequence
  Description of Artificial Sequence: Synthetic oligonucleotide
cagcauugaugcuguaguc

SEQ ID NO: 2074181 - RNA, 19 nt, Artificial Sequence
  Description of Artificial Sequence: Synthetic oligonucleotide
auaucaugaggagcugccu

SEQ ID NO: 2074182 - RNA, 19 nt, Artificial Sequence
  Description of Artificial Sequence: Synthetic oligonucleotide
aguggugauuacguaacuu

SEQ ID NO: 2074183 - RNA, 19 nt, Artificial Sequence
  Description of Artificial Sequence: Synthetic oligonucleotide
agaccgggucaaucucugg

SEQ ID NO: 2074184 - RNA, 19 nt, Artificial Sequence
  Description of Artificial Sequence: Synthetic oligonucleotide
uagggaaaucggccccuca

SEQ ID NO: 2074185 - RNA, 19 nt, Artificial Sequence
  Description of Artificial Sequence: Synthetic oligonucleotide
cguaguuuaagcaggguga

SEQ ID NO: 2074186 - RNA, 19 nt, Artificial Sequence
  Description of Artificial Sequence: Synthetic oligonucleotide
caaguugucgauggaguca

SEQ ID NO: 2074187 - RNA, 19 nt, Artificial Sequence
  Description of Artificial Sequence: Synthetic oligonucleotide
caagucccuccguagcaac

SEQ ID NO: 2074188 - RNA, 19 nt, Artificial Sequence
  Description of Artificial Sequence: Synthetic oligonucleotide
ucacagcuuugugugaaau

SEQ ID NO: 2074189 - RNA, 19 nt, Artificial Sequence
  Description of Artificial Sequence: Synthetic oligonucleotide
ggugauuacguaacuuuca

SEQ ID NO: 2074190 - RNA, 19 nt, Artificial Sequence
  Description of Artificial Sequence: Synthetic oligonucleotide
uccacacacuugucuguac

SEQ ID NO: 2074191 - RNA, 19 nt, Artificial Sequence
  Description of Artificial Sequence: Synthetic oligonucleotide
gacaaucccaccauccggu

SEQ ID NO: 2074192 - RNA, 19 nt, Artificial Sequence
  Description of Artificial Sequence: Synthetic oligonucleotide
guggugauuacguaacuuu

SEQ ID NO: 2074193 - RNA, 19 nt, Artificial Sequence
  Description of Artificial Sequence: Synthetic oligonucleotide
cacuugucuguaccaauca

SEQ ID NO: 2074194 - RNA, 19 nt, Artificial Sequence
  Description of Artificial Sequence: Synthetic oligonucleotide
ugguuugugcucaguccau

SEQ ID NO: 2074195 - RNA, 19 nt, Artificial Sequence
  Description of Artificial Sequence: Synthetic oligonucleotide
guauccaaugugcuuggcu

SEQ ID NO: 2074196 - RNA, 19 nt, Artificial Sequence
  Description of Artificial Sequence: Synthetic oligonucleotide
gccaauaucaugaggagcu

SEQ ID NO: 2074197 - RNA, 19 nt, Artificial Sequence
  Description of Artificial Sequence: Synthetic oligonucleotide
caggcuucgaagggguacc

SEQ ID NO: 2074198 - RNA, 19 nt, Artificial Sequence
  Description of Artificial Sequence: Synthetic oligonucleotide
guuugcccagcaucucccc

SEQ ID NO: 2074199 - RNA, 19 nt, Artificial Sequence
  Description of Artificial Sequence: Synthetic oligonucleotide
ugccaggagaaagccuucc

SEQ ID NO: 2074200 - RNA, 19 nt, Artificial Sequence
  Description of Artificial Sequence: Synthetic oligonucleotide
caccuggaaauaguugaac

SEQ ID NO: 2074201 - RNA, 19 nt, Artificial Sequence
  Description of Artificial Sequence: Synthetic oligonucleotide
ugaggauuccuagccgauc

SEQ ID NO: 2074202 - RNA, 19 nt, Artificial Sequence
  Description of Artificial Sequence: Synthetic oligonucleotide
gggugaggauuccuagccg

SEQ ID NO: 2074203 - RNA, 19 nt, Artificial Sequence
  Description of Artificial Sequence: Synthetic oligonucleotide
gaccagccuacaguuggag

SEQ ID NO: 2074204 - RNA, 19 nt, Artificial Sequence
  Description of Artificial Sequence: Synthetic oligonucleotide
ucaugaggagcugccucca

SEQ ID NO: 2074205 - RNA, 19 nt, Artificial Sequence
  Description of Artificial Sequence: Synthetic oligonucleotide
guaguuuaagcagggugaa

SEQ ID NO: 2074206 - RNA, 19 nt, Artificial Sequence
  Description of Artificial Sequence: Synthetic oligonucleotide
cacgauguguuugcccagc

SEQ ID NO: 2074207 - RNA, 19 nt, Artificial Sequence
  Description of Artificial Sequence: Synthetic oligonucleotide
aguugaacauggccugcuu

SEQ ID NO: 2074208 - RNA, 19 nt, Artificial Sequence
  Description of Artificial Sequence: Synthetic oligonucleotide
acgauguguuugcccagca

SEQ ID NO: 2074209 - RNA, 19 nt, Artificial Sequence
  Description of Artificial Sequence: Synthetic oligonucleotide
ggcaaaacugccacgaugu

SEQ ID NO: 2074210 - RNA, 19 nt, Artificial Sequence
  Description of Artificial Sequence: Synthetic oligonucleotide
caccuucugcgauuuucug

SEQ ID NO: 2074211 - RNA, 19 nt, Artificial Sequence
  Description of Artificial Sequence: Synthetic oligonucleotide
acagaauggggaggccaag

SEQ ID NO: 2074212 - RNA, 19 nt, Artificial Sequence
  Description of Artificial Sequence: Synthetic oligonucleotide
gggcuuuggaccgugugcc

SEQ ID NO: 2074213 - RNA, 19 nt, Artificial Sequence
  Description of Artificial Sequence: Synthetic oligonucleotide
cucguugauccucuccaca

SEQ ID NO: 2074214 - RNA, 19 nt, Artificial Sequence
  Description of Artificial Sequence: Synthetic oligonucleotide
ugugcaccuucugcgauuu

SEQ ID NO: 2074215 - RNA, 19 nt, Artificial Sequence
  Description of Artificial Sequence: Synthetic oligonucleotide
ugcugcaucaguggugauu

SEQ ID NO: 2074216 - RNA, 19 nt, Artificial Sequence
  Description of Artificial Sequence: Synthetic oligonucleotide
ugcccauccuuggaaagua

SEQ ID NO: 2074217 - RNA, 19 nt, Artificial Sequence
  Description of Artificial Sequence: Synthetic oligonucleotide
agucccuccguagcaacgu

SEQ ID NO: 2074218 - RNA, 19 nt, Artificial Sequence
  Description of Artificial Sequence: Synthetic oligonucleotide
agggacaggcccaggcuuc

SEQ ID NO: 2074219 - RNA, 19 nt, Artificial Sequence
  Description of Artificial Sequence: Synthetic oligonucleotide
aaucggccccucaacuccu

SEQ ID NO: 2074220 - RNA, 19 nt, Artificial Sequence
  Description of Artificial Sequence: Synthetic oligonucleotide
cacagaauggggaggccaa

SEQ ID NO: 2074221 - RNA, 19 nt, Artificial Sequence
  Description of Artificial Sequence: Synthetic oligonucleotide
aucaggagccucaaugcuu

SEQ ID NO: 2074222 - RNA, 19 nt, Artificial Sequence
  Description of Artificial Sequence: Synthetic oligonucleotide
cagcuuugugugaaaucca

SEQ ID NO: 2074223 - RNA, 19 nt, Artificial Sequence
  Description of Artificial Sequence: Synthetic oligonucleotide
gccaagcuccccuuggaac

SEQ ID NO: 2074224 - RNA, 19 nt, Artificial Sequence
  Description of Artificial Sequence: Synthetic oligonucleotide
agagcgcagccauccuaug

SEQ ID NO: 2074225 - RNA, 19 nt, Artificial Sequence
  Description of Artificial Sequence: Synthetic oligonucleotide
agcgggauaaggaguucug

SEQ ID NO: 2074226 - RNA, 19 nt, Artificial Sequence
  Description of Artificial Sequence: Synthetic oligonucleotide
uccagaaggcugagcccuc

SEQ ID NO: 2074227 - RNA, 19 nt, Artificial Sequence
  Description of Artificial Sequence: Synthetic oligonucleotide
gccgccauagagcgcagcc

SEQ ID NO: 2074228 - RNA, 19 nt, Artificial Sequence
  Description of Artificial Sequence: Synthetic oligonucleotide
caccaucucguugauccuc

SEQ ID NO: 2074229 - RNA, 19 nt, Artificial Sequence
  Description of Artificial Sequence: Synthetic oligonucleotide
gcgaugaggacaaucccac

SEQ ID NO: 2074230 - RNA, 19 nt, Artificial Sequence
  Description of Artificial Sequence: Synthetic oligonucleotide
cucggcccugggucaaugc

SEQ ID NO: 2074231 - RNA, 19 nt, Artificial Sequence
  Description of Artificial Sequence: Synthetic oligonucleotide
aggccaagcuccccuugga

SEQ ID NO: 2074232 - RNA, 19 nt, Artificial Sequence
  Description of Artificial Sequence: Synthetic oligonucleotide
ggcgauggaaccugcugca

SEQ ID NO: 2074233 - RNA, 19 nt, Artificial Sequence
  Description of Artificial Sequence: Synthetic oligonucleotide
ccaagcuccccuuggaaca

SEQ ID NO: 2074234 - RNA, 19 nt, Artificial Sequence
  Description of Artificial Sequence: Synthetic oligonucleotide
ccaaucagccagugguuug

SEQ ID NO: 2074235 - RNA, 19 nt, Artificial Sequence
  Description of Artificial Sequence: Synthetic oligonucleotide
ccaagggaaggugguaucc

SEQ ID NO: 2074236 - RNA, 19 nt, Artificial Sequence
  Description of Artificial Sequence: Synthetic oligonucleotide
ggaaaucggccccucaacu

SEQ ID NO: 2074237 - RNA, 19 nt, Artificial Sequence
  Description of Artificial Sequence: Synthetic oligonucleotide
uccuaugcugccgccgcaa

SEQ ID NO: 2074238 - RNA, 19 nt, Artificial Sequence
  Description of Artificial Sequence: Synthetic oligonucleotide
gccugucccagcgaugagg

SEQ ID NO: 2074239 - RNA, 19 nt, Artificial Sequence
  Description of Artificial Sequence: Synthetic oligonucleotide
gcugcaucaguggugauua

SEQ ID NO: 2074240 - RNA, 19 nt, Artificial Sequence
  Description of Artificial Sequence: Synthetic oligonucleotide
caguuggagccugucccag

SEQ ID NO: 2074241 - RNA, 19 nt, Artificial Sequence
  Description of Artificial Sequence: Synthetic oligonucleotide
accugcugcaucaguggug

SEQ ID NO: 2074242 - RNA, 19 nt, Artificial Sequence
  Description of Artificial Sequence: Synthetic oligonucleotide
caagggaaggugguaucca

SEQ ID NO: 2074243 - RNA, 19 nt, Artificial Sequence
  Description of Artificial Sequence: Synthetic oligonucleotide
ggcaaaacccagcaaacuu

SEQ ID NO: 2074244 - RNA, 19 nt, Artificial Sequence
  Description of Artificial Sequence: Synthetic oligonucleotide
cuucaacagcucccagcuc

SEQ ID NO: 2074245 - RNA, 19 nt, Artificial Sequence
  Description of Artificial Sequence: Synthetic oligonucleotide
gccgcaagucccuccguag

SEQ ID NO: 2074246 - RNA, 19 nt, Artificial Sequence
  Description of Artificial Sequence: Synthetic oligonucleotide
augccaggagaaagccuuc

SEQ ID NO: 2074247 - RNA, 19 nt, Artificial Sequence
  Description of Artificial Sequence: Synthetic oligonucleotide
ucacucagguagggaaauc

SEQ ID NO: 2074248 - RNA, 19 nt, Artificial Sequence
  Description of Artificial Sequence: Synthetic oligonucleotide
gacaggcccaggcuucgaa

SEQ ID NO: 2074249 - RNA, 19 nt, Artificial Sequence
  Description of Artificial Sequence: Synthetic oligonucleotide
cacacagaauggggaggcc

SEQ ID NO: 2074250 - RNA, 19 nt, Artificial Sequence
  Description of Artificial Sequence: Synthetic oligonucleotide
cagcgccacucucggagcc

SEQ ID NO: 2074251 - RNA, 19 nt, Artificial Sequence
  Description of Artificial Sequence: Synthetic oligonucleotide
caagaccgggucaaucucu

SEQ ID NO: 2074252 - RNA, 19 nt, Artificial Sequence
  Description of Artificial Sequence: Synthetic oligonucleotide
cccagugcagcagacugcc

SEQ ID NO: 2074253 - RNA, 19 nt, Artificial Sequence
  Description of Artificial Sequence: Synthetic oligonucleotide
gggugaagcgggauaagga

SEQ ID NO: 2074254 - RNA, 19 nt, Artificial Sequence
  Description of Artificial Sequence: Synthetic oligonucleotide
auauggccccagccaccag

SEQ ID NO: 2074255 - RNA, 19 nt, Artificial Sequence
  Description of Artificial Sequence: Synthetic oligonucleotide
ccuagcauauggccccagc

SEQ ID NO: 2074256 - RNA, 19 nt, Artificial Sequence
  Description of Artificial Sequence: Synthetic oligonucleotide
gaagcgggauaaggaguuc

SEQ ID NO: 2074257 - RNA, 19 nt, Artificial Sequence
  Description of Artificial Sequence: Synthetic oligonucleotide
auccuaugcugccgccgca

SEQ ID NO: 2074258 - RNA, 19 nt, Artificial Sequence
  Description of Artificial Sequence: Synthetic oligonucleotide
cucaaugcuuccuccugcu

SEQ ID NO: 2074259 - RNA, 19 nt, Artificial Sequence
  Description of Artificial Sequence: Synthetic oligonucleotide
cuguaccaaucagccagug

SEQ ID NO: 2074260 - RNA, 19 nt, Artificial Sequence
  Description of Artificial Sequence: Synthetic oligonucleotide
gguugaccagccuacaguu

SEQ ID NO: 2074261 - RNA, 19 nt, Artificial Sequence
  Description of Artificial Sequence: Synthetic oligonucleotide
caucaguggugauuacgua

SEQ ID NO: 2074262 - RNA, 19 nt, Artificial Sequence
  Description of Artificial Sequence: Synthetic oligonucleotide
gugaagcgggauaaggagu

SEQ ID NO: 2074263 - RNA, 19 nt, Artificial Sequence
  Description of Artificial Sequence: Synthetic oligonucleotide
caggagccucaaugcuucc

SEQ ID NO: 2074264 - RNA, 19 nt, Artificial Sequence
  Description of Artificial Sequence: Synthetic oligonucleotide
uuggaccgugugccucccc

SEQ ID NO: 2074265 - RNA, 19 nt, Artificial Sequence
  Description of Artificial Sequence: Synthetic oligonucleotide
gcccucaucuccuagcaua

SEQ ID NO: 2074266 - RNA, 19 nt, Artificial Sequence
  Description of Artificial Sequence: Synthetic oligonucleotide
gccgccgcaagucccuccg

SEQ ID NO: 2074267 - RNA, 19 nt, Artificial Sequence
  Description of Artificial Sequence: Synthetic oligonucleotide
cccuauacaggugggugag

SEQ ID NO: 2074268 - RNA, 19 nt, Artificial Sequence
  Description of Artificial Sequence: Synthetic oligonucleotide
uccuagcauauggccccag

SEQ ID NO: 2074269 - RNA, 19 nt, Artificial Sequence
  Description of Artificial Sequence: Synthetic oligonucleotide
guugucgauggagucaaau

SEQ ID NO: 2074270 - RNA, 19 nt, Artificial Sequence
  Description of Artificial Sequence: Synthetic oligonucleotide
ucucggcccugggucaaug

SEQ ID NO: 2074271 - RNA, 19 nt, Artificial Sequence
  Description of Artificial Sequence: Synthetic oligonucleotide
ccccuuggaacaagaccgg

SEQ ID NO: 2074272 - RNA, 19 nt, Artificial Sequence
  Description of Artificial Sequence: Synthetic oligonucleotide
gucccagcgaugaggacaa

SEQ ID NO: 2074273 - RNA, 19 nt, Artificial Sequence
  Description of Artificial Sequence: Synthetic oligonucleotide
ggguugaccagccuacagu

SEQ ID NO: 2074274 - RNA, 19 nt, Artificial Sequence
  Description of Artificial Sequence: Synthetic oligonucleotide
gcaucaguggugauuacgu

SEQ ID NO: 2074275 - RNA, 19 nt, Artificial Sequence
  Description of Artificial Sequence: Synthetic oligonucleotide
gaucuggcaccuggaaaua

SEQ ID NO: 2074276 - RNA, 19 nt, Artificial Sequence
  Description of Artificial Sequence: Synthetic oligonucleotide
cucaguccaucugcuucug

SEQ ID NO: 2074277 - RNA, 19 nt, Artificial Sequence
  Description of Artificial Sequence: Synthetic oligonucleotide
aguccaagggaagguggua

SEQ ID NO: 2074278 - RNA, 19 nt, Artificial Sequence
  Description of Artificial Sequence: Synthetic oligonucleotide
cugcaucaguggugauuac

SEQ ID NO: 2074279 - RNA, 19 nt, Artificial Sequence
  Description of Artificial Sequence: Synthetic oligonucleotide
gggucaaucucuggcaaaa

SEQ ID NO: 2074280 - RNA, 19 nt, Artificial Sequence
  Description of Artificial Sequence: Synthetic oligonucleotide
ccaccagcgccacucucgg

SEQ ID NO: 2074281 - RNA, 19 nt, Artificial Sequence
  Description of Artificial Sequence: Synthetic oligonucleotide
ccauccuaugcugccgccg

SEQ ID NO: 2074282 - RNA, 19 nt, Artificial Sequence
  Description of Artificial Sequence: Synthetic oligonucleotide
agccuacaguuggagccug

SEQ ID NO: 2074283 - RNA, 19 nt, Artificial Sequence
  Description of Artificial Sequence: Synthetic oligonucleotide
ccuggaaauaguugaacau

SEQ ID NO: 2074284 - RNA, 19 nt, Artificial Sequence
  Description of Artificial Sequence: Synthetic oligonucleotide
caccauccgguguagcugu

SEQ ID NO: 2074285 - RNA, 19 nt, Artificial Sequence
  Description of Artificial Sequence: Synthetic oligonucleotide
ggaggccaagcuccccuug

SEQ ID NO: 2074286 - RNA, 19 nt, Artificial Sequence
  Description of Artificial Sequence: Synthetic oligonucleotide
gguuugugcucaguccauc

SEQ ID NO: 2074287 - RNA, 19 nt, Artificial Sequence
  Description of Artificial Sequence: Synthetic oligonucleotide
ucggagccaucaggguuga

SEQ ID NO: 2074288 - RNA, 19 nt, Artificial Sequence
  Description of Artificial Sequence: Synthetic oligonucleotide
cugccacgauguguuugcc

SEQ ID NO: 2074289 - RNA, 19 nt, Artificial Sequence
  Description of Artificial Sequence: Synthetic oligonucleotide
caaucagccagugguuugu

SEQ ID NO: 2074290 - RNA, 19 nt, Artificial Sequence
  Description of Artificial Sequence: Synthetic oligonucleotide
agcuccccuuggaacaaga

SEQ ID NO: 2074291 - RNA, 19 nt, Artificial Sequence
  Description of Artificial Sequence: Synthetic oligonucleotide
ccgcaagucccuccguagc

SEQ ID NO: 2074292 - RNA, 19 nt, Artificial Sequence
  Description of Artificial Sequence: Synthetic oligonucleotide
gcauauggccccagccacc

SEQ ID NO: 2074293 - RNA, 19 nt, Artificial Sequence
  Description of Artificial Sequence: Synthetic oligonucleotide
gcagggugaagcgggauaa

SEQ ID NO: 2074294 - RNA, 19 nt, Artificial Sequence
  Description of Artificial Sequence: Synthetic oligonucleotide
guagggaaaucggccccuc

SEQ ID NO: 2074295 - RNA, 19 nt, Artificial Sequence
  Description of Artificial Sequence: Synthetic oligonucleotide
ccaauaucaugaggagcug

SEQ ID NO: 2074296 - RNA, 19 nt, Artificial Sequence
  Description of Artificial Sequence: Synthetic oligonucleotide
gucccuccguagcaacguc

SEQ ID NO: 2074297 - RNA, 19 nt, Artificial Sequence
  Description of Artificial Sequence: Synthetic oligonucleotide
gggacaggcccaggcuucg

SEQ ID NO: 2074298 - RNA, 19 nt, Artificial Sequence
  Description of Artificial Sequence: Synthetic oligonucleotide
ccccagugcagcagacugc

SEQ ID NO: 2074299 - RNA, 19 nt, Artificial Sequence
  Description of Artificial Sequence: Synthetic oligonucleotide
guccaagggaaggugguau

SEQ ID NO: 2074300 - RNA, 19 nt, Artificial Sequence
  Description of Artificial Sequence: Synthetic oligonucleotide
ccacgauguguuugcccag

SEQ ID NO: 2074301 - RNA, 19 nt, Artificial Sequence
  Description of Artificial Sequence: Synthetic oligonucleotide
gcgcagccauccuaugcug

SEQ ID NO: 2074302 - RNA, 19 nt, Artificial Sequence
  Description of Artificial Sequence: Synthetic oligonucleotide
gaggagcugccuccaaguu

SEQ ID NO: 2074303 - RNA, 19 nt, Artificial Sequence
  Description of Artificial Sequence: Synthetic oligonucleotide
ccuauacaggugggugagg

SEQ ID NO: 2074304 - RNA, 19 nt, Artificial Sequence
  Description of Artificial Sequence: Synthetic oligonucleotide
aggcuucgaagggguacca

SEQ ID NO: 2074305 - RNA, 19 nt, Artificial Sequence
  Description of Artificial Sequence: Synthetic oligonucleotide
ccuaugcugccgccgcaag

SEQ ID NO: 2074306 - RNA, 19 nt, Artificial Sequence
  Description of Artificial Sequence: Synthetic oligonucleotide
cgcagccauccuaugcugc

SEQ ID NO: 2074307 - RNA, 19 nt, Artificial Sequence
  Description of Artificial Sequence: Synthetic oligonucleotide
agcgccacucucggagcca

SEQ ID NO: 2074308 - RNA, 19 nt, Artificial Sequence
  Description of Artificial Sequence: Synthetic oligonucleotide
aucggccccucaacuccuc

SEQ ID NO: 2074309 - RNA, 19 nt, Artificial Sequence
  Description of Artificial Sequence: Synthetic oligonucleotide
cuaugcugccgccgcaagu

SEQ ID NO: 2074310 - RNA, 19 nt, Artificial Sequence
  Description of Artificial Sequence: Synthetic oligonucleotide
ccuacaguuggagccuguc

SEQ ID NO: 2074311 - RNA, 19 nt, Artificial Sequence
  Description of Artificial Sequence: Synthetic oligonucleotide
ccauccgguguagcugugg

SEQ ID NO: 2074312 - RNA, 19 nt, Artificial Sequence
  Description of Artificial Sequence: Synthetic oligonucleotide
cuagccgaucuggcaccug

SEQ ID NO: 2074313 - RNA, 19 nt, Artificial Sequence
  Description of Artificial Sequence: Synthetic oligonucleotide
cauagagcgcagccauccu

SEQ ID NO: 2074314 - RNA, 19 nt, Artificial Sequence
  Description of Artificial Sequence: Synthetic oligonucleotide
agccgaucuggcaccugga

SEQ ID NO: 2074315 - RNA, 19 nt, Artificial Sequence
  Description of Artificial Sequence: Synthetic oligonucleotide
cccagcgaugaggacaauc

SEQ ID NO: 2074316 - RNA, 19 nt, Artificial Sequence
  Description of Artificial Sequence: Synthetic oligonucleotide
ccagugcagcagacugccg

SEQ ID NO: 2074317 - RNA, 19 nt, Artificial Sequence
  Description of Artificial Sequence: Synthetic oligonucleotide
ggccaagcuccccuuggaa

SEQ ID NO: 2074318 - RNA, 19 nt, Artificial Sequence
  Description of Artificial Sequence: Synthetic oligonucleotide
caguggugauuacguaacu

SEQ ID NO: 2074319 - RNA, 19 nt, Artificial Sequence
  Description of Artificial Sequence: Synthetic oligonucleotide
cgaucuggcaccuggaaau

SEQ ID NO: 2074320 - RNA, 19 nt, Artificial Sequence
  Description of Artificial Sequence: Synthetic oligonucleotide
cucucggagccaucagggu

SEQ ID NO: 2074321 - RNA, 19 nt, Artificial Sequence
  Description of Artificial Sequence: Synthetic oligonucleotide
cccuccguagcaacgucga

SEQ ID NO: 2074322 - RNA, 19 nt, Artificial Sequence
  Description of Artificial Sequence: Synthetic oligonucleotide
ccuuggaacaagaccgggu

SEQ ID NO: 2074323 - RNA, 19 nt, Artificial Sequence
  Description of Artificial Sequence: Synthetic oligonucleotide
guuuggcuguguucaccau

SEQ ID NO: 2074324 - RNA, 19 nt, Artificial Sequence
  Description of Artificial Sequence: Synthetic oligonucleotide
gcaccuggaaauaguugaa

SEQ ID NO: 2074325 - RNA, 19 nt, Artificial Sequence
  Description of Artificial Sequence: Synthetic oligonucleotide
ccacucucggagccaucag

SEQ ID NO: 2074326 - RNA, 19 nt, Artificial Sequence
  Description of Artificial Sequence: Synthetic oligonucleotide
gccgaucuggcaccuggaa

SEQ ID NO: 2074327 - RNA, 19 nt, Artificial Sequence
  Description of Artificial Sequence: Synthetic oligonucleotide
gggucaaugccaggagaaa

SEQ ID NO: 2074328 - RNA, 19 nt, Artificial Sequence
  Description of Artificial Sequence: Synthetic oligonucleotide
caggguugaccagccuaca

SEQ ID NO: 2074329 - RNA, 19 nt, Artificial Sequence
  Description of Artificial Sequence: Synthetic oligonucleotide
cccugggucaaugccagga

SEQ ID NO: 2074330 - RNA, 19 nt, Artificial Sequence
  Description of Artificial Sequence: Synthetic oligonucleotide
ccgaucuggcaccuggaaa

SEQ ID NO: 2074331 - RNA, 19 nt, Artificial Sequence
  Description of Artificial Sequence: Synthetic oligonucleotide
cagggacaggcccaggcuu

SEQ ID NO: 2074332 - RNA, 19 nt, Artificial Sequence
  Description of Artificial Sequence: Synthetic oligonucleotide
gcaagucccuccguagcaa

SEQ ID NO: 2074333 - RNA, 19 nt, Artificial Sequence
  Description of Artificial Sequence: Synthetic oligonucleotide
accauccgguguagcugug

SEQ ID NO: 2074334 - RNA, 19 nt, Artificial Sequence
  Description of Artificial Sequence: Synthetic oligonucleotide
cagccuucuugaagaugua

SEQ ID NO: 2074335 - RNA, 19 nt, Artificial Sequence
  Description of Artificial Sequence: Synthetic oligonucleotide
cagccuacaguuggagccu

SEQ ID NO: 2074336 - RNA, 19 nt, Artificial Sequence
  Description of Artificial Sequence: Synthetic oligonucleotide
cuccuagcauauggcccca

SEQ ID NO: 2074337 - RNA, 19 nt, Artificial Sequence
  Description of Artificial Sequence: Synthetic oligonucleotide
cugugcaccuucugcgauu

SEQ ID NO: 2074338 - RNA, 19 nt, Artificial Sequence
  Description of Artificial Sequence: Synthetic oligonucleotide
aguugucgauggagucaaa

SEQ ID NO: 2074339 - RNA, 19 nt, Artificial Sequence
  Description of Artificial Sequence: Synthetic oligonucleotide
cgcaagucccuccguagca

SEQ ID NO: 2074340 - RNA, 19 nt, Artificial Sequence
  Description of Artificial Sequence: Synthetic oligonucleotide
gcugugcaccuucugcgau

SEQ ID NO: 2074341 - RNA, 19 nt, Artificial Sequence
  Description of Artificial Sequence: Synthetic oligonucleotide
ccgggucaaucucuggcaa

SEQ ID NO: 2074342 - RNA, 19 nt, Artificial Sequence
  Description of Artificial Sequence: Synthetic oligonucleotide
ccuuccacgccgccauaga

SEQ ID NO: 2074343 - RNA, 19 nt, Artificial Sequence
  Description of Artificial Sequence: Synthetic oligonucleotide
cucuaucaggagccucaau

SEQ ID NO: 2074344 - RNA, 19 nt, Artificial Sequence
  Description of Artificial Sequence: Synthetic oligonucleotide
ggcuuuggaccgugugccu

SEQ ID NO: 2074345 - RNA, 19 nt, Artificial Sequence
  Description of Artificial Sequence: Synthetic oligonucleotide
cccucaucuccuagcauau

SEQ ID NO: 2074346 - RNA, 19 nt, Artificial Sequence
  Description of Artificial Sequence: Synthetic oligonucleotide
ccgccauagagcgcagcca

SEQ ID NO: 2074347 - RNA, 19 nt, Artificial Sequence
  Description of Artificial Sequence: Synthetic oligonucleotide
gcccauccuuggaaaguaa

SEQ ID NO: 2074348 - RNA, 19 nt, Artificial Sequence
  Description of Artificial Sequence: Synthetic oligonucleotide
cgguguagcuguggcgaug

SEQ ID NO: 2074349 - RNA, 19 nt, Artificial Sequence
  Description of Artificial Sequence: Synthetic oligonucleotide
ucccagcgaugaggacaau

SEQ ID NO: 2074350 - RNA, 19 nt, Artificial Sequence
  Description of Artificial Sequence: Synthetic oligonucleotide
cgggucaaucucuggcaaa

SEQ ID NO: 2074351 - RNA, 19 nt, Artificial Sequence
  Description of Artificial Sequence: Synthetic oligonucleotide
gccguaguuuaagcagggu

SEQ ID NO: 2074352 - RNA, 19 nt, Artificial Sequence
  Description of Artificial Sequence: Synthetic oligonucleotide
ggacaggcccaggcuucga

SEQ ID NO: 2074353 - RNA, 19 nt, Artificial Sequence
  Description of Artificial Sequence: Synthetic oligonucleotide
cgauggagucaaauacgau

SEQ ID NO: 2074354 - RNA, 19 nt, Artificial Sequence
  Description of Artificial Sequence: Synthetic oligonucleotide
cccagcaaacuuggauuua

SEQ ID NO: 2074355 - RNA, 19 nt, Artificial Sequence
  Description of Artificial Sequence: Synthetic oligonucleotide
gggaggccaagcuccccuu

SEQ ID NO: 2074356 - RNA, 19 nt, Artificial Sequence
  Description of Artificial Sequence: Synthetic oligonucleotide
cgaagggguaccagaggau

SEQ ID NO: 2074357 - RNA, 19 nt, Artificial Sequence
  Description of Artificial Sequence: Synthetic oligonucleotide
cccaggcuucgaaggggua

SEQ ID NO: 2074358 - RNA, 19 nt, Artificial Sequence
  Description of Artificial Sequence: Synthetic oligonucleotide
cgauguguuugcccagcau

SEQ ID NO: 2074359 - RNA, 19 nt, Artificial Sequence
  Description of Artificial Sequence: Synthetic oligonucleotide
gugcaccuucugcgauuuu

SEQ ID NO: 2074360 - RNA, 19 nt, Artificial Sequence
  Description of Artificial Sequence: Synthetic oligonucleotide
cgccgcaagucccuccgua

SEQ ID NO: 2074361 - RNA, 19 nt, Artificial Sequence
  Description of Artificial Sequence: Synthetic oligonucleotide
ccagugguuugugcucagu

SEQ ID NO: 2074362 - RNA, 19 nt, Artificial Sequence
  Description of Artificial Sequence: Synthetic oligonucleotide
ccuagccgaucuggcaccu

SEQ ID NO: 2074363 - RNA, 19 nt, Artificial Sequence
  Description of Artificial Sequence: Synthetic oligonucleotide
gcaucuccccagccuucuu

SEQ ID NO: 2074364 - RNA, 19 nt, Artificial Sequence
  Description of Artificial Sequence: Synthetic oligonucleotide
ccgguguagcuguggcgau

SEQ ID NO: 2074365 - RNA, 19 nt, Artificial Sequence
  Description of Artificial Sequence: Synthetic oligonucleotide
gcgccacucucggagccau

SEQ ID NO: 2074366 - RNA, 19 nt, Artificial Sequence
  Description of Artificial Sequence: Synthetic oligonucleotide
cgccacucucggagccauc

SEQ ID NO: 2074367 - RNA, 19 nt, Artificial Sequence
  Description of Artificial Sequence: Synthetic oligonucleotide
ccccuuccacgccgccaua

SEQ ID NO: 2074368 - RNA, 19 nt, Artificial Sequence
  Description of Artificial Sequence: Synthetic oligonucleotide
ccgccgcaagucccuccgu

SEQ ID NO: 2074369 - RNA, 19 nt, Artificial Sequence
  Description of Artificial Sequence: Synthetic oligonucleotide
auuaaauuaaaucaacaag

SEQ ID NO: 2074370 - RNA, 19 nt, Artificial Sequence
  Description of Artificial Sequence: Synthetic oligonucleotide
gaauuuguaauaaaggagg

SEQ ID NO: 2074371 - RNA, 19 nt, Artificial Sequence
  Description of Artificial Sequence: Synthetic oligonucleotide
uauugaauuuguaauaaag

SEQ ID NO: 2074372 - RNA, 19 nt, Artificial Sequence
  Description of Artificial Sequence: Synthetic oligonucleotide
ugaauuuguaauaaaggag

SEQ ID NO: 2074373 - RNA, 19 nt, Artificial Sequence
  Description of Artificial Sequence: Synthetic oligonucleotide
uuuguaauaaaggagguag

SEQ ID NO: 2074374 - RNA, 19 nt, Artificial Sequence
  Description of Artificial Sequence: Synthetic oligonucleotide
acucauaucagacaguggg

SEQ ID NO: 2074375 - RNA, 19 nt, Artificial Sequence
  Description of Artificial Sequence: Synthetic oligonucleotide
aaauauuacauucgaaggu

SEQ ID NO: 2074376 - RNA, 19 nt, Artificial Sequence
  Description of Artificial Sequence: Synthetic oligonucleotide
aauauuacauucgaagguc

SEQ ID NO: 2074377 - RNA, 19 nt, Artificial Sequence
  Description of Artificial Sequence: Synthetic oligonucleotide
ucagcuaacagacauaggu

SEQ ID NO: 2074378 - RNA, 19 nt, Artificial Sequence
  Description of Artificial Sequence: Synthetic oligonucleotide
caaauauuacauucgaagg

SEQ ID NO: 2074379 - RNA, 19 nt, Artificial Sequence
  Description of Artificial Sequence: Synthetic oligonucleotide
aaaggagguagccagggcg

SEQ ID NO: 2074380 - RNA, 19 nt, Artificial Sequence
  Description of Artificial Sequence: Synthetic oligonucleotide
uaauaaaggagguagccag

SEQ ID NO: 2074381 - RNA, 19 nt, Artificial Sequence
  Description of Artificial Sequence: Synthetic oligonucleotide
ucaaauacugagcagccag

SEQ ID NO: 2074382 - RNA, 19 nt, Artificial Sequence
  Description of Artificial Sequence: Synthetic oligonucleotide
ugguccaaaagcaaggcgg

SEQ ID NO: 2074383 - RNA, 19 nt, Artificial Sequence
  Description of Artificial Sequence: Synthetic oligonucleotide
agagucagaacucauauca

SEQ ID NO: 2074384 - RNA, 19 nt, Artificial Sequence
  Description of Artificial Sequence: Synthetic oligonucleotide
uaaaucaacaaguggagga

SEQ ID NO: 2074385 - RNA, 19 nt, Artificial Sequence
  Description of Artificial Sequence: Synthetic oligonucleotide
aaugagaaguggaagcccc

SEQ ID NO: 2074386 - RNA, 19 nt, Artificial Sequence
  Description of Artificial Sequence: Synthetic oligonucleotide
agcucaaauacugagcagc

SEQ ID NO: 2074387 - RNA, 19 nt, Artificial Sequence
  Description of Artificial Sequence: Synthetic oligonucleotide
uagacgcucacacagcgcg

SEQ ID NO: 2074388 - RNA, 19 nt, Artificial Sequence
  Description of Artificial Sequence: Synthetic oligonucleotide
aaacauccaaucaagaagu

SEQ ID NO: 2074389 - RNA, 19 nt, Artificial Sequence
  Description of Artificial Sequence: Synthetic oligonucleotide
cauccaaucaagaagucug

SEQ ID NO: 2074390 - RNA, 19 nt, Artificial Sequence
  Description of Artificial Sequence: Synthetic oligonucleotide
uguaauaaaggagguagcc

SEQ ID NO: 2074391 - RNA, 19 nt, Artificial Sequence
  Description of Artificial Sequence: Synthetic oligonucleotide
cagacaaauauuacauucg

SEQ ID NO: 2074392 - RNA, 19 nt, Artificial Sequence
  Description of Artificial Sequence: Synthetic oligonucleotide
ugaggggugguccaaaagc

SEQ ID NO: 2074393 - RNA, 19 nt, Artificial Sequence
  Description of Artificial Sequence: Synthetic oligonucleotide
uuagagucagaacucauau

SEQ ID NO: 2074394 - RNA, 19 nt, Artificial Sequence
  Description of Artificial Sequence: Synthetic oligonucleotide
uuaaaucaacaaguggagg

SEQ ID NO: 2074395 - RNA, 19 nt, Artificial Sequence
  Description of Artificial Sequence: Synthetic oligonucleotide
aaaucaacaaguggaggag

SEQ ID NO: 2074396 - RNA, 19 nt, Artificial Sequence
  Description of Artificial Sequence: Synthetic oligonucleotide
agagggacgacuguguccc

SEQ ID NO: 2074397 - RNA, 19 nt, Artificial Sequence
  Description of Artificial Sequence: Synthetic oligonucleotide
aaagcaccgacaccaaaug

SEQ ID NO: 2074398 - RNA, 19 nt, Artificial Sequence
  Description of Artificial Sequence: Synthetic oligonucleotide
ucuccagacaaauauuaca

SEQ ID NO: 2074399 - RNA, 19 nt, Artificial Sequence
  Description of Artificial Sequence: Synthetic oligonucleotide
auacugauucuccucuagc

SEQ ID NO: 2074400 - RNA, 19 nt, Artificial Sequence
  Description of Artificial Sequence: Synthetic oligonucleotide
gauggcgagaaacaggaac

SEQ ID NO: 2074401 - RNA, 19 nt, Artificial Sequence
  Description of Artificial Sequence: Synthetic oligonucleotide
aaagccaaagggaaaagca

SEQ ID NO: 2074402 - RNA, 19 nt, Artificial Sequence
  Description of Artificial Sequence: Synthetic oligonucleotide
agcuaacagacauagguca

SEQ ID NO: 2074403 - RNA, 19 nt, Artificial Sequence
  Description of Artificial Sequence: Synthetic oligonucleotide
auuaaaucaacaaguggag

SEQ ID NO: 2074404 - RNA, 19 nt, Artificial Sequence
  Description of Artificial Sequence: Synthetic oligonucleotide
cagacauaggucaugggag

SEQ ID NO: 2074405 - RNA, 19 nt, Artificial Sequence
  Description of Artificial Sequence: Synthetic oligonucleotide
aagauggcgagaaacagga

SEQ ID NO: 2074406 - RNA, 19 nt, Artificial Sequence
  Description of Artificial Sequence: Synthetic oligonucleotide
acucuugccggucuggccg

SEQ ID NO: 2074407 - RNA, 19 nt, Artificial Sequence
  Description of Artificial Sequence: Synthetic oligonucleotide
uaacagacauaggucaugg

SEQ ID NO: 2074408 - RNA, 19 nt, Artificial Sequence
  Description of Artificial Sequence: Synthetic oligonucleotide
gaacucauaucagacagug

SEQ ID NO: 2074409 - RNA, 19 nt, Artificial Sequence
  Description of Artificial Sequence: Synthetic oligonucleotide
uuguaauaaaggagguagc

SEQ ID NO: 2074410 - RNA, 19 nt, Artificial Sequence
  Description of Artificial Sequence: Synthetic oligonucleotide
uauuacauucgaaggucgc

SEQ ID NO: 2074411 - RNA, 19 nt, Artificial Sequence
  Description of Artificial Sequence: Synthetic oligonucleotide
gacaccaaaugagaagugg

SEQ ID NO: 2074412 - RNA, 19 nt, Artificial Sequence
  Description of Artificial Sequence: Synthetic oligonucleotide
acacaauuagagucagaac

SEQ ID NO: 2074413 - RNA, 19 nt, Artificial Sequence
  Description of Artificial Sequence: Synthetic oligonucleotide
agacaaauauuacauucga

SEQ ID NO: 2074414 - RNA, 19 nt, Artificial Sequence
  Description of Artificial Sequence: Synthetic oligonucleotide
ggagacacagcucaaauac

SEQ ID NO: 2074415 - RNA, 19 nt, Artificial Sequence
  Description of Artificial Sequence: Synthetic oligonucleotide
cacaauuagagucagaacu

SEQ ID NO: 2074416 - RNA, 19 nt, Artificial Sequence
  Description of Artificial Sequence: Synthetic oligonucleotide
acaauuagagucagaacuc

SEQ ID NO: 2074417 - RNA, 19 nt, Artificial Sequence
  Description of Artificial Sequence: Synthetic oligonucleotide
cacugaugaagacagggcc

SEQ ID NO: 2074418 - RNA, 19 nt, Artificial Sequence
  Description of Artificial Sequence: Synthetic oligonucleotide
ggaaaggacacaauuagag

SEQ ID NO: 2074419 - RNA, 19 nt, Artificial Sequence
  Description of Artificial Sequence: Synthetic oligonucleotide
gaagauggcgagaaacagg

SEQ ID NO: 2074420 - RNA, 19 nt, Artificial Sequence
  Description of Artificial Sequence: Synthetic oligonucleotide
aguacagguguccgcacac

SEQ ID NO: 2074421 - RNA, 19 nt, Artificial Sequence
  Description of Artificial Sequence: Synthetic oligonucleotide
auuacauucgaaggucgcg

SEQ ID NO: 2074422 - RNA, 19 nt, Artificial Sequence
  Description of Artificial Sequence: Synthetic oligonucleotide
accuuuaaacauccaauca

SEQ ID NO: 2074423 - RNA, 19 nt, Artificial Sequence
  Description of Artificial Sequence: Synthetic oligonucleotide
uacugauucuccucuagcu

SEQ ID NO: 2074424 - RNA, 19 nt, Artificial Sequence
  Description of Artificial Sequence: Synthetic oligonucleotide
acacagcucaaauacugag

SEQ ID NO: 2074425 - RNA, 19 nt, Artificial Sequence
  Description of Artificial Sequence: Synthetic oligonucleotide
aacagacauaggucauggg

SEQ ID NO: 2074426 - RNA, 19 nt, Artificial Sequence
  Description of Artificial Sequence: Synthetic oligonucleotide
aggaacagggagucuugcc

SEQ ID NO: 2074427 - RNA, 19 nt, Artificial Sequence
  Description of Artificial Sequence: Synthetic oligonucleotide
uuacauucgaaggucgcgc

SEQ ID NO: 2074428 - RNA, 19 nt, Artificial Sequence
  Description of Artificial Sequence: Synthetic oligonucleotide
uuauugaauuuguaauaaa

SEQ ID NO: 2074429 - RNA, 19 nt, Artificial Sequence
  Description of Artificial Sequence: Synthetic oligonucleotide
aaaagcaccgacaccaaau

SEQ ID NO: 2074430 - RNA, 19 nt, Artificial Sequence
  Description of Artificial Sequence: Synthetic oligonucleotide
ucgugggcauugaacacgg

SEQ ID NO: 2074431 - RNA, 19 nt, Artificial Sequence
  Description of Artificial Sequence: Synthetic oligonucleotide
aaggacacaauuagaguca

SEQ ID NO: 2074432 - RNA, 19 nt, Artificial Sequence
  Description of Artificial Sequence: Synthetic oligonucleotide
auauuacauucgaaggucg

SEQ ID NO: 2074433 - RNA, 19 nt, Artificial Sequence
  Description of Artificial Sequence: Synthetic oligonucleotide
ccaaaugagaaguggaagc

SEQ ID NO: 2074434 - RNA, 19 nt, Artificial Sequence
  Description of Artificial Sequence: Synthetic oligonucleotide
ucaacaaguggaggagucg

SEQ ID NO: 2074435 - RNA, 19 nt, Artificial Sequence
  Description of Artificial Sequence: Synthetic oligonucleotide
aaagggaaaagcaccgaca

SEQ ID NO: 2074436 - RNA, 19 nt, Artificial Sequence
  Description of Artificial Sequence: Synthetic oligonucleotide
ucacucgucacuccuuccc

SEQ ID NO: 2074437 - RNA, 19 nt, Artificial Sequence
  Description of Artificial Sequence: Synthetic oligonucleotide
cacagcucaaauacugagc

SEQ ID NO: 2074438 - RNA, 19 nt, Artificial Sequence
  Description of Artificial Sequence: Synthetic oligonucleotide
gaaacaggaacagggaguc

SEQ ID NO: 2074439 - RNA, 19 nt, Artificial Sequence
  Description of Artificial Sequence: Synthetic oligonucleotide
accgacaccaaaugagaag

SEQ ID NO: 2074440 - RNA, 19 nt, Artificial Sequence
  Description of Artificial Sequence: Synthetic oligonucleotide
acacacggggcacucuugc

SEQ ID NO: 2074441 - RNA, 19 nt, Artificial Sequence
  Description of Artificial Sequence: Synthetic oligonucleotide
agggaaaagcaccgacacc

SEQ ID NO: 2074442 - RNA, 19 nt, Artificial Sequence
  Description of Artificial Sequence: Synthetic oligonucleotide
acauucgaaggucgcgccc

SEQ ID NO: 2074443 - RNA, 19 nt, Artificial Sequence
  Description of Artificial Sequence: Synthetic oligonucleotide
caccuuuaaacauccaauc

SEQ ID NO: 2074444 - RNA, 19 nt, Artificial Sequence
  Description of Artificial Sequence: Synthetic oligonucleotide
agaagauggcgagaaacag

SEQ ID NO: 2074445 - RNA, 19 nt, Artificial Sequence
  Description of Artificial Sequence: Synthetic oligonucleotide
uggaguuuucagucugggg

SEQ ID NO: 2074446 - RNA, 19 nt, Artificial Sequence
  Description of Artificial Sequence: Synthetic oligonucleotide
agggagucuugccagcugg

SEQ ID NO: 2074447 - RNA, 19 nt, Artificial Sequence
  Description of Artificial Sequence: Synthetic oligonucleotide
gcgagaaacaggaacaggg

SEQ ID NO: 2074448 - RNA, 19 nt, Artificial Sequence
  Description of Artificial Sequence: Synthetic oligonucleotide
acgacugugucccugcuga

SEQ ID NO: 2074449 - RNA, 19 nt, Artificial Sequence
  Description of Artificial Sequence: Synthetic oligonucleotide
aguuuucagucuggggucc

SEQ ID NO: 2074450 - RNA, 19 nt, Artificial Sequence
  Description of Artificial Sequence: Synthetic oligonucleotide
aaaagcaaggcggggccag

SEQ ID NO: 2074451 - RNA, 19 nt, Artificial Sequence
  Description of Artificial Sequence: Synthetic oligonucleotide
cugaccacagccucgcgag

SEQ ID NO: 2074452 - RNA, 19 nt, Artificial Sequence
  Description of Artificial Sequence: Synthetic oligonucleotide
aagcccaccuuuaaacauc

SEQ ID NO: 2074453 - RNA, 19 nt, Artificial Sequence
  Description of Artificial Sequence: Synthetic oligonucleotide
uacagguguccgcacacgc

SEQ ID NO: 2074454 - RNA, 19 nt, Artificial Sequence
  Description of Artificial Sequence: Synthetic oligonucleotide
agcaccgacaccaaaugag

SEQ ID NO: 2074455 - RNA, 19 nt, Artificial Sequence
  Description of Artificial Sequence: Synthetic oligonucleotide
gaguuuucagucugggguc

SEQ ID NO: 2074456 - RNA, 19 nt, Artificial Sequence
  Description of Artificial Sequence: Synthetic oligonucleotide
aaucaacaaguggaggagu

SEQ ID NO: 2074457 - RNA, 19 nt, Artificial Sequence
  Description of Artificial Sequence: Synthetic oligonucleotide
caacaaguggaggagucgg

SEQ ID NO: 2074458 - RNA, 19 nt, Artificial Sequence
  Description of Artificial Sequence: Synthetic oligonucleotide
agagagggacgacuguguc

SEQ ID NO: 2074459 - RNA, 19 nt, Artificial Sequence
  Description of Artificial Sequence: Synthetic oligonucleotide
uccccgaacggcuggaacc

SEQ ID NO: 2074460 - RNA, 19 nt, Artificial Sequence
  Description of Artificial Sequence: Synthetic oligonucleotide
uacauucgaaggucgcgcc

SEQ ID NO: 2074461 - RNA, 19 nt, Artificial Sequence
  Description of Artificial Sequence: Synthetic oligonucleotide
uccucuagcuggagguggg

SEQ ID NO: 2074462 - RNA, 19 nt, Artificial Sequence
  Description of Artificial Sequence: Synthetic oligonucleotide
aucaacaaguggaggaguc

SEQ ID NO: 2074463 - RNA, 19 nt, Artificial Sequence
  Description of Artificial Sequence: Synthetic oligonucleotide
aaguggaggagucggggaa

SEQ ID NO: 2074464 - RNA, 19 nt, Artificial Sequence
  Description of Artificial Sequence: Synthetic oligonucleotide
uucagggcggggauggcug

SEQ ID NO: 2074465 - RNA, 19 nt, Artificial Sequence
  Description of Artificial Sequence: Synthetic oligonucleotide
acaaguggaggagucgggg

SEQ ID NO: 2074466 - RNA, 19 nt, Artificial Sequence
  Description of Artificial Sequence: Synthetic oligonucleotide
gaaaggacacaauuagagu

SEQ ID NO: 2074467 - RNA, 19 nt, Artificial Sequence
  Description of Artificial Sequence: Synthetic oligonucleotide
aacucauaucagacagugg

SEQ ID NO: 2074468 - RNA, 19 nt, Artificial Sequence
  Description of Artificial Sequence: Synthetic oligonucleotide
gugguccaaaagcaaggcg

SEQ ID NO: 2074469 - RNA, 19 nt, Artificial Sequence
  Description of Artificial Sequence: Synthetic oligonucleotide
aacaaguggaggagucggg

SEQ ID NO: 2074470 - RNA, 19 nt, Artificial Sequence
  Description of Artificial Sequence: Synthetic oligonucleotide
aacauccaaucaagaaguc

SEQ ID NO: 2074471 - RNA, 19 nt, Artificial Sequence
  Description of Artificial Sequence: Synthetic oligonucleotide
augccggcuuuacacacgg

SEQ ID NO: 2074472 - RNA, 19 nt, Artificial Sequence
  Description of Artificial Sequence: Synthetic oligonucleotide
guaauaaaggagguagcca

SEQ ID NO: 2074473 - RNA, 19 nt, Artificial Sequence
  Description of Artificial Sequence: Synthetic oligonucleotide
uagagagggacgacugugu

SEQ ID NO: 2074474 - RNA, 19 nt, Artificial Sequence
  Description of Artificial Sequence: Synthetic oligonucleotide
cagcuaacagacauagguc

SEQ ID NO: 2074475 - RNA, 19 nt, Artificial Sequence
  Description of Artificial Sequence: Synthetic oligonucleotide
auccacaccugcuccccgc

SEQ ID NO: 2074476 - RNA, 19 nt, Artificial Sequence
  Description of Artificial Sequence: Synthetic oligonucleotide
gggaaaagcaccgacacca

SEQ ID NO: 2074477 - RNA, 19 nt, Artificial Sequence
  Description of Artificial Sequence: Synthetic oligonucleotide
acucgucacuccuucccac

SEQ ID NO: 2074478 - RNA, 19 nt, Artificial Sequence
  Description of Artificial Sequence: Synthetic oligonucleotide
agauccacaccugcucccc

SEQ ID NO: 2074479 - RNA, 19 nt, Artificial Sequence
  Description of Artificial Sequence: Synthetic oligonucleotide
cauucgaaggucgcgcccg

SEQ ID NO: 2074480 - RNA, 19 nt, Artificial Sequence
  Description of Artificial Sequence: Synthetic oligonucleotide
cucgugggcauugaacacg

SEQ ID NO: 2074481 - RNA, 19 nt, Artificial Sequence
  Description of Artificial Sequence: Synthetic oligonucleotide
auaucagacaguggggaga

SEQ ID NO: 2074482 - RNA, 19 nt, Artificial Sequence
  Description of Artificial Sequence: Synthetic oligonucleotide
ugaugccggcuuuacacac

SEQ ID NO: 2074483 - RNA, 19 nt, Artificial Sequence
  Description of Artificial Sequence: Synthetic oligonucleotide
auggcgagaaacaggaaca

SEQ ID NO: 2074484 - RNA, 19 nt, Artificial Sequence
  Description of Artificial Sequence: Synthetic oligonucleotide
guagagagggacgacugug

SEQ ID NO: 2074485 - RNA, 19 nt, Artificial Sequence
  Description of Artificial Sequence: Synthetic oligonucleotide
aauuagagucagaacucau

SEQ ID NO: 2074486 - RNA, 19 nt, Artificial Sequence
  Description of Artificial Sequence: Synthetic oligonucleotide
acauccaaucaagaagucu

SEQ ID NO: 2074487 - RNA, 19 nt, Artificial Sequence
  Description of Artificial Sequence: Synthetic oligonucleotide
gaccacagccucgcgagcg

SEQ ID NO: 2074488 - RNA, 19 nt, Artificial Sequence
  Description of Artificial Sequence: Synthetic oligonucleotide
aggcacucccgacccaggc

SEQ ID NO: 2074489 - RNA, 19 nt, Artificial Sequence
  Description of Artificial Sequence: Synthetic oligonucleotide
auucgaaggucgcgcccgc

SEQ ID NO: 2074490 - RNA, 19 nt, Artificial Sequence
  Description of Artificial Sequence: Synthetic oligonucleotide
uagagucagaacucauauc

SEQ ID NO: 2074491 - RNA, 19 nt, Artificial Sequence
  Description of Artificial Sequence: Synthetic oligonucleotide
gucgcuggcccugagggcg

SEQ ID NO: 2074492 - RNA, 19 nt, Artificial Sequence
  Description of Artificial Sequence: Synthetic oligonucleotide
agacggggugacccugucc

SEQ ID NO: 2074493 - RNA, 19 nt, Artificial Sequence
  Description of Artificial Sequence: Synthetic oligonucleotide
cauaggucaugggagugag

SEQ ID NO: 2074494 - RNA, 19 nt, Artificial Sequence
  Description of Artificial Sequence: Synthetic oligonucleotide
ucgaaggucgcgcccgccc

SEQ ID NO: 2074495 - RNA, 19 nt, Artificial Sequence
  Description of Artificial Sequence: Synthetic oligonucleotide
ucggggaaagcccaccuuu

SEQ ID NO: 2074496 - RNA, 19 nt, Artificial Sequence
  Description of Artificial Sequence: Synthetic oligonucleotide
cagucugggguccugcggc

SEQ ID NO: 2074497 - RNA, 19 nt, Artificial Sequence
  Description of Artificial Sequence: Synthetic oligonucleotide
acaccaaaugagaagugga

SEQ ID NO: 2074498 - RNA, 19 nt, Artificial Sequence
  Description of Artificial Sequence: Synthetic oligonucleotide
ucgucacuccuucccacug

SEQ ID NO: 2074499 - RNA, 19 nt, Artificial Sequence
  Description of Artificial Sequence: Synthetic oligonucleotide
auagacgcucacacagcgc

SEQ ID NO: 2074500 - RNA, 19 nt, Artificial Sequence
  Description of Artificial Sequence: Synthetic oligonucleotide
gacaaauauuacauucgaa

SEQ ID NO: 2074501 - RNA, 19 nt, Artificial Sequence
  Description of Artificial Sequence: Synthetic oligonucleotide
gaugccggcuuuacacacg

SEQ ID NO: 2074502 - RNA, 19 nt, Artificial Sequence
  Description of Artificial Sequence: Synthetic oligonucleotide
gaggagucggggaaagccc

SEQ ID NO: 2074503 - RNA, 19 nt, Artificial Sequence
  Description of Artificial Sequence: Synthetic oligonucleotide
ggaacagggagucuugcca

SEQ ID NO: 2074504 - RNA, 19 nt, Artificial Sequence
  Description of Artificial Sequence: Synthetic oligonucleotide
auuuguaauaaaggaggua

SEQ ID NO: 2074505 - RNA, 19 nt, Artificial Sequence
  Description of Artificial Sequence: Synthetic oligonucleotide
cucagcuaacagacauagg

SEQ ID NO: 2074506 - RNA, 19 nt, Artificial Sequence
  Description of Artificial Sequence: Synthetic oligonucleotide
uggcgagaaacaggaacag

SEQ ID NO: 2074507 - RNA, 19 nt, Artificial Sequence
  Description of Artificial Sequence: Synthetic oligonucleotide
ugcggcuuguggcugccgc

SEQ ID NO: 2074508 - RNA, 19 nt, Artificial Sequence
  Description of Artificial Sequence: Synthetic oligonucleotide
gagucuugccagcuggaga

SEQ ID NO: 2074509 - RNA, 19 nt, Artificial Sequence
  Description of Artificial Sequence: Synthetic oligonucleotide
ucuggccgcgucuccagcc

SEQ ID NO: 2074510 - RNA, 19 nt, Artificial Sequence
  Description of Artificial Sequence: Synthetic oligonucleotide
cacggggcacucuugccgg

SEQ ID NO: 2074511 - RNA, 19 nt, Artificial Sequence
  Description of Artificial Sequence: Synthetic oligonucleotide
ugcucuccggggcgggucg

SEQ ID NO: 2074512 - RNA, 19 nt, Artificial Sequence
  Description of Artificial Sequence: Synthetic oligonucleotide
ucaugggagugaggggugg

SEQ ID NO: 2074513 - RNA, 19 nt, Artificial Sequence
  Description of Artificial Sequence: Synthetic oligonucleotide
auuagagucagaacucaua

SEQ ID NO: 2074514 - RNA, 19 nt, Artificial Sequence
  Description of Artificial Sequence: Synthetic oligonucleotide
cacgcugaccacagccucg

SEQ ID NO: 2074515 - RNA, 19 nt, Artificial Sequence
  Description of Artificial Sequence: Synthetic oligonucleotide
gcgguuugggccuucgggg

SEQ ID NO: 2074516 - RNA, 19 nt, Artificial Sequence
  Description of Artificial Sequence: Synthetic oligonucleotide
gguccaaaagcaaggcggg

SEQ ID NO: 2074517 - RNA, 19 nt, Artificial Sequence
  Description of Artificial Sequence: Synthetic oligonucleotide
gccaaagggaaaagcaccg

SEQ ID NO: 2074518 - RNA, 19 nt, Artificial Sequence
  Description of Artificial Sequence: Synthetic oligonucleotide
gggaccccaauacugauuc

SEQ ID NO: 2074519 - RNA, 19 nt, Artificial Sequence
  Description of Artificial Sequence: Synthetic oligonucleotide
ucccagauccacaccugcu

SEQ ID NO: 2074520 - RNA, 19 nt, Artificial Sequence
  Description of Artificial Sequence: Synthetic oligonucleotide
ggcucgugggcauugaaca

SEQ ID NO: 2074521 - RNA, 19 nt, Artificial Sequence
  Description of Artificial Sequence: Synthetic oligonucleotide
caauuagagucagaacuca

SEQ ID NO: 2074522 - RNA, 19 nt, Artificial Sequence
  Description of Artificial Sequence: Synthetic oligonucleotide
gugaggggugguccaaaag

SEQ ID NO: 2074523 - RNA, 19 nt, Artificial Sequence
  Description of Artificial Sequence: Synthetic oligonucleotide
acgcugaccacagccucgc

SEQ ID NO: 2074524 - RNA, 19 nt, Artificial Sequence
  Description of Artificial Sequence: Synthetic oligonucleotide
aggcucgugggcauugaac

SEQ ID NO: 2074525 - RNA, 19 nt, Artificial Sequence
  Description of Artificial Sequence: Synthetic oligonucleotide
gaaaggcucgugggcauug

SEQ ID NO: 2074526 - RNA, 19 nt, Artificial Sequence
  Description of Artificial Sequence: Synthetic oligonucleotide
gaaggucgcgcccgccccg

SEQ ID NO: 2074527 - RNA, 19 nt, Artificial Sequence
  Description of Artificial Sequence: Synthetic oligonucleotide
gacgacugugucccugcug

SEQ ID NO: 2074528 - RNA, 19 nt, Artificial Sequence
  Description of Artificial Sequence: Synthetic oligonucleotide
cagcucaaauacugagcag

SEQ ID NO: 2074529 - RNA, 19 nt, Artificial Sequence
  Description of Artificial Sequence: Synthetic oligonucleotide
ccucagcuaacagacauag

SEQ ID NO: 2074530 - RNA, 19 nt, Artificial Sequence
  Description of Artificial Sequence: Synthetic oligonucleotide
gaagacagggccagcagua

SEQ ID NO: 2074531 - RNA, 19 nt, Artificial Sequence
  Description of Artificial Sequence: Synthetic oligonucleotide
cacaccugcuccccgccgg

SEQ ID NO: 2074532 - RNA, 19 nt, Artificial Sequence
  Description of Artificial Sequence: Synthetic oligonucleotide
acauaggucaugggaguga

SEQ ID NO: 2074533 - RNA, 19 nt, Artificial Sequence
  Description of Artificial Sequence: Synthetic oligonucleotide
accacagccucgcgagcgg

SEQ ID NO: 2074534 - RNA, 19 nt, Artificial Sequence
  Description of Artificial Sequence: Synthetic oligonucleotide
agucggggaaagcccaccu

SEQ ID NO: 2074535 - RNA, 19 nt, Artificial Sequence
  Description of Artificial Sequence: Synthetic oligonucleotide
ucgcgagcggucuccagac

SEQ ID NO: 2074536 - RNA, 19 nt, Artificial Sequence
  Description of Artificial Sequence: Synthetic oligonucleotide
gggugguccaaaagcaagg

SEQ ID NO: 2074537 - RNA, 19 nt, Artificial Sequence
  Description of Artificial Sequence: Synthetic oligonucleotide
gucuccagacaaauauuac

SEQ ID NO: 2074538 - RNA, 19 nt, Artificial Sequence
  Description of Artificial Sequence: Synthetic oligonucleotide
cucacucgucacuccuucc

SEQ ID NO: 2074539 - RNA, 19 nt, Artificial Sequence
  Description of Artificial Sequence: Synthetic oligonucleotide
uggccgguugugcuucgcc

SEQ ID NO: 2074540 - RNA, 19 nt, Artificial Sequence
  Description of Artificial Sequence: Synthetic oligonucleotide
cuccccgccggaaaggcuc

SEQ ID NO: 2074541 - RNA, 19 nt, Artificial Sequence
  Description of Artificial Sequence: Synthetic oligonucleotide
acccaggcucacucgucac

SEQ ID NO: 2074542 - RNA, 19 nt, Artificial Sequence
  Description of Artificial Sequence: Synthetic oligonucleotide
cacucuugccggucuggcc

SEQ ID NO: 2074543 - RNA, 19 nt, Artificial Sequence
  Description of Artificial Sequence: Synthetic oligonucleotide
gacccaggcucacucguca

SEQ ID NO: 2074544 - RNA, 19 nt, Artificial Sequence
  Description of Artificial Sequence: Synthetic oligonucleotide
ucuccucuagcuggaggug

SEQ ID NO: 2074545 - RNA, 19 nt, Artificial Sequence
  Description of Artificial Sequence: Synthetic oligonucleotide
uuuacacacggggcacucu

SEQ ID NO: 2074546 - RNA, 19 nt, Artificial Sequence
  Description of Artificial Sequence: Synthetic oligonucleotide
uccccgccggaaaggcucg

SEQ ID NO: 2074547 - RNA, 19 nt, Artificial Sequence
  Description of Artificial Sequence: Synthetic oligonucleotide
uagccagggcggaaaggac

SEQ ID NO: 2074548 - RNA, 19 nt, Artificial Sequence
  Description of Artificial Sequence: Synthetic oligonucleotide
guacagguguccgcacacg

SEQ ID NO: 2074549 - RNA, 19 nt, Artificial Sequence
  Description of Artificial Sequence: Synthetic oligonucleotide
uccgcacacgcugaccaca

SEQ ID NO: 2074550 - RNA, 19 nt, Artificial Sequence
  Description of Artificial Sequence: Synthetic oligonucleotide
gcucaaauacugagcagcc

SEQ ID NO: 2074551 - RNA, 19 nt, Artificial Sequence
  Description of Artificial Sequence: Synthetic oligonucleotide
cagcaguacagguguccgc

SEQ ID NO: 2074552 - RNA, 19 nt, Artificial Sequence
  Description of Artificial Sequence: Synthetic oligonucleotide
agugaggggugguccaaaa

SEQ ID NO: 2074553 - RNA, 19 nt, Artificial Sequence
  Description of Artificial Sequence: Synthetic oligonucleotide
guccaaaagcaaggcgggg

SEQ ID NO: 2074554 - RNA, 19 nt, Artificial Sequence
  Description of Artificial Sequence: Synthetic oligonucleotide
ugaccacagccucgcgagc

SEQ ID NO: 2074555 - RNA, 19 nt, Artificial Sequence
  Description of Artificial Sequence: Synthetic oligonucleotide
gccgcggccguagagaggg

SEQ ID NO: 2074556 - RNA, 19 nt, Artificial Sequence
  Description of Artificial Sequence: Synthetic oligonucleotide
ggguccugcggcuuguggc

SEQ ID NO: 2074557 - RNA, 19 nt, Artificial Sequence
  Description of Artificial Sequence: Synthetic oligonucleotide
ucccgacccaggcucacuc

SEQ ID NO: 2074558 - RNA, 19 nt, Artificial Sequence
  Description of Artificial Sequence: Synthetic oligonucleotide
ggaggccucagcuaacaga

SEQ ID NO: 2074559 - RNA, 19 nt, Artificial Sequence
  Description of Artificial Sequence: Synthetic oligonucleotide
cugaugccggcuuuacaca

SEQ ID NO: 2074560 - RNA, 19 nt, Artificial Sequence
  Description of Artificial Sequence: Synthetic oligonucleotide
agagccgcaggcacucccg

SEQ ID NO: 2074561 - RNA, 19 nt, Artificial Sequence
  Description of Artificial Sequence: Synthetic oligonucleotide
ucgcgguuugggccuucgg

SEQ ID NO: 2074562 - RNA, 19 nt, Artificial Sequence
  Description of Artificial Sequence: Synthetic oligonucleotide
cugccgcggccguagagag

SEQ ID NO: 2074563 - RNA, 19 nt, Artificial Sequence
  Description of Artificial Sequence: Synthetic oligonucleotide
gguggaguuuucagucugg

SEQ ID NO: 2074564 - RNA, 19 nt, Artificial Sequence
  Description of Artificial Sequence: Synthetic oligonucleotide
gcuggagacggggugaccc

SEQ ID NO: 2074565 - RNA, 19 nt, Artificial Sequence
  Description of Artificial Sequence: Synthetic oligonucleotide
agacgcucacacagcgcgc

SEQ ID NO: 2074566 - RNA, 19 nt, Artificial Sequence
  Description of Artificial Sequence: Synthetic oligonucleotide
ccggcuuuacacacggggc

SEQ ID NO: 2074567 - RNA, 19 nt, Artificial Sequence
  Description of Artificial Sequence: Synthetic oligonucleotide
agccucgcgagcggucucc

SEQ ID NO: 2074568 - RNA, 19 nt, Artificial Sequence
  Description of Artificial Sequence: Synthetic oligonucleotide
ggcgagaaacaggaacagg

SEQ ID NO: 2074569 - RNA, 19 nt, Artificial Sequence
  Description of Artificial Sequence: Synthetic oligonucleotide
ugaugaagacagggccagc

SEQ ID NO: 2074570 - RNA, 19 nt, Artificial Sequence
  Description of Artificial Sequence: Synthetic oligonucleotide
aaaggcucgugggcauuga

SEQ ID NO: 2074571 - RNA, 19 nt, Artificial Sequence
  Description of Artificial Sequence: Synthetic oligonucleotide
gcaaggcggggccagcagg

SEQ ID NO: 2074572 - RNA, 19 nt, Artificial Sequence
  Description of Artificial Sequence: Synthetic oligonucleotide
ggcgcgguggaguuuucag

SEQ ID NO: 2074573 - RNA, 19 nt, Artificial Sequence
  Description of Artificial Sequence: Synthetic oligonucleotide
cucuugccggucuggccgc

SEQ ID NO: 2074574 - RNA, 19 nt, Artificial Sequence
  Description of Artificial Sequence: Synthetic oligonucleotide
ugacccugucccagaucca

SEQ ID NO: 2074575 - RNA, 19 nt, Artificial Sequence
  Description of Artificial Sequence: Synthetic oligonucleotide
aaaggagaacugggccccu

SEQ ID NO: 2074576 - RNA, 19 nt, Artificial Sequence
  Description of Artificial Sequence: Synthetic oligonucleotide
gacgcucacacagcgcgca

SEQ ID NO: 2074577 - RNA, 19 nt, Artificial Sequence
  Description of Artificial Sequence: Synthetic oligonucleotide
auaggucaugggagugagg

SEQ ID NO: 2074578 - RNA, 19 nt, Artificial Sequence
  Description of Artificial Sequence: Synthetic oligonucleotide
acgcucacacagcgcgcac

SEQ ID NO: 2074579 - RNA, 19 nt, Artificial Sequence
  Description of Artificial Sequence: Synthetic oligonucleotide
gagucggggaaagcccacc

SEQ ID NO: 2074580 - RNA, 19 nt, Artificial Sequence
  Description of Artificial Sequence: Synthetic oligonucleotide
ugccggcuuuacacacggg

SEQ ID NO: 2074581 - RNA, 19 nt, Artificial Sequence
  Description of Artificial Sequence: Synthetic oligonucleotide
uggagacggggugacccug

SEQ ID NO: 2074582 - RNA, 19 nt, Artificial Sequence
  Description of Artificial Sequence: Synthetic oligonucleotide
aggagucggggaaagccca

SEQ ID NO: 2074583 - RNA, 19 nt, Artificial Sequence
  Description of Artificial Sequence: Synthetic oligonucleotide
gggagaggaaaauuaaauu

SEQ ID NO: 2074584 - RNA, 19 nt, Artificial Sequence
  Description of Artificial Sequence: Synthetic oligonucleotide
uccugcggcuuguggcugc

SEQ ID NO: 2074585 - RNA, 19 nt, Artificial Sequence
  Description of Artificial Sequence: Synthetic oligonucleotide
cugugucccugcugaugcc

SEQ ID NO: 2074586 - RNA, 19 nt, Artificial Sequence
  Description of Artificial Sequence: Synthetic oligonucleotide
ugccgcggccguagagagg

SEQ ID NO: 2074587 - RNA, 19 nt, Artificial Sequence
  Description of Artificial Sequence: Synthetic oligonucleotide
agucugggguccugcggcu

SEQ ID NO: 2074588 - RNA, 19 nt, Artificial Sequence
  Description of Artificial Sequence: Synthetic oligonucleotide
gugucccugcugaugccgg

SEQ ID NO: 2074589 - RNA, 19 nt, Artificial Sequence
  Description of Artificial Sequence: Synthetic oligonucleotide
cucgcgagcggucuccaga

SEQ ID NO: 2074590 - RNA, 19 nt, Artificial Sequence
  Description of Artificial Sequence: Synthetic oligonucleotide
guuugggccuucggggccc

SEQ ID NO: 2074591 - RNA, 19 nt, Artificial Sequence
  Description of Artificial Sequence: Synthetic oligonucleotide
ccagcaguacagguguccg

SEQ ID NO: 2074592 - RNA, 19 nt, Artificial Sequence
  Description of Artificial Sequence: Synthetic oligonucleotide
caccgacaccaaaugagaa

SEQ ID NO: 2074593 - RNA, 19 nt, Artificial Sequence
  Description of Artificial Sequence: Synthetic oligonucleotide
gccggaaaggcucgugggc

SEQ ID NO: 2074594 - RNA, 19 nt, Artificial Sequence
  Description of Artificial Sequence: Synthetic oligonucleotide
acagccucgcgagcggucu

SEQ ID NO: 2074595 - RNA, 19 nt, Artificial Sequence
  Description of Artificial Sequence: Synthetic oligonucleotide
ggagucuugccagcuggag

SEQ ID NO: 2074596 - RNA, 19 nt, Artificial Sequence
  Description of Artificial Sequence: Synthetic oligonucleotide
cauggccgguugugcuucg

SEQ ID NO: 2074597 - RNA, 19 nt, Artificial Sequence
  Description of Artificial Sequence: Synthetic oligonucleotide
ggccgguugugcuucgccc

SEQ ID NO: 2074598 - RNA, 19 nt, Artificial Sequence
  Description of Artificial Sequence: Synthetic oligonucleotide
agggaggccucagcuaaca

SEQ ID NO: 2074599 - RNA, 19 nt, Artificial Sequence
  Description of Artificial Sequence: Synthetic oligonucleotide
gccgguugugcuucgcccc

SEQ ID NO: 2074600 - RNA, 19 nt, Artificial Sequence
  Description of Artificial Sequence: Synthetic oligonucleotide
gagacacagcucaaauacu

SEQ ID NO: 2074601 - RNA, 19 nt, Artificial Sequence
  Description of Artificial Sequence: Synthetic oligonucleotide
ccguagagagggacgacug

SEQ ID NO: 2074602 - RNA, 19 nt, Artificial Sequence
  Description of Artificial Sequence: Synthetic oligonucleotide
cacucgucacuccuuccca

SEQ ID NO: 2074603 - RNA, 19 nt, Artificial Sequence
  Description of Artificial Sequence: Synthetic oligonucleotide
agggacgacugugucccug

SEQ ID NO: 2074604 - RNA, 19 nt, Artificial Sequence
  Description of Artificial Sequence: Synthetic oligonucleotide
cugccauggccgguugugc

SEQ ID NO: 2074605 - RNA, 19 nt, Artificial Sequence
  Description of Artificial Sequence: Synthetic oligonucleotide
cccgcucgcgguuugggcc

SEQ ID NO: 2074606 - RNA, 19 nt, Artificial Sequence
  Description of Artificial Sequence: Synthetic oligonucleotide
auggccgguugugcuucgc

SEQ ID NO: 2074607 - RNA, 19 nt, Artificial Sequence
  Description of Artificial Sequence: Synthetic oligonucleotide
guccccgaacggcuggaac

SEQ ID NO: 2074608 - RNA, 19 nt, Artificial Sequence
  Description of Artificial Sequence: Synthetic oligonucleotide
ucgcuggcccugagggcgc

SEQ ID NO: 2074609 - RNA, 19 nt, Artificial Sequence
  Description of Artificial Sequence: Synthetic oligonucleotide
gcugaccacagccucgcga

SEQ ID NO: 2074610 - RNA, 19 nt, Artificial Sequence
  Description of Artificial Sequence: Synthetic oligonucleotide
ugccggucuggccgcgucu

SEQ ID NO: 2074611 - RNA, 19 nt, Artificial Sequence
  Description of Artificial Sequence: Synthetic oligonucleotide
uucgaaggucgcgcccgcc

SEQ ID NO: 2074612 - RNA, 19 nt, Artificial Sequence
  Description of Artificial Sequence: Synthetic oligonucleotide
ucuugccggucuggccgcg

SEQ ID NO: 2074613 - RNA, 19 nt, Artificial Sequence
  Description of Artificial Sequence: Synthetic oligonucleotide
gggagacacagcucaaaua

SEQ ID NO: 2074614 - RNA, 19 nt, Artificial Sequence
  Description of Artificial Sequence: Synthetic oligonucleotide
cgcgguggaguuuucaguc

SEQ ID NO: 2074615 - RNA, 19 nt, Artificial Sequence
  Description of Artificial Sequence: Synthetic oligonucleotide
ggcggaaaggacacaauua

SEQ ID NO: 2074616 - RNA, 19 nt, Artificial Sequence
  Description of Artificial Sequence: Synthetic oligonucleotide
gcucacucgucacuccuuc

SEQ ID NO: 2074617 - RNA, 19 nt, Artificial Sequence
  Description of Artificial Sequence: Synthetic oligonucleotide
cccaccuuuaaacauccaa

SEQ ID NO: 2074618 - RNA, 19 nt, Artificial Sequence
  Description of Artificial Sequence: Synthetic oligonucleotide
aggggagacacagcucaaa

SEQ ID NO: 2074619 - RNA, 19 nt, Artificial Sequence
  Description of Artificial Sequence: Synthetic oligonucleotide
acucccgacccaggcucac

SEQ ID NO: 2074620 - RNA, 19 nt, Artificial Sequence
  Description of Artificial Sequence: Synthetic oligonucleotide
uugccggucuggccgcguc

SEQ ID NO: 2074621 - RNA, 19 nt, Artificial Sequence
  Description of Artificial Sequence: Synthetic oligonucleotide
ggcuuuacacacggggcac

SEQ ID NO: 2074622 - RNA, 19 nt, Artificial Sequence
  Description of Artificial Sequence: Synthetic oligonucleotide
ggcacucuugccggucugg

SEQ ID NO: 2074623 - RNA, 19 nt, Artificial Sequence
  Description of Artificial Sequence: Synthetic oligonucleotide
gagacggggugacccuguc

SEQ ID NO: 2074624 - RNA, 19 nt, Artificial Sequence
  Description of Artificial Sequence: Synthetic oligonucleotide
gccagcaguacaggugucc

SEQ ID NO: 2074625 - RNA, 19 nt, Artificial Sequence
  Description of Artificial Sequence: Synthetic oligonucleotide
caaaagcaaggcggggcca

SEQ ID NO: 2074626 - RNA, 19 nt, Artificial Sequence
  Description of Artificial Sequence: Synthetic oligonucleotide
gcaccgacaccaaaugaga

SEQ ID NO: 2074627 - RNA, 19 nt, Artificial Sequence
  Description of Artificial Sequence: Synthetic oligonucleotide
cacacgcugaccacagccu

SEQ ID NO: 2074628 - RNA, 19 nt, Artificial Sequence
  Description of Artificial Sequence: Synthetic oligonucleotide
cucgcgguuugggccuucg

SEQ ID NO: 2074629 - RNA, 19 nt, Artificial Sequence
  Description of Artificial Sequence: Synthetic oligonucleotide
gucuggccgcgucuccagc

SEQ ID NO: 2074630 - RNA, 19 nt, Artificial Sequence
  Description of Artificial Sequence: Synthetic oligonucleotide
gggaggccucagcuaacag

SEQ ID NO: 2074631 - RNA, 19 nt, Artificial Sequence
  Description of Artificial Sequence: Synthetic oligonucleotide
ccaccuuuaaacauccaau

SEQ ID NO: 2074632 - RNA, 19 nt, Artificial Sequence
  Description of Artificial Sequence: Synthetic oligonucleotide
cacagccucgcgagcgguc

SEQ ID NO: 2074633 - RNA, 19 nt, Artificial Sequence
  Description of Artificial Sequence: Synthetic oligonucleotide
accugcuccccgccggaaa

SEQ ID NO: 2074634 - RNA, 19 nt, Artificial Sequence
  Description of Artificial Sequence: Synthetic oligonucleotide
cagggcggaaaggacacaa

SEQ ID NO: 2074635 - RNA, 19 nt, Artificial Sequence
  Description of Artificial Sequence: Synthetic oligonucleotide
acggggugacccuguccca

SEQ ID NO: 2074636 - RNA, 19 nt, Artificial Sequence
  Description of Artificial Sequence: Synthetic oligonucleotide
ggccucagcuaacagacau

SEQ ID NO: 2074637 - RNA, 19 nt, Artificial Sequence
  Description of Artificial Sequence: Synthetic oligonucleotide
ccgccggaaaggcucgugg

SEQ ID NO: 2074638 - RNA, 19 nt, Artificial Sequence
  Description of Artificial Sequence: Synthetic oligonucleotide
gucgcgcccgccccgcccc

SEQ ID NO: 2074639 - RNA, 19 nt, Artificial Sequence
  Description of Artificial Sequence: Synthetic oligonucleotide
aggagguagccagggcgga

SEQ ID NO: 2074640 - RNA, 19 nt, Artificial Sequence
  Description of Artificial Sequence: Synthetic oligonucleotide
gcggccguagagagggacg

SEQ ID NO: 2074641 - RNA, 19 nt, Artificial Sequence
  Description of Artificial Sequence: Synthetic oligonucleotide
gcgagcggucuccagacaa

SEQ ID NO: 2074642 - RNA, 19 nt, Artificial Sequence
  Description of Artificial Sequence: Synthetic oligonucleotide
ggcggggccagcagggacc

SEQ ID NO: 2074643 - RNA, 19 nt, Artificial Sequence
  Description of Artificial Sequence: Synthetic oligonucleotide
ucuccggggcgggucgcug

SEQ ID NO: 2074644 - RNA, 19 nt, Artificial Sequence
  Description of Artificial Sequence: Synthetic oligonucleotide
gcggggauggcugugccuc

SEQ ID NO: 2074645 - RNA, 19 nt, Artificial Sequence
  Description of Artificial Sequence: Synthetic oligonucleotide
cucgucacuccuucccacu

SEQ ID NO: 2074646 - RNA, 19 nt, Artificial Sequence
  Description of Artificial Sequence: Synthetic oligonucleotide
cgccggaaaggcucguggg

SEQ ID NO: 2074647 - RNA, 19 nt, Artificial Sequence
  Description of Artificial Sequence: Synthetic oligonucleotide
ccgacaccaaaugagaagu

SEQ ID NO: 2074648 - RNA, 19 nt, Artificial Sequence
  Description of Artificial Sequence: Synthetic oligonucleotide
gguccugcggcuuguggcu

SEQ ID NO: 2074649 - RNA, 19 nt, Artificial Sequence
  Description of Artificial Sequence: Synthetic oligonucleotide
agggaccccaauacugauu

SEQ ID NO: 2074650 - RNA, 19 nt, Artificial Sequence
  Description of Artificial Sequence: Synthetic oligonucleotide
cggaaaggacacaauuaga

SEQ ID NO: 2074651 - RNA, 19 nt, Artificial Sequence
  Description of Artificial Sequence: Synthetic oligonucleotide
ccccgaacggcuggaaccc

SEQ ID NO: 2074652 - RNA, 19 nt, Artificial Sequence
  Description of Artificial Sequence: Synthetic oligonucleotide
ggggagacacagcucaaau

SEQ ID NO: 2074653 - RNA, 19 nt, Artificial Sequence
  Description of Artificial Sequence: Synthetic oligonucleotide
cccgacccaggcucacucg

SEQ ID NO: 2074654 - RNA, 19 nt, Artificial Sequence
  Description of Artificial Sequence: Synthetic oligonucleotide
ccgcaggcacucccgaccc

SEQ ID NO: 2074655 - RNA, 19 nt, Artificial Sequence
  Description of Artificial Sequence: Synthetic oligonucleotide
cgguggaguuuucagucug

SEQ ID NO: 2074656 - RNA, 19 nt, Artificial Sequence
  Description of Artificial Sequence: Synthetic oligonucleotide
acggggcacucuugccggu

SEQ ID NO: 2074657 - RNA, 19 nt, Artificial Sequence
  Description of Artificial Sequence: Synthetic oligonucleotide
ggaaaagcaccgacaccaa

SEQ ID NO: 2074658 - RNA, 19 nt, Artificial Sequence
  Description of Artificial Sequence: Synthetic oligonucleotide
gggcggaaaggacacaauu

SEQ ID NO: 2074659 - RNA, 19 nt, Artificial Sequence
  Description of Artificial Sequence: Synthetic oligonucleotide
guccugcggcuuguggcug

SEQ ID NO: 2074660 - RNA, 19 nt, Artificial Sequence
  Description of Artificial Sequence: Synthetic oligonucleotide
cgucacuccuucccacugc

SEQ ID NO: 2074661 - RNA, 19 nt, Artificial Sequence
  Description of Artificial Sequence: Synthetic oligonucleotide
cugcugccauggccgguug

SEQ ID NO: 2074662 - RNA, 19 nt, Artificial Sequence
  Description of Artificial Sequence: Synthetic oligonucleotide
agcggucuccagacaaaua

SEQ ID NO: 2074663 - RNA, 19 nt, Artificial Sequence
  Description of Artificial Sequence: Synthetic oligonucleotide
gcugccgcggccguagaga

SEQ ID NO: 2074664 - RNA, 19 nt, Artificial Sequence
  Description of Artificial Sequence: Synthetic oligonucleotide
cgaaggucgcgcccgcccc

SEQ ID NO: 2074665 - RNA, 19 nt, Artificial Sequence
  Description of Artificial Sequence: Synthetic oligonucleotide
caggggagacacagcucaa

SEQ ID NO: 2074666 - RNA, 19 nt, Artificial Sequence
  Description of Artificial Sequence: Synthetic oligonucleotide
cuggagacggggugacccu

SEQ ID NO: 2074667 - RNA, 19 nt, Artificial Sequence
  Description of Artificial Sequence: Synthetic oligonucleotide
uggcugccgcggccguaga

SEQ ID NO: 2074668 - RNA, 19 nt, Artificial Sequence
  Description of Artificial Sequence: Synthetic oligonucleotide
ccggaaaggcucgugggca

SEQ ID NO: 2074669 - RNA, 19 nt, Artificial Sequence
  Description of Artificial Sequence: Synthetic oligonucleotide
aggccucagcuaacagaca

SEQ ID NO: 2074670 - RNA, 19 nt, Artificial Sequence
  Description of Artificial Sequence: Synthetic oligonucleotide
ccacaccugcuccccgccg

SEQ ID NO: 2074671 - RNA, 19 nt, Artificial Sequence
  Description of Artificial Sequence: Synthetic oligonucleotide
cggcuuuacacacggggca

SEQ ID NO: 2074672 - RNA, 19 nt, Artificial Sequence
  Description of Artificial Sequence: Synthetic oligonucleotide
gcuaacagacauaggucau

SEQ ID NO: 2074673 - RNA, 19 nt, Artificial Sequence
  Description of Artificial Sequence: Synthetic oligonucleotide
gcgucuccagccacugaug

SEQ ID NO: 2074674 - RNA, 19 nt, Artificial Sequence
  Description of Artificial Sequence: Synthetic oligonucleotide
ggggugacccugucccaga

SEQ ID NO: 2074675 - RNA, 19 nt, Artificial Sequence
  Description of Artificial Sequence: Synthetic oligonucleotide
ggagucggggaaagcccac

SEQ ID NO: 2074676 - RNA, 19 nt, Artificial Sequence
  Description of Artificial Sequence: Synthetic oligonucleotide
guuuucagucugggguccu

SEQ ID NO: 2074677 - RNA, 19 nt, Artificial Sequence
  Description of Artificial Sequence: Synthetic oligonucleotide
gagggcgcgguggaguuuu

SEQ ID NO: 2074678 - RNA, 19 nt, Artificial Sequence
  Description of Artificial Sequence: Synthetic oligonucleotide
ggucgcgcccgccccgccc

SEQ ID NO: 2074679 - RNA, 19 nt, Artificial Sequence
  Description of Artificial Sequence: Synthetic oligonucleotide
ccauggccgguugugcuuc

SEQ ID NO: 2074680 - RNA, 19 nt, Artificial Sequence
  Description of Artificial Sequence: Synthetic oligonucleotide
ggcaggggagacacagcuc

SEQ ID NO: 2074681 - RNA, 19 nt, Artificial Sequence
  Description of Artificial Sequence: Synthetic oligonucleotide
cagggaccccaauacugau

SEQ ID NO: 2074682 - RNA, 19 nt, Artificial Sequence
  Description of Artificial Sequence: Synthetic oligonucleotide
cagggcggggauggcugug

SEQ ID NO: 2074683 - RNA, 19 nt, Artificial Sequence
  Description of Artificial Sequence: Synthetic oligonucleotide
gccguagagagggacgacu

SEQ ID NO: 2074684 - RNA, 19 nt, Artificial Sequence
  Description of Artificial Sequence: Synthetic oligonucleotide
ccccgcucgcgguuugggc

SEQ ID NO: 2074685 - RNA, 19 nt, Artificial Sequence
  Description of Artificial Sequence: Synthetic oligonucleotide
gggagucuugccagcugga

SEQ ID NO: 2074686 - RNA, 19 nt, Artificial Sequence
  Description of Artificial Sequence: Synthetic oligonucleotide
gcgguggaguuuucagucu

SEQ ID NO: 2074687 - RNA, 19 nt, Artificial Sequence
  Description of Artificial Sequence: Synthetic oligonucleotide
cagccucgcgagcggucuc

SEQ ID NO: 2074688 - RNA, 19 nt, Artificial Sequence
  Description of Artificial Sequence: Synthetic oligonucleotide
gucggggaaagcccaccuu

SEQ ID NO: 2074689 - RNA, 19 nt, Artificial Sequence
  Description of Artificial Sequence: Synthetic oligonucleotide
gcgcgguggaguuuucagu

SEQ ID NO: 2074690 - RNA, 19 nt, Artificial Sequence
  Description of Artificial Sequence: Synthetic oligonucleotide
gccgcgucuccagccacug

SEQ ID NO: 2074691 - RNA, 19 nt, Artificial Sequence
  Description of Artificial Sequence: Synthetic oligonucleotide
cugugccuccaggccagca

SEQ ID NO: 2074692 - RNA, 19 nt, Artificial Sequence
  Description of Artificial Sequence: Synthetic oligonucleotide
ccccaauacugauucuccu

SEQ ID NO: 2074693 - RNA, 19 nt, Artificial Sequence
  Description of Artificial Sequence: Synthetic oligonucleotide
caugggagugagggguggu

SEQ ID NO: 2074694 - RNA, 19 nt, Artificial Sequence
  Description of Artificial Sequence: Synthetic oligonucleotide
agggcgcgguggaguuuuc

SEQ ID NO: 2074695 - RNA, 19 nt, Artificial Sequence
  Description of Artificial Sequence: Synthetic oligonucleotide
gcggggccagcagggaccc

SEQ ID NO: 2074696 - RNA, 19 nt, Artificial Sequence
  Description of Artificial Sequence: Synthetic oligonucleotide
ggagguagccagggcggaa

SEQ ID NO: 2074697 - RNA, 19 nt, Artificial Sequence
  Description of Artificial Sequence: Synthetic oligonucleotide
cgggucgcuggcccugagg

SEQ ID NO: 2074698 - RNA, 19 nt, Artificial Sequence
  Description of Artificial Sequence: Synthetic oligonucleotide
ccucgcgagcggucuccag

SEQ ID NO: 2074699 - RNA, 19 nt, Artificial Sequence
  Description of Artificial Sequence: Synthetic oligonucleotide
gccucagcuaacagacaua

SEQ ID NO: 2074700 - RNA, 19 nt, Artificial Sequence
  Description of Artificial Sequence: Synthetic oligonucleotide
cggggugacccugucccag

SEQ ID NO: 2074701 - RNA, 19 nt, Artificial Sequence
  Description of Artificial Sequence: Synthetic oligonucleotide
ggaccccaauacugauucu

SEQ ID NO: 2074702 - RNA, 19 nt, Artificial Sequence
  Description of Artificial Sequence: Synthetic oligonucleotide
cggggauggcugugccucc

SEQ ID NO: 2074703 - RNA, 19 nt, Artificial Sequence
  Description of Artificial Sequence: Synthetic oligonucleotide
gccccugucuccagggugu

SEQ ID NO: 2074704 - RNA, 19 nt, Artificial Sequence
  Description of Artificial Sequence: Synthetic oligonucleotide
cccgaacggcuggaacccc

SEQ ID NO: 2074705 - RNA, 19 nt, Artificial Sequence
  Description of Artificial Sequence: Synthetic oligonucleotide
gccggucuggccgcgucuc

SEQ ID NO: 2074706 - RNA, 19 nt, Artificial Sequence
  Description of Artificial Sequence: Synthetic oligonucleotide
cggggcgggucgcuggccc

SEQ ID NO: 2074707 - RNA, 19 nt, Artificial Sequence
  Description of Artificial Sequence: Synthetic oligonucleotide
gggcgggucgcuggcccug

SEQ ID NO: 2074708 - RNA, 19 nt, Artificial Sequence
  Description of Artificial Sequence: Synthetic oligonucleotide
ggagacggggugacccugu

SEQ ID NO: 2074709 - RNA, 19 nt, Artificial Sequence
  Description of Artificial Sequence: Synthetic oligonucleotide
ggcggggauggcugugccu

SEQ ID NO: 2074710 - RNA, 19 nt, Artificial Sequence
  Description of Artificial Sequence: Synthetic oligonucleotide
gggcgcgguggaguuuuca

SEQ ID NO: 2074711 - RNA, 19 nt, Artificial Sequence
  Description of Artificial Sequence: Synthetic oligonucleotide
cgcggccguagagagggac

SEQ ID NO: 2074712 - RNA, 19 nt, Artificial Sequence
  Description of Artificial Sequence: Synthetic oligonucleotide
cguagagagggacgacugu

SEQ ID NO: 2074713 - RNA, 19 nt, Artificial Sequence
  Description of Artificial Sequence: Synthetic oligonucleotide
gcgggucgcuggcccugag

SEQ ID NO: 2074714 - RNA, 19 nt, Artificial Sequence
  Description of Artificial Sequence: Synthetic oligonucleotide
gcugcugccauggccgguu

SEQ ID NO: 2074715 - RNA, 19 nt, Artificial Sequence
  Description of Artificial Sequence: Synthetic oligonucleotide
ccgacccaggcucacucgu

SEQ ID NO: 2074716 - RNA, 19 nt, Artificial Sequence
  Description of Artificial Sequence: Synthetic oligonucleotide
ggaaaggcucgugggcauu

SEQ ID NO: 2074717 - RNA, 19 nt, Artificial Sequence
  Description of Artificial Sequence: Synthetic oligonucleotide
caccugcuccccgccggaa

SEQ ID NO: 2074718 - RNA, 19 nt, Artificial Sequence
  Description of Artificial Sequence: Synthetic oligonucleotide
cuugccggucuggccgcgu

SEQ ID NO: 2074719 - RNA, 19 nt, Artificial Sequence
  Description of Artificial Sequence: Synthetic oligonucleotide
ccgcucgcgguuugggccu

SEQ ID NO: 2074720 - RNA, 19 nt, Artificial Sequence
  Description of Artificial Sequence: Synthetic oligonucleotide
ggcucacucgucacuccuu

SEQ ID NO: 2074721 - RNA, 19 nt, Artificial Sequence
  Description of Artificial Sequence: Synthetic oligonucleotide
ggcgggucgcuggcccuga

SEQ ID NO: 2074722 - RNA, 19 nt, Artificial Sequence
  Description of Artificial Sequence: Synthetic oligonucleotide
gggccccugucuccagggu

SEQ ID NO: 2074723 - RNA, 19 nt, Artificial Sequence
  Description of Artificial Sequence: Synthetic oligonucleotide
gccucgcgagcggucucca

SEQ ID NO: 2074724 - RNA, 19 nt, Artificial Sequence
  Description of Artificial Sequence: Synthetic oligonucleotide
ggggcgggucgcuggcccu

SEQ ID NO: 2074725 - RNA, 19 nt, Artificial Sequence
  Description of Artificial Sequence: Synthetic oligonucleotide
ccagggcggaaaggacaca

SEQ ID NO: 2074726 - RNA, 19 nt, Artificial Sequence
  Description of Artificial Sequence: Synthetic oligonucleotide
cucuccggggcgggucgcu

SEQ ID NO: 2074727 - RNA, 19 nt, Artificial Sequence
  Description of Artificial Sequence: Synthetic oligonucleotide
ccggggcgggucgcuggcc

SEQ ID NO: 2074728 - RNA, 19 nt, Artificial Sequence
  Description of Artificial Sequence: Synthetic oligonucleotide
gcuccccgccggaaaggcu

SEQ ID NO: 2074729 - RNA, 19 nt, Artificial Sequence
  Description of Artificial Sequence: Synthetic oligonucleotide
ccgcgucuccagccacuga

SEQ ID NO: 2074730 - RNA, 19 nt, Artificial Sequence
  Description of Artificial Sequence: Synthetic oligonucleotide
cgcgagcggucuccagaca

SEQ ID NO: 2074731 - RNA, 19 nt, Artificial Sequence
  Description of Artificial Sequence: Synthetic oligonucleotide
gcucgcgguuugggccuuc

SEQ ID NO: 2074732 - RNA, 19 nt, Artificial Sequence
  Description of Artificial Sequence: Synthetic oligonucleotide
cgcaggcacucccgaccca

SEQ ID NO: 2074733 - RNA, 19 nt, Artificial Sequence
  Description of Artificial Sequence: Synthetic oligonucleotide
ccacagccucgcgagcggu

SEQ ID NO: 2074734 - RNA, 19 nt, Artificial Sequence
  Description of Artificial Sequence: Synthetic oligonucleotide
cgugggcauugaacacggu

SEQ ID NO: 2074735 - RNA, 19 nt, Artificial Sequence
  Description of Artificial Sequence: Synthetic oligonucleotide
cgacugugucccugcugau

SEQ ID NO: 2074736 - RNA, 19 nt, Artificial Sequence
  Description of Artificial Sequence: Synthetic oligonucleotide
ccgcggccguagagaggga

SEQ ID NO: 2074737 - RNA, 19 nt, Artificial Sequence
  Description of Artificial Sequence: Synthetic oligonucleotide
ccccgccggaaaggcucgu

SEQ ID NO: 2074738 - RNA, 19 nt, Artificial Sequence
  Description of Artificial Sequence: Synthetic oligonucleotide
cgcucgcgguuugggccuu

SEQ ID NO: 2074739 - RNA, 19 nt, Artificial Sequence
  Description of Artificial Sequence: Synthetic oligonucleotide
aacucaacauaauuaaucc

SEQ ID NO: 2074740 - RNA, 19 nt, Artificial Sequence
  Description of Artificial Sequence: Synthetic oligonucleotide
aauuaauccaauuacguga

SEQ ID NO: 2074741 - RNA, 19 nt, Artificial Sequence
  Description of Artificial Sequence: Synthetic oligonucleotide
uuuauucucagaauaaugc

SEQ ID NO: 2074742 - RNA, 19 nt, Artificial Sequence
  Description of Artificial Sequence: Synthetic oligonucleotide
auaccauucuuccagcucc

SEQ ID NO: 2074743 - RNA, 19 nt, Artificial Sequence
  Description of Artificial Sequence: Synthetic oligonucleotide
aauccaauuacgugaacag

SEQ ID NO: 2074744 - RNA, 19 nt, Artificial Sequence
  Description of Artificial Sequence: Synthetic oligonucleotide
auuaagauauugcagacgu

SEQ ID NO: 2074745 - RNA, 19 nt, Artificial Sequence
  Description of Artificial Sequence: Synthetic oligonucleotide
uaggguuaaagucacacag

SEQ ID NO: 2074746 - RNA, 19 nt, Artificial Sequence
  Description of Artificial Sequence: Synthetic oligonucleotide
aucgaugucguuuacaaag

SEQ ID NO: 2074747 - RNA, 19 nt, Artificial Sequence
  Description of Artificial Sequence: Synthetic oligonucleotide
aacucaaccgcagugacac

SEQ ID NO: 2074748 - RNA, 19 nt, Artificial Sequence
  Description of Artificial Sequence: Synthetic oligonucleotide
cuuacggauacuuucaggc

SEQ ID NO: 2074749 - RNA, 19 nt, Artificial Sequence
  Description of Artificial Sequence: Synthetic oligonucleotide
uggaccauuacucuccugg

SEQ ID NO: 2074750 - RNA, 19 nt, Artificial Sequence
  Description of Artificial Sequence: Synthetic oligonucleotide
uaagauauugcagacguag

SEQ ID NO: 2074751 - RNA, 19 nt, Artificial Sequence
  Description of Artificial Sequence: Synthetic oligonucleotide
aaaagguuugguccaaaag

SEQ ID NO: 2074752 - RNA, 19 nt, Artificial Sequence
  Description of Artificial Sequence: Synthetic oligonucleotide
aagaacucaacauaauuaa

SEQ ID NO: 2074753 - RNA, 19 nt, Artificial Sequence
  Description of Artificial Sequence: Synthetic oligonucleotide
ucuaaagacaaaagguuug

SEQ ID NO: 2074754 - RNA, 19 nt, Artificial Sequence
  Description of Artificial Sequence: Synthetic oligonucleotide
acaguugaaggaaacaugc

SEQ ID NO: 2074755 - RNA, 19 nt, Artificial Sequence
  Description of Artificial Sequence: Synthetic oligonucleotide
uaggauuaagauauugcag

SEQ ID NO: 2074756 - RNA, 19 nt, Artificial Sequence
  Description of Artificial Sequence: Synthetic oligonucleotide
uaauuaauccaauuacgug

SEQ ID NO: 2074757 - RNA, 19 nt, Artificial Sequence
  Description of Artificial Sequence: Synthetic oligonucleotide
aggauuaagauauugcaga

SEQ ID NO: 2074758 - RNA, 19 nt, Artificial Sequence
  Description of Artificial Sequence: Synthetic oligonucleotide
uccaauuacgugaacagcu

SEQ ID NO: 2074759 - RNA, 19 nt, Artificial Sequence
  Description of Artificial Sequence: Synthetic oligonucleotide
augacugcccaacucaacc

SEQ ID NO: 2074760 - RNA, 19 nt, Artificial Sequence
  Description of Artificial Sequence: Synthetic oligonucleotide
ucaacucuaaagacaaaag

SEQ ID NO: 2074761 - RNA, 19 nt, Artificial Sequence
  Description of Artificial Sequence: Synthetic oligonucleotide
uacgugaacagcuucacug

SEQ ID NO: 2074762 - RNA, 19 nt, Artificial Sequence
  Description of Artificial Sequence: Synthetic oligonucleotide
aguaggauuaagauauugc

SEQ ID NO: 2074763 - RNA, 19 nt, Artificial Sequence
  Description of Artificial Sequence: Synthetic oligonucleotide
caacucuaaagacaaaagg

SEQ ID NO: 2074764 - RNA, 19 nt, Artificial Sequence
  Description of Artificial Sequence: Synthetic oligonucleotide
uaguauucaccauucauca

SEQ ID NO: 2074765 - RNA, 19 nt, Artificial Sequence
  Description of Artificial Sequence: Synthetic oligonucleotide
agaauaaugcacaaaagca

SEQ ID NO: 2074766 - RNA, 19 nt, Artificial Sequence
  Description of Artificial Sequence: Synthetic oligonucleotide
uuaaagucacacaggcggg

SEQ ID NO: 2074767 - RNA, 19 nt, Artificial Sequence
  Description of Artificial Sequence: Synthetic oligonucleotide
uggacuuaggguuaaaguc

SEQ ID NO: 2074768 - RNA, 19 nt, Artificial Sequence
  Description of Artificial Sequence: Synthetic oligonucleotide
auaacugucuguuggacca

SEQ ID NO: 2074769 - RNA, 19 nt, Artificial Sequence
  Description of Artificial Sequence: Synthetic oligonucleotide
acaaacaaugaucaacucu

SEQ ID NO: 2074770 - RNA, 19 nt, Artificial Sequence
  Description of Artificial Sequence: Synthetic oligonucleotide
uucucugaaugccagggag

SEQ ID NO: 2074771 - RNA, 19 nt, Artificial Sequence
  Description of Artificial Sequence: Synthetic oligonucleotide
uguuggaccauuacucucc

SEQ ID NO: 2074772 - RNA, 19 nt, Artificial Sequence
  Description of Artificial Sequence: Synthetic oligonucleotide
ucgcauaccauucuuccag

SEQ ID NO: 2074773 - RNA, 19 nt, Artificial Sequence
  Description of Artificial Sequence: Synthetic oligonucleotide
accauuacucuccugguag

SEQ ID NO: 2074774 - RNA, 19 nt, Artificial Sequence
  Description of Artificial Sequence: Synthetic oligonucleotide
aaugcacaaaagcacgggu

SEQ ID NO: 2074775 - RNA, 19 nt, Artificial Sequence
  Description of Artificial Sequence: Synthetic oligonucleotide
guaggauuaagauauugca

SEQ ID NO: 2074776 - RNA, 19 nt, Artificial Sequence
  Description of Artificial Sequence: Synthetic oligonucleotide
cacgccaucaacagcaucc

SEQ ID NO: 2074777 - RNA, 19 nt, Artificial Sequence
  Description of Artificial Sequence: Synthetic oligonucleotide
uauucaccauucaucacgc

SEQ ID NO: 2074778 - RNA, 19 nt, Artificial Sequence
  Description of Artificial Sequence: Synthetic oligonucleotide
gagaauuggcaucaagggc

SEQ ID NO: 2074779 - RNA, 19 nt, Artificial Sequence
  Description of Artificial Sequence: Synthetic oligonucleotide
auaauuaauccaauuacgu

SEQ ID NO: 2074780 - RNA, 19 nt, Artificial Sequence
  Description of Artificial Sequence: Synthetic oligonucleotide
ucgaugucguuuacaaagg

SEQ ID NO: 2074781 - RNA, 19 nt, Artificial Sequence
  Description of Artificial Sequence: Synthetic oligonucleotide
ugcugcgccaagaaggccg

SEQ ID NO: 2074782 - RNA, 19 nt, Artificial Sequence
  Description of Artificial Sequence: Synthetic oligonucleotide
aaaagcacggguugaggcu

SEQ ID NO: 2074783 - RNA, 19 nt, Artificial Sequence
  Description of Artificial Sequence: Synthetic oligonucleotide
uuucuguagcuguucaucc

SEQ ID NO: 2074784 - RNA, 19 nt, Artificial Sequence
  Description of Artificial Sequence: Synthetic oligonucleotide
agaauuggcaucaagggcu

SEQ ID NO: 2074785 - RNA, 19 nt, Artificial Sequence
  Description of Artificial Sequence: Synthetic oligonucleotide
uucaucacgccaucaacag

SEQ ID NO: 2074786 - RNA, 19 nt, Artificial Sequence
  Description of Artificial Sequence: Synthetic oligonucleotide
aaacaugcaaucacaaaca

SEQ ID NO: 2074787 - RNA, 19 nt, Artificial Sequence
  Description of Artificial Sequence: Synthetic oligonucleotide
uaauccaauuacgugaaca

SEQ ID NO: 2074788 - RNA, 19 nt, Artificial Sequence
  Description of Artificial Sequence: Synthetic oligonucleotide
gacaucuuuggccuguuug

SEQ ID NO: 2074789 - RNA, 19 nt, Artificial Sequence
  Description of Artificial Sequence: Synthetic oligonucleotide
aaucgauccacuucugaaa

SEQ ID NO: 2074790 - RNA, 19 nt, Artificial Sequence
  Description of Artificial Sequence: Synthetic oligonucleotide
cugcauaacugucuguugg

SEQ ID NO: 2074791 - RNA, 19 nt, Artificial Sequence
  Description of Artificial Sequence: Synthetic oligonucleotide
ucucgcauaccauucuucc

SEQ ID NO: 2074792 - RNA, 19 nt, Artificial Sequence
  Description of Artificial Sequence: Synthetic oligonucleotide
ucacugaguaggauuaaga

SEQ ID NO: 2074793 - RNA, 19 nt, Artificial Sequence
  Description of Artificial Sequence: Synthetic oligonucleotide
uccacuuacggauacuuuc

SEQ ID NO: 2074794 - RNA, 19 nt, Artificial Sequence
  Description of Artificial Sequence: Synthetic oligonucleotide
auugcagacguaguguuuc

SEQ ID NO: 2074795 - RNA, 19 nt, Artificial Sequence
  Description of Artificial Sequence: Synthetic oligonucleotide
ucuccugguaguauucacc

SEQ ID NO: 2074796 - RNA, 19 nt, Artificial Sequence
  Description of Artificial Sequence: Synthetic oligonucleotide
augaggacugagcgcaugc

SEQ ID NO: 2074797 - RNA, 19 nt, Artificial Sequence
  Description of Artificial Sequence: Synthetic oligonucleotide
cugaguaggauuaagauau

SEQ ID NO: 2074798 - RNA, 19 nt, Artificial Sequence
  Description of Artificial Sequence: Synthetic oligonucleotide
cauaacugucuguuggacc

SEQ ID NO: 2074799 - RNA, 19 nt, Artificial Sequence
  Description of Artificial Sequence: Synthetic oligonucleotide
aaauagcugcauaacuguc

SEQ ID NO: 2074800 - RNA, 19 nt, Artificial Sequence
  Description of Artificial Sequence: Synthetic oligonucleotide
aguauucaccauucaucac

SEQ ID NO: 2074801 - RNA, 19 nt, Artificial Sequence
  Description of Artificial Sequence: Synthetic oligonucleotide
acuuacggauacuuucagg

SEQ ID NO: 2074802 - RNA, 19 nt, Artificial Sequence
  Description of Artificial Sequence: Synthetic oligonucleotide
aauuacgugaacagcuuca

SEQ ID NO: 2074803 - RNA, 19 nt, Artificial Sequence
  Description of Artificial Sequence: Synthetic oligonucleotide
cuuaggguuaaagucacac

SEQ ID NO: 2074804 - RNA, 19 nt, Artificial Sequence
  Description of Artificial Sequence: Synthetic oligonucleotide
agacguaguguuuccacag

SEQ ID NO: 2074805 - RNA, 19 nt, Artificial Sequence
  Description of Artificial Sequence: Synthetic oligonucleotide
acguaguguuuccacaggg

SEQ ID NO: 2074806 - RNA, 19 nt, Artificial Sequence
  Description of Artificial Sequence: Synthetic oligonucleotide
ugacugcccaacucaaccg

SEQ ID NO: 2074807 - RNA, 19 nt, Artificial Sequence
  Description of Artificial Sequence: Synthetic oligonucleotide
uuaggguuaaagucacaca

SEQ ID NO: 2074808 - RNA, 19 nt, Artificial Sequence
  Description of Artificial Sequence: Synthetic oligonucleotide
auccaauuacgugaacagc

SEQ ID NO: 2074809 - RNA, 19 nt, Artificial Sequence
  Description of Artificial Sequence: Synthetic oligonucleotide
caucacgccaucaacagca

SEQ ID NO: 2074810 - RNA, 19 nt, Artificial Sequence
  Description of Artificial Sequence: Synthetic oligonucleotide
caggguagcucuucaaugc

SEQ ID NO: 2074811 - RNA, 19 nt, Artificial Sequence
  Description of Artificial Sequence: Synthetic oligonucleotide
acaggguagcucuucaaug

SEQ ID NO: 2074812 - RNA, 19 nt, Artificial Sequence
  Description of Artificial Sequence: Synthetic oligonucleotide
aaggaaacaugcaaucaca

SEQ ID NO: 2074813 - RNA, 19 nt, Artificial Sequence
  Description of Artificial Sequence: Synthetic oligonucleotide
caugcgagagacaucuuug

SEQ ID NO: 2074814 - RNA, 19 nt, Artificial Sequence
  Description of Artificial Sequence: Synthetic oligonucleotide
acucaacauaauuaaucca

SEQ ID NO: 2074815 - RNA, 19 nt, Artificial Sequence
  Description of Artificial Sequence: Synthetic oligonucleotide
gaaauagcugcauaacugu

SEQ ID NO: 2074816 - RNA, 19 nt, Artificial Sequence
  Description of Artificial Sequence: Synthetic oligonucleotide
auuacgugaacagcuucac

SEQ ID NO: 2074817 - RNA, 19 nt, Artificial Sequence
  Description of Artificial Sequence: Synthetic oligonucleotide
aagguuugguccaaaagaa

SEQ ID NO: 2074818 - RNA, 19 nt, Artificial Sequence
  Description of Artificial Sequence: Synthetic oligonucleotide
ucugacugcaaucgaucca

SEQ ID NO: 2074819 - RNA, 19 nt, Artificial Sequence
  Description of Artificial Sequence: Synthetic oligonucleotide
ggguuaaagucacacaggc

SEQ ID NO: 2074820 - RNA, 19 nt, Artificial Sequence
  Description of Artificial Sequence: Synthetic oligonucleotide
augcgagagacaucuuugg

SEQ ID NO: 2074821 - RNA, 19 nt, Artificial Sequence
  Description of Artificial Sequence: Synthetic oligonucleotide
agggagaacacaguugaag

SEQ ID NO: 2074822 - RNA, 19 nt, Artificial Sequence
  Description of Artificial Sequence: Synthetic oligonucleotide
uguuugcuggacuuagggu

SEQ ID NO: 2074823 - RNA, 19 nt, Artificial Sequence
  Description of Artificial Sequence: Synthetic oligonucleotide
gacguaguguuuccacagg

SEQ ID NO: 2074824 - RNA, 19 nt, Artificial Sequence
  Description of Artificial Sequence: Synthetic oligonucleotide
ugcgagagacaucuuuggc

SEQ ID NO: 2074825 - RNA, 19 nt, Artificial Sequence
  Description of Artificial Sequence: Synthetic oligonucleotide
ccgagaauuggcaucaagg

SEQ ID NO: 2074826 - RNA, 19 nt, Artificial Sequence
  Description of Artificial Sequence: Synthetic oligonucleotide
ucucugaaugccagggaga

SEQ ID NO: 2074827 - RNA, 19 nt, Artificial Sequence
  Description of Artificial Sequence: Synthetic oligonucleotide
cucaaccgcagugacaccg

SEQ ID NO: 2074828 - RNA, 19 nt, Artificial Sequence
  Description of Artificial Sequence: Synthetic oligonucleotide
ugcucuucucuccacuuac

SEQ ID NO: 2074829 - RNA, 19 nt, Artificial Sequence
  Description of Artificial Sequence: Synthetic oligonucleotide
uuacggauacuuucaggcu

SEQ ID NO: 2074830 - RNA, 19 nt, Artificial Sequence
  Description of Artificial Sequence: Synthetic oligonucleotide
agcuguucauccugucucg

SEQ ID NO: 2074831 - RNA, 19 nt, Artificial Sequence
  Description of Artificial Sequence: Synthetic oligonucleotide
ugcauaacugucuguugga

SEQ ID NO: 2074832 - RNA, 19 nt, Artificial Sequence
  Description of Artificial Sequence: Synthetic oligonucleotide
cugaaugccagggagaaca

SEQ ID NO: 2074833 - RNA, 19 nt, Artificial Sequence
  Description of Artificial Sequence: Synthetic oligonucleotide
gaguaggauuaagauauug

SEQ ID NO: 2074834 - RNA, 19 nt, Artificial Sequence
  Description of Artificial Sequence: Synthetic oligonucleotide
gugacaccgaagccgacgg

SEQ ID NO: 2074835 - RNA, 19 nt, Artificial Sequence
  Description of Artificial Sequence: Synthetic oligonucleotide
cauucaucacgccaucaac

SEQ ID NO: 2074836 - RNA, 19 nt, Artificial Sequence
  Description of Artificial Sequence: Synthetic oligonucleotide
ggaugacucaucgaugucg

SEQ ID NO: 2074837 - RNA, 19 nt, Artificial Sequence
  Description of Artificial Sequence: Synthetic oligonucleotide
ugguccaaaagaacucaac

SEQ ID NO: 2074838 - RNA, 19 nt, Artificial Sequence
  Description of Artificial Sequence: Synthetic oligonucleotide
aagccgacggcaaccgacc

SEQ ID NO: 2074839 - RNA, 19 nt, Artificial Sequence
  Description of Artificial Sequence: Synthetic oligonucleotide
ugucguuuacaaaggcuuc

SEQ ID NO: 2074840 - RNA, 19 nt, Artificial Sequence
  Description of Artificial Sequence: Synthetic oligonucleotide
uccguuugcucuucucucc

SEQ ID NO: 2074841 - RNA, 19 nt, Artificial Sequence
  Description of Artificial Sequence: Synthetic oligonucleotide
uuugcuggacuuaggguua

SEQ ID NO: 2074842 - RNA, 19 nt, Artificial Sequence
  Description of Artificial Sequence: Synthetic oligonucleotide
ugaggcuacuguugggagc

SEQ ID NO: 2074843 - RNA, 19 nt, Artificial Sequence
  Description of Artificial Sequence: Synthetic oligonucleotide
caggcucugacugcaaucg

SEQ ID NO: 2074844 - RNA, 19 nt, Artificial Sequence
  Description of Artificial Sequence: Synthetic oligonucleotide
ucaucacgccaucaacagc

SEQ ID NO: 2074845 - RNA, 19 nt, Artificial Sequence
  Description of Artificial Sequence: Synthetic oligonucleotide
agugacaccgaagccgacg

SEQ ID NO: 2074846 - RNA, 19 nt, Artificial Sequence
  Description of Artificial Sequence: Synthetic oligonucleotide
gacggcaaccgaccgaccc

SEQ ID NO: 2074847 - RNA, 19 nt, Artificial Sequence
  Description of Artificial Sequence: Synthetic oligonucleotide
auuaauccaauuacgugaa

SEQ ID NO: 2074848 - RNA, 19 nt, Artificial Sequence
  Description of Artificial Sequence: Synthetic oligonucleotide
acaaaagcacggguugagg

SEQ ID NO: 2074849 - RNA, 19 nt, Artificial Sequence
  Description of Artificial Sequence: Synthetic oligonucleotide
ggauuaagauauugcagac

SEQ ID NO: 2074850 - RNA, 19 nt, Artificial Sequence
  Description of Artificial Sequence: Synthetic oligonucleotide
aagauauugcagacguagu

SEQ ID NO: 2074851 - RNA, 19 nt, Artificial Sequence
  Description of Artificial Sequence: Synthetic oligonucleotide
gaaggccucgucguucucg

SEQ ID NO: 2074852 - RNA, 19 nt, Artificial Sequence
  Description of Artificial Sequence: Synthetic oligonucleotide
uggggaugacucaucgaug

SEQ ID NO: 2074853 - RNA, 19 nt, Artificial Sequence
  Description of Artificial Sequence: Synthetic oligonucleotide
guugggagcaucccucccc

SEQ ID NO: 2074854 - RNA, 19 nt, Artificial Sequence
  Description of Artificial Sequence: Synthetic oligonucleotide
gcgagagacaucuuuggcc

SEQ ID NO: 2074855 - RNA, 19 nt, Artificial Sequence
  Description of Artificial Sequence: Synthetic oligonucleotide
accgaagccgacggcaacc

SEQ ID NO: 2074856 - RNA, 19 nt, Artificial Sequence
  Description of Artificial Sequence: Synthetic oligonucleotide
uuacgugaacagcuucacu

SEQ ID NO: 2074857 - RNA, 19 nt, Artificial Sequence
  Description of Artificial Sequence: Synthetic oligonucleotide
cauaccauucuuccagcuc

SEQ ID NO: 2074858 - RNA, 19 nt, Artificial Sequence
  Description of Artificial Sequence: Synthetic oligonucleotide
agggcuuccaagcgcuccg

SEQ ID NO: 2074859 - RNA, 19 nt, Artificial Sequence
  Description of Artificial Sequence: Synthetic oligonucleotide
cauccugucucgcauacca

SEQ ID NO: 2074860 - RNA, 19 nt, Artificial Sequence
  Description of Artificial Sequence: Synthetic oligonucleotide
uuaauccaauuacgugaac

SEQ ID NO: 2074861 - RNA, 19 nt, Artificial Sequence
  Description of Artificial Sequence: Synthetic oligonucleotide
caauuacgugaacagcuuc

SEQ ID NO: 2074862 - RNA, 19 nt, Artificial Sequence
  Description of Artificial Sequence: Synthetic oligonucleotide
agguuugguccaaaagaac

SEQ ID NO: 2074863 - RNA, 19 nt, Artificial Sequence
  Description of Artificial Sequence: Synthetic oligonucleotide
uuaagauauugcagacgua

SEQ ID NO: 2074864 - RNA, 19 nt, Artificial Sequence
  Description of Artificial Sequence: Synthetic oligonucleotide
aucucacucuccugcugcg

SEQ ID NO: 2074865 - RNA, 19 nt, Artificial Sequence
  Description of Artificial Sequence: Synthetic oligonucleotide
ugacucaucgaugucguuu

SEQ ID NO: 2074866 - RNA, 19 nt, Artificial Sequence
  Description of Artificial Sequence: Synthetic oligonucleotide
acggcaaccgaccgacccg

SEQ ID NO: 2074867 - RNA, 19 nt, Artificial Sequence
  Description of Artificial Sequence: Synthetic oligonucleotide
aaccgaccgacccgccgac

SEQ ID NO: 2074868 - RNA, 19 nt, Artificial Sequence
  Description of Artificial Sequence: Synthetic oligonucleotide
guaguguuuccacagggua

SEQ ID NO: 2074869 - RNA, 19 nt, Artificial Sequence
  Description of Artificial Sequence: Synthetic oligonucleotide
gacugagcgcaugcgagag

SEQ ID NO: 2074870 - RNA, 19 nt, Artificial Sequence
  Description of Artificial Sequence: Synthetic oligonucleotide
guuugguccaaaagaacuc

SEQ ID NO: 2074871 - RNA, 19 nt, Artificial Sequence
  Description of Artificial Sequence: Synthetic oligonucleotide
caaucgauccacuucugaa

SEQ ID NO: 2074872 - RNA, 19 nt, Artificial Sequence
  Description of Artificial Sequence: Synthetic oligonucleotide
uagcucuucaaugcaccag

SEQ ID NO: 2074873 - RNA, 19 nt, Artificial Sequence
  Description of Artificial Sequence: Synthetic oligonucleotide
gaagccgacggcaaccgac

SEQ ID NO: 2074874 - RNA, 19 nt, Artificial Sequence
  Description of Artificial Sequence: Synthetic oligonucleotide
gaacacaguugaaggaaac

SEQ ID NO: 2074875 - RNA, 19 nt, Artificial Sequence
  Description of Artificial Sequence: Synthetic oligonucleotide
gacucaucgaugucguuua

SEQ ID NO: 2074876 - RNA, 19 nt, Artificial Sequence
  Description of Artificial Sequence: Synthetic oligonucleotide
gaccgacccgccgacagcg

SEQ ID NO: 2074877 - RNA, 19 nt, Artificial Sequence
  Description of Artificial Sequence: Synthetic oligonucleotide
ucaaccgcagugacaccga

SEQ ID NO: 2074878 - RNA, 19 nt, Artificial Sequence
  Description of Artificial Sequence: Synthetic oligonucleotide
ugaaugccagggagaacac

SEQ ID NO: 2074879 - RNA, 19 nt, Artificial Sequence
  Description of Artificial Sequence: Synthetic oligonucleotide
aaagcacggguugaggcua

SEQ ID NO: 2074880 - RNA, 19 nt, Artificial Sequence
  Description of Artificial Sequence: Synthetic oligonucleotide
cugagcgcaugcgagagac

SEQ ID NO: 2074881 - RNA, 19 nt, Artificial Sequence
  Description of Artificial Sequence: Synthetic oligonucleotide
cuagcggcugcuaccggag

SEQ ID NO: 2074882 - RNA, 19 nt, Artificial Sequence
  Description of Artificial Sequence: Synthetic oligonucleotide
uccccuaucuucucugaau

SEQ ID NO: 2074883 - RNA, 19 nt, Artificial Sequence
  Description of Artificial Sequence: Synthetic oligonucleotide
cacuuacggauacuuucag

SEQ ID NO: 2074884 - RNA, 19 nt, Artificial Sequence
  Description of Artificial Sequence: Synthetic oligonucleotide
aggguagcucuucaaugca

SEQ ID NO: 2074885 - RNA, 19 nt, Artificial Sequence
  Description of Artificial Sequence: Synthetic oligonucleotide
ggacuuaggguuaaaguca

SEQ ID NO: 2074886 - RNA, 19 nt, Artificial Sequence
  Description of Artificial Sequence: Synthetic oligonucleotide
ugcgccaagaaggccgcgg

SEQ ID NO: 2074887 - RNA, 19 nt, Artificial Sequence
  Description of Artificial Sequence: Synthetic oligonucleotide
ucucagaauaaugcacaaa

SEQ ID NO: 2074888 - RNA, 19 nt, Artificial Sequence
  Description of Artificial Sequence: Synthetic oligonucleotide
ccuaucuucucugaaugcc

SEQ ID NO: 2074889 - RNA, 19 nt, Artificial Sequence
  Description of Artificial Sequence: Synthetic oligonucleotide
cucccauucagugccuggg

SEQ ID NO: 2074890 - RNA, 19 nt, Artificial Sequence
  Description of Artificial Sequence: Synthetic oligonucleotide
aaacaaugaucaacucuaa

SEQ ID NO: 2074891 - RNA, 19 nt, Artificial Sequence
  Description of Artificial Sequence: Synthetic oligonucleotide
uugcagacguaguguuucc

SEQ ID NO: 2074892 - RNA, 19 nt, Artificial Sequence
  Description of Artificial Sequence: Synthetic oligonucleotide
cuaccggaggacgagcgag

SEQ ID NO: 2074893 - RNA, 19 nt, Artificial Sequence
  Description of Artificial Sequence: Synthetic oligonucleotide
cuguugggagcaucccucc

SEQ ID NO: 2074894 - RNA, 19 nt, Artificial Sequence
  Description of Artificial Sequence: Synthetic oligonucleotide
gaugucguuuacaaaggcu

SEQ ID NO: 2074895 - RNA, 19 nt, Artificial Sequence
  Description of Artificial Sequence: Synthetic oligonucleotide
caugacugcccaacucaac

SEQ ID NO: 2074896 - RNA, 19 nt, Artificial Sequence
  Description of Artificial Sequence: Synthetic oligonucleotide
cugucuguuggaccauuac

SEQ ID NO: 2074897 - RNA, 19 nt, Artificial Sequence
  Description of Artificial Sequence: Synthetic oligonucleotide
ugucucgcauaccauucuu

SEQ ID NO: 2074898 - RNA, 19 nt, Artificial Sequence
  Description of Artificial Sequence: Synthetic oligonucleotide
gcagcggacacugcuagcg

SEQ ID NO: 2074899 - RNA, 19 nt, Artificial Sequence
  Description of Artificial Sequence: Synthetic oligonucleotide
agcugcauaacugucuguu

SEQ ID NO: 2074900 - RNA, 19 nt, Artificial Sequence
  Description of Artificial Sequence: Synthetic oligonucleotide
acucaaccgcagugacacc

SEQ ID NO: 2074901 - RNA, 19 nt, Artificial Sequence
  Description of Artificial Sequence: Synthetic oligonucleotide
cucuccugguaguauucac

SEQ ID NO: 2074902 - RNA, 19 nt, Artificial Sequence
  Description of Artificial Sequence: Synthetic oligonucleotide
uaccauucuuccagcuccu

SEQ ID NO: 2074903 - RNA, 19 nt, Artificial Sequence
  Description of Artificial Sequence: Synthetic oligonucleotide
cucuaaagacaaaagguuu

SEQ ID NO: 2074904 - RNA, 19 nt, Artificial Sequence
  Description of Artificial Sequence: Synthetic oligonucleotide
cugcuagcggcugcuaccg

SEQ ID NO: 2074905 - RNA, 19 nt, Artificial Sequence
  Description of Artificial Sequence: Synthetic oligonucleotide
agcgaaggccucgucguuc

SEQ ID NO: 2074906 - RNA, 19 nt, Artificial Sequence
  Description of Artificial Sequence: Synthetic oligonucleotide
augcaaucacaaacaauga

SEQ ID NO: 2074907 - RNA, 19 nt, Artificial Sequence
  Description of Artificial Sequence: Synthetic oligonucleotide
gagagacaucuuuggccug

SEQ ID NO: 2074908 - RNA, 19 nt, Artificial Sequence
  Description of Artificial Sequence: Synthetic oligonucleotide
ucuuccucgccggcgcccg

SEQ ID NO: 2074909 - RNA, 19 nt, Artificial Sequence
  Description of Artificial Sequence: Synthetic oligonucleotide
gcuacuguugggagcaucc

SEQ ID NO: 2074910 - RNA, 19 nt, Artificial Sequence
  Description of Artificial Sequence: Synthetic oligonucleotide
cagacguaguguuuccaca

SEQ ID NO: 2074911 - RNA, 19 nt, Artificial Sequence
  Description of Artificial Sequence: Synthetic oligonucleotide
acggguugaggcuacuguu

SEQ ID NO: 2074912 - RNA, 19 nt, Artificial Sequence
  Description of Artificial Sequence: Synthetic oligonucleotide
gccgaagggauccagcuca

SEQ ID NO: 2074913 - RNA, 19 nt, Artificial Sequence
  Description of Artificial Sequence: Synthetic oligonucleotide
ugcccaacucaaccgcagu

SEQ ID NO: 2074914 - RNA, 19 nt, Artificial Sequence
  Description of Artificial Sequence: Synthetic oligonucleotide
uaccggaggacgagcgaga

SEQ ID NO: 2074915 - RNA, 19 nt, Artificial Sequence
  Description of Artificial Sequence: Synthetic oligonucleotide
gacagcgcgcccggcagcg

SEQ ID NO: 2074916 - RNA, 19 nt, Artificial Sequence
  Description of Artificial Sequence: Synthetic oligonucleotide
cugcccaacucaaccgcag

SEQ ID NO: 2074917 - RNA, 19 nt, Artificial Sequence
  Description of Artificial Sequence: Synthetic oligonucleotide
ggaaacaugcaaucacaaa

SEQ ID NO: 2074918 - RNA, 19 nt, Artificial Sequence
  Description of Artificial Sequence: Synthetic oligonucleotide
agcgccgaagggauccagc

SEQ ID NO: 2074919 - RNA, 19 nt, Artificial Sequence
  Description of Artificial Sequence: Synthetic oligonucleotide
cugcaaucgauccacuucu

SEQ ID NO: 2074920 - RNA, 19 nt, Artificial Sequence
  Description of Artificial Sequence: Synthetic oligonucleotide
gaugacucaucgaugucgu

SEQ ID NO: 2074921 - RNA, 19 nt, Artificial Sequence
  Description of Artificial Sequence: Synthetic oligonucleotide
cacccgcucccauucagug

SEQ ID NO: 2074922 - RNA, 19 nt, Artificial Sequence
  Description of Artificial Sequence: Synthetic oligonucleotide
ugaguaggauuaagauauu

SEQ ID NO: 2074923 - RNA, 19 nt, Artificial Sequence
  Description of Artificial Sequence: Synthetic oligonucleotide
cuacuguugggagcauccc

SEQ ID NO: 2074924 - RNA, 19 nt, Artificial Sequence
  Description of Artificial Sequence: Synthetic oligonucleotide
cccgcucccauucagugcc

SEQ ID NO: 2074925 - RNA, 19 nt, Artificial Sequence
  Description of Artificial Sequence: Synthetic oligonucleotide
ugacugcaaucgauccacu

SEQ ID NO: 2074926 - RNA, 19 nt, Artificial Sequence
  Description of Artificial Sequence: Synthetic oligonucleotide
uguuuccacaggguagcuc

SEQ ID NO: 2074927 - RNA, 19 nt, Artificial Sequence
  Description of Artificial Sequence: Synthetic oligonucleotide
acggauacuuucaggcucu

SEQ ID NO: 2074928 - RNA, 19 nt, Artificial Sequence
  Description of Artificial Sequence: Synthetic oligonucleotide
ugcuagcggcugcuaccgg

SEQ ID NO: 2074929 - RNA, 19 nt, Artificial Sequence
  Description of Artificial Sequence: Synthetic oligonucleotide
gcagacguaguguuuccac

SEQ ID NO: 2074930 - RNA, 19 nt, Artificial Sequence
  Description of Artificial Sequence: Synthetic oligonucleotide
gccuggggaugacucaucg

SEQ ID NO: 2074931 - RNA, 19 nt, Artificial Sequence
  Description of Artificial Sequence: Synthetic oligonucleotide
aagcacggguugaggcuac

SEQ ID NO: 2074932 - RNA, 19 nt, Artificial Sequence
  Description of Artificial Sequence: Synthetic oligonucleotide
cucgcauaccauucuucca

SEQ ID NO: 2074933 - RNA, 19 nt, Artificial Sequence
  Description of Artificial Sequence: Synthetic oligonucleotide
gaccauuacucuccuggua

SEQ ID NO: 2074934 - RNA, 19 nt, Artificial Sequence
  Description of Artificial Sequence: Synthetic oligonucleotide
agccgacggcaaccgaccg

SEQ ID NO: 2074935 - RNA, 19 nt, Artificial Sequence
  Description of Artificial Sequence: Synthetic oligonucleotide
gcugcauaacugucuguug

SEQ ID NO: 2074936 - RNA, 19 nt, Artificial Sequence
  Description of Artificial Sequence: Synthetic oligonucleotide
ucguuuacaaaggcuucuu

SEQ ID NO: 2074937 - RNA, 19 nt, Artificial Sequence
  Description of Artificial Sequence: Synthetic oligonucleotide
cuggggaugacucaucgau

SEQ ID NO: 2074938 - RNA, 19 nt, Artificial Sequence
  Description of Artificial Sequence: Synthetic oligonucleotide
ucgauccacuucugaaaua

SEQ ID NO: 2074939 - RNA, 19 nt, Artificial Sequence
  Description of Artificial Sequence: Synthetic oligonucleotide
cagcggacacugcuagcgg

SEQ ID NO: 2074940 - RNA, 19 nt, Artificial Sequence
  Description of Artificial Sequence: Synthetic oligonucleotide
gcuuccgagaauuggcauc

SEQ ID NO: 2074941 - RNA, 19 nt, Artificial Sequence
  Description of Artificial Sequence: Synthetic oligonucleotide
cucgccgugcggcugcggc

SEQ ID NO: 2074942 - RNA, 19 nt, Artificial Sequence
  Description of Artificial Sequence: Synthetic oligonucleotide
cgcagugacaccgaagccg

SEQ ID NO: 2074943 - RNA, 19 nt, Artificial Sequence
  Description of Artificial Sequence: Synthetic oligonucleotide
uuggaccauuacucuccug

SEQ ID NO: 2074944 - RNA, 19 nt, Artificial Sequence
  Description of Artificial Sequence: Synthetic oligonucleotide
cacacaggcgggccacccg

SEQ ID NO: 2074945 - RNA, 19 nt, Artificial Sequence
  Description of Artificial Sequence: Synthetic oligonucleotide
ccccuaucuucucugaaug

SEQ ID NO: 2074946 - RNA, 19 nt, Artificial Sequence
  Description of Artificial Sequence: Synthetic oligonucleotide
ucugaaugccagggagaac

SEQ ID NO: 2074947 - RNA, 19 nt, Artificial Sequence
  Description of Artificial Sequence: Synthetic oligonucleotide
uccugguaguauucaccau

SEQ ID NO: 2074948 - RNA, 19 nt, Artificial Sequence
  Description of Artificial Sequence: Synthetic oligonucleotide
ucacacaggcgggccaccc

SEQ ID NO: 2074949 - RNA, 19 nt, Artificial Sequence
  Description of Artificial Sequence: Synthetic oligonucleotide
cucugaaugccagggagaa

SEQ ID NO: 2074950 - RNA, 19 nt, Artificial Sequence
  Description of Artificial Sequence: Synthetic oligonucleotide
ccugucucgcauaccauuc

SEQ ID NO: 2074951 - RNA, 19 nt, Artificial Sequence
  Description of Artificial Sequence: Synthetic oligonucleotide
ggggaugacucaucgaugu

SEQ ID NO: 2074952 - RNA, 19 nt, Artificial Sequence
  Description of Artificial Sequence: Synthetic oligonucleotide
acaggcgggccacccgcuc

SEQ ID NO: 2074953 - RNA, 19 nt, Artificial Sequence
  Description of Artificial Sequence: Synthetic oligonucleotide
ggccucgucguucucgaug

SEQ ID NO: 2074954 - RNA, 19 nt, Artificial Sequence
  Description of Artificial Sequence: Synthetic oligonucleotide
caacucaaccgcagugaca

SEQ ID NO: 2074955 - RNA, 19 nt, Artificial Sequence
  Description of Artificial Sequence: Synthetic oligonucleotide
acugagcgcaugcgagaga

SEQ ID NO: 2074956 - RNA, 19 nt, Artificial Sequence
  Description of Artificial Sequence: Synthetic oligonucleotide
gcuuuuguuuucuguagcu

SEQ ID NO: 2074957 - RNA, 19 nt, Artificial Sequence
  Description of Artificial Sequence: Synthetic oligonucleotide
gucucgcauaccauucuuc

SEQ ID NO: 2074958 - RNA, 19 nt, Artificial Sequence
  Description of Artificial Sequence: Synthetic oligonucleotide
cucaucgaugucguuuaca

SEQ ID NO: 2074959 - RNA, 19 nt, Artificial Sequence
  Description of Artificial Sequence: Synthetic oligonucleotide
gcaaccgaccgacccgccg

SEQ ID NO: 2074960 - RNA, 19 nt, Artificial Sequence
  Description of Artificial Sequence: Synthetic oligonucleotide
aggauagcgaaggccucgu

SEQ ID NO: 2074961 - RNA, 19 nt, Artificial Sequence
  Description of Artificial Sequence: Synthetic oligonucleotide
gccgccguccaggauagcg

SEQ ID NO: 2074962 - RNA, 19 nt, Artificial Sequence
  Description of Artificial Sequence: Synthetic oligonucleotide
caaccgaccgacccgccga

SEQ ID NO: 2074963 - RNA, 19 nt, Artificial Sequence
  Description of Artificial Sequence: Synthetic oligonucleotide
caucgaugucguuuacaaa

SEQ ID NO: 2074964 - RNA, 19 nt, Artificial Sequence
  Description of Artificial Sequence: Synthetic oligonucleotide
caagcgcuccguuugcucu

SEQ ID NO: 2074965 - RNA, 19 nt, Artificial Sequence
  Description of Artificial Sequence: Synthetic oligonucleotide
gggagcgccgaagggaucc

SEQ ID NO: 2074966 - RNA, 19 nt, Artificial Sequence
  Description of Artificial Sequence: Synthetic oligonucleotide
gagcgcaugcgagagacau

SEQ ID NO: 2074967 - RNA, 19 nt, Artificial Sequence
  Description of Artificial Sequence: Synthetic oligonucleotide
gucguuuacaaaggcuucu

SEQ ID NO: 2074968 - RNA, 19 nt, Artificial Sequence
  Description of Artificial Sequence: Synthetic oligonucleotide
guucauccugucucgcaua

SEQ ID NO: 2074969 - RNA, 19 nt, Artificial Sequence
  Description of Artificial Sequence: Synthetic oligonucleotide
agcgcaugcgagagacauc

SEQ ID NO: 2074970 - RNA, 19 nt, Artificial Sequence
  Description of Artificial Sequence: Synthetic oligonucleotide
ugccuggggaugacucauc

SEQ ID NO: 2074971 - RNA, 19 nt, Artificial Sequence
  Description of Artificial Sequence: Synthetic oligonucleotide
agcgcuccguuugcucuuc

SEQ ID NO: 2074972 - RNA, 19 nt, Artificial Sequence
  Description of Artificial Sequence: Synthetic oligonucleotide
gcuagcggcugcuaccgga

SEQ ID NO: 2074973 - RNA, 19 nt, Artificial Sequence
  Description of Artificial Sequence: Synthetic oligonucleotide
uaacugucuguuggaccau

SEQ ID NO: 2074974 - RNA, 19 nt, Artificial Sequence
  Description of Artificial Sequence: Synthetic oligonucleotide
gcagugacaccgaagccga

SEQ ID NO: 2074975 - RNA, 19 nt, Artificial Sequence
  Description of Artificial Sequence: Synthetic oligonucleotide
cugcuaccggaggacgagc

SEQ ID NO: 2074976 - RNA, 19 nt, Artificial Sequence
  Description of Artificial Sequence: Synthetic oligonucleotide
gacugcaaucgauccacuu

SEQ ID NO: 2074977 - RNA, 19 nt, Artificial Sequence
  Description of Artificial Sequence: Synthetic oligonucleotide
uagcgaaggccucgucguu

SEQ ID NO: 2074978 - RNA, 19 nt, Artificial Sequence
  Description of Artificial Sequence: Synthetic oligonucleotide
caccgaagccgacggcaac

SEQ ID NO: 2074979 - RNA, 19 nt, Artificial Sequence
  Description of Artificial Sequence: Synthetic oligonucleotide
cugcugcccuguuguuugc

SEQ ID NO: 2074980 - RNA, 19 nt, Artificial Sequence
  Description of Artificial Sequence: Synthetic oligonucleotide
accccguuccccagcgcgg

SEQ ID NO: 2074981 - RNA, 19 nt, Artificial Sequence
  Description of Artificial Sequence: Synthetic oligonucleotide
uugcuggacuuaggguuaa

SEQ ID NO: 2074982 - RNA, 19 nt, Artificial Sequence
  Description of Artificial Sequence: Synthetic oligonucleotide
cucgccggcgcccgccacc

SEQ ID NO: 2074983 - RNA, 19 nt, Artificial Sequence
  Description of Artificial Sequence: Synthetic oligonucleotide
cacggguugaggcuacugu

SEQ ID NO: 2074984 - RNA, 19 nt, Artificial Sequence
  Description of Artificial Sequence: Synthetic oligonucleotide
cauuacucuccugguagua

SEQ ID NO: 2074985 - RNA, 19 nt, Artificial Sequence
  Description of Artificial Sequence: Synthetic oligonucleotide
ggacacugcuagcggcugc

SEQ ID NO: 2074986 - RNA, 19 nt, Artificial Sequence
  Description of Artificial Sequence: Synthetic oligonucleotide
gacacugcuagcggcugcu

SEQ ID NO: 2074987 - RNA, 19 nt, Artificial Sequence
  Description of Artificial Sequence: Synthetic oligonucleotide
gggcgcaccggcgggagcg

SEQ ID NO: 2074988 - RNA, 19 nt, Artificial Sequence
  Description of Artificial Sequence: Synthetic oligonucleotide
gagcgccgaagggauccag

SEQ ID NO: 2074989 - RNA, 19 nt, Artificial Sequence
  Description of Artificial Sequence: Synthetic oligonucleotide
cgcauaccauucuuccagc

SEQ ID NO: 2074990 - RNA, 19 nt, Artificial Sequence
  Description of Artificial Sequence: Synthetic oligonucleotide
cguuuacaaaggcuucuuc

SEQ ID NO: 2074991 - RNA, 19 nt, Artificial Sequence
  Description of Artificial Sequence: Synthetic oligonucleotide
gcgccaagaaggccgcggc

SEQ ID NO: 2074992 - RNA, 19 nt, Artificial Sequence
  Description of Artificial Sequence: Synthetic oligonucleotide
gcgcccgccaccccguucc

SEQ ID NO: 2074993 - RNA, 19 nt, Artificial Sequence
  Description of Artificial Sequence: Synthetic oligonucleotide
aaggccgcggccgggucuu

SEQ ID NO: 2074994 - RNA, 19 nt, Artificial Sequence
  Description of Artificial Sequence: Synthetic oligonucleotide
gggaugacucaucgauguc

SEQ ID NO: 2074995 - RNA, 19 nt, Artificial Sequence
  Description of Artificial Sequence: Synthetic oligonucleotide
accggcgggagcgccgaag

SEQ ID NO: 2074996 - RNA, 19 nt, Artificial Sequence
  Description of Artificial Sequence: Synthetic oligonucleotide
cgagagacaucuuuggccu

SEQ ID NO: 2074997 - RNA, 19 nt, Artificial Sequence
  Description of Artificial Sequence: Synthetic oligonucleotide
ccgacggcaaccgaccgac

SEQ ID NO: 2074998 - RNA, 19 nt, Artificial Sequence
  Description of Artificial Sequence: Synthetic oligonucleotide
gcgcaugcgagagacaucu

SEQ ID NO: 2074999 - RNA, 19 nt, Artificial Sequence
  Description of Artificial Sequence: Synthetic oligonucleotide
gaauuggcaucaagggcuu

SEQ ID NO: 2075000 - RNA, 19 nt, Artificial Sequence
  Description of Artificial Sequence: Synthetic oligonucleotide
ggcgccgccguccaggaua

SEQ ID NO: 2075001 - RNA, 19 nt, Artificial Sequence
  Description of Artificial Sequence: Synthetic oligonucleotide
cagugacaccgaagccgac

SEQ ID NO: 2075002 - RNA, 19 nt, Artificial Sequence
  Description of Artificial Sequence: Synthetic oligonucleotide
cuccccuaucuucucugaa

SEQ ID NO: 2075003 - RNA, 19 nt, Artificial Sequence
  Description of Artificial Sequence: Synthetic oligonucleotide
ggaccauuacucuccuggu

SEQ ID NO: 2075004 - RNA, 19 nt, Artificial Sequence
  Description of Artificial Sequence: Synthetic oligonucleotide
accgacccgccgacagcgc

SEQ ID NO: 2075005 - RNA, 19 nt, Artificial Sequence
  Description of Artificial Sequence: Synthetic oligonucleotide
ccgaccgacccgccgacag

SEQ ID NO: 2075006 - RNA, 19 nt, Artificial Sequence
  Description of Artificial Sequence: Synthetic oligonucleotide
cuucacugaguaggauuaa

SEQ ID NO: 2075007 - RNA, 19 nt, Artificial Sequence
  Description of Artificial Sequence: Synthetic oligonucleotide
cagggagaacacaguugaa

SEQ ID NO: 2075008 - RNA, 19 nt, Artificial Sequence
  Description of Artificial Sequence: Synthetic oligonucleotide
cugucucgcauaccauucu

SEQ ID NO: 2075009 - RNA, 19 nt, Artificial Sequence
  Description of Artificial Sequence: Synthetic oligonucleotide
ggcgggagcgccgaaggga

SEQ ID NO: 2075010 - RNA, 19 nt, Artificial Sequence
  Description of Artificial Sequence: Synthetic oligonucleotide
gcaugcgagagacaucuuu

SEQ ID NO: 2075011 - RNA, 19 nt, Artificial Sequence
  Description of Artificial Sequence: Synthetic oligonucleotide
ccgaagccgacggcaaccg

SEQ ID NO: 2075012 - RNA, 19 nt, Artificial Sequence
  Description of Artificial Sequence: Synthetic oligonucleotide
uuccgagaauuggcaucaa

SEQ ID NO: 2075013 - RNA, 19 nt, Artificial Sequence
  Description of Artificial Sequence: Synthetic oligonucleotide
auccugucucgcauaccau

SEQ ID NO: 2075014 - RNA, 19 nt, Artificial Sequence
  Description of Artificial Sequence: Synthetic oligonucleotide
gcauaccauucuuccagcu

SEQ ID NO: 2075015 - RNA, 19 nt, Artificial Sequence
  Description of Artificial Sequence: Synthetic oligonucleotide
gcuaccggaggacgagcga

SEQ ID NO: 2075016 - RNA, 19 nt, Artificial Sequence
  Description of Artificial Sequence: Synthetic oligonucleotide
cccauucagugccugggga

SEQ ID NO: 2075017 - RNA, 19 nt, Artificial Sequence
  Description of Artificial Sequence: Synthetic oligonucleotide
ccgacccgccgacagcgcg

SEQ ID NO: 2075018 - RNA, 19 nt, Artificial Sequence
  Description of Artificial Sequence: Synthetic oligonucleotide
ggauacuuucaggcucuga

SEQ ID NO: 2075019 - RNA, 19 nt, Artificial Sequence
  Description of Artificial Sequence: Synthetic oligonucleotide
ccgaagggauccagcucag

SEQ ID NO: 2075020 - RNA, 19 nt, Artificial Sequence
  Description of Artificial Sequence: Synthetic oligonucleotide
ccgcagugacaccgaagcc

SEQ ID NO: 2075021 - RNA, 19 nt, Artificial Sequence
  Description of Artificial Sequence: Synthetic oligonucleotide
ggauagcgaaggccucguc

SEQ ID NO: 2075022 - RNA, 19 nt, Artificial Sequence
  Description of Artificial Sequence: Synthetic oligonucleotide
cuccacuuacggauacuuu

SEQ ID NO: 2075023 - RNA, 19 nt, Artificial Sequence
  Description of Artificial Sequence: Synthetic oligonucleotide
cuuccucgccggcgcccgc

SEQ ID NO: 2075024 - RNA, 19 nt, Artificial Sequence
  Description of Artificial Sequence: Synthetic oligonucleotide
ggcuacuguugggagcauc

SEQ ID NO: 2075025 - RNA, 19 nt, Artificial Sequence
  Description of Artificial Sequence: Synthetic oligonucleotide
gcacggguugaggcuacug

SEQ ID NO: 2075026 - RNA, 19 nt, Artificial Sequence
  Description of Artificial Sequence: Synthetic oligonucleotide
ccaauuacgugaacagcuu

SEQ ID NO: 2075027 - RNA, 19 nt, Artificial Sequence
  Description of Artificial Sequence: Synthetic oligonucleotide
agcacggguugaggcuacu

SEQ ID NO: 2075028 - RNA, 19 nt, Artificial Sequence
  Description of Artificial Sequence: Synthetic oligonucleotide
gcgccgaagggauccagcu

SEQ ID NO: 2075029 - RNA, 19 nt, Artificial Sequence
  Description of Artificial Sequence: Synthetic oligonucleotide
ccuggggaugacucaucga

SEQ ID NO: 2075030 - RNA, 19 nt, Artificial Sequence
  Description of Artificial Sequence: Synthetic oligonucleotide
gccgacagcgcgcccggca

SEQ ID NO: 2075031 - RNA, 19 nt, Artificial Sequence
  Description of Artificial Sequence: Synthetic oligonucleotide
gccgacggcaaccgaccga

SEQ ID NO: 2075032 - RNA, 19 nt, Artificial Sequence
  Description of Artificial Sequence: Synthetic oligonucleotide
gccguccaggauagcgaag

SEQ ID NO: 2075033 - RNA, 19 nt, Artificial Sequence
  Description of Artificial Sequence: Synthetic oligonucleotide
ggccaccgggcgcaccggc

SEQ ID NO: 2075034 - RNA, 19 nt, Artificial Sequence
  Description of Artificial Sequence: Synthetic oligonucleotide
cagccaugacugcccaacu

SEQ ID NO: 2075035 - RNA, 19 nt, Artificial Sequence
  Description of Artificial Sequence: Synthetic oligonucleotide
ccgccguccaggauagcga

SEQ ID NO: 2075036 - RNA, 19 nt, Artificial Sequence
  Description of Artificial Sequence: Synthetic oligonucleotide
cacucuccugcugcgccaa

SEQ ID NO: 2075037 - RNA, 19 nt, Artificial Sequence
  Description of Artificial Sequence: Synthetic oligonucleotide
ccauuacucuccugguagu

SEQ ID NO: 2075038 - RNA, 19 nt, Artificial Sequence
  Description of Artificial Sequence: Synthetic oligonucleotide
acacugcuagcggcugcua

SEQ ID NO: 2075039 - RNA, 19 nt, Artificial Sequence
  Description of Artificial Sequence: Synthetic oligonucleotide
gcgccgccguccaggauag

SEQ ID NO: 2075040 - RNA, 19 nt, Artificial Sequence
  Description of Artificial Sequence: Synthetic oligonucleotide
cgacccgccgacagcgcgc

SEQ ID NO: 2075041 - RNA, 19 nt, Artificial Sequence
  Description of Artificial Sequence: Synthetic oligonucleotide
accgaccgacccgccgaca

SEQ ID NO: 2075042 - RNA, 19 nt, Artificial Sequence
  Description of Artificial Sequence: Synthetic oligonucleotide
guguuuccacaggguagcu

SEQ ID NO: 2075043 - RNA, 19 nt, Artificial Sequence
  Description of Artificial Sequence: Synthetic oligonucleotide
cgggucuuccucgccggcg

SEQ ID NO: 2075044 - RNA, 19 nt, Artificial Sequence
  Description of Artificial Sequence: Synthetic oligonucleotide
cggcaaccgaccgacccgc

SEQ ID NO: 2075045 - RNA, 19 nt, Artificial Sequence
  Description of Artificial Sequence: Synthetic oligonucleotide
ggcaaccgaccgacccgcc

SEQ ID NO: 2075046 - RNA, 19 nt, Artificial Sequence
  Description of Artificial Sequence: Synthetic oligonucleotide
cgaccgacccgccgacagc

SEQ ID NO: 2075047 - RNA, 19 nt, Artificial Sequence
  Description of Artificial Sequence: Synthetic oligonucleotide
cccguuccccagcgcgggg

SEQ ID NO: 2075048 - RNA, 19 nt, Artificial Sequence
  Description of Artificial Sequence: Synthetic oligonucleotide
cggcugcuaccggaggacg

SEQ ID NO: 2075049 - RNA, 19 nt, Artificial Sequence
  Description of Artificial Sequence: Synthetic oligonucleotide
cgccgaagggauccagcuc

SEQ ID NO: 2075050 - RNA, 19 nt, Artificial Sequence
  Description of Artificial Sequence: Synthetic oligonucleotide
gcggacacugcuagcggcu

SEQ ID NO: 2075051 - RNA, 19 nt, Artificial Sequence
  Description of Artificial Sequence: Synthetic oligonucleotide
ggagcgccgaagggaucca

SEQ ID NO: 2075052 - RNA, 19 nt, Artificial Sequence
  Description of Artificial Sequence: Synthetic oligonucleotide
ggccuguuugcuggacuua

SEQ ID NO: 2075053 - RNA, 19 nt, Artificial Sequence
  Description of Artificial Sequence: Synthetic oligonucleotide
cgcccggcagcggacacug

SEQ ID NO: 2075054 - RNA, 19 nt, Artificial Sequence
  Description of Artificial Sequence: Synthetic oligonucleotide
ggcucgccgugcggcugcg

SEQ ID NO: 2075055 - RNA, 19 nt, Artificial Sequence
  Description of Artificial Sequence: Synthetic oligonucleotide
gggccaccgggcgcaccgg

SEQ ID NO: 2075056 - RNA, 19 nt, Artificial Sequence
  Description of Artificial Sequence: Synthetic oligonucleotide
cccggcagcggacacugcu

SEQ ID NO: 2075057 - RNA, 19 nt, Artificial Sequence
  Description of Artificial Sequence: Synthetic oligonucleotide
ccggcagcggacacugcua

SEQ ID NO: 2075058 - RNA, 19 nt, Artificial Sequence
  Description of Artificial Sequence: Synthetic oligonucleotide
cgccguccaggauagcgaa

SEQ ID NO: 2075059 - RNA, 19 nt, Artificial Sequence
  Description of Artificial Sequence: Synthetic oligonucleotide
ccaccccguuccccagcgc

SEQ ID NO: 2075060 - RNA, 19 nt, Artificial Sequence
  Description of Artificial Sequence: Synthetic oligonucleotide
cccuguuguuugcuuuugu

SEQ ID NO: 2075061 - RNA, 19 nt, Artificial Sequence
  Description of Artificial Sequence: Synthetic oligonucleotide
ccgccaccccguuccccag

SEQ ID NO: 2075062 - RNA, 19 nt, Artificial Sequence
  Description of Artificial Sequence: Synthetic oligonucleotide
cgacggcaaccgaccgacc

SEQ ID NO: 2075063 - RNA, 19 nt, Artificial Sequence
  Description of Artificial Sequence: Synthetic oligonucleotide
cggcucgccgugcggcugc

SEQ ID NO: 2075064 - RNA, 19 nt, Artificial Sequence
  Description of Artificial Sequence: Synthetic oligonucleotide
gcaccggcgggagcgccga

SEQ ID NO: 2075065 - RNA, 19 nt, Artificial Sequence
  Description of Artificial Sequence: Synthetic oligonucleotide
ggcuuccaagcgcuccguu

SEQ ID NO: 2075066 - RNA, 19 nt, Artificial Sequence
  Description of Artificial Sequence: Synthetic oligonucleotide
cggauacuuucaggcucug

SEQ ID NO: 2075067 - RNA, 19 nt, Artificial Sequence
  Description of Artificial Sequence: Synthetic oligonucleotide
ccgggcgcaccggcgggag

SEQ ID NO: 2075068 - RNA, 19 nt, Artificial Sequence
  Description of Artificial Sequence: Synthetic oligonucleotide
cgaagccgacggcaaccga

SEQ ID NO: 2075069 - RNA, 19 nt, Artificial Sequence
  Description of Artificial Sequence: Synthetic oligonucleotide
cgggagcgccgaagggauc

SEQ ID NO: 2075070 - RNA, 19 nt, Artificial Sequence
  Description of Artificial Sequence: Synthetic oligonucleotide
ccgugcggcugcggcccgg

SEQ ID NO: 2075071 - RNA, 19 nt, Artificial Sequence
  Description of Artificial Sequence: Synthetic oligonucleotide
cgggcgcaccggcgggagc

SEQ ID NO: 2075072 - RNA, 19 nt, Artificial Sequence
  Description of Artificial Sequence: Synthetic oligonucleotide
gcgcgcccggcagcggaca

SEQ ID NO: 2075073 - RNA, 19 nt, Artificial Sequence
  Description of Artificial Sequence: Synthetic oligonucleotide
cgcccgccaccccguuccc

SEQ ID NO: 2075074 - RNA, 19 nt, Artificial Sequence
  Description of Artificial Sequence: Synthetic oligonucleotide
gcgcccggcagcggacacu

SEQ ID NO: 2075075 - RNA, 19 nt, Artificial Sequence
  Description of Artificial Sequence: Synthetic oligonucleotide
ccgcucccauucagugccu

SEQ ID NO: 2075076 - RNA, 19 nt, Artificial Sequence
  Description of Artificial Sequence: Synthetic oligonucleotide
cgcaugcgagagacaucuu

SEQ ID NO: 2075077 - RNA, 19 nt, Artificial Sequence
  Description of Artificial Sequence: Synthetic oligonucleotide
cgccgccguccaggauagc

SEQ ID NO: 2075078 - RNA, 19 nt, Artificial Sequence
  Description of Artificial Sequence: Synthetic oligonucleotide
auaaucagaauccagaucc

SEQ ID NO: 2075079 - RNA, 19 nt, Artificial Sequence
  Description of Artificial Sequence: Synthetic oligonucleotide
uccauuuucgaaaacagcc

SEQ ID NO: 2075080 - RNA, 19 nt, Artificial Sequence
  Description of Artificial Sequence: Synthetic oligonucleotide
uguaucaugggacagggag

SEQ ID NO: 2075081 - RNA, 19 nt, Artificial Sequence
  Description of Artificial Sequence: Synthetic oligonucleotide
aaagucuccguccuccucc

SEQ ID NO: 2075082 - RNA, 19 nt, Artificial Sequence
  Description of Artificial Sequence: Synthetic oligonucleotide
gagucugccacuuucaggg

SEQ ID NO: 2075083 - RNA, 19 nt, Artificial Sequence
  Description of Artificial Sequence: Synthetic oligonucleotide
agugucuacaaauaccugg

SEQ ID NO: 2075084 - RNA, 19 nt, Artificial Sequence
  Description of Artificial Sequence: Synthetic oligonucleotide
uugacugucaccuccaucc

SEQ ID NO: 2075085 - RNA, 19 nt, Artificial Sequence
  Description of Artificial Sequence: Synthetic oligonucleotide
cacacacacacauagaagg

SEQ ID NO: 2075086 - RNA, 19 nt, Artificial Sequence
  Description of Artificial Sequence: Synthetic oligonucleotide
aggaaguaggaugugaucc

SEQ ID NO: 2075087 - RNA, 19 nt, Artificial Sequence
  Description of Artificial Sequence: Synthetic oligonucleotide
aacgcauacuguaucagcc

SEQ ID NO: 2075088 - RNA, 19 nt, Artificial Sequence
  Description of Artificial Sequence: Synthetic oligonucleotide
agagccauaaucagaaucc

SEQ ID NO: 2075089 - RNA, 19 nt, Artificial Sequence
  Description of Artificial Sequence: Synthetic oligonucleotide
uauaaugggaucuggugcc

SEQ ID NO: 2075090 - RNA, 19 nt, Artificial Sequence
  Description of Artificial Sequence: Synthetic oligonucleotide
aggucuuugagucugccac

SEQ ID NO: 2075091 - RNA, 19 nt, Artificial Sequence
  Description of Artificial Sequence: Synthetic oligonucleotide
cacauuugccucuagaggc

SEQ ID NO: 2075092 - RNA, 19 nt, Artificial Sequence
  Description of Artificial Sequence: Synthetic oligonucleotide
uucgaaaacagccucuccc

SEQ ID NO: 2075093 - RNA, 19 nt, Artificial Sequence
  Description of Artificial Sequence: Synthetic oligonucleotide
uugagguuguacuugacgc

SEQ ID NO: 2075094 - RNA, 19 nt, Artificial Sequence
  Description of Artificial Sequence: Synthetic oligonucleotide
aagaggggcggauucacac

SEQ ID NO: 2075095 - RNA, 19 nt, Artificial Sequence
  Description of Artificial Sequence: Synthetic oligonucleotide
cuauaaugggaucuggugc

SEQ ID NO: 2075096 - RNA, 19 nt, Artificial Sequence
  Description of Artificial Sequence: Synthetic oligonucleotide
gauggcguagaccaugggg

SEQ ID NO: 2075097 - RNA, 19 nt, Artificial Sequence
  Description of Artificial Sequence: Synthetic oligonucleotide
cauugggauagccagagcc

SEQ ID NO: 2075098 - RNA, 19 nt, Artificial Sequence
  Description of Artificial Sequence: Synthetic oligonucleotide
uucauccacgcccaggacg

SEQ ID NO: 2075099 - RNA, 19 nt, Artificial Sequence
  Description of Artificial Sequence: Synthetic oligonucleotide
acagcuuuaauucccaagu

SEQ ID NO: 2075100 - RNA, 19 nt, Artificial Sequence
  Description of Artificial Sequence: Synthetic oligonucleotide
aaguaagaggggcggauuc

SEQ ID NO: 2075101 - RNA, 19 nt, Artificial Sequence
  Description of Artificial Sequence: Synthetic oligonucleotide
acacauuugccucuagagg

SEQ ID NO: 2075102 - RNA, 19 nt, Artificial Sequence
  Description of Artificial Sequence: Synthetic oligonucleotide
cugggugacauucacaccc

SEQ ID NO: 2075103 - RNA, 19 nt, Artificial Sequence
  Description of Artificial Sequence: Synthetic oligonucleotide
uacuguaucagccccgcag

SEQ ID NO: 2075104 - RNA, 19 nt, Artificial Sequence
  Description of Artificial Sequence: Synthetic oligonucleotide
ucgaaaacagccucucccg

SEQ ID NO: 2075105 - RNA, 19 nt, Artificial Sequence
  Description of Artificial Sequence: Synthetic oligonucleotide
aaggaaguaggaugugauc

SEQ ID NO: 2075106 - RNA, 19 nt, Artificial Sequence
  Description of Artificial Sequence: Synthetic oligonucleotide
ucuagaucugccaggcggg

SEQ ID NO: 2075107 - RNA, 19 nt, Artificial Sequence
  Description of Artificial Sequence: Synthetic oligonucleotide
uagagaucagguuuggaga

SEQ ID NO: 2075108 - RNA, 19 nt, Artificial Sequence
  Description of Artificial Sequence: Synthetic oligonucleotide
cacacacacacacacauag

SEQ ID NO: 2075109 - RNA, 19 nt, Artificial Sequence
  Description of Artificial Sequence: Synthetic oligonucleotide
gacagaauguccaaagccc

SEQ ID NO: 2075110 - RNA, 19 nt, Artificial Sequence
  Description of Artificial Sequence: Synthetic oligonucleotide
cucuagaucugccaggcgg

SEQ ID NO: 2075111 - RNA, 19 nt, Artificial Sequence
  Description of Artificial Sequence: Synthetic oligonucleotide
cagguuuggagacagaaug

SEQ ID NO: 2075112 - RNA, 19 nt, Artificial Sequence
  Description of Artificial Sequence: Synthetic oligonucleotide
ugagguuguacuugacgcg

SEQ ID NO: 2075113 - RNA, 19 nt, Artificial Sequence
  Description of Artificial Sequence: Synthetic oligonucleotide
gauccuguaaacucucuac

SEQ ID NO: 2075114 - RNA, 19 nt, Artificial Sequence
  Description of Artificial Sequence: Synthetic oligonucleotide
uggcuaaggaaguaggaug

SEQ ID NO: 2075115 - RNA, 19 nt, Artificial Sequence
  Description of Artificial Sequence: Synthetic oligonucleotide
auggcguagaccauggggc

SEQ ID NO: 2075116 - RNA, 19 nt, Artificial Sequence
  Description of Artificial Sequence: Synthetic oligonucleotide
cuugaacagcuuuaauucc

SEQ ID NO: 2075117 - RNA, 19 nt, Artificial Sequence
  Description of Artificial Sequence: Synthetic oligonucleotide
agcugaaccggacaaacug

SEQ ID NO: 2075118 - RNA, 19 nt, Artificial Sequence
  Description of Artificial Sequence: Synthetic oligonucleotide
cugucaaggucuuugaguc

SEQ ID NO: 2075119 - RNA, 19 nt, Artificial Sequence
  Description of Artificial Sequence: Synthetic oligonucleotide
ggaucauugggauagccag

SEQ ID NO: 2075120 - RNA, 19 nt, Artificial Sequence
  Description of Artificial Sequence: Synthetic oligonucleotide
ugccucuagaggcuguugg

SEQ ID NO: 2075121 - RNA, 19 nt, Artificial Sequence
  Description of Artificial Sequence: Synthetic oligonucleotide
acccacaaagucuccgucc

SEQ ID NO: 2075122 - RNA, 19 nt, Artificial Sequence
  Description of Artificial Sequence: Synthetic oligonucleotide
ucauccacgcccaggacgc

SEQ ID NO: 2075123 - RNA, 19 nt, Artificial Sequence
  Description of Artificial Sequence: Synthetic oligonucleotide
uucccaaguaagaggggcg

SEQ ID NO: 2075124 - RNA, 19 nt, Artificial Sequence
  Description of Artificial Sequence: Synthetic oligonucleotide
uugcaaucgagccugguau

SEQ ID NO: 2075125 - RNA, 19 nt, Artificial Sequence
  Description of Artificial Sequence: Synthetic oligonucleotide
gagagcucaggcgacagcg

SEQ ID NO: 2075126 - RNA, 19 nt, Artificial Sequence
  Description of Artificial Sequence: Synthetic oligonucleotide
aaucgagccugguaugucu

SEQ ID NO: 2075127 - RNA, 19 nt, Artificial Sequence
  Description of Artificial Sequence: Synthetic oligonucleotide
ugagucugccacuuucagg

SEQ ID NO: 2075128 - RNA, 19 nt, Artificial Sequence
  Description of Artificial Sequence: Synthetic oligonucleotide
acgcacggcuccuugaggc

SEQ ID NO: 2075129 - RNA, 19 nt, Artificial Sequence
  Description of Artificial Sequence: Synthetic oligonucleotide
acgcauacuguaucagccc

SEQ ID NO: 2075130 - RNA, 19 nt, Artificial Sequence
  Description of Artificial Sequence: Synthetic oligonucleotide
gaaagcgcuguugcaaucg

SEQ ID NO: 2075131 - RNA, 19 nt, Artificial Sequence
  Description of Artificial Sequence: Synthetic oligonucleotide
cacacacacacacacacac

SEQ ID NO: 2075132 - RNA, 19 nt, Artificial Sequence
  Description of Artificial Sequence: Synthetic oligonucleotide
agaccauggggccaagcac

SEQ ID NO: 2075133 - RNA, 19 nt, Artificial Sequence
  Description of Artificial Sequence: Synthetic oligonucleotide
uuggccuugacugucaccu

SEQ ID NO: 2075134 - RNA, 19 nt, Artificial Sequence
  Description of Artificial Sequence: Synthetic oligonucleotide
ugauccaacgcauacugua

SEQ ID NO: 2075135 - RNA, 19 nt, Artificial Sequence
  Description of Artificial Sequence: Synthetic oligonucleotide
uccucaaccaggcuuuugu

SEQ ID NO: 2075136 - RNA, 19 nt, Artificial Sequence
  Description of Artificial Sequence: Synthetic oligonucleotide
ucucgagccaccuuggcaa

SEQ ID NO: 2075137 - RNA, 19 nt, Artificial Sequence
  Description of Artificial Sequence: Synthetic oligonucleotide
uagaccauggggccaagca

SEQ ID NO: 2075138 - RNA, 19 nt, Artificial Sequence
  Description of Artificial Sequence: Synthetic oligonucleotide
gucuacaaauaccugggug

SEQ ID NO: 2075139 - RNA, 19 nt, Artificial Sequence
  Description of Artificial Sequence: Synthetic oligonucleotide
acagugucuacaaauaccu

SEQ ID NO: 2075140 - RNA, 19 nt, Artificial Sequence
  Description of Artificial Sequence: Synthetic oligonucleotide
gagacagaauguccaaagc

SEQ ID NO: 2075141 - RNA, 19 nt, Artificial Sequence
  Description of Artificial Sequence: Synthetic oligonucleotide
uccacguguuuccucaacc

SEQ ID NO: 2075142 - RNA, 19 nt, Artificial Sequence
  Description of Artificial Sequence: Synthetic oligonucleotide
gaugcuugcagcacugacc

SEQ ID NO: 2075143 - RNA, 19 nt, Artificial Sequence
  Description of Artificial Sequence: Synthetic oligonucleotide
augugauccuuccaggcug

SEQ ID NO: 2075144 - RNA, 19 nt, Artificial Sequence
  Description of Artificial Sequence: Synthetic oligonucleotide
agcuuuaauucccaaguaa

SEQ ID NO: 2075145 - RNA, 19 nt, Artificial Sequence
  Description of Artificial Sequence: Synthetic oligonucleotide
cuuuaauucccaaguaaga

SEQ ID NO: 2075146 - RNA, 19 nt, Artificial Sequence
  Description of Artificial Sequence: Synthetic oligonucleotide
agggaguugagguuguacu

SEQ ID NO: 2075147 - RNA, 19 nt, Artificial Sequence
  Description of Artificial Sequence: Synthetic oligonucleotide
ugaaccggacaaacugggg

SEQ ID NO: 2075148 - RNA, 19 nt, Artificial Sequence
  Description of Artificial Sequence: Synthetic oligonucleotide
auaccugggugacauucac

SEQ ID NO: 2075149 - RNA, 19 nt, Artificial Sequence
  Description of Artificial Sequence: Synthetic oligonucleotide
cugugcuccagcugaaccg

SEQ ID NO: 2075150 - RNA, 19 nt, Artificial Sequence
  Description of Artificial Sequence: Synthetic oligonucleotide
cauuuucgaaaacagccuc

SEQ ID NO: 2075151 - RNA, 19 nt, Artificial Sequence
  Description of Artificial Sequence: Synthetic oligonucleotide
acacacauagaaggguggc

SEQ ID NO: 2075152 - RNA, 19 nt, Artificial Sequence
  Description of Artificial Sequence: Synthetic oligonucleotide
ugcccucucuucuugaaca

SEQ ID NO: 2075153 - RNA, 19 nt, Artificial Sequence
  Description of Artificial Sequence: Synthetic oligonucleotide
agcgcuguugcaaucgagc

SEQ ID NO: 2075154 - RNA, 19 nt, Artificial Sequence
  Description of Artificial Sequence: Synthetic oligonucleotide
agaauguccaaagcccaac

SEQ ID NO: 2075155 - RNA, 19 nt, Artificial Sequence
  Description of Artificial Sequence: Synthetic oligonucleotide
ggcggauucacacauuugc

SEQ ID NO: 2075156 - RNA, 19 nt, Artificial Sequence
  Description of Artificial Sequence: Synthetic oligonucleotide
cuugacgcgcccaagcaug

SEQ ID NO: 2075157 - RNA, 19 nt, Artificial Sequence
  Description of Artificial Sequence: Synthetic oligonucleotide
acaaauaccugggugacau

SEQ ID NO: 2075158 - RNA, 19 nt, Artificial Sequence
  Description of Artificial Sequence: Synthetic oligonucleotide
uuucgaaaacagccucucc

SEQ ID NO: 2075159 - RNA, 19 nt, Artificial Sequence
  Description of Artificial Sequence: Synthetic oligonucleotide
ucuagaggcuguuggcugc

SEQ ID NO: 2075160 - RNA, 19 nt, Artificial Sequence
  Description of Artificial Sequence: Synthetic oligonucleotide
cauaaucagaauccagauc

SEQ ID NO: 2075161 - RNA, 19 nt, Artificial Sequence
  Description of Artificial Sequence: Synthetic oligonucleotide
auccaacgcauacuguauc

SEQ ID NO: 2075162 - RNA, 19 nt, Artificial Sequence
  Description of Artificial Sequence: Synthetic oligonucleotide
gcuuuaauucccaaguaag

SEQ ID NO: 2075163 - RNA, 19 nt, Artificial Sequence
  Description of Artificial Sequence: Synthetic oligonucleotide
auccuguaaacucucuaca

SEQ ID NO: 2075164 - RNA, 19 nt, Artificial Sequence
  Description of Artificial Sequence: Synthetic oligonucleotide
acuuucagggccucuagau

SEQ ID NO: 2075165 - RNA, 19 nt, Artificial Sequence
  Description of Artificial Sequence: Synthetic oligonucleotide
uccuguaaacucucuacaa

SEQ ID NO: 2075166 - RNA, 19 nt, Artificial Sequence
  Description of Artificial Sequence: Synthetic oligonucleotide
caacgcauacuguaucagc

SEQ ID NO: 2075167 - RNA, 19 nt, Artificial Sequence
  Description of Artificial Sequence: Synthetic oligonucleotide
agaauccagauccuguaaa

SEQ ID NO: 2075168 - RNA, 19 nt, Artificial Sequence
  Description of Artificial Sequence: Synthetic oligonucleotide
cuuugagucugccacuuuc

SEQ ID NO: 2075169 - RNA, 19 nt, Artificial Sequence
  Description of Artificial Sequence: Synthetic oligonucleotide
aaagaugcuugcagcacug

SEQ ID NO: 2075170 - RNA, 19 nt, Artificial Sequence
  Description of Artificial Sequence: Synthetic oligonucleotide
agggagucugcuuuggccu

SEQ ID NO: 2075171 - RNA, 19 nt, Artificial Sequence
  Description of Artificial Sequence: Synthetic oligonucleotide
ucagaauccagauccugua

SEQ ID NO: 2075172 - RNA, 19 nt, Artificial Sequence
  Description of Artificial Sequence: Synthetic oligonucleotide
uacuugacgcgcccaagca

SEQ ID NO: 2075173 - RNA, 19 nt, Artificial Sequence
  Description of Artificial Sequence: Synthetic oligonucleotide
uaaucagaauccagauccu

SEQ ID NO: 2075174 - RNA, 19 nt, Artificial Sequence
  Description of Artificial Sequence: Synthetic oligonucleotide
aaggucuuugagucugcca

SEQ ID NO: 2075175 - RNA, 19 nt, Artificial Sequence
  Description of Artificial Sequence: Synthetic oligonucleotide
gagguuguacuugacgcgc

SEQ ID NO: 2075176 - RNA, 19 nt, Artificial Sequence
  Description of Artificial Sequence: Synthetic oligonucleotide
ccacgugacaccuucagcc

SEQ ID NO: 2075177 - RNA, 19 nt, Artificial Sequence
  Description of Artificial Sequence: Synthetic oligonucleotide
agcaugcugguagagauca

SEQ ID NO: 2075178 - RNA, 19 nt, Artificial Sequence
  Description of Artificial Sequence: Synthetic oligonucleotide
aaacugccaguucuucaca

SEQ ID NO: 2075179 - RNA, 19 nt, Artificial Sequence
  Description of Artificial Sequence: Synthetic oligonucleotide
aguccucccacgugacacc

SEQ ID NO: 2075180 - RNA, 19 nt, Artificial Sequence
  Description of Artificial Sequence: Synthetic oligonucleotide
ucaugggacagggaguuga

SEQ ID NO: 2075181 - RNA, 19 nt, Artificial Sequence
  Description of Artificial Sequence: Synthetic oligonucleotide
agaucagguuuggagacag

SEQ ID NO: 2075182 - RNA, 19 nt, Artificial Sequence
  Description of Artificial Sequence: Synthetic oligonucleotide
gaccauggggccaagcacc

SEQ ID NO: 2075183 - RNA, 19 nt, Artificial Sequence
  Description of Artificial Sequence: Synthetic oligonucleotide
gguacaggagagcucaggc

SEQ ID NO: 2075184 - RNA, 19 nt, Artificial Sequence
  Description of Artificial Sequence: Synthetic oligonucleotide
uuuucgaaaacagccucuc

SEQ ID NO: 2075185 - RNA, 19 nt, Artificial Sequence
  Description of Artificial Sequence: Synthetic oligonucleotide
cuggcauuccuacaguguc

SEQ ID NO: 2075186 - RNA, 19 nt, Artificial Sequence
  Description of Artificial Sequence: Synthetic oligonucleotide
guaacagauggcguagacc

SEQ ID NO: 2075187 - RNA, 19 nt, Artificial Sequence
  Description of Artificial Sequence: Synthetic oligonucleotide
acagcggcccguauugucc

SEQ ID NO: 2075188 - RNA, 19 nt, Artificial Sequence
  Description of Artificial Sequence: Synthetic oligonucleotide
aaagcgcuguugcaaucga

SEQ ID NO: 2075189 - RNA, 19 nt, Artificial Sequence
  Description of Artificial Sequence: Synthetic oligonucleotide
acguguuuccucaaccagg

SEQ ID NO: 2075190 - RNA, 19 nt, Artificial Sequence
  Description of Artificial Sequence: Synthetic oligonucleotide
uaugucucuggcauuccua

SEQ ID NO: 2075191 - RNA, 19 nt, Artificial Sequence
  Description of Artificial Sequence: Synthetic oligonucleotide
ucccacgugacaccuucag

SEQ ID NO: 2075192 - RNA, 19 nt, Artificial Sequence
  Description of Artificial Sequence: Synthetic oligonucleotide
ggggcaguaacagauggcg

SEQ ID NO: 2075193 - RNA, 19 nt, Artificial Sequence
  Description of Artificial Sequence: Synthetic oligonucleotide
ugucuacaaauaccugggu

SEQ ID NO: 2075194 - RNA, 19 nt, Artificial Sequence
  Description of Artificial Sequence: Synthetic oligonucleotide
guacuugacgcgcccaagc

SEQ ID NO: 2075195 - RNA, 19 nt, Artificial Sequence
  Description of Artificial Sequence: Synthetic oligonucleotide
cacacacacacacauagaa

SEQ ID NO: 2075196 - RNA, 19 nt, Artificial Sequence
  Description of Artificial Sequence: Synthetic oligonucleotide
ugcaaucgagccugguaug

SEQ ID NO: 2075197 - RNA, 19 nt, Artificial Sequence
  Description of Artificial Sequence: Synthetic oligonucleotide
aaccaggcuuuugucuugg

SEQ ID NO: 2075198 - RNA, 19 nt, Artificial Sequence
  Description of Artificial Sequence: Synthetic oligonucleotide
aauaccugggugacauuca

SEQ ID NO: 2075199 - RNA, 19 nt, Artificial Sequence
  Description of Artificial Sequence: Synthetic oligonucleotide
agcuguaucaugggacagg

SEQ ID NO: 2075200 - RNA, 19 nt, Artificial Sequence
  Description of Artificial Sequence: Synthetic oligonucleotide
cagaccucgcuccuggaag

SEQ ID NO: 2075201 - RNA, 19 nt, Artificial Sequence
  Description of Artificial Sequence: Synthetic oligonucleotide
cucuagaggcuguuggcug

SEQ ID NO: 2075202 - RNA, 19 nt, Artificial Sequence
  Description of Artificial Sequence: Synthetic oligonucleotide
ucugagauccaugcugccu

SEQ ID NO: 2075203 - RNA, 19 nt, Artificial Sequence
  Description of Artificial Sequence: Synthetic oligonucleotide
cacguguuuccucaaccag

SEQ ID NO: 2075204 - RNA, 19 nt, Artificial Sequence
  Description of Artificial Sequence: Synthetic oligonucleotide
auagaaggguggcucacaa

SEQ ID NO: 2075205 - RNA, 19 nt, Artificial Sequence
  Description of Artificial Sequence: Synthetic oligonucleotide
agucugccacuuucagggc

SEQ ID NO: 2075206 - RNA, 19 nt, Artificial Sequence
  Description of Artificial Sequence: Synthetic oligonucleotide
uccacgcccaggacgcacg

SEQ ID NO: 2075207 - RNA, 19 nt, Artificial Sequence
  Description of Artificial Sequence: Synthetic oligonucleotide
acacacacacacauagaag

SEQ ID NO: 2075208 - RNA, 19 nt, Artificial Sequence
  Description of Artificial Sequence: Synthetic oligonucleotide
agcacugaccacagggaac

SEQ ID NO: 2075209 - RNA, 19 nt, Artificial Sequence
  Description of Artificial Sequence: Synthetic oligonucleotide
acgugacaccuucagccuc

SEQ ID NO: 2075210 - RNA, 19 nt, Artificial Sequence
  Description of Artificial Sequence: Synthetic oligonucleotide
gauggcuugggcugugcuc

SEQ ID NO: 2075211 - RNA, 19 nt, Artificial Sequence
  Description of Artificial Sequence: Synthetic oligonucleotide
auuuucgaaaacagccucu

SEQ ID NO: 2075212 - RNA, 19 nt, Artificial Sequence
  Description of Artificial Sequence: Synthetic oligonucleotide
aucagaauccagauccugu

SEQ ID NO: 2075213 - RNA, 19 nt, Artificial Sequence
  Description of Artificial Sequence: Synthetic oligonucleotide
ucaaggucuuugagucugc

SEQ ID NO: 2075214 - RNA, 19 nt, Artificial Sequence
  Description of Artificial Sequence: Synthetic oligonucleotide
ggauucacacauuugccuc

SEQ ID NO: 2075215 - RNA, 19 nt, Artificial Sequence
  Description of Artificial Sequence: Synthetic oligonucleotide
uccucagcggcugaguccu

SEQ ID NO: 2075216 - RNA, 19 nt, Artificial Sequence
  Description of Artificial Sequence: Synthetic oligonucleotide
uggcauuccuacagugucu

SEQ ID NO: 2075217 - RNA, 19 nt, Artificial Sequence
  Description of Artificial Sequence: Synthetic oligonucleotide
uaagaggggcggauucaca

SEQ ID NO: 2075218 - RNA, 19 nt, Artificial Sequence
  Description of Artificial Sequence: Synthetic oligonucleotide
ggaugugauccuuccaggc

SEQ ID NO: 2075219 - RNA, 19 nt, Artificial Sequence
  Description of Artificial Sequence: Synthetic oligonucleotide
ugguaugucucuggcauuc

SEQ ID NO: 2075220 - RNA, 19 nt, Artificial Sequence
  Description of Artificial Sequence: Synthetic oligonucleotide
uuuggccuugacugucacc

SEQ ID NO: 2075221 - RNA, 19 nt, Artificial Sequence
  Description of Artificial Sequence: Synthetic oligonucleotide
gaacagggagucugcuuug

SEQ ID NO: 2075222 - RNA, 19 nt, Artificial Sequence
  Description of Artificial Sequence: Synthetic oligonucleotide
uuggagacagaauguccaa

SEQ ID NO: 2075223 - RNA, 19 nt, Artificial Sequence
  Description of Artificial Sequence: Synthetic oligonucleotide
gcuguugcaaucgagccug

SEQ ID NO: 2075224 - RNA, 19 nt, Artificial Sequence
  Description of Artificial Sequence: Synthetic oligonucleotide
uguaucagccccgcagcug

SEQ ID NO: 2075225 - RNA, 19 nt, Artificial Sequence
  Description of Artificial Sequence: Synthetic oligonucleotide
uggcguagaccauggggcc

SEQ ID NO: 2075226 - RNA, 19 nt, Artificial Sequence
  Description of Artificial Sequence: Synthetic oligonucleotide
aagcaugcugguagagauc

SEQ ID NO: 2075227 - RNA, 19 nt, Artificial Sequence
  Description of Artificial Sequence: Synthetic oligonucleotide
gcuguaucaugggacaggg

SEQ ID NO: 2075228 - RNA, 19 nt, Artificial Sequence
  Description of Artificial Sequence: Synthetic oligonucleotide
agauccuguaaacucucua

SEQ ID NO: 2075229 - RNA, 19 nt, Artificial Sequence
  Description of Artificial Sequence: Synthetic oligonucleotide
gacgcacggcuccuugagg

SEQ ID NO: 2075230 - RNA, 19 nt, Artificial Sequence
  Description of Artificial Sequence: Synthetic oligonucleotide
ccugauccaacgcauacug

SEQ ID NO: 2075231 - RNA, 19 nt, Artificial Sequence
  Description of Artificial Sequence: Synthetic oligonucleotide
uugacgcgcccaagcaugc

SEQ ID NO: 2075232 - RNA, 19 nt, Artificial Sequence
  Description of Artificial Sequence: Synthetic oligonucleotide
ccuggaaguaccugugggg

SEQ ID NO: 2075233 - RNA, 19 nt, Artificial Sequence
  Description of Artificial Sequence: Synthetic oligonucleotide
ucauugggauagccagagc

SEQ ID NO: 2075234 - RNA, 19 nt, Artificial Sequence
  Description of Artificial Sequence: Synthetic oligonucleotide
ugagauccaugcugccuca

SEQ ID NO: 2075235 - RNA, 19 nt, Artificial Sequence
  Description of Artificial Sequence: Synthetic oligonucleotide
cguucauucucugucaagg

SEQ ID NO: 2075236 - RNA, 19 nt, Artificial Sequence
  Description of Artificial Sequence: Synthetic oligonucleotide
gacgcgcccaagcaugcug

SEQ ID NO: 2075237 - RNA, 19 nt, Artificial Sequence
  Description of Artificial Sequence: Synthetic oligonucleotide
aaacagccucucccguuca

SEQ ID NO: 2075238 - RNA, 19 nt, Artificial Sequence
  Description of Artificial Sequence: Synthetic oligonucleotide
cuaaggaaguaggauguga

SEQ ID NO: 2075239 - RNA, 19 nt, Artificial Sequence
  Description of Artificial Sequence: Synthetic oligonucleotide
ugggugacauucacacccu

SEQ ID NO: 2075240 - RNA, 19 nt, Artificial Sequence
  Description of Artificial Sequence: Synthetic oligonucleotide
ucuccguccuccuccauuu

SEQ ID NO: 2075241 - RNA, 19 nt, Artificial Sequence
  Description of Artificial Sequence: Synthetic oligonucleotide
ugggaucauugggauagcc

SEQ ID NO: 2075242 - RNA, 19 nt, Artificial Sequence
  Description of Artificial Sequence: Synthetic oligonucleotide
agggcccuggcuaaggaag

SEQ ID NO: 2075243 - RNA, 19 nt, Artificial Sequence
  Description of Artificial Sequence: Synthetic oligonucleotide
agguuguacuugacgcgcc

SEQ ID NO: 2075244 - RNA, 19 nt, Artificial Sequence
  Description of Artificial Sequence: Synthetic oligonucleotide
cacacggcggguacaggag

SEQ ID NO: 2075245 - RNA, 19 nt, Artificial Sequence
  Description of Artificial Sequence: Synthetic oligonucleotide
aguaagaggggcggauuca

SEQ ID NO: 2075246 - RNA, 19 nt, Artificial Sequence
  Description of Artificial Sequence: Synthetic oligonucleotide
ggaguugagguuguacuug

SEQ ID NO: 2075247 - RNA, 19 nt, Artificial Sequence
  Description of Artificial Sequence: Synthetic oligonucleotide
guugcaaucgagccuggua

SEQ ID NO: 2075248 - RNA, 19 nt, Artificial Sequence
  Description of Artificial Sequence: Synthetic oligonucleotide
auccaugcugccucagcga

SEQ ID NO: 2075249 - RNA, 19 nt, Artificial Sequence
  Description of Artificial Sequence: Synthetic oligonucleotide
uccguccuccuccauuuuc

SEQ ID NO: 2075250 - RNA, 19 nt, Artificial Sequence
  Description of Artificial Sequence: Synthetic oligonucleotide
acuugacgcgcccaagcau

SEQ ID NO: 2075251 - RNA, 19 nt, Artificial Sequence
  Description of Artificial Sequence: Synthetic oligonucleotide
agaggggcggauucacaca

SEQ ID NO: 2075252 - RNA, 19 nt, Artificial Sequence
  Description of Artificial Sequence: Synthetic oligonucleotide
uugggauagccagagccau

SEQ ID NO: 2075253 - RNA, 19 nt, Artificial Sequence
  Description of Artificial Sequence: Synthetic oligonucleotide
cagugucuacaaauaccug

SEQ ID NO: 2075254 - RNA, 19 nt, Artificial Sequence
  Description of Artificial Sequence: Synthetic oligonucleotide
uagaaggguggcucacaac

SEQ ID NO: 2075255 - RNA, 19 nt, Artificial Sequence
  Description of Artificial Sequence: Synthetic oligonucleotide
agcucaggcgacagcggcc

SEQ ID NO: 2075256 - RNA, 19 nt, Artificial Sequence
  Description of Artificial Sequence: Synthetic oligonucleotide
ugcugguagagaucagguu

SEQ ID NO: 2075257 - RNA, 19 nt, Artificial Sequence
  Description of Artificial Sequence: Synthetic oligonucleotide
agguuuggagacagaaugu

SEQ ID NO: 2075258 - RNA, 19 nt, Artificial Sequence
  Description of Artificial Sequence: Synthetic oligonucleotide
ugauccuuccaggcugccc

SEQ ID NO: 2075259 - RNA, 19 nt, Artificial Sequence
  Description of Artificial Sequence: Synthetic oligonucleotide
ucucuacaaacugccaguu

SEQ ID NO: 2075260 - RNA, 19 nt, Artificial Sequence
  Description of Artificial Sequence: Synthetic oligonucleotide
gcccguauuguccuucucc

SEQ ID NO: 2075261 - RNA, 19 nt, Artificial Sequence
  Description of Artificial Sequence: Synthetic oligonucleotide
cuccaucccuggaaagcgc

SEQ ID NO: 2075262 - RNA, 19 nt, Artificial Sequence
  Description of Artificial Sequence: Synthetic oligonucleotide
cguguuuccucaaccaggc

SEQ ID NO: 2075263 - RNA, 19 nt, Artificial Sequence
  Description of Artificial Sequence: Synthetic oligonucleotide
cacauagaaggguggcuca

SEQ ID NO: 2075264 - RNA, 19 nt, Artificial Sequence
  Description of Artificial Sequence: Synthetic oligonucleotide
cucugagauccaugcugcc

SEQ ID NO: 2075265 - RNA, 19 nt, Artificial Sequence
  Description of Artificial Sequence: Synthetic oligonucleotide
ucagcggcugaguccuccc

SEQ ID NO: 2075266 - RNA, 19 nt, Artificial Sequence
  Description of Artificial Sequence: Synthetic oligonucleotide
gacagcggcccguauuguc

SEQ ID NO: 2075267 - RNA, 19 nt, Artificial Sequence
  Description of Artificial Sequence: Synthetic oligonucleotide
cacggcggguacaggagag

SEQ ID NO: 2075268 - RNA, 19 nt, Artificial Sequence
  Description of Artificial Sequence: Synthetic oligonucleotide
gcugugcuccagcugaacc

SEQ ID NO: 2075269 - RNA, 19 nt, Artificial Sequence
  Description of Artificial Sequence: Synthetic oligonucleotide
cucuacaaacugccaguuc

SEQ ID NO: 2075270 - RNA, 19 nt, Artificial Sequence
  Description of Artificial Sequence: Synthetic oligonucleotide
aagcgcuguugcaaucgag

SEQ ID NO: 2075271 - RNA, 19 nt, Artificial Sequence
  Description of Artificial Sequence: Synthetic oligonucleotide
acauuugccucuagaggcu

SEQ ID NO: 2075272 - RNA, 19 nt, Artificial Sequence
  Description of Artificial Sequence: Synthetic oligonucleotide
gagccauaaucagaaucca

SEQ ID NO: 2075273 - RNA, 19 nt, Artificial Sequence
  Description of Artificial Sequence: Synthetic oligonucleotide
guaggaugugauccuucca

SEQ ID NO: 2075274 - RNA, 19 nt, Artificial Sequence
  Description of Artificial Sequence: Synthetic oligonucleotide
aagaugcuugcagcacuga

SEQ ID NO: 2075275 - RNA, 19 nt, Artificial Sequence
  Description of Artificial Sequence: Synthetic oligonucleotide
aucgagccugguaugucuc

SEQ ID NO: 2075276 - RNA, 19 nt, Artificial Sequence
  Description of Artificial Sequence: Synthetic oligonucleotide
ggccuugacugucaccucc

SEQ ID NO: 2075277 - RNA, 19 nt, Artificial Sequence
  Description of Artificial Sequence: Synthetic oligonucleotide
uggggccaagcaccgggcc

SEQ ID NO: 2075278 - RNA, 19 nt, Artificial Sequence
  Description of Artificial Sequence: Synthetic oligonucleotide
gaaggguggcucacaacca

SEQ ID NO: 2075279 - RNA, 19 nt, Artificial Sequence
  Description of Artificial Sequence: Synthetic oligonucleotide
cacacacacacacacacau

SEQ ID NO: 2075280 - RNA, 19 nt, Artificial Sequence
  Description of Artificial Sequence: Synthetic oligonucleotide
caaggucuuugagucugcc

SEQ ID NO: 2075281 - RNA, 19 nt, Artificial Sequence
  Description of Artificial Sequence: Synthetic oligonucleotide
guaucagccccgcagcugu

SEQ ID NO: 2075282 - RNA, 19 nt, Artificial Sequence
  Description of Artificial Sequence: Synthetic oligonucleotide
ucgagccugguaugucucu

SEQ ID NO: 2075283 - RNA, 19 nt, Artificial Sequence
  Description of Artificial Sequence: Synthetic oligonucleotide
accauggggccaagcaccg

SEQ ID NO: 2075284 - RNA, 19 nt, Artificial Sequence
  Description of Artificial Sequence: Synthetic oligonucleotide
aacagccucucccguucau

SEQ ID NO: 2075285 - RNA, 19 nt, Artificial Sequence
  Description of Artificial Sequence: Synthetic oligonucleotide
ucccuggaaagcgcuguug

SEQ ID NO: 2075286 - RNA, 19 nt, Artificial Sequence
  Description of Artificial Sequence: Synthetic oligonucleotide
ccguccuccuccauuuucg

SEQ ID NO: 2075287 - RNA, 19 nt, Artificial Sequence
  Description of Artificial Sequence: Synthetic oligonucleotide
acacggcggguacaggaga

SEQ ID NO: 2075288 - RNA, 19 nt, Artificial Sequence
  Description of Artificial Sequence: Synthetic oligonucleotide
gcgcuguugcaaucgagcc

SEQ ID NO: 2075289 - RNA, 19 nt, Artificial Sequence
  Description of Artificial Sequence: Synthetic oligonucleotide
cccuggcuaaggaaguagg

SEQ ID NO: 2075290 - RNA, 19 nt, Artificial Sequence
  Description of Artificial Sequence: Synthetic oligonucleotide
cauuugccucuagaggcug

SEQ ID NO: 2075291 - RNA, 19 nt, Artificial Sequence
  Description of Artificial Sequence: Synthetic oligonucleotide
ccuugaggcacacggcggg

SEQ ID NO: 2075292 - RNA, 19 nt, Artificial Sequence
  Description of Artificial Sequence: Synthetic oligonucleotide
ucuuugagucugccacuuu

SEQ ID NO: 2075293 - RNA, 19 nt, Artificial Sequence
  Description of Artificial Sequence: Synthetic oligonucleotide
cugaguccucccacgugac

SEQ ID NO: 2075294 - RNA, 19 nt, Artificial Sequence
  Description of Artificial Sequence: Synthetic oligonucleotide
auccacgcccaggacgcac

SEQ ID NO: 2075295 - RNA, 19 nt, Artificial Sequence
  Description of Artificial Sequence: Synthetic oligonucleotide
gcgacagcggcccguauug

SEQ ID NO: 2075296 - RNA, 19 nt, Artificial Sequence
  Description of Artificial Sequence: Synthetic oligonucleotide
caagcaccgggccccggcc

SEQ ID NO: 2075297 - RNA, 19 nt, Artificial Sequence
  Description of Artificial Sequence: Synthetic oligonucleotide
ugccucagcgacagcccac

SEQ ID NO: 2075298 - RNA, 19 nt, Artificial Sequence
  Description of Artificial Sequence: Synthetic oligonucleotide
cuggaaagcgcuguugcaa

SEQ ID NO: 2075299 - RNA, 19 nt, Artificial Sequence
  Description of Artificial Sequence: Synthetic oligonucleotide
gcauacuguaucagccccg

SEQ ID NO: 2075300 - RNA, 19 nt, Artificial Sequence
  Description of Artificial Sequence: Synthetic oligonucleotide
gaaaacagccucucccguu

SEQ ID NO: 2075301 - RNA, 19 nt, Artificial Sequence
  Description of Artificial Sequence: Synthetic oligonucleotide
gagaucagguuuggagaca

SEQ ID NO: 2075302 - RNA, 19 nt, Artificial Sequence
  Description of Artificial Sequence: Synthetic oligonucleotide
ucagccccgcagcuguauc

SEQ ID NO: 2075303 - RNA, 19 nt, Artificial Sequence
  Description of Artificial Sequence: Synthetic oligonucleotide
acgcgcccaagcaugcugg

SEQ ID NO: 2075304 - RNA, 19 nt, Artificial Sequence
  Description of Artificial Sequence: Synthetic oligonucleotide
caccuccaucccuggaaag

SEQ ID NO: 2075305 - RNA, 19 nt, Artificial Sequence
  Description of Artificial Sequence: Synthetic oligonucleotide
ggacgcacggcuccuugag

SEQ ID NO: 2075306 - RNA, 19 nt, Artificial Sequence
  Description of Artificial Sequence: Synthetic oligonucleotide
cuggugcccucucuucuug

SEQ ID NO: 2075307 - RNA, 19 nt, Artificial Sequence
  Description of Artificial Sequence: Synthetic oligonucleotide
uguugcaaucgagccuggu

SEQ ID NO: 2075308 - RNA, 19 nt, Artificial Sequence
  Description of Artificial Sequence: Synthetic oligonucleotide
cagaauguccaaagcccaa

SEQ ID NO: 2075309 - RNA, 19 nt, Artificial Sequence
  Description of Artificial Sequence: Synthetic oligonucleotide
ggaucugcaggcggcaggc

SEQ ID NO: 2075310 - RNA, 19 nt, Artificial Sequence
  Description of Artificial Sequence: Synthetic oligonucleotide
uuccucaaccaggcuuuug

SEQ ID NO: 2075311 - RNA, 19 nt, Artificial Sequence
  Description of Artificial Sequence: Synthetic oligonucleotide
cucagcggcugaguccucc

SEQ ID NO: 2075312 - RNA, 19 nt, Artificial Sequence
  Description of Artificial Sequence: Synthetic oligonucleotide
uggugcccucucuucuuga

SEQ ID NO: 2075313 - RNA, 19 nt, Artificial Sequence
  Description of Artificial Sequence: Synthetic oligonucleotide
uuugccucuagaggcuguu

SEQ ID NO: 2075314 - RNA, 19 nt, Artificial Sequence
  Description of Artificial Sequence: Synthetic oligonucleotide
aggacgcacggcuccuuga

SEQ ID NO: 2075315 - RNA, 19 nt, Artificial Sequence
  Description of Artificial Sequence: Synthetic oligonucleotide
gugcccucucuucuugaac

SEQ ID NO: 2075316 - RNA, 19 nt, Artificial Sequence
  Description of Artificial Sequence: Synthetic oligonucleotide
aacagauggcguagaccau

SEQ ID NO: 2075317 - RNA, 19 nt, Artificial Sequence
  Description of Artificial Sequence: Synthetic oligonucleotide
gccucuagaggcuguuggc

SEQ ID NO: 2075318 - RNA, 19 nt, Artificial Sequence
  Description of Artificial Sequence: Synthetic oligonucleotide
ugggaucuggugcccucuc

SEQ ID NO: 2075319 - RNA, 19 nt, Artificial Sequence
  Description of Artificial Sequence: Synthetic oligonucleotide
ggaaguaggaugugauccu

SEQ ID NO: 2075320 - RNA, 19 nt, Artificial Sequence
  Description of Artificial Sequence: Synthetic oligonucleotide
uugccucuagaggcuguug

SEQ ID NO: 2075321 - RNA, 19 nt, Artificial Sequence
  Description of Artificial Sequence: Synthetic oligonucleotide
acacacacacacacacaca

SEQ ID NO: 2075322 - RNA, 19 nt, Artificial Sequence
  Description of Artificial Sequence: Synthetic oligonucleotide
ccuacagugucuacaaaua

SEQ ID NO: 2075323 - RNA, 19 nt, Artificial Sequence
  Description of Artificial Sequence: Synthetic oligonucleotide
gauccaacgcauacuguau

SEQ ID NO: 2075324 - RNA, 19 nt, Artificial Sequence
  Description of Artificial Sequence: Synthetic oligonucleotide
acacacacacacacauaga

SEQ ID NO: 2075325 - RNA, 19 nt, Artificial Sequence
  Description of Artificial Sequence: Synthetic oligonucleotide
gaggggcggauucacacau

SEQ ID NO: 2075326 - RNA, 19 nt, Artificial Sequence
  Description of Artificial Sequence: Synthetic oligonucleotide
guuguacuugacgcgccca

SEQ ID NO: 2075327 - RNA, 19 nt, Artificial Sequence
  Description of Artificial Sequence: Synthetic oligonucleotide
caaucgagccugguauguc

SEQ ID NO: 2075328 - RNA, 19 nt, Artificial Sequence
  Description of Artificial Sequence: Synthetic oligonucleotide
cacgggguccacguguuuc

SEQ ID NO: 2075329 - RNA, 19 nt, Artificial Sequence
  Description of Artificial Sequence: Synthetic oligonucleotide
gggaucauugggauagcca

SEQ ID NO: 2075330 - RNA, 19 nt, Artificial Sequence
  Description of Artificial Sequence: Synthetic oligonucleotide
gccucuagaucugccaggc

SEQ ID NO: 2075331 - RNA, 19 nt, Artificial Sequence
  Description of Artificial Sequence: Synthetic oligonucleotide
cauagaaggguggcucaca

SEQ ID NO: 2075332 - RNA, 19 nt, Artificial Sequence
  Description of Artificial Sequence: Synthetic oligonucleotide
ccagcugaaccggacaaac

SEQ ID NO: 2075333 - RNA, 19 nt, Artificial Sequence
  Description of Artificial Sequence: Synthetic oligonucleotide
guaucaugggacagggagu

SEQ ID NO: 2075334 - RNA, 19 nt, Artificial Sequence
  Description of Artificial Sequence: Synthetic oligonucleotide
cgcccaagcaugcugguag

SEQ ID NO: 2075335 - RNA, 19 nt, Artificial Sequence
  Description of Artificial Sequence: Synthetic oligonucleotide
guaugucucuggcauuccu

SEQ ID NO: 2075336 - RNA, 19 nt, Artificial Sequence
  Description of Artificial Sequence: Synthetic oligonucleotide
acacccugauccaacgcau

SEQ ID NO: 2075337 - RNA, 19 nt, Artificial Sequence
  Description of Artificial Sequence: Synthetic oligonucleotide
gagggcccuggcuaaggaa

SEQ ID NO: 2075338 - RNA, 19 nt, Artificial Sequence
  Description of Artificial Sequence: Synthetic oligonucleotide
cagcuuuaauucccaagua

SEQ ID NO: 2075339 - RNA, 19 nt, Artificial Sequence
  Description of Artificial Sequence: Synthetic oligonucleotide
ggcuaaggaaguaggaugu

SEQ ID NO: 2075340 - RNA, 19 nt, Artificial Sequence
  Description of Artificial Sequence: Synthetic oligonucleotide
gcggguacaggagagcuca

SEQ ID NO: 2075341 - RNA, 19 nt, Artificial Sequence
  Description of Artificial Sequence: Synthetic oligonucleotide
ggaaagcgcuguugcaauc

SEQ ID NO: 2075342 - RNA, 19 nt, Artificial Sequence
  Description of Artificial Sequence: Synthetic oligonucleotide
cgugacaccuucagccucc

SEQ ID NO: 2075343 - RNA, 19 nt, Artificial Sequence
  Description of Artificial Sequence: Synthetic oligonucleotide
caggacgcacggcuccuug

SEQ ID NO: 2075344 - RNA, 19 nt, Artificial Sequence
  Description of Artificial Sequence: Synthetic oligonucleotide
gcacacggcggguacagga

SEQ ID NO: 2075345 - RNA, 19 nt, Artificial Sequence
  Description of Artificial Sequence: Synthetic oligonucleotide
ggcggcaggccugagggcc

SEQ ID NO: 2075346 - RNA, 19 nt, Artificial Sequence
  Description of Artificial Sequence: Synthetic oligonucleotide
gggauagccagagccauaa

SEQ ID NO: 2075347 - RNA, 19 nt, Artificial Sequence
  Description of Artificial Sequence: Synthetic oligonucleotide
guagaccauggggccaagc

SEQ ID NO: 2075348 - RNA, 19 nt, Artificial Sequence
  Description of Artificial Sequence: Synthetic oligonucleotide
agccaaacacgggguccac

SEQ ID NO: 2075349 - RNA, 19 nt, Artificial Sequence
  Description of Artificial Sequence: Synthetic oligonucleotide
gcccucucuucuugaacag

SEQ ID NO: 2075350 - RNA, 19 nt, Artificial Sequence
  Description of Artificial Sequence: Synthetic oligonucleotide
ucgcuccuggaaguaccug

SEQ ID NO: 2075351 - RNA, 19 nt, Artificial Sequence
  Description of Artificial Sequence: Synthetic oligonucleotide
cccguauuguccuucucca

SEQ ID NO: 2075352 - RNA, 19 nt, Artificial Sequence
  Description of Artificial Sequence: Synthetic oligonucleotide
gcuaaggaaguaggaugug

SEQ ID NO: 2075353 - RNA, 19 nt, Artificial Sequence
  Description of Artificial Sequence: Synthetic oligonucleotide
uugaggcacacggcgggua

SEQ ID NO: 2075354 - RNA, 19 nt, Artificial Sequence
  Description of Artificial Sequence: Synthetic oligonucleotide
gaucugcaggcggcaggcc

SEQ ID NO: 2075355 - RNA, 19 nt, Artificial Sequence
  Description of Artificial Sequence: Synthetic oligonucleotide
caacccacaaagucuccgu

SEQ ID NO: 2075356 - RNA, 19 nt, Artificial Sequence
  Description of Artificial Sequence: Synthetic oligonucleotide
ccauuuucgaaaacagccu

SEQ ID NO: 2075357 - RNA, 19 nt, Artificial Sequence
  Description of Artificial Sequence: Synthetic oligonucleotide
gguaugucucuggcauucc

SEQ ID NO: 2075358 - RNA, 19 nt, Artificial Sequence
  Description of Artificial Sequence: Synthetic oligonucleotide
acggcuccuugaggcacac

SEQ ID NO: 2075359 - RNA, 19 nt, Artificial Sequence
  Description of Artificial Sequence: Synthetic oligonucleotide
gcucaggcgacagcggccc

SEQ ID NO: 2075360 - RNA, 19 nt, Artificial Sequence
  Description of Artificial Sequence: Synthetic oligonucleotide
ccguauuguccuucuccag

SEQ ID NO: 2075361 - RNA, 19 nt, Artificial Sequence
  Description of Artificial Sequence: Synthetic oligonucleotide
cuguaucaugggacaggga

SEQ ID NO: 2075362 - RNA, 19 nt, Artificial Sequence
  Description of Artificial Sequence: Synthetic oligonucleotide
aucccuggaaagcgcuguu

SEQ ID NO: 2075363 - RNA, 19 nt, Artificial Sequence
  Description of Artificial Sequence: Synthetic oligonucleotide
cuggcuaaggaaguaggau

SEQ ID NO: 2075364 - RNA, 19 nt, Artificial Sequence
  Description of Artificial Sequence: Synthetic oligonucleotide
cccacgugacaccuucagc

SEQ ID NO: 2075365 - RNA, 19 nt, Artificial Sequence
  Description of Artificial Sequence: Synthetic oligonucleotide
cacgugacaccuucagccu

SEQ ID NO: 2075366 - RNA, 19 nt, Artificial Sequence
  Description of Artificial Sequence: Synthetic oligonucleotide
cuucacagcuuggucucga

SEQ ID NO: 2075367 - RNA, 19 nt, Artificial Sequence
  Description of Artificial Sequence: Synthetic oligonucleotide
ccuggcuaaggaaguagga

SEQ ID NO: 2075368 - RNA, 19 nt, Artificial Sequence
  Description of Artificial Sequence: Synthetic oligonucleotide
ggucucgagccaccuuggc

SEQ ID NO: 2075369 - RNA, 19 nt, Artificial Sequence
  Description of Artificial Sequence: Synthetic oligonucleotide
cuugggcugugcuccagcu

SEQ ID NO: 2075370 - RNA, 19 nt, Artificial Sequence
  Description of Artificial Sequence: Synthetic oligonucleotide
ccacguguuuccucaacca

SEQ ID NO: 2075371 - RNA, 19 nt, Artificial Sequence
  Description of Artificial Sequence: Synthetic oligonucleotide
cagccccgcagcuguauca

SEQ ID NO: 2075372 - RNA, 19 nt, Artificial Sequence
  Description of Artificial Sequence: Synthetic oligonucleotide
gggugacauucacacccug

SEQ ID NO: 2075373 - RNA, 19 nt, Artificial Sequence
  Description of Artificial Sequence: Synthetic oligonucleotide
gccaaacacgggguccacg

SEQ ID NO: 2075374 - RNA, 19 nt, Artificial Sequence
  Description of Artificial Sequence: Synthetic oligonucleotide
uaucagccccgcagcugua

SEQ ID NO: 2075375 - RNA, 19 nt, Artificial Sequence
  Description of Artificial Sequence: Synthetic oligonucleotide
gcccuggcuaaggaaguag

SEQ ID NO: 2075376 - RNA, 19 nt, Artificial Sequence
  Description of Artificial Sequence: Synthetic oligonucleotide
acacacacacacacacaua

SEQ ID NO: 2075377 - RNA, 19 nt, Artificial Sequence
  Description of Artificial Sequence: Synthetic oligonucleotide
gguagagaucagguuugga

SEQ ID NO: 2075378 - RNA, 19 nt, Artificial Sequence
  Description of Artificial Sequence: Synthetic oligonucleotide
cugauccaacgcauacugu

SEQ ID NO: 2075379 - RNA, 19 nt, Artificial Sequence
  Description of Artificial Sequence: Synthetic oligonucleotide
caguaacagauggcguaga

SEQ ID NO: 2075380 - RNA, 19 nt, Artificial Sequence
  Description of Artificial Sequence: Synthetic oligonucleotide
ccucuagaucugccaggcg

SEQ ID NO: 2075381 - RNA, 19 nt, Artificial Sequence
  Description of Artificial Sequence: Synthetic oligonucleotide
ccaagcaccgggccccggc

SEQ ID NO: 2075382 - RNA, 19 nt, Artificial Sequence
  Description of Artificial Sequence: Synthetic oligonucleotide
ugacgcgcccaagcaugcu

SEQ ID NO: 2075383 - RNA, 19 nt, Artificial Sequence
  Description of Artificial Sequence: Synthetic oligonucleotide
ggucuuugagucugccacu

SEQ ID NO: 2075384 - RNA, 19 nt, Artificial Sequence
  Description of Artificial Sequence: Synthetic oligonucleotide
gaggcacacggcggguaca

SEQ ID NO: 2075385 - RNA, 19 nt, Artificial Sequence
  Description of Artificial Sequence: Synthetic oligonucleotide
cacggcuccuugaggcaca

SEQ ID NO: 2075386 - RNA, 19 nt, Artificial Sequence
  Description of Artificial Sequence: Synthetic oligonucleotide
agccccgcagcuguaucau

SEQ ID NO: 2075387 - RNA, 19 nt, Artificial Sequence
  Description of Artificial Sequence: Synthetic oligonucleotide
ccuggaaagcgcuguugca

SEQ ID NO: 2075388 - RNA, 19 nt, Artificial Sequence
  Description of Artificial Sequence: Synthetic oligonucleotide
aucagccccgcagcuguau

SEQ ID NO: 2075389 - RNA, 19 nt, Artificial Sequence
  Description of Artificial Sequence: Synthetic oligonucleotide
gugauccuuccaggcugcc

SEQ ID NO: 2075390 - RNA, 19 nt, Artificial Sequence
  Description of Artificial Sequence: Synthetic oligonucleotide
gggaguugagguuguacuu

SEQ ID NO: 2075391 - RNA, 19 nt, Artificial Sequence
  Description of Artificial Sequence: Synthetic oligonucleotide
gacagggaguugagguugu

SEQ ID NO: 2075392 - RNA, 19 nt, Artificial Sequence
  Description of Artificial Sequence: Synthetic oligonucleotide
ccaucccuggaaagcgcug

SEQ ID NO: 2075393 - RNA, 19 nt, Artificial Sequence
  Description of Artificial Sequence: Synthetic oligonucleotide
cucgagccaccuuggcaaa

SEQ ID NO: 2075394 - RNA, 19 nt, Artificial Sequence
  Description of Artificial Sequence: Synthetic oligonucleotide
uccucccacgugacaccuu

SEQ ID NO: 2075395 - RNA, 19 nt, Artificial Sequence
  Description of Artificial Sequence: Synthetic oligonucleotide
caucccuggaaagcgcugu

SEQ ID NO: 2075396 - RNA, 19 nt, Artificial Sequence
  Description of Artificial Sequence: Synthetic oligonucleotide
cucgcuccuggaaguaccu

SEQ ID NO: 2075397 - RNA, 19 nt, Artificial Sequence
  Description of Artificial Sequence: Synthetic oligonucleotide
gagccaccuuggcaaagau

SEQ ID NO: 2075398 - RNA, 19 nt, Artificial Sequence
  Description of Artificial Sequence: Synthetic oligonucleotide
ccaagcaugcugguagaga

SEQ ID NO: 2075399 - RNA, 19 nt, Artificial Sequence
  Description of Artificial Sequence: Synthetic oligonucleotide
cacccugauccaacgcaua

SEQ ID NO: 2075400 - RNA, 19 nt, Artificial Sequence
  Description of Artificial Sequence: Synthetic oligonucleotide
gggcggauucacacauuug

SEQ ID NO: 2075401 - RNA, 19 nt, Artificial Sequence
  Description of Artificial Sequence: Synthetic oligonucleotide
cucccacgugacaccuuca

SEQ ID NO: 2075402 - RNA, 19 nt, Artificial Sequence
  Description of Artificial Sequence: Synthetic oligonucleotide
gucuuugagucugccacuu

SEQ ID NO: 2075403 - RNA, 19 nt, Artificial Sequence
  Description of Artificial Sequence: Synthetic oligonucleotide
cccgcuucauccacgccca

SEQ ID NO: 2075404 - RNA, 19 nt, Artificial Sequence
  Description of Artificial Sequence: Synthetic oligonucleotide
caggagagcucaggcgaca

SEQ ID NO: 2075405 - RNA, 19 nt, Artificial Sequence
  Description of Artificial Sequence: Synthetic oligonucleotide
cccaagcaugcugguagag

SEQ ID NO: 2075406 - RNA, 19 nt, Artificial Sequence
  Description of Artificial Sequence: Synthetic oligonucleotide
cacgcccaggacgcacggc

SEQ ID NO: 2075407 - RNA, 19 nt, Artificial Sequence
  Description of Artificial Sequence: Synthetic oligonucleotide
cggauucacacauuugccu

SEQ ID NO: 2075408 - RNA, 19 nt, Artificial Sequence
  Description of Artificial Sequence: Synthetic oligonucleotide
ggggcggauucacacauuu

SEQ ID NO: 2075409 - RNA, 19 nt, Artificial Sequence
  Description of Artificial Sequence: Synthetic oligonucleotide
acacgggguccacguguuu

SEQ ID NO: 2075410 - RNA, 19 nt, Artificial Sequence
  Description of Artificial Sequence: Synthetic oligonucleotide
gcccaagcaugcugguaga

SEQ ID NO: 2075411 - RNA, 19 nt, Artificial Sequence
  Description of Artificial Sequence: Synthetic oligonucleotide
gcaaucgagccugguaugu

SEQ ID NO: 2075412 - RNA, 19 nt, Artificial Sequence
  Description of Artificial Sequence: Synthetic oligonucleotide
ggcguagaccauggggcca

SEQ ID NO: 2075413 - RNA, 19 nt, Artificial Sequence
  Description of Artificial Sequence: Synthetic oligonucleotide
guguuuccucaaccaggcu

SEQ ID NO: 2075414 - RNA, 19 nt, Artificial Sequence
  Description of Artificial Sequence: Synthetic oligonucleotide
ccggcccgcuucauccacg

SEQ ID NO: 2075415 - RNA, 19 nt, Artificial Sequence
  Description of Artificial Sequence: Synthetic oligonucleotide
caaguaagaggggcggauu

SEQ ID NO: 2075416 - RNA, 19 nt, Artificial Sequence
  Description of Artificial Sequence: Synthetic oligonucleotide
gaccucgcuccuggaagua

SEQ ID NO: 2075417 - RNA, 19 nt, Artificial Sequence
  Description of Artificial Sequence: Synthetic oligonucleotide
gccuugacugucaccucca

SEQ ID NO: 2075418 - RNA, 19 nt, Artificial Sequence
  Description of Artificial Sequence: Synthetic oligonucleotide
ugcaggcggcaggccugag

SEQ ID NO: 2075419 - RNA, 19 nt, Artificial Sequence
  Description of Artificial Sequence: Synthetic oligonucleotide
ccacgcccaggacgcacgg

SEQ ID NO: 2075420 - RNA, 19 nt, Artificial Sequence
  Description of Artificial Sequence: Synthetic oligonucleotide
cagcggcccguauuguccu

SEQ ID NO: 2075421 - RNA, 19 nt, Artificial Sequence
  Description of Artificial Sequence: Synthetic oligonucleotide
agcggcccguauuguccuu

SEQ ID NO: 2075422 - RNA, 19 nt, Artificial Sequence
  Description of Artificial Sequence: Synthetic oligonucleotide
ggcggguacaggagagcuc

SEQ ID NO: 2075423 - RNA, 19 nt, Artificial Sequence
  Description of Artificial Sequence: Synthetic oligonucleotide
ggcuugggcugugcuccag

SEQ ID NO: 2075424 - RNA, 19 nt, Artificial Sequence
  Description of Artificial Sequence: Synthetic oligonucleotide
gccccgcagcuguaucaug

SEQ ID NO: 2075425 - RNA, 19 nt, Artificial Sequence
  Description of Artificial Sequence: Synthetic oligonucleotide
ccaugcugccucagcgaca

SEQ ID NO: 2075426 - RNA, 19 nt, Artificial Sequence
  Description of Artificial Sequence: Synthetic oligonucleotide
cuuggucucgagccaccuu

SEQ ID NO: 2075427 - RNA, 19 nt, Artificial Sequence
  Description of Artificial Sequence: Synthetic oligonucleotide
gggcaguaacagauggcgu

SEQ ID NO: 2075428 - RNA, 19 nt, Artificial Sequence
  Description of Artificial Sequence: Synthetic oligonucleotide
ccucuagaggcuguuggcu

SEQ ID NO: 2075429 - RNA, 19 nt, Artificial Sequence
  Description of Artificial Sequence: Synthetic oligonucleotide
ggccaagcaccgggccccg

SEQ ID NO: 2075430 - RNA, 19 nt, Artificial Sequence
  Description of Artificial Sequence: Synthetic oligonucleotide
cggcccgcuucauccacgc

SEQ ID NO: 2075431 - RNA, 19 nt, Artificial Sequence
  Description of Artificial Sequence: Synthetic oligonucleotide
ggcgacagcggcccguauu

SEQ ID NO: 2075432 - RNA, 19 nt, Artificial Sequence
  Description of Artificial Sequence: Synthetic oligonucleotide
aggggcggauucacacauu

SEQ ID NO: 2075433 - RNA, 19 nt, Artificial Sequence
  Description of Artificial Sequence: Synthetic oligonucleotide
cccaaguaagaggggcgga

SEQ ID NO: 2075434 - RNA, 19 nt, Artificial Sequence
  Description of Artificial Sequence: Synthetic oligonucleotide
gggagucugcuuuggccuu

SEQ ID NO: 2075435 - RNA, 19 nt, Artificial Sequence
  Description of Artificial Sequence: Synthetic oligonucleotide
gcggcccguauuguccuuc

SEQ ID NO: 2075436 - RNA, 19 nt, Artificial Sequence
  Description of Artificial Sequence: Synthetic oligonucleotide
ccaaguaagaggggcggau

SEQ ID NO: 2075437 - RNA, 19 nt, Artificial Sequence
  Description of Artificial Sequence: Synthetic oligonucleotide
cauccacgcccaggacgca

SEQ ID NO: 2075438 - RNA, 19 nt, Artificial Sequence
  Description of Artificial Sequence: Synthetic oligonucleotide
caggcgacagcggcccgua

SEQ ID NO: 2075439 - RNA, 19 nt, Artificial Sequence
  Description of Artificial Sequence: Synthetic oligonucleotide
cgaaaacagccucucccgu

SEQ ID NO: 2075440 - RNA, 19 nt, Artificial Sequence
  Description of Artificial Sequence: Synthetic oligonucleotide
gugacaccuucagccuccu

SEQ ID NO: 2075441 - RNA, 19 nt, Artificial Sequence
  Description of Artificial Sequence: Synthetic oligonucleotide
cgagccaccuuggcaaaga

SEQ ID NO: 2075442 - RNA, 19 nt, Artificial Sequence
  Description of Artificial Sequence: Synthetic oligonucleotide
ggauagccagagccauaau

SEQ ID NO: 2075443 - RNA, 19 nt, Artificial Sequence
  Description of Artificial Sequence: Synthetic oligonucleotide
gcuuuugucuugggaucau

SEQ ID NO: 2075444 - RNA, 19 nt, Artificial Sequence
  Description of Artificial Sequence: Synthetic oligonucleotide
cgcacggcuccuugaggca

SEQ ID NO: 2075445 - RNA, 19 nt, Artificial Sequence
  Description of Artificial Sequence: Synthetic oligonucleotide
cccugauccaacgcauacu

SEQ ID NO: 2075446 - RNA, 19 nt, Artificial Sequence
  Description of Artificial Sequence: Synthetic oligonucleotide
ccgcuucauccacgcccag

SEQ ID NO: 2075447 - RNA, 19 nt, Artificial Sequence
  Description of Artificial Sequence: Synthetic oligonucleotide
cagccuccuuuuccaggau

SEQ ID NO: 2075448 - RNA, 19 nt, Artificial Sequence
  Description of Artificial Sequence: Synthetic oligonucleotide
accgggccccggcccgcuu

SEQ ID NO: 2075449 - RNA, 19 nt, Artificial Sequence
  Description of Artificial Sequence: Synthetic oligonucleotide
cguagaccauggggccaag

SEQ ID NO: 2075450 - RNA, 19 nt, Artificial Sequence
  Description of Artificial Sequence: Synthetic oligonucleotide
ccgggccccggcccgcuuc

SEQ ID NO: 2075451 - RNA, 19 nt, Artificial Sequence
  Description of Artificial Sequence: Synthetic oligonucleotide
gcgcccaagcaugcuggua

SEQ ID NO: 2075452 - RNA, 19 nt, Artificial Sequence
  Description of Artificial Sequence: Synthetic oligonucleotide
cuccguccuccuccauuuu

SEQ ID NO: 2075453 - RNA, 19 nt, Artificial Sequence
  Description of Artificial Sequence: Synthetic oligonucleotide
ccucagcggcugaguccuc

SEQ ID NO: 2075454 - RNA, 19 nt, Artificial Sequence
  Description of Artificial Sequence: Synthetic oligonucleotide
ccccggcccgcuucaucca

SEQ ID NO: 2075455 - RNA, 19 nt, Artificial Sequence
  Description of Artificial Sequence: Synthetic oligonucleotide
cccaggacgcacggcuccu

SEQ ID NO: 2075456 - RNA, 19 nt, Artificial Sequence
  Description of Artificial Sequence: Synthetic oligonucleotide
cgggccccggcccgcuuca

SEQ ID NO: 2075457 - RNA, 19 nt, Artificial Sequence
  Description of Artificial Sequence: Synthetic oligonucleotide
cgcgcccaagcaugcuggu

SEQ ID NO: 2075458 - RNA, 19 nt, Artificial Sequence
  Description of Artificial Sequence: Synthetic oligonucleotide
cgacagcggcccguauugu

SEQ ID NO: 2075459 - RNA, 19 nt, Artificial Sequence
  Description of Artificial Sequence: Synthetic oligonucleotide
ccaggacgcacggcuccuu

SEQ ID NO: 2075460 - RNA, 19 nt, Artificial Sequence
  Description of Artificial Sequence: Synthetic oligonucleotide
gggccccggcccgcuucau

SEQ ID NO: 2075461 - RNA, 19 nt, Artificial Sequence
  Description of Artificial Sequence: Synthetic oligonucleotide
aaauccaaguccuaacccc

SEQ ID NO: 2075462 - RNA, 19 nt, Artificial Sequence
  Description of Artificial Sequence: Synthetic oligonucleotide
aauaaacugacucaagagu

SEQ ID NO: 2075463 - RNA, 19 nt, Artificial Sequence
  Description of Artificial Sequence: Synthetic oligonucleotide
ucgguuaucucucagaagc

SEQ ID NO: 2075464 - RNA, 19 nt, Artificial Sequence
  Description of Artificial Sequence: Synthetic oligonucleotide
ucauuggugaacaagccgg

SEQ ID NO: 2075465 - RNA, 19 nt, Artificial Sequence
  Description of Artificial Sequence: Synthetic oligonucleotide
uuauaaacuacacuggagu

SEQ ID NO: 2075466 - RNA, 19 nt, Artificial Sequence
  Description of Artificial Sequence: Synthetic oligonucleotide
aauacuagccuuugggaag

SEQ ID NO: 2075467 - RNA, 19 nt, Artificial Sequence
  Description of Artificial Sequence: Synthetic oligonucleotide
aaaacuacuuccucuuggg

SEQ ID NO: 2075468 - RNA, 19 nt, Artificial Sequence
  Description of Artificial Sequence: Synthetic oligonucleotide
ugacuaaaaccuuaaauca

SEQ ID NO: 2075469 - RNA, 19 nt, Artificial Sequence
  Description of Artificial Sequence: Synthetic oligonucleotide
ucaucuuagguucuaaaug

SEQ ID NO: 2075470 - RNA, 19 nt, Artificial Sequence
  Description of Artificial Sequence: Synthetic oligonucleotide
uguguccucuuucugaucg

SEQ ID NO: 2075471 - RNA, 19 nt, Artificial Sequence
  Description of Artificial Sequence: Synthetic oligonucleotide
uaauaauuuacuucaguga

SEQ ID NO: 2075472 - RNA, 19 nt, Artificial Sequence
  Description of Artificial Sequence: Synthetic oligonucleotide
uuucuuucaguaaucaucu

SEQ ID NO: 2075473 - RNA, 19 nt, Artificial Sequence
  Description of Artificial Sequence: Synthetic oligonucleotide
aaaucuucaaauaaacuga

SEQ ID NO: 2075474 - RNA, 19 nt, Artificial Sequence
  Description of Artificial Sequence: Synthetic oligonucleotide
aaaauacuagccuuuggga

SEQ ID NO: 2075475 - RNA, 19 nt, Artificial Sequence
  Description of Artificial Sequence: Synthetic oligonucleotide
gacuccuucucauagaacc

SEQ ID NO: 2075476 - RNA, 19 nt, Artificial Sequence
  Description of Artificial Sequence: Synthetic oligonucleotide
uaaaaugcaugcuuguuug

SEQ ID NO: 2075477 - RNA, 19 nt, Artificial Sequence
  Description of Artificial Sequence: Synthetic oligonucleotide
aaaccuuaaaucaucuuuc

SEQ ID NO: 2075478 - RNA, 19 nt, Artificial Sequence
  Description of Artificial Sequence: Synthetic oligonucleotide
uacaaggauccuaaaaugc

SEQ ID NO: 2075479 - RNA, 19 nt, Artificial Sequence
  Description of Artificial Sequence: Synthetic oligonucleotide
ucuuagguucuaaaugagg

SEQ ID NO: 2075480 - RNA, 19 nt, Artificial Sequence
  Description of Artificial Sequence: Synthetic oligonucleotide
uucucauagaaccaaucgc

SEQ ID NO: 2075481 - RNA, 19 nt, Artificial Sequence
  Description of Artificial Sequence: Synthetic oligonucleotide
aaauacuagccuuugggaa

SEQ ID NO: 2075482 - RNA, 19 nt, Artificial Sequence
  Description of Artificial Sequence: Synthetic oligonucleotide
auaaacugacucaagaguc

SEQ ID NO: 2075483 - RNA, 19 nt, Artificial Sequence
  Description of Artificial Sequence: Synthetic oligonucleotide
gagcagacgucauugaagg

SEQ ID NO: 2075484 - RNA, 19 nt, Artificial Sequence
  Description of Artificial Sequence: Synthetic oligonucleotide
aagugaaccauccucuugu

SEQ ID NO: 2075485 - RNA, 19 nt, Artificial Sequence
  Description of Artificial Sequence: Synthetic oligonucleotide
ucaguaaucaucuuagguu

SEQ ID NO: 2075486 - RNA, 19 nt, Artificial Sequence
  Description of Artificial Sequence: Synthetic oligonucleotide
agagguagacaucuggagg

SEQ ID NO: 2075487 - RNA, 19 nt, Artificial Sequence
  Description of Artificial Sequence: Synthetic oligonucleotide
aagagguagacaucuggag

SEQ ID NO: 2075488 - RNA, 19 nt, Artificial Sequence
  Description of Artificial Sequence: Synthetic oligonucleotide
uucacuuuccaaaacuacu

SEQ ID NO: 2075489 - RNA, 19 nt, Artificial Sequence
  Description of Artificial Sequence: Synthetic oligonucleotide
ucuaaaugagguaaaguuu

SEQ ID NO: 2075490 - RNA, 19 nt, Artificial Sequence
  Description of Artificial Sequence: Synthetic oligonucleotide
gaaccaaucgcucuguuca

SEQ ID NO: 2075491 - RNA, 19 nt, Artificial Sequence
  Description of Artificial Sequence: Synthetic oligonucleotide
cauacucugaagcaugcgg

SEQ ID NO: 2075492 - RNA, 19 nt, Artificial Sequence
  Description of Artificial Sequence: Synthetic oligonucleotide
uuuacuucagugacuaaaa

SEQ ID NO: 2075493 - RNA, 19 nt, Artificial Sequence
  Description of Artificial Sequence: Synthetic oligonucleotide
aucauuggugaacaagccg

SEQ ID NO: 2075494 - RNA, 19 nt, Artificial Sequence
  Description of Artificial Sequence: Synthetic oligonucleotide
ucacuuucgcucaugagcu

SEQ ID NO: 2075495 - RNA, 19 nt, Artificial Sequence
  Description of Artificial Sequence: Synthetic oligonucleotide
uuucguauuccuauuuugu

SEQ ID NO: 2075496 - RNA, 19 nt, Artificial Sequence
  Description of Artificial Sequence: Synthetic oligonucleotide
aaucgcucuguucaucguc

SEQ ID NO: 2075497 - RNA, 19 nt, Artificial Sequence
  Description of Artificial Sequence: Synthetic oligonucleotide
ugcugaucugcucaggaag

SEQ ID NO: 2075498 - RNA, 19 nt, Artificial Sequence
  Description of Artificial Sequence: Synthetic oligonucleotide
uuaauauccuuuucccacc

SEQ ID NO: 2075499 - RNA, 19 nt, Artificial Sequence
  Description of Artificial Sequence: Synthetic oligonucleotide
uuuugguagaggaaaucca

SEQ ID NO: 2075500 - RNA, 19 nt, Artificial Sequence
  Description of Artificial Sequence: Synthetic oligonucleotide
acuaaaaccuuaaaucauc

SEQ ID NO: 2075501 - RNA, 19 nt, Artificial Sequence
  Description of Artificial Sequence: Synthetic oligonucleotide
aguuuauaaacuacacugg

SEQ ID NO: 2075502 - RNA, 19 nt, Artificial Sequence
  Description of Artificial Sequence: Synthetic oligonucleotide
uccugugcuacaaggaucc

SEQ ID NO: 2075503 - RNA, 19 nt, Artificial Sequence
  Description of Artificial Sequence: Synthetic oligonucleotide
ugugcuacaaggauccuaa

SEQ ID NO: 2075504 - RNA, 19 nt, Artificial Sequence
  Description of Artificial Sequence: Synthetic oligonucleotide
aaugcugaucugcucagga

SEQ ID NO: 2075505 - RNA, 19 nt, Artificial Sequence
  Description of Artificial Sequence: Synthetic oligonucleotide
cuuaaaucaucuuucuuca

SEQ ID NO: 2075506 - RNA, 19 nt, Artificial Sequence
  Description of Artificial Sequence: Synthetic oligonucleotide
aaugcaugcuuguuugccu

SEQ ID NO: 2075507 - RNA, 19 nt, Artificial Sequence
  Description of Artificial Sequence: Synthetic oligonucleotide
ucagucagcacgaauuuaa

SEQ ID NO: 2075508 - RNA, 19 nt, Artificial Sequence
  Description of Artificial Sequence: Synthetic oligonucleotide
cuacaaggauccuaaaaug

SEQ ID NO: 2075509 - RNA, 19 nt, Artificial Sequence
  Description of Artificial Sequence: Synthetic oligonucleotide
aacuacuuccucuuggguu

SEQ ID NO: 2075510 - RNA, 19 nt, Artificial Sequence
  Description of Artificial Sequence: Synthetic oligonucleotide
aaaccaguggucaugguga

SEQ ID NO: 2075511 - RNA, 19 nt, Artificial Sequence
  Description of Artificial Sequence: Synthetic oligonucleotide
aaccuuaaaucaucuuucu

SEQ ID NO: 2075512 - RNA, 19 nt, Artificial Sequence
  Description of Artificial Sequence: Synthetic oligonucleotide
caucuuagguucuaaauga

SEQ ID NO: 2075513 - RNA, 19 nt, Artificial Sequence
  Description of Artificial Sequence: Synthetic oligonucleotide
uuugguccuugucuaauca

SEQ ID NO: 2075514 - RNA, 19 nt, Artificial Sequence
  Description of Artificial Sequence: Synthetic oligonucleotide
uaauuuacuucagugacua

SEQ ID NO: 2075515 - RNA, 19 nt, Artificial Sequence
  Description of Artificial Sequence: Synthetic oligonucleotide
cagacgucauugaaggugg

SEQ ID NO: 2075516 - RNA, 19 nt, Artificial Sequence
  Description of Artificial Sequence: Synthetic oligonucleotide
cuaaaugagguaaaguuua

SEQ ID NO: 2075517 - RNA, 19 nt, Artificial Sequence
  Description of Artificial Sequence: Synthetic oligonucleotide
caaauaaacugacucaaga

SEQ ID NO: 2075518 - RNA, 19 nt, Artificial Sequence
  Description of Artificial Sequence: Synthetic oligonucleotide
uggaguaaugcugaucugc

SEQ ID NO: 2075519 - RNA, 19 nt, Artificial Sequence
  Description of Artificial Sequence: Synthetic oligonucleotide
uuggagcugauucuuaaaa

SEQ ID NO: 2075520 - RNA, 19 nt, Artificial Sequence
  Description of Artificial Sequence: Synthetic oligonucleotide
ucagcgaucccucugccgu

SEQ ID NO: 2075521 - RNA, 19 nt, Artificial Sequence
  Description of Artificial Sequence: Synthetic oligonucleotide
cuuucguauuccuauuuug

SEQ ID NO: 2075522 - RNA, 19 nt, Artificial Sequence
  Description of Artificial Sequence: Synthetic oligonucleotide
agaaccaaucgcucuguuc

SEQ ID NO: 2075523 - RNA, 19 nt, Artificial Sequence
  Description of Artificial Sequence: Synthetic oligonucleotide
uuccaaaacuacuuccucu

SEQ ID NO: 2075524 - RNA, 19 nt, Artificial Sequence
  Description of Artificial Sequence: Synthetic oligonucleotide
ucauagaaccaaucgcucu

SEQ ID NO: 2075525 - RNA, 19 nt, Artificial Sequence
  Description of Artificial Sequence: Synthetic oligonucleotide
uuuugaugucuccugugcu

SEQ ID NO: 2075526 - RNA, 19 nt, Artificial Sequence
  Description of Artificial Sequence: Synthetic oligonucleotide
uagguucuaaaugagguaa

SEQ ID NO: 2075527 - RNA, 19 nt, Artificial Sequence
  Description of Artificial Sequence: Synthetic oligonucleotide
aucaucuuagguucuaaau

SEQ ID NO: 2075528 - RNA, 19 nt, Artificial Sequence
  Description of Artificial Sequence: Synthetic oligonucleotide
aaucaucuuagguucuaaa

SEQ ID NO: 2075529 - RNA, 19 nt, Artificial Sequence
  Description of Artificial Sequence: Synthetic oligonucleotide
aagagucuaauaauuuacu

SEQ ID NO: 2075530 - RNA, 19 nt, Artificial Sequence
  Description of Artificial Sequence: Synthetic oligonucleotide
uccuugucuaaucacuuuc

SEQ ID NO: 2075531 - RNA, 19 nt, Artificial Sequence
  Description of Artificial Sequence: Synthetic oligonucleotide
ucugccgucucgcccaagg

SEQ ID NO: 2075532 - RNA, 19 nt, Artificial Sequence
  Description of Artificial Sequence: Synthetic oligonucleotide
augcuuguuugccugcugg

SEQ ID NO: 2075533 - RNA, 19 nt, Artificial Sequence
  Description of Artificial Sequence: Synthetic oligonucleotide
cauuuucacccacaauucc

SEQ ID NO: 2075534 - RNA, 19 nt, Artificial Sequence
  Description of Artificial Sequence: Synthetic oligonucleotide
ucauugaagguggagcccc

SEQ ID NO: 2075535 - RNA, 19 nt, Artificial Sequence
  Description of Artificial Sequence: Synthetic oligonucleotide
aggguauacaguucaguca

SEQ ID NO: 2075536 - RNA, 19 nt, Artificial Sequence
  Description of Artificial Sequence: Synthetic oligonucleotide
caucauuggugaacaagcc

SEQ ID NO: 2075537 - RNA, 19 nt, Artificial Sequence
  Description of Artificial Sequence: Synthetic oligonucleotide
uucguauuccuauuuuguc

SEQ ID NO: 2075538 - RNA, 19 nt, Artificial Sequence
  Description of Artificial Sequence: Synthetic oligonucleotide
cucugcacggcuuggacag

SEQ ID NO: 2075539 - RNA, 19 nt, Artificial Sequence
  Description of Artificial Sequence: Synthetic oligonucleotide
uaauauccuuuucccacca

SEQ ID NO: 2075540 - RNA, 19 nt, Artificial Sequence
  Description of Artificial Sequence: Synthetic oligonucleotide
ugguccuugucuaaucacu

SEQ ID NO: 2075541 - RNA, 19 nt, Artificial Sequence
  Description of Artificial Sequence: Synthetic oligonucleotide
aaacuacuuccucuugggu

SEQ ID NO: 2075542 - RNA, 19 nt, Artificial Sequence
  Description of Artificial Sequence: Synthetic oligonucleotide
agagucuaauaauuuacuu

SEQ ID NO: 2075543 - RNA, 19 nt, Artificial Sequence
  Description of Artificial Sequence: Synthetic oligonucleotide
caggguauacaguucaguc

SEQ ID NO: 2075544 - RNA, 19 nt, Artificial Sequence
  Description of Artificial Sequence: Synthetic oligonucleotide
uuggugaacaagccggcgu

SEQ ID NO: 2075545 - RNA, 19 nt, Artificial Sequence
  Description of Artificial Sequence: Synthetic oligonucleotide
ugacguggggcagagcugg

SEQ ID NO: 2075546 - RNA, 19 nt, Artificial Sequence
  Description of Artificial Sequence: Synthetic oligonucleotide
agguaaaguuuauaaacua

SEQ ID NO: 2075547 - RNA, 19 nt, Artificial Sequence
  Description of Artificial Sequence: Synthetic oligonucleotide
ugaucgguuaucucucaga

SEQ ID NO: 2075548 - RNA, 19 nt, Artificial Sequence
  Description of Artificial Sequence: Synthetic oligonucleotide
aucggcugggcauuuucac

SEQ ID NO: 2075549 - RNA, 19 nt, Artificial Sequence
  Description of Artificial Sequence: Synthetic oligonucleotide
acuccagcaauaccacagg

SEQ ID NO: 2075550 - RNA, 19 nt, Artificial Sequence
  Description of Artificial Sequence: Synthetic oligonucleotide
uuccccucaucauugguga

SEQ ID NO: 2075551 - RNA, 19 nt, Artificial Sequence
  Description of Artificial Sequence: Synthetic oligonucleotide
ucuuguuacuggcggggcc

SEQ ID NO: 2075552 - RNA, 19 nt, Artificial Sequence
  Description of Artificial Sequence: Synthetic oligonucleotide
gcuacuaaaaucuucaaau

SEQ ID NO: 2075553 - RNA, 19 nt, Artificial Sequence
  Description of Artificial Sequence: Synthetic oligonucleotide
agcuacuaaaaucuucaaa

SEQ ID NO: 2075554 - RNA, 19 nt, Artificial Sequence
  Description of Artificial Sequence: Synthetic oligonucleotide
aguggucauggugaugggc

SEQ ID NO: 2075555 - RNA, 19 nt, Artificial Sequence
  Description of Artificial Sequence: Synthetic oligonucleotide
gaucgguuaucucucagaa

SEQ ID NO: 2075556 - RNA, 19 nt, Artificial Sequence
  Description of Artificial Sequence: Synthetic oligonucleotide
ugaagcaugcgguucccga

SEQ ID NO: 2075557 - RNA, 19 nt, Artificial Sequence
  Description of Artificial Sequence: Synthetic oligonucleotide
aucgcucuguucaucgucc

SEQ ID NO: 2075558 - RNA, 19 nt, Artificial Sequence
  Description of Artificial Sequence: Synthetic oligonucleotide
aauccaaguccuaaccccu

SEQ ID NO: 2075559 - RNA, 19 nt, Artificial Sequence
  Description of Artificial Sequence: Synthetic oligonucleotide
guaaugcugaucugcucag

SEQ ID NO: 2075560 - RNA, 19 nt, Artificial Sequence
  Description of Artificial Sequence: Synthetic oligonucleotide
uccuaaaaugcaugcuugu

SEQ ID NO: 2075561 - RNA, 19 nt, Artificial Sequence
  Description of Artificial Sequence: Synthetic oligonucleotide
uucgcucaugagcucaucu

SEQ ID NO: 2075562 - RNA, 19 nt, Artificial Sequence
  Description of Artificial Sequence: Synthetic oligonucleotide
caugagcucaucugaguac

SEQ ID NO: 2075563 - RNA, 19 nt, Artificial Sequence
  Description of Artificial Sequence: Synthetic oligonucleotide
ucuuucguauuccuauuuu

SEQ ID NO: 2075564 - RNA, 19 nt, Artificial Sequence
  Description of Artificial Sequence: Synthetic oligonucleotide
gaacaagccggcgucagug

SEQ ID NO: 2075565 - RNA, 19 nt, Artificial Sequence
  Description of Artificial Sequence: Synthetic oligonucleotide
uugaagguggagccccucc

SEQ ID NO: 2075566 - RNA, 19 nt, Artificial Sequence
  Description of Artificial Sequence: Synthetic oligonucleotide
uaaaugagguaaaguuuau

SEQ ID NO: 2075567 - RNA, 19 nt, Artificial Sequence
  Description of Artificial Sequence: Synthetic oligonucleotide
gguaaaguuuauaaacuac

SEQ ID NO: 2075568 - RNA, 19 nt, Artificial Sequence
  Description of Artificial Sequence: Synthetic oligonucleotide
cuuguuugccugcuggcug

SEQ ID NO: 2075569 - RNA, 19 nt, Artificial Sequence
  Description of Artificial Sequence: Synthetic oligonucleotide
uccucuuguuacuggcggg

SEQ ID NO: 2075570 - RNA, 19 nt, Artificial Sequence
  Description of Artificial Sequence: Synthetic oligonucleotide
ggagaagugaaccauccuc

SEQ ID NO: 2075571 - RNA, 19 nt, Artificial Sequence
  Description of Artificial Sequence: Synthetic oligonucleotide
cucauagaaccaaucgcuc

SEQ ID NO: 2075572 - RNA, 19 nt, Artificial Sequence
  Description of Artificial Sequence: Synthetic oligonucleotide
uuaucucucagaagcugau

SEQ ID NO: 2075573 - RNA, 19 nt, Artificial Sequence
  Description of Artificial Sequence: Synthetic oligonucleotide
aagccggcgucagugcugc

SEQ ID NO: 2075574 - RNA, 19 nt, Artificial Sequence
  Description of Artificial Sequence: Synthetic oligonucleotide
uucaucguccccuugucuu

SEQ ID NO: 2075575 - RNA, 19 nt, Artificial Sequence
  Description of Artificial Sequence: Synthetic oligonucleotide
cauccucuuguuacuggcg

SEQ ID NO: 2075576 - RNA, 19 nt, Artificial Sequence
  Description of Artificial Sequence: Synthetic oligonucleotide
gaagagguagacaucugga

SEQ ID NO: 2075577 - RNA, 19 nt, Artificial Sequence
  Description of Artificial Sequence: Synthetic oligonucleotide
uguccuuauugguuuggcu

SEQ ID NO: 2075578 - RNA, 19 nt, Artificial Sequence
  Description of Artificial Sequence: Synthetic oligonucleotide
agccuuugggaagagguag

SEQ ID NO: 2075579 - RNA, 19 nt, Artificial Sequence
  Description of Artificial Sequence: Synthetic oligonucleotide
auaauuuacuucagugacu

SEQ ID NO: 2075580 - RNA, 19 nt, Artificial Sequence
  Description of Artificial Sequence: Synthetic oligonucleotide
ucgcucaugagcucaucug

SEQ ID NO: 2075581 - RNA, 19 nt, Artificial Sequence
  Description of Artificial Sequence: Synthetic oligonucleotide
uccucuuucugaucgguua

SEQ ID NO: 2075582 - RNA, 19 nt, Artificial Sequence
  Description of Artificial Sequence: Synthetic oligonucleotide
ugccgucucgcccaaggcc

SEQ ID NO: 2075583 - RNA, 19 nt, Artificial Sequence
  Description of Artificial Sequence: Synthetic oligonucleotide
aucgguuaucucucagaag

SEQ ID NO: 2075584 - RNA, 19 nt, Artificial Sequence
  Description of Artificial Sequence: Synthetic oligonucleotide
caaguccuaaccccuucgg

SEQ ID NO: 2075585 - RNA, 19 nt, Artificial Sequence
  Description of Artificial Sequence: Synthetic oligonucleotide
gagguaaaguuuauaaacu

SEQ ID NO: 2075586 - RNA, 19 nt, Artificial Sequence
  Description of Artificial Sequence: Synthetic oligonucleotide
uggacaggcucagcgaucc

SEQ ID NO: 2075587 - RNA, 19 nt, Artificial Sequence
  Description of Artificial Sequence: Synthetic oligonucleotide
uucuuucguauuccuauuu

SEQ ID NO: 2075588 - RNA, 19 nt, Artificial Sequence
  Description of Artificial Sequence: Synthetic oligonucleotide
augcaugcuuguuugccug

SEQ ID NO: 2075589 - RNA, 19 nt, Artificial Sequence
  Description of Artificial Sequence: Synthetic oligonucleotide
uggugaacaagccggcguc

SEQ ID NO: 2075590 - RNA, 19 nt, Artificial Sequence
  Description of Artificial Sequence: Synthetic oligonucleotide
gauccuaaaaugcaugcuu

SEQ ID NO: 2075591 - RNA, 19 nt, Artificial Sequence
  Description of Artificial Sequence: Synthetic oligonucleotide
agucagcacgaauuuaaaa

SEQ ID NO: 2075592 - RNA, 19 nt, Artificial Sequence
  Description of Artificial Sequence: Synthetic oligonucleotide
aagcuacuaaaaucuucaa

SEQ ID NO: 2075593 - RNA, 19 nt, Artificial Sequence
  Description of Artificial Sequence: Synthetic oligonucleotide
agggcuaaaccagugguca

SEQ ID NO: 2075594 - RNA, 19 nt, Artificial Sequence
  Description of Artificial Sequence: Synthetic oligonucleotide
accccuucggccucugcac

SEQ ID NO: 2075595 - RNA, 19 nt, Artificial Sequence
  Description of Artificial Sequence: Synthetic oligonucleotide
ucggcugggcauuuucacc

SEQ ID NO: 2075596 - RNA, 19 nt, Artificial Sequence
  Description of Artificial Sequence: Synthetic oligonucleotide
acugcuggagucacuuucg

SEQ ID NO: 2075597 - RNA, 19 nt, Artificial Sequence
  Description of Artificial Sequence: Synthetic oligonucleotide
ucguggggagaagugaacc

SEQ ID NO: 2075598 - RNA, 19 nt, Artificial Sequence
  Description of Artificial Sequence: Synthetic oligonucleotide
cuacuaaaaucuucaaaua

SEQ ID NO: 2075599 - RNA, 19 nt, Artificial Sequence
  Description of Artificial Sequence: Synthetic oligonucleotide
acaauuccugcugcugugg

SEQ ID NO: 2075600 - RNA, 19 nt, Artificial Sequence
  Description of Artificial Sequence: Synthetic oligonucleotide
agucacuuucgcucaugag

SEQ ID NO: 2075601 - RNA, 19 nt, Artificial Sequence
  Description of Artificial Sequence: Synthetic oligonucleotide
uuaaaucaucuuucuucau

SEQ ID NO: 2075602 - RNA, 19 nt, Artificial Sequence
  Description of Artificial Sequence: Synthetic oligonucleotide
uugguccuugucuaaucac

SEQ ID NO: 2075603 - RNA, 19 nt, Artificial Sequence
  Description of Artificial Sequence: Synthetic oligonucleotide
agggcaaaggcgcagcuuu

SEQ ID NO: 2075604 - RNA, 19 nt, Artificial Sequence
  Description of Artificial Sequence: Synthetic oligonucleotide
auuccuauuuuguccuuau

SEQ ID NO: 2075605 - RNA, 19 nt, Artificial Sequence
  Description of Artificial Sequence: Synthetic oligonucleotide
uugcucucuaggaucggcu

SEQ ID NO: 2075606 - RNA, 19 nt, Artificial Sequence
  Description of Artificial Sequence: Synthetic oligonucleotide
cuagccuuugggaagaggu

SEQ ID NO: 2075607 - RNA, 19 nt, Artificial Sequence
  Description of Artificial Sequence: Synthetic oligonucleotide
uuguuugccugcuggcugu

SEQ ID NO: 2075608 - RNA, 19 nt, Artificial Sequence
  Description of Artificial Sequence: Synthetic oligonucleotide
agguagacaucuggagggc

SEQ ID NO: 2075609 - RNA, 19 nt, Artificial Sequence
  Description of Artificial Sequence: Synthetic oligonucleotide
guuuggcucauuucuucac

SEQ ID NO: 2075610 - RNA, 19 nt, Artificial Sequence
  Description of Artificial Sequence: Synthetic oligonucleotide
augcgguucccgauguugc

SEQ ID NO: 2075611 - RNA, 19 nt, Artificial Sequence
  Description of Artificial Sequence: Synthetic oligonucleotide
uaaugcugaucugcucagg

SEQ ID NO: 2075612 - RNA, 19 nt, Artificial Sequence
  Description of Artificial Sequence: Synthetic oligonucleotide
uguccagcccauacucuga

SEQ ID NO: 2075613 - RNA, 19 nt, Artificial Sequence
  Description of Artificial Sequence: Synthetic oligonucleotide
guagacaucuggagggcag

SEQ ID NO: 2075614 - RNA, 19 nt, Artificial Sequence
  Description of Artificial Sequence: Synthetic oligonucleotide
cuagccccagggcuaaacc

SEQ ID NO: 2075615 - RNA, 19 nt, Artificial Sequence
  Description of Artificial Sequence: Synthetic oligonucleotide
gacucaagagucuaauaau

SEQ ID NO: 2075616 - RNA, 19 nt, Artificial Sequence
  Description of Artificial Sequence: Synthetic oligonucleotide
ccaaucgcucuguucaucg

SEQ ID NO: 2075617 - RNA, 19 nt, Artificial Sequence
  Description of Artificial Sequence: Synthetic oligonucleotide
aaccauccucuuguuacug

SEQ ID NO: 2075618 - RNA, 19 nt, Artificial Sequence
  Description of Artificial Sequence: Synthetic oligonucleotide
acucaagagucuaauaauu

SEQ ID NO: 2075619 - RNA, 19 nt, Artificial Sequence
  Description of Artificial Sequence: Synthetic oligonucleotide
aaacugacucaagagucua

SEQ ID NO: 2075620 - RNA, 19 nt, Artificial Sequence
  Description of Artificial Sequence: Synthetic oligonucleotide
uuugccugcuggcuguuuu

SEQ ID NO: 2075621 - RNA, 19 nt, Artificial Sequence
  Description of Artificial Sequence: Synthetic oligonucleotide
gcuaaaccaguggucaugg

SEQ ID NO: 2075622 - RNA, 19 nt, Artificial Sequence
  Description of Artificial Sequence: Synthetic oligonucleotide
cuuucugaucgguuaucuc

SEQ ID NO: 2075623 - RNA, 19 nt, Artificial Sequence
  Description of Artificial Sequence: Synthetic oligonucleotide
gguucuaaaugagguaaag

SEQ ID NO: 2075624 - RNA, 19 nt, Artificial Sequence
  Description of Artificial Sequence: Synthetic oligonucleotide
uacuggcggggccaggagc

SEQ ID NO: 2075625 - RNA, 19 nt, Artificial Sequence
  Description of Artificial Sequence: Synthetic oligonucleotide
gcagacgucauugaaggug

SEQ ID NO: 2075626 - RNA, 19 nt, Artificial Sequence
  Description of Artificial Sequence: Synthetic oligonucleotide
gacgucauugaagguggag

SEQ ID NO: 2075627 - RNA, 19 nt, Artificial Sequence
  Description of Artificial Sequence: Synthetic oligonucleotide
cuccugugcuacaaggauc

SEQ ID NO: 2075628 - RNA, 19 nt, Artificial Sequence
  Description of Artificial Sequence: Synthetic oligonucleotide
ggagcagacgucauugaag

SEQ ID NO: 2075629 - RNA, 19 nt, Artificial Sequence
  Description of Artificial Sequence: Synthetic oligonucleotide
gcuacaaggauccuaaaau

SEQ ID NO: 2075630 - RNA, 19 nt, Artificial Sequence
  Description of Artificial Sequence: Synthetic oligonucleotide
ugaugggcgucguggggag

SEQ ID NO: 2075631 - RNA, 19 nt, Artificial Sequence
  Description of Artificial Sequence: Synthetic oligonucleotide
gagucacuuucgcucauga

SEQ ID NO: 2075632 - RNA, 19 nt, Artificial Sequence
  Description of Artificial Sequence: Synthetic oligonucleotide
acuuucgcucaugagcuca

SEQ ID NO: 2075633 - RNA, 19 nt, Artificial Sequence
  Description of Artificial Sequence: Synthetic oligonucleotide
cucgguccuagccccaggg

SEQ ID NO: 2075634 - RNA, 19 nt, Artificial Sequence
  Description of Artificial Sequence: Synthetic oligonucleotide
cucagcgaucccucugccg

SEQ ID NO: 2075635 - RNA, 19 nt, Artificial Sequence
  Description of Artificial Sequence: Synthetic oligonucleotide
uaucucucagaagcugaug

SEQ ID NO: 2075636 - RNA, 19 nt, Artificial Sequence
  Description of Artificial Sequence: Synthetic oligonucleotide
ccagcccauacucugaagc

SEQ ID NO: 2075637 - RNA, 19 nt, Artificial Sequence
  Description of Artificial Sequence: Synthetic oligonucleotide
ugacuccuucucauagaac

SEQ ID NO: 2075638 - RNA, 19 nt, Artificial Sequence
  Description of Artificial Sequence: Synthetic oligonucleotide
caggaaggcuuuccugacg

SEQ ID NO: 2075639 - RNA, 19 nt, Artificial Sequence
  Description of Artificial Sequence: Synthetic oligonucleotide
agcucaucugaguacuuuu

SEQ ID NO: 2075640 - RNA, 19 nt, Artificial Sequence
  Description of Artificial Sequence: Synthetic oligonucleotide
uccuucucauagaaccaau

SEQ ID NO: 2075641 - RNA, 19 nt, Artificial Sequence
  Description of Artificial Sequence: Synthetic oligonucleotide
uccaaguccuaaccccuuc

SEQ ID NO: 2075642 - RNA, 19 nt, Artificial Sequence
  Description of Artificial Sequence: Synthetic oligonucleotide
uaaucaucuuagguucuaa

SEQ ID NO: 2075643 - RNA, 19 nt, Artificial Sequence
  Description of Artificial Sequence: Synthetic oligonucleotide
uuacuggcggggccaggag

SEQ ID NO: 2075644 - RNA, 19 nt, Artificial Sequence
  Description of Artificial Sequence: Synthetic oligonucleotide
acugacucaagagucuaau

SEQ ID NO: 2075645 - RNA, 19 nt, Artificial Sequence
  Description of Artificial Sequence: Synthetic oligonucleotide
gaguaaugcugaucugcuc

SEQ ID NO: 2075646 - RNA, 19 nt, Artificial Sequence
  Description of Artificial Sequence: Synthetic oligonucleotide
uuggcucauuucuucacuu

SEQ ID NO: 2075647 - RNA, 19 nt, Artificial Sequence
  Description of Artificial Sequence: Synthetic oligonucleotide
uauuccuauuuuguccuua

SEQ ID NO: 2075648 - RNA, 19 nt, Artificial Sequence
  Description of Artificial Sequence: Synthetic oligonucleotide
aaccaaucgcucuguucau

SEQ ID NO: 2075649 - RNA, 19 nt, Artificial Sequence
  Description of Artificial Sequence: Synthetic oligonucleotide
ucaucguccccuugucuuc

SEQ ID NO: 2075650 - RNA, 19 nt, Artificial Sequence
  Description of Artificial Sequence: Synthetic oligonucleotide
auacuagccuuugggaaga

SEQ ID NO: 2075651 - RNA, 19 nt, Artificial Sequence
  Description of Artificial Sequence: Synthetic oligonucleotide
cuaaaaugcaugcuuguuu

SEQ ID NO: 2075652 - RNA, 19 nt, Artificial Sequence
  Description of Artificial Sequence: Synthetic oligonucleotide
cugaucgguuaucucucag

SEQ ID NO: 2075653 - RNA, 19 nt, Artificial Sequence
  Description of Artificial Sequence: Synthetic oligonucleotide
uacucugaagcaugcgguu

SEQ ID NO: 2075654 - RNA, 19 nt, Artificial Sequence
  Description of Artificial Sequence: Synthetic oligonucleotide
aaccaguggucauggugau

SEQ ID NO: 2075655 - RNA, 19 nt, Artificial Sequence
  Description of Artificial Sequence: Synthetic oligonucleotide
gcugaucugcucaggaagg

SEQ ID NO: 2075656 - RNA, 19 nt, Artificial Sequence
  Description of Artificial Sequence: Synthetic oligonucleotide
auagaaccaaucgcucugu

SEQ ID NO: 2075657 - RNA, 19 nt, Artificial Sequence
  Description of Artificial Sequence: Synthetic oligonucleotide
gacuaaaaccuuaaaucau

SEQ ID NO: 2075658 - RNA, 19 nt, Artificial Sequence
  Description of Artificial Sequence: Synthetic oligonucleotide
gucauugaagguggagccc

SEQ ID NO: 2075659 - RNA, 19 nt, Artificial Sequence
  Description of Artificial Sequence: Synthetic oligonucleotide
cgucauugaagguggagcc

SEQ ID NO: 2075660 - RNA, 19 nt, Artificial Sequence
  Description of Artificial Sequence: Synthetic oligonucleotide
cagggcuaaaccagugguc

SEQ ID NO: 2075661 - RNA, 19 nt, Artificial Sequence
  Description of Artificial Sequence: Synthetic oligonucleotide
cccgauguugcucucuagg

SEQ ID NO: 2075662 - RNA, 19 nt, Artificial Sequence
  Description of Artificial Sequence: Synthetic oligonucleotide
gacccagguguccagccca

SEQ ID NO: 2075663 - RNA, 19 nt, Artificial Sequence
  Description of Artificial Sequence: Synthetic oligonucleotide
accaaucgcucuguucauc

SEQ ID NO: 2075664 - RNA, 19 nt, Artificial Sequence
  Description of Artificial Sequence: Synthetic oligonucleotide
ggcucauuucuucacuuuc

SEQ ID NO: 2075665 - RNA, 19 nt, Artificial Sequence
  Description of Artificial Sequence: Synthetic oligonucleotide
uuggacaggcucagcgauc

SEQ ID NO: 2075666 - RNA, 19 nt, Artificial Sequence
  Description of Artificial Sequence: Synthetic oligonucleotide
auugaagguggagccccuc

SEQ ID NO: 2075667 - RNA, 19 nt, Artificial Sequence
  Description of Artificial Sequence: Synthetic oligonucleotide
augcugaucugcucaggaa

SEQ ID NO: 2075668 - RNA, 19 nt, Artificial Sequence
  Description of Artificial Sequence: Synthetic oligonucleotide
ugaugucuccugugcuaca

SEQ ID NO: 2075669 - RNA, 19 nt, Artificial Sequence
  Description of Artificial Sequence: Synthetic oligonucleotide
cuggagucacuuucgcuca

SEQ ID NO: 2075670 - RNA, 19 nt, Artificial Sequence
  Description of Artificial Sequence: Synthetic oligonucleotide
uguugcucucuaggaucgg

SEQ ID NO: 2075671 - RNA, 19 nt, Artificial Sequence
  Description of Artificial Sequence: Synthetic oligonucleotide
gcucauuucuucacuuucc

SEQ ID NO: 2075672 - RNA, 19 nt, Artificial Sequence
  Description of Artificial Sequence: Synthetic oligonucleotide
cuuguuacuggcggggcca

SEQ ID NO: 2075673 - RNA, 19 nt, Artificial Sequence
  Description of Artificial Sequence: Synthetic oligonucleotide
uucagucagcacgaauuua

SEQ ID NO: 2075674 - RNA, 19 nt, Artificial Sequence
  Description of Artificial Sequence: Synthetic oligonucleotide
ucccgauguugcucucuag

SEQ ID NO: 2075675 - RNA, 19 nt, Artificial Sequence
  Description of Artificial Sequence: Synthetic oligonucleotide
gguuuggcucauuucuuca

SEQ ID NO: 2075676 - RNA, 19 nt, Artificial Sequence
  Description of Artificial Sequence: Synthetic oligonucleotide
ucgcucuguucaucguccc

SEQ ID NO: 2075677 - RNA, 19 nt, Artificial Sequence
  Description of Artificial Sequence: Synthetic oligonucleotide
gugaacaagccggcgucag

SEQ ID NO: 2075678 - RNA, 19 nt, Artificial Sequence
  Description of Artificial Sequence: Synthetic oligonucleotide
uccccuugucuuccccuca

SEQ ID NO: 2075679 - RNA, 19 nt, Artificial Sequence
  Description of Artificial Sequence: Synthetic oligonucleotide
agcagacgucauugaaggu

SEQ ID NO: 2075680 - RNA, 19 nt, Artificial Sequence
  Description of Artificial Sequence: Synthetic oligonucleotide
caagccggcgucagugcug

SEQ ID NO: 2075681 - RNA, 19 nt, Artificial Sequence
  Description of Artificial Sequence: Synthetic oligonucleotide
ccaaguccuaaccccuucg

SEQ ID NO: 2075682 - RNA, 19 nt, Artificial Sequence
  Description of Artificial Sequence: Synthetic oligonucleotide
gaaccauccucuuguuacu

SEQ ID NO: 2075683 - RNA, 19 nt, Artificial Sequence
  Description of Artificial Sequence: Synthetic oligonucleotide
cugacguggggcagagcug

SEQ ID NO: 2075684 - RNA, 19 nt, Artificial Sequence
  Description of Artificial Sequence: Synthetic oligonucleotide
ggcucagcgaucccucugc

SEQ ID NO: 2075685 - RNA, 19 nt, Artificial Sequence
  Description of Artificial Sequence: Synthetic oligonucleotide
cuuggagcugauucuuaaa

SEQ ID NO: 2075686 - RNA, 19 nt, Artificial Sequence
  Description of Artificial Sequence: Synthetic oligonucleotide
aacugacucaagagucuaa

SEQ ID NO: 2075687 - RNA, 19 nt, Artificial Sequence
  Description of Artificial Sequence: Synthetic oligonucleotide
caaggauccuaaaaugcau

SEQ ID NO: 2075688 - RNA, 19 nt, Artificial Sequence
  Description of Artificial Sequence: Synthetic oligonucleotide
gcgucagugcugcugagac

SEQ ID NO: 2075689 - RNA, 19 nt, Artificial Sequence
  Description of Artificial Sequence: Synthetic oligonucleotide
gaucggcugggcauuuuca

SEQ ID NO: 2075690 - RNA, 19 nt, Artificial Sequence
  Description of Artificial Sequence: Synthetic oligonucleotide
aggcucagcgaucccucug

SEQ ID NO: 2075691 - RNA, 19 nt, Artificial Sequence
  Description of Artificial Sequence: Synthetic oligonucleotide
guuacuggcggggccagga

SEQ ID NO: 2075692 - RNA, 19 nt, Artificial Sequence
  Description of Artificial Sequence: Synthetic oligonucleotide
gcuguuuucauggagcagu

SEQ ID NO: 2075693 - RNA, 19 nt, Artificial Sequence
  Description of Artificial Sequence: Synthetic oligonucleotide
ccuucucauagaaccaauc

SEQ ID NO: 2075694 - RNA, 19 nt, Artificial Sequence
  Description of Artificial Sequence: Synthetic oligonucleotide
ccaugcucgguccuagccc

SEQ ID NO: 2075695 - RNA, 19 nt, Artificial Sequence
  Description of Artificial Sequence: Synthetic oligonucleotide
acccacaauuccugcugcu

SEQ ID NO: 2075696 - RNA, 19 nt, Artificial Sequence
  Description of Artificial Sequence: Synthetic oligonucleotide
agguggagccccuccagua

SEQ ID NO: 2075697 - RNA, 19 nt, Artificial Sequence
  Description of Artificial Sequence: Synthetic oligonucleotide
ggcuaaaccaguggucaug

SEQ ID NO: 2075698 - RNA, 19 nt, Artificial Sequence
  Description of Artificial Sequence: Synthetic oligonucleotide
uguuacuggcggggccagg

SEQ ID NO: 2075699 - RNA, 19 nt, Artificial Sequence
  Description of Artificial Sequence: Synthetic oligonucleotide
cugaagcaugcgguucccg

SEQ ID NO: 2075700 - RNA, 19 nt, Artificial Sequence
  Description of Artificial Sequence: Synthetic oligonucleotide
gcucaugagcucaucugag

SEQ ID NO: 2075701 - RNA, 19 nt, Artificial Sequence
  Description of Artificial Sequence: Synthetic oligonucleotide
caguggucauggugauggg

SEQ ID NO: 2075702 - RNA, 19 nt, Artificial Sequence
  Description of Artificial Sequence: Synthetic oligonucleotide
gaagcaugcgguucccgau

SEQ ID NO: 2075703 - RNA, 19 nt, Artificial Sequence
  Description of Artificial Sequence: Synthetic oligonucleotide
uuguguccucuuucugauc

SEQ ID NO: 2075704 - RNA, 19 nt, Artificial Sequence
  Description of Artificial Sequence: Synthetic oligonucleotide
cugagacugcuggagucac

SEQ ID NO: 2075705 - RNA, 19 nt, Artificial Sequence
  Description of Artificial Sequence: Synthetic oligonucleotide
gugaugggcgucgugggga

SEQ ID NO: 2075706 - RNA, 19 nt, Artificial Sequence
  Description of Artificial Sequence: Synthetic oligonucleotide
cugcacggcuuggacaggc

SEQ ID NO: 2075707 - RNA, 19 nt, Artificial Sequence
  Description of Artificial Sequence: Synthetic oligonucleotide
caaggcccgacccaggugu

SEQ ID NO: 2075708 - RNA, 19 nt, Artificial Sequence
  Description of Artificial Sequence: Synthetic oligonucleotide
uggccaugcucgguccuag

SEQ ID NO: 2075709 - RNA, 19 nt, Artificial Sequence
  Description of Artificial Sequence: Synthetic oligonucleotide
cuuugggaagagguagaca

SEQ ID NO: 2075710 - RNA, 19 nt, Artificial Sequence
  Description of Artificial Sequence: Synthetic oligonucleotide
gccaugcucgguccuagcc

SEQ ID NO: 2075711 - RNA, 19 nt, Artificial Sequence
  Description of Artificial Sequence: Synthetic oligonucleotide
cugacucaagagucuaaua

SEQ ID NO: 2075712 - RNA, 19 nt, Artificial Sequence
  Description of Artificial Sequence: Synthetic oligonucleotide
ucugcacggcuuggacagg

SEQ ID NO: 2075713 - RNA, 19 nt, Artificial Sequence
  Description of Artificial Sequence: Synthetic oligonucleotide
guccuaaccccuucggccu

SEQ ID NO: 2075714 - RNA, 19 nt, Artificial Sequence
  Description of Artificial Sequence: Synthetic oligonucleotide
uggagccccuccaguauuu

SEQ ID NO: 2075715 - RNA, 19 nt, Artificial Sequence
  Description of Artificial Sequence: Synthetic oligonucleotide
cauggugaugggcgucgug

SEQ ID NO: 2075716 - RNA, 19 nt, Artificial Sequence
  Description of Artificial Sequence: Synthetic oligonucleotide
uccuaaccccuucggccuc

SEQ ID NO: 2075717 - RNA, 19 nt, Artificial Sequence
  Description of Artificial Sequence: Synthetic oligonucleotide
cagggcacaacuccagcaa

SEQ ID NO: 2075718 - RNA, 19 nt, Artificial Sequence
  Description of Artificial Sequence: Synthetic oligonucleotide
gcacaacuccagcaauacc

SEQ ID NO: 2075719 - RNA, 19 nt, Artificial Sequence
  Description of Artificial Sequence: Synthetic oligonucleotide
agguucuaaaugagguaaa

SEQ ID NO: 2075720 - RNA, 19 nt, Artificial Sequence
  Description of Artificial Sequence: Synthetic oligonucleotide
uggagucacuuucgcucau

SEQ ID NO: 2075721 - RNA, 19 nt, Artificial Sequence
  Description of Artificial Sequence: Synthetic oligonucleotide
guucagucagcacgaauuu

SEQ ID NO: 2075722 - RNA, 19 nt, Artificial Sequence
  Description of Artificial Sequence: Synthetic oligonucleotide
cuuggacaggcucagcgau

SEQ ID NO: 2075723 - RNA, 19 nt, Artificial Sequence
  Description of Artificial Sequence: Synthetic oligonucleotide
aaggcccgacccagguguc

SEQ ID NO: 2075724 - RNA, 19 nt, Artificial Sequence
  Description of Artificial Sequence: Synthetic oligonucleotide
cagucagcacgaauuuaaa

SEQ ID NO: 2075725 - RNA, 19 nt, Artificial Sequence
  Description of Artificial Sequence: Synthetic oligonucleotide
uacuagccuuugggaagag

SEQ ID NO: 2075726 - RNA, 19 nt, Artificial Sequence
  Description of Artificial Sequence: Synthetic oligonucleotide
aggcccgacccaggugucc

SEQ ID NO: 2075727 - RNA, 19 nt, Artificial Sequence
  Description of Artificial Sequence: Synthetic oligonucleotide
gccgucucgcccaaggccc

SEQ ID NO: 2075728 - RNA, 19 nt, Artificial Sequence
  Description of Artificial Sequence: Synthetic oligonucleotide
gacaggcucagcgaucccu

SEQ ID NO: 2075729 - RNA, 19 nt, Artificial Sequence
  Description of Artificial Sequence: Synthetic oligonucleotide
cuguucaucguccccuugu

SEQ ID NO: 2075730 - RNA, 19 nt, Artificial Sequence
  Description of Artificial Sequence: Synthetic oligonucleotide
ggaucggcugggcauuuuc

SEQ ID NO: 2075731 - RNA, 19 nt, Artificial Sequence
  Description of Artificial Sequence: Synthetic oligonucleotide
uucggccucugcacggcuu

SEQ ID NO: 2075732 - RNA, 19 nt, Artificial Sequence
  Description of Artificial Sequence: Synthetic oligonucleotide
gguauacaguucagucagc

SEQ ID NO: 2075733 - RNA, 19 nt, Artificial Sequence
  Description of Artificial Sequence: Synthetic oligonucleotide
cacuuucgcucaugagcuc

SEQ ID NO: 2075734 - RNA, 19 nt, Artificial Sequence
  Description of Artificial Sequence: Synthetic oligonucleotide
gagacugcuggagucacuu

SEQ ID NO: 2075735 - RNA, 19 nt, Artificial Sequence
  Description of Artificial Sequence: Synthetic oligonucleotide
gcccauacucugaagcaug

SEQ ID NO: 2075736 - RNA, 19 nt, Artificial Sequence
  Description of Artificial Sequence: Synthetic oligonucleotide
gucguggggagaagugaac

SEQ ID NO: 2075737 - RNA, 19 nt, Artificial Sequence
  Description of Artificial Sequence: Synthetic oligonucleotide
uccccucaucauuggugaa

SEQ ID NO: 2075738 - RNA, 19 nt, Artificial Sequence
  Description of Artificial Sequence: Synthetic oligonucleotide
guucaucguccccuugucu

SEQ ID NO: 2075739 - RNA, 19 nt, Artificial Sequence
  Description of Artificial Sequence: Synthetic oligonucleotide
cagugacuaaaaccuuaaa

SEQ ID NO: 2075740 - RNA, 19 nt, Artificial Sequence
  Description of Artificial Sequence: Synthetic oligonucleotide
uuucgcucaugagcucauc

SEQ ID NO: 2075741 - RNA, 19 nt, Artificial Sequence
  Description of Artificial Sequence: Synthetic oligonucleotide
ccgauguugcucucuagga

SEQ ID NO: 2075742 - RNA, 19 nt, Artificial Sequence
  Description of Artificial Sequence: Synthetic oligonucleotide
cuguggguccagggcaaag

SEQ ID NO: 2075743 - RNA, 19 nt, Artificial Sequence
  Description of Artificial Sequence: Synthetic oligonucleotide
augggcgucguggggagaa

SEQ ID NO: 2075744 - RNA, 19 nt, Artificial Sequence
  Description of Artificial Sequence: Synthetic oligonucleotide
ggaguaaugcugaucugcu

SEQ ID NO: 2075745 - RNA, 19 nt, Artificial Sequence
  Description of Artificial Sequence: Synthetic oligonucleotide
ccauacucugaagcaugcg

SEQ ID NO: 2075746 - RNA, 19 nt, Artificial Sequence
  Description of Artificial Sequence: Synthetic oligonucleotide
guucuuucguauuccuauu

SEQ ID NO: 2075747 - RNA, 19 nt, Artificial Sequence
  Description of Artificial Sequence: Synthetic oligonucleotide
agcgaucccucugccgucu

SEQ ID NO: 2075748 - RNA, 19 nt, Artificial Sequence
  Description of Artificial Sequence: Synthetic oligonucleotide
accaguggucauggugaug

SEQ ID NO: 2075749 - RNA, 19 nt, Artificial Sequence
  Description of Artificial Sequence: Synthetic oligonucleotide
ccugacguggggcagagcu

SEQ ID NO: 2075750 - RNA, 19 nt, Artificial Sequence
  Description of Artificial Sequence: Synthetic oligonucleotide
agaggaaauccaaguccua

SEQ ID NO: 2075751 - RNA, 19 nt, Artificial Sequence
  Description of Artificial Sequence: Synthetic oligonucleotide
cguauuccuauuuuguccu

SEQ ID NO: 2075752 - RNA, 19 nt, Artificial Sequence
  Description of Artificial Sequence: Synthetic oligonucleotide
ggcaggguauacaguucag

SEQ ID NO: 2075753 - RNA, 19 nt, Artificial Sequence
  Description of Artificial Sequence: Synthetic oligonucleotide
gguagacaucuggagggca

SEQ ID NO: 2075754 - RNA, 19 nt, Artificial Sequence
  Description of Artificial Sequence: Synthetic oligonucleotide
gcugagacugcuggaguca

SEQ ID NO: 2075755 - RNA, 19 nt, Artificial Sequence
  Description of Artificial Sequence: Synthetic oligonucleotide
ggagucacuuucgcucaug

SEQ ID NO: 2075756 - RNA, 19 nt, Artificial Sequence
  Description of Artificial Sequence: Synthetic oligonucleotide
cugugcuacaaggauccua

SEQ ID NO: 2075757 - RNA, 19 nt, Artificial Sequence
  Description of Artificial Sequence: Synthetic oligonucleotide
cccuucggccucugcacgg

SEQ ID NO: 2075758 - RNA, 19 nt, Artificial Sequence
  Description of Artificial Sequence: Synthetic oligonucleotide
aucuuggagcugauucuua

SEQ ID NO: 2075759 - RNA, 19 nt, Artificial Sequence
  Description of Artificial Sequence: Synthetic oligonucleotide
cagcgaucccucugccguc

SEQ ID NO: 2075760 - RNA, 19 nt, Artificial Sequence
  Description of Artificial Sequence: Synthetic oligonucleotide
ggauccuaaaaugcaugcu

SEQ ID NO: 2075761 - RNA, 19 nt, Artificial Sequence
  Description of Artificial Sequence: Synthetic oligonucleotide
cccacaauuccugcugcug

SEQ ID NO: 2075762 - RNA, 19 nt, Artificial Sequence
  Description of Artificial Sequence: Synthetic oligonucleotide
ugggcgucguggggagaag

SEQ ID NO: 2075763 - RNA, 19 nt, Artificial Sequence
  Description of Artificial Sequence: Synthetic oligonucleotide
gacaucuggagggcagggu

SEQ ID NO: 2075764 - RNA, 19 nt, Artificial Sequence
  Description of Artificial Sequence: Synthetic oligonucleotide
aucuggagggcaggguaua

SEQ ID NO: 2075765 - RNA, 19 nt, Artificial Sequence
  Description of Artificial Sequence: Synthetic oligonucleotide
acaguucagucagcacgaa

SEQ ID NO: 2075766 - RNA, 19 nt, Artificial Sequence
  Description of Artificial Sequence: Synthetic oligonucleotide
guggggagaagugaaccau

SEQ ID NO: 2075767 - RNA, 19 nt, Artificial Sequence
  Description of Artificial Sequence: Synthetic oligonucleotide
ggcgucguggggagaagug

SEQ ID NO: 2075768 - RNA, 19 nt, Artificial Sequence
  Description of Artificial Sequence: Synthetic oligonucleotide
gcucagcgaucccucugcc

SEQ ID NO: 2075769 - RNA, 19 nt, Artificial Sequence
  Description of Artificial Sequence: Synthetic oligonucleotide
caucuggagggcaggguau

SEQ ID NO: 2075770 - RNA, 19 nt, Artificial Sequence
  Description of Artificial Sequence: Synthetic oligonucleotide
ggugaacaagccggcguca

SEQ ID NO: 2075771 - RNA, 19 nt, Artificial Sequence
  Description of Artificial Sequence: Synthetic oligonucleotide
guccuugucuaaucacuuu

SEQ ID NO: 2075772 - RNA, 19 nt, Artificial Sequence
  Description of Artificial Sequence: Synthetic oligonucleotide
ccugacuccuucucauaga

SEQ ID NO: 2075773 - RNA, 19 nt, Artificial Sequence
  Description of Artificial Sequence: Synthetic oligonucleotide
ccccucaucauuggugaac

SEQ ID NO: 2075774 - RNA, 19 nt, Artificial Sequence
  Description of Artificial Sequence: Synthetic oligonucleotide
gcacggcuuggacaggcuc

SEQ ID NO: 2075775 - RNA, 19 nt, Artificial Sequence
  Description of Artificial Sequence: Synthetic oligonucleotide
cgcucaugagcucaucuga

SEQ ID NO: 2075776 - RNA, 19 nt, Artificial Sequence
  Description of Artificial Sequence: Synthetic oligonucleotide
gugcuacaaggauccuaaa

SEQ ID NO: 2075777 - RNA, 19 nt, Artificial Sequence
  Description of Artificial Sequence: Synthetic oligonucleotide
auccaaguccuaaccccuu

SEQ ID NO: 2075778 - RNA, 19 nt, Artificial Sequence
  Description of Artificial Sequence: Synthetic oligonucleotide
ccucugcacggcuuggaca

SEQ ID NO: 2075779 - RNA, 19 nt, Artificial Sequence
  Description of Artificial Sequence: Synthetic oligonucleotide
ccccuucggccucugcacg

SEQ ID NO: 2075780 - RNA, 19 nt, Artificial Sequence
  Description of Artificial Sequence: Synthetic oligonucleotide
cauugaagguggagccccu

SEQ ID NO: 2075781 - RNA, 19 nt, Artificial Sequence
  Description of Artificial Sequence: Synthetic oligonucleotide
gcucuguucaucguccccu

SEQ ID NO: 2075782 - RNA, 19 nt, Artificial Sequence
  Description of Artificial Sequence: Synthetic oligonucleotide
cuaaaccaguggucauggu

SEQ ID NO: 2075783 - RNA, 19 nt, Artificial Sequence
  Description of Artificial Sequence: Synthetic oligonucleotide
caucuuggagcugauucuu

SEQ ID NO: 2075784 - RNA, 19 nt, Artificial Sequence
  Description of Artificial Sequence: Synthetic oligonucleotide
caaucgcucuguucaucgu

SEQ ID NO: 2075785 - RNA, 19 nt, Artificial Sequence
  Description of Artificial Sequence: Synthetic oligonucleotide
uguuugccugcuggcuguu

SEQ ID NO: 2075786 - RNA, 19 nt, Artificial Sequence
  Description of Artificial Sequence: Synthetic oligonucleotide
gggccaggagcagacguca

SEQ ID NO: 2075787 - RNA, 19 nt, Artificial Sequence
  Description of Artificial Sequence: Synthetic oligonucleotide
cugcugagacugcuggagu

SEQ ID NO: 2075788 - RNA, 19 nt, Artificial Sequence
  Description of Artificial Sequence: Synthetic oligonucleotide
cuuucgcucaugagcucau

SEQ ID NO: 2075789 - RNA, 19 nt, Artificial Sequence
  Description of Artificial Sequence: Synthetic oligonucleotide
uaggaucggcugggcauuu

SEQ ID NO: 2075790 - RNA, 19 nt, Artificial Sequence
  Description of Artificial Sequence: Synthetic oligonucleotide
cguggggagaagugaacca

SEQ ID NO: 2075791 - RNA, 19 nt, Artificial Sequence
  Description of Artificial Sequence: Synthetic oligonucleotide
gccuuugggaagagguaga

SEQ ID NO: 2075792 - RNA, 19 nt, Artificial Sequence
  Description of Artificial Sequence: Synthetic oligonucleotide
cuaaccccuucggccucug

SEQ ID NO: 2075793 - RNA, 19 nt, Artificial Sequence
  Description of Artificial Sequence: Synthetic oligonucleotide
ggccaugcucgguccuagc

SEQ ID NO: 2075794 - RNA, 19 nt, Artificial Sequence
  Description of Artificial Sequence: Synthetic oligonucleotide
gccggcgucagugcugcug

SEQ ID NO: 2075795 - RNA, 19 nt, Artificial Sequence
  Description of Artificial Sequence: Synthetic oligonucleotide
ccuagccccagggcuaaac

SEQ ID NO: 2075796 - RNA, 19 nt, Artificial Sequence
  Description of Artificial Sequence: Synthetic oligonucleotide
gcuuguuugccugcuggcu

SEQ ID NO: 2075797 - RNA, 19 nt, Artificial Sequence
  Description of Artificial Sequence: Synthetic oligonucleotide
gcaggguauacaguucagu

SEQ ID NO: 2075798 - RNA, 19 nt, Artificial Sequence
  Description of Artificial Sequence: Synthetic oligonucleotide
gcgucguggggagaaguga

SEQ ID NO: 2075799 - RNA, 19 nt, Artificial Sequence
  Description of Artificial Sequence: Synthetic oligonucleotide
caguucagucagcacgaau

SEQ ID NO: 2075800 - RNA, 19 nt, Artificial Sequence
  Description of Artificial Sequence: Synthetic oligonucleotide
gguccuagccccagggcua

SEQ ID NO: 2075801 - RNA, 19 nt, Artificial Sequence
  Description of Artificial Sequence: Synthetic oligonucleotide
gaugggcgucguggggaga

SEQ ID NO: 2075802 - RNA, 19 nt, Artificial Sequence
  Description of Artificial Sequence: Synthetic oligonucleotide
ccgucucgcccaaggcccg

SEQ ID NO: 2075803 - RNA, 19 nt, Artificial Sequence
  Description of Artificial Sequence: Synthetic oligonucleotide
gguggagccccuccaguau

SEQ ID NO: 2075804 - RNA, 19 nt, Artificial Sequence
  Description of Artificial Sequence: Synthetic oligonucleotide
cgcucuguucaucgucccc

SEQ ID NO: 2075805 - RNA, 19 nt, Artificial Sequence
  Description of Artificial Sequence: Synthetic oligonucleotide
ggggccaggagcagacguc

SEQ ID NO: 2075806 - RNA, 19 nt, Artificial Sequence
  Description of Artificial Sequence: Synthetic oligonucleotide
ccuucggccucugcacggc

SEQ ID NO: 2075807 - RNA, 19 nt, Artificial Sequence
  Description of Artificial Sequence: Synthetic oligonucleotide
gcaauaccacaggcucccc

SEQ ID NO: 2075808 - RNA, 19 nt, Artificial Sequence
  Description of Artificial Sequence: Synthetic oligonucleotide
gggcacaacuccagcaaua

SEQ ID NO: 2075809 - RNA, 19 nt, Artificial Sequence
  Description of Artificial Sequence: Synthetic oligonucleotide
ccggcgucagugcugcuga

SEQ ID NO: 2075810 - RNA, 19 nt, Artificial Sequence
  Description of Artificial Sequence: Synthetic oligonucleotide
gcgguucccgauguugcuc

SEQ ID NO: 2075811 - RNA, 19 nt, Artificial Sequence
  Description of Artificial Sequence: Synthetic oligonucleotide
gguccagggcaaaggcgca

SEQ ID NO: 2075812 - RNA, 19 nt, Artificial Sequence
  Description of Artificial Sequence: Synthetic oligonucleotide
cgacccagguguccagccc

SEQ ID NO: 2075813 - RNA, 19 nt, Artificial Sequence
  Description of Artificial Sequence: Synthetic oligonucleotide
cgucguggggagaagugaa

SEQ ID NO: 2075814 - RNA, 19 nt, Artificial Sequence
  Description of Artificial Sequence: Synthetic oligonucleotide
cucuguucaucguccccuu

SEQ ID NO: 2075815 - RNA, 19 nt, Artificial Sequence
  Description of Artificial Sequence: Synthetic oligonucleotide
aggaucggcugggcauuuu

SEQ ID NO: 2075816 - RNA, 19 nt, Artificial Sequence
  Description of Artificial Sequence: Synthetic oligonucleotide
augcucgguccuagcccca

SEQ ID NO: 2075817 - RNA, 19 nt, Artificial Sequence
  Description of Artificial Sequence: Synthetic oligonucleotide
ggcccgacccaggugucca

SEQ ID NO: 2075818 - RNA, 19 nt, Artificial Sequence
  Description of Artificial Sequence: Synthetic oligonucleotide
cuggccaugcucgguccua

SEQ ID NO: 2075819 - RNA, 19 nt, Artificial Sequence
  Description of Artificial Sequence: Synthetic oligonucleotide
ccucuuucugaucgguuau

SEQ ID NO: 2075820 - RNA, 19 nt, Artificial Sequence
  Description of Artificial Sequence: Synthetic oligonucleotide
gggcuaaaccaguggucau

SEQ ID NO: 2075821 - RNA, 19 nt, Artificial Sequence
  Description of Artificial Sequence: Synthetic oligonucleotide
cucugccgucucgcccaag

SEQ ID NO: 2075822 - RNA, 19 nt, Artificial Sequence
  Description of Artificial Sequence: Synthetic oligonucleotide
cuuauugguuuggcucauu

SEQ ID NO: 2075823 - RNA, 19 nt, Artificial Sequence
  Description of Artificial Sequence: Synthetic oligonucleotide
gcaugcuuguuugccugcu

SEQ ID NO: 2075824 - RNA, 19 nt, Artificial Sequence
  Description of Artificial Sequence: Synthetic oligonucleotide
cgcccaaggcccgacccag

SEQ ID NO: 2075825 - RNA, 19 nt, Artificial Sequence
  Description of Artificial Sequence: Synthetic oligonucleotide
cgguuaucucucagaagcu

SEQ ID NO: 2075826 - RNA, 19 nt, Artificial Sequence
  Description of Artificial Sequence: Synthetic oligonucleotide
agccggcgucagugcugcu

SEQ ID NO: 2075827 - RNA, 19 nt, Artificial Sequence
  Description of Artificial Sequence: Synthetic oligonucleotide
cgguccuagccccagggcu

SEQ ID NO: 2075828 - RNA, 19 nt, Artificial Sequence
  Description of Artificial Sequence: Synthetic oligonucleotide
gacguggggcagagcuggu

SEQ ID NO: 2075829 - RNA, 19 nt, Artificial Sequence
  Description of Artificial Sequence: Synthetic oligonucleotide
gcgcagcuuuccuucuccu

SEQ ID NO: 2075830 - RNA, 19 nt, Artificial Sequence
  Description of Artificial Sequence: Synthetic oligonucleotide
cagggcaaaggcgcagcuu

SEQ ID NO: 2075831 - RNA, 19 nt, Artificial Sequence
  Description of Artificial Sequence: Synthetic oligonucleotide
gcgaucccucugccgucuc

SEQ ID NO: 2075832 - RNA, 19 nt, Artificial Sequence
  Description of Artificial Sequence: Synthetic oligonucleotide
guuugccugcuggcuguuu

SEQ ID NO: 2075833 - RNA, 19 nt, Artificial Sequence
  Description of Artificial Sequence: Synthetic oligonucleotide
gggcgucguggggagaagu

SEQ ID NO: 2075834 - RNA, 19 nt, Artificial Sequence
  Description of Artificial Sequence: Synthetic oligonucleotide
cgucagugcugcugagacu

SEQ ID NO: 2075835 - RNA, 19 nt, Artificial Sequence
  Description of Artificial Sequence: Synthetic oligonucleotide
ggagccccuccaguauuuu

SEQ ID NO: 2075836 - RNA, 19 nt, Artificial Sequence
  Description of Artificial Sequence: Synthetic oligonucleotide
ccccuugucuuccccucau

SEQ ID NO: 2075837 - RNA, 19 nt, Artificial Sequence
  Description of Artificial Sequence: Synthetic oligonucleotide
gcaugcgguucccgauguu

SEQ ID NO: 2075838 - RNA, 19 nt, Artificial Sequence
  Description of Artificial Sequence: Synthetic oligonucleotide
ccuaaccccuucggccucu

SEQ ID NO: 2075839 - RNA, 19 nt, Artificial Sequence
  Description of Artificial Sequence: Synthetic oligonucleotide
ccucugccgucucgcccaa

SEQ ID NO: 2075840 - RNA, 19 nt, Artificial Sequence
  Description of Artificial Sequence: Synthetic oligonucleotide
ccugugcuacaaggauccu

SEQ ID NO: 2075841 - RNA, 19 nt, Artificial Sequence
  Description of Artificial Sequence: Synthetic oligonucleotide
cgucucgcccaaggcccga

SEQ ID NO: 2075842 - RNA, 19 nt, Artificial Sequence
  Description of Artificial Sequence: Synthetic oligonucleotide
uuuauuuagaauuaaagcc

SEQ ID NO: 2075843 - RNA, 19 nt, Artificial Sequence
  Description of Artificial Sequence: Synthetic oligonucleotide
acuuuauuggguuugagcc

SEQ ID NO: 2075844 - RNA, 19 nt, Artificial Sequence
  Description of Artificial Sequence: Synthetic oligonucleotide
uuauuuagaauuaaagcca

SEQ ID NO: 2075845 - RNA, 19 nt, Artificial Sequence
  Description of Artificial Sequence: Synthetic oligonucleotide
uugagugugacaaacacag

SEQ ID NO: 2075846 - RNA, 19 nt, Artificial Sequence
  Description of Artificial Sequence: Synthetic oligonucleotide
agcaagaucacuuuauugg

SEQ ID NO: 2075847 - RNA, 19 nt, Artificial Sequence
  Description of Artificial Sequence: Synthetic oligonucleotide
acaaucaugacauguggac

SEQ ID NO: 2075848 - RNA, 19 nt, Artificial Sequence
  Description of Artificial Sequence: Synthetic oligonucleotide
guuacuacagcaauggagg

SEQ ID NO: 2075849 - RNA, 19 nt, Artificial Sequence
  Description of Artificial Sequence: Synthetic oligonucleotide
ucuagcacaggucaccugg

SEQ ID NO: 2075850 - RNA, 19 nt, Artificial Sequence
  Description of Artificial Sequence: Synthetic oligonucleotide
uccgaaaccagcaaaaccu

SEQ ID NO: 2075851 - RNA, 19 nt, Artificial Sequence
  Description of Artificial Sequence: Synthetic oligonucleotide
gaagguucggaguagggcg

SEQ ID NO: 2075852 - RNA, 19 nt, Artificial Sequence
  Description of Artificial Sequence: Synthetic oligonucleotide
aauuaaagccaacacuuga

SEQ ID NO: 2075853 - RNA, 19 nt, Artificial Sequence
  Description of Artificial Sequence: Synthetic oligonucleotide
ugacauguggacaaacccg

SEQ ID NO: 2075854 - RNA, 19 nt, Artificial Sequence
  Description of Artificial Sequence: Synthetic oligonucleotide
uuagaauuaaagccaacac

SEQ ID NO: 2075855 - RNA, 19 nt, Artificial Sequence
  Description of Artificial Sequence: Synthetic oligonucleotide
aaagccaacacuugagugu

SEQ ID NO: 2075856 - RNA, 19 nt, Artificial Sequence
  Description of Artificial Sequence: Synthetic oligonucleotide
uuuagaauuaaagccaaca

SEQ ID NO: 2075857 - RNA, 19 nt, Artificial Sequence
  Description of Artificial Sequence: Synthetic oligonucleotide
uuggguuugagccagggga

SEQ ID NO: 2075858 - RNA, 19 nt, Artificial Sequence
  Description of Artificial Sequence: Synthetic oligonucleotide
aaaccagcaaaaccuccgc

SEQ ID NO: 2075859 - RNA, 19 nt, Artificial Sequence
  Description of Artificial Sequence: Synthetic oligonucleotide
uucagcucaaagaagcacc

SEQ ID NO: 2075860 - RNA, 19 nt, Artificial Sequence
  Description of Artificial Sequence: Synthetic oligonucleotide
gaugcuagcugaaagacug

SEQ ID NO: 2075861 - RNA, 19 nt, Artificial Sequence
  Description of Artificial Sequence: Synthetic oligonucleotide
auggagugagcauuuauuc

SEQ ID NO: 2075862 - RNA, 19 nt, Artificial Sequence
  Description of Artificial Sequence: Synthetic oligonucleotide
agaagcaccccgcuaaugg

SEQ ID NO: 2075863 - RNA, 19 nt, Artificial Sequence
  Description of Artificial Sequence: Synthetic oligonucleotide
gaugaaaacauggucggcc

SEQ ID NO: 2075864 - RNA, 19 nt, Artificial Sequence
  Description of Artificial Sequence: Synthetic oligonucleotide
acuacagcaauggagggcg

SEQ ID NO: 2075865 - RNA, 19 nt, Artificial Sequence
  Description of Artificial Sequence: Synthetic oligonucleotide
uauuuagaauuaaagccaa

SEQ ID NO: 2075866 - RNA, 19 nt, Artificial Sequence
  Description of Artificial Sequence: Synthetic oligonucleotide
agcucaaagaagcaccccg

SEQ ID NO: 2075867 - RNA, 19 nt, Artificial Sequence
  Description of Artificial Sequence: Synthetic oligonucleotide
uuuauuggguuugagccag

SEQ ID NO: 2075868 - RNA, 19 nt, Artificial Sequence
  Description of Artificial Sequence: Synthetic oligonucleotide
gaaagcugaagguucggag

SEQ ID NO: 2075869 - RNA, 19 nt, Artificial Sequence
  Description of Artificial Sequence: Synthetic oligonucleotide
ugucauuagacguuggcuc

SEQ ID NO: 2075870 - RNA, 19 nt, Artificial Sequence
  Description of Artificial Sequence: Synthetic oligonucleotide
gaggauuucaccauccggc

SEQ ID NO: 2075871 - RNA, 19 nt, Artificial Sequence
  Description of Artificial Sequence: Synthetic oligonucleotide
uuuguuagugagcaagauc

SEQ ID NO: 2075872 - RNA, 19 nt, Artificial Sequence
  Description of Artificial Sequence: Synthetic oligonucleotide
agaauuaaagccaacacuu

SEQ ID NO: 2075873 - RNA, 19 nt, Artificial Sequence
  Description of Artificial Sequence: Synthetic oligonucleotide
gauuucaccauccggccgc

SEQ ID NO: 2075874 - RNA, 19 nt, Artificial Sequence
  Description of Artificial Sequence: Synthetic oligonucleotide
uuagugagcaagaucacuu

SEQ ID NO: 2075875 - RNA, 19 nt, Artificial Sequence
  Description of Artificial Sequence: Synthetic oligonucleotide
ucggaguagaggaugcuag

SEQ ID NO: 2075876 - RNA, 19 nt, Artificial Sequence
  Description of Artificial Sequence: Synthetic oligonucleotide
ugaaagacugugaucccgc

SEQ ID NO: 2075877 - RNA, 19 nt, Artificial Sequence
  Description of Artificial Sequence: Synthetic oligonucleotide
ugacaaacacagcauucag

SEQ ID NO: 2075878 - RNA, 19 nt, Artificial Sequence
  Description of Artificial Sequence: Synthetic oligonucleotide
agggacacugggcagggcc

SEQ ID NO: 2075879 - RNA, 19 nt, Artificial Sequence
  Description of Artificial Sequence: Synthetic oligonucleotide
caagaaagcugaagguucg

SEQ ID NO: 2075880 - RNA, 19 nt, Artificial Sequence
  Description of Artificial Sequence: Synthetic oligonucleotide
aagaucacuuuauuggguu

SEQ ID NO: 2075881 - RNA, 19 nt, Artificial Sequence
  Description of Artificial Sequence: Synthetic oligonucleotide
cacuuuauuggguuugagc

SEQ ID NO: 2075882 - RNA, 19 nt, Artificial Sequence
  Description of Artificial Sequence: Synthetic oligonucleotide
ucucacaaucucaaagcca

SEQ ID NO: 2075883 - RNA, 19 nt, Artificial Sequence
  Description of Artificial Sequence: Synthetic oligonucleotide
gacccuagaacucucgcug

SEQ ID NO: 2075884 - RNA, 19 nt, Artificial Sequence
  Description of Artificial Sequence: Synthetic oligonucleotide
auuaaagccaacacuugag

SEQ ID NO: 2075885 - RNA, 19 nt, Artificial Sequence
  Description of Artificial Sequence: Synthetic oligonucleotide
uuacuacagcaauggaggg

SEQ ID NO: 2075886 - RNA, 19 nt, Artificial Sequence
  Description of Artificial Sequence: Synthetic oligonucleotide
cagguuacuacagcaaugg

SEQ ID NO: 2075887 - RNA, 19 nt, Artificial Sequence
  Description of Artificial Sequence: Synthetic oligonucleotide
auguggacaaacccgggag

SEQ ID NO: 2075888 - RNA, 19 nt, Artificial Sequence
  Description of Artificial Sequence: Synthetic oligonucleotide
aggaugcuagcugaaagac

SEQ ID NO: 2075889 - RNA, 19 nt, Artificial Sequence
  Description of Artificial Sequence: Synthetic oligonucleotide
augcucagaacccuggucu

SEQ ID NO: 2075890 - RNA, 19 nt, Artificial Sequence
  Description of Artificial Sequence: Synthetic oligonucleotide
gaaaacauggucggcccgg

SEQ ID NO: 2075891 - RNA, 19 nt, Artificial Sequence
  Description of Artificial Sequence: Synthetic oligonucleotide
aaagacugugaucccgcug

SEQ ID NO: 2075892 - RNA, 19 nt, Artificial Sequence
  Description of Artificial Sequence: Synthetic oligonucleotide
gcaagaucacuuuauuggg

SEQ ID NO: 2075893 - RNA, 19 nt, Artificial Sequence
  Description of Artificial Sequence: Synthetic oligonucleotide
agaccaugaagcaagcguc

SEQ ID NO: 2075894 - RNA, 19 nt, Artificial Sequence
  Description of Artificial Sequence: Synthetic oligonucleotide
ggagugagcauuuauucug

SEQ ID NO: 2075895 - RNA, 19 nt, Artificial Sequence
  Description of Artificial Sequence: Synthetic oligonucleotide
gauguagaggccaccgccg

SEQ ID NO: 2075896 - RNA, 19 nt, Artificial Sequence
  Description of Artificial Sequence: Synthetic oligonucleotide
cucugucacauucagccgc

SEQ ID NO: 2075897 - RNA, 19 nt, Artificial Sequence
  Description of Artificial Sequence: Synthetic oligonucleotide
gggagcucgauguagaggc

SEQ ID NO: 2075898 - RNA, 19 nt, Artificial Sequence
  Description of Artificial Sequence: Synthetic oligonucleotide
uggguuugagccaggggag

SEQ ID NO: 2075899 - RNA, 19 nt, Artificial Sequence
  Description of Artificial Sequence: Synthetic oligonucleotide
gguuacuacagcaauggag

SEQ ID NO: 2075900 - RNA, 19 nt, Artificial Sequence
  Description of Artificial Sequence: Synthetic oligonucleotide
gucauuagacguuggcucc

SEQ ID NO: 2075901 - RNA, 19 nt, Artificial Sequence
  Description of Artificial Sequence: Synthetic oligonucleotide
cucacaaucucaaagccaa

SEQ ID NO: 2075902 - RNA, 19 nt, Artificial Sequence
  Description of Artificial Sequence: Synthetic oligonucleotide
ucaccuggccaucuuaaac

SEQ ID NO: 2075903 - RNA, 19 nt, Artificial Sequence
  Description of Artificial Sequence: Synthetic oligonucleotide
ugaagguucggaguagggc

SEQ ID NO: 2075904 - RNA, 19 nt, Artificial Sequence
  Description of Artificial Sequence: Synthetic oligonucleotide
uuggggaagcagaugaaaa

SEQ ID NO: 2075905 - RNA, 19 nt, Artificial Sequence
  Description of Artificial Sequence: Synthetic oligonucleotide
aauggagugagcauuuauu

SEQ ID NO: 2075906 - RNA, 19 nt, Artificial Sequence
  Description of Artificial Sequence: Synthetic oligonucleotide
ggucucacaaucucaaagc

SEQ ID NO: 2075907 - RNA, 19 nt, Artificial Sequence
  Description of Artificial Sequence: Synthetic oligonucleotide
uucucucuggcgaagcagu

SEQ ID NO: 2075908 - RNA, 19 nt, Artificial Sequence
  Description of Artificial Sequence: Synthetic oligonucleotide
uggggaagcagaugaaaac

SEQ ID NO: 2075909 - RNA, 19 nt, Artificial Sequence
  Description of Artificial Sequence: Synthetic oligonucleotide
uugucauuagacguuggcu

SEQ ID NO: 2075910 - RNA, 19 nt, Artificial Sequence
  Description of Artificial Sequence: Synthetic oligonucleotide
aguagggcggcucuguccu

SEQ ID NO: 2075911 - RNA, 19 nt, Artificial Sequence
  Description of Artificial Sequence: Synthetic oligonucleotide
caagcgucgggucucuugg

SEQ ID NO: 2075912 - RNA, 19 nt, Artificial Sequence
  Description of Artificial Sequence: Synthetic oligonucleotide
ucuugucauuagacguugg

SEQ ID NO: 2075913 - RNA, 19 nt, Artificial Sequence
  Description of Artificial Sequence: Synthetic oligonucleotide
acuaucuaucucugccagg

SEQ ID NO: 2075914 - RNA, 19 nt, Artificial Sequence
  Description of Artificial Sequence: Synthetic oligonucleotide
uguagaccaugaagcaagc

SEQ ID NO: 2075915 - RNA, 19 nt, Artificial Sequence
  Description of Artificial Sequence: Synthetic oligonucleotide
uguggacaaacccgggaga

SEQ ID NO: 2075916 - RNA, 19 nt, Artificial Sequence
  Description of Artificial Sequence: Synthetic oligonucleotide
uagacguuggcuccucugu

SEQ ID NO: 2075917 - RNA, 19 nt, Artificial Sequence
  Description of Artificial Sequence: Synthetic oligonucleotide
agaugaaaacauggucggc

SEQ ID NO: 2075918 - RNA, 19 nt, Artificial Sequence
  Description of Artificial Sequence: Synthetic oligonucleotide
uggagggcgacccuagaac

SEQ ID NO: 2075919 - RNA, 19 nt, Artificial Sequence
  Description of Artificial Sequence: Synthetic oligonucleotide
gaggaugcuagcugaaaga

SEQ ID NO: 2075920 - RNA, 19 nt, Artificial Sequence
  Description of Artificial Sequence: Synthetic oligonucleotide
guccucacgguucuugggg

SEQ ID NO: 2075921 - RNA, 19 nt, Artificial Sequence
  Description of Artificial Sequence: Synthetic oligonucleotide
guccgaaaccagcaaaacc

SEQ ID NO: 2075922 - RNA, 19 nt, Artificial Sequence
  Description of Artificial Sequence: Synthetic oligonucleotide
aagcugaagguucggagua

SEQ ID NO: 2075923 - RNA, 19 nt, Artificial Sequence
  Description of Artificial Sequence: Synthetic oligonucleotide
acagcaauggagggcgacc

SEQ ID NO: 2075924 - RNA, 19 nt, Artificial Sequence
  Description of Artificial Sequence: Synthetic oligonucleotide
uaauggagugagcauuuau

SEQ ID NO: 2075925 - RNA, 19 nt, Artificial Sequence
  Description of Artificial Sequence: Synthetic oligonucleotide
cugaaagacugugaucccg

SEQ ID NO: 2075926 - RNA, 19 nt, Artificial Sequence
  Description of Artificial Sequence: Synthetic oligonucleotide
uuagacguuggcuccucug

SEQ ID NO: 2075927 - RNA, 19 nt, Artificial Sequence
  Description of Artificial Sequence: Synthetic oligonucleotide
aaaccuccgcugcacucuc

SEQ ID NO: 2075928 - RNA, 19 nt, Artificial Sequence
  Description of Artificial Sequence: Synthetic oligonucleotide
uauuggguuugagccaggg

SEQ ID NO: 2075929 - RNA, 19 nt, Artificial Sequence
  Description of Artificial Sequence: Synthetic oligonucleotide
agcggcaugguguggcugg

SEQ ID NO: 2075930 - RNA, 19 nt, Artificial Sequence
  Description of Artificial Sequence: Synthetic oligonucleotide
aaccagcaaaaccuccgcu

SEQ ID NO: 2075931 - RNA, 19 nt, Artificial Sequence
  Description of Artificial Sequence: Synthetic oligonucleotide
ugagcaagaucacuuuauu

SEQ ID NO: 2075932 - RNA, 19 nt, Artificial Sequence
  Description of Artificial Sequence: Synthetic oligonucleotide
agcaaaaccuccgcugcac

SEQ ID NO: 2075933 - RNA, 19 nt, Artificial Sequence
  Description of Artificial Sequence: Synthetic oligonucleotide
gaccaugaagcaagcgucg

SEQ ID NO: 2075934 - RNA, 19 nt, Artificial Sequence
  Description of Artificial Sequence: Synthetic oligonucleotide
gggucucacaaucucaaag

SEQ ID NO: 2075935 - RNA, 19 nt, Artificial Sequence
  Description of Artificial Sequence: Synthetic oligonucleotide
uguuagugagcaagaucac

SEQ ID NO: 2075936 - RNA, 19 nt, Artificial Sequence
  Description of Artificial Sequence: Synthetic oligonucleotide
accuaguccuccucgcccg

SEQ ID NO: 2075937 - RNA, 19 nt, Artificial Sequence
  Description of Artificial Sequence: Synthetic oligonucleotide
ucucuuggggacgagggga

SEQ ID NO: 2075938 - RNA, 19 nt, Artificial Sequence
  Description of Artificial Sequence: Synthetic oligonucleotide
cagcguguagaccaugaag

SEQ ID NO: 2075939 - RNA, 19 nt, Artificial Sequence
  Description of Artificial Sequence: Synthetic oligonucleotide
agggccggcaccuaguccu

SEQ ID NO: 2075940 - RNA, 19 nt, Artificial Sequence
  Description of Artificial Sequence: Synthetic oligonucleotide
ugaggagcggcauggugug

SEQ ID NO: 2075941 - RNA, 19 nt, Artificial Sequence
  Description of Artificial Sequence: Synthetic oligonucleotide
aagguucggaguagggcgg

SEQ ID NO: 2075942 - RNA, 19 nt, Artificial Sequence
  Description of Artificial Sequence: Synthetic oligonucleotide
aacacuugagugugacaaa

SEQ ID NO: 2075943 - RNA, 19 nt, Artificial Sequence
  Description of Artificial Sequence: Synthetic oligonucleotide
acauggucggcccggagcu

SEQ ID NO: 2075944 - RNA, 19 nt, Artificial Sequence
  Description of Artificial Sequence: Synthetic oligonucleotide
cuugagugugacaaacaca

SEQ ID NO: 2075945 - RNA, 19 nt, Artificial Sequence
  Description of Artificial Sequence: Synthetic oligonucleotide
aaagaagcaccccgcuaau

SEQ ID NO: 2075946 - RNA, 19 nt, Artificial Sequence
  Description of Artificial Sequence: Synthetic oligonucleotide
ucuggcgaagcaguggcug

SEQ ID NO: 2075947 - RNA, 19 nt, Artificial Sequence
  Description of Artificial Sequence: Synthetic oligonucleotide
cucgauguagaggccaccg

SEQ ID NO: 2075948 - RNA, 19 nt, Artificial Sequence
  Description of Artificial Sequence: Synthetic oligonucleotide
ggacaaacccgggagaggg

SEQ ID NO: 2075949 - RNA, 19 nt, Artificial Sequence
  Description of Artificial Sequence: Synthetic oligonucleotide
gaugcucagaacccugguc

SEQ ID NO: 2075950 - RNA, 19 nt, Artificial Sequence
  Description of Artificial Sequence: Synthetic oligonucleotide
gcauuuauucugcacaauc

SEQ ID NO: 2075951 - RNA, 19 nt, Artificial Sequence
  Description of Artificial Sequence: Synthetic oligonucleotide
ugaucccgcugacuguucc

SEQ ID NO: 2075952 - RNA, 19 nt, Artificial Sequence
  Description of Artificial Sequence: Synthetic oligonucleotide
gaggauccgcugcagggag

SEQ ID NO: 2075953 - RNA, 19 nt, Artificial Sequence
  Description of Artificial Sequence: Synthetic oligonucleotide
gagugagcauuuauucugc

SEQ ID NO: 2075954 - RNA, 19 nt, Artificial Sequence
  Description of Artificial Sequence: Synthetic oligonucleotide
ugagugugacaaacacagc

SEQ ID NO: 2075955 - RNA, 19 nt, Artificial Sequence
  Description of Artificial Sequence: Synthetic oligonucleotide
cugaagguucggaguaggg

SEQ ID NO: 2075956 - RNA, 19 nt, Artificial Sequence
  Description of Artificial Sequence: Synthetic oligonucleotide
gacuggaugcucagaaccc

SEQ ID NO: 2075957 - RNA, 19 nt, Artificial Sequence
  Description of Artificial Sequence: Synthetic oligonucleotide
ucgucggaguagaggaugc

SEQ ID NO: 2075958 - RNA, 19 nt, Artificial Sequence
  Description of Artificial Sequence: Synthetic oligonucleotide
uuuuguuagugagcaagau

SEQ ID NO: 2075959 - RNA, 19 nt, Artificial Sequence
  Description of Artificial Sequence: Synthetic oligonucleotide
gacccagguuacuacagca

SEQ ID NO: 2075960 - RNA, 19 nt, Artificial Sequence
  Description of Artificial Sequence: Synthetic oligonucleotide
ugacacuaucuaucucugc

SEQ ID NO: 2075961 - RNA, 19 nt, Artificial Sequence
  Description of Artificial Sequence: Synthetic oligonucleotide
cagcauucagcucaaagaa

SEQ ID NO: 2075962 - RNA, 19 nt, Artificial Sequence
  Description of Artificial Sequence: Synthetic oligonucleotide
gagcauuuauucugcacaa

SEQ ID NO: 2075963 - RNA, 19 nt, Artificial Sequence
  Description of Artificial Sequence: Synthetic oligonucleotide
agcgucgggucucuugggg

SEQ ID NO: 2075964 - RNA, 19 nt, Artificial Sequence
  Description of Artificial Sequence: Synthetic oligonucleotide
cacauucagccgcucgucg

SEQ ID NO: 2075965 - RNA, 19 nt, Artificial Sequence
  Description of Artificial Sequence: Synthetic oligonucleotide
ugcuagcugaaagacugug

SEQ ID NO: 2075966 - RNA, 19 nt, Artificial Sequence
  Description of Artificial Sequence: Synthetic oligonucleotide
ugggagcucgauguagagg

SEQ ID NO: 2075967 - RNA, 19 nt, Artificial Sequence
  Description of Artificial Sequence: Synthetic oligonucleotide
ccaagaaagcugaagguuc

SEQ ID NO: 2075968 - RNA, 19 nt, Artificial Sequence
  Description of Artificial Sequence: Synthetic oligonucleotide
ugcucuagcacaggucacc

SEQ ID NO: 2075969 - RNA, 19 nt, Artificial Sequence
  Description of Artificial Sequence: Synthetic oligonucleotide
ggugacacuaucuaucucu

SEQ ID NO: 2075970 - RNA, 19 nt, Artificial Sequence
  Description of Artificial Sequence: Synthetic oligonucleotide
aaacauggucggcccggag

SEQ ID NO: 2075971 - RNA, 19 nt, Artificial Sequence
  Description of Artificial Sequence: Synthetic oligonucleotide
gaguagggcggcucugucc

SEQ ID NO: 2075972 - RNA, 19 nt, Artificial Sequence
  Description of Artificial Sequence: Synthetic oligonucleotide
caccuggccaucuuaaaca

SEQ ID NO: 2075973 - RNA, 19 nt, Artificial Sequence
  Description of Artificial Sequence: Synthetic oligonucleotide
aucuaucucugccaggcuu

SEQ ID NO: 2075974 - RNA, 19 nt, Artificial Sequence
  Description of Artificial Sequence: Synthetic oligonucleotide
gugagcauuuauucugcac

SEQ ID NO: 2075975 - RNA, 19 nt, Artificial Sequence
  Description of Artificial Sequence: Synthetic oligonucleotide
uuauuggguuugagccagg

SEQ ID NO: 2075976 - RNA, 19 nt, Artificial Sequence
  Description of Artificial Sequence: Synthetic oligonucleotide
cuguccucacgguucuugg

SEQ ID NO: 2075977 - RNA, 19 nt, Artificial Sequence
  Description of Artificial Sequence: Synthetic oligonucleotide
aagcaccccgcuaauggag

SEQ ID NO: 2075978 - RNA, 19 nt, Artificial Sequence
  Description of Artificial Sequence: Synthetic oligonucleotide
aagcuguccuugcugcccu

SEQ ID NO: 2075979 - RNA, 19 nt, Artificial Sequence
  Description of Artificial Sequence: Synthetic oligonucleotide
gugacaaacacagcauuca

SEQ ID NO: 2075980 - RNA, 19 nt, Artificial Sequence
  Description of Artificial Sequence: Synthetic oligonucleotide
uggcgcugcguuuaucccc

SEQ ID NO: 2075981 - RNA, 19 nt, Artificial Sequence
  Description of Artificial Sequence: Synthetic oligonucleotide
aagcgucgggucucuuggg

SEQ ID NO: 2075982 - RNA, 19 nt, Artificial Sequence
  Description of Artificial Sequence: Synthetic oligonucleotide
acggacuggaugcucagaa

SEQ ID NO: 2075983 - RNA, 19 nt, Artificial Sequence
  Description of Artificial Sequence: Synthetic oligonucleotide
cugugcugacugaggagcg

SEQ ID NO: 2075984 - RNA, 19 nt, Artificial Sequence
  Description of Artificial Sequence: Synthetic oligonucleotide
guggacaaacccgggagag

SEQ ID NO: 2075985 - RNA, 19 nt, Artificial Sequence
  Description of Artificial Sequence: Synthetic oligonucleotide
aauggagggcgacccuaga

SEQ ID NO: 2075986 - RNA, 19 nt, Artificial Sequence
  Description of Artificial Sequence: Synthetic oligonucleotide
gaagcaccccgcuaaugga

SEQ ID NO: 2075987 - RNA, 19 nt, Artificial Sequence
  Description of Artificial Sequence: Synthetic oligonucleotide
cuagcacaggucaccuggc

SEQ ID NO: 2075988 - RNA, 19 nt, Artificial Sequence
  Description of Artificial Sequence: Synthetic oligonucleotide
accaugaagcaagcgucgg

SEQ ID NO: 2075989 - RNA, 19 nt, Artificial Sequence
  Description of Artificial Sequence: Synthetic oligonucleotide
agugugacaaacacagcau

SEQ ID NO: 2075990 - RNA, 19 nt, Artificial Sequence
  Description of Artificial Sequence: Synthetic oligonucleotide
guagaccaugaagcaagcg

SEQ ID NO: 2075991 - RNA, 19 nt, Artificial Sequence
  Description of Artificial Sequence: Synthetic oligonucleotide
aagaagcaccccgcuaaug

SEQ ID NO: 2075992 - RNA, 19 nt, Artificial Sequence
  Description of Artificial Sequence: Synthetic oligonucleotide
ggauuucaccauccggccg

SEQ ID NO: 2075993 - RNA, 19 nt, Artificial Sequence
  Description of Artificial Sequence: Synthetic oligonucleotide
uaucuaucucugccaggcu

SEQ ID NO: 2075994 - RNA, 19 nt, Artificial Sequence
  Description of Artificial Sequence: Synthetic oligonucleotide
caauggagggcgacccuag

SEQ ID NO: 2075995 - RNA, 19 nt, Artificial Sequence
  Description of Artificial Sequence: Synthetic oligonucleotide
uccucacgguucuugggga

SEQ ID NO: 2075996 - RNA, 19 nt, Artificial Sequence
  Description of Artificial Sequence: Synthetic oligonucleotide
gcuguugaggauccgcugc

SEQ ID NO: 2075997 - RNA, 19 nt, Artificial Sequence
  Description of Artificial Sequence: Synthetic oligonucleotide
caccuaguccuccucgccc

SEQ ID NO: 2075998 - RNA, 19 nt, Artificial Sequence
  Description of Artificial Sequence: Synthetic oligonucleotide
ucugcacaaucaugacaug

SEQ ID NO: 2075999 - RNA, 19 nt, Artificial Sequence
  Description of Artificial Sequence: Synthetic oligonucleotide
agacugugaucccgcugac

SEQ ID NO: 2076000 - RNA, 19 nt, Artificial Sequence
  Description of Artificial Sequence: Synthetic oligonucleotide
agaaagcugaagguucgga

SEQ ID NO: 2076001 - RNA, 19 nt, Artificial Sequence
  Description of Artificial Sequence: Synthetic oligonucleotide
aaaacauggucggcccgga

SEQ ID NO: 2076002 - RNA, 19 nt, Artificial Sequence
  Description of Artificial Sequence: Synthetic oligonucleotide
acaaacccgggagagggca

SEQ ID NO: 2076003 - RNA, 19 nt, Artificial Sequence
  Description of Artificial Sequence: Synthetic oligonucleotide
gaucccgcugacuguuccc

SEQ ID NO: 2076004 - RNA, 19 nt, Artificial Sequence
  Description of Artificial Sequence: Synthetic oligonucleotide
cauucagcucaaagaagca

SEQ ID NO: 2076005 - RNA, 19 nt, Artificial Sequence
  Description of Artificial Sequence: Synthetic oligonucleotide
caaucaugacauguggaca

SEQ ID NO: 2076006 - RNA, 19 nt, Artificial Sequence
  Description of Artificial Sequence: Synthetic oligonucleotide
cacaaucucaaagccaaga

SEQ ID NO: 2076007 - RNA, 19 nt, Artificial Sequence
  Description of Artificial Sequence: Synthetic oligonucleotide
cuggaugcucagaacccug

SEQ ID NO: 2076008 - RNA, 19 nt, Artificial Sequence
  Description of Artificial Sequence: Synthetic oligonucleotide
ccuggucuugucauuagac

SEQ ID NO: 2076009 - RNA, 19 nt, Artificial Sequence
  Description of Artificial Sequence: Synthetic oligonucleotide
gcugugcugacugaggagc

SEQ ID NO: 2076010 - RNA, 19 nt, Artificial Sequence
  Description of Artificial Sequence: Synthetic oligonucleotide
cuagcugaaagacugugau

SEQ ID NO: 2076011 - RNA, 19 nt, Artificial Sequence
  Description of Artificial Sequence: Synthetic oligonucleotide
gcguuuauccccuuccuuc

SEQ ID NO: 2076012 - RNA, 19 nt, Artificial Sequence
  Description of Artificial Sequence: Synthetic oligonucleotide
ucauuagacguuggcuccu

SEQ ID NO: 2076013 - RNA, 19 nt, Artificial Sequence
  Description of Artificial Sequence: Synthetic oligonucleotide
ugacuguucccucgcccac

SEQ ID NO: 2076014 - RNA, 19 nt, Artificial Sequence
  Description of Artificial Sequence: Synthetic oligonucleotide
cuggcguggagcguggcgc

SEQ ID NO: 2076015 - RNA, 19 nt, Artificial Sequence
  Description of Artificial Sequence: Synthetic oligonucleotide
ucacgguucuuggggaagc

SEQ ID NO: 2076016 - RNA, 19 nt, Artificial Sequence
  Description of Artificial Sequence: Synthetic oligonucleotide
ggaggugacacuaucuauc

SEQ ID NO: 2076017 - RNA, 19 nt, Artificial Sequence
  Description of Artificial Sequence: Synthetic oligonucleotide
gaagcaagcgucgggucuc

SEQ ID NO: 2076018 - RNA, 19 nt, Artificial Sequence
  Description of Artificial Sequence: Synthetic oligonucleotide
uggccaucuuaaacagaca

SEQ ID NO: 2076019 - RNA, 19 nt, Artificial Sequence
  Description of Artificial Sequence: Synthetic oligonucleotide
cucucuggcgaagcagugg

SEQ ID NO: 2076020 - RNA, 19 nt, Artificial Sequence
  Description of Artificial Sequence: Synthetic oligonucleotide
ccagcaaaaccuccgcugc

SEQ ID NO: 2076021 - RNA, 19 nt, Artificial Sequence
  Description of Artificial Sequence: Synthetic oligonucleotide
cucgucggaguagaggaug

SEQ ID NO: 2076022 - RNA, 19 nt, Artificial Sequence
  Description of Artificial Sequence: Synthetic oligonucleotide
uggagcguggcgcugcguu

SEQ ID NO: 2076023 - RNA, 19 nt, Artificial Sequence
  Description of Artificial Sequence: Synthetic oligonucleotide
auuagacguuggcuccucu

SEQ ID NO: 2076024 - RNA, 19 nt, Artificial Sequence
  Description of Artificial Sequence: Synthetic oligonucleotide
cacaccgcccuccagguga

SEQ ID NO: 2076025 - RNA, 19 nt, Artificial Sequence
  Description of Artificial Sequence: Synthetic oligonucleotide
ucagccgcucgucggagua

SEQ ID NO: 2076026 - RNA, 19 nt, Artificial Sequence
  Description of Artificial Sequence: Synthetic oligonucleotide
aacccuggucuugucauua

SEQ ID NO: 2076027 - RNA, 19 nt, Artificial Sequence
  Description of Artificial Sequence: Synthetic oligonucleotide
aucacuuuauuggguuuga

SEQ ID NO: 2076028 - RNA, 19 nt, Artificial Sequence
  Description of Artificial Sequence: Synthetic oligonucleotide
ggggaagcagaugaaaaca

SEQ ID NO: 2076029 - RNA, 19 nt, Artificial Sequence
  Description of Artificial Sequence: Synthetic oligonucleotide
cuccgcaaacuccaggaga

SEQ ID NO: 2076030 - RNA, 19 nt, Artificial Sequence
  Description of Artificial Sequence: Synthetic oligonucleotide
uacagcaauggagggcgac

SEQ ID NO: 2076031 - RNA, 19 nt, Artificial Sequence
  Description of Artificial Sequence: Synthetic oligonucleotide
aaacccgggagagggcaca

SEQ ID NO: 2076032 - RNA, 19 nt, Artificial Sequence
  Description of Artificial Sequence: Synthetic oligonucleotide
gaggccaccgccguuccac

SEQ ID NO: 2076033 - RNA, 19 nt, Artificial Sequence
  Description of Artificial Sequence: Synthetic oligonucleotide
acauguggacaaacccggg

SEQ ID NO: 2076034 - RNA, 19 nt, Artificial Sequence
  Description of Artificial Sequence: Synthetic oligonucleotide
guggcuguugaggauccgc

SEQ ID NO: 2076035 - RNA, 19 nt, Artificial Sequence
  Description of Artificial Sequence: Synthetic oligonucleotide
cacuugagugugacaaaca

SEQ ID NO: 2076036 - RNA, 19 nt, Artificial Sequence
  Description of Artificial Sequence: Synthetic oligonucleotide
ccagguuacuacagcaaug

SEQ ID NO: 2076037 - RNA, 19 nt, Artificial Sequence
  Description of Artificial Sequence: Synthetic oligonucleotide
cugggguccgaaaccagca

SEQ ID NO: 2076038 - RNA, 19 nt, Artificial Sequence
  Description of Artificial Sequence: Synthetic oligonucleotide
caagaucacuuuauugggu

SEQ ID NO: 2076039 - RNA, 19 nt, Artificial Sequence
  Description of Artificial Sequence: Synthetic oligonucleotide
ugggguccgaaaccagcaa

SEQ ID NO: 2076040 - RNA, 19 nt, Artificial Sequence
  Description of Artificial Sequence: Synthetic oligonucleotide
aacacagcauucagcucaa

SEQ ID NO: 2076041 - RNA, 19 nt, Artificial Sequence
  Description of Artificial Sequence: Synthetic oligonucleotide
guggcgcugcguuuauccc

SEQ ID NO: 2076042 - RNA, 19 nt, Artificial Sequence
  Description of Artificial Sequence: Synthetic oligonucleotide
ccaucuuaaacagacaaua

SEQ ID NO: 2076043 - RNA, 19 nt, Artificial Sequence
  Description of Artificial Sequence: Synthetic oligonucleotide
guuagugagcaagaucacu

SEQ ID NO: 2076044 - RNA, 19 nt, Artificial Sequence
  Description of Artificial Sequence: Synthetic oligonucleotide
gagcucgauguagaggcca

SEQ ID NO: 2076045 - RNA, 19 nt, Artificial Sequence
  Description of Artificial Sequence: Synthetic oligonucleotide
cauccggccgcuggggucc

SEQ ID NO: 2076046 - RNA, 19 nt, Artificial Sequence
  Description of Artificial Sequence: Synthetic oligonucleotide
accccgcuaauggagugag

SEQ ID NO: 2076047 - RNA, 19 nt, Artificial Sequence
  Description of Artificial Sequence: Synthetic oligonucleotide
agcaguggcuguugaggau

SEQ ID NO: 2076048 - RNA, 19 nt, Artificial Sequence
  Description of Artificial Sequence: Synthetic oligonucleotide
cauucagccgcucgucgga

SEQ ID NO: 2076049 - RNA, 19 nt, Artificial Sequence
  Description of Artificial Sequence: Synthetic oligonucleotide
ccaugaagcaagcgucggg

SEQ ID NO: 2076050 - RNA, 19 nt, Artificial Sequence
  Description of Artificial Sequence: Synthetic oligonucleotide
ggacccagguuacuacagc

SEQ ID NO: 2076051 - RNA, 19 nt, Artificial Sequence
  Description of Artificial Sequence: Synthetic oligonucleotide
acgguucuuggggaagcag

SEQ ID NO: 2076052 - RNA, 19 nt, Artificial Sequence
  Description of Artificial Sequence: Synthetic oligonucleotide
cguggcgcugcguuuaucc

SEQ ID NO: 2076053 - RNA, 19 nt, Artificial Sequence
  Description of Artificial Sequence: Synthetic oligonucleotide
cucuagcacaggucaccug

SEQ ID NO: 2076054 - RNA, 19 nt, Artificial Sequence
  Description of Artificial Sequence: Synthetic oligonucleotide
caaacccgggagagggcac

SEQ ID NO: 2076055 - RNA, 19 nt, Artificial Sequence
  Description of Artificial Sequence: Synthetic oligonucleotide
cugcucuagcacaggucac

SEQ ID NO: 2076056 - RNA, 19 nt, Artificial Sequence
  Description of Artificial Sequence: Synthetic oligonucleotide
gcucaaagaagcaccccgc

SEQ ID NO: 2076057 - RNA, 19 nt, Artificial Sequence
  Description of Artificial Sequence: Synthetic oligonucleotide
cccaccugggaucuucagg

SEQ ID NO: 2076058 - RNA, 19 nt, Artificial Sequence
  Description of Artificial Sequence: Synthetic oligonucleotide
agcauuuauucugcacaau

SEQ ID NO: 2076059 - RNA, 19 nt, Artificial Sequence
  Description of Artificial Sequence: Synthetic oligonucleotide
caggggaggugacacuauc

SEQ ID NO: 2076060 - RNA, 19 nt, Artificial Sequence
  Description of Artificial Sequence: Synthetic oligonucleotide
aggggaggugacacuaucu

SEQ ID NO: 2076061 - RNA, 19 nt, Artificial Sequence
  Description of Artificial Sequence: Synthetic oligonucleotide
aacccgggagagggcacag

SEQ ID NO: 2076062 - RNA, 19 nt, Artificial Sequence
  Description of Artificial Sequence: Synthetic oligonucleotide
cccgggagagggcacaggg

SEQ ID NO: 2076063 - RNA, 19 nt, Artificial Sequence
  Description of Artificial Sequence: Synthetic oligonucleotide
cagcucaaagaagcacccc

SEQ ID NO: 2076064 - RNA, 19 nt, Artificial Sequence
  Description of Artificial Sequence: Synthetic oligonucleotide
gcaagcgucgggucucuug

SEQ ID NO: 2076065 - RNA, 19 nt, Artificial Sequence
  Description of Artificial Sequence: Synthetic oligonucleotide
gucggcccggagcugcucc

SEQ ID NO: 2076066 - RNA, 19 nt, Artificial Sequence
  Description of Artificial Sequence: Synthetic oligonucleotide
gcaaacuccaggagagcug

SEQ ID NO: 2076067 - RNA, 19 nt, Artificial Sequence
  Description of Artificial Sequence: Synthetic oligonucleotide
agggcggcucuguccucac

SEQ ID NO: 2076068 - RNA, 19 nt, Artificial Sequence
  Description of Artificial Sequence: Synthetic oligonucleotide
uugcugcccucaggcaggg

SEQ ID NO: 2076069 - RNA, 19 nt, Artificial Sequence
  Description of Artificial Sequence: Synthetic oligonucleotide
gcguguagaccaugaagca

SEQ ID NO: 2076070 - RNA, 19 nt, Artificial Sequence
  Description of Artificial Sequence: Synthetic oligonucleotide
ugaccugcuuggccuccgu

SEQ ID NO: 2076071 - RNA, 19 nt, Artificial Sequence
  Description of Artificial Sequence: Synthetic oligonucleotide
gagggcgacccuagaacuc

SEQ ID NO: 2076072 - RNA, 19 nt, Artificial Sequence
  Description of Artificial Sequence: Synthetic oligonucleotide
aucaugacauguggacaaa

SEQ ID NO: 2076073 - RNA, 19 nt, Artificial Sequence
  Description of Artificial Sequence: Synthetic oligonucleotide
cccgcugacuguucccucg

SEQ ID NO: 2076074 - RNA, 19 nt, Artificial Sequence
  Description of Artificial Sequence: Synthetic oligonucleotide
cauuagacguuggcuccuc

SEQ ID NO: 2076075 - RNA, 19 nt, Artificial Sequence
  Description of Artificial Sequence: Synthetic oligonucleotide
accauccggccgcuggggu

SEQ ID NO: 2076076 - RNA, 19 nt, Artificial Sequence
  Description of Artificial Sequence: Synthetic oligonucleotide
uggcguggagcguggcgcu

SEQ ID NO: 2076077 - RNA, 19 nt, Artificial Sequence
  Description of Artificial Sequence: Synthetic oligonucleotide
cugcacaaucaugacaugu

SEQ ID NO: 2076078 - RNA, 19 nt, Artificial Sequence
  Description of Artificial Sequence: Synthetic oligonucleotide
cucaaagaagcaccccgcu

SEQ ID NO: 2076079 - RNA, 19 nt, Artificial Sequence
  Description of Artificial Sequence: Synthetic oligonucleotide
gugagcaagaucacuuuau

SEQ ID NO: 2076080 - RNA, 19 nt, Artificial Sequence
  Description of Artificial Sequence: Synthetic oligonucleotide
aagcaagcgucgggucucu

SEQ ID NO: 2076081 - RNA, 19 nt, Artificial Sequence
  Description of Artificial Sequence: Synthetic oligonucleotide
agcaccccgcuaauggagu

SEQ ID NO: 2076082 - RNA, 19 nt, Artificial Sequence
  Description of Artificial Sequence: Synthetic oligonucleotide
gccgcugggguccgaaacc

SEQ ID NO: 2076083 - RNA, 19 nt, Artificial Sequence
  Description of Artificial Sequence: Synthetic oligonucleotide
ggggaggugacacuaucua

SEQ ID NO: 2076084 - RNA, 19 nt, Artificial Sequence
  Description of Artificial Sequence: Synthetic oligonucleotide
ucggaguagggcggcucug

SEQ ID NO: 2076085 - RNA, 19 nt, Artificial Sequence
  Description of Artificial Sequence: Synthetic oligonucleotide
gcgacccuagaacucucgc

SEQ ID NO: 2076086 - RNA, 19 nt, Artificial Sequence
  Description of Artificial Sequence: Synthetic oligonucleotide
cccgcuaauggagugagca

SEQ ID NO: 2076087 - RNA, 19 nt, Artificial Sequence
  Description of Artificial Sequence: Synthetic oligonucleotide
uggggacgaggggaugccc

SEQ ID NO: 2076088 - RNA, 19 nt, Artificial Sequence
  Description of Artificial Sequence: Synthetic oligonucleotide
gccgcggcugugcugacug

SEQ ID NO: 2076089 - RNA, 19 nt, Artificial Sequence
  Description of Artificial Sequence: Synthetic oligonucleotide
gcaccuaguccuccucgcc

SEQ ID NO: 2076090 - RNA, 19 nt, Artificial Sequence
  Description of Artificial Sequence: Synthetic oligonucleotide
gcuagcugaaagacuguga

SEQ ID NO: 2076091 - RNA, 19 nt, Artificial Sequence
  Description of Artificial Sequence: Synthetic oligonucleotide
accgcccuccaggugaccu

SEQ ID NO: 2076092 - RNA, 19 nt, Artificial Sequence
  Description of Artificial Sequence: Synthetic oligonucleotide
ccaccgccguuccacaccg

SEQ ID NO: 2076093 - RNA, 19 nt, Artificial Sequence
  Description of Artificial Sequence: Synthetic oligonucleotide
auuucaccauccggccgcu

SEQ ID NO: 2076094 - RNA, 19 nt, Artificial Sequence
  Description of Artificial Sequence: Synthetic oligonucleotide
ggagggcgacccuagaacu

SEQ ID NO: 2076095 - RNA, 19 nt, Artificial Sequence
  Description of Artificial Sequence: Synthetic oligonucleotide
cuccgugagcacggacugg

SEQ ID NO: 2076096 - RNA, 19 nt, Artificial Sequence
  Description of Artificial Sequence: Synthetic oligonucleotide
gucggaguagaggaugcua

SEQ ID NO: 2076097 - RNA, 19 nt, Artificial Sequence
  Description of Artificial Sequence: Synthetic oligonucleotide
caccauccggccgcugggg

SEQ ID NO: 2076098 - RNA, 19 nt, Artificial Sequence
  Description of Artificial Sequence: Synthetic oligonucleotide
ccuccgugagcacggacug

SEQ ID NO: 2076099 - RNA, 19 nt, Artificial Sequence
  Description of Artificial Sequence: Synthetic oligonucleotide
acaccgcccuccaggugac

SEQ ID NO: 2076100 - RNA, 19 nt, Artificial Sequence
  Description of Artificial Sequence: Synthetic oligonucleotide
ggcgacccuagaacucucg

SEQ ID NO: 2076101 - RNA, 19 nt, Artificial Sequence
  Description of Artificial Sequence: Synthetic oligonucleotide
ggaguagaggaugcuagcu

SEQ ID NO: 2076102 - RNA, 19 nt, Artificial Sequence
  Description of Artificial Sequence: Synthetic oligonucleotide
guucggaguagggcggcuc

SEQ ID NO: 2076103 - RNA, 19 nt, Artificial Sequence
  Description of Artificial Sequence: Synthetic oligonucleotide
gccaccgccguuccacacc

SEQ ID NO: 2076104 - RNA, 19 nt, Artificial Sequence
  Description of Artificial Sequence: Synthetic oligonucleotide
augcuagcugaaagacugu

SEQ ID NO: 2076105 - RNA, 19 nt, Artificial Sequence
  Description of Artificial Sequence: Synthetic oligonucleotide
ggaugcccgggucucacaa

SEQ ID NO: 2076106 - RNA, 19 nt, Artificial Sequence
  Description of Artificial Sequence: Synthetic oligonucleotide
cacucucagcgccgccgcc

SEQ ID NO: 2076107 - RNA, 19 nt, Artificial Sequence
  Description of Artificial Sequence: Synthetic oligonucleotide
ucccgcugacuguucccuc

SEQ ID NO: 2076108 - RNA, 19 nt, Artificial Sequence
  Description of Artificial Sequence: Synthetic oligonucleotide
gggguccgaaaccagcaaa

SEQ ID NO: 2076109 - RNA, 19 nt, Artificial Sequence
  Description of Artificial Sequence: Synthetic oligonucleotide
ggccgcugggguccgaaac

SEQ ID NO: 2076110 - RNA, 19 nt, Artificial Sequence
  Description of Artificial Sequence: Synthetic oligonucleotide
gcacggacuggaugcucag

SEQ ID NO: 2076111 - RNA, 19 nt, Artificial Sequence
  Description of Artificial Sequence: Synthetic oligonucleotide
gacgaggggaugcccgggu

SEQ ID NO: 2076112 - RNA, 19 nt, Artificial Sequence
  Description of Artificial Sequence: Synthetic oligonucleotide
ccuccgcaaacuccaggag

SEQ ID NO: 2076113 - RNA, 19 nt, Artificial Sequence
  Description of Artificial Sequence: Synthetic oligonucleotide
ggauccgcugcagggagga

SEQ ID NO: 2076114 - RNA, 19 nt, Artificial Sequence
  Description of Artificial Sequence: Synthetic oligonucleotide
ggguccgaaaccagcaaaa

SEQ ID NO: 2076115 - RNA, 19 nt, Artificial Sequence
  Description of Artificial Sequence: Synthetic oligonucleotide
aggccaccgccguuccaca

SEQ ID NO: 2076116 - RNA, 19 nt, Artificial Sequence
  Description of Artificial Sequence: Synthetic oligonucleotide
gcugggagcucgauguaga

SEQ ID NO: 2076117 - RNA, 19 nt, Artificial Sequence
  Description of Artificial Sequence: Synthetic oligonucleotide
gcucagaacccuggucuug

SEQ ID NO: 2076118 - RNA, 19 nt, Artificial Sequence
  Description of Artificial Sequence: Synthetic oligonucleotide
cuaauggagugagcauuua

SEQ ID NO: 2076119 - RNA, 19 nt, Artificial Sequence
  Description of Artificial Sequence: Synthetic oligonucleotide
cucagaacccuggucuugu

SEQ ID NO: 2076120 - RNA, 19 nt, Artificial Sequence
  Description of Artificial Sequence: Synthetic oligonucleotide
cuacagcaauggagggcga

SEQ ID NO: 2076121 - RNA, 19 nt, Artificial Sequence
  Description of Artificial Sequence: Synthetic oligonucleotide
acccgggagagggcacagg

SEQ ID NO: 2076122 - RNA, 19 nt, Artificial Sequence
  Description of Artificial Sequence: Synthetic oligonucleotide
gcaccccgcuaauggagug

SEQ ID NO: 2076123 - RNA, 19 nt, Artificial Sequence
  Description of Artificial Sequence: Synthetic oligonucleotide
cccggacccagguuacuac

SEQ ID NO: 2076124 - RNA, 19 nt, Artificial Sequence
  Description of Artificial Sequence: Synthetic oligonucleotide
ggacgaggggaugcccggg

SEQ ID NO: 2076125 - RNA, 19 nt, Artificial Sequence
  Description of Artificial Sequence: Synthetic oligonucleotide
ggucaccuggccaucuuaa

SEQ ID NO: 2076126 - RNA, 19 nt, Artificial Sequence
  Description of Artificial Sequence: Synthetic oligonucleotide
gccaagaaagcugaagguu

SEQ ID NO: 2076127 - RNA, 19 nt, Artificial Sequence
  Description of Artificial Sequence: Synthetic oligonucleotide
gggaggugacacuaucuau

SEQ ID NO: 2076128 - RNA, 19 nt, Artificial Sequence
  Description of Artificial Sequence: Synthetic oligonucleotide
gagcguggcgcugcguuua

SEQ ID NO: 2076129 - RNA, 19 nt, Artificial Sequence
  Description of Artificial Sequence: Synthetic oligonucleotide
ggcaugguguggcuggcgu

SEQ ID NO: 2076130 - RNA, 19 nt, Artificial Sequence
  Description of Artificial Sequence: Synthetic oligonucleotide
cuccagcguguagaccaug

SEQ ID NO: 2076131 - RNA, 19 nt, Artificial Sequence
  Description of Artificial Sequence: Synthetic oligonucleotide
ccuaguccuccucgcccgg

SEQ ID NO: 2076132 - RNA, 19 nt, Artificial Sequence
  Description of Artificial Sequence: Synthetic oligonucleotide
cugcguuuauccccuuccu

SEQ ID NO: 2076133 - RNA, 19 nt, Artificial Sequence
  Description of Artificial Sequence: Synthetic oligonucleotide
gcugcacucucagcgccgc

SEQ ID NO: 2076134 - RNA, 19 nt, Artificial Sequence
  Description of Artificial Sequence: Synthetic oligonucleotide
cuggcgaagcaguggcugu

SEQ ID NO: 2076135 - RNA, 19 nt, Artificial Sequence
  Description of Artificial Sequence: Synthetic oligonucleotide
agcguggcgcugcguuuau

SEQ ID NO: 2076136 - RNA, 19 nt, Artificial Sequence
  Description of Artificial Sequence: Synthetic oligonucleotide
ggaugcuagcugaaagacu

SEQ ID NO: 2076137 - RNA, 19 nt, Artificial Sequence
  Description of Artificial Sequence: Synthetic oligonucleotide
ccgcucgucggaguagagg

SEQ ID NO: 2076138 - RNA, 19 nt, Artificial Sequence
  Description of Artificial Sequence: Synthetic oligonucleotide
cgguucuuggggaagcaga

SEQ ID NO: 2076139 - RNA, 19 nt, Artificial Sequence
  Description of Artificial Sequence: Synthetic oligonucleotide
gcgucgggucucuugggga

SEQ ID NO: 2076140 - RNA, 19 nt, Artificial Sequence
  Description of Artificial Sequence: Synthetic oligonucleotide
gaacccuggucuugucauu

SEQ ID NO: 2076141 - RNA, 19 nt, Artificial Sequence
  Description of Artificial Sequence: Synthetic oligonucleotide
cgucgggucucuuggggac

SEQ ID NO: 2076142 - RNA, 19 nt, Artificial Sequence
  Description of Artificial Sequence: Synthetic oligonucleotide
ccaacacuugagugugaca

SEQ ID NO: 2076143 - RNA, 19 nt, Artificial Sequence
  Description of Artificial Sequence: Synthetic oligonucleotide
cagccgcucgucggaguag

SEQ ID NO: 2076144 - RNA, 19 nt, Artificial Sequence
  Description of Artificial Sequence: Synthetic oligonucleotide
ccgggucucacaaucucaa

SEQ ID NO: 2076145 - RNA, 19 nt, Artificial Sequence
  Description of Artificial Sequence: Synthetic oligonucleotide
cacgguucuuggggaagca

SEQ ID NO: 2076146 - RNA, 19 nt, Artificial Sequence
  Description of Artificial Sequence: Synthetic oligonucleotide
cauggucggcccggagcug

SEQ ID NO: 2076147 - RNA, 19 nt, Artificial Sequence
  Description of Artificial Sequence: Synthetic oligonucleotide
uccucgcccggguccucuc

SEQ ID NO: 2076148 - RNA, 19 nt, Artificial Sequence
  Description of Artificial Sequence: Synthetic oligonucleotide
cggacuggaugcucagaac

SEQ ID NO: 2076149 - RNA, 19 nt, Artificial Sequence
  Description of Artificial Sequence: Synthetic oligonucleotide
caccccgcuaauggaguga

SEQ ID NO: 2076150 - RNA, 19 nt, Artificial Sequence
  Description of Artificial Sequence: Synthetic oligonucleotide
gcaauggagggcgacccua

SEQ ID NO: 2076151 - RNA, 19 nt, Artificial Sequence
  Description of Artificial Sequence: Synthetic oligonucleotide
guagggcggcucuguccuc

SEQ ID NO: 2076152 - RNA, 19 nt, Artificial Sequence
  Description of Artificial Sequence: Synthetic oligonucleotide
agccaacacuugaguguga

SEQ ID NO: 2076153 - RNA, 19 nt, Artificial Sequence
  Description of Artificial Sequence: Synthetic oligonucleotide
ccgcugacuguucccucgc

SEQ ID NO: 2076154 - RNA, 19 nt, Artificial Sequence
  Description of Artificial Sequence: Synthetic oligonucleotide
gguuugagccaggggaggu

SEQ ID NO: 2076155 - RNA, 19 nt, Artificial Sequence
  Description of Artificial Sequence: Synthetic oligonucleotide
cacggacuggaugcucaga

SEQ ID NO: 2076156 - RNA, 19 nt, Artificial Sequence
  Description of Artificial Sequence: Synthetic oligonucleotide
aggggaugcccgggucuca

SEQ ID NO: 2076157 - RNA, 19 nt, Artificial Sequence
  Description of Artificial Sequence: Synthetic oligonucleotide
ccauccggccgcugggguc

SEQ ID NO: 2076158 - RNA, 19 nt, Artificial Sequence
  Description of Artificial Sequence: Synthetic oligonucleotide
gccaggggaggugacacua

SEQ ID NO: 2076159 - RNA, 19 nt, Artificial Sequence
  Description of Artificial Sequence: Synthetic oligonucleotide
caccgccguuccacaccgc

SEQ ID NO: 2076160 - RNA, 19 nt, Artificial Sequence
  Description of Artificial Sequence: Synthetic oligonucleotide
cugcgaagcuguccuugcu

SEQ ID NO: 2076161 - RNA, 19 nt, Artificial Sequence
  Description of Artificial Sequence: Synthetic oligonucleotide
gccuccgugagcacggacu

SEQ ID NO: 2076162 - RNA, 19 nt, Artificial Sequence
  Description of Artificial Sequence: Synthetic oligonucleotide
cucuggcgaagcaguggcu

SEQ ID NO: 2076163 - RNA, 19 nt, Artificial Sequence
  Description of Artificial Sequence: Synthetic oligonucleotide
gacugaggagcggcauggu

SEQ ID NO: 2076164 - RNA, 19 nt, Artificial Sequence
  Description of Artificial Sequence: Synthetic oligonucleotide
gcguggagcguggcgcugc

SEQ ID NO: 2076165 - RNA, 19 nt, Artificial Sequence
  Description of Artificial Sequence: Synthetic oligonucleotide
cccagguuacuacagcaau

SEQ ID NO: 2076166 - RNA, 19 nt, Artificial Sequence
  Description of Artificial Sequence: Synthetic oligonucleotide
cguguagaccaugaagcaa

SEQ ID NO: 2076167 - RNA, 19 nt, Artificial Sequence
  Description of Artificial Sequence: Synthetic oligonucleotide
ccguuccacaccgcccucc

SEQ ID NO: 2076168 - RNA, 19 nt, Artificial Sequence
  Description of Artificial Sequence: Synthetic oligonucleotide
ggcgcugcguuuauccccu

SEQ ID NO: 2076169 - RNA, 19 nt, Artificial Sequence
  Description of Artificial Sequence: Synthetic oligonucleotide
ccgcaaacuccaggagagc

SEQ ID NO: 2076170 - RNA, 19 nt, Artificial Sequence
  Description of Artificial Sequence: Synthetic oligonucleotide
gggaugcccgggucucaca

SEQ ID NO: 2076171 - RNA, 19 nt, Artificial Sequence
  Description of Artificial Sequence: Synthetic oligonucleotide
ggccuccgugagcacggac

SEQ ID NO: 2076172 - RNA, 19 nt, Artificial Sequence
  Description of Artificial Sequence: Synthetic oligonucleotide
auccggccgcugggguccg

SEQ ID NO: 2076173 - RNA, 19 nt, Artificial Sequence
  Description of Artificial Sequence: Synthetic oligonucleotide
ccccgcuaauggagugagc

SEQ ID NO: 2076174 - RNA, 19 nt, Artificial Sequence
  Description of Artificial Sequence: Synthetic oligonucleotide
cgcggcugugcugacugag

SEQ ID NO: 2076175 - RNA, 19 nt, Artificial Sequence
  Description of Artificial Sequence: Synthetic oligonucleotide
ggagcggcaugguguggcu

SEQ ID NO: 2076176 - RNA, 19 nt, Artificial Sequence
  Description of Artificial Sequence: Synthetic oligonucleotide
cgcugacuguucccucgcc

SEQ ID NO: 2076177 - RNA, 19 nt, Artificial Sequence
  Description of Artificial Sequence: Synthetic oligonucleotide
cgcugggguccgaaaccag

SEQ ID NO: 2076178 - RNA, 19 nt, Artificial Sequence
  Description of Artificial Sequence: Synthetic oligonucleotide
ggcguggagcguggcgcug

SEQ ID NO: 2076179 - RNA, 19 nt, Artificial Sequence
  Description of Artificial Sequence: Synthetic oligonucleotide
ggccccggacccagguuac

SEQ ID NO: 2076180 - RNA, 19 nt, Artificial Sequence
  Description of Artificial Sequence: Synthetic oligonucleotide
cgacccuagaacucucgcu

SEQ ID NO: 2076181 - RNA, 19 nt, Artificial Sequence
  Description of Artificial Sequence: Synthetic oligonucleotide
gccgcucgucggaguagag

SEQ ID NO: 2076182 - RNA, 19 nt, Artificial Sequence
  Description of Artificial Sequence: Synthetic oligonucleotide
ccacaccgcccuccaggug

SEQ ID NO: 2076183 - RNA, 19 nt, Artificial Sequence
  Description of Artificial Sequence: Synthetic oligonucleotide
agcaagcgucgggucucuu

SEQ ID NO: 2076184 - RNA, 19 nt, Artificial Sequence
  Description of Artificial Sequence: Synthetic oligonucleotide
ccgcugggguccgaaacca

SEQ ID NO: 2076185 - RNA, 19 nt, Artificial Sequence
  Description of Artificial Sequence: Synthetic oligonucleotide
gccguuccacaccgcccuc

SEQ ID NO: 2076186 - RNA, 19 nt, Artificial Sequence
  Description of Artificial Sequence: Synthetic oligonucleotide
gggcgacccuagaacucuc

SEQ ID NO: 2076187 - RNA, 19 nt, Artificial Sequence
  Description of Artificial Sequence: Synthetic oligonucleotide
cgcuaauggagugagcauu

SEQ ID NO: 2076188 - RNA, 19 nt, Artificial Sequence
  Description of Artificial Sequence: Synthetic oligonucleotide
gccggcaccuaguccuccu

SEQ ID NO: 2076189 - RNA, 19 nt, Artificial Sequence
  Description of Artificial Sequence: Synthetic oligonucleotide
ccgcuaauggagugagcau

SEQ ID NO: 2076190 - RNA, 19 nt, Artificial Sequence
  Description of Artificial Sequence: Synthetic oligonucleotide
caccgaggccccggaccca

SEQ ID NO: 2076191 - RNA, 19 nt, Artificial Sequence
  Description of Artificial Sequence: Synthetic oligonucleotide
cgggucucacaaucucaaa

SEQ ID NO: 2076192 - RNA, 19 nt, Artificial Sequence
  Description of Artificial Sequence: Synthetic oligonucleotide
uccggccgcugggguccga

SEQ ID NO: 2076193 - RNA, 19 nt, Artificial Sequence
  Description of Artificial Sequence: Synthetic oligonucleotide
ccccggacccagguuacua

SEQ ID NO: 2076194 - RNA, 19 nt, Artificial Sequence
  Description of Artificial Sequence: Synthetic oligonucleotide
gcguggcgcugcguuuauc

SEQ ID NO: 2076195 - RNA, 19 nt, Artificial Sequence
  Description of Artificial Sequence: Synthetic oligonucleotide
ccgcggcugugcugacuga

SEQ ID NO: 2076196 - RNA, 19 nt, Artificial Sequence
  Description of Artificial Sequence: Synthetic oligonucleotide
cgggucucuuggggacgag

SEQ ID NO: 2076197 - RNA, 19 nt, Artificial Sequence
  Description of Artificial Sequence: Synthetic oligonucleotide
cggaguagggcggcucugu

SEQ ID NO: 2076198 - RNA, 19 nt, Artificial Sequence
  Description of Artificial Sequence: Synthetic oligonucleotide
ccgugagcacggacuggau

SEQ ID NO: 2076199 - RNA, 19 nt, Artificial Sequence
  Description of Artificial Sequence: Synthetic oligonucleotide
ccucgcccggguccucucu

SEQ ID NO: 2076200 - RNA, 19 nt, Artificial Sequence
  Description of Artificial Sequence: Synthetic oligonucleotide
cgucggaguagaggaugcu

SEQ ID NO: 2076201 - RNA, 19 nt, Artificial Sequence
  Description of Artificial Sequence: Synthetic oligonucleotide
ccggccgcugggguccgaa

SEQ ID NO: 2076202 - RNA, 19 nt, Artificial Sequence
  Description of Artificial Sequence: Synthetic oligonucleotide
cggcccggagcugcuccuc

SEQ ID NO: 2076203 - RNA, 19 nt, Artificial Sequence
  Description of Artificial Sequence: Synthetic oligonucleotide
cggccgcugggguccgaaa

SEQ ID NO: 2076204 - RNA, 19 nt, Artificial Sequence
  Description of Artificial Sequence: Synthetic oligonucleotide
gcgcugcguuuauccccuu

SEQ ID NO: 2076205 - RNA, 19 nt, Artificial Sequence
  Description of Artificial Sequence: Synthetic oligonucleotide
ucauauaugauccaaaugu

SEQ ID NO: 2076206 - RNA, 19 nt, Artificial Sequence
  Description of Artificial Sequence: Synthetic oligonucleotide
aaagcuagaauucgaauag

SEQ ID NO: 2076207 - RNA, 19 nt, Artificial Sequence
  Description of Artificial Sequence: Synthetic oligonucleotide
aauagcacuaggcauuucg

SEQ ID NO: 2076208 - RNA, 19 nt, Artificial Sequence
  Description of Artificial Sequence: Synthetic oligonucleotide
aacaaugccaaaucaucgc

SEQ ID NO: 2076209 - RNA, 19 nt, Artificial Sequence
  Description of Artificial Sequence: Synthetic oligonucleotide
aauucggucauacaguugu

SEQ ID NO: 2076210 - RNA, 19 nt, Artificial Sequence
  Description of Artificial Sequence: Synthetic oligonucleotide
ucguaaacaagucacaggc

SEQ ID NO: 2076211 - RNA, 19 nt, Artificial Sequence
  Description of Artificial Sequence: Synthetic oligonucleotide
guauaaaugguugugaggg

SEQ ID NO: 2076212 - RNA, 19 nt, Artificial Sequence
  Description of Artificial Sequence: Synthetic oligonucleotide
auaacugaccucuugagag

SEQ ID NO: 2076213 - RNA, 19 nt, Artificial Sequence
  Description of Artificial Sequence: Synthetic oligonucleotide
aauucgaauagcacuaggc

SEQ ID NO: 2076214 - RNA, 19 nt, Artificial Sequence
  Description of Artificial Sequence: Synthetic oligonucleotide
cauuaauuaauucuucucc

SEQ ID NO: 2076215 - RNA, 19 nt, Artificial Sequence
  Description of Artificial Sequence: Synthetic oligonucleotide
ucuucaacugccuuaagag

SEQ ID NO: 2076216 - RNA, 19 nt, Artificial Sequence
  Description of Artificial Sequence: Synthetic oligonucleotide
uaaagcuaaugucaaagag

SEQ ID NO: 2076217 - RNA, 19 nt, Artificial Sequence
  Description of Artificial Sequence: Synthetic oligonucleotide
auugauauaaaguucugca

SEQ ID NO: 2076218 - RNA, 19 nt, Artificial Sequence
  Description of Artificial Sequence: Synthetic oligonucleotide
uguucauugauauaaaguu

SEQ ID NO: 2076219 - RNA, 19 nt, Artificial Sequence
  Description of Artificial Sequence: Synthetic oligonucleotide
aucauuagcuccuccaagc

SEQ ID NO: 2076220 - RNA, 19 nt, Artificial Sequence
  Description of Artificial Sequence: Synthetic oligonucleotide
gaaaccuuaagacugugug

SEQ ID NO: 2076221 - RNA, 19 nt, Artificial Sequence
  Description of Artificial Sequence: Synthetic oligonucleotide
aaucaucgcgaccauaguc

SEQ ID NO: 2076222 - RNA, 19 nt, Artificial Sequence
  Description of Artificial Sequence: Synthetic oligonucleotide
uauaugauccaaaugucgu

SEQ ID NO: 2076223 - RNA, 19 nt, Artificial Sequence
  Description of Artificial Sequence: Synthetic oligonucleotide
ugcaauguuuccaacaugu

SEQ ID NO: 2076224 - RNA, 19 nt, Artificial Sequence
  Description of Artificial Sequence: Synthetic oligonucleotide
uguuugguaaagcuaaugu

SEQ ID NO: 2076225 - RNA, 19 nt, Artificial Sequence
  Description of Artificial Sequence: Synthetic oligonucleotide
aaacaaugccaaaucaucg

SEQ ID NO: 2076226 - RNA, 19 nt, Artificial Sequence
  Description of Artificial Sequence: Synthetic oligonucleotide
aguauaaaugguugugagg

SEQ ID NO: 2076227 - RNA, 19 nt, Artificial Sequence
  Description of Artificial Sequence: Synthetic oligonucleotide
cauuucguaaacaagucac

SEQ ID NO: 2076228 - RNA, 19 nt, Artificial Sequence
  Description of Artificial Sequence: Synthetic oligonucleotide
aguucugcaagcucaugcc

SEQ ID NO: 2076229 - RNA, 19 nt, Artificial Sequence
  Description of Artificial Sequence: Synthetic oligonucleotide
cuuacuucgaccugcaaac

SEQ ID NO: 2076230 - RNA, 19 nt, Artificial Sequence
  Description of Artificial Sequence: Synthetic oligonucleotide
ugauuagcagcccaacuag

SEQ ID NO: 2076231 - RNA, 19 nt, Artificial Sequence
  Description of Artificial Sequence: Synthetic oligonucleotide
gguguauuugacuucagcg

SEQ ID NO: 2076232 - RNA, 19 nt, Artificial Sequence
  Description of Artificial Sequence: Synthetic oligonucleotide
uuuaucucgcauuucuucc

SEQ ID NO: 2076233 - RNA, 19 nt, Artificial Sequence
  Description of Artificial Sequence: Synthetic oligonucleotide
caaucuuacgcuuucuugc

SEQ ID NO: 2076234 - RNA, 19 nt, Artificial Sequence
  Description of Artificial Sequence: Synthetic oligonucleotide
uuucuugaaagcucgaggu

SEQ ID NO: 2076235 - RNA, 19 nt, Artificial Sequence
  Description of Artificial Sequence: Synthetic oligonucleotide
cugaagacaaaacaaugcc

SEQ ID NO: 2076236 - RNA, 19 nt, Artificial Sequence
  Description of Artificial Sequence: Synthetic oligonucleotide
uuauuugaacacauucuug

SEQ ID NO: 2076237 - RNA, 19 nt, Artificial Sequence
  Description of Artificial Sequence: Synthetic oligonucleotide
uuggauuagaagcaauaug

SEQ ID NO: 2076238 - RNA, 19 nt, Artificial Sequence
  Description of Artificial Sequence: Synthetic oligonucleotide
uucauauaugauccaaaug

SEQ ID NO: 2076239 - RNA, 19 nt, Artificial Sequence
  Description of Artificial Sequence: Synthetic oligonucleotide
gcaaaauucggucauacag

SEQ ID NO: 2076240 - RNA, 19 nt, Artificial Sequence
  Description of Artificial Sequence: Synthetic oligonucleotide
aaagcuaaugucaaagagu

SEQ ID NO: 2076241 - RNA, 19 nt, Artificial Sequence
  Description of Artificial Sequence: Synthetic oligonucleotide
uaauuaauucuucuccgac

SEQ ID NO: 2076242 - RNA, 19 nt, Artificial Sequence
  Description of Artificial Sequence: Synthetic oligonucleotide
guuuguuggaucuucuugc

SEQ ID NO: 2076243 - RNA, 19 nt, Artificial Sequence
  Description of Artificial Sequence: Synthetic oligonucleotide
uucguaaacaagucacagg

SEQ ID NO: 2076244 - RNA, 19 nt, Artificial Sequence
  Description of Artificial Sequence: Synthetic oligonucleotide
aucacuuguucauauauga

SEQ ID NO: 2076245 - RNA, 19 nt, Artificial Sequence
  Description of Artificial Sequence: Synthetic oligonucleotide
ucgaccugcaaacugauaa

SEQ ID NO: 2076246 - RNA, 19 nt, Artificial Sequence
  Description of Artificial Sequence: Synthetic oligonucleotide
ucaucauaucuuuccauag

SEQ ID NO: 2076247 - RNA, 19 nt, Artificial Sequence
  Description of Artificial Sequence: Synthetic oligonucleotide
uuaauuaauucuucuccga

SEQ ID NO: 2076248 - RNA, 19 nt, Artificial Sequence
  Description of Artificial Sequence: Synthetic oligonucleotide
uuagucaucauuagcuccu

SEQ ID NO: 2076249 - RNA, 19 nt, Artificial Sequence
  Description of Artificial Sequence: Synthetic oligonucleotide
uugauaacugaccucuuga

SEQ ID NO: 2076250 - RNA, 19 nt, Artificial Sequence
  Description of Artificial Sequence: Synthetic oligonucleotide
aaaauucggucauacaguu

SEQ ID NO: 2076251 - RNA, 19 nt, Artificial Sequence
  Description of Artificial Sequence: Synthetic oligonucleotide
auauaugauccaaaugucg

SEQ ID NO: 2076252 - RNA, 19 nt, Artificial Sequence
  Description of Artificial Sequence: Synthetic oligonucleotide
caagcuuagaagcauaauc

SEQ ID NO: 2076253 - RNA, 19 nt, Artificial Sequence
  Description of Artificial Sequence: Synthetic oligonucleotide
uuagaagcaauaugacuug

SEQ ID NO: 2076254 - RNA, 19 nt, Artificial Sequence
  Description of Artificial Sequence: Synthetic oligonucleotide
ucuuacuucgaccugcaaa

SEQ ID NO: 2076255 - RNA, 19 nt, Artificial Sequence
  Description of Artificial Sequence: Synthetic oligonucleotide
aggguuagucaucauuagc

SEQ ID NO: 2076256 - RNA, 19 nt, Artificial Sequence
  Description of Artificial Sequence: Synthetic oligonucleotide
aaagcucgagguuuucaag

SEQ ID NO: 2076257 - RNA, 19 nt, Artificial Sequence
  Description of Artificial Sequence: Synthetic oligonucleotide
uguauuugacuucagcgua

SEQ ID NO: 2076258 - RNA, 19 nt, Artificial Sequence
  Description of Artificial Sequence: Synthetic oligonucleotide
ugcuuuuggauuagaagca

SEQ ID NO: 2076259 - RNA, 19 nt, Artificial Sequence
  Description of Artificial Sequence: Synthetic oligonucleotide
auaugauccaaaugucguc

SEQ ID NO: 2076260 - RNA, 19 nt, Artificial Sequence
  Description of Artificial Sequence: Synthetic oligonucleotide
aaaccuuaagacuguguga

SEQ ID NO: 2076261 - RNA, 19 nt, Artificial Sequence
  Description of Artificial Sequence: Synthetic oligonucleotide
uagaauucgaauagcacua

SEQ ID NO: 2076262 - RNA, 19 nt, Artificial Sequence
  Description of Artificial Sequence: Synthetic oligonucleotide
agccgcuuaacucugugac

SEQ ID NO: 2076263 - RNA, 19 nt, Artificial Sequence
  Description of Artificial Sequence: Synthetic oligonucleotide
uuauuugauuagcagccca

SEQ ID NO: 2076264 - RNA, 19 nt, Artificial Sequence
  Description of Artificial Sequence: Synthetic oligonucleotide
uuccauagcuucaaagcgc

SEQ ID NO: 2076265 - RNA, 19 nt, Artificial Sequence
  Description of Artificial Sequence: Synthetic oligonucleotide
aaucuuacgcuuucuugca

SEQ ID NO: 2076266 - RNA, 19 nt, Artificial Sequence
  Description of Artificial Sequence: Synthetic oligonucleotide
guuagucaucauuagcucc

SEQ ID NO: 2076267 - RNA, 19 nt, Artificial Sequence
  Description of Artificial Sequence: Synthetic oligonucleotide
aguugagguuauuugaaca

SEQ ID NO: 2076268 - RNA, 19 nt, Artificial Sequence
  Description of Artificial Sequence: Synthetic oligonucleotide
caacaugucuucaacugcc

SEQ ID NO: 2076269 - RNA, 19 nt, Artificial Sequence
  Description of Artificial Sequence: Synthetic oligonucleotide
uugauuagcagcccaacua

SEQ ID NO: 2076270 - RNA, 19 nt, Artificial Sequence
  Description of Artificial Sequence: Synthetic oligonucleotide
auagucuagggcugcaauc

SEQ ID NO: 2076271 - RNA, 19 nt, Artificial Sequence
  Description of Artificial Sequence: Synthetic oligonucleotide
acuugcagacauguaaagc

SEQ ID NO: 2076272 - RNA, 19 nt, Artificial Sequence
  Description of Artificial Sequence: Synthetic oligonucleotide
ucauguuucgguuguugag

SEQ ID NO: 2076273 - RNA, 19 nt, Artificial Sequence
  Description of Artificial Sequence: Synthetic oligonucleotide
uuugauuagcagcccaacu

SEQ ID NO: 2076274 - RNA, 19 nt, Artificial Sequence
  Description of Artificial Sequence: Synthetic oligonucleotide
aacugauaagcccuguuua

SEQ ID NO: 2076275 - RNA, 19 nt, Artificial Sequence
  Description of Artificial Sequence: Synthetic oligonucleotide
aaacugauaagcccuguuu

SEQ ID NO: 2076276 - RNA, 19 nt, Artificial Sequence
  Description of Artificial Sequence: Synthetic oligonucleotide
cauauaugauccaaauguc

SEQ ID NO: 2076277 - RNA, 19 nt, Artificial Sequence
  Description of Artificial Sequence: Synthetic oligonucleotide
uguuggaucuucuugcaaa

SEQ ID NO: 2076278 - RNA, 19 nt, Artificial Sequence
  Description of Artificial Sequence: Synthetic oligonucleotide
gaauucgaauagcacuagg

SEQ ID NO: 2076279 - RNA, 19 nt, Artificial Sequence
  Description of Artificial Sequence: Synthetic oligonucleotide
acuagcauauuugauguug

SEQ ID NO: 2076280 - RNA, 19 nt, Artificial Sequence
  Description of Artificial Sequence: Synthetic oligonucleotide
aagcucgagguuuucaagu

SEQ ID NO: 2076281 - RNA, 19 nt, Artificial Sequence
  Description of Artificial Sequence: Synthetic oligonucleotide
cuucuuaacuccugaagac

SEQ ID NO: 2076282 - RNA, 19 nt, Artificial Sequence
  Description of Artificial Sequence: Synthetic oligonucleotide
guugagguuauuugaacac

SEQ ID NO: 2076283 - RNA, 19 nt, Artificial Sequence
  Description of Artificial Sequence: Synthetic oligonucleotide
aaccuuaagacugugugau

SEQ ID NO: 2076284 - RNA, 19 nt, Artificial Sequence
  Description of Artificial Sequence: Synthetic oligonucleotide
aagcuagaauucgaauagc

SEQ ID NO: 2076285 - RNA, 19 nt, Artificial Sequence
  Description of Artificial Sequence: Synthetic oligonucleotide
agcauaaucauuaauuaau

SEQ ID NO: 2076286 - RNA, 19 nt, Artificial Sequence
  Description of Artificial Sequence: Synthetic oligonucleotide
aagcuaaugucaaagaguu

SEQ ID NO: 2076287 - RNA, 19 nt, Artificial Sequence
  Description of Artificial Sequence: Synthetic oligonucleotide
agucacaucguagcgcucc

SEQ ID NO: 2076288 - RNA, 19 nt, Artificial Sequence
  Description of Artificial Sequence: Synthetic oligonucleotide
caguauaaaugguugugag

SEQ ID NO: 2076289 - RNA, 19 nt, Artificial Sequence
  Description of Artificial Sequence: Synthetic oligonucleotide
uaugauccaaaugucgucu

SEQ ID NO: 2076290 - RNA, 19 nt, Artificial Sequence
  Description of Artificial Sequence: Synthetic oligonucleotide
ucuccgaccuccaugauuu

SEQ ID NO: 2076291 - RNA, 19 nt, Artificial Sequence
  Description of Artificial Sequence: Synthetic oligonucleotide
aguacaaggcaaguugagg

SEQ ID NO: 2076292 - RNA, 19 nt, Artificial Sequence
  Description of Artificial Sequence: Synthetic oligonucleotide
uugguaaagcuaaugucaa

SEQ ID NO: 2076293 - RNA, 19 nt, Artificial Sequence
  Description of Artificial Sequence: Synthetic oligonucleotide
aacagagcucucauguuuc

SEQ ID NO: 2076294 - RNA, 19 nt, Artificial Sequence
  Description of Artificial Sequence: Synthetic oligonucleotide
ucuuacgcuuucuugcagc

SEQ ID NO: 2076295 - RNA, 19 nt, Artificial Sequence
  Description of Artificial Sequence: Synthetic oligonucleotide
augguugugaggguuaguc

SEQ ID NO: 2076296 - RNA, 19 nt, Artificial Sequence
  Description of Artificial Sequence: Synthetic oligonucleotide
ucccaagucacaucguagc

SEQ ID NO: 2076297 - RNA, 19 nt, Artificial Sequence
  Description of Artificial Sequence: Synthetic oligonucleotide
ugagguuauuugaacacau

SEQ ID NO: 2076298 - RNA, 19 nt, Artificial Sequence
  Description of Artificial Sequence: Synthetic oligonucleotide
gauaagcccuguuuauuug

SEQ ID NO: 2076299 - RNA, 19 nt, Artificial Sequence
  Description of Artificial Sequence: Synthetic oligonucleotide
cauugauauaaaguucugc

SEQ ID NO: 2076300 - RNA, 19 nt, Artificial Sequence
  Description of Artificial Sequence: Synthetic oligonucleotide
uauuugauuagcagcccaa

SEQ ID NO: 2076301 - RNA, 19 nt, Artificial Sequence
  Description of Artificial Sequence: Synthetic oligonucleotide
cuggcaguauaaaugguug

SEQ ID NO: 2076302 - RNA, 19 nt, Artificial Sequence
  Description of Artificial Sequence: Synthetic oligonucleotide
uuaucucgcauuucuuccc

SEQ ID NO: 2076303 - RNA, 19 nt, Artificial Sequence
  Description of Artificial Sequence: Synthetic oligonucleotide
aagcaaaaggcugccuugg

SEQ ID NO: 2076304 - RNA, 19 nt, Artificial Sequence
  Description of Artificial Sequence: Synthetic oligonucleotide
cuuacgcuuucuugcagcg

SEQ ID NO: 2076305 - RNA, 19 nt, Artificial Sequence
  Description of Artificial Sequence: Synthetic oligonucleotide
agagaaguucaacuguacu

SEQ ID NO: 2076306 - RNA, 19 nt, Artificial Sequence
  Description of Artificial Sequence: Synthetic oligonucleotide
aaacaagucacaggccgag

SEQ ID NO: 2076307 - RNA, 19 nt, Artificial Sequence
  Description of Artificial Sequence: Synthetic oligonucleotide
ucuugcaaaauucggucau

SEQ ID NO: 2076308 - RNA, 19 nt, Artificial Sequence
  Description of Artificial Sequence: Synthetic oligonucleotide
ucugcaagcucaugccagg

SEQ ID NO: 2076309 - RNA, 19 nt, Artificial Sequence
  Description of Artificial Sequence: Synthetic oligonucleotide
cuagaauucgaauagcacu

SEQ ID NO: 2076310 - RNA, 19 nt, Artificial Sequence
  Description of Artificial Sequence: Synthetic oligonucleotide
ucauuagcuccuccaagca

SEQ ID NO: 2076311 - RNA, 19 nt, Artificial Sequence
  Description of Artificial Sequence: Synthetic oligonucleotide
uuuauuugauuagcagccc

SEQ ID NO: 2076312 - RNA, 19 nt, Artificial Sequence
  Description of Artificial Sequence: Synthetic oligonucleotide
uucgaauggcaaucuuacg

SEQ ID NO: 2076313 - RNA, 19 nt, Artificial Sequence
  Description of Artificial Sequence: Synthetic oligonucleotide
uuuguuggaucuucuugca

SEQ ID NO: 2076314 - RNA, 19 nt, Artificial Sequence
  Description of Artificial Sequence: Synthetic oligonucleotide
uaagagaguauuugcuuuc

SEQ ID NO: 2076315 - RNA, 19 nt, Artificial Sequence
  Description of Artificial Sequence: Synthetic oligonucleotide
aaagcgcaugcccguuagc

SEQ ID NO: 2076316 - RNA, 19 nt, Artificial Sequence
  Description of Artificial Sequence: Synthetic oligonucleotide
uacuucgaccugcaaacug

SEQ ID NO: 2076317 - RNA, 19 nt, Artificial Sequence
  Description of Artificial Sequence: Synthetic oligonucleotide
aaugucgucuccaagcuua

SEQ ID NO: 2076318 - RNA, 19 nt, Artificial Sequence
  Description of Artificial Sequence: Synthetic oligonucleotide
ugauccaaaugucgucucc

SEQ ID NO: 2076319 - RNA, 19 nt, Artificial Sequence
  Description of Artificial Sequence: Synthetic oligonucleotide
ucgaauggccuccacauuu

SEQ ID NO: 2076320 - RNA, 19 nt, Artificial Sequence
  Description of Artificial Sequence: Synthetic oligonucleotide
ccaaaugucgucuccaagc

SEQ ID NO: 2076321 - RNA, 19 nt, Artificial Sequence
  Description of Artificial Sequence: Synthetic oligonucleotide
cuugauaacugaccucuug

SEQ ID NO: 2076322 - RNA, 19 nt, Artificial Sequence
  Description of Artificial Sequence: Synthetic oligonucleotide
cuugcagcgguguuuguug

SEQ ID NO: 2076323 - RNA, 19 nt, Artificial Sequence
  Description of Artificial Sequence: Synthetic oligonucleotide
uucuuaacuccugaagaca

SEQ ID NO: 2076324 - RNA, 19 nt, Artificial Sequence
  Description of Artificial Sequence: Synthetic oligonucleotide
ugaaaccuuaagacugugu

SEQ ID NO: 2076325 - RNA, 19 nt, Artificial Sequence
  Description of Artificial Sequence: Synthetic oligonucleotide
ugccuuaagagaguauuug

SEQ ID NO: 2076326 - RNA, 19 nt, Artificial Sequence
  Description of Artificial Sequence: Synthetic oligonucleotide
agcacuaggcauuucguaa

SEQ ID NO: 2076327 - RNA, 19 nt, Artificial Sequence
  Description of Artificial Sequence: Synthetic oligonucleotide
agcaaaaggcugccuuggc

SEQ ID NO: 2076328 - RNA, 19 nt, Artificial Sequence
  Description of Artificial Sequence: Synthetic oligonucleotide
agacauguaaagcccaaaa

SEQ ID NO: 2076329 - RNA, 19 nt, Artificial Sequence
  Description of Artificial Sequence: Synthetic oligonucleotide
uagucuagggcugcaauca

SEQ ID NO: 2076330 - RNA, 19 nt, Artificial Sequence
  Description of Artificial Sequence: Synthetic oligonucleotide
caguuguauagcaucauca

SEQ ID NO: 2076331 - RNA, 19 nt, Artificial Sequence
  Description of Artificial Sequence: Synthetic oligonucleotide
aagacugugugaucugcaa

SEQ ID NO: 2076332 - RNA, 19 nt, Artificial Sequence
  Description of Artificial Sequence: Synthetic oligonucleotide
aaaucaucgcgaccauagu

SEQ ID NO: 2076333 - RNA, 19 nt, Artificial Sequence
  Description of Artificial Sequence: Synthetic oligonucleotide
agaaagcuagaauucgaau

SEQ ID NO: 2076334 - RNA, 19 nt, Artificial Sequence
  Description of Artificial Sequence: Synthetic oligonucleotide
aucgcgaccauagucuagg

SEQ ID NO: 2076335 - RNA, 19 nt, Artificial Sequence
  Description of Artificial Sequence: Synthetic oligonucleotide
cuuuccuucuuacuucgac

SEQ ID NO: 2076336 - RNA, 19 nt, Artificial Sequence
  Description of Artificial Sequence: Synthetic oligonucleotide
uauaaaugguugugagggu

SEQ ID NO: 2076337 - RNA, 19 nt, Artificial Sequence
  Description of Artificial Sequence: Synthetic oligonucleotide
uagaagcauaaucauuaau

SEQ ID NO: 2076338 - RNA, 19 nt, Artificial Sequence
  Description of Artificial Sequence: Synthetic oligonucleotide
ucuugaaagcucgagguuu

SEQ ID NO: 2076339 - RNA, 19 nt, Artificial Sequence
  Description of Artificial Sequence: Synthetic oligonucleotide
augccaaaucaucgcgacc

SEQ ID NO: 2076340 - RNA, 19 nt, Artificial Sequence
  Description of Artificial Sequence: Synthetic oligonucleotide
caagcaaaaggcugccuug

SEQ ID NO: 2076341 - RNA, 19 nt, Artificial Sequence
  Description of Artificial Sequence: Synthetic oligonucleotide
auaugacuugcagacaugu

SEQ ID NO: 2076342 - RNA, 19 nt, Artificial Sequence
  Description of Artificial Sequence: Synthetic oligonucleotide
ucaacugccuuaagagagu

SEQ ID NO: 2076343 - RNA, 19 nt, Artificial Sequence
  Description of Artificial Sequence: Synthetic oligonucleotide
uucagcucucgaauggccu

SEQ ID NO: 2076344 - RNA, 19 nt, Artificial Sequence
  Description of Artificial Sequence: Synthetic oligonucleotide
uugagguuauuugaacaca

SEQ ID NO: 2076345 - RNA, 19 nt, Artificial Sequence
  Description of Artificial Sequence: Synthetic oligonucleotide
uuggguguauuugacuuca

SEQ ID NO: 2076346 - RNA, 19 nt, Artificial Sequence
  Description of Artificial Sequence: Synthetic oligonucleotide
auuugaacacauucuugau

SEQ ID NO: 2076347 - RNA, 19 nt, Artificial Sequence
  Description of Artificial Sequence: Synthetic oligonucleotide
acugauaagcccuguuuau

SEQ ID NO: 2076348 - RNA, 19 nt, Artificial Sequence
  Description of Artificial Sequence: Synthetic oligonucleotide
agcuuagaagcauaaucau

SEQ ID NO: 2076349 - RNA, 19 nt, Artificial Sequence
  Description of Artificial Sequence: Synthetic oligonucleotide
ugcaaaauucggucauaca

SEQ ID NO: 2076350 - RNA, 19 nt, Artificial Sequence
  Description of Artificial Sequence: Synthetic oligonucleotide
uuagccgcuuaacucugug

SEQ ID NO: 2076351 - RNA, 19 nt, Artificial Sequence
  Description of Artificial Sequence: Synthetic oligonucleotide
gaaagcucgagguuuucaa

SEQ ID NO: 2076352 - RNA, 19 nt, Artificial Sequence
  Description of Artificial Sequence: Synthetic oligonucleotide
ucacuuguucauauaugau

SEQ ID NO: 2076353 - RNA, 19 nt, Artificial Sequence
  Description of Artificial Sequence: Synthetic oligonucleotide
uuagcagcccaacuagcau

SEQ ID NO: 2076354 - RNA, 19 nt, Artificial Sequence
  Description of Artificial Sequence: Synthetic oligonucleotide
uccaagcuuagaagcauaa

SEQ ID NO: 2076355 - RNA, 19 nt, Artificial Sequence
  Description of Artificial Sequence: Synthetic oligonucleotide
aauaugacuugcagacaug

SEQ ID NO: 2076356 - RNA, 19 nt, Artificial Sequence
  Description of Artificial Sequence: Synthetic oligonucleotide
cugaccucuugagagaaag

SEQ ID NO: 2076357 - RNA, 19 nt, Artificial Sequence
  Description of Artificial Sequence: Synthetic oligonucleotide
aucaucgcgaccauagucu

SEQ ID NO: 2076358 - RNA, 19 nt, Artificial Sequence
  Description of Artificial Sequence: Synthetic oligonucleotide
ucgcauuucuucccaaguc

SEQ ID NO: 2076359 - RNA, 19 nt, Artificial Sequence
  Description of Artificial Sequence: Synthetic oligonucleotide
uaacugaccucuugagaga

SEQ ID NO: 2076360 - RNA, 19 nt, Artificial Sequence
  Description of Artificial Sequence: Synthetic oligonucleotide
uugcaaaauucggucauac

SEQ ID NO: 2076361 - RNA, 19 nt, Artificial Sequence
  Description of Artificial Sequence: Synthetic oligonucleotide
agggaacugucuucuuaac

SEQ ID NO: 2076362 - RNA, 19 nt, Artificial Sequence
  Description of Artificial Sequence: Synthetic oligonucleotide
ucgguuguugaguuucagu

SEQ ID NO: 2076363 - RNA, 19 nt, Artificial Sequence
  Description of Artificial Sequence: Synthetic oligonucleotide
ugguugugaggguuaguca

SEQ ID NO: 2076364 - RNA, 19 nt, Artificial Sequence
  Description of Artificial Sequence: Synthetic oligonucleotide
acugccuuaagagaguauu

SEQ ID NO: 2076365 - RNA, 19 nt, Artificial Sequence
  Description of Artificial Sequence: Synthetic oligonucleotide
uugcagcgguguuuguugg

SEQ ID NO: 2076366 - RNA, 19 nt, Artificial Sequence
  Description of Artificial Sequence: Synthetic oligonucleotide
auuagcuccuccaagcaaa

SEQ ID NO: 2076367 - RNA, 19 nt, Artificial Sequence
  Description of Artificial Sequence: Synthetic oligonucleotide
caacuagcauauuugaugu

SEQ ID NO: 2076368 - RNA, 19 nt, Artificial Sequence
  Description of Artificial Sequence: Synthetic oligonucleotide
uggcaguauaaaugguugu

SEQ ID NO: 2076369 - RNA, 19 nt, Artificial Sequence
  Description of Artificial Sequence: Synthetic oligonucleotide
agcuagaauucgaauagca

SEQ ID NO: 2076370 - RNA, 19 nt, Artificial Sequence
  Description of Artificial Sequence: Synthetic oligonucleotide
agaauucgaauagcacuag

SEQ ID NO: 2076371 - RNA, 19 nt, Artificial Sequence
  Description of Artificial Sequence: Synthetic oligonucleotide
auaaaugguugugaggguu

SEQ ID NO: 2076372 - RNA, 19 nt, Artificial Sequence
  Description of Artificial Sequence: Synthetic oligonucleotide
agcucucauguuucgguug

SEQ ID NO: 2076373 - RNA, 19 nt, Artificial Sequence
  Description of Artificial Sequence: Synthetic oligonucleotide
caucguagcgcuccgugac

SEQ ID NO: 2076374 - RNA, 19 nt, Artificial Sequence
  Description of Artificial Sequence: Synthetic oligonucleotide
uugugaggguuagucauca

SEQ ID NO: 2076375 - RNA, 19 nt, Artificial Sequence
  Description of Artificial Sequence: Synthetic oligonucleotide
ugaaagcucgagguuuuca

SEQ ID NO: 2076376 - RNA, 19 nt, Artificial Sequence
  Description of Artificial Sequence: Synthetic oligonucleotide
cagugccugugcaaaauac

SEQ ID NO: 2076377 - RNA, 19 nt, Artificial Sequence
  Description of Artificial Sequence: Synthetic oligonucleotide
cuucaacugccuuaagaga

SEQ ID NO: 2076378 - RNA, 19 nt, Artificial Sequence
  Description of Artificial Sequence: Synthetic oligonucleotide
aucuuacgcuuucuugcag

SEQ ID NO: 2076379 - RNA, 19 nt, Artificial Sequence
  Description of Artificial Sequence: Synthetic oligonucleotide
ucggucauacaguuguaua

SEQ ID NO: 2076380 - RNA, 19 nt, Artificial Sequence
  Description of Artificial Sequence: Synthetic oligonucleotide
gcuucaaagcgcaugcccg

SEQ ID NO: 2076381 - RNA, 19 nt, Artificial Sequence
  Description of Artificial Sequence: Synthetic oligonucleotide
uucuugaaagcucgagguu

SEQ ID NO: 2076382 - RNA, 19 nt, Artificial Sequence
  Description of Artificial Sequence: Synthetic oligonucleotide
aaauucggucauacaguug

SEQ ID NO: 2076383 - RNA, 19 nt, Artificial Sequence
  Description of Artificial Sequence: Synthetic oligonucleotide
gccuuaagagaguauuugc

SEQ ID NO: 2076384 - RNA, 19 nt, Artificial Sequence
  Description of Artificial Sequence: Synthetic oligonucleotide
cuuggguguauuugacuuc

SEQ ID NO: 2076385 - RNA, 19 nt, Artificial Sequence
  Description of Artificial Sequence: Synthetic oligonucleotide
agagaaagcuagaauucga

SEQ ID NO: 2076386 - RNA, 19 nt, Artificial Sequence
  Description of Artificial Sequence: Synthetic oligonucleotide
auacucauucagcucucga

SEQ ID NO: 2076387 - RNA, 19 nt, Artificial Sequence
  Description of Artificial Sequence: Synthetic oligonucleotide
gagaaagcuagaauucgaa

SEQ ID NO: 2076388 - RNA, 19 nt, Artificial Sequence
  Description of Artificial Sequence: Synthetic oligonucleotide
gauccaaaugucgucucca

SEQ ID NO: 2076389 - RNA, 19 nt, Artificial Sequence
  Description of Artificial Sequence: Synthetic oligonucleotide
uaugacuugcagacaugua

SEQ ID NO: 2076390 - RNA, 19 nt, Artificial Sequence
  Description of Artificial Sequence: Synthetic oligonucleotide
acuucgaccugcaaacuga

SEQ ID NO: 2076391 - RNA, 19 nt, Artificial Sequence
  Description of Artificial Sequence: Synthetic oligonucleotide
auagucauguucauugaua

SEQ ID NO: 2076392 - RNA, 19 nt, Artificial Sequence
  Description of Artificial Sequence: Synthetic oligonucleotide
caaagcgcaugcccguuag

SEQ ID NO: 2076393 - RNA, 19 nt, Artificial Sequence
  Description of Artificial Sequence: Synthetic oligonucleotide
uuguuggaucuucuugcaa

SEQ ID NO: 2076394 - RNA, 19 nt, Artificial Sequence
  Description of Artificial Sequence: Synthetic oligonucleotide
uccuucuuacuucgaccug

SEQ ID NO: 2076395 - RNA, 19 nt, Artificial Sequence
  Description of Artificial Sequence: Synthetic oligonucleotide
cucgagguuuucaagucca

SEQ ID NO: 2076396 - RNA, 19 nt, Artificial Sequence
  Description of Artificial Sequence: Synthetic oligonucleotide
agcccaacuagcauauuug

SEQ ID NO: 2076397 - RNA, 19 nt, Artificial Sequence
  Description of Artificial Sequence: Synthetic oligonucleotide
uuagcuccuccaagcaaaa

SEQ ID NO: 2076398 - RNA, 19 nt, Artificial Sequence
  Description of Artificial Sequence: Synthetic oligonucleotide
uuacgcuuucuugcagcgg

SEQ ID NO: 2076399 - RNA, 19 nt, Artificial Sequence
  Description of Artificial Sequence: Synthetic oligonucleotide
caacuguacuguuugguaa

SEQ ID NO: 2076400 - RNA, 19 nt, Artificial Sequence
  Description of Artificial Sequence: Synthetic oligonucleotide
aauggcaaucuuacgcuuu

SEQ ID NO: 2076401 - RNA, 19 nt, Artificial Sequence
  Description of Artificial Sequence: Synthetic oligonucleotide
uagcauauuugauguuguc

SEQ ID NO: 2076402 - RNA, 19 nt, Artificial Sequence
  Description of Artificial Sequence: Synthetic oligonucleotide
uagcagcccaacuagcaua

SEQ ID NO: 2076403 - RNA, 19 nt, Artificial Sequence
  Description of Artificial Sequence: Synthetic oligonucleotide
uagcgcuccgugaccuucg

SEQ ID NO: 2076404 - RNA, 19 nt, Artificial Sequence
  Description of Artificial Sequence: Synthetic oligonucleotide
gagagaaguucaacuguac

SEQ ID NO: 2076405 - RNA, 19 nt, Artificial Sequence
  Description of Artificial Sequence: Synthetic oligonucleotide
gguuagucaucauuagcuc

SEQ ID NO: 2076406 - RNA, 19 nt, Artificial Sequence
  Description of Artificial Sequence: Synthetic oligonucleotide
gaccucuugagagaaagcu

SEQ ID NO: 2076407 - RNA, 19 nt, Artificial Sequence
  Description of Artificial Sequence: Synthetic oligonucleotide
uucuccgaccuccaugauu

SEQ ID NO: 2076408 - RNA, 19 nt, Artificial Sequence
  Description of Artificial Sequence: Synthetic oligonucleotide
aacuagcauauuugauguu

SEQ ID NO: 2076409 - RNA, 19 nt, Artificial Sequence
  Description of Artificial Sequence: Synthetic oligonucleotide
uagcacuaggcauuucgua

SEQ ID NO: 2076410 - RNA, 19 nt, Artificial Sequence
  Description of Artificial Sequence: Synthetic oligonucleotide
agaagcaauaugacuugca

SEQ ID NO: 2076411 - RNA, 19 nt, Artificial Sequence
  Description of Artificial Sequence: Synthetic oligonucleotide
uaccagggaacugucuucu

SEQ ID NO: 2076412 - RNA, 19 nt, Artificial Sequence
  Description of Artificial Sequence: Synthetic oligonucleotide
guauuugacuucagcguac

SEQ ID NO: 2076413 - RNA, 19 nt, Artificial Sequence
  Description of Artificial Sequence: Synthetic oligonucleotide
caugauuuguucacuauuu

SEQ ID NO: 2076414 - RNA, 19 nt, Artificial Sequence
  Description of Artificial Sequence: Synthetic oligonucleotide
ugugacuaccagggaacug

SEQ ID NO: 2076415 - RNA, 19 nt, Artificial Sequence
  Description of Artificial Sequence: Synthetic oligonucleotide
guauagcaucaucauaucu

SEQ ID NO: 2076416 - RNA, 19 nt, Artificial Sequence
  Description of Artificial Sequence: Synthetic oligonucleotide
uucgguuguugaguuucag

SEQ ID NO: 2076417 - RNA, 19 nt, Artificial Sequence
  Description of Artificial Sequence: Synthetic oligonucleotide
cacuaggcauuucguaaac

SEQ ID NO: 2076418 - RNA, 19 nt, Artificial Sequence
  Description of Artificial Sequence: Synthetic oligonucleotide
gugaucugcaauguuucca

SEQ ID NO: 2076419 - RNA, 19 nt, Artificial Sequence
  Description of Artificial Sequence: Synthetic oligonucleotide
auagcacuaggcauuucgu

SEQ ID NO: 2076420 - RNA, 19 nt, Artificial Sequence
  Description of Artificial Sequence: Synthetic oligonucleotide
uagccgcuuaacucuguga

SEQ ID NO: 2076421 - RNA, 19 nt, Artificial Sequence
  Description of Artificial Sequence: Synthetic oligonucleotide
cugcaaacugauaagcccu

SEQ ID NO: 2076422 - RNA, 19 nt, Artificial Sequence
  Description of Artificial Sequence: Synthetic oligonucleotide
caagucacaucguagcgcu

SEQ ID NO: 2076423 - RNA, 19 nt, Artificial Sequence
  Description of Artificial Sequence: Synthetic oligonucleotide
uucggucauacaguuguau

SEQ ID NO: 2076424 - RNA, 19 nt, Artificial Sequence
  Description of Artificial Sequence: Synthetic oligonucleotide
cucugugacuaccagggaa

SEQ ID NO: 2076425 - RNA, 19 nt, Artificial Sequence
  Description of Artificial Sequence: Synthetic oligonucleotide
aaguucaacuguacuguuu

SEQ ID NO: 2076426 - RNA, 19 nt, Artificial Sequence
  Description of Artificial Sequence: Synthetic oligonucleotide
ucgagguuuucaaguccac

SEQ ID NO: 2076427 - RNA, 19 nt, Artificial Sequence
  Description of Artificial Sequence: Synthetic oligonucleotide
uucagugccugugcaaaau

SEQ ID NO: 2076428 - RNA, 19 nt, Artificial Sequence
  Description of Artificial Sequence: Synthetic oligonucleotide
ucaaagcgcaugcccguua

SEQ ID NO: 2076429 - RNA, 19 nt, Artificial Sequence
  Description of Artificial Sequence: Synthetic oligonucleotide
gcgaccauagucuagggcu

SEQ ID NO: 2076430 - RNA, 19 nt, Artificial Sequence
  Description of Artificial Sequence: Synthetic oligonucleotide
gcuagaauucgaauagcac

SEQ ID NO: 2076431 - RNA, 19 nt, Artificial Sequence
  Description of Artificial Sequence: Synthetic oligonucleotide
caagcucaugccaggcuuc

SEQ ID NO: 2076432 - RNA, 19 nt, Artificial Sequence
  Description of Artificial Sequence: Synthetic oligonucleotide
aagcccuguuuauuugauu

SEQ ID NO: 2076433 - RNA, 19 nt, Artificial Sequence
  Description of Artificial Sequence: Synthetic oligonucleotide
gcauuucguaaacaaguca

SEQ ID NO: 2076434 - RNA, 19 nt, Artificial Sequence
  Description of Artificial Sequence: Synthetic oligonucleotide
ucaucgcgaccauagucua

SEQ ID NO: 2076435 - RNA, 19 nt, Artificial Sequence
  Description of Artificial Sequence: Synthetic oligonucleotide
aggccgagagaaguucaac

SEQ ID NO: 2076436 - RNA, 19 nt, Artificial Sequence
  Description of Artificial Sequence: Synthetic oligonucleotide
cagggaacugucuucuuaa

SEQ ID NO: 2076437 - RNA, 19 nt, Artificial Sequence
  Description of Artificial Sequence: Synthetic oligonucleotide
ucgcgaccauagucuaggg

SEQ ID NO: 2076438 - RNA, 19 nt, Artificial Sequence
  Description of Artificial Sequence: Synthetic oligonucleotide
ccuucuuacuucgaccugc

SEQ ID NO: 2076439 - RNA, 19 nt, Artificial Sequence
  Description of Artificial Sequence: Synthetic oligonucleotide
uuacuucgaccugcaaacu

SEQ ID NO: 2076440 - RNA, 19 nt, Artificial Sequence
  Description of Artificial Sequence: Synthetic oligonucleotide
agcuaaugucaaagaguuc

SEQ ID NO: 2076441 - RNA, 19 nt, Artificial Sequence
  Description of Artificial Sequence: Synthetic oligonucleotide
agcgcuccgugaccuucgc

SEQ ID NO: 2076442 - RNA, 19 nt, Artificial Sequence
  Description of Artificial Sequence: Synthetic oligonucleotide
gugacuaccagggaacugu

SEQ ID NO: 2076443 - RNA, 19 nt, Artificial Sequence
  Description of Artificial Sequence: Synthetic oligonucleotide
caucgcgaccauagucuag

SEQ ID NO: 2076444 - RNA, 19 nt, Artificial Sequence
  Description of Artificial Sequence: Synthetic oligonucleotide
caaaugucgucuccaagcu

SEQ ID NO: 2076445 - RNA, 19 nt, Artificial Sequence
  Description of Artificial Sequence: Synthetic oligonucleotide
cccaagucacaucguagcg

SEQ ID NO: 2076446 - RNA, 19 nt, Artificial Sequence
  Description of Artificial Sequence: Synthetic oligonucleotide
cuucuuacuucgaccugca

SEQ ID NO: 2076447 - RNA, 19 nt, Artificial Sequence
  Description of Artificial Sequence: Synthetic oligonucleotide
gcaguauaaaugguuguga

SEQ ID NO: 2076448 - RNA, 19 nt, Artificial Sequence
  Description of Artificial Sequence: Synthetic oligonucleotide
uccgaccuccaugauuugu

SEQ ID NO: 2076449 - RNA, 19 nt, Artificial Sequence
  Description of Artificial Sequence: Synthetic oligonucleotide
gcucgagguuuucaagucc

SEQ ID NO: 2076450 - RNA, 19 nt, Artificial Sequence
  Description of Artificial Sequence: Synthetic oligonucleotide
ucguagcgcuccgugaccu

SEQ ID NO: 2076451 - RNA, 19 nt, Artificial Sequence
  Description of Artificial Sequence: Synthetic oligonucleotide
uucuuacuucgaccugcaa

SEQ ID NO: 2076452 - RNA, 19 nt, Artificial Sequence
  Description of Artificial Sequence: Synthetic oligonucleotide
cauuagcuccuccaagcaa

SEQ ID NO: 2076453 - RNA, 19 nt, Artificial Sequence
  Description of Artificial Sequence: Synthetic oligonucleotide
gguugugaggguuagucau

SEQ ID NO: 2076454 - RNA, 19 nt, Artificial Sequence
  Description of Artificial Sequence: Synthetic oligonucleotide
cccguuagccgcuuaacuc

SEQ ID NO: 2076455 - RNA, 19 nt, Artificial Sequence
  Description of Artificial Sequence: Synthetic oligonucleotide
ggcauuucguaaacaaguc

SEQ ID NO: 2076456 - RNA, 19 nt, Artificial Sequence
  Description of Artificial Sequence: Synthetic oligonucleotide
uguuucgguuguugaguuu

SEQ ID NO: 2076457 - RNA, 19 nt, Artificial Sequence
  Description of Artificial Sequence: Synthetic oligonucleotide
ccaagucacaucguagcgc

SEQ ID NO: 2076458 - RNA, 19 nt, Artificial Sequence
  Description of Artificial Sequence: Synthetic oligonucleotide
cauguuucgguuguugagu

SEQ ID NO: 2076459 - RNA, 19 nt, Artificial Sequence
  Description of Artificial Sequence: Synthetic oligonucleotide
aagucacaucguagcgcuc

SEQ ID NO: 2076460 - RNA, 19 nt, Artificial Sequence
  Description of Artificial Sequence: Synthetic oligonucleotide
cguaaacaagucacaggcc

SEQ ID NO: 2076461 - RNA, 19 nt, Artificial Sequence
  Description of Artificial Sequence: Synthetic oligonucleotide
uagcaguacaaggcaaguu

SEQ ID NO: 2076462 - RNA, 19 nt, Artificial Sequence
  Description of Artificial Sequence: Synthetic oligonucleotide
uucgaccugcaaacugaua

SEQ ID NO: 2076463 - RNA, 19 nt, Artificial Sequence
  Description of Artificial Sequence: Synthetic oligonucleotide
agcagcccaacuagcauau

SEQ ID NO: 2076464 - RNA, 19 nt, Artificial Sequence
  Description of Artificial Sequence: Synthetic oligonucleotide
ccuuaagagaguauuugcu

SEQ ID NO: 2076465 - RNA, 19 nt, Artificial Sequence
  Description of Artificial Sequence: Synthetic oligonucleotide
gaauggcaaucuuacgcuu

SEQ ID NO: 2076466 - RNA, 19 nt, Artificial Sequence
  Description of Artificial Sequence: Synthetic oligonucleotide
aaguccaccuuggguguau

SEQ ID NO: 2076467 - RNA, 19 nt, Artificial Sequence
  Description of Artificial Sequence: Synthetic oligonucleotide
uggcaaucuuacgcuuucu

SEQ ID NO: 2076468 - RNA, 19 nt, Artificial Sequence
  Description of Artificial Sequence: Synthetic oligonucleotide
uucaaagcgcaugcccguu

SEQ ID NO: 2076469 - RNA, 19 nt, Artificial Sequence
  Description of Artificial Sequence: Synthetic oligonucleotide
ugcccguuagccgcuuaac

SEQ ID NO: 2076470 - RNA, 19 nt, Artificial Sequence
  Description of Artificial Sequence: Synthetic oligonucleotide
aucucgcauuucuucccaa

SEQ ID NO: 2076471 - RNA, 19 nt, Artificial Sequence
  Description of Artificial Sequence: Synthetic oligonucleotide
cuucaaagcgcaugcccgu

SEQ ID NO: 2076472 - RNA, 19 nt, Artificial Sequence
  Description of Artificial Sequence: Synthetic oligonucleotide
gcacuaggcauuucguaaa

SEQ ID NO: 2076473 - RNA, 19 nt, Artificial Sequence
  Description of Artificial Sequence: Synthetic oligonucleotide
cucgcauuucuucccaagu

SEQ ID NO: 2076474 - RNA, 19 nt, Artificial Sequence
  Description of Artificial Sequence: Synthetic oligonucleotide
augucgucuccaagcuuag

SEQ ID NO: 2076475 - RNA, 19 nt, Artificial Sequence
  Description of Artificial Sequence: Synthetic oligonucleotide
caaucaucacuuguucaua

SEQ ID NO: 2076476 - RNA, 19 nt, Artificial Sequence
  Description of Artificial Sequence: Synthetic oligonucleotide
cagcgguguuuguuggauc

SEQ ID NO: 2076477 - RNA, 19 nt, Artificial Sequence
  Description of Artificial Sequence: Synthetic oligonucleotide
cuugaaagcucgagguuuu

SEQ ID NO: 2076478 - RNA, 19 nt, Artificial Sequence
  Description of Artificial Sequence: Synthetic oligonucleotide
guagcgcuccgugaccuuc

SEQ ID NO: 2076479 - RNA, 19 nt, Artificial Sequence
  Description of Artificial Sequence: Synthetic oligonucleotide
cgaccugcaaacugauaag

SEQ ID NO: 2076480 - RNA, 19 nt, Artificial Sequence
  Description of Artificial Sequence: Synthetic oligonucleotide
aaggcaaguugagguuauu

SEQ ID NO: 2076481 - RNA, 19 nt, Artificial Sequence
  Description of Artificial Sequence: Synthetic oligonucleotide
gaauagcacuaggcauuuc

SEQ ID NO: 2076482 - RNA, 19 nt, Artificial Sequence
  Description of Artificial Sequence: Synthetic oligonucleotide
gcuuuuggauuagaagcaa

SEQ ID NO: 2076483 - RNA, 19 nt, Artificial Sequence
  Description of Artificial Sequence: Synthetic oligonucleotide
cgaccauagucuagggcug

SEQ ID NO: 2076484 - RNA, 19 nt, Artificial Sequence
  Description of Artificial Sequence: Synthetic oligonucleotide
cuccgugaccuucgccauc

SEQ ID NO: 2076485 - RNA, 19 nt, Artificial Sequence
  Description of Artificial Sequence: Synthetic oligonucleotide
caaggcaaguugagguuau

SEQ ID NO: 2076486 - RNA, 19 nt, Artificial Sequence
  Description of Artificial Sequence: Synthetic oligonucleotide
accagggaacugucuucuu

SEQ ID NO: 2076487 - RNA, 19 nt, Artificial Sequence
  Description of Artificial Sequence: Synthetic oligonucleotide
caacugccuuaagagagua

SEQ ID NO: 2076488 - RNA, 19 nt, Artificial Sequence
  Description of Artificial Sequence: Synthetic oligonucleotide
ccuuggguguauuugacuu

SEQ ID NO: 2076489 - RNA, 19 nt, Artificial Sequence
  Description of Artificial Sequence: Synthetic oligonucleotide
cuccgaccuccaugauuug

SEQ ID NO: 2076490 - RNA, 19 nt, Artificial Sequence
  Description of Artificial Sequence: Synthetic oligonucleotide
ccguuagccgcuuaacucu

SEQ ID NO: 2076491 - RNA, 19 nt, Artificial Sequence
  Description of Artificial Sequence: Synthetic oligonucleotide
cguuagccgcuuaacucug

SEQ ID NO: 2076492 - RNA, 19 nt, Artificial Sequence
  Description of Artificial Sequence: Synthetic oligonucleotide
cuucgaccugcaaacugau

SEQ ID NO: 2076493 - RNA, 19 nt, Artificial Sequence
  Description of Artificial Sequence: Synthetic oligonucleotide
cuuuucgaauggcaaucuu

SEQ ID NO: 2076494 - RNA, 19 nt, Artificial Sequence
  Description of Artificial Sequence: Synthetic oligonucleotide
gacuaccagggaacugucu

SEQ ID NO: 2076495 - RNA, 19 nt, Artificial Sequence
  Description of Artificial Sequence: Synthetic oligonucleotide
gcaagcucaugccaggcuu

SEQ ID NO: 2076496 - RNA, 19 nt, Artificial Sequence
  Description of Artificial Sequence: Synthetic oligonucleotide
cgagagaaguucaacugua

SEQ ID NO: 2076497 - RNA, 19 nt, Artificial Sequence
  Description of Artificial Sequence: Synthetic oligonucleotide
cgcgaccauagucuagggc

SEQ ID NO: 2076498 - RNA, 19 nt, Artificial Sequence
  Description of Artificial Sequence: Synthetic oligonucleotide
auucggucauacaguugua

SEQ ID NO: 2076499 - RNA, 19 nt, Artificial Sequence
  Description of Artificial Sequence: Synthetic oligonucleotide
ggcaaucuuacgcuuucuu

SEQ ID NO: 2076500 - RNA, 19 nt, Artificial Sequence
  Description of Artificial Sequence: Synthetic oligonucleotide
gggcuuuucgaauggcaau

SEQ ID NO: 2076501 - RNA, 19 nt, Artificial Sequence
  Description of Artificial Sequence: Synthetic oligonucleotide
ccgcuuaacucugugacua

SEQ ID NO: 2076502 - RNA, 19 nt, Artificial Sequence
  Description of Artificial Sequence: Synthetic oligonucleotide
ccgagagaaguucaacugu

SEQ ID NO: 2076503 - RNA, 19 nt, Artificial Sequence
  Description of Artificial Sequence: Synthetic oligonucleotide
ccagggaacugucuucuua

SEQ ID NO: 2076504 - RNA, 19 nt, Artificial Sequence
  Description of Artificial Sequence: Synthetic oligonucleotide
gcccguuagccgcuuaacu

SEQ ID NO: 2076505 - RNA, 19 nt, Artificial Sequence
  Description of Artificial Sequence: Synthetic oligonucleotide
gccgcuuaacucugugacu

SEQ ID NO: 2076506 - RNA, 19 nt, Artificial Sequence
  Description of Artificial Sequence: Synthetic oligonucleotide
cgcuuaacucugugacuac

SEQ ID NO: 2076507 - RNA, 19 nt, Artificial Sequence
  Description of Artificial Sequence: Synthetic oligonucleotide
aguccaccuuggguguauu

SEQ ID NO: 2076508 - RNA, 19 nt, Artificial Sequence
  Description of Artificial Sequence: Synthetic oligonucleotide
gcguacugcuggcaguaua

SEQ ID NO: 2076509 - RNA, 19 nt, Artificial Sequence
  Description of Artificial Sequence: Synthetic oligonucleotide
guuagccgcuuaacucugu

SEQ ID NO: 2076510 - RNA, 19 nt, Artificial Sequence
  Description of Artificial Sequence: Synthetic oligonucleotide
cgguguuuguuggaucuuc

SEQ ID NO: 2076511 - RNA, 19 nt, Artificial Sequence
  Description of Artificial Sequence: Synthetic oligonucleotide
cucgaauggccuccacauu

SEQ ID NO: 2076512 - RNA, 19 nt, Artificial Sequence
  Description of Artificial Sequence: Synthetic oligonucleotide
gcgcuccgugaccuucgcc

SEQ ID NO: 2076513 - RNA, 19 nt, Artificial Sequence
  Description of Artificial Sequence: Synthetic oligonucleotide
caugcccguuagccgcuua

SEQ ID NO: 2076514 - RNA, 19 nt, Artificial Sequence
  Description of Artificial Sequence: Synthetic oligonucleotide
ccgaccuccaugauuuguu

SEQ ID NO: 2076515 - RNA, 19 nt, Artificial Sequence
  Description of Artificial Sequence: Synthetic oligonucleotide
ccaaaucaucgcgaccaua

SEQ ID NO: 2076516 - RNA, 19 nt, Artificial Sequence
  Description of Artificial Sequence: Synthetic oligonucleotide
gcuccgugaccuucgccau

SEQ ID NO: 2076517 - RNA, 19 nt, Artificial Sequence
  Description of Artificial Sequence: Synthetic oligonucleotide
gccaaaucaucgcgaccau

SEQ ID NO: 2076518 - RNA, 19 nt, Artificial Sequence
  Description of Artificial Sequence: Synthetic oligonucleotide
cgaauagcacuaggcauuu

SEQ ID NO: 2076519 - RNA, 19 nt, Artificial Sequence
  Description of Artificial Sequence: Synthetic oligonucleotide
ccauagcuucaaagcgcau

SEQ ID NO: 2076520 - RNA, 19 nt, Artificial Sequence
  Description of Artificial Sequence: Synthetic oligonucleotide
gcgguguuuguuggaucuu

SEQ ID NO: 2076521 - RNA, 19 nt, Artificial Sequence
  Description of Artificial Sequence: Synthetic oligonucleotide
cgcaugcccguuagccgcu

SEQ ID NO: 2076522 - RNA, 19 nt, Artificial Sequence
  Description of Artificial Sequence: Synthetic oligonucleotide
gcagcccaacuagcauauu

SEQ ID NO: 2076523 - RNA, 19 nt, Artificial Sequence
  Description of Artificial Sequence: Synthetic oligonucleotide
ucaauguuuauucuccgag

SEQ ID NO: 2076524 - RNA, 19 nt, Artificial Sequence
  Description of Artificial Sequence: Synthetic oligonucleotide
uguuuauucuccgagaccc

SEQ ID NO: 2076525 - RNA, 19 nt, Artificial Sequence
  Description of Artificial Sequence: Synthetic oligonucleotide
uucgcugguagacagaaag

SEQ ID NO: 2076526 - RNA, 19 nt, Artificial Sequence
  Description of Artificial Sequence: Synthetic oligonucleotide
aagaaucagaacuucgcug

SEQ ID NO: 2076527 - RNA, 19 nt, Artificial Sequence
  Description of Artificial Sequence: Synthetic oligonucleotide
cauaggaacaggaugcagg

SEQ ID NO: 2076528 - RNA, 19 nt, Artificial Sequence
  Description of Artificial Sequence: Synthetic oligonucleotide
ucucauuugcauuuccggg

SEQ ID NO: 2076529 - RNA, 19 nt, Artificial Sequence
  Description of Artificial Sequence: Synthetic oligonucleotide
aagaaggcgagaccacgcc

SEQ ID NO: 2076530 - RNA, 19 nt, Artificial Sequence
  Description of Artificial Sequence: Synthetic oligonucleotide
uuugccucgaaguuucucc

SEQ ID NO: 2076531 - RNA, 19 nt, Artificial Sequence
  Description of Artificial Sequence: Synthetic oligonucleotide
cauccugcaagucagggcc

SEQ ID NO: 2076532 - RNA, 19 nt, Artificial Sequence
  Description of Artificial Sequence: Synthetic oligonucleotide
ugugacuugucuccucugg

SEQ ID NO: 2076533 - RNA, 19 nt, Artificial Sequence
  Description of Artificial Sequence: Synthetic oligonucleotide
acucugucgcauccgaucc

SEQ ID NO: 2076534 - RNA, 19 nt, Artificial Sequence
  Description of Artificial Sequence: Synthetic oligonucleotide
ucagccaauucccacccgg

SEQ ID NO: 2076535 - RNA, 19 nt, Artificial Sequence
  Description of Artificial Sequence: Synthetic oligonucleotide
uuuaccaguugaagaauca

SEQ ID NO: 2076536 - RNA, 19 nt, Artificial Sequence
  Description of Artificial Sequence: Synthetic oligonucleotide
aauaagaaggcgagaccac

SEQ ID NO: 2076537 - RNA, 19 nt, Artificial Sequence
  Description of Artificial Sequence: Synthetic oligonucleotide
uccuuuaccaguugaagaa

SEQ ID NO: 2076538 - RNA, 19 nt, Artificial Sequence
  Description of Artificial Sequence: Synthetic oligonucleotide
aucagaacuucgcugguag

SEQ ID NO: 2076539 - RNA, 19 nt, Artificial Sequence
  Description of Artificial Sequence: Synthetic oligonucleotide
gucucaaggccacagaggc

SEQ ID NO: 2076540 - RNA, 19 nt, Artificial Sequence
  Description of Artificial Sequence: Synthetic oligonucleotide
gucucauuugcauuuccgg

SEQ ID NO: 2076541 - RNA, 19 nt, Artificial Sequence
  Description of Artificial Sequence: Synthetic oligonucleotide
uuuauucuccgagaccccg

SEQ ID NO: 2076542 - RNA, 19 nt, Artificial Sequence
  Description of Artificial Sequence: Synthetic oligonucleotide
ucagcucgcuucuagaaga

SEQ ID NO: 2076543 - RNA, 19 nt, Artificial Sequence
  Description of Artificial Sequence: Synthetic oligonucleotide
ucuagaagagcaggcaucc

SEQ ID NO: 2076544 - RNA, 19 nt, Artificial Sequence
  Description of Artificial Sequence: Synthetic oligonucleotide
auugacacgaucuguggga

SEQ ID NO: 2076545 - RNA, 19 nt, Artificial Sequence
  Description of Artificial Sequence: Synthetic oligonucleotide
caguucgugacauuccucc

SEQ ID NO: 2076546 - RNA, 19 nt, Artificial Sequence
  Description of Artificial Sequence: Synthetic oligonucleotide
gaagagcaggcauccaccg

SEQ ID NO: 2076547 - RNA, 19 nt, Artificial Sequence
  Description of Artificial Sequence: Synthetic oligonucleotide
gaaagacaccacucugucg

SEQ ID NO: 2076548 - RNA, 19 nt, Artificial Sequence
  Description of Artificial Sequence: Synthetic oligonucleotide
agggccgugugcaagaugc

SEQ ID NO: 2076549 - RNA, 19 nt, Artificial Sequence
  Description of Artificial Sequence: Synthetic oligonucleotide
uugcucauggcuuguaggc

SEQ ID NO: 2076550 - RNA, 19 nt, Artificial Sequence
  Description of Artificial Sequence: Synthetic oligonucleotide
uagaagagcaggcauccac

SEQ ID NO: 2076551 - RNA, 19 nt, Artificial Sequence
  Description of Artificial Sequence: Synthetic oligonucleotide
uaagaaggcgagaccacgc

SEQ ID NO: 2076552 - RNA, 19 nt, Artificial Sequence
  Description of Artificial Sequence: Synthetic oligonucleotide
uucagcucgcuucuagaag

SEQ ID NO: 2076553 - RNA, 19 nt, Artificial Sequence
  Description of Artificial Sequence: Synthetic oligonucleotide
ucgaaguuucuccugcaug

SEQ ID NO: 2076554 - RNA, 19 nt, Artificial Sequence
  Description of Artificial Sequence: Synthetic oligonucleotide
cuugcccucagccaauucc

SEQ ID NO: 2076555 - RNA, 19 nt, Artificial Sequence
  Description of Artificial Sequence: Synthetic oligonucleotide
uauucuccgagaccccggg

SEQ ID NO: 2076556 - RNA, 19 nt, Artificial Sequence
  Description of Artificial Sequence: Synthetic oligonucleotide
uaaagucccagguucgaga

SEQ ID NO: 2076557 - RNA, 19 nt, Artificial Sequence
  Description of Artificial Sequence: Synthetic oligonucleotide
gaacuucgcugguagacag

SEQ ID NO: 2076558 - RNA, 19 nt, Artificial Sequence
  Description of Artificial Sequence: Synthetic oligonucleotide
auacuaaagcagguuuugc

SEQ ID NO: 2076559 - RNA, 19 nt, Artificial Sequence
  Description of Artificial Sequence: Synthetic oligonucleotide
uuauucuccgagaccccgg

SEQ ID NO: 2076560 - RNA, 19 nt, Artificial Sequence
  Description of Artificial Sequence: Synthetic oligonucleotide
ucauuugcauuuccgggac

SEQ ID NO: 2076561 - RNA, 19 nt, Artificial Sequence
  Description of Artificial Sequence: Synthetic oligonucleotide
aaggcgagaccacgccucc

SEQ ID NO: 2076562 - RNA, 19 nt, Artificial Sequence
  Description of Artificial Sequence: Synthetic oligonucleotide
agucccagguucgagaccg

SEQ ID NO: 2076563 - RNA, 19 nt, Artificial Sequence
  Description of Artificial Sequence: Synthetic oligonucleotide
cauugacacgaucuguggg

SEQ ID NO: 2076564 - RNA, 19 nt, Artificial Sequence
  Description of Artificial Sequence: Synthetic oligonucleotide
auaagaaggcgagaccacg

SEQ ID NO: 2076565 - RNA, 19 nt, Artificial Sequence
  Description of Artificial Sequence: Synthetic oligonucleotide
auucccacggacuccgcac

SEQ ID NO: 2076566 - RNA, 19 nt, Artificial Sequence
  Description of Artificial Sequence: Synthetic oligonucleotide
ugcaagaugcagccuuggg

SEQ ID NO: 2076567 - RNA, 19 nt, Artificial Sequence
  Description of Artificial Sequence: Synthetic oligonucleotide
ucuggauucccacggacuc

SEQ ID NO: 2076568 - RNA, 19 nt, Artificial Sequence
  Description of Artificial Sequence: Synthetic oligonucleotide
uccaacgacgcccugugac

SEQ ID NO: 2076569 - RNA, 19 nt, Artificial Sequence
  Description of Artificial Sequence: Synthetic oligonucleotide
auccaucaaagucugggug

SEQ ID NO: 2076570 - RNA, 19 nt, Artificial Sequence
  Description of Artificial Sequence: Synthetic oligonucleotide
ucgcauccgauccagugcc

SEQ ID NO: 2076571 - RNA, 19 nt, Artificial Sequence
  Description of Artificial Sequence: Synthetic oligonucleotide
uucuagaagagcaggcauc

SEQ ID NO: 2076572 - RNA, 19 nt, Artificial Sequence
  Description of Artificial Sequence: Synthetic oligonucleotide
uuaccaguugaagaaucag

SEQ ID NO: 2076573 - RNA, 19 nt, Artificial Sequence
  Description of Artificial Sequence: Synthetic oligonucleotide
gacugcaccacucuuggga

SEQ ID NO: 2076574 - RNA, 19 nt, Artificial Sequence
  Description of Artificial Sequence: Synthetic oligonucleotide
cuuuaccaguugaagaauc

SEQ ID NO: 2076575 - RNA, 19 nt, Artificial Sequence
  Description of Artificial Sequence: Synthetic oligonucleotide
acaccacucugucgcaucc

SEQ ID NO: 2076576 - RNA, 19 nt, Artificial Sequence
  Description of Artificial Sequence: Synthetic oligonucleotide
caauaagaaggcgagacca

SEQ ID NO: 2076577 - RNA, 19 nt, Artificial Sequence
  Description of Artificial Sequence: Synthetic oligonucleotide
uugccuuggaagaagcuua

SEQ ID NO: 2076578 - RNA, 19 nt, Artificial Sequence
  Description of Artificial Sequence: Synthetic oligonucleotide
gauccagugccaccagccg

SEQ ID NO: 2076579 - RNA, 19 nt, Artificial Sequence
  Description of Artificial Sequence: Synthetic oligonucleotide
ucaaagucugggugacagg

SEQ ID NO: 2076580 - RNA, 19 nt, Artificial Sequence
  Description of Artificial Sequence: Synthetic oligonucleotide
ugucgcauccgauccagug

SEQ ID NO: 2076581 - RNA, 19 nt, Artificial Sequence
  Description of Artificial Sequence: Synthetic oligonucleotide
accauacuaaagcagguuu

SEQ ID NO: 2076582 - RNA, 19 nt, Artificial Sequence
  Description of Artificial Sequence: Synthetic oligonucleotide
cuaaagcagguuuugcuca

SEQ ID NO: 2076583 - RNA, 19 nt, Artificial Sequence
  Description of Artificial Sequence: Synthetic oligonucleotide
agacagaaagacaccacuc

SEQ ID NO: 2076584 - RNA, 19 nt, Artificial Sequence
  Description of Artificial Sequence: Synthetic oligonucleotide
uugcucuugccuuggaaga

SEQ ID NO: 2076585 - RNA, 19 nt, Artificial Sequence
  Description of Artificial Sequence: Synthetic oligonucleotide
aucaauguuuauucuccga

SEQ ID NO: 2076586 - RNA, 19 nt, Artificial Sequence
  Description of Artificial Sequence: Synthetic oligonucleotide
ucuccaacgacgcccugug

SEQ ID NO: 2076587 - RNA, 19 nt, Artificial Sequence
  Description of Artificial Sequence: Synthetic oligonucleotide
ugugcaagaugcagccuug

SEQ ID NO: 2076588 - RNA, 19 nt, Artificial Sequence
  Description of Artificial Sequence: Synthetic oligonucleotide
uggauucccacggacuccg

SEQ ID NO: 2076589 - RNA, 19 nt, Artificial Sequence
  Description of Artificial Sequence: Synthetic oligonucleotide
uucgugacauuccuccuuc

SEQ ID NO: 2076590 - RNA, 19 nt, Artificial Sequence
  Description of Artificial Sequence: Synthetic oligonucleotide
caggaugcaggacucgggg

SEQ ID NO: 2076591 - RNA, 19 nt, Artificial Sequence
  Description of Artificial Sequence: Synthetic oligonucleotide
cucauuugcauuuccggga

SEQ ID NO: 2076592 - RNA, 19 nt, Artificial Sequence
  Description of Artificial Sequence: Synthetic oligonucleotide
ucuugggauccguggaugc

SEQ ID NO: 2076593 - RNA, 19 nt, Artificial Sequence
  Description of Artificial Sequence: Synthetic oligonucleotide
gaagaaucagaacuucgcu

SEQ ID NO: 2076594 - RNA, 19 nt, Artificial Sequence
  Description of Artificial Sequence: Synthetic oligonucleotide
agucucauuugcauuuccg

SEQ ID NO: 2076595 - RNA, 19 nt, Artificial Sequence
  Description of Artificial Sequence: Synthetic oligonucleotide
ucgcuucuagaagagcagg

SEQ ID NO: 2076596 - RNA, 19 nt, Artificial Sequence
  Description of Artificial Sequence: Synthetic oligonucleotide
ugcagcguccuuuaccagu

SEQ ID NO: 2076597 - RNA, 19 nt, Artificial Sequence
  Description of Artificial Sequence: Synthetic oligonucleotide
auuuccgggaccagcugcc

SEQ ID NO: 2076598 - RNA, 19 nt, Artificial Sequence
  Description of Artificial Sequence: Synthetic oligonucleotide
cauuuccgggaccagcugc

SEQ ID NO: 2076599 - RNA, 19 nt, Artificial Sequence
  Description of Artificial Sequence: Synthetic oligonucleotide
ugcaccacucuugggaucc

SEQ ID NO: 2076600 - RNA, 19 nt, Artificial Sequence
  Description of Artificial Sequence: Synthetic oligonucleotide
gaccccgggucccaguucg

SEQ ID NO: 2076601 - RNA, 19 nt, Artificial Sequence
  Description of Artificial Sequence: Synthetic oligonucleotide
guccuuuaccaguugaaga

SEQ ID NO: 2076602 - RNA, 19 nt, Artificial Sequence
  Description of Artificial Sequence: Synthetic oligonucleotide
auuugcauuuccgggacca

SEQ ID NO: 2076603 - RNA, 19 nt, Artificial Sequence
  Description of Artificial Sequence: Synthetic oligonucleotide
ugcaagucagggccuggag

SEQ ID NO: 2076604 - RNA, 19 nt, Artificial Sequence
  Description of Artificial Sequence: Synthetic oligonucleotide
cuccucuggauucccacgg

SEQ ID NO: 2076605 - RNA, 19 nt, Artificial Sequence
  Description of Artificial Sequence: Synthetic oligonucleotide
uucuccgagaccccggguc

SEQ ID NO: 2076606 - RNA, 19 nt, Artificial Sequence
  Description of Artificial Sequence: Synthetic oligonucleotide
caggacucggggaggaucc

SEQ ID NO: 2076607 - RNA, 19 nt, Artificial Sequence
  Description of Artificial Sequence: Synthetic oligonucleotide
gcugccauggucccuaaag

SEQ ID NO: 2076608 - RNA, 19 nt, Artificial Sequence
  Description of Artificial Sequence: Synthetic oligonucleotide
uccgugaagugcccggggc

SEQ ID NO: 2076609 - RNA, 19 nt, Artificial Sequence
  Description of Artificial Sequence: Synthetic oligonucleotide
gaagcuuagcagcccgaug

SEQ ID NO: 2076610 - RNA, 19 nt, Artificial Sequence
  Description of Artificial Sequence: Synthetic oligonucleotide
uugggauccguggaugcag

SEQ ID NO: 2076611 - RNA, 19 nt, Artificial Sequence
  Description of Artificial Sequence: Synthetic oligonucleotide
gagaccacgccuccccucc

SEQ ID NO: 2076612 - RNA, 19 nt, Artificial Sequence
  Description of Artificial Sequence: Synthetic oligonucleotide
caauguuuauucuccgaga

SEQ ID NO: 2076613 - RNA, 19 nt, Artificial Sequence
  Description of Artificial Sequence: Synthetic oligonucleotide
gucgcauccgauccagugc

SEQ ID NO: 2076614 - RNA, 19 nt, Artificial Sequence
  Description of Artificial Sequence: Synthetic oligonucleotide
ucgcugguagacagaaaga

SEQ ID NO: 2076615 - RNA, 19 nt, Artificial Sequence
  Description of Artificial Sequence: Synthetic oligonucleotide
cucuugccuuggaagaagc

SEQ ID NO: 2076616 - RNA, 19 nt, Artificial Sequence
  Description of Artificial Sequence: Synthetic oligonucleotide
cagaacuucgcugguagac

SEQ ID NO: 2076617 - RNA, 19 nt, Artificial Sequence
  Description of Artificial Sequence: Synthetic oligonucleotide
ugacuugucuccucuggau

SEQ ID NO: 2076618 - RNA, 19 nt, Artificial Sequence
  Description of Artificial Sequence: Synthetic oligonucleotide
aggacuuugccucgaaguu

SEQ ID NO: 2076619 - RNA, 19 nt, Artificial Sequence
  Description of Artificial Sequence: Synthetic oligonucleotide
ucuugccuuggaagaagcu

SEQ ID NO: 2076620 - RNA, 19 nt, Artificial Sequence
  Description of Artificial Sequence: Synthetic oligonucleotide
agcuuagcagcccgauguc

SEQ ID NO: 2076621 - RNA, 19 nt, Artificial Sequence
  Description of Artificial Sequence: Synthetic oligonucleotide
uuuucccgcuccgugaagu

SEQ ID NO: 2076622 - RNA, 19 nt, Artificial Sequence
  Description of Artificial Sequence: Synthetic oligonucleotide
uggucccuaaagucccagg

SEQ ID NO: 2076623 - RNA, 19 nt, Artificial Sequence
  Description of Artificial Sequence: Synthetic oligonucleotide
uaaagcagguuuugcucau

SEQ ID NO: 2076624 - RNA, 19 nt, Artificial Sequence
  Description of Artificial Sequence: Synthetic oligonucleotide
cacucugucgcauccgauc

SEQ ID NO: 2076625 - RNA, 19 nt, Artificial Sequence
  Description of Artificial Sequence: Synthetic oligonucleotide
acgcccugugacuugucuc

SEQ ID NO: 2076626 - RNA, 19 nt, Artificial Sequence
  Description of Artificial Sequence: Synthetic oligonucleotide
uugccucgaaguuucuccu

SEQ ID NO: 2076627 - RNA, 19 nt, Artificial Sequence
  Description of Artificial Sequence: Synthetic oligonucleotide
ggcauccaccgccacaugg

SEQ ID NO: 2076628 - RNA, 19 nt, Artificial Sequence
  Description of Artificial Sequence: Synthetic oligonucleotide
agaaggcgagaccacgccu

SEQ ID NO: 2076629 - RNA, 19 nt, Artificial Sequence
  Description of Artificial Sequence: Synthetic oligonucleotide
cuaaagucccagguucgag

SEQ ID NO: 2076630 - RNA, 19 nt, Artificial Sequence
  Description of Artificial Sequence: Synthetic oligonucleotide
agaacuucgcugguagaca

SEQ ID NO: 2076631 - RNA, 19 nt, Artificial Sequence
  Description of Artificial Sequence: Synthetic oligonucleotide
ugcucauggcuuguaggcc

SEQ ID NO: 2076632 - RNA, 19 nt, Artificial Sequence
  Description of Artificial Sequence: Synthetic oligonucleotide
ucucaaggccacagaggca

SEQ ID NO: 2076633 - RNA, 19 nt, Artificial Sequence
  Description of Artificial Sequence: Synthetic oligonucleotide
aagacaccacucugucgca

SEQ ID NO: 2076634 - RNA, 19 nt, Artificial Sequence
  Description of Artificial Sequence: Synthetic oligonucleotide
ucagaacuucgcugguaga

SEQ ID NO: 2076635 - RNA, 19 nt, Artificial Sequence
  Description of Artificial Sequence: Synthetic oligonucleotide
cugggugacagggagggug

SEQ ID NO: 2076636 - RNA, 19 nt, Artificial Sequence
  Description of Artificial Sequence: Synthetic oligonucleotide
aacgacgcccugugacuug

SEQ ID NO: 2076637 - RNA, 19 nt, Artificial Sequence
  Description of Artificial Sequence: Synthetic oligonucleotide
agcguccuuuaccaguuga

SEQ ID NO: 2076638 - RNA, 19 nt, Artificial Sequence
  Description of Artificial Sequence: Synthetic oligonucleotide
aguucgugacauuccuccu

SEQ ID NO: 2076639 - RNA, 19 nt, Artificial Sequence
  Description of Artificial Sequence: Synthetic oligonucleotide
aaagcagguuuugcucaug

SEQ ID NO: 2076640 - RNA, 19 nt, Artificial Sequence
  Description of Artificial Sequence: Synthetic oligonucleotide
ucccacggacuccgcaccg

SEQ ID NO: 2076641 - RNA, 19 nt, Artificial Sequence
  Description of Artificial Sequence: Synthetic oligonucleotide
gcucauggcuuguaggccc

SEQ ID NO: 2076642 - RNA, 19 nt, Artificial Sequence
  Description of Artificial Sequence: Synthetic oligonucleotide
cacgccuccccucccacgg

SEQ ID NO: 2076643 - RNA, 19 nt, Artificial Sequence
  Description of Artificial Sequence: Synthetic oligonucleotide
gaaggcgagaccacgccuc

SEQ ID NO: 2076644 - RNA, 19 nt, Artificial Sequence
  Description of Artificial Sequence: Synthetic oligonucleotide
agcucgcuucuagaagagc

SEQ ID NO: 2076645 - RNA, 19 nt, Artificial Sequence
  Description of Artificial Sequence: Synthetic oligonucleotide
uggaccuguagcccucggu

SEQ ID NO: 2076646 - RNA, 19 nt, Artificial Sequence
  Description of Artificial Sequence: Synthetic oligonucleotide
ccaauaagaaggcgagacc

SEQ ID NO: 2076647 - RNA, 19 nt, Artificial Sequence
  Description of Artificial Sequence: Synthetic oligonucleotide
gguccauccugcaagucag

SEQ ID NO: 2076648 - RNA, 19 nt, Artificial Sequence
  Description of Artificial Sequence: Synthetic oligonucleotide
acaggaugcaggacucggg

SEQ ID NO: 2076649 - RNA, 19 nt, Artificial Sequence
  Description of Artificial Sequence: Synthetic oligonucleotide
acuucgcugguagacagaa

SEQ ID NO: 2076650 - RNA, 19 nt, Artificial Sequence
  Description of Artificial Sequence: Synthetic oligonucleotide
ccauggucccuaaaguccc

SEQ ID NO: 2076651 - RNA, 19 nt, Artificial Sequence
  Description of Artificial Sequence: Synthetic oligonucleotide
agugcccggggcccagccc

SEQ ID NO: 2076652 - RNA, 19 nt, Artificial Sequence
  Description of Artificial Sequence: Synthetic oligonucleotide
gaggguggguccauccugc

SEQ ID NO: 2076653 - RNA, 19 nt, Artificial Sequence
  Description of Artificial Sequence: Synthetic oligonucleotide
ccauugacacgaucugugg

SEQ ID NO: 2076654 - RNA, 19 nt, Artificial Sequence
  Description of Artificial Sequence: Synthetic oligonucleotide
aggcaccgagcgcagcugg

SEQ ID NO: 2076655 - RNA, 19 nt, Artificial Sequence
  Description of Artificial Sequence: Synthetic oligonucleotide
accacucugucgcauccga

SEQ ID NO: 2076656 - RNA, 19 nt, Artificial Sequence
  Description of Artificial Sequence: Synthetic oligonucleotide
ucgagggccgugugcaaga

SEQ ID NO: 2076657 - RNA, 19 nt, Artificial Sequence
  Description of Artificial Sequence: Synthetic oligonucleotide
guagcccucgguccaggag

SEQ ID NO: 2076658 - RNA, 19 nt, Artificial Sequence
  Description of Artificial Sequence: Synthetic oligonucleotide
gccauggucccuaaagucc

SEQ ID NO: 2076659 - RNA, 19 nt, Artificial Sequence
  Description of Artificial Sequence: Synthetic oligonucleotide
gacaccacucugucgcauc

SEQ ID NO: 2076660 - RNA, 19 nt, Artificial Sequence
  Description of Artificial Sequence: Synthetic oligonucleotide
gaggucgagggccgugugc

SEQ ID NO: 2076661 - RNA, 19 nt, Artificial Sequence
  Description of Artificial Sequence: Synthetic oligonucleotide
aggaugcaggacucgggga

SEQ ID NO: 2076662 - RNA, 19 nt, Artificial Sequence
  Description of Artificial Sequence: Synthetic oligonucleotide
ggucucaaggccacagagg

SEQ ID NO: 2076663 - RNA, 19 nt, Artificial Sequence
  Description of Artificial Sequence: Synthetic oligonucleotide
cauuugcauuuccgggacc

SEQ ID NO: 2076664 - RNA, 19 nt, Artificial Sequence
  Description of Artificial Sequence: Synthetic oligonucleotide
accuguagcccucggucca

SEQ ID NO: 2076665 - RNA, 19 nt, Artificial Sequence
  Description of Artificial Sequence: Synthetic oligonucleotide
auccaccgccacauggacc

SEQ ID NO: 2076666 - RNA, 19 nt, Artificial Sequence
  Description of Artificial Sequence: Synthetic oligonucleotide
uccucuggauucccacgga

SEQ ID NO: 2076667 - RNA, 19 nt, Artificial Sequence
  Description of Artificial Sequence: Synthetic oligonucleotide
auccgauccagugccacca

SEQ ID NO: 2076668 - RNA, 19 nt, Artificial Sequence
  Description of Artificial Sequence: Synthetic oligonucleotide
cugugggugugcagcgucc

SEQ ID NO: 2076669 - RNA, 19 nt, Artificial Sequence
  Description of Artificial Sequence: Synthetic oligonucleotide
uccgauccagugccaccag

SEQ ID NO: 2076670 - RNA, 19 nt, Artificial Sequence
  Description of Artificial Sequence: Synthetic oligonucleotide
ggaccuguagcccucgguc

SEQ ID NO: 2076671 - RNA, 19 nt, Artificial Sequence
  Description of Artificial Sequence: Synthetic oligonucleotide
cauccaccgccacauggac

SEQ ID NO: 2076672 - RNA, 19 nt, Artificial Sequence
  Description of Artificial Sequence: Synthetic oligonucleotide
ccgugugcaagaugcagcc

SEQ ID NO: 2076673 - RNA, 19 nt, Artificial Sequence
  Description of Artificial Sequence: Synthetic oligonucleotide
ucgugacauuccuccuucc

SEQ ID NO: 2076674 - RNA, 19 nt, Artificial Sequence
  Description of Artificial Sequence: Synthetic oligonucleotide
agaccacgccuccccuccc

SEQ ID NO: 2076675 - RNA, 19 nt, Artificial Sequence
  Description of Artificial Sequence: Synthetic oligonucleotide
uccgggaccagcugcccaa

SEQ ID NO: 2076676 - RNA, 19 nt, Artificial Sequence
  Description of Artificial Sequence: Synthetic oligonucleotide
ccaauucccacccggcacc

SEQ ID NO: 2076677 - RNA, 19 nt, Artificial Sequence
  Description of Artificial Sequence: Synthetic oligonucleotide
aggucgagggccgugugca

SEQ ID NO: 2076678 - RNA, 19 nt, Artificial Sequence
  Description of Artificial Sequence: Synthetic oligonucleotide
agcggccauugacacgauc

SEQ ID NO: 2076679 - RNA, 19 nt, Artificial Sequence
  Description of Artificial Sequence: Synthetic oligonucleotide
cagcucgcuucuagaagag

SEQ ID NO: 2076680 - RNA, 19 nt, Artificial Sequence
  Description of Artificial Sequence: Synthetic oligonucleotide
cccuaaagucccagguucg

SEQ ID NO: 2076681 - RNA, 19 nt, Artificial Sequence
  Description of Artificial Sequence: Synthetic oligonucleotide
ugcucuugccuuggaagaa

SEQ ID NO: 2076682 - RNA, 19 nt, Artificial Sequence
  Description of Artificial Sequence: Synthetic oligonucleotide
agaagcuuagcagcccgau

SEQ ID NO: 2076683 - RNA, 19 nt, Artificial Sequence
  Description of Artificial Sequence: Synthetic oligonucleotide
uagaggacuuugccucgaa

SEQ ID NO: 2076684 - RNA, 19 nt, Artificial Sequence
  Description of Artificial Sequence: Synthetic oligonucleotide
agcaggcauccaccgccac

SEQ ID NO: 2076685 - RNA, 19 nt, Artificial Sequence
  Description of Artificial Sequence: Synthetic oligonucleotide
cuccgugaagugcccgggg

SEQ ID NO: 2076686 - RNA, 19 nt, Artificial Sequence
  Description of Artificial Sequence: Synthetic oligonucleotide
ggguccauccugcaaguca

SEQ ID NO: 2076687 - RNA, 19 nt, Artificial Sequence
  Description of Artificial Sequence: Synthetic oligonucleotide
uggcggacugcaccacucu

SEQ ID NO: 2076688 - RNA, 19 nt, Artificial Sequence
  Description of Artificial Sequence: Synthetic oligonucleotide
acauggaccuguagcccuc

SEQ ID NO: 2076689 - RNA, 19 nt, Artificial Sequence
  Description of Artificial Sequence: Synthetic oligonucleotide
ugcagccuugggucucaag

SEQ ID NO: 2076690 - RNA, 19 nt, Artificial Sequence
  Description of Artificial Sequence: Synthetic oligonucleotide
accagcugcccaauaagaa

SEQ ID NO: 2076691 - RNA, 19 nt, Artificial Sequence
  Description of Artificial Sequence: Synthetic oligonucleotide
auggaccuguagcccucgg

SEQ ID NO: 2076692 - RNA, 19 nt, Artificial Sequence
  Description of Artificial Sequence: Synthetic oligonucleotide
guaggcccugagcacccag

SEQ ID NO: 2076693 - RNA, 19 nt, Artificial Sequence
  Description of Artificial Sequence: Synthetic oligonucleotide
cugugacuugucuccucug

SEQ ID NO: 2076694 - RNA, 19 nt, Artificial Sequence
  Description of Artificial Sequence: Synthetic oligonucleotide
aacugugggugugcagcgu

SEQ ID NO: 2076695 - RNA, 19 nt, Artificial Sequence
  Description of Artificial Sequence: Synthetic oligonucleotide
agaccccgggucccaguuc

SEQ ID NO: 2076696 - RNA, 19 nt, Artificial Sequence
  Description of Artificial Sequence: Synthetic oligonucleotide
ugugggugugcagcguccu

SEQ ID NO: 2076697 - RNA, 19 nt, Artificial Sequence
  Description of Artificial Sequence: Synthetic oligonucleotide
cucagccaauucccacccg

SEQ ID NO: 2076698 - RNA, 19 nt, Artificial Sequence
  Description of Artificial Sequence: Synthetic oligonucleotide
gggaaguagaggacuuugc

SEQ ID NO: 2076699 - RNA, 19 nt, Artificial Sequence
  Description of Artificial Sequence: Synthetic oligonucleotide
cuggcggacugcaccacuc

SEQ ID NO: 2076700 - RNA, 19 nt, Artificial Sequence
  Description of Artificial Sequence: Synthetic oligonucleotide
gccaauucccacccggcac

SEQ ID NO: 2076701 - RNA, 19 nt, Artificial Sequence
  Description of Artificial Sequence: Synthetic oligonucleotide
ccauccugcaagucagggc

SEQ ID NO: 2076702 - RNA, 19 nt, Artificial Sequence
  Description of Artificial Sequence: Synthetic oligonucleotide
auggucccuaaagucccag

SEQ ID NO: 2076703 - RNA, 19 nt, Artificial Sequence
  Description of Artificial Sequence: Synthetic oligonucleotide
cuuuucccgcuccgugaag

SEQ ID NO: 2076704 - RNA, 19 nt, Artificial Sequence
  Description of Artificial Sequence: Synthetic oligonucleotide
aacuucgcugguagacaga

SEQ ID NO: 2076705 - RNA, 19 nt, Artificial Sequence
  Description of Artificial Sequence: Synthetic oligonucleotide
cuucuagaagagcaggcau

SEQ ID NO: 2076706 - RNA, 19 nt, Artificial Sequence
  Description of Artificial Sequence: Synthetic oligonucleotide
uccugcaagucagggccug

SEQ ID NO: 2076707 - RNA, 19 nt, Artificial Sequence
  Description of Artificial Sequence: Synthetic oligonucleotide
caccgagcgcagcuggggc

SEQ ID NO: 2076708 - RNA, 19 nt, Artificial Sequence
  Description of Artificial Sequence: Synthetic oligonucleotide
uccguggaugcaggagaag

SEQ ID NO: 2076709 - RNA, 19 nt, Artificial Sequence
  Description of Artificial Sequence: Synthetic oligonucleotide
ggcgagaccacgccucccc

SEQ ID NO: 2076710 - RNA, 19 nt, Artificial Sequence
  Description of Artificial Sequence: Synthetic oligonucleotide
cauggaccuguagcccucg

SEQ ID NO: 2076711 - RNA, 19 nt, Artificial Sequence
  Description of Artificial Sequence: Synthetic oligonucleotide
ccguggaugcaggagaagc

SEQ ID NO: 2076712 - RNA, 19 nt, Artificial Sequence
  Description of Artificial Sequence: Synthetic oligonucleotide
gucgagggccgugugcaag

SEQ ID NO: 2076713 - RNA, 19 nt, Artificial Sequence
  Description of Artificial Sequence: Synthetic oligonucleotide
cagguucgagaccggcccc

SEQ ID NO: 2076714 - RNA, 19 nt, Artificial Sequence
  Description of Artificial Sequence: Synthetic oligonucleotide
uccgcaccgggucuccuuu

SEQ ID NO: 2076715 - RNA, 19 nt, Artificial Sequence
  Description of Artificial Sequence: Synthetic oligonucleotide
cagguuuugcucauggcuu

SEQ ID NO: 2076716 - RNA, 19 nt, Artificial Sequence
  Description of Artificial Sequence: Synthetic oligonucleotide
gcuuguaggcccugagcac

SEQ ID NO: 2076717 - RNA, 19 nt, Artificial Sequence
  Description of Artificial Sequence: Synthetic oligonucleotide
uuuccgggaccagcugccc

SEQ ID NO: 2076718 - RNA, 19 nt, Artificial Sequence
  Description of Artificial Sequence: Synthetic oligonucleotide
ugaagugcccggggcccag

SEQ ID NO: 2076719 - RNA, 19 nt, Artificial Sequence
  Description of Artificial Sequence: Synthetic oligonucleotide
gugugcaagaugcagccuu

SEQ ID NO: 2076720 - RNA, 19 nt, Artificial Sequence
  Description of Artificial Sequence: Synthetic oligonucleotide
gagggccgugugcaagaug

SEQ ID NO: 2076721 - RNA, 19 nt, Artificial Sequence
  Description of Artificial Sequence: Synthetic oligonucleotide
gcugcccaauaagaaggcg

SEQ ID NO: 2076722 - RNA, 19 nt, Artificial Sequence
  Description of Artificial Sequence: Synthetic oligonucleotide
auucuccgagaccccgggu

SEQ ID NO: 2076723 - RNA, 19 nt, Artificial Sequence
  Description of Artificial Sequence: Synthetic oligonucleotide
gcugguagacagaaagaca

SEQ ID NO: 2076724 - RNA, 19 nt, Artificial Sequence
  Description of Artificial Sequence: Synthetic oligonucleotide
accacucuugggauccgug

SEQ ID NO: 2076725 - RNA, 19 nt, Artificial Sequence
  Description of Artificial Sequence: Synthetic oligonucleotide
cacauaggaacaggaugca

SEQ ID NO: 2076726 - RNA, 19 nt, Artificial Sequence
  Description of Artificial Sequence: Synthetic oligonucleotide
cacauggaccuguagcccu

SEQ ID NO: 2076727 - RNA, 19 nt, Artificial Sequence
  Description of Artificial Sequence: Synthetic oligonucleotide
agucagggccuggagucca

SEQ ID NO: 2076728 - RNA, 19 nt, Artificial Sequence
  Description of Artificial Sequence: Synthetic oligonucleotide
ggucccuaaagucccaggu

SEQ ID NO: 2076729 - RNA, 19 nt, Artificial Sequence
  Description of Artificial Sequence: Synthetic oligonucleotide
gccgugugcaagaugcagc

SEQ ID NO: 2076730 - RNA, 19 nt, Artificial Sequence
  Description of Artificial Sequence: Synthetic oligonucleotide
cucuggauucccacggacu

SEQ ID NO: 2076731 - RNA, 19 nt, Artificial Sequence
  Description of Artificial Sequence: Synthetic oligonucleotide
gcucuugccuuggaagaag

SEQ ID NO: 2076732 - RNA, 19 nt, Artificial Sequence
  Description of Artificial Sequence: Synthetic oligonucleotide
gaugcagccuugggucuca

SEQ ID NO: 2076733 - RNA, 19 nt, Artificial Sequence
  Description of Artificial Sequence: Synthetic oligonucleotide
caccacucugucgcauccg

SEQ ID NO: 2076734 - RNA, 19 nt, Artificial Sequence
  Description of Artificial Sequence: Synthetic oligonucleotide
ggggcgggucuccuggcgg

SEQ ID NO: 2076735 - RNA, 19 nt, Artificial Sequence
  Description of Artificial Sequence: Synthetic oligonucleotide
cugcaccacucuugggauc

SEQ ID NO: 2076736 - RNA, 19 nt, Artificial Sequence
  Description of Artificial Sequence: Synthetic oligonucleotide
ggccgugugcaagaugcag

SEQ ID NO: 2076737 - RNA, 19 nt, Artificial Sequence
  Description of Artificial Sequence: Synthetic oligonucleotide
aggaggucgagggccgugu

SEQ ID NO: 2076738 - RNA, 19 nt, Artificial Sequence
  Description of Artificial Sequence: Synthetic oligonucleotide
cuugggauccguggaugca

SEQ ID NO: 2076739 - RNA, 19 nt, Artificial Sequence
  Description of Artificial Sequence: Synthetic oligonucleotide
gacgcccugugacuugucu

SEQ ID NO: 2076740 - RNA, 19 nt, Artificial Sequence
  Description of Artificial Sequence: Synthetic oligonucleotide
ccacccggcaccaggaguc

SEQ ID NO: 2076741 - RNA, 19 nt, Artificial Sequence
  Description of Artificial Sequence: Synthetic oligonucleotide
ggacugcaccacucuuggg

SEQ ID NO: 2076742 - RNA, 19 nt, Artificial Sequence
  Description of Artificial Sequence: Synthetic oligonucleotide
aggacucggggaggauccg

SEQ ID NO: 2076743 - RNA, 19 nt, Artificial Sequence
  Description of Artificial Sequence: Synthetic oligonucleotide
gggaccagcugcccaauaa

SEQ ID NO: 2076744 - RNA, 19 nt, Artificial Sequence
  Description of Artificial Sequence: Synthetic oligonucleotide
guagaggacuuugccucga

SEQ ID NO: 2076745 - RNA, 19 nt, Artificial Sequence
  Description of Artificial Sequence: Synthetic oligonucleotide
cauggucccuaaaguccca

SEQ ID NO: 2076746 - RNA, 19 nt, Artificial Sequence
  Description of Artificial Sequence: Synthetic oligonucleotide
cuugccuuggaagaagcuu

SEQ ID NO: 2076747 - RNA, 19 nt, Artificial Sequence
  Description of Artificial Sequence: Synthetic oligonucleotide
cguccuuuaccaguugaag

SEQ ID NO: 2076748 - RNA, 19 nt, Artificial Sequence
  Description of Artificial Sequence: Synthetic oligonucleotide
aggguggguccauccugca

SEQ ID NO: 2076749 - RNA, 19 nt, Artificial Sequence
  Description of Artificial Sequence: Synthetic oligonucleotide
guucgugacauuccuccuu

SEQ ID NO: 2076750 - RNA, 19 nt, Artificial Sequence
  Description of Artificial Sequence: Synthetic oligonucleotide
gguugcucuugccuuggaa

SEQ ID NO: 2076751 - RNA, 19 nt, Artificial Sequence
  Description of Artificial Sequence: Synthetic oligonucleotide
acgccuccccucccacggg

SEQ ID NO: 2076752 - RNA, 19 nt, Artificial Sequence
  Description of Artificial Sequence: Synthetic oligonucleotide
acgacgcccugugacuugu

SEQ ID NO: 2076753 - RNA, 19 nt, Artificial Sequence
  Description of Artificial Sequence: Synthetic oligonucleotide
gaccacgccuccccuccca

SEQ ID NO: 2076754 - RNA, 19 nt, Artificial Sequence
  Description of Artificial Sequence: Synthetic oligonucleotide
ccccucuccaacgacgccc

SEQ ID NO: 2076755 - RNA, 19 nt, Artificial Sequence
  Description of Artificial Sequence: Synthetic oligonucleotide
uguaggcccugagcaccca

SEQ ID NO: 2076756 - RNA, 19 nt, Artificial Sequence
  Description of Artificial Sequence: Synthetic oligonucleotide
gcauuuccgggaccagcug

SEQ ID NO: 2076757 - RNA, 19 nt, Artificial Sequence
  Description of Artificial Sequence: Synthetic oligonucleotide
auccguggaugcaggagaa

SEQ ID NO: 2076758 - RNA, 19 nt, Artificial Sequence
  Description of Artificial Sequence: Synthetic oligonucleotide
ccucuggauucccacggac

SEQ ID NO: 2076759 - RNA, 19 nt, Artificial Sequence
  Description of Artificial Sequence: Synthetic oligonucleotide
ccgugaagugcccggggcc

SEQ ID NO: 2076760 - RNA, 19 nt, Artificial Sequence
  Description of Artificial Sequence: Synthetic oligonucleotide
gcggacugcaccacucuug

SEQ ID NO: 2076761 - RNA, 19 nt, Artificial Sequence
  Description of Artificial Sequence: Synthetic oligonucleotide
agacaccacucugucgcau

SEQ ID NO: 2076762 - RNA, 19 nt, Artificial Sequence
  Description of Artificial Sequence: Synthetic oligonucleotide
gggguugcucuugccuugg

SEQ ID NO: 2076763 - RNA, 19 nt, Artificial Sequence
  Description of Artificial Sequence: Synthetic oligonucleotide
cucugucgcauccgaucca

SEQ ID NO: 2076764 - RNA, 19 nt, Artificial Sequence
  Description of Artificial Sequence: Synthetic oligonucleotide
gcuccgugaagugcccggg

SEQ ID NO: 2076765 - RNA, 19 nt, Artificial Sequence
  Description of Artificial Sequence: Synthetic oligonucleotide
gacuccgcaccgggucucc

SEQ ID NO: 2076766 - RNA, 19 nt, Artificial Sequence
  Description of Artificial Sequence: Synthetic oligonucleotide
cuccgagaccccggguccc

SEQ ID NO: 2076767 - RNA, 19 nt, Artificial Sequence
  Description of Artificial Sequence: Synthetic oligonucleotide
ccaguucgugacauuccuc

SEQ ID NO: 2076768 - RNA, 19 nt, Artificial Sequence
  Description of Artificial Sequence: Synthetic oligonucleotide
gagcaggcauccaccgcca

SEQ ID NO: 2076769 - RNA, 19 nt, Artificial Sequence
  Description of Artificial Sequence: Synthetic oligonucleotide
gcggccauugacacgaucu

SEQ ID NO: 2076770 - RNA, 19 nt, Artificial Sequence
  Description of Artificial Sequence: Synthetic oligonucleotide
gcauccaccgccacaugga

SEQ ID NO: 2076771 - RNA, 19 nt, Artificial Sequence
  Description of Artificial Sequence: Synthetic oligonucleotide
ccacggacuccgcaccggg

SEQ ID NO: 2076772 - RNA, 19 nt, Artificial Sequence
  Description of Artificial Sequence: Synthetic oligonucleotide
ccgggucccaguucgugac

SEQ ID NO: 2076773 - RNA, 19 nt, Artificial Sequence
  Description of Artificial Sequence: Synthetic oligonucleotide
aggcauccaccgccacaug

SEQ ID NO: 2076774 - RNA, 19 nt, Artificial Sequence
  Description of Artificial Sequence: Synthetic oligonucleotide
ggugugcagcguccuuuac

SEQ ID NO: 2076775 - RNA, 19 nt, Artificial Sequence
  Description of Artificial Sequence: Synthetic oligonucleotide
cauggcuuguaggcccuga

SEQ ID NO: 2076776 - RNA, 19 nt, Artificial Sequence
  Description of Artificial Sequence: Synthetic oligonucleotide
guggguccauccugcaagu

SEQ ID NO: 2076777 - RNA, 19 nt, Artificial Sequence
  Description of Artificial Sequence: Synthetic oligonucleotide
cagcguccuuuaccaguug

SEQ ID NO: 2076778 - RNA, 19 nt, Artificial Sequence
  Description of Artificial Sequence: Synthetic oligonucleotide
ggaggucgagggccgugug

SEQ ID NO: 2076779 - RNA, 19 nt, Artificial Sequence
  Description of Artificial Sequence: Synthetic oligonucleotide
caucaaagucugggugaca

SEQ ID NO: 2076780 - RNA, 19 nt, Artificial Sequence
  Description of Artificial Sequence: Synthetic oligonucleotide
agcccucgguccaggaggu

SEQ ID NO: 2076781 - RNA, 19 nt, Artificial Sequence
  Description of Artificial Sequence: Synthetic oligonucleotide
gcaggacucggggaggauc

SEQ ID NO: 2076782 - RNA, 19 nt, Artificial Sequence
  Description of Artificial Sequence: Synthetic oligonucleotide
cgugaagugcccggggccc

SEQ ID NO: 2076783 - RNA, 19 nt, Artificial Sequence
  Description of Artificial Sequence: Synthetic oligonucleotide
ccgauccagugccaccagc

SEQ ID NO: 2076784 - RNA, 19 nt, Artificial Sequence
  Description of Artificial Sequence: Synthetic oligonucleotide
acccggcaccaggagucuc

SEQ ID NO: 2076785 - RNA, 19 nt, Artificial Sequence
  Description of Artificial Sequence: Synthetic oligonucleotide
cgcuccgugaagugcccgg

SEQ ID NO: 2076786 - RNA, 19 nt, Artificial Sequence
  Description of Artificial Sequence: Synthetic oligonucleotide
gagaccccgggucccaguu

SEQ ID NO: 2076787 - RNA, 19 nt, Artificial Sequence
  Description of Artificial Sequence: Synthetic oligonucleotide
gucccagguucgagaccgg

SEQ ID NO: 2076788 - RNA, 19 nt, Artificial Sequence
  Description of Artificial Sequence: Synthetic oligonucleotide
cucuccaacgacgcccugu

SEQ ID NO: 2076789 - RNA, 19 nt, Artificial Sequence
  Description of Artificial Sequence: Synthetic oligonucleotide
ccuaaagucccagguucga

SEQ ID NO: 2076790 - RNA, 19 nt, Artificial Sequence
  Description of Artificial Sequence: Synthetic oligonucleotide
ccugcaagucagggccugg

SEQ ID NO: 2076791 - RNA, 19 nt, Artificial Sequence
  Description of Artificial Sequence: Synthetic oligonucleotide
caccauacuaaagcagguu

SEQ ID NO: 2076792 - RNA, 19 nt, Artificial Sequence
  Description of Artificial Sequence: Synthetic oligonucleotide
ccacgccuccccucccacg

SEQ ID NO: 2076793 - RNA, 19 nt, Artificial Sequence
  Description of Artificial Sequence: Synthetic oligonucleotide
cuccaacgacgcccuguga

SEQ ID NO: 2076794 - RNA, 19 nt, Artificial Sequence
  Description of Artificial Sequence: Synthetic oligonucleotide
ccugugacuugucuccucu

SEQ ID NO: 2076795 - RNA, 19 nt, Artificial Sequence
  Description of Artificial Sequence: Synthetic oligonucleotide
gcguccuuuaccaguugaa

SEQ ID NO: 2076796 - RNA, 19 nt, Artificial Sequence
  Description of Artificial Sequence: Synthetic oligonucleotide
ggccauugacacgaucugu

SEQ ID NO: 2076797 - RNA, 19 nt, Artificial Sequence
  Description of Artificial Sequence: Synthetic oligonucleotide
ggacuuugccucgaaguuu

SEQ ID NO: 2076798 - RNA, 19 nt, Artificial Sequence
  Description of Artificial Sequence: Synthetic oligonucleotide
ccaacgacgcccugugacu

SEQ ID NO: 2076799 - RNA, 19 nt, Artificial Sequence
  Description of Artificial Sequence: Synthetic oligonucleotide
ggguggguccauccugcaa

SEQ ID NO: 2076800 - RNA, 19 nt, Artificial Sequence
  Description of Artificial Sequence: Synthetic oligonucleotide
cccaguucgugacauuccu

SEQ ID NO: 2076801 - RNA, 19 nt, Artificial Sequence
  Description of Artificial Sequence: Synthetic oligonucleotide
gcccaauaagaaggcgaga

SEQ ID NO: 2076802 - RNA, 19 nt, Artificial Sequence
  Description of Artificial Sequence: Synthetic oligonucleotide
cccgcuccgugaagugccc

SEQ ID NO: 2076803 - RNA, 19 nt, Artificial Sequence
  Description of Artificial Sequence: Synthetic oligonucleotide
acuccgcaccgggucuccu

SEQ ID NO: 2076804 - RNA, 19 nt, Artificial Sequence
  Description of Artificial Sequence: Synthetic oligonucleotide
gguuuugcucauggcuugu

SEQ ID NO: 2076805 - RNA, 19 nt, Artificial Sequence
  Description of Artificial Sequence: Synthetic oligonucleotide
agcgcagcuggggccguuu

SEQ ID NO: 2076806 - RNA, 19 nt, Artificial Sequence
  Description of Artificial Sequence: Synthetic oligonucleotide
accgccacauggaccugua

SEQ ID NO: 2076807 - RNA, 19 nt, Artificial Sequence
  Description of Artificial Sequence: Synthetic oligonucleotide
gcgcagcuggggccguuug

SEQ ID NO: 2076808 - RNA, 19 nt, Artificial Sequence
  Description of Artificial Sequence: Synthetic oligonucleotide
gugggaaguagaggacuuu

SEQ ID NO: 2076809 - RNA, 19 nt, Artificial Sequence
  Description of Artificial Sequence: Synthetic oligonucleotide
ccuugcccucagccaauuc

SEQ ID NO: 2076810 - RNA, 19 nt, Artificial Sequence
  Description of Artificial Sequence: Synthetic oligonucleotide
ggauucccacggacuccgc

SEQ ID NO: 2076811 - RNA, 19 nt, Artificial Sequence
  Description of Artificial Sequence: Synthetic oligonucleotide
cacggacuccgcaccgggu

SEQ ID NO: 2076812 - RNA, 19 nt, Artificial Sequence
  Description of Artificial Sequence: Synthetic oligonucleotide
caacgacgcccugugacuu

SEQ ID NO: 2076813 - RNA, 19 nt, Artificial Sequence
  Description of Artificial Sequence: Synthetic oligonucleotide
cgagaccacgccuccccuc

SEQ ID NO: 2076814 - RNA, 19 nt, Artificial Sequence
  Description of Artificial Sequence: Synthetic oligonucleotide
ggguugcucuugccuugga

SEQ ID NO: 2076815 - RNA, 19 nt, Artificial Sequence
  Description of Artificial Sequence: Synthetic oligonucleotide
cgggucuccuggcggacug

SEQ ID NO: 2076816 - RNA, 19 nt, Artificial Sequence
  Description of Artificial Sequence: Synthetic oligonucleotide
ggucgagggccgugugcaa

SEQ ID NO: 2076817 - RNA, 19 nt, Artificial Sequence
  Description of Artificial Sequence: Synthetic oligonucleotide
ggacuccgcaccgggucuc

SEQ ID NO: 2076818 - RNA, 19 nt, Artificial Sequence
  Description of Artificial Sequence: Synthetic oligonucleotide
gcagcguccuuuaccaguu

SEQ ID NO: 2076819 - RNA, 19 nt, Artificial Sequence
  Description of Artificial Sequence: Synthetic oligonucleotide
cugucgcauccgauccagu

SEQ ID NO: 2076820 - RNA, 19 nt, Artificial Sequence
  Description of Artificial Sequence: Synthetic oligonucleotide
ggcaggcaccgagcgcagc

SEQ ID NO: 2076821 - RNA, 19 nt, Artificial Sequence
  Description of Artificial Sequence: Synthetic oligonucleotide
caccuugcccucagccaau

SEQ ID NO: 2076822 - RNA, 19 nt, Artificial Sequence
  Description of Artificial Sequence: Synthetic oligonucleotide
ccgcuccgugaagugcccg

SEQ ID NO: 2076823 - RNA, 19 nt, Artificial Sequence
  Description of Artificial Sequence: Synthetic oligonucleotide
gggucccaguucgugacau

SEQ ID NO: 2076824 - RNA, 19 nt, Artificial Sequence
  Description of Artificial Sequence: Synthetic oligonucleotide
ggcgggucuccuggcggac

SEQ ID NO: 2076825 - RNA, 19 nt, Artificial Sequence
  Description of Artificial Sequence: Synthetic oligonucleotide
ggcggacugcaccacucuu

SEQ ID NO: 2076826 - RNA, 19 nt, Artificial Sequence
  Description of Artificial Sequence: Synthetic oligonucleotide
ggccguuuguccagcuccu

SEQ ID NO: 2076827 - RNA, 19 nt, Artificial Sequence
  Description of Artificial Sequence: Synthetic oligonucleotide
ccccgggucccaguucgug

SEQ ID NO: 2076828 - RNA, 19 nt, Artificial Sequence
  Description of Artificial Sequence: Synthetic oligonucleotide
accccgggucccaguucgu

SEQ ID NO: 2076829 - RNA, 19 nt, Artificial Sequence
  Description of Artificial Sequence: Synthetic oligonucleotide
gggccgugugcaagaugca

SEQ ID NO: 2076830 - RNA, 19 nt, Artificial Sequence
  Description of Artificial Sequence: Synthetic oligonucleotide
gcgagaccacgccuccccu

SEQ ID NO: 2076831 - RNA, 19 nt, Artificial Sequence
  Description of Artificial Sequence: Synthetic oligonucleotide
cuccgcaccgggucuccuu

SEQ ID NO: 2076832 - RNA, 19 nt, Artificial Sequence
  Description of Artificial Sequence: Synthetic oligonucleotide
cagccacaucaauguuuau

SEQ ID NO: 2076833 - RNA, 19 nt, Artificial Sequence
  Description of Artificial Sequence: Synthetic oligonucleotide
cccacccggcaccaggagu

SEQ ID NO: 2076834 - RNA, 19 nt, Artificial Sequence
  Description of Artificial Sequence: Synthetic oligonucleotide
ccuggcggacugcaccacu

SEQ ID NO: 2076835 - RNA, 19 nt, Artificial Sequence
  Description of Artificial Sequence: Synthetic oligonucleotide
cacccggcaccaggagucu

SEQ ID NO: 2076836 - RNA, 19 nt, Artificial Sequence
  Description of Artificial Sequence: Synthetic oligonucleotide
cgcauccgauccagugcca

SEQ ID NO: 2076837 - RNA, 19 nt, Artificial Sequence
  Description of Artificial Sequence: Synthetic oligonucleotide
cgacgcccugugacuuguc

SEQ ID NO: 2076838 - RNA, 19 nt, Artificial Sequence
  Description of Artificial Sequence: Synthetic oligonucleotide
gcgggucuccuggcggacu

SEQ ID NO: 2076839 - RNA, 19 nt, Artificial Sequence
  Description of Artificial Sequence: Synthetic oligonucleotide
gcccucgguccaggagguc

SEQ ID NO: 2076840 - RNA, 19 nt, Artificial Sequence
  Description of Artificial Sequence: Synthetic oligonucleotide
cgugugcaagaugcagccu

SEQ ID NO: 2076841 - RNA, 19 nt, Artificial Sequence
  Description of Artificial Sequence: Synthetic oligonucleotide
gagcgcagcuggggccguu

SEQ ID NO: 2076842 - RNA, 19 nt, Artificial Sequence
  Description of Artificial Sequence: Synthetic oligonucleotide
ccggcaccaggagucucau

SEQ ID NO: 2076843 - RNA, 19 nt, Artificial Sequence
  Description of Artificial Sequence: Synthetic oligonucleotide
ccgcaccgggucuccuuuu

SEQ ID NO: 2076844 - RNA, 19 nt, Artificial Sequence
  Description of Artificial Sequence: Synthetic oligonucleotide
cgagggccgugugcaagau

SEQ ID NO: 2076845 - RNA, 19 nt, Artificial Sequence
  Description of Artificial Sequence: Synthetic oligonucleotide
ccgggaccagcugcccaau

SEQ ID NO: 2076846 - RNA, 19 nt, Artificial Sequence
  Description of Artificial Sequence: Synthetic oligonucleotide
cgagcgcagcuggggccgu

SEQ ID NO: 2076847 - RNA, 19 nt, Artificial Sequence
  Description of Artificial Sequence: Synthetic oligonucleotide
uuaagugagauucugauaa

SEQ ID NO: 2076848 - RNA, 19 nt, Artificial Sequence
  Description of Artificial Sequence: Synthetic oligonucleotide
aacagggucaaccagggga

SEQ ID NO: 2076849 - RNA, 19 nt, Artificial Sequence
  Description of Artificial Sequence: Synthetic oligonucleotide
gguaaaauugcccaucugg

SEQ ID NO: 2076850 - RNA, 19 nt, Artificial Sequence
  Description of Artificial Sequence: Synthetic oligonucleotide
cuugauguugguuuaagug

SEQ ID NO: 2076851 - RNA, 19 nt, Artificial Sequence
  Description of Artificial Sequence: Synthetic oligonucleotide
uggaaaaccaacaggguca

SEQ ID NO: 2076852 - RNA, 19 nt, Artificial Sequence
  Description of Artificial Sequence: Synthetic oligonucleotide
guugguuuaagugagauuc

SEQ ID NO: 2076853 - RNA, 19 nt, Artificial Sequence
  Description of Artificial Sequence: Synthetic oligonucleotide
ucuagugggagaucaaugc

SEQ ID NO: 2076854 - RNA, 19 nt, Artificial Sequence
  Description of Artificial Sequence: Synthetic oligonucleotide
aaaguaggguaaaauugcc

SEQ ID NO: 2076855 - RNA, 19 nt, Artificial Sequence
  Description of Artificial Sequence: Synthetic oligonucleotide
ugcggcacugcuuacaggg

SEQ ID NO: 2076856 - RNA, 19 nt, Artificial Sequence
  Description of Artificial Sequence: Synthetic oligonucleotide
aguaggguaaaauugccca

SEQ ID NO: 2076857 - RNA, 19 nt, Artificial Sequence
  Description of Artificial Sequence: Synthetic oligonucleotide
aucaaugcuggauggaccg

SEQ ID NO: 2076858 - RNA, 19 nt, Artificial Sequence
  Description of Artificial Sequence: Synthetic oligonucleotide
ucugaagaguggaaaacca

SEQ ID NO: 2076859 - RNA, 19 nt, Artificial Sequence
  Description of Artificial Sequence: Synthetic oligonucleotide
guaaaauugcccaucuggg

SEQ ID NO: 2076860 - RNA, 19 nt, Artificial Sequence
  Description of Artificial Sequence: Synthetic oligonucleotide
aaguaggguaaaauugccc

SEQ ID NO: 2076861 - RNA, 19 nt, Artificial Sequence
  Description of Artificial Sequence: Synthetic oligonucleotide
ucucuguuccaccagggcc

SEQ ID NO: 2076862 - RNA, 19 nt, Artificial Sequence
  Description of Artificial Sequence: Synthetic oligonucleotide
ucuacaucauccccggaug

SEQ ID NO: 2076863 - RNA, 19 nt, Artificial Sequence
  Description of Artificial Sequence: Synthetic oligonucleotide
aucgcgauagagcgggucc

SEQ ID NO: 2076864 - RNA, 19 nt, Artificial Sequence
  Description of Artificial Sequence: Synthetic oligonucleotide
uucucauaccguuugcggc

SEQ ID NO: 2076865 - RNA, 19 nt, Artificial Sequence
  Description of Artificial Sequence: Synthetic oligonucleotide
uagugggagaucaaugcug

SEQ ID NO: 2076866 - RNA, 19 nt, Artificial Sequence
  Description of Artificial Sequence: Synthetic oligonucleotide
cuucucauaccguuugcgg

SEQ ID NO: 2076867 - RNA, 19 nt, Artificial Sequence
  Description of Artificial Sequence: Synthetic oligonucleotide
agucaccaccaccagaccg

SEQ ID NO: 2076868 - RNA, 19 nt, Artificial Sequence
  Description of Artificial Sequence: Synthetic oligonucleotide
uucuagugggagaucaaug

SEQ ID NO: 2076869 - RNA, 19 nt, Artificial Sequence
  Description of Artificial Sequence: Synthetic oligonucleotide
uucgguauggcaguguccc

SEQ ID NO: 2076870 - RNA, 19 nt, Artificial Sequence
  Description of Artificial Sequence: Synthetic oligonucleotide
uccaaaguaggguaaaauu

SEQ ID NO: 2076871 - RNA, 19 nt, Artificial Sequence
  Description of Artificial Sequence: Synthetic oligonucleotide
uuugcggcacugcuuacag

SEQ ID NO: 2076872 - RNA, 19 nt, Artificial Sequence
  Description of Artificial Sequence: Synthetic oligonucleotide
agaucaaugcuggauggac

SEQ ID NO: 2076873 - RNA, 19 nt, Artificial Sequence
  Description of Artificial Sequence: Synthetic oligonucleotide
uaaaauugcccaucugggu

SEQ ID NO: 2076874 - RNA, 19 nt, Artificial Sequence
  Description of Artificial Sequence: Synthetic oligonucleotide
ucugcuacagagagcaggu

SEQ ID NO: 2076875 - RNA, 19 nt, Artificial Sequence
  Description of Artificial Sequence: Synthetic oligonucleotide
auacgcaccucaccgggcc

SEQ ID NO: 2076876 - RNA, 19 nt, Artificial Sequence
  Description of Artificial Sequence: Synthetic oligonucleotide
aaagugggccacugccucg

SEQ ID NO: 2076877 - RNA, 19 nt, Artificial Sequence
  Description of Artificial Sequence: Synthetic oligonucleotide
uggguaacucugcagggcc

SEQ ID NO: 2076878 - RNA, 19 nt, Artificial Sequence
  Description of Artificial Sequence: Synthetic oligonucleotide
uccagcgcgagucuguggc

SEQ ID NO: 2076879 - RNA, 19 nt, Artificial Sequence
  Description of Artificial Sequence: Synthetic oligonucleotide
gggucaucgcgauagagcg

SEQ ID NO: 2076880 - RNA, 19 nt, Artificial Sequence
  Description of Artificial Sequence: Synthetic oligonucleotide
accacaacccucucugagg

SEQ ID NO: 2076881 - RNA, 19 nt, Artificial Sequence
  Description of Artificial Sequence: Synthetic oligonucleotide
uuggagaugcggaaugcga

SEQ ID NO: 2076882 - RNA, 19 nt, Artificial Sequence
  Description of Artificial Sequence: Synthetic oligonucleotide
ucugacccuaaccccuucg

SEQ ID NO: 2076883 - RNA, 19 nt, Artificial Sequence
  Description of Artificial Sequence: Synthetic oligonucleotide
ugguaccaagguuagcugc

SEQ ID NO: 2076884 - RNA, 19 nt, Artificial Sequence
  Description of Artificial Sequence: Synthetic oligonucleotide
acaggggucaucgcgauag

SEQ ID NO: 2076885 - RNA, 19 nt, Artificial Sequence
  Description of Artificial Sequence: Synthetic oligonucleotide
gucaucgcgauagagcggg

SEQ ID NO: 2076886 - RNA, 19 nt, Artificial Sequence
  Description of Artificial Sequence: Synthetic oligonucleotide
uggagcguggguaacucug

SEQ ID NO: 2076887 - RNA, 19 nt, Artificial Sequence
  Description of Artificial Sequence: Synthetic oligonucleotide
cagaccgccucucugaccc

SEQ ID NO: 2076888 - RNA, 19 nt, Artificial Sequence
  Description of Artificial Sequence: Synthetic oligonucleotide
ugcggaaugcgauacgcac

SEQ ID NO: 2076889 - RNA, 19 nt, Artificial Sequence
  Description of Artificial Sequence: Synthetic oligonucleotide
guuagcugccgucugcucc

SEQ ID NO: 2076890 - RNA, 19 nt, Artificial Sequence
  Description of Artificial Sequence: Synthetic oligonucleotide
agugggagaucaaugcugg

SEQ ID NO: 2076891 - RNA, 19 nt, Artificial Sequence
  Description of Artificial Sequence: Synthetic oligonucleotide
gacccuaaccccuucgcug

SEQ ID NO: 2076892 - RNA, 19 nt, Artificial Sequence
  Description of Artificial Sequence: Synthetic oligonucleotide
gaugcggaaugcgauacgc

SEQ ID NO: 2076893 - RNA, 19 nt, Artificial Sequence
  Description of Artificial Sequence: Synthetic oligonucleotide
uccguaaggcaggucaugg

SEQ ID NO: 2076894 - RNA, 19 nt, Artificial Sequence
  Description of Artificial Sequence: Synthetic oligonucleotide
ucaaagugggccacugccu

SEQ ID NO: 2076895 - RNA, 19 nt, Artificial Sequence
  Description of Artificial Sequence: Synthetic oligonucleotide
acccuaaccccuucgcugg

SEQ ID NO: 2076896 - RNA, 19 nt, Artificial Sequence
  Description of Artificial Sequence: Synthetic oligonucleotide
ugcucagccgacacaaaga

SEQ ID NO: 2076897 - RNA, 19 nt, Artificial Sequence
  Description of Artificial Sequence: Synthetic oligonucleotide
acaucauccccggaugucg

SEQ ID NO: 2076898 - RNA, 19 nt, Artificial Sequence
  Description of Artificial Sequence: Synthetic oligonucleotide
gagagacucagggaugggg

SEQ ID NO: 2076899 - RNA, 19 nt, Artificial Sequence
  Description of Artificial Sequence: Synthetic oligonucleotide
cugcuuacaggggucaucg

SEQ ID NO: 2076900 - RNA, 19 nt, Artificial Sequence
  Description of Artificial Sequence: Synthetic oligonucleotide
ugcggagacccuugguugg

SEQ ID NO: 2076901 - RNA, 19 nt, Artificial Sequence
  Description of Artificial Sequence: Synthetic oligonucleotide
gaaugcgauacgcaccuca

SEQ ID NO: 2076902 - RNA, 19 nt, Artificial Sequence
  Description of Artificial Sequence: Synthetic oligonucleotide
gaucaaugcuggauggacc

SEQ ID NO: 2076903 - RNA, 19 nt, Artificial Sequence
  Description of Artificial Sequence: Synthetic oligonucleotide
acaacccucucugaggguc

SEQ ID NO: 2076904 - RNA, 19 nt, Artificial Sequence
  Description of Artificial Sequence: Synthetic oligonucleotide
aagugagauucugauaaaa

SEQ ID NO: 2076905 - RNA, 19 nt, Artificial Sequence
  Description of Artificial Sequence: Synthetic oligonucleotide
gcuuacaggggucaucgcg

SEQ ID NO: 2076906 - RNA, 19 nt, Artificial Sequence
  Description of Artificial Sequence: Synthetic oligonucleotide
gaagguguuggcuggcgac

SEQ ID NO: 2076907 - RNA, 19 nt, Artificial Sequence
  Description of Artificial Sequence: Synthetic oligonucleotide
cacaucgcccuucucauac

SEQ ID NO: 2076908 - RNA, 19 nt, Artificial Sequence
  Description of Artificial Sequence: Synthetic oligonucleotide
ugguuuaagugagauucug

SEQ ID NO: 2076909 - RNA, 19 nt, Artificial Sequence
  Description of Artificial Sequence: Synthetic oligonucleotide
uucggcagcacauccagua

SEQ ID NO: 2076910 - RNA, 19 nt, Artificial Sequence
  Description of Artificial Sequence: Synthetic oligonucleotide
uugucguggaggcccaagc

SEQ ID NO: 2076911 - RNA, 19 nt, Artificial Sequence
  Description of Artificial Sequence: Synthetic oligonucleotide
cucgcgaucggcucuucgg

SEQ ID NO: 2076912 - RNA, 19 nt, Artificial Sequence
  Description of Artificial Sequence: Synthetic oligonucleotide
aggguaaaauugcccaucu

SEQ ID NO: 2076913 - RNA, 19 nt, Artificial Sequence
  Description of Artificial Sequence: Synthetic oligonucleotide
cuuacaggggucaucgcga

SEQ ID NO: 2076914 - RNA, 19 nt, Artificial Sequence
  Description of Artificial Sequence: Synthetic oligonucleotide
cucggcugcagucaccacc

SEQ ID NO: 2076915 - RNA, 19 nt, Artificial Sequence
  Description of Artificial Sequence: Synthetic oligonucleotide
auagagcgggucccgguuc

SEQ ID NO: 2076916 - RNA, 19 nt, Artificial Sequence
  Description of Artificial Sequence: Synthetic oligonucleotide
gggagaucaaugcuggaug

SEQ ID NO: 2076917 - RNA, 19 nt, Artificial Sequence
  Description of Artificial Sequence: Synthetic oligonucleotide
ucguggaggcccaagcgac

SEQ ID NO: 2076918 - RNA, 19 nt, Artificial Sequence
  Description of Artificial Sequence: Synthetic oligonucleotide
cagagagacucagggaugg

SEQ ID NO: 2076919 - RNA, 19 nt, Artificial Sequence
  Description of Artificial Sequence: Synthetic oligonucleotide
uccgcuccaaaguagggua

SEQ ID NO: 2076920 - RNA, 19 nt, Artificial Sequence
  Description of Artificial Sequence: Synthetic oligonucleotide
ucggcagcacauccaguag

SEQ ID NO: 2076921 - RNA, 19 nt, Artificial Sequence
  Description of Artificial Sequence: Synthetic oligonucleotide
acaucgcccuucucauacc

SEQ ID NO: 2076922 - RNA, 19 nt, Artificial Sequence
  Description of Artificial Sequence: Synthetic oligonucleotide
ucgcgaucggcucuucggc

SEQ ID NO: 2076923 - RNA, 19 nt, Artificial Sequence
  Description of Artificial Sequence: Synthetic oligonucleotide
caucgcccuucucauaccg

SEQ ID NO: 2076924 - RNA, 19 nt, Artificial Sequence
  Description of Artificial Sequence: Synthetic oligonucleotide
aauugcccaucugggugac

SEQ ID NO: 2076925 - RNA, 19 nt, Artificial Sequence
  Description of Artificial Sequence: Synthetic oligonucleotide
agaugcggaaugcgauacg

SEQ ID NO: 2076926 - RNA, 19 nt, Artificial Sequence
  Description of Artificial Sequence: Synthetic oligonucleotide
ugacccuaaccccuucgcu

SEQ ID NO: 2076927 - RNA, 19 nt, Artificial Sequence
  Description of Artificial Sequence: Synthetic oligonucleotide
aaccuggucccaguucuag

SEQ ID NO: 2076928 - RNA, 19 nt, Artificial Sequence
  Description of Artificial Sequence: Synthetic oligonucleotide
uaagugagauucugauaaa

SEQ ID NO: 2076929 - RNA, 19 nt, Artificial Sequence
  Description of Artificial Sequence: Synthetic oligonucleotide
cuaaccccuucgcuggugc

SEQ ID NO: 2076930 - RNA, 19 nt, Artificial Sequence
  Description of Artificial Sequence: Synthetic oligonucleotide
gagaugcggaaugcgauac

SEQ ID NO: 2076931 - RNA, 19 nt, Artificial Sequence
  Description of Artificial Sequence: Synthetic oligonucleotide
cuuccgcuccaaaguaggg

SEQ ID NO: 2076932 - RNA, 19 nt, Artificial Sequence
  Description of Artificial Sequence: Synthetic oligonucleotide
accagaccgccucucugac

SEQ ID NO: 2076933 - RNA, 19 nt, Artificial Sequence
  Description of Artificial Sequence: Synthetic oligonucleotide
cacuccauugcacggcagc

SEQ ID NO: 2076934 - RNA, 19 nt, Artificial Sequence
  Description of Artificial Sequence: Synthetic oligonucleotide
ucucgcgaucggcucuucg

SEQ ID NO: 2076935 - RNA, 19 nt, Artificial Sequence
  Description of Artificial Sequence: Synthetic oligonucleotide
caaagugggccacugccuc

SEQ ID NO: 2076936 - RNA, 19 nt, Artificial Sequence
  Description of Artificial Sequence: Synthetic oligonucleotide
ggcagagggacacaucgcc

SEQ ID NO: 2076937 - RNA, 19 nt, Artificial Sequence
  Description of Artificial Sequence: Synthetic oligonucleotide
cucaccgggcccaggaccc

SEQ ID NO: 2076938 - RNA, 19 nt, Artificial Sequence
  Description of Artificial Sequence: Synthetic oligonucleotide
uaccguuugcggcacugcu

SEQ ID NO: 2076939 - RNA, 19 nt, Artificial Sequence
  Description of Artificial Sequence: Synthetic oligonucleotide
aaccccuucgcuggugcuc

SEQ ID NO: 2076940 - RNA, 19 nt, Artificial Sequence
  Description of Artificial Sequence: Synthetic oligonucleotide
aaagcgggaagggguucgg

SEQ ID NO: 2076941 - RNA, 19 nt, Artificial Sequence
  Description of Artificial Sequence: Synthetic oligonucleotide
agcguggguaacucugcag

SEQ ID NO: 2076942 - RNA, 19 nt, Artificial Sequence
  Description of Artificial Sequence: Synthetic oligonucleotide
ucaaugcuggauggaccgg

SEQ ID NO: 2076943 - RNA, 19 nt, Artificial Sequence
  Description of Artificial Sequence: Synthetic oligonucleotide
cuugaggagagccucaggu

SEQ ID NO: 2076944 - RNA, 19 nt, Artificial Sequence
  Description of Artificial Sequence: Synthetic oligonucleotide
ugguuggagggcugucccg

SEQ ID NO: 2076945 - RNA, 19 nt, Artificial Sequence
  Description of Artificial Sequence: Synthetic oligonucleotide
auaccguuugcggcacugc

SEQ ID NO: 2076946 - RNA, 19 nt, Artificial Sequence
  Description of Artificial Sequence: Synthetic oligonucleotide
cauccaguaggagcguccg

SEQ ID NO: 2076947 - RNA, 19 nt, Artificial Sequence
  Description of Artificial Sequence: Synthetic oligonucleotide
cucagccgacacaaagacc

SEQ ID NO: 2076948 - RNA, 19 nt, Artificial Sequence
  Description of Artificial Sequence: Synthetic oligonucleotide
cacccaguuguugucgugg

SEQ ID NO: 2076949 - RNA, 19 nt, Artificial Sequence
  Description of Artificial Sequence: Synthetic oligonucleotide
cauuggagaugcggaaugc

SEQ ID NO: 2076950 - RNA, 19 nt, Artificial Sequence
  Description of Artificial Sequence: Synthetic oligonucleotide
uagagcgggucccgguucc

SEQ ID NO: 2076951 - RNA, 19 nt, Artificial Sequence
  Description of Artificial Sequence: Synthetic oligonucleotide
gugaccggggcucucggcc

SEQ ID NO: 2076952 - RNA, 19 nt, Artificial Sequence
  Description of Artificial Sequence: Synthetic oligonucleotide
aagguguuggcuggcgacu

SEQ ID NO: 2076953 - RNA, 19 nt, Artificial Sequence
  Description of Artificial Sequence: Synthetic oligonucleotide
cucucugaggguccauggc

SEQ ID NO: 2076954 - RNA, 19 nt, Artificial Sequence
  Description of Artificial Sequence: Synthetic oligonucleotide
cugacccuaaccccuucgc

SEQ ID NO: 2076955 - RNA, 19 nt, Artificial Sequence
  Description of Artificial Sequence: Synthetic oligonucleotide
uccaguaggagcguccgua

SEQ ID NO: 2076956 - RNA, 19 nt, Artificial Sequence
  Description of Artificial Sequence: Synthetic oligonucleotide
accccuucgcuggugcucc

SEQ ID NO: 2076957 - RNA, 19 nt, Artificial Sequence
  Description of Artificial Sequence: Synthetic oligonucleotide
auguugguuuaagugagau

SEQ ID NO: 2076958 - RNA, 19 nt, Artificial Sequence
  Description of Artificial Sequence: Synthetic oligonucleotide
ggcgacucaguccuggccc

SEQ ID NO: 2076959 - RNA, 19 nt, Artificial Sequence
  Description of Artificial Sequence: Synthetic oligonucleotide
uggcgacucaguccuggcc

SEQ ID NO: 2076960 - RNA, 19 nt, Artificial Sequence
  Description of Artificial Sequence: Synthetic oligonucleotide
ucucggccauuggagaugc

SEQ ID NO: 2076961 - RNA, 19 nt, Artificial Sequence
  Description of Artificial Sequence: Synthetic oligonucleotide
auugcacggcagcacccag

SEQ ID NO: 2076962 - RNA, 19 nt, Artificial Sequence
  Description of Artificial Sequence: Synthetic oligonucleotide
uucgcuggugcucccugcu

SEQ ID NO: 2076963 - RNA, 19 nt, Artificial Sequence
  Description of Artificial Sequence: Synthetic oligonucleotide
ccaacagggucaaccaggg

SEQ ID NO: 2076964 - RNA, 19 nt, Artificial Sequence
  Description of Artificial Sequence: Synthetic oligonucleotide
ugcugugucccuggggcag

SEQ ID NO: 2076965 - RNA, 19 nt, Artificial Sequence
  Description of Artificial Sequence: Synthetic oligonucleotide
aguggaaaaccaacagggu

SEQ ID NO: 2076966 - RNA, 19 nt, Artificial Sequence
  Description of Artificial Sequence: Synthetic oligonucleotide
agggccaccauuucugcua

SEQ ID NO: 2076967 - RNA, 19 nt, Artificial Sequence
  Description of Artificial Sequence: Synthetic oligonucleotide
auggaccggaagguguugg

SEQ ID NO: 2076968 - RNA, 19 nt, Artificial Sequence
  Description of Artificial Sequence: Synthetic oligonucleotide
guuggcuggcgacucaguc

SEQ ID NO: 2076969 - RNA, 19 nt, Artificial Sequence
  Description of Artificial Sequence: Synthetic oligonucleotide
uuccgcuccaaaguagggu

SEQ ID NO: 2076970 - RNA, 19 nt, Artificial Sequence
  Description of Artificial Sequence: Synthetic oligonucleotide
cagggcggcucucuguucc

SEQ ID NO: 2076971 - RNA, 19 nt, Artificial Sequence
  Description of Artificial Sequence: Synthetic oligonucleotide
ugcacggcagcacccaguu

SEQ ID NO: 2076972 - RNA, 19 nt, Artificial Sequence
  Description of Artificial Sequence: Synthetic oligonucleotide
guaccaagguuagcugccg

SEQ ID NO: 2076973 - RNA, 19 nt, Artificial Sequence
  Description of Artificial Sequence: Synthetic oligonucleotide
ccacaacccucucugaggg

SEQ ID NO: 2076974 - RNA, 19 nt, Artificial Sequence
  Description of Artificial Sequence: Synthetic oligonucleotide
ucccaguucuagugggaga

SEQ ID NO: 2076975 - RNA, 19 nt, Artificial Sequence
  Description of Artificial Sequence: Synthetic oligonucleotide
gguaccaagguuagcugcc

SEQ ID NO: 2076976 - RNA, 19 nt, Artificial Sequence
  Description of Artificial Sequence: Synthetic oligonucleotide
uggaccggaagguguuggc

SEQ ID NO: 2076977 - RNA, 19 nt, Artificial Sequence
  Description of Artificial Sequence: Synthetic oligonucleotide
cuugggugguggagcgugg

SEQ ID NO: 2076978 - RNA, 19 nt, Artificial Sequence
  Description of Artificial Sequence: Synthetic oligonucleotide
caagguuagcugccgucug

SEQ ID NO: 2076979 - RNA, 19 nt, Artificial Sequence
  Description of Artificial Sequence: Synthetic oligonucleotide
gcucagccgacacaaagac

SEQ ID NO: 2076980 - RNA, 19 nt, Artificial Sequence
  Description of Artificial Sequence: Synthetic oligonucleotide
caaaccuggucccaguucu

SEQ ID NO: 2076981 - RNA, 19 nt, Artificial Sequence
  Description of Artificial Sequence: Synthetic oligonucleotide
uugcggcacugcuuacagg

SEQ ID NO: 2076982 - RNA, 19 nt, Artificial Sequence
  Description of Artificial Sequence: Synthetic oligonucleotide
uaccaagguuagcugccgu

SEQ ID NO: 2076983 - RNA, 19 nt, Artificial Sequence
  Description of Artificial Sequence: Synthetic oligonucleotide
ggguccauggcccuggcuc

SEQ ID NO: 2076984 - RNA, 19 nt, Artificial Sequence
  Description of Artificial Sequence: Synthetic oligonucleotide
gauacgcaccucaccgggc

SEQ ID NO: 2076985 - RNA, 19 nt, Artificial Sequence
  Description of Artificial Sequence: Synthetic oligonucleotide
caacccucucugagggucc

SEQ ID NO: 2076986 - RNA, 19 nt, Artificial Sequence
  Description of Artificial Sequence: Synthetic oligonucleotide
aggacccggccgcuccucc

SEQ ID NO: 2076987 - RNA, 19 nt, Artificial Sequence
  Description of Artificial Sequence: Synthetic oligonucleotide
uuccagcgcgagucugugg

SEQ ID NO: 2076988 - RNA, 19 nt, Artificial Sequence
  Description of Artificial Sequence: Synthetic oligonucleotide
uuacaggggucaucgcgau

SEQ ID NO: 2076989 - RNA, 19 nt, Artificial Sequence
  Description of Artificial Sequence: Synthetic oligonucleotide
uacaucauccccggauguc

SEQ ID NO: 2076990 - RNA, 19 nt, Artificial Sequence
  Description of Artificial Sequence: Synthetic oligonucleotide
caguucuagugggagauca

SEQ ID NO: 2076991 - RNA, 19 nt, Artificial Sequence
  Description of Artificial Sequence: Synthetic oligonucleotide
guggguaacucugcagggc

SEQ ID NO: 2076992 - RNA, 19 nt, Artificial Sequence
  Description of Artificial Sequence: Synthetic oligonucleotide
gcuuccgcuccaaaguagg

SEQ ID NO: 2076993 - RNA, 19 nt, Artificial Sequence
  Description of Artificial Sequence: Synthetic oligonucleotide
gucccaguucuagugggag

SEQ ID NO: 2076994 - RNA, 19 nt, Artificial Sequence
  Description of Artificial Sequence: Synthetic oligonucleotide
ugggugaccggggcucucg

SEQ ID NO: 2076995 - RNA, 19 nt, Artificial Sequence
  Description of Artificial Sequence: Synthetic oligonucleotide
ucccgcugggccucaaagu

SEQ ID NO: 2076996 - RNA, 19 nt, Artificial Sequence
  Description of Artificial Sequence: Synthetic oligonucleotide
cauaccguuugcggcacug

SEQ ID NO: 2076997 - RNA, 19 nt, Artificial Sequence
  Description of Artificial Sequence: Synthetic oligonucleotide
uugcacggcagcacccagu

SEQ ID NO: 2076998 - RNA, 19 nt, Artificial Sequence
  Description of Artificial Sequence: Synthetic oligonucleotide
ucgcccuucucauaccguu

SEQ ID NO: 2076999 - RNA, 19 nt, Artificial Sequence
  Description of Artificial Sequence: Synthetic oligonucleotide
accucaccgggcccaggac

SEQ ID NO: 2077000 - RNA, 19 nt, Artificial Sequence
  Description of Artificial Sequence: Synthetic oligonucleotide
gacacaucgcccuucucau

SEQ ID NO: 2077001 - RNA, 19 nt, Artificial Sequence
  Description of Artificial Sequence: Synthetic oligonucleotide
agcgcgagucuguggcccg

SEQ ID NO: 2077002 - RNA, 19 nt, Artificial Sequence
  Description of Artificial Sequence: Synthetic oligonucleotide
ucggcgacucggcugcagu

SEQ ID NO: 2077003 - RNA, 19 nt, Artificial Sequence
  Description of Artificial Sequence: Synthetic oligonucleotide
cacggcagcacccaguugu

SEQ ID NO: 2077004 - RNA, 19 nt, Artificial Sequence
  Description of Artificial Sequence: Synthetic oligonucleotide
gucuguggcccgcacccag

SEQ ID NO: 2077005 - RNA, 19 nt, Artificial Sequence
  Description of Artificial Sequence: Synthetic oligonucleotide
gucuacaucauccccggau

SEQ ID NO: 2077006 - RNA, 19 nt, Artificial Sequence
  Description of Artificial Sequence: Synthetic oligonucleotide
agcacccaguuguugucgu

SEQ ID NO: 2077007 - RNA, 19 nt, Artificial Sequence
  Description of Artificial Sequence: Synthetic oligonucleotide
uguuggcuggcgacucagu

SEQ ID NO: 2077008 - RNA, 19 nt, Artificial Sequence
  Description of Artificial Sequence: Synthetic oligonucleotide
agcuugaggagagccucag

SEQ ID NO: 2077009 - RNA, 19 nt, Artificial Sequence
  Description of Artificial Sequence: Synthetic oligonucleotide
ucgcgauagagcggguccc

SEQ ID NO: 2077010 - RNA, 19 nt, Artificial Sequence
  Description of Artificial Sequence: Synthetic oligonucleotide
gguucgguauggcaguguc

SEQ ID NO: 2077011 - RNA, 19 nt, Artificial Sequence
  Description of Artificial Sequence: Synthetic oligonucleotide
gguuggggcuugauguugg

SEQ ID NO: 2077012 - RNA, 19 nt, Artificial Sequence
  Description of Artificial Sequence: Synthetic oligonucleotide
gcguccguaaggcagguca

SEQ ID NO: 2077013 - RNA, 19 nt, Artificial Sequence
  Description of Artificial Sequence: Synthetic oligonucleotide
uacgcaccucaccgggccc

SEQ ID NO: 2077014 - RNA, 19 nt, Artificial Sequence
  Description of Artificial Sequence: Synthetic oligonucleotide
ugaccggggcucucggcca

SEQ ID NO: 2077015 - RNA, 19 nt, Artificial Sequence
  Description of Artificial Sequence: Synthetic oligonucleotide
gacagccgggcgucucgcg

SEQ ID NO: 2077016 - RNA, 19 nt, Artificial Sequence
  Description of Artificial Sequence: Synthetic oligonucleotide
uaggagcguccguaaggca

SEQ ID NO: 2077017 - RNA, 19 nt, Artificial Sequence
  Description of Artificial Sequence: Synthetic oligonucleotide
agagagacucagggauggg

SEQ ID NO: 2077018 - RNA, 19 nt, Artificial Sequence
  Description of Artificial Sequence: Synthetic oligonucleotide
ugcuuacaggggucaucgc

SEQ ID NO: 2077019 - RNA, 19 nt, Artificial Sequence
  Description of Artificial Sequence: Synthetic oligonucleotide
aaugcuggauggaccggaa

SEQ ID NO: 2077020 - RNA, 19 nt, Artificial Sequence
  Description of Artificial Sequence: Synthetic oligonucleotide
gauggaccggaagguguug

SEQ ID NO: 2077021 - RNA, 19 nt, Artificial Sequence
  Description of Artificial Sequence: Synthetic oligonucleotide
cguaaggcaggucauggug

SEQ ID NO: 2077022 - RNA, 19 nt, Artificial Sequence
  Description of Artificial Sequence: Synthetic oligonucleotide
cuacagagagcaggucuac

SEQ ID NO: 2077023 - RNA, 19 nt, Artificial Sequence
  Description of Artificial Sequence: Synthetic oligonucleotide
caacagggucaaccagggg

SEQ ID NO: 2077024 - RNA, 19 nt, Artificial Sequence
  Description of Artificial Sequence: Synthetic oligonucleotide
uguggcccgcacccaggcc

SEQ ID NO: 2077025 - RNA, 19 nt, Artificial Sequence
  Description of Artificial Sequence: Synthetic oligonucleotide
guucgguauggcagugucc

SEQ ID NO: 2077026 - RNA, 19 nt, Artificial Sequence
  Description of Artificial Sequence: Synthetic oligonucleotide
ucgguauggcagugucccc

SEQ ID NO: 2077027 - RNA, 19 nt, Artificial Sequence
  Description of Artificial Sequence: Synthetic oligonucleotide
ggagcguccguaaggcagg

SEQ ID NO: 2077028 - RNA, 19 nt, Artificial Sequence
  Description of Artificial Sequence: Synthetic oligonucleotide
ucucugacccuaaccccuu

SEQ ID NO: 2077029 - RNA, 19 nt, Artificial Sequence
  Description of Artificial Sequence: Synthetic oligonucleotide
acagccgggcgucucgcga

SEQ ID NO: 2077030 - RNA, 19 nt, Artificial Sequence
  Description of Artificial Sequence: Synthetic oligonucleotide
cuagugggagaucaaugcu

SEQ ID NO: 2077031 - RNA, 19 nt, Artificial Sequence
  Description of Artificial Sequence: Synthetic oligonucleotide
cuggauggaccggaaggug

SEQ ID NO: 2077032 - RNA, 19 nt, Artificial Sequence
  Description of Artificial Sequence: Synthetic oligonucleotide
gcgauacgcaccucaccgg

SEQ ID NO: 2077033 - RNA, 19 nt, Artificial Sequence
  Description of Artificial Sequence: Synthetic oligonucleotide
guugucguggaggcccaag

SEQ ID NO: 2077034 - RNA, 19 nt, Artificial Sequence
  Description of Artificial Sequence: Synthetic oligonucleotide
accaccagaccgccucucu

SEQ ID NO: 2077035 - RNA, 19 nt, Artificial Sequence
  Description of Artificial Sequence: Synthetic oligonucleotide
agguuagcugccgucugcu

SEQ ID NO: 2077036 - RNA, 19 nt, Artificial Sequence
  Description of Artificial Sequence: Synthetic oligonucleotide
cuccuugcggagacccuug

SEQ ID NO: 2077037 - RNA, 19 nt, Artificial Sequence
  Description of Artificial Sequence: Synthetic oligonucleotide
cuggcgacucaguccuggc

SEQ ID NO: 2077038 - RNA, 19 nt, Artificial Sequence
  Description of Artificial Sequence: Synthetic oligonucleotide
gcucuucggcagcacaucc

SEQ ID NO: 2077039 - RNA, 19 nt, Artificial Sequence
  Description of Artificial Sequence: Synthetic oligonucleotide
caagcgacagccgggcguc

SEQ ID NO: 2077040 - RNA, 19 nt, Artificial Sequence
  Description of Artificial Sequence: Synthetic oligonucleotide
gccgacacaaagaccacug

SEQ ID NO: 2077041 - RNA, 19 nt, Artificial Sequence
  Description of Artificial Sequence: Synthetic oligonucleotide
gcucugaagaguggaaaac

SEQ ID NO: 2077042 - RNA, 19 nt, Artificial Sequence
  Description of Artificial Sequence: Synthetic oligonucleotide
ggguaaaauugcccaucug

SEQ ID NO: 2077043 - RNA, 19 nt, Artificial Sequence
  Description of Artificial Sequence: Synthetic oligonucleotide
uaaccccuucgcuggugcu

SEQ ID NO: 2077044 - RNA, 19 nt, Artificial Sequence
  Description of Artificial Sequence: Synthetic oligonucleotide
ggcuugauguugguuuaag

SEQ ID NO: 2077045 - RNA, 19 nt, Artificial Sequence
  Description of Artificial Sequence: Synthetic oligonucleotide
guaggguaaaauugcccau

SEQ ID NO: 2077046 - RNA, 19 nt, Artificial Sequence
  Description of Artificial Sequence: Synthetic oligonucleotide
guuugcggcacugcuuaca

SEQ ID NO: 2077047 - RNA, 19 nt, Artificial Sequence
  Description of Artificial Sequence: Synthetic oligonucleotide
cacugccucggcgacucgg

SEQ ID NO: 2077048 - RNA, 19 nt, Artificial Sequence
  Description of Artificial Sequence: Synthetic oligonucleotide
acucggcugcagucaccac

SEQ ID NO: 2077049 - RNA, 19 nt, Artificial Sequence
  Description of Artificial Sequence: Synthetic oligonucleotide
auugcccaucugggugacc

SEQ ID NO: 2077050 - RNA, 19 nt, Artificial Sequence
  Description of Artificial Sequence: Synthetic oligonucleotide
cucauaccguuugcggcac

SEQ ID NO: 2077051 - RNA, 19 nt, Artificial Sequence
  Description of Artificial Sequence: Synthetic oligonucleotide
gauagagcgggucccgguu

SEQ ID NO: 2077052 - RNA, 19 nt, Artificial Sequence
  Description of Artificial Sequence: Synthetic oligonucleotide
caaugcuggauggaccgga

SEQ ID NO: 2077053 - RNA, 19 nt, Artificial Sequence
  Description of Artificial Sequence: Synthetic oligonucleotide
ugguggagcguggguaacu

SEQ ID NO: 2077054 - RNA, 19 nt, Artificial Sequence
  Description of Artificial Sequence: Synthetic oligonucleotide
cguggguaacucugcaggg

SEQ ID NO: 2077055 - RNA, 19 nt, Artificial Sequence
  Description of Artificial Sequence: Synthetic oligonucleotide
cgauacgcaccucaccggg

SEQ ID NO: 2077056 - RNA, 19 nt, Artificial Sequence
  Description of Artificial Sequence: Synthetic oligonucleotide
gcgaucggcucuucggcag

SEQ ID NO: 2077057 - RNA, 19 nt, Artificial Sequence
  Description of Artificial Sequence: Synthetic oligonucleotide
gccgucugcucccugcugc

SEQ ID NO: 2077058 - RNA, 19 nt, Artificial Sequence
  Description of Artificial Sequence: Synthetic oligonucleotide
agccgacacaaagaccacu

SEQ ID NO: 2077059 - RNA, 19 nt, Artificial Sequence
  Description of Artificial Sequence: Synthetic oligonucleotide
cccgcugggccucaaagug

SEQ ID NO: 2077060 - RNA, 19 nt, Artificial Sequence
  Description of Artificial Sequence: Synthetic oligonucleotide
guuccagcgcgagucugug

SEQ ID NO: 2077061 - RNA, 19 nt, Artificial Sequence
  Description of Artificial Sequence: Synthetic oligonucleotide
cagcgcgagucuguggccc

SEQ ID NO: 2077062 - RNA, 19 nt, Artificial Sequence
  Description of Artificial Sequence: Synthetic oligonucleotide
ucauaccguuugcggcacu

SEQ ID NO: 2077063 - RNA, 19 nt, Artificial Sequence
  Description of Artificial Sequence: Synthetic oligonucleotide
ccgacacaaagaccacugg

SEQ ID NO: 2077064 - RNA, 19 nt, Artificial Sequence
  Description of Artificial Sequence: Synthetic oligonucleotide
aacccucucugagggucca

SEQ ID NO: 2077065 - RNA, 19 nt, Artificial Sequence
  Description of Artificial Sequence: Synthetic oligonucleotide
caucgcgauagagcggguc

SEQ ID NO: 2077066 - RNA, 19 nt, Artificial Sequence
  Description of Artificial Sequence: Synthetic oligonucleotide
agcaaagcgggaagggguu

SEQ ID NO: 2077067 - RNA, 19 nt, Artificial Sequence
  Description of Artificial Sequence: Synthetic oligonucleotide
guccguaaggcaggucaug

SEQ ID NO: 2077068 - RNA, 19 nt, Artificial Sequence
  Description of Artificial Sequence: Synthetic oligonucleotide
gccucaggugguaccaagg

SEQ ID NO: 2077069 - RNA, 19 nt, Artificial Sequence
  Description of Artificial Sequence: Synthetic oligonucleotide
gggucccgguuccagcgcg

SEQ ID NO: 2077070 - RNA, 19 nt, Artificial Sequence
  Description of Artificial Sequence: Synthetic oligonucleotide
gcuugggugguggagcgug

SEQ ID NO: 2077071 - RNA, 19 nt, Artificial Sequence
  Description of Artificial Sequence: Synthetic oligonucleotide
ggucaucgcgauagagcgg

SEQ ID NO: 2077072 - RNA, 19 nt, Artificial Sequence
  Description of Artificial Sequence: Synthetic oligonucleotide
augcggaaugcgauacgca

SEQ ID NO: 2077073 - RNA, 19 nt, Artificial Sequence
  Description of Artificial Sequence: Synthetic oligonucleotide
cugggagaggcacagggau

SEQ ID NO: 2077074 - RNA, 19 nt, Artificial Sequence
  Description of Artificial Sequence: Synthetic oligonucleotide
gguauggcaguguccccuc

SEQ ID NO: 2077075 - RNA, 19 nt, Artificial Sequence
  Description of Artificial Sequence: Synthetic oligonucleotide
aguucuagugggagaucaa

SEQ ID NO: 2077076 - RNA, 19 nt, Artificial Sequence
  Description of Artificial Sequence: Synthetic oligonucleotide
ucaucgcgauagagcgggu

SEQ ID NO: 2077077 - RNA, 19 nt, Artificial Sequence
  Description of Artificial Sequence: Synthetic oligonucleotide
ccauugcacggcagcaccc

SEQ ID NO: 2077078 - RNA, 19 nt, Artificial Sequence
  Description of Artificial Sequence: Synthetic oligonucleotide
ucgcuggugcucccugcuc

SEQ ID NO: 2077079 - RNA, 19 nt, Artificial Sequence
  Description of Artificial Sequence: Synthetic oligonucleotide
gaaaaccaacagggucaac

SEQ ID NO: 2077080 - RNA, 19 nt, Artificial Sequence
  Description of Artificial Sequence: Synthetic oligonucleotide
agccgggcgucucgcgauc

SEQ ID NO: 2077081 - RNA, 19 nt, Artificial Sequence
  Description of Artificial Sequence: Synthetic oligonucleotide
ggaagguguuggcuggcga

SEQ ID NO: 2077082 - RNA, 19 nt, Artificial Sequence
  Description of Artificial Sequence: Synthetic oligonucleotide
ggagaugcggaaugcgaua

SEQ ID NO: 2077083 - RNA, 19 nt, Artificial Sequence
  Description of Artificial Sequence: Synthetic oligonucleotide
ggugguggagcguggguaa

SEQ ID NO: 2077084 - RNA, 19 nt, Artificial Sequence
  Description of Artificial Sequence: Synthetic oligonucleotide
agggucaaccaggggauuu

SEQ ID NO: 2077085 - RNA, 19 nt, Artificial Sequence
  Description of Artificial Sequence: Synthetic oligonucleotide
ggagcguggguaacucugc

SEQ ID NO: 2077086 - RNA, 19 nt, Artificial Sequence
  Description of Artificial Sequence: Synthetic oligonucleotide
cuggcucugaagaguggaa

SEQ ID NO: 2077087 - RNA, 19 nt, Artificial Sequence
  Description of Artificial Sequence: Synthetic oligonucleotide
ucugggugaccggggcucu

SEQ ID NO: 2077088 - RNA, 19 nt, Artificial Sequence
  Description of Artificial Sequence: Synthetic oligonucleotide
cauugcacggcagcaccca

SEQ ID NO: 2077089 - RNA, 19 nt, Artificial Sequence
  Description of Artificial Sequence: Synthetic oligonucleotide
agcgacagccgggcgucuc

SEQ ID NO: 2077090 - RNA, 19 nt, Artificial Sequence
  Description of Artificial Sequence: Synthetic oligonucleotide
guucuagugggagaucaau

SEQ ID NO: 2077091 - RNA, 19 nt, Artificial Sequence
  Description of Artificial Sequence: Synthetic oligonucleotide
cacauccaguaggagcguc

SEQ ID NO: 2077092 - RNA, 19 nt, Artificial Sequence
  Description of Artificial Sequence: Synthetic oligonucleotide
ggggcucucggccauugga

SEQ ID NO: 2077093 - RNA, 19 nt, Artificial Sequence
  Description of Artificial Sequence: Synthetic oligonucleotide
cuacaucauccccggaugu

SEQ ID NO: 2077094 - RNA, 19 nt, Artificial Sequence
  Description of Artificial Sequence: Synthetic oligonucleotide
ccgcugggccucaaagugg

SEQ ID NO: 2077095 - RNA, 19 nt, Artificial Sequence
  Description of Artificial Sequence: Synthetic oligonucleotide
cccagcaaagcgggaaggg

SEQ ID NO: 2077096 - RNA, 19 nt, Artificial Sequence
  Description of Artificial Sequence: Synthetic oligonucleotide
gaucggcucuucggcagca

SEQ ID NO: 2077097 - RNA, 19 nt, Artificial Sequence
  Description of Artificial Sequence: Synthetic oligonucleotide
gcgacagccgggcgucucg

SEQ ID NO: 2077098 - RNA, 19 nt, Artificial Sequence
  Description of Artificial Sequence: Synthetic oligonucleotide
ucccgguuccagcgcgagu

SEQ ID NO: 2077099 - RNA, 19 nt, Artificial Sequence
  Description of Artificial Sequence: Synthetic oligonucleotide
gcuugauguugguuuaagu

SEQ ID NO: 2077100 - RNA, 19 nt, Artificial Sequence
  Description of Artificial Sequence: Synthetic oligonucleotide
gagcgggucccgguuccag

SEQ ID NO: 2077101 - RNA, 19 nt, Artificial Sequence
  Description of Artificial Sequence: Synthetic oligonucleotide
cccaucugggugaccgggg

SEQ ID NO: 2077102 - RNA, 19 nt, Artificial Sequence
  Description of Artificial Sequence: Synthetic oligonucleotide
gcccaucugggugaccggg

SEQ ID NO: 2077103 - RNA, 19 nt, Artificial Sequence
  Description of Artificial Sequence: Synthetic oligonucleotide
guauggcaguguccccuca

SEQ ID NO: 2077104 - RNA, 19 nt, Artificial Sequence
  Description of Artificial Sequence: Synthetic oligonucleotide
gcgacucaguccuggcccc

SEQ ID NO: 2077105 - RNA, 19 nt, Artificial Sequence
  Description of Artificial Sequence: Synthetic oligonucleotide
ggguuggggcuugauguug

SEQ ID NO: 2077106 - RNA, 19 nt, Artificial Sequence
  Description of Artificial Sequence: Synthetic oligonucleotide
ccucaaagugggccacugc

SEQ ID NO: 2077107 - RNA, 19 nt, Artificial Sequence
  Description of Artificial Sequence: Synthetic oligonucleotide
caccucaccgggcccagga

SEQ ID NO: 2077108 - RNA, 19 nt, Artificial Sequence
  Description of Artificial Sequence: Synthetic oligonucleotide
cagcuugaggagagccuca

SEQ ID NO: 2077109 - RNA, 19 nt, Artificial Sequence
  Description of Artificial Sequence: Synthetic oligonucleotide
gggccaccauuucugcuac

SEQ ID NO: 2077110 - RNA, 19 nt, Artificial Sequence
  Description of Artificial Sequence: Synthetic oligonucleotide
agggcggcucucuguucca

SEQ ID NO: 2077111 - RNA, 19 nt, Artificial Sequence
  Description of Artificial Sequence: Synthetic oligonucleotide
cuccaaaguaggguaaaau

SEQ ID NO: 2077112 - RNA, 19 nt, Artificial Sequence
  Description of Artificial Sequence: Synthetic oligonucleotide
cccgguuccagcgcgaguc

SEQ ID NO: 2077113 - RNA, 19 nt, Artificial Sequence
  Description of Artificial Sequence: Synthetic oligonucleotide
cucugacccuaaccccuuc

SEQ ID NO: 2077114 - RNA, 19 nt, Artificial Sequence
  Description of Artificial Sequence: Synthetic oligonucleotide
ggcggcucucuguuccacc

SEQ ID NO: 2077115 - RNA, 19 nt, Artificial Sequence
  Description of Artificial Sequence: Synthetic oligonucleotide
ggcccaagcgacagccggg

SEQ ID NO: 2077116 - RNA, 19 nt, Artificial Sequence
  Description of Artificial Sequence: Synthetic oligonucleotide
gguggagcguggguaacuc

SEQ ID NO: 2077117 - RNA, 19 nt, Artificial Sequence
  Description of Artificial Sequence: Synthetic oligonucleotide
ggugaccggggcucucggc

SEQ ID NO: 2077118 - RNA, 19 nt, Artificial Sequence
  Description of Artificial Sequence: Synthetic oligonucleotide
cucggccauuggagaugcg

SEQ ID NO: 2077119 - RNA, 19 nt, Artificial Sequence
  Description of Artificial Sequence: Synthetic oligonucleotide
aucgcccuucucauaccgu

SEQ ID NO: 2077120 - RNA, 19 nt, Artificial Sequence
  Description of Artificial Sequence: Synthetic oligonucleotide
gcagcacauccaguaggag

SEQ ID NO: 2077121 - RNA, 19 nt, Artificial Sequence
  Description of Artificial Sequence: Synthetic oligonucleotide
cugcugugucccuggggca

SEQ ID NO: 2077122 - RNA, 19 nt, Artificial Sequence
  Description of Artificial Sequence: Synthetic oligonucleotide
agcguccguaaggcagguc

SEQ ID NO: 2077123 - RNA, 19 nt, Artificial Sequence
  Description of Artificial Sequence: Synthetic oligonucleotide
accguuugcggcacugcuu

SEQ ID NO: 2077124 - RNA, 19 nt, Artificial Sequence
  Description of Artificial Sequence: Synthetic oligonucleotide
gguuagcugccgucugcuc

SEQ ID NO: 2077125 - RNA, 19 nt, Artificial Sequence
  Description of Artificial Sequence: Synthetic oligonucleotide
gucccgguuccagcgcgag

SEQ ID NO: 2077126 - RNA, 19 nt, Artificial Sequence
  Description of Artificial Sequence: Synthetic oligonucleotide
ggcgucucgcgaucggcuc

SEQ ID NO: 2077127 - RNA, 19 nt, Artificial Sequence
  Description of Artificial Sequence: Synthetic oligonucleotide
caucauccccggaugucgu

SEQ ID NO: 2077128 - RNA, 19 nt, Artificial Sequence
  Description of Artificial Sequence: Synthetic oligonucleotide
acccggccgcuccuccuug

SEQ ID NO: 2077129 - RNA, 19 nt, Artificial Sequence
  Description of Artificial Sequence: Synthetic oligonucleotide
gccagcggcagagggacac

SEQ ID NO: 2077130 - RNA, 19 nt, Artificial Sequence
  Description of Artificial Sequence: Synthetic oligonucleotide
gcgacucggcugcagucac

SEQ ID NO: 2077131 - RNA, 19 nt, Artificial Sequence
  Description of Artificial Sequence: Synthetic oligonucleotide
gcggcacugcuuacagggg

SEQ ID NO: 2077132 - RNA, 19 nt, Artificial Sequence
  Description of Artificial Sequence: Synthetic oligonucleotide
agaccgccucucugacccu

SEQ ID NO: 2077133 - RNA, 19 nt, Artificial Sequence
  Description of Artificial Sequence: Synthetic oligonucleotide
ccagaccgccucucugacc

SEQ ID NO: 2077134 - RNA, 19 nt, Artificial Sequence
  Description of Artificial Sequence: Synthetic oligonucleotide
ggcgacucggcugcaguca

SEQ ID NO: 2077135 - RNA, 19 nt, Artificial Sequence
  Description of Artificial Sequence: Synthetic oligonucleotide
ccaccagaccgccucucug

SEQ ID NO: 2077136 - RNA, 19 nt, Artificial Sequence
  Description of Artificial Sequence: Synthetic oligonucleotide
cucggcgacucggcugcag

SEQ ID NO: 2077137 - RNA, 19 nt, Artificial Sequence
  Description of Artificial Sequence: Synthetic oligonucleotide
uguugucguggaggcccaa

SEQ ID NO: 2077138 - RNA, 19 nt, Artificial Sequence
  Description of Artificial Sequence: Synthetic oligonucleotide
caccgggcccaggacccgg

SEQ ID NO: 2077139 - RNA, 19 nt, Artificial Sequence
  Description of Artificial Sequence: Synthetic oligonucleotide
ggagagccucaggugguac

SEQ ID NO: 2077140 - RNA, 19 nt, Artificial Sequence
  Description of Artificial Sequence: Synthetic oligonucleotide
aggagagccucagguggua

SEQ ID NO: 2077141 - RNA, 19 nt, Artificial Sequence
  Description of Artificial Sequence: Synthetic oligonucleotide
gcccaagcgacagccgggc

SEQ ID NO: 2077142 - RNA, 19 nt, Artificial Sequence
  Description of Artificial Sequence: Synthetic oligonucleotide
gguccauggcccuggcucu

SEQ ID NO: 2077143 - RNA, 19 nt, Artificial Sequence
  Description of Artificial Sequence: Synthetic oligonucleotide
guuggagggcugucccgcu

SEQ ID NO: 2077144 - RNA, 19 nt, Artificial Sequence
  Description of Artificial Sequence: Synthetic oligonucleotide
guggagcguggguaacucu

SEQ ID NO: 2077145 - RNA, 19 nt, Artificial Sequence
  Description of Artificial Sequence: Synthetic oligonucleotide
cgccucucugacccuaacc

SEQ ID NO: 2077146 - RNA, 19 nt, Artificial Sequence
  Description of Artificial Sequence: Synthetic oligonucleotide
gccacugccucggcgacuc

SEQ ID NO: 2077147 - RNA, 19 nt, Artificial Sequence
  Description of Artificial Sequence: Synthetic oligonucleotide
aagcgacagccgggcgucu

SEQ ID NO: 2077148 - RNA, 19 nt, Artificial Sequence
  Description of Artificial Sequence: Synthetic oligonucleotide
ggcucuucggcagcacauc

SEQ ID NO: 2077149 - RNA, 19 nt, Artificial Sequence
  Description of Artificial Sequence: Synthetic oligonucleotide
ccguuugcggcacugcuua

SEQ ID NO: 2077150 - RNA, 19 nt, Artificial Sequence
  Description of Artificial Sequence: Synthetic oligonucleotide
agcuugggugguggagcgu

SEQ ID NO: 2077151 - RNA, 19 nt, Artificial Sequence
  Description of Artificial Sequence: Synthetic oligonucleotide
agagcgggucccgguucca

SEQ ID NO: 2077152 - RNA, 19 nt, Artificial Sequence
  Description of Artificial Sequence: Synthetic oligonucleotide
ccaguaggagcguccguaa

SEQ ID NO: 2077153 - RNA, 19 nt, Artificial Sequence
  Description of Artificial Sequence: Synthetic oligonucleotide
caucugggugaccggggcu

SEQ ID NO: 2077154 - RNA, 19 nt, Artificial Sequence
  Description of Artificial Sequence: Synthetic oligonucleotide
gcgggaagggguucgguau

SEQ ID NO: 2077155 - RNA, 19 nt, Artificial Sequence
  Description of Artificial Sequence: Synthetic oligonucleotide
acccuugguuggagggcug

SEQ ID NO: 2077156 - RNA, 19 nt, Artificial Sequence
  Description of Artificial Sequence: Synthetic oligonucleotide
caccaccagaccgccucuc

SEQ ID NO: 2077157 - RNA, 19 nt, Artificial Sequence
  Description of Artificial Sequence: Synthetic oligonucleotide
gggguucgguauggcagug

SEQ ID NO: 2077158 - RNA, 19 nt, Artificial Sequence
  Description of Artificial Sequence: Synthetic oligonucleotide
cuucggcagcacauccagu

SEQ ID NO: 2077159 - RNA, 19 nt, Artificial Sequence
  Description of Artificial Sequence: Synthetic oligonucleotide
cccaagcgacagccgggcg

SEQ ID NO: 2077160 - RNA, 19 nt, Artificial Sequence
  Description of Artificial Sequence: Synthetic oligonucleotide
gaccgccucucugacccua

SEQ ID NO: 2077161 - RNA, 19 nt, Artificial Sequence
  Description of Artificial Sequence: Synthetic oligonucleotide
uagcugccgucugcucccu

SEQ ID NO: 2077162 - RNA, 19 nt, Artificial Sequence
  Description of Artificial Sequence: Synthetic oligonucleotide
caggggucaucgcgauaga

SEQ ID NO: 2077163 - RNA, 19 nt, Artificial Sequence
  Description of Artificial Sequence: Synthetic oligonucleotide
cgaucggcucuucggcagc

SEQ ID NO: 2077164 - RNA, 19 nt, Artificial Sequence
  Description of Artificial Sequence: Synthetic oligonucleotide
cggaaugcgauacgcaccu

SEQ ID NO: 2077165 - RNA, 19 nt, Artificial Sequence
  Description of Artificial Sequence: Synthetic oligonucleotide
cgggaagggguucgguaug

SEQ ID NO: 2077166 - RNA, 19 nt, Artificial Sequence
  Description of Artificial Sequence: Synthetic oligonucleotide
ccggcuuccgcuccaaagu

SEQ ID NO: 2077167 - RNA, 19 nt, Artificial Sequence
  Description of Artificial Sequence: Synthetic oligonucleotide
gggucaaccaggggauuua

SEQ ID NO: 2077168 - RNA, 19 nt, Artificial Sequence
  Description of Artificial Sequence: Synthetic oligonucleotide
gaugggguuggggcuugau

SEQ ID NO: 2077169 - RNA, 19 nt, Artificial Sequence
  Description of Artificial Sequence: Synthetic oligonucleotide
ccuaaccccuucgcuggug

SEQ ID NO: 2077170 - RNA, 19 nt, Artificial Sequence
  Description of Artificial Sequence: Synthetic oligonucleotide
ccaggccggcuuccgcucc

SEQ ID NO: 2077171 - RNA, 19 nt, Artificial Sequence
  Description of Artificial Sequence: Synthetic oligonucleotide
acggcagcacccaguuguu

SEQ ID NO: 2077172 - RNA, 19 nt, Artificial Sequence
  Description of Artificial Sequence: Synthetic oligonucleotide
cgcgauagagcgggucccg

SEQ ID NO: 2077173 - RNA, 19 nt, Artificial Sequence
  Description of Artificial Sequence: Synthetic oligonucleotide
ccggccgcuccuccuugcg

SEQ ID NO: 2077174 - RNA, 19 nt, Artificial Sequence
  Description of Artificial Sequence: Synthetic oligonucleotide
gccgggcgucucgcgaucg

SEQ ID NO: 2077175 - RNA, 19 nt, Artificial Sequence
  Description of Artificial Sequence: Synthetic oligonucleotide
gcacggcagcacccaguug

SEQ ID NO: 2077176 - RNA, 19 nt, Artificial Sequence
  Description of Artificial Sequence: Synthetic oligonucleotide
cacaacccucucugagggu

SEQ ID NO: 2077177 - RNA, 19 nt, Artificial Sequence
  Description of Artificial Sequence: Synthetic oligonucleotide
gguuccagcgcgagucugu

SEQ ID NO: 2077178 - RNA, 19 nt, Artificial Sequence
  Description of Artificial Sequence: Synthetic oligonucleotide
ccaagcgacagccgggcgu

SEQ ID NO: 2077179 - RNA, 19 nt, Artificial Sequence
  Description of Artificial Sequence: Synthetic oligonucleotide
ccaguucuagugggagauc

SEQ ID NO: 2077180 - RNA, 19 nt, Artificial Sequence
  Description of Artificial Sequence: Synthetic oligonucleotide
accgccucucugacccuaa

SEQ ID NO: 2077181 - RNA, 19 nt, Artificial Sequence
  Description of Artificial Sequence: Synthetic oligonucleotide
caggacccggccgcuccuc

SEQ ID NO: 2077182 - RNA, 19 nt, Artificial Sequence
  Description of Artificial Sequence: Synthetic oligonucleotide
cugggugaccggggcucuc

SEQ ID NO: 2077183 - RNA, 19 nt, Artificial Sequence
  Description of Artificial Sequence: Synthetic oligonucleotide
ggaaugcgauacgcaccuc

SEQ ID NO: 2077184 - RNA, 19 nt, Artificial Sequence
  Description of Artificial Sequence: Synthetic oligonucleotide
ccggaagguguuggcuggc

SEQ ID NO: 2077185 - RNA, 19 nt, Artificial Sequence
  Description of Artificial Sequence: Synthetic oligonucleotide
gcuuggggugccagcggca

SEQ ID NO: 2077186 - RNA, 19 nt, Artificial Sequence
  Description of Artificial Sequence: Synthetic oligonucleotide
ggauggaccggaagguguu

SEQ ID NO: 2077187 - RNA, 19 nt, Artificial Sequence
  Description of Artificial Sequence: Synthetic oligonucleotide
gagcguccguaaggcaggu

SEQ ID NO: 2077188 - RNA, 19 nt, Artificial Sequence
  Description of Artificial Sequence: Synthetic oligonucleotide
ccgcuccaaaguaggguaa

SEQ ID NO: 2077189 - RNA, 19 nt, Artificial Sequence
  Description of Artificial Sequence: Synthetic oligonucleotide
gggguuggggcuugauguu

SEQ ID NO: 2077190 - RNA, 19 nt, Artificial Sequence
  Description of Artificial Sequence: Synthetic oligonucleotide
gaccggggcucucggccau

SEQ ID NO: 2077191 - RNA, 19 nt, Artificial Sequence
  Description of Artificial Sequence: Synthetic oligonucleotide
cccggccgcuccuccuugc

SEQ ID NO: 2077192 - RNA, 19 nt, Artificial Sequence
  Description of Artificial Sequence: Synthetic oligonucleotide
cgcgaucggcucuucggca

SEQ ID NO: 2077193 - RNA, 19 nt, Artificial Sequence
  Description of Artificial Sequence: Synthetic oligonucleotide
gguagggcuuggggugcca

SEQ ID NO: 2077194 - RNA, 19 nt, Artificial Sequence
  Description of Artificial Sequence: Synthetic oligonucleotide
gccagggcggcucucuguu

SEQ ID NO: 2077195 - RNA, 19 nt, Artificial Sequence
  Description of Artificial Sequence: Synthetic oligonucleotide
gggcggcucucuguuccac

SEQ ID NO: 2077196 - RNA, 19 nt, Artificial Sequence
  Description of Artificial Sequence: Synthetic oligonucleotide
gcgucucgcgaucggcucu

SEQ ID NO: 2077197 - RNA, 19 nt, Artificial Sequence
  Description of Artificial Sequence: Synthetic oligonucleotide
cagccgggcgucucgcgau

SEQ ID NO: 2077198 - RNA, 19 nt, Artificial Sequence
  Description of Artificial Sequence: Synthetic oligonucleotide
cugccucggcgacucggcu

SEQ ID NO: 2077199 - RNA, 19 nt, Artificial Sequence
  Description of Artificial Sequence: Synthetic oligonucleotide
gcaccucaccgggcccagg

SEQ ID NO: 2077200 - RNA, 19 nt, Artificial Sequence
  Description of Artificial Sequence: Synthetic oligonucleotide
cggcgacucggcugcaguc

SEQ ID NO: 2077201 - RNA, 19 nt, Artificial Sequence
  Description of Artificial Sequence: Synthetic oligonucleotide
ccguaaggcaggucauggu

SEQ ID NO: 2077202 - RNA, 19 nt, Artificial Sequence
  Description of Artificial Sequence: Synthetic oligonucleotide
gucucgcgaucggcucuuc

SEQ ID NO: 2077203 - RNA, 19 nt, Artificial Sequence
  Description of Artificial Sequence: Synthetic oligonucleotide
ccgccucucugacccuaac

SEQ ID NO: 2077204 - RNA, 19 nt, Artificial Sequence
  Description of Artificial Sequence: Synthetic oligonucleotide
ggucccgguuccagcgcga

SEQ ID NO: 2077205 - RNA, 19 nt, Artificial Sequence
  Description of Artificial Sequence: Synthetic oligonucleotide
aggccggcuuccgcuccaa

SEQ ID NO: 2077206 - RNA, 19 nt, Artificial Sequence
  Description of Artificial Sequence: Synthetic oligonucleotide
cagcggcagagggacacau

SEQ ID NO: 2077207 - RNA, 19 nt, Artificial Sequence
  Description of Artificial Sequence: Synthetic oligonucleotide
gggcgucucgcgaucggcu

SEQ ID NO: 2077208 - RNA, 19 nt, Artificial Sequence
  Description of Artificial Sequence: Synthetic oligonucleotide
ggguucgguauggcagugu

SEQ ID NO: 2077209 - RNA, 19 nt, Artificial Sequence
  Description of Artificial Sequence: Synthetic oligonucleotide
cacugcuuacaggggucau

SEQ ID NO: 2077210 - RNA, 19 nt, Artificial Sequence
  Description of Artificial Sequence: Synthetic oligonucleotide
cgacagccgggcgucucgc

SEQ ID NO: 2077211 - RNA, 19 nt, Artificial Sequence
  Description of Artificial Sequence: Synthetic oligonucleotide
ccccuucgcuggugcuccc

SEQ ID NO: 2077212 - RNA, 19 nt, Artificial Sequence
  Description of Artificial Sequence: Synthetic oligonucleotide
ggacccggccgcuccuccu

SEQ ID NO: 2077213 - RNA, 19 nt, Artificial Sequence
  Description of Artificial Sequence: Synthetic oligonucleotide
ccuugcggagacccuuggu

SEQ ID NO: 2077214 - RNA, 19 nt, Artificial Sequence
  Description of Artificial Sequence: Synthetic oligonucleotide
cgauagagcgggucccggu

SEQ ID NO: 2077215 - RNA, 19 nt, Artificial Sequence
  Description of Artificial Sequence: Synthetic oligonucleotide
ggcuggcgacucaguccug

SEQ ID NO: 2077216 - RNA, 19 nt, Artificial Sequence
  Description of Artificial Sequence: Synthetic oligonucleotide
ccccaaaccuggucccagu

SEQ ID NO: 2077217 - RNA, 19 nt, Artificial Sequence
  Description of Artificial Sequence: Synthetic oligonucleotide
ggccggcuuccgcuccaaa

SEQ ID NO: 2077218 - RNA, 19 nt, Artificial Sequence
  Description of Artificial Sequence: Synthetic oligonucleotide
ccgucugcucccugcugcu

SEQ ID NO: 2077219 - RNA, 19 nt, Artificial Sequence
  Description of Artificial Sequence: Synthetic oligonucleotide
ccagcggcagagggacaca

SEQ ID NO: 2077220 - RNA, 19 nt, Artificial Sequence
  Description of Artificial Sequence: Synthetic oligonucleotide
cguccguaaggcaggucau

SEQ ID NO: 2077221 - RNA, 19 nt, Artificial Sequence
  Description of Artificial Sequence: Synthetic oligonucleotide
cccuugguuggagggcugu

SEQ ID NO: 2077222 - RNA, 19 nt, Artificial Sequence
  Description of Artificial Sequence: Synthetic oligonucleotide
ccgguuccagcgcgagucu

SEQ ID NO: 2077223 - RNA, 19 nt, Artificial Sequence
  Description of Artificial Sequence: Synthetic oligonucleotide
gcccaggacccggccgcuc

SEQ ID NO: 2077224 - RNA, 19 nt, Artificial Sequence
  Description of Artificial Sequence: Synthetic oligonucleotide
cccuaaccccuucgcuggu

SEQ ID NO: 2077225 - RNA, 19 nt, Artificial Sequence
  Description of Artificial Sequence: Synthetic oligonucleotide
cgcccuucucauaccguuu

SEQ ID NO: 2077226 - RNA, 19 nt, Artificial Sequence
  Description of Artificial Sequence: Synthetic oligonucleotide
cccuucgcuggugcucccu

SEQ ID NO: 2077227 - RNA, 19 nt, Artificial Sequence
  Description of Artificial Sequence: Synthetic oligonucleotide
cgucucgcgaucggcucuu

SEQ ID NO: 2077228 - RNA, 19 nt, Artificial Sequence
  Description of Artificial Sequence: Synthetic oligonucleotide
aaggcaaccauauucuucc

SEQ ID NO: 2077229 - RNA, 19 nt, Artificial Sequence
  Description of Artificial Sequence: Synthetic oligonucleotide
aaaugagcgacacaucugg

SEQ ID NO: 2077230 - RNA, 19 nt, Artificial Sequence
  Description of Artificial Sequence: Synthetic oligonucleotide
auagaaggcaaccauauuc

SEQ ID NO: 2077231 - RNA, 19 nt, Artificial Sequence
  Description of Artificial Sequence: Synthetic oligonucleotide
uugagaaccgcccacauag

SEQ ID NO: 2077232 - RNA, 19 nt, Artificial Sequence
  Description of Artificial Sequence: Synthetic oligonucleotide
aauaugggccgaaagaagc

SEQ ID NO: 2077233 - RNA, 19 nt, Artificial Sequence
  Description of Artificial Sequence: Synthetic oligonucleotide
uggaugacuuccaagaagg

SEQ ID NO: 2077234 - RNA, 19 nt, Artificial Sequence
  Description of Artificial Sequence: Synthetic oligonucleotide
cauggugucaauaugggcc

SEQ ID NO: 2077235 - RNA, 19 nt, Artificial Sequence
  Description of Artificial Sequence: Synthetic oligonucleotide
cucucuauaagauacaguc

SEQ ID NO: 2077236 - RNA, 19 nt, Artificial Sequence
  Description of Artificial Sequence: Synthetic oligonucleotide
aacuaaggaaugaagcugc

SEQ ID NO: 2077237 - RNA, 19 nt, Artificial Sequence
  Description of Artificial Sequence: Synthetic oligonucleotide
aaggaaugaagcugcaggg

SEQ ID NO: 2077238 - RNA, 19 nt, Artificial Sequence
  Description of Artificial Sequence: Synthetic oligonucleotide
ugcauaaugugugaggugg

SEQ ID NO: 2077239 - RNA, 19 nt, Artificial Sequence
  Description of Artificial Sequence: Synthetic oligonucleotide
aauaccucgucuuccuugg

SEQ ID NO: 2077240 - RNA, 19 nt, Artificial Sequence
  Description of Artificial Sequence: Synthetic oligonucleotide
uaucccacaauucugacuc

SEQ ID NO: 2077241 - RNA, 19 nt, Artificial Sequence
  Description of Artificial Sequence: Synthetic oligonucleotide
gaaccgcccacauagaagg

SEQ ID NO: 2077242 - RNA, 19 nt, Artificial Sequence
  Description of Artificial Sequence: Synthetic oligonucleotide
cauaaaagggagaaccagg

SEQ ID NO: 2077243 - RNA, 19 nt, Artificial Sequence
  Description of Artificial Sequence: Synthetic oligonucleotide
agauuugucacucuugacu

SEQ ID NO: 2077244 - RNA, 19 nt, Artificial Sequence
  Description of Artificial Sequence: Synthetic oligonucleotide
augacuuccaagaaggugg

SEQ ID NO: 2077245 - RNA, 19 nt, Artificial Sequence
  Description of Artificial Sequence: Synthetic oligonucleotide
auaaaagggagaaccaggc

SEQ ID NO: 2077246 - RNA, 19 nt, Artificial Sequence
  Description of Artificial Sequence: Synthetic oligonucleotide
agaaaugagcgacacaucu

SEQ ID NO: 2077247 - RNA, 19 nt, Artificial Sequence
  Description of Artificial Sequence: Synthetic oligonucleotide
ugggaguggaacauaaaag

SEQ ID NO: 2077248 - RNA, 19 nt, Artificial Sequence
  Description of Artificial Sequence: Synthetic oligonucleotide
uuggaguuagggcagaaca

SEQ ID NO: 2077249 - RNA, 19 nt, Artificial Sequence
  Description of Artificial Sequence: Synthetic oligonucleotide
agggccaguacauagcuac

SEQ ID NO: 2077250 - RNA, 19 nt, Artificial Sequence
  Description of Artificial Sequence: Synthetic oligonucleotide
cuuccagacaccuuccugg

SEQ ID NO: 2077251 - RNA, 19 nt, Artificial Sequence
  Description of Artificial Sequence: Synthetic oligonucleotide
gggaguggaacauaaaagg

SEQ ID NO: 2077252 - RNA, 19 nt, Artificial Sequence
  Description of Artificial Sequence: Synthetic oligonucleotide
uagaaggcaaccauauucu

SEQ ID NO: 2077253 - RNA, 19 nt, Artificial Sequence
  Description of Artificial Sequence: Synthetic oligonucleotide
agucuucgugcucuuagcc

SEQ ID NO: 2077254 - RNA, 19 nt, Artificial Sequence
  Description of Artificial Sequence: Synthetic oligonucleotide
acuuccaagaagguggugg

SEQ ID NO: 2077255 - RNA, 19 nt, Artificial Sequence
  Description of Artificial Sequence: Synthetic oligonucleotide
auagcuacguuuuccagca

SEQ ID NO: 2077256 - RNA, 19 nt, Artificial Sequence
  Description of Artificial Sequence: Synthetic oligonucleotide
ggaagcgucguccaaaacg

SEQ ID NO: 2077257 - RNA, 19 nt, Artificial Sequence
  Description of Artificial Sequence: Synthetic oligonucleotide
agcuacguuuuccagcagc

SEQ ID NO: 2077258 - RNA, 19 nt, Artificial Sequence
  Description of Artificial Sequence: Synthetic oligonucleotide
cuauaagauacagucuucg

SEQ ID NO: 2077259 - RNA, 19 nt, Artificial Sequence
  Description of Artificial Sequence: Synthetic oligonucleotide
gaaaugaagggucgucccg

SEQ ID NO: 2077260 - RNA, 19 nt, Artificial Sequence
  Description of Artificial Sequence: Synthetic oligonucleotide
aaagggagaaccaggcaac

SEQ ID NO: 2077261 - RNA, 19 nt, Artificial Sequence
  Description of Artificial Sequence: Synthetic oligonucleotide
acaugggcaucucuggccc

SEQ ID NO: 2077262 - RNA, 19 nt, Artificial Sequence
  Description of Artificial Sequence: Synthetic oligonucleotide
acuacaugggcaucucugg

SEQ ID NO: 2077263 - RNA, 19 nt, Artificial Sequence
  Description of Artificial Sequence: Synthetic oligonucleotide
uccaagaaggugguggucg

SEQ ID NO: 2077264 - RNA, 19 nt, Artificial Sequence
  Description of Artificial Sequence: Synthetic oligonucleotide
uacuacaugggcaucucug

SEQ ID NO: 2077265 - RNA, 19 nt, Artificial Sequence
  Description of Artificial Sequence: Synthetic oligonucleotide
aaggacgaaggugaucggc

SEQ ID NO: 2077266 - RNA, 19 nt, Artificial Sequence
  Description of Artificial Sequence: Synthetic oligonucleotide
acauggugucaauaugggc

SEQ ID NO: 2077267 - RNA, 19 nt, Artificial Sequence
  Description of Artificial Sequence: Synthetic oligonucleotide
uugagcuacgccuaaugug

SEQ ID NO: 2077268 - RNA, 19 nt, Artificial Sequence
  Description of Artificial Sequence: Synthetic oligonucleotide
caugguaucagccgcuucc

SEQ ID NO: 2077269 - RNA, 19 nt, Artificial Sequence
  Description of Artificial Sequence: Synthetic oligonucleotide
gaacuaaggaaugaagcug

SEQ ID NO: 2077270 - RNA, 19 nt, Artificial Sequence
  Description of Artificial Sequence: Synthetic oligonucleotide
ucuucgugcucuuagccgc

SEQ ID NO: 2077271 - RNA, 19 nt, Artificial Sequence
  Description of Artificial Sequence: Synthetic oligonucleotide
auggugucaauaugggccg

SEQ ID NO: 2077272 - RNA, 19 nt, Artificial Sequence
  Description of Artificial Sequence: Synthetic oligonucleotide
ugggguaucccacaauucu

SEQ ID NO: 2077273 - RNA, 19 nt, Artificial Sequence
  Description of Artificial Sequence: Synthetic oligonucleotide
ucucuauaagauacagucu

SEQ ID NO: 2077274 - RNA, 19 nt, Artificial Sequence
  Description of Artificial Sequence: Synthetic oligonucleotide
uggaacauaaaagggagaa

SEQ ID NO: 2077275 - RNA, 19 nt, Artificial Sequence
  Description of Artificial Sequence: Synthetic oligonucleotide
uacauagcuacguuuucca

SEQ ID NO: 2077276 - RNA, 19 nt, Artificial Sequence
  Description of Artificial Sequence: Synthetic oligonucleotide
gaagcgucguccaaaacgc

SEQ ID NO: 2077277 - RNA, 19 nt, Artificial Sequence
  Description of Artificial Sequence: Synthetic oligonucleotide
ugagcgacacaucuggggu

SEQ ID NO: 2077278 - RNA, 19 nt, Artificial Sequence
  Description of Artificial Sequence: Synthetic oligonucleotide
uguugagcuacgccuaaug

SEQ ID NO: 2077279 - RNA, 19 nt, Artificial Sequence
  Description of Artificial Sequence: Synthetic oligonucleotide
augagcgacacaucugggg

SEQ ID NO: 2077280 - RNA, 19 nt, Artificial Sequence
  Description of Artificial Sequence: Synthetic oligonucleotide
caaaagcacaaagaugucc

SEQ ID NO: 2077281 - RNA, 19 nt, Artificial Sequence
  Description of Artificial Sequence: Synthetic oligonucleotide
ucagcuagcuccagcuggg

SEQ ID NO: 2077282 - RNA, 19 nt, Artificial Sequence
  Description of Artificial Sequence: Synthetic oligonucleotide
uauaagauacagucuucgu

SEQ ID NO: 2077283 - RNA, 19 nt, Artificial Sequence
  Description of Artificial Sequence: Synthetic oligonucleotide
uggugucuggcccaagcgg

SEQ ID NO: 2077284 - RNA, 19 nt, Artificial Sequence
  Description of Artificial Sequence: Synthetic oligonucleotide
aguacauagcuacguuuuc

SEQ ID NO: 2077285 - RNA, 19 nt, Artificial Sequence
  Description of Artificial Sequence: Synthetic oligonucleotide
gaaggugaucggcagcagg

SEQ ID NO: 2077286 - RNA, 19 nt, Artificial Sequence
  Description of Artificial Sequence: Synthetic oligonucleotide
gaugacuuccaagaaggug

SEQ ID NO: 2077287 - RNA, 19 nt, Artificial Sequence
  Description of Artificial Sequence: Synthetic oligonucleotide
auucacauggugucaauau

SEQ ID NO: 2077288 - RNA, 19 nt, Artificial Sequence
  Description of Artificial Sequence: Synthetic oligonucleotide
ucuauaagauacagucuuc

SEQ ID NO: 2077289 - RNA, 19 nt, Artificial Sequence
  Description of Artificial Sequence: Synthetic oligonucleotide
uaaaagggagaaccaggca

SEQ ID NO: 2077290 - RNA, 19 nt, Artificial Sequence
  Description of Artificial Sequence: Synthetic oligonucleotide
guuuccguaagugugccag

SEQ ID NO: 2077291 - RNA, 19 nt, Artificial Sequence
  Description of Artificial Sequence: Synthetic oligonucleotide
acgguguugagcuacgccu

SEQ ID NO: 2077292 - RNA, 19 nt, Artificial Sequence
  Description of Artificial Sequence: Synthetic oligonucleotide
auggcaauaccucgucuuc

SEQ ID NO: 2077293 - RNA, 19 nt, Artificial Sequence
  Description of Artificial Sequence: Synthetic oligonucleotide
guuagggcagaacacccag

SEQ ID NO: 2077294 - RNA, 19 nt, Artificial Sequence
  Description of Artificial Sequence: Synthetic oligonucleotide
agagcagucugcucagauc

SEQ ID NO: 2077295 - RNA, 19 nt, Artificial Sequence
  Description of Artificial Sequence: Synthetic oligonucleotide
ucuuccagacaccuuccug

SEQ ID NO: 2077296 - RNA, 19 nt, Artificial Sequence
  Description of Artificial Sequence: Synthetic oligonucleotide
uggaguuagggcagaacac

SEQ ID NO: 2077297 - RNA, 19 nt, Artificial Sequence
  Description of Artificial Sequence: Synthetic oligonucleotide
auaggcaauggcaauaccu

SEQ ID NO: 2077298 - RNA, 19 nt, Artificial Sequence
  Description of Artificial Sequence: Synthetic oligonucleotide
auaugggccgaaagaagcc

SEQ ID NO: 2077299 - RNA, 19 nt, Artificial Sequence
  Description of Artificial Sequence: Synthetic oligonucleotide
guccaaaacgcuccagagg

SEQ ID NO: 2077300 - RNA, 19 nt, Artificial Sequence
  Description of Artificial Sequence: Synthetic oligonucleotide
gucuucgugcucuuagccg

SEQ ID NO: 2077301 - RNA, 19 nt, Artificial Sequence
  Description of Artificial Sequence: Synthetic oligonucleotide
ugccucacgguguugagcu

SEQ ID NO: 2077302 - RNA, 19 nt, Artificial Sequence
  Description of Artificial Sequence: Synthetic oligonucleotide
cuggaugacuuccaagaag

SEQ ID NO: 2077303 - RNA, 19 nt, Artificial Sequence
  Description of Artificial Sequence: Synthetic oligonucleotide
uucccucauccucauaggc

SEQ ID NO: 2077304 - RNA, 19 nt, Artificial Sequence
  Description of Artificial Sequence: Synthetic oligonucleotide
ucguccaaaacgcuccaga

SEQ ID NO: 2077305 - RNA, 19 nt, Artificial Sequence
  Description of Artificial Sequence: Synthetic oligonucleotide
ucucagggaaguuggcaag

SEQ ID NO: 2077306 - RNA, 19 nt, Artificial Sequence
  Description of Artificial Sequence: Synthetic oligonucleotide
gaacuuggggaccccaccc

SEQ ID NO: 2077307 - RNA, 19 nt, Artificial Sequence
  Description of Artificial Sequence: Synthetic oligonucleotide
aagugugccagugccucac

SEQ ID NO: 2077308 - RNA, 19 nt, Artificial Sequence
  Description of Artificial Sequence: Synthetic oligonucleotide
aucggcagcaggcuggcag

SEQ ID NO: 2077309 - RNA, 19 nt, Artificial Sequence
  Description of Artificial Sequence: Synthetic oligonucleotide
ggaguggaacauaaaaggg

SEQ ID NO: 2077310 - RNA, 19 nt, Artificial Sequence
  Description of Artificial Sequence: Synthetic oligonucleotide
cuccaauucacaugguguc

SEQ ID NO: 2077311 - RNA, 19 nt, Artificial Sequence
  Description of Artificial Sequence: Synthetic oligonucleotide
ccaaggacgaaggugaucg

SEQ ID NO: 2077312 - RNA, 19 nt, Artificial Sequence
  Description of Artificial Sequence: Synthetic oligonucleotide
accucucaugguaucagcc

SEQ ID NO: 2077313 - RNA, 19 nt, Artificial Sequence
  Description of Artificial Sequence: Synthetic oligonucleotide
agaggcucaggcugugaac

SEQ ID NO: 2077314 - RNA, 19 nt, Artificial Sequence
  Description of Artificial Sequence: Synthetic oligonucleotide
uggaucaaggacagggguc

SEQ ID NO: 2077315 - RNA, 19 nt, Artificial Sequence
  Description of Artificial Sequence: Synthetic oligonucleotide
ggcuuaagcaggcaggacc

SEQ ID NO: 2077316 - RNA, 19 nt, Artificial Sequence
  Description of Artificial Sequence: Synthetic oligonucleotide
gggaacuaaggaaugaagc

SEQ ID NO: 2077317 - RNA, 19 nt, Artificial Sequence
  Description of Artificial Sequence: Synthetic oligonucleotide
ucggaggucuccagaaaug

SEQ ID NO: 2077318 - RNA, 19 nt, Artificial Sequence
  Description of Artificial Sequence: Synthetic oligonucleotide
agcaggcaggaccaaagug

SEQ ID NO: 2077319 - RNA, 19 nt, Artificial Sequence
  Description of Artificial Sequence: Synthetic oligonucleotide
cucuuagccgcccagccug

SEQ ID NO: 2077320 - RNA, 19 nt, Artificial Sequence
  Description of Artificial Sequence: Synthetic oligonucleotide
aaugagcgacacaucuggg

SEQ ID NO: 2077321 - RNA, 19 nt, Artificial Sequence
  Description of Artificial Sequence: Synthetic oligonucleotide
ucauaggcaauggcaauac

SEQ ID NO: 2077322 - RNA, 19 nt, Artificial Sequence
  Description of Artificial Sequence: Synthetic oligonucleotide
aaugaagggucgucccggu

SEQ ID NO: 2077323 - RNA, 19 nt, Artificial Sequence
  Description of Artificial Sequence: Synthetic oligonucleotide
guacauagcuacguuuucc

SEQ ID NO: 2077324 - RNA, 19 nt, Artificial Sequence
  Description of Artificial Sequence: Synthetic oligonucleotide
cagcggacaggccaaaagc

SEQ ID NO: 2077325 - RNA, 19 nt, Artificial Sequence
  Description of Artificial Sequence: Synthetic oligonucleotide
cuugugucuguccuguguc

SEQ ID NO: 2077326 - RNA, 19 nt, Artificial Sequence
  Description of Artificial Sequence: Synthetic oligonucleotide
gagcagucugcucagaucu

SEQ ID NO: 2077327 - RNA, 19 nt, Artificial Sequence
  Description of Artificial Sequence: Synthetic oligonucleotide
aggguuacaggcagccucc

SEQ ID NO: 2077328 - RNA, 19 nt, Artificial Sequence
  Description of Artificial Sequence: Synthetic oligonucleotide
gucuccagaaaugagcgac

SEQ ID NO: 2077329 - RNA, 19 nt, Artificial Sequence
  Description of Artificial Sequence: Synthetic oligonucleotide
uguccaacccaagagcagu

SEQ ID NO: 2077330 - RNA, 19 nt, Artificial Sequence
  Description of Artificial Sequence: Synthetic oligonucleotide
agauguccaucucagggaa

SEQ ID NO: 2077331 - RNA, 19 nt, Artificial Sequence
  Description of Artificial Sequence: Synthetic oligonucleotide
ucuggcccucucuauaaga

SEQ ID NO: 2077332 - RNA, 19 nt, Artificial Sequence
  Description of Artificial Sequence: Synthetic oligonucleotide
gaaggcaaccauauucuuc

SEQ ID NO: 2077333 - RNA, 19 nt, Artificial Sequence
  Description of Artificial Sequence: Synthetic oligonucleotide
augguaucagccgcuuccc

SEQ ID NO: 2077334 - RNA, 19 nt, Artificial Sequence
  Description of Artificial Sequence: Synthetic oligonucleotide
gacacccuggucuuguguc

SEQ ID NO: 2077335 - RNA, 19 nt, Artificial Sequence
  Description of Artificial Sequence: Synthetic oligonucleotide
aauucacauggugucaaua

SEQ ID NO: 2077336 - RNA, 19 nt, Artificial Sequence
  Description of Artificial Sequence: Synthetic oligonucleotide
cagcaggaaaugaaggguc

SEQ ID NO: 2077337 - RNA, 19 nt, Artificial Sequence
  Description of Artificial Sequence: Synthetic oligonucleotide
acgcuccagaggcucaggc

SEQ ID NO: 2077338 - RNA, 19 nt, Artificial Sequence
  Description of Artificial Sequence: Synthetic oligonucleotide
cuucccucauccucauagg

SEQ ID NO: 2077339 - RNA, 19 nt, Artificial Sequence
  Description of Artificial Sequence: Synthetic oligonucleotide
ccacaauucugacucaggg

SEQ ID NO: 2077340 - RNA, 19 nt, Artificial Sequence
  Description of Artificial Sequence: Synthetic oligonucleotide
gugggaguggaacauaaaa

SEQ ID NO: 2077341 - RNA, 19 nt, Artificial Sequence
  Description of Artificial Sequence: Synthetic oligonucleotide
caagcggggcucuaauccc

SEQ ID NO: 2077342 - RNA, 19 nt, Artificial Sequence
  Description of Artificial Sequence: Synthetic oligonucleotide
ucggcagcaggcuggcagg

SEQ ID NO: 2077343 - RNA, 19 nt, Artificial Sequence
  Description of Artificial Sequence: Synthetic oligonucleotide
gucacucuugacucugacc

SEQ ID NO: 2077344 - RNA, 19 nt, Artificial Sequence
  Description of Artificial Sequence: Synthetic oligonucleotide
ugugggccuccccagggcc

SEQ ID NO: 2077345 - RNA, 19 nt, Artificial Sequence
  Description of Artificial Sequence: Synthetic oligonucleotide
ugacuuccaagaagguggu

SEQ ID NO: 2077346 - RNA, 19 nt, Artificial Sequence
  Description of Artificial Sequence: Synthetic oligonucleotide
accucgucuuccuuggaca

SEQ ID NO: 2077347 - RNA, 19 nt, Artificial Sequence
  Description of Artificial Sequence: Synthetic oligonucleotide
uccaauucacaugguguca

SEQ ID NO: 2077348 - RNA, 19 nt, Artificial Sequence
  Description of Artificial Sequence: Synthetic oligonucleotide
aacccaagagcagucugcu

SEQ ID NO: 2077349 - RNA, 19 nt, Artificial Sequence
  Description of Artificial Sequence: Synthetic oligonucleotide
uaccucgucuuccuuggac

SEQ ID NO: 2077350 - RNA, 19 nt, Artificial Sequence
  Description of Artificial Sequence: Synthetic oligonucleotide
ucgucuuccuuggacagcu

SEQ ID NO: 2077351 - RNA, 19 nt, Artificial Sequence
  Description of Artificial Sequence: Synthetic oligonucleotide
uaugggccgaaagaagcca

SEQ ID NO: 2077352 - RNA, 19 nt, Artificial Sequence
  Description of Artificial Sequence: Synthetic oligonucleotide
agccgcuucccucauccuc

SEQ ID NO: 2077353 - RNA, 19 nt, Artificial Sequence
  Description of Artificial Sequence: Synthetic oligonucleotide
cuggugucuggcccaagcg

SEQ ID NO: 2077354 - RNA, 19 nt, Artificial Sequence
  Description of Artificial Sequence: Synthetic oligonucleotide
ugaccucucaugguaucag

SEQ ID NO: 2077355 - RNA, 19 nt, Artificial Sequence
  Description of Artificial Sequence: Synthetic oligonucleotide
acucugaccucucauggua

SEQ ID NO: 2077356 - RNA, 19 nt, Artificial Sequence
  Description of Artificial Sequence: Synthetic oligonucleotide
agaaccgcccacauagaag

SEQ ID NO: 2077357 - RNA, 19 nt, Artificial Sequence
  Description of Artificial Sequence: Synthetic oligonucleotide
ugucacucuugacucugac

SEQ ID NO: 2077358 - RNA, 19 nt, Artificial Sequence
  Description of Artificial Sequence: Synthetic oligonucleotide
auaaugugugaggugggga

SEQ ID NO: 2077359 - RNA, 19 nt, Artificial Sequence
  Description of Artificial Sequence: Synthetic oligonucleotide
cacaucugggguaucccac

SEQ ID NO: 2077360 - RNA, 19 nt, Artificial Sequence
  Description of Artificial Sequence: Synthetic oligonucleotide
ggaacuaaggaaugaagcu

SEQ ID NO: 2077361 - RNA, 19 nt, Artificial Sequence
  Description of Artificial Sequence: Synthetic oligonucleotide
cucuauaagauacagucuu

SEQ ID NO: 2077362 - RNA, 19 nt, Artificial Sequence
  Description of Artificial Sequence: Synthetic oligonucleotide
cagggcugcucucagcuag

SEQ ID NO: 2077363 - RNA, 19 nt, Artificial Sequence
  Description of Artificial Sequence: Synthetic oligonucleotide
agcccuacuacaugggcau

SEQ ID NO: 2077364 - RNA, 19 nt, Artificial Sequence
  Description of Artificial Sequence: Synthetic oligonucleotide
ugugucuguccugugucug

SEQ ID NO: 2077365 - RNA, 19 nt, Artificial Sequence
  Description of Artificial Sequence: Synthetic oligonucleotide
uucuuucacuggugucugg

SEQ ID NO: 2077366 - RNA, 19 nt, Artificial Sequence
  Description of Artificial Sequence: Synthetic oligonucleotide
gacgaaggugaucggcagc

SEQ ID NO: 2077367 - RNA, 19 nt, Artificial Sequence
  Description of Artificial Sequence: Synthetic oligonucleotide
ucuugacucugaccucuca

SEQ ID NO: 2077368 - RNA, 19 nt, Artificial Sequence
  Description of Artificial Sequence: Synthetic oligonucleotide
gaccucucaugguaucagc

SEQ ID NO: 2077369 - RNA, 19 nt, Artificial Sequence
  Description of Artificial Sequence: Synthetic oligonucleotide
ucucuggcccucucuauaa

SEQ ID NO: 2077370 - RNA, 19 nt, Artificial Sequence
  Description of Artificial Sequence: Synthetic oligonucleotide
caagcuuggcagguguggg

SEQ ID NO: 2077371 - RNA, 19 nt, Artificial Sequence
  Description of Artificial Sequence: Synthetic oligonucleotide
uuccguaagugugccagug

SEQ ID NO: 2077372 - RNA, 19 nt, Artificial Sequence
  Description of Artificial Sequence: Synthetic oligonucleotide
cucagaucuggaucaagga

SEQ ID NO: 2077373 - RNA, 19 nt, Artificial Sequence
  Description of Artificial Sequence: Synthetic oligonucleotide
acucuugacucugaccucu

SEQ ID NO: 2077374 - RNA, 19 nt, Artificial Sequence
  Description of Artificial Sequence: Synthetic oligonucleotide
gugaucggcagcaggcugg

SEQ ID NO: 2077375 - RNA, 19 nt, Artificial Sequence
  Description of Artificial Sequence: Synthetic oligonucleotide
cuaaucccugccagcuccg

SEQ ID NO: 2077376 - RNA, 19 nt, Artificial Sequence
  Description of Artificial Sequence: Synthetic oligonucleotide
ccaagcggggcucuaaucc

SEQ ID NO: 2077377 - RNA, 19 nt, Artificial Sequence
  Description of Artificial Sequence: Synthetic oligonucleotide
ugggccgaaagaagccacc

SEQ ID NO: 2077378 - RNA, 19 nt, Artificial Sequence
  Description of Artificial Sequence: Synthetic oligonucleotide
acaucugggguaucccaca

SEQ ID NO: 2077379 - RNA, 19 nt, Artificial Sequence
  Description of Artificial Sequence: Synthetic oligonucleotide
cagucaguuuccguaagug

SEQ ID NO: 2077380 - RNA, 19 nt, Artificial Sequence
  Description of Artificial Sequence: Synthetic oligonucleotide
cacgguguugagcuacgcc

SEQ ID NO: 2077381 - RNA, 19 nt, Artificial Sequence
  Description of Artificial Sequence: Synthetic oligonucleotide
cauaggcaauggcaauacc

SEQ ID NO: 2077382 - RNA, 19 nt, Artificial Sequence
  Description of Artificial Sequence: Synthetic oligonucleotide
aaacgcuccagaggcucag

SEQ ID NO: 2077383 - RNA, 19 nt, Artificial Sequence
  Description of Artificial Sequence: Synthetic oligonucleotide
cagucuucgugcucuuagc

SEQ ID NO: 2077384 - RNA, 19 nt, Artificial Sequence
  Description of Artificial Sequence: Synthetic oligonucleotide
acgaaggugaucggcagca

SEQ ID NO: 2077385 - RNA, 19 nt, Artificial Sequence
  Description of Artificial Sequence: Synthetic oligonucleotide
caaaacgcuccagaggcuc

SEQ ID NO: 2077386 - RNA, 19 nt, Artificial Sequence
  Description of Artificial Sequence: Synthetic oligonucleotide
gaagcugcagggcugcucu

SEQ ID NO: 2077387 - RNA, 19 nt, Artificial Sequence
  Description of Artificial Sequence: Synthetic oligonucleotide
uagccgcccagccuggaca

SEQ ID NO: 2077388 - RNA, 19 nt, Artificial Sequence
  Description of Artificial Sequence: Synthetic oligonucleotide
agcgucguccaaaacgcuc

SEQ ID NO: 2077389 - RNA, 19 nt, Artificial Sequence
  Description of Artificial Sequence: Synthetic oligonucleotide
gcagauuugucacucuuga

SEQ ID NO: 2077390 - RNA, 19 nt, Artificial Sequence
  Description of Artificial Sequence: Synthetic oligonucleotide
cagauuugucacucuugac

SEQ ID NO: 2077391 - RNA, 19 nt, Artificial Sequence
  Description of Artificial Sequence: Synthetic oligonucleotide
ggugucuggcccaagcggg

SEQ ID NO: 2077392 - RNA, 19 nt, Artificial Sequence
  Description of Artificial Sequence: Synthetic oligonucleotide
cugcauaaugugugaggug

SEQ ID NO: 2077393 - RNA, 19 nt, Artificial Sequence
  Description of Artificial Sequence: Synthetic oligonucleotide
agcagauuugucacucuug

SEQ ID NO: 2077394 - RNA, 19 nt, Artificial Sequence
  Description of Artificial Sequence: Synthetic oligonucleotide
ugagaaccgcccacauaga

SEQ ID NO: 2077395 - RNA, 19 nt, Artificial Sequence
  Description of Artificial Sequence: Synthetic oligonucleotide
ggcgguacaagucccagca

SEQ ID NO: 2077396 - RNA, 19 nt, Artificial Sequence
  Description of Artificial Sequence: Synthetic oligonucleotide
uacaggcagccuccaauuc

SEQ ID NO: 2077397 - RNA, 19 nt, Artificial Sequence
  Description of Artificial Sequence: Synthetic oligonucleotide
uuaagcaggcaggaccaaa

SEQ ID NO: 2077398 - RNA, 19 nt, Artificial Sequence
  Description of Artificial Sequence: Synthetic oligonucleotide
gagaaccgcccacauagaa

SEQ ID NO: 2077399 - RNA, 19 nt, Artificial Sequence
  Description of Artificial Sequence: Synthetic oligonucleotide
uccagacaccuuccugggc

SEQ ID NO: 2077400 - RNA, 19 nt, Artificial Sequence
  Description of Artificial Sequence: Synthetic oligonucleotide
aaccgcccacauagaaggc

SEQ ID NO: 2077401 - RNA, 19 nt, Artificial Sequence
  Description of Artificial Sequence: Synthetic oligonucleotide
uaagugugccagugccuca

SEQ ID NO: 2077402 - RNA, 19 nt, Artificial Sequence
  Description of Artificial Sequence: Synthetic oligonucleotide
cuuggacagcuucuuucac

SEQ ID NO: 2077403 - RNA, 19 nt, Artificial Sequence
  Description of Artificial Sequence: Synthetic oligonucleotide
ugugaacuuggggacccca

SEQ ID NO: 2077404 - RNA, 19 nt, Artificial Sequence
  Description of Artificial Sequence: Synthetic oligonucleotide
uggcuugagaaccgcccac

SEQ ID NO: 2077405 - RNA, 19 nt, Artificial Sequence
  Description of Artificial Sequence: Synthetic oligonucleotide
aaaacgcuccagaggcuca

SEQ ID NO: 2077406 - RNA, 19 nt, Artificial Sequence
  Description of Artificial Sequence: Synthetic oligonucleotide
gugugccagugccucacgg

SEQ ID NO: 2077407 - RNA, 19 nt, Artificial Sequence
  Description of Artificial Sequence: Synthetic oligonucleotide
gccgaaagaagccaccuga

SEQ ID NO: 2077408 - RNA, 19 nt, Artificial Sequence
  Description of Artificial Sequence: Synthetic oligonucleotide
uugucacucuugacucuga

SEQ ID NO: 2077409 - RNA, 19 nt, Artificial Sequence
  Description of Artificial Sequence: Synthetic oligonucleotide
uccgggaacuaaggaauga

SEQ ID NO: 2077410 - RNA, 19 nt, Artificial Sequence
  Description of Artificial Sequence: Synthetic oligonucleotide
agcggacaggccaaaagca

SEQ ID NO: 2077411 - RNA, 19 nt, Artificial Sequence
  Description of Artificial Sequence: Synthetic oligonucleotide
agugugccagugccucacg

SEQ ID NO: 2077412 - RNA, 19 nt, Artificial Sequence
  Description of Artificial Sequence: Synthetic oligonucleotide
gggaaguuggcaagcuugg

SEQ ID NO: 2077413 - RNA, 19 nt, Artificial Sequence
  Description of Artificial Sequence: Synthetic oligonucleotide
augggccgaaagaagccac

SEQ ID NO: 2077414 - RNA, 19 nt, Artificial Sequence
  Description of Artificial Sequence: Synthetic oligonucleotide
caaggacgaaggugaucgg

SEQ ID NO: 2077415 - RNA, 19 nt, Artificial Sequence
  Description of Artificial Sequence: Synthetic oligonucleotide
aggacgaaggugaucggca

SEQ ID NO: 2077416 - RNA, 19 nt, Artificial Sequence
  Description of Artificial Sequence: Synthetic oligonucleotide
cuacgccuaaugugccugc

SEQ ID NO: 2077417 - RNA, 19 nt, Artificial Sequence
  Description of Artificial Sequence: Synthetic oligonucleotide
ucaugguaucagccgcuuc

SEQ ID NO: 2077418 - RNA, 19 nt, Artificial Sequence
  Description of Artificial Sequence: Synthetic oligonucleotide
cuucgugcucuuagccgcc

SEQ ID NO: 2077419 - RNA, 19 nt, Artificial Sequence
  Description of Artificial Sequence: Synthetic oligonucleotide
guugagcuacgccuaaugu

SEQ ID NO: 2077420 - RNA, 19 nt, Artificial Sequence
  Description of Artificial Sequence: Synthetic oligonucleotide
ggcccucucuauaagauac

SEQ ID NO: 2077421 - RNA, 19 nt, Artificial Sequence
  Description of Artificial Sequence: Synthetic oligonucleotide
gaaggugguggucggaggu

SEQ ID NO: 2077422 - RNA, 19 nt, Artificial Sequence
  Description of Artificial Sequence: Synthetic oligonucleotide
gagguggggagccaggccu

SEQ ID NO: 2077423 - RNA, 19 nt, Artificial Sequence
  Description of Artificial Sequence: Synthetic oligonucleotide
acaagucccagcagauuug

SEQ ID NO: 2077424 - RNA, 19 nt, Artificial Sequence
  Description of Artificial Sequence: Synthetic oligonucleotide
aagggucgucccggugucc

SEQ ID NO: 2077425 - RNA, 19 nt, Artificial Sequence
  Description of Artificial Sequence: Synthetic oligonucleotide
cuccagaaaugagcgacac

SEQ ID NO: 2077426 - RNA, 19 nt, Artificial Sequence
  Description of Artificial Sequence: Synthetic oligonucleotide
guuacaggcagccuccaau

SEQ ID NO: 2077427 - RNA, 19 nt, Artificial Sequence
  Description of Artificial Sequence: Synthetic oligonucleotide
ugucuguccugugucugga

SEQ ID NO: 2077428 - RNA, 19 nt, Artificial Sequence
  Description of Artificial Sequence: Synthetic oligonucleotide
gauguccaucucagggaag

SEQ ID NO: 2077429 - RNA, 19 nt, Artificial Sequence
  Description of Artificial Sequence: Synthetic oligonucleotide
caaagugaacaagggcuuc

SEQ ID NO: 2077430 - RNA, 19 nt, Artificial Sequence
  Description of Artificial Sequence: Synthetic oligonucleotide
uuagccgcccagccuggac

SEQ ID NO: 2077431 - RNA, 19 nt, Artificial Sequence
  Description of Artificial Sequence: Synthetic oligonucleotide
gaagggucgucccgguguc

SEQ ID NO: 2077432 - RNA, 19 nt, Artificial Sequence
  Description of Artificial Sequence: Synthetic oligonucleotide
cucaggcugugaacuuggg

SEQ ID NO: 2077433 - RNA, 19 nt, Artificial Sequence
  Description of Artificial Sequence: Synthetic oligonucleotide
gcuacguuuuccagcagcc

SEQ ID NO: 2077434 - RNA, 19 nt, Artificial Sequence
  Description of Artificial Sequence: Synthetic oligonucleotide
ggccaaaagcacaaagaug

SEQ ID NO: 2077435 - RNA, 19 nt, Artificial Sequence
  Description of Artificial Sequence: Synthetic oligonucleotide
agcuggcuugagaaccgcc

SEQ ID NO: 2077436 - RNA, 19 nt, Artificial Sequence
  Description of Artificial Sequence: Synthetic oligonucleotide
ugguaucagccgcuucccu

SEQ ID NO: 2077437 - RNA, 19 nt, Artificial Sequence
  Description of Artificial Sequence: Synthetic oligonucleotide
acacccuggucuugugucu

SEQ ID NO: 2077438 - RNA, 19 nt, Artificial Sequence
  Description of Artificial Sequence: Synthetic oligonucleotide
acccaagagcagucugcuc

SEQ ID NO: 2077439 - RNA, 19 nt, Artificial Sequence
  Description of Artificial Sequence: Synthetic oligonucleotide
ggacgaaggugaucggcag

SEQ ID NO: 2077440 - RNA, 19 nt, Artificial Sequence
  Description of Artificial Sequence: Synthetic oligonucleotide
cuccgggaacuaaggaaug

SEQ ID NO: 2077441 - RNA, 19 nt, Artificial Sequence
  Description of Artificial Sequence: Synthetic oligonucleotide
agggagaaccaggcaacag

SEQ ID NO: 2077442 - RNA, 19 nt, Artificial Sequence
  Description of Artificial Sequence: Synthetic oligonucleotide
caguuuccguaagugugcc

SEQ ID NO: 2077443 - RNA, 19 nt, Artificial Sequence
  Description of Artificial Sequence: Synthetic oligonucleotide
ggaaugaagcugcagggcu

SEQ ID NO: 2077444 - RNA, 19 nt, Artificial Sequence
  Description of Artificial Sequence: Synthetic oligonucleotide
uuggcucaggcgguacaag

SEQ ID NO: 2077445 - RNA, 19 nt, Artificial Sequence
  Description of Artificial Sequence: Synthetic oligonucleotide
agcuacgccuaaugugccu

SEQ ID NO: 2077446 - RNA, 19 nt, Artificial Sequence
  Description of Artificial Sequence: Synthetic oligonucleotide
uccaacccaagagcagucu

SEQ ID NO: 2077447 - RNA, 19 nt, Artificial Sequence
  Description of Artificial Sequence: Synthetic oligonucleotide
gaggcucaggcugugaacu

SEQ ID NO: 2077448 - RNA, 19 nt, Artificial Sequence
  Description of Artificial Sequence: Synthetic oligonucleotide
cccaagagcagucugcuca

SEQ ID NO: 2077449 - RNA, 19 nt, Artificial Sequence
  Description of Artificial Sequence: Synthetic oligonucleotide
aguuuccguaagugugcca

SEQ ID NO: 2077450 - RNA, 19 nt, Artificial Sequence
  Description of Artificial Sequence: Synthetic oligonucleotide
ccauauucuuccagacacc

SEQ ID NO: 2077451 - RNA, 19 nt, Artificial Sequence
  Description of Artificial Sequence: Synthetic oligonucleotide
uggggaccccacccaagga

SEQ ID NO: 2077452 - RNA, 19 nt, Artificial Sequence
  Description of Artificial Sequence: Synthetic oligonucleotide
acuuggggaccccacccaa

SEQ ID NO: 2077453 - RNA, 19 nt, Artificial Sequence
  Description of Artificial Sequence: Synthetic oligonucleotide
uacgccuaaugugccugcc

SEQ ID NO: 2077454 - RNA, 19 nt, Artificial Sequence
  Description of Artificial Sequence: Synthetic oligonucleotide
ggugaucggcagcaggcug

SEQ ID NO: 2077455 - RNA, 19 nt, Artificial Sequence
  Description of Artificial Sequence: Synthetic oligonucleotide
guaucccacaauucugacu

SEQ ID NO: 2077456 - RNA, 19 nt, Artificial Sequence
  Description of Artificial Sequence: Synthetic oligonucleotide
guguccaacccaagagcag

SEQ ID NO: 2077457 - RNA, 19 nt, Artificial Sequence
  Description of Artificial Sequence: Synthetic oligonucleotide
agcagcccuacuacauggg

SEQ ID NO: 2077458 - RNA, 19 nt, Artificial Sequence
  Description of Artificial Sequence: Synthetic oligonucleotide
gaucuggaucaaggacagg

SEQ ID NO: 2077459 - RNA, 19 nt, Artificial Sequence
  Description of Artificial Sequence: Synthetic oligonucleotide
ccagcuccgggaacuaagg

SEQ ID NO: 2077460 - RNA, 19 nt, Artificial Sequence
  Description of Artificial Sequence: Synthetic oligonucleotide
uggcccucucuauaagaua

SEQ ID NO: 2077461 - RNA, 19 nt, Artificial Sequence
  Description of Artificial Sequence: Synthetic oligonucleotide
gagcuacgccuaaugugcc

SEQ ID NO: 2077462 - RNA, 19 nt, Artificial Sequence
  Description of Artificial Sequence: Synthetic oligonucleotide
caggcaggaccaaagugaa

SEQ ID NO: 2077463 - RNA, 19 nt, Artificial Sequence
  Description of Artificial Sequence: Synthetic oligonucleotide
ucgucccgguguccaaccc

SEQ ID NO: 2077464 - RNA, 19 nt, Artificial Sequence
  Description of Artificial Sequence: Synthetic oligonucleotide
acgccuaaugugccugcca

SEQ ID NO: 2077465 - RNA, 19 nt, Artificial Sequence
  Description of Artificial Sequence: Synthetic oligonucleotide
gucgucccgguguccaacc

SEQ ID NO: 2077466 - RNA, 19 nt, Artificial Sequence
  Description of Artificial Sequence: Synthetic oligonucleotide
aagcggggcucuaaucccu

SEQ ID NO: 2077467 - RNA, 19 nt, Artificial Sequence
  Description of Artificial Sequence: Synthetic oligonucleotide
cucuggcccucucuauaag

SEQ ID NO: 2077468 - RNA, 19 nt, Artificial Sequence
  Description of Artificial Sequence: Synthetic oligonucleotide
caguacauagcuacguuuu

SEQ ID NO: 2077469 - RNA, 19 nt, Artificial Sequence
  Description of Artificial Sequence: Synthetic oligonucleotide
ccgguguccaacccaagag

SEQ ID NO: 2077470 - RNA, 19 nt, Artificial Sequence
  Description of Artificial Sequence: Synthetic oligonucleotide
gucacuggaugacuuccaa

SEQ ID NO: 2077471 - RNA, 19 nt, Artificial Sequence
  Description of Artificial Sequence: Synthetic oligonucleotide
caacagcucugcauaaugu

SEQ ID NO: 2077472 - RNA, 19 nt, Artificial Sequence
  Description of Artificial Sequence: Synthetic oligonucleotide
cuggcuugagaaccgccca

SEQ ID NO: 2077473 - RNA, 19 nt, Artificial Sequence
  Description of Artificial Sequence: Synthetic oligonucleotide
agcgacacaucugggguau

SEQ ID NO: 2077474 - RNA, 19 nt, Artificial Sequence
  Description of Artificial Sequence: Synthetic oligonucleotide
gcuggcuugagaaccgccc

SEQ ID NO: 2077475 - RNA, 19 nt, Artificial Sequence
  Description of Artificial Sequence: Synthetic oligonucleotide
ucgugcucuuagccgccca

SEQ ID NO: 2077476 - RNA, 19 nt, Artificial Sequence
  Description of Artificial Sequence: Synthetic oligonucleotide
gcugugaacuuggggaccc

SEQ ID NO: 2077477 - RNA, 19 nt, Artificial Sequence
  Description of Artificial Sequence: Synthetic oligonucleotide
cuggaucaaggacaggggu

SEQ ID NO: 2077478 - RNA, 19 nt, Artificial Sequence
  Description of Artificial Sequence: Synthetic oligonucleotide
cgggaacuaaggaaugaag

SEQ ID NO: 2077479 - RNA, 19 nt, Artificial Sequence
  Description of Artificial Sequence: Synthetic oligonucleotide
ucacgguguugagcuacgc

SEQ ID NO: 2077480 - RNA, 19 nt, Artificial Sequence
  Description of Artificial Sequence: Synthetic oligonucleotide
caagggcuucagcuccagc

SEQ ID NO: 2077481 - RNA, 19 nt, Artificial Sequence
  Description of Artificial Sequence: Synthetic oligonucleotide
aucccacaauucugacuca

SEQ ID NO: 2077482 - RNA, 19 nt, Artificial Sequence
  Description of Artificial Sequence: Synthetic oligonucleotide
ccagcggacaggccaaaag

SEQ ID NO: 2077483 - RNA, 19 nt, Artificial Sequence
  Description of Artificial Sequence: Synthetic oligonucleotide
gcgucguccaaaacgcucc

SEQ ID NO: 2077484 - RNA, 19 nt, Artificial Sequence
  Description of Artificial Sequence: Synthetic oligonucleotide
aucugggguaucccacaau

SEQ ID NO: 2077485 - RNA, 19 nt, Artificial Sequence
  Description of Artificial Sequence: Synthetic oligonucleotide
gccucagucaguuuccgua

SEQ ID NO: 2077486 - RNA, 19 nt, Artificial Sequence
  Description of Artificial Sequence: Synthetic oligonucleotide
uucgugcucuuagccgccc

SEQ ID NO: 2077487 - RNA, 19 nt, Artificial Sequence
  Description of Artificial Sequence: Synthetic oligonucleotide
gucggaggucuccagaaau

SEQ ID NO: 2077488 - RNA, 19 nt, Artificial Sequence
  Description of Artificial Sequence: Synthetic oligonucleotide
ugguggucggaggucucca

SEQ ID NO: 2077489 - RNA, 19 nt, Artificial Sequence
  Description of Artificial Sequence: Synthetic oligonucleotide
caggcgguacaagucccag

SEQ ID NO: 2077490 - RNA, 19 nt, Artificial Sequence
  Description of Artificial Sequence: Synthetic oligonucleotide
guggucggaggucuccaga

SEQ ID NO: 2077491 - RNA, 19 nt, Artificial Sequence
  Description of Artificial Sequence: Synthetic oligonucleotide
ccuggucuugugucugucc

SEQ ID NO: 2077492 - RNA, 19 nt, Artificial Sequence
  Description of Artificial Sequence: Synthetic oligonucleotide
gagcgacacaucuggggua

SEQ ID NO: 2077493 - RNA, 19 nt, Artificial Sequence
  Description of Artificial Sequence: Synthetic oligonucleotide
ucccgguguccaacccaag

SEQ ID NO: 2077494 - RNA, 19 nt, Artificial Sequence
  Description of Artificial Sequence: Synthetic oligonucleotide
aagcgucguccaaaacgcu

SEQ ID NO: 2077495 - RNA, 19 nt, Artificial Sequence
  Description of Artificial Sequence: Synthetic oligonucleotide
ccuaaugugccugccagca

SEQ ID NO: 2077496 - RNA, 19 nt, Artificial Sequence
  Description of Artificial Sequence: Synthetic oligonucleotide
cagccucagucaguuuccg

SEQ ID NO: 2077497 - RNA, 19 nt, Artificial Sequence
  Description of Artificial Sequence: Synthetic oligonucleotide
aggcaggaccaaagugaac

SEQ ID NO: 2077498 - RNA, 19 nt, Artificial Sequence
  Description of Artificial Sequence: Synthetic oligonucleotide
cuugagaaccgcccacaua

SEQ ID NO: 2077499 - RNA, 19 nt, Artificial Sequence
  Description of Artificial Sequence: Synthetic oligonucleotide
gacuuccaagaagguggug

SEQ ID NO: 2077500 - RNA, 19 nt, Artificial Sequence
  Description of Artificial Sequence: Synthetic oligonucleotide
gucguccaaaacgcuccag

SEQ ID NO: 2077501 - RNA, 19 nt, Artificial Sequence
  Description of Artificial Sequence: Synthetic oligonucleotide
auaccucgucuuccuugga

SEQ ID NO: 2077502 - RNA, 19 nt, Artificial Sequence
  Description of Artificial Sequence: Synthetic oligonucleotide
ggagaaccaggcaacagcu

SEQ ID NO: 2077503 - RNA, 19 nt, Artificial Sequence
  Description of Artificial Sequence: Synthetic oligonucleotide
cagucugcucagaucugga

SEQ ID NO: 2077504 - RNA, 19 nt, Artificial Sequence
  Description of Artificial Sequence: Synthetic oligonucleotide
gagcuggcuugagaaccgc

SEQ ID NO: 2077505 - RNA, 19 nt, Artificial Sequence
  Description of Artificial Sequence: Synthetic oligonucleotide
cuugacucugaccucucau

SEQ ID NO: 2077506 - RNA, 19 nt, Artificial Sequence
  Description of Artificial Sequence: Synthetic oligonucleotide
uaucagccgcuucccucau

SEQ ID NO: 2077507 - RNA, 19 nt, Artificial Sequence
  Description of Artificial Sequence: Synthetic oligonucleotide
ggccgaaagaagccaccug

SEQ ID NO: 2077508 - RNA, 19 nt, Artificial Sequence
  Description of Artificial Sequence: Synthetic oligonucleotide
agggucgucccggugucca

SEQ ID NO: 2077509 - RNA, 19 nt, Artificial Sequence
  Description of Artificial Sequence: Synthetic oligonucleotide
accaggcaacagcucugca

SEQ ID NO: 2077510 - RNA, 19 nt, Artificial Sequence
  Description of Artificial Sequence: Synthetic oligonucleotide
gccuaaugugccugccagc

SEQ ID NO: 2077511 - RNA, 19 nt, Artificial Sequence
  Description of Artificial Sequence: Synthetic oligonucleotide
ccuccaauucacauggugu

SEQ ID NO: 2077512 - RNA, 19 nt, Artificial Sequence
  Description of Artificial Sequence: Synthetic oligonucleotide
ccccagggccaguacauag

SEQ ID NO: 2077513 - RNA, 19 nt, Artificial Sequence
  Description of Artificial Sequence: Synthetic oligonucleotide
ggcuagggcucccagcgga

SEQ ID NO: 2077514 - RNA, 19 nt, Artificial Sequence
  Description of Artificial Sequence: Synthetic oligonucleotide
gcuggggccuuggaguuag

SEQ ID NO: 2077515 - RNA, 19 nt, Artificial Sequence
  Description of Artificial Sequence: Synthetic oligonucleotide
auauucuuccagacaccuu

SEQ ID NO: 2077516 - RNA, 19 nt, Artificial Sequence
  Description of Artificial Sequence: Synthetic oligonucleotide
uggugucaauaugggccga

SEQ ID NO: 2077517 - RNA, 19 nt, Artificial Sequence
  Description of Artificial Sequence: Synthetic oligonucleotide
cgccuaaugugccugccag

SEQ ID NO: 2077518 - RNA, 19 nt, Artificial Sequence
  Description of Artificial Sequence: Synthetic oligonucleotide
cuggcccucucuauaagau

SEQ ID NO: 2077519 - RNA, 19 nt, Artificial Sequence
  Description of Artificial Sequence: Synthetic oligonucleotide
cagugccucacgguguuga

SEQ ID NO: 2077520 - RNA, 19 nt, Artificial Sequence
  Description of Artificial Sequence: Synthetic oligonucleotide
agcagucugcucagaucug

SEQ ID NO: 2077521 - RNA, 19 nt, Artificial Sequence
  Description of Artificial Sequence: Synthetic oligonucleotide
guccaacccaagagcaguc

SEQ ID NO: 2077522 - RNA, 19 nt, Artificial Sequence
  Description of Artificial Sequence: Synthetic oligonucleotide
uacagucuucgugcucuua

SEQ ID NO: 2077523 - RNA, 19 nt, Artificial Sequence
  Description of Artificial Sequence: Synthetic oligonucleotide
gggccaguacauagcuacg

SEQ ID NO: 2077524 - RNA, 19 nt, Artificial Sequence
  Description of Artificial Sequence: Synthetic oligonucleotide
cagcuagcuccagcugggg

SEQ ID NO: 2077525 - RNA, 19 nt, Artificial Sequence
  Description of Artificial Sequence: Synthetic oligonucleotide
ggggcuuaagcaggcagga

SEQ ID NO: 2077526 - RNA, 19 nt, Artificial Sequence
  Description of Artificial Sequence: Synthetic oligonucleotide
ggacaggccaaaagcacaa

SEQ ID NO: 2077527 - RNA, 19 nt, Artificial Sequence
  Description of Artificial Sequence: Synthetic oligonucleotide
cugugaacuuggggacccc

SEQ ID NO: 2077528 - RNA, 19 nt, Artificial Sequence
  Description of Artificial Sequence: Synthetic oligonucleotide
gguguugagcuacgccuaa

SEQ ID NO: 2077529 - RNA, 19 nt, Artificial Sequence
  Description of Artificial Sequence: Synthetic oligonucleotide
ggcucaggcgguacaaguc

SEQ ID NO: 2077530 - RNA, 19 nt, Artificial Sequence
  Description of Artificial Sequence: Synthetic oligonucleotide
ggggaagcgucguccaaaa

SEQ ID NO: 2077531 - RNA, 19 nt, Artificial Sequence
  Description of Artificial Sequence: Synthetic oligonucleotide
gcucuaaucccugccagcu

SEQ ID NO: 2077532 - RNA, 19 nt, Artificial Sequence
  Description of Artificial Sequence: Synthetic oligonucleotide
cuacuacaugggcaucucu

SEQ ID NO: 2077533 - RNA, 19 nt, Artificial Sequence
  Description of Artificial Sequence: Synthetic oligonucleotide
ccagacaccuuccugggcu

SEQ ID NO: 2077534 - RNA, 19 nt, Artificial Sequence
  Description of Artificial Sequence: Synthetic oligonucleotide
cucccagcggacaggccaa

SEQ ID NO: 2077535 - RNA, 19 nt, Artificial Sequence
  Description of Artificial Sequence: Synthetic oligonucleotide
gucccgguguccaacccaa

SEQ ID NO: 2077536 - RNA, 19 nt, Artificial Sequence
  Description of Artificial Sequence: Synthetic oligonucleotide
ggcuugagaaccgcccaca

SEQ ID NO: 2077537 - RNA, 19 nt, Artificial Sequence
  Description of Artificial Sequence: Synthetic oligonucleotide
gguacaagucccagcagau

SEQ ID NO: 2077538 - RNA, 19 nt, Artificial Sequence
  Description of Artificial Sequence: Synthetic oligonucleotide
cgguacaagucccagcaga

SEQ ID NO: 2077539 - RNA, 19 nt, Artificial Sequence
  Description of Artificial Sequence: Synthetic oligonucleotide
caagucccagcagauuugu

SEQ ID NO: 2077540 - RNA, 19 nt, Artificial Sequence
  Description of Artificial Sequence: Synthetic oligonucleotide
cucugaccucucaugguau

SEQ ID NO: 2077541 - RNA, 19 nt, Artificial Sequence
  Description of Artificial Sequence: Synthetic oligonucleotide
gguggggagccaggccugg

SEQ ID NO: 2077542 - RNA, 19 nt, Artificial Sequence
  Description of Artificial Sequence: Synthetic oligonucleotide
ccaauucacauggugucaa

SEQ ID NO: 2077543 - RNA, 19 nt, Artificial Sequence
  Description of Artificial Sequence: Synthetic oligonucleotide
ugccagcuccgggaacuaa

SEQ ID NO: 2077544 - RNA, 19 nt, Artificial Sequence
  Description of Artificial Sequence: Synthetic oligonucleotide
gcuccgggaacuaaggaau

SEQ ID NO: 2077545 - RNA, 19 nt, Artificial Sequence
  Description of Artificial Sequence: Synthetic oligonucleotide
cuagggcucccagcggaca

SEQ ID NO: 2077546 - RNA, 19 nt, Artificial Sequence
  Description of Artificial Sequence: Synthetic oligonucleotide
gggaagcgucguccaaaac

SEQ ID NO: 2077547 - RNA, 19 nt, Artificial Sequence
  Description of Artificial Sequence: Synthetic oligonucleotide
cuuaagcaggcaggaccaa

SEQ ID NO: 2077548 - RNA, 19 nt, Artificial Sequence
  Description of Artificial Sequence: Synthetic oligonucleotide
ccgaaagaagccaccugaa

SEQ ID NO: 2077549 - RNA, 19 nt, Artificial Sequence
  Description of Artificial Sequence: Synthetic oligonucleotide
ccuacuacaugggcaucuc

SEQ ID NO: 2077550 - RNA, 19 nt, Artificial Sequence
  Description of Artificial Sequence: Synthetic oligonucleotide
cuggggccuuggaguuagg

SEQ ID NO: 2077551 - RNA, 19 nt, Artificial Sequence
  Description of Artificial Sequence: Synthetic oligonucleotide
cagugucacuggaugacuu

SEQ ID NO: 2077552 - RNA, 19 nt, Artificial Sequence
  Description of Artificial Sequence: Synthetic oligonucleotide
ggcagccuccaauucacau

SEQ ID NO: 2077553 - RNA, 19 nt, Artificial Sequence
  Description of Artificial Sequence: Synthetic oligonucleotide
gguuacaggcagccuccaa

SEQ ID NO: 2077554 - RNA, 19 nt, Artificial Sequence
  Description of Artificial Sequence: Synthetic oligonucleotide
cccaagcggggcucuaauc

SEQ ID NO: 2077555 - RNA, 19 nt, Artificial Sequence
  Description of Artificial Sequence: Synthetic oligonucleotide
ggugucaauaugggccgaa

SEQ ID NO: 2077556 - RNA, 19 nt, Artificial Sequence
  Description of Artificial Sequence: Synthetic oligonucleotide
cgugcucuuagccgcccag

SEQ ID NO: 2077557 - RNA, 19 nt, Artificial Sequence
  Description of Artificial Sequence: Synthetic oligonucleotide
cuacguuuuccagcagccu

SEQ ID NO: 2077558 - RNA, 19 nt, Artificial Sequence
  Description of Artificial Sequence: Synthetic oligonucleotide
caagagcagucugcucaga

SEQ ID NO: 2077559 - RNA, 19 nt, Artificial Sequence
  Description of Artificial Sequence: Synthetic oligonucleotide
ccaguacauagcuacguuu

SEQ ID NO: 2077560 - RNA, 19 nt, Artificial Sequence
  Description of Artificial Sequence: Synthetic oligonucleotide
ggucgucccgguguccaac

SEQ ID NO: 2077561 - RNA, 19 nt, Artificial Sequence
  Description of Artificial Sequence: Synthetic oligonucleotide
ccacauagaaggcaaccau

SEQ ID NO: 2077562 - RNA, 19 nt, Artificial Sequence
  Description of Artificial Sequence: Synthetic oligonucleotide
cccgguguccaacccaaga

SEQ ID NO: 2077563 - RNA, 19 nt, Artificial Sequence
  Description of Artificial Sequence: Synthetic oligonucleotide
ggccaguacauagcuacgu

SEQ ID NO: 2077564 - RNA, 19 nt, Artificial Sequence
  Description of Artificial Sequence: Synthetic oligonucleotide
cagggccaguacauagcua

SEQ ID NO: 2077565 - RNA, 19 nt, Artificial Sequence
  Description of Artificial Sequence: Synthetic oligonucleotide
aggcagccuccaauucaca

SEQ ID NO: 2077566 - RNA, 19 nt, Artificial Sequence
  Description of Artificial Sequence: Synthetic oligonucleotide
ggugggaguggaacauaaa

SEQ ID NO: 2077567 - RNA, 19 nt, Artificial Sequence
  Description of Artificial Sequence: Synthetic oligonucleotide
gggcuuaagcaggcaggac

SEQ ID NO: 2077568 - RNA, 19 nt, Artificial Sequence
  Description of Artificial Sequence: Synthetic oligonucleotide
ggggucagagcuggcuuga

SEQ ID NO: 2077569 - RNA, 19 nt, Artificial Sequence
  Description of Artificial Sequence: Synthetic oligonucleotide
ccgcccagccuggacaccc

SEQ ID NO: 2077570 - RNA, 19 nt, Artificial Sequence
  Description of Artificial Sequence: Synthetic oligonucleotide
gaccccacccaaggacgaa

SEQ ID NO: 2077571 - RNA, 19 nt, Artificial Sequence
  Description of Artificial Sequence: Synthetic oligonucleotide
ccgcccacauagaaggcaa

SEQ ID NO: 2077572 - RNA, 19 nt, Artificial Sequence
  Description of Artificial Sequence: Synthetic oligonucleotide
gggucagagcuggcuugag

SEQ ID NO: 2077573 - RNA, 19 nt, Artificial Sequence
  Description of Artificial Sequence: Synthetic oligonucleotide
gccaguacauagcuacguu

SEQ ID NO: 2077574 - RNA, 19 nt, Artificial Sequence
  Description of Artificial Sequence: Synthetic oligonucleotide
gcuagggcucccagcggac

SEQ ID NO: 2077575 - RNA, 19 nt, Artificial Sequence
  Description of Artificial Sequence: Synthetic oligonucleotide
ccgggaacuaaggaaugaa

SEQ ID NO: 2077576 - RNA, 19 nt, Artificial Sequence
  Description of Artificial Sequence: Synthetic oligonucleotide
gcuugagaaccgcccacau

SEQ ID NO: 2077577 - RNA, 19 nt, Artificial Sequence
  Description of Artificial Sequence: Synthetic oligonucleotide
gaucggcagcaggcuggca

SEQ ID NO: 2077578 - RNA, 19 nt, Artificial Sequence
  Description of Artificial Sequence: Synthetic oligonucleotide
cuuagccgcccagccugga

SEQ ID NO: 2077579 - RNA, 19 nt, Artificial Sequence
  Description of Artificial Sequence: Synthetic oligonucleotide
cccaaggacgaaggugauc

SEQ ID NO: 2077580 - RNA, 19 nt, Artificial Sequence
  Description of Artificial Sequence: Synthetic oligonucleotide
agguggccaggcaggguua

SEQ ID NO: 2077581 - RNA, 19 nt, Artificial Sequence
  Description of Artificial Sequence: Synthetic oligonucleotide
gggccgaaagaagccaccu

SEQ ID NO: 2077582 - RNA, 19 nt, Artificial Sequence
  Description of Artificial Sequence: Synthetic oligonucleotide
cucaugguaucagccgcuu

SEQ ID NO: 2077583 - RNA, 19 nt, Artificial Sequence
  Description of Artificial Sequence: Synthetic oligonucleotide
guguugagcuacgccuaau

SEQ ID NO: 2077584 - RNA, 19 nt, Artificial Sequence
  Description of Artificial Sequence: Synthetic oligonucleotide
ggguuacaggcagccucca

SEQ ID NO: 2077585 - RNA, 19 nt, Artificial Sequence
  Description of Artificial Sequence: Synthetic oligonucleotide
cguaagugugccagugccu

SEQ ID NO: 2077586 - RNA, 19 nt, Artificial Sequence
  Description of Artificial Sequence: Synthetic oligonucleotide
ccaaaacgcuccagaggcu

SEQ ID NO: 2077587 - RNA, 19 nt, Artificial Sequence
  Description of Artificial Sequence: Synthetic oligonucleotide
ggcaacagcucugcauaau

SEQ ID NO: 2077588 - RNA, 19 nt, Artificial Sequence
  Description of Artificial Sequence: Synthetic oligonucleotide
cgaaggugaucggcagcag

SEQ ID NO: 2077589 - RNA, 19 nt, Artificial Sequence
  Description of Artificial Sequence: Synthetic oligonucleotide
cccuacuacaugggcaucu

SEQ ID NO: 2077590 - RNA, 19 nt, Artificial Sequence
  Description of Artificial Sequence: Synthetic oligonucleotide
cgguguugagcuacgccua

SEQ ID NO: 2077591 - RNA, 19 nt, Artificial Sequence
  Description of Artificial Sequence: Synthetic oligonucleotide
ggggugggaguggaacaua

SEQ ID NO: 2077592 - RNA, 19 nt, Artificial Sequence
  Description of Artificial Sequence: Synthetic oligonucleotide
gggucgucccgguguccaa

SEQ ID NO: 2077593 - RNA, 19 nt, Artificial Sequence
  Description of Artificial Sequence: Synthetic oligonucleotide
cgucguccaaaacgcucca

SEQ ID NO: 2077594 - RNA, 19 nt, Artificial Sequence
  Description of Artificial Sequence: Synthetic oligonucleotide
gcccuacuacaugggcauc

SEQ ID NO: 2077595 - RNA, 19 nt, Artificial Sequence
  Description of Artificial Sequence: Synthetic oligonucleotide
cagccgcuucccucauccu

SEQ ID NO: 2077596 - RNA, 19 nt, Artificial Sequence
  Description of Artificial Sequence: Synthetic oligonucleotide
cugccagcuccgggaacua

SEQ ID NO: 2077597 - RNA, 19 nt, Artificial Sequence
  Description of Artificial Sequence: Synthetic oligonucleotide
gcccaagcggggcucuaau

SEQ ID NO: 2077598 - RNA, 19 nt, Artificial Sequence
  Description of Artificial Sequence: Synthetic oligonucleotide
gccucacgguguugagcua

SEQ ID NO: 2077599 - RNA, 19 nt, Artificial Sequence
  Description of Artificial Sequence: Synthetic oligonucleotide
cccacccaaggacgaaggu

SEQ ID NO: 2077600 - RNA, 19 nt, Artificial Sequence
  Description of Artificial Sequence: Synthetic oligonucleotide
cuggcccaagcggggcucu

SEQ ID NO: 2077601 - RNA, 19 nt, Artificial Sequence
  Description of Artificial Sequence: Synthetic oligonucleotide
gcgacacaucugggguauc

SEQ ID NO: 2077602 - RNA, 19 nt, Artificial Sequence
  Description of Artificial Sequence: Synthetic oligonucleotide
cccagcggacaggccaaaa

SEQ ID NO: 2077603 - RNA, 19 nt, Artificial Sequence
  Description of Artificial Sequence: Synthetic oligonucleotide
ccgcuucccucauccucau

SEQ ID NO: 2077604 - RNA, 19 nt, Artificial Sequence
  Description of Artificial Sequence: Synthetic oligonucleotide
gggccuccccagggccagu

SEQ ID NO: 2077605 - RNA, 19 nt, Artificial Sequence
  Description of Artificial Sequence: Synthetic oligonucleotide
auauauuccaaacagaugg

SEQ ID NO: 2077606 - RNA, 19 nt, Artificial Sequence
  Description of Artificial Sequence: Synthetic oligonucleotide
gauguaauuacuugaaccg

SEQ ID NO: 2077607 - RNA, 19 nt, Artificial Sequence
  Description of Artificial Sequence: Synthetic oligonucleotide
agauguaauuacuugaacc

SEQ ID NO: 2077608 - RNA, 19 nt, Artificial Sequence
  Description of Artificial Sequence: Synthetic oligonucleotide
aaagucuaaaacaucagcc

SEQ ID NO: 2077609 - RNA, 19 nt, Artificial Sequence
  Description of Artificial Sequence: Synthetic oligonucleotide
aguguguuccacuagaacc

SEQ ID NO: 2077610 - RNA, 19 nt, Artificial Sequence
  Description of Artificial Sequence: Synthetic oligonucleotide
gauguuauaagucuuaaac

SEQ ID NO: 2077611 - RNA, 19 nt, Artificial Sequence
  Description of Artificial Sequence: Synthetic oligonucleotide
aagauaucgguauuauugc

SEQ ID NO: 2077612 - RNA, 19 nt, Artificial Sequence
  Description of Artificial Sequence: Synthetic oligonucleotide
agaauuuagagucaaguuc

SEQ ID NO: 2077613 - RNA, 19 nt, Artificial Sequence
  Description of Artificial Sequence: Synthetic oligonucleotide
aaaauugccaguaaacugg

SEQ ID NO: 2077614 - RNA, 19 nt, Artificial Sequence
  Description of Artificial Sequence: Synthetic oligonucleotide
acuuauuagauguaauuac

SEQ ID NO: 2077615 - RNA, 19 nt, Artificial Sequence
  Description of Artificial Sequence: Synthetic oligonucleotide
uuaacaaacaguaguaaug

SEQ ID NO: 2077616 - RNA, 19 nt, Artificial Sequence
  Description of Artificial Sequence: Synthetic oligonucleotide
aaagguucucuuuuagagc

SEQ ID NO: 2077617 - RNA, 19 nt, Artificial Sequence
  Description of Artificial Sequence: Synthetic oligonucleotide
cuugauuauaauuugugcc

SEQ ID NO: 2077618 - RNA, 19 nt, Artificial Sequence
  Description of Artificial Sequence: Synthetic oligonucleotide
agcuugagaauuuagaguc

SEQ ID NO: 2077619 - RNA, 19 nt, Artificial Sequence
  Description of Artificial Sequence: Synthetic oligonucleotide
aaugacgcaaaauugccag

SEQ ID NO: 2077620 - RNA, 19 nt, Artificial Sequence
  Description of Artificial Sequence: Synthetic oligonucleotide
aauaugaauucccauucuc

SEQ ID NO: 2077621 - RNA, 19 nt, Artificial Sequence
  Description of Artificial Sequence: Synthetic oligonucleotide
uuuacuacugacuucaaac

SEQ ID NO: 2077622 - RNA, 19 nt, Artificial Sequence
  Description of Artificial Sequence: Synthetic oligonucleotide
cuucuaauucccaagaugc

SEQ ID NO: 2077623 - RNA, 19 nt, Artificial Sequence
  Description of Artificial Sequence: Synthetic oligonucleotide
acuagaaagccauaaacuc

SEQ ID NO: 2077624 - RNA, 19 nt, Artificial Sequence
  Description of Artificial Sequence: Synthetic oligonucleotide
uuaaacauccaauaaacuc

SEQ ID NO: 2077625 - RNA, 19 nt, Artificial Sequence
  Description of Artificial Sequence: Synthetic oligonucleotide
aaaaugacgcaaaauugcc

SEQ ID NO: 2077626 - RNA, 19 nt, Artificial Sequence
  Description of Artificial Sequence: Synthetic oligonucleotide
cucaauauauuccaaacag

SEQ ID NO: 2077627 - RNA, 19 nt, Artificial Sequence
  Description of Artificial Sequence: Synthetic oligonucleotide
ucaagauauugcauuaagg

SEQ ID NO: 2077628 - RNA, 19 nt, Artificial Sequence
  Description of Artificial Sequence: Synthetic oligonucleotide
uguuauaagucuuaaacau

SEQ ID NO: 2077629 - RNA, 19 nt, Artificial Sequence
  Description of Artificial Sequence: Synthetic oligonucleotide
caaaaugacgcaaaauugc

SEQ ID NO: 2077630 - RNA, 19 nt, Artificial Sequence
  Description of Artificial Sequence: Synthetic oligonucleotide
aaacaguaguaauggacac

SEQ ID NO: 2077631 - RNA, 19 nt, Artificial Sequence
  Description of Artificial Sequence: Synthetic oligonucleotide
uacaccuaaagaaauacac

SEQ ID NO: 2077632 - RNA, 19 nt, Artificial Sequence
  Description of Artificial Sequence: Synthetic oligonucleotide
aagguucucuuuuagagcu

SEQ ID NO: 2077633 - RNA, 19 nt, Artificial Sequence
  Description of Artificial Sequence: Synthetic oligonucleotide
aagacaguuaaacaaaguu

SEQ ID NO: 2077634 - RNA, 19 nt, Artificial Sequence
  Description of Artificial Sequence: Synthetic oligonucleotide
uuuagugauguuauaaguc

SEQ ID NO: 2077635 - RNA, 19 nt, Artificial Sequence
  Description of Artificial Sequence: Synthetic oligonucleotide
ugcauuuauugcuugaacc

SEQ ID NO: 2077636 - RNA, 19 nt, Artificial Sequence
  Description of Artificial Sequence: Synthetic oligonucleotide
aacuguuuauaguggcugc

SEQ ID NO: 2077637 - RNA, 19 nt, Artificial Sequence
  Description of Artificial Sequence: Synthetic oligonucleotide
uuuagagucaaguucuuga

SEQ ID NO: 2077638 - RNA, 19 nt, Artificial Sequence
  Description of Artificial Sequence: Synthetic oligonucleotide
uguaaguuggaauaggcuc

SEQ ID NO: 2077639 - RNA, 19 nt, Artificial Sequence
  Description of Artificial Sequence: Synthetic oligonucleotide
cuucaaacuguuuauagug

SEQ ID NO: 2077640 - RNA, 19 nt, Artificial Sequence
  Description of Artificial Sequence: Synthetic oligonucleotide
uguagaacaggcuaagugu

SEQ ID NO: 2077641 - RNA, 19 nt, Artificial Sequence
  Description of Artificial Sequence: Synthetic oligonucleotide
uauugcauaguguacaccu

SEQ ID NO: 2077642 - RNA, 19 nt, Artificial Sequence
  Description of Artificial Sequence: Synthetic oligonucleotide
auaguguacaccuaaagaa

SEQ ID NO: 2077643 - RNA, 19 nt, Artificial Sequence
  Description of Artificial Sequence: Synthetic oligonucleotide
aacuugguagaguauuuuc

SEQ ID NO: 2077644 - RNA, 19 nt, Artificial Sequence
  Description of Artificial Sequence: Synthetic oligonucleotide
uuagugauguuauaagucu

SEQ ID NO: 2077645 - RNA, 19 nt, Artificial Sequence
  Description of Artificial Sequence: Synthetic oligonucleotide
aaaacaucagccaaacuug

SEQ ID NO: 2077646 - RNA, 19 nt, Artificial Sequence
  Description of Artificial Sequence: Synthetic oligonucleotide
aagucuaaaacaucagcca

SEQ ID NO: 2077647 - RNA, 19 nt, Artificial Sequence
  Description of Artificial Sequence: Synthetic oligonucleotide
uguauuuaucauuuaguga

SEQ ID NO: 2077648 - RNA, 19 nt, Artificial Sequence
  Description of Artificial Sequence: Synthetic oligonucleotide
uccaauaaacuccagguaa

SEQ ID NO: 2077649 - RNA, 19 nt, Artificial Sequence
  Description of Artificial Sequence: Synthetic oligonucleotide
ucuugauuauaauuugugc

SEQ ID NO: 2077650 - RNA, 19 nt, Artificial Sequence
  Description of Artificial Sequence: Synthetic oligonucleotide
uguguauuuaucauuuagu

SEQ ID NO: 2077651 - RNA, 19 nt, Artificial Sequence
  Description of Artificial Sequence: Synthetic oligonucleotide
aauuacuugaaccggucga

SEQ ID NO: 2077652 - RNA, 19 nt, Artificial Sequence
  Description of Artificial Sequence: Synthetic oligonucleotide
agcaauauguuguaaguug

SEQ ID NO: 2077653 - RNA, 19 nt, Artificial Sequence
  Description of Artificial Sequence: Synthetic oligonucleotide
aacaggcuaaguguguucc

SEQ ID NO: 2077654 - RNA, 19 nt, Artificial Sequence
  Description of Artificial Sequence: Synthetic oligonucleotide
uauguuguaaguuggaaua

SEQ ID NO: 2077655 - RNA, 19 nt, Artificial Sequence
  Description of Artificial Sequence: Synthetic oligonucleotide
cuagaaagccauaaacucc

SEQ ID NO: 2077656 - RNA, 19 nt, Artificial Sequence
  Description of Artificial Sequence: Synthetic oligonucleotide
uuucagguccauaagcaag

SEQ ID NO: 2077657 - RNA, 19 nt, Artificial Sequence
  Description of Artificial Sequence: Synthetic oligonucleotide
uuaucuugauuauaauuug

SEQ ID NO: 2077658 - RNA, 19 nt, Artificial Sequence
  Description of Artificial Sequence: Synthetic oligonucleotide
aguauuuucagguccauaa

SEQ ID NO: 2077659 - RNA, 19 nt, Artificial Sequence
  Description of Artificial Sequence: Synthetic oligonucleotide
agcaaaaugacgcaaaauu

SEQ ID NO: 2077660 - RNA, 19 nt, Artificial Sequence
  Description of Artificial Sequence: Synthetic oligonucleotide
uuccacuagaaccacaaca

SEQ ID NO: 2077661 - RNA, 19 nt, Artificial Sequence
  Description of Artificial Sequence: Synthetic oligonucleotide
caagauauugcauuaagga

SEQ ID NO: 2077662 - RNA, 19 nt, Artificial Sequence
  Description of Artificial Sequence: Synthetic oligonucleotide
uguaguguagaacaggcua

SEQ ID NO: 2077663 - RNA, 19 nt, Artificial Sequence
  Description of Artificial Sequence: Synthetic oligonucleotide
uaauuacuugaaccggucg

SEQ ID NO: 2077664 - RNA, 19 nt, Artificial Sequence
  Description of Artificial Sequence: Synthetic oligonucleotide
acaaacaguaguaauggac

SEQ ID NO: 2077665 - RNA, 19 nt, Artificial Sequence
  Description of Artificial Sequence: Synthetic oligonucleotide
uucauuauagucucgcccu

SEQ ID NO: 2077666 - RNA, 19 nt, Artificial Sequence
  Description of Artificial Sequence: Synthetic oligonucleotide
uggaauaggcucaauauau

SEQ ID NO: 2077667 - RNA, 19 nt, Artificial Sequence
  Description of Artificial Sequence: Synthetic oligonucleotide
uccacuagaaccacaacac

SEQ ID NO: 2077668 - RNA, 19 nt, Artificial Sequence
  Description of Artificial Sequence: Synthetic oligonucleotide
uagaaagccauaaacuccu

SEQ ID NO: 2077669 - RNA, 19 nt, Artificial Sequence
  Description of Artificial Sequence: Synthetic oligonucleotide
uuagauguaauuacuugaa

SEQ ID NO: 2077670 - RNA, 19 nt, Artificial Sequence
  Description of Artificial Sequence: Synthetic oligonucleotide
agguccauaagcaagacag

SEQ ID NO: 2077671 - RNA, 19 nt, Artificial Sequence
  Description of Artificial Sequence: Synthetic oligonucleotide
auguuauaagucuuaaaca

SEQ ID NO: 2077672 - RNA, 19 nt, Artificial Sequence
  Description of Artificial Sequence: Synthetic oligonucleotide
aaagaaaccaggugaagua

SEQ ID NO: 2077673 - RNA, 19 nt, Artificial Sequence
  Description of Artificial Sequence: Synthetic oligonucleotide
acauccaauaaacuccagg

SEQ ID NO: 2077674 - RNA, 19 nt, Artificial Sequence
  Description of Artificial Sequence: Synthetic oligonucleotide
caaaauugccaguaaacug

SEQ ID NO: 2077675 - RNA, 19 nt, Artificial Sequence
  Description of Artificial Sequence: Synthetic oligonucleotide
gacaguuaaacaaaguuuc

SEQ ID NO: 2077676 - RNA, 19 nt, Artificial Sequence
  Description of Artificial Sequence: Synthetic oligonucleotide
uguaauuacuugaaccggu

SEQ ID NO: 2077677 - RNA, 19 nt, Artificial Sequence
  Description of Artificial Sequence: Synthetic oligonucleotide
guauuuaucauuuagugau

SEQ ID NO: 2077678 - RNA, 19 nt, Artificial Sequence
  Description of Artificial Sequence: Synthetic oligonucleotide
uaucauuuagugauguuau

SEQ ID NO: 2077679 - RNA, 19 nt, Artificial Sequence
  Description of Artificial Sequence: Synthetic oligonucleotide
agauauugcauuaaggacu

SEQ ID NO: 2077680 - RNA, 19 nt, Artificial Sequence
  Description of Artificial Sequence: Synthetic oligonucleotide
uaagcaagacaguuaaaca

SEQ ID NO: 2077681 - RNA, 19 nt, Artificial Sequence
  Description of Artificial Sequence: Synthetic oligonucleotide
ugagaauuuagagucaagu

SEQ ID NO: 2077682 - RNA, 19 nt, Artificial Sequence
  Description of Artificial Sequence: Synthetic oligonucleotide
uaaacuccagguaacuuga

SEQ ID NO: 2077683 - RNA, 19 nt, Artificial Sequence
  Description of Artificial Sequence: Synthetic oligonucleotide
aaugacuuccuuccugaug

SEQ ID NO: 2077684 - RNA, 19 nt, Artificial Sequence
  Description of Artificial Sequence: Synthetic oligonucleotide
caugaacuaaagaaauggc

SEQ ID NO: 2077685 - RNA, 19 nt, Artificial Sequence
  Description of Artificial Sequence: Synthetic oligonucleotide
agaugcauccuuuucagga

SEQ ID NO: 2077686 - RNA, 19 nt, Artificial Sequence
  Description of Artificial Sequence: Synthetic oligonucleotide
ucgguauuauugcauagug

SEQ ID NO: 2077687 - RNA, 19 nt, Artificial Sequence
  Description of Artificial Sequence: Synthetic oligonucleotide
ugguagaguauuuucaggu

SEQ ID NO: 2077688 - RNA, 19 nt, Artificial Sequence
  Description of Artificial Sequence: Synthetic oligonucleotide
aaacagucucggugaaacc

SEQ ID NO: 2077689 - RNA, 19 nt, Artificial Sequence
  Description of Artificial Sequence: Synthetic oligonucleotide
agcuucauaguaaagguuc

SEQ ID NO: 2077690 - RNA, 19 nt, Artificial Sequence
  Description of Artificial Sequence: Synthetic oligonucleotide
aauuugugccacaucaaag

SEQ ID NO: 2077691 - RNA, 19 nt, Artificial Sequence
  Description of Artificial Sequence: Synthetic oligonucleotide
ugcuugaaccuguaaacag

SEQ ID NO: 2077692 - RNA, 19 nt, Artificial Sequence
  Description of Artificial Sequence: Synthetic oligonucleotide
uacuacugacuucaaacug

SEQ ID NO: 2077693 - RNA, 19 nt, Artificial Sequence
  Description of Artificial Sequence: Synthetic oligonucleotide
aacaucgcagcggucaugg

SEQ ID NO: 2077694 - RNA, 19 nt, Artificial Sequence
  Description of Artificial Sequence: Synthetic oligonucleotide
caagcauucuuacaacagg

SEQ ID NO: 2077695 - RNA, 19 nt, Artificial Sequence
  Description of Artificial Sequence: Synthetic oligonucleotide
uuuaccaauguguauuuau

SEQ ID NO: 2077696 - RNA, 19 nt, Artificial Sequence
  Description of Artificial Sequence: Synthetic oligonucleotide
gaacuaaagaaauggcaac

SEQ ID NO: 2077697 - RNA, 19 nt, Artificial Sequence
  Description of Artificial Sequence: Synthetic oligonucleotide
auaggcucaauauauucca

SEQ ID NO: 2077698 - RNA, 19 nt, Artificial Sequence
  Description of Artificial Sequence: Synthetic oligonucleotide
guuaaacaaaguuucagaa

SEQ ID NO: 2077699 - RNA, 19 nt, Artificial Sequence
  Description of Artificial Sequence: Synthetic oligonucleotide
aguuucagaaaagaaacca

SEQ ID NO: 2077700 - RNA, 19 nt, Artificial Sequence
  Description of Artificial Sequence: Synthetic oligonucleotide
aguaaagguucucuuuuag

SEQ ID NO: 2077701 - RNA, 19 nt, Artificial Sequence
  Description of Artificial Sequence: Synthetic oligonucleotide
uacacuccugcauuuauug

SEQ ID NO: 2077702 - RNA, 19 nt, Artificial Sequence
  Description of Artificial Sequence: Synthetic oligonucleotide
uauuggguucauuauaguc

SEQ ID NO: 2077703 - RNA, 19 nt, Artificial Sequence
  Description of Artificial Sequence: Synthetic oligonucleotide
auucauuuacuacugacuu

SEQ ID NO: 2077704 - RNA, 19 nt, Artificial Sequence
  Description of Artificial Sequence: Synthetic oligonucleotide
ucagcaauauguuguaagu

SEQ ID NO: 2077705 - RNA, 19 nt, Artificial Sequence
  Description of Artificial Sequence: Synthetic oligonucleotide
agagucaaguucuugacaa

SEQ ID NO: 2077706 - RNA, 19 nt, Artificial Sequence
  Description of Artificial Sequence: Synthetic oligonucleotide
uugguagaguauuuucagg

SEQ ID NO: 2077707 - RNA, 19 nt, Artificial Sequence
  Description of Artificial Sequence: Synthetic oligonucleotide
gaauaggcucaauauauuc

SEQ ID NO: 2077708 - RNA, 19 nt, Artificial Sequence
  Description of Artificial Sequence: Synthetic oligonucleotide
ugguacauugaaaaguguc

SEQ ID NO: 2077709 - RNA, 19 nt, Artificial Sequence
  Description of Artificial Sequence: Synthetic oligonucleotide
uaugaauucccauucucaa

SEQ ID NO: 2077710 - RNA, 19 nt, Artificial Sequence
  Description of Artificial Sequence: Synthetic oligonucleotide
uguacaccuaaagaaauac

SEQ ID NO: 2077711 - RNA, 19 nt, Artificial Sequence
  Description of Artificial Sequence: Synthetic oligonucleotide
uaucuugauuauaauuugu

SEQ ID NO: 2077712 - RNA, 19 nt, Artificial Sequence
  Description of Artificial Sequence: Synthetic oligonucleotide
cucagcaauauguuguaag

SEQ ID NO: 2077713 - RNA, 19 nt, Artificial Sequence
  Description of Artificial Sequence: Synthetic oligonucleotide
uucugaaagauaucgguau

SEQ ID NO: 2077714 - RNA, 19 nt, Artificial Sequence
  Description of Artificial Sequence: Synthetic oligonucleotide
uaauuugugccacaucaaa

SEQ ID NO: 2077715 - RNA, 19 nt, Artificial Sequence
  Description of Artificial Sequence: Synthetic oligonucleotide
accuaaagaaauacacucc

SEQ ID NO: 2077716 - RNA, 19 nt, Artificial Sequence
  Description of Artificial Sequence: Synthetic oligonucleotide
uauuuaucauuuagugaug

SEQ ID NO: 2077717 - RNA, 19 nt, Artificial Sequence
  Description of Artificial Sequence: Synthetic oligonucleotide
uaccaauguguauuuauca

SEQ ID NO: 2077718 - RNA, 19 nt, Artificial Sequence
  Description of Artificial Sequence: Synthetic oligonucleotide
uguuguaaguuggaauagg

SEQ ID NO: 2077719 - RNA, 19 nt, Artificial Sequence
  Description of Artificial Sequence: Synthetic oligonucleotide
ugaaaagugucucgguacu

SEQ ID NO: 2077720 - RNA, 19 nt, Artificial Sequence
  Description of Artificial Sequence: Synthetic oligonucleotide
ucuuuuaccaauguguauu

SEQ ID NO: 2077721 - RNA, 19 nt, Artificial Sequence
  Description of Artificial Sequence: Synthetic oligonucleotide
uucagguccauaagcaaga

SEQ ID NO: 2077722 - RNA, 19 nt, Artificial Sequence
  Description of Artificial Sequence: Synthetic oligonucleotide
uaguguacaccuaaagaaa

SEQ ID NO: 2077723 - RNA, 19 nt, Artificial Sequence
  Description of Artificial Sequence: Synthetic oligonucleotide
uuaccaauguguauuuauc

SEQ ID NO: 2077724 - RNA, 19 nt, Artificial Sequence
  Description of Artificial Sequence: Synthetic oligonucleotide
uuagagucaaguucuugac

SEQ ID NO: 2077725 - RNA, 19 nt, Artificial Sequence
  Description of Artificial Sequence: Synthetic oligonucleotide
cacuagaaccacaacacug

SEQ ID NO: 2077726 - RNA, 19 nt, Artificial Sequence
  Description of Artificial Sequence: Synthetic oligonucleotide
uaauucccaagaugcaucc

SEQ ID NO: 2077727 - RNA, 19 nt, Artificial Sequence
  Description of Artificial Sequence: Synthetic oligonucleotide
uuguaaguuggaauaggcu

SEQ ID NO: 2077728 - RNA, 19 nt, Artificial Sequence
  Description of Artificial Sequence: Synthetic oligonucleotide
aagaugcauccuuuucagg

SEQ ID NO: 2077729 - RNA, 19 nt, Artificial Sequence
  Description of Artificial Sequence: Synthetic oligonucleotide
ucuaaaacaucagccaaac

SEQ ID NO: 2077730 - RNA, 19 nt, Artificial Sequence
  Description of Artificial Sequence: Synthetic oligonucleotide
uuucugaaagauaucggua

SEQ ID NO: 2077731 - RNA, 19 nt, Artificial Sequence
  Description of Artificial Sequence: Synthetic oligonucleotide
auuggguucauuauagucu

SEQ ID NO: 2077732 - RNA, 19 nt, Artificial Sequence
  Description of Artificial Sequence: Synthetic oligonucleotide
auauguuguaaguuggaau

SEQ ID NO: 2077733 - RNA, 19 nt, Artificial Sequence
  Description of Artificial Sequence: Synthetic oligonucleotide
auugccaguaaacuggaaa

SEQ ID NO: 2077734 - RNA, 19 nt, Artificial Sequence
  Description of Artificial Sequence: Synthetic oligonucleotide
agaaauacacuccugcauu

SEQ ID NO: 2077735 - RNA, 19 nt, Artificial Sequence
  Description of Artificial Sequence: Synthetic oligonucleotide
ucuucgaacaucgcagcgg

SEQ ID NO: 2077736 - RNA, 19 nt, Artificial Sequence
  Description of Artificial Sequence: Synthetic oligonucleotide
agaugguacauugaaaagu

SEQ ID NO: 2077737 - RNA, 19 nt, Artificial Sequence
  Description of Artificial Sequence: Synthetic oligonucleotide
uugagcauucauuuacuac

SEQ ID NO: 2077738 - RNA, 19 nt, Artificial Sequence
  Description of Artificial Sequence: Synthetic oligonucleotide
aauacacuccugcauuuau

SEQ ID NO: 2077739 - RNA, 19 nt, Artificial Sequence
  Description of Artificial Sequence: Synthetic oligonucleotide
uauauuccaaacagauggu

SEQ ID NO: 2077740 - RNA, 19 nt, Artificial Sequence
  Description of Artificial Sequence: Synthetic oligonucleotide
caucagccaaacuugguag

SEQ ID NO: 2077741 - RNA, 19 nt, Artificial Sequence
  Description of Artificial Sequence: Synthetic oligonucleotide
uacuuauuagauguaauua

SEQ ID NO: 2077742 - RNA, 19 nt, Artificial Sequence
  Description of Artificial Sequence: Synthetic oligonucleotide
uagaguauuuucaggucca

SEQ ID NO: 2077743 - RNA, 19 nt, Artificial Sequence
  Description of Artificial Sequence: Synthetic oligonucleotide
ugacagucgcuuuacuucc

SEQ ID NO: 2077744 - RNA, 19 nt, Artificial Sequence
  Description of Artificial Sequence: Synthetic oligonucleotide
aauauguuguaaguuggaa

SEQ ID NO: 2077745 - RNA, 19 nt, Artificial Sequence
  Description of Artificial Sequence: Synthetic oligonucleotide
cucaagauauugcauuaag

SEQ ID NO: 2077746 - RNA, 19 nt, Artificial Sequence
  Description of Artificial Sequence: Synthetic oligonucleotide
aacaucucuuucugaaaga

SEQ ID NO: 2077747 - RNA, 19 nt, Artificial Sequence
  Description of Artificial Sequence: Synthetic oligonucleotide
aaccuguaaacagucucgg

SEQ ID NO: 2077748 - RNA, 19 nt, Artificial Sequence
  Description of Artificial Sequence: Synthetic oligonucleotide
acaucuucgaacaucgcag

SEQ ID NO: 2077749 - RNA, 19 nt, Artificial Sequence
  Description of Artificial Sequence: Synthetic oligonucleotide
guuucagaaaagaaaccag

SEQ ID NO: 2077750 - RNA, 19 nt, Artificial Sequence
  Description of Artificial Sequence: Synthetic oligonucleotide
auguaauuacuugaaccgg

SEQ ID NO: 2077751 - RNA, 19 nt, Artificial Sequence
  Description of Artificial Sequence: Synthetic oligonucleotide
gaauuuagagucaaguucu

SEQ ID NO: 2077752 - RNA, 19 nt, Artificial Sequence
  Description of Artificial Sequence: Synthetic oligonucleotide
gguauuauugcauagugua

SEQ ID NO: 2077753 - RNA, 19 nt, Artificial Sequence
  Description of Artificial Sequence: Synthetic oligonucleotide
ugugccacaucaaagucua

SEQ ID NO: 2077754 - RNA, 19 nt, Artificial Sequence
  Description of Artificial Sequence: Synthetic oligonucleotide
aacagcucuugauaggcau

SEQ ID NO: 2077755 - RNA, 19 nt, Artificial Sequence
  Description of Artificial Sequence: Synthetic oligonucleotide
agagaugaagucucaagau

SEQ ID NO: 2077756 - RNA, 19 nt, Artificial Sequence
  Description of Artificial Sequence: Synthetic oligonucleotide
agaaaccaggugaaguacc

SEQ ID NO: 2077757 - RNA, 19 nt, Artificial Sequence
  Description of Artificial Sequence: Synthetic oligonucleotide
cuaauucccaagaugcauc

SEQ ID NO: 2077758 - RNA, 19 nt, Artificial Sequence
  Description of Artificial Sequence: Synthetic oligonucleotide
uuggaauaggcucaauaua

SEQ ID NO: 2077759 - RNA, 19 nt, Artificial Sequence
  Description of Artificial Sequence: Synthetic oligonucleotide
cuugaaccuguaaacaguc

SEQ ID NO: 2077760 - RNA, 19 nt, Artificial Sequence
  Description of Artificial Sequence: Synthetic oligonucleotide
ugaaaccaagcauucuuac

SEQ ID NO: 2077761 - RNA, 19 nt, Artificial Sequence
  Description of Artificial Sequence: Synthetic oligonucleotide
uaucgguauuauugcauag

SEQ ID NO: 2077762 - RNA, 19 nt, Artificial Sequence
  Description of Artificial Sequence: Synthetic oligonucleotide
auugcauuaaggacuguag

SEQ ID NO: 2077763 - RNA, 19 nt, Artificial Sequence
  Description of Artificial Sequence: Synthetic oligonucleotide
agucuaaaacaucagccaa

SEQ ID NO: 2077764 - RNA, 19 nt, Artificial Sequence
  Description of Artificial Sequence: Synthetic oligonucleotide
uguuuauaguggcugcagu

SEQ ID NO: 2077765 - RNA, 19 nt, Artificial Sequence
  Description of Artificial Sequence: Synthetic oligonucleotide
uauaagucuuaaacaucca

SEQ ID NO: 2077766 - RNA, 19 nt, Artificial Sequence
  Description of Artificial Sequence: Synthetic oligonucleotide
augaacuaaagaaauggca

SEQ ID NO: 2077767 - RNA, 19 nt, Artificial Sequence
  Description of Artificial Sequence: Synthetic oligonucleotide
agucaaguucuugacaaag

SEQ ID NO: 2077768 - RNA, 19 nt, Artificial Sequence
  Description of Artificial Sequence: Synthetic oligonucleotide
agucuuaaacauccaauaa

SEQ ID NO: 2077769 - RNA, 19 nt, Artificial Sequence
  Description of Artificial Sequence: Synthetic oligonucleotide
aaguucuugacaaagccuu

SEQ ID NO: 2077770 - RNA, 19 nt, Artificial Sequence
  Description of Artificial Sequence: Synthetic oligonucleotide
agucucaagauauugcauu

SEQ ID NO: 2077771 - RNA, 19 nt, Artificial Sequence
  Description of Artificial Sequence: Synthetic oligonucleotide
acacuccugcauuuauugc

SEQ ID NO: 2077772 - RNA, 19 nt, Artificial Sequence
  Description of Artificial Sequence: Synthetic oligonucleotide
ucuuuuagagcuugagaau

SEQ ID NO: 2077773 - RNA, 19 nt, Artificial Sequence
  Description of Artificial Sequence: Synthetic oligonucleotide
uagagucaaguucuugaca

SEQ ID NO: 2077774 - RNA, 19 nt, Artificial Sequence
  Description of Artificial Sequence: Synthetic oligonucleotide
auugaaaagugucucggua

SEQ ID NO: 2077775 - RNA, 19 nt, Artificial Sequence
  Description of Artificial Sequence: Synthetic oligonucleotide
guuguaaguuggaauaggc

SEQ ID NO: 2077776 - RNA, 19 nt, Artificial Sequence
  Description of Artificial Sequence: Synthetic oligonucleotide
aaccggucgauguuuccag

SEQ ID NO: 2077777 - RNA, 19 nt, Artificial Sequence
  Description of Artificial Sequence: Synthetic oligonucleotide
uuggguucauuauagucuc

SEQ ID NO: 2077778 - RNA, 19 nt, Artificial Sequence
  Description of Artificial Sequence: Synthetic oligonucleotide
ugauuauaauuugugccac

SEQ ID NO: 2077779 - RNA, 19 nt, Artificial Sequence
  Description of Artificial Sequence: Synthetic oligonucleotide
cuggaaaaugacuuccuuc

SEQ ID NO: 2077780 - RNA, 19 nt, Artificial Sequence
  Description of Artificial Sequence: Synthetic oligonucleotide
gacuguaguguagaacagg

SEQ ID NO: 2077781 - RNA, 19 nt, Artificial Sequence
  Description of Artificial Sequence: Synthetic oligonucleotide
ucauggcucugcaacagcu

SEQ ID NO: 2077782 - RNA, 19 nt, Artificial Sequence
  Description of Artificial Sequence: Synthetic oligonucleotide
auuuaucauuuagugaugu

SEQ ID NO: 2077783 - RNA, 19 nt, Artificial Sequence
  Description of Artificial Sequence: Synthetic oligonucleotide
aucuugauuauaauuugug

SEQ ID NO: 2077784 - RNA, 19 nt, Artificial Sequence
  Description of Artificial Sequence: Synthetic oligonucleotide
agugucucgguacuuauua

SEQ ID NO: 2077785 - RNA, 19 nt, Artificial Sequence
  Description of Artificial Sequence: Synthetic oligonucleotide
caguuaaacaaaguuucag

SEQ ID NO: 2077786 - RNA, 19 nt, Artificial Sequence
  Description of Artificial Sequence: Synthetic oligonucleotide
uuuauaguggcugcaguau

SEQ ID NO: 2077787 - RNA, 19 nt, Artificial Sequence
  Description of Artificial Sequence: Synthetic oligonucleotide
uugcauaguguacaccuaa

SEQ ID NO: 2077788 - RNA, 19 nt, Artificial Sequence
  Description of Artificial Sequence: Synthetic oligonucleotide
uccacuugacauuaacaaa

SEQ ID NO: 2077789 - RNA, 19 nt, Artificial Sequence
  Description of Artificial Sequence: Synthetic oligonucleotide
ucgaacaucgcagcgguca

SEQ ID NO: 2077790 - RNA, 19 nt, Artificial Sequence
  Description of Artificial Sequence: Synthetic oligonucleotide
uacuugaaccggucgaugu

SEQ ID NO: 2077791 - RNA, 19 nt, Artificial Sequence
  Description of Artificial Sequence: Synthetic oligonucleotide
acuaaagaaauggcaacca

SEQ ID NO: 2077792 - RNA, 19 nt, Artificial Sequence
  Description of Artificial Sequence: Synthetic oligonucleotide
aucuucgaacaucgcagcg

SEQ ID NO: 2077793 - RNA, 19 nt, Artificial Sequence
  Description of Artificial Sequence: Synthetic oligonucleotide
aaagugucucgguacuuau

SEQ ID NO: 2077794 - RNA, 19 nt, Artificial Sequence
  Description of Artificial Sequence: Synthetic oligonucleotide
accaauguguauuuaucau

SEQ ID NO: 2077795 - RNA, 19 nt, Artificial Sequence
  Description of Artificial Sequence: Synthetic oligonucleotide
ugcuauuggguucauuaua

SEQ ID NO: 2077796 - RNA, 19 nt, Artificial Sequence
  Description of Artificial Sequence: Synthetic oligonucleotide
agaugaagucucaagauau

SEQ ID NO: 2077797 - RNA, 19 nt, Artificial Sequence
  Description of Artificial Sequence: Synthetic oligonucleotide
augaagucucaagauauug

SEQ ID NO: 2077798 - RNA, 19 nt, Artificial Sequence
  Description of Artificial Sequence: Synthetic oligonucleotide
agauaucgguauuauugca

SEQ ID NO: 2077799 - RNA, 19 nt, Artificial Sequence
  Description of Artificial Sequence: Synthetic oligonucleotide
aaaugacgcaaaauugcca

SEQ ID NO: 2077800 - RNA, 19 nt, Artificial Sequence
  Description of Artificial Sequence: Synthetic oligonucleotide
aaaccaggugaaguaccac

SEQ ID NO: 2077801 - RNA, 19 nt, Artificial Sequence
  Description of Artificial Sequence: Synthetic oligonucleotide
uucauuuacuacugacuuc

SEQ ID NO: 2077802 - RNA, 19 nt, Artificial Sequence
  Description of Artificial Sequence: Synthetic oligonucleotide
auaugaauucccauucuca

SEQ ID NO: 2077803 - RNA, 19 nt, Artificial Sequence
  Description of Artificial Sequence: Synthetic oligonucleotide
guagaacaggcuaagugug

SEQ ID NO: 2077804 - RNA, 19 nt, Artificial Sequence
  Description of Artificial Sequence: Synthetic oligonucleotide
cauuuauugcuugaaccug

SEQ ID NO: 2077805 - RNA, 19 nt, Artificial Sequence
  Description of Artificial Sequence: Synthetic oligonucleotide
gcaauauguuguaaguugg

SEQ ID NO: 2077806 - RNA, 19 nt, Artificial Sequence
  Description of Artificial Sequence: Synthetic oligonucleotide
cuguaaacagucucgguga

SEQ ID NO: 2077807 - RNA, 19 nt, Artificial Sequence
  Description of Artificial Sequence: Synthetic oligonucleotide
uccagcaaaaugacgcaaa

SEQ ID NO: 2077808 - RNA, 19 nt, Artificial Sequence
  Description of Artificial Sequence: Synthetic oligonucleotide
uauaguggcugcaguauuu

SEQ ID NO: 2077809 - RNA, 19 nt, Artificial Sequence
  Description of Artificial Sequence: Synthetic oligonucleotide
cucgguacuuauuagaugu

SEQ ID NO: 2077810 - RNA, 19 nt, Artificial Sequence
  Description of Artificial Sequence: Synthetic oligonucleotide
ucucggugaaaccaagcau

SEQ ID NO: 2077811 - RNA, 19 nt, Artificial Sequence
  Description of Artificial Sequence: Synthetic oligonucleotide
acuacugacuucaaacugu

SEQ ID NO: 2077812 - RNA, 19 nt, Artificial Sequence
  Description of Artificial Sequence: Synthetic oligonucleotide
ugauguuauaagucuuaaa

SEQ ID NO: 2077813 - RNA, 19 nt, Artificial Sequence
  Description of Artificial Sequence: Synthetic oligonucleotide
cagagaugaagucucaaga

SEQ ID NO: 2077814 - RNA, 19 nt, Artificial Sequence
  Description of Artificial Sequence: Synthetic oligonucleotide
guaacuugagcauucauuu

SEQ ID NO: 2077815 - RNA, 19 nt, Artificial Sequence
  Description of Artificial Sequence: Synthetic oligonucleotide
aauguguauuuaucauuua

SEQ ID NO: 2077816 - RNA, 19 nt, Artificial Sequence
  Description of Artificial Sequence: Synthetic oligonucleotide
uccacuagaaagccauaaa

SEQ ID NO: 2077817 - RNA, 19 nt, Artificial Sequence
  Description of Artificial Sequence: Synthetic oligonucleotide
agccuucaaacagagauga

SEQ ID NO: 2077818 - RNA, 19 nt, Artificial Sequence
  Description of Artificial Sequence: Synthetic oligonucleotide
auaucgguauuauugcaua

SEQ ID NO: 2077819 - RNA, 19 nt, Artificial Sequence
  Description of Artificial Sequence: Synthetic oligonucleotide
acaucagccaaacuuggua

SEQ ID NO: 2077820 - RNA, 19 nt, Artificial Sequence
  Description of Artificial Sequence: Synthetic oligonucleotide
guaaguuggaauaggcuca

SEQ ID NO: 2077821 - RNA, 19 nt, Artificial Sequence
  Description of Artificial Sequence: Synthetic oligonucleotide
ucaacaucucuuucugaaa

SEQ ID NO: 2077822 - RNA, 19 nt, Artificial Sequence
  Description of Artificial Sequence: Synthetic oligonucleotide
cuaaguguguuccacuaga

SEQ ID NO: 2077823 - RNA, 19 nt, Artificial Sequence
  Description of Artificial Sequence: Synthetic oligonucleotide
agacaguuaaacaaaguuu

SEQ ID NO: 2077824 - RNA, 19 nt, Artificial Sequence
  Description of Artificial Sequence: Synthetic oligonucleotide
gcuauuggguucauuauag

SEQ ID NO: 2077825 - RNA, 19 nt, Artificial Sequence
  Description of Artificial Sequence: Synthetic oligonucleotide
ugucuuccacuagaaagcc

SEQ ID NO: 2077826 - RNA, 19 nt, Artificial Sequence
  Description of Artificial Sequence: Synthetic oligonucleotide
cuuucugaaagauaucggu

SEQ ID NO: 2077827 - RNA, 19 nt, Artificial Sequence
  Description of Artificial Sequence: Synthetic oligonucleotide
gaaagccauaaacuccuuc

SEQ ID NO: 2077828 - RNA, 19 nt, Artificial Sequence
  Description of Artificial Sequence: Synthetic oligonucleotide
caucuucgaacaucgcagc

SEQ ID NO: 2077829 - RNA, 19 nt, Artificial Sequence
  Description of Artificial Sequence: Synthetic oligonucleotide
auuuacuacugacuucaaa

SEQ ID NO: 2077830 - RNA, 19 nt, Artificial Sequence
  Description of Artificial Sequence: Synthetic oligonucleotide
ucugaaagauaucgguauu

SEQ ID NO: 2077831 - RNA, 19 nt, Artificial Sequence
  Description of Artificial Sequence: Synthetic oligonucleotide
acuugguagaguauuuuca

SEQ ID NO: 2077832 - RNA, 19 nt, Artificial Sequence
  Description of Artificial Sequence: Synthetic oligonucleotide
uuauugcauaguguacacc

SEQ ID NO: 2077833 - RNA, 19 nt, Artificial Sequence
  Description of Artificial Sequence: Synthetic oligonucleotide
ucccauuugcuauuggguu

SEQ ID NO: 2077834 - RNA, 19 nt, Artificial Sequence
  Description of Artificial Sequence: Synthetic oligonucleotide
uguaaacagucucggugaa

SEQ ID NO: 2077835 - RNA, 19 nt, Artificial Sequence
  Description of Artificial Sequence: Synthetic oligonucleotide
guuggaauaggcucaauau

SEQ ID NO: 2077836 - RNA, 19 nt, Artificial Sequence
  Description of Artificial Sequence: Synthetic oligonucleotide
auguuguaaguuggaauag

SEQ ID NO: 2077837 - RNA, 19 nt, Artificial Sequence
  Description of Artificial Sequence: Synthetic oligonucleotide
auuaaggacuguaguguag

SEQ ID NO: 2077838 - RNA, 19 nt, Artificial Sequence
  Description of Artificial Sequence: Synthetic oligonucleotide
aagccuucaaacagagaug

SEQ ID NO: 2077839 - RNA, 19 nt, Artificial Sequence
  Description of Artificial Sequence: Synthetic oligonucleotide
uaggcauuuucuucuaauu

SEQ ID NO: 2077840 - RNA, 19 nt, Artificial Sequence
  Description of Artificial Sequence: Synthetic oligonucleotide
uaguguagaacaggcuaag

SEQ ID NO: 2077841 - RNA, 19 nt, Artificial Sequence
  Description of Artificial Sequence: Synthetic oligonucleotide
aaauugccaguaaacugga

SEQ ID NO: 2077842 - RNA, 19 nt, Artificial Sequence
  Description of Artificial Sequence: Synthetic oligonucleotide
guacauugaaaagugucuc

SEQ ID NO: 2077843 - RNA, 19 nt, Artificial Sequence
  Description of Artificial Sequence: Synthetic oligonucleotide
gagcauucauuuacuacug

SEQ ID NO: 2077844 - RNA, 19 nt, Artificial Sequence
  Description of Artificial Sequence: Synthetic oligonucleotide
acugacagucgcuuuacuu

SEQ ID NO: 2077845 - RNA, 19 nt, Artificial Sequence
  Description of Artificial Sequence: Synthetic oligonucleotide
gaugcauccuuuucaggaa

SEQ ID NO: 2077846 - RNA, 19 nt, Artificial Sequence
  Description of Artificial Sequence: Synthetic oligonucleotide
uagugauguuauaagucuu

SEQ ID NO: 2077847 - RNA, 19 nt, Artificial Sequence
  Description of Artificial Sequence: Synthetic oligonucleotide
gacaaagccuucaaacaga

SEQ ID NO: 2077848 - RNA, 19 nt, Artificial Sequence
  Description of Artificial Sequence: Synthetic oligonucleotide
cauucuuacaacagggacu

SEQ ID NO: 2077849 - RNA, 19 nt, Artificial Sequence
  Description of Artificial Sequence: Synthetic oligonucleotide
cacuagaaagccauaaacu

SEQ ID NO: 2077850 - RNA, 19 nt, Artificial Sequence
  Description of Artificial Sequence: Synthetic oligonucleotide
acaccuaaagaaauacacu

SEQ ID NO: 2077851 - RNA, 19 nt, Artificial Sequence
  Description of Artificial Sequence: Synthetic oligonucleotide
guuuauaguggcugcagua

SEQ ID NO: 2077852 - RNA, 19 nt, Artificial Sequence
  Description of Artificial Sequence: Synthetic oligonucleotide
ugcauaguguacaccuaaa

SEQ ID NO: 2077853 - RNA, 19 nt, Artificial Sequence
  Description of Artificial Sequence: Synthetic oligonucleotide
ugaugucuuccacuagaaa

SEQ ID NO: 2077854 - RNA, 19 nt, Artificial Sequence
  Description of Artificial Sequence: Synthetic oligonucleotide
gucaaguucuugacaaagc

SEQ ID NO: 2077855 - RNA, 19 nt, Artificial Sequence
  Description of Artificial Sequence: Synthetic oligonucleotide
gcauucuuacaacagggac

SEQ ID NO: 2077856 - RNA, 19 nt, Artificial Sequence
  Description of Artificial Sequence: Synthetic oligonucleotide
uuauugcuugaaccuguaa

SEQ ID NO: 2077857 - RNA, 19 nt, Artificial Sequence
  Description of Artificial Sequence: Synthetic oligonucleotide
ccacuagaaagccauaaac

SEQ ID NO: 2077858 - RNA, 19 nt, Artificial Sequence
  Description of Artificial Sequence: Synthetic oligonucleotide
gcauaguguacaccuaaag

SEQ ID NO: 2077859 - RNA, 19 nt, Artificial Sequence
  Description of Artificial Sequence: Synthetic oligonucleotide
cugcauuuauugcuugaac

SEQ ID NO: 2077860 - RNA, 19 nt, Artificial Sequence
  Description of Artificial Sequence: Synthetic oligonucleotide
gucucggugaaaccaagca

SEQ ID NO: 2077861 - RNA, 19 nt, Artificial Sequence
  Description of Artificial Sequence: Synthetic oligonucleotide
aguguacaccuaaagaaau

SEQ ID NO: 2077862 - RNA, 19 nt, Artificial Sequence
  Description of Artificial Sequence: Synthetic oligonucleotide
gcauucauuuacuacugac

SEQ ID NO: 2077863 - RNA, 19 nt, Artificial Sequence
  Description of Artificial Sequence: Synthetic oligonucleotide
auccaauaaacuccaggua

SEQ ID NO: 2077864 - RNA, 19 nt, Artificial Sequence
  Description of Artificial Sequence: Synthetic oligonucleotide
ugccacaucaaagucuaaa

SEQ ID NO: 2077865 - RNA, 19 nt, Artificial Sequence
  Description of Artificial Sequence: Synthetic oligonucleotide
aguauuuaucuugauuaua

SEQ ID NO: 2077866 - RNA, 19 nt, Artificial Sequence
  Description of Artificial Sequence: Synthetic oligonucleotide
accggucgauguuuccagc

SEQ ID NO: 2077867 - RNA, 19 nt, Artificial Sequence
  Description of Artificial Sequence: Synthetic oligonucleotide
aucagccaaacuugguaga

SEQ ID NO: 2077868 - RNA, 19 nt, Artificial Sequence
  Description of Artificial Sequence: Synthetic oligonucleotide
cuagaaccacaacacugac

SEQ ID NO: 2077869 - RNA, 19 nt, Artificial Sequence
  Description of Artificial Sequence: Synthetic oligonucleotide
guggcugcaguauuuaucu

SEQ ID NO: 2077870 - RNA, 19 nt, Artificial Sequence
  Description of Artificial Sequence: Synthetic oligonucleotide
aucgguauuauugcauagu

SEQ ID NO: 2077871 - RNA, 19 nt, Artificial Sequence
  Description of Artificial Sequence: Synthetic oligonucleotide
agucucggugaaaccaagc

SEQ ID NO: 2077872 - RNA, 19 nt, Artificial Sequence
  Description of Artificial Sequence: Synthetic oligonucleotide
uaguaaagguucucuuuua

SEQ ID NO: 2077873 - RNA, 19 nt, Artificial Sequence
  Description of Artificial Sequence: Synthetic oligonucleotide
aggcucaauauauuccaaa

SEQ ID NO: 2077874 - RNA, 19 nt, Artificial Sequence
  Description of Artificial Sequence: Synthetic oligonucleotide
accacaacacugacagucg

SEQ ID NO: 2077875 - RNA, 19 nt, Artificial Sequence
  Description of Artificial Sequence: Synthetic oligonucleotide
auuacuugaaccggucgau

SEQ ID NO: 2077876 - RNA, 19 nt, Artificial Sequence
  Description of Artificial Sequence: Synthetic oligonucleotide
ugacgcaaaauugccagua

SEQ ID NO: 2077877 - RNA, 19 nt, Artificial Sequence
  Description of Artificial Sequence: Synthetic oligonucleotide
aggugaaguaccaccauga

SEQ ID NO: 2077878 - RNA, 19 nt, Artificial Sequence
  Description of Artificial Sequence: Synthetic oligonucleotide
uuacuugaaccggucgaug

SEQ ID NO: 2077879 - RNA, 19 nt, Artificial Sequence
  Description of Artificial Sequence: Synthetic oligonucleotide
acacugacagucgcuuuac

SEQ ID NO: 2077880 - RNA, 19 nt, Artificial Sequence
  Description of Artificial Sequence: Synthetic oligonucleotide
acagggacucagcaauaug

SEQ ID NO: 2077881 - RNA, 19 nt, Artificial Sequence
  Description of Artificial Sequence: Synthetic oligonucleotide
acgcaaaauugccaguaaa

SEQ ID NO: 2077882 - RNA, 19 nt, Artificial Sequence
  Description of Artificial Sequence: Synthetic oligonucleotide
uaacuugagcauucauuua

SEQ ID NO: 2077883 - RNA, 19 nt, Artificial Sequence
  Description of Artificial Sequence: Synthetic oligonucleotide
cuguuuauaguggcugcag

SEQ ID NO: 2077884 - RNA, 19 nt, Artificial Sequence
  Description of Artificial Sequence: Synthetic oligonucleotide
caggugaaguaccaccaug

SEQ ID NO: 2077885 - RNA, 19 nt, Artificial Sequence
  Description of Artificial Sequence: Synthetic oligonucleotide
aagucucaagauauugcau

SEQ ID NO: 2077886 - RNA, 19 nt, Artificial Sequence
  Description of Artificial Sequence: Synthetic oligonucleotide
aacagagaugaagucucaa

SEQ ID NO: 2077887 - RNA, 19 nt, Artificial Sequence
  Description of Artificial Sequence: Synthetic oligonucleotide
gguucauuauagucucgcc

SEQ ID NO: 2077888 - RNA, 19 nt, Artificial Sequence
  Description of Artificial Sequence: Synthetic oligonucleotide
uaggcucaauauauuccaa

SEQ ID NO: 2077889 - RNA, 19 nt, Artificial Sequence
  Description of Artificial Sequence: Synthetic oligonucleotide
ucucaagauauugcauuaa

SEQ ID NO: 2077890 - RNA, 19 nt, Artificial Sequence
  Description of Artificial Sequence: Synthetic oligonucleotide
acaguuaaacaaaguuuca

SEQ ID NO: 2077891 - RNA, 19 nt, Artificial Sequence
  Description of Artificial Sequence: Synthetic oligonucleotide
ccaauaaacuccagguaac

SEQ ID NO: 2077892 - RNA, 19 nt, Artificial Sequence
  Description of Artificial Sequence: Synthetic oligonucleotide
guaauuacuugaaccgguc

SEQ ID NO: 2077893 - RNA, 19 nt, Artificial Sequence
  Description of Artificial Sequence: Synthetic oligonucleotide
cacuugacauuaacaaaca

SEQ ID NO: 2077894 - RNA, 19 nt, Artificial Sequence
  Description of Artificial Sequence: Synthetic oligonucleotide
uaaggacuguaguguagaa

SEQ ID NO: 2077895 - RNA, 19 nt, Artificial Sequence
  Description of Artificial Sequence: Synthetic oligonucleotide
ugaaccggucgauguuucc

SEQ ID NO: 2077896 - RNA, 19 nt, Artificial Sequence
  Description of Artificial Sequence: Synthetic oligonucleotide
aaauacacuccugcauuua

SEQ ID NO: 2077897 - RNA, 19 nt, Artificial Sequence
  Description of Artificial Sequence: Synthetic oligonucleotide
gaacaggcuaaguguguuc

SEQ ID NO: 2077898 - RNA, 19 nt, Artificial Sequence
  Description of Artificial Sequence: Synthetic oligonucleotide
aacaucagccaaacuuggu

SEQ ID NO: 2077899 - RNA, 19 nt, Artificial Sequence
  Description of Artificial Sequence: Synthetic oligonucleotide
uugaaccggucgauguuuc

SEQ ID NO: 2077900 - RNA, 19 nt, Artificial Sequence
  Description of Artificial Sequence: Synthetic oligonucleotide
ugacaucuucgaacaucgc

SEQ ID NO: 2077901 - RNA, 19 nt, Artificial Sequence
  Description of Artificial Sequence: Synthetic oligonucleotide
ucauuauagucucgcccuu

SEQ ID NO: 2077902 - RNA, 19 nt, Artificial Sequence
  Description of Artificial Sequence: Synthetic oligonucleotide
augacgcaaaauugccagu

SEQ ID NO: 2077903 - RNA, 19 nt, Artificial Sequence
  Description of Artificial Sequence: Synthetic oligonucleotide
uaaguuggaauaggcucaa

SEQ ID NO: 2077904 - RNA, 19 nt, Artificial Sequence
  Description of Artificial Sequence: Synthetic oligonucleotide
gggacucagcaauauguug

SEQ ID NO: 2077905 - RNA, 19 nt, Artificial Sequence
  Description of Artificial Sequence: Synthetic oligonucleotide
gauaucgguauuauugcau

SEQ ID NO: 2077906 - RNA, 19 nt, Artificial Sequence
  Description of Artificial Sequence: Synthetic oligonucleotide
aucauuuagugauguuaua

SEQ ID NO: 2077907 - RNA, 19 nt, Artificial Sequence
  Description of Artificial Sequence: Synthetic oligonucleotide
cagggacucagcaauaugu

SEQ ID NO: 2077908 - RNA, 19 nt, Artificial Sequence
  Description of Artificial Sequence: Synthetic oligonucleotide
agugauguuauaagucuua

SEQ ID NO: 2077909 - RNA, 19 nt, Artificial Sequence
  Description of Artificial Sequence: Synthetic oligonucleotide
ugacuucaaacuguuuaua

SEQ ID NO: 2077910 - RNA, 19 nt, Artificial Sequence
  Description of Artificial Sequence: Synthetic oligonucleotide
gucucaagauauugcauua

SEQ ID NO: 2077911 - RNA, 19 nt, Artificial Sequence
  Description of Artificial Sequence: Synthetic oligonucleotide
agucgcuuuacuucccauu

SEQ ID NO: 2077912 - RNA, 19 nt, Artificial Sequence
  Description of Artificial Sequence: Synthetic oligonucleotide
aauucccaagaugcauccu

SEQ ID NO: 2077913 - RNA, 19 nt, Artificial Sequence
  Description of Artificial Sequence: Synthetic oligonucleotide
auaauuugugccacaucaa

SEQ ID NO: 2077914 - RNA, 19 nt, Artificial Sequence
  Description of Artificial Sequence: Synthetic oligonucleotide
uguguuccacuagaaccac

SEQ ID NO: 2077915 - RNA, 19 nt, Artificial Sequence
  Description of Artificial Sequence: Synthetic oligonucleotide
acagucgcuuuacuuccca

SEQ ID NO: 2077916 - RNA, 19 nt, Artificial Sequence
  Description of Artificial Sequence: Synthetic oligonucleotide
ugccaguaaacuggaaaau

SEQ ID NO: 2077917 - RNA, 19 nt, Artificial Sequence
  Description of Artificial Sequence: Synthetic oligonucleotide
gcuaaguguguuccacuag

SEQ ID NO: 2077918 - RNA, 19 nt, Artificial Sequence
  Description of Artificial Sequence: Synthetic oligonucleotide
aauuuagagucaaguucuu

SEQ ID NO: 2077919 - RNA, 19 nt, Artificial Sequence
  Description of Artificial Sequence: Synthetic oligonucleotide
acuugaaccggucgauguu

SEQ ID NO: 2077920 - RNA, 19 nt, Artificial Sequence
  Description of Artificial Sequence: Synthetic oligonucleotide
caaguucuugacaaagccu

SEQ ID NO: 2077921 - RNA, 19 nt, Artificial Sequence
  Description of Artificial Sequence: Synthetic oligonucleotide
gccaguaaacuggaaaaug

SEQ ID NO: 2077922 - RNA, 19 nt, Artificial Sequence
  Description of Artificial Sequence: Synthetic oligonucleotide
accuguaaacagucucggu

SEQ ID NO: 2077923 - RNA, 19 nt, Artificial Sequence
  Description of Artificial Sequence: Synthetic oligonucleotide
gacucagcaauauguugua

SEQ ID NO: 2077924 - RNA, 19 nt, Artificial Sequence
  Description of Artificial Sequence: Synthetic oligonucleotide
gacgcaaaauugccaguaa

SEQ ID NO: 2077925 - RNA, 19 nt, Artificial Sequence
  Description of Artificial Sequence: Synthetic oligonucleotide
guacaccuaaagaaauaca

SEQ ID NO: 2077926 - RNA, 19 nt, Artificial Sequence
  Description of Artificial Sequence: Synthetic oligonucleotide
ggguucauuauagucucgc

SEQ ID NO: 2077927 - RNA, 19 nt, Artificial Sequence
  Description of Artificial Sequence: Synthetic oligonucleotide
cauaguaaagguucucuuu

SEQ ID NO: 2077928 - RNA, 19 nt, Artificial Sequence
  Description of Artificial Sequence: Synthetic oligonucleotide
acaucgcagcggucauggc

SEQ ID NO: 2077929 - RNA, 19 nt, Artificial Sequence
  Description of Artificial Sequence: Synthetic oligonucleotide
ucgguacuuauuagaugua

SEQ ID NO: 2077930 - RNA, 19 nt, Artificial Sequence
  Description of Artificial Sequence: Synthetic oligonucleotide
caggcuaaguguguuccac

SEQ ID NO: 2077931 - RNA, 19 nt, Artificial Sequence
  Description of Artificial Sequence: Synthetic oligonucleotide
gguucucuuuuagagcuug

SEQ ID NO: 2077932 - RNA, 19 nt, Artificial Sequence
  Description of Artificial Sequence: Synthetic oligonucleotide
aguguagaacaggcuaagu

SEQ ID NO: 2077933 - RNA, 19 nt, Artificial Sequence
  Description of Artificial Sequence: Synthetic oligonucleotide
uccagguaacuugagcauu

SEQ ID NO: 2077934 - RNA, 19 nt, Artificial Sequence
  Description of Artificial Sequence: Synthetic oligonucleotide
acaggcuaaguguguucca

SEQ ID NO: 2077935 - RNA, 19 nt, Artificial Sequence
  Description of Artificial Sequence: Synthetic oligonucleotide
cagucucggugaaaccaag

SEQ ID NO: 2077936 - RNA, 19 nt, Artificial Sequence
  Description of Artificial Sequence: Synthetic oligonucleotide
gaaguaccaccaugaacua

SEQ ID NO: 2077937 - RNA, 19 nt, Artificial Sequence
  Description of Artificial Sequence: Synthetic oligonucleotide
cucggugaaaccaagcauu

SEQ ID NO: 2077938 - RNA, 19 nt, Artificial Sequence
  Description of Artificial Sequence: Synthetic oligonucleotide
agguaacuugagcauucau

SEQ ID NO: 2077939 - RNA, 19 nt, Artificial Sequence
  Description of Artificial Sequence: Synthetic oligonucleotide
agaacaggcuaaguguguu

SEQ ID NO: 2077940 - RNA, 19 nt, Artificial Sequence
  Description of Artificial Sequence: Synthetic oligonucleotide
cugaugucuuccacuagaa

SEQ ID NO: 2077941 - RNA, 19 nt, Artificial Sequence
  Description of Artificial Sequence: Synthetic oligonucleotide
cuuuuagagcuugagaauu

SEQ ID NO: 2077942 - RNA, 19 nt, Artificial Sequence
  Description of Artificial Sequence: Synthetic oligonucleotide
guuccacuagaaccacaac

SEQ ID NO: 2077943 - RNA, 19 nt, Artificial Sequence
  Description of Artificial Sequence: Synthetic oligonucleotide
cugaaagauaucgguauua

SEQ ID NO: 2077944 - RNA, 19 nt, Artificial Sequence
  Description of Artificial Sequence: Synthetic oligonucleotide
gugauguuauaagucuuaa

SEQ ID NO: 2077945 - RNA, 19 nt, Artificial Sequence
  Description of Artificial Sequence: Synthetic oligonucleotide
uaguggcugcaguauuuau

SEQ ID NO: 2077946 - RNA, 19 nt, Artificial Sequence
  Description of Artificial Sequence: Synthetic oligonucleotide
ggugaaaccaagcauucuu

SEQ ID NO: 2077947 - RNA, 19 nt, Artificial Sequence
  Description of Artificial Sequence: Synthetic oligonucleotide
gacagucgcuuuacuuccc

SEQ ID NO: 2077948 - RNA, 19 nt, Artificial Sequence
  Description of Artificial Sequence: Synthetic oligonucleotide
ccuaaagaaauacacuccu

SEQ ID NO: 2077949 - RNA, 19 nt, Artificial Sequence
  Description of Artificial Sequence: Synthetic oligonucleotide
augguacauugaaaagugu

SEQ ID NO: 2077950 - RNA, 19 nt, Artificial Sequence
  Description of Artificial Sequence: Synthetic oligonucleotide
gugaaaccaagcauucuua

SEQ ID NO: 2077951 - RNA, 19 nt, Artificial Sequence
  Description of Artificial Sequence: Synthetic oligonucleotide
auaguggcugcaguauuua

SEQ ID NO: 2077952 - RNA, 19 nt, Artificial Sequence
  Description of Artificial Sequence: Synthetic oligonucleotide
cuucgaacaucgcagcggu

SEQ ID NO: 2077953 - RNA, 19 nt, Artificial Sequence
  Description of Artificial Sequence: Synthetic oligonucleotide
gcauuaaggacuguagugu

SEQ ID NO: 2077954 - RNA, 19 nt, Artificial Sequence
  Description of Artificial Sequence: Synthetic oligonucleotide
acagucucggugaaaccaa

SEQ ID NO: 2077955 - RNA, 19 nt, Artificial Sequence
  Description of Artificial Sequence: Synthetic oligonucleotide
gucgauguuuccagcaaaa

SEQ ID NO: 2077956 - RNA, 19 nt, Artificial Sequence
  Description of Artificial Sequence: Synthetic oligonucleotide
aauugccaguaaacuggaa

SEQ ID NO: 2077957 - RNA, 19 nt, Artificial Sequence
  Description of Artificial Sequence: Synthetic oligonucleotide
gaacaucgcagcggucaug

SEQ ID NO: 2077958 - RNA, 19 nt, Artificial Sequence
  Description of Artificial Sequence: Synthetic oligonucleotide
gucgcuuuacuucccauuu

SEQ ID NO: 2077959 - RNA, 19 nt, Artificial Sequence
  Description of Artificial Sequence: Synthetic oligonucleotide
cuucuucccucucugccaa

SEQ ID NO: 2077960 - RNA, 19 nt, Artificial Sequence
  Description of Artificial Sequence: Synthetic oligonucleotide
auugcauaguguacaccua

SEQ ID NO: 2077961 - RNA, 19 nt, Artificial Sequence
  Description of Artificial Sequence: Synthetic oligonucleotide
uucgaacaucgcagcgguc

SEQ ID NO: 2077962 - RNA, 19 nt, Artificial Sequence
  Description of Artificial Sequence: Synthetic oligonucleotide
agaguauuuucagguccau

SEQ ID NO: 2077963 - RNA, 19 nt, Artificial Sequence
  Description of Artificial Sequence: Synthetic oligonucleotide
ugacuuccuuccugauguc

SEQ ID NO: 2077964 - RNA, 19 nt, Artificial Sequence
  Description of Artificial Sequence: Synthetic oligonucleotide
auacacuccugcauuuauu

SEQ ID NO: 2077965 - RNA, 19 nt, Artificial Sequence
  Description of Artificial Sequence: Synthetic oligonucleotide
gucuuuuaccaauguguau

SEQ ID NO: 2077966 - RNA, 19 nt, Artificial Sequence
  Description of Artificial Sequence: Synthetic oligonucleotide
agggacucagcaauauguu

SEQ ID NO: 2077967 - RNA, 19 nt, Artificial Sequence
  Description of Artificial Sequence: Synthetic oligonucleotide
ggugaaguaccaccaugaa

SEQ ID NO: 2077968 - RNA, 19 nt, Artificial Sequence
  Description of Artificial Sequence: Synthetic oligonucleotide
caucgcagcggucauggcu

SEQ ID NO: 2077969 - RNA, 19 nt, Artificial Sequence
  Description of Artificial Sequence: Synthetic oligonucleotide
caauaaacuccagguaacu

SEQ ID NO: 2077970 - RNA, 19 nt, Artificial Sequence
  Description of Artificial Sequence: Synthetic oligonucleotide
ggcuaaguguguuccacua

SEQ ID NO: 2077971 - RNA, 19 nt, Artificial Sequence
  Description of Artificial Sequence: Synthetic oligonucleotide
ccacaacacugacagucgc

SEQ ID NO: 2077972 - RNA, 19 nt, Artificial Sequence
  Description of Artificial Sequence: Synthetic oligonucleotide
ggcucugcaacagcucuug

SEQ ID NO: 2077973 - RNA, 19 nt, Artificial Sequence
  Description of Artificial Sequence: Synthetic oligonucleotide
cuauuggguucauuauagu

SEQ ID NO: 2077974 - RNA, 19 nt, Artificial Sequence
  Description of Artificial Sequence: Synthetic oligonucleotide
guccauaagcaagacaguu

SEQ ID NO: 2077975 - RNA, 19 nt, Artificial Sequence
  Description of Artificial Sequence: Synthetic oligonucleotide
ggucgauguuuccagcaaa

SEQ ID NO: 2077976 - RNA, 19 nt, Artificial Sequence
  Description of Artificial Sequence: Synthetic oligonucleotide
gaugaagucucaagauauu

SEQ ID NO: 2077977 - RNA, 19 nt, Artificial Sequence
  Description of Artificial Sequence: Synthetic oligonucleotide
cuaaaacaucagccaaacu

SEQ ID NO: 2077978 - RNA, 19 nt, Artificial Sequence
  Description of Artificial Sequence: Synthetic oligonucleotide
cacaacacugacagucgcu

SEQ ID NO: 2077979 - RNA, 19 nt, Artificial Sequence
  Description of Artificial Sequence: Synthetic oligonucleotide
guaaacagucucggugaaa

SEQ ID NO: 2077980 - RNA, 19 nt, Artificial Sequence
  Description of Artificial Sequence: Synthetic oligonucleotide
cauuuacuacugacuucaa

SEQ ID NO: 2077981 - RNA, 19 nt, Artificial Sequence
  Description of Artificial Sequence: Synthetic oligonucleotide
uucuuacaacagggacuca

SEQ ID NO: 2077982 - RNA, 19 nt, Artificial Sequence
  Description of Artificial Sequence: Synthetic oligonucleotide
gguacuuauuagauguaau

SEQ ID NO: 2077983 - RNA, 19 nt, Artificial Sequence
  Description of Artificial Sequence: Synthetic oligonucleotide
cuccagguaacuugagcau

SEQ ID NO: 2077984 - RNA, 19 nt, Artificial Sequence
  Description of Artificial Sequence: Synthetic oligonucleotide
gcuugaaccuguaaacagu

SEQ ID NO: 2077985 - RNA, 19 nt, Artificial Sequence
  Description of Artificial Sequence: Synthetic oligonucleotide
gcagcggucauggcucugc

SEQ ID NO: 2077986 - RNA, 19 nt, Artificial Sequence
  Description of Artificial Sequence: Synthetic oligonucleotide
ccauuugcuauuggguuca

SEQ ID NO: 2077987 - RNA, 19 nt, Artificial Sequence
  Description of Artificial Sequence: Synthetic oligonucleotide
caacagggacucagcaaua

SEQ ID NO: 2077988 - RNA, 19 nt, Artificial Sequence
  Description of Artificial Sequence: Synthetic oligonucleotide
cuugaaccggucgauguuu

SEQ ID NO: 2077989 - RNA, 19 nt, Artificial Sequence
  Description of Artificial Sequence: Synthetic oligonucleotide
agaaagccauaaacuccuu

SEQ ID NO: 2077990 - RNA, 19 nt, Artificial Sequence
  Description of Artificial Sequence: Synthetic oligonucleotide
ccggucgauguuuccagca

SEQ ID NO: 2077991 - RNA, 19 nt, Artificial Sequence
  Description of Artificial Sequence: Synthetic oligonucleotide
ggaauaggcucaauauauu

SEQ ID NO: 2077992 - RNA, 19 nt, Artificial Sequence
  Description of Artificial Sequence: Synthetic oligonucleotide
agguucucuuuuagagcuu

SEQ ID NO: 2077993 - RNA, 19 nt, Artificial Sequence
  Description of Artificial Sequence: Synthetic oligonucleotide
cagcggucauggcucugca

SEQ ID NO: 2077994 - RNA, 19 nt, Artificial Sequence
  Description of Artificial Sequence: Synthetic oligonucleotide
cauuauagucucgcccuuu

SEQ ID NO: 2077995 - RNA, 19 nt, Artificial Sequence
  Description of Artificial Sequence: Synthetic oligonucleotide
ccauucucaacaucucuuu

SEQ ID NO: 2077996 - RNA, 19 nt, Artificial Sequence
  Description of Artificial Sequence: Synthetic oligonucleotide
cgguauuauugcauagugu

SEQ ID NO: 2077997 - RNA, 19 nt, Artificial Sequence
  Description of Artificial Sequence: Synthetic oligonucleotide
cugcaguauuuaucuugau

SEQ ID NO: 2077998 - RNA, 19 nt, Artificial Sequence
  Description of Artificial Sequence: Synthetic oligonucleotide
ccacuagaaccacaacacu

SEQ ID NO: 2077999 - RNA, 19 nt, Artificial Sequence
  Description of Artificial Sequence: Synthetic oligonucleotide
cgguacuuauuagauguaa

SEQ ID NO: 2078000 - RNA, 19 nt, Artificial Sequence
  Description of Artificial Sequence: Synthetic oligonucleotide
gccuucaaacagagaugaa

SEQ ID NO: 2078001 - RNA, 19 nt, Artificial Sequence
  Description of Artificial Sequence: Synthetic oligonucleotide
gugccacaucaaagucuaa

SEQ ID NO: 2078002 - RNA, 19 nt, Artificial Sequence
  Description of Artificial Sequence: Synthetic oligonucleotide
cggugaaaccaagcauucu

SEQ ID NO: 2078003 - RNA, 19 nt, Artificial Sequence
  Description of Artificial Sequence: Synthetic oligonucleotide
aaauucuuuacauaaauuc

SEQ ID NO: 2078004 - RNA, 19 nt, Artificial Sequence
  Description of Artificial Sequence: Synthetic oligonucleotide
agaaauucgacccuuaucc

SEQ ID NO: 2078005 - RNA, 19 nt, Artificial Sequence
  Description of Artificial Sequence: Synthetic oligonucleotide
aauaucaaacauuauccgc

SEQ ID NO: 2078006 - RNA, 19 nt, Artificial Sequence
  Description of Artificial Sequence: Synthetic oligonucleotide
  modified_base (6)..(6): a, c, u, g, unknown or other
acuagnuaaauccucaucc

SEQ ID NO: 2078007 - RNA, 19 nt, Artificial Sequence
  Description of Artificial Sequence: Synthetic oligonucleotide
agaucgagcaaacugaacc

SEQ ID NO: 2078008 - RNA, 19 nt, Artificial Sequence
  Description of Artificial Sequence: Synthetic oligonucleotide
aaagcuuguccuuucauac

SEQ ID NO: 2078009 - RNA, 19 nt, Artificial Sequence
  Description of Artificial Sequence: Synthetic oligonucleotide
aaauucggcaguuugguuc

SEQ ID NO: 2078010 - RNA, 19 nt, Artificial Sequence
  Description of Artificial Sequence: Synthetic oligonucleotide
aacgugucuagcuaaauuc

SEQ ID NO: 2078011 - RNA, 19 nt, Artificial Sequence
  Description of Artificial Sequence: Synthetic oligonucleotide
gagaaauacauugugaggg

SEQ ID NO: 2078012 - RNA, 19 nt, Artificial Sequence
  Description of Artificial Sequence: Synthetic oligonucleotide
uguauuugaaucaucaagu

SEQ ID NO: 2078013 - RNA, 19 nt, Artificial Sequence
  Description of Artificial Sequence: Synthetic oligonucleotide
aucagaaucgucuuuaauc

SEQ ID NO: 2078014 - RNA, 19 nt, Artificial Sequence
  Description of Artificial Sequence: Synthetic oligonucleotide
aaagaacauagccauuagc

SEQ ID NO: 2078015 - RNA, 19 nt, Artificial Sequence
  Description of Artificial Sequence: Synthetic oligonucleotide
uuuauucauaagaugaagc

SEQ ID NO: 2078016 - RNA, 19 nt, Artificial Sequence
  Description of Artificial Sequence: Synthetic oligonucleotide
aacuaugugaagcugacga

SEQ ID NO: 2078017 - RNA, 19 nt, Artificial Sequence
  Description of Artificial Sequence: Synthetic oligonucleotide
aaauacaucugaugguaac

SEQ ID NO: 2078018 - RNA, 19 nt, Artificial Sequence
  Description of Artificial Sequence: Synthetic oligonucleotide
agguacauucaacauaucc

SEQ ID NO: 2078019 - RNA, 19 nt, Artificial Sequence
  Description of Artificial Sequence: Synthetic oligonucleotide
cuuuacauaaauucggcag

SEQ ID NO: 2078020 - RNA, 19 nt, Artificial Sequence
  Description of Artificial Sequence: Synthetic oligonucleotide
aagaaaagucaacauaucu

SEQ ID NO: 2078021 - RNA, 19 nt, Artificial Sequence
  Description of Artificial Sequence: Synthetic oligonucleotide
ucuuuaaucucuuccgugg

SEQ ID NO: 2078022 - RNA, 19 nt, Artificial Sequence
  Description of Artificial Sequence: Synthetic oligonucleotide
caaauauaaauuuaagguc

SEQ ID NO: 2078023 - RNA, 19 nt, Artificial Sequence
  Description of Artificial Sequence: Synthetic oligonucleotide
uuauucauaagaugaagca

SEQ ID NO: 2078024 - RNA, 19 nt, Artificial Sequence
  Description of Artificial Sequence: Synthetic oligonucleotide
uugugugacaguauuacag

SEQ ID NO: 2078025 - RNA, 19 nt, Artificial Sequence
  Description of Artificial Sequence: Synthetic oligonucleotide
  modified_base (9)..(9): a, c, u, g, unknown or other
uuuacuagnuaaauccuca

SEQ ID NO: 2078026 - RNA, 19 nt, Artificial Sequence
  Description of Artificial Sequence: Synthetic oligonucleotide
aucgucuuuaaucucuucc

SEQ ID NO: 2078027 - RNA, 19 nt, Artificial Sequence
  Description of Artificial Sequence: Synthetic oligonucleotide
ucgagaaauacauugugag

SEQ ID NO: 2078028 - RNA, 19 nt, Artificial Sequence
  Description of Artificial Sequence: Synthetic oligonucleotide
auauaguccucauacauug

SEQ ID NO: 2078029 - RNA, 19 nt, Artificial Sequence
  Description of Artificial Sequence: Synthetic oligonucleotide
aaucuuucuuaaaugcugc

SEQ ID NO: 2078030 - RNA, 19 nt, Artificial Sequence
  Description of Artificial Sequence: Synthetic oligonucleotide
ggucaaauacaucugaugg

SEQ ID NO: 2078031 - RNA, 19 nt, Artificial Sequence
  Description of Artificial Sequence: Synthetic oligonucleotide
guucaaauuagguuugggg

SEQ ID NO: 2078032 - RNA, 19 nt, Artificial Sequence
  Description of Artificial Sequence: Synthetic oligonucleotide
aaauggugugggcaaauuc

SEQ ID NO: 2078033 - RNA, 19 nt, Artificial Sequence
  Description of Artificial Sequence: Synthetic oligonucleotide
ucagaaucgucuuuaaucu

SEQ ID NO: 2078034 - RNA, 19 nt, Artificial Sequence
  Description of Artificial Sequence: Synthetic oligonucleotide
cauguugguagauauauug

SEQ ID NO: 2078035 - RNA, 19 nt, Artificial Sequence
  Description of Artificial Sequence: Synthetic oligonucleotide
agaaauacauugugagggc

SEQ ID NO: 2078036 - RNA, 19 nt, Artificial Sequence
  Description of Artificial Sequence: Synthetic oligonucleotide
ugguuggucaaauacaucu

SEQ ID NO: 2078037 - RNA, 19 nt, Artificial Sequence
  Description of Artificial Sequence: Synthetic oligonucleotide
uuggaaguccaacaaaagc

SEQ ID NO: 2078038 - RNA, 19 nt, Artificial Sequence
  Description of Artificial Sequence: Synthetic oligonucleotide
ucuagcuaaauucuuuaca

SEQ ID NO: 2078039 - RNA, 19 nt, Artificial Sequence
  Description of Artificial Sequence: Synthetic oligonucleotide
uucuuuuaaggcuuuagcu

SEQ ID NO: 2078040 - RNA, 19 nt, Artificial Sequence
  Description of Artificial Sequence: Synthetic oligonucleotide
cugaagauuugcuaguucc

SEQ ID NO: 2078041 - RNA, 19 nt, Artificial Sequence
  Description of Artificial Sequence: Synthetic oligonucleotide
uuuuacugccuacagguug

SEQ ID NO: 2078042 - RNA, 19 nt, Artificial Sequence
  Description of Artificial Sequence: Synthetic oligonucleotide
uaucuggugaaucagaauu

SEQ ID NO: 2078043 - RNA, 19 nt, Artificial Sequence
  Description of Artificial Sequence: Synthetic oligonucleotide
uauuacagcaguguuuacg

SEQ ID NO: 2078044 - RNA, 19 nt, Artificial Sequence
  Description of Artificial Sequence: Synthetic oligonucleotide
uggcauauaguccucauac

SEQ ID NO: 2078045 - RNA, 19 nt, Artificial Sequence
  Description of Artificial Sequence: Synthetic oligonucleotide
uccaaaagaacauagccau

SEQ ID NO: 2078046 - RNA, 19 nt, Artificial Sequence
  Description of Artificial Sequence: Synthetic oligonucleotide
auuagcuucuuuuaaggcu

SEQ ID NO: 2078047 - RNA, 19 nt, Artificial Sequence
  Description of Artificial Sequence: Synthetic oligonucleotide
cauaaauucggcaguuugg

SEQ ID NO: 2078048 - RNA, 19 nt, Artificial Sequence
  Description of Artificial Sequence: Synthetic oligonucleotide
uuuaagguccuuuucuuga

SEQ ID NO: 2078049 - RNA, 19 nt, Artificial Sequence
  Description of Artificial Sequence: Synthetic oligonucleotide
uuuuccaaaagaacauagc

SEQ ID NO: 2078050 - RNA, 19 nt, Artificial Sequence
  Description of Artificial Sequence: Synthetic oligonucleotide
ucgucuuuaaucucuuccg

SEQ ID NO: 2078051 - RNA, 19 nt, Artificial Sequence
  Description of Artificial Sequence: Synthetic oligonucleotide
auucuuuacauaaauucgg

SEQ ID NO: 2078052 - RNA, 19 nt, Artificial Sequence
  Description of Artificial Sequence: Synthetic oligonucleotide
aaugcugcuggcauguugg

SEQ ID NO: 2078053 - RNA, 19 nt, Artificial Sequence
  Description of Artificial Sequence: Synthetic oligonucleotide
uccuguauuugaaucauca

SEQ ID NO: 2078054 - RNA, 19 nt, Artificial Sequence
  Description of Artificial Sequence: Synthetic oligonucleotide
caucaagcgaauaucaaac

SEQ ID NO: 2078055 - RNA, 19 nt, Artificial Sequence
  Description of Artificial Sequence: Synthetic oligonucleotide
uucuuuacauaaauucggc

SEQ ID NO: 2078056 - RNA, 19 nt, Artificial Sequence
  Description of Artificial Sequence: Synthetic oligonucleotide
uccaaaucuuucuuaaaug

SEQ ID NO: 2078057 - RNA, 19 nt, Artificial Sequence
  Description of Artificial Sequence: Synthetic oligonucleotide
aguuugguucaccagguuc

SEQ ID NO: 2078058 - RNA, 19 nt, Artificial Sequence
  Description of Artificial Sequence: Synthetic oligonucleotide
uuauccaacucccuucgag

SEQ ID NO: 2078059 - RNA, 19 nt, Artificial Sequence
  Description of Artificial Sequence: Synthetic oligonucleotide
ucaaacauuauccgcugug

SEQ ID NO: 2078060 - RNA, 19 nt, Artificial Sequence
  Description of Artificial Sequence: Synthetic oligonucleotide
augguaacagcacaggaug

SEQ ID NO: 2078061 - RNA, 19 nt, Artificial Sequence
  Description of Artificial Sequence: Synthetic oligonucleotide
ugugacaguauuacagcag

SEQ ID NO: 2078062 - RNA, 19 nt, Artificial Sequence
  Description of Artificial Sequence: Synthetic oligonucleotide
  modified_base (10)..(10): a, c, u, g, unknown or other
cuuuacuagnuaaauccuc

SEQ ID NO: 2078063 - RNA, 19 nt, Artificial Sequence
  Description of Artificial Sequence: Synthetic oligonucleotide
uggucuagcagaucgagca

SEQ ID NO: 2078064 - RNA, 19 nt, Artificial Sequence
  Description of Artificial Sequence: Synthetic oligonucleotide
auugugagggcauuucauc

SEQ ID NO: 2078065 - RNA, 19 nt, Artificial Sequence
  Description of Artificial Sequence: Synthetic oligonucleotide
ugaaucaucaaguccagua

SEQ ID NO: 2078066 - RNA, 19 nt, Artificial Sequence
  Description of Artificial Sequence: Synthetic oligonucleotide
aauucgacccuuauccaac

SEQ ID NO: 2078067 - RNA, 19 nt, Artificial Sequence
  Description of Artificial Sequence: Synthetic oligonucleotide
uuuucuugaacgugucuag

SEQ ID NO: 2078068 - RNA, 19 nt, Artificial Sequence
  Description of Artificial Sequence: Synthetic oligonucleotide
uuccucguuauucuguucc

SEQ ID NO: 2078069 - RNA, 19 nt, Artificial Sequence
  Description of Artificial Sequence: Synthetic oligonucleotide
  modified_base (11)..(11): a, c, u, g, unknown or other
ucuuuacuagnuaaauccu

SEQ ID NO: 2078070 - RNA, 19 nt, Artificial Sequence
  Description of Artificial Sequence: Synthetic oligonucleotide
ucaaauuagguuuggggaa

SEQ ID NO: 2078071 - RNA, 19 nt, Artificial Sequence
  Description of Artificial Sequence: Synthetic oligonucleotide
ugugugacaguauuacagc

SEQ ID NO: 2078072 - RNA, 19 nt, Artificial Sequence
  Description of Artificial Sequence: Synthetic oligonucleotide
uagcagaucgagcaaacug

SEQ ID NO: 2078073 - RNA, 19 nt, Artificial Sequence
  Description of Artificial Sequence: Synthetic oligonucleotide
uucgagaaauacauuguga

SEQ ID NO: 2078074 - RNA, 19 nt, Artificial Sequence
  Description of Artificial Sequence: Synthetic oligonucleotide
aauggugugggcaaauuca

SEQ ID NO: 2078075 - RNA, 19 nt, Artificial Sequence
  Description of Artificial Sequence: Synthetic oligonucleotide
cgaauaucaaacauuaucc

SEQ ID NO: 2078076 - RNA, 19 nt, Artificial Sequence
  Description of Artificial Sequence: Synthetic oligonucleotide
aauucggcaguuugguuca

SEQ ID NO: 2078077 - RNA, 19 nt, Artificial Sequence
  Description of Artificial Sequence: Synthetic oligonucleotide
uacagcaguguuuacguca

SEQ ID NO: 2078078 - RNA, 19 nt, Artificial Sequence
  Description of Artificial Sequence: Synthetic oligonucleotide
uguugguagauauauugaa

SEQ ID NO: 2078079 - RNA, 19 nt, Artificial Sequence
  Description of Artificial Sequence: Synthetic oligonucleotide
uuuuccuacuccuaucacu

SEQ ID NO: 2078080 - RNA, 19 nt, Artificial Sequence
  Description of Artificial Sequence: Synthetic oligonucleotide
aagcuuguccuuucauacg

SEQ ID NO: 2078081 - RNA, 19 nt, Artificial Sequence
  Description of Artificial Sequence: Synthetic oligonucleotide
uaagaugaagcaccuguac

SEQ ID NO: 2078082 - RNA, 19 nt, Artificial Sequence
  Description of Artificial Sequence: Synthetic oligonucleotide
ucuuuacauaaauucggca

SEQ ID NO: 2078083 - RNA, 19 nt, Artificial Sequence
  Description of Artificial Sequence: Synthetic oligonucleotide
aaaagcuuguccuuucaua

SEQ ID NO: 2078084 - RNA, 19 nt, Artificial Sequence
  Description of Artificial Sequence: Synthetic oligonucleotide
uuuacgucaggaauugcuc

SEQ ID NO: 2078085 - RNA, 19 nt, Artificial Sequence
  Description of Artificial Sequence: Synthetic oligonucleotide
uguguuucugaagaaaagu

SEQ ID NO: 2078086 - RNA, 19 nt, Artificial Sequence
  Description of Artificial Sequence: Synthetic oligonucleotide
ugugguuggucaaauacau

SEQ ID NO: 2078087 - RNA, 19 nt, Artificial Sequence
  Description of Artificial Sequence: Synthetic oligonucleotide
uuugaaucaucaaguccag

SEQ ID NO: 2078088 - RNA, 19 nt, Artificial Sequence
  Description of Artificial Sequence: Synthetic oligonucleotide
uuagcuucuuuuaaggcuu

SEQ ID NO: 2078089 - RNA, 19 nt, Artificial Sequence
  Description of Artificial Sequence: Synthetic oligonucleotide
auaaauuuaagguccuuuu

SEQ ID NO: 2078090 - RNA, 19 nt, Artificial Sequence
  Description of Artificial Sequence: Synthetic oligonucleotide
ucaagcgaauaucaaacau

SEQ ID NO: 2078091 - RNA, 19 nt, Artificial Sequence
  Description of Artificial Sequence: Synthetic oligonucleotide
acauuauccgcuguguuuc

SEQ ID NO: 2078092 - RNA, 19 nt, Artificial Sequence
  Description of Artificial Sequence: Synthetic oligonucleotide
aaauucgacccuuauccaa

SEQ ID NO: 2078093 - RNA, 19 nt, Artificial Sequence
  Description of Artificial Sequence: Synthetic oligonucleotide
gacgaagguacauucaaca

SEQ ID NO: 2078094 - RNA, 19 nt, Artificial Sequence
  Description of Artificial Sequence: Synthetic oligonucleotide
uuuacugccuacagguugu

SEQ ID NO: 2078095 - RNA, 19 nt, Artificial Sequence
  Description of Artificial Sequence: Synthetic oligonucleotide
uacucugauucuuuacuag

SEQ ID NO: 2078096 - RNA, 19 nt, Artificial Sequence
  Description of Artificial Sequence: Synthetic oligonucleotide
  modified_base (4)..(4): a, c, u, g, unknown or other
uagnuaaauccucauccuc

SEQ ID NO: 2078097 - RNA, 19 nt, Artificial Sequence
  Description of Artificial Sequence: Synthetic oligonucleotide
  modified_base (7)..(7): a, c, u, g, unknown or other
uacuagnuaaauccucauc

SEQ ID NO: 2078098 - RNA, 19 nt, Artificial Sequence
  Description of Artificial Sequence: Synthetic oligonucleotide
uuuagagucuuguuuuggu

SEQ ID NO: 2078099 - RNA, 19 nt, Artificial Sequence
  Description of Artificial Sequence: Synthetic oligonucleotide
agggagguuccucaggugg

SEQ ID NO: 2078100 - RNA, 19 nt, Artificial Sequence
  Description of Artificial Sequence: Synthetic oligonucleotide
aauauaaauuuaagguccu

SEQ ID NO: 2078101 - RNA, 19 nt, Artificial Sequence
  Description of Artificial Sequence: Synthetic oligonucleotide
aacauuauccgcuguguuu

SEQ ID NO: 2078102 - RNA, 19 nt, Artificial Sequence
  Description of Artificial Sequence: Synthetic oligonucleotide
cauuagcuucuuuuaaggc

SEQ ID NO: 2078103 - RNA, 19 nt, Artificial Sequence
  Description of Artificial Sequence: Synthetic oligonucleotide
uugugguuggucaaauaca

SEQ ID NO: 2078104 - RNA, 19 nt, Artificial Sequence
  Description of Artificial Sequence: Synthetic oligonucleotide
agcaccuguacauagaauu

SEQ ID NO: 2078105 - RNA, 19 nt, Artificial Sequence
  Description of Artificial Sequence: Synthetic oligonucleotide
ucuuuugggcugaagauuu

SEQ ID NO: 2078106 - RNA, 19 nt, Artificial Sequence
  Description of Artificial Sequence: Synthetic oligonucleotide
uuuaaucucuuccguggug

SEQ ID NO: 2078107 - RNA, 19 nt, Artificial Sequence
  Description of Artificial Sequence: Synthetic oligonucleotide
uccuacuccuaucacuucc

SEQ ID NO: 2078108 - RNA, 19 nt, Artificial Sequence
  Description of Artificial Sequence: Synthetic oligonucleotide
ugguucaccagguucauaa

SEQ ID NO: 2078109 - RNA, 19 nt, Artificial Sequence
  Description of Artificial Sequence: Synthetic oligonucleotide
aaaugcugcuggcauguug

SEQ ID NO: 2078110 - RNA, 19 nt, Artificial Sequence
  Description of Artificial Sequence: Synthetic oligonucleotide
uuuccuacuccuaucacuu

SEQ ID NO: 2078111 - RNA, 19 nt, Artificial Sequence
  Description of Artificial Sequence: Synthetic oligonucleotide
uccaguaucuggugaauca

SEQ ID NO: 2078112 - RNA, 19 nt, Artificial Sequence
  Description of Artificial Sequence: Synthetic oligonucleotide
ccaaaucuuucuuaaaugc

SEQ ID NO: 2078113 - RNA, 19 nt, Artificial Sequence
  Description of Artificial Sequence: Synthetic oligonucleotide
uccgugguguucaaauuag

SEQ ID NO: 2078114 - RNA, 19 nt, Artificial Sequence
  Description of Artificial Sequence: Synthetic oligonucleotide
ucuucucuagaaauucgac

SEQ ID NO: 2078115 - RNA, 19 nt, Artificial Sequence
  Description of Artificial Sequence: Synthetic oligonucleotide
ucguuauucuguuccaucu

SEQ ID NO: 2078116 - RNA, 19 nt, Artificial Sequence
  Description of Artificial Sequence: Synthetic oligonucleotide
guuuccauuucuucucuag

SEQ ID NO: 2078117 - RNA, 19 nt, Artificial Sequence
  Description of Artificial Sequence: Synthetic oligonucleotide
ucgacccuuauccaacucc

SEQ ID NO: 2078118 - RNA, 19 nt, Artificial Sequence
  Description of Artificial Sequence: Synthetic oligonucleotide
agcugacgaagguacauuc

SEQ ID NO: 2078119 - RNA, 19 nt, Artificial Sequence
  Description of Artificial Sequence: Synthetic oligonucleotide
ugugagggcauuucaucag

SEQ ID NO: 2078120 - RNA, 19 nt, Artificial Sequence
  Description of Artificial Sequence: Synthetic oligonucleotide
uuaaaugcugcuggcaugu

SEQ ID NO: 2078121 - RNA, 19 nt, Artificial Sequence
  Description of Artificial Sequence: Synthetic oligonucleotide
acuccuaucacuuccguuu

SEQ ID NO: 2078122 - RNA, 19 nt, Artificial Sequence
  Description of Artificial Sequence: Synthetic oligonucleotide
uugugagggcauuucauca

SEQ ID NO: 2078123 - RNA, 19 nt, Artificial Sequence
  Description of Artificial Sequence: Synthetic oligonucleotide
aacugaaaggguuuccauu

SEQ ID NO: 2078124 - RNA, 19 nt, Artificial Sequence
  Description of Artificial Sequence: Synthetic oligonucleotide
uccguuuuccuucuuuaga

SEQ ID NO: 2078125 - RNA, 19 nt, Artificial Sequence
  Description of Artificial Sequence: Synthetic oligonucleotide
aguaauagguccaaauggu

SEQ ID NO: 2078126 - RNA, 19 nt, Artificial Sequence
  Description of Artificial Sequence: Synthetic oligonucleotide
ucuuucuuaaaugcugcug

SEQ ID NO: 2078127 - RNA, 19 nt, Artificial Sequence
  Description of Artificial Sequence: Synthetic oligonucleotide
uguucaaauuagguuuggg

SEQ ID NO: 2078128 - RNA, 19 nt, Artificial Sequence
  Description of Artificial Sequence: Synthetic oligonucleotide
guagauauauugaauuuca

SEQ ID NO: 2078129 - RNA, 19 nt, Artificial Sequence
  Description of Artificial Sequence: Synthetic oligonucleotide
aguauuacagcaguguuua

SEQ ID NO: 2078130 - RNA, 19 nt, Artificial Sequence
  Description of Artificial Sequence: Synthetic oligonucleotide
cuucgagaaauacauugug

SEQ ID NO: 2078131 - RNA, 19 nt, Artificial Sequence
  Description of Artificial Sequence: Synthetic oligonucleotide
  modified_base (3)..(3): a, c, u, g, unknown or other
agnuaaauccucauccuca

SEQ ID NO: 2078132 - RNA, 19 nt, Artificial Sequence
  Description of Artificial Sequence: Synthetic oligonucleotide
aacucccuucgagaaauac

SEQ ID NO: 2078133 - RNA, 19 nt, Artificial Sequence
  Description of Artificial Sequence: Synthetic oligonucleotide
caggaugcaaacuauguga

SEQ ID NO: 2078134 - RNA, 19 nt, Artificial Sequence
  Description of Artificial Sequence: Synthetic oligonucleotide
uagaaauucgacccuuauc

SEQ ID NO: 2078135 - RNA, 19 nt, Artificial Sequence
  Description of Artificial Sequence: Synthetic oligonucleotide
uuaaucucuuccguggugu

SEQ ID NO: 2078136 - RNA, 19 nt, Artificial Sequence
  Description of Artificial Sequence: Synthetic oligonucleotide
auaaauucggcaguuuggu

SEQ ID NO: 2078137 - RNA, 19 nt, Artificial Sequence
  Description of Artificial Sequence: Synthetic oligonucleotide
uuggcguggcuuuugcagg

SEQ ID NO: 2078138 - RNA, 19 nt, Artificial Sequence
  Description of Artificial Sequence: Synthetic oligonucleotide
cagguuugggucuuuuggg

SEQ ID NO: 2078139 - RNA, 19 nt, Artificial Sequence
  Description of Artificial Sequence: Synthetic oligonucleotide
acugccuacagguuguggu

SEQ ID NO: 2078140 - RNA, 19 nt, Artificial Sequence
  Description of Artificial Sequence: Synthetic oligonucleotide
aagcgaauaucaaacauua

SEQ ID NO: 2078141 - RNA, 19 nt, Artificial Sequence
  Description of Artificial Sequence: Synthetic oligonucleotide
caaacuaugugaagcugac

SEQ ID NO: 2078142 - RNA, 19 nt, Artificial Sequence
  Description of Artificial Sequence: Synthetic oligonucleotide
  modified_base (17)..(17): a, c, u, g, unknown or other
ucugauucuuuacuagnua

SEQ ID NO: 2078143 - RNA, 19 nt, Artificial Sequence
  Description of Artificial Sequence: Synthetic oligonucleotide
auacaucugaugguaacag

SEQ ID NO: 2078144 - RNA, 19 nt, Artificial Sequence
  Description of Artificial Sequence: Synthetic oligonucleotide
aaacugaaaggguuuccau

SEQ ID NO: 2078145 - RNA, 19 nt, Artificial Sequence
  Description of Artificial Sequence: Synthetic oligonucleotide
  modified_base (19)..(19): a, c, u, g, unknown or other
acucugauucuuuacuagn

SEQ ID NO: 2078146 - RNA, 19 nt, Artificial Sequence
  Description of Artificial Sequence: Synthetic oligonucleotide
gcgaauaucaaacauuauc

SEQ ID NO: 2078147 - RNA, 19 nt, Artificial Sequence
  Description of Artificial Sequence: Synthetic oligonucleotide
ucuuccgugguguucaaau

SEQ ID NO: 2078148 - RNA, 19 nt, Artificial Sequence
  Description of Artificial Sequence: Synthetic oligonucleotide
guauuugaaucaucaaguc

SEQ ID NO: 2078149 - RNA, 19 nt, Artificial Sequence
  Description of Artificial Sequence: Synthetic oligonucleotide
gaucgagcaaacugaacca

SEQ ID NO: 2078150 - RNA, 19 nt, Artificial Sequence
  Description of Artificial Sequence: Synthetic oligonucleotide
agguucauaacuucugaaa

SEQ ID NO: 2078151 - RNA, 19 nt, Artificial Sequence
  Description of Artificial Sequence: Synthetic oligonucleotide
uucaccagguucauaacuu

SEQ ID NO: 2078152 - RNA, 19 nt, Artificial Sequence
  Description of Artificial Sequence: Synthetic oligonucleotide
aaacuaugugaagcugacg

SEQ ID NO: 2078153 - RNA, 19 nt, Artificial Sequence
  Description of Artificial Sequence: Synthetic oligonucleotide
ucgagcaaacugaaccacc

SEQ ID NO: 2078154 - RNA, 19 nt, Artificial Sequence
  Description of Artificial Sequence: Synthetic oligonucleotide
uuacgucaggaauugcucu

SEQ ID NO: 2078155 - RNA, 19 nt, Artificial Sequence
  Description of Artificial Sequence: Synthetic oligonucleotide
acaucugaugguaacagca

SEQ ID NO: 2078156 - RNA, 19 nt, Artificial Sequence
  Description of Artificial Sequence: Synthetic oligonucleotide
uucaucaagcgaauaucaa

SEQ ID NO: 2078157 - RNA, 19 nt, Artificial Sequence
  Description of Artificial Sequence: Synthetic oligonucleotide
uuugggcugaagauuugcu

SEQ ID NO: 2078158 - RNA, 19 nt, Artificial Sequence
  Description of Artificial Sequence: Synthetic oligonucleotide
aaacauuauccgcuguguu

SEQ ID NO: 2078159 - RNA, 19 nt, Artificial Sequence
  Description of Artificial Sequence: Synthetic oligonucleotide
ucuugaacgugucuagcua

SEQ ID NO: 2078160 - RNA, 19 nt, Artificial Sequence
  Description of Artificial Sequence: Synthetic oligonucleotide
ugucuagcuaaauucuuua

SEQ ID NO: 2078161 - RNA, 19 nt, Artificial Sequence
  Description of Artificial Sequence: Synthetic oligonucleotide
gcagguuugggucuuuugg

SEQ ID NO: 2078162 - RNA, 19 nt, Artificial Sequence
  Description of Artificial Sequence: Synthetic oligonucleotide
agaaaagucaacauaucuu

SEQ ID NO: 2078163 - RNA, 19 nt, Artificial Sequence
  Description of Artificial Sequence: Synthetic oligonucleotide
agaaucgucuuuaaucucu

SEQ ID NO: 2078164 - RNA, 19 nt, Artificial Sequence
  Description of Artificial Sequence: Synthetic oligonucleotide
ugaagcaccuguacauaga

SEQ ID NO: 2078165 - RNA, 19 nt, Artificial Sequence
  Description of Artificial Sequence: Synthetic oligonucleotide
aauccuguauuugaaucau

SEQ ID NO: 2078166 - RNA, 19 nt, Artificial Sequence
  Description of Artificial Sequence: Synthetic oligonucleotide
ucuagcagaucgagcaaac

SEQ ID NO: 2078167 - RNA, 19 nt, Artificial Sequence
  Description of Artificial Sequence: Synthetic oligonucleotide
aucaagcgaauaucaaaca

SEQ ID NO: 2078168 - RNA, 19 nt, Artificial Sequence
  Description of Artificial Sequence: Synthetic oligonucleotide
ugguaacagcacaggaugc

SEQ ID NO: 2078169 - RNA, 19 nt, Artificial Sequence
  Description of Artificial Sequence: Synthetic oligonucleotide
uuccguuuuccuucuuuag

SEQ ID NO: 2078170 - RNA, 19 nt, Artificial Sequence
  Description of Artificial Sequence: Synthetic oligonucleotide
uuuuggucuagcagaucga

SEQ ID NO: 2078171 - RNA, 19 nt, Artificial Sequence
  Description of Artificial Sequence: Synthetic oligonucleotide
uguucauucucugucgguc

SEQ ID NO: 2078172 - RNA, 19 nt, Artificial Sequence
  Description of Artificial Sequence: Synthetic oligonucleotide
ucucuagaaauucgacccu

SEQ ID NO: 2078173 - RNA, 19 nt, Artificial Sequence
  Description of Artificial Sequence: Synthetic oligonucleotide
gcaguaauagguccaaaug

SEQ ID NO: 2078174 - RNA, 19 nt, Artificial Sequence
  Description of Artificial Sequence: Synthetic oligonucleotide
ugugggcaaauucauuuua

SEQ ID NO: 2078175 - RNA, 19 nt, Artificial Sequence
  Description of Artificial Sequence: Synthetic oligonucleotide
uuuugggcugaagauuugc

SEQ ID NO: 2078176 - RNA, 19 nt, Artificial Sequence
  Description of Artificial Sequence: Synthetic oligonucleotide
aagauuugcuaguuccauu

SEQ ID NO: 2078177 - RNA, 19 nt, Artificial Sequence
  Description of Artificial Sequence: Synthetic oligonucleotide
caaauuagguuuggggaag

SEQ ID NO: 2078178 - RNA, 19 nt, Artificial Sequence
  Description of Artificial Sequence: Synthetic oligonucleotide
uuauccgcuguguuucuga

SEQ ID NO: 2078179 - RNA, 19 nt, Artificial Sequence
  Description of Artificial Sequence: Synthetic oligonucleotide
uuccgugguguucaaauua

SEQ ID NO: 2078180 - RNA, 19 nt, Artificial Sequence
  Description of Artificial Sequence: Synthetic oligonucleotide
ugacgaagguacauucaac

SEQ ID NO: 2078181 - RNA, 19 nt, Artificial Sequence
  Description of Artificial Sequence: Synthetic oligonucleotide
uuggucaaauacaucugau

SEQ ID NO: 2078182 - RNA, 19 nt, Artificial Sequence
  Description of Artificial Sequence: Synthetic oligonucleotide
caucacugcuuucauacuc

SEQ ID NO: 2078183 - RNA, 19 nt, Artificial Sequence
  Description of Artificial Sequence: Synthetic oligonucleotide
aguccaacaaaagcuuguc

SEQ ID NO: 2078184 - RNA, 19 nt, Artificial Sequence
  Description of Artificial Sequence: Synthetic oligonucleotide
gaaauucgacccuuaucca

SEQ ID NO: 2078185 - RNA, 19 nt, Artificial Sequence
  Description of Artificial Sequence: Synthetic oligonucleotide
guaagggagguuccucagg

SEQ ID NO: 2078186 - RNA, 19 nt, Artificial Sequence
  Description of Artificial Sequence: Synthetic oligonucleotide
caucugaugguaacagcac

SEQ ID NO: 2078187 - RNA, 19 nt, Artificial Sequence
  Description of Artificial Sequence: Synthetic oligonucleotide
ugaaaacugaaaggguuuc

SEQ ID NO: 2078188 - RNA, 19 nt, Artificial Sequence
  Description of Artificial Sequence: Synthetic oligonucleotide
cauggguuuuccaaaagaa

SEQ ID NO: 2078189 - RNA, 19 nt, Artificial Sequence
  Description of Artificial Sequence: Synthetic oligonucleotide
accaccauggguuuuccaa

SEQ ID NO: 2078190 - RNA, 19 nt, Artificial Sequence
  Description of Artificial Sequence: Synthetic oligonucleotide
guaauagguccaaauggug

SEQ ID NO: 2078191 - RNA, 19 nt, Artificial Sequence
  Description of Artificial Sequence: Synthetic oligonucleotide
uuggucuagcagaucgagc

SEQ ID NO: 2078192 - RNA, 19 nt, Artificial Sequence
  Description of Artificial Sequence: Synthetic oligonucleotide
uugcuaguuccauuaauuu

SEQ ID NO: 2078193 - RNA, 19 nt, Artificial Sequence
  Description of Artificial Sequence: Synthetic oligonucleotide
uuaagguccuuuucuugaa

SEQ ID NO: 2078194 - RNA, 19 nt, Artificial Sequence
  Description of Artificial Sequence: Synthetic oligonucleotide
gguucauaacuucugaaaa

SEQ ID NO: 2078195 - RNA, 19 nt, Artificial Sequence
  Description of Artificial Sequence: Synthetic oligonucleotide
  modified_base (8)..(8): a, c, u, g, unknown or other
uuacuagnuaaauccucau

SEQ ID NO: 2078196 - RNA, 19 nt, Artificial Sequence
  Description of Artificial Sequence: Synthetic oligonucleotide
auuuuauucauaagaugaa

SEQ ID NO: 2078197 - RNA, 19 nt, Artificial Sequence
  Description of Artificial Sequence: Synthetic oligonucleotide
gucgugcaguaauaggucc

SEQ ID NO: 2078198 - RNA, 19 nt, Artificial Sequence
  Description of Artificial Sequence: Synthetic oligonucleotide
ucgugcaguaauaggucca

SEQ ID NO: 2078199 - RNA, 19 nt, Artificial Sequence
  Description of Artificial Sequence: Synthetic oligonucleotide
agucuuguuuuggucuagc

SEQ ID NO: 2078200 - RNA, 19 nt, Artificial Sequence
  Description of Artificial Sequence: Synthetic oligonucleotide
ugcaaacuaugugaagcug

SEQ ID NO: 2078201 - RNA, 19 nt, Artificial Sequence
  Description of Artificial Sequence: Synthetic oligonucleotide
guuugggucuuuugggcug

SEQ ID NO: 2078202 - RNA, 19 nt, Artificial Sequence
  Description of Artificial Sequence: Synthetic oligonucleotide
uuguccuuucauacguccu

SEQ ID NO: 2078203 - RNA, 19 nt, Artificial Sequence
  Description of Artificial Sequence: Synthetic oligonucleotide
acaaaagcuuguccuuuca

SEQ ID NO: 2078204 - RNA, 19 nt, Artificial Sequence
  Description of Artificial Sequence: Synthetic oligonucleotide
auacucugauucuuuacua

SEQ ID NO: 2078205 - RNA, 19 nt, Artificial Sequence
  Description of Artificial Sequence: Synthetic oligonucleotide
cccuucgagaaauacauug

SEQ ID NO: 2078206 - RNA, 19 nt, Artificial Sequence
  Description of Artificial Sequence: Synthetic oligonucleotide
ucuagaaauucgacccuua

SEQ ID NO: 2078207 - RNA, 19 nt, Artificial Sequence
  Description of Artificial Sequence: Synthetic oligonucleotide
uucauacucugauucuuua

SEQ ID NO: 2078208 - RNA, 19 nt, Artificial Sequence
  Description of Artificial Sequence: Synthetic oligonucleotide
cucguuauucuguuccauc

SEQ ID NO: 2078209 - RNA, 19 nt, Artificial Sequence
  Description of Artificial Sequence: Synthetic oligonucleotide
uggugacguagguggaagg

SEQ ID NO: 2078210 - RNA, 19 nt, Artificial Sequence
  Description of Artificial Sequence: Synthetic oligonucleotide
acguagguggaaggggugc

SEQ ID NO: 2078211 - RNA, 19 nt, Artificial Sequence
  Description of Artificial Sequence: Synthetic oligonucleotide
acgaagguacauucaacau

SEQ ID NO: 2078212 - RNA, 19 nt, Artificial Sequence
  Description of Artificial Sequence: Synthetic oligonucleotide
acuaugugaagcugacgaa

SEQ ID NO: 2078213 - RNA, 19 nt, Artificial Sequence
  Description of Artificial Sequence: Synthetic oligonucleotide
caucugguaagggagguuc

SEQ ID NO: 2078214 - RNA, 19 nt, Artificial Sequence
  Description of Artificial Sequence: Synthetic oligonucleotide
aaauuagguuuggggaaga

SEQ ID NO: 2078215 - RNA, 19 nt, Artificial Sequence
  Description of Artificial Sequence: Synthetic oligonucleotide
uugaacgugucuagcuaaa

SEQ ID NO: 2078216 - RNA, 19 nt, Artificial Sequence
  Description of Artificial Sequence: Synthetic oligonucleotide
gaaucaucaaguccaguau

SEQ ID NO: 2078217 - RNA, 19 nt, Artificial Sequence
  Description of Artificial Sequence: Synthetic oligonucleotide
gugacguagguggaagggg

SEQ ID NO: 2078218 - RNA, 19 nt, Artificial Sequence
  Description of Artificial Sequence: Synthetic oligonucleotide
uucucugucgguccuccuc

SEQ ID NO: 2078219 - RNA, 19 nt, Artificial Sequence
  Description of Artificial Sequence: Synthetic oligonucleotide
aagggagguuccucaggug

SEQ ID NO: 2078220 - RNA, 19 nt, Artificial Sequence
  Description of Artificial Sequence: Synthetic oligonucleotide
ugugaagcugacgaaggua

SEQ ID NO: 2078221 - RNA, 19 nt, Artificial Sequence
  Description of Artificial Sequence: Synthetic oligonucleotide
uugggcugaagauuugcua

SEQ ID NO: 2078222 - RNA, 19 nt, Artificial Sequence
  Description of Artificial Sequence: Synthetic oligonucleotide
uagccauuagcuucuuuua

SEQ ID NO: 2078223 - RNA, 19 nt, Artificial Sequence
  Description of Artificial Sequence: Synthetic oligonucleotide
aucaaacauuauccgcugu

SEQ ID NO: 2078224 - RNA, 19 nt, Artificial Sequence
  Description of Artificial Sequence: Synthetic oligonucleotide
cauacucugauucuuuacu

SEQ ID NO: 2078225 - RNA, 19 nt, Artificial Sequence
  Description of Artificial Sequence: Synthetic oligonucleotide
gucaacauaucuuccaaau

SEQ ID NO: 2078226 - RNA, 19 nt, Artificial Sequence
  Description of Artificial Sequence: Synthetic oligonucleotide
acagcaguguuuacgucag

SEQ ID NO: 2078227 - RNA, 19 nt, Artificial Sequence
  Description of Artificial Sequence: Synthetic oligonucleotide
  modified_base (2)..(2): a, c, u, g, unknown or other
gnuaaauccucauccucau

SEQ ID NO: 2078228 - RNA, 19 nt, Artificial Sequence
  Description of Artificial Sequence: Synthetic oligonucleotide
cuugaacgugucuagcuaa

SEQ ID NO: 2078229 - RNA, 19 nt, Artificial Sequence
  Description of Artificial Sequence: Synthetic oligonucleotide
uccuuuucuugaacguguc

SEQ ID NO: 2078230 - RNA, 19 nt, Artificial Sequence
  Description of Artificial Sequence: Synthetic oligonucleotide
agccauuagcuucuuuuaa

SEQ ID NO: 2078231 - RNA, 19 nt, Artificial Sequence
  Description of Artificial Sequence: Synthetic oligonucleotide
augugaagcugacgaaggu

SEQ ID NO: 2078232 - RNA, 19 nt, Artificial Sequence
  Description of Artificial Sequence: Synthetic oligonucleotide
  modified_base (5)..(5): a, c, u, g, unknown or other
cuagnuaaauccucauccu

SEQ ID NO: 2078233 - RNA, 19 nt, Artificial Sequence
  Description of Artificial Sequence: Synthetic oligonucleotide
ucauaagaugaagcaccug

SEQ ID NO: 2078234 - RNA, 19 nt, Artificial Sequence
  Description of Artificial Sequence: Synthetic oligonucleotide
ucuggugaaucagaauuuu

SEQ ID NO: 2078235 - RNA, 19 nt, Artificial Sequence
  Description of Artificial Sequence: Synthetic oligonucleotide
gguacauucaacauauccu

SEQ ID NO: 2078236 - RNA, 19 nt, Artificial Sequence
  Description of Artificial Sequence: Synthetic oligonucleotide
uucauacguccuucuuuca

SEQ ID NO: 2078237 - RNA, 19 nt, Artificial Sequence
  Description of Artificial Sequence: Synthetic oligonucleotide
uaaauucggcaguuugguu

SEQ ID NO: 2078238 - RNA, 19 nt, Artificial Sequence
  Description of Artificial Sequence: Synthetic oligonucleotide
ggugacguagguggaaggg

SEQ ID NO: 2078239 - RNA, 19 nt, Artificial Sequence
  Description of Artificial Sequence: Synthetic oligonucleotide
gugacaguauuacagcagu

SEQ ID NO: 2078240 - RNA, 19 nt, Artificial Sequence
  Description of Artificial Sequence: Synthetic oligonucleotide
auucgacccuuauccaacu

SEQ ID NO: 2078241 - RNA, 19 nt, Artificial Sequence
  Description of Artificial Sequence: Synthetic oligonucleotide
ccuuauccaacucccuucg

SEQ ID NO: 2078242 - RNA, 19 nt, Artificial Sequence
  Description of Artificial Sequence: Synthetic oligonucleotide
guggcuguggugacguagg

SEQ ID NO: 2078243 - RNA, 19 nt, Artificial Sequence
  Description of Artificial Sequence: Synthetic oligonucleotide
aauuagguuuggggaagau

SEQ ID NO: 2078244 - RNA, 19 nt, Artificial Sequence
  Description of Artificial Sequence: Synthetic oligonucleotide
uccaacucccuucgagaaa

SEQ ID NO: 2078245 - RNA, 19 nt, Artificial Sequence
  Description of Artificial Sequence: Synthetic oligonucleotide
cugucgguccuccucauca

SEQ ID NO: 2078246 - RNA, 19 nt, Artificial Sequence
  Description of Artificial Sequence: Synthetic oligonucleotide
cagaaucgucuuuaaucuc

SEQ ID NO: 2078247 - RNA, 19 nt, Artificial Sequence
  Description of Artificial Sequence: Synthetic oligonucleotide
gguguucaaauuagguuug

SEQ ID NO: 2078248 - RNA, 19 nt, Artificial Sequence
  Description of Artificial Sequence: Synthetic oligonucleotide
cugacgaagguacauucaa

SEQ ID NO: 2078249 - RNA, 19 nt, Artificial Sequence
  Description of Artificial Sequence: Synthetic oligonucleotide
uacgucaggaauugcucuu

SEQ ID NO: 2078250 - RNA, 19 nt, Artificial Sequence
  Description of Artificial Sequence: Synthetic oligonucleotide
accagguucauaacuucug

SEQ ID NO: 2078251 - RNA, 19 nt, Artificial Sequence
  Description of Artificial Sequence: Synthetic oligonucleotide
guuuacgucaggaauugcu

SEQ ID NO: 2078252 - RNA, 19 nt, Artificial Sequence
  Description of Artificial Sequence: Synthetic oligonucleotide
ugccuacagguugugguug

SEQ ID NO: 2078253 - RNA, 19 nt, Artificial Sequence
  Description of Artificial Sequence: Synthetic oligonucleotide
acgugucuagcuaaauucu

SEQ ID NO: 2078254 - RNA, 19 nt, Artificial Sequence
  Description of Artificial Sequence: Synthetic oligonucleotide
gguaagggagguuccucag

SEQ ID NO: 2078255 - RNA, 19 nt, Artificial Sequence
  Description of Artificial Sequence: Synthetic oligonucleotide
ucucacuuggcguggcuuu

SEQ ID NO: 2078256 - RNA, 19 nt, Artificial Sequence
  Description of Artificial Sequence: Synthetic oligonucleotide
uaguuccauuaauuuguuc

SEQ ID NO: 2078257 - RNA, 19 nt, Artificial Sequence
  Description of Artificial Sequence: Synthetic oligonucleotide
guguucaaauuagguuugg

SEQ ID NO: 2078258 - RNA, 19 nt, Artificial Sequence
  Description of Artificial Sequence: Synthetic oligonucleotide
uuacagcaguguuuacguc

SEQ ID NO: 2078259 - RNA, 19 nt, Artificial Sequence
  Description of Artificial Sequence: Synthetic oligonucleotide
cucccuucgagaaauacau

SEQ ID NO: 2078260 - RNA, 19 nt, Artificial Sequence
  Description of Artificial Sequence: Synthetic oligonucleotide
acucccuucgagaaauaca

SEQ ID NO: 2078261 - RNA, 19 nt, Artificial Sequence
  Description of Artificial Sequence: Synthetic oligonucleotide
caaauacaucugaugguaa

SEQ ID NO: 2078262 - RNA, 19 nt, Artificial Sequence
  Description of Artificial Sequence: Synthetic oligonucleotide
uauccgcuguguuucugaa

SEQ ID NO: 2078263 - RNA, 19 nt, Artificial Sequence
  Description of Artificial Sequence: Synthetic oligonucleotide
cuuuugggcugaagauuug

SEQ ID NO: 2078264 - RNA, 19 nt, Artificial Sequence
  Description of Artificial Sequence: Synthetic oligonucleotide
ccuacuccuaucacuuccg

SEQ ID NO: 2078265 - RNA, 19 nt, Artificial Sequence
  Description of Artificial Sequence: Synthetic oligonucleotide
aggaugcaaacuaugugaa

SEQ ID NO: 2078266 - RNA, 19 nt, Artificial Sequence
  Description of Artificial Sequence: Synthetic oligonucleotide
ucacuuccguuuuccuucu

SEQ ID NO: 2078267 - RNA, 19 nt, Artificial Sequence
  Description of Artificial Sequence: Synthetic oligonucleotide
auccgcuguguuucugaag

SEQ ID NO: 2078268 - RNA, 19 nt, Artificial Sequence
  Description of Artificial Sequence: Synthetic oligonucleotide
ggggucgugcaguaauagg

SEQ ID NO: 2078269 - RNA, 19 nt, Artificial Sequence
  Description of Artificial Sequence: Synthetic oligonucleotide
cagaucgagcaaacugaac

SEQ ID NO: 2078270 - RNA, 19 nt, Artificial Sequence
  Description of Artificial Sequence: Synthetic oligonucleotide
uguuuacgucaggaauugc

SEQ ID NO: 2078271 - RNA, 19 nt, Artificial Sequence
  Description of Artificial Sequence: Synthetic oligonucleotide
guggugacguagguggaag

SEQ ID NO: 2078272 - RNA, 19 nt, Artificial Sequence
  Description of Artificial Sequence: Synthetic oligonucleotide
cugaaaggguuuccauuuc

SEQ ID NO: 2078273 - RNA, 19 nt, Artificial Sequence
  Description of Artificial Sequence: Synthetic oligonucleotide
acccuuauccaacucccuu

SEQ ID NO: 2078274 - RNA, 19 nt, Artificial Sequence
  Description of Artificial Sequence: Synthetic oligonucleotide
caguaucuggugaaucaga

SEQ ID NO: 2078275 - RNA, 19 nt, Artificial Sequence
  Description of Artificial Sequence: Synthetic oligonucleotide
cauccucaucugguaaggg

SEQ ID NO: 2078276 - RNA, 19 nt, Artificial Sequence
  Description of Artificial Sequence: Synthetic oligonucleotide
caagcgaauaucaaacauu

SEQ ID NO: 2078277 - RNA, 19 nt, Artificial Sequence
  Description of Artificial Sequence: Synthetic oligonucleotide
gugguguucaaauuagguu

SEQ ID NO: 2078278 - RNA, 19 nt, Artificial Sequence
  Description of Artificial Sequence: Synthetic oligonucleotide
gguggaaggggugcagugg

SEQ ID NO: 2078279 - RNA, 19 nt, Artificial Sequence
  Description of Artificial Sequence: Synthetic oligonucleotide
uacuccuaucacuuccguu

SEQ ID NO: 2078280 - RNA, 19 nt, Artificial Sequence
  Description of Artificial Sequence: Synthetic oligonucleotide
uugaaucaucaaguccagu

SEQ ID NO: 2078281 - RNA, 19 nt, Artificial Sequence
  Description of Artificial Sequence: Synthetic oligonucleotide
ugucgguccuccucaucac

SEQ ID NO: 2078282 - RNA, 19 nt, Artificial Sequence
  Description of Artificial Sequence: Synthetic oligonucleotide
guccaaauggugugggcaa

SEQ ID NO: 2078283 - RNA, 19 nt, Artificial Sequence
  Description of Artificial Sequence: Synthetic oligonucleotide
gaugaagcaccuguacaua

SEQ ID NO: 2078284 - RNA, 19 nt, Artificial Sequence
  Description of Artificial Sequence: Synthetic oligonucleotide
gcaaacuaugugaagcuga

SEQ ID NO: 2078285 - RNA, 19 nt, Artificial Sequence
  Description of Artificial Sequence: Synthetic oligonucleotide
cguccuucuuucaucaagc

SEQ ID NO: 2078286 - RNA, 19 nt, Artificial Sequence
  Description of Artificial Sequence: Synthetic oligonucleotide
acugaaccaccauggguuu

SEQ ID NO: 2078287 - RNA, 19 nt, Artificial Sequence
  Description of Artificial Sequence: Synthetic oligonucleotide
uucgacccuuauccaacuc

SEQ ID NO: 2078288 - RNA, 19 nt, Artificial Sequence
  Description of Artificial Sequence: Synthetic oligonucleotide
aagcugacgaagguacauu

SEQ ID NO: 2078289 - RNA, 19 nt, Artificial Sequence
  Description of Artificial Sequence: Synthetic oligonucleotide
ccuaucacuuccguuuucc

SEQ ID NO: 2078290 - RNA, 19 nt, Artificial Sequence
  Description of Artificial Sequence: Synthetic oligonucleotide
gguuggucaaauacaucug

SEQ ID NO: 2078291 - RNA, 19 nt, Artificial Sequence
  Description of Artificial Sequence: Synthetic oligonucleotide
uguggugacguagguggaa

SEQ ID NO: 2078292 - RNA, 19 nt, Artificial Sequence
  Description of Artificial Sequence: Synthetic oligonucleotide
ugaacgugucuagcuaaau

SEQ ID NO: 2078293 - RNA, 19 nt, Artificial Sequence
  Description of Artificial Sequence: Synthetic oligonucleotide
cuuccguuuuccuucuuua

SEQ ID NO: 2078294 - RNA, 19 nt, Artificial Sequence
  Description of Artificial Sequence: Synthetic oligonucleotide
gaacgugucuagcuaaauu

SEQ ID NO: 2078295 - RNA, 19 nt, Artificial Sequence
  Description of Artificial Sequence: Synthetic oligonucleotide
auuauccgcuguguuucug

SEQ ID NO: 2078296 - RNA, 19 nt, Artificial Sequence
  Description of Artificial Sequence: Synthetic oligonucleotide
auccuguauuugaaucauc

SEQ ID NO: 2078297 - RNA, 19 nt, Artificial Sequence
  Description of Artificial Sequence: Synthetic oligonucleotide
ccucaucugguaagggagg

SEQ ID NO: 2078298 - RNA, 19 nt, Artificial Sequence
  Description of Artificial Sequence: Synthetic oligonucleotide
uccuaucacuuccguuuuc

SEQ ID NO: 2078299 - RNA, 19 nt, Artificial Sequence
  Description of Artificial Sequence: Synthetic oligonucleotide
uggcauguugguagauaua

SEQ ID NO: 2078300 - RNA, 19 nt, Artificial Sequence
  Description of Artificial Sequence: Synthetic oligonucleotide
gacguagguggaaggggug

SEQ ID NO: 2078301 - RNA, 19 nt, Artificial Sequence
  Description of Artificial Sequence: Synthetic oligonucleotide
cacuuggcguggcuuuugc

SEQ ID NO: 2078302 - RNA, 19 nt, Artificial Sequence
  Description of Artificial Sequence: Synthetic oligonucleotide
cagguucauaacuucugaa

SEQ ID NO: 2078303 - RNA, 19 nt, Artificial Sequence
  Description of Artificial Sequence: Synthetic oligonucleotide
guugguagauauauugaau

SEQ ID NO: 2078304 - RNA, 19 nt, Artificial Sequence
  Description of Artificial Sequence: Synthetic oligonucleotide
cagcacaggaugcaaacua

SEQ ID NO: 2078305 - RNA, 19 nt, Artificial Sequence
  Description of Artificial Sequence: Synthetic oligonucleotide
cuuucauacguccuucuuu

SEQ ID NO: 2078306 - RNA, 19 nt, Artificial Sequence
  Description of Artificial Sequence: Synthetic oligonucleotide
  modified_base (18)..(18): a, c, u, g, unknown or other
cucugauucuuuacuagnu

SEQ ID NO: 2078307 - RNA, 19 nt, Artificial Sequence
  Description of Artificial Sequence: Synthetic oligonucleotide
uuugguucaccagguucau

SEQ ID NO: 2078308 - RNA, 19 nt, Artificial Sequence
  Description of Artificial Sequence: Synthetic oligonucleotide
ggcauauaguccucauaca

SEQ ID NO: 2078309 - RNA, 19 nt, Artificial Sequence
  Description of Artificial Sequence: Synthetic oligonucleotide
aucuggugaaucagaauuu

SEQ ID NO: 2078310 - RNA, 19 nt, Artificial Sequence
  Description of Artificial Sequence: Synthetic oligonucleotide
agcacaggaugcaaacuau

SEQ ID NO: 2078311 - RNA, 19 nt, Artificial Sequence
  Description of Artificial Sequence: Synthetic oligonucleotide
uucggcaguuugguucacc

SEQ ID NO: 2078312 - RNA, 19 nt, Artificial Sequence
  Description of Artificial Sequence: Synthetic oligonucleotide
ucugucgguccuccucauc

SEQ ID NO: 2078313 - RNA, 19 nt, Artificial Sequence
  Description of Artificial Sequence: Synthetic oligonucleotide
caguguuuacgucaggaau

SEQ ID NO: 2078314 - RNA, 19 nt, Artificial Sequence
  Description of Artificial Sequence: Synthetic oligonucleotide
gccuacagguugugguugg

SEQ ID NO: 2078315 - RNA, 19 nt, Artificial Sequence
  Description of Artificial Sequence: Synthetic oligonucleotide
gcuguguuucugaagaaaa

SEQ ID NO: 2078316 - RNA, 19 nt, Artificial Sequence
  Description of Artificial Sequence: Synthetic oligonucleotide
uucucacuuggcguggcuu

SEQ ID NO: 2078317 - RNA, 19 nt, Artificial Sequence
  Description of Artificial Sequence: Synthetic oligonucleotide
aagcaccuguacauagaau

SEQ ID NO: 2078318 - RNA, 19 nt, Artificial Sequence
  Description of Artificial Sequence: Synthetic oligonucleotide
cccuuauccaacucccuuc

SEQ ID NO: 2078319 - RNA, 19 nt, Artificial Sequence
  Description of Artificial Sequence: Synthetic oligonucleotide
cgacccuuauccaacuccc

SEQ ID NO: 2078320 - RNA, 19 nt, Artificial Sequence
  Description of Artificial Sequence: Synthetic oligonucleotide
caaacauuauccgcugugu

SEQ ID NO: 2078321 - RNA, 19 nt, Artificial Sequence
  Description of Artificial Sequence: Synthetic oligonucleotide
ccaguaucuggugaaucag

SEQ ID NO: 2078322 - RNA, 19 nt, Artificial Sequence
  Description of Artificial Sequence: Synthetic oligonucleotide
cucagguggcuguggugac

SEQ ID NO: 2078323 - RNA, 19 nt, Artificial Sequence
  Description of Artificial Sequence: Synthetic oligonucleotide
ggggugcaguggcauauag

SEQ ID NO: 2078324 - RNA, 19 nt, Artificial Sequence
  Description of Artificial Sequence: Synthetic oligonucleotide
ucccuucgagaaauacauu

SEQ ID NO: 2078325 - RNA, 19 nt, Artificial Sequence
  Description of Artificial Sequence: Synthetic oligonucleotide
uuacugccuacagguugug

SEQ ID NO: 2078326 - RNA, 19 nt, Artificial Sequence
  Description of Artificial Sequence: Synthetic oligonucleotide
gguucaccagguucauaac

SEQ ID NO: 2078327 - RNA, 19 nt, Artificial Sequence
  Description of Artificial Sequence: Synthetic oligonucleotide
cacugcuuucauacucuga

SEQ ID NO: 2078328 - RNA, 19 nt, Artificial Sequence
  Description of Artificial Sequence: Synthetic oligonucleotide
ggcauguugguagauauau

SEQ ID NO: 2078329 - RNA, 19 nt, Artificial Sequence
  Description of Artificial Sequence: Synthetic oligonucleotide
guggcauauaguccucaua

SEQ ID NO: 2078330 - RNA, 19 nt, Artificial Sequence
  Description of Artificial Sequence: Synthetic oligonucleotide
caccauggguuuuccaaaa

SEQ ID NO: 2078331 - RNA, 19 nt, Artificial Sequence
  Description of Artificial Sequence: Synthetic oligonucleotide
guccaguaucuggugaauc

SEQ ID NO: 2078332 - RNA, 19 nt, Artificial Sequence
  Description of Artificial Sequence: Synthetic oligonucleotide
cacuugugugacaguauua

SEQ ID NO: 2078333 - RNA, 19 nt, Artificial Sequence
  Description of Artificial Sequence: Synthetic oligonucleotide
ggucgugcaguaauagguc

SEQ ID NO: 2078334 - RNA, 19 nt, Artificial Sequence
  Description of Artificial Sequence: Synthetic oligonucleotide
aguccaguaucuggugaau

SEQ ID NO: 2078335 - RNA, 19 nt, Artificial Sequence
  Description of Artificial Sequence: Synthetic oligonucleotide
ccgugguguucaaauuagg

SEQ ID NO: 2078336 - RNA, 19 nt, Artificial Sequence
  Description of Artificial Sequence: Synthetic oligonucleotide
guaucuggugaaucagaau

SEQ ID NO: 2078337 - RNA, 19 nt, Artificial Sequence
  Description of Artificial Sequence: Synthetic oligonucleotide
ucaucugguaagggagguu

SEQ ID NO: 2078338 - RNA, 19 nt, Artificial Sequence
  Description of Artificial Sequence: Synthetic oligonucleotide
gcacaggaugcaaacuaug

SEQ ID NO: 2078339 - RNA, 19 nt, Artificial Sequence
  Description of Artificial Sequence: Synthetic oligonucleotide
gggucgugcaguaauaggu

SEQ ID NO: 2078340 - RNA, 19 nt, Artificial Sequence
  Description of Artificial Sequence: Synthetic oligonucleotide
gugguuggucaaauacauc

SEQ ID NO: 2078341 - RNA, 19 nt, Artificial Sequence
  Description of Artificial Sequence: Synthetic oligonucleotide
agguugugguuggucaaau

SEQ ID NO: 2078342 - RNA, 19 nt, Artificial Sequence
  Description of Artificial Sequence: Synthetic oligonucleotide
cuguuccaucuccaaaucu

SEQ ID NO: 2078343 - RNA, 19 nt, Artificial Sequence
  Description of Artificial Sequence: Synthetic oligonucleotide
auucggcaguuugguucac

SEQ ID NO: 2078344 - RNA, 19 nt, Artificial Sequence
  Description of Artificial Sequence: Synthetic oligonucleotide
ccagguucauaacuucuga

SEQ ID NO: 2078345 - RNA, 19 nt, Artificial Sequence
  Description of Artificial Sequence: Synthetic oligonucleotide
cuaucacuuccguuuuccu

SEQ ID NO: 2078346 - RNA, 19 nt, Artificial Sequence
  Description of Artificial Sequence: Synthetic oligonucleotide
gucuuuugggcugaagauu

SEQ ID NO: 2078347 - RNA, 19 nt, Artificial Sequence
  Description of Artificial Sequence: Synthetic oligonucleotide
acgucaggaauugcucuuu

SEQ ID NO: 2078348 - RNA, 19 nt, Artificial Sequence
  Description of Artificial Sequence: Synthetic oligonucleotide
cgagcaaacugaaccacca

SEQ ID NO: 2078349 - RNA, 19 nt, Artificial Sequence
  Description of Artificial Sequence: Synthetic oligonucleotide
ucucuuccgugguguucaa

SEQ ID NO: 2078350 - RNA, 19 nt, Artificial Sequence
  Description of Artificial Sequence: Synthetic oligonucleotide
cguuauucuguuccaucuc

SEQ ID NO: 2078351 - RNA, 19 nt, Artificial Sequence
  Description of Artificial Sequence: Synthetic oligonucleotide
gcugacgaagguacauuca

SEQ ID NO: 2078352 - RNA, 19 nt, Artificial Sequence
  Description of Artificial Sequence: Synthetic oligonucleotide
gaaucgucuuuaaucucuu

SEQ ID NO: 2078353 - RNA, 19 nt, Artificial Sequence
  Description of Artificial Sequence: Synthetic oligonucleotide
caucagaaucgucuuuaau

SEQ ID NO: 2078354 - RNA, 19 nt, Artificial Sequence
  Description of Artificial Sequence: Synthetic oligonucleotide
cgaagguacauucaacaua

SEQ ID NO: 2078355 - RNA, 19 nt, Artificial Sequence
  Description of Artificial Sequence: Synthetic oligonucleotide
gugucuagcuaaauucuuu

SEQ ID NO: 2078356 - RNA, 19 nt, Artificial Sequence
  Description of Artificial Sequence: Synthetic oligonucleotide
ccuucgagaaauacauugu

SEQ ID NO: 2078357 - RNA, 19 nt, Artificial Sequence
  Description of Artificial Sequence: Synthetic oligonucleotide
gugugggcaaauucauuuu

SEQ ID NO: 2078358 - RNA, 19 nt, Artificial Sequence
  Description of Artificial Sequence: Synthetic oligonucleotide
uaaaugcugcuggcauguu

SEQ ID NO: 2078359 - RNA, 19 nt, Artificial Sequence
  Description of Artificial Sequence: Synthetic oligonucleotide
uuugcagguuugggucuuu

SEQ ID NO: 2078360 - RNA, 19 nt, Artificial Sequence
  Description of Artificial Sequence: Synthetic oligonucleotide
cguggcuuuugcagguuug

SEQ ID NO: 2078361 - RNA, 19 nt, Artificial Sequence
  Description of Artificial Sequence: Synthetic oligonucleotide
uugcagguuugggucuuuu

SEQ ID NO: 2078362 - RNA, 19 nt, Artificial Sequence
  Description of Artificial Sequence: Synthetic oligonucleotide
cauuauccgcuguguuucu

SEQ ID NO: 2078363 - RNA, 19 nt, Artificial Sequence
  Description of Artificial Sequence: Synthetic oligonucleotide
cuagcagaucgagcaaacu

SEQ ID NO: 2078364 - RNA, 19 nt, Artificial Sequence
  Description of Artificial Sequence: Synthetic oligonucleotide
gucgguccuccucaucacu

SEQ ID NO: 2078365 - RNA, 19 nt, Artificial Sequence
  Description of Artificial Sequence: Synthetic oligonucleotide
cagguugugguuggucaaa

SEQ ID NO: 2078366 - RNA, 19 nt, Artificial Sequence
  Description of Artificial Sequence: Synthetic oligonucleotide
cuuccgugguguucaaauu

SEQ ID NO: 2078367 - RNA, 19 nt, Artificial Sequence
  Description of Artificial Sequence: Synthetic oligonucleotide
ccaccauggguuuuccaaa

SEQ ID NO: 2078368 - RNA, 19 nt, Artificial Sequence
  Description of Artificial Sequence: Synthetic oligonucleotide
cuacuccuaucacuuccgu

SEQ ID NO: 2078369 - RNA, 19 nt, Artificial Sequence
  Description of Artificial Sequence: Synthetic oligonucleotide
cucuagaaauucgacccuu

SEQ ID NO: 2078370 - RNA, 19 nt, Artificial Sequence
  Description of Artificial Sequence: Synthetic oligonucleotide
cugccuacagguugugguu

SEQ ID NO: 2078371 - RNA, 19 nt, Artificial Sequence
  Description of Artificial Sequence: Synthetic oligonucleotide
gacccuuauccaacucccu

SEQ ID NO: 2078372 - RNA, 19 nt, Artificial Sequence
  Description of Artificial Sequence: Synthetic oligonucleotide
ccaacaaaagcuuguccuu

SEQ ID NO: 2078373 - RNA, 19 nt, Artificial Sequence
  Description of Artificial Sequence: Synthetic oligonucleotide
uugggucuuuugggcugaa

SEQ ID NO: 2078374 - RNA, 19 nt, Artificial Sequence
  Description of Artificial Sequence: Synthetic oligonucleotide
caaauggugugggcaaauu

SEQ ID NO: 2078375 - RNA, 19 nt, Artificial Sequence
  Description of Artificial Sequence: Synthetic oligonucleotide
aggggugcaguggcauaua

SEQ ID NO: 2078376 - RNA, 19 nt, Artificial Sequence
  Description of Artificial Sequence: Synthetic oligonucleotide
caacucccuucgagaaaua

SEQ ID NO: 2078377 - RNA, 19 nt, Artificial Sequence
  Description of Artificial Sequence: Synthetic oligonucleotide
gcaccuguacauagaauuu

SEQ ID NO: 2078378 - RNA, 19 nt, Artificial Sequence
  Description of Artificial Sequence: Synthetic oligonucleotide
ggaaggggugcaguggcau

SEQ ID NO: 2078379 - RNA, 19 nt, Artificial Sequence
  Description of Artificial Sequence: Synthetic oligonucleotide
caguuugguucaccagguu

SEQ ID NO: 2078380 - RNA, 19 nt, Artificial Sequence
  Description of Artificial Sequence: Synthetic oligonucleotide
cgcuguguuucugaagaaa

SEQ ID NO: 2078381 - RNA, 19 nt, Artificial Sequence
  Description of Artificial Sequence: Synthetic oligonucleotide
ccuuucauacguccuucuu

SEQ ID NO: 2078382 - RNA, 19 nt, Artificial Sequence
  Description of Artificial Sequence: Synthetic oligonucleotide
cgugucuagcuaaauucuu

SEQ ID NO: 2078383 - RNA, 19 nt, Artificial Sequence
  Description of Artificial Sequence: Synthetic oligonucleotide
cugaaccaccauggguuuu

SEQ ID NO: 2078384 - RNA, 19 nt, Artificial Sequence
  Description of Artificial Sequence: Synthetic oligonucleotide
cgucaggaauugcucuuuu

SEQ ID NO: 2078385 - RNA, 19 nt, Artificial Sequence
  Description of Artificial Sequence: Synthetic oligonucleotide
ggcguggcuuuugcagguu

SEQ ID NO: 2078386 - RNA, 19 nt, Artificial Sequence
  Description of Artificial Sequence: Synthetic oligonucleotide
  modified_base (1)..(1): a, c, u, g, unknown or other
nuaaauccucauccucauc

SEQ ID NO: 2078387 - RNA, 19 nt, Artificial Sequence
  Description of Artificial Sequence: Synthetic oligonucleotide
aaagcaauuccggagaagc

SEQ ID NO: 2078388 - RNA, 19 nt, Artificial Sequence
  Description of Artificial Sequence: Synthetic oligonucleotide
acauuauugaccaaagucc

SEQ ID NO: 2078389 - RNA, 19 nt, Artificial Sequence
  Description of Artificial Sequence: Synthetic oligonucleotide
ugaaguagaauuccgagga

SEQ ID NO: 2078390 - RNA, 19 nt, Artificial Sequence
  Description of Artificial Sequence: Synthetic oligonucleotide
aacacagauuuccaagagc

SEQ ID NO: 2078391 - RNA, 19 nt, Artificial Sequence
  Description of Artificial Sequence: Synthetic oligonucleotide
gacauuauugaccaaaguc

SEQ ID NO: 2078392 - RNA, 19 nt, Artificial Sequence
  Description of Artificial Sequence: Synthetic oligonucleotide
aaguagaauuccgaggagc

SEQ ID NO: 2078393 - RNA, 19 nt, Artificial Sequence
  Description of Artificial Sequence: Synthetic oligonucleotide
aauuccgaggagcugguuc

SEQ ID NO: 2078394 - RNA, 19 nt, Artificial Sequence
  Description of Artificial Sequence: Synthetic oligonucleotide
uggaacaugaaguagaauu

SEQ ID NO: 2078395 - RNA, 19 nt, Artificial Sequence
  Description of Artificial Sequence: Synthetic oligonucleotide
uguuggaacaugaaguaga

SEQ ID NO: 2078396 - RNA, 19 nt, Artificial Sequence
  Description of Artificial Sequence: Synthetic oligonucleotide
aaccgcuguagcuagcggc

SEQ ID NO: 2078397 - RNA, 19 nt, Artificial Sequence
  Description of Artificial Sequence: Synthetic oligonucleotide
uugagaaacacagauuucc

SEQ ID NO: 2078398 - RNA, 19 nt, Artificial Sequence
  Description of Artificial Sequence: Synthetic oligonucleotide
acagauuuccaagagcgcc

SEQ ID NO: 2078399 - RNA, 19 nt, Artificial Sequence
  Description of Artificial Sequence: Synthetic oligonucleotide
cauuauugaccaaaguccc

SEQ ID NO: 2078400 - RNA, 19 nt, Artificial Sequence
  Description of Artificial Sequence: Synthetic oligonucleotide
uuaaggaucaguguggccu

SEQ ID NO: 2078401 - RNA, 19 nt, Artificial Sequence
  Description of Artificial Sequence: Synthetic oligonucleotide
aagguguagagaucaccgc

SEQ ID NO: 2078402 - RNA, 19 nt, Artificial Sequence
  Description of Artificial Sequence: Synthetic oligonucleotide
augaaguagaauuccgagg

SEQ ID NO: 2078403 - RNA, 19 nt, Artificial Sequence
  Description of Artificial Sequence: Synthetic oligonucleotide
agguguagagaucaccgcc

SEQ ID NO: 2078404 - RNA, 19 nt, Artificial Sequence
  Description of Artificial Sequence: Synthetic oligonucleotide
acacagauuuccaagagcg

SEQ ID NO: 2078405 - RNA, 19 nt, Artificial Sequence
  Description of Artificial Sequence: Synthetic oligonucleotide
auuccgaggagcugguucc

SEQ ID NO: 2078406 - RNA, 19 nt, Artificial Sequence
  Description of Artificial Sequence: Synthetic oligonucleotide
uuugacccggacuuguugg

SEQ ID NO: 2078407 - RNA, 19 nt, Artificial Sequence
  Description of Artificial Sequence: Synthetic oligonucleotide
uagaauuccgaggagcugg

SEQ ID NO: 2078408 - RNA, 19 nt, Artificial Sequence
  Description of Artificial Sequence: Synthetic oligonucleotide
uucgcgaugcaaaaccagg

SEQ ID NO: 2078409 - RNA, 19 nt, Artificial Sequence
  Description of Artificial Sequence: Synthetic oligonucleotide
caugaaguagaauuccgag

SEQ ID NO: 2078410 - RNA, 19 nt, Artificial Sequence
  Description of Artificial Sequence: Synthetic oligonucleotide
aacaugaaguagaauuccg

SEQ ID NO: 2078411 - RNA, 19 nt, Artificial Sequence
  Description of Artificial Sequence: Synthetic oligonucleotide
gaaggugaggggcugaggc

SEQ ID NO: 2078412 - RNA, 19 nt, Artificial Sequence
  Description of Artificial Sequence: Synthetic oligonucleotide
uuccaagagcgccagaggc

SEQ ID NO: 2078413 - RNA, 19 nt, Artificial Sequence
  Description of Artificial Sequence: Synthetic oligonucleotide
gaucgagggacggugaugg

SEQ ID NO: 2078414 - RNA, 19 nt, Artificial Sequence
  Description of Artificial Sequence: Synthetic oligonucleotide
ugagguuugacccggacuu

SEQ ID NO: 2078415 - RNA, 19 nt, Artificial Sequence
  Description of Artificial Sequence: Synthetic oligonucleotide
acuuguuggaacaugaagu

SEQ ID NO: 2078416 - RNA, 19 nt, Artificial Sequence
  Description of Artificial Sequence: Synthetic oligonucleotide
ugugggaccuccgugaugc

SEQ ID NO: 2078417 - RNA, 19 nt, Artificial Sequence
  Description of Artificial Sequence: Synthetic oligonucleotide
ucguggguggagcaggugg

SEQ ID NO: 2078418 - RNA, 19 nt, Artificial Sequence
  Description of Artificial Sequence: Synthetic oligonucleotide
agucggacauuauugacca

SEQ ID NO: 2078419 - RNA, 19 nt, Artificial Sequence
  Description of Artificial Sequence: Synthetic oligonucleotide
agcaguucaucaccucucc

SEQ ID NO: 2078420 - RNA, 19 nt, Artificial Sequence
  Description of Artificial Sequence: Synthetic oligonucleotide
gaguuaaggaucagugugg

SEQ ID NO: 2078421 - RNA, 19 nt, Artificial Sequence
  Description of Artificial Sequence: Synthetic oligonucleotide
gaacaugaaguagaauucc

SEQ ID NO: 2078422 - RNA, 19 nt, Artificial Sequence
  Description of Artificial Sequence: Synthetic oligonucleotide
cucaacucuagccuguggc

SEQ ID NO: 2078423 - RNA, 19 nt, Artificial Sequence
  Description of Artificial Sequence: Synthetic oligonucleotide
agucucguucucaucaucc

SEQ ID NO: 2078424 - RNA, 19 nt, Artificial Sequence
  Description of Artificial Sequence: Synthetic oligonucleotide
ucagcaguucaucaccucu

SEQ ID NO: 2078425 - RNA, 19 nt, Artificial Sequence
  Description of Artificial Sequence: Synthetic oligonucleotide
gauaggugcagccugaccu

SEQ ID NO: 2078426 - RNA, 19 nt, Artificial Sequence
  Description of Artificial Sequence: Synthetic oligonucleotide
uguggguaaugccaacuug

SEQ ID NO: 2078427 - RNA, 19 nt, Artificial Sequence
  Description of Artificial Sequence: Synthetic oligonucleotide
ugaccaaagucccuugacu

SEQ ID NO: 2078428 - RNA, 19 nt, Artificial Sequence
  Description of Artificial Sequence: Synthetic oligonucleotide
ucaacucuagccuguggcc

SEQ ID NO: 2078429 - RNA, 19 nt, Artificial Sequence
  Description of Artificial Sequence: Synthetic oligonucleotide
caaugcauggaccccagag

SEQ ID NO: 2078430 - RNA, 19 nt, Artificial Sequence
  Description of Artificial Sequence: Synthetic oligonucleotide
uuucgcgaugcaaaaccag

SEQ ID NO: 2078431 - RNA, 19 nt, Artificial Sequence
  Description of Artificial Sequence: Synthetic oligonucleotide
aacucuagccuguggccuc

SEQ ID NO: 2078432 - RNA, 19 nt, Artificial Sequence
  Description of Artificial Sequence: Synthetic oligonucleotide
aaccgauaggugcagccug

SEQ ID NO: 2078433 - RNA, 19 nt, Artificial Sequence
  Description of Artificial Sequence: Synthetic oligonucleotide
acaucacacaggucagccc

SEQ ID NO: 2078434 - RNA, 19 nt, Artificial Sequence
  Description of Artificial Sequence: Synthetic oligonucleotide
uggguaaugccaacuugag

SEQ ID NO: 2078435 - RNA, 19 nt, Artificial Sequence
  Description of Artificial Sequence: Synthetic oligonucleotide
uccgguuucucgugggugg

SEQ ID NO: 2078436 - RNA, 19 nt, Artificial Sequence
  Description of Artificial Sequence: Synthetic oligonucleotide
ugaacugauuuccuccggu

SEQ ID NO: 2078437 - RNA, 19 nt, Artificial Sequence
  Description of Artificial Sequence: Synthetic oligonucleotide
aagucucguucucaucauc

SEQ ID NO: 2078438 - RNA, 19 nt, Artificial Sequence
  Description of Artificial Sequence: Synthetic oligonucleotide
caggaagacguccuguggg

SEQ ID NO: 2078439 - RNA, 19 nt, Artificial Sequence
  Description of Artificial Sequence: Synthetic oligonucleotide
ucagcgugcagcaaugcau

SEQ ID NO: 2078440 - RNA, 19 nt, Artificial Sequence
  Description of Artificial Sequence: Synthetic oligonucleotide
aggucagaaggucaccauc

SEQ ID NO: 2078441 - RNA, 19 nt, Artificial Sequence
  Description of Artificial Sequence: Synthetic oligonucleotide
gagucggacauuauugacc

SEQ ID NO: 2078442 - RNA, 19 nt, Artificial Sequence
  Description of Artificial Sequence: Synthetic oligonucleotide
uuccggagaagcccuuucg

SEQ ID NO: 2078443 - RNA, 19 nt, Artificial Sequence
  Description of Artificial Sequence: Synthetic oligonucleotide
agaucaccgccccugccgc

SEQ ID NO: 2078444 - RNA, 19 nt, Artificial Sequence
  Description of Artificial Sequence: Synthetic oligonucleotide
aaaagcaauuccggagaag

SEQ ID NO: 2078445 - RNA, 19 nt, Artificial Sequence
  Description of Artificial Sequence: Synthetic oligonucleotide
auggaguuaaggaucagug

SEQ ID NO: 2078446 - RNA, 19 nt, Artificial Sequence
  Description of Artificial Sequence: Synthetic oligonucleotide
gaaguagaauuccgaggag

SEQ ID NO: 2078447 - RNA, 19 nt, Artificial Sequence
  Description of Artificial Sequence: Synthetic oligonucleotide
ucaggccgcagaauauccg

SEQ ID NO: 2078448 - RNA, 19 nt, Artificial Sequence
  Description of Artificial Sequence: Synthetic oligonucleotide
uccaagagcgccagaggcc

SEQ ID NO: 2078449 - RNA, 19 nt, Artificial Sequence
  Description of Artificial Sequence: Synthetic oligonucleotide
ugcaaaguccugagguuug

SEQ ID NO: 2078450 - RNA, 19 nt, Artificial Sequence
  Description of Artificial Sequence: Synthetic oligonucleotide
ucugacgucagcagcccca

SEQ ID NO: 2078451 - RNA, 19 nt, Artificial Sequence
  Description of Artificial Sequence: Synthetic oligonucleotide
uggaguuaaggaucagugu

SEQ ID NO: 2078452 - RNA, 19 nt, Artificial Sequence
  Description of Artificial Sequence: Synthetic oligonucleotide
agaugagacuucaaaagca

SEQ ID NO: 2078453 - RNA, 19 nt, Artificial Sequence
  Description of Artificial Sequence: Synthetic oligonucleotide
agucccuugacugcugugg

SEQ ID NO: 2078454 - RNA, 19 nt, Artificial Sequence
  Description of Artificial Sequence: Synthetic oligonucleotide
cagcccaaccgauaggugc

SEQ ID NO: 2078455 - RNA, 19 nt, Artificial Sequence
  Description of Artificial Sequence: Synthetic oligonucleotide
augccaacuugagaaacac

SEQ ID NO: 2078456 - RNA, 19 nt, Artificial Sequence
  Description of Artificial Sequence: Synthetic oligonucleotide
gucaagaugagacuucaaa

SEQ ID NO: 2078457 - RNA, 19 nt, Artificial Sequence
  Description of Artificial Sequence: Synthetic oligonucleotide
gaagacguccugugggacc

SEQ ID NO: 2078458 - RNA, 19 nt, Artificial Sequence
  Description of Artificial Sequence: Synthetic oligonucleotide
accaucgcucaacucuagc

SEQ ID NO: 2078459 - RNA, 19 nt, Artificial Sequence
  Description of Artificial Sequence: Synthetic oligonucleotide
gaugcaaaaccaggaagac

SEQ ID NO: 2078460 - RNA, 19 nt, Artificial Sequence
  Description of Artificial Sequence: Synthetic oligonucleotide
gacggugauggcugcaaag

SEQ ID NO: 2078461 - RNA, 19 nt, Artificial Sequence
  Description of Artificial Sequence: Synthetic oligonucleotide
ucagaaggucaccaucgcu

SEQ ID NO: 2078462 - RNA, 19 nt, Artificial Sequence
  Description of Artificial Sequence: Synthetic oligonucleotide
cuuccugggcuccaugagg

SEQ ID NO: 2078463 - RNA, 19 nt, Artificial Sequence
  Description of Artificial Sequence: Synthetic oligonucleotide
uccggagaagcccuuucgc

SEQ ID NO: 2078464 - RNA, 19 nt, Artificial Sequence
  Description of Artificial Sequence: Synthetic oligonucleotide
ucggacauuauugaccaaa

SEQ ID NO: 2078465 - RNA, 19 nt, Artificial Sequence
  Description of Artificial Sequence: Synthetic oligonucleotide
uauugaccaaagucccuug

SEQ ID NO: 2078466 - RNA, 19 nt, Artificial Sequence
  Description of Artificial Sequence: Synthetic oligonucleotide
guagcuagcggcugucaag

SEQ ID NO: 2078467 - RNA, 19 nt, Artificial Sequence
  Description of Artificial Sequence: Synthetic oligonucleotide
aguagaauuccgaggagcu

SEQ ID NO: 2078468 - RNA, 19 nt, Artificial Sequence
  Description of Artificial Sequence: Synthetic oligonucleotide
aaagucccuugacugcugu

SEQ ID NO: 2078469 - RNA, 19 nt, Artificial Sequence
  Description of Artificial Sequence: Synthetic oligonucleotide
augcauggaccccagagau

SEQ ID NO: 2078470 - RNA, 19 nt, Artificial Sequence
  Description of Artificial Sequence: Synthetic oligonucleotide
ggaagucucguucucauca

SEQ ID NO: 2078471 - RNA, 19 nt, Artificial Sequence
  Description of Artificial Sequence: Synthetic oligonucleotide
uccccuagaucgagggacg

SEQ ID NO: 2078472 - RNA, 19 nt, Artificial Sequence
  Description of Artificial Sequence: Synthetic oligonucleotide
ucgcgaugcaaaaccagga

SEQ ID NO: 2078473 - RNA, 19 nt, Artificial Sequence
  Description of Artificial Sequence: Synthetic oligonucleotide
uaugcgcagcagcuggaag

SEQ ID NO: 2078474 - RNA, 19 nt, Artificial Sequence
  Description of Artificial Sequence: Synthetic oligonucleotide
aucgcucaacucuagccug

SEQ ID NO: 2078475 - RNA, 19 nt, Artificial Sequence
  Description of Artificial Sequence: Synthetic oligonucleotide
uuauugaccaaagucccuu

SEQ ID NO: 2078476 - RNA, 19 nt, Artificial Sequence
  Description of Artificial Sequence: Synthetic oligonucleotide
ugcaccgcuucucagcagu

SEQ ID NO: 2078477 - RNA, 19 nt, Artificial Sequence
  Description of Artificial Sequence: Synthetic oligonucleotide
cacucugugaacugauuuc

SEQ ID NO: 2078478 - RNA, 19 nt, Artificial Sequence
  Description of Artificial Sequence: Synthetic oligonucleotide
ggucagaaggucaccaucg

SEQ ID NO: 2078479 - RNA, 19 nt, Artificial Sequence
  Description of Artificial Sequence: Synthetic oligonucleotide
caggccgcagaauauccgg

SEQ ID NO: 2078480 - RNA, 19 nt, Artificial Sequence
  Description of Artificial Sequence: Synthetic oligonucleotide
uggacacgcaugcaaccgc

SEQ ID NO: 2078481 - RNA, 19 nt, Artificial Sequence
  Description of Artificial Sequence: Synthetic oligonucleotide
auuccggagaagcccuuuc

SEQ ID NO: 2078482 - RNA, 19 nt, Artificial Sequence
  Description of Artificial Sequence: Synthetic oligonucleotide
ugccgauggaguuaaggau

SEQ ID NO: 2078483 - RNA, 19 nt, Artificial Sequence
  Description of Artificial Sequence: Synthetic oligonucleotide
uccugugggaccuccguga

SEQ ID NO: 2078484 - RNA, 19 nt, Artificial Sequence
  Description of Artificial Sequence: Synthetic oligonucleotide
cucaggccgcagaauaucc

SEQ ID NO: 2078485 - RNA, 19 nt, Artificial Sequence
  Description of Artificial Sequence: Synthetic oligonucleotide
uguagcuagcggcugucaa

SEQ ID NO: 2078486 - RNA, 19 nt, Artificial Sequence
  Description of Artificial Sequence: Synthetic oligonucleotide
gaccccagagaugaggccc

SEQ ID NO: 2078487 - RNA, 19 nt, Artificial Sequence
  Description of Artificial Sequence: Synthetic oligonucleotide
cacaucacacaggucagcc

SEQ ID NO: 2078488 - RNA, 19 nt, Artificial Sequence
  Description of Artificial Sequence: Synthetic oligonucleotide
acacucugugaacugauuu

SEQ ID NO: 2078489 - RNA, 19 nt, Artificial Sequence
  Description of Artificial Sequence: Synthetic oligonucleotide
ccuuucgcgaugcaaaacc

SEQ ID NO: 2078490 - RNA, 19 nt, Artificial Sequence
  Description of Artificial Sequence: Synthetic oligonucleotide
ugcguaggaacagccaggc

SEQ ID NO: 2078491 - RNA, 19 nt, Artificial Sequence
  Description of Artificial Sequence: Synthetic oligonucleotide
augaggacugacagagggc

SEQ ID NO: 2078492 - RNA, 19 nt, Artificial Sequence
  Description of Artificial Sequence: Synthetic oligonucleotide
aagagcgccagaggccugg

SEQ ID NO: 2078493 - RNA, 19 nt, Artificial Sequence
  Description of Artificial Sequence: Synthetic oligonucleotide
cacagauuuccaagagcgc

SEQ ID NO: 2078494 - RNA, 19 nt, Artificial Sequence
  Description of Artificial Sequence: Synthetic oligonucleotide
agagggugcugagaggccg

SEQ ID NO: 2078495 - RNA, 19 nt, Artificial Sequence
  Description of Artificial Sequence: Synthetic oligonucleotide
cuagccuguggccucuggg

SEQ ID NO: 2078496 - RNA, 19 nt, Artificial Sequence
  Description of Artificial Sequence: Synthetic oligonucleotide
guuugacccggacuuguug

SEQ ID NO: 2078497 - RNA, 19 nt, Artificial Sequence
  Description of Artificial Sequence: Synthetic oligonucleotide
agcgccagaggccuggaca

SEQ ID NO: 2078498 - RNA, 19 nt, Artificial Sequence
  Description of Artificial Sequence: Synthetic oligonucleotide
aggagcugguuccugcuug

SEQ ID NO: 2078499 - RNA, 19 nt, Artificial Sequence
  Description of Artificial Sequence: Synthetic oligonucleotide
uggugaggcucccacuucu

SEQ ID NO: 2078500 - RNA, 19 nt, Artificial Sequence
  Description of Artificial Sequence: Synthetic oligonucleotide
uagcuagcggcugucaaga

SEQ ID NO: 2078501 - RNA, 19 nt, Artificial Sequence
  Description of Artificial Sequence: Synthetic oligonucleotide
accgcuucucagcaguuca

SEQ ID NO: 2078502 - RNA, 19 nt, Artificial Sequence
  Description of Artificial Sequence: Synthetic oligonucleotide
gaugccggguccucaggcc

SEQ ID NO: 2078503 - RNA, 19 nt, Artificial Sequence
  Description of Artificial Sequence: Synthetic oligonucleotide
acaugaaguagaauuccga

SEQ ID NO: 2078504 - RNA, 19 nt, Artificial Sequence
  Description of Artificial Sequence: Synthetic oligonucleotide
ucuagccuguggccucugg

SEQ ID NO: 2078505 - RNA, 19 nt, Artificial Sequence
  Description of Artificial Sequence: Synthetic oligonucleotide
guuaaggaucaguguggcc

SEQ ID NO: 2078506 - RNA, 19 nt, Artificial Sequence
  Description of Artificial Sequence: Synthetic oligonucleotide
uuuccuccgguuucucgug

SEQ ID NO: 2078507 - RNA, 19 nt, Artificial Sequence
  Description of Artificial Sequence: Synthetic oligonucleotide
uuccuccgguuucucgugg

SEQ ID NO: 2078508 - RNA, 19 nt, Artificial Sequence
  Description of Artificial Sequence: Synthetic oligonucleotide
ucaccaucgcucaacucua

SEQ ID NO: 2078509 - RNA, 19 nt, Artificial Sequence
  Description of Artificial Sequence: Synthetic oligonucleotide
auggaccccagagaugagg

SEQ ID NO: 2078510 - RNA, 19 nt, Artificial Sequence
  Description of Artificial Sequence: Synthetic oligonucleotide
augccggguccucaggccg

SEQ ID NO: 2078511 - RNA, 19 nt, Artificial Sequence
  Description of Artificial Sequence: Synthetic oligonucleotide
gcgaugcaaaaccaggaag

SEQ ID NO: 2078512 - RNA, 19 nt, Artificial Sequence
  Description of Artificial Sequence: Synthetic oligonucleotide
ugagaggccgcuggggugc

SEQ ID NO: 2078513 - RNA, 19 nt, Artificial Sequence
  Description of Artificial Sequence: Synthetic oligonucleotide
aacuugagaaacacagauu

SEQ ID NO: 2078514 - RNA, 19 nt, Artificial Sequence
  Description of Artificial Sequence: Synthetic oligonucleotide
uccaggcugcguaggaaca

SEQ ID NO: 2078515 - RNA, 19 nt, Artificial Sequence
  Description of Artificial Sequence: Synthetic oligonucleotide
uggcugcaaaguccugagg

SEQ ID NO: 2078516 - RNA, 19 nt, Artificial Sequence
  Description of Artificial Sequence: Synthetic oligonucleotide
cuccccuagaucgagggac

SEQ ID NO: 2078517 - RNA, 19 nt, Artificial Sequence
  Description of Artificial Sequence: Synthetic oligonucleotide
cugccgauggaguuaagga

SEQ ID NO: 2078518 - RNA, 19 nt, Artificial Sequence
  Description of Artificial Sequence: Synthetic oligonucleotide
guggguaaugccaacuuga

SEQ ID NO: 2078519 - RNA, 19 nt, Artificial Sequence
  Description of Artificial Sequence: Synthetic oligonucleotide
ggaacagccaggcucugug

SEQ ID NO: 2078520 - RNA, 19 nt, Artificial Sequence
  Description of Artificial Sequence: Synthetic oligonucleotide
caacuugagaaacacagau

SEQ ID NO: 2078521 - RNA, 19 nt, Artificial Sequence
  Description of Artificial Sequence: Synthetic oligonucleotide
uguggucugccaccacccc

SEQ ID NO: 2078522 - RNA, 19 nt, Artificial Sequence
  Description of Artificial Sequence: Synthetic oligonucleotide
uggggagucggacauuauu

SEQ ID NO: 2078523 - RNA, 19 nt, Artificial Sequence
  Description of Artificial Sequence: Synthetic oligonucleotide
cagcgugcagcaaugcaug

SEQ ID NO: 2078524 - RNA, 19 nt, Artificial Sequence
  Description of Artificial Sequence: Synthetic oligonucleotide
agcgugcagcaaugcaugg

SEQ ID NO: 2078525 - RNA, 19 nt, Artificial Sequence
  Description of Artificial Sequence: Synthetic oligonucleotide
aagucccuugacugcugug

SEQ ID NO: 2078526 - RNA, 19 nt, Artificial Sequence
  Description of Artificial Sequence: Synthetic oligonucleotide
ugccaacacucugugaacu

SEQ ID NO: 2078527 - RNA, 19 nt, Artificial Sequence
  Description of Artificial Sequence: Synthetic oligonucleotide
ucgguucaguugucugacg

SEQ ID NO: 2078528 - RNA, 19 nt, Artificial Sequence
  Description of Artificial Sequence: Synthetic oligonucleotide
uccuccgguuucucguggg

SEQ ID NO: 2078529 - RNA, 19 nt, Artificial Sequence
  Description of Artificial Sequence: Synthetic oligonucleotide
uucuccaggcugcguagga

SEQ ID NO: 2078530 - RNA, 19 nt, Artificial Sequence
  Description of Artificial Sequence: Synthetic oligonucleotide
cuucgguucaguugucuga

SEQ ID NO: 2078531 - RNA, 19 nt, Artificial Sequence
  Description of Artificial Sequence: Synthetic oligonucleotide
ugacccgccagucgucccc

SEQ ID NO: 2078532 - RNA, 19 nt, Artificial Sequence
  Description of Artificial Sequence: Synthetic oligonucleotide
cagcccugcagcccaaccg

SEQ ID NO: 2078533 - RNA, 19 nt, Artificial Sequence
  Description of Artificial Sequence: Synthetic oligonucleotide
cuuucgcgaugcaaaacca

SEQ ID NO: 2078534 - RNA, 19 nt, Artificial Sequence
  Description of Artificial Sequence: Synthetic oligonucleotide
auuauugaccaaagucccu

SEQ ID NO: 2078535 - RNA, 19 nt, Artificial Sequence
  Description of Artificial Sequence: Synthetic oligonucleotide
ccaucgcucaacucuagcc

SEQ ID NO: 2078536 - RNA, 19 nt, Artificial Sequence
  Description of Artificial Sequence: Synthetic oligonucleotide
ucagcccugcagcccaacc

SEQ ID NO: 2078537 - RNA, 19 nt, Artificial Sequence
  Description of Artificial Sequence: Synthetic oligonucleotide
acacgcaugcaaccgcugu

SEQ ID NO: 2078538 - RNA, 19 nt, Artificial Sequence
  Description of Artificial Sequence: Synthetic oligonucleotide
gcggcugucaagaugagac

SEQ ID NO: 2078539 - RNA, 19 nt, Artificial Sequence
  Description of Artificial Sequence: Synthetic oligonucleotide
acggugauggcugcaaagu

SEQ ID NO: 2078540 - RNA, 19 nt, Artificial Sequence
  Description of Artificial Sequence: Synthetic oligonucleotide
cguaggaacagccaggcuc

SEQ ID NO: 2078541 - RNA, 19 nt, Artificial Sequence
  Description of Artificial Sequence: Synthetic oligonucleotide
uccccuuggagcucagcgu

SEQ ID NO: 2078542 - RNA, 19 nt, Artificial Sequence
  Description of Artificial Sequence: Synthetic oligonucleotide
acuguggguaaugccaacu

SEQ ID NO: 2078543 - RNA, 19 nt, Artificial Sequence
  Description of Artificial Sequence: Synthetic oligonucleotide
cuucuccccuagaucgagg

SEQ ID NO: 2078544 - RNA, 19 nt, Artificial Sequence
  Description of Artificial Sequence: Synthetic oligonucleotide
uaaggaucaguguggccuu

SEQ ID NO: 2078545 - RNA, 19 nt, Artificial Sequence
  Description of Artificial Sequence: Synthetic oligonucleotide
uugacccggacuuguugga

SEQ ID NO: 2078546 - RNA, 19 nt, Artificial Sequence
  Description of Artificial Sequence: Synthetic oligonucleotide
ggggagucggacauuauug

SEQ ID NO: 2078547 - RNA, 19 nt, Artificial Sequence
  Description of Artificial Sequence: Synthetic oligonucleotide
ugucaagaugagacuucaa

SEQ ID NO: 2078548 - RNA, 19 nt, Artificial Sequence
  Description of Artificial Sequence: Synthetic oligonucleotide
gguguagagaucaccgccc

SEQ ID NO: 2078549 - RNA, 19 nt, Artificial Sequence
  Description of Artificial Sequence: Synthetic oligonucleotide
ucgagggacggugauggcu

SEQ ID NO: 2078550 - RNA, 19 nt, Artificial Sequence
  Description of Artificial Sequence: Synthetic oligonucleotide
gacccggacuuguuggaac

SEQ ID NO: 2078551 - RNA, 19 nt, Artificial Sequence
  Description of Artificial Sequence: Synthetic oligonucleotide
cagcaguucaucaccucuc

SEQ ID NO: 2078552 - RNA, 19 nt, Artificial Sequence
  Description of Artificial Sequence: Synthetic oligonucleotide
acgcaugcaaccgcuguag

SEQ ID NO: 2078553 - RNA, 19 nt, Artificial Sequence
  Description of Artificial Sequence: Synthetic oligonucleotide
gugcagccugaccuggacg

SEQ ID NO: 2078554 - RNA, 19 nt, Artificial Sequence
  Description of Artificial Sequence: Synthetic oligonucleotide
gauggaguuaaggaucagu

SEQ ID NO: 2078555 - RNA, 19 nt, Artificial Sequence
  Description of Artificial Sequence: Synthetic oligonucleotide
aucgagggacggugauggc

SEQ ID NO: 2078556 - RNA, 19 nt, Artificial Sequence
  Description of Artificial Sequence: Synthetic oligonucleotide
aggcugcguaggaacagcc

SEQ ID NO: 2078557 - RNA, 19 nt, Artificial Sequence
  Description of Artificial Sequence: Synthetic oligonucleotide
ucuggggagucggacauua

SEQ ID NO: 2078558 - RNA, 19 nt, Artificial Sequence
  Description of Artificial Sequence: Synthetic oligonucleotide
aggcugacccgccagucgu

SEQ ID NO: 2078559 - RNA, 19 nt, Artificial Sequence
  Description of Artificial Sequence: Synthetic oligonucleotide
ucuccccuagaucgaggga

SEQ ID NO: 2078560 - RNA, 19 nt, Artificial Sequence
  Description of Artificial Sequence: Synthetic oligonucleotide
guagaauuccgaggagcug

SEQ ID NO: 2078561 - RNA, 19 nt, Artificial Sequence
  Description of Artificial Sequence: Synthetic oligonucleotide
ggugcuccccucugcaccg

SEQ ID NO: 2078562 - RNA, 19 nt, Artificial Sequence
  Description of Artificial Sequence: Synthetic oligonucleotide
ucgcucaacucuagccugu

SEQ ID NO: 2078563 - RNA, 19 nt, Artificial Sequence
  Description of Artificial Sequence: Synthetic oligonucleotide
ggagucggacauuauugac

SEQ ID NO: 2078564 - RNA, 19 nt, Artificial Sequence
  Description of Artificial Sequence: Synthetic oligonucleotide
acccggacuuguuggaaca

SEQ ID NO: 2078565 - RNA, 19 nt, Artificial Sequence
  Description of Artificial Sequence: Synthetic oligonucleotide
caucacacaggucagcccu

SEQ ID NO: 2078566 - RNA, 19 nt, Artificial Sequence
  Description of Artificial Sequence: Synthetic oligonucleotide
cugccaacacucugugaac

SEQ ID NO: 2078567 - RNA, 19 nt, Artificial Sequence
  Description of Artificial Sequence: Synthetic oligonucleotide
agagggcucagggaagucu

SEQ ID NO: 2078568 - RNA, 19 nt, Artificial Sequence
  Description of Artificial Sequence: Synthetic oligonucleotide
ccaaccgauaggugcagcc

SEQ ID NO: 2078569 - RNA, 19 nt, Artificial Sequence
  Description of Artificial Sequence: Synthetic oligonucleotide
guuucucguggguggagca

SEQ ID NO: 2078570 - RNA, 19 nt, Artificial Sequence
  Description of Artificial Sequence: Synthetic oligonucleotide
cuacucccaggccaugcac

SEQ ID NO: 2078571 - RNA, 19 nt, Artificial Sequence
  Description of Artificial Sequence: Synthetic oligonucleotide
gcugccgauggaguuaagg

SEQ ID NO: 2078572 - RNA, 19 nt, Artificial Sequence
  Description of Artificial Sequence: Synthetic oligonucleotide
cagguggugaggcucccac

SEQ ID NO: 2078573 - RNA, 19 nt, Artificial Sequence
  Description of Artificial Sequence: Synthetic oligonucleotide
cagagaugaggcccggcuc

SEQ ID NO: 2078574 - RNA, 19 nt, Artificial Sequence
  Description of Artificial Sequence: Synthetic oligonucleotide
gacugcugugguccuccag

SEQ ID NO: 2078575 - RNA, 19 nt, Artificial Sequence
  Description of Artificial Sequence: Synthetic oligonucleotide
caaagucccuugacugcug

SEQ ID NO: 2078576 - RNA, 19 nt, Artificial Sequence
  Description of Artificial Sequence: Synthetic oligonucleotide
ccggagaagcccuuucgcg

SEQ ID NO: 2078577 - RNA, 19 nt, Artificial Sequence
  Description of Artificial Sequence: Synthetic oligonucleotide
ucucguggguggagcaggu

SEQ ID NO: 2078578 - RNA, 19 nt, Artificial Sequence
  Description of Artificial Sequence: Synthetic oligonucleotide
caugcaaccgcuguagcua

SEQ ID NO: 2078579 - RNA, 19 nt, Artificial Sequence
  Description of Artificial Sequence: Synthetic oligonucleotide
ggaucaguguggccuuggg

SEQ ID NO: 2078580 - RNA, 19 nt, Artificial Sequence
  Description of Artificial Sequence: Synthetic oligonucleotide
caaaagcaauuccggagaa

SEQ ID NO: 2078581 - RNA, 19 nt, Artificial Sequence
  Description of Artificial Sequence: Synthetic oligonucleotide
caaccgcuguagcuagcgg

SEQ ID NO: 2078582 - RNA, 19 nt, Artificial Sequence
  Description of Artificial Sequence: Synthetic oligonucleotide
cuagaucgagggacgguga

SEQ ID NO: 2078583 - RNA, 19 nt, Artificial Sequence
  Description of Artificial Sequence: Synthetic oligonucleotide
gcuagcggcugucaagaug

SEQ ID NO: 2078584 - RNA, 19 nt, Artificial Sequence
  Description of Artificial Sequence: Synthetic oligonucleotide
agaucgagggacggugaug

SEQ ID NO: 2078585 - RNA, 19 nt, Artificial Sequence
  Description of Artificial Sequence: Synthetic oligonucleotide
gggaccuccgugaugccgg

SEQ ID NO: 2078586 - RNA, 19 nt, Artificial Sequence
  Description of Artificial Sequence: Synthetic oligonucleotide
cccuaugcgcagcagcugg

SEQ ID NO: 2078587 - RNA, 19 nt, Artificial Sequence
  Description of Artificial Sequence: Synthetic oligonucleotide
cccacuguggguaaugcca

SEQ ID NO: 2078588 - RNA, 19 nt, Artificial Sequence
  Description of Artificial Sequence: Synthetic oligonucleotide
gcaaccgcuguagcuagcg

SEQ ID NO: 2078589 - RNA, 19 nt, Artificial Sequence
  Description of Artificial Sequence: Synthetic oligonucleotide
aauuccggagaagcccuuu

SEQ ID NO: 2078590 - RNA, 19 nt, Artificial Sequence
  Description of Artificial Sequence: Synthetic oligonucleotide
cauaggcuggaagccaguc

SEQ ID NO: 2078591 - RNA, 19 nt, Artificial Sequence
  Description of Artificial Sequence: Synthetic oligonucleotide
cgaugcaaaaccaggaaga

SEQ ID NO: 2078592 - RNA, 19 nt, Artificial Sequence
  Description of Artificial Sequence: Synthetic oligonucleotide
cucagcaguucaucaccuc

SEQ ID NO: 2078593 - RNA, 19 nt, Artificial Sequence
  Description of Artificial Sequence: Synthetic oligonucleotide
gggagucggacauuauuga

SEQ ID NO: 2078594 - RNA, 19 nt, Artificial Sequence
  Description of Artificial Sequence: Synthetic oligonucleotide
gcuucgguucaguugucug

SEQ ID NO: 2078595 - RNA, 19 nt, Artificial Sequence
  Description of Artificial Sequence: Synthetic oligonucleotide
aagcccuuucgcgaugcaa

SEQ ID NO: 2078596 - RNA, 19 nt, Artificial Sequence
  Description of Artificial Sequence: Synthetic oligonucleotide
agguuugacccggacuugu

SEQ ID NO: 2078597 - RNA, 19 nt, Artificial Sequence
  Description of Artificial Sequence: Synthetic oligonucleotide
aaggaucaguguggccuug

SEQ ID NO: 2078598 - RNA, 19 nt, Artificial Sequence
  Description of Artificial Sequence: Synthetic oligonucleotide
uuggaacaugaaguagaau

SEQ ID NO: 2078599 - RNA, 19 nt, Artificial Sequence
  Description of Artificial Sequence: Synthetic oligonucleotide
caucgcucaacucuagccu

SEQ ID NO: 2078600 - RNA, 19 nt, Artificial Sequence
  Description of Artificial Sequence: Synthetic oligonucleotide
augagacuucaaaagcaau

SEQ ID NO: 2078601 - RNA, 19 nt, Artificial Sequence
  Description of Artificial Sequence: Synthetic oligonucleotide
ugcaaccgcuguagcuagc

SEQ ID NO: 2078602 - RNA, 19 nt, Artificial Sequence
  Description of Artificial Sequence: Synthetic oligonucleotide
guaggaacagccaggcucu

SEQ ID NO: 2078603 - RNA, 19 nt, Artificial Sequence
  Description of Artificial Sequence: Synthetic oligonucleotide
agcccuuucgcgaugcaaa

SEQ ID NO: 2078604 - RNA, 19 nt, Artificial Sequence
  Description of Artificial Sequence: Synthetic oligonucleotide
gguucaguugucugacguc

SEQ ID NO: 2078605 - RNA, 19 nt, Artificial Sequence
  Description of Artificial Sequence: Synthetic oligonucleotide
aggccgcagaauauccggg

SEQ ID NO: 2078606 - RNA, 19 nt, Artificial Sequence
  Description of Artificial Sequence: Synthetic oligonucleotide
gagguuugacccggacuug

SEQ ID NO: 2078607 - RNA, 19 nt, Artificial Sequence
  Description of Artificial Sequence: Synthetic oligonucleotide
aacacucugugaacugauu

SEQ ID NO: 2078608 - RNA, 19 nt, Artificial Sequence
  Description of Artificial Sequence: Synthetic oligonucleotide
agcccaaccgauaggugca

SEQ ID NO: 2078609 - RNA, 19 nt, Artificial Sequence
  Description of Artificial Sequence: Synthetic oligonucleotide
gccgauggaguuaaggauc

SEQ ID NO: 2078610 - RNA, 19 nt, Artificial Sequence
  Description of Artificial Sequence: Synthetic oligonucleotide
gacugacagagggcucagg

SEQ ID NO: 2078611 - RNA, 19 nt, Artificial Sequence
  Description of Artificial Sequence: Synthetic oligonucleotide
guccucaggccgcagaaua

SEQ ID NO: 2078612 - RNA, 19 nt, Artificial Sequence
  Description of Artificial Sequence: Synthetic oligonucleotide
cucagcgugcagcaaugca

SEQ ID NO: 2078613 - RNA, 19 nt, Artificial Sequence
  Description of Artificial Sequence: Synthetic oligonucleotide
caccccgggagaaggugag

SEQ ID NO: 2078614 - RNA, 19 nt, Artificial Sequence
  Description of Artificial Sequence: Synthetic oligonucleotide
agaggagagggugcugaga

SEQ ID NO: 2078615 - RNA, 19 nt, Artificial Sequence
  Description of Artificial Sequence: Synthetic oligonucleotide
cgugcagcaaugcauggac

SEQ ID NO: 2078616 - RNA, 19 nt, Artificial Sequence
  Description of Artificial Sequence: Synthetic oligonucleotide
ucccuugacugcugugguc

SEQ ID NO: 2078617 - RNA, 19 nt, Artificial Sequence
  Description of Artificial Sequence: Synthetic oligonucleotide
cuuggagcucagcgugcag

SEQ ID NO: 2078618 - RNA, 19 nt, Artificial Sequence
  Description of Artificial Sequence: Synthetic oligonucleotide
ugccggguccucaggccgc

SEQ ID NO: 2078619 - RNA, 19 nt, Artificial Sequence
  Description of Artificial Sequence: Synthetic oligonucleotide
gucccagcuucuccccuag

SEQ ID NO: 2078620 - RNA, 19 nt, Artificial Sequence
  Description of Artificial Sequence: Synthetic oligonucleotide
caccaucgcucaacucuag

SEQ ID NO: 2078621 - RNA, 19 nt, Artificial Sequence
  Description of Artificial Sequence: Synthetic oligonucleotide
agaauuccgaggagcuggu

SEQ ID NO: 2078622 - RNA, 19 nt, Artificial Sequence
  Description of Artificial Sequence: Synthetic oligonucleotide
ggguaaugccaacuugaga

SEQ ID NO: 2078623 - RNA, 19 nt, Artificial Sequence
  Description of Artificial Sequence: Synthetic oligonucleotide
gaacugauuuccuccgguu

SEQ ID NO: 2078624 - RNA, 19 nt, Artificial Sequence
  Description of Artificial Sequence: Synthetic oligonucleotide
gugcagcaaugcauggacc

SEQ ID NO: 2078625 - RNA, 19 nt, Artificial Sequence
  Description of Artificial Sequence: Synthetic oligonucleotide
gcaccauaggcuggaagcc

SEQ ID NO: 2078626 - RNA, 19 nt, Artificial Sequence
  Description of Artificial Sequence: Synthetic oligonucleotide
gcucaacucuagccugugg

SEQ ID NO: 2078627 - RNA, 19 nt, Artificial Sequence
  Description of Artificial Sequence: Synthetic oligonucleotide
cuccgguuucucgugggug

SEQ ID NO: 2078628 - RNA, 19 nt, Artificial Sequence
  Description of Artificial Sequence: Synthetic oligonucleotide
gauuuccaagagcgccaga

SEQ ID NO: 2078629 - RNA, 19 nt, Artificial Sequence
  Description of Artificial Sequence: Synthetic oligonucleotide
gaucaccgccccugccgcc

SEQ ID NO: 2078630 - RNA, 19 nt, Artificial Sequence
  Description of Artificial Sequence: Synthetic oligonucleotide
gacacgcaugcaaccgcug

SEQ ID NO: 2078631 - RNA, 19 nt, Artificial Sequence
  Description of Artificial Sequence: Synthetic oligonucleotide
gaagucucguucucaucau

SEQ ID NO: 2078632 - RNA, 19 nt, Artificial Sequence
  Description of Artificial Sequence: Synthetic oligonucleotide
gucugacgucagcagcccc

SEQ ID NO: 2078633 - RNA, 19 nt, Artificial Sequence
  Description of Artificial Sequence: Synthetic oligonucleotide
cacuucuccaggcugcgua

SEQ ID NO: 2078634 - RNA, 19 nt, Artificial Sequence
  Description of Artificial Sequence: Synthetic oligonucleotide
cauggaccccagagaugag

SEQ ID NO: 2078635 - RNA, 19 nt, Artificial Sequence
  Description of Artificial Sequence: Synthetic oligonucleotide
gagggcaccauaggcugga

SEQ ID NO: 2078636 - RNA, 19 nt, Artificial Sequence
  Description of Artificial Sequence: Synthetic oligonucleotide
ugacccggacuuguuggaa

SEQ ID NO: 2078637 - RNA, 19 nt, Artificial Sequence
  Description of Artificial Sequence: Synthetic oligonucleotide
cuccccucugcaccgcuuc

SEQ ID NO: 2078638 - RNA, 19 nt, Artificial Sequence
  Description of Artificial Sequence: Synthetic oligonucleotide
cugacccgccagucguccc

SEQ ID NO: 2078639 - RNA, 19 nt, Artificial Sequence
  Description of Artificial Sequence: Synthetic oligonucleotide
cugagguuugacccggacu

SEQ ID NO: 2078640 - RNA, 19 nt, Artificial Sequence
  Description of Artificial Sequence: Synthetic oligonucleotide
cagucguccccuuggagcu

SEQ ID NO: 2078641 - RNA, 19 nt, Artificial Sequence
  Description of Artificial Sequence: Synthetic oligonucleotide
gaaggucaccaucgcucaa

SEQ ID NO: 2078642 - RNA, 19 nt, Artificial Sequence
  Description of Artificial Sequence: Synthetic oligonucleotide
accgauaggugcagccuga

SEQ ID NO: 2078643 - RNA, 19 nt, Artificial Sequence
  Description of Artificial Sequence: Synthetic oligonucleotide
ugacugcugugguccucca

SEQ ID NO: 2078644 - RNA, 19 nt, Artificial Sequence
  Description of Artificial Sequence: Synthetic oligonucleotide
ggugcagccugaccuggac

SEQ ID NO: 2078645 - RNA, 19 nt, Artificial Sequence
  Description of Artificial Sequence: Synthetic oligonucleotide
aggcccggcuccugcuggg

SEQ ID NO: 2078646 - RNA, 19 nt, Artificial Sequence
  Description of Artificial Sequence: Synthetic oligonucleotide
cgagggacggugauggcug

SEQ ID NO: 2078647 - RNA, 19 nt, Artificial Sequence
  Description of Artificial Sequence: Synthetic oligonucleotide
gggcaccauaggcuggaag

SEQ ID NO: 2078648 - RNA, 19 nt, Artificial Sequence
  Description of Artificial Sequence: Synthetic oligonucleotide
gcgccagaggccuggacac

SEQ ID NO: 2078649 - RNA, 19 nt, Artificial Sequence
  Description of Artificial Sequence: Synthetic oligonucleotide
agcggcugucaagaugaga

SEQ ID NO: 2078650 - RNA, 19 nt, Artificial Sequence
  Description of Artificial Sequence: Synthetic oligonucleotide
gcuucuccccuagaucgag

SEQ ID NO: 2078651 - RNA, 19 nt, Artificial Sequence
  Description of Artificial Sequence: Synthetic oligonucleotide
cugugggaccuccgugaug

SEQ ID NO: 2078652 - RNA, 19 nt, Artificial Sequence
  Description of Artificial Sequence: Synthetic oligonucleotide
ugacgucagcagccccacu

SEQ ID NO: 2078653 - RNA, 19 nt, Artificial Sequence
  Description of Artificial Sequence: Synthetic oligonucleotide
ccgauggaguuaaggauca

SEQ ID NO: 2078654 - RNA, 19 nt, Artificial Sequence
  Description of Artificial Sequence: Synthetic oligonucleotide
caccauaggcuggaagcca

SEQ ID NO: 2078655 - RNA, 19 nt, Artificial Sequence
  Description of Artificial Sequence: Synthetic oligonucleotide
gaagcccuuucgcgaugca

SEQ ID NO: 2078656 - RNA, 19 nt, Artificial Sequence
  Description of Artificial Sequence: Synthetic oligonucleotide
cuugacugcugugguccuc

SEQ ID NO: 2078657 - RNA, 19 nt, Artificial Sequence
  Description of Artificial Sequence: Synthetic oligonucleotide
ccccgggagaaggugaggg

SEQ ID NO: 2078658 - RNA, 19 nt, Artificial Sequence
  Description of Artificial Sequence: Synthetic oligonucleotide
acucuagccuguggccucu

SEQ ID NO: 2078659 - RNA, 19 nt, Artificial Sequence
  Description of Artificial Sequence: Synthetic oligonucleotide
agccccacuguggguaaug

SEQ ID NO: 2078660 - RNA, 19 nt, Artificial Sequence
  Description of Artificial Sequence: Synthetic oligonucleotide
agucguccccuuggagcuc

SEQ ID NO: 2078661 - RNA, 19 nt, Artificial Sequence
  Description of Artificial Sequence: Synthetic oligonucleotide
ggaagacguccugugggac

SEQ ID NO: 2078662 - RNA, 19 nt, Artificial Sequence
  Description of Artificial Sequence: Synthetic oligonucleotide
ggccaaaggucagaagguc

SEQ ID NO: 2078663 - RNA, 19 nt, Artificial Sequence
  Description of Artificial Sequence: Synthetic oligonucleotide
cccgggagaaggugagggg

SEQ ID NO: 2078664 - RNA, 19 nt, Artificial Sequence
  Description of Artificial Sequence: Synthetic oligonucleotide
gaggcugccgauggaguua

SEQ ID NO: 2078665 - RNA, 19 nt, Artificial Sequence
  Description of Artificial Sequence: Synthetic oligonucleotide
cugcaccgcuucucagcag

SEQ ID NO: 2078666 - RNA, 19 nt, Artificial Sequence
  Description of Artificial Sequence: Synthetic oligonucleotide
caagagcgccagaggccug

SEQ ID NO: 2078667 - RNA, 19 nt, Artificial Sequence
  Description of Artificial Sequence: Synthetic oligonucleotide
agcuagcggcugucaagau

SEQ ID NO: 2078668 - RNA, 19 nt, Artificial Sequence
  Description of Artificial Sequence: Synthetic oligonucleotide
gggaagucucguucucauc

SEQ ID NO: 2078669 - RNA, 19 nt, Artificial Sequence
  Description of Artificial Sequence: Synthetic oligonucleotide
gccagucguccccuuggag

SEQ ID NO: 2078670 - RNA, 19 nt, Artificial Sequence
  Description of Artificial Sequence: Synthetic oligonucleotide
gccagaggccuggacacgc

SEQ ID NO: 2078671 - RNA, 19 nt, Artificial Sequence
  Description of Artificial Sequence: Synthetic oligonucleotide
caacucuagccuguggccu

SEQ ID NO: 2078672 - RNA, 19 nt, Artificial Sequence
  Description of Artificial Sequence: Synthetic oligonucleotide
ggaccuccgugaugccggg

SEQ ID NO: 2078673 - RNA, 19 nt, Artificial Sequence
  Description of Artificial Sequence: Synthetic oligonucleotide
cacgcaugcaaccgcugua

SEQ ID NO: 2078674 - RNA, 19 nt, Artificial Sequence
  Description of Artificial Sequence: Synthetic oligonucleotide
gucccuugacugcuguggu

SEQ ID NO: 2078675 - RNA, 19 nt, Artificial Sequence
  Description of Artificial Sequence: Synthetic oligonucleotide
acguccugugggaccuccg

SEQ ID NO: 2078676 - RNA, 19 nt, Artificial Sequence
  Description of Artificial Sequence: Synthetic oligonucleotide
caccgcuucucagcaguuc

SEQ ID NO: 2078677 - RNA, 19 nt, Artificial Sequence
  Description of Artificial Sequence: Synthetic oligonucleotide
cgugaugccggguccucag

SEQ ID NO: 2078678 - RNA, 19 nt, Artificial Sequence
  Description of Artificial Sequence: Synthetic oligonucleotide
gggccgcagggccacauca

SEQ ID NO: 2078679 - RNA, 19 nt, Artificial Sequence
  Description of Artificial Sequence: Synthetic oligonucleotide
gagcgccagaggccuggac

SEQ ID NO: 2078680 - RNA, 19 nt, Artificial Sequence
  Description of Artificial Sequence: Synthetic oligonucleotide
ugugguccuccaggcugac

SEQ ID NO: 2078681 - RNA, 19 nt, Artificial Sequence
  Description of Artificial Sequence: Synthetic oligonucleotide
ggagaagcccuuucgcgau

SEQ ID NO: 2078682 - RNA, 19 nt, Artificial Sequence
  Description of Artificial Sequence: Synthetic oligonucleotide
ccaccaccccgggagaagg

SEQ ID NO: 2078683 - RNA, 19 nt, Artificial Sequence
  Description of Artificial Sequence: Synthetic oligonucleotide
gguggugaggcucccacuu

SEQ ID NO: 2078684 - RNA, 19 nt, Artificial Sequence
  Description of Artificial Sequence: Synthetic oligonucleotide
uccgugaugccggguccuc

SEQ ID NO: 2078685 - RNA, 19 nt, Artificial Sequence
  Description of Artificial Sequence: Synthetic oligonucleotide
ccugagguuugacccggac

SEQ ID NO: 2078686 - RNA, 19 nt, Artificial Sequence
  Description of Artificial Sequence: Synthetic oligonucleotide
cuaugcgcagcagcuggaa

SEQ ID NO: 2078687 - RNA, 19 nt, Artificial Sequence
  Description of Artificial Sequence: Synthetic oligonucleotide
gucguccccuuggagcuca

SEQ ID NO: 2078688 - RNA, 19 nt, Artificial Sequence
  Description of Artificial Sequence: Synthetic oligonucleotide
ccaacacucugugaacuga

SEQ ID NO: 2078689 - RNA, 19 nt, Artificial Sequence
  Description of Artificial Sequence: Synthetic oligonucleotide
ccgcagggccacaucacac

SEQ ID NO: 2078690 - RNA, 19 nt, Artificial Sequence
  Description of Artificial Sequence: Synthetic oligonucleotide
gcugacccgccagucgucc

SEQ ID NO: 2078691 - RNA, 19 nt, Artificial Sequence
  Description of Artificial Sequence: Synthetic oligonucleotide
caaccgauaggugcagccu

SEQ ID NO: 2078692 - RNA, 19 nt, Artificial Sequence
  Description of Artificial Sequence: Synthetic oligonucleotide
ggacugacagagggcucag

SEQ ID NO: 2078693 - RNA, 19 nt, Artificial Sequence
  Description of Artificial Sequence: Synthetic oligonucleotide
cuguggguaaugccaacuu

SEQ ID NO: 2078694 - RNA, 19 nt, Artificial Sequence
  Description of Artificial Sequence: Synthetic oligonucleotide
gugggaccuccgugaugcc

SEQ ID NO: 2078695 - RNA, 19 nt, Artificial Sequence
  Description of Artificial Sequence: Synthetic oligonucleotide
cggagaagcccuuucgcga

SEQ ID NO: 2078696 - RNA, 19 nt, Artificial Sequence
  Description of Artificial Sequence: Synthetic oligonucleotide
cgauaggugcagccugacc

SEQ ID NO: 2078697 - RNA, 19 nt, Artificial Sequence
  Description of Artificial Sequence: Synthetic oligonucleotide
cucguggguggagcaggug

SEQ ID NO: 2078698 - RNA, 19 nt, Artificial Sequence
  Description of Artificial Sequence: Synthetic oligonucleotide
ggacuuguuggaacaugaa

SEQ ID NO: 2078699 - RNA, 19 nt, Artificial Sequence
  Description of Artificial Sequence: Synthetic oligonucleotide
agggugcugagaggccgcu

SEQ ID NO: 2078700 - RNA, 19 nt, Artificial Sequence
  Description of Artificial Sequence: Synthetic oligonucleotide
ccucugcaccgcuucucag

SEQ ID NO: 2078701 - RNA, 19 nt, Artificial Sequence
  Description of Artificial Sequence: Synthetic oligonucleotide
cuguagcuagcggcuguca

SEQ ID NO: 2078702 - RNA, 19 nt, Artificial Sequence
  Description of Artificial Sequence: Synthetic oligonucleotide
ccucaggccgcagaauauc

SEQ ID NO: 2078703 - RNA, 19 nt, Artificial Sequence
  Description of Artificial Sequence: Synthetic oligonucleotide
agacguccugugggaccuc

SEQ ID NO: 2078704 - RNA, 19 nt, Artificial Sequence
  Description of Artificial Sequence: Synthetic oligonucleotide
ggcugucaagaugagacuu

SEQ ID NO: 2078705 - RNA, 19 nt, Artificial Sequence
  Description of Artificial Sequence: Synthetic oligonucleotide
gaggagcugguuccugcuu

SEQ ID NO: 2078706 - RNA, 19 nt, Artificial Sequence
  Description of Artificial Sequence: Synthetic oligonucleotide
gagaggccgcuggggugcc

SEQ ID NO: 2078707 - RNA, 19 nt, Artificial Sequence
  Description of Artificial Sequence: Synthetic oligonucleotide
ccucuccuacucccaggcc

SEQ ID NO: 2078708 - RNA, 19 nt, Artificial Sequence
  Description of Artificial Sequence: Synthetic oligonucleotide
ccggacuuguuggaacaug

SEQ ID NO: 2078709 - RNA, 19 nt, Artificial Sequence
  Description of Artificial Sequence: Synthetic oligonucleotide
gcccuuucgcgaugcaaaa

SEQ ID NO: 2078710 - RNA, 19 nt, Artificial Sequence
  Description of Artificial Sequence: Synthetic oligonucleotide
ccuacucccaggccaugca

SEQ ID NO: 2078711 - RNA, 19 nt, Artificial Sequence
  Description of Artificial Sequence: Synthetic oligonucleotide
aggugcagccugaccugga

SEQ ID NO: 2078712 - RNA, 19 nt, Artificial Sequence
  Description of Artificial Sequence: Synthetic oligonucleotide
ggacggugauggcugcaaa

SEQ ID NO: 2078713 - RNA, 19 nt, Artificial Sequence
  Description of Artificial Sequence: Synthetic oligonucleotide
agagcgccagaggccugga

SEQ ID NO: 2078714 - RNA, 19 nt, Artificial Sequence
  Description of Artificial Sequence: Synthetic oligonucleotide
ccccuagaucgagggacgg

SEQ ID NO: 2078715 - RNA, 19 nt, Artificial Sequence
  Description of Artificial Sequence: Synthetic oligonucleotide
cuccuacucccaggccaug

SEQ ID NO: 2078716 - RNA, 19 nt, Artificial Sequence
  Description of Artificial Sequence: Synthetic oligonucleotide
cgcaugcaaccgcuguagc

SEQ ID NO: 2078717 - RNA, 19 nt, Artificial Sequence
  Description of Artificial Sequence: Synthetic oligonucleotide
gcgugcagcaaugcaugga

SEQ ID NO: 2078718 - RNA, 19 nt, Artificial Sequence
  Description of Artificial Sequence: Synthetic oligonucleotide
gccaccaccccgggagaag

SEQ ID NO: 2078719 - RNA, 19 nt, Artificial Sequence
  Description of Artificial Sequence: Synthetic oligonucleotide
ggacacgcaugcaaccgcu

SEQ ID NO: 2078720 - RNA, 19 nt, Artificial Sequence
  Description of Artificial Sequence: Synthetic oligonucleotide
uggggccgcagggccacau

SEQ ID NO: 2078721 - RNA, 19 nt, Artificial Sequence
  Description of Artificial Sequence: Synthetic oligonucleotide
ggccucuggggagucggac

SEQ ID NO: 2078722 - RNA, 19 nt, Artificial Sequence
  Description of Artificial Sequence: Synthetic oligonucleotide
gucagcccugcagcccaac

SEQ ID NO: 2078723 - RNA, 19 nt, Artificial Sequence
  Description of Artificial Sequence: Synthetic oligonucleotide
gcccaaccgauaggugcag

SEQ ID NO: 2078724 - RNA, 19 nt, Artificial Sequence
  Description of Artificial Sequence: Synthetic oligonucleotide
cgcgaugcaaaaccaggaa

SEQ ID NO: 2078725 - RNA, 19 nt, Artificial Sequence
  Description of Artificial Sequence: Synthetic oligonucleotide
ccaagagcgccagaggccu

SEQ ID NO: 2078726 - RNA, 19 nt, Artificial Sequence
  Description of Artificial Sequence: Synthetic oligonucleotide
cccaaccgauaggugcagc

SEQ ID NO: 2078727 - RNA, 19 nt, Artificial Sequence
  Description of Artificial Sequence: Synthetic oligonucleotide
ggccgcagggccacaucac

SEQ ID NO: 2078728 - RNA, 19 nt, Artificial Sequence
  Description of Artificial Sequence: Synthetic oligonucleotide
ccgauaggugcagccugac

SEQ ID NO: 2078729 - RNA, 19 nt, Artificial Sequence
  Description of Artificial Sequence: Synthetic oligonucleotide
ggcccggcuccugcugggg

SEQ ID NO: 2078730 - RNA, 19 nt, Artificial Sequence
  Description of Artificial Sequence: Synthetic oligonucleotide
cagaggccuggacacgcau

SEQ ID NO: 2078731 - RNA, 19 nt, Artificial Sequence
  Description of Artificial Sequence: Synthetic oligonucleotide
agggcaccauaggcuggaa

SEQ ID NO: 2078732 - RNA, 19 nt, Artificial Sequence
  Description of Artificial Sequence: Synthetic oligonucleotide
gaauuccgaggagcugguu

SEQ ID NO: 2078733 - RNA, 19 nt, Artificial Sequence
  Description of Artificial Sequence: Synthetic oligonucleotide
cgguucaguugucugacgu

SEQ ID NO: 2078734 - RNA, 19 nt, Artificial Sequence
  Description of Artificial Sequence: Synthetic oligonucleotide
caauuccggagaagcccuu

SEQ ID NO: 2078735 - RNA, 19 nt, Artificial Sequence
  Description of Artificial Sequence: Synthetic oligonucleotide
ccccuaugcgcagcagcug

SEQ ID NO: 2078736 - RNA, 19 nt, Artificial Sequence
  Description of Artificial Sequence: Synthetic oligonucleotide
ggcucagggaagucucguu

SEQ ID NO: 2078737 - RNA, 19 nt, Artificial Sequence
  Description of Artificial Sequence: Synthetic oligonucleotide
gacccgccagucguccccu

SEQ ID NO: 2078738 - RNA, 19 nt, Artificial Sequence
  Description of Artificial Sequence: Synthetic oligonucleotide
cuccgugaugccggguccu

SEQ ID NO: 2078739 - RNA, 19 nt, Artificial Sequence
  Description of Artificial Sequence: Synthetic oligonucleotide
ccucuggggagucggacau

SEQ ID NO: 2078740 - RNA, 19 nt, Artificial Sequence
  Description of Artificial Sequence: Synthetic oligonucleotide
cgauggaguuaaggaucag

SEQ ID NO: 2078741 - RNA, 19 nt, Artificial Sequence
  Description of Artificial Sequence: Synthetic oligonucleotide
caccaccccgggagaaggu

SEQ ID NO: 2078742 - RNA, 19 nt, Artificial Sequence
  Description of Artificial Sequence: Synthetic oligonucleotide
ggcugacccgccagucguc

SEQ ID NO: 2078743 - RNA, 19 nt, Artificial Sequence
  Description of Artificial Sequence: Synthetic oligonucleotide
cuggggagucggacauuau

SEQ ID NO: 2078744 - RNA, 19 nt, Artificial Sequence
  Description of Artificial Sequence: Synthetic oligonucleotide
ccgcuguagcuagcggcug

SEQ ID NO: 2078745 - RNA, 19 nt, Artificial Sequence
  Description of Artificial Sequence: Synthetic oligonucleotide
gcguaggaacagccaggcu

SEQ ID NO: 2078746 - RNA, 19 nt, Artificial Sequence
  Description of Artificial Sequence: Synthetic oligonucleotide
gguuugacccggacuuguu

SEQ ID NO: 2078747 - RNA, 19 nt, Artificial Sequence
  Description of Artificial Sequence: Synthetic oligonucleotide
cgguuucucguggguggag

SEQ ID NO: 2078748 - RNA, 19 nt, Artificial Sequence
  Description of Artificial Sequence: Synthetic oligonucleotide
cccugcagcccaaccgaua

SEQ ID NO: 2078749 - RNA, 19 nt, Artificial Sequence
  Description of Artificial Sequence: Synthetic oligonucleotide
ccuugacugcugugguccu

SEQ ID NO: 2078750 - RNA, 19 nt, Artificial Sequence
  Description of Artificial Sequence: Synthetic oligonucleotide
gaccuccgugaugccgggu

SEQ ID NO: 2078751 - RNA, 19 nt, Artificial Sequence
  Description of Artificial Sequence: Synthetic oligonucleotide
ccgguuucucgugggugga

SEQ ID NO: 2078752 - RNA, 19 nt, Artificial Sequence
  Description of Artificial Sequence: Synthetic oligonucleotide
ccugugggaccuccgugau

SEQ ID NO: 2078753 - RNA, 19 nt, Artificial Sequence
  Description of Artificial Sequence: Synthetic oligonucleotide
ccgugaugccggguccuca

SEQ ID NO: 2078754 - RNA, 19 nt, Artificial Sequence
  Description of Artificial Sequence: Synthetic oligonucleotide
ccuccgguuucucgugggu

SEQ ID NO: 2078755 - RNA, 19 nt, Artificial Sequence
  Description of Artificial Sequence: Synthetic oligonucleotide
gccggguccucaggccgca

SEQ ID NO: 2078756 - RNA, 19 nt, Artificial Sequence
  Description of Artificial Sequence: Synthetic oligonucleotide
cguccugugggaccuccgu

SEQ ID NO: 2078757 - RNA, 19 nt, Artificial Sequence
  Description of Artificial Sequence: Synthetic oligonucleotide
ccgcuucucagcaguucau

SEQ ID NO: 2078758 - RNA, 19 nt, Artificial Sequence
  Description of Artificial Sequence: Synthetic oligonucleotide
cccuagaucgagggacggu

SEQ ID NO: 2078759 - RNA, 19 nt, Artificial Sequence
  Description of Artificial Sequence: Synthetic oligonucleotide
cgcuguagcuagcggcugu

SEQ ID NO: 2078760 - RNA, 19 nt, Artificial Sequence
  Description of Artificial Sequence: Synthetic oligonucleotide
cucuggggagucggacauu

SEQ ID NO: 2078761 - RNA, 19 nt, Artificial Sequence
  Description of Artificial Sequence: Synthetic oligonucleotide
ccggguccucaggccgcag

SEQ ID NO: 2078762 - RNA, 19 nt, Artificial Sequence
  Description of Artificial Sequence: Synthetic oligonucleotide
gcccugcagcccaaccgau

SEQ ID NO: 2078763 - RNA, 19 nt, Artificial Sequence
  Description of Artificial Sequence: Synthetic oligonucleotide
cccggacuuguuggaacau

SEQ ID NO: 2078764 - RNA, 19 nt, Artificial Sequence
  Description of Artificial Sequence: Synthetic oligonucleotide
uuucuuguugcccuuguca

SEQ ID NO: 2078765 - RNA, 19 nt, Artificial Sequence
  Description of Artificial Sequence: Synthetic oligonucleotide
acagugacaguuuucuugu

SEQ ID NO: 2078766 - RNA, 19 nt, Artificial Sequence
  Description of Artificial Sequence: Synthetic oligonucleotide
gugacaguuuucuuguugc

SEQ ID NO: 2078767 - RNA, 19 nt, Artificial Sequence
  Description of Artificial Sequence: Synthetic oligonucleotide
agugacaguuuucuuguug

SEQ ID NO: 2078768 - RNA, 19 nt, Artificial Sequence
  Description of Artificial Sequence: Synthetic oligonucleotide
uucuuguugcccuugucau

SEQ ID NO: 2078769 - RNA, 19 nt, Artificial Sequence
  Description of Artificial Sequence: Synthetic oligonucleotide
ugacaguuuucuuguugcc

SEQ ID NO: 2078770 - RNA, 19 nt, Artificial Sequence
  Description of Artificial Sequence: Synthetic oligonucleotide
cuuguugcccuugucauca

SEQ ID NO: 2078771 - RNA, 19 nt, Artificial Sequence
  Description of Artificial Sequence: Synthetic oligonucleotide
uuuucuuguugcccuuguc

SEQ ID NO: 2078772 - RNA, 19 nt, Artificial Sequence
  Description of Artificial Sequence: Synthetic oligonucleotide
ucuuguugcccuugucauc

SEQ ID NO: 2078773 - RNA, 19 nt, Artificial Sequence
  Description of Artificial Sequence: Synthetic oligonucleotide
aguuuucuuguugcccuug

SEQ ID NO: 2078774 - RNA, 19 nt, Artificial Sequence
  Description of Artificial Sequence: Synthetic oligonucleotide
guuuucuuguugcccuugu

SEQ ID NO: 2078775 - RNA, 19 nt, Artificial Sequence
  Description of Artificial Sequence: Synthetic oligonucleotide
aauaauacuacauucaugg

SEQ ID NO: 2078776 - RNA, 19 nt, Artificial Sequence
  Description of Artificial Sequence: Synthetic oligonucleotide
aaguaaaugaaauaaaacg

SEQ ID NO: 2078777 - RNA, 19 nt, Artificial Sequence
  Description of Artificial Sequence: Synthetic oligonucleotide
aacacuuaccauuaaaugg

SEQ ID NO: 2078778 - RNA, 19 nt, Artificial Sequence
  Description of Artificial Sequence: Synthetic oligonucleotide
uuauauacaagucuaagca

SEQ ID NO: 2078779 - RNA, 19 nt, Artificial Sequence
  Description of Artificial Sequence: Synthetic oligonucleotide
uaagcaaugaccuuggugc

SEQ ID NO: 2078780 - RNA, 19 nt, Artificial Sequence
  Description of Artificial Sequence: Synthetic oligonucleotide
acuuuaaucaacuauaaca

SEQ ID NO: 2078781 - RNA, 19 nt, Artificial Sequence
  Description of Artificial Sequence: Synthetic oligonucleotide
gaaaauuacaacuagaucu

SEQ ID NO: 2078782 - RNA, 19 nt, Artificial Sequence
  Description of Artificial Sequence: Synthetic oligonucleotide
aaugcuucaacacuuacca

SEQ ID NO: 2078783 - RNA, 19 nt, Artificial Sequence
  Description of Artificial Sequence: Synthetic oligonucleotide
uuaaauacuuccaaggaca

SEQ ID NO: 2078784 - RNA, 19 nt, Artificial Sequence
  Description of Artificial Sequence: Synthetic oligonucleotide
uuuaguuuaaugcuugaag

SEQ ID NO: 2078785 - RNA, 19 nt, Artificial Sequence
  Description of Artificial Sequence: Synthetic oligonucleotide
uccaaauguaccauuaggg

SEQ ID NO: 2078786 - RNA, 19 nt, Artificial Sequence
  Description of Artificial Sequence: Synthetic oligonucleotide
aauacaaggugacauuuuc

SEQ ID NO: 2078787 - RNA, 19 nt, Artificial Sequence
  Description of Artificial Sequence: Synthetic oligonucleotide
auuaaauacuuccaaggac

SEQ ID NO: 2078788 - RNA, 19 nt, Artificial Sequence
  Description of Artificial Sequence: Synthetic oligonucleotide
aaucaauuaucauauauaa

SEQ ID NO: 2078789 - RNA, 19 nt, Artificial Sequence
  Description of Artificial Sequence: Synthetic oligonucleotide
uucaauuccauuguaaggg

SEQ ID NO: 2078790 - RNA, 19 nt, Artificial Sequence
  Description of Artificial Sequence: Synthetic oligonucleotide
  modified_base (8)..(8): a, c, u, g, unknown or other
aaaagagngaucaaaugac

SEQ ID NO: 2078791 - RNA, 19 nt, Artificial Sequence
  Description of Artificial Sequence: Synthetic oligonucleotide
ucaauuauaaacaaugcuu

SEQ ID NO: 2078792 - RNA, 19 nt, Artificial Sequence
  Description of Artificial Sequence: Synthetic oligonucleotide
ucaacuauaacaaaucaau

SEQ ID NO: 2078793 - RNA, 19 nt, Artificial Sequence
  Description of Artificial Sequence: Synthetic oligonucleotide
uuaaauucaucacaguaca

SEQ ID NO: 2078794 - RNA, 19 nt, Artificial Sequence
  Description of Artificial Sequence: Synthetic oligonucleotide
uacuuuucaauuauaaaca

SEQ ID NO: 2078795 - RNA, 19 nt, Artificial Sequence
  Description of Artificial Sequence: Synthetic oligonucleotide
aaugagcuuauuuacuuag

SEQ ID NO: 2078796 - RNA, 19 nt, Artificial Sequence
  Description of Artificial Sequence: Synthetic oligonucleotide
uuauguauaaucuaugaau

SEQ ID NO: 2078797 - RNA, 19 nt, Artificial Sequence
  Description of Artificial Sequence: Synthetic oligonucleotide
aauacuacauucaugggag

SEQ ID NO: 2078798 - RNA, 19 nt, Artificial Sequence
  Description of Artificial Sequence: Synthetic oligonucleotide
guuuauauacuuuuguacc

SEQ ID NO: 2078799 - RNA, 19 nt, Artificial Sequence
  Description of Artificial Sequence: Synthetic oligonucleotide
cauacaaucuagaaguucc

SEQ ID NO: 2078800 - RNA, 19 nt, Artificial Sequence
  Description of Artificial Sequence: Synthetic oligonucleotide
aauguuuauauacuuuugu

SEQ ID NO: 2078801 - RNA, 19 nt, Artificial Sequence
  Description of Artificial Sequence: Synthetic oligonucleotide
aguacauacaaucuagaag

SEQ ID NO: 2078802 - RNA, 19 nt, Artificial Sequence
  Description of Artificial Sequence: Synthetic oligonucleotide
aaauauaucaggaagcccu

SEQ ID NO: 2078803 - RNA, 19 nt, Artificial Sequence
  Description of Artificial Sequence: Synthetic oligonucleotide
  modified_base (9)..(9): a, c, u, g, unknown or other
gaaaagagngaucaaauga

SEQ ID NO: 2078804 - RNA, 19 nt, Artificial Sequence
  Description of Artificial Sequence: Synthetic oligonucleotide
uaauacuacauucauggga

SEQ ID NO: 2078805 - RNA, 19 nt, Artificial Sequence
  Description of Artificial Sequence: Synthetic oligonucleotide
ucaacuuuaguuuaaugcu

SEQ ID NO: 2078806 - RNA, 19 nt, Artificial Sequence
  Description of Artificial Sequence: Synthetic oligonucleotide
aacuauaacaaaucaauua

SEQ ID NO: 2078807 - RNA, 19 nt, Artificial Sequence
  Description of Artificial Sequence: Synthetic oligonucleotide
ucauaugcagauuaauuag

SEQ ID NO: 2078808 - RNA, 19 nt, Artificial Sequence
  Description of Artificial Sequence: Synthetic oligonucleotide
aaaacgucaacuuuaguuu

SEQ ID NO: 2078809 - RNA, 19 nt, Artificial Sequence
  Description of Artificial Sequence: Synthetic oligonucleotide
auuacauaaauuauacaac

SEQ ID NO: 2078810 - RNA, 19 nt, Artificial Sequence
  Description of Artificial Sequence: Synthetic oligonucleotide
  modified_base (10)..(10): a, c, u, g, unknown or other
ugaaaagagngaucaaaug

SEQ ID NO: 2078811 - RNA, 19 nt, Artificial Sequence
  Description of Artificial Sequence: Synthetic oligonucleotide
uuucaauuccauuguaagg

SEQ ID NO: 2078812 - RNA, 19 nt, Artificial Sequence
  Description of Artificial Sequence: Synthetic oligonucleotide
aauacacgcacuuauguau

SEQ ID NO: 2078813 - RNA, 19 nt, Artificial Sequence
  Description of Artificial Sequence: Synthetic oligonucleotide
uaaaacgucaacuuuaguu

SEQ ID NO: 2078814 - RNA, 19 nt, Artificial Sequence
  Description of Artificial Sequence: Synthetic oligonucleotide
aaaagguccaaauguacca

SEQ ID NO: 2078815 - RNA, 19 nt, Artificial Sequence
  Description of Artificial Sequence: Synthetic oligonucleotide
aaucaacuauaacaaauca

SEQ ID NO: 2078816 - RNA, 19 nt, Artificial Sequence
  Description of Artificial Sequence: Synthetic oligonucleotide
  modified_base (5)..(5): a, c, u, g, unknown or other
agagngaucaaaugacugg

SEQ ID NO: 2078817 - RNA, 19 nt, Artificial Sequence
  Description of Artificial Sequence: Synthetic oligonucleotide
aguuuaaugcuugaagagc

SEQ ID NO: 2078818 - RNA, 19 nt, Artificial Sequence
  Description of Artificial Sequence: Synthetic oligonucleotide
aaucuaugaauaauacuac

SEQ ID NO: 2078819 - RNA, 19 nt, Artificial Sequence
  Description of Artificial Sequence: Synthetic oligonucleotide
aaaugggcuacacugcauc

SEQ ID NO: 2078820 - RNA, 19 nt, Artificial Sequence
  Description of Artificial Sequence: Synthetic oligonucleotide
uacacugcaucuuauauac

SEQ ID NO: 2078821 - RNA, 19 nt, Artificial Sequence
  Description of Artificial Sequence: Synthetic oligonucleotide
acugccaaaagcaauacac

SEQ ID NO: 2078822 - RNA, 19 nt, Artificial Sequence
  Description of Artificial Sequence: Synthetic oligonucleotide
aaauuauacaacugucaca

SEQ ID NO: 2078823 - RNA, 19 nt, Artificial Sequence
  Description of Artificial Sequence: Synthetic oligonucleotide
gaugguaacggggacaugg

SEQ ID NO: 2078824 - RNA, 19 nt, Artificial Sequence
  Description of Artificial Sequence: Synthetic oligonucleotide
aauucugacucaugcauca

SEQ ID NO: 2078825 - RNA, 19 nt, Artificial Sequence
  Description of Artificial Sequence: Synthetic oligonucleotide
aacaaugcuuacaucauuc

SEQ ID NO: 2078826 - RNA, 19 nt, Artificial Sequence
  Description of Artificial Sequence: Synthetic oligonucleotide
uggaaaauuacaacuagau

SEQ ID NO: 2078827 - RNA, 19 nt, Artificial Sequence
  Description of Artificial Sequence: Synthetic oligonucleotide
ucuaugaauaauacuacau

SEQ ID NO: 2078828 - RNA, 19 nt, Artificial Sequence
  Description of Artificial Sequence: Synthetic oligonucleotide
uuuacuuagguuuccacuc

SEQ ID NO: 2078829 - RNA, 19 nt, Artificial Sequence
  Description of Artificial Sequence: Synthetic oligonucleotide
uaguuuaaugcuugaagag

SEQ ID NO: 2078830 - RNA, 19 nt, Artificial Sequence
  Description of Artificial Sequence: Synthetic oligonucleotide
ucagauuacauaaauuaua

SEQ ID NO: 2078831 - RNA, 19 nt, Artificial Sequence
  Description of Artificial Sequence: Synthetic oligonucleotide
uggauuauuaaaguuauaa

SEQ ID NO: 2078832 - RNA, 19 nt, Artificial Sequence
  Description of Artificial Sequence: Synthetic oligonucleotide
acaagucuaagcaaugacc

SEQ ID NO: 2078833 - RNA, 19 nt, Artificial Sequence
  Description of Artificial Sequence: Synthetic oligonucleotide
aauaaaacgucaacuuuag

SEQ ID NO: 2078834 - RNA, 19 nt, Artificial Sequence
  Description of Artificial Sequence: Synthetic oligonucleotide
guacauacaaucuagaagu

SEQ ID NO: 2078835 - RNA, 19 nt, Artificial Sequence
  Description of Artificial Sequence: Synthetic oligonucleotide
aaaacuaggguggaugcag

SEQ ID NO: 2078836 - RNA, 19 nt, Artificial Sequence
  Description of Artificial Sequence: Synthetic oligonucleotide
aucacacacacacacgugg

SEQ ID NO: 2078837 - RNA, 19 nt, Artificial Sequence
  Description of Artificial Sequence: Synthetic oligonucleotide
agaacauacauuucuagau

SEQ ID NO: 2078838 - RNA, 19 nt, Artificial Sequence
  Description of Artificial Sequence: Synthetic oligonucleotide
aaggguaauacuuuucaau

SEQ ID NO: 2078839 - RNA, 19 nt, Artificial Sequence
  Description of Artificial Sequence: Synthetic oligonucleotide
auguauaugaguugcuaag

SEQ ID NO: 2078840 - RNA, 19 nt, Artificial Sequence
  Description of Artificial Sequence: Synthetic oligonucleotide
ucaacacuuaccauuaaau

SEQ ID NO: 2078841 - RNA, 19 nt, Artificial Sequence
  Description of Artificial Sequence: Synthetic oligonucleotide
acaaugcuuacaucauucc

SEQ ID NO: 2078842 - RNA, 19 nt, Artificial Sequence
  Description of Artificial Sequence: Synthetic oligonucleotide
  modified_base (4)..(4): a, c, u, g, unknown or other
gagngaucaaaugacuggg

SEQ ID NO: 2078843 - RNA, 19 nt, Artificial Sequence
  Description of Artificial Sequence: Synthetic oligonucleotide
  modified_base (18)..(18): a, c, u, g, unknown or other
cucugcacugaaaagagng

SEQ ID NO: 2078844 - RNA, 19 nt, Artificial Sequence
  Description of Artificial Sequence: Synthetic oligonucleotide
acacuuaccauuaaauggg

SEQ ID NO: 2078845 - RNA, 19 nt, Artificial Sequence
  Description of Artificial Sequence: Synthetic oligonucleotide
agauuaauuagugaaggug

SEQ ID NO: 2078846 - RNA, 19 nt, Artificial Sequence
  Description of Artificial Sequence: Synthetic oligonucleotide
uacacaucuuauuaaauau

SEQ ID NO: 2078847 - RNA, 19 nt, Artificial Sequence
  Description of Artificial Sequence: Synthetic oligonucleotide
ucacaucacacacacacac

SEQ ID NO: 2078848 - RNA, 19 nt, Artificial Sequence
  Description of Artificial Sequence: Synthetic oligonucleotide
uuaaaugggcuacacugca

SEQ ID NO: 2078849 - RNA, 19 nt, Artificial Sequence
  Description of Artificial Sequence: Synthetic oligonucleotide
uugcuaagaacauacauuu

SEQ ID NO: 2078850 - RNA, 19 nt, Artificial Sequence
  Description of Artificial Sequence: Synthetic oligonucleotide
uuacuuagguuuccacucg

SEQ ID NO: 2078851 - RNA, 19 nt, Artificial Sequence
  Description of Artificial Sequence: Synthetic oligonucleotide
augaaauaaaacgucaacu

SEQ ID NO: 2078852 - RNA, 19 nt, Artificial Sequence
  Description of Artificial Sequence: Synthetic oligonucleotide
caucacaguacauacaauc

SEQ ID NO: 2078853 - RNA, 19 nt, Artificial Sequence
  Description of Artificial Sequence: Synthetic oligonucleotide
uacaaggugacauuuucac

SEQ ID NO: 2078854 - RNA, 19 nt, Artificial Sequence
  Description of Artificial Sequence: Synthetic oligonucleotide
ugacacaagucccaguagc

SEQ ID NO: 2078855 - RNA, 19 nt, Artificial Sequence
  Description of Artificial Sequence: Synthetic oligonucleotide
ugagcuuauuuacuuaggu

SEQ ID NO: 2078856 - RNA, 19 nt, Artificial Sequence
  Description of Artificial Sequence: Synthetic oligonucleotide
aaaagcaauacacgcacuu

SEQ ID NO: 2078857 - RNA, 19 nt, Artificial Sequence
  Description of Artificial Sequence: Synthetic oligonucleotide
ucacuaaugagcuuauuua

SEQ ID NO: 2078858 - RNA, 19 nt, Artificial Sequence
  Description of Artificial Sequence: Synthetic oligonucleotide
uagaaguuccauaaauuaa

SEQ ID NO: 2078859 - RNA, 19 nt, Artificial Sequence
  Description of Artificial Sequence: Synthetic oligonucleotide
ugaguugcuaagcauuuac

SEQ ID NO: 2078860 - RNA, 19 nt, Artificial Sequence
  Description of Artificial Sequence: Synthetic oligonucleotide
cuagaucuugauuuacugc

SEQ ID NO: 2078861 - RNA, 19 nt, Artificial Sequence
  Description of Artificial Sequence: Synthetic oligonucleotide
uauauacaagucuaagcaa

SEQ ID NO: 2078862 - RNA, 19 nt, Artificial Sequence
  Description of Artificial Sequence: Synthetic oligonucleotide
uauauacuuuuguaccugc

SEQ ID NO: 2078863 - RNA, 19 nt, Artificial Sequence
  Description of Artificial Sequence: Synthetic oligonucleotide
uauaucaggaagcccuuca

SEQ ID NO: 2078864 - RNA, 19 nt, Artificial Sequence
  Description of Artificial Sequence: Synthetic oligonucleotide
caucagauuacauaaauua

SEQ ID NO: 2078865 - RNA, 19 nt, Artificial Sequence
  Description of Artificial Sequence: Synthetic oligonucleotide
auaauacuacauucauggg

SEQ ID NO: 2078866 - RNA, 19 nt, Artificial Sequence
  Description of Artificial Sequence: Synthetic oligonucleotide
acacuugcuaagaacauac

SEQ ID NO: 2078867 - RNA, 19 nt, Artificial Sequence
  Description of Artificial Sequence: Synthetic oligonucleotide
uacaacugucacauuauac

SEQ ID NO: 2078868 - RNA, 19 nt, Artificial Sequence
  Description of Artificial Sequence: Synthetic oligonucleotide
  modified_base (7)..(7): a, c, u, g, unknown or other
aaagagngaucaaaugacu

SEQ ID NO: 2078869 - RNA, 19 nt, Artificial Sequence
  Description of Artificial Sequence: Synthetic oligonucleotide
uugcuaagcauuuacuuaa

SEQ ID NO: 2078870 - RNA, 19 nt, Artificial Sequence
  Description of Artificial Sequence: Synthetic oligonucleotide
aaugcuuacaucauuccaa

SEQ ID NO: 2078871 - RNA, 19 nt, Artificial Sequence
  Description of Artificial Sequence: Synthetic oligonucleotide
gaaggugcuaccuauugca

SEQ ID NO: 2078872 - RNA, 19 nt, Artificial Sequence
  Description of Artificial Sequence: Synthetic oligonucleotide
agacccucuguauaccacc

SEQ ID NO: 2078873 - RNA, 19 nt, Artificial Sequence
  Description of Artificial Sequence: Synthetic oligonucleotide
uguauaaucuaugaauaau

SEQ ID NO: 2078874 - RNA, 19 nt, Artificial Sequence
  Description of Artificial Sequence: Synthetic oligonucleotide
uaauuagugaaggugcuac

SEQ ID NO: 2078875 - RNA, 19 nt, Artificial Sequence
  Description of Artificial Sequence: Synthetic oligonucleotide
auaaauuauacaacuguca

SEQ ID NO: 2078876 - RNA, 19 nt, Artificial Sequence
  Description of Artificial Sequence: Synthetic oligonucleotide
ucuagaaguuccauaaauu

SEQ ID NO: 2078877 - RNA, 19 nt, Artificial Sequence
  Description of Artificial Sequence: Synthetic oligonucleotide
uguauaugaguugcuaagc

SEQ ID NO: 2078878 - RNA, 19 nt, Artificial Sequence
  Description of Artificial Sequence: Synthetic oligonucleotide
aacggggacauggaagagc

SEQ ID NO: 2078879 - RNA, 19 nt, Artificial Sequence
  Description of Artificial Sequence: Synthetic oligonucleotide
aaauucaucacaguacaua

SEQ ID NO: 2078880 - RNA, 19 nt, Artificial Sequence
  Description of Artificial Sequence: Synthetic oligonucleotide
cacuaaugagcuuauuuac

SEQ ID NO: 2078881 - RNA, 19 nt, Artificial Sequence
  Description of Artificial Sequence: Synthetic oligonucleotide
  modified_base (6)..(6): a, c, u, g, unknown or other
aagagngaucaaaugacug

SEQ ID NO: 2078882 - RNA, 19 nt, Artificial Sequence
  Description of Artificial Sequence: Synthetic oligonucleotide
aagcaauacacgcacuuau

SEQ ID NO: 2078883 - RNA, 19 nt, Artificial Sequence
  Description of Artificial Sequence: Synthetic oligonucleotide
acaucacacacacacacgu

SEQ ID NO: 2078884 - RNA, 19 nt, Artificial Sequence
  Description of Artificial Sequence: Synthetic oligonucleotide
caacacuuaccauuaaaug

SEQ ID NO: 2078885 - RNA, 19 nt, Artificial Sequence
  Description of Artificial Sequence: Synthetic oligonucleotide
ugucacauuauacaauguu

SEQ ID NO: 2078886 - RNA, 19 nt, Artificial Sequence
  Description of Artificial Sequence: Synthetic oligonucleotide
gagggcaaaacuagggugg

SEQ ID NO: 2078887 - RNA, 19 nt, Artificial Sequence
  Description of Artificial Sequence: Synthetic oligonucleotide
ugcuugaagagcuucuaca

SEQ ID NO: 2078888 - RNA, 19 nt, Artificial Sequence
  Description of Artificial Sequence: Synthetic oligonucleotide
gaucaaaugacugggcaug

SEQ ID NO: 2078889 - RNA, 19 nt, Artificial Sequence
  Description of Artificial Sequence: Synthetic oligonucleotide
auuacaacuagaucuugau

SEQ ID NO: 2078890 - RNA, 19 nt, Artificial Sequence
  Description of Artificial Sequence: Synthetic oligonucleotide
aacuuuaguuuaaugcuug

SEQ ID NO: 2078891 - RNA, 19 nt, Artificial Sequence
  Description of Artificial Sequence: Synthetic oligonucleotide
ugcaucagauuacauaaau

SEQ ID NO: 2078892 - RNA, 19 nt, Artificial Sequence
  Description of Artificial Sequence: Synthetic oligonucleotide
cacaagucccaguagcugg

SEQ ID NO: 2078893 - RNA, 19 nt, Artificial Sequence
  Description of Artificial Sequence: Synthetic oligonucleotide
agcaucuggauuauuaaag

SEQ ID NO: 2078894 - RNA, 19 nt, Artificial Sequence
  Description of Artificial Sequence: Synthetic oligonucleotide
ccuauugcauauuaaauac

SEQ ID NO: 2078895 - RNA, 19 nt, Artificial Sequence
  Description of Artificial Sequence: Synthetic oligonucleotide
  modified_base (2)..(2): a, c, u, g, unknown or other
unacguggcaauacuguca

SEQ ID NO: 2078896 - RNA, 19 nt, Artificial Sequence
  Description of Artificial Sequence: Synthetic oligonucleotide
gaauaauacuacauucaug

SEQ ID NO: 2078897 - RNA, 19 nt, Artificial Sequence
  Description of Artificial Sequence: Synthetic oligonucleotide
uaagaaggaaggguaauac

SEQ ID NO: 2078898 - RNA, 19 nt, Artificial Sequence
  Description of Artificial Sequence: Synthetic oligonucleotide
ucacacacacacacguggg

SEQ ID NO: 2078899 - RNA, 19 nt, Artificial Sequence
  Description of Artificial Sequence: Synthetic oligonucleotide
ucaugcaucagauuacaua

SEQ ID NO: 2078900 - RNA, 19 nt, Artificial Sequence
  Description of Artificial Sequence: Synthetic oligonucleotide
caaauguaccauuagggga

SEQ ID NO: 2078901 - RNA, 19 nt, Artificial Sequence
  Description of Artificial Sequence: Synthetic oligonucleotide
gugaaacccuuuuaaauac

SEQ ID NO: 2078902 - RNA, 19 nt, Artificial Sequence
  Description of Artificial Sequence: Synthetic oligonucleotide
uauaugaguugcuaagcau

SEQ ID NO: 2078903 - RNA, 19 nt, Artificial Sequence
  Description of Artificial Sequence: Synthetic oligonucleotide
uaccuauugcauauuaaau

SEQ ID NO: 2078904 - RNA, 19 nt, Artificial Sequence
  Description of Artificial Sequence: Synthetic oligonucleotide
aaaugaaauaaaacgucaa

SEQ ID NO: 2078905 - RNA, 19 nt, Artificial Sequence
  Description of Artificial Sequence: Synthetic oligonucleotide
ugcaucuuauauacaaguc

SEQ ID NO: 2078906 - RNA, 19 nt, Artificial Sequence
  Description of Artificial Sequence: Synthetic oligonucleotide
caaucuagaaguuccauaa

SEQ ID NO: 2078907 - RNA, 19 nt, Artificial Sequence
  Description of Artificial Sequence: Synthetic oligonucleotide
uucaacacuuaccauuaaa

SEQ ID NO: 2078908 - RNA, 19 nt, Artificial Sequence
  Description of Artificial Sequence: Synthetic oligonucleotide
  modified_base (2)..(2): a, c, u, g, unknown or other
gngaucaaaugacugggca

SEQ ID NO: 2078909 - RNA, 19 nt, Artificial Sequence
  Description of Artificial Sequence: Synthetic oligonucleotide
cuaagcaaugaccuuggug

SEQ ID NO: 2078910 - RNA, 19 nt, Artificial Sequence
  Description of Artificial Sequence: Synthetic oligonucleotide
ugcuucaacacuuaccauu

SEQ ID NO: 2078911 - RNA, 19 nt, Artificial Sequence
  Description of Artificial Sequence: Synthetic oligonucleotide
agucuaagcaaugaccuug

SEQ ID NO: 2078912 - RNA, 19 nt, Artificial Sequence
  Description of Artificial Sequence: Synthetic oligonucleotide
accagcuugcagcacaguc

SEQ ID NO: 2078913 - RNA, 19 nt, Artificial Sequence
  Description of Artificial Sequence: Synthetic oligonucleotide
ucugucacuaaugagcuua

SEQ ID NO: 2078914 - RNA, 19 nt, Artificial Sequence
  Description of Artificial Sequence: Synthetic oligonucleotide
augaauaauacuacauuca

SEQ ID NO: 2078915 - RNA, 19 nt, Artificial Sequence
  Description of Artificial Sequence: Synthetic oligonucleotide
uccaacacuugcuaagaac

SEQ ID NO: 2078916 - RNA, 19 nt, Artificial Sequence
  Description of Artificial Sequence: Synthetic oligonucleotide
caauguuuauauacuuuug

SEQ ID NO: 2078917 - RNA, 19 nt, Artificial Sequence
  Description of Artificial Sequence: Synthetic oligonucleotide
agagcuucuacacaucuua

SEQ ID NO: 2078918 - RNA, 19 nt, Artificial Sequence
  Description of Artificial Sequence: Synthetic oligonucleotide
guacagagaaaaguaaaug

SEQ ID NO: 2078919 - RNA, 19 nt, Artificial Sequence
  Description of Artificial Sequence: Synthetic oligonucleotide
ucuugauuuacugccaaaa

SEQ ID NO: 2078920 - RNA, 19 nt, Artificial Sequence
  Description of Artificial Sequence: Synthetic oligonucleotide
uuagguuuccacucgugaa

SEQ ID NO: 2078921 - RNA, 19 nt, Artificial Sequence
  Description of Artificial Sequence: Synthetic oligonucleotide
agauuacauaaauuauaca

SEQ ID NO: 2078922 - RNA, 19 nt, Artificial Sequence
  Description of Artificial Sequence: Synthetic oligonucleotide
ucuacacaucuuauuaaau

SEQ ID NO: 2078923 - RNA, 19 nt, Artificial Sequence
  Description of Artificial Sequence: Synthetic oligonucleotide
acauacaaucuagaaguuc

SEQ ID NO: 2078924 - RNA, 19 nt, Artificial Sequence
  Description of Artificial Sequence: Synthetic oligonucleotide
uauuuacuuagguuuccac

SEQ ID NO: 2078925 - RNA, 19 nt, Artificial Sequence
  Description of Artificial Sequence: Synthetic oligonucleotide
uuaccauuaaaugggcuac

SEQ ID NO: 2078926 - RNA, 19 nt, Artificial Sequence
  Description of Artificial Sequence: Synthetic oligonucleotide
gcagauuaauuagugaagg

SEQ ID NO: 2078927 - RNA, 19 nt, Artificial Sequence
  Description of Artificial Sequence: Synthetic oligonucleotide
uaaugcuugaagagcuucu

SEQ ID NO: 2078928 - RNA, 19 nt, Artificial Sequence
  Description of Artificial Sequence: Synthetic oligonucleotide
aaugggcuacacugcaucu

SEQ ID NO: 2078929 - RNA, 19 nt, Artificial Sequence
  Description of Artificial Sequence: Synthetic oligonucleotide
auguuuauauacuuuugua

SEQ ID NO: 2078930 - RNA, 19 nt, Artificial Sequence
  Description of Artificial Sequence: Synthetic oligonucleotide
aaacgucaacuuuaguuua

SEQ ID NO: 2078931 - RNA, 19 nt, Artificial Sequence
  Description of Artificial Sequence: Synthetic oligonucleotide
cuagaaguuccauaaauua

SEQ ID NO: 2078932 - RNA, 19 nt, Artificial Sequence
  Description of Artificial Sequence: Synthetic oligonucleotide
  modified_base (13)..(13): a, c, u, g, unknown or other
caguagcugggunacgugg

SEQ ID NO: 2078933 - RNA, 19 nt, Artificial Sequence
  Description of Artificial Sequence: Synthetic oligonucleotide
ugaaacccuuuuaaauaca

SEQ ID NO: 2078934 - RNA, 19 nt, Artificial Sequence
  Description of Artificial Sequence: Synthetic oligonucleotide
gcuuacaucauuccaacac

SEQ ID NO: 2078935 - RNA, 19 nt, Artificial Sequence
  Description of Artificial Sequence: Synthetic oligonucleotide
augcuugaagagcuucuac

SEQ ID NO: 2078936 - RNA, 19 nt, Artificial Sequence
  Description of Artificial Sequence: Synthetic oligonucleotide
uaugaguugcuaagcauuu

SEQ ID NO: 2078937 - RNA, 19 nt, Artificial Sequence
  Description of Artificial Sequence: Synthetic oligonucleotide
guauaugaguugcuaagca

SEQ ID NO: 2078938 - RNA, 19 nt, Artificial Sequence
  Description of Artificial Sequence: Synthetic oligonucleotide
cauuucuagaucugcagca

SEQ ID NO: 2078939 - RNA, 19 nt, Artificial Sequence
  Description of Artificial Sequence: Synthetic oligonucleotide
auguauaaucuaugaauaa

SEQ ID NO: 2078940 - RNA, 19 nt, Artificial Sequence
  Description of Artificial Sequence: Synthetic oligonucleotide
ggugcaugcugacagaccc

SEQ ID NO: 2078941 - RNA, 19 nt, Artificial Sequence
  Description of Artificial Sequence: Synthetic oligonucleotide
guggaugcagaacacagca

SEQ ID NO: 2078942 - RNA, 19 nt, Artificial Sequence
  Description of Artificial Sequence: Synthetic oligonucleotide
guaacggggacauggaaga

SEQ ID NO: 2078943 - RNA, 19 nt, Artificial Sequence
  Description of Artificial Sequence: Synthetic oligonucleotide
  modified_base (3)..(3): a, c, u, g, unknown or other
agngaucaaaugacugggc

SEQ ID NO: 2078944 - RNA, 19 nt, Artificial Sequence
  Description of Artificial Sequence: Synthetic oligonucleotide
auauacaagucuaagcaau

SEQ ID NO: 2078945 - RNA, 19 nt, Artificial Sequence
  Description of Artificial Sequence: Synthetic oligonucleotide
  modified_base (12)..(12): a, c, u, g, unknown or other
aguagcugggunacguggc

SEQ ID NO: 2078946 - RNA, 19 nt, Artificial Sequence
  Description of Artificial Sequence: Synthetic oligonucleotide
cuuauuuacuuagguuucc

SEQ ID NO: 2078947 - RNA, 19 nt, Artificial Sequence
  Description of Artificial Sequence: Synthetic oligonucleotide
caucuuauauacaagucua

SEQ ID NO: 2078948 - RNA, 19 nt, Artificial Sequence
  Description of Artificial Sequence: Synthetic oligonucleotide
cuaggguggaugcagaaca

SEQ ID NO: 2078949 - RNA, 19 nt, Artificial Sequence
  Description of Artificial Sequence: Synthetic oligonucleotide
acuacauucaugggaggag

SEQ ID NO: 2078950 - RNA, 19 nt, Artificial Sequence
  Description of Artificial Sequence: Synthetic oligonucleotide
ugcuaagcauuuacuuaag

SEQ ID NO: 2078951 - RNA, 19 nt, Artificial Sequence
  Description of Artificial Sequence: Synthetic oligonucleotide
cuaccuauugcauauuaaa

SEQ ID NO: 2078952 - RNA, 19 nt, Artificial Sequence
  Description of Artificial Sequence: Synthetic oligonucleotide
ugcucgaggaaugacacaa

SEQ ID NO: 2078953 - RNA, 19 nt, Artificial Sequence
  Description of Artificial Sequence: Synthetic oligonucleotide
cgaggaaugacacaagucc

SEQ ID NO: 2078954 - RNA, 19 nt, Artificial Sequence
  Description of Artificial Sequence: Synthetic oligonucleotide
ugaccuuggugcucgagga

SEQ ID NO: 2078955 - RNA, 19 nt, Artificial Sequence
  Description of Artificial Sequence: Synthetic oligonucleotide
uucuagaucugcagcauuu

SEQ ID NO: 2078956 - RNA, 19 nt, Artificial Sequence
  Description of Artificial Sequence: Synthetic oligonucleotide
uggugcucgaggaaugaca

SEQ ID NO: 2078957 - RNA, 19 nt, Artificial Sequence
  Description of Artificial Sequence: Synthetic oligonucleotide
ugcagcacaguccuucccu

SEQ ID NO: 2078958 - RNA, 19 nt, Artificial Sequence
  Description of Artificial Sequence: Synthetic oligonucleotide
aacuagaucuugauuuacu

SEQ ID NO: 2078959 - RNA, 19 nt, Artificial Sequence
  Description of Artificial Sequence: Synthetic oligonucleotide
aaaauguauaugaguugcu

SEQ ID NO: 2078960 - RNA, 19 nt, Artificial Sequence
  Description of Artificial Sequence: Synthetic oligonucleotide
acucgugaaacccuuuuaa

SEQ ID NO: 2078961 - RNA, 19 nt, Artificial Sequence
  Description of Artificial Sequence: Synthetic oligonucleotide
cuuaccauuaaaugggcua

SEQ ID NO: 2078962 - RNA, 19 nt, Artificial Sequence
  Description of Artificial Sequence: Synthetic oligonucleotide
uuauuuacuuagguuucca

SEQ ID NO: 2078963 - RNA, 19 nt, Artificial Sequence
  Description of Artificial Sequence: Synthetic oligonucleotide
cacgcacuuauguauaauc

SEQ ID NO: 2078964 - RNA, 19 nt, Artificial Sequence
  Description of Artificial Sequence: Synthetic oligonucleotide
ucgaggaaugacacaaguc

SEQ ID NO: 2078965 - RNA, 19 nt, Artificial Sequence
  Description of Artificial Sequence: Synthetic oligonucleotide
acaaucuagaaguuccaua

SEQ ID NO: 2078966 - RNA, 19 nt, Artificial Sequence
  Description of Artificial Sequence: Synthetic oligonucleotide
uuaaugcuugaagagcuuc

SEQ ID NO: 2078967 - RNA, 19 nt, Artificial Sequence
  Description of Artificial Sequence: Synthetic oligonucleotide
uuacaacuagaucuugauu

SEQ ID NO: 2078968 - RNA, 19 nt, Artificial Sequence
  Description of Artificial Sequence: Synthetic oligonucleotide
cacaucacacacacacacg

SEQ ID NO: 2078969 - RNA, 19 nt, Artificial Sequence
  Description of Artificial Sequence: Synthetic oligonucleotide
gcuggaaaauuacaacuag

SEQ ID NO: 2078970 - RNA, 19 nt, Artificial Sequence
  Description of Artificial Sequence: Synthetic oligonucleotide
uacuacauucaugggagga

SEQ ID NO: 2078971 - RNA, 19 nt, Artificial Sequence
  Description of Artificial Sequence: Synthetic oligonucleotide
uuuccacucgugaaacccu

SEQ ID NO: 2078972 - RNA, 19 nt, Artificial Sequence
  Description of Artificial Sequence: Synthetic oligonucleotide
guugcuaagcauuuacuua

SEQ ID NO: 2078973 - RNA, 19 nt, Artificial Sequence
  Description of Artificial Sequence: Synthetic oligonucleotide
  modified_base (15)..(15): a, c, u, g, unknown or other
ugcacugaaaagagngauc

SEQ ID NO: 2078974 - RNA, 19 nt, Artificial Sequence
  Description of Artificial Sequence: Synthetic oligonucleotide
acuaaugagcuuauuuacu

SEQ ID NO: 2078975 - RNA, 19 nt, Artificial Sequence
  Description of Artificial Sequence: Synthetic oligonucleotide
auuaauuagugaaggugcu

SEQ ID NO: 2078976 - RNA, 19 nt, Artificial Sequence
  Description of Artificial Sequence: Synthetic oligonucleotide
uuaagaaggaaggguaaua

SEQ ID NO: 2078977 - RNA, 19 nt, Artificial Sequence
  Description of Artificial Sequence: Synthetic oligonucleotide
ugggaggagggcaaaacua

SEQ ID NO: 2078978 - RNA, 19 nt, Artificial Sequence
  Description of Artificial Sequence: Synthetic oligonucleotide
uaaauucaucacaguacau

SEQ ID NO: 2078979 - RNA, 19 nt, Artificial Sequence
  Description of Artificial Sequence: Synthetic oligonucleotide
  modified_base (6)..(6): a, c, u, g, unknown or other
ugggunacguggcaauacu

SEQ ID NO: 2078980 - RNA, 19 nt, Artificial Sequence
  Description of Artificial Sequence: Synthetic oligonucleotide
acccuuuuaaauacaaggu

SEQ ID NO: 2078981 - RNA, 19 nt, Artificial Sequence
  Description of Artificial Sequence: Synthetic oligonucleotide
auacuacauucaugggagg

SEQ ID NO: 2078982 - RNA, 19 nt, Artificial Sequence
  Description of Artificial Sequence: Synthetic oligonucleotide
caaaugacugggcaugcuc

SEQ ID NO: 2078983 - RNA, 19 nt, Artificial Sequence
  Description of Artificial Sequence: Synthetic oligonucleotide
cacuuaccauuaaaugggc

SEQ ID NO: 2078984 - RNA, 19 nt, Artificial Sequence
  Description of Artificial Sequence: Synthetic oligonucleotide
  modified_base (3)..(3): a, c, u, g, unknown or other
gunacguggcaauacuguc

SEQ ID NO: 2078985 - RNA, 19 nt, Artificial Sequence
  Description of Artificial Sequence: Synthetic oligonucleotide
aucagauuacauaaauuau

SEQ ID NO: 2078986 - RNA, 19 nt, Artificial Sequence
  Description of Artificial Sequence: Synthetic oligonucleotide
aucaacuauaacaaaucaa

SEQ ID NO: 2078987 - RNA, 19 nt, Artificial Sequence
  Description of Artificial Sequence: Synthetic oligonucleotide
acaacuagaucuugauuua

SEQ ID NO: 2078988 - RNA, 19 nt, Artificial Sequence
  Description of Artificial Sequence: Synthetic oligonucleotide
ggaaggguaauacuuuuca

SEQ ID NO: 2078989 - RNA, 19 nt, Artificial Sequence
  Description of Artificial Sequence: Synthetic oligonucleotide
ggauuauuaaaguuauaaa

SEQ ID NO: 2078990 - RNA, 19 nt, Artificial Sequence
  Description of Artificial Sequence: Synthetic oligonucleotide
aaagguccaaauguaccau

SEQ ID NO: 2078991 - RNA, 19 nt, Artificial Sequence
  Description of Artificial Sequence: Synthetic oligonucleotide
caaaucaauuaucauauau

SEQ ID NO: 2078992 - RNA, 19 nt, Artificial Sequence
  Description of Artificial Sequence: Synthetic oligonucleotide
acuuuaguuuaaugcuuga

SEQ ID NO: 2078993 - RNA, 19 nt, Artificial Sequence
  Description of Artificial Sequence: Synthetic oligonucleotide
cuggaaaauuacaacuaga

SEQ ID NO: 2078994 - RNA, 19 nt, Artificial Sequence
  Description of Artificial Sequence: Synthetic oligonucleotide
aaagcaauacacgcacuua

SEQ ID NO: 2078995 - RNA, 19 nt, Artificial Sequence
  Description of Artificial Sequence: Synthetic oligonucleotide
ggagggcaaaacuagggug

SEQ ID NO: 2078996 - RNA, 19 nt, Artificial Sequence
  Description of Artificial Sequence: Synthetic oligonucleotide
  modified_base (14)..(14): a, c, u, g, unknown or other
gcacugaaaagagngauca

SEQ ID NO: 2078997 - RNA, 19 nt, Artificial Sequence
  Description of Artificial Sequence: Synthetic oligonucleotide
gucuaagcaaugaccuugg

SEQ ID NO: 2078998 - RNA, 19 nt, Artificial Sequence
  Description of Artificial Sequence: Synthetic oligonucleotide
ugacugggcaugcucacau

SEQ ID NO: 2078999 - RNA, 19 nt, Artificial Sequence
  Description of Artificial Sequence: Synthetic oligonucleotide
uacuuagguuuccacucgu

SEQ ID NO: 2079000 - RNA, 19 nt, Artificial Sequence
  Description of Artificial Sequence: Synthetic oligonucleotide
cucuguauaccaccaccag

SEQ ID NO: 2079001 - RNA, 19 nt, Artificial Sequence
  Description of Artificial Sequence: Synthetic oligonucleotide
cuuagguuuccacucguga

SEQ ID NO: 2079002 - RNA, 19 nt, Artificial Sequence
  Description of Artificial Sequence: Synthetic oligonucleotide
ugcuaagaacauacauuuc

SEQ ID NO: 2079003 - RNA, 19 nt, Artificial Sequence
  Description of Artificial Sequence: Synthetic oligonucleotide
ggcaauacugucaagcuga

SEQ ID NO: 2079004 - RNA, 19 nt, Artificial Sequence
  Description of Artificial Sequence: Synthetic oligonucleotide
gguaacggggacauggaag

SEQ ID NO: 2079005 - RNA, 19 nt, Artificial Sequence
  Description of Artificial Sequence: Synthetic oligonucleotide
auaaaacgucaacuuuagu

SEQ ID NO: 2079006 - RNA, 19 nt, Artificial Sequence
  Description of Artificial Sequence: Synthetic oligonucleotide
cacacacacacacgugggg

SEQ ID NO: 2079007 - RNA, 19 nt, Artificial Sequence
  Description of Artificial Sequence: Synthetic oligonucleotide
aagguccaaauguaccauu

SEQ ID NO: 2079008 - RNA, 19 nt, Artificial Sequence
  Description of Artificial Sequence: Synthetic oligonucleotide
aacuaggguggaugcagaa

SEQ ID NO: 2079009 - RNA, 19 nt, Artificial Sequence
  Description of Artificial Sequence: Synthetic oligonucleotide
ugggcuacacugcaucuua

SEQ ID NO: 2079010 - RNA, 19 nt, Artificial Sequence
  Description of Artificial Sequence: Synthetic oligonucleotide
cuugcuaagaacauacauu

SEQ ID NO: 2079011 - RNA, 19 nt, Artificial Sequence
  Description of Artificial Sequence: Synthetic oligonucleotide
caaugcuuacaucauucca

SEQ ID NO: 2079012 - RNA, 19 nt, Artificial Sequence
  Description of Artificial Sequence: Synthetic oligonucleotide
uuucuagaucugcagcauu

SEQ ID NO: 2079013 - RNA, 19 nt, Artificial Sequence
  Description of Artificial Sequence: Synthetic oligonucleotide
uaaaugggcuacacugcau

SEQ ID NO: 2079014 - RNA, 19 nt, Artificial Sequence
  Description of Artificial Sequence: Synthetic oligonucleotide
uuaauuagugaaggugcua

SEQ ID NO: 2079015 - RNA, 19 nt, Artificial Sequence
  Description of Artificial Sequence: Synthetic oligonucleotide
auauaucaggaagcccuuc

SEQ ID NO: 2079016 - RNA, 19 nt, Artificial Sequence
  Description of Artificial Sequence: Synthetic oligonucleotide
agcauuuacuuaagaagga

SEQ ID NO: 2079017 - RNA, 19 nt, Artificial Sequence
  Description of Artificial Sequence: Synthetic oligonucleotide
cacacacguggggagaugg

SEQ ID NO: 2079018 - RNA, 19 nt, Artificial Sequence
  Description of Artificial Sequence: Synthetic oligonucleotide
gacucaugcaucagauuac

SEQ ID NO: 2079019 - RNA, 19 nt, Artificial Sequence
  Description of Artificial Sequence: Synthetic oligonucleotide
auaucaggaagcccuucau

SEQ ID NO: 2079020 - RNA, 19 nt, Artificial Sequence
  Description of Artificial Sequence: Synthetic oligonucleotide
gauuuacugccaaaagcaa

SEQ ID NO: 2079021 - RNA, 19 nt, Artificial Sequence
  Description of Artificial Sequence: Synthetic oligonucleotide
ggggacagauuucaauucc

SEQ ID NO: 2079022 - RNA, 19 nt, Artificial Sequence
  Description of Artificial Sequence: Synthetic oligonucleotide
auacugucaagcugaguuu

SEQ ID NO: 2079023 - RNA, 19 nt, Artificial Sequence
  Description of Artificial Sequence: Synthetic oligonucleotide
acgcacuuauguauaaucu

SEQ ID NO: 2079024 - RNA, 19 nt, Artificial Sequence
  Description of Artificial Sequence: Synthetic oligonucleotide
ggcaaaacuaggguggaug

SEQ ID NO: 2079025 - RNA, 19 nt, Artificial Sequence
  Description of Artificial Sequence: Synthetic oligonucleotide
cauuaggggacagauuuca

SEQ ID NO: 2079026 - RNA, 19 nt, Artificial Sequence
  Description of Artificial Sequence: Synthetic oligonucleotide
uacaaucuagaaguuccau

SEQ ID NO: 2079027 - RNA, 19 nt, Artificial Sequence
  Description of Artificial Sequence: Synthetic oligonucleotide
  modified_base (7)..(7): a, c, u, g, unknown or other
cugggunacguggcaauac

SEQ ID NO: 2079028 - RNA, 19 nt, Artificial Sequence
  Description of Artificial Sequence: Synthetic oligonucleotide
caguacauacaaucuagaa

SEQ ID NO: 2079029 - RNA, 19 nt, Artificial Sequence
  Description of Artificial Sequence: Synthetic oligonucleotide
aauguaccauuaggggaca

SEQ ID NO: 2079030 - RNA, 19 nt, Artificial Sequence
  Description of Artificial Sequence: Synthetic oligonucleotide
cauaugcagauuaauuagu

SEQ ID NO: 2079031 - RNA, 19 nt, Artificial Sequence
  Description of Artificial Sequence: Synthetic oligonucleotide
acaagucccaguagcuggg

SEQ ID NO: 2079032 - RNA, 19 nt, Artificial Sequence
  Description of Artificial Sequence: Synthetic oligonucleotide
caucacacacacacacgug

SEQ ID NO: 2079033 - RNA, 19 nt, Artificial Sequence
  Description of Artificial Sequence: Synthetic oligonucleotide
gcaucuuauauacaagucu

SEQ ID NO: 2079034 - RNA, 19 nt, Artificial Sequence
  Description of Artificial Sequence: Synthetic oligonucleotide
uacugucaagcugaguuua

SEQ ID NO: 2079035 - RNA, 19 nt, Artificial Sequence
  Description of Artificial Sequence: Synthetic oligonucleotide
ccagcuugcagcacagucc

SEQ ID NO: 2079036 - RNA, 19 nt, Artificial Sequence
  Description of Artificial Sequence: Synthetic oligonucleotide
acucaugcaucagauuaca

SEQ ID NO: 2079037 - RNA, 19 nt, Artificial Sequence
  Description of Artificial Sequence: Synthetic oligonucleotide
auacaaggugacauuuuca

SEQ ID NO: 2079038 - RNA, 19 nt, Artificial Sequence
  Description of Artificial Sequence: Synthetic oligonucleotide
auacaacugucacauuaua

SEQ ID NO: 2079039 - RNA, 19 nt, Artificial Sequence
  Description of Artificial Sequence: Synthetic oligonucleotide
uacacgcacuuauguauaa

SEQ ID NO: 2079040 - RNA, 19 nt, Artificial Sequence
  Description of Artificial Sequence: Synthetic oligonucleotide
agcaauacacgcacuuaug

SEQ ID NO: 2079041 - RNA, 19 nt, Artificial Sequence
  Description of Artificial Sequence: Synthetic oligonucleotide
cuaaugagcuuauuuacuu

SEQ ID NO: 2079042 - RNA, 19 nt, Artificial Sequence
  Description of Artificial Sequence: Synthetic oligonucleotide
aggaaugacacaaguccca

SEQ ID NO: 2079043 - RNA, 19 nt, Artificial Sequence
  Description of Artificial Sequence: Synthetic oligonucleotide
acacaagucccaguagcug

SEQ ID NO: 2079044 - RNA, 19 nt, Artificial Sequence
  Description of Artificial Sequence: Synthetic oligonucleotide
ugguaacggggacauggaa

SEQ ID NO: 2079045 - RNA, 19 nt, Artificial Sequence
  Description of Artificial Sequence: Synthetic oligonucleotide
caacuagaucuugauuuac

SEQ ID NO: 2079046 - RNA, 19 nt, Artificial Sequence
  Description of Artificial Sequence: Synthetic oligonucleotide
acacacacacacgugggga

SEQ ID NO: 2079047 - RNA, 19 nt, Artificial Sequence
  Description of Artificial Sequence: Synthetic oligonucleotide
ugcugacagacccucugua

SEQ ID NO: 2079048 - RNA, 19 nt, Artificial Sequence
  Description of Artificial Sequence: Synthetic oligonucleotide
auuccauuguaaggguuga

SEQ ID NO: 2079049 - RNA, 19 nt, Artificial Sequence
  Description of Artificial Sequence: Synthetic oligonucleotide
acccucuguauaccaccac

SEQ ID NO: 2079050 - RNA, 19 nt, Artificial Sequence
  Description of Artificial Sequence: Synthetic oligonucleotide
caauacacgcacuuaugua

SEQ ID NO: 2079051 - RNA, 19 nt, Artificial Sequence
  Description of Artificial Sequence: Synthetic oligonucleotide
aacgucaacuuuaguuuaa

SEQ ID NO: 2079052 - RNA, 19 nt, Artificial Sequence
  Description of Artificial Sequence: Synthetic oligonucleotide
acaguacauacaaucuaga

SEQ ID NO: 2079053 - RNA, 19 nt, Artificial Sequence
  Description of Artificial Sequence: Synthetic oligonucleotide
auauacuuuuguaccugca

SEQ ID NO: 2079054 - RNA, 19 nt, Artificial Sequence
  Description of Artificial Sequence: Synthetic oligonucleotide
ugcaugcugacagacccuc

SEQ ID NO: 2079055 - RNA, 19 nt, Artificial Sequence
  Description of Artificial Sequence: Synthetic oligonucleotide
uaccauuaaaugggcuaca

SEQ ID NO: 2079056 - RNA, 19 nt, Artificial Sequence
  Description of Artificial Sequence: Synthetic oligonucleotide
acggggacauggaagagca

SEQ ID NO: 2079057 - RNA, 19 nt, Artificial Sequence
  Description of Artificial Sequence: Synthetic oligonucleotide
auacaaucuagaaguucca

SEQ ID NO: 2079058 - RNA, 19 nt, Artificial Sequence
  Description of Artificial Sequence: Synthetic oligonucleotide
gggaggagggcaaaacuag

SEQ ID NO: 2079059 - RNA, 19 nt, Artificial Sequence
  Description of Artificial Sequence: Synthetic oligonucleotide
  modified_base (9)..(9): a, c, u, g, unknown or other
agcugggunacguggcaau

SEQ ID NO: 2079060 - RNA, 19 nt, Artificial Sequence
  Description of Artificial Sequence: Synthetic oligonucleotide
aucuuauauacaagucuaa

SEQ ID NO: 2079061 - RNA, 19 nt, Artificial Sequence
  Description of Artificial Sequence: Synthetic oligonucleotide
cagauuucaauuccauugu

SEQ ID NO: 2079062 - RNA, 19 nt, Artificial Sequence
  Description of Artificial Sequence: Synthetic oligonucleotide
cagacccucuguauaccac

SEQ ID NO: 2079063 - RNA, 19 nt, Artificial Sequence
  Description of Artificial Sequence: Synthetic oligonucleotide
acuuaccauuaaaugggcu

SEQ ID NO: 2079064 - RNA, 19 nt, Artificial Sequence
  Description of Artificial Sequence: Synthetic oligonucleotide
  modified_base (16)..(16): a, c, u, g, unknown or other
ucccaguagcugggunacg

SEQ ID NO: 2079065 - RNA, 19 nt, Artificial Sequence
  Description of Artificial Sequence: Synthetic oligonucleotide
uuccacucgugaaacccuu

SEQ ID NO: 2079066 - RNA, 19 nt, Artificial Sequence
  Description of Artificial Sequence: Synthetic oligonucleotide
cucacaucacacacacaca

SEQ ID NO: 2079067 - RNA, 19 nt, Artificial Sequence
  Description of Artificial Sequence: Synthetic oligonucleotide
aggugcuaccuauugcaua

SEQ ID NO: 2079068 - RNA, 19 nt, Artificial Sequence
  Description of Artificial Sequence: Synthetic oligonucleotide
uaacggggacauggaagag

SEQ ID NO: 2079069 - RNA, 19 nt, Artificial Sequence
  Description of Artificial Sequence: Synthetic oligonucleotide
gucacauuauacaauguuu

SEQ ID NO: 2079070 - RNA, 19 nt, Artificial Sequence
  Description of Artificial Sequence: Synthetic oligonucleotide
aaggugcuaccuauugcau

SEQ ID NO: 2079071 - RNA, 19 nt, Artificial Sequence
  Description of Artificial Sequence: Synthetic oligonucleotide
guaauacuuuucaauuaua

SEQ ID NO: 2079072 - RNA, 19 nt, Artificial Sequence
  Description of Artificial Sequence: Synthetic oligonucleotide
cccucuguauaccaccacc

SEQ ID NO: 2079073 - RNA, 19 nt, Artificial Sequence
  Description of Artificial Sequence: Synthetic oligonucleotide
  modified_base (10)..(10): a, c, u, g, unknown or other
uagcugggunacguggcaa

SEQ ID NO: 2079074 - RNA, 19 nt, Artificial Sequence
  Description of Artificial Sequence: Synthetic oligonucleotide
acuuagguuuccacucgug

SEQ ID NO: 2079075 - RNA, 19 nt, Artificial Sequence
  Description of Artificial Sequence: Synthetic oligonucleotide
acguggggagaugguaacg

SEQ ID NO: 2079076 - RNA, 19 nt, Artificial Sequence
  Description of Artificial Sequence: Synthetic oligonucleotide
cagauuaauuagugaaggu

SEQ ID NO: 2079077 - RNA, 19 nt, Artificial Sequence
  Description of Artificial Sequence: Synthetic oligonucleotide
gcaauacacgcacuuaugu

SEQ ID NO: 2079078 - RNA, 19 nt, Artificial Sequence
  Description of Artificial Sequence: Synthetic oligonucleotide
ggugcuaccuauugcauau

SEQ ID NO: 2079079 - RNA, 19 nt, Artificial Sequence
  Description of Artificial Sequence: Synthetic oligonucleotide
  modified_base (11)..(11): a, c, u, g, unknown or other
guagcugggunacguggca

SEQ ID NO: 2079080 - RNA, 19 nt, Artificial Sequence
  Description of Artificial Sequence: Synthetic oligonucleotide
caacuauaacaaaucaauu

SEQ ID NO: 2079081 - RNA, 19 nt, Artificial Sequence
  Description of Artificial Sequence: Synthetic oligonucleotide
gcuaagcauuuacuuaaga

SEQ ID NO: 2079082 - RNA, 19 nt, Artificial Sequence
  Description of Artificial Sequence: Synthetic oligonucleotide
uuggugcucgaggaaugac

SEQ ID NO: 2079083 - RNA, 19 nt, Artificial Sequence
  Description of Artificial Sequence: Synthetic oligonucleotide
  modified_base (4)..(4): a, c, u, g, unknown or other
ggunacguggcaauacugu

SEQ ID NO: 2079084 - RNA, 19 nt, Artificial Sequence
  Description of Artificial Sequence: Synthetic oligonucleotide
gccaaaagcaauacacgca

SEQ ID NO: 2079085 - RNA, 19 nt, Artificial Sequence
  Description of Artificial Sequence: Synthetic oligonucleotide
augcuucaacacuuaccau

SEQ ID NO: 2079086 - RNA, 19 nt, Artificial Sequence
  Description of Artificial Sequence: Synthetic oligonucleotide
aggcaaugcuucaacacuu

SEQ ID NO: 2079087 - RNA, 19 nt, Artificial Sequence
  Description of Artificial Sequence: Synthetic oligonucleotide
gggcuuucggugcaugcug

SEQ ID NO: 2079088 - RNA, 19 nt, Artificial Sequence
  Description of Artificial Sequence: Synthetic oligonucleotide
auacacgcacuuauguaua

SEQ ID NO: 2079089 - RNA, 19 nt, Artificial Sequence
  Description of Artificial Sequence: Synthetic oligonucleotide
caaaacuaggguggaugca

SEQ ID NO: 2079090 - RNA, 19 nt, Artificial Sequence
  Description of Artificial Sequence: Synthetic oligonucleotide
cacuugcuaagaacauaca

SEQ ID NO: 2079091 - RNA, 19 nt, Artificial Sequence
  Description of Artificial Sequence: Synthetic oligonucleotide
agguccaaauguaccauua

SEQ ID NO: 2079092 - RNA, 19 nt, Artificial Sequence
  Description of Artificial Sequence: Synthetic oligonucleotide
gaguugcuaagcauuuacu

SEQ ID NO: 2079093 - RNA, 19 nt, Artificial Sequence
  Description of Artificial Sequence: Synthetic oligonucleotide
  modified_base (5)..(5): a, c, u, g, unknown or other
gggunacguggcaauacug

SEQ ID NO: 2079094 - RNA, 19 nt, Artificial Sequence
  Description of Artificial Sequence: Synthetic oligonucleotide
  modified_base (14)..(14): a, c, u, g, unknown or other
ccaguagcugggunacgug

SEQ ID NO: 2079095 - RNA, 19 nt, Artificial Sequence
  Description of Artificial Sequence: Synthetic oligonucleotide
guaccauuaggggacagau

SEQ ID NO: 2079096 - RNA, 19 nt, Artificial Sequence
  Description of Artificial Sequence: Synthetic oligonucleotide
  modified_base (16)..(16): a, c, u, g, unknown or other
cugcacugaaaagagngau

SEQ ID NO: 2079097 - RNA, 19 nt, Artificial Sequence
  Description of Artificial Sequence: Synthetic oligonucleotide
agggcaaaacuagggugga

SEQ ID NO: 2079098 - RNA, 19 nt, Artificial Sequence
  Description of Artificial Sequence: Synthetic oligonucleotide
gcauuuacuuaagaaggaa

SEQ ID NO: 2079099 - RNA, 19 nt, Artificial Sequence
  Description of Artificial Sequence: Synthetic oligonucleotide
  modified_base (17)..(17): a, c, u, g, unknown or other
gucccaguagcugggunac

SEQ ID NO: 2079100 - RNA, 19 nt, Artificial Sequence
  Description of Artificial Sequence: Synthetic oligonucleotide
acgucaacuuuaguuuaau

SEQ ID NO: 2079101 - RNA, 19 nt, Artificial Sequence
  Description of Artificial Sequence: Synthetic oligonucleotide
augguaacggggacaugga

SEQ ID NO: 2079102 - RNA, 19 nt, Artificial Sequence
  Description of Artificial Sequence: Synthetic oligonucleotide
uccacucgugaaacccuuu

SEQ ID NO: 2079103 - RNA, 19 nt, Artificial Sequence
  Description of Artificial Sequence: Synthetic oligonucleotide
agagcaggucugucacuaa

SEQ ID NO: 2079104 - RNA, 19 nt, Artificial Sequence
  Description of Artificial Sequence: Synthetic oligonucleotide
ccucuguauaccaccacca

SEQ ID NO: 2079105 - RNA, 19 nt, Artificial Sequence
  Description of Artificial Sequence: Synthetic oligonucleotide
auguaccauuaggggacag

SEQ ID NO: 2079106 - RNA, 19 nt, Artificial Sequence
  Description of Artificial Sequence: Synthetic oligonucleotide
cuuucggugcaugcugaca

SEQ ID NO: 2079107 - RNA, 19 nt, Artificial Sequence
  Description of Artificial Sequence: Synthetic oligonucleotide
cuuaagaaggaaggguaau

SEQ ID NO: 2079108 - RNA, 19 nt, Artificial Sequence
  Description of Artificial Sequence: Synthetic oligonucleotide
caaaagcaauacacgcacu

SEQ ID NO: 2079109 - RNA, 19 nt, Artificial Sequence
  Description of Artificial Sequence: Synthetic oligonucleotide
acguggcaauacugucaag

SEQ ID NO: 2079110 - RNA, 19 nt, Artificial Sequence
  Description of Artificial Sequence: Synthetic oligonucleotide
cugucaagcugaguuuaga

SEQ ID NO: 2079111 - RNA, 19 nt, Artificial Sequence
  Description of Artificial Sequence: Synthetic oligonucleotide
agugaaggugcuaccuauu

SEQ ID NO: 2079112 - RNA, 19 nt, Artificial Sequence
  Description of Artificial Sequence: Synthetic oligonucleotide
acacgcacuuauguauaau

SEQ ID NO: 2079113 - RNA, 19 nt, Artificial Sequence
  Description of Artificial Sequence: Synthetic oligonucleotide
gggagaugguaacggggac

SEQ ID NO: 2079114 - RNA, 19 nt, Artificial Sequence
  Description of Artificial Sequence: Synthetic oligonucleotide
gagcaggucugucacuaau

SEQ ID NO: 2079115 - RNA, 19 nt, Artificial Sequence
  Description of Artificial Sequence: Synthetic oligonucleotide
cuggauuauuaaaguuaua

SEQ ID NO: 2079116 - RNA, 19 nt, Artificial Sequence
  Description of Artificial Sequence: Synthetic oligonucleotide
augcaucagauuacauaaa

SEQ ID NO: 2079117 - RNA, 19 nt, Artificial Sequence
  Description of Artificial Sequence: Synthetic oligonucleotide
gcccuucauaugcagauua

SEQ ID NO: 2079118 - RNA, 19 nt, Artificial Sequence
  Description of Artificial Sequence: Synthetic oligonucleotide
cgucaacuuuaguuuaaug

SEQ ID NO: 2079119 - RNA, 19 nt, Artificial Sequence
  Description of Artificial Sequence: Synthetic oligonucleotide
augaguugcuaagcauuua

SEQ ID NO: 2079120 - RNA, 19 nt, Artificial Sequence
  Description of Artificial Sequence: Synthetic oligonucleotide
aggacagcaucuggauuau

SEQ ID NO: 2079121 - RNA, 19 nt, Artificial Sequence
  Description of Artificial Sequence: Synthetic oligonucleotide
ugucacuaaugagcuuauu

SEQ ID NO: 2079122 - RNA, 19 nt, Artificial Sequence
  Description of Artificial Sequence: Synthetic oligonucleotide
auacuuccaaggacagcau

SEQ ID NO: 2079123 - RNA, 19 nt, Artificial Sequence
  Description of Artificial Sequence: Synthetic oligonucleotide
ccauuaggggacagauuuc

SEQ ID NO: 2079124 - RNA, 19 nt, Artificial Sequence
  Description of Artificial Sequence: Synthetic oligonucleotide
gcuaccuauugcauauuaa

SEQ ID NO: 2079125 - RNA, 19 nt, Artificial Sequence
  Description of Artificial Sequence: Synthetic oligonucleotide
acacugcaucuuauauaca

SEQ ID NO: 2079126 - RNA, 19 nt, Artificial Sequence
  Description of Artificial Sequence: Synthetic oligonucleotide
cacacguggggagauggua

SEQ ID NO: 2079127 - RNA, 19 nt, Artificial Sequence
  Description of Artificial Sequence: Synthetic oligonucleotide
cgcacuuauguauaaucua

SEQ ID NO: 2079128 - RNA, 19 nt, Artificial Sequence
  Description of Artificial Sequence: Synthetic oligonucleotide
cucaugcaucagauuacau

SEQ ID NO: 2079129 - RNA, 19 nt, Artificial Sequence
  Description of Artificial Sequence: Synthetic oligonucleotide
cugucacuaaugagcuuau

SEQ ID NO: 2079130 - RNA, 19 nt, Artificial Sequence
  Description of Artificial Sequence: Synthetic oligonucleotide
ggcuuucggugcaugcuga

SEQ ID NO: 2079131 - RNA, 19 nt, Artificial Sequence
  Description of Artificial Sequence: Synthetic oligonucleotide
cggugcaugcugacagacc

SEQ ID NO: 2079132 - RNA, 19 nt, Artificial Sequence
  Description of Artificial Sequence: Synthetic oligonucleotide
ggcaaugcuucaacacuua

SEQ ID NO: 2079133 - RNA, 19 nt, Artificial Sequence
  Description of Artificial Sequence: Synthetic oligonucleotide
cagcacaguccuucccucu

SEQ ID NO: 2079134 - RNA, 19 nt, Artificial Sequence
  Description of Artificial Sequence: Synthetic oligonucleotide
caaugaccuuggugcucga

SEQ ID NO: 2079135 - RNA, 19 nt, Artificial Sequence
  Description of Artificial Sequence: Synthetic oligonucleotide
caauacugucaagcugagu

SEQ ID NO: 2079136 - RNA, 19 nt, Artificial Sequence
  Description of Artificial Sequence: Synthetic oligonucleotide
ggggcuuucggugcaugcu

SEQ ID NO: 2079137 - RNA, 19 nt, Artificial Sequence
  Description of Artificial Sequence: Synthetic oligonucleotide
  modified_base (8)..(8): a, c, u, g, unknown or other
gcugggunacguggcaaua

SEQ ID NO: 2079138 - RNA, 19 nt, Artificial Sequence
  Description of Artificial Sequence: Synthetic oligonucleotide
gugcuaccuauugcauauu

SEQ ID NO: 2079139 - RNA, 19 nt, Artificial Sequence
  Description of Artificial Sequence: Synthetic oligonucleotide
gggcuacacugcaucuuau

SEQ ID NO: 2079140 - RNA, 19 nt, Artificial Sequence
  Description of Artificial Sequence: Synthetic oligonucleotide
  modified_base (1)..(1): a, c, u, g, unknown or other
nacguggcaauacugucaa

SEQ ID NO: 2079141 - RNA, 19 nt, Artificial Sequence
  Description of Artificial Sequence: Synthetic oligonucleotide
  modified_base (1)..(1): a, c, u, g, unknown or other
ngaucaaaugacugggcau

SEQ ID NO: 2079142 - RNA, 19 nt, Artificial Sequence
  Description of Artificial Sequence: Synthetic oligonucleotide
uccuaauccacuuagaagc

SEQ ID NO: 2079143 - RNA, 19 nt, Artificial Sequence
  Description of Artificial Sequence: Synthetic oligonucleotide
aaagacugauuccccaggc

SEQ ID NO: 2079144 - RNA, 19 nt, Artificial Sequence
  Description of Artificial Sequence: Synthetic oligonucleotide
acuuuacacgcccacuugg

SEQ ID NO: 2079145 - RNA, 19 nt, Artificial Sequence
  Description of Artificial Sequence: Synthetic oligonucleotide
agacugauuccccaggcag

SEQ ID NO: 2079146 - RNA, 19 nt, Artificial Sequence
  Description of Artificial Sequence: Synthetic oligonucleotide
uuacacgcccacuuggucc

SEQ ID NO: 2079147 - RNA, 19 nt, Artificial Sequence
  Description of Artificial Sequence: Synthetic oligonucleotide
uccucucagguccuaaucc

SEQ ID NO: 2079148 - RNA, 19 nt, Artificial Sequence
  Description of Artificial Sequence: Synthetic oligonucleotide
cuugagacuuuacacgccc

SEQ ID NO: 2079149 - RNA, 19 nt, Artificial Sequence
  Description of Artificial Sequence: Synthetic oligonucleotide
guccuaauccacuuagaag

SEQ ID NO: 2079150 - RNA, 19 nt, Artificial Sequence
  Description of Artificial Sequence: Synthetic oligonucleotide
ugagacuuuacacgcccac

SEQ ID NO: 2079151 - RNA, 19 nt, Artificial Sequence
  Description of Artificial Sequence: Synthetic oligonucleotide
aagacugauuccccaggca

SEQ ID NO: 2079152 - RNA, 19 nt, Artificial Sequence
  Description of Artificial Sequence: Synthetic oligonucleotide
uuggccaguacccugggua

SEQ ID NO: 2079153 - RNA, 19 nt, Artificial Sequence
  Description of Artificial Sequence: Synthetic oligonucleotide
gacuuuacacgcccacuug

SEQ ID NO: 2079154 - RNA, 19 nt, Artificial Sequence
  Description of Artificial Sequence: Synthetic oligonucleotide
ggcuugagacuuuacacgc

SEQ ID NO: 2079155 - RNA, 19 nt, Artificial Sequence
  Description of Artificial Sequence: Synthetic oligonucleotide
ucucagguccuaauccacu

SEQ ID NO: 2079156 - RNA, 19 nt, Artificial Sequence
  Description of Artificial Sequence: Synthetic oligonucleotide
cagguccuaauccacuuag

SEQ ID NO: 2079157 - RNA, 19 nt, Artificial Sequence
  Description of Artificial Sequence: Synthetic oligonucleotide
uuuacacgcccacuugguc

SEQ ID NO: 2079158 - RNA, 19 nt, Artificial Sequence
  Description of Artificial Sequence: Synthetic oligonucleotide
uacacgcccacuugguccc

SEQ ID NO: 2079159 - RNA, 19 nt, Artificial Sequence
  Description of Artificial Sequence: Synthetic oligonucleotide
ugauuccccaggcagugaa

SEQ ID NO: 2079160 - RNA, 19 nt, Artificial Sequence
  Description of Artificial Sequence: Synthetic oligonucleotide
agacuuuacacgcccacuu

SEQ ID NO: 2079161 - RNA, 19 nt, Artificial Sequence
  Description of Artificial Sequence: Synthetic oligonucleotide
uugagacuuuacacgccca

SEQ ID NO: 2079162 - RNA, 19 nt, Artificial Sequence
  Description of Artificial Sequence: Synthetic oligonucleotide
acugauuccccaggcagug

SEQ ID NO: 2079163 - RNA, 19 nt, Artificial Sequence
  Description of Artificial Sequence: Synthetic oligonucleotide
cucucagguccuaauccac

SEQ ID NO: 2079164 - RNA, 19 nt, Artificial Sequence
  Description of Artificial Sequence: Synthetic oligonucleotide
ccuaauccacuuagaagcc

SEQ ID NO: 2079165 - RNA, 19 nt, Artificial Sequence
  Description of Artificial Sequence: Synthetic oligonucleotide
ucagguccuaauccacuua

SEQ ID NO: 2079166 - RNA, 19 nt, Artificial Sequence
  Description of Artificial Sequence: Synthetic oligonucleotide
gguccuaauccacuuagaa

SEQ ID NO: 2079167 - RNA, 19 nt, Artificial Sequence
  Description of Artificial Sequence: Synthetic oligonucleotide
auuccccaggcagugaaaa

SEQ ID NO: 2079168 - RNA, 19 nt, Artificial Sequence
  Description of Artificial Sequence: Synthetic oligonucleotide
cuuuacacgcccacuuggu

SEQ ID NO: 2079169 - RNA, 19 nt, Artificial Sequence
  Description of Artificial Sequence: Synthetic oligonucleotide
ggguuggccaguacccugg

SEQ ID NO: 2079170 - RNA, 19 nt, Artificial Sequence
  Description of Artificial Sequence: Synthetic oligonucleotide
gagacuuuacacgcccacu

SEQ ID NO: 2079171 - RNA, 19 nt, Artificial Sequence
  Description of Artificial Sequence: Synthetic oligonucleotide
gguuggccaguacccuggg

SEQ ID NO: 2079172 - RNA, 19 nt, Artificial Sequence
  Description of Artificial Sequence: Synthetic oligonucleotide
gcuugagacuuuacacgcc

SEQ ID NO: 2079173 - RNA, 19 nt, Artificial Sequence
  Description of Artificial Sequence: Synthetic oligonucleotide
gggguuggccaguacccug

SEQ ID NO: 2079174 - RNA, 19 nt, Artificial Sequence
  Description of Artificial Sequence: Synthetic oligonucleotide
gacugauuccccaggcagu

SEQ ID NO: 2079175 - RNA, 19 nt, Artificial Sequence
  Description of Artificial Sequence: Synthetic oligonucleotide
agguccuaauccacuuaga

SEQ ID NO: 2079176 - RNA, 19 nt, Artificial Sequence
  Description of Artificial Sequence: Synthetic oligonucleotide
ccucucagguccuaaucca

SEQ ID NO: 2079177 - RNA, 19 nt, Artificial Sequence
  Description of Artificial Sequence: Synthetic oligonucleotide
acgcccacuuggucccuug

SEQ ID NO: 2079178 - RNA, 19 nt, Artificial Sequence
  Description of Artificial Sequence: Synthetic oligonucleotide
cuaauccacuuagaagccu

SEQ ID NO: 2079179 - RNA, 19 nt, Artificial Sequence
  Description of Artificial Sequence: Synthetic oligonucleotide
gauuccccaggcagugaaa

SEQ ID NO: 2079180 - RNA, 19 nt, Artificial Sequence
  Description of Artificial Sequence: Synthetic oligonucleotide
cucagguccuaauccacuu

SEQ ID NO: 2079181 - RNA, 19 nt, Artificial Sequence
  Description of Artificial Sequence: Synthetic oligonucleotide
cugauuccccaggcaguga

SEQ ID NO: 2079182 - RNA, 19 nt, Artificial Sequence
  Description of Artificial Sequence: Synthetic oligonucleotide
guuggccaguacccugggu

SEQ ID NO: 2079183 - RNA, 19 nt, Artificial Sequence
  Description of Artificial Sequence: Synthetic oligonucleotide
acacgcccacuuggucccu

SEQ ID NO: 2079184 - RNA, 19 nt, Artificial Sequence
  Description of Artificial Sequence: Synthetic oligonucleotide
gcccacuuggucccuuguu

SEQ ID NO: 2079185 - RNA, 19 nt, Artificial Sequence
  Description of Artificial Sequence: Synthetic oligonucleotide
cacgcccacuuggucccuu

SEQ ID NO: 2079186 - RNA, 19 nt, Artificial Sequence
  Description of Artificial Sequence: Synthetic oligonucleotide
aaggacauaaacuaugacg

SEQ ID NO: 2079187 - RNA, 19 nt, Artificial Sequence
  Description of Artificial Sequence: Synthetic oligonucleotide
auuaacacaaaguagggag

SEQ ID NO: 2079188 - RNA, 19 nt, Artificial Sequence
  Description of Artificial Sequence: Synthetic oligonucleotide
acuaugacgaccaaaagcc

SEQ ID NO: 2079189 - RNA, 19 nt, Artificial Sequence
  Description of Artificial Sequence: Synthetic oligonucleotide
uaauccuugaaucauauaa

SEQ ID NO: 2079190 - RNA, 19 nt, Artificial Sequence
  Description of Artificial Sequence: Synthetic oligonucleotide
aagccaaagaugcugagag

SEQ ID NO: 2079191 - RNA, 19 nt, Artificial Sequence
  Description of Artificial Sequence: Synthetic oligonucleotide
gacauuacagcuuaucacc

SEQ ID NO: 2079192 - RNA, 19 nt, Artificial Sequence
  Description of Artificial Sequence: Synthetic oligonucleotide
uugaaucauauaaauuugg

SEQ ID NO: 2079193 - RNA, 19 nt, Artificial Sequence
  Description of Artificial Sequence: Synthetic oligonucleotide
cuuguuauuuuaaaccugg

SEQ ID NO: 2079194 - RNA, 19 nt, Artificial Sequence
  Description of Artificial Sequence: Synthetic oligonucleotide
accauuaacacaaaguagg

SEQ ID NO: 2079195 - RNA, 19 nt, Artificial Sequence
  Description of Artificial Sequence: Synthetic oligonucleotide
auuacagcuuaucaccacc

SEQ ID NO: 2079196 - RNA, 19 nt, Artificial Sequence
  Description of Artificial Sequence: Synthetic oligonucleotide
aacaaaagccuuuuauuca

SEQ ID NO: 2079197 - RNA, 19 nt, Artificial Sequence
  Description of Artificial Sequence: Synthetic oligonucleotide
uugaauggaaacuguaucc

SEQ ID NO: 2079198 - RNA, 19 nt, Artificial Sequence
  Description of Artificial Sequence: Synthetic oligonucleotide
aauggaaacuguauccagc

SEQ ID NO: 2079199 - RNA, 19 nt, Artificial Sequence
  Description of Artificial Sequence: Synthetic oligonucleotide
aggaaaucaacugucaaac

SEQ ID NO: 2079200 - RNA, 19 nt, Artificial Sequence
  Description of Artificial Sequence: Synthetic oligonucleotide
agugucugaggcuugggcc

SEQ ID NO: 2079201 - RNA, 19 nt, Artificial Sequence
  Description of Artificial Sequence: Synthetic oligonucleotide
caaaguagggagcaaaugc

SEQ ID NO: 2079202 - RNA, 19 nt, Artificial Sequence
  Description of Artificial Sequence: Synthetic oligonucleotide
uuuaaaccuggcuagauau

SEQ ID NO: 2079203 - RNA, 19 nt, Artificial Sequence
  Description of Artificial Sequence: Synthetic oligonucleotide
ucaccauuaacacaaagua

SEQ ID NO: 2079204 - RNA, 19 nt, Artificial Sequence
  Description of Artificial Sequence: Synthetic oligonucleotide
aaaugcuuggaagaagagg

SEQ ID NO: 2079205 - RNA, 19 nt, Artificial Sequence
  Description of Artificial Sequence: Synthetic oligonucleotide
ugaaucauauaaauuugga

SEQ ID NO: 2079206 - RNA, 19 nt, Artificial Sequence
  Description of Artificial Sequence: Synthetic oligonucleotide
uguuauuuuaaaccuggcu

SEQ ID NO: 2079207 - RNA, 19 nt, Artificial Sequence
  Description of Artificial Sequence: Synthetic oligonucleotide
cagaugaccuagaagaggg

SEQ ID NO: 2079208 - RNA, 19 nt, Artificial Sequence
  Description of Artificial Sequence: Synthetic oligonucleotide
uuuaaaggaagagaugucu

SEQ ID NO: 2079209 - RNA, 19 nt, Artificial Sequence
  Description of Artificial Sequence: Synthetic oligonucleotide
aaugaacauggggagaggg

SEQ ID NO: 2079210 - RNA, 19 nt, Artificial Sequence
  Description of Artificial Sequence: Synthetic oligonucleotide
augccaauuaccuugccag

SEQ ID NO: 2079211 - RNA, 19 nt, Artificial Sequence
  Description of Artificial Sequence: Synthetic oligonucleotide
cuugaaucauauaaauuug

SEQ ID NO: 2079212 - RNA, 19 nt, Artificial Sequence
  Description of Artificial Sequence: Synthetic oligonucleotide
guuauuuuaaaccuggcua

SEQ ID NO: 2079213 - RNA, 19 nt, Artificial Sequence
  Description of Artificial Sequence: Synthetic oligonucleotide
uuaacacaaaguagggagc

SEQ ID NO: 2079214 - RNA, 19 nt, Artificial Sequence
  Description of Artificial Sequence: Synthetic oligonucleotide
guagaaaugaacaugggga

SEQ ID NO: 2079215 - RNA, 19 nt, Artificial Sequence
  Description of Artificial Sequence: Synthetic oligonucleotide
aaagaugcugagaggaaac

SEQ ID NO: 2079216 - RNA, 19 nt, Artificial Sequence
  Description of Artificial Sequence: Synthetic oligonucleotide
agugguuuucugcuuggcc

SEQ ID NO: 2079217 - RNA, 19 nt, Artificial Sequence
  Description of Artificial Sequence: Synthetic oligonucleotide
cuagauaucacaaagucgu

SEQ ID NO: 2079218 - RNA, 19 nt, Artificial Sequence
  Description of Artificial Sequence: Synthetic oligonucleotide
gucuaugccgcauacauac

SEQ ID NO: 2079219 - RNA, 19 nt, Artificial Sequence
  Description of Artificial Sequence: Synthetic oligonucleotide
aggacauaaacuaugacga

SEQ ID NO: 2079220 - RNA, 19 nt, Artificial Sequence
  Description of Artificial Sequence: Synthetic oligonucleotide
aggaagagaugucuaugcc

SEQ ID NO: 2079221 - RNA, 19 nt, Artificial Sequence
  Description of Artificial Sequence: Synthetic oligonucleotide
cuguaagucaccauuaaca

SEQ ID NO: 2079222 - RNA, 19 nt, Artificial Sequence
  Description of Artificial Sequence: Synthetic oligonucleotide
acugucaaacugcagagca

SEQ ID NO: 2079223 - RNA, 19 nt, Artificial Sequence
  Description of Artificial Sequence: Synthetic oligonucleotide
acggaaggcagucagcacg

SEQ ID NO: 2079224 - RNA, 19 nt, Artificial Sequence
  Description of Artificial Sequence: Synthetic oligonucleotide
gacauaaacuaugacgacc

SEQ ID NO: 2079225 - RNA, 19 nt, Artificial Sequence
  Description of Artificial Sequence: Synthetic oligonucleotide
uaaccauuggguuuauucu

SEQ ID NO: 2079226 - RNA, 19 nt, Artificial Sequence
  Description of Artificial Sequence: Synthetic oligonucleotide
cuggccuccaacuugcugg

SEQ ID NO: 2079227 - RNA, 19 nt, Artificial Sequence
  Description of Artificial Sequence: Synthetic oligonucleotide
aaauacacugggaggaauc

SEQ ID NO: 2079228 - RNA, 19 nt, Artificial Sequence
  Description of Artificial Sequence: Synthetic oligonucleotide
aaggacggaaggcagucag

SEQ ID NO: 2079229 - RNA, 19 nt, Artificial Sequence
  Description of Artificial Sequence: Synthetic oligonucleotide
uaucacaaagucgugacgu

SEQ ID NO: 2079230 - RNA, 19 nt, Artificial Sequence
  Description of Artificial Sequence: Synthetic oligonucleotide
aucacaggaaaucaacugu

SEQ ID NO: 2079231 - RNA, 19 nt, Artificial Sequence
  Description of Artificial Sequence: Synthetic oligonucleotide
cuggcuagauaucacaaag

SEQ ID NO: 2079232 - RNA, 19 nt, Artificial Sequence
  Description of Artificial Sequence: Synthetic oligonucleotide
uaugacgaccaaaagccac

SEQ ID NO: 2079233 - RNA, 19 nt, Artificial Sequence
  Description of Artificial Sequence: Synthetic oligonucleotide
ugagaggaaaccugggccc

SEQ ID NO: 2079234 - RNA, 19 nt, Artificial Sequence
  Description of Artificial Sequence: Synthetic oligonucleotide
gaauggaaacuguauccag

SEQ ID NO: 2079235 - RNA, 19 nt, Artificial Sequence
  Description of Artificial Sequence: Synthetic oligonucleotide
ugaacauggggagagggcc

SEQ ID NO: 2079236 - RNA, 19 nt, Artificial Sequence
  Description of Artificial Sequence: Synthetic oligonucleotide
aaaguagggagcaaaugcu

SEQ ID NO: 2079237 - RNA, 19 nt, Artificial Sequence
  Description of Artificial Sequence: Synthetic oligonucleotide
uggaccacaccccuaaaga

SEQ ID NO: 2079238 - RNA, 19 nt, Artificial Sequence
  Description of Artificial Sequence: Synthetic oligonucleotide
gacaaugucccggaaaggc

SEQ ID NO: 2079239 - RNA, 19 nt, Artificial Sequence
  Description of Artificial Sequence: Synthetic oligonucleotide
aucacagugguuuucugcu

SEQ ID NO: 2079240 - RNA, 19 nt, Artificial Sequence
  Description of Artificial Sequence: Synthetic oligonucleotide
agcauuuaaaggaagagau

SEQ ID NO: 2079241 - RNA, 19 nt, Artificial Sequence
  Description of Artificial Sequence: Synthetic oligonucleotide
ggaagagaugucuaugccg

SEQ ID NO: 2079242 - RNA, 19 nt, Artificial Sequence
  Description of Artificial Sequence: Synthetic oligonucleotide
aaauuaaccauuggguuua

SEQ ID NO: 2079243 - RNA, 19 nt, Artificial Sequence
  Description of Artificial Sequence: Synthetic oligonucleotide
uacacugggaggaaucaca

SEQ ID NO: 2079244 - RNA, 19 nt, Artificial Sequence
  Description of Artificial Sequence: Synthetic oligonucleotide
uugaaccacagccaccuug

SEQ ID NO: 2079245 - RNA, 19 nt, Artificial Sequence
  Description of Artificial Sequence: Synthetic oligonucleotide
auaucacaaagucgugacg

SEQ ID NO: 2079246 - RNA, 19 nt, Artificial Sequence
  Description of Artificial Sequence: Synthetic oligonucleotide
acgccuuguuauuuuaaac

SEQ ID NO: 2079247 - RNA, 19 nt, Artificial Sequence
  Description of Artificial Sequence: Synthetic oligonucleotide
caccauuaacacaaaguag

SEQ ID NO: 2079248 - RNA, 19 nt, Artificial Sequence
  Description of Artificial Sequence: Synthetic oligonucleotide
caucacaggaaaucaacug

SEQ ID NO: 2079249 - RNA, 19 nt, Artificial Sequence
  Description of Artificial Sequence: Synthetic oligonucleotide
uggggugggacucaguaga

SEQ ID NO: 2079250 - RNA, 19 nt, Artificial Sequence
  Description of Artificial Sequence: Synthetic oligonucleotide
ugcccuuaugccaauuacc

SEQ ID NO: 2079251 - RNA, 19 nt, Artificial Sequence
  Description of Artificial Sequence: Synthetic oligonucleotide
ugucaggaagaagacagcc

SEQ ID NO: 2079252 - RNA, 19 nt, Artificial Sequence
  Description of Artificial Sequence: Synthetic oligonucleotide
agagcauuuaaaggaagag

SEQ ID NO: 2079253 - RNA, 19 nt, Artificial Sequence
  Description of Artificial Sequence: Synthetic oligonucleotide
uuuuaaaccuggcuagaua

SEQ ID NO: 2079254 - RNA, 19 nt, Artificial Sequence
  Description of Artificial Sequence: Synthetic oligonucleotide
ucuugaaccacagccaccu

SEQ ID NO: 2079255 - RNA, 19 nt, Artificial Sequence
  Description of Artificial Sequence: Synthetic oligonucleotide
guagggagcaaaugcuugg

SEQ ID NO: 2079256 - RNA, 19 nt, Artificial Sequence
  Description of Artificial Sequence: Synthetic oligonucleotide
uaugccgcauacauacgcc

SEQ ID NO: 2079257 - RNA, 19 nt, Artificial Sequence
  Description of Artificial Sequence: Synthetic oligonucleotide
acgaccaaaagccacacuu

SEQ ID NO: 2079258 - RNA, 19 nt, Artificial Sequence
  Description of Artificial Sequence: Synthetic oligonucleotide
augucuaugccgcauacau

SEQ ID NO: 2079259 - RNA, 19 nt, Artificial Sequence
  Description of Artificial Sequence: Synthetic oligonucleotide
ggaaacuguauccagcagc

SEQ ID NO: 2079260 - RNA, 19 nt, Artificial Sequence
  Description of Artificial Sequence: Synthetic oligonucleotide
aaaugcaucaucacaggaa

SEQ ID NO: 2079261 - RNA, 19 nt, Artificial Sequence
  Description of Artificial Sequence: Synthetic oligonucleotide
uccccuagaagagacaaug

SEQ ID NO: 2079262 - RNA, 19 nt, Artificial Sequence
  Description of Artificial Sequence: Synthetic oligonucleotide
cucaguagaaaugaacaug

SEQ ID NO: 2079263 - RNA, 19 nt, Artificial Sequence
  Description of Artificial Sequence: Synthetic oligonucleotide
caaugucccggaaaggccc

SEQ ID NO: 2079264 - RNA, 19 nt, Artificial Sequence
  Description of Artificial Sequence: Synthetic oligonucleotide
agaugucuaugccgcauac

SEQ ID NO: 2079265 - RNA, 19 nt, Artificial Sequence
  Description of Artificial Sequence: Synthetic oligonucleotide
gaugaccuagaagaggggc

SEQ ID NO: 2079266 - RNA, 19 nt, Artificial Sequence
  Description of Artificial Sequence: Synthetic oligonucleotide
cuaugccgcauacauacgc

SEQ ID NO: 2079267 - RNA, 19 nt, Artificial Sequence
  Description of Artificial Sequence: Synthetic oligonucleotide
acauaaacuaugacgacca

SEQ ID NO: 2079268 - RNA, 19 nt, Artificial Sequence
  Description of Artificial Sequence: Synthetic oligonucleotide
aauacacugggaggaauca

SEQ ID NO: 2079269 - RNA, 19 nt, Artificial Sequence
  Description of Artificial Sequence: Synthetic oligonucleotide
caccccuaaagaaagcagc

SEQ ID NO: 2079270 - RNA, 19 nt, Artificial Sequence
  Description of Artificial Sequence: Synthetic oligonucleotide
uagaagagacaaugucccg

SEQ ID NO: 2079271 - RNA, 19 nt, Artificial Sequence
  Description of Artificial Sequence: Synthetic oligonucleotide
acaaugucccggaaaggcc

SEQ ID NO: 2079272 - RNA, 19 nt, Artificial Sequence
  Description of Artificial Sequence: Synthetic oligonucleotide
ugugugccacagcuaacgg

SEQ ID NO: 2079273 - RNA, 19 nt, Artificial Sequence
  Description of Artificial Sequence: Synthetic oligonucleotide
ccuuaugccaauuaccuug

SEQ ID NO: 2079274 - RNA, 19 nt, Artificial Sequence
  Description of Artificial Sequence: Synthetic oligonucleotide
gugacauuacagcuuauca

SEQ ID NO: 2079275 - RNA, 19 nt, Artificial Sequence
  Description of Artificial Sequence: Synthetic oligonucleotide
cuaacggcuggugaaagag

SEQ ID NO: 2079276 - RNA, 19 nt, Artificial Sequence
  Description of Artificial Sequence: Synthetic oligonucleotide
auuuaaaggaagagauguc

SEQ ID NO: 2079277 - RNA, 19 nt, Artificial Sequence
  Description of Artificial Sequence: Synthetic oligonucleotide
ugggacucaguagaaauga

SEQ ID NO: 2079278 - RNA, 19 nt, Artificial Sequence
  Description of Artificial Sequence: Synthetic oligonucleotide
ccaaaagccacacuugagg

SEQ ID NO: 2079279 - RNA, 19 nt, Artificial Sequence
  Description of Artificial Sequence: Synthetic oligonucleotide
ugcugugugccacagcuaa

SEQ ID NO: 2079280 - RNA, 19 nt, Artificial Sequence
  Description of Artificial Sequence: Synthetic oligonucleotide
ucuaugccgcauacauacg

SEQ ID NO: 2079281 - RNA, 19 nt, Artificial Sequence
  Description of Artificial Sequence: Synthetic oligonucleotide
agucgugacgugcuguaag

SEQ ID NO: 2079282 - RNA, 19 nt, Artificial Sequence
  Description of Artificial Sequence: Synthetic oligonucleotide
gugguuuucugcuuggcca

SEQ ID NO: 2079283 - RNA, 19 nt, Artificial Sequence
  Description of Artificial Sequence: Synthetic oligonucleotide
gcuuucucuagagagaugc

SEQ ID NO: 2079284 - RNA, 19 nt, Artificial Sequence
  Description of Artificial Sequence: Synthetic oligonucleotide
gcuagauaucacaaagucg

SEQ ID NO: 2079285 - RNA, 19 nt, Artificial Sequence
  Description of Artificial Sequence: Synthetic oligonucleotide
uggcuagauaucacaaagu

SEQ ID NO: 2079286 - RNA, 19 nt, Artificial Sequence
  Description of Artificial Sequence: Synthetic oligonucleotide
uagauaucacaaagucgug

SEQ ID NO: 2079287 - RNA, 19 nt, Artificial Sequence
  Description of Artificial Sequence: Synthetic oligonucleotide
cugucucagugucugaggc

SEQ ID NO: 2079288 - RNA, 19 nt, Artificial Sequence
  Description of Artificial Sequence: Synthetic oligonucleotide
acucaguagaaaugaacau

SEQ ID NO: 2079289 - RNA, 19 nt, Artificial Sequence
  Description of Artificial Sequence: Synthetic oligonucleotide
ucauauaaauuuggaaaua

SEQ ID NO: 2079290 - RNA, 19 nt, Artificial Sequence
  Description of Artificial Sequence: Synthetic oligonucleotide
ugggcccacagaaaguuac

SEQ ID NO: 2079291 - RNA, 19 nt, Artificial Sequence
  Description of Artificial Sequence: Synthetic oligonucleotide
aaucaacugucaaacugca

SEQ ID NO: 2079292 - RNA, 19 nt, Artificial Sequence
  Description of Artificial Sequence: Synthetic oligonucleotide
uauuuuaaaccuggcuaga

SEQ ID NO: 2079293 - RNA, 19 nt, Artificial Sequence
  Description of Artificial Sequence: Synthetic oligonucleotide
uggaaacuguauccagcag

SEQ ID NO: 2079294 - RNA, 19 nt, Artificial Sequence
  Description of Artificial Sequence: Synthetic oligonucleotide
ugaccuagaagaggggcag

SEQ ID NO: 2079295 - RNA, 19 nt, Artificial Sequence
  Description of Artificial Sequence: Synthetic oligonucleotide
uuggguuuauucugcagau

SEQ ID NO: 2079296 - RNA, 19 nt, Artificial Sequence
  Description of Artificial Sequence: Synthetic oligonucleotide
agauaucacaaagucguga

SEQ ID NO: 2079297 - RNA, 19 nt, Artificial Sequence
  Description of Artificial Sequence: Synthetic oligonucleotide
cugugugccacagcuaacg

SEQ ID NO: 2079298 - RNA, 19 nt, Artificial Sequence
  Description of Artificial Sequence: Synthetic oligonucleotide
caaaugcuuggaagaagag

SEQ ID NO: 2079299 - RNA, 19 nt, Artificial Sequence
  Description of Artificial Sequence: Synthetic oligonucleotide
ucacaaagucgugacgugc

SEQ ID NO: 2079300 - RNA, 19 nt, Artificial Sequence
  Description of Artificial Sequence: Synthetic oligonucleotide
uuaaaccuggcuagauauc

SEQ ID NO: 2079301 - RNA, 19 nt, Artificial Sequence
  Description of Artificial Sequence: Synthetic oligonucleotide
aaagucgugacgugcugua

SEQ ID NO: 2079302 - RNA, 19 nt, Artificial Sequence
  Description of Artificial Sequence: Synthetic oligonucleotide
agcuuaucaccaccagggg

SEQ ID NO: 2079303 - RNA, 19 nt, Artificial Sequence
  Description of Artificial Sequence: Synthetic oligonucleotide
agaaggacggaaggcaguc

SEQ ID NO: 2079304 - RNA, 19 nt, Artificial Sequence
  Description of Artificial Sequence: Synthetic oligonucleotide
acagugguuuucugcuugg

SEQ ID NO: 2079305 - RNA, 19 nt, Artificial Sequence
  Description of Artificial Sequence: Synthetic oligonucleotide
gagcauuuaaaggaagaga

SEQ ID NO: 2079306 - RNA, 19 nt, Artificial Sequence
  Description of Artificial Sequence: Synthetic oligonucleotide
ggcuagauaucacaaaguc

SEQ ID NO: 2079307 - RNA, 19 nt, Artificial Sequence
  Description of Artificial Sequence: Synthetic oligonucleotide
cuagagagaugccagggca

SEQ ID NO: 2079308 - RNA, 19 nt, Artificial Sequence
  Description of Artificial Sequence: Synthetic oligonucleotide
ggagcaaaugcuuggaaga

SEQ ID NO: 2079309 - RNA, 19 nt, Artificial Sequence
  Description of Artificial Sequence: Synthetic oligonucleotide
cucuagagagaugccaggg

SEQ ID NO: 2079310 - RNA, 19 nt, Artificial Sequence
  Description of Artificial Sequence: Synthetic oligonucleotide
cagcacgcauccuugaaug

SEQ ID NO: 2079311 - RNA, 19 nt, Artificial Sequence
  Description of Artificial Sequence: Synthetic oligonucleotide
acaaaguagggagcaaaug

SEQ ID NO: 2079312 - RNA, 19 nt, Artificial Sequence
  Description of Artificial Sequence: Synthetic oligonucleotide
gggagcaaaugcuuggaag

SEQ ID NO: 2079313 - RNA, 19 nt, Artificial Sequence
  Description of Artificial Sequence: Synthetic oligonucleotide
ccauuaacacaaaguaggg

SEQ ID NO: 2079314 - RNA, 19 nt, Artificial Sequence
  Description of Artificial Sequence: Synthetic oligonucleotide
uccuugaauggaaacugua

SEQ ID NO: 2079315 - RNA, 19 nt, Artificial Sequence
  Description of Artificial Sequence: Synthetic oligonucleotide
caauuaccuugccaguccc

SEQ ID NO: 2079316 - RNA, 19 nt, Artificial Sequence
  Description of Artificial Sequence: Synthetic oligonucleotide
ugccacagcuaacggcugg

SEQ ID NO: 2079317 - RNA, 19 nt, Artificial Sequence
  Description of Artificial Sequence: Synthetic oligonucleotide
cuuucucuagagagaugcc

SEQ ID NO: 2079318 - RNA, 19 nt, Artificial Sequence
  Description of Artificial Sequence: Synthetic oligonucleotide
uacgccuuguuauuuuaaa

SEQ ID NO: 2079319 - RNA, 19 nt, Artificial Sequence
  Description of Artificial Sequence: Synthetic oligonucleotide
aucacaaagucgugacgug

SEQ ID NO: 2079320 - RNA, 19 nt, Artificial Sequence
  Description of Artificial Sequence: Synthetic oligonucleotide
ucagcacgcauccuugaau

SEQ ID NO: 2079321 - RNA, 19 nt, Artificial Sequence
  Description of Artificial Sequence: Synthetic oligonucleotide
agcacgcauccuugaaugg

SEQ ID NO: 2079322 - RNA, 19 nt, Artificial Sequence
  Description of Artificial Sequence: Synthetic oligonucleotide
auaaacuaugacgaccaaa

SEQ ID NO: 2079323 - RNA, 19 nt, Artificial Sequence
  Description of Artificial Sequence: Synthetic oligonucleotide
cauuggguuuauucugcag

SEQ ID NO: 2079324 - RNA, 19 nt, Artificial Sequence
  Description of Artificial Sequence: Synthetic oligonucleotide
cccggaaaggcccaaaugc

SEQ ID NO: 2079325 - RNA, 19 nt, Artificial Sequence
  Description of Artificial Sequence: Synthetic oligonucleotide
ucagauucugggcgugcug

SEQ ID NO: 2079326 - RNA, 19 nt, Artificial Sequence
  Description of Artificial Sequence: Synthetic oligonucleotide
cauuacagcuuaucaccac

SEQ ID NO: 2079327 - RNA, 19 nt, Artificial Sequence
  Description of Artificial Sequence: Synthetic oligonucleotide
aacggcuggugaaagagaa

SEQ ID NO: 2079328 - RNA, 19 nt, Artificial Sequence
  Description of Artificial Sequence: Synthetic oligonucleotide
ugcuguaagucaccauuaa

SEQ ID NO: 2079329 - RNA, 19 nt, Artificial Sequence
  Description of Artificial Sequence: Synthetic oligonucleotide
ucccggaaaggcccaaaug

SEQ ID NO: 2079330 - RNA, 19 nt, Artificial Sequence
  Description of Artificial Sequence: Synthetic oligonucleotide
ggauaugugcggcucgggg

SEQ ID NO: 2079331 - RNA, 19 nt, Artificial Sequence
  Description of Artificial Sequence: Synthetic oligonucleotide
gauggggugggacucagua

SEQ ID NO: 2079332 - RNA, 19 nt, Artificial Sequence
  Description of Artificial Sequence: Synthetic oligonucleotide
ugggagacaugcugccagg

SEQ ID NO: 2079333 - RNA, 19 nt, Artificial Sequence
  Description of Artificial Sequence: Synthetic oligonucleotide
gaugccagggcauccccac

SEQ ID NO: 2079334 - RNA, 19 nt, Artificial Sequence
  Description of Artificial Sequence: Synthetic oligonucleotide
agcaaaugcuuggaagaag

SEQ ID NO: 2079335 - RNA, 19 nt, Artificial Sequence
  Description of Artificial Sequence: Synthetic oligonucleotide
caaggacauaaacuaugac

SEQ ID NO: 2079336 - RNA, 19 nt, Artificial Sequence
  Description of Artificial Sequence: Synthetic oligonucleotide
ggagggaaaagcuucccac

SEQ ID NO: 2079337 - RNA, 19 nt, Artificial Sequence
  Description of Artificial Sequence: Synthetic oligonucleotide
uaacggcuggugaaagaga

SEQ ID NO: 2079338 - RNA, 19 nt, Artificial Sequence
  Description of Artificial Sequence: Synthetic oligonucleotide
auacacugggaggaaucac

SEQ ID NO: 2079339 - RNA, 19 nt, Artificial Sequence
  Description of Artificial Sequence: Synthetic oligonucleotide
cacagugguuuucugcuug

SEQ ID NO: 2079340 - RNA, 19 nt, Artificial Sequence
  Description of Artificial Sequence: Synthetic oligonucleotide
uugccagucccagaugacc

SEQ ID NO: 2079341 - RNA, 19 nt, Artificial Sequence
  Description of Artificial Sequence: Synthetic oligonucleotide
cagagcauuuaaaggaaga

SEQ ID NO: 2079342 - RNA, 19 nt, Artificial Sequence
  Description of Artificial Sequence: Synthetic oligonucleotide
gagacaugcugccaggaua

SEQ ID NO: 2079343 - RNA, 19 nt, Artificial Sequence
  Description of Artificial Sequence: Synthetic oligonucleotide
cuggaccacaccccuaaag

SEQ ID NO: 2079344 - RNA, 19 nt, Artificial Sequence
  Description of Artificial Sequence: Synthetic oligonucleotide
ugugcccuuaugccaauua

SEQ ID NO: 2079345 - RNA, 19 nt, Artificial Sequence
  Description of Artificial Sequence: Synthetic oligonucleotide
auucugggcgugcugugug

SEQ ID NO: 2079346 - RNA, 19 nt, Artificial Sequence
  Description of Artificial Sequence: Synthetic oligonucleotide
ccuaaagaaagcagcauca

SEQ ID NO: 2079347 - RNA, 19 nt, Artificial Sequence
  Description of Artificial Sequence: Synthetic oligonucleotide
aguaauccuugaaucauau

SEQ ID NO: 2079348 - RNA, 19 nt, Artificial Sequence
  Description of Artificial Sequence: Synthetic oligonucleotide
acaaagucgugacgugcug

SEQ ID NO: 2079349 - RNA, 19 nt, Artificial Sequence
  Description of Artificial Sequence: Synthetic oligonucleotide
auuuuaaaccuggcuagau

SEQ ID NO: 2079350 - RNA, 19 nt, Artificial Sequence
  Description of Artificial Sequence: Synthetic oligonucleotide
agaugcugagaggaaaccu

SEQ ID NO: 2079351 - RNA, 19 nt, Artificial Sequence
  Description of Artificial Sequence: Synthetic oligonucleotide
cucuugaaccacagccacc

SEQ ID NO: 2079352 - RNA, 19 nt, Artificial Sequence
  Description of Artificial Sequence: Synthetic oligonucleotide
cugucaggaagaagacagc

SEQ ID NO: 2079353 - RNA, 19 nt, Artificial Sequence
  Description of Artificial Sequence: Synthetic oligonucleotide
caaaugcaucaucacagga

SEQ ID NO: 2079354 - RNA, 19 nt, Artificial Sequence
  Description of Artificial Sequence: Synthetic oligonucleotide
aggaaucacagugguuuuc

SEQ ID NO: 2079355 - RNA, 19 nt, Artificial Sequence
  Description of Artificial Sequence: Synthetic oligonucleotide
gugugccacagcuaacggc

SEQ ID NO: 2079356 - RNA, 19 nt, Artificial Sequence
  Description of Artificial Sequence: Synthetic oligonucleotide
acauuacagcuuaucacca

SEQ ID NO: 2079357 - RNA, 19 nt, Artificial Sequence
  Description of Artificial Sequence: Synthetic oligonucleotide
ugucuaugccgcauacaua

SEQ ID NO: 2079358 - RNA, 19 nt, Artificial Sequence
  Description of Artificial Sequence: Synthetic oligonucleotide
agacaaugucccggaaagg

SEQ ID NO: 2079359 - RNA, 19 nt, Artificial Sequence
  Description of Artificial Sequence: Synthetic oligonucleotide
ucaaacugcagagcauuua

SEQ ID NO: 2079360 - RNA, 19 nt, Artificial Sequence
  Description of Artificial Sequence: Synthetic oligonucleotide
auuuggaaauacacuggga

SEQ ID NO: 2079361 - RNA, 19 nt, Artificial Sequence
  Description of Artificial Sequence: Synthetic oligonucleotide
cccaaggacauaaacuaug

SEQ ID NO: 2079362 - RNA, 19 nt, Artificial Sequence
  Description of Artificial Sequence: Synthetic oligonucleotide
gucaccauuaacacaaagu

SEQ ID NO: 2079363 - RNA, 19 nt, Artificial Sequence
  Description of Artificial Sequence: Synthetic oligonucleotide
cauuaacacaaaguaggga

SEQ ID NO: 2079364 - RNA, 19 nt, Artificial Sequence
  Description of Artificial Sequence: Synthetic oligonucleotide
ugccaauuaccuugccagu

SEQ ID NO: 2079365 - RNA, 19 nt, Artificial Sequence
  Description of Artificial Sequence: Synthetic oligonucleotide
aaguagggagcaaaugcuu

SEQ ID NO: 2079366 - RNA, 19 nt, Artificial Sequence
  Description of Artificial Sequence: Synthetic oligonucleotide
ccuuguuauuuuaaaccug

SEQ ID NO: 2079367 - RNA, 19 nt, Artificial Sequence
  Description of Artificial Sequence: Synthetic oligonucleotide
acacaaaguagggagcaaa

SEQ ID NO: 2079368 - RNA, 19 nt, Artificial Sequence
  Description of Artificial Sequence: Synthetic oligonucleotide
augccgcauacauacgccu

SEQ ID NO: 2079369 - RNA, 19 nt, Artificial Sequence
  Description of Artificial Sequence: Synthetic oligonucleotide
acuguauccagcagccugu

SEQ ID NO: 2079370 - RNA, 19 nt, Artificial Sequence
  Description of Artificial Sequence: Synthetic oligonucleotide
acaccccuaaagaaagcag

SEQ ID NO: 2079371 - RNA, 19 nt, Artificial Sequence
  Description of Artificial Sequence: Synthetic oligonucleotide
gugcccuuaugccaauuac

SEQ ID NO: 2079372 - RNA, 19 nt, Artificial Sequence
  Description of Artificial Sequence: Synthetic oligonucleotide
aauuaccuugccaguccca

SEQ ID NO: 2079373 - RNA, 19 nt, Artificial Sequence
  Description of Artificial Sequence: Synthetic oligonucleotide
ccaauuaccuugccagucc

SEQ ID NO: 2079374 - RNA, 19 nt, Artificial Sequence
  Description of Artificial Sequence: Synthetic oligonucleotide
cagucagcacgcauccuug

SEQ ID NO: 2079375 - RNA, 19 nt, Artificial Sequence
  Description of Artificial Sequence: Synthetic oligonucleotide
gcaggugggagacaugcug

SEQ ID NO: 2079376 - RNA, 19 nt, Artificial Sequence
  Description of Artificial Sequence: Synthetic oligonucleotide
ggcccaaggacauaaacua

SEQ ID NO: 2079377 - RNA, 19 nt, Artificial Sequence
  Description of Artificial Sequence: Synthetic oligonucleotide
aagagacaaugucccggaa

SEQ ID NO: 2079378 - RNA, 19 nt, Artificial Sequence
  Description of Artificial Sequence: Synthetic oligonucleotide
gcaaaugcuuggaagaaga

SEQ ID NO: 2079379 - RNA, 19 nt, Artificial Sequence
  Description of Artificial Sequence: Synthetic oligonucleotide
gugaaagagaaggacggaa

SEQ ID NO: 2079380 - RNA, 19 nt, Artificial Sequence
  Description of Artificial Sequence: Synthetic oligonucleotide
augacgaccaaaagccaca

SEQ ID NO: 2079381 - RNA, 19 nt, Artificial Sequence
  Description of Artificial Sequence: Synthetic oligonucleotide
uuaccuugccagucccaga

SEQ ID NO: 2079382 - RNA, 19 nt, Artificial Sequence
  Description of Artificial Sequence: Synthetic oligonucleotide
augaccuagaagaggggca

SEQ ID NO: 2079383 - RNA, 19 nt, Artificial Sequence
  Description of Artificial Sequence: Synthetic oligonucleotide
aggaaaccugggcccacag

SEQ ID NO: 2079384 - RNA, 19 nt, Artificial Sequence
  Description of Artificial Sequence: Synthetic oligonucleotide
gcuguaagucaccauuaac

SEQ ID NO: 2079385 - RNA, 19 nt, Artificial Sequence
  Description of Artificial Sequence: Synthetic oligonucleotide
ucucagugucugaggcuug

SEQ ID NO: 2079386 - RNA, 19 nt, Artificial Sequence
  Description of Artificial Sequence: Synthetic oligonucleotide
gugggacucaguagaaaug

SEQ ID NO: 2079387 - RNA, 19 nt, Artificial Sequence
  Description of Artificial Sequence: Synthetic oligonucleotide
caggauaugugcggcucgg

SEQ ID NO: 2079388 - RNA, 19 nt, Artificial Sequence
  Description of Artificial Sequence: Synthetic oligonucleotide
agucccagaugaccuagaa

SEQ ID NO: 2079389 - RNA, 19 nt, Artificial Sequence
  Description of Artificial Sequence: Synthetic oligonucleotide
uucugggcgugcugugugc

SEQ ID NO: 2079390 - RNA, 19 nt, Artificial Sequence
  Description of Artificial Sequence: Synthetic oligonucleotide
uacauacgccuuguuauuu

SEQ ID NO: 2079391 - RNA, 19 nt, Artificial Sequence
  Description of Artificial Sequence: Synthetic oligonucleotide
gaccacaccccuaaagaaa

SEQ ID NO: 2079392 - RNA, 19 nt, Artificial Sequence
  Description of Artificial Sequence: Synthetic oligonucleotide
aggacggaaggcagucagc

SEQ ID NO: 2079393 - RNA, 19 nt, Artificial Sequence
  Description of Artificial Sequence: Synthetic oligonucleotide
ggacucaguagaaaugaac

SEQ ID NO: 2079394 - RNA, 19 nt, Artificial Sequence
  Description of Artificial Sequence: Synthetic oligonucleotide
aaacuguauccagcagccu

SEQ ID NO: 2079395 - RNA, 19 nt, Artificial Sequence
  Description of Artificial Sequence: Synthetic oligonucleotide
ggacauaaacuaugacgac

SEQ ID NO: 2079396 - RNA, 19 nt, Artificial Sequence
  Description of Artificial Sequence: Synthetic oligonucleotide
ggguuuauucugcagauau

SEQ ID NO: 2079397 - RNA, 19 nt, Artificial Sequence
  Description of Artificial Sequence: Synthetic oligonucleotide
ugacgaccaaaagccacac

SEQ ID NO: 2079398 - RNA, 19 nt, Artificial Sequence
  Description of Artificial Sequence: Synthetic oligonucleotide
aaugucccggaaaggccca

SEQ ID NO: 2079399 - RNA, 19 nt, Artificial Sequence
  Description of Artificial Sequence: Synthetic oligonucleotide
gaugucuaugccgcauaca

SEQ ID NO: 2079400 - RNA, 19 nt, Artificial Sequence
  Description of Artificial Sequence: Synthetic oligonucleotide
gacggaaggcagucagcac

SEQ ID NO: 2079401 - RNA, 19 nt, Artificial Sequence
  Description of Artificial Sequence: Synthetic oligonucleotide
agcuaacggcuggugaaag

SEQ ID NO: 2079402 - RNA, 19 nt, Artificial Sequence
  Description of Artificial Sequence: Synthetic oligonucleotide
agagaugucuaugccgcau

SEQ ID NO: 2079403 - RNA, 19 nt, Artificial Sequence
  Description of Artificial Sequence: Synthetic oligonucleotide
agucagcacgcauccuuga

SEQ ID NO: 2079404 - RNA, 19 nt, Artificial Sequence
  Description of Artificial Sequence: Synthetic oligonucleotide
accuagaagaggggcaggu

SEQ ID NO: 2079405 - RNA, 19 nt, Artificial Sequence
  Description of Artificial Sequence: Synthetic oligonucleotide
gaccuagaagaggggcagg

SEQ ID NO: 2079406 - RNA, 19 nt, Artificial Sequence
  Description of Artificial Sequence: Synthetic oligonucleotide
agaggaaaccugggcccac

SEQ ID NO: 2079407 - RNA, 19 nt, Artificial Sequence
  Description of Artificial Sequence: Synthetic oligonucleotide
ucugggcgugcugugugcc

SEQ ID NO: 2079408 - RNA, 19 nt, Artificial Sequence
  Description of Artificial Sequence: Synthetic oligonucleotide
aucaacugucaaacugcag

SEQ ID NO: 2079409 - RNA, 19 nt, Artificial Sequence
  Description of Artificial Sequence: Synthetic oligonucleotide
ugggagggaaaagcuuccc

SEQ ID NO: 2079410 - RNA, 19 nt, Artificial Sequence
  Description of Artificial Sequence: Synthetic oligonucleotide
gagaugucuaugccgcaua

SEQ ID NO: 2079411 - RNA, 19 nt, Artificial Sequence
  Description of Artificial Sequence: Synthetic oligonucleotide
uggccuccaacuugcugga

SEQ ID NO: 2079412 - RNA, 19 nt, Artificial Sequence
  Description of Artificial Sequence: Synthetic oligonucleotide
cacaccccuaaagaaagca

SEQ ID NO: 2079413 - RNA, 19 nt, Artificial Sequence
  Description of Artificial Sequence: Synthetic oligonucleotide
caggugacauuacagcuua

SEQ ID NO: 2079414 - RNA, 19 nt, Artificial Sequence
  Description of Artificial Sequence: Synthetic oligonucleotide
aaaggcccaaaugcaucau

SEQ ID NO: 2079415 - RNA, 19 nt, Artificial Sequence
  Description of Artificial Sequence: Synthetic oligonucleotide
agccucagauucugggcgu

SEQ ID NO: 2079416 - RNA, 19 nt, Artificial Sequence
  Description of Artificial Sequence: Synthetic oligonucleotide
ggugacauuacagcuuauc

SEQ ID NO: 2079417 - RNA, 19 nt, Artificial Sequence
  Description of Artificial Sequence: Synthetic oligonucleotide
agaagaggcucagccucag

SEQ ID NO: 2079418 - RNA, 19 nt, Artificial Sequence
  Description of Artificial Sequence: Synthetic oligonucleotide
ugccgcauacauacgccuu

SEQ ID NO: 2079419 - RNA, 19 nt, Artificial Sequence
  Description of Artificial Sequence: Synthetic oligonucleotide
aggauaugugcggcucggg

SEQ ID NO: 2079420 - RNA, 19 nt, Artificial Sequence
  Description of Artificial Sequence: Synthetic oligonucleotide
ucagauggggugggacuca

SEQ ID NO: 2079421 - RNA, 19 nt, Artificial Sequence
  Description of Artificial Sequence: Synthetic oligonucleotide
agccuuuuauucauucaaa

SEQ ID NO: 2079422 - RNA, 19 nt, Artificial Sequence
  Description of Artificial Sequence: Synthetic oligonucleotide
ccaaggacauaaacuauga

SEQ ID NO: 2079423 - RNA, 19 nt, Artificial Sequence
  Description of Artificial Sequence: Synthetic oligonucleotide
cacagcuaacggcugguga

SEQ ID NO: 2079424 - RNA, 19 nt, Artificial Sequence
  Description of Artificial Sequence: Synthetic oligonucleotide
cucgggcugcucagaagag

SEQ ID NO: 2079425 - RNA, 19 nt, Artificial Sequence
  Description of Artificial Sequence: Synthetic oligonucleotide
ggaggaaucacagugguuu

SEQ ID NO: 2079426 - RNA, 19 nt, Artificial Sequence
  Description of Artificial Sequence: Synthetic oligonucleotide
cacgcauccuugaauggaa

SEQ ID NO: 2079427 - RNA, 19 nt, Artificial Sequence
  Description of Artificial Sequence: Synthetic oligonucleotide
ugccaggauaugugcggcu

SEQ ID NO: 2079428 - RNA, 19 nt, Artificial Sequence
  Description of Artificial Sequence: Synthetic oligonucleotide
gacgugcuguaagucacca

SEQ ID NO: 2079429 - RNA, 19 nt, Artificial Sequence
  Description of Artificial Sequence: Synthetic oligonucleotide
auccuugaauggaaacugu

SEQ ID NO: 2079430 - RNA, 19 nt, Artificial Sequence
  Description of Artificial Sequence: Synthetic oligonucleotide
ccucuugaaccacagccac

SEQ ID NO: 2079431 - RNA, 19 nt, Artificial Sequence
  Description of Artificial Sequence: Synthetic oligonucleotide
agggccucgggcugcucag

SEQ ID NO: 2079432 - RNA, 19 nt, Artificial Sequence
  Description of Artificial Sequence: Synthetic oligonucleotide
cacaaagucgugacgugcu

SEQ ID NO: 2079433 - RNA, 19 nt, Artificial Sequence
  Description of Artificial Sequence: Synthetic oligonucleotide
cauccccuagaagagacaa

SEQ ID NO: 2079434 - RNA, 19 nt, Artificial Sequence
  Description of Artificial Sequence: Synthetic oligonucleotide
cugccaggauaugugcggc

SEQ ID NO: 2079435 - RNA, 19 nt, Artificial Sequence
  Description of Artificial Sequence: Synthetic oligonucleotide
aguugggagggaaaagcuu

SEQ ID NO: 2079436 - RNA, 19 nt, Artificial Sequence
  Description of Artificial Sequence: Synthetic oligonucleotide
caguaauccuugaaucaua

SEQ ID NO: 2079437 - RNA, 19 nt, Artificial Sequence
  Description of Artificial Sequence: Synthetic oligonucleotide
gagaggaaaccugggccca

SEQ ID NO: 2079438 - RNA, 19 nt, Artificial Sequence
  Description of Artificial Sequence: Synthetic oligonucleotide
ccaccauccccuagaagag

SEQ ID NO: 2079439 - RNA, 19 nt, Artificial Sequence
  Description of Artificial Sequence: Synthetic oligonucleotide
cccaguaauccuugaauca

SEQ ID NO: 2079440 - RNA, 19 nt, Artificial Sequence
  Description of Artificial Sequence: Synthetic oligonucleotide
gcagagcauuuaaaggaag

SEQ ID NO: 2079441 - RNA, 19 nt, Artificial Sequence
  Description of Artificial Sequence: Synthetic oligonucleotide
cauacgccuuguuauuuua

SEQ ID NO: 2079442 - RNA, 19 nt, Artificial Sequence
  Description of Artificial Sequence: Synthetic oligonucleotide
agccccaguaauccuugaa

SEQ ID NO: 2079443 - RNA, 19 nt, Artificial Sequence
  Description of Artificial Sequence: Synthetic oligonucleotide
guaauccuugaaucauaua

SEQ ID NO: 2079444 - RNA, 19 nt, Artificial Sequence
  Description of Artificial Sequence: Synthetic oligonucleotide
ucgugacgugcuguaaguc

SEQ ID NO: 2079445 - RNA, 19 nt, Artificial Sequence
  Description of Artificial Sequence: Synthetic oligonucleotide
ggaccacaccccuaaagaa

SEQ ID NO: 2079446 - RNA, 19 nt, Artificial Sequence
  Description of Artificial Sequence: Synthetic oligonucleotide
gccgcauacauacgccuug

SEQ ID NO: 2079447 - RNA, 19 nt, Artificial Sequence
  Description of Artificial Sequence: Synthetic oligonucleotide
ggugggacucaguagaaau

SEQ ID NO: 2079448 - RNA, 19 nt, Artificial Sequence
  Description of Artificial Sequence: Synthetic oligonucleotide
cagcccagagcugucucag

SEQ ID NO: 2079449 - RNA, 19 nt, Artificial Sequence
  Description of Artificial Sequence: Synthetic oligonucleotide
ggacggaaggcagucagca

SEQ ID NO: 2079450 - RNA, 19 nt, Artificial Sequence
  Description of Artificial Sequence: Synthetic oligonucleotide
aagucgugacgugcuguaa

SEQ ID NO: 2079451 - RNA, 19 nt, Artificial Sequence
  Description of Artificial Sequence: Synthetic oligonucleotide
caucagauggggugggacu

SEQ ID NO: 2079452 - RNA, 19 nt, Artificial Sequence
  Description of Artificial Sequence: Synthetic oligonucleotide
uggguuuauucugcagaua

SEQ ID NO: 2079453 - RNA, 19 nt, Artificial Sequence
  Description of Artificial Sequence: Synthetic oligonucleotide
ccaggauaugugcggcucg

SEQ ID NO: 2079454 - RNA, 19 nt, Artificial Sequence
  Description of Artificial Sequence: Synthetic oligonucleotide
agggccucuugaaccacag

SEQ ID NO: 2079455 - RNA, 19 nt, Artificial Sequence
  Description of Artificial Sequence: Synthetic oligonucleotide
cagugguuuucugcuuggc

SEQ ID NO: 2079456 - RNA, 19 nt, Artificial Sequence
  Description of Artificial Sequence: Synthetic oligonucleotide
gucgugacgugcuguaagu

SEQ ID NO: 2079457 - RNA, 19 nt, Artificial Sequence
  Description of Artificial Sequence: Synthetic oligonucleotide
gaaggacggaaggcaguca

SEQ ID NO: 2079458 - RNA, 19 nt, Artificial Sequence
  Description of Artificial Sequence: Synthetic oligonucleotide
cauaaacuaugacgaccaa

SEQ ID NO: 2079459 - RNA, 19 nt, Artificial Sequence
  Description of Artificial Sequence: Synthetic oligonucleotide
ggcccaaaugcaucaucac

SEQ ID NO: 2079460 - RNA, 19 nt, Artificial Sequence
  Description of Artificial Sequence: Synthetic oligonucleotide
gggagggaaaagcuuccca

SEQ ID NO: 2079461 - RNA, 19 nt, Artificial Sequence
  Description of Artificial Sequence: Synthetic oligonucleotide
ggaaaucaacugucaaacu

SEQ ID NO: 2079462 - RNA, 19 nt, Artificial Sequence
  Description of Artificial Sequence: Synthetic oligonucleotide
auacgccuuguuauuuuaa

SEQ ID NO: 2079463 - RNA, 19 nt, Artificial Sequence
  Description of Artificial Sequence: Synthetic oligonucleotide
uugggcccaaggacauaaa

SEQ ID NO: 2079464 - RNA, 19 nt, Artificial Sequence
  Description of Artificial Sequence: Synthetic oligonucleotide
ccagagcugucucaguguc

SEQ ID NO: 2079465 - RNA, 19 nt, Artificial Sequence
  Description of Artificial Sequence: Synthetic oligonucleotide
gccaauuaccuugccaguc

SEQ ID NO: 2079466 - RNA, 19 nt, Artificial Sequence
  Description of Artificial Sequence: Synthetic oligonucleotide
ggcucagggccucuugaac

SEQ ID NO: 2079467 - RNA, 19 nt, Artificial Sequence
  Description of Artificial Sequence: Synthetic oligonucleotide
cgaccaaaagccacacuug

SEQ ID NO: 2079468 - RNA, 19 nt, Artificial Sequence
  Description of Artificial Sequence: Synthetic oligonucleotide
ucugaggcuugggcccaag

SEQ ID NO: 2079469 - RNA, 19 nt, Artificial Sequence
  Description of Artificial Sequence: Synthetic oligonucleotide
gaaggcagucagcacgcau

SEQ ID NO: 2079470 - RNA, 19 nt, Artificial Sequence
  Description of Artificial Sequence: Synthetic oligonucleotide
cauccccaccauccccuag

SEQ ID NO: 2079471 - RNA, 19 nt, Artificial Sequence
  Description of Artificial Sequence: Synthetic oligonucleotide
gacaugcugccaggauaug

SEQ ID NO: 2079472 - RNA, 19 nt, Artificial Sequence
  Description of Artificial Sequence: Synthetic oligonucleotide
ggaaucacagugguuuucu

SEQ ID NO: 2079473 - RNA, 19 nt, Artificial Sequence
  Description of Artificial Sequence: Synthetic oligonucleotide
acgugcuguaagucaccau

SEQ ID NO: 2079474 - RNA, 19 nt, Artificial Sequence
  Description of Artificial Sequence: Synthetic oligonucleotide
cagauggggugggacucag

SEQ ID NO: 2079475 - RNA, 19 nt, Artificial Sequence
  Description of Artificial Sequence: Synthetic oligonucleotide
gggaccagggaccuggccu

SEQ ID NO: 2079476 - RNA, 19 nt, Artificial Sequence
  Description of Artificial Sequence: Synthetic oligonucleotide
ggugaaagagaaggacgga

SEQ ID NO: 2079477 - RNA, 19 nt, Artificial Sequence
  Description of Artificial Sequence: Synthetic oligonucleotide
ccuccaacuugcuggacca

SEQ ID NO: 2079478 - RNA, 19 nt, Artificial Sequence
  Description of Artificial Sequence: Synthetic oligonucleotide
agaugccagggcaucccca

SEQ ID NO: 2079479 - RNA, 19 nt, Artificial Sequence
  Description of Artificial Sequence: Synthetic oligonucleotide
ccggaaaggcccaaaugca

SEQ ID NO: 2079480 - RNA, 19 nt, Artificial Sequence
  Description of Artificial Sequence: Synthetic oligonucleotide
gcuaacggcuggugaaaga

SEQ ID NO: 2079481 - RNA, 19 nt, Artificial Sequence
  Description of Artificial Sequence: Synthetic oligonucleotide
ggagccccaguaauccuug

SEQ ID NO: 2079482 - RNA, 19 nt, Artificial Sequence
  Description of Artificial Sequence: Synthetic oligonucleotide
gaacauggggagagggccu

SEQ ID NO: 2079483 - RNA, 19 nt, Artificial Sequence
  Description of Artificial Sequence: Synthetic oligonucleotide
gcaucagauggggugggac

SEQ ID NO: 2079484 - RNA, 19 nt, Artificial Sequence
  Description of Artificial Sequence: Synthetic oligonucleotide
gcccuuaugccaauuaccu

SEQ ID NO: 2079485 - RNA, 19 nt, Artificial Sequence
  Description of Artificial Sequence: Synthetic oligonucleotide
acugugcccuuaugccaau

SEQ ID NO: 2079486 - RNA, 19 nt, Artificial Sequence
  Description of Artificial Sequence: Synthetic oligonucleotide
gccucuugaaccacagcca

SEQ ID NO: 2079487 - RNA, 19 nt, Artificial Sequence
  Description of Artificial Sequence: Synthetic oligonucleotide
cgugacgugcuguaaguca

SEQ ID NO: 2079488 - RNA, 19 nt, Artificial Sequence
  Description of Artificial Sequence: Synthetic oligonucleotide
auuaaccauuggguuuauu

SEQ ID NO: 2079489 - RNA, 19 nt, Artificial Sequence
  Description of Artificial Sequence: Synthetic oligonucleotide
cgcauccuugaauggaaac

SEQ ID NO: 2079490 - RNA, 19 nt, Artificial Sequence
  Description of Artificial Sequence: Synthetic oligonucleotide
ggaaauacacugggaggaa

SEQ ID NO: 2079491 - RNA, 19 nt, Artificial Sequence
  Description of Artificial Sequence: Synthetic oligonucleotide
cagauucugggcgugcugu

SEQ ID NO: 2079492 - RNA, 19 nt, Artificial Sequence
  Description of Artificial Sequence: Synthetic oligonucleotide
gacgaccaaaagccacacu

SEQ ID NO: 2079493 - RNA, 19 nt, Artificial Sequence
  Description of Artificial Sequence: Synthetic oligonucleotide
ugucccggaaaggcccaaa

SEQ ID NO: 2079494 - RNA, 19 nt, Artificial Sequence
  Description of Artificial Sequence: Synthetic oligonucleotide
ggggcuuucucuagagaga

SEQ ID NO: 2079495 - RNA, 19 nt, Artificial Sequence
  Description of Artificial Sequence: Synthetic oligonucleotide
cuguauccagcagccuguc

SEQ ID NO: 2079496 - RNA, 19 nt, Artificial Sequence
  Description of Artificial Sequence: Synthetic oligonucleotide
cagcagccugucaggaaga

SEQ ID NO: 2079497 - RNA, 19 nt, Artificial Sequence
  Description of Artificial Sequence: Synthetic oligonucleotide
gcacgcauccuugaaugga

SEQ ID NO: 2079498 - RNA, 19 nt, Artificial Sequence
  Description of Artificial Sequence: Synthetic oligonucleotide
ccuugaauggaaacuguau

SEQ ID NO: 2079499 - RNA, 19 nt, Artificial Sequence
  Description of Artificial Sequence: Synthetic oligonucleotide
gggaaaagcuucccacugu

SEQ ID NO: 2079500 - RNA, 19 nt, Artificial Sequence
  Description of Artificial Sequence: Synthetic oligonucleotide
ccagucccagaugaccuag

SEQ ID NO: 2079501 - RNA, 19 nt, Artificial Sequence
  Description of Artificial Sequence: Synthetic oligonucleotide
caaagucgugacgugcugu

SEQ ID NO: 2079502 - RNA, 19 nt, Artificial Sequence
  Description of Artificial Sequence: Synthetic oligonucleotide
gggacacagcaucccuggc

SEQ ID NO: 2079503 - RNA, 19 nt, Artificial Sequence
  Description of Artificial Sequence: Synthetic oligonucleotide
agcagccugucaggaagaa

SEQ ID NO: 2079504 - RNA, 19 nt, Artificial Sequence
  Description of Artificial Sequence: Synthetic oligonucleotide
cccaggugacauuacagcu

SEQ ID NO: 2079505 - RNA, 19 nt, Artificial Sequence
  Description of Artificial Sequence: Synthetic oligonucleotide
ccuagaagaggggcaggug

SEQ ID NO: 2079506 - RNA, 19 nt, Artificial Sequence
  Description of Artificial Sequence: Synthetic oligonucleotide
cuccaacuugcuggaccac

SEQ ID NO: 2079507 - RNA, 19 nt, Artificial Sequence
  Description of Artificial Sequence: Synthetic oligonucleotide
cagucccagaugaccuaga

SEQ ID NO: 2079508 - RNA, 19 nt, Artificial Sequence
  Description of Artificial Sequence: Synthetic oligonucleotide
acgcauccuugaauggaaa

SEQ ID NO: 2079509 - RNA, 19 nt, Artificial Sequence
  Description of Artificial Sequence: Synthetic oligonucleotide
caccauccccuagaagaga

SEQ ID NO: 2079510 - RNA, 19 nt, Artificial Sequence
  Description of Artificial Sequence: Synthetic oligonucleotide
ccauuggguuuauucugca

SEQ ID NO: 2079511 - RNA, 19 nt, Artificial Sequence
  Description of Artificial Sequence: Synthetic oligonucleotide
ggcccacagaaaguuacaa

SEQ ID NO: 2079512 - RNA, 19 nt, Artificial Sequence
  Description of Artificial Sequence: Synthetic oligonucleotide
gcagucagcacgcauccuu

SEQ ID NO: 2079513 - RNA, 19 nt, Artificial Sequence
  Description of Artificial Sequence: Synthetic oligonucleotide
gccucgggcugcucagaag

SEQ ID NO: 2079514 - RNA, 19 nt, Artificial Sequence
  Description of Artificial Sequence: Synthetic oligonucleotide
cuggccucacaggcuggac

SEQ ID NO: 2079515 - RNA, 19 nt, Artificial Sequence
  Description of Artificial Sequence: Synthetic oligonucleotide
ggagagggccucgggcugc

SEQ ID NO: 2079516 - RNA, 19 nt, Artificial Sequence
  Description of Artificial Sequence: Synthetic oligonucleotide
cugggcgugcugugugcca

SEQ ID NO: 2079517 - RNA, 19 nt, Artificial Sequence
  Description of Artificial Sequence: Synthetic oligonucleotide
cagcuaacggcuggugaaa

SEQ ID NO: 2079518 - RNA, 19 nt, Artificial Sequence
  Description of Artificial Sequence: Synthetic oligonucleotide
gggccucuugaaccacagc

SEQ ID NO: 2079519 - RNA, 19 nt, Artificial Sequence
  Description of Artificial Sequence: Synthetic oligonucleotide
ggcuuucucuagagagaug

SEQ ID NO: 2079520 - RNA, 19 nt, Artificial Sequence
  Description of Artificial Sequence: Synthetic oligonucleotide
ggcgugcugugugccacag

SEQ ID NO: 2079521 - RNA, 19 nt, Artificial Sequence
  Description of Artificial Sequence: Synthetic oligonucleotide
gucccggaaaggcccaaau

SEQ ID NO: 2079522 - RNA, 19 nt, Artificial Sequence
  Description of Artificial Sequence: Synthetic oligonucleotide
ucccaccucuggccuccaa

SEQ ID NO: 2079523 - RNA, 19 nt, Artificial Sequence
  Description of Artificial Sequence: Synthetic oligonucleotide
agauggggugggacucagu

SEQ ID NO: 2079524 - RNA, 19 nt, Artificial Sequence
  Description of Artificial Sequence: Synthetic oligonucleotide
gggacucaguagaaaugaa

SEQ ID NO: 2079525 - RNA, 19 nt, Artificial Sequence
  Description of Artificial Sequence: Synthetic oligonucleotide
ccucagauucugggcgugc

SEQ ID NO: 2079526 - RNA, 19 nt, Artificial Sequence
  Description of Artificial Sequence: Synthetic oligonucleotide
ccaguaauccuugaaucau

SEQ ID NO: 2079527 - RNA, 19 nt, Artificial Sequence
  Description of Artificial Sequence: Synthetic oligonucleotide
gucaaacugcagagcauuu

SEQ ID NO: 2079528 - RNA, 19 nt, Artificial Sequence
  Description of Artificial Sequence: Synthetic oligonucleotide
cgugcuguaagucaccauu

SEQ ID NO: 2079529 - RNA, 19 nt, Artificial Sequence
  Description of Artificial Sequence: Synthetic oligonucleotide
gcugugugccacagcuaac

SEQ ID NO: 2079530 - RNA, 19 nt, Artificial Sequence
  Description of Artificial Sequence: Synthetic oligonucleotide
gccucagauucugggcgug

SEQ ID NO: 2079531 - RNA, 19 nt, Artificial Sequence
  Description of Artificial Sequence: Synthetic oligonucleotide
cuucccacugugcccuuau

SEQ ID NO: 2079532 - RNA, 19 nt, Artificial Sequence
  Description of Artificial Sequence: Synthetic oligonucleotide
gguuuauucugcagauauu

SEQ ID NO: 2079533 - RNA, 19 nt, Artificial Sequence
  Description of Artificial Sequence: Synthetic oligonucleotide
cagagggaccagggaccug

SEQ ID NO: 2079534 - RNA, 19 nt, Artificial Sequence
  Description of Artificial Sequence: Synthetic oligonucleotide
aggugacauuacagcuuau

SEQ ID NO: 2079535 - RNA, 19 nt, Artificial Sequence
  Description of Artificial Sequence: Synthetic oligonucleotide
augucccggaaaggcccaa

SEQ ID NO: 2079536 - RNA, 19 nt, Artificial Sequence
  Description of Artificial Sequence: Synthetic oligonucleotide
gggugggacucaguagaaa

SEQ ID NO: 2079537 - RNA, 19 nt, Artificial Sequence
  Description of Artificial Sequence: Synthetic oligonucleotide
gcgugcugugugccacagc

SEQ ID NO: 2079538 - RNA, 19 nt, Artificial Sequence
  Description of Artificial Sequence: Synthetic oligonucleotide
gugcugugugccacagcua

SEQ ID NO: 2079539 - RNA, 19 nt, Artificial Sequence
  Description of Artificial Sequence: Synthetic oligonucleotide
ccccuagaagagacaaugu

SEQ ID NO: 2079540 - RNA, 19 nt, Artificial Sequence
  Description of Artificial Sequence: Synthetic oligonucleotide
gggcgugcugugugccaca

SEQ ID NO: 2079541 - RNA, 19 nt, Artificial Sequence
  Description of Artificial Sequence: Synthetic oligonucleotide
ggggagccccaguaauccu

SEQ ID NO: 2079542 - RNA, 19 nt, Artificial Sequence
  Description of Artificial Sequence: Synthetic oligonucleotide
caccucuggccuccaacuu

SEQ ID NO: 2079543 - RNA, 19 nt, Artificial Sequence
  Description of Artificial Sequence: Synthetic oligonucleotide
gcccaaggacauaaacuau

SEQ ID NO: 2079544 - RNA, 19 nt, Artificial Sequence
  Description of Artificial Sequence: Synthetic oligonucleotide
cuugaaccacagccaccuu

SEQ ID NO: 2079545 - RNA, 19 nt, Artificial Sequence
  Description of Artificial Sequence: Synthetic oligonucleotide
aggcuggaccacaccccua

SEQ ID NO: 2079546 - RNA, 19 nt, Artificial Sequence
  Description of Artificial Sequence: Synthetic oligonucleotide
gggagccccaguaauccuu

SEQ ID NO: 2079547 - RNA, 19 nt, Artificial Sequence
  Description of Artificial Sequence: Synthetic oligonucleotide
cucuggccuccaacuugcu

SEQ ID NO: 2079548 - RNA, 19 nt, Artificial Sequence
  Description of Artificial Sequence: Synthetic oligonucleotide
gccacagcuaacggcuggu

SEQ ID NO: 2079549 - RNA, 19 nt, Artificial Sequence
  Description of Artificial Sequence: Synthetic oligonucleotide
cccuuaugccaauuaccuu

SEQ ID NO: 2079550 - RNA, 19 nt, Artificial Sequence
  Description of Artificial Sequence: Synthetic oligonucleotide
ggccuccaacuugcuggac

SEQ ID NO: 2079551 - RNA, 19 nt, Artificial Sequence
  Description of Artificial Sequence: Synthetic oligonucleotide
ggcagucagcacgcauccu

SEQ ID NO: 2079552 - RNA, 19 nt, Artificial Sequence
  Description of Artificial Sequence: Synthetic oligonucleotide
ccgcauacauacgccuugu

SEQ ID NO: 2079553 - RNA, 19 nt, Artificial Sequence
  Description of Artificial Sequence: Synthetic oligonucleotide
cugugcccuuaugccaauu

SEQ ID NO: 2079554 - RNA, 19 nt, Artificial Sequence
  Description of Artificial Sequence: Synthetic oligonucleotide
cgcauacauacgccuuguu

SEQ ID NO: 2079555 - RNA, 19 nt, Artificial Sequence
  Description of Artificial Sequence: Synthetic oligonucleotide
gacaucuuuauuuaagagg

SEQ ID NO: 2079556 - RNA, 19 nt, Artificial Sequence
  Description of Artificial Sequence: Synthetic oligonucleotide
agcuuaaugaaaucccugc

SEQ ID NO: 2079557 - RNA, 19 nt, Artificial Sequence
  Description of Artificial Sequence: Synthetic oligonucleotide
aaaugcaugggaaagccac

SEQ ID NO: 2079558 - RNA, 19 nt, Artificial Sequence
  Description of Artificial Sequence: Synthetic oligonucleotide
uuauuuaagaggcuucuga

SEQ ID NO: 2079559 - RNA, 19 nt, Artificial Sequence
  Description of Artificial Sequence: Synthetic oligonucleotide
aacacacagaugauaagcc

SEQ ID NO: 2079560 - RNA, 19 nt, Artificial Sequence
  Description of Artificial Sequence: Synthetic oligonucleotide
aagccgauccaccuugucc

SEQ ID NO: 2079561 - RNA, 19 nt, Artificial Sequence
  Description of Artificial Sequence: Synthetic oligonucleotide
uuaaugaaaucccugcaga

SEQ ID NO: 2079562 - RNA, 19 nt, Artificial Sequence
  Description of Artificial Sequence: Synthetic oligonucleotide
gaaguaauggggcaggcgc

SEQ ID NO: 2079563 - RNA, 19 nt, Artificial Sequence
  Description of Artificial Sequence: Synthetic oligonucleotide
augggaaagccacugagcg

SEQ ID NO: 2079564 - RNA, 19 nt, Artificial Sequence
  Description of Artificial Sequence: Synthetic oligonucleotide
agaaaugcaugggaaagcc

SEQ ID NO: 2079565 - RNA, 19 nt, Artificial Sequence
  Description of Artificial Sequence: Synthetic oligonucleotide
auauuugggguccuccacc

SEQ ID NO: 2079566 - RNA, 19 nt, Artificial Sequence
  Description of Artificial Sequence: Synthetic oligonucleotide
uggaugacguacuuggccg

SEQ ID NO: 2079567 - RNA, 19 nt, Artificial Sequence
  Description of Artificial Sequence: Synthetic oligonucleotide
uauccaaacacgccuguag

SEQ ID NO: 2079568 - RNA, 19 nt, Artificial Sequence
  Description of Artificial Sequence: Synthetic oligonucleotide
uuaggguauccaaacacgc

SEQ ID NO: 2079569 - RNA, 19 nt, Artificial Sequence
  Description of Artificial Sequence: Synthetic oligonucleotide
cuucagaaagguuuuggcc

SEQ ID NO: 2079570 - RNA, 19 nt, Artificial Sequence
  Description of Artificial Sequence: Synthetic oligonucleotide
uuuuguuaggcugaaucag

SEQ ID NO: 2079571 - RNA, 19 nt, Artificial Sequence
  Description of Artificial Sequence: Synthetic oligonucleotide
aacacgccuguagaaaugc

SEQ ID NO: 2079572 - RNA, 19 nt, Artificial Sequence
  Description of Artificial Sequence: Synthetic oligonucleotide
gugaucuuagcuuugccag

SEQ ID NO: 2079573 - RNA, 19 nt, Artificial Sequence
  Description of Artificial Sequence: Synthetic oligonucleotide
acugggcuggccuacagcg

SEQ ID NO: 2079574 - RNA, 19 nt, Artificial Sequence
  Description of Artificial Sequence: Synthetic oligonucleotide
agcgaggucccacaggccc

SEQ ID NO: 2079575 - RNA, 19 nt, Artificial Sequence
  Description of Artificial Sequence: Synthetic oligonucleotide
gauaagccgauccaccuug

SEQ ID NO: 2079576 - RNA, 19 nt, Artificial Sequence
  Description of Artificial Sequence: Synthetic oligonucleotide
ucgguaaauguccucgucc

SEQ ID NO: 2079577 - RNA, 19 nt, Artificial Sequence
  Description of Artificial Sequence: Synthetic oligonucleotide
uuuguuaggcugaaucaga

SEQ ID NO: 2079578 - RNA, 19 nt, Artificial Sequence
  Description of Artificial Sequence: Synthetic oligonucleotide
aaucagacaucuuuauuua

SEQ ID NO: 2079579 - RNA, 19 nt, Artificial Sequence
  Description of Artificial Sequence: Synthetic oligonucleotide
ugcucaaauagcagcugcg

SEQ ID NO: 2079580 - RNA, 19 nt, Artificial Sequence
  Description of Artificial Sequence: Synthetic oligonucleotide
agcguugacaauggcaucc

SEQ ID NO: 2079581 - RNA, 19 nt, Artificial Sequence
  Description of Artificial Sequence: Synthetic oligonucleotide
cucagguccaccuucgcgg

SEQ ID NO: 2079582 - RNA, 19 nt, Artificial Sequence
  Description of Artificial Sequence: Synthetic oligonucleotide
cauuaggguauccaaacac

SEQ ID NO: 2079583 - RNA, 19 nt, Artificial Sequence
  Description of Artificial Sequence: Synthetic oligonucleotide
acacacagaugauaagccg

SEQ ID NO: 2079584 - RNA, 19 nt, Artificial Sequence
  Description of Artificial Sequence: Synthetic oligonucleotide
ucuuuauuuaagaggcuuc

SEQ ID NO: 2079585 - RNA, 19 nt, Artificial Sequence
  Description of Artificial Sequence: Synthetic oligonucleotide
cucauuaggguauccaaac

SEQ ID NO: 2079586 - RNA, 19 nt, Artificial Sequence
  Description of Artificial Sequence: Synthetic oligonucleotide
ucagcuuaaugaaaucccu

SEQ ID NO: 2079587 - RNA, 19 nt, Artificial Sequence
  Description of Artificial Sequence: Synthetic oligonucleotide
auuaggguauccaaacacg

SEQ ID NO: 2079588 - RNA, 19 nt, Artificial Sequence
  Description of Artificial Sequence: Synthetic oligonucleotide
agcugcggagcucagcugc

SEQ ID NO: 2079589 - RNA, 19 nt, Artificial Sequence
  Description of Artificial Sequence: Synthetic oligonucleotide
uucggcuucucucagaguu

SEQ ID NO: 2079590 - RNA, 19 nt, Artificial Sequence
  Description of Artificial Sequence: Synthetic oligonucleotide
uuauauuugggguccucca

SEQ ID NO: 2079591 - RNA, 19 nt, Artificial Sequence
  Description of Artificial Sequence: Synthetic oligonucleotide
uacugggaaguaauggggc

SEQ ID NO: 2079592 - RNA, 19 nt, Artificial Sequence
  Description of Artificial Sequence: Synthetic oligonucleotide
gaugauaagccgauccacc

SEQ ID NO: 2079593 - RNA, 19 nt, Artificial Sequence
  Description of Artificial Sequence: Synthetic oligonucleotide
gaaucagacaucuuuauuu

SEQ ID NO: 2079594 - RNA, 19 nt, Artificial Sequence
  Description of Artificial Sequence: Synthetic oligonucleotide
uauauuugggguccuccac

SEQ ID NO: 2079595 - RNA, 19 nt, Artificial Sequence
  Description of Artificial Sequence: Synthetic oligonucleotide
uaagaggcuucugaaaggc

SEQ ID NO: 2079596 - RNA, 19 nt, Artificial Sequence
  Description of Artificial Sequence: Synthetic oligonucleotide
ucucucagaguugggagcg

SEQ ID NO: 2079597 - RNA, 19 nt, Artificial Sequence
  Description of Artificial Sequence: Synthetic oligonucleotide
aggguauccaaacacgccu

SEQ ID NO: 2079598 - RNA, 19 nt, Artificial Sequence
  Description of Artificial Sequence: Synthetic oligonucleotide
cuucuuauauuuggggucc

SEQ ID NO: 2079599 - RNA, 19 nt, Artificial Sequence
  Description of Artificial Sequence: Synthetic oligonucleotide
aggugggucagucccauuc

SEQ ID NO: 2079600 - RNA, 19 nt, Artificial Sequence
  Description of Artificial Sequence: Synthetic oligonucleotide
guccuucuuauauuugggg

SEQ ID NO: 2079601 - RNA, 19 nt, Artificial Sequence
  Description of Artificial Sequence: Synthetic oligonucleotide
caaccggugcuccagaagc

SEQ ID NO: 2079602 - RNA, 19 nt, Artificial Sequence
  Description of Artificial Sequence: Synthetic oligonucleotide
uuguuaggcugaaucagac

SEQ ID NO: 2079603 - RNA, 19 nt, Artificial Sequence
  Description of Artificial Sequence: Synthetic oligonucleotide
ucacucaagcccuucagaa

SEQ ID NO: 2079604 - RNA, 19 nt, Artificial Sequence
  Description of Artificial Sequence: Synthetic oligonucleotide
cuuggugauguccccacgg

SEQ ID NO: 2079605 - RNA, 19 nt, Artificial Sequence
  Description of Artificial Sequence: Synthetic oligonucleotide
cagggugcgacacucgucg

SEQ ID NO: 2079606 - RNA, 19 nt, Artificial Sequence
  Description of Artificial Sequence: Synthetic oligonucleotide
uaggguauccaaacacgcc

SEQ ID NO: 2079607 - RNA, 19 nt, Artificial Sequence
  Description of Artificial Sequence: Synthetic oligonucleotide
agucucacaguugugcagg

SEQ ID NO: 2079608 - RNA, 19 nt, Artificial Sequence
  Description of Artificial Sequence: Synthetic oligonucleotide
acagcgauaggccccacug

SEQ ID NO: 2079609 - RNA, 19 nt, Artificial Sequence
  Description of Artificial Sequence: Synthetic oligonucleotide
caugggaaagccacugagc

SEQ ID NO: 2079610 - RNA, 19 nt, Artificial Sequence
  Description of Artificial Sequence: Synthetic oligonucleotide
uggccuacagcgauaggcc

SEQ ID NO: 2079611 - RNA, 19 nt, Artificial Sequence
  Description of Artificial Sequence: Synthetic oligonucleotide
uuuauuuaagaggcuucug

SEQ ID NO: 2079612 - RNA, 19 nt, Artificial Sequence
  Description of Artificial Sequence: Synthetic oligonucleotide
uaggcugaaucagacaucu

SEQ ID NO: 2079613 - RNA, 19 nt, Artificial Sequence
  Description of Artificial Sequence: Synthetic oligonucleotide
cucucgguaaauguccucg

SEQ ID NO: 2079614 - RNA, 19 nt, Artificial Sequence
  Description of Artificial Sequence: Synthetic oligonucleotide
ugaaaggcagggcuaggac

SEQ ID NO: 2079615 - RNA, 19 nt, Artificial Sequence
  Description of Artificial Sequence: Synthetic oligonucleotide
cuggccuacagcgauaggc

SEQ ID NO: 2079616 - RNA, 19 nt, Artificial Sequence
  Description of Artificial Sequence: Synthetic oligonucleotide
ucgggguuggccaggcugg

SEQ ID NO: 2079617 - RNA, 19 nt, Artificial Sequence
  Description of Artificial Sequence: Synthetic oligonucleotide
ugggucagucccauucagg

SEQ ID NO: 2079618 - RNA, 19 nt, Artificial Sequence
  Description of Artificial Sequence: Synthetic oligonucleotide
ugaaucagacaucuuuauu

SEQ ID NO: 2079619 - RNA, 19 nt, Artificial Sequence
  Description of Artificial Sequence: Synthetic oligonucleotide
uuccauguggggaucuucu

SEQ ID NO: 2079620 - RNA, 19 nt, Artificial Sequence
  Description of Artificial Sequence: Synthetic oligonucleotide
gaaaucccugcagaaguag

SEQ ID NO: 2079621 - RNA, 19 nt, Artificial Sequence
  Description of Artificial Sequence: Synthetic oligonucleotide
aaucccugcagaaguagug

SEQ ID NO: 2079622 - RNA, 19 nt, Artificial Sequence
  Description of Artificial Sequence: Synthetic oligonucleotide
caaauagcagcugcggagc

SEQ ID NO: 2079623 - RNA, 19 nt, Artificial Sequence
  Description of Artificial Sequence: Synthetic oligonucleotide
agcgauaggccccacugug

SEQ ID NO: 2079624 - RNA, 19 nt, Artificial Sequence
  Description of Artificial Sequence: Synthetic oligonucleotide
aggggcgacgcgcaguggc

SEQ ID NO: 2079625 - RNA, 19 nt, Artificial Sequence
  Description of Artificial Sequence: Synthetic oligonucleotide
uggaacaagcuguucggcu

SEQ ID NO: 2079626 - RNA, 19 nt, Artificial Sequence
  Description of Artificial Sequence: Synthetic oligonucleotide
uuagcuuugccagucucac

SEQ ID NO: 2079627 - RNA, 19 nt, Artificial Sequence
  Description of Artificial Sequence: Synthetic oligonucleotide
cagggcuaggacauacugg

SEQ ID NO: 2079628 - RNA, 19 nt, Artificial Sequence
  Description of Artificial Sequence: Synthetic oligonucleotide
guuaggcugaaucagacau

SEQ ID NO: 2079629 - RNA, 19 nt, Artificial Sequence
  Description of Artificial Sequence: Synthetic oligonucleotide
uucugaaaggcagggcuag

SEQ ID NO: 2079630 - RNA, 19 nt, Artificial Sequence
  Description of Artificial Sequence: Synthetic oligonucleotide
uaaauguccucguccuucu

SEQ ID NO: 2079631 - RNA, 19 nt, Artificial Sequence
  Description of Artificial Sequence: Synthetic oligonucleotide
acguacuuggccggcagcc

SEQ ID NO: 2079632 - RNA, 19 nt, Artificial Sequence
  Description of Artificial Sequence: Synthetic oligonucleotide
uguuaggcugaaucagaca

SEQ ID NO: 2079633 - RNA, 19 nt, Artificial Sequence
  Description of Artificial Sequence: Synthetic oligonucleotide
aaauagcagcugcggagcu

SEQ ID NO: 2079634 - RNA, 19 nt, Artificial Sequence
  Description of Artificial Sequence: Synthetic oligonucleotide
acacucgucggugagcagg

SEQ ID NO: 2079635 - RNA, 19 nt, Artificial Sequence
  Description of Artificial Sequence: Synthetic oligonucleotide
gauaggccccacugugugg

SEQ ID NO: 2079636 - RNA, 19 nt, Artificial Sequence
  Description of Artificial Sequence: Synthetic oligonucleotide
aguaguguuccucccucug

SEQ ID NO: 2079637 - RNA, 19 nt, Artificial Sequence
  Description of Artificial Sequence: Synthetic oligonucleotide
ugggaaguaauggggcagg

SEQ ID NO: 2079638 - RNA, 19 nt, Artificial Sequence
  Description of Artificial Sequence: Synthetic oligonucleotide
ugcguacccaggcuccacg

SEQ ID NO: 2079639 - RNA, 19 nt, Artificial Sequence
  Description of Artificial Sequence: Synthetic oligonucleotide
aggaacucgggguuggcca

SEQ ID NO: 2079640 - RNA, 19 nt, Artificial Sequence
  Description of Artificial Sequence: Synthetic oligonucleotide
cacacagaugauaagccga

SEQ ID NO: 2079641 - RNA, 19 nt, Artificial Sequence
  Description of Artificial Sequence: Synthetic oligonucleotide
ugaucuuagcuuugccagu

SEQ ID NO: 2079642 - RNA, 19 nt, Artificial Sequence
  Description of Artificial Sequence: Synthetic oligonucleotide
uuaggcugaaucagacauc

SEQ ID NO: 2079643 - RNA, 19 nt, Artificial Sequence
  Description of Artificial Sequence: Synthetic oligonucleotide
aaguaguguuccucccucu

SEQ ID NO: 2079644 - RNA, 19 nt, Artificial Sequence
  Description of Artificial Sequence: Synthetic oligonucleotide
cagcuuaaugaaaucccug

SEQ ID NO: 2079645 - RNA, 19 nt, Artificial Sequence
  Description of Artificial Sequence: Synthetic oligonucleotide
uuggugauguccccacgga

SEQ ID NO: 2079646 - RNA, 19 nt, Artificial Sequence
  Description of Artificial Sequence: Synthetic oligonucleotide
uccaaacacgccuguagaa

SEQ ID NO: 2079647 - RNA, 19 nt, Artificial Sequence
  Description of Artificial Sequence: Synthetic oligonucleotide
gggagauuuucucauucag

SEQ ID NO: 2079648 - RNA, 19 nt, Artificial Sequence
  Description of Artificial Sequence: Synthetic oligonucleotide
gcuggaacaagcuguucgg

SEQ ID NO: 2079649 - RNA, 19 nt, Artificial Sequence
  Description of Artificial Sequence: Synthetic oligonucleotide
uguuuguccuucuuauauu

SEQ ID NO: 2079650 - RNA, 19 nt, Artificial Sequence
  Description of Artificial Sequence: Synthetic oligonucleotide
uucaggagccucaggcuac

SEQ ID NO: 2079651 - RNA, 19 nt, Artificial Sequence
  Description of Artificial Sequence: Synthetic oligonucleotide
ggagcgaggucccacaggc

SEQ ID NO: 2079652 - RNA, 19 nt, Artificial Sequence
  Description of Artificial Sequence: Synthetic oligonucleotide
guaguguuccucccucugc

SEQ ID NO: 2079653 - RNA, 19 nt, Artificial Sequence
  Description of Artificial Sequence: Synthetic oligonucleotide
uuccagucgguggaggugc

SEQ ID NO: 2079654 - RNA, 19 nt, Artificial Sequence
  Description of Artificial Sequence: Synthetic oligonucleotide
agggagauuuucucauuca

SEQ ID NO: 2079655 - RNA, 19 nt, Artificial Sequence
  Description of Artificial Sequence: Synthetic oligonucleotide
cagaaguaguguuccuccc

SEQ ID NO: 2079656 - RNA, 19 nt, Artificial Sequence
  Description of Artificial Sequence: Synthetic oligonucleotide
aaccucccgcccgaggggc

SEQ ID NO: 2079657 - RNA, 19 nt, Artificial Sequence
  Description of Artificial Sequence: Synthetic oligonucleotide
aaacacgccuguagaaaug

SEQ ID NO: 2079658 - RNA, 19 nt, Artificial Sequence
  Description of Artificial Sequence: Synthetic oligonucleotide
ugggaaagccacugagcgc

SEQ ID NO: 2079659 - RNA, 19 nt, Artificial Sequence
  Description of Artificial Sequence: Synthetic oligonucleotide
gaucuuagcuuugccaguc

SEQ ID NO: 2079660 - RNA, 19 nt, Artificial Sequence
  Description of Artificial Sequence: Synthetic oligonucleotide
ggugaucuuagcuuugcca

SEQ ID NO: 2079661 - RNA, 19 nt, Artificial Sequence
  Description of Artificial Sequence: Synthetic oligonucleotide
aaaucccugcagaaguagu

SEQ ID NO: 2079662 - RNA, 19 nt, Artificial Sequence
  Description of Artificial Sequence: Synthetic oligonucleotide
cagggugggcuucaggagc

SEQ ID NO: 2079663 - RNA, 19 nt, Artificial Sequence
  Description of Artificial Sequence: Synthetic oligonucleotide
ucgguggaggugcucaggu

SEQ ID NO: 2079664 - RNA, 19 nt, Artificial Sequence
  Description of Artificial Sequence: Synthetic oligonucleotide
aguaauggggcaggcgcuc

SEQ ID NO: 2079665 - RNA, 19 nt, Artificial Sequence
  Description of Artificial Sequence: Synthetic oligonucleotide
aaugcaugggaaagccacu

SEQ ID NO: 2079666 - RNA, 19 nt, Artificial Sequence
  Description of Artificial Sequence: Synthetic oligonucleotide
ugcaugggaaagccacuga

SEQ ID NO: 2079667 - RNA, 19 nt, Artificial Sequence
  Description of Artificial Sequence: Synthetic oligonucleotide
aacucgggguuggccaggc

SEQ ID NO: 2079668 - RNA, 19 nt, Artificial Sequence
  Description of Artificial Sequence: Synthetic oligonucleotide
cuguagaaaugcaugggaa

SEQ ID NO: 2079669 - RNA, 19 nt, Artificial Sequence
  Description of Artificial Sequence: Synthetic oligonucleotide
gaacaagcuguucggcuuc

SEQ ID NO: 2079670 - RNA, 19 nt, Artificial Sequence
  Description of Artificial Sequence: Synthetic oligonucleotide
cagggagauuuucucauuc

SEQ ID NO: 2079671 - RNA, 19 nt, Artificial Sequence
  Description of Artificial Sequence: Synthetic oligonucleotide
cucagaguugggagcgagg

SEQ ID NO: 2079672 - RNA, 19 nt, Artificial Sequence
  Description of Artificial Sequence: Synthetic oligonucleotide
ugauaagccgauccaccuu

SEQ ID NO: 2079673 - RNA, 19 nt, Artificial Sequence
  Description of Artificial Sequence: Synthetic oligonucleotide
ggagauuuucucauucagc

SEQ ID NO: 2079674 - RNA, 19 nt, Artificial Sequence
  Description of Artificial Sequence: Synthetic oligonucleotide
guacccaggcuccacgccc

SEQ ID NO: 2079675 - RNA, 19 nt, Artificial Sequence
  Description of Artificial Sequence: Synthetic oligonucleotide
ucggcuucucucagaguug

SEQ ID NO: 2079676 - RNA, 19 nt, Artificial Sequence
  Description of Artificial Sequence: Synthetic oligonucleotide
ucgucggugagcagggguc

SEQ ID NO: 2079677 - RNA, 19 nt, Artificial Sequence
  Description of Artificial Sequence: Synthetic oligonucleotide
gaugcagccguccacuccu

SEQ ID NO: 2079678 - RNA, 19 nt, Artificial Sequence
  Description of Artificial Sequence: Synthetic oligonucleotide
cacucgucggugagcaggg

SEQ ID NO: 2079679 - RNA, 19 nt, Artificial Sequence
  Description of Artificial Sequence: Synthetic oligonucleotide
ugcagggugcgacacucgu

SEQ ID NO: 2079680 - RNA, 19 nt, Artificial Sequence
  Description of Artificial Sequence: Synthetic oligonucleotide
ucucagaguugggagcgag

SEQ ID NO: 2079681 - RNA, 19 nt, Artificial Sequence
  Description of Artificial Sequence: Synthetic oligonucleotide
gcaugggaaagccacugag

SEQ ID NO: 2079682 - RNA, 19 nt, Artificial Sequence
  Description of Artificial Sequence: Synthetic oligonucleotide
ugugcagggugcgacacuc

SEQ ID NO: 2079683 - RNA, 19 nt, Artificial Sequence
  Description of Artificial Sequence: Synthetic oligonucleotide
uguuccucccucugcuugu

SEQ ID NO: 2079684 - RNA, 19 nt, Artificial Sequence
  Description of Artificial Sequence: Synthetic oligonucleotide
ucucgguaaauguccucgu

SEQ ID NO: 2079685 - RNA, 19 nt, Artificial Sequence
  Description of Artificial Sequence: Synthetic oligonucleotide
agccgauagccgcagguga

SEQ ID NO: 2079686 - RNA, 19 nt, Artificial Sequence
  Description of Artificial Sequence: Synthetic oligonucleotide
cucaaauagcagcugcgga

SEQ ID NO: 2079687 - RNA, 19 nt, Artificial Sequence
  Description of Artificial Sequence: Synthetic oligonucleotide
uggccggcagccgauagcc

SEQ ID NO: 2079688 - RNA, 19 nt, Artificial Sequence
  Description of Artificial Sequence: Synthetic oligonucleotide
cucgggguuggccaggcug

SEQ ID NO: 2079689 - RNA, 19 nt, Artificial Sequence
  Description of Artificial Sequence: Synthetic oligonucleotide
uugggguccuccaccuuca

SEQ ID NO: 2079690 - RNA, 19 nt, Artificial Sequence
  Description of Artificial Sequence: Synthetic oligonucleotide
gugauguccccacggaaca

SEQ ID NO: 2079691 - RNA, 19 nt, Artificial Sequence
  Description of Artificial Sequence: Synthetic oligonucleotide
aguugugcagggugcgaca

SEQ ID NO: 2079692 - RNA, 19 nt, Artificial Sequence
  Description of Artificial Sequence: Synthetic oligonucleotide
gguuuuggccuccuuccag

SEQ ID NO: 2079693 - RNA, 19 nt, Artificial Sequence
  Description of Artificial Sequence: Synthetic oligonucleotide
gcucaaauagcagcugcgg

SEQ ID NO: 2079694 - RNA, 19 nt, Artificial Sequence
  Description of Artificial Sequence: Synthetic oligonucleotide
gggaaagccacugagcgca

SEQ ID NO: 2079695 - RNA, 19 nt, Artificial Sequence
  Description of Artificial Sequence: Synthetic oligonucleotide
ugccuccucauuaggguau

SEQ ID NO: 2079696 - RNA, 19 nt, Artificial Sequence
  Description of Artificial Sequence: Synthetic oligonucleotide
agccguccacuccuccacc

SEQ ID NO: 2079697 - RNA, 19 nt, Artificial Sequence
  Description of Artificial Sequence: Synthetic oligonucleotide
aggugcguacccaggcucc

SEQ ID NO: 2079698 - RNA, 19 nt, Artificial Sequence
  Description of Artificial Sequence: Synthetic oligonucleotide
ugugcgcacccacgcgccg

SEQ ID NO: 2079699 - RNA, 19 nt, Artificial Sequence
  Description of Artificial Sequence: Synthetic oligonucleotide
ugggagcgaggucccacag

SEQ ID NO: 2079700 - RNA, 19 nt, Artificial Sequence
  Description of Artificial Sequence: Synthetic oligonucleotide
gaugacguacuuggccggc

SEQ ID NO: 2079701 - RNA, 19 nt, Artificial Sequence
  Description of Artificial Sequence: Synthetic oligonucleotide
auaggccccacugugugga

SEQ ID NO: 2079702 - RNA, 19 nt, Artificial Sequence
  Description of Artificial Sequence: Synthetic oligonucleotide
ucacagccaccccuuucgc

SEQ ID NO: 2079703 - RNA, 19 nt, Artificial Sequence
  Description of Artificial Sequence: Synthetic oligonucleotide
uugggagcgaggucccaca

SEQ ID NO: 2079704 - RNA, 19 nt, Artificial Sequence
  Description of Artificial Sequence: Synthetic oligonucleotide
cacaguugugcagggugcg

SEQ ID NO: 2079705 - RNA, 19 nt, Artificial Sequence
  Description of Artificial Sequence: Synthetic oligonucleotide
gaaaugcaugggaaagcca

SEQ ID NO: 2079706 - RNA, 19 nt, Artificial Sequence
  Description of Artificial Sequence: Synthetic oligonucleotide
acggaacagggagauuuuc

SEQ ID NO: 2079707 - RNA, 19 nt, Artificial Sequence
  Description of Artificial Sequence: Synthetic oligonucleotide
aggcagggcuaggacauac

SEQ ID NO: 2079708 - RNA, 19 nt, Artificial Sequence
  Description of Artificial Sequence: Synthetic oligonucleotide
ggaugacguacuuggccgg

SEQ ID NO: 2079709 - RNA, 19 nt, Artificial Sequence
  Description of Artificial Sequence: Synthetic oligonucleotide
gugggucagucccauucag

SEQ ID NO: 2079710 - RNA, 19 nt, Artificial Sequence
  Description of Artificial Sequence: Synthetic oligonucleotide
cacugagcgcaaccggugc

SEQ ID NO: 2079711 - RNA, 19 nt, Artificial Sequence
  Description of Artificial Sequence: Synthetic oligonucleotide
gcuuaaugaaaucccugca

SEQ ID NO: 2079712 - RNA, 19 nt, Artificial Sequence
  Description of Artificial Sequence: Synthetic oligonucleotide
gacgcgcaguggcugugcg

SEQ ID NO: 2079713 - RNA, 19 nt, Artificial Sequence
  Description of Artificial Sequence: Synthetic oligonucleotide
acugagcgcaaccggugcu

SEQ ID NO: 2079714 - RNA, 19 nt, Artificial Sequence
  Description of Artificial Sequence: Synthetic oligonucleotide
uacagcgauaggccccacu

SEQ ID NO: 2079715 - RNA, 19 nt, Artificial Sequence
  Description of Artificial Sequence: Synthetic oligonucleotide
gacguacuuggccggcagc

SEQ ID NO: 2079716 - RNA, 19 nt, Artificial Sequence
  Description of Artificial Sequence: Synthetic oligonucleotide
ugauguccccacggaacag

SEQ ID NO: 2079717 - RNA, 19 nt, Artificial Sequence
  Description of Artificial Sequence: Synthetic oligonucleotide
cuggaacaagcuguucggc

SEQ ID NO: 2079718 - RNA, 19 nt, Artificial Sequence
  Description of Artificial Sequence: Synthetic oligonucleotide
ccagcacuaccucagcugc

SEQ ID NO: 2079719 - RNA, 19 nt, Artificial Sequence
  Description of Artificial Sequence: Synthetic oligonucleotide
uagccgcaggugaucuuag

SEQ ID NO: 2079720 - RNA, 19 nt, Artificial Sequence
  Description of Artificial Sequence: Synthetic oligonucleotide
gcucagguccaccuucgcg

SEQ ID NO: 2079721 - RNA, 19 nt, Artificial Sequence
  Description of Artificial Sequence: Synthetic oligonucleotide
cucgguaaauguccucguc

SEQ ID NO: 2079722 - RNA, 19 nt, Artificial Sequence
  Description of Artificial Sequence: Synthetic oligonucleotide
aggcgcucucgguaaaugu

SEQ ID NO: 2079723 - RNA, 19 nt, Artificial Sequence
  Description of Artificial Sequence: Synthetic oligonucleotide
ucaggcuacugggaaguaa

SEQ ID NO: 2079724 - RNA, 19 nt, Artificial Sequence
  Description of Artificial Sequence: Synthetic oligonucleotide
acgcgcaguggcugugcgc

SEQ ID NO: 2079725 - RNA, 19 nt, Artificial Sequence
  Description of Artificial Sequence: Synthetic oligonucleotide
aucuuagcuuugccagucu

SEQ ID NO: 2079726 - RNA, 19 nt, Artificial Sequence
  Description of Artificial Sequence: Synthetic oligonucleotide
agguccaggcugcucaaau

SEQ ID NO: 2079727 - RNA, 19 nt, Artificial Sequence
  Description of Artificial Sequence: Synthetic oligonucleotide
gcuucugaaaggcagggcu

SEQ ID NO: 2079728 - RNA, 19 nt, Artificial Sequence
  Description of Artificial Sequence: Synthetic oligonucleotide
uuucgcugucuccuuccau

SEQ ID NO: 2079729 - RNA, 19 nt, Artificial Sequence
  Description of Artificial Sequence: Synthetic oligonucleotide
agucgguggaggugcucag

SEQ ID NO: 2079730 - RNA, 19 nt, Artificial Sequence
  Description of Artificial Sequence: Synthetic oligonucleotide
uccccacggaacagggaga

SEQ ID NO: 2079731 - RNA, 19 nt, Artificial Sequence
  Description of Artificial Sequence: Synthetic oligonucleotide
caccuucgcggccauggcc

SEQ ID NO: 2079732 - RNA, 19 nt, Artificial Sequence
  Description of Artificial Sequence: Synthetic oligonucleotide
aacaagcuguucggcuucu

SEQ ID NO: 2079733 - RNA, 19 nt, Artificial Sequence
  Description of Artificial Sequence: Synthetic oligonucleotide
gccagucucacaguugugc

SEQ ID NO: 2079734 - RNA, 19 nt, Artificial Sequence
  Description of Artificial Sequence: Synthetic oligonucleotide
auagccgcaggugaucuua

SEQ ID NO: 2079735 - RNA, 19 nt, Artificial Sequence
  Description of Artificial Sequence: Synthetic oligonucleotide
ugagcgcaaccggugcucc

SEQ ID NO: 2079736 - RNA, 19 nt, Artificial Sequence
  Description of Artificial Sequence: Synthetic oligonucleotide
caggugcguacccaggcuc

SEQ ID NO: 2079737 - RNA, 19 nt, Artificial Sequence
  Description of Artificial Sequence: Synthetic oligonucleotide
ggaacucgggguuggccag

SEQ ID NO: 2079738 - RNA, 19 nt, Artificial Sequence
  Description of Artificial Sequence: Synthetic oligonucleotide
ucggugagcaggggucccg

SEQ ID NO: 2079739 - RNA, 19 nt, Artificial Sequence
  Description of Artificial Sequence: Synthetic oligonucleotide
accuucgcggccauggcca

SEQ ID NO: 2079740 - RNA, 19 nt, Artificial Sequence
  Description of Artificial Sequence: Synthetic oligonucleotide
agcgcaaccggugcuccag

SEQ ID NO: 2079741 - RNA, 19 nt, Artificial Sequence
  Description of Artificial Sequence: Synthetic oligonucleotide
caaccucccgcccgagggg

SEQ ID NO: 2079742 - RNA, 19 nt, Artificial Sequence
  Description of Artificial Sequence: Synthetic oligonucleotide
ccuguagaaaugcauggga

SEQ ID NO: 2079743 - RNA, 19 nt, Artificial Sequence
  Description of Artificial Sequence: Synthetic oligonucleotide
cuuggccggcagccgauag

SEQ ID NO: 2079744 - RNA, 19 nt, Artificial Sequence
  Description of Artificial Sequence: Synthetic oligonucleotide
cuucugaaaggcagggcua

SEQ ID NO: 2079745 - RNA, 19 nt, Artificial Sequence
  Description of Artificial Sequence: Synthetic oligonucleotide
uugugcagggugcgacacu

SEQ ID NO: 2079746 - RNA, 19 nt, Artificial Sequence
  Description of Artificial Sequence: Synthetic oligonucleotide
caguugugcagggugcgac

SEQ ID NO: 2079747 - RNA, 19 nt, Artificial Sequence
  Description of Artificial Sequence: Synthetic oligonucleotide
caaacacgccuguagaaau

SEQ ID NO: 2079748 - RNA, 19 nt, Artificial Sequence
  Description of Artificial Sequence: Synthetic oligonucleotide
uaauggggcaggcgcucuc

SEQ ID NO: 2079749 - RNA, 19 nt, Artificial Sequence
  Description of Artificial Sequence: Synthetic oligonucleotide
ugccagucucacaguugug

SEQ ID NO: 2079750 - RNA, 19 nt, Artificial Sequence
  Description of Artificial Sequence: Synthetic oligonucleotide
agggugcgacacucgucgg

SEQ ID NO: 2079751 - RNA, 19 nt, Artificial Sequence
  Description of Artificial Sequence: Synthetic oligonucleotide
guacuuggccggcagccga

SEQ ID NO: 2079752 - RNA, 19 nt, Artificial Sequence
  Description of Artificial Sequence: Synthetic oligonucleotide
gaacucgggguuggccagg

SEQ ID NO: 2079753 - RNA, 19 nt, Artificial Sequence
  Description of Artificial Sequence: Synthetic oligonucleotide
aaccggugcuccagaagca

SEQ ID NO: 2079754 - RNA, 19 nt, Artificial Sequence
  Description of Artificial Sequence: Synthetic oligonucleotide
gcccaggugggucaguccc

SEQ ID NO: 2079755 - RNA, 19 nt, Artificial Sequence
  Description of Artificial Sequence: Synthetic oligonucleotide
cagcacuaccucagcugcc

SEQ ID NO: 2079756 - RNA, 19 nt, Artificial Sequence
  Description of Artificial Sequence: Synthetic oligonucleotide
caggaacucgggguuggcc

SEQ ID NO: 2079757 - RNA, 19 nt, Artificial Sequence
  Description of Artificial Sequence: Synthetic oligonucleotide
agcgccgccagcacuaccu

SEQ ID NO: 2079758 - RNA, 19 nt, Artificial Sequence
  Description of Artificial Sequence: Synthetic oligonucleotide
cugaaaggcagggcuagga

SEQ ID NO: 2079759 - RNA, 19 nt, Artificial Sequence
  Description of Artificial Sequence: Synthetic oligonucleotide
cuuccauguggggaucuuc

SEQ ID NO: 2079760 - RNA, 19 nt, Artificial Sequence
  Description of Artificial Sequence: Synthetic oligonucleotide
uccauguggggaucuucuu

SEQ ID NO: 2079761 - RNA, 19 nt, Artificial Sequence
  Description of Artificial Sequence: Synthetic oligonucleotide
ugcgcacccacgcgccgcc

SEQ ID NO: 2079762 - RNA, 19 nt, Artificial Sequence
  Description of Artificial Sequence: Synthetic oligonucleotide
ccuuucgcugucuccuucc

SEQ ID NO: 2079763 - RNA, 19 nt, Artificial Sequence
  Description of Artificial Sequence: Synthetic oligonucleotide
uacuuggccggcagccgau

SEQ ID NO: 2079764 - RNA, 19 nt, Artificial Sequence
  Description of Artificial Sequence: Synthetic oligonucleotide
gacacucgucggugagcag

SEQ ID NO: 2079765 - RNA, 19 nt, Artificial Sequence
  Description of Artificial Sequence: Synthetic oligonucleotide
uuccucccucugcuuguca

SEQ ID NO: 2079766 - RNA, 19 nt, Artificial Sequence
  Description of Artificial Sequence: Synthetic oligonucleotide
ggccuacagcgauaggccc

SEQ ID NO: 2079767 - RNA, 19 nt, Artificial Sequence
  Description of Artificial Sequence: Synthetic oligonucleotide
ggugcgacacucgucggug

SEQ ID NO: 2079768 - RNA, 19 nt, Artificial Sequence
  Description of Artificial Sequence: Synthetic oligonucleotide
uggcagcguugacaauggc

SEQ ID NO: 2079769 - RNA, 19 nt, Artificial Sequence
  Description of Artificial Sequence: Synthetic oligonucleotide
gaggugcucagguccaccu

SEQ ID NO: 2079770 - RNA, 19 nt, Artificial Sequence
  Description of Artificial Sequence: Synthetic oligonucleotide
gucgguggaggugcucagg

SEQ ID NO: 2079771 - RNA, 19 nt, Artificial Sequence
  Description of Artificial Sequence: Synthetic oligonucleotide
uggaugcagccguccacuc

SEQ ID NO: 2079772 - RNA, 19 nt, Artificial Sequence
  Description of Artificial Sequence: Synthetic oligonucleotide
aguguuccucccucugcuu

SEQ ID NO: 2079773 - RNA, 19 nt, Artificial Sequence
  Description of Artificial Sequence: Synthetic oligonucleotide
gggagcgaggucccacagg

SEQ ID NO: 2079774 - RNA, 19 nt, Artificial Sequence
  Description of Artificial Sequence: Synthetic oligonucleotide
caggcuacugggaaguaau

SEQ ID NO: 2079775 - RNA, 19 nt, Artificial Sequence
  Description of Artificial Sequence: Synthetic oligonucleotide
gcuguucggcuucucucag

SEQ ID NO: 2079776 - RNA, 19 nt, Artificial Sequence
  Description of Artificial Sequence: Synthetic oligonucleotide
ggguauccaaacacgccug

SEQ ID NO: 2079777 - RNA, 19 nt, Artificial Sequence
  Description of Artificial Sequence: Synthetic oligonucleotide
gccggcagccgauagccgc

SEQ ID NO: 2079778 - RNA, 19 nt, Artificial Sequence
  Description of Artificial Sequence: Synthetic oligonucleotide
cagccgauagccgcaggug

SEQ ID NO: 2079779 - RNA, 19 nt, Artificial Sequence
  Description of Artificial Sequence: Synthetic oligonucleotide
cagcguugacaauggcauc

SEQ ID NO: 2079780 - RNA, 19 nt, Artificial Sequence
  Description of Artificial Sequence: Synthetic oligonucleotide
gcggagcucagcugccugg

SEQ ID NO: 2079781 - RNA, 19 nt, Artificial Sequence
  Description of Artificial Sequence: Synthetic oligonucleotide
gcgcucucgguaaaugucc

SEQ ID NO: 2079782 - RNA, 19 nt, Artificial Sequence
  Description of Artificial Sequence: Synthetic oligonucleotide
uccagucgguggaggugcu

SEQ ID NO: 2079783 - RNA, 19 nt, Artificial Sequence
  Description of Artificial Sequence: Synthetic oligonucleotide
caccgccccaaccucccgc

SEQ ID NO: 2079784 - RNA, 19 nt, Artificial Sequence
  Description of Artificial Sequence: Synthetic oligonucleotide
acaguugugcagggugcga

SEQ ID NO: 2079785 - RNA, 19 nt, Artificial Sequence
  Description of Artificial Sequence: Synthetic oligonucleotide
cuuucgcugucuccuucca

SEQ ID NO: 2079786 - RNA, 19 nt, Artificial Sequence
  Description of Artificial Sequence: Synthetic oligonucleotide
aggcuacugggaaguaaug

SEQ ID NO: 2079787 - RNA, 19 nt, Artificial Sequence
  Description of Artificial Sequence: Synthetic oligonucleotide
cacagaugauaagccgauc

SEQ ID NO: 2079788 - RNA, 19 nt, Artificial Sequence
  Description of Artificial Sequence: Synthetic oligonucleotide
ggcccuguggaugcagccg

SEQ ID NO: 2079789 - RNA, 19 nt, Artificial Sequence
  Description of Artificial Sequence: Synthetic oligonucleotide
ccucauuaggguauccaaa

SEQ ID NO: 2079790 - RNA, 19 nt, Artificial Sequence
  Description of Artificial Sequence: Synthetic oligonucleotide
augacguacuuggccggca

SEQ ID NO: 2079791 - RNA, 19 nt, Artificial Sequence
  Description of Artificial Sequence: Synthetic oligonucleotide
ggcuggccuacagcgauag

SEQ ID NO: 2079792 - RNA, 19 nt, Artificial Sequence
  Description of Artificial Sequence: Synthetic oligonucleotide
caggcgcucucgguaaaug

SEQ ID NO: 2079793 - RNA, 19 nt, Artificial Sequence
  Description of Artificial Sequence: Synthetic oligonucleotide
ggucccgcggcccugugga

SEQ ID NO: 2079794 - RNA, 19 nt, Artificial Sequence
  Description of Artificial Sequence: Synthetic oligonucleotide
caagcuguucggcuucucu

SEQ ID NO: 2079795 - RNA, 19 nt, Artificial Sequence
  Description of Artificial Sequence: Synthetic oligonucleotide
auaagccgauccaccuugu

SEQ ID NO: 2079796 - RNA, 19 nt, Artificial Sequence
  Description of Artificial Sequence: Synthetic oligonucleotide
ggggaucuucuucagcuua

SEQ ID NO: 2079797 - RNA, 19 nt, Artificial Sequence
  Description of Artificial Sequence: Synthetic oligonucleotide
ggaacaagcuguucggcuu

SEQ ID NO: 2079798 - RNA, 19 nt, Artificial Sequence
  Description of Artificial Sequence: Synthetic oligonucleotide
gccuacagcgauaggcccc

SEQ ID NO: 2079799 - RNA, 19 nt, Artificial Sequence
  Description of Artificial Sequence: Synthetic oligonucleotide
ggcgcucucgguaaauguc

SEQ ID NO: 2079800 - RNA, 19 nt, Artificial Sequence
  Description of Artificial Sequence: Synthetic oligonucleotide
agcccuucagaaagguuuu

SEQ ID NO: 2079801 - RNA, 19 nt, Artificial Sequence
  Description of Artificial Sequence: Synthetic oligonucleotide
ccggugcuccagaagcagg

SEQ ID NO: 2079802 - RNA, 19 nt, Artificial Sequence
  Description of Artificial Sequence: Synthetic oligonucleotide
agggaguuguuggcagcgu

SEQ ID NO: 2079803 - RNA, 19 nt, Artificial Sequence
  Description of Artificial Sequence: Synthetic oligonucleotide
cgauaggccccacugugug

SEQ ID NO: 2079804 - RNA, 19 nt, Artificial Sequence
  Description of Artificial Sequence: Synthetic oligonucleotide
guauccaaacacgccugua

SEQ ID NO: 2079805 - RNA, 19 nt, Artificial Sequence
  Description of Artificial Sequence: Synthetic oligonucleotide
gcguacccaggcuccacgc

SEQ ID NO: 2079806 - RNA, 19 nt, Artificial Sequence
  Description of Artificial Sequence: Synthetic oligonucleotide
acucgucggugagcagggg

SEQ ID NO: 2079807 - RNA, 19 nt, Artificial Sequence
  Description of Artificial Sequence: Synthetic oligonucleotide
gguauccaaacacgccugu

SEQ ID NO: 2079808 - RNA, 19 nt, Artificial Sequence
  Description of Artificial Sequence: Synthetic oligonucleotide
gggcuaggacauacugggg

SEQ ID NO: 2079809 - RNA, 19 nt, Artificial Sequence
  Description of Artificial Sequence: Synthetic oligonucleotide
cccacuguguggaugacgu

SEQ ID NO: 2079810 - RNA, 19 nt, Artificial Sequence
  Description of Artificial Sequence: Synthetic oligonucleotide
gagcgcaaccggugcucca

SEQ ID NO: 2079811 - RNA, 19 nt, Artificial Sequence
  Description of Artificial Sequence: Synthetic oligonucleotide
cuucgcggccauggccagg

SEQ ID NO: 2079812 - RNA, 19 nt, Artificial Sequence
  Description of Artificial Sequence: Synthetic oligonucleotide
gcaggugaucuuagcuuug

SEQ ID NO: 2079813 - RNA, 19 nt, Artificial Sequence
  Description of Artificial Sequence: Synthetic oligonucleotide
gugcgacacucgucgguga

SEQ ID NO: 2079814 - RNA, 19 nt, Artificial Sequence
  Description of Artificial Sequence: Synthetic oligonucleotide
ggggccaggacaggaacuc

SEQ ID NO: 2079815 - RNA, 19 nt, Artificial Sequence
  Description of Artificial Sequence: Synthetic oligonucleotide
ccaaacacgccuguagaaa

SEQ ID NO: 2079816 - RNA, 19 nt, Artificial Sequence
  Description of Artificial Sequence: Synthetic oligonucleotide
cuccacgccccgccacccc

SEQ ID NO: 2079817 - RNA, 19 nt, Artificial Sequence
  Description of Artificial Sequence: Synthetic oligonucleotide
cucgucggugagcaggggu

SEQ ID NO: 2079818 - RNA, 19 nt, Artificial Sequence
  Description of Artificial Sequence: Synthetic oligonucleotide
gcagccguccacuccucca

SEQ ID NO: 2079819 - RNA, 19 nt, Artificial Sequence
  Description of Artificial Sequence: Synthetic oligonucleotide
ggaccggcacgcacugccg

SEQ ID NO: 2079820 - RNA, 19 nt, Artificial Sequence
  Description of Artificial Sequence: Synthetic oligonucleotide
aaggcagggcuaggacaua

SEQ ID NO: 2079821 - RNA, 19 nt, Artificial Sequence
  Description of Artificial Sequence: Synthetic oligonucleotide
cggcuucucucagaguugg

SEQ ID NO: 2079822 - RNA, 19 nt, Artificial Sequence
  Description of Artificial Sequence: Synthetic oligonucleotide
gugcgcacccacgcgccgc

SEQ ID NO: 2079823 - RNA, 19 nt, Artificial Sequence
  Description of Artificial Sequence: Synthetic oligonucleotide
gcucucgguaaauguccuc

SEQ ID NO: 2079824 - RNA, 19 nt, Artificial Sequence
  Description of Artificial Sequence: Synthetic oligonucleotide
gcacccacgcgccgccggg

SEQ ID NO: 2079825 - RNA, 19 nt, Artificial Sequence
  Description of Artificial Sequence: Synthetic oligonucleotide
acucgggguuggccaggcu

SEQ ID NO: 2079826 - RNA, 19 nt, Artificial Sequence
  Description of Artificial Sequence: Synthetic oligonucleotide
cacuuccaacuuggugaug

SEQ ID NO: 2079827 - RNA, 19 nt, Artificial Sequence
  Description of Artificial Sequence: Synthetic oligonucleotide
ggcagccgauagccgcagg

SEQ ID NO: 2079828 - RNA, 19 nt, Artificial Sequence
  Description of Artificial Sequence: Synthetic oligonucleotide
cacgcgccgccggggaccg

SEQ ID NO: 2079829 - RNA, 19 nt, Artificial Sequence
  Description of Artificial Sequence: Synthetic oligonucleotide
augcagccguccacuccuc

SEQ ID NO: 2079830 - RNA, 19 nt, Artificial Sequence
  Description of Artificial Sequence: Synthetic oligonucleotide
cguacccaggcuccacgcc

SEQ ID NO: 2079831 - RNA, 19 nt, Artificial Sequence
  Description of Artificial Sequence: Synthetic oligonucleotide
gggguccuccaccuucaca

SEQ ID NO: 2079832 - RNA, 19 nt, Artificial Sequence
  Description of Artificial Sequence: Synthetic oligonucleotide
gcagccgauagccgcaggu

SEQ ID NO: 2079833 - RNA, 19 nt, Artificial Sequence
  Description of Artificial Sequence: Synthetic oligonucleotide
cagcgccgccagcacuacc

SEQ ID NO: 2079834 - RNA, 19 nt, Artificial Sequence
  Description of Artificial Sequence: Synthetic oligonucleotide
cguacuuggccggcagccg

SEQ ID NO: 2079835 - RNA, 19 nt, Artificial Sequence
  Description of Artificial Sequence: Synthetic oligonucleotide
ucccgcccgaggggcgacg

SEQ ID NO: 2079836 - RNA, 19 nt, Artificial Sequence
  Description of Artificial Sequence: Synthetic oligonucleotide
gcgacacucgucggugagc

SEQ ID NO: 2079837 - RNA, 19 nt, Artificial Sequence
  Description of Artificial Sequence: Synthetic oligonucleotide
cacccacgcgccgccgggg

SEQ ID NO: 2079838 - RNA, 19 nt, Artificial Sequence
  Description of Artificial Sequence: Synthetic oligonucleotide
guaauggggcaggcgcucu

SEQ ID NO: 2079839 - RNA, 19 nt, Artificial Sequence
  Description of Artificial Sequence: Synthetic oligonucleotide
cauccacuuccaacuuggu

SEQ ID NO: 2079840 - RNA, 19 nt, Artificial Sequence
  Description of Artificial Sequence: Synthetic oligonucleotide
gugcguacccaggcuccac

SEQ ID NO: 2079841 - RNA, 19 nt, Artificial Sequence
  Description of Artificial Sequence: Synthetic oligonucleotide
accucccgcccgaggggcg

SEQ ID NO: 2079842 - RNA, 19 nt, Artificial Sequence
  Description of Artificial Sequence: Synthetic oligonucleotide
ccuacagcgauaggcccca

SEQ ID NO: 2079843 - RNA, 19 nt, Artificial Sequence
  Description of Artificial Sequence: Synthetic oligonucleotide
cccaaccucccgcccgagg

SEQ ID NO: 2079844 - RNA, 19 nt, Artificial Sequence
  Description of Artificial Sequence: Synthetic oligonucleotide
guucggcuucucucagagu

SEQ ID NO: 2079845 - RNA, 19 nt, Artificial Sequence
  Description of Artificial Sequence: Synthetic oligonucleotide
cagcgauaggccccacugu

SEQ ID NO: 2079846 - RNA, 19 nt, Artificial Sequence
  Description of Artificial Sequence: Synthetic oligonucleotide
ccaccuucgcggccauggc

SEQ ID NO: 2079847 - RNA, 19 nt, Artificial Sequence
  Description of Artificial Sequence: Synthetic oligonucleotide
cgguaaauguccucguccu

SEQ ID NO: 2079848 - RNA, 19 nt, Artificial Sequence
  Description of Artificial Sequence: Synthetic oligonucleotide
gcccuucagaaagguuuug

SEQ ID NO: 2079849 - RNA, 19 nt, Artificial Sequence
  Description of Artificial Sequence: Synthetic oligonucleotide
cccuuucgcugucuccuuc

SEQ ID NO: 2079850 - RNA, 19 nt, Artificial Sequence
  Description of Artificial Sequence: Synthetic oligonucleotide
cacggaacagggagauuuu

SEQ ID NO: 2079851 - RNA, 19 nt, Artificial Sequence
  Description of Artificial Sequence: Synthetic oligonucleotide
ccuucgcggccauggccag

SEQ ID NO: 2079852 - RNA, 19 nt, Artificial Sequence
  Description of Artificial Sequence: Synthetic oligonucleotide
ccacggaacagggagauuu

SEQ ID NO: 2079853 - RNA, 19 nt, Artificial Sequence
  Description of Artificial Sequence: Synthetic oligonucleotide
acuuggccggcagccgaua

SEQ ID NO: 2079854 - RNA, 19 nt, Artificial Sequence
  Description of Artificial Sequence: Synthetic oligonucleotide
ggugcguacccaggcucca

SEQ ID NO: 2079855 - RNA, 19 nt, Artificial Sequence
  Description of Artificial Sequence: Synthetic oligonucleotide
gcagggugcgacacucguc

SEQ ID NO: 2079856 - RNA, 19 nt, Artificial Sequence
  Description of Artificial Sequence: Synthetic oligonucleotide
gcacuaccucagcugccuc

SEQ ID NO: 2079857 - RNA, 19 nt, Artificial Sequence
  Description of Artificial Sequence: Synthetic oligonucleotide
ccgauagccgcaggugauc

SEQ ID NO: 2079858 - RNA, 19 nt, Artificial Sequence
  Description of Artificial Sequence: Synthetic oligonucleotide
gggaguuguuggcagcguu

SEQ ID NO: 2079859 - RNA, 19 nt, Artificial Sequence
  Description of Artificial Sequence: Synthetic oligonucleotide
gggugcgacacucgucggu

SEQ ID NO: 2079860 - RNA, 19 nt, Artificial Sequence
  Description of Artificial Sequence: Synthetic oligonucleotide
gggcgacgcgcaguggcug

SEQ ID NO: 2079861 - RNA, 19 nt, Artificial Sequence
  Description of Artificial Sequence: Synthetic oligonucleotide
cgacacucgucggugagca

SEQ ID NO: 2079862 - RNA, 19 nt, Artificial Sequence
  Description of Artificial Sequence: Synthetic oligonucleotide
aggggucccgcggcccugu

SEQ ID NO: 2079863 - RNA, 19 nt, Artificial Sequence
  Description of Artificial Sequence: Synthetic oligonucleotide
cccauucagggugggcuuc

SEQ ID NO: 2079864 - RNA, 19 nt, Artificial Sequence
  Description of Artificial Sequence: Synthetic oligonucleotide
ggccggcagccgauagccg

SEQ ID NO: 2079865 - RNA, 19 nt, Artificial Sequence
  Description of Artificial Sequence: Synthetic oligonucleotide
cuacagcgauaggccccac

SEQ ID NO: 2079866 - RNA, 19 nt, Artificial Sequence
  Description of Artificial Sequence: Synthetic oligonucleotide
gcggcccuguggaugcagc

SEQ ID NO: 2079867 - RNA, 19 nt, Artificial Sequence
  Description of Artificial Sequence: Synthetic oligonucleotide
ccgccagcacuaccucagc

SEQ ID NO: 2079868 - RNA, 19 nt, Artificial Sequence
  Description of Artificial Sequence: Synthetic oligonucleotide
ccacgcgccgccggggacc

SEQ ID NO: 2079869 - RNA, 19 nt, Artificial Sequence
  Description of Artificial Sequence: Synthetic oligonucleotide
aggcugaaucagacaucuu

SEQ ID NO: 2079870 - RNA, 19 nt, Artificial Sequence
  Description of Artificial Sequence: Synthetic oligonucleotide
ccguccacuccuccaccuc

SEQ ID NO: 2079871 - RNA, 19 nt, Artificial Sequence
  Description of Artificial Sequence: Synthetic oligonucleotide
ccggcagccgauagccgca

SEQ ID NO: 2079872 - RNA, 19 nt, Artificial Sequence
  Description of Artificial Sequence: Synthetic oligonucleotide
cgcaguggcugugcgcacc

SEQ ID NO: 2079873 - RNA, 19 nt, Artificial Sequence
  Description of Artificial Sequence: Synthetic oligonucleotide
cucaggcuacugggaagua

SEQ ID NO: 2079874 - RNA, 19 nt, Artificial Sequence
  Description of Artificial Sequence: Synthetic oligonucleotide
cccuguggaugcagccguc

SEQ ID NO: 2079875 - RNA, 19 nt, Artificial Sequence
  Description of Artificial Sequence: Synthetic oligonucleotide
ccgcaggugaucuuagcuu

SEQ ID NO: 2079876 - RNA, 19 nt, Artificial Sequence
  Description of Artificial Sequence: Synthetic oligonucleotide
gccguccacuccuccaccu

SEQ ID NO: 2079877 - RNA, 19 nt, Artificial Sequence
  Description of Artificial Sequence: Synthetic oligonucleotide
ccaccgccccaaccucccg

SEQ ID NO: 2079878 - RNA, 19 nt, Artificial Sequence
  Description of Artificial Sequence: Synthetic oligonucleotide
cgcaggugaucuuagcuuu

SEQ ID NO: 2079879 - RNA, 19 nt, Artificial Sequence
  Description of Artificial Sequence: Synthetic oligonucleotide
guccaccuucgcggccaug

SEQ ID NO: 2079880 - RNA, 19 nt, Artificial Sequence
  Description of Artificial Sequence: Synthetic oligonucleotide
cgcacccacgcgccgccgg

SEQ ID NO: 2079881 - RNA, 19 nt, Artificial Sequence
  Description of Artificial Sequence: Synthetic oligonucleotide
ggcaggcgcucucgguaaa

SEQ ID NO: 2079882 - RNA, 19 nt, Artificial Sequence
  Description of Artificial Sequence: Synthetic oligonucleotide
ccauucagggugggcuuca

SEQ ID NO: 2079883 - RNA, 19 nt, Artificial Sequence
  Description of Artificial Sequence: Synthetic oligonucleotide
ggcgacgcgcaguggcugu

SEQ ID NO: 2079884 - RNA, 19 nt, Artificial Sequence
  Description of Artificial Sequence: Synthetic oligonucleotide
cgcccgaggggcgacgcgc

SEQ ID NO: 2079885 - RNA, 19 nt, Artificial Sequence
  Description of Artificial Sequence: Synthetic oligonucleotide
gcgacgcgcaguggcugug

SEQ ID NO: 2079886 - RNA, 19 nt, Artificial Sequence
  Description of Artificial Sequence: Synthetic oligonucleotide
cucccgcccgaggggcgac

SEQ ID NO: 2079887 - RNA, 19 nt, Artificial Sequence
  Description of Artificial Sequence: Synthetic oligonucleotide
ggcagggcuaggacauacu

SEQ ID NO: 2079888 - RNA, 19 nt, Artificial Sequence
  Description of Artificial Sequence: Synthetic oligonucleotide
ccaggugcguacccaggcu

SEQ ID NO: 2079889 - RNA, 19 nt, Artificial Sequence
  Description of Artificial Sequence: Synthetic oligonucleotide
gccgauagccgcaggugau

SEQ ID NO: 2079890 - RNA, 19 nt, Artificial Sequence
  Description of Artificial Sequence: Synthetic oligonucleotide
caguggcugugcgcaccca

SEQ ID NO: 2079891 - RNA, 19 nt, Artificial Sequence
  Description of Artificial Sequence: Synthetic oligonucleotide
cggggaccggcacgcacug

SEQ ID NO: 2079892 - RNA, 19 nt, Artificial Sequence
  Description of Artificial Sequence: Synthetic oligonucleotide
ggggaccggcacgcacugc

SEQ ID NO: 2079893 - RNA, 19 nt, Artificial Sequence
  Description of Artificial Sequence: Synthetic oligonucleotide
cgauccaccuuguccuugu

SEQ ID NO: 2079894 - RNA, 19 nt, Artificial Sequence
  Description of Artificial Sequence: Synthetic oligonucleotide
cggcacgcacugccgcggg

SEQ ID NO: 2079895 - RNA, 19 nt, Artificial Sequence
  Description of Artificial Sequence: Synthetic oligonucleotide
gcagcgccgccagcacuac

SEQ ID NO: 2079896 - RNA, 19 nt, Artificial Sequence
  Description of Artificial Sequence: Synthetic oligonucleotide
ccgcccgaggggcgacgcg

SEQ ID NO: 2079897 - RNA, 19 nt, Artificial Sequence
  Description of Artificial Sequence: Synthetic oligonucleotide
cgacgcgcaguggcugugc

SEQ ID NO: 2079898 - RNA, 19 nt, Artificial Sequence
  Description of Artificial Sequence: Synthetic oligonucleotide
ccagucgguggaggugcuc

SEQ ID NO: 2079899 - RNA, 19 nt, Artificial Sequence
  Description of Artificial Sequence: Synthetic oligonucleotide
cugcggagcucagcugccu

SEQ ID NO: 2079900 - RNA, 19 nt, Artificial Sequence
  Description of Artificial Sequence: Synthetic oligonucleotide
cccacgcgccgccggggac

SEQ ID NO: 2079901 - RNA, 19 nt, Artificial Sequence
  Description of Artificial Sequence: Synthetic oligonucleotide
cccgcccgaggggcgacgc

SEQ ID NO: 2079902 - RNA, 19 nt, Artificial Sequence
  Description of Artificial Sequence: Synthetic oligonucleotide
ggggucccgcggcccugug

SEQ ID NO: 2079903 - RNA, 19 nt, Artificial Sequence
  Description of Artificial Sequence: Synthetic oligonucleotide
caccuccaagcagggaguu

SEQ ID NO: 2079904 - RNA, 19 nt, Artificial Sequence
  Description of Artificial Sequence: Synthetic oligonucleotide
ggggcgacgcgcaguggcu

SEQ ID NO: 2079905 - RNA, 19 nt, Artificial Sequence
  Description of Artificial Sequence: Synthetic oligonucleotide
cgcaaccggugcuccagaa

SEQ ID NO: 2079906 - RNA, 19 nt, Artificial Sequence
  Description of Artificial Sequence: Synthetic oligonucleotide
cgcucucgguaaauguccu

SEQ ID NO: 2079907 - RNA, 19 nt, Artificial Sequence
  Description of Artificial Sequence: Synthetic oligonucleotide
cgauagccgcaggugaucu

SEQ ID NO: 2079908 - RNA, 19 nt, Artificial Sequence
  Description of Artificial Sequence: Synthetic oligonucleotide
gggcuggccuacagcgaua

SEQ ID NO: 2079909 - RNA, 19 nt, Artificial Sequence
  Description of Artificial Sequence: Synthetic oligonucleotide
cggcagccgauagccgcag

SEQ ID NO: 2079910 - RNA, 19 nt, Artificial Sequence
  Description of Artificial Sequence: Synthetic oligonucleotide
ccccacggaacagggagau

SEQ ID NO: 2079911 - RNA, 19 nt, Artificial Sequence
  Description of Artificial Sequence: Synthetic oligonucleotide
gcaggcgcucucgguaaau

SEQ ID NO: 2079912 - RNA, 19 nt, Artificial Sequence
  Description of Artificial Sequence: Synthetic oligonucleotide
caggugggucagucccauu

SEQ ID NO: 2079913 - RNA, 19 nt, Artificial Sequence
  Description of Artificial Sequence: Synthetic oligonucleotide
acgcgccgccggggaccgg

SEQ ID NO: 2079914 - RNA, 19 nt, Artificial Sequence
  Description of Artificial Sequence: Synthetic oligonucleotide
ccucccgcccgaggggcga

SEQ ID NO: 2079915 - RNA, 19 nt, Artificial Sequence
  Description of Artificial Sequence: Synthetic oligonucleotide
cgccgccggggaccggcac

SEQ ID NO: 2079916 - RNA, 19 nt, Artificial Sequence
  Description of Artificial Sequence: Synthetic oligonucleotide
ccccuuucgcugucuccuu

SEQ ID NO: 2079917 - RNA, 19 nt, Artificial Sequence
  Description of Artificial Sequence: Synthetic oligonucleotide
cccacggaacagggagauu

SEQ ID NO: 2079918 - RNA, 19 nt, Artificial Sequence
  Description of Artificial Sequence: Synthetic oligonucleotide
ccgcggcccuguggaugca

SEQ ID NO: 2079919 - RNA, 19 nt, Artificial Sequence
  Description of Artificial Sequence: Synthetic oligonucleotide
cgccggggaccggcacgca

SEQ ID NO: 2079920 - RNA, 19 nt, Artificial Sequence
  Description of Artificial Sequence: Synthetic oligonucleotide
aacacuuaagcagagaagc

SEQ ID NO: 2079921 - RNA, 19 nt, Artificial Sequence
  Description of Artificial Sequence: Synthetic oligonucleotide
uuuaagauugacuucaaag

SEQ ID NO: 2079922 - RNA, 19 nt, Artificial Sequence
  Description of Artificial Sequence: Synthetic oligonucleotide
auuacguuccguuucagcc

SEQ ID NO: 2079923 - RNA, 19 nt, Artificial Sequence
  Description of Artificial Sequence: Synthetic oligonucleotide
uccaaaaggagauuaaagg

SEQ ID NO: 2079924 - RNA, 19 nt, Artificial Sequence
  Description of Artificial Sequence: Synthetic oligonucleotide
uuaagauugacuucaaagc

SEQ ID NO: 2079925 - RNA, 19 nt, Artificial Sequence
  Description of Artificial Sequence: Synthetic oligonucleotide
aauacaaagaugcaacggu

SEQ ID NO: 2079926 - RNA, 19 nt, Artificial Sequence
  Description of Artificial Sequence: Synthetic oligonucleotide
ugcguauuuacucugaggc

SEQ ID NO: 2079927 - RNA, 19 nt, Artificial Sequence
  Description of Artificial Sequence: Synthetic oligonucleotide
uuuacucugaggcaccugg

SEQ ID NO: 2079928 - RNA, 19 nt, Artificial Sequence
  Description of Artificial Sequence: Synthetic oligonucleotide
uuugaauguagguucagag

SEQ ID NO: 2079929 - RNA, 19 nt, Artificial Sequence
  Description of Artificial Sequence: Synthetic oligonucleotide
ugaaaauaagcuuuauuac

SEQ ID NO: 2079930 - RNA, 19 nt, Artificial Sequence
  Description of Artificial Sequence: Synthetic oligonucleotide
aaauacaaagaugcaacgg

SEQ ID NO: 2079931 - RNA, 19 nt, Artificial Sequence
  Description of Artificial Sequence: Synthetic oligonucleotide
uaaauacaaagaugcaacg

SEQ ID NO: 2079932 - RNA, 19 nt, Artificial Sequence
  Description of Artificial Sequence: Synthetic oligonucleotide
aucaugcaaacacuuaagc

SEQ ID NO: 2079933 - RNA, 19 nt, Artificial Sequence
  Description of Artificial Sequence: Synthetic oligonucleotide
uuuuagucuuuccauggcg

SEQ ID NO: 2079934 - RNA, 19 nt, Artificial Sequence
  Description of Artificial Sequence: Synthetic oligonucleotide
aagucaacuggggugaugc

SEQ ID NO: 2079935 - RNA, 19 nt, Artificial Sequence
  Description of Artificial Sequence: Synthetic oligonucleotide
aacgguuucaguuguuuuc

SEQ ID NO: 2079936 - RNA, 19 nt, Artificial Sequence
  Description of Artificial Sequence: Synthetic oligonucleotide
aaacacggaacugagaucu

SEQ ID NO: 2079937 - RNA, 19 nt, Artificial Sequence
  Description of Artificial Sequence: Synthetic oligonucleotide
aaggaagucaacuggggug

SEQ ID NO: 2079938 - RNA, 19 nt, Artificial Sequence
  Description of Artificial Sequence: Synthetic oligonucleotide
aacuacugccauuuugaac

SEQ ID NO: 2079939 - RNA, 19 nt, Artificial Sequence
  Description of Artificial Sequence: Synthetic oligonucleotide
auaacugcaaaaugucuuc

SEQ ID NO: 2079940 - RNA, 19 nt, Artificial Sequence
  Description of Artificial Sequence: Synthetic oligonucleotide
gucaaguucggcuuguacg

SEQ ID NO: 2079941 - RNA, 19 nt, Artificial Sequence
  Description of Artificial Sequence: Synthetic oligonucleotide
ucaauaacugcaaaauguc

SEQ ID NO: 2079942 - RNA, 19 nt, Artificial Sequence
  Description of Artificial Sequence: Synthetic oligonucleotide
aaaacuacugccauuuuga

SEQ ID NO: 2079943 - RNA, 19 nt, Artificial Sequence
  Description of Artificial Sequence: Synthetic oligonucleotide
uccuaacuacuuaaaaugc

SEQ ID NO: 2079944 - RNA, 19 nt, Artificial Sequence
  Description of Artificial Sequence: Synthetic oligonucleotide
uuuagucuuuccauggcgc

SEQ ID NO: 2079945 - RNA, 19 nt, Artificial Sequence
  Description of Artificial Sequence: Synthetic oligonucleotide
cuaacuacuuaaaaugcac

SEQ ID NO: 2079946 - RNA, 19 nt, Artificial Sequence
  Description of Artificial Sequence: Synthetic oligonucleotide
auuacaucaaguaauaaau

SEQ ID NO: 2079947 - RNA, 19 nt, Artificial Sequence
  Description of Artificial Sequence: Synthetic oligonucleotide
aacuacuuaaaaugcacau

SEQ ID NO: 2079948 - RNA, 19 nt, Artificial Sequence
  Description of Artificial Sequence: Synthetic oligonucleotide
cacucaaucaugcaaacac

SEQ ID NO: 2079949 - RNA, 19 nt, Artificial Sequence
  Description of Artificial Sequence: Synthetic oligonucleotide
ucuguauuuauaacuugug

SEQ ID NO: 2079950 - RNA, 19 nt, Artificial Sequence
  Description of Artificial Sequence: Synthetic oligonucleotide
agcuuaaugaccauggcag

SEQ ID NO: 2079951 - RNA, 19 nt, Artificial Sequence
  Description of Artificial Sequence: Synthetic oligonucleotide
cuacuuaaaaugcacauca

SEQ ID NO: 2079952 - RNA, 19 nt, Artificial Sequence
  Description of Artificial Sequence: Synthetic oligonucleotide
gaugcaacgguuucaguug

SEQ ID NO: 2079953 - RNA, 19 nt, Artificial Sequence
  Description of Artificial Sequence: Synthetic oligonucleotide
aucaauaacugcaaaaugu

SEQ ID NO: 2079954 - RNA, 19 nt, Artificial Sequence
  Description of Artificial Sequence: Synthetic oligonucleotide
ucgucucacaguaaacacg

SEQ ID NO: 2079955 - RNA, 19 nt, Artificial Sequence
  Description of Artificial Sequence: Synthetic oligonucleotide
uuuugaacaaagccucuca

SEQ ID NO: 2079956 - RNA, 19 nt, Artificial Sequence
  Description of Artificial Sequence: Synthetic oligonucleotide
gaugcuauccaaaaggaga

SEQ ID NO: 2079957 - RNA, 19 nt, Artificial Sequence
  Description of Artificial Sequence: Synthetic oligonucleotide
uguacgacauccccgcggg

SEQ ID NO: 2079958 - RNA, 19 nt, Artificial Sequence
  Description of Artificial Sequence: Synthetic oligonucleotide
agcaguucugcguauuuac

SEQ ID NO: 2079959 - RNA, 19 nt, Artificial Sequence
  Description of Artificial Sequence: Synthetic oligonucleotide
uaagcaaacgugcuguggu

SEQ ID NO: 2079960 - RNA, 19 nt, Artificial Sequence
  Description of Artificial Sequence: Synthetic oligonucleotide
acaaagaugcaacgguuuc

SEQ ID NO: 2079961 - RNA, 19 nt, Artificial Sequence
  Description of Artificial Sequence: Synthetic oligonucleotide
ucaaguucggcuuguacga

SEQ ID NO: 2079962 - RNA, 19 nt, Artificial Sequence
  Description of Artificial Sequence: Synthetic oligonucleotide
uagguucagagcuuaauga

SEQ ID NO: 2079963 - RNA, 19 nt, Artificial Sequence
  Description of Artificial Sequence: Synthetic oligonucleotide
uuugcagggcgcuugguag

SEQ ID NO: 2079964 - RNA, 19 nt, Artificial Sequence
  Description of Artificial Sequence: Synthetic oligonucleotide
aucgucucacaguaaacac

SEQ ID NO: 2079965 - RNA, 19 nt, Artificial Sequence
  Description of Artificial Sequence: Synthetic oligonucleotide
ugcacucaaguccucagag

SEQ ID NO: 2079966 - RNA, 19 nt, Artificial Sequence
  Description of Artificial Sequence: Synthetic oligonucleotide
cagagcuuaaugaccaugg

SEQ ID NO: 2079967 - RNA, 19 nt, Artificial Sequence
  Description of Artificial Sequence: Synthetic oligonucleotide
gagaucuacagucucagga

SEQ ID NO: 2079968 - RNA, 19 nt, Artificial Sequence
  Description of Artificial Sequence: Synthetic oligonucleotide
ucacaguaaacacggaacu

SEQ ID NO: 2079969 - RNA, 19 nt, Artificial Sequence
  Description of Artificial Sequence: Synthetic oligonucleotide
ugagcucauggaaaggaag

SEQ ID NO: 2079970 - RNA, 19 nt, Artificial Sequence
  Description of Artificial Sequence: Synthetic oligonucleotide
caaacaauagcuugcugug

SEQ ID NO: 2079971 - RNA, 19 nt, Artificial Sequence
  Description of Artificial Sequence: Synthetic oligonucleotide
cuuccagauguugugaucg

SEQ ID NO: 2079972 - RNA, 19 nt, Artificial Sequence
  Description of Artificial Sequence: Synthetic oligonucleotide
gauauugggaggaugucgc

SEQ ID NO: 2079973 - RNA, 19 nt, Artificial Sequence
  Description of Artificial Sequence: Synthetic oligonucleotide
agcuacuaagcaaacgugc

SEQ ID NO: 2079974 - RNA, 19 nt, Artificial Sequence
  Description of Artificial Sequence: Synthetic oligonucleotide
gaggaugucgccaugcuag

SEQ ID NO: 2079975 - RNA, 19 nt, Artificial Sequence
  Description of Artificial Sequence: Synthetic oligonucleotide
gagauuaaaggggacacug

SEQ ID NO: 2079976 - RNA, 19 nt, Artificial Sequence
  Description of Artificial Sequence: Synthetic oligonucleotide
uacagucucaggauggaca

SEQ ID NO: 2079977 - RNA, 19 nt, Artificial Sequence
  Description of Artificial Sequence: Synthetic oligonucleotide
cacucaaguccucagaggc

SEQ ID NO: 2079978 - RNA, 19 nt, Artificial Sequence
  Description of Artificial Sequence: Synthetic oligonucleotide
caggguaucgagaugggcc

SEQ ID NO: 2079979 - RNA, 19 nt, Artificial Sequence
  Description of Artificial Sequence: Synthetic oligonucleotide
agcuuuauuacaucaagua

SEQ ID NO: 2079980 - RNA, 19 nt, Artificial Sequence
  Description of Artificial Sequence: Synthetic oligonucleotide
agagcuuaaugaccauggc

SEQ ID NO: 2079981 - RNA, 19 nt, Artificial Sequence
  Description of Artificial Sequence: Synthetic oligonucleotide
acuacuuaaaaugcacauc

SEQ ID NO: 2079982 - RNA, 19 nt, Artificial Sequence
  Description of Artificial Sequence: Synthetic oligonucleotide
ucuuuugaauguagguuca

SEQ ID NO: 2079983 - RNA, 19 nt, Artificial Sequence
  Description of Artificial Sequence: Synthetic oligonucleotide
uguagccuagugacggugg

SEQ ID NO: 2079984 - RNA, 19 nt, Artificial Sequence
  Description of Artificial Sequence: Synthetic oligonucleotide
uucagaucaaugcuuggaa

SEQ ID NO: 2079985 - RNA, 19 nt, Artificial Sequence
  Description of Artificial Sequence: Synthetic oligonucleotide
uuguacgacauccccgcgg

SEQ ID NO: 2079986 - RNA, 19 nt, Artificial Sequence
  Description of Artificial Sequence: Synthetic oligonucleotide
gagaugggccuucagacug

SEQ ID NO: 2079987 - RNA, 19 nt, Artificial Sequence
  Description of Artificial Sequence: Synthetic oligonucleotide
acacuuccggcguugaggg

SEQ ID NO: 2079988 - RNA, 19 nt, Artificial Sequence
  Description of Artificial Sequence: Synthetic oligonucleotide
auagcuugcugugaagugg

SEQ ID NO: 2079989 - RNA, 19 nt, Artificial Sequence
  Description of Artificial Sequence: Synthetic oligonucleotide
aggagauuaaaggggacac

SEQ ID NO: 2079990 - RNA, 19 nt, Artificial Sequence
  Description of Artificial Sequence: Synthetic oligonucleotide
ucucacaguaaacacggaa

SEQ ID NO: 2079991 - RNA, 19 nt, Artificial Sequence
  Description of Artificial Sequence: Synthetic oligonucleotide
uucaguuguuuucuuccag

SEQ ID NO: 2079992 - RNA, 19 nt, Artificial Sequence
  Description of Artificial Sequence: Synthetic oligonucleotide
cuggguguagccuagugac

SEQ ID NO: 2079993 - RNA, 19 nt, Artificial Sequence
  Description of Artificial Sequence: Synthetic oligonucleotide
ucgagaugggccuucagac

SEQ ID NO: 2079994 - RNA, 19 nt, Artificial Sequence
  Description of Artificial Sequence: Synthetic oligonucleotide
gauguugugaucgucucac

SEQ ID NO: 2079995 - RNA, 19 nt, Artificial Sequence
  Description of Artificial Sequence: Synthetic oligonucleotide
cuucgggcaugaaugaugc

SEQ ID NO: 2079996 - RNA, 19 nt, Artificial Sequence
  Description of Artificial Sequence: Synthetic oligonucleotide
gaaaggaagucaacugggg

SEQ ID NO: 2079997 - RNA, 19 nt, Artificial Sequence
  Description of Artificial Sequence: Synthetic oligonucleotide
caugcuaguagaaggcgag

SEQ ID NO: 2079998 - RNA, 19 nt, Artificial Sequence
  Description of Artificial Sequence: Synthetic oligonucleotide
gauggacauuugcagggcg

SEQ ID NO: 2079999 - RNA, 19 nt, Artificial Sequence
  Description of Artificial Sequence: Synthetic oligonucleotide
aggaccuggcauuacguuc

SEQ ID NO: 2080000 - RNA, 19 nt, Artificial Sequence
  Description of Artificial Sequence: Synthetic oligonucleotide
aacaucuuucagaucaaug

SEQ ID NO: 2080001 - RNA, 19 nt, Artificial Sequence
  Description of Artificial Sequence: Synthetic oligonucleotide
cauggcaggaaaacuacug

SEQ ID NO: 2080002 - RNA, 19 nt, Artificial Sequence
  Description of Artificial Sequence: Synthetic oligonucleotide
uucggcuuguacgacaucc

SEQ ID NO: 2080003 - RNA, 19 nt, Artificial Sequence
  Description of Artificial Sequence: Synthetic oligonucleotide
gacacuuccggcguugagg

SEQ ID NO: 2080004 - RNA, 19 nt, Artificial Sequence
  Description of Artificial Sequence: Synthetic oligonucleotide
ucguuuuagucuuuccaug

SEQ ID NO: 2080005 - RNA, 19 nt, Artificial Sequence
  Description of Artificial Sequence: Synthetic oligonucleotide
caucaauaacugcaaaaug

SEQ ID NO: 2080006 - RNA, 19 nt, Artificial Sequence
  Description of Artificial Sequence: Synthetic oligonucleotide
acacaggcgggccagcuac

SEQ ID NO: 2080007 - RNA, 19 nt, Artificial Sequence
  Description of Artificial Sequence: Synthetic oligonucleotide
agaugcaacgguuucaguu

SEQ ID NO: 2080008 - RNA, 19 nt, Artificial Sequence
  Description of Artificial Sequence: Synthetic oligonucleotide
agugggucugaucucuuuc

SEQ ID NO: 2080009 - RNA, 19 nt, Artificial Sequence
  Description of Artificial Sequence: Synthetic oligonucleotide
augaccauggcaggaaaac

SEQ ID NO: 2080010 - RNA, 19 nt, Artificial Sequence
  Description of Artificial Sequence: Synthetic oligonucleotide
uugugaucgucucacagua

SEQ ID NO: 2080011 - RNA, 19 nt, Artificial Sequence
  Description of Artificial Sequence: Synthetic oligonucleotide
uacuaagcaaacgugcugu

SEQ ID NO: 2080012 - RNA, 19 nt, Artificial Sequence
  Description of Artificial Sequence: Synthetic oligonucleotide
aaaggagauuaaaggggac

SEQ ID NO: 2080013 - RNA, 19 nt, Artificial Sequence
  Description of Artificial Sequence: Synthetic oligonucleotide
auauugggaggaugucgcc

SEQ ID NO: 2080014 - RNA, 19 nt, Artificial Sequence
  Description of Artificial Sequence: Synthetic oligonucleotide
auuuugaacaaagccucuc

SEQ ID NO: 2080015 - RNA, 19 nt, Artificial Sequence
  Description of Artificial Sequence: Synthetic oligonucleotide
uuucagaucaaugcuugga

SEQ ID NO: 2080016 - RNA, 19 nt, Artificial Sequence
  Description of Artificial Sequence: Synthetic oligonucleotide
ucugcguauuuacucugag

SEQ ID NO: 2080017 - RNA, 19 nt, Artificial Sequence
  Description of Artificial Sequence: Synthetic oligonucleotide
aaggagauuaaaggggaca

SEQ ID NO: 2080018 - RNA, 19 nt, Artificial Sequence
  Description of Artificial Sequence: Synthetic oligonucleotide
ucuugcucccugcauaagu

SEQ ID NO: 2080019 - RNA, 19 nt, Artificial Sequence
  Description of Artificial Sequence: Synthetic oligonucleotide
ucaacuggggugaugcuau

SEQ ID NO: 2080020 - RNA, 19 nt, Artificial Sequence
  Description of Artificial Sequence: Synthetic oligonucleotide
uuuuaagauugacuucaaa

SEQ ID NO: 2080021 - RNA, 19 nt, Artificial Sequence
  Description of Artificial Sequence: Synthetic oligonucleotide
ucccgaaccaggcuucggg

SEQ ID NO: 2080022 - RNA, 19 nt, Artificial Sequence
  Description of Artificial Sequence: Synthetic oligonucleotide
aacgugcugugguuugcac

SEQ ID NO: 2080023 - RNA, 19 nt, Artificial Sequence
  Description of Artificial Sequence: Synthetic oligonucleotide
acggaacugagaucuacag

SEQ ID NO: 2080024 - RNA, 19 nt, Artificial Sequence
  Description of Artificial Sequence: Synthetic oligonucleotide
agccuagugacgguggccc

SEQ ID NO: 2080025 - RNA, 19 nt, Artificial Sequence
  Description of Artificial Sequence: Synthetic oligonucleotide
guaaacacggaacugagau

SEQ ID NO: 2080026 - RNA, 19 nt, Artificial Sequence
  Description of Artificial Sequence: Synthetic oligonucleotide
uuacguuccguuucagcca

SEQ ID NO: 2080027 - RNA, 19 nt, Artificial Sequence
  Description of Artificial Sequence: Synthetic oligonucleotide
agaucuacagucucaggau

SEQ ID NO: 2080028 - RNA, 19 nt, Artificial Sequence
  Description of Artificial Sequence: Synthetic oligonucleotide
uuucaguuguuuucuucca

SEQ ID NO: 2080029 - RNA, 19 nt, Artificial Sequence
  Description of Artificial Sequence: Synthetic oligonucleotide
uuucagccaagcacucccg

SEQ ID NO: 2080030 - RNA, 19 nt, Artificial Sequence
  Description of Artificial Sequence: Synthetic oligonucleotide
uugaacaaagccucucauc

SEQ ID NO: 2080031 - RNA, 19 nt, Artificial Sequence
  Description of Artificial Sequence: Synthetic oligonucleotide
cuuaagcagagaagcuccg

SEQ ID NO: 2080032 - RNA, 19 nt, Artificial Sequence
  Description of Artificial Sequence: Synthetic oligonucleotide
uggaucguuccuaacuacu

SEQ ID NO: 2080033 - RNA, 19 nt, Artificial Sequence
  Description of Artificial Sequence: Synthetic oligonucleotide
ucaaucaugcaaacacuua

SEQ ID NO: 2080034 - RNA, 19 nt, Artificial Sequence
  Description of Artificial Sequence: Synthetic oligonucleotide
uagcuugcugugaaguggc

SEQ ID NO: 2080035 - RNA, 19 nt, Artificial Sequence
  Description of Artificial Sequence: Synthetic oligonucleotide
uacaaagaugcaacgguuu

SEQ ID NO: 2080036 - RNA, 19 nt, Artificial Sequence
  Description of Artificial Sequence: Synthetic oligonucleotide
acuuccggcguugagggcg

SEQ ID NO: 2080037 - RNA, 19 nt, Artificial Sequence
  Description of Artificial Sequence: Synthetic oligonucleotide
uacgacauccccgcgggcg

SEQ ID NO: 2080038 - RNA, 19 nt, Artificial Sequence
  Description of Artificial Sequence: Synthetic oligonucleotide
guuuuagucuuuccauggc

SEQ ID NO: 2080039 - RNA, 19 nt, Artificial Sequence
  Description of Artificial Sequence: Synthetic oligonucleotide
ucgggcaugaaugaugccu

SEQ ID NO: 2080040 - RNA, 19 nt, Artificial Sequence
  Description of Artificial Sequence: Synthetic oligonucleotide
ugaaugaugccucguuuua

SEQ ID NO: 2080041 - RNA, 19 nt, Artificial Sequence
  Description of Artificial Sequence: Synthetic oligonucleotide
gugacgguggcccauaguc

SEQ ID NO: 2080042 - RNA, 19 nt, Artificial Sequence
  Description of Artificial Sequence: Synthetic oligonucleotide
aucgagaugggccuucaga

SEQ ID NO: 2080043 - RNA, 19 nt, Artificial Sequence
  Description of Artificial Sequence: Synthetic oligonucleotide
ugagaucuacagucucagg

SEQ ID NO: 2080044 - RNA, 19 nt, Artificial Sequence
  Description of Artificial Sequence: Synthetic oligonucleotide
auugacuucaaagcacuca

SEQ ID NO: 2080045 - RNA, 19 nt, Artificial Sequence
  Description of Artificial Sequence: Synthetic oligonucleotide
gaucgucucacaguaaaca

SEQ ID NO: 2080046 - RNA, 19 nt, Artificial Sequence
  Description of Artificial Sequence: Synthetic oligonucleotide
aaacuacugccauuuugaa

SEQ ID NO: 2080047 - RNA, 19 nt, Artificial Sequence
  Description of Artificial Sequence: Synthetic oligonucleotide
gauuaaaggggacacuggu

SEQ ID NO: 2080048 - RNA, 19 nt, Artificial Sequence
  Description of Artificial Sequence: Synthetic oligonucleotide
cauuacguuccguuucagc

SEQ ID NO: 2080049 - RNA, 19 nt, Artificial Sequence
  Description of Artificial Sequence: Synthetic oligonucleotide
uuagucuuuccauggcgcu

SEQ ID NO: 2080050 - RNA, 19 nt, Artificial Sequence
  Description of Artificial Sequence: Synthetic oligonucleotide
aaguucggcuuguacgaca

SEQ ID NO: 2080051 - RNA, 19 nt, Artificial Sequence
  Description of Artificial Sequence: Synthetic oligonucleotide
ugcuaguagaaggcgagug

SEQ ID NO: 2080052 - RNA, 19 nt, Artificial Sequence
  Description of Artificial Sequence: Synthetic oligonucleotide
gaaugaugccucguuuuag

SEQ ID NO: 2080053 - RNA, 19 nt, Artificial Sequence
  Description of Artificial Sequence: Synthetic oligonucleotide
cugcguauuuacucugagg

SEQ ID NO: 2080054 - RNA, 19 nt, Artificial Sequence
  Description of Artificial Sequence: Synthetic oligonucleotide
cagcuggcgauauugggag

SEQ ID NO: 2080055 - RNA, 19 nt, Artificial Sequence
  Description of Artificial Sequence: Synthetic oligonucleotide
aucuacagucucaggaugg

SEQ ID NO: 2080056 - RNA, 19 nt, Artificial Sequence
  Description of Artificial Sequence: Synthetic oligonucleotide
agauuaaaggggacacugg

SEQ ID NO: 2080057 - RNA, 19 nt, Artificial Sequence
  Description of Artificial Sequence: Synthetic oligonucleotide
acaauagcuugcugugaag

SEQ ID NO: 2080058 - RNA, 19 nt, Artificial Sequence
  Description of Artificial Sequence: Synthetic oligonucleotide
uggguguagccuagugacg

SEQ ID NO: 2080059 - RNA, 19 nt, Artificial Sequence
  Description of Artificial Sequence: Synthetic oligonucleotide
ccauuuugaacaaagccuc

SEQ ID NO: 2080060 - RNA, 19 nt, Artificial Sequence
  Description of Artificial Sequence: Synthetic oligonucleotide
aucguuccuaacuacuuaa

SEQ ID NO: 2080061 - RNA, 19 nt, Artificial Sequence
  Description of Artificial Sequence: Synthetic oligonucleotide
augugcgcggucaaguucg

SEQ ID NO: 2080062 - RNA, 19 nt, Artificial Sequence
  Description of Artificial Sequence: Synthetic oligonucleotide
uuaaugaccauggcaggaa

SEQ ID NO: 2080063 - RNA, 19 nt, Artificial Sequence
  Description of Artificial Sequence: Synthetic oligonucleotide
caggugagcucauggaaag

SEQ ID NO: 2080064 - RNA, 19 nt, Artificial Sequence
  Description of Artificial Sequence: Synthetic oligonucleotide
cuaagcaaacgugcugugg

SEQ ID NO: 2080065 - RNA, 19 nt, Artificial Sequence
  Description of Artificial Sequence: Synthetic oligonucleotide
ccaaucuuuugaauguagg

SEQ ID NO: 2080066 - RNA, 19 nt, Artificial Sequence
  Description of Artificial Sequence: Synthetic oligonucleotide
ugcgcggucaaguucggcu

SEQ ID NO: 2080067 - RNA, 19 nt, Artificial Sequence
  Description of Artificial Sequence: Synthetic oligonucleotide
uaacugcaaaaugucuucc

SEQ ID NO: 2080068 - RNA, 19 nt, Artificial Sequence
  Description of Artificial Sequence: Synthetic oligonucleotide
accauggcaggaaaacuac

SEQ ID NO: 2080069 - RNA, 19 nt, Artificial Sequence
  Description of Artificial Sequence: Synthetic oligonucleotide
augaaugaugccucguuuu

SEQ ID NO: 2080070 - RNA, 19 nt, Artificial Sequence
  Description of Artificial Sequence: Synthetic oligonucleotide
aaacaauagcuugcuguga

SEQ ID NO: 2080071 - RNA, 19 nt, Artificial Sequence
  Description of Artificial Sequence: Synthetic oligonucleotide
ugaucgucucacaguaaac

SEQ ID NO: 2080072 - RNA, 19 nt, Artificial Sequence
  Description of Artificial Sequence: Synthetic oligonucleotide
cuacuaagcaaacgugcug

SEQ ID NO: 2080073 - RNA, 19 nt, Artificial Sequence
  Description of Artificial Sequence: Synthetic oligonucleotide
uggcauuacguuccguuuc

SEQ ID NO: 2080074 - RNA, 19 nt, Artificial Sequence
  Description of Artificial Sequence: Synthetic oligonucleotide
auggacauuugcagggcgc

SEQ ID NO: 2080075 - RNA, 19 nt, Artificial Sequence
  Description of Artificial Sequence: Synthetic oligonucleotide
gcuaguagaaggcgagugg

SEQ ID NO: 2080076 - RNA, 19 nt, Artificial Sequence
  Description of Artificial Sequence: Synthetic oligonucleotide
aggguaucgagaugggccu

SEQ ID NO: 2080077 - RNA, 19 nt, Artificial Sequence
  Description of Artificial Sequence: Synthetic oligonucleotide
uaaacacggaacugagauc

SEQ ID NO: 2080078 - RNA, 19 nt, Artificial Sequence
  Description of Artificial Sequence: Synthetic oligonucleotide
ucauggaaaggaagucaac

SEQ ID NO: 2080079 - RNA, 19 nt, Artificial Sequence
  Description of Artificial Sequence: Synthetic oligonucleotide
agaucaaugcuuggaaaga

SEQ ID NO: 2080080 - RNA, 19 nt, Artificial Sequence
  Description of Artificial Sequence: Synthetic oligonucleotide
aguagaaggcgaguggaca

SEQ ID NO: 2080081 - RNA, 19 nt, Artificial Sequence
  Description of Artificial Sequence: Synthetic oligonucleotide
uauugggaggaugucgcca

SEQ ID NO: 2080082 - RNA, 19 nt, Artificial Sequence
  Description of Artificial Sequence: Synthetic oligonucleotide
uucugcguauuuacucuga

SEQ ID NO: 2080083 - RNA, 19 nt, Artificial Sequence
  Description of Artificial Sequence: Synthetic oligonucleotide
uacuuaaaaugcacaucau

SEQ ID NO: 2080084 - RNA, 19 nt, Artificial Sequence
  Description of Artificial Sequence: Synthetic oligonucleotide
gacauuugcagggcgcuug

SEQ ID NO: 2080085 - RNA, 19 nt, Artificial Sequence
  Description of Artificial Sequence: Synthetic oligonucleotide
acacuguacacaggcgggc

SEQ ID NO: 2080086 - RNA, 19 nt, Artificial Sequence
  Description of Artificial Sequence: Synthetic oligonucleotide
uagucacucagcagcuggc

SEQ ID NO: 2080087 - RNA, 19 nt, Artificial Sequence
  Description of Artificial Sequence: Synthetic oligonucleotide
uaaugaccauggcaggaaa

SEQ ID NO: 2080088 - RNA, 19 nt, Artificial Sequence
  Description of Artificial Sequence: Synthetic oligonucleotide
uuacucugaggcaccuggc

SEQ ID NO: 2080089 - RNA, 19 nt, Artificial Sequence
  Description of Artificial Sequence: Synthetic oligonucleotide
uaguagaaggcgaguggac

SEQ ID NO: 2080090 - RNA, 19 nt, Artificial Sequence
  Description of Artificial Sequence: Synthetic oligonucleotide
caaaaugucuucccaaucu

SEQ ID NO: 2080091 - RNA, 19 nt, Artificial Sequence
  Description of Artificial Sequence: Synthetic oligonucleotide
acacggaacugagaucuac

SEQ ID NO: 2080092 - RNA, 19 nt, Artificial Sequence
  Description of Artificial Sequence: Synthetic oligonucleotide
ugacgguggcccauaguca

SEQ ID NO: 2080093 - RNA, 19 nt, Artificial Sequence
  Description of Artificial Sequence: Synthetic oligonucleotide
cacuuaagcagagaagcuc

SEQ ID NO: 2080094 - RNA, 19 nt, Artificial Sequence
  Description of Artificial Sequence: Synthetic oligonucleotide
uacguuccguuucagccaa

SEQ ID NO: 2080095 - RNA, 19 nt, Artificial Sequence
  Description of Artificial Sequence: Synthetic oligonucleotide
uugcacucaaguccucaga

SEQ ID NO: 2080096 - RNA, 19 nt, Artificial Sequence
  Description of Artificial Sequence: Synthetic oligonucleotide
cgucucacaguaaacacgg

SEQ ID NO: 2080097 - RNA, 19 nt, Artificial Sequence
  Description of Artificial Sequence: Synthetic oligonucleotide
cagcuacuaagcaaacgug

SEQ ID NO: 2080098 - RNA, 19 nt, Artificial Sequence
  Description of Artificial Sequence: Synthetic oligonucleotide
ucggcuuguacgacauccc

SEQ ID NO: 2080099 - RNA, 19 nt, Artificial Sequence
  Description of Artificial Sequence: Synthetic oligonucleotide
acuaagcaaacgugcugug

SEQ ID NO: 2080100 - RNA, 19 nt, Artificial Sequence
  Description of Artificial Sequence: Synthetic oligonucleotide
gcuuguacgacauccccgc

SEQ ID NO: 2080101 - RNA, 19 nt, Artificial Sequence
  Description of Artificial Sequence: Synthetic oligonucleotide
agauguugugaucgucuca

SEQ ID NO: 2080102 - RNA, 19 nt, Artificial Sequence
  Description of Artificial Sequence: Synthetic oligonucleotide
gaagcuccgugaagcaggg

SEQ ID NO: 2080103 - RNA, 19 nt, Artificial Sequence
  Description of Artificial Sequence: Synthetic oligonucleotide
cucauggaaaggaagucaa

SEQ ID NO: 2080104 - RNA, 19 nt, Artificial Sequence
  Description of Artificial Sequence: Synthetic oligonucleotide
gcaaacaauagcuugcugu

SEQ ID NO: 2080105 - RNA, 19 nt, Artificial Sequence
  Description of Artificial Sequence: Synthetic oligonucleotide
cguuuuagucuuuccaugg

SEQ ID NO: 2080106 - RNA, 19 nt, Artificial Sequence
  Description of Artificial Sequence: Synthetic oligonucleotide
agagaagcuccgugaagca

SEQ ID NO: 2080107 - RNA, 19 nt, Artificial Sequence
  Description of Artificial Sequence: Synthetic oligonucleotide
guucugcguauuuacucug

SEQ ID NO: 2080108 - RNA, 19 nt, Artificial Sequence
  Description of Artificial Sequence: Synthetic oligonucleotide
cauaagugggucugaucuc

SEQ ID NO: 2080109 - RNA, 19 nt, Artificial Sequence
  Description of Artificial Sequence: Synthetic oligonucleotide
uuuauaacuugugcauuuu

SEQ ID NO: 2080110 - RNA, 19 nt, Artificial Sequence
  Description of Artificial Sequence: Synthetic oligonucleotide
gcuaggaccuggcauuacg

SEQ ID NO: 2080111 - RNA, 19 nt, Artificial Sequence
  Description of Artificial Sequence: Synthetic oligonucleotide
ucucaucuccacaggguau

SEQ ID NO: 2080112 - RNA, 19 nt, Artificial Sequence
  Description of Artificial Sequence: Synthetic oligonucleotide
gugaucgucucacaguaaa

SEQ ID NO: 2080113 - RNA, 19 nt, Artificial Sequence
  Description of Artificial Sequence: Synthetic oligonucleotide
caaucuuuugaauguaggu

SEQ ID NO: 2080114 - RNA, 19 nt, Artificial Sequence
  Description of Artificial Sequence: Synthetic oligonucleotide
ggguguagccuagugacgg

SEQ ID NO: 2080115 - RNA, 19 nt, Artificial Sequence
  Description of Artificial Sequence: Synthetic oligonucleotide
uccacaggguaucgagaug

SEQ ID NO: 2080116 - RNA, 19 nt, Artificial Sequence
  Description of Artificial Sequence: Synthetic oligonucleotide
guauuuacucugaggcacc

SEQ ID NO: 2080117 - RNA, 19 nt, Artificial Sequence
  Description of Artificial Sequence: Synthetic oligonucleotide
cuaguagaaggcgagugga

SEQ ID NO: 2080118 - RNA, 19 nt, Artificial Sequence
  Description of Artificial Sequence: Synthetic oligonucleotide
ucguuccuaacuacuuaaa

SEQ ID NO: 2080119 - RNA, 19 nt, Artificial Sequence
  Description of Artificial Sequence: Synthetic oligonucleotide
ggcgaguggacacuuccgg

SEQ ID NO: 2080120 - RNA, 19 nt, Artificial Sequence
  Description of Artificial Sequence: Synthetic oligonucleotide
acgacauccccgcgggcgg

SEQ ID NO: 2080121 - RNA, 19 nt, Artificial Sequence
  Description of Artificial Sequence: Synthetic oligonucleotide
cuggaucguuccuaacuac

SEQ ID NO: 2080122 - RNA, 19 nt, Artificial Sequence
  Description of Artificial Sequence: Synthetic oligonucleotide
auuugcagggcgcuuggua

SEQ ID NO: 2080123 - RNA, 19 nt, Artificial Sequence
  Description of Artificial Sequence: Synthetic oligonucleotide
ugcauaagugggucugauc

SEQ ID NO: 2080124 - RNA, 19 nt, Artificial Sequence
  Description of Artificial Sequence: Synthetic oligonucleotide
aagcaaacgugcugugguu

SEQ ID NO: 2080125 - RNA, 19 nt, Artificial Sequence
  Description of Artificial Sequence: Synthetic oligonucleotide
cagauguugugaucgucuc

SEQ ID NO: 2080126 - RNA, 19 nt, Artificial Sequence
  Description of Artificial Sequence: Synthetic oligonucleotide
uaucgagaugggccuucag

SEQ ID NO: 2080127 - RNA, 19 nt, Artificial Sequence
  Description of Artificial Sequence: Synthetic oligonucleotide
agagcuggaucguuccuaa

SEQ ID NO: 2080128 - RNA, 19 nt, Artificial Sequence
  Description of Artificial Sequence: Synthetic oligonucleotide
gaucguuccuaacuacuua

SEQ ID NO: 2080129 - RNA, 19 nt, Artificial Sequence
  Description of Artificial Sequence: Synthetic oligonucleotide
gugaugcuauccaaaagga

SEQ ID NO: 2080130 - RNA, 19 nt, Artificial Sequence
  Description of Artificial Sequence: Synthetic oligonucleotide
uauuuacucugaggcaccu

SEQ ID NO: 2080131 - RNA, 19 nt, Artificial Sequence
  Description of Artificial Sequence: Synthetic oligonucleotide
augcuauccaaaaggagau

SEQ ID NO: 2080132 - RNA, 19 nt, Artificial Sequence
  Description of Artificial Sequence: Synthetic oligonucleotide
cugugaaguggcuucacaa

SEQ ID NO: 2080133 - RNA, 19 nt, Artificial Sequence
  Description of Artificial Sequence: Synthetic oligonucleotide
gucgccaugcuaguagaag

SEQ ID NO: 2080134 - RNA, 19 nt, Artificial Sequence
  Description of Artificial Sequence: Synthetic oligonucleotide
cuuuugaauguagguucag

SEQ ID NO: 2080135 - RNA, 19 nt, Artificial Sequence
  Description of Artificial Sequence: Synthetic oligonucleotide
uauuuccaguucccugggu

SEQ ID NO: 2080136 - RNA, 19 nt, Artificial Sequence
  Description of Artificial Sequence: Synthetic oligonucleotide
gaugccucguuuuagucuu

SEQ ID NO: 2080137 - RNA, 19 nt, Artificial Sequence
  Description of Artificial Sequence: Synthetic oligonucleotide
ucagccaagcacucccgaa

SEQ ID NO: 2080138 - RNA, 19 nt, Artificial Sequence
  Description of Artificial Sequence: Synthetic oligonucleotide
aaacgugcugugguuugca

SEQ ID NO: 2080139 - RNA, 19 nt, Artificial Sequence
  Description of Artificial Sequence: Synthetic oligonucleotide
augcaacgguuucaguugu

SEQ ID NO: 2080140 - RNA, 19 nt, Artificial Sequence
  Description of Artificial Sequence: Synthetic oligonucleotide
gggagauuguucuuucuuc

SEQ ID NO: 2080141 - RNA, 19 nt, Artificial Sequence
  Description of Artificial Sequence: Synthetic oligonucleotide
aagagcuggaucguuccua

SEQ ID NO: 2080142 - RNA, 19 nt, Artificial Sequence
  Description of Artificial Sequence: Synthetic oligonucleotide
guugugaucgucucacagu

SEQ ID NO: 2080143 - RNA, 19 nt, Artificial Sequence
  Description of Artificial Sequence: Synthetic oligonucleotide
ugugaucgucucacaguaa

SEQ ID NO: 2080144 - RNA, 19 nt, Artificial Sequence
  Description of Artificial Sequence: Synthetic oligonucleotide
guagccuagugacgguggc

SEQ ID NO: 2080145 - RNA, 19 nt, Artificial Sequence
  Description of Artificial Sequence: Synthetic oligonucleotide
augucgccaugcuaguaga

SEQ ID NO: 2080146 - RNA, 19 nt, Artificial Sequence
  Description of Artificial Sequence: Synthetic oligonucleotide
uucccuggguguagccuag

SEQ ID NO: 2080147 - RNA, 19 nt, Artificial Sequence
  Description of Artificial Sequence: Synthetic oligonucleotide
caugugcgcggucaaguuc

SEQ ID NO: 2080148 - RNA, 19 nt, Artificial Sequence
  Description of Artificial Sequence: Synthetic oligonucleotide
cuuguacgacauccccgcg

SEQ ID NO: 2080149 - RNA, 19 nt, Artificial Sequence
  Description of Artificial Sequence: Synthetic oligonucleotide
gaccauggcaggaaaacua

SEQ ID NO: 2080150 - RNA, 19 nt, Artificial Sequence
  Description of Artificial Sequence: Synthetic oligonucleotide
gguuucaguuguuuucuuc

SEQ ID NO: 2080151 - RNA, 19 nt, Artificial Sequence
  Description of Artificial Sequence: Synthetic oligonucleotide
aagugggucugaucucuuu

SEQ ID NO: 2080152 - RNA, 19 nt, Artificial Sequence
  Description of Artificial Sequence: Synthetic oligonucleotide
cguauuuacucugaggcac

SEQ ID NO: 2080153 - RNA, 19 nt, Artificial Sequence
  Description of Artificial Sequence: Synthetic oligonucleotide
ccuaacuacuuaaaaugca

SEQ ID NO: 2080154 - RNA, 19 nt, Artificial Sequence
  Description of Artificial Sequence: Synthetic oligonucleotide
ggggcaaacaauagcuugc

SEQ ID NO: 2080155 - RNA, 19 nt, Artificial Sequence
  Description of Artificial Sequence: Synthetic oligonucleotide
caaagcacucaaucaugca

SEQ ID NO: 2080156 - RNA, 19 nt, Artificial Sequence
  Description of Artificial Sequence: Synthetic oligonucleotide
ugugcgcggucaaguucgg

SEQ ID NO: 2080157 - RNA, 19 nt, Artificial Sequence
  Description of Artificial Sequence: Synthetic oligonucleotide
aguaaacacggaacugaga

SEQ ID NO: 2080158 - RNA, 19 nt, Artificial Sequence
  Description of Artificial Sequence: Synthetic oligonucleotide
uuccagauguugugaucgu

SEQ ID NO: 2080159 - RNA, 19 nt, Artificial Sequence
  Description of Artificial Sequence: Synthetic oligonucleotide
auuaaaggggacacuggua

SEQ ID NO: 2080160 - RNA, 19 nt, Artificial Sequence
  Description of Artificial Sequence: Synthetic oligonucleotide
acacuuaagcagagaagcu

SEQ ID NO: 2080161 - RNA, 19 nt, Artificial Sequence
  Description of Artificial Sequence: Synthetic oligonucleotide
ggcuuguacgacauccccg

SEQ ID NO: 2080162 - RNA, 19 nt, Artificial Sequence
  Description of Artificial Sequence: Synthetic oligonucleotide
uagugacgguggcccauag

SEQ ID NO: 2080163 - RNA, 19 nt, Artificial Sequence
  Description of Artificial Sequence: Synthetic oligonucleotide
uggggagauuguucuuucu

SEQ ID NO: 2080164 - RNA, 19 nt, Artificial Sequence
  Description of Artificial Sequence: Synthetic oligonucleotide
uagaaggcgaguggacacu

SEQ ID NO: 2080165 - RNA, 19 nt, Artificial Sequence
  Description of Artificial Sequence: Synthetic oligonucleotide
uaggaccuggcauuacguu

SEQ ID NO: 2080166 - RNA, 19 nt, Artificial Sequence
  Description of Artificial Sequence: Synthetic oligonucleotide
agcuggcgauauugggagg

SEQ ID NO: 2080167 - RNA, 19 nt, Artificial Sequence
  Description of Artificial Sequence: Synthetic oligonucleotide
cuuccggcguugagggcgg

SEQ ID NO: 2080168 - RNA, 19 nt, Artificial Sequence
  Description of Artificial Sequence: Synthetic oligonucleotide
cagggcgcuugguagguug

SEQ ID NO: 2080169 - RNA, 19 nt, Artificial Sequence
  Description of Artificial Sequence: Synthetic oligonucleotide
ugucgccaugcuaguagaa

SEQ ID NO: 2080170 - RNA, 19 nt, Artificial Sequence
  Description of Artificial Sequence: Synthetic oligonucleotide
gaagucaacuggggugaug

SEQ ID NO: 2080171 - RNA, 19 nt, Artificial Sequence
  Description of Artificial Sequence: Synthetic oligonucleotide
cacggaacugagaucuaca

SEQ ID NO: 2080172 - RNA, 19 nt, Artificial Sequence
  Description of Artificial Sequence: Synthetic oligonucleotide
cgaguggacacuuccggcg

SEQ ID NO: 2080173 - RNA, 19 nt, Artificial Sequence
  Description of Artificial Sequence: Synthetic oligonucleotide
cacuguacacaggcgggcc

SEQ ID NO: 2080174 - RNA, 19 nt, Artificial Sequence
  Description of Artificial Sequence: Synthetic oligonucleotide
uccagauguugugaucguc

SEQ ID NO: 2080175 - RNA, 19 nt, Artificial Sequence
  Description of Artificial Sequence: Synthetic oligonucleotide
gucuucccaaucuuuugaa

SEQ ID NO: 2080176 - RNA, 19 nt, Artificial Sequence
  Description of Artificial Sequence: Synthetic oligonucleotide
caaacgugcugugguuugc

SEQ ID NO: 2080177 - RNA, 19 nt, Artificial Sequence
  Description of Artificial Sequence: Synthetic oligonucleotide
cucagaggcaggugagcuc

SEQ ID NO: 2080178 - RNA, 19 nt, Artificial Sequence
  Description of Artificial Sequence: Synthetic oligonucleotide
gagcucauggaaaggaagu

SEQ ID NO: 2080179 - RNA, 19 nt, Artificial Sequence
  Description of Artificial Sequence: Synthetic oligonucleotide
gggucugaucucuuucccc

SEQ ID NO: 2080180 - RNA, 19 nt, Artificial Sequence
  Description of Artificial Sequence: Synthetic oligonucleotide
gcaaacgugcugugguuug

SEQ ID NO: 2080181 - RNA, 19 nt, Artificial Sequence
  Description of Artificial Sequence: Synthetic oligonucleotide
aggaugucgccaugcuagu

SEQ ID NO: 2080182 - RNA, 19 nt, Artificial Sequence
  Description of Artificial Sequence: Synthetic oligonucleotide
aguucccuggguguagccu

SEQ ID NO: 2080183 - RNA, 19 nt, Artificial Sequence
  Description of Artificial Sequence: Synthetic oligonucleotide
uggcgauauugggaggaug

SEQ ID NO: 2080184 - RNA, 19 nt, Artificial Sequence
  Description of Artificial Sequence: Synthetic oligonucleotide
uagccuagugacgguggcc

SEQ ID NO: 2080185 - RNA, 19 nt, Artificial Sequence
  Description of Artificial Sequence: Synthetic oligonucleotide
cgauauugggaggaugucg

SEQ ID NO: 2080186 - RNA, 19 nt, Artificial Sequence
  Description of Artificial Sequence: Synthetic oligonucleotide
agaugggccuucagacugg

SEQ ID NO: 2080187 - RNA, 19 nt, Artificial Sequence
  Description of Artificial Sequence: Synthetic oligonucleotide
auuuacucugaggcaccug

SEQ ID NO: 2080188 - RNA, 19 nt, Artificial Sequence
  Description of Artificial Sequence: Synthetic oligonucleotide
agugacgguggcccauagu

SEQ ID NO: 2080189 - RNA, 19 nt, Artificial Sequence
  Description of Artificial Sequence: Synthetic oligonucleotide
caaacaucuuucagaucaa

SEQ ID NO: 2080190 - RNA, 19 nt, Artificial Sequence
  Description of Artificial Sequence: Synthetic oligonucleotide
ggucaaguucggcuuguac

SEQ ID NO: 2080191 - RNA, 19 nt, Artificial Sequence
  Description of Artificial Sequence: Synthetic oligonucleotide
uucgggcaugaaugaugcc

SEQ ID NO: 2080192 - RNA, 19 nt, Artificial Sequence
  Description of Artificial Sequence: Synthetic oligonucleotide
ggcauuacguuccguuuca

SEQ ID NO: 2080193 - RNA, 19 nt, Artificial Sequence
  Description of Artificial Sequence: Synthetic oligonucleotide
cuacagucucaggauggac

SEQ ID NO: 2080194 - RNA, 19 nt, Artificial Sequence
  Description of Artificial Sequence: Synthetic oligonucleotide
gucacucagcagcuggcga

SEQ ID NO: 2080195 - RNA, 19 nt, Artificial Sequence
  Description of Artificial Sequence: Synthetic oligonucleotide
gcuucgggcaugaaugaug

SEQ ID NO: 2080196 - RNA, 19 nt, Artificial Sequence
  Description of Artificial Sequence: Synthetic oligonucleotide
cugugguuugcacucaagu

SEQ ID NO: 2080197 - RNA, 19 nt, Artificial Sequence
  Description of Artificial Sequence: Synthetic oligonucleotide
aggcgaguggacacuuccg

SEQ ID NO: 2080198 - RNA, 19 nt, Artificial Sequence
  Description of Artificial Sequence: Synthetic oligonucleotide
aguucggcuuguacgacau

SEQ ID NO: 2080199 - RNA, 19 nt, Artificial Sequence
  Description of Artificial Sequence: Synthetic oligonucleotide
acucaaguccucagaggca

SEQ ID NO: 2080200 - RNA, 19 nt, Artificial Sequence
  Description of Artificial Sequence: Synthetic oligonucleotide
ucccugcauaagugggucu

SEQ ID NO: 2080201 - RNA, 19 nt, Artificial Sequence
  Description of Artificial Sequence: Synthetic oligonucleotide
uacacaggcgggccagcua

SEQ ID NO: 2080202 - RNA, 19 nt, Artificial Sequence
  Description of Artificial Sequence: Synthetic oligonucleotide
guucccuggguguagccua

SEQ ID NO: 2080203 - RNA, 19 nt, Artificial Sequence
  Description of Artificial Sequence: Synthetic oligonucleotide
agcaaacgugcugugguuu

SEQ ID NO: 2080204 - RNA, 19 nt, Artificial Sequence
  Description of Artificial Sequence: Synthetic oligonucleotide
ggcaaacaauagcuugcug

SEQ ID NO: 2080205 - RNA, 19 nt, Artificial Sequence
  Description of Artificial Sequence: Synthetic oligonucleotide
cucccugcauaaguggguc

SEQ ID NO: 2080206 - RNA, 19 nt, Artificial Sequence
  Description of Artificial Sequence: Synthetic oligonucleotide
ccagcuacuaagcaaacgu

SEQ ID NO: 2080207 - RNA, 19 nt, Artificial Sequence
  Description of Artificial Sequence: Synthetic oligonucleotide
gcguauuuacucugaggca

SEQ ID NO: 2080208 - RNA, 19 nt, Artificial Sequence
  Description of Artificial Sequence: Synthetic oligonucleotide
caaguucggcuuguacgac

SEQ ID NO: 2080209 - RNA, 19 nt, Artificial Sequence
  Description of Artificial Sequence: Synthetic oligonucleotide
acucccgaaccaggcuucg

SEQ ID NO: 2080210 - RNA, 19 nt, Artificial Sequence
  Description of Artificial Sequence: Synthetic oligonucleotide
gcgaguggacacuuccggc

SEQ ID NO: 2080211 - RNA, 19 nt, Artificial Sequence
  Description of Artificial Sequence: Synthetic oligonucleotide
ggggugaugcuauccaaaa

SEQ ID NO: 2080212 - RNA, 19 nt, Artificial Sequence
  Description of Artificial Sequence: Synthetic oligonucleotide
gcuggaucguuccuaacua

SEQ ID NO: 2080213 - RNA, 19 nt, Artificial Sequence
  Description of Artificial Sequence: Synthetic oligonucleotide
gucaacuggggugaugcua

SEQ ID NO: 2080214 - RNA, 19 nt, Artificial Sequence
  Description of Artificial Sequence: Synthetic oligonucleotide
agggcgcuugguagguugg

SEQ ID NO: 2080215 - RNA, 19 nt, Artificial Sequence
  Description of Artificial Sequence: Synthetic oligonucleotide
augcuaguagaaggcgagu

SEQ ID NO: 2080216 - RNA, 19 nt, Artificial Sequence
  Description of Artificial Sequence: Synthetic oligonucleotide
ugcuauccaaaaggagauu

SEQ ID NO: 2080217 - RNA, 19 nt, Artificial Sequence
  Description of Artificial Sequence: Synthetic oligonucleotide
ugcaacgguuucaguuguu

SEQ ID NO: 2080218 - RNA, 19 nt, Artificial Sequence
  Description of Artificial Sequence: Synthetic oligonucleotide
uggcgcucuugcucccugc

SEQ ID NO: 2080219 - RNA, 19 nt, Artificial Sequence
  Description of Artificial Sequence: Synthetic oligonucleotide
uccggcguugagggcggcg

SEQ ID NO: 2080220 - RNA, 19 nt, Artificial Sequence
  Description of Artificial Sequence: Synthetic oligonucleotide
cuccacaggguaucgagau

SEQ ID NO: 2080221 - RNA, 19 nt, Artificial Sequence
  Description of Artificial Sequence: Synthetic oligonucleotide
gacauccccgcgggcggcg

SEQ ID NO: 2080222 - RNA, 19 nt, Artificial Sequence
  Description of Artificial Sequence: Synthetic oligonucleotide
ggcgcuugguagguugggg

SEQ ID NO: 2080223 - RNA, 19 nt, Artificial Sequence
  Description of Artificial Sequence: Synthetic oligonucleotide
ggcgauauugggaggaugu

SEQ ID NO: 2080224 - RNA, 19 nt, Artificial Sequence
  Description of Artificial Sequence: Synthetic oligonucleotide
gugagcucauggaaaggaa

SEQ ID NO: 2080225 - RNA, 19 nt, Artificial Sequence
  Description of Artificial Sequence: Synthetic oligonucleotide
aguggacacuuccggcguu

SEQ ID NO: 2080226 - RNA, 19 nt, Artificial Sequence
  Description of Artificial Sequence: Synthetic oligonucleotide
cccgaaccaggcuucgggc

SEQ ID NO: 2080227 - RNA, 19 nt, Artificial Sequence
  Description of Artificial Sequence: Synthetic oligonucleotide
cuggggugaugcuauccaa

SEQ ID NO: 2080228 - RNA, 19 nt, Artificial Sequence
  Description of Artificial Sequence: Synthetic oligonucleotide
gcuacuaagcaaacgugcu

SEQ ID NO: 2080229 - RNA, 19 nt, Artificial Sequence
  Description of Artificial Sequence: Synthetic oligonucleotide
gccucguuuuagucuuucc

SEQ ID NO: 2080230 - RNA, 19 nt, Artificial Sequence
  Description of Artificial Sequence: Synthetic oligonucleotide
cugaucucuuuccccaacu

SEQ ID NO: 2080231 - RNA, 19 nt, Artificial Sequence
  Description of Artificial Sequence: Synthetic oligonucleotide
cagacuggccaggggcuag

SEQ ID NO: 2080232 - RNA, 19 nt, Artificial Sequence
  Description of Artificial Sequence: Synthetic oligonucleotide
gcuggcgauauugggagga

SEQ ID NO: 2080233 - RNA, 19 nt, Artificial Sequence
  Description of Artificial Sequence: Synthetic oligonucleotide
gaaggcgaguggacacuuc

SEQ ID NO: 2080234 - RNA, 19 nt, Artificial Sequence
  Description of Artificial Sequence: Synthetic oligonucleotide
uccgugaagcagggucuac

SEQ ID NO: 2080235 - RNA, 19 nt, Artificial Sequence
  Description of Artificial Sequence: Synthetic oligonucleotide
gggccagcuacuaagcaaa

SEQ ID NO: 2080236 - RNA, 19 nt, Artificial Sequence
  Description of Artificial Sequence: Synthetic oligonucleotide
guuggggagauuguucuuu

SEQ ID NO: 2080237 - RNA, 19 nt, Artificial Sequence
  Description of Artificial Sequence: Synthetic oligonucleotide
cacuuccggcguugagggc

SEQ ID NO: 2080238 - RNA, 19 nt, Artificial Sequence
  Description of Artificial Sequence: Synthetic oligonucleotide
cucuugcucccugcauaag

SEQ ID NO: 2080239 - RNA, 19 nt, Artificial Sequence
  Description of Artificial Sequence: Synthetic oligonucleotide
ggacacuuccggcguugag

SEQ ID NO: 2080240 - RNA, 19 nt, Artificial Sequence
  Description of Artificial Sequence: Synthetic oligonucleotide
cgcuugguagguuggggag

SEQ ID NO: 2080241 - RNA, 19 nt, Artificial Sequence
  Description of Artificial Sequence: Synthetic oligonucleotide
ccagauguugugaucgucu

SEQ ID NO: 2080242 - RNA, 19 nt, Artificial Sequence
  Description of Artificial Sequence: Synthetic oligonucleotide
gcgcuugguagguugggga

SEQ ID NO: 2080243 - RNA, 19 nt, Artificial Sequence
  Description of Artificial Sequence: Synthetic oligonucleotide
guacgacauccccgcgggc

SEQ ID NO: 2080244 - RNA, 19 nt, Artificial Sequence
  Description of Artificial Sequence: Synthetic oligonucleotide
aacacggaacugagaucua

SEQ ID NO: 2080245 - RNA, 19 nt, Artificial Sequence
  Description of Artificial Sequence: Synthetic oligonucleotide
cucccgaaccaggcuucgg

SEQ ID NO: 2080246 - RNA, 19 nt, Artificial Sequence
  Description of Artificial Sequence: Synthetic oligonucleotide
gguaucgagaugggccuuc

SEQ ID NO: 2080247 - RNA, 19 nt, Artificial Sequence
  Description of Artificial Sequence: Synthetic oligonucleotide
cgggcaugaaugaugccuc

SEQ ID NO: 2080248 - RNA, 19 nt, Artificial Sequence
  Description of Artificial Sequence: Synthetic oligonucleotide
cccugcauaagugggucug

SEQ ID NO: 2080249 - RNA, 19 nt, Artificial Sequence
  Description of Artificial Sequence: Synthetic oligonucleotide
ggaggaugucgccaugcua

SEQ ID NO: 2080250 - RNA, 19 nt, Artificial Sequence
  Description of Artificial Sequence: Synthetic oligonucleotide
gccuucagacuggccaggg

SEQ ID NO: 2080251 - RNA, 19 nt, Artificial Sequence
  Description of Artificial Sequence: Synthetic oligonucleotide
cuggcauuacguuccguuu

SEQ ID NO: 2080252 - RNA, 19 nt, Artificial Sequence
  Description of Artificial Sequence: Synthetic oligonucleotide
ggcggcgggcaugugcgcg

SEQ ID NO: 2080253 - RNA, 19 nt, Artificial Sequence
  Description of Artificial Sequence: Synthetic oligonucleotide
cggcuuguacgacaucccc

SEQ ID NO: 2080254 - RNA, 19 nt, Artificial Sequence
  Description of Artificial Sequence: Synthetic oligonucleotide
gcauuacguuccguuucag

SEQ ID NO: 2080255 - RNA, 19 nt, Artificial Sequence
  Description of Artificial Sequence: Synthetic oligonucleotide
guucggcuuguacgacauc

SEQ ID NO: 2080256 - RNA, 19 nt, Artificial Sequence
  Description of Artificial Sequence: Synthetic oligonucleotide
gcuugguagguuggggaga

SEQ ID NO: 2080257 - RNA, 19 nt, Artificial Sequence
  Description of Artificial Sequence: Synthetic oligonucleotide
cauccccgcgggcggcggg

SEQ ID NO: 2080258 - RNA, 19 nt, Artificial Sequence
  Description of Artificial Sequence: Synthetic oligonucleotide
aagcuccgugaagcagggu

SEQ ID NO: 2080259 - RNA, 19 nt, Artificial Sequence
  Description of Artificial Sequence: Synthetic oligonucleotide
ggagauuaaaggggacacu

SEQ ID NO: 2080260 - RNA, 19 nt, Artificial Sequence
  Description of Artificial Sequence: Synthetic oligonucleotide
cguuccguuucagccaagc

SEQ ID NO: 2080261 - RNA, 19 nt, Artificial Sequence
  Description of Artificial Sequence: Synthetic oligonucleotide
ggggcuaggaccuggcauu

SEQ ID NO: 2080262 - RNA, 19 nt, Artificial Sequence
  Description of Artificial Sequence: Synthetic oligonucleotide
gcgauauugggaggauguc

SEQ ID NO: 2080263 - RNA, 19 nt, Artificial Sequence
  Description of Artificial Sequence: Synthetic oligonucleotide
ggcgcucuugcucccugca

SEQ ID NO: 2080264 - RNA, 19 nt, Artificial Sequence
  Description of Artificial Sequence: Synthetic oligonucleotide
gggcgcuugguagguuggg

SEQ ID NO: 2080265 - RNA, 19 nt, Artificial Sequence
  Description of Artificial Sequence: Synthetic oligonucleotide
acgguggcccauagucacu

SEQ ID NO: 2080266 - RNA, 19 nt, Artificial Sequence
  Description of Artificial Sequence: Synthetic oligonucleotide
cguuucagccaagcacucc

SEQ ID NO: 2080267 - RNA, 19 nt, Artificial Sequence
  Description of Artificial Sequence: Synthetic oligonucleotide
cuagugacgguggcccaua

SEQ ID NO: 2080268 - RNA, 19 nt, Artificial Sequence
  Description of Artificial Sequence: Synthetic oligonucleotide
ccguuucagccaagcacuc

SEQ ID NO: 2080269 - RNA, 19 nt, Artificial Sequence
  Description of Artificial Sequence: Synthetic oligonucleotide
ggaucguuccuaacuacuu

SEQ ID NO: 2080270 - RNA, 19 nt, Artificial Sequence
  Description of Artificial Sequence: Synthetic oligonucleotide
accuggcauuacguuccgu

SEQ ID NO: 2080271 - RNA, 19 nt, Artificial Sequence
  Description of Artificial Sequence: Synthetic oligonucleotide
ccuggcauuacguuccguu

SEQ ID NO: 2080272 - RNA, 19 nt, Artificial Sequence
  Description of Artificial Sequence: Synthetic oligonucleotide
gguguagccuagugacggu

SEQ ID NO: 2080273 - RNA, 19 nt, Artificial Sequence
  Description of Artificial Sequence: Synthetic oligonucleotide
gguggcccauagucacuca

SEQ ID NO: 2080274 - RNA, 19 nt, Artificial Sequence
  Description of Artificial Sequence: Synthetic oligonucleotide
gugcgcggucaaguucggc

SEQ ID NO: 2080275 - RNA, 19 nt, Artificial Sequence
  Description of Artificial Sequence: Synthetic oligonucleotide
gggcaugugcgcggucaag

SEQ ID NO: 2080276 - RNA, 19 nt, Artificial Sequence
  Description of Artificial Sequence: Synthetic oligonucleotide
uugguagguuggggagauu

SEQ ID NO: 2080277 - RNA, 19 nt, Artificial Sequence
  Description of Artificial Sequence: Synthetic oligonucleotide
ggaaaacuacugccauuuu

SEQ ID NO: 2080278 - RNA, 19 nt, Artificial Sequence
  Description of Artificial Sequence: Synthetic oligonucleotide
cugcauaagugggucugau

SEQ ID NO: 2080279 - RNA, 19 nt, Artificial Sequence
  Description of Artificial Sequence: Synthetic oligonucleotide
cuccgugaagcagggucua

SEQ ID NO: 2080280 - RNA, 19 nt, Artificial Sequence
  Description of Artificial Sequence: Synthetic oligonucleotide
gcaacgguuucaguuguuu

SEQ ID NO: 2080281 - RNA, 19 nt, Artificial Sequence
  Description of Artificial Sequence: Synthetic oligonucleotide
ggcuaggaccuggcauuac

SEQ ID NO: 2080282 - RNA, 19 nt, Artificial Sequence
  Description of Artificial Sequence: Synthetic oligonucleotide
ccauggcaggaaaacuacu

SEQ ID NO: 2080283 - RNA, 19 nt, Artificial Sequence
  Description of Artificial Sequence: Synthetic oligonucleotide
cgcggucaaguucggcuug

SEQ ID NO: 2080284 - RNA, 19 nt, Artificial Sequence
  Description of Artificial Sequence: Synthetic oligonucleotide
ggaugucgccaugcuagua

SEQ ID NO: 2080285 - RNA, 19 nt, Artificial Sequence
  Description of Artificial Sequence: Synthetic oligonucleotide
uuccggcguugagggcggc

SEQ ID NO: 2080286 - RNA, 19 nt, Artificial Sequence
  Description of Artificial Sequence: Synthetic oligonucleotide
gguuggggagauuguucuu

SEQ ID NO: 2080287 - RNA, 19 nt, Artificial Sequence
  Description of Artificial Sequence: Synthetic oligonucleotide
gcaugugcgcggucaaguu

SEQ ID NO: 2080288 - RNA, 19 nt, Artificial Sequence
  Description of Artificial Sequence: Synthetic oligonucleotide
cauuugcagggcgcuuggu

SEQ ID NO: 2080289 - RNA, 19 nt, Artificial Sequence
  Description of Artificial Sequence: Synthetic oligonucleotide
cggaacugagaucuacagu

SEQ ID NO: 2080290 - RNA, 19 nt, Artificial Sequence
  Description of Artificial Sequence: Synthetic oligonucleotide
augccucguuuuagucuuu

SEQ ID NO: 2080291 - RNA, 19 nt, Artificial Sequence
  Description of Artificial Sequence: Synthetic oligonucleotide
cuggcgauauugggaggau

SEQ ID NO: 2080292 - RNA, 19 nt, Artificial Sequence
  Description of Artificial Sequence: Synthetic oligonucleotide
gcgggcggcgggcgcgccg

SEQ ID NO: 2080293 - RNA, 19 nt, Artificial Sequence
  Description of Artificial Sequence: Synthetic oligonucleotide
gcgcggucaaguucggcuu

SEQ ID NO: 2080294 - RNA, 19 nt, Artificial Sequence
  Description of Artificial Sequence: Synthetic oligonucleotide
gggcuaggaccuggcauua

SEQ ID NO: 2080295 - RNA, 19 nt, Artificial Sequence
  Description of Artificial Sequence: Synthetic oligonucleotide
cauggcgcucuugcucccu

SEQ ID NO: 2080296 - RNA, 19 nt, Artificial Sequence
  Description of Artificial Sequence: Synthetic oligonucleotide
ccagcaguucugcguauuu

SEQ ID NO: 2080297 - RNA, 19 nt, Artificial Sequence
  Description of Artificial Sequence: Synthetic oligonucleotide
ggaagucaacuggggugau

SEQ ID NO: 2080298 - RNA, 19 nt, Artificial Sequence
  Description of Artificial Sequence: Synthetic oligonucleotide
gcggucaaguucggcuugu

SEQ ID NO: 2080299 - RNA, 19 nt, Artificial Sequence
  Description of Artificial Sequence: Synthetic oligonucleotide
ggcgggcaugugcgcgguc

SEQ ID NO: 2080300 - RNA, 19 nt, Artificial Sequence
  Description of Artificial Sequence: Synthetic oligonucleotide
ccuagugacgguggcccau

SEQ ID NO: 2080301 - RNA, 19 nt, Artificial Sequence
  Description of Artificial Sequence: Synthetic oligonucleotide
gccagcaguucugcguauu

SEQ ID NO: 2080302 - RNA, 19 nt, Artificial Sequence
  Description of Artificial Sequence: Synthetic oligonucleotide
ggguaucgagaugggccuu

SEQ ID NO: 2080303 - RNA, 19 nt, Artificial Sequence
  Description of Artificial Sequence: Synthetic oligonucleotide
cgggcaugugcgcggucaa

SEQ ID NO: 2080304 - RNA, 19 nt, Artificial Sequence
  Description of Artificial Sequence: Synthetic oligonucleotide
gcagggcgcuugguagguu

SEQ ID NO: 2080305 - RNA, 19 nt, Artificial Sequence
  Description of Artificial Sequence: Synthetic oligonucleotide
cggucaaguucggcuugua

SEQ ID NO: 2080306 - RNA, 19 nt, Artificial Sequence
  Description of Artificial Sequence: Synthetic oligonucleotide
cggcgggcaugugcgcggu

SEQ ID NO: 2080307 - RNA, 19 nt, Artificial Sequence
  Description of Artificial Sequence: Synthetic oligonucleotide
aauaacauuauuuuaagca

SEQ ID NO: 2080308 - RNA, 19 nt, Artificial Sequence
  Description of Artificial Sequence: Synthetic oligonucleotide
aauauuauauuaacaaacc

SEQ ID NO: 2080309 - RNA, 19 nt, Artificial Sequence
  Description of Artificial Sequence: Synthetic oligonucleotide
ugugauauaaccaaccagc

SEQ ID NO: 2080310 - RNA, 19 nt, Artificial Sequence
  Description of Artificial Sequence: Synthetic oligonucleotide
gauauaaccaaccagcuug

SEQ ID NO: 2080311 - RNA, 19 nt, Artificial Sequence
  Description of Artificial Sequence: Synthetic oligonucleotide
uauuauauuaacaaaccca

SEQ ID NO: 2080312 - RNA, 19 nt, Artificial Sequence
  Description of Artificial Sequence: Synthetic oligonucleotide
aauuuguucagcuaugucu

SEQ ID NO: 2080313 - RNA, 19 nt, Artificial Sequence
  Description of Artificial Sequence: Synthetic oligonucleotide
uauaguuugugauauaacc

SEQ ID NO: 2080314 - RNA, 19 nt, Artificial Sequence
  Description of Artificial Sequence: Synthetic oligonucleotide
auauuauauuaacaaaccc

SEQ ID NO: 2080315 - RNA, 19 nt, Artificial Sequence
  Description of Artificial Sequence: Synthetic oligonucleotide
uaauaaacaguaaauuuag

SEQ ID NO: 2080316 - RNA, 19 nt, Artificial Sequence
  Description of Artificial Sequence: Synthetic oligonucleotide
agagcaaaacacuaaaugg

SEQ ID NO: 2080317 - RNA, 19 nt, Artificial Sequence
  Description of Artificial Sequence: Synthetic oligonucleotide
aagauagcacauuauaauc

SEQ ID NO: 2080318 - RNA, 19 nt, Artificial Sequence
  Description of Artificial Sequence: Synthetic oligonucleotide
uaaucuaaaauuacaagga

SEQ ID NO: 2080319 - RNA, 19 nt, Artificial Sequence
  Description of Artificial Sequence: Synthetic oligonucleotide
uaaauuuagaugauauucc

SEQ ID NO: 2080320 - RNA, 19 nt, Artificial Sequence
  Description of Artificial Sequence: Synthetic oligonucleotide
uaggaaaucacuuguauag

SEQ ID NO: 2080321 - RNA, 19 nt, Artificial Sequence
  Description of Artificial Sequence: Synthetic oligonucleotide
uaguuuguaagcaacaccc

SEQ ID NO: 2080322 - RNA, 19 nt, Artificial Sequence
  Description of Artificial Sequence: Synthetic oligonucleotide
aacccaauuucuuuuggcc

SEQ ID NO: 2080323 - RNA, 19 nt, Artificial Sequence
  Description of Artificial Sequence: Synthetic oligonucleotide
agaugagggacccauagcc

SEQ ID NO: 2080324 - RNA, 19 nt, Artificial Sequence
  Description of Artificial Sequence: Synthetic oligonucleotide
aaggaaauuaacaaucagg

SEQ ID NO: 2080325 - RNA, 19 nt, Artificial Sequence
  Description of Artificial Sequence: Synthetic oligonucleotide
aggaaaauauuauauuaac

SEQ ID NO: 2080326 - RNA, 19 nt, Artificial Sequence
  Description of Artificial Sequence: Synthetic oligonucleotide
auuucuaaugaacaaaugu

SEQ ID NO: 2080327 - RNA, 19 nt, Artificial Sequence
  Description of Artificial Sequence: Synthetic oligonucleotide
uguuuuaagacacuuguaa

SEQ ID NO: 2080328 - RNA, 19 nt, Artificial Sequence
  Description of Artificial Sequence: Synthetic oligonucleotide
ugauauuccaauuaccugu

SEQ ID NO: 2080329 - RNA, 19 nt, Artificial Sequence
  Description of Artificial Sequence: Synthetic oligonucleotide
ugaauauguuuuaagacac

SEQ ID NO: 2080330 - RNA, 19 nt, Artificial Sequence
  Description of Artificial Sequence: Synthetic oligonucleotide
aauagaaucugcaaguuca

SEQ ID NO: 2080331 - RNA, 19 nt, Artificial Sequence
  Description of Artificial Sequence: Synthetic oligonucleotide
aagcauauauacuauaaaa

SEQ ID NO: 2080332 - RNA, 19 nt, Artificial Sequence
  Description of Artificial Sequence: Synthetic oligonucleotide
uauauuaacaaacccaauu

SEQ ID NO: 2080333 - RNA, 19 nt, Artificial Sequence
  Description of Artificial Sequence: Synthetic oligonucleotide
auuuuaagcauauauacua

SEQ ID NO: 2080334 - RNA, 19 nt, Artificial Sequence
  Description of Artificial Sequence: Synthetic oligonucleotide
agauaguuaggauugucac

SEQ ID NO: 2080335 - RNA, 19 nt, Artificial Sequence
  Description of Artificial Sequence: Synthetic oligonucleotide
aaaccuguauuucuaauga

SEQ ID NO: 2080336 - RNA, 19 nt, Artificial Sequence
  Description of Artificial Sequence: Synthetic oligonucleotide
uccuaauagaaucugcaag

SEQ ID NO: 2080337 - RNA, 19 nt, Artificial Sequence
  Description of Artificial Sequence: Synthetic oligonucleotide
uucaacaagggucacaacu

SEQ ID NO: 2080338 - RNA, 19 nt, Artificial Sequence
  Description of Artificial Sequence: Synthetic oligonucleotide
auaaccaaccagcuugucc

SEQ ID NO: 2080339 - RNA, 19 nt, Artificial Sequence
  Description of Artificial Sequence: Synthetic oligonucleotide
aaaagagaagagauguucg

SEQ ID NO: 2080340 - RNA, 19 nt, Artificial Sequence
  Description of Artificial Sequence: Synthetic oligonucleotide
aaaaugacuguuguaguuc

SEQ ID NO: 2080341 - RNA, 19 nt, Artificial Sequence
  Description of Artificial Sequence: Synthetic oligonucleotide
ucugaauauguuuuaagac

SEQ ID NO: 2080342 - RNA, 19 nt, Artificial Sequence
  Description of Artificial Sequence: Synthetic oligonucleotide
aauugaaaccuguauuucu

SEQ ID NO: 2080343 - RNA, 19 nt, Artificial Sequence
  Description of Artificial Sequence: Synthetic oligonucleotide
acaggacuaaugcugacgc

SEQ ID NO: 2080344 - RNA, 19 nt, Artificial Sequence
  Description of Artificial Sequence: Synthetic oligonucleotide
aaugaacaaauguucauau

SEQ ID NO: 2080345 - RNA, 19 nt, Artificial Sequence
  Description of Artificial Sequence: Synthetic oligonucleotide
aauuacaaggaaauuaaca

SEQ ID NO: 2080346 - RNA, 19 nt, Artificial Sequence
  Description of Artificial Sequence: Synthetic oligonucleotide
uauaauccaaggaaaauau

SEQ ID NO: 2080347 - RNA, 19 nt, Artificial Sequence
  Description of Artificial Sequence: Synthetic oligonucleotide
uccaauguagagcaaaaca

SEQ ID NO: 2080348 - RNA, 19 nt, Artificial Sequence
  Description of Artificial Sequence: Synthetic oligonucleotide
aaaagauauucuguguuuc

SEQ ID NO: 2080349 - RNA, 19 nt, Artificial Sequence
  Description of Artificial Sequence: Synthetic oligonucleotide
guaaauuuagaugauauuc

SEQ ID NO: 2080350 - RNA, 19 nt, Artificial Sequence
  Description of Artificial Sequence: Synthetic oligonucleotide
aacacccacauccuugugg

SEQ ID NO: 2080351 - RNA, 19 nt, Artificial Sequence
  Description of Artificial Sequence: Synthetic oligonucleotide
uucuaaugaacaaauguuc

SEQ ID NO: 2080352 - RNA, 19 nt, Artificial Sequence
  Description of Artificial Sequence: Synthetic oligonucleotide
aaccggcugauccagacgg

SEQ ID NO: 2080353 - RNA, 19 nt, Artificial Sequence
  Description of Artificial Sequence: Synthetic oligonucleotide
uuuaguuaggaaaucacuu

SEQ ID NO: 2080354 - RNA, 19 nt, Artificial Sequence
  Description of Artificial Sequence: Synthetic oligonucleotide
uuuccuaauagaaucugca

SEQ ID NO: 2080355 - RNA, 19 nt, Artificial Sequence
  Description of Artificial Sequence: Synthetic oligonucleotide
uuaguuaggaaaucacuug

SEQ ID NO: 2080356 - RNA, 19 nt, Artificial Sequence
  Description of Artificial Sequence: Synthetic oligonucleotide
uccaaggaaaauauuauau

SEQ ID NO: 2080357 - RNA, 19 nt, Artificial Sequence
  Description of Artificial Sequence: Synthetic oligonucleotide
aaauuuguucagcuauguc

SEQ ID NO: 2080358 - RNA, 19 nt, Artificial Sequence
  Description of Artificial Sequence: Synthetic oligonucleotide
ugugguaucuuuuggauaa

SEQ ID NO: 2080359 - RNA, 19 nt, Artificial Sequence
  Description of Artificial Sequence: Synthetic oligonucleotide
auaacauuauuuuaagcau

SEQ ID NO: 2080360 - RNA, 19 nt, Artificial Sequence
  Description of Artificial Sequence: Synthetic oligonucleotide
gaaaccuguauuucuaaug

SEQ ID NO: 2080361 - RNA, 19 nt, Artificial Sequence
  Description of Artificial Sequence: Synthetic oligonucleotide
aaugcugacgcgaguaacc

SEQ ID NO: 2080362 - RNA, 19 nt, Artificial Sequence
  Description of Artificial Sequence: Synthetic oligonucleotide
aaucuaaaauuacaaggaa

SEQ ID NO: 2080363 - RNA, 19 nt, Artificial Sequence
  Description of Artificial Sequence: Synthetic oligonucleotide
acauguuccaauguagagc

SEQ ID NO: 2080364 - RNA, 19 nt, Artificial Sequence
  Description of Artificial Sequence: Synthetic oligonucleotide
uaaauuugacuuuucauuu

SEQ ID NO: 2080365 - RNA, 19 nt, Artificial Sequence
  Description of Artificial Sequence: Synthetic oligonucleotide
uugugauauaaccaaccag

SEQ ID NO: 2080366 - RNA, 19 nt, Artificial Sequence
  Description of Artificial Sequence: Synthetic oligonucleotide
uuagaugauauuccaauua

SEQ ID NO: 2080367 - RNA, 19 nt, Artificial Sequence
  Description of Artificial Sequence: Synthetic oligonucleotide
uaaccaaccagcuuguccu

SEQ ID NO: 2080368 - RNA, 19 nt, Artificial Sequence
  Description of Artificial Sequence: Synthetic oligonucleotide
aaaacaggaagugaauuga

SEQ ID NO: 2080369 - RNA, 19 nt, Artificial Sequence
  Description of Artificial Sequence: Synthetic oligonucleotide
ugaauugaaaccuguauuu

SEQ ID NO: 2080370 - RNA, 19 nt, Artificial Sequence
  Description of Artificial Sequence: Synthetic oligonucleotide
ugucauuuaguuaggaaau

SEQ ID NO: 2080371 - RNA, 19 nt, Artificial Sequence
  Description of Artificial Sequence: Synthetic oligonucleotide
auauuaacaaacccaauuu

SEQ ID NO: 2080372 - RNA, 19 nt, Artificial Sequence
  Description of Artificial Sequence: Synthetic oligonucleotide
agcuaugucuuccagaggu

SEQ ID NO: 2080373 - RNA, 19 nt, Artificial Sequence
  Description of Artificial Sequence: Synthetic oligonucleotide
uguagagcaaaacacuaaa

SEQ ID NO: 2080374 - RNA, 19 nt, Artificial Sequence
  Description of Artificial Sequence: Synthetic oligonucleotide
uuaggauugucacauguuc

SEQ ID NO: 2080375 - RNA, 19 nt, Artificial Sequence
  Description of Artificial Sequence: Synthetic oligonucleotide
aaagagaagagauguucgu

SEQ ID NO: 2080376 - RNA, 19 nt, Artificial Sequence
  Description of Artificial Sequence: Synthetic oligonucleotide
ugacuuuucauuuaaucua

SEQ ID NO: 2080377 - RNA, 19 nt, Artificial Sequence
  Description of Artificial Sequence: Synthetic oligonucleotide
uuuaagacacuuguaauaa

SEQ ID NO: 2080378 - RNA, 19 nt, Artificial Sequence
  Description of Artificial Sequence: Synthetic oligonucleotide
gucagaacaggacuaaugc

SEQ ID NO: 2080379 - RNA, 19 nt, Artificial Sequence
  Description of Artificial Sequence: Synthetic oligonucleotide
uagcacauuauaauccaag

SEQ ID NO: 2080380 - RNA, 19 nt, Artificial Sequence
  Description of Artificial Sequence: Synthetic oligonucleotide
aaaugacuguuguaguucu

SEQ ID NO: 2080381 - RNA, 19 nt, Artificial Sequence
  Description of Artificial Sequence: Synthetic oligonucleotide
aggaaauuaacaaucaggu

SEQ ID NO: 2080382 - RNA, 19 nt, Artificial Sequence
  Description of Artificial Sequence: Synthetic oligonucleotide
caggaagugaauugaaacc

SEQ ID NO: 2080383 - RNA, 19 nt, Artificial Sequence
  Description of Artificial Sequence: Synthetic oligonucleotide
ugucuauuaccauauauuu

SEQ ID NO: 2080384 - RNA, 19 nt, Artificial Sequence
  Description of Artificial Sequence: Synthetic oligonucleotide
auuauauuaacaaacccaa

SEQ ID NO: 2080385 - RNA, 19 nt, Artificial Sequence
  Description of Artificial Sequence: Synthetic oligonucleotide
uuuugugguaucuuuugga

SEQ ID NO: 2080386 - RNA, 19 nt, Artificial Sequence
  Description of Artificial Sequence: Synthetic oligonucleotide
auuaccauauauuucuaau

SEQ ID NO: 2080387 - RNA, 19 nt, Artificial Sequence
  Description of Artificial Sequence: Synthetic oligonucleotide
uaguuugugauauaaccaa

SEQ ID NO: 2080388 - RNA, 19 nt, Artificial Sequence
  Description of Artificial Sequence: Synthetic oligonucleotide
uuuggccuaaauuugacuu

SEQ ID NO: 2080389 - RNA, 19 nt, Artificial Sequence
  Description of Artificial Sequence: Synthetic oligonucleotide
uuauaauccaaggaaaaua

SEQ ID NO: 2080390 - RNA, 19 nt, Artificial Sequence
  Description of Artificial Sequence: Synthetic oligonucleotide
uucuauuuuccuucuaaac

SEQ ID NO: 2080391 - RNA, 19 nt, Artificial Sequence
  Description of Artificial Sequence: Synthetic oligonucleotide
agagauguucgucugcauc

SEQ ID NO: 2080392 - RNA, 19 nt, Artificial Sequence
  Description of Artificial Sequence: Synthetic oligonucleotide
uguauuucuaaugaacaaa

SEQ ID NO: 2080393 - RNA, 19 nt, Artificial Sequence
  Description of Artificial Sequence: Synthetic oligonucleotide
uguauagcuucaauuuucu

SEQ ID NO: 2080394 - RNA, 19 nt, Artificial Sequence
  Description of Artificial Sequence: Synthetic oligonucleotide
gauagcacauuauaaucca

SEQ ID NO: 2080395 - RNA, 19 nt, Artificial Sequence
  Description of Artificial Sequence: Synthetic oligonucleotide
aacaggacuaaugcugacg

SEQ ID NO: 2080396 - RNA, 19 nt, Artificial Sequence
  Description of Artificial Sequence: Synthetic oligonucleotide
ucuuuuggccuaaauuuga

SEQ ID NO: 2080397 - RNA, 19 nt, Artificial Sequence
  Description of Artificial Sequence: Synthetic oligonucleotide
agaaucugcaaguucaaaa

SEQ ID NO: 2080398 - RNA, 19 nt, Artificial Sequence
  Description of Artificial Sequence: Synthetic oligonucleotide
auugucacauguuccaaug

SEQ ID NO: 2080399 - RNA, 19 nt, Artificial Sequence
  Description of Artificial Sequence: Synthetic oligonucleotide
auccagacggcgcaggcgc

SEQ ID NO: 2080400 - RNA, 19 nt, Artificial Sequence
  Description of Artificial Sequence: Synthetic oligonucleotide
aauauguuuuaagacacuu

SEQ ID NO: 2080401 - RNA, 19 nt, Artificial Sequence
  Description of Artificial Sequence: Synthetic oligonucleotide
uguucauaugucauuuagu

SEQ ID NO: 2080402 - RNA, 19 nt, Artificial Sequence
  Description of Artificial Sequence: Synthetic oligonucleotide
augauauuccaauuaccug

SEQ ID NO: 2080403 - RNA, 19 nt, Artificial Sequence
  Description of Artificial Sequence: Synthetic oligonucleotide
uuuguaagcaacaccccaa

SEQ ID NO: 2080404 - RNA, 19 nt, Artificial Sequence
  Description of Artificial Sequence: Synthetic oligonucleotide
agugaauugaaaccuguau

SEQ ID NO: 2080405 - RNA, 19 nt, Artificial Sequence
  Description of Artificial Sequence: Synthetic oligonucleotide
ucuggcacaaguuuccuaa

SEQ ID NO: 2080406 - RNA, 19 nt, Artificial Sequence
  Description of Artificial Sequence: Synthetic oligonucleotide
aguuaggauugucacaugu

SEQ ID NO: 2080407 - RNA, 19 nt, Artificial Sequence
  Description of Artificial Sequence: Synthetic oligonucleotide
uucuaaacguuccuuuacu

SEQ ID NO: 2080408 - RNA, 19 nt, Artificial Sequence
  Description of Artificial Sequence: Synthetic oligonucleotide
guaauaaacaguaaauuua

SEQ ID NO: 2080409 - RNA, 19 nt, Artificial Sequence
  Description of Artificial Sequence: Synthetic oligonucleotide
ucacauguuccaauguaga

SEQ ID NO: 2080410 - RNA, 19 nt, Artificial Sequence
  Description of Artificial Sequence: Synthetic oligonucleotide
accuguauuucuaaugaac

SEQ ID NO: 2080411 - RNA, 19 nt, Artificial Sequence
  Description of Artificial Sequence: Synthetic oligonucleotide
gacuguuguaguucuguag

SEQ ID NO: 2080412 - RNA, 19 nt, Artificial Sequence
  Description of Artificial Sequence: Synthetic oligonucleotide
uacuaagguucuauuuucc

SEQ ID NO: 2080413 - RNA, 19 nt, Artificial Sequence
  Description of Artificial Sequence: Synthetic oligonucleotide
accaagauaguuaggauug

SEQ ID NO: 2080414 - RNA, 19 nt, Artificial Sequence
  Description of Artificial Sequence: Synthetic oligonucleotide
agggucacaacucuuccag

SEQ ID NO: 2080415 - RNA, 19 nt, Artificial Sequence
  Description of Artificial Sequence: Synthetic oligonucleotide
uuugugguaucuuuuggau

SEQ ID NO: 2080416 - RNA, 19 nt, Artificial Sequence
  Description of Artificial Sequence: Synthetic oligonucleotide
caaucaggugucuauuacc

SEQ ID NO: 2080417 - RNA, 19 nt, Artificial Sequence
  Description of Artificial Sequence: Synthetic oligonucleotide
uuuaagcauauauacuaua

SEQ ID NO: 2080418 - RNA, 19 nt, Artificial Sequence
  Description of Artificial Sequence: Synthetic oligonucleotide
aaauuugacuuuucauuua

SEQ ID NO: 2080419 - RNA, 19 nt, Artificial Sequence
  Description of Artificial Sequence: Synthetic oligonucleotide
gauaguuaggauugucaca

SEQ ID NO: 2080420 - RNA, 19 nt, Artificial Sequence
  Description of Artificial Sequence: Synthetic oligonucleotide
auccuuguggacccuggcc

SEQ ID NO: 2080421 - RNA, 19 nt, Artificial Sequence
  Description of Artificial Sequence: Synthetic oligonucleotide
uuaggaaaucacuuguaua

SEQ ID NO: 2080422 - RNA, 19 nt, Artificial Sequence
  Description of Artificial Sequence: Synthetic oligonucleotide
ucuucaacaagggucacaa

SEQ ID NO: 2080423 - RNA, 19 nt, Artificial Sequence
  Description of Artificial Sequence: Synthetic oligonucleotide
aggaaaucacuuguauagc

SEQ ID NO: 2080424 - RNA, 19 nt, Artificial Sequence
  Description of Artificial Sequence: Synthetic oligonucleotide
uaugucauuuaguuaggaa

SEQ ID NO: 2080425 - RNA, 19 nt, Artificial Sequence
  Description of Artificial Sequence: Synthetic oligonucleotide
cuuuccuacugguaguuug

SEQ ID NO: 2080426 - RNA, 19 nt, Artificial Sequence
  Description of Artificial Sequence: Synthetic oligonucleotide
gaagauagcacauuauaau

SEQ ID NO: 2080427 - RNA, 19 nt, Artificial Sequence
  Description of Artificial Sequence: Synthetic oligonucleotide
cuacugguaguuuguaagc

SEQ ID NO: 2080428 - RNA, 19 nt, Artificial Sequence
  Description of Artificial Sequence: Synthetic oligonucleotide
aacaugguuccuccaauaa

SEQ ID NO: 2080429 - RNA, 19 nt, Artificial Sequence
  Description of Artificial Sequence: Synthetic oligonucleotide
auaguuugugauauaacca

SEQ ID NO: 2080430 - RNA, 19 nt, Artificial Sequence
  Description of Artificial Sequence: Synthetic oligonucleotide
ucuguagccuccuuucucu

SEQ ID NO: 2080431 - RNA, 19 nt, Artificial Sequence
  Description of Artificial Sequence: Synthetic oligonucleotide
cauguaaggcgcaaagcac

SEQ ID NO: 2080432 - RNA, 19 nt, Artificial Sequence
  Description of Artificial Sequence: Synthetic oligonucleotide
ccaauguagagcaaaacac

SEQ ID NO: 2080433 - RNA, 19 nt, Artificial Sequence
  Description of Artificial Sequence: Synthetic oligonucleotide
uguaugcaaaucuucugaa

SEQ ID NO: 2080434 - RNA, 19 nt, Artificial Sequence
  Description of Artificial Sequence: Synthetic oligonucleotide
aacaccccaaacacugccc

SEQ ID NO: 2080435 - RNA, 19 nt, Artificial Sequence
  Description of Artificial Sequence: Synthetic oligonucleotide
cuauaguuugugauauaac

SEQ ID NO: 2080436 - RNA, 19 nt, Artificial Sequence
  Description of Artificial Sequence: Synthetic oligonucleotide
auuuaguuaggaaaucacu

SEQ ID NO: 2080437 - RNA, 19 nt, Artificial Sequence
  Description of Artificial Sequence: Synthetic oligonucleotide
gauauuccaauuaccugug

SEQ ID NO: 2080438 - RNA, 19 nt, Artificial Sequence
  Description of Artificial Sequence: Synthetic oligonucleotide
ugaagucaagguauguuuu

SEQ ID NO: 2080439 - RNA, 19 nt, Artificial Sequence
  Description of Artificial Sequence: Synthetic oligonucleotide
acuaagguucuauuuuccu

SEQ ID NO: 2080440 - RNA, 19 nt, Artificial Sequence
  Description of Artificial Sequence: Synthetic oligonucleotide
aggaccaagauaguuagga

SEQ ID NO: 2080441 - RNA, 19 nt, Artificial Sequence
  Description of Artificial Sequence: Synthetic oligonucleotide
cacauguuccaauguagag

SEQ ID NO: 2080442 - RNA, 19 nt, Artificial Sequence
  Description of Artificial Sequence: Synthetic oligonucleotide
uuauauuaacaaacccaau

SEQ ID NO: 2080443 - RNA, 19 nt, Artificial Sequence
  Description of Artificial Sequence: Synthetic oligonucleotide
ugucacauguuccaaugua

SEQ ID NO: 2080444 - RNA, 19 nt, Artificial Sequence
  Description of Artificial Sequence: Synthetic oligonucleotide
aguuugugauauaaccaac

SEQ ID NO: 2080445 - RNA, 19 nt, Artificial Sequence
  Description of Artificial Sequence: Synthetic oligonucleotide
uuuccuacugguaguuugu

SEQ ID NO: 2080446 - RNA, 19 nt, Artificial Sequence
  Description of Artificial Sequence: Synthetic oligonucleotide
uggaccagcugcauuaaaa

SEQ ID NO: 2080447 - RNA, 19 nt, Artificial Sequence
  Description of Artificial Sequence: Synthetic oligonucleotide
uuuuggccuaaauuugacu

SEQ ID NO: 2080448 - RNA, 19 nt, Artificial Sequence
  Description of Artificial Sequence: Synthetic oligonucleotide
aguuuguaagcaacacccc

SEQ ID NO: 2080449 - RNA, 19 nt, Artificial Sequence
  Description of Artificial Sequence: Synthetic oligonucleotide
augaacaaauguucauaug

SEQ ID NO: 2080450 - RNA, 19 nt, Artificial Sequence
  Description of Artificial Sequence: Synthetic oligonucleotide
cugguaguuuguaagcaac

SEQ ID NO: 2080451 - RNA, 19 nt, Artificial Sequence
  Description of Artificial Sequence: Synthetic oligonucleotide
uuuccuucuaaacguuccu

SEQ ID NO: 2080452 - RNA, 19 nt, Artificial Sequence
  Description of Artificial Sequence: Synthetic oligonucleotide
uucauaugucauuuaguua

SEQ ID NO: 2080453 - RNA, 19 nt, Artificial Sequence
  Description of Artificial Sequence: Synthetic oligonucleotide
auuauaauccaaggaaaau

SEQ ID NO: 2080454 - RNA, 19 nt, Artificial Sequence
  Description of Artificial Sequence: Synthetic oligonucleotide
acacuuguaauaaacagua

SEQ ID NO: 2080455 - RNA, 19 nt, Artificial Sequence
  Description of Artificial Sequence: Synthetic oligonucleotide
agaagcgccggcuauaguu

SEQ ID NO: 2080456 - RNA, 19 nt, Artificial Sequence
  Description of Artificial Sequence: Synthetic oligonucleotide
uucagcuaugucuuccaga

SEQ ID NO: 2080457 - RNA, 19 nt, Artificial Sequence
  Description of Artificial Sequence: Synthetic oligonucleotide
cuauuuuccuucuaaacgu

SEQ ID NO: 2080458 - RNA, 19 nt, Artificial Sequence
  Description of Artificial Sequence: Synthetic oligonucleotide
auagccaaacacccacauc

SEQ ID NO: 2080459 - RNA, 19 nt, Artificial Sequence
  Description of Artificial Sequence: Synthetic oligonucleotide
ggcacaaguuuccuaauag

SEQ ID NO: 2080460 - RNA, 19 nt, Artificial Sequence
  Description of Artificial Sequence: Synthetic oligonucleotide
augcaaaucuucugaauau

SEQ ID NO: 2080461 - RNA, 19 nt, Artificial Sequence
  Description of Artificial Sequence: Synthetic oligonucleotide
gacccauagccaaacaccc

SEQ ID NO: 2080462 - RNA, 19 nt, Artificial Sequence
  Description of Artificial Sequence: Synthetic oligonucleotide
ugcaaaucuucugaauaug

SEQ ID NO: 2080463 - RNA, 19 nt, Artificial Sequence
  Description of Artificial Sequence: Synthetic oligonucleotide
uuccuaauagaaucugcaa

SEQ ID NO: 2080464 - RNA, 19 nt, Artificial Sequence
  Description of Artificial Sequence: Synthetic oligonucleotide
cacaaguuuccuaauagaa

SEQ ID NO: 2080465 - RNA, 19 nt, Artificial Sequence
  Description of Artificial Sequence: Synthetic oligonucleotide
agaagauagcacauuauaa

SEQ ID NO: 2080466 - RNA, 19 nt, Artificial Sequence
  Description of Artificial Sequence: Synthetic oligonucleotide
acccaauuucuuuuggccu

SEQ ID NO: 2080467 - RNA, 19 nt, Artificial Sequence
  Description of Artificial Sequence: Synthetic oligonucleotide
cacgccucauguaaggcgc

SEQ ID NO: 2080468 - RNA, 19 nt, Artificial Sequence
  Description of Artificial Sequence: Synthetic oligonucleotide
aaguuuccuaauagaaucu

SEQ ID NO: 2080469 - RNA, 19 nt, Artificial Sequence
  Description of Artificial Sequence: Synthetic oligonucleotide
uaaccggcugauccagacg

SEQ ID NO: 2080470 - RNA, 19 nt, Artificial Sequence
  Description of Artificial Sequence: Synthetic oligonucleotide
ugauauaaccaaccagcuu

SEQ ID NO: 2080471 - RNA, 19 nt, Artificial Sequence
  Description of Artificial Sequence: Synthetic oligonucleotide
gucacauguuccaauguag

SEQ ID NO: 2080472 - RNA, 19 nt, Artificial Sequence
  Description of Artificial Sequence: Synthetic oligonucleotide
acuuggaccagcugcauua

SEQ ID NO: 2080473 - RNA, 19 nt, Artificial Sequence
  Description of Artificial Sequence: Synthetic oligonucleotide
ccuacugguaguuuguaag

SEQ ID NO: 2080474 - RNA, 19 nt, Artificial Sequence
  Description of Artificial Sequence: Synthetic oligonucleotide
aaacaugguuccuccaaua

SEQ ID NO: 2080475 - RNA, 19 nt, Artificial Sequence
  Description of Artificial Sequence: Synthetic oligonucleotide
cuuuuggccuaaauuugac

SEQ ID NO: 2080476 - RNA, 19 nt, Artificial Sequence
  Description of Artificial Sequence: Synthetic oligonucleotide
uguaagcaacaccccaaac

SEQ ID NO: 2080477 - RNA, 19 nt, Artificial Sequence
  Description of Artificial Sequence: Synthetic oligonucleotide
gaauugaaaccuguauuuc

SEQ ID NO: 2080478 - RNA, 19 nt, Artificial Sequence
  Description of Artificial Sequence: Synthetic oligonucleotide
cuguaugcaaaucuucuga

SEQ ID NO: 2080479 - RNA, 19 nt, Artificial Sequence
  Description of Artificial Sequence: Synthetic oligonucleotide
auauguuuuaagacacuug

SEQ ID NO: 2080480 - RNA, 19 nt, Artificial Sequence
  Description of Artificial Sequence: Synthetic oligonucleotide
ugugcuacuaagguucuau

SEQ ID NO: 2080481 - RNA, 19 nt, Artificial Sequence
  Description of Artificial Sequence: Synthetic oligonucleotide
acacccacauccuugugga

SEQ ID NO: 2080482 - RNA, 19 nt, Artificial Sequence
  Description of Artificial Sequence: Synthetic oligonucleotide
uuccaauuaccugugugcu

SEQ ID NO: 2080483 - RNA, 19 nt, Artificial Sequence
  Description of Artificial Sequence: Synthetic oligonucleotide
guucauaugucauuuaguu

SEQ ID NO: 2080484 - RNA, 19 nt, Artificial Sequence
  Description of Artificial Sequence: Synthetic oligonucleotide
uugccgggaacccacggug

SEQ ID NO: 2080485 - RNA, 19 nt, Artificial Sequence
  Description of Artificial Sequence: Synthetic oligonucleotide
aacguuccuuuacuaauuu

SEQ ID NO: 2080486 - RNA, 19 nt, Artificial Sequence
  Description of Artificial Sequence: Synthetic oligonucleotide
guuguaguucuguagccuc

SEQ ID NO: 2080487 - RNA, 19 nt, Artificial Sequence
  Description of Artificial Sequence: Synthetic oligonucleotide
uuaagacacuuguaauaaa

SEQ ID NO: 2080488 - RNA, 19 nt, Artificial Sequence
  Description of Artificial Sequence: Synthetic oligonucleotide
aaccuguauuucuaaugaa

SEQ ID NO: 2080489 - RNA, 19 nt, Artificial Sequence
  Description of Artificial Sequence: Synthetic oligonucleotide
cuaugucuuccagaggugc

SEQ ID NO: 2080490 - RNA, 19 nt, Artificial Sequence
  Description of Artificial Sequence: Synthetic oligonucleotide
aggagaagauagcacauua

SEQ ID NO: 2080491 - RNA, 19 nt, Artificial Sequence
  Description of Artificial Sequence: Synthetic oligonucleotide
acaaggaaauuaacaauca

SEQ ID NO: 2080492 - RNA, 19 nt, Artificial Sequence
  Description of Artificial Sequence: Synthetic oligonucleotide
aggacuaaugcugacgcga

SEQ ID NO: 2080493 - RNA, 19 nt, Artificial Sequence
  Description of Artificial Sequence: Synthetic oligonucleotide
ugaaaccuguauuucuaau

SEQ ID NO: 2080494 - RNA, 19 nt, Artificial Sequence
  Description of Artificial Sequence: Synthetic oligonucleotide
ugcuacuaagguucuauuu

SEQ ID NO: 2080495 - RNA, 19 nt, Artificial Sequence
  Description of Artificial Sequence: Synthetic oligonucleotide
guuuccuaauagaaucugc

SEQ ID NO: 2080496 - RNA, 19 nt, Artificial Sequence
  Description of Artificial Sequence: Synthetic oligonucleotide
uauuuuccuucuaaacguu

SEQ ID NO: 2080497 - RNA, 19 nt, Artificial Sequence
  Description of Artificial Sequence: Synthetic oligonucleotide
ugcugccuugccagaagcg

SEQ ID NO: 2080498 - RNA, 19 nt, Artificial Sequence
  Description of Artificial Sequence: Synthetic oligonucleotide
ucuucugaauauguuuuaa

SEQ ID NO: 2080499 - RNA, 19 nt, Artificial Sequence
  Description of Artificial Sequence: Synthetic oligonucleotide
gagauguucgucugcaucu

SEQ ID NO: 2080500 - RNA, 19 nt, Artificial Sequence
  Description of Artificial Sequence: Synthetic oligonucleotide
uguucgucugcaucuucug

SEQ ID NO: 2080501 - RNA, 19 nt, Artificial Sequence
  Description of Artificial Sequence: Synthetic oligonucleotide
uucuguagccuccuuucuc

SEQ ID NO: 2080502 - RNA, 19 nt, Artificial Sequence
  Description of Artificial Sequence: Synthetic oligonucleotide
uugucacauguuccaaugu

SEQ ID NO: 2080503 - RNA, 19 nt, Artificial Sequence
  Description of Artificial Sequence: Synthetic oligonucleotide
gaagagauguucgucugca

SEQ ID NO: 2080504 - RNA, 19 nt, Artificial Sequence
  Description of Artificial Sequence: Synthetic oligonucleotide
caagggucacaacucuucc

SEQ ID NO: 2080505 - RNA, 19 nt, Artificial Sequence
  Description of Artificial Sequence: Synthetic oligonucleotide
cuuucuaauaaaaugccuu

SEQ ID NO: 2080506 - RNA, 19 nt, Artificial Sequence
  Description of Artificial Sequence: Synthetic oligonucleotide
ggucacaacucuuccaggc

SEQ ID NO: 2080507 - RNA, 19 nt, Artificial Sequence
  Description of Artificial Sequence: Synthetic oligonucleotide
caacaccccaaacacugcc

SEQ ID NO: 2080508 - RNA, 19 nt, Artificial Sequence
  Description of Artificial Sequence: Synthetic oligonucleotide
gcgaguaaccggcugaucc

SEQ ID NO: 2080509 - RNA, 19 nt, Artificial Sequence
  Description of Artificial Sequence: Synthetic oligonucleotide
uccuucuaaacguuccuuu

SEQ ID NO: 2080510 - RNA, 19 nt, Artificial Sequence
  Description of Artificial Sequence: Synthetic oligonucleotide
ucugaagucaagguauguu

SEQ ID NO: 2080511 - RNA, 19 nt, Artificial Sequence
  Description of Artificial Sequence: Synthetic oligonucleotide
aacaguaaauuuagaugau

SEQ ID NO: 2080512 - RNA, 19 nt, Artificial Sequence
  Description of Artificial Sequence: Synthetic oligonucleotide
acaugguuccuccaauaaa

SEQ ID NO: 2080513 - RNA, 19 nt, Artificial Sequence
  Description of Artificial Sequence: Synthetic oligonucleotide
auuaccugugugcuacuaa

SEQ ID NO: 2080514 - RNA, 19 nt, Artificial Sequence
  Description of Artificial Sequence: Synthetic oligonucleotide
ugauccagacggcgcaggc

SEQ ID NO: 2080515 - RNA, 19 nt, Artificial Sequence
  Description of Artificial Sequence: Synthetic oligonucleotide
uucuaauaaaaugccuuuu

SEQ ID NO: 2080516 - RNA, 19 nt, Artificial Sequence
  Description of Artificial Sequence: Synthetic oligonucleotide
auguaaggcgcaaagcaca

SEQ ID NO: 2080517 - RNA, 19 nt, Artificial Sequence
  Description of Artificial Sequence: Synthetic oligonucleotide
guagccuccuuucucucug

SEQ ID NO: 2080518 - RNA, 19 nt, Artificial Sequence
  Description of Artificial Sequence: Synthetic oligonucleotide
caauguagagcaaaacacu

SEQ ID NO: 2080519 - RNA, 19 nt, Artificial Sequence
  Description of Artificial Sequence: Synthetic oligonucleotide
guuuuaagacacuuguaau

SEQ ID NO: 2080520 - RNA, 19 nt, Artificial Sequence
  Description of Artificial Sequence: Synthetic oligonucleotide
augcugacgcgaguaaccg

SEQ ID NO: 2080521 - RNA, 19 nt, Artificial Sequence
  Description of Artificial Sequence: Synthetic oligonucleotide
ugcugacgcgaguaaccgg

SEQ ID NO: 2080522 - RNA, 19 nt, Artificial Sequence
  Description of Artificial Sequence: Synthetic oligonucleotide
ccuguauuucuaaugaaca

SEQ ID NO: 2080523 - RNA, 19 nt, Artificial Sequence
  Description of Artificial Sequence: Synthetic oligonucleotide
aaacguuccuuuacuaauu

SEQ ID NO: 2080524 - RNA, 19 nt, Artificial Sequence
  Description of Artificial Sequence: Synthetic oligonucleotide
ugguaggggaaguccaccu

SEQ ID NO: 2080525 - RNA, 19 nt, Artificial Sequence
  Description of Artificial Sequence: Synthetic oligonucleotide
aacccacgguggucagugc

SEQ ID NO: 2080526 - RNA, 19 nt, Artificial Sequence
  Description of Artificial Sequence: Synthetic oligonucleotide
caguaaauuuagaugauau

SEQ ID NO: 2080527 - RNA, 19 nt, Artificial Sequence
  Description of Artificial Sequence: Synthetic oligonucleotide
ugccgggaacccacggugg

SEQ ID NO: 2080528 - RNA, 19 nt, Artificial Sequence
  Description of Artificial Sequence: Synthetic oligonucleotide
uaaugcugacgcgaguaac

SEQ ID NO: 2080529 - RNA, 19 nt, Artificial Sequence
  Description of Artificial Sequence: Synthetic oligonucleotide
guaaccggcugauccagac

SEQ ID NO: 2080530 - RNA, 19 nt, Artificial Sequence
  Description of Artificial Sequence: Synthetic oligonucleotide
agcaaaacacuaaaugguu

SEQ ID NO: 2080531 - RNA, 19 nt, Artificial Sequence
  Description of Artificial Sequence: Synthetic oligonucleotide
guaggggaaguccaccuuc

SEQ ID NO: 2080532 - RNA, 19 nt, Artificial Sequence
  Description of Artificial Sequence: Synthetic oligonucleotide
uuggccuaaauuugacuuu

SEQ ID NO: 2080533 - RNA, 19 nt, Artificial Sequence
  Description of Artificial Sequence: Synthetic oligonucleotide
auauuucuaauaacauuau

SEQ ID NO: 2080534 - RNA, 19 nt, Artificial Sequence
  Description of Artificial Sequence: Synthetic oligonucleotide
ggacccauagccaaacacc

SEQ ID NO: 2080535 - RNA, 19 nt, Artificial Sequence
  Description of Artificial Sequence: Synthetic oligonucleotide
aagcgccggcuauaguuug

SEQ ID NO: 2080536 - RNA, 19 nt, Artificial Sequence
  Description of Artificial Sequence: Synthetic oligonucleotide
gaccaagauaguuaggauu

SEQ ID NO: 2080537 - RNA, 19 nt, Artificial Sequence
  Description of Artificial Sequence: Synthetic oligonucleotide
gaguaaccggcugauccag

SEQ ID NO: 2080538 - RNA, 19 nt, Artificial Sequence
  Description of Artificial Sequence: Synthetic oligonucleotide
gugaauugaaaccuguauu

SEQ ID NO: 2080539 - RNA, 19 nt, Artificial Sequence
  Description of Artificial Sequence: Synthetic oligonucleotide
ggaucuucaacaaggguca

SEQ ID NO: 2080540 - RNA, 19 nt, Artificial Sequence
  Description of Artificial Sequence: Synthetic oligonucleotide
cagaugagggacccauagc

SEQ ID NO: 2080541 - RNA, 19 nt, Artificial Sequence
  Description of Artificial Sequence: Synthetic oligonucleotide
uccuacugguaguuuguaa

SEQ ID NO: 2080542 - RNA, 19 nt, Artificial Sequence
  Description of Artificial Sequence: Synthetic oligonucleotide
aagagauguucgucugcau

SEQ ID NO: 2080543 - RNA, 19 nt, Artificial Sequence
  Description of Artificial Sequence: Synthetic oligonucleotide
auaugucauuuaguuagga

SEQ ID NO: 2080544 - RNA, 19 nt, Artificial Sequence
  Description of Artificial Sequence: Synthetic oligonucleotide
caggacuaaugcugacgcg

SEQ ID NO: 2080545 - RNA, 19 nt, Artificial Sequence
  Description of Artificial Sequence: Synthetic oligonucleotide
guucagcuaugucuuccag

SEQ ID NO: 2080546 - RNA, 19 nt, Artificial Sequence
  Description of Artificial Sequence: Synthetic oligonucleotide
ccaaacacccacauccuug

SEQ ID NO: 2080547 - RNA, 19 nt, Artificial Sequence
  Description of Artificial Sequence: Synthetic oligonucleotide
gacgcgaguaaccggcuga

SEQ ID NO: 2080548 - RNA, 19 nt, Artificial Sequence
  Description of Artificial Sequence: Synthetic oligonucleotide
acaguaaauuuagaugaua

SEQ ID NO: 2080549 - RNA, 19 nt, Artificial Sequence
  Description of Artificial Sequence: Synthetic oligonucleotide
gguaguuuguaagcaacac

SEQ ID NO: 2080550 - RNA, 19 nt, Artificial Sequence
  Description of Artificial Sequence: Synthetic oligonucleotide
gggaaguccaccuuccaga

SEQ ID NO: 2080551 - RNA, 19 nt, Artificial Sequence
  Description of Artificial Sequence: Synthetic oligonucleotide
caagauaguuaggauuguc

SEQ ID NO: 2080552 - RNA, 19 nt, Artificial Sequence
  Description of Artificial Sequence: Synthetic oligonucleotide
auauaaccaaccagcuugu

SEQ ID NO: 2080553 - RNA, 19 nt, Artificial Sequence
  Description of Artificial Sequence: Synthetic oligonucleotide
ccaauuaccugugugcuac

SEQ ID NO: 2080554 - RNA, 19 nt, Artificial Sequence
  Description of Artificial Sequence: Synthetic oligonucleotide
ugacuguuguaguucugua

SEQ ID NO: 2080555 - RNA, 19 nt, Artificial Sequence
  Description of Artificial Sequence: Synthetic oligonucleotide
ugacgcgaguaaccggcug

SEQ ID NO: 2080556 - RNA, 19 nt, Artificial Sequence
  Description of Artificial Sequence: Synthetic oligonucleotide
aagugaauugaaaccugua

SEQ ID NO: 2080557 - RNA, 19 nt, Artificial Sequence
  Description of Artificial Sequence: Synthetic oligonucleotide
cuaaugaacaaauguucau

SEQ ID NO: 2080558 - RNA, 19 nt, Artificial Sequence
  Description of Artificial Sequence: Synthetic oligonucleotide
aauuaccugugugcuacua

SEQ ID NO: 2080559 - RNA, 19 nt, Artificial Sequence
  Description of Artificial Sequence: Synthetic oligonucleotide
gaagugaauugaaaccugu

SEQ ID NO: 2080560 - RNA, 19 nt, Artificial Sequence
  Description of Artificial Sequence: Synthetic oligonucleotide
ugguaucuuuuggauaaaa

SEQ ID NO: 2080561 - RNA, 19 nt, Artificial Sequence
  Description of Artificial Sequence: Synthetic oligonucleotide
uccaauuaccugugugcua

SEQ ID NO: 2080562 - RNA, 19 nt, Artificial Sequence
  Description of Artificial Sequence: Synthetic oligonucleotide
ggaaaucacuuguauagcu

SEQ ID NO: 2080563 - RNA, 19 nt, Artificial Sequence
  Description of Artificial Sequence: Synthetic oligonucleotide
gaaguccaccuuccagaug

SEQ ID NO: 2080564 - RNA, 19 nt, Artificial Sequence
  Description of Artificial Sequence: Synthetic oligonucleotide
caaaacacuaaaugguuuu

SEQ ID NO: 2080565 - RNA, 19 nt, Artificial Sequence
  Description of Artificial Sequence: Synthetic oligonucleotide
gcuauaguuugugauauaa

SEQ ID NO: 2080566 - RNA, 19 nt, Artificial Sequence
  Description of Artificial Sequence: Synthetic oligonucleotide
guguuucuuccacuuggac

SEQ ID NO: 2080567 - RNA, 19 nt, Artificial Sequence
  Description of Artificial Sequence: Synthetic oligonucleotide
ccuaauagaaucugcaagu

SEQ ID NO: 2080568 - RNA, 19 nt, Artificial Sequence
  Description of Artificial Sequence: Synthetic oligonucleotide
uggccuaaauuugacuuuu

SEQ ID NO: 2080569 - RNA, 19 nt, Artificial Sequence
  Description of Artificial Sequence: Synthetic oligonucleotide
gauugucacauguuccaau

SEQ ID NO: 2080570 - RNA, 19 nt, Artificial Sequence
  Description of Artificial Sequence: Synthetic oligonucleotide
ggaagugaauugaaaccug

SEQ ID NO: 2080571 - RNA, 19 nt, Artificial Sequence
  Description of Artificial Sequence: Synthetic oligonucleotide
gcugacgcgaguaaccggc

SEQ ID NO: 2080572 - RNA, 19 nt, Artificial Sequence
  Description of Artificial Sequence: Synthetic oligonucleotide
ccucauguaaggcgcaaag

SEQ ID NO: 2080573 - RNA, 19 nt, Artificial Sequence
  Description of Artificial Sequence: Synthetic oligonucleotide
uccagacggcgcaggcgcg

SEQ ID NO: 2080574 - RNA, 19 nt, Artificial Sequence
  Description of Artificial Sequence: Synthetic oligonucleotide
gccuaaauuugacuuuuca

SEQ ID NO: 2080575 - RNA, 19 nt, Artificial Sequence
  Description of Artificial Sequence: Synthetic oligonucleotide
aucaggugucuauuaccau

SEQ ID NO: 2080576 - RNA, 19 nt, Artificial Sequence
  Description of Artificial Sequence: Synthetic oligonucleotide
accaaccagcuuguccugg

SEQ ID NO: 2080577 - RNA, 19 nt, Artificial Sequence
  Description of Artificial Sequence: Synthetic oligonucleotide
gugcugccuugccagaagc

SEQ ID NO: 2080578 - RNA, 19 nt, Artificial Sequence
  Description of Artificial Sequence: Synthetic oligonucleotide
cugaagucaagguauguuu

SEQ ID NO: 2080579 - RNA, 19 nt, Artificial Sequence
  Description of Artificial Sequence: Synthetic oligonucleotide
cucuuccaggcuugccggg

SEQ ID NO: 2080580 - RNA, 19 nt, Artificial Sequence
  Description of Artificial Sequence: Synthetic oligonucleotide
ucuuccaggcuugccggga

SEQ ID NO: 2080581 - RNA, 19 nt, Artificial Sequence
  Description of Artificial Sequence: Synthetic oligonucleotide
cugguaggggaaguccacc

SEQ ID NO: 2080582 - RNA, 19 nt, Artificial Sequence
  Description of Artificial Sequence: Synthetic oligonucleotide
uucuggcacaaguuuccua

SEQ ID NO: 2080583 - RNA, 19 nt, Artificial Sequence
  Description of Artificial Sequence: Synthetic oligonucleotide
cuucaacaagggucacaac

SEQ ID NO: 2080584 - RNA, 19 nt, Artificial Sequence
  Description of Artificial Sequence: Synthetic oligonucleotide
ccacgccucauguaaggcg

SEQ ID NO: 2080585 - RNA, 19 nt, Artificial Sequence
  Description of Artificial Sequence: Synthetic oligonucleotide
aucacuuguauagcuucaa

SEQ ID NO: 2080586 - RNA, 19 nt, Artificial Sequence
  Description of Artificial Sequence: Synthetic oligonucleotide
cuggccacgccucauguaa

SEQ ID NO: 2080587 - RNA, 19 nt, Artificial Sequence
  Description of Artificial Sequence: Synthetic oligonucleotide
gugucuauuaccauauauu

SEQ ID NO: 2080588 - RNA, 19 nt, Artificial Sequence
  Description of Artificial Sequence: Synthetic oligonucleotide
aggcuugccgggaacccac

SEQ ID NO: 2080589 - RNA, 19 nt, Artificial Sequence
  Description of Artificial Sequence: Synthetic oligonucleotide
cuuguauagcuucaauuuu

SEQ ID NO: 2080590 - RNA, 19 nt, Artificial Sequence
  Description of Artificial Sequence: Synthetic oligonucleotide
uuccuucuaaacguuccuu

SEQ ID NO: 2080591 - RNA, 19 nt, Artificial Sequence
  Description of Artificial Sequence: Synthetic oligonucleotide
gcuacuaagguucuauuuu

SEQ ID NO: 2080592 - RNA, 19 nt, Artificial Sequence
  Description of Artificial Sequence: Synthetic oligonucleotide
uuggaccagcugcauuaaa

SEQ ID NO: 2080593 - RNA, 19 nt, Artificial Sequence
  Description of Artificial Sequence: Synthetic oligonucleotide
cuaagguucuauuuuccuu

SEQ ID NO: 2080594 - RNA, 19 nt, Artificial Sequence
  Description of Artificial Sequence: Synthetic oligonucleotide
uggccgguacccggcagcg

SEQ ID NO: 2080595 - RNA, 19 nt, Artificial Sequence
  Description of Artificial Sequence: Synthetic oligonucleotide
cuauuaccauauauuucua

SEQ ID NO: 2080596 - RNA, 19 nt, Artificial Sequence
  Description of Artificial Sequence: Synthetic oligonucleotide
gugauauaaccaaccagcu

SEQ ID NO: 2080597 - RNA, 19 nt, Artificial Sequence
  Description of Artificial Sequence: Synthetic oligonucleotide
ggacuaaugcugacgcgag

SEQ ID NO: 2080598 - RNA, 19 nt, Artificial Sequence
  Description of Artificial Sequence: Synthetic oligonucleotide
auagcacauuauaauccaa

SEQ ID NO: 2080599 - RNA, 19 nt, Artificial Sequence
  Description of Artificial Sequence: Synthetic oligonucleotide
uauaaccaaccagcuuguc

SEQ ID NO: 2080600 - RNA, 19 nt, Artificial Sequence
  Description of Artificial Sequence: Synthetic oligonucleotide
cuaaugcugacgcgaguaa

SEQ ID NO: 2080601 - RNA, 19 nt, Artificial Sequence
  Description of Artificial Sequence: Synthetic oligonucleotide
cuggccgguacccggcagc

SEQ ID NO: 2080602 - RNA, 19 nt, Artificial Sequence
  Description of Artificial Sequence: Synthetic oligonucleotide
auguuuuaagacacuugua

SEQ ID NO: 2080603 - RNA, 19 nt, Artificial Sequence
  Description of Artificial Sequence: Synthetic oligonucleotide
cgucagaacaggacuaaug

SEQ ID NO: 2080604 - RNA, 19 nt, Artificial Sequence
  Description of Artificial Sequence: Synthetic oligonucleotide
cacuuguaauaaacaguaa

SEQ ID NO: 2080605 - RNA, 19 nt, Artificial Sequence
  Description of Artificial Sequence: Synthetic oligonucleotide
uguccugguaggggaaguc

SEQ ID NO: 2080606 - RNA, 19 nt, Artificial Sequence
  Description of Artificial Sequence: Synthetic oligonucleotide
gcugccuugccagaagcgc

SEQ ID NO: 2080607 - RNA, 19 nt, Artificial Sequence
  Description of Artificial Sequence: Synthetic oligonucleotide
caggugucuauuaccauau

SEQ ID NO: 2080608 - RNA, 19 nt, Artificial Sequence
  Description of Artificial Sequence: Synthetic oligonucleotide
gucacaacucuuccaggcu

SEQ ID NO: 2080609 - RNA, 19 nt, Artificial Sequence
  Description of Artificial Sequence: Synthetic oligonucleotide
uacccggcagcgucagaac

SEQ ID NO: 2080610 - RNA, 19 nt, Artificial Sequence
  Description of Artificial Sequence: Synthetic oligonucleotide
gaucuucaacaagggucac

SEQ ID NO: 2080611 - RNA, 19 nt, Artificial Sequence
  Description of Artificial Sequence: Synthetic oligonucleotide
guacccggcagcgucagaa

SEQ ID NO: 2080612 - RNA, 19 nt, Artificial Sequence
  Description of Artificial Sequence: Synthetic oligonucleotide
gcagcgucagaacaggacu

SEQ ID NO: 2080613 - RNA, 19 nt, Artificial Sequence
  Description of Artificial Sequence: Synthetic oligonucleotide
ccuuguggacccuggccgg

SEQ ID NO: 2080614 - RNA, 19 nt, Artificial Sequence
  Description of Artificial Sequence: Synthetic oligonucleotide
ucuuuccuacugguaguuu

SEQ ID NO: 2080615 - RNA, 19 nt, Artificial Sequence
  Description of Artificial Sequence: Synthetic oligonucleotide
agcgucagaacaggacuaa

SEQ ID NO: 2080616 - RNA, 19 nt, Artificial Sequence
  Description of Artificial Sequence: Synthetic oligonucleotide
caacaagggucacaacucu

SEQ ID NO: 2080617 - RNA, 19 nt, Artificial Sequence
  Description of Artificial Sequence: Synthetic oligonucleotide
accggcugauccagacggc

SEQ ID NO: 2080618 - RNA, 19 nt, Artificial Sequence
  Description of Artificial Sequence: Synthetic oligonucleotide
ccccaaaggagaagauagc

SEQ ID NO: 2080619 - RNA, 19 nt, Artificial Sequence
  Description of Artificial Sequence: Synthetic oligonucleotide
agccaaacacccacauccu

SEQ ID NO: 2080620 - RNA, 19 nt, Artificial Sequence
  Description of Artificial Sequence: Synthetic oligonucleotide
guagagcaaaacacuaaau

SEQ ID NO: 2080621 - RNA, 19 nt, Artificial Sequence
  Description of Artificial Sequence: Synthetic oligonucleotide
agggacccauagccaaaca

SEQ ID NO: 2080622 - RNA, 19 nt, Artificial Sequence
  Description of Artificial Sequence: Synthetic oligonucleotide
ggcagcgucagaacaggac

SEQ ID NO: 2080623 - RNA, 19 nt, Artificial Sequence
  Description of Artificial Sequence: Synthetic oligonucleotide
cauagccaaacacccacau

SEQ ID NO: 2080624 - RNA, 19 nt, Artificial Sequence
  Description of Artificial Sequence: Synthetic oligonucleotide
cuaauagaaucugcaaguu

SEQ ID NO: 2080625 - RNA, 19 nt, Artificial Sequence
  Description of Artificial Sequence: Synthetic oligonucleotide
agauguucgucugcaucuu

SEQ ID NO: 2080626 - RNA, 19 nt, Artificial Sequence
  Description of Artificial Sequence: Synthetic oligonucleotide
agguucuauuuuccuucua

SEQ ID NO: 2080627 - RNA, 19 nt, Artificial Sequence
  Description of Artificial Sequence: Synthetic oligonucleotide
gacuaaugcugacgcgagu

SEQ ID NO: 2080628 - RNA, 19 nt, Artificial Sequence
  Description of Artificial Sequence: Synthetic oligonucleotide
ggucagugcugccuugcca

SEQ ID NO: 2080629 - RNA, 19 nt, Artificial Sequence
  Description of Artificial Sequence: Synthetic oligonucleotide
cagcgucagaacaggacua

SEQ ID NO: 2080630 - RNA, 19 nt, Artificial Sequence
  Description of Artificial Sequence: Synthetic oligonucleotide
cacgguggucagugcugcc

SEQ ID NO: 2080631 - RNA, 19 nt, Artificial Sequence
  Description of Artificial Sequence: Synthetic oligonucleotide
cccggcagcgucagaacag

SEQ ID NO: 2080632 - RNA, 19 nt, Artificial Sequence
  Description of Artificial Sequence: Synthetic oligonucleotide
acccauagccaaacaccca

SEQ ID NO: 2080633 - RNA, 19 nt, Artificial Sequence
  Description of Artificial Sequence: Synthetic oligonucleotide
aguaaccggcugauccaga

SEQ ID NO: 2080634 - RNA, 19 nt, Artificial Sequence
  Description of Artificial Sequence: Synthetic oligonucleotide
agccuccuuucucucugaa

SEQ ID NO: 2080635 - RNA, 19 nt, Artificial Sequence
  Description of Artificial Sequence: Synthetic oligonucleotide
caggaucuucaacaagggu

SEQ ID NO: 2080636 - RNA, 19 nt, Artificial Sequence
  Description of Artificial Sequence: Synthetic oligonucleotide
cccaauuucuuuuggccua

SEQ ID NO: 2080637 - RNA, 19 nt, Artificial Sequence
  Description of Artificial Sequence: Synthetic oligonucleotide
guauagcuucaauuuucuu

SEQ ID NO: 2080638 - RNA, 19 nt, Artificial Sequence
  Description of Artificial Sequence: Synthetic oligonucleotide
gccgguacccggcagcguc

SEQ ID NO: 2080639 - RNA, 19 nt, Artificial Sequence
  Description of Artificial Sequence: Synthetic oligonucleotide
gaagcgccggcuauaguuu

SEQ ID NO: 2080640 - RNA, 19 nt, Artificial Sequence
  Description of Artificial Sequence: Synthetic oligonucleotide
cuugccagaagcgccggcu

SEQ ID NO: 2080641 - RNA, 19 nt, Artificial Sequence
  Description of Artificial Sequence: Synthetic oligonucleotide
ccagaagcgccggcuauag

SEQ ID NO: 2080642 - RNA, 19 nt, Artificial Sequence
  Description of Artificial Sequence: Synthetic oligonucleotide
ccggcugauccagacggcg

SEQ ID NO: 2080643 - RNA, 19 nt, Artificial Sequence
  Description of Artificial Sequence: Synthetic oligonucleotide
aguccaccuuccagaugag

SEQ ID NO: 2080644 - RNA, 19 nt, Artificial Sequence
  Description of Artificial Sequence: Synthetic oligonucleotide
gcaacaccccaaacacugc

SEQ ID NO: 2080645 - RNA, 19 nt, Artificial Sequence
  Description of Artificial Sequence: Synthetic oligonucleotide
cuugccgggaacccacggu

SEQ ID NO: 2080646 - RNA, 19 nt, Artificial Sequence
  Description of Artificial Sequence: Synthetic oligonucleotide
ggauugucacauguuccaa

SEQ ID NO: 2080647 - RNA, 19 nt, Artificial Sequence
  Description of Artificial Sequence: Synthetic oligonucleotide
ggaccaagauaguuaggau

SEQ ID NO: 2080648 - RNA, 19 nt, Artificial Sequence
  Description of Artificial Sequence: Synthetic oligonucleotide
acgcgaguaaccggcugau

SEQ ID NO: 2080649 - RNA, 19 nt, Artificial Sequence
  Description of Artificial Sequence: Synthetic oligonucleotide
ccggcuauaguuugugaua

SEQ ID NO: 2080650 - RNA, 19 nt, Artificial Sequence
  Description of Artificial Sequence: Synthetic oligonucleotide
cuuggaccagcugcauuaa

SEQ ID NO: 2080651 - RNA, 19 nt, Artificial Sequence
  Description of Artificial Sequence: Synthetic oligonucleotide
gccggcuauaguuugugau

SEQ ID NO: 2080652 - RNA, 19 nt, Artificial Sequence
  Description of Artificial Sequence: Synthetic oligonucleotide
ccggcagcgucagaacagg

SEQ ID NO: 2080653 - RNA, 19 nt, Artificial Sequence
  Description of Artificial Sequence: Synthetic oligonucleotide
gcaaaacacuaaaugguuu

SEQ ID NO: 2080654 - RNA, 19 nt, Artificial Sequence
  Description of Artificial Sequence: Synthetic oligonucleotide
gugcuacuaagguucuauu

SEQ ID NO: 2080655 - RNA, 19 nt, Artificial Sequence
  Description of Artificial Sequence: Synthetic oligonucleotide
agcgccggcuauaguuugu

SEQ ID NO: 2080656 - RNA, 19 nt, Artificial Sequence
  Description of Artificial Sequence: Synthetic oligonucleotide
gggaacccacgguggucag

SEQ ID NO: 2080657 - RNA, 19 nt, Artificial Sequence
  Description of Artificial Sequence: Synthetic oligonucleotide
cgaguaaccggcugaucca

SEQ ID NO: 2080658 - RNA, 19 nt, Artificial Sequence
  Description of Artificial Sequence: Synthetic oligonucleotide
ggacccuggccgguacccg

SEQ ID NO: 2080659 - RNA, 19 nt, Artificial Sequence
  Description of Artificial Sequence: Synthetic oligonucleotide
ccacgguggucagugcugc

SEQ ID NO: 2080660 - RNA, 19 nt, Artificial Sequence
  Description of Artificial Sequence: Synthetic oligonucleotide
gugguaucuuuuggauaaa

SEQ ID NO: 2080661 - RNA, 19 nt, Artificial Sequence
  Description of Artificial Sequence: Synthetic oligonucleotide
ccaggcuugccgggaaccc

SEQ ID NO: 2080662 - RNA, 19 nt, Artificial Sequence
  Description of Artificial Sequence: Synthetic oligonucleotide
caaccagcuuguccuggua

SEQ ID NO: 2080663 - RNA, 19 nt, Artificial Sequence
  Description of Artificial Sequence: Synthetic oligonucleotide
ggcuauaguuugugauaua

SEQ ID NO: 2080664 - RNA, 19 nt, Artificial Sequence
  Description of Artificial Sequence: Synthetic oligonucleotide
caauuaccugugugcuacu

SEQ ID NO: 2080665 - RNA, 19 nt, Artificial Sequence
  Description of Artificial Sequence: Synthetic oligonucleotide
ggccuaaauuugacuuuuc

SEQ ID NO: 2080666 - RNA, 19 nt, Artificial Sequence
  Description of Artificial Sequence: Synthetic oligonucleotide
acgccucauguaaggcgca

SEQ ID NO: 2080667 - RNA, 19 nt, Artificial Sequence
  Description of Artificial Sequence: Synthetic oligonucleotide
cuuccagaugagggaccca

SEQ ID NO: 2080668 - RNA, 19 nt, Artificial Sequence
  Description of Artificial Sequence: Synthetic oligonucleotide
ggcuugccgggaacccacg

SEQ ID NO: 2080669 - RNA, 19 nt, Artificial Sequence
  Description of Artificial Sequence: Synthetic oligonucleotide
cuucuggcacaaguuuccu

SEQ ID NO: 2080670 - RNA, 19 nt, Artificial Sequence
  Description of Artificial Sequence: Synthetic oligonucleotide
cagugcugccuugccagaa

SEQ ID NO: 2080671 - RNA, 19 nt, Artificial Sequence
  Description of Artificial Sequence: Synthetic oligonucleotide
gcgccggcuauaguuugug

SEQ ID NO: 2080672 - RNA, 19 nt, Artificial Sequence
  Description of Artificial Sequence: Synthetic oligonucleotide
cugacgcgaguaaccggcu

SEQ ID NO: 2080673 - RNA, 19 nt, Artificial Sequence
  Description of Artificial Sequence: Synthetic oligonucleotide
ccuugccagaagcgccggc

SEQ ID NO: 2080674 - RNA, 19 nt, Artificial Sequence
  Description of Artificial Sequence: Synthetic oligonucleotide
gccuugccagaagcgccgg

SEQ ID NO: 2080675 - RNA, 19 nt, Artificial Sequence
  Description of Artificial Sequence: Synthetic oligonucleotide
guaguucuguagccuccuu

SEQ ID NO: 2080676 - RNA, 19 nt, Artificial Sequence
  Description of Artificial Sequence: Synthetic oligonucleotide
gguaggggaaguccaccuu

SEQ ID NO: 2080677 - RNA, 19 nt, Artificial Sequence
  Description of Artificial Sequence: Synthetic oligonucleotide
ccaaaagagaagagauguu

SEQ ID NO: 2080678 - RNA, 19 nt, Artificial Sequence
  Description of Artificial Sequence: Synthetic oligonucleotide
gcgcuggccacgccucaug

SEQ ID NO: 2080679 - RNA, 19 nt, Artificial Sequence
  Description of Artificial Sequence: Synthetic oligonucleotide
ccaauuucuuuuggccuaa

SEQ ID NO: 2080680 - RNA, 19 nt, Artificial Sequence
  Description of Artificial Sequence: Synthetic oligonucleotide
cacuuggaccagcugcauu

SEQ ID NO: 2080681 - RNA, 19 nt, Artificial Sequence
  Description of Artificial Sequence: Synthetic oligonucleotide
ccagacggcgcaggcgcgc

SEQ ID NO: 2080682 - RNA, 19 nt, Artificial Sequence
  Description of Artificial Sequence: Synthetic oligonucleotide
ccuggccgguacccggcag

SEQ ID NO: 2080683 - RNA, 19 nt, Artificial Sequence
  Description of Artificial Sequence: Synthetic oligonucleotide
cuuguggacccuggccggu

SEQ ID NO: 2080684 - RNA, 19 nt, Artificial Sequence
  Description of Artificial Sequence: Synthetic oligonucleotide
gugugcuacuaagguucua

SEQ ID NO: 2080685 - RNA, 19 nt, Artificial Sequence
  Description of Artificial Sequence: Synthetic oligonucleotide
gccucauguaaggcgcaaa

SEQ ID NO: 2080686 - RNA, 19 nt, Artificial Sequence
  Description of Artificial Sequence: Synthetic oligonucleotide
cgggaacccacggugguca

SEQ ID NO: 2080687 - RNA, 19 nt, Artificial Sequence
  Description of Artificial Sequence: Synthetic oligonucleotide
cagaagcgccggcuauagu

SEQ ID NO: 2080688 - RNA, 19 nt, Artificial Sequence
  Description of Artificial Sequence: Synthetic oligonucleotide
gcgcaggcgcgcuggccac

SEQ ID NO: 2080689 - RNA, 19 nt, Artificial Sequence
  Description of Artificial Sequence: Synthetic oligonucleotide
gccgggaacccacgguggu

SEQ ID NO: 2080690 - RNA, 19 nt, Artificial Sequence
  Description of Artificial Sequence: Synthetic oligonucleotide
ccgguacccggcagcguca

SEQ ID NO: 2080691 - RNA, 19 nt, Artificial Sequence
  Description of Artificial Sequence: Synthetic oligonucleotide
ccgggaacccacggugguc

SEQ ID NO: 2080692 - RNA, 19 nt, Artificial Sequence
  Description of Artificial Sequence: Synthetic oligonucleotide
ggaacccacgguggucagu

SEQ ID NO: 2080693 - RNA, 19 nt, Artificial Sequence
  Description of Artificial Sequence: Synthetic oligonucleotide
cagacggcgcaggcgcgcu

SEQ ID NO: 2080694 - RNA, 19 nt, Artificial Sequence
  Description of Artificial Sequence: Synthetic oligonucleotide
gcgucagaacaggacuaau

SEQ ID NO: 2080695 - RNA, 19 nt, Artificial Sequence
  Description of Artificial Sequence: Synthetic oligonucleotide
cgccggcuauaguuuguga

SEQ ID NO: 2080696 - RNA, 19 nt, Artificial Sequence
  Description of Artificial Sequence: Synthetic oligonucleotide
cgguacccggcagcgucag

SEQ ID NO: 2080697 - RNA, 19 nt, Artificial Sequence
  Description of Artificial Sequence: Synthetic oligonucleotide
cgcgaguaaccggcugauc

SEQ ID NO: 2080698 - RNA, 19 nt, Artificial Sequence
  Description of Artificial Sequence: Synthetic oligonucleotide
cggcagcgucagaacagga

SEQ ID NO: 2080699 - RNA, 19 nt, Artificial Sequence
  Description of Artificial Sequence: Synthetic oligonucleotide
cccuggccgguacccggca

SEQ ID NO: 2080700 - RNA, 19 nt, Artificial Sequence
  Description of Artificial Sequence: Synthetic oligonucleotide
ggccgguacccggcagcgu

SEQ ID NO: 2080701 - RNA, 19 nt, Artificial Sequence
  Description of Artificial Sequence: Synthetic oligonucleotide
cgcgcuggccacgccucau

SEQ ID NO: 2080702 - RNA, 19 nt, Artificial Sequence
  Description of Artificial Sequence: Synthetic oligonucleotide
aagaauuuaauaccacugc

SEQ ID NO: 2080703 - RNA, 19 nt, Artificial Sequence
  Description of Artificial Sequence: Synthetic oligonucleotide
aaauaucacuuucaaaagc

SEQ ID NO: 2080704 - RNA, 19 nt, Artificial Sequence
  Description of Artificial Sequence: Synthetic oligonucleotide
aacagggaagauuaagugc

SEQ ID NO: 2080705 - RNA, 19 nt, Artificial Sequence
  Description of Artificial Sequence: Synthetic oligonucleotide
uuuuccaucauuucaaucu

SEQ ID NO: 2080706 - RNA, 19 nt, Artificial Sequence
  Description of Artificial Sequence: Synthetic oligonucleotide
ucucaaauauaucugagga

SEQ ID NO: 2080707 - RNA, 19 nt, Artificial Sequence
  Description of Artificial Sequence: Synthetic oligonucleotide
aaggcuagaacaccaaagg

SEQ ID NO: 2080708 - RNA, 19 nt, Artificial Sequence
  Description of Artificial Sequence: Synthetic oligonucleotide
gauuuaauaaguguaacug

SEQ ID NO: 2080709 - RNA, 19 nt, Artificial Sequence
  Description of Artificial Sequence: Synthetic oligonucleotide
auuuaauaaguguaacugg

SEQ ID NO: 2080710 - RNA, 19 nt, Artificial Sequence
  Description of Artificial Sequence: Synthetic oligonucleotide
ucugacauaauuauauucu

SEQ ID NO: 2080711 - RNA, 19 nt, Artificial Sequence
  Description of Artificial Sequence: Synthetic oligonucleotide
uuuaauaaguguaacuggu

SEQ ID NO: 2080712 - RNA, 19 nt, Artificial Sequence
  Description of Artificial Sequence: Synthetic oligonucleotide
uuuguaguaaacagggaag

SEQ ID NO: 2080713 - RNA, 19 nt, Artificial Sequence
  Description of Artificial Sequence: Synthetic oligonucleotide
ucuaagaacaagaagcuuc

SEQ ID NO: 2080714 - RNA, 19 nt, Artificial Sequence
  Description of Artificial Sequence: Synthetic oligonucleotide
aagaacuaggucuccaagg

SEQ ID NO: 2080715 - RNA, 19 nt, Artificial Sequence
  Description of Artificial Sequence: Synthetic oligonucleotide
acugguuuauuucagguuc

SEQ ID NO: 2080716 - RNA, 19 nt, Artificial Sequence
  Description of Artificial Sequence: Synthetic oligonucleotide
uuuuguaguaaacagggaa

SEQ ID NO: 2080717 - RNA, 19 nt, Artificial Sequence
  Description of Artificial Sequence: Synthetic oligonucleotide
caaugaagaauuuaauacc

SEQ ID NO: 2080718 - RNA, 19 nt, Artificial Sequence
  Description of Artificial Sequence: Synthetic oligonucleotide
aauuuugugaagccagaag

SEQ ID NO: 2080719 - RNA, 19 nt, Artificial Sequence
  Description of Artificial Sequence: Synthetic oligonucleotide
agaagaauuuugugaagcc

SEQ ID NO: 2080720 - RNA, 19 nt, Artificial Sequence
  Description of Artificial Sequence: Synthetic oligonucleotide
ucaccuuucauaaucacac

SEQ ID NO: 2080721 - RNA, 19 nt, Artificial Sequence
  Description of Artificial Sequence: Synthetic oligonucleotide
gaauucuccaacuaggcac

SEQ ID NO: 2080722 - RNA, 19 nt, Artificial Sequence
  Description of Artificial Sequence: Synthetic oligonucleotide
ucuacugagaucaugcuuc

SEQ ID NO: 2080723 - RNA, 19 nt, Artificial Sequence
  Description of Artificial Sequence: Synthetic oligonucleotide
acuuuuguaguaaacaggg

SEQ ID NO: 2080724 - RNA, 19 nt, Artificial Sequence
  Description of Artificial Sequence: Synthetic oligonucleotide
uauuggucuacugagauca

SEQ ID NO: 2080725 - RNA, 19 nt, Artificial Sequence
  Description of Artificial Sequence: Synthetic oligonucleotide
aauaucacuuucaaaagca

SEQ ID NO: 2080726 - RNA, 19 nt, Artificial Sequence
  Description of Artificial Sequence: Synthetic oligonucleotide
auuucagguucacaugucc

SEQ ID NO: 2080727 - RNA, 19 nt, Artificial Sequence
  Description of Artificial Sequence: Synthetic oligonucleotide
gaagauuaagugcugauga

SEQ ID NO: 2080728 - RNA, 19 nt, Artificial Sequence
  Description of Artificial Sequence: Synthetic oligonucleotide
uaaaacaacuggaaacugc

SEQ ID NO: 2080729 - RNA, 19 nt, Artificial Sequence
  Description of Artificial Sequence: Synthetic oligonucleotide
aucugacauaauuauauuc

SEQ ID NO: 2080730 - RNA, 19 nt, Artificial Sequence
  Description of Artificial Sequence: Synthetic oligonucleotide
caggcaauaaaacaacugg

SEQ ID NO: 2080731 - RNA, 19 nt, Artificial Sequence
  Description of Artificial Sequence: Synthetic oligonucleotide
ucuugucugacucugaaaa

SEQ ID NO: 2080732 - RNA, 19 nt, Artificial Sequence
  Description of Artificial Sequence: Synthetic oligonucleotide
uuggguaaaggacagaaaa

SEQ ID NO: 2080733 - RNA, 19 nt, Artificial Sequence
  Description of Artificial Sequence: Synthetic oligonucleotide
uucuuaguuaggaugggag

SEQ ID NO: 2080734 - RNA, 19 nt, Artificial Sequence
  Description of Artificial Sequence: Synthetic oligonucleotide
agaaaugauauauauuuaa

SEQ ID NO: 2080735 - RNA, 19 nt, Artificial Sequence
  Description of Artificial Sequence: Synthetic oligonucleotide
cucuacagaucauugaugc

SEQ ID NO: 2080736 - RNA, 19 nt, Artificial Sequence
  Description of Artificial Sequence: Synthetic oligonucleotide
agacuuuuguaguaaacag

SEQ ID NO: 2080737 - RNA, 19 nt, Artificial Sequence
  Description of Artificial Sequence: Synthetic oligonucleotide
gaguuauuggucuacugag

SEQ ID NO: 2080738 - RNA, 19 nt, Artificial Sequence
  Description of Artificial Sequence: Synthetic oligonucleotide
uaguaaacagggaagauua

SEQ ID NO: 2080739 - RNA, 19 nt, Artificial Sequence
  Description of Artificial Sequence: Synthetic oligonucleotide
ucugacucugaaaagccag

SEQ ID NO: 2080740 - RNA, 19 nt, Artificial Sequence
  Description of Artificial Sequence: Synthetic oligonucleotide
ugaagaauuuaauaccacu

SEQ ID NO: 2080741 - RNA, 19 nt, Artificial Sequence
  Description of Artificial Sequence: Synthetic oligonucleotide
aaggcauugaaugaaguca

SEQ ID NO: 2080742 - RNA, 19 nt, Artificial Sequence
  Description of Artificial Sequence: Synthetic oligonucleotide
ugauuuaauaaguguaacu

SEQ ID NO: 2080743 - RNA, 19 nt, Artificial Sequence
  Description of Artificial Sequence: Synthetic oligonucleotide
agauuaagugcugaugagc

SEQ ID NO: 2080744 - RNA, 19 nt, Artificial Sequence
  Description of Artificial Sequence: Synthetic oligonucleotide
uucugauuuaauaagugua

SEQ ID NO: 2080745 - RNA, 19 nt, Artificial Sequence
  Description of Artificial Sequence: Synthetic oligonucleotide
uuuauuucagguucacaug

SEQ ID NO: 2080746 - RNA, 19 nt, Artificial Sequence
  Description of Artificial Sequence: Synthetic oligonucleotide
uacuaugucagacuuuugu

SEQ ID NO: 2080747 - RNA, 19 nt, Artificial Sequence
  Description of Artificial Sequence: Synthetic oligonucleotide
uccaacuaggcacaaaccu

SEQ ID NO: 2080748 - RNA, 19 nt, Artificial Sequence
  Description of Artificial Sequence: Synthetic oligonucleotide
aagauuaagugcugaugag

SEQ ID NO: 2080749 - RNA, 19 nt, Artificial Sequence
  Description of Artificial Sequence: Synthetic oligonucleotide
aagucaguuggguaaagga

SEQ ID NO: 2080750 - RNA, 19 nt, Artificial Sequence
  Description of Artificial Sequence: Synthetic oligonucleotide
aaaagcucuaagaacaaga

SEQ ID NO: 2080751 - RNA, 19 nt, Artificial Sequence
  Description of Artificial Sequence: Synthetic oligonucleotide
uggucuacugagaucaugc

SEQ ID NO: 2080752 - RNA, 19 nt, Artificial Sequence
  Description of Artificial Sequence: Synthetic oligonucleotide
uguaacugguuuauuucag

SEQ ID NO: 2080753 - RNA, 19 nt, Artificial Sequence
  Description of Artificial Sequence: Synthetic oligonucleotide
aaaggcgaguuauuggucu

SEQ ID NO: 2080754 - RNA, 19 nt, Artificial Sequence
  Description of Artificial Sequence: Synthetic oligonucleotide
cuaugucagacuuuuguag

SEQ ID NO: 2080755 - RNA, 19 nt, Artificial Sequence
  Description of Artificial Sequence: Synthetic oligonucleotide
cacacauugaggauuauuc

SEQ ID NO: 2080756 - RNA, 19 nt, Artificial Sequence
  Description of Artificial Sequence: Synthetic oligonucleotide
agaauuuaauaccacugca

SEQ ID NO: 2080757 - RNA, 19 nt, Artificial Sequence
  Description of Artificial Sequence: Synthetic oligonucleotide
ucuccaacuaggcacaaac

SEQ ID NO: 2080758 - RNA, 19 nt, Artificial Sequence
  Description of Artificial Sequence: Synthetic oligonucleotide
uuuugugaagccagaagga

SEQ ID NO: 2080759 - RNA, 19 nt, Artificial Sequence
  Description of Artificial Sequence: Synthetic oligonucleotide
uugaauucuccaacuaggc

SEQ ID NO: 2080760 - RNA, 19 nt, Artificial Sequence
  Description of Artificial Sequence: Synthetic oligonucleotide
aagcucuaagaacaagaag

SEQ ID NO: 2080761 - RNA, 19 nt, Artificial Sequence
  Description of Artificial Sequence: Synthetic oligonucleotide
gacuuuuguaguaaacagg

SEQ ID NO: 2080762 - RNA, 19 nt, Artificial Sequence
  Description of Artificial Sequence: Synthetic oligonucleotide
aacaccaaaggucuuccca

SEQ ID NO: 2080763 - RNA, 19 nt, Artificial Sequence
  Description of Artificial Sequence: Synthetic oligonucleotide
uggguaaaggacagaaaag

SEQ ID NO: 2080764 - RNA, 19 nt, Artificial Sequence
  Description of Artificial Sequence: Synthetic oligonucleotide
cauugaaugaagucaguug

SEQ ID NO: 2080765 - RNA, 19 nt, Artificial Sequence
  Description of Artificial Sequence: Synthetic oligonucleotide
uaauaaguguaacugguuu

SEQ ID NO: 2080766 - RNA, 19 nt, Artificial Sequence
  Description of Artificial Sequence: Synthetic oligonucleotide
aaaggucuucccaaauggc

SEQ ID NO: 2080767 - RNA, 19 nt, Artificial Sequence
  Description of Artificial Sequence: Synthetic oligonucleotide
aggauuauucacuuccuug

SEQ ID NO: 2080768 - RNA, 19 nt, Artificial Sequence
  Description of Artificial Sequence: Synthetic oligonucleotide
agaacaagaagcuucugaa

SEQ ID NO: 2080769 - RNA, 19 nt, Artificial Sequence
  Description of Artificial Sequence: Synthetic oligonucleotide
acuucuguuauuucuaaaa

SEQ ID NO: 2080770 - RNA, 19 nt, Artificial Sequence
  Description of Artificial Sequence: Synthetic oligonucleotide
cauugaauucuccaacuag

SEQ ID NO: 2080771 - RNA, 19 nt, Artificial Sequence
  Description of Artificial Sequence: Synthetic oligonucleotide
ugaaaagccagaagaauuu

SEQ ID NO: 2080772 - RNA, 19 nt, Artificial Sequence
  Description of Artificial Sequence: Synthetic oligonucleotide
ugucugacucugaaaagcc

SEQ ID NO: 2080773 - RNA, 19 nt, Artificial Sequence
  Description of Artificial Sequence: Synthetic oligonucleotide
caacuaggcacaaaccucc

SEQ ID NO: 2080774 - RNA, 19 nt, Artificial Sequence
  Description of Artificial Sequence: Synthetic oligonucleotide
gaaacugcuauacccgggc

SEQ ID NO: 2080775 - RNA, 19 nt, Artificial Sequence
  Description of Artificial Sequence: Synthetic oligonucleotide
uuuaauaccacugcauuuu

SEQ ID NO: 2080776 - RNA, 19 nt, Artificial Sequence
  Description of Artificial Sequence: Synthetic oligonucleotide
ugaauucuccaacuaggca

SEQ ID NO: 2080777 - RNA, 19 nt, Artificial Sequence
  Description of Artificial Sequence: Synthetic oligonucleotide
aaagccagaagaauuuugu

SEQ ID NO: 2080778 - RNA, 19 nt, Artificial Sequence
  Description of Artificial Sequence: Synthetic oligonucleotide
cacauugaggauuauucac

SEQ ID NO: 2080779 - RNA, 19 nt, Artificial Sequence
  Description of Artificial Sequence: Synthetic oligonucleotide
uuaagugcugaugagcugu

SEQ ID NO: 2080780 - RNA, 19 nt, Artificial Sequence
  Description of Artificial Sequence: Synthetic oligonucleotide
agaacuaggucuccaagga

SEQ ID NO: 2080781 - RNA, 19 nt, Artificial Sequence
  Description of Artificial Sequence: Synthetic oligonucleotide
guaacugguuuauuucagg

SEQ ID NO: 2080782 - RNA, 19 nt, Artificial Sequence
  Description of Artificial Sequence: Synthetic oligonucleotide
gaaggcuagaacaccaaag

SEQ ID NO: 2080783 - RNA, 19 nt, Artificial Sequence
  Description of Artificial Sequence: Synthetic oligonucleotide
uuucauaaucacacauuga

SEQ ID NO: 2080784 - RNA, 19 nt, Artificial Sequence
  Description of Artificial Sequence: Synthetic oligonucleotide
uugucugacucugaaaagc

SEQ ID NO: 2080785 - RNA, 19 nt, Artificial Sequence
  Description of Artificial Sequence: Synthetic oligonucleotide
uguccugccuuucaacugc

SEQ ID NO: 2080786 - RNA, 19 nt, Artificial Sequence
  Description of Artificial Sequence: Synthetic oligonucleotide
uggaaacugcuauacccgg

SEQ ID NO: 2080787 - RNA, 19 nt, Artificial Sequence
  Description of Artificial Sequence: Synthetic oligonucleotide
aagccagaagaauuuugug

SEQ ID NO: 2080788 - RNA, 19 nt, Artificial Sequence
  Description of Artificial Sequence: Synthetic oligonucleotide
agucaguuggguaaaggac

SEQ ID NO: 2080789 - RNA, 19 nt, Artificial Sequence
  Description of Artificial Sequence: Synthetic oligonucleotide
uuaauaccacugcauuuug

SEQ ID NO: 2080790 - RNA, 19 nt, Artificial Sequence
  Description of Artificial Sequence: Synthetic oligonucleotide
cagaagaauuuugugaagc

SEQ ID NO: 2080791 - RNA, 19 nt, Artificial Sequence
  Description of Artificial Sequence: Synthetic oligonucleotide
aguuaguuccaggacgggc

SEQ ID NO: 2080792 - RNA, 19 nt, Artificial Sequence
  Description of Artificial Sequence: Synthetic oligonucleotide
guaaaggacagaaaaggac

SEQ ID NO: 2080793 - RNA, 19 nt, Artificial Sequence
  Description of Artificial Sequence: Synthetic oligonucleotide
ucuuaguuaggaugggagu

SEQ ID NO: 2080794 - RNA, 19 nt, Artificial Sequence
  Description of Artificial Sequence: Synthetic oligonucleotide
aaagcucuacagaucauug

SEQ ID NO: 2080795 - RNA, 19 nt, Artificial Sequence
  Description of Artificial Sequence: Synthetic oligonucleotide
uuucaacugccaaacuucu

SEQ ID NO: 2080796 - RNA, 19 nt, Artificial Sequence
  Description of Artificial Sequence: Synthetic oligonucleotide
uaaaucugacauaauuaua

SEQ ID NO: 2080797 - RNA, 19 nt, Artificial Sequence
  Description of Artificial Sequence: Synthetic oligonucleotide
uaaggcauugaaugaaguc

SEQ ID NO: 2080798 - RNA, 19 nt, Artificial Sequence
  Description of Artificial Sequence: Synthetic oligonucleotide
uauacccgggcuaaagaac

SEQ ID NO: 2080799 - RNA, 19 nt, Artificial Sequence
  Description of Artificial Sequence: Synthetic oligonucleotide
aaaagccagaagaauuuug

SEQ ID NO: 2080800 - RNA, 19 nt, Artificial Sequence
  Description of Artificial Sequence: Synthetic oligonucleotide
auugaugccaugguagcag

SEQ ID NO: 2080801 - RNA, 19 nt, Artificial Sequence
  Description of Artificial Sequence: Synthetic oligonucleotide
acagggaagauuaagugcu

SEQ ID NO: 2080802 - RNA, 19 nt, Artificial Sequence
  Description of Artificial Sequence: Synthetic oligonucleotide
aaucugacauaauuauauu

SEQ ID NO: 2080803 - RNA, 19 nt, Artificial Sequence
  Description of Artificial Sequence: Synthetic oligonucleotide
uuucagguucacauguccu

SEQ ID NO: 2080804 - RNA, 19 nt, Artificial Sequence
  Description of Artificial Sequence: Synthetic oligonucleotide
uuguaguaaacagggaaga

SEQ ID NO: 2080805 - RNA, 19 nt, Artificial Sequence
  Description of Artificial Sequence: Synthetic oligonucleotide
cagaucauugaugccaugg

SEQ ID NO: 2080806 - RNA, 19 nt, Artificial Sequence
  Description of Artificial Sequence: Synthetic oligonucleotide
auugaggauuauucacuuc

SEQ ID NO: 2080807 - RNA, 19 nt, Artificial Sequence
  Description of Artificial Sequence: Synthetic oligonucleotide
uuaauaaguguaacugguu

SEQ ID NO: 2080808 - RNA, 19 nt, Artificial Sequence
  Description of Artificial Sequence: Synthetic oligonucleotide
uuagcaagggcgacaggug

SEQ ID NO: 2080809 - RNA, 19 nt, Artificial Sequence
  Description of Artificial Sequence: Synthetic oligonucleotide
aaacuucuguuauuucuaa

SEQ ID NO: 2080810 - RNA, 19 nt, Artificial Sequence
  Description of Artificial Sequence: Synthetic oligonucleotide
aaaaggcgaguuauugguc

SEQ ID NO: 2080811 - RNA, 19 nt, Artificial Sequence
  Description of Artificial Sequence: Synthetic oligonucleotide
aaaugcuaaaucugacaua

SEQ ID NO: 2080812 - RNA, 19 nt, Artificial Sequence
  Description of Artificial Sequence: Synthetic oligonucleotide
aaagcucuaagaacaagaa

SEQ ID NO: 2080813 - RNA, 19 nt, Artificial Sequence
  Description of Artificial Sequence: Synthetic oligonucleotide
cugagaucaugcuucuuag

SEQ ID NO: 2080814 - RNA, 19 nt, Artificial Sequence
  Description of Artificial Sequence: Synthetic oligonucleotide
agcucuacagaucauugau

SEQ ID NO: 2080815 - RNA, 19 nt, Artificial Sequence
  Description of Artificial Sequence: Synthetic oligonucleotide
cuuaguuaggaugggaguc

SEQ ID NO: 2080816 - RNA, 19 nt, Artificial Sequence
  Description of Artificial Sequence: Synthetic oligonucleotide
cuagucuggucuacaagag

SEQ ID NO: 2080817 - RNA, 19 nt, Artificial Sequence
  Description of Artificial Sequence: Synthetic oligonucleotide
ucaugcuucuuaguuagga

SEQ ID NO: 2080818 - RNA, 19 nt, Artificial Sequence
  Description of Artificial Sequence: Synthetic oligonucleotide
aagcucuacagaucauuga

SEQ ID NO: 2080819 - RNA, 19 nt, Artificial Sequence
  Description of Artificial Sequence: Synthetic oligonucleotide
gaggacauugaauucucca

SEQ ID NO: 2080820 - RNA, 19 nt, Artificial Sequence
  Description of Artificial Sequence: Synthetic oligonucleotide
augaagaauuuaauaccac

SEQ ID NO: 2080821 - RNA, 19 nt, Artificial Sequence
  Description of Artificial Sequence: Synthetic oligonucleotide
acugccaaacuucuguuau

SEQ ID NO: 2080822 - RNA, 19 nt, Artificial Sequence
  Description of Artificial Sequence: Synthetic oligonucleotide
aguucugauuuaauaagug

SEQ ID NO: 2080823 - RNA, 19 nt, Artificial Sequence
  Description of Artificial Sequence: Synthetic oligonucleotide
aggcacaaaccucccaacg

SEQ ID NO: 2080824 - RNA, 19 nt, Artificial Sequence
  Description of Artificial Sequence: Synthetic oligonucleotide
accuuucauaaucacacau

SEQ ID NO: 2080825 - RNA, 19 nt, Artificial Sequence
  Description of Artificial Sequence: Synthetic oligonucleotide
agaucauugaugccauggu

SEQ ID NO: 2080826 - RNA, 19 nt, Artificial Sequence
  Description of Artificial Sequence: Synthetic oligonucleotide
acuaugucagacuuuugua

SEQ ID NO: 2080827 - RNA, 19 nt, Artificial Sequence
  Description of Artificial Sequence: Synthetic oligonucleotide
ugcgaaguuacagggaaac

SEQ ID NO: 2080828 - RNA, 19 nt, Artificial Sequence
  Description of Artificial Sequence: Synthetic oligonucleotide
cuacagaucauugaugcca

SEQ ID NO: 2080829 - RNA, 19 nt, Artificial Sequence
  Description of Artificial Sequence: Synthetic oligonucleotide
uuccagguuccuccaaugc

SEQ ID NO: 2080830 - RNA, 19 nt, Artificial Sequence
  Description of Artificial Sequence: Synthetic oligonucleotide
cuaaaucugacauaauuau

SEQ ID NO: 2080831 - RNA, 19 nt, Artificial Sequence
  Description of Artificial Sequence: Synthetic oligonucleotide
accacugcauuuugcagug

SEQ ID NO: 2080832 - RNA, 19 nt, Artificial Sequence
  Description of Artificial Sequence: Synthetic oligonucleotide
aggacaaaaggagaagcug

SEQ ID NO: 2080833 - RNA, 19 nt, Artificial Sequence
  Description of Artificial Sequence: Synthetic oligonucleotide
uaaucacacauugaggauu

SEQ ID NO: 2080834 - RNA, 19 nt, Artificial Sequence
  Description of Artificial Sequence: Synthetic oligonucleotide
uuaguuaggaugggagucu

SEQ ID NO: 2080835 - RNA, 19 nt, Artificial Sequence
  Description of Artificial Sequence: Synthetic oligonucleotide
gauuaagugcugaugagcu

SEQ ID NO: 2080836 - RNA, 19 nt, Artificial Sequence
  Description of Artificial Sequence: Synthetic oligonucleotide
auuaagugcugaugagcug

SEQ ID NO: 2080837 - RNA, 19 nt, Artificial Sequence
  Description of Artificial Sequence: Synthetic oligonucleotide
agugcugaugagcugucca

SEQ ID NO: 2080838 - RNA, 19 nt, Artificial Sequence
  Description of Artificial Sequence: Synthetic oligonucleotide
ucagguucacauguccugc

SEQ ID NO: 2080839 - RNA, 19 nt, Artificial Sequence
  Description of Artificial Sequence: Synthetic oligonucleotide
acauugaggauuauucacu

SEQ ID NO: 2080840 - RNA, 19 nt, Artificial Sequence
  Description of Artificial Sequence: Synthetic oligonucleotide
auaaguguaacugguuuau

SEQ ID NO: 2080841 - RNA, 19 nt, Artificial Sequence
  Description of Artificial Sequence: Synthetic oligonucleotide
aacuaggcacaaaccuccc

SEQ ID NO: 2080842 - RNA, 19 nt, Artificial Sequence
  Description of Artificial Sequence: Synthetic oligonucleotide
acauuccauuuauuacagg

SEQ ID NO: 2080843 - RNA, 19 nt, Artificial Sequence
  Description of Artificial Sequence: Synthetic oligonucleotide
agaucaugcuucuuaguua

SEQ ID NO: 2080844 - RNA, 19 nt, Artificial Sequence
  Description of Artificial Sequence: Synthetic oligonucleotide
cugcauuuugcaguggaag

SEQ ID NO: 2080845 - RNA, 19 nt, Artificial Sequence
  Description of Artificial Sequence: Synthetic oligonucleotide
aguuggguaaaggacagaa

SEQ ID NO: 2080846 - RNA, 19 nt, Artificial Sequence
  Description of Artificial Sequence: Synthetic oligonucleotide
ugaggacauugaauucucc

SEQ ID NO: 2080847 - RNA, 19 nt, Artificial Sequence
  Description of Artificial Sequence: Synthetic oligonucleotide
gcaacaaaaccaaugaaga

SEQ ID NO: 2080848 - RNA, 19 nt, Artificial Sequence
  Description of Artificial Sequence: Synthetic oligonucleotide
aggcauugaaugaagucag

SEQ ID NO: 2080849 - RNA, 19 nt, Artificial Sequence
  Description of Artificial Sequence: Synthetic oligonucleotide
aggcuagaacaccaaaggu

SEQ ID NO: 2080850 - RNA, 19 nt, Artificial Sequence
  Description of Artificial Sequence: Synthetic oligonucleotide
aagugcugaugagcugucc

SEQ ID NO: 2080851 - RNA, 19 nt, Artificial Sequence
  Description of Artificial Sequence: Synthetic oligonucleotide
aaacugcuauacccgggcu

SEQ ID NO: 2080852 - RNA, 19 nt, Artificial Sequence
  Description of Artificial Sequence: Synthetic oligonucleotide
uuauuggucuacugagauc

SEQ ID NO: 2080853 - RNA, 19 nt, Artificial Sequence
  Description of Artificial Sequence: Synthetic oligonucleotide
uucaacugccaaacuucug

SEQ ID NO: 2080854 - RNA, 19 nt, Artificial Sequence
  Description of Artificial Sequence: Synthetic oligonucleotide
cacaacuucaccuuucaua

SEQ ID NO: 2080855 - RNA, 19 nt, Artificial Sequence
  Description of Artificial Sequence: Synthetic oligonucleotide
uggcuaaggcauugaauga

SEQ ID NO: 2080856 - RNA, 19 nt, Artificial Sequence
  Description of Artificial Sequence: Synthetic oligonucleotide
uuuuacuaugucagacuuu

SEQ ID NO: 2080857 - RNA, 19 nt, Artificial Sequence
  Description of Artificial Sequence: Synthetic oligonucleotide
aggacagaaaaggacaaaa

SEQ ID NO: 2080858 - RNA, 19 nt, Artificial Sequence
  Description of Artificial Sequence: Synthetic oligonucleotide
acaccaaaggucuucccaa

SEQ ID NO: 2080859 - RNA, 19 nt, Artificial Sequence
  Description of Artificial Sequence: Synthetic oligonucleotide
ugccuuucaacugccaaac

SEQ ID NO: 2080860 - RNA, 19 nt, Artificial Sequence
  Description of Artificial Sequence: Synthetic oligonucleotide
cuccaaugcucucucacac

SEQ ID NO: 2080861 - RNA, 19 nt, Artificial Sequence
  Description of Artificial Sequence: Synthetic oligonucleotide
gucaguuggguaaaggaca

SEQ ID NO: 2080862 - RNA, 19 nt, Artificial Sequence
  Description of Artificial Sequence: Synthetic oligonucleotide
aaauauaucugaggacauu

SEQ ID NO: 2080863 - RNA, 19 nt, Artificial Sequence
  Description of Artificial Sequence: Synthetic oligonucleotide
cuccaacuaggcacaaacc

SEQ ID NO: 2080864 - RNA, 19 nt, Artificial Sequence
  Description of Artificial Sequence: Synthetic oligonucleotide
gcuagucuggucuacaaga

SEQ ID NO: 2080865 - RNA, 19 nt, Artificial Sequence
  Description of Artificial Sequence: Synthetic oligonucleotide
ugcacuccuuggcuaaggc

SEQ ID NO: 2080866 - RNA, 19 nt, Artificial Sequence
  Description of Artificial Sequence: Synthetic oligonucleotide
aacugcuauacccgggcua

SEQ ID NO: 2080867 - RNA, 19 nt, Artificial Sequence
  Description of Artificial Sequence: Synthetic oligonucleotide
gaacuaggucuccaaggac

SEQ ID NO: 2080868 - RNA, 19 nt, Artificial Sequence
  Description of Artificial Sequence: Synthetic oligonucleotide
caacuggaaacugcuauac

SEQ ID NO: 2080869 - RNA, 19 nt, Artificial Sequence
  Description of Artificial Sequence: Synthetic oligonucleotide
aggcaauaaaacaacugga

SEQ ID NO: 2080870 - RNA, 19 nt, Artificial Sequence
  Description of Artificial Sequence: Synthetic oligonucleotide
ugagaucaugcuucuuagu

SEQ ID NO: 2080871 - RNA, 19 nt, Artificial Sequence
  Description of Artificial Sequence: Synthetic oligonucleotide
uccaggacgggcugcgaag

SEQ ID NO: 2080872 - RNA, 19 nt, Artificial Sequence
  Description of Artificial Sequence: Synthetic oligonucleotide
aaucacacauugaggauua

SEQ ID NO: 2080873 - RNA, 19 nt, Artificial Sequence
  Description of Artificial Sequence: Synthetic oligonucleotide
ggacauugaauucuccaac

SEQ ID NO: 2080874 - RNA, 19 nt, Artificial Sequence
  Description of Artificial Sequence: Synthetic oligonucleotide
ugcuauacccgggcuaaag

SEQ ID NO: 2080875 - RNA, 19 nt, Artificial Sequence
  Description of Artificial Sequence: Synthetic oligonucleotide
aacugccaaacuucuguua

SEQ ID NO: 2080876 - RNA, 19 nt, Artificial Sequence
  Description of Artificial Sequence: Synthetic oligonucleotide
auaucugaggacauugaau

SEQ ID NO: 2080877 - RNA, 19 nt, Artificial Sequence
  Description of Artificial Sequence: Synthetic oligonucleotide
uguaguaaacagggaagau

SEQ ID NO: 2080878 - RNA, 19 nt, Artificial Sequence
  Description of Artificial Sequence: Synthetic oligonucleotide
gcaugggaaagaaacaggc

SEQ ID NO: 2080879 - RNA, 19 nt, Artificial Sequence
  Description of Artificial Sequence: Synthetic oligonucleotide
uuacuaugucagacuuuug

SEQ ID NO: 2080880 - RNA, 19 nt, Artificial Sequence
  Description of Artificial Sequence: Synthetic oligonucleotide
uagaacaccaaaggucuuc

SEQ ID NO: 2080881 - RNA, 19 nt, Artificial Sequence
  Description of Artificial Sequence: Synthetic oligonucleotide
cuucaccuuucauaaucac

SEQ ID NO: 2080882 - RNA, 19 nt, Artificial Sequence
  Description of Artificial Sequence: Synthetic oligonucleotide
uccaaugcucucucacaca

SEQ ID NO: 2080883 - RNA, 19 nt, Artificial Sequence
  Description of Artificial Sequence: Synthetic oligonucleotide
ggaagauuaagugcugaug

SEQ ID NO: 2080884 - RNA, 19 nt, Artificial Sequence
  Description of Artificial Sequence: Synthetic oligonucleotide
aaguuacagggaaacccug

SEQ ID NO: 2080885 - RNA, 19 nt, Artificial Sequence
  Description of Artificial Sequence: Synthetic oligonucleotide
guuauuggucuacugagau

SEQ ID NO: 2080886 - RNA, 19 nt, Artificial Sequence
  Description of Artificial Sequence: Synthetic oligonucleotide
gggcuaaagaacuaggucu

SEQ ID NO: 2080887 - RNA, 19 nt, Artificial Sequence
  Description of Artificial Sequence: Synthetic oligonucleotide
gaauuuaauaccacugcau

SEQ ID NO: 2080888 - RNA, 19 nt, Artificial Sequence
  Description of Artificial Sequence: Synthetic oligonucleotide
cugaggacauugaauucuc

SEQ ID NO: 2080889 - RNA, 19 nt, Artificial Sequence
  Description of Artificial Sequence: Synthetic oligonucleotide
aacgccaaguucugauuua

SEQ ID NO: 2080890 - RNA, 19 nt, Artificial Sequence
  Description of Artificial Sequence: Synthetic oligonucleotide
uugaugccaugguagcaga

SEQ ID NO: 2080891 - RNA, 19 nt, Artificial Sequence
  Description of Artificial Sequence: Synthetic oligonucleotide
cuauacccgggcuaaagaa

SEQ ID NO: 2080892 - RNA, 19 nt, Artificial Sequence
  Description of Artificial Sequence: Synthetic oligonucleotide
cuguuagcaagggcgacag

SEQ ID NO: 2080893 - RNA, 19 nt, Artificial Sequence
  Description of Artificial Sequence: Synthetic oligonucleotide
gaaguuacagggaaacccu

SEQ ID NO: 2080894 - RNA, 19 nt, Artificial Sequence
  Description of Artificial Sequence: Synthetic oligonucleotide
ugucagacuuuuguaguaa

SEQ ID NO: 2080895 - RNA, 19 nt, Artificial Sequence
  Description of Artificial Sequence: Synthetic oligonucleotide
ggcuagaacaccaaagguc

SEQ ID NO: 2080896 - RNA, 19 nt, Artificial Sequence
  Description of Artificial Sequence: Synthetic oligonucleotide
gaagcugaggaauacuguu

SEQ ID NO: 2080897 - RNA, 19 nt, Artificial Sequence
  Description of Artificial Sequence: Synthetic oligonucleotide
guuagcaagggcgacaggu

SEQ ID NO: 2080898 - RNA, 19 nt, Artificial Sequence
  Description of Artificial Sequence: Synthetic oligonucleotide
auacccgggcuaaagaacu

SEQ ID NO: 2080899 - RNA, 19 nt, Artificial Sequence
  Description of Artificial Sequence: Synthetic oligonucleotide
uaggcacaaaccucccaac

SEQ ID NO: 2080900 - RNA, 19 nt, Artificial Sequence
  Description of Artificial Sequence: Synthetic oligonucleotide
cgaaguuacagggaaaccc

SEQ ID NO: 2080901 - RNA, 19 nt, Artificial Sequence
  Description of Artificial Sequence: Synthetic oligonucleotide
aguuauuggucuacugaga

SEQ ID NO: 2080902 - RNA, 19 nt, Artificial Sequence
  Description of Artificial Sequence: Synthetic oligonucleotide
cuaggcacaaaccucccaa

SEQ ID NO: 2080903 - RNA, 19 nt, Artificial Sequence
  Description of Artificial Sequence: Synthetic oligonucleotide
gggcugcgaaguuacaggg

SEQ ID NO: 2080904 - RNA, 19 nt, Artificial Sequence
  Description of Artificial Sequence: Synthetic oligonucleotide
acuucaccuuucauaauca

SEQ ID NO: 2080905 - RNA, 19 nt, Artificial Sequence
  Description of Artificial Sequence: Synthetic oligonucleotide
ugacucugaaaagccagaa

SEQ ID NO: 2080906 - RNA, 19 nt, Artificial Sequence
  Description of Artificial Sequence: Synthetic oligonucleotide
aagggcgacaggugcugca

SEQ ID NO: 2080907 - RNA, 19 nt, Artificial Sequence
  Description of Artificial Sequence: Synthetic oligonucleotide
cagguucacauguccugcc

SEQ ID NO: 2080908 - RNA, 19 nt, Artificial Sequence
  Description of Artificial Sequence: Synthetic oligonucleotide
acuaggcacaaaccuccca

SEQ ID NO: 2080909 - RNA, 19 nt, Artificial Sequence
  Description of Artificial Sequence: Synthetic oligonucleotide
ggacaaaaggagaagcuga

SEQ ID NO: 2080910 - RNA, 19 nt, Artificial Sequence
  Description of Artificial Sequence: Synthetic oligonucleotide
acugcuauacccgggcuaa

SEQ ID NO: 2080911 - RNA, 19 nt, Artificial Sequence
  Description of Artificial Sequence: Synthetic oligonucleotide
uaagugcugaugagcuguc

SEQ ID NO: 2080912 - RNA, 19 nt, Artificial Sequence
  Description of Artificial Sequence: Synthetic oligonucleotide
aaggacagaaaaggacaaa

SEQ ID NO: 2080913 - RNA, 19 nt, Artificial Sequence
  Description of Artificial Sequence: Synthetic oligonucleotide
aaggcgaguuauuggucua

SEQ ID NO: 2080914 - RNA, 19 nt, Artificial Sequence
  Description of Artificial Sequence: Synthetic oligonucleotide
ggcaauaaaacaacuggaa

SEQ ID NO: 2080915 - RNA, 19 nt, Artificial Sequence
  Description of Artificial Sequence: Synthetic oligonucleotide
ccaacuaggcacaaaccuc

SEQ ID NO: 2080916 - RNA, 19 nt, Artificial Sequence
  Description of Artificial Sequence: Synthetic oligonucleotide
ccucucucaaauauaucug

SEQ ID NO: 2080917 - RNA, 19 nt, Artificial Sequence
  Description of Artificial Sequence: Synthetic oligonucleotide
cugguuuauuucagguuca

SEQ ID NO: 2080918 - RNA, 19 nt, Artificial Sequence
  Description of Artificial Sequence: Synthetic oligonucleotide
agcagaaaugauauauauu

SEQ ID NO: 2080919 - RNA, 19 nt, Artificial Sequence
  Description of Artificial Sequence: Synthetic oligonucleotide
aggcgaguuauuggucuac

SEQ ID NO: 2080920 - RNA, 19 nt, Artificial Sequence
  Description of Artificial Sequence: Synthetic oligonucleotide
ugguuuauuucagguucac

SEQ ID NO: 2080921 - RNA, 19 nt, Artificial Sequence
  Description of Artificial Sequence: Synthetic oligonucleotide
acgggcugcgaaguuacag

SEQ ID NO: 2080922 - RNA, 19 nt, Artificial Sequence
  Description of Artificial Sequence: Synthetic oligonucleotide
ucacacauugaggauuauu

SEQ ID NO: 2080923 - RNA, 19 nt, Artificial Sequence
  Description of Artificial Sequence: Synthetic oligonucleotide
gcuaaggcauugaaugaag

SEQ ID NO: 2080924 - RNA, 19 nt, Artificial Sequence
  Description of Artificial Sequence: Synthetic oligonucleotide
cauccucucucaaauauau

SEQ ID NO: 2080925 - RNA, 19 nt, Artificial Sequence
  Description of Artificial Sequence: Synthetic oligonucleotide
gcuagaacaccaaaggucu

SEQ ID NO: 2080926 - RNA, 19 nt, Artificial Sequence
  Description of Artificial Sequence: Synthetic oligonucleotide
cacugcauuuugcagugga

SEQ ID NO: 2080927 - RNA, 19 nt, Artificial Sequence
  Description of Artificial Sequence: Synthetic oligonucleotide
acagaucauugaugccaug

SEQ ID NO: 2080928 - RNA, 19 nt, Artificial Sequence
  Description of Artificial Sequence: Synthetic oligonucleotide
aaccucccaacgccaaguu

SEQ ID NO: 2080929 - RNA, 19 nt, Artificial Sequence
  Description of Artificial Sequence: Synthetic oligonucleotide
gagcuguccaggaaggcaa

SEQ ID NO: 2080930 - RNA, 19 nt, Artificial Sequence
  Description of Artificial Sequence: Synthetic oligonucleotide
gcugcgaaguuacagggaa

SEQ ID NO: 2080931 - RNA, 19 nt, Artificial Sequence
  Description of Artificial Sequence: Synthetic oligonucleotide
gccaaguucugauuuaaua

SEQ ID NO: 2080932 - RNA, 19 nt, Artificial Sequence
  Description of Artificial Sequence: Synthetic oligonucleotide
ggcuaaagaacuaggucuc

SEQ ID NO: 2080933 - RNA, 19 nt, Artificial Sequence
  Description of Artificial Sequence: Synthetic oligonucleotide
cuaaggcauugaaugaagu

SEQ ID NO: 2080934 - RNA, 19 nt, Artificial Sequence
  Description of Artificial Sequence: Synthetic oligonucleotide
guaguaaacagggaagauu

SEQ ID NO: 2080935 - RNA, 19 nt, Artificial Sequence
  Description of Artificial Sequence: Synthetic oligonucleotide
acccgggcuaaagaacuag

SEQ ID NO: 2080936 - RNA, 19 nt, Artificial Sequence
  Description of Artificial Sequence: Synthetic oligonucleotide
acacaacuucaccuuucau

SEQ ID NO: 2080937 - RNA, 19 nt, Artificial Sequence
  Description of Artificial Sequence: Synthetic oligonucleotide
uucacauguccugccuuuc

SEQ ID NO: 2080938 - RNA, 19 nt, Artificial Sequence
  Description of Artificial Sequence: Synthetic oligonucleotide
gcuauacccgggcuaaaga

SEQ ID NO: 2080939 - RNA, 19 nt, Artificial Sequence
  Description of Artificial Sequence: Synthetic oligonucleotide
cuuggcuaaggcauugaau

SEQ ID NO: 2080940 - RNA, 19 nt, Artificial Sequence
  Description of Artificial Sequence: Synthetic oligonucleotide
gcucuacagaucauugaug

SEQ ID NO: 2080941 - RNA, 19 nt, Artificial Sequence
  Description of Artificial Sequence: Synthetic oligonucleotide
aguaaacagggaagauuaa

SEQ ID NO: 2080942 - RNA, 19 nt, Artificial Sequence
  Description of Artificial Sequence: Synthetic oligonucleotide
cauugaugccaugguagca

SEQ ID NO: 2080943 - RNA, 19 nt, Artificial Sequence
  Description of Artificial Sequence: Synthetic oligonucleotide
cugcacuccuuggcuaagg

SEQ ID NO: 2080944 - RNA, 19 nt, Artificial Sequence
  Description of Artificial Sequence: Synthetic oligonucleotide
gcuucuuaguuaggauggg

SEQ ID NO: 2080945 - RNA, 19 nt, Artificial Sequence
  Description of Artificial Sequence: Synthetic oligonucleotide
cauugaggauuauucacuu

SEQ ID NO: 2080946 - RNA, 19 nt, Artificial Sequence
  Description of Artificial Sequence: Synthetic oligonucleotide
gcgaguuauuggucuacug

SEQ ID NO: 2080947 - RNA, 19 nt, Artificial Sequence
  Description of Artificial Sequence: Synthetic oligonucleotide
caccuuucauaaucacaca

SEQ ID NO: 2080948 - RNA, 19 nt, Artificial Sequence
  Description of Artificial Sequence: Synthetic oligonucleotide
gcuaaagaacuaggucucc

SEQ ID NO: 2080949 - RNA, 19 nt, Artificial Sequence
  Description of Artificial Sequence: Synthetic oligonucleotide
cgaguuauuggucuacuga

SEQ ID NO: 2080950 - RNA, 19 nt, Artificial Sequence
  Description of Artificial Sequence: Synthetic oligonucleotide
uccuuggcuaaggcauuga

SEQ ID NO: 2080951 - RNA, 19 nt, Artificial Sequence
  Description of Artificial Sequence: Synthetic oligonucleotide
guuggguaaaggacagaaa

SEQ ID NO: 2080952 - RNA, 19 nt, Artificial Sequence
  Description of Artificial Sequence: Synthetic oligonucleotide
acugcauuuugcaguggaa

SEQ ID NO: 2080953 - RNA, 19 nt, Artificial Sequence
  Description of Artificial Sequence: Synthetic oligonucleotide
cccgggcuaaagaacuagg

SEQ ID NO: 2080954 - RNA, 19 nt, Artificial Sequence
  Description of Artificial Sequence: Synthetic oligonucleotide
caugcuucuuaguuaggau

SEQ ID NO: 2080955 - RNA, 19 nt, Artificial Sequence
  Description of Artificial Sequence: Synthetic oligonucleotide
agcaagggcgacaggugcu

SEQ ID NO: 2080956 - RNA, 19 nt, Artificial Sequence
  Description of Artificial Sequence: Synthetic oligonucleotide
gucuacugagaucaugcuu

SEQ ID NO: 2080957 - RNA, 19 nt, Artificial Sequence
  Description of Artificial Sequence: Synthetic oligonucleotide
cgggcugcgaaguuacagg

SEQ ID NO: 2080958 - RNA, 19 nt, Artificial Sequence
  Description of Artificial Sequence: Synthetic oligonucleotide
cuaggucuccaaggacagc

SEQ ID NO: 2080959 - RNA, 19 nt, Artificial Sequence
  Description of Artificial Sequence: Synthetic oligonucleotide
uacccgggcuaaagaacua

SEQ ID NO: 2080960 - RNA, 19 nt, Artificial Sequence
  Description of Artificial Sequence: Synthetic oligonucleotide
cuccuuggcuaaggcauug

SEQ ID NO: 2080961 - RNA, 19 nt, Artificial Sequence
  Description of Artificial Sequence: Synthetic oligonucleotide
acgccaaguucugauuuaa

SEQ ID NO: 2080962 - RNA, 19 nt, Artificial Sequence
  Description of Artificial Sequence: Synthetic oligonucleotide
ggcuaaggcauugaaugaa

SEQ ID NO: 2080963 - RNA, 19 nt, Artificial Sequence
  Description of Artificial Sequence: Synthetic oligonucleotide
ccaucauuucaaucuaaaa

SEQ ID NO: 2080964 - RNA, 19 nt, Artificial Sequence
  Description of Artificial Sequence: Synthetic oligonucleotide
uucuccaacuaggcacaaa

SEQ ID NO: 2080965 - RNA, 19 nt, Artificial Sequence
  Description of Artificial Sequence: Synthetic oligonucleotide
ggcauccucucucaaauau

SEQ ID NO: 2080966 - RNA, 19 nt, Artificial Sequence
  Description of Artificial Sequence: Synthetic oligonucleotide
gcucuaagaacaagaagcu

SEQ ID NO: 2080967 - RNA, 19 nt, Artificial Sequence
  Description of Artificial Sequence: Synthetic oligonucleotide
cgggcuaaagaacuagguc

SEQ ID NO: 2080968 - RNA, 19 nt, Artificial Sequence
  Description of Artificial Sequence: Synthetic oligonucleotide
guucacauguccugccuuu

SEQ ID NO: 2080969 - RNA, 19 nt, Artificial Sequence
  Description of Artificial Sequence: Synthetic oligonucleotide
gcgaaguuacagggaaacc

SEQ ID NO: 2080970 - RNA, 19 nt, Artificial Sequence
  Description of Artificial Sequence: Synthetic oligonucleotide
cuacugagaucaugcuucu

SEQ ID NO: 2080971 - RNA, 19 nt, Artificial Sequence
  Description of Artificial Sequence: Synthetic oligonucleotide
gcucucucacacaacuuca

SEQ ID NO: 2080972 - RNA, 19 nt, Artificial Sequence
  Description of Artificial Sequence: Synthetic oligonucleotide
caagggcgacaggugcugc

SEQ ID NO: 2080973 - RNA, 19 nt, Artificial Sequence
  Description of Artificial Sequence: Synthetic oligonucleotide
cuucaauggcauccucucu

SEQ ID NO: 2080974 - RNA, 19 nt, Artificial Sequence
  Description of Artificial Sequence: Synthetic oligonucleotide
gcuguuagcaagggcgaca

SEQ ID NO: 2080975 - RNA, 19 nt, Artificial Sequence
  Description of Artificial Sequence: Synthetic oligonucleotide
ggacgggcugcgaaguuac

SEQ ID NO: 2080976 - RNA, 19 nt, Artificial Sequence
  Description of Artificial Sequence: Synthetic oligonucleotide
aggacgggcugcgaaguua

SEQ ID NO: 2080977 - RNA, 19 nt, Artificial Sequence
  Description of Artificial Sequence: Synthetic oligonucleotide
caacgccaaguucugauuu

SEQ ID NO: 2080978 - RNA, 19 nt, Artificial Sequence
  Description of Artificial Sequence: Synthetic oligonucleotide
cugcgaaguuacagggaaa

SEQ ID NO: 2080979 - RNA, 19 nt, Artificial Sequence
  Description of Artificial Sequence: Synthetic oligonucleotide
ggucuacugagaucaugcu

SEQ ID NO: 2080980 - RNA, 19 nt, Artificial Sequence
  Description of Artificial Sequence: Synthetic oligonucleotide
gcaagggcgacaggugcug

SEQ ID NO: 2080981 - RNA, 19 nt, Artificial Sequence
  Description of Artificial Sequence: Synthetic oligonucleotide
gguuccuccaaugcucucu

SEQ ID NO: 2080982 - RNA, 19 nt, Artificial Sequence
  Description of Artificial Sequence: Synthetic oligonucleotide
auucuccaacuaggcacaa

SEQ ID NO: 2080983 - RNA, 19 nt, Artificial Sequence
  Description of Artificial Sequence: Synthetic oligonucleotide
aguuaggaugggagucuuu

SEQ ID NO: 2080984 - RNA, 19 nt, Artificial Sequence
  Description of Artificial Sequence: Synthetic oligonucleotide
acuccuuggcuaaggcauu

SEQ ID NO: 2080985 - RNA, 19 nt, Artificial Sequence
  Description of Artificial Sequence: Synthetic oligonucleotide
gcauugaaugaagucaguu

SEQ ID NO: 2080986 - RNA, 19 nt, Artificial Sequence
  Description of Artificial Sequence: Synthetic oligonucleotide
ggagaagcugaggaauacu

SEQ ID NO: 2080987 - RNA, 19 nt, Artificial Sequence
  Description of Artificial Sequence: Synthetic oligonucleotide
gcgacaggugcugcacucc

SEQ ID NO: 2080988 - RNA, 19 nt, Artificial Sequence
  Description of Artificial Sequence: Synthetic oligonucleotide
aucacacauugaggauuau

SEQ ID NO: 2080989 - RNA, 19 nt, Artificial Sequence
  Description of Artificial Sequence: Synthetic oligonucleotide
gcauuuugcaguggaaguu

SEQ ID NO: 2080990 - RNA, 19 nt, Artificial Sequence
  Description of Artificial Sequence: Synthetic oligonucleotide
gcugcacuccuuggcuaag

SEQ ID NO: 2080991 - RNA, 19 nt, Artificial Sequence
  Description of Artificial Sequence: Synthetic oligonucleotide
ggcugcgaaguuacaggga

SEQ ID NO: 2080992 - RNA, 19 nt, Artificial Sequence
  Description of Artificial Sequence: Synthetic oligonucleotide
ccuuggcuaaggcauugaa

SEQ ID NO: 2080993 - RNA, 19 nt, Artificial Sequence
  Description of Artificial Sequence: Synthetic oligonucleotide
gacgggcugcgaaguuaca

SEQ ID NO: 2080994 - RNA, 19 nt, Artificial Sequence
  Description of Artificial Sequence: Synthetic oligonucleotide
ccacuucaauggcauccuc

SEQ ID NO: 2080995 - RNA, 19 nt, Artificial Sequence
  Description of Artificial Sequence: Synthetic oligonucleotide
ccgggcuaaagaacuaggu

SEQ ID NO: 2080996 - RNA, 19 nt, Artificial Sequence
  Description of Artificial Sequence: Synthetic oligonucleotide
cccaacgccaaguucugau

SEQ ID NO: 2080997 - RNA, 19 nt, Artificial Sequence
  Description of Artificial Sequence: Synthetic oligonucleotide
ggcauugaaugaagucagu

SEQ ID NO: 2080998 - RNA, 19 nt, Artificial Sequence
  Description of Artificial Sequence: Synthetic oligonucleotide
ggcgaguuauuggucuacu

SEQ ID NO: 2080999 - RNA, 19 nt, Artificial Sequence
  Description of Artificial Sequence: Synthetic oligonucleotide
cugcuauacccgggcuaaa

SEQ ID NO: 2081000 - RNA, 19 nt, Artificial Sequence
  Description of Artificial Sequence: Synthetic oligonucleotide
ccaacgccaaguucugauu

SEQ ID NO: 2081001 - RNA, 19 nt, Artificial Sequence
  Description of Artificial Sequence: Synthetic oligonucleotide
gggcgacaggugcugcacu

SEQ ID NO: 2081002 - RNA, 19 nt, Artificial Sequence
  Description of Artificial Sequence: Synthetic oligonucleotide
caggacgggcugcgaaguu

SEQ ID NO: 2081003 - RNA, 19 nt, Artificial Sequence
  Description of Artificial Sequence: Synthetic oligonucleotide
ccaggacgggcugcgaagu

SEQ ID NO: 2081004 - RNA, 19 nt, Artificial Sequence
  Description of Artificial Sequence: Synthetic oligonucleotide
aaauaugaaguguuaacac

SEQ ID NO: 2081005 - RNA, 19 nt, Artificial Sequence
  Description of Artificial Sequence: Synthetic oligonucleotide
uaaaauauuauagcaaugg

SEQ ID NO: 2081006 - RNA, 19 nt, Artificial Sequence
  Description of Artificial Sequence: Synthetic oligonucleotide
aaaucuuacaaguaggcug

SEQ ID NO: 2081007 - RNA, 19 nt, Artificial Sequence
  Description of Artificial Sequence: Synthetic oligonucleotide
uacauauuuauguacaucc

SEQ ID NO: 2081008 - RNA, 19 nt, Artificial Sequence
  Description of Artificial Sequence: Synthetic oligonucleotide
aaagcacauguucuuaacc

SEQ ID NO: 2081009 - RNA, 19 nt, Artificial Sequence
  Description of Artificial Sequence: Synthetic oligonucleotide
uuaguagucauaaauacaa

SEQ ID NO: 2081010 - RNA, 19 nt, Artificial Sequence
  Description of Artificial Sequence: Synthetic oligonucleotide
cuugcuuuaagauagcuac

SEQ ID NO: 2081011 - RNA, 19 nt, Artificial Sequence
  Description of Artificial Sequence: Synthetic oligonucleotide
aaagcuugcuuuaagauag

SEQ ID NO: 2081012 - RNA, 19 nt, Artificial Sequence
  Description of Artificial Sequence: Synthetic oligonucleotide
aauauuauagcaaugguuu

SEQ ID NO: 2081013 - RNA, 19 nt, Artificial Sequence
  Description of Artificial Sequence: Synthetic oligonucleotide
ugagaucugagauaucugg

SEQ ID NO: 2081014 - RNA, 19 nt, Artificial Sequence
  Description of Artificial Sequence: Synthetic oligonucleotide
cuuaucauaacccucuagc

SEQ ID NO: 2081015 - RNA, 19 nt, Artificial Sequence
  Description of Artificial Sequence: Synthetic oligonucleotide
aaaauauuauagcaauggu

SEQ ID NO: 2081016 - RNA, 19 nt, Artificial Sequence
  Description of Artificial Sequence: Synthetic oligonucleotide
uuuauuuaguauauccucu

SEQ ID NO: 2081017 - RNA, 19 nt, Artificial Sequence
  Description of Artificial Sequence: Synthetic oligonucleotide
uuuuauuuaguauauccuc

SEQ ID NO: 2081018 - RNA, 19 nt, Artificial Sequence
  Description of Artificial Sequence: Synthetic oligonucleotide
aaaagcacauguucuuaac

SEQ ID NO: 2081019 - RNA, 19 nt, Artificial Sequence
  Description of Artificial Sequence: Synthetic oligonucleotide
uguggaagcaugcugagcu

SEQ ID NO: 2081020 - RNA, 19 nt, Artificial Sequence
  Description of Artificial Sequence: Synthetic oligonucleotide
aagagauugccuuccacag

SEQ ID NO: 2081021 - RNA, 19 nt, Artificial Sequence
  Description of Artificial Sequence: Synthetic oligonucleotide
uaaccaucgacguaguucc

SEQ ID NO: 2081022 - RNA, 19 nt, Artificial Sequence
  Description of Artificial Sequence: Synthetic oligonucleotide
cuuuaucucaaagagauug

SEQ ID NO: 2081023 - RNA, 19 nt, Artificial Sequence
  Description of Artificial Sequence: Synthetic oligonucleotide
aaaucuugauuauuaaaau

SEQ ID NO: 2081024 - RNA, 19 nt, Artificial Sequence
  Description of Artificial Sequence: Synthetic oligonucleotide
cuuuugaauuggcagaugg

SEQ ID NO: 2081025 - RNA, 19 nt, Artificial Sequence
  Description of Artificial Sequence: Synthetic oligonucleotide
auaucaugcaaacuucuuc

SEQ ID NO: 2081026 - RNA, 19 nt, Artificial Sequence
  Description of Artificial Sequence: Synthetic oligonucleotide
ugaaguguuaacacagaag

SEQ ID NO: 2081027 - RNA, 19 nt, Artificial Sequence
  Description of Artificial Sequence: Synthetic oligonucleotide
acuuuuagcucuucagagc

SEQ ID NO: 2081028 - RNA, 19 nt, Artificial Sequence
  Description of Artificial Sequence: Synthetic oligonucleotide
gaugucgcaggcuacaaag

SEQ ID NO: 2081029 - RNA, 19 nt, Artificial Sequence
  Description of Artificial Sequence: Synthetic oligonucleotide
aauuaccagaaauaacaca

SEQ ID NO: 2081030 - RNA, 19 nt, Artificial Sequence
  Description of Artificial Sequence: Synthetic oligonucleotide
aauccccaguacuugaggg

SEQ ID NO: 2081031 - RNA, 19 nt, Artificial Sequence
  Description of Artificial Sequence: Synthetic oligonucleotide
ugaauuggcagauggaaca

SEQ ID NO: 2081032 - RNA, 19 nt, Artificial Sequence
  Description of Artificial Sequence: Synthetic oligonucleotide
uuguuuaguagucauaaau

SEQ ID NO: 2081033 - RNA, 19 nt, Artificial Sequence
  Description of Artificial Sequence: Synthetic oligonucleotide
aagauagcuacauauuuau

SEQ ID NO: 2081034 - RNA, 19 nt, Artificial Sequence
  Description of Artificial Sequence: Synthetic oligonucleotide
aaauuaccagaaauaacac

SEQ ID NO: 2081035 - RNA, 19 nt, Artificial Sequence
  Description of Artificial Sequence: Synthetic oligonucleotide
uacuuuuagcucuucagag

SEQ ID NO: 2081036 - RNA, 19 nt, Artificial Sequence
  Description of Artificial Sequence: Synthetic oligonucleotide
auagcaaugguuuucuuga

SEQ ID NO: 2081037 - RNA, 19 nt, Artificial Sequence
  Description of Artificial Sequence: Synthetic oligonucleotide
uucuuaaccaucgacguag

SEQ ID NO: 2081038 - RNA, 19 nt, Artificial Sequence
  Description of Artificial Sequence: Synthetic oligonucleotide
cuuuuagcucuucagagcc

SEQ ID NO: 2081039 - RNA, 19 nt, Artificial Sequence
  Description of Artificial Sequence: Synthetic oligonucleotide
ucaaguauacuccgaaucu

SEQ ID NO: 2081040 - RNA, 19 nt, Artificial Sequence
  Description of Artificial Sequence: Synthetic oligonucleotide
gaaguguuaacacagaagu

SEQ ID NO: 2081041 - RNA, 19 nt, Artificial Sequence
  Description of Artificial Sequence: Synthetic oligonucleotide
aguauauccucucauucag

SEQ ID NO: 2081042 - RNA, 19 nt, Artificial Sequence
  Description of Artificial Sequence: Synthetic oligonucleotide
uuauguacaucccaaguuc

SEQ ID NO: 2081043 - RNA, 19 nt, Artificial Sequence
  Description of Artificial Sequence: Synthetic oligonucleotide
guuuaguagucauaaauac

SEQ ID NO: 2081044 - RNA, 19 nt, Artificial Sequence
  Description of Artificial Sequence: Synthetic oligonucleotide
aacacagaagugauguccc

SEQ ID NO: 2081045 - RNA, 19 nt, Artificial Sequence
  Description of Artificial Sequence: Synthetic oligonucleotide
uguuuaguagucauaaaua

SEQ ID NO: 2081046 - RNA, 19 nt, Artificial Sequence
  Description of Artificial Sequence: Synthetic oligonucleotide
aagcacauguucuuaacca

SEQ ID NO: 2081047 - RNA, 19 nt, Artificial Sequence
  Description of Artificial Sequence: Synthetic oligonucleotide
uuaagauagcuacauauuu

SEQ ID NO: 2081048 - RNA, 19 nt, Artificial Sequence
  Description of Artificial Sequence: Synthetic oligonucleotide
uaucaugcaaacuucuucu

SEQ ID NO: 2081049 - RNA, 19 nt, Artificial Sequence
  Description of Artificial Sequence: Synthetic oligonucleotide
uuaguauauccucucauuc

SEQ ID NO: 2081050 - RNA, 19 nt, Artificial Sequence
  Description of Artificial Sequence: Synthetic oligonucleotide
uuaauuaaaucuucaggaa

SEQ ID NO: 2081051 - RNA, 19 nt, Artificial Sequence
  Description of Artificial Sequence: Synthetic oligonucleotide
aggacuuucagacgagggc

SEQ ID NO: 2081052 - RNA, 19 nt, Artificial Sequence
  Description of Artificial Sequence: Synthetic oligonucleotide
uggcagauggaacaaaagc

SEQ ID NO: 2081053 - RNA, 19 nt, Artificial Sequence
  Description of Artificial Sequence: Synthetic oligonucleotide
gauagcuacauauuuaugu

SEQ ID NO: 2081054 - RNA, 19 nt, Artificial Sequence
  Description of Artificial Sequence: Synthetic oligonucleotide
gagccuucuaccaauaagg

SEQ ID NO: 2081055 - RNA, 19 nt, Artificial Sequence
  Description of Artificial Sequence: Synthetic oligonucleotide
uaccagaaauaacacauug

SEQ ID NO: 2081056 - RNA, 19 nt, Artificial Sequence
  Description of Artificial Sequence: Synthetic oligonucleotide
aauuaaaucuucaggaaaa

SEQ ID NO: 2081057 - RNA, 19 nt, Artificial Sequence
  Description of Artificial Sequence: Synthetic oligonucleotide
aggaacauuucuugguggc

SEQ ID NO: 2081058 - RNA, 19 nt, Artificial Sequence
  Description of Artificial Sequence: Synthetic oligonucleotide
aaguaggcugaguauggcg

SEQ ID NO: 2081059 - RNA, 19 nt, Artificial Sequence
  Description of Artificial Sequence: Synthetic oligonucleotide
aguguuaacacagaaguga

SEQ ID NO: 2081060 - RNA, 19 nt, Artificial Sequence
  Description of Artificial Sequence: Synthetic oligonucleotide
uacugugucaaguauacuc

SEQ ID NO: 2081061 - RNA, 19 nt, Artificial Sequence
  Description of Artificial Sequence: Synthetic oligonucleotide
uuuaucucaaagagauugc

SEQ ID NO: 2081062 - RNA, 19 nt, Artificial Sequence
  Description of Artificial Sequence: Synthetic oligonucleotide
agaucuacaacauccagau

SEQ ID NO: 2081063 - RNA, 19 nt, Artificial Sequence
  Description of Artificial Sequence: Synthetic oligonucleotide
uuuauguacaucccaaguu

SEQ ID NO: 2081064 - RNA, 19 nt, Artificial Sequence
  Description of Artificial Sequence: Synthetic oligonucleotide
uacaacauccagaugucgc

SEQ ID NO: 2081065 - RNA, 19 nt, Artificial Sequence
  Description of Artificial Sequence: Synthetic oligonucleotide
uaaggcaccugcaauaagu

SEQ ID NO: 2081066 - RNA, 19 nt, Artificial Sequence
  Description of Artificial Sequence: Synthetic oligonucleotide
acugugucaaguauacucc

SEQ ID NO: 2081067 - RNA, 19 nt, Artificial Sequence
  Description of Artificial Sequence: Synthetic oligonucleotide
uauacuccgaaucugguuu

SEQ ID NO: 2081068 - RNA, 19 nt, Artificial Sequence
  Description of Artificial Sequence: Synthetic oligonucleotide
auuaccagaaauaacacau

SEQ ID NO: 2081069 - RNA, 19 nt, Artificial Sequence
  Description of Artificial Sequence: Synthetic oligonucleotide
aaauauuauagcaaugguu

SEQ ID NO: 2081070 - RNA, 19 nt, Artificial Sequence
  Description of Artificial Sequence: Synthetic oligonucleotide
ucgcaggcuacaaaguugg

SEQ ID NO: 2081071 - RNA, 19 nt, Artificial Sequence
  Description of Artificial Sequence: Synthetic oligonucleotide
uguucuuaaccaucgacgu

SEQ ID NO: 2081072 - RNA, 19 nt, Artificial Sequence
  Description of Artificial Sequence: Synthetic oligonucleotide
cuaccaauaaggcaccugc

SEQ ID NO: 2081073 - RNA, 19 nt, Artificial Sequence
  Description of Artificial Sequence: Synthetic oligonucleotide
auaugaaguguuaacacag

SEQ ID NO: 2081074 - RNA, 19 nt, Artificial Sequence
  Description of Artificial Sequence: Synthetic oligonucleotide
uaacacagaagugaugucc

SEQ ID NO: 2081075 - RNA, 19 nt, Artificial Sequence
  Description of Artificial Sequence: Synthetic oligonucleotide
aaguauacuccgaaucugg

SEQ ID NO: 2081076 - RNA, 19 nt, Artificial Sequence
  Description of Artificial Sequence: Synthetic oligonucleotide
auuuauguacaucccaagu

SEQ ID NO: 2081077 - RNA, 19 nt, Artificial Sequence
  Description of Artificial Sequence: Synthetic oligonucleotide
uucugguugagauugaguu

SEQ ID NO: 2081078 - RNA, 19 nt, Artificial Sequence
  Description of Artificial Sequence: Synthetic oligonucleotide
uguacuuaucauaacccuc

SEQ ID NO: 2081079 - RNA, 19 nt, Artificial Sequence
  Description of Artificial Sequence: Synthetic oligonucleotide
ugucccaugguccuggaga

SEQ ID NO: 2081080 - RNA, 19 nt, Artificial Sequence
  Description of Artificial Sequence: Synthetic oligonucleotide
aguaggcugaguauggcgc

SEQ ID NO: 2081081 - RNA, 19 nt, Artificial Sequence
  Description of Artificial Sequence: Synthetic oligonucleotide
auuugggagucauugagga

SEQ ID NO: 2081082 - RNA, 19 nt, Artificial Sequence
  Description of Artificial Sequence: Synthetic oligonucleotide
aaucuuacaaguaggcuga

SEQ ID NO: 2081083 - RNA, 19 nt, Artificial Sequence
  Description of Artificial Sequence: Synthetic oligonucleotide
aaaaucuuacaaguaggcu

SEQ ID NO: 2081084 - RNA, 19 nt, Artificial Sequence
  Description of Artificial Sequence: Synthetic oligonucleotide
ugguagugcucccagcugg

SEQ ID NO: 2081085 - RNA, 19 nt, Artificial Sequence
  Description of Artificial Sequence: Synthetic oligonucleotide
uuugaauuggcagauggaa

SEQ ID NO: 2081086 - RNA, 19 nt, Artificial Sequence
  Description of Artificial Sequence: Synthetic oligonucleotide
aacauccagaugucgcagg

SEQ ID NO: 2081087 - RNA, 19 nt, Artificial Sequence
  Description of Artificial Sequence: Synthetic oligonucleotide
ccuucuaccaauaaggcac

SEQ ID NO: 2081088 - RNA, 19 nt, Artificial Sequence
  Description of Artificial Sequence: Synthetic oligonucleotide
uaguauauccucucauuca

SEQ ID NO: 2081089 - RNA, 19 nt, Artificial Sequence
  Description of Artificial Sequence: Synthetic oligonucleotide
gaagugaugucccaugguc

SEQ ID NO: 2081090 - RNA, 19 nt, Artificial Sequence
  Description of Artificial Sequence: Synthetic oligonucleotide
agcugguucccagagaggc

SEQ ID NO: 2081091 - RNA, 19 nt, Artificial Sequence
  Description of Artificial Sequence: Synthetic oligonucleotide
uuaagucugaggcuagccu

SEQ ID NO: 2081092 - RNA, 19 nt, Artificial Sequence
  Description of Artificial Sequence: Synthetic oligonucleotide
uuuugaauuggcagaugga

SEQ ID NO: 2081093 - RNA, 19 nt, Artificial Sequence
  Description of Artificial Sequence: Synthetic oligonucleotide
acauauuuauguacauccc

SEQ ID NO: 2081094 - RNA, 19 nt, Artificial Sequence
  Description of Artificial Sequence: Synthetic oligonucleotide
uuauuuaguauauccucuc

SEQ ID NO: 2081095 - RNA, 19 nt, Artificial Sequence
  Description of Artificial Sequence: Synthetic oligonucleotide
uacaaguaggcugaguaug

SEQ ID NO: 2081096 - RNA, 19 nt, Artificial Sequence
  Description of Artificial Sequence: Synthetic oligonucleotide
auuuguuuaguagucauaa

SEQ ID NO: 2081097 - RNA, 19 nt, Artificial Sequence
  Description of Artificial Sequence: Synthetic oligonucleotide
aguucgauggccugcagcu

SEQ ID NO: 2081098 - RNA, 19 nt, Artificial Sequence
  Description of Artificial Sequence: Synthetic oligonucleotide
ucauugaggaugcucugug

SEQ ID NO: 2081099 - RNA, 19 nt, Artificial Sequence
  Description of Artificial Sequence: Synthetic oligonucleotide
uugaauuggcagauggaac

SEQ ID NO: 2081100 - RNA, 19 nt, Artificial Sequence
  Description of Artificial Sequence: Synthetic oligonucleotide
uggagaauaucaugcaaac

SEQ ID NO: 2081101 - RNA, 19 nt, Artificial Sequence
  Description of Artificial Sequence: Synthetic oligonucleotide
gagauugccuuccacagca

SEQ ID NO: 2081102 - RNA, 19 nt, Artificial Sequence
  Description of Artificial Sequence: Synthetic oligonucleotide
agagauugccuuccacagc

SEQ ID NO: 2081103 - RNA, 19 nt, Artificial Sequence
  Description of Artificial Sequence: Synthetic oligonucleotide
uaauuuguuuaguagucau

SEQ ID NO: 2081104 - RNA, 19 nt, Artificial Sequence
  Description of Artificial Sequence: Synthetic oligonucleotide
uaauccccaguacuugagg

SEQ ID NO: 2081105 - RNA, 19 nt, Artificial Sequence
  Description of Artificial Sequence: Synthetic oligonucleotide
gagaaugaccaugauaaac

SEQ ID NO: 2081106 - RNA, 19 nt, Artificial Sequence
  Description of Artificial Sequence: Synthetic oligonucleotide
uauaauccccaguacuuga

SEQ ID NO: 2081107 - RNA, 19 nt, Artificial Sequence
  Description of Artificial Sequence: Synthetic oligonucleotide
uuuaguauauccucucauu

SEQ ID NO: 2081108 - RNA, 19 nt, Artificial Sequence
  Description of Artificial Sequence: Synthetic oligonucleotide
ucagagaaugaccaugaua

SEQ ID NO: 2081109 - RNA, 19 nt, Artificial Sequence
  Description of Artificial Sequence: Synthetic oligonucleotide
uucccacaaaauuagaauu

SEQ ID NO: 2081110 - RNA, 19 nt, Artificial Sequence
  Description of Artificial Sequence: Synthetic oligonucleotide
ggaacaaaagcacauguuc

SEQ ID NO: 2081111 - RNA, 19 nt, Artificial Sequence
  Description of Artificial Sequence: Synthetic oligonucleotide
aacccucuagcucucuaag

SEQ ID NO: 2081112 - RNA, 19 nt, Artificial Sequence
  Description of Artificial Sequence: Synthetic oligonucleotide
gucaaguauacuccgaauc

SEQ ID NO: 2081113 - RNA, 19 nt, Artificial Sequence
  Description of Artificial Sequence: Synthetic oligonucleotide
guaguucccacaaaauuag

SEQ ID NO: 2081114 - RNA, 19 nt, Artificial Sequence
  Description of Artificial Sequence: Synthetic oligonucleotide
uaugaaguguuaacacaga

SEQ ID NO: 2081115 - RNA, 19 nt, Artificial Sequence
  Description of Artificial Sequence: Synthetic oligonucleotide
ugagauugaguucgauggc

SEQ ID NO: 2081116 - RNA, 19 nt, Artificial Sequence
  Description of Artificial Sequence: Synthetic oligonucleotide
gacaaagcuugcuuuaaga

SEQ ID NO: 2081117 - RNA, 19 nt, Artificial Sequence
  Description of Artificial Sequence: Synthetic oligonucleotide
auguacuuaucauaacccu

SEQ ID NO: 2081118 - RNA, 19 nt, Artificial Sequence
  Description of Artificial Sequence: Synthetic oligonucleotide
cauguucuuaaccaucgac

SEQ ID NO: 2081119 - RNA, 19 nt, Artificial Sequence
  Description of Artificial Sequence: Synthetic oligonucleotide
auuuaguauauccucucau

SEQ ID NO: 2081120 - RNA, 19 nt, Artificial Sequence
  Description of Artificial Sequence: Synthetic oligonucleotide
auugaggaugcucugugga

SEQ ID NO: 2081121 - RNA, 19 nt, Artificial Sequence
  Description of Artificial Sequence: Synthetic oligonucleotide
agagaucuacaacauccag

SEQ ID NO: 2081122 - RNA, 19 nt, Artificial Sequence
  Description of Artificial Sequence: Synthetic oligonucleotide
auagcuacauauuuaugua

SEQ ID NO: 2081123 - RNA, 19 nt, Artificial Sequence
  Description of Artificial Sequence: Synthetic oligonucleotide
uauuauagcaaugguuuuc

SEQ ID NO: 2081124 - RNA, 19 nt, Artificial Sequence
  Description of Artificial Sequence: Synthetic oligonucleotide
uuggcagauggaacaaaag

SEQ ID NO: 2081125 - RNA, 19 nt, Artificial Sequence
  Description of Artificial Sequence: Synthetic oligonucleotide
ugacaaagcuugcuuuaag

SEQ ID NO: 2081126 - RNA, 19 nt, Artificial Sequence
  Description of Artificial Sequence: Synthetic oligonucleotide
gaucugagauaucugguuc

SEQ ID NO: 2081127 - RNA, 19 nt, Artificial Sequence
  Description of Artificial Sequence: Synthetic oligonucleotide
uguuaacacagaagugaug

SEQ ID NO: 2081128 - RNA, 19 nt, Artificial Sequence
  Description of Artificial Sequence: Synthetic oligonucleotide
auuauagcaaugguuuucu

SEQ ID NO: 2081129 - RNA, 19 nt, Artificial Sequence
  Description of Artificial Sequence: Synthetic oligonucleotide
uuuaagucugaggcuagcc

SEQ ID NO: 2081130 - RNA, 19 nt, Artificial Sequence
  Description of Artificial Sequence: Synthetic oligonucleotide
cuuuaagauagcuacauau

SEQ ID NO: 2081131 - RNA, 19 nt, Artificial Sequence
  Description of Artificial Sequence: Synthetic oligonucleotide
acuuaucauaacccucuag

SEQ ID NO: 2081132 - RNA, 19 nt, Artificial Sequence
  Description of Artificial Sequence: Synthetic oligonucleotide
accaugauaaacauaaguu

SEQ ID NO: 2081133 - RNA, 19 nt, Artificial Sequence
  Description of Artificial Sequence: Synthetic oligonucleotide
cuuacaaguaggcugagua

SEQ ID NO: 2081134 - RNA, 19 nt, Artificial Sequence
  Description of Artificial Sequence: Synthetic oligonucleotide
uucagacgagggcagcagg

SEQ ID NO: 2081135 - RNA, 19 nt, Artificial Sequence
  Description of Artificial Sequence: Synthetic oligonucleotide
aaugguuuucuugaaggua

SEQ ID NO: 2081136 - RNA, 19 nt, Artificial Sequence
  Description of Artificial Sequence: Synthetic oligonucleotide
ugaggaugcucuguggaag

SEQ ID NO: 2081137 - RNA, 19 nt, Artificial Sequence
  Description of Artificial Sequence: Synthetic oligonucleotide
acagaagugaugucccaug

SEQ ID NO: 2081138 - RNA, 19 nt, Artificial Sequence
  Description of Artificial Sequence: Synthetic oligonucleotide
ugugucaaguauacuccga

SEQ ID NO: 2081139 - RNA, 19 nt, Artificial Sequence
  Description of Artificial Sequence: Synthetic oligonucleotide
cugugucaaguauacuccg

SEQ ID NO: 2081140 - RNA, 19 nt, Artificial Sequence
  Description of Artificial Sequence: Synthetic oligonucleotide
agugcacugcuuuugaauu

SEQ ID NO: 2081141 - RNA, 19 nt, Artificial Sequence
  Description of Artificial Sequence: Synthetic oligonucleotide
uguguuggugcuccucuug

SEQ ID NO: 2081142 - RNA, 19 nt, Artificial Sequence
  Description of Artificial Sequence: Synthetic oligonucleotide
ugggagucauugaggaugc

SEQ ID NO: 2081143 - RNA, 19 nt, Artificial Sequence
  Description of Artificial Sequence: Synthetic oligonucleotide
cagaagugaugucccaugg

SEQ ID NO: 2081144 - RNA, 19 nt, Artificial Sequence
  Description of Artificial Sequence: Synthetic oligonucleotide
uacaucccaaguuccaagu

SEQ ID NO: 2081145 - RNA, 19 nt, Artificial Sequence
  Description of Artificial Sequence: Synthetic oligonucleotide
augaaguguuaacacagaa

SEQ ID NO: 2081146 - RNA, 19 nt, Artificial Sequence
  Description of Artificial Sequence: Synthetic oligonucleotide
cucaaagagauugccuucc

SEQ ID NO: 2081147 - RNA, 19 nt, Artificial Sequence
  Description of Artificial Sequence: Synthetic oligonucleotide
aaguguuaacacagaagug

SEQ ID NO: 2081148 - RNA, 19 nt, Artificial Sequence
  Description of Artificial Sequence: Synthetic oligonucleotide
gauaucugguucugguuga

SEQ ID NO: 2081149 - RNA, 19 nt, Artificial Sequence
  Description of Artificial Sequence: Synthetic oligonucleotide
ucagacgagggcagcagga

SEQ ID NO: 2081150 - RNA, 19 nt, Artificial Sequence
  Description of Artificial Sequence: Synthetic oligonucleotide
auccccaguacuugagggg

SEQ ID NO: 2081151 - RNA, 19 nt, Artificial Sequence
  Description of Artificial Sequence: Synthetic oligonucleotide
cagcaggauaucuucacug

SEQ ID NO: 2081152 - RNA, 19 nt, Artificial Sequence
  Description of Artificial Sequence: Synthetic oligonucleotide
cauugaggaugcucugugg

SEQ ID NO: 2081153 - RNA, 19 nt, Artificial Sequence
  Description of Artificial Sequence: Synthetic oligonucleotide
uuacaaguaggcugaguau

SEQ ID NO: 2081154 - RNA, 19 nt, Artificial Sequence
  Description of Artificial Sequence: Synthetic oligonucleotide
agccuucuaccaauaaggc

SEQ ID NO: 2081155 - RNA, 19 nt, Artificial Sequence
  Description of Artificial Sequence: Synthetic oligonucleotide
uggaacaaaagcacauguu

SEQ ID NO: 2081156 - RNA, 19 nt, Artificial Sequence
  Description of Artificial Sequence: Synthetic oligonucleotide
aaguuggggugguagugcu

SEQ ID NO: 2081157 - RNA, 19 nt, Artificial Sequence
  Description of Artificial Sequence: Synthetic oligonucleotide
gagaucuacaacauccaga

SEQ ID NO: 2081158 - RNA, 19 nt, Artificial Sequence
  Description of Artificial Sequence: Synthetic oligonucleotide
uugcuuuaagauagcuaca

SEQ ID NO: 2081159 - RNA, 19 nt, Artificial Sequence
  Description of Artificial Sequence: Synthetic oligonucleotide
guacaucccaaguuccaag

SEQ ID NO: 2081160 - RNA, 19 nt, Artificial Sequence
  Description of Artificial Sequence: Synthetic oligonucleotide
cuucuaccaauaaggcacc

SEQ ID NO: 2081161 - RNA, 19 nt, Artificial Sequence
  Description of Artificial Sequence: Synthetic oligonucleotide
uuuguuuaguagucauaaa

SEQ ID NO: 2081162 - RNA, 19 nt, Artificial Sequence
  Description of Artificial Sequence: Synthetic oligonucleotide
agaucugagauaucugguu

SEQ ID NO: 2081163 - RNA, 19 nt, Artificial Sequence
  Description of Artificial Sequence: Synthetic oligonucleotide
aggaaaaucuugauuauua

SEQ ID NO: 2081164 - RNA, 19 nt, Artificial Sequence
  Description of Artificial Sequence: Synthetic oligonucleotide
gauugaguucgauggccug

SEQ ID NO: 2081165 - RNA, 19 nt, Artificial Sequence
  Description of Artificial Sequence: Synthetic oligonucleotide
gaggaugcucuguggaagc

SEQ ID NO: 2081166 - RNA, 19 nt, Artificial Sequence
  Description of Artificial Sequence: Synthetic oligonucleotide
accaauaaggcaccugcaa

SEQ ID NO: 2081167 - RNA, 19 nt, Artificial Sequence
  Description of Artificial Sequence: Synthetic oligonucleotide
agccuugaggaacauuucu

SEQ ID NO: 2081168 - RNA, 19 nt, Artificial Sequence
  Description of Artificial Sequence: Synthetic oligonucleotide
acguaguucccacaaaauu

SEQ ID NO: 2081169 - RNA, 19 nt, Artificial Sequence
  Description of Artificial Sequence: Synthetic oligonucleotide
auauuauagcaaugguuuu

SEQ ID NO: 2081170 - RNA, 19 nt, Artificial Sequence
  Description of Artificial Sequence: Synthetic oligonucleotide
aauaucaugcaaacuucuu

SEQ ID NO: 2081171 - RNA, 19 nt, Artificial Sequence
  Description of Artificial Sequence: Synthetic oligonucleotide
uccucucauucagagaaug

SEQ ID NO: 2081172 - RNA, 19 nt, Artificial Sequence
  Description of Artificial Sequence: Synthetic oligonucleotide
uaccaauaaggcaccugca

SEQ ID NO: 2081173 - RNA, 19 nt, Artificial Sequence
  Description of Artificial Sequence: Synthetic oligonucleotide
cuauaauccccaguacuug

SEQ ID NO: 2081174 - RNA, 19 nt, Artificial Sequence
  Description of Artificial Sequence: Synthetic oligonucleotide
gaguucgauggccugcagc

SEQ ID NO: 2081175 - RNA, 19 nt, Artificial Sequence
  Description of Artificial Sequence: Synthetic oligonucleotide
cuggagaauaucaugcaaa

SEQ ID NO: 2081176 - RNA, 19 nt, Artificial Sequence
  Description of Artificial Sequence: Synthetic oligonucleotide
aaauugcuacugcagccuu

SEQ ID NO: 2081177 - RNA, 19 nt, Artificial Sequence
  Description of Artificial Sequence: Synthetic oligonucleotide
ugaguauggcgcaugccua

SEQ ID NO: 2081178 - RNA, 19 nt, Artificial Sequence
  Description of Artificial Sequence: Synthetic oligonucleotide
caaguauacuccgaaucug

SEQ ID NO: 2081179 - RNA, 19 nt, Artificial Sequence
  Description of Artificial Sequence: Synthetic oligonucleotide
uuaccagaaauaacacauu

SEQ ID NO: 2081180 - RNA, 19 nt, Artificial Sequence
  Description of Artificial Sequence: Synthetic oligonucleotide
uuuuaagucugaggcuagc

SEQ ID NO: 2081181 - RNA, 19 nt, Artificial Sequence
  Description of Artificial Sequence: Synthetic oligonucleotide
ugucgcaggcuacaaaguu

SEQ ID NO: 2081182 - RNA, 19 nt, Artificial Sequence
  Description of Artificial Sequence: Synthetic oligonucleotide
uuuuagcucuucagagccu

SEQ ID NO: 2081183 - RNA, 19 nt, Artificial Sequence
  Description of Artificial Sequence: Synthetic oligonucleotide
agcucucuaaguuucuuua

SEQ ID NO: 2081184 - RNA, 19 nt, Artificial Sequence
  Description of Artificial Sequence: Synthetic oligonucleotide
cucuguggaagcaugcuga

SEQ ID NO: 2081185 - RNA, 19 nt, Artificial Sequence
  Description of Artificial Sequence: Synthetic oligonucleotide
guuggggugguagugcucc

SEQ ID NO: 2081186 - RNA, 19 nt, Artificial Sequence
  Description of Artificial Sequence: Synthetic oligonucleotide
uuucagacgagggcagcag

SEQ ID NO: 2081187 - RNA, 19 nt, Artificial Sequence
  Description of Artificial Sequence: Synthetic oligonucleotide
agaagugaugucccauggu

SEQ ID NO: 2081188 - RNA, 19 nt, Artificial Sequence
  Description of Artificial Sequence: Synthetic oligonucleotide
agcacauguucuuaaccau

SEQ ID NO: 2081189 - RNA, 19 nt, Artificial Sequence
  Description of Artificial Sequence: Synthetic oligonucleotide
ugucaaguauacuccgaau

SEQ ID NO: 2081190 - RNA, 19 nt, Artificial Sequence
  Description of Artificial Sequence: Synthetic oligonucleotide
aucgacguaguucccacaa

SEQ ID NO: 2081191 - RNA, 19 nt, Artificial Sequence
  Description of Artificial Sequence: Synthetic oligonucleotide
ucuagcucucuaaguuucu

SEQ ID NO: 2081192 - RNA, 19 nt, Artificial Sequence
  Description of Artificial Sequence: Synthetic oligonucleotide
cugcuuuugaauuggcaga

SEQ ID NO: 2081193 - RNA, 19 nt, Artificial Sequence
  Description of Artificial Sequence: Synthetic oligonucleotide
agcaagcaggcagauuugg

SEQ ID NO: 2081194 - RNA, 19 nt, Artificial Sequence
  Description of Artificial Sequence: Synthetic oligonucleotide
cugagaucugagauaucug

SEQ ID NO: 2081195 - RNA, 19 nt, Artificial Sequence
  Description of Artificial Sequence: Synthetic oligonucleotide
ggcagauggaacaaaagca

SEQ ID NO: 2081196 - RNA, 19 nt, Artificial Sequence
  Description of Artificial Sequence: Synthetic oligonucleotide
uccucuugacaaagcuugc

SEQ ID NO: 2081197 - RNA, 19 nt, Artificial Sequence
  Description of Artificial Sequence: Synthetic oligonucleotide
ccuacugugucaaguauac

SEQ ID NO: 2081198 - RNA, 19 nt, Artificial Sequence
  Description of Artificial Sequence: Synthetic oligonucleotide
auauccucucauucagaga

SEQ ID NO: 2081199 - RNA, 19 nt, Artificial Sequence
  Description of Artificial Sequence: Synthetic oligonucleotide
uguacaucccaaguuccaa

SEQ ID NO: 2081200 - RNA, 19 nt, Artificial Sequence
  Description of Artificial Sequence: Synthetic oligonucleotide
uccauguacuuaucauaac

SEQ ID NO: 2081201 - RNA, 19 nt, Artificial Sequence
  Description of Artificial Sequence: Synthetic oligonucleotide
cuacaacauccagaugucg

SEQ ID NO: 2081202 - RNA, 19 nt, Artificial Sequence
  Description of Artificial Sequence: Synthetic oligonucleotide
ugccuauaauccccaguac

SEQ ID NO: 2081203 - RNA, 19 nt, Artificial Sequence
  Description of Artificial Sequence: Synthetic oligonucleotide
acuuucagacgagggcagc

SEQ ID NO: 2081204 - RNA, 19 nt, Artificial Sequence
  Description of Artificial Sequence: Synthetic oligonucleotide
uaacccucuagcucucuaa

SEQ ID NO: 2081205 - RNA, 19 nt, Artificial Sequence
  Description of Artificial Sequence: Synthetic oligonucleotide
caauaaggcaccugcaaua

SEQ ID NO: 2081206 - RNA, 19 nt, Artificial Sequence
  Description of Artificial Sequence: Synthetic oligonucleotide
caggauaucuucacugaga

SEQ ID NO: 2081207 - RNA, 19 nt, Artificial Sequence
  Description of Artificial Sequence: Synthetic oligonucleotide
caaaguuggggugguagug

SEQ ID NO: 2081208 - RNA, 19 nt, Artificial Sequence
  Description of Artificial Sequence: Synthetic oligonucleotide
cagauggaacaaaagcaca

SEQ ID NO: 2081209 - RNA, 19 nt, Artificial Sequence
  Description of Artificial Sequence: Synthetic oligonucleotide
gauaaacauaaguuauuuu

SEQ ID NO: 2081210 - RNA, 19 nt, Artificial Sequence
  Description of Artificial Sequence: Synthetic oligonucleotide
aauugcuacugcagccuug

SEQ ID NO: 2081211 - RNA, 19 nt, Artificial Sequence
  Description of Artificial Sequence: Synthetic oligonucleotide
ucuuaaccaucgacguagu

SEQ ID NO: 2081212 - RNA, 19 nt, Artificial Sequence
  Description of Artificial Sequence: Synthetic oligonucleotide
auugcuacugcagccuuga

SEQ ID NO: 2081213 - RNA, 19 nt, Artificial Sequence
  Description of Artificial Sequence: Synthetic oligonucleotide
uuuagcucuucagagccuu

SEQ ID NO: 2081214 - RNA, 19 nt, Artificial Sequence
  Description of Artificial Sequence: Synthetic oligonucleotide
gagucauugaggaugcucu

SEQ ID NO: 2081215 - RNA, 19 nt, Artificial Sequence
  Description of Artificial Sequence: Synthetic oligonucleotide
auaauccccaguacuugag

SEQ ID NO: 2081216 - RNA, 19 nt, Artificial Sequence
  Description of Artificial Sequence: Synthetic oligonucleotide
gacuuucagacgagggcag

SEQ ID NO: 2081217 - RNA, 19 nt, Artificial Sequence
  Description of Artificial Sequence: Synthetic oligonucleotide
ugaaccucuccauguacuu

SEQ ID NO: 2081218 - RNA, 19 nt, Artificial Sequence
  Description of Artificial Sequence: Synthetic oligonucleotide
uauggcgcaugccuauaau

SEQ ID NO: 2081219 - RNA, 19 nt, Artificial Sequence
  Description of Artificial Sequence: Synthetic oligonucleotide
uugaguucgauggccugca

SEQ ID NO: 2081220 - RNA, 19 nt, Artificial Sequence
  Description of Artificial Sequence: Synthetic oligonucleotide
gaucuacaacauccagaug

SEQ ID NO: 2081221 - RNA, 19 nt, Artificial Sequence
  Description of Artificial Sequence: Synthetic oligonucleotide
guacuuaucauaacccucu

SEQ ID NO: 2081222 - RNA, 19 nt, Artificial Sequence
  Description of Artificial Sequence: Synthetic oligonucleotide
caaguuccaagugcacugc

SEQ ID NO: 2081223 - RNA, 19 nt, Artificial Sequence
  Description of Artificial Sequence: Synthetic oligonucleotide
gugucaaguauacuccgaa

SEQ ID NO: 2081224 - RNA, 19 nt, Artificial Sequence
  Description of Artificial Sequence: Synthetic oligonucleotide
uuugggagucauugaggau

SEQ ID NO: 2081225 - RNA, 19 nt, Artificial Sequence
  Description of Artificial Sequence: Synthetic oligonucleotide
gucgcaggcuacaaaguug

SEQ ID NO: 2081226 - RNA, 19 nt, Artificial Sequence
  Description of Artificial Sequence: Synthetic oligonucleotide
agagaaugaccaugauaaa

SEQ ID NO: 2081227 - RNA, 19 nt, Artificial Sequence
  Description of Artificial Sequence: Synthetic oligonucleotide
gcaggauaucuucacugag

SEQ ID NO: 2081228 - RNA, 19 nt, Artificial Sequence
  Description of Artificial Sequence: Synthetic oligonucleotide
uucagagaaugaccaugau

SEQ ID NO: 2081229 - RNA, 19 nt, Artificial Sequence
  Description of Artificial Sequence: Synthetic oligonucleotide
agauagcuacauauuuaug

SEQ ID NO: 2081230 - RNA, 19 nt, Artificial Sequence
  Description of Artificial Sequence: Synthetic oligonucleotide
acauguucuuaaccaucga

SEQ ID NO: 2081231 - RNA, 19 nt, Artificial Sequence
  Description of Artificial Sequence: Synthetic oligonucleotide
cugaguauggcgcaugccu

SEQ ID NO: 2081232 - RNA, 19 nt, Artificial Sequence
  Description of Artificial Sequence: Synthetic oligonucleotide
agauugaguucgauggccu

SEQ ID NO: 2081233 - RNA, 19 nt, Artificial Sequence
  Description of Artificial Sequence: Synthetic oligonucleotide
aguauacuccgaaucuggu

SEQ ID NO: 2081234 - RNA, 19 nt, Artificial Sequence
  Description of Artificial Sequence: Synthetic oligonucleotide
ccaugauaaacauaaguua

SEQ ID NO: 2081235 - RNA, 19 nt, Artificial Sequence
  Description of Artificial Sequence: Synthetic oligonucleotide
acaaaagcacauguucuua

SEQ ID NO: 2081236 - RNA, 19 nt, Artificial Sequence
  Description of Artificial Sequence: Synthetic oligonucleotide
caaguaggcugaguauggc

SEQ ID NO: 2081237 - RNA, 19 nt, Artificial Sequence
  Description of Artificial Sequence: Synthetic oligonucleotide
aaccaucgacguaguuccc

SEQ ID NO: 2081238 - RNA, 19 nt, Artificial Sequence
  Description of Artificial Sequence: Synthetic oligonucleotide
ugaguucgauggccugcag

SEQ ID NO: 2081239 - RNA, 19 nt, Artificial Sequence
  Description of Artificial Sequence: Synthetic oligonucleotide
ucauaacccucuagcucuc

SEQ ID NO: 2081240 - RNA, 19 nt, Artificial Sequence
  Description of Artificial Sequence: Synthetic oligonucleotide
aaggcaccugcaauaagua

SEQ ID NO: 2081241 - RNA, 19 nt, Artificial Sequence
  Description of Artificial Sequence: Synthetic oligonucleotide
ggacuuucagacgagggca

SEQ ID NO: 2081242 - RNA, 19 nt, Artificial Sequence
  Description of Artificial Sequence: Synthetic oligonucleotide
acccucuagcucucuaagu

SEQ ID NO: 2081243 - RNA, 19 nt, Artificial Sequence
  Description of Artificial Sequence: Synthetic oligonucleotide
guuguguuggugcuccucu

SEQ ID NO: 2081244 - RNA, 19 nt, Artificial Sequence
  Description of Artificial Sequence: Synthetic oligonucleotide
ucaaggcaguucuccucca

SEQ ID NO: 2081245 - RNA, 19 nt, Artificial Sequence
  Description of Artificial Sequence: Synthetic oligonucleotide
gggagaaauuaccagaaau

SEQ ID NO: 2081246 - RNA, 19 nt, Artificial Sequence
  Description of Artificial Sequence: Synthetic oligonucleotide
ucgacguaguucccacaaa

SEQ ID NO: 2081247 - RNA, 19 nt, Artificial Sequence
  Description of Artificial Sequence: Synthetic oligonucleotide
guaggcugaguauggcgca

SEQ ID NO: 2081248 - RNA, 19 nt, Artificial Sequence
  Description of Artificial Sequence: Synthetic oligonucleotide
auaucugguucugguugag

SEQ ID NO: 2081249 - RNA, 19 nt, Artificial Sequence
  Description of Artificial Sequence: Synthetic oligonucleotide
agaugucgcaggcuacaaa

SEQ ID NO: 2081250 - RNA, 19 nt, Artificial Sequence
  Description of Artificial Sequence: Synthetic oligonucleotide
ugguugagauugaguucga

SEQ ID NO: 2081251 - RNA, 19 nt, Artificial Sequence
  Description of Artificial Sequence: Synthetic oligonucleotide
ggcaccugcaauaaguaaa

SEQ ID NO: 2081252 - RNA, 19 nt, Artificial Sequence
  Description of Artificial Sequence: Synthetic oligonucleotide
ggcagcaggauaucuucac

SEQ ID NO: 2081253 - RNA, 19 nt, Artificial Sequence
  Description of Artificial Sequence: Synthetic oligonucleotide
aggcaccugcaauaaguaa

SEQ ID NO: 2081254 - RNA, 19 nt, Artificial Sequence
  Description of Artificial Sequence: Synthetic oligonucleotide
gcggaggacuuucagacga

SEQ ID NO: 2081255 - RNA, 19 nt, Artificial Sequence
  Description of Artificial Sequence: Synthetic oligonucleotide
auaacccucuagcucucua

SEQ ID NO: 2081256 - RNA, 19 nt, Artificial Sequence
  Description of Artificial Sequence: Synthetic oligonucleotide
auacuccgaaucugguuuu

SEQ ID NO: 2081257 - RNA, 19 nt, Artificial Sequence
  Description of Artificial Sequence: Synthetic oligonucleotide
auguacaucccaaguucca

SEQ ID NO: 2081258 - RNA, 19 nt, Artificial Sequence
  Description of Artificial Sequence: Synthetic oligonucleotide
gagaucugagauaucuggu

SEQ ID NO: 2081259 - RNA, 19 nt, Artificial Sequence
  Description of Artificial Sequence: Synthetic oligonucleotide
uuccaagugcacugcuuuu

SEQ ID NO: 2081260 - RNA, 19 nt, Artificial Sequence
  Description of Artificial Sequence: Synthetic oligonucleotide
accaucgacguaguuccca

SEQ ID NO: 2081261 - RNA, 19 nt, Artificial Sequence
  Description of Artificial Sequence: Synthetic oligonucleotide
uugcuacugcagccuugag

SEQ ID NO: 2081262 - RNA, 19 nt, Artificial Sequence
  Description of Artificial Sequence: Synthetic oligonucleotide
augucccaugguccuggag

SEQ ID NO: 2081263 - RNA, 19 nt, Artificial Sequence
  Description of Artificial Sequence: Synthetic oligonucleotide
uccaggcggaggacuuuca

SEQ ID NO: 2081264 - RNA, 19 nt, Artificial Sequence
  Description of Artificial Sequence: Synthetic oligonucleotide
guucuuaaccaucgacgua

SEQ ID NO: 2081265 - RNA, 19 nt, Artificial Sequence
  Description of Artificial Sequence: Synthetic oligonucleotide
cguaguucccacaaaauua

SEQ ID NO: 2081266 - RNA, 19 nt, Artificial Sequence
  Description of Artificial Sequence: Synthetic oligonucleotide
ggcugugaaccucuccaug

SEQ ID NO: 2081267 - RNA, 19 nt, Artificial Sequence
  Description of Artificial Sequence: Synthetic oligonucleotide
cauauacuuuuagcucuuc

SEQ ID NO: 2081268 - RNA, 19 nt, Artificial Sequence
  Description of Artificial Sequence: Synthetic oligonucleotide
cuguggaagcaugcugagc

SEQ ID NO: 2081269 - RNA, 19 nt, Artificial Sequence
  Description of Artificial Sequence: Synthetic oligonucleotide
gccuucuaccaauaaggca

SEQ ID NO: 2081270 - RNA, 19 nt, Artificial Sequence
  Description of Artificial Sequence: Synthetic oligonucleotide
cuuucagacgagggcagca

SEQ ID NO: 2081271 - RNA, 19 nt, Artificial Sequence
  Description of Artificial Sequence: Synthetic oligonucleotide
agacgagggcagcaggaua

SEQ ID NO: 2081272 - RNA, 19 nt, Artificial Sequence
  Description of Artificial Sequence: Synthetic oligonucleotide
gucccaugguccuggagaa

SEQ ID NO: 2081273 - RNA, 19 nt, Artificial Sequence
  Description of Artificial Sequence: Synthetic oligonucleotide
caggcggaggacuuucaga

SEQ ID NO: 2081274 - RNA, 19 nt, Artificial Sequence
  Description of Artificial Sequence: Synthetic oligonucleotide
uucuaccaauaaggcaccu

SEQ ID NO: 2081275 - RNA, 19 nt, Artificial Sequence
  Description of Artificial Sequence: Synthetic oligonucleotide
gccuauaauccccaguacu

SEQ ID NO: 2081276 - RNA, 19 nt, Artificial Sequence
  Description of Artificial Sequence: Synthetic oligonucleotide
uccuccaggcggaggacuu

SEQ ID NO: 2081277 - RNA, 19 nt, Artificial Sequence
  Description of Artificial Sequence: Synthetic oligonucleotide
guauggcgcaugccuauaa

SEQ ID NO: 2081278 - RNA, 19 nt, Artificial Sequence
  Description of Artificial Sequence: Synthetic oligonucleotide
aguuggggugguagugcuc

SEQ ID NO: 2081279 - RNA, 19 nt, Artificial Sequence
  Description of Artificial Sequence: Synthetic oligonucleotide
ggcugaguauggcgcaugc

SEQ ID NO: 2081280 - RNA, 19 nt, Artificial Sequence
  Description of Artificial Sequence: Synthetic oligonucleotide
aucuuacaaguaggcugag

SEQ ID NO: 2081281 - RNA, 19 nt, Artificial Sequence
  Description of Artificial Sequence: Synthetic oligonucleotide
caugguccuggagaauauc

SEQ ID NO: 2081282 - RNA, 19 nt, Artificial Sequence
  Description of Artificial Sequence: Synthetic oligonucleotide
uuggggugguagugcuccc

SEQ ID NO: 2081283 - RNA, 19 nt, Artificial Sequence
  Description of Artificial Sequence: Synthetic oligonucleotide
gacgagggcagcaggauau

SEQ ID NO: 2081284 - RNA, 19 nt, Artificial Sequence
  Description of Artificial Sequence: Synthetic oligonucleotide
guauacuccgaaucugguu

SEQ ID NO: 2081285 - RNA, 19 nt, Artificial Sequence
  Description of Artificial Sequence: Synthetic oligonucleotide
ggggugguagugcucccag

SEQ ID NO: 2081286 - RNA, 19 nt, Artificial Sequence
  Description of Artificial Sequence: Synthetic oligonucleotide
augucgcaggcuacaaagu

SEQ ID NO: 2081287 - RNA, 19 nt, Artificial Sequence
  Description of Artificial Sequence: Synthetic oligonucleotide
gaguauggcgcaugccuau

SEQ ID NO: 2081288 - RNA, 19 nt, Artificial Sequence
  Description of Artificial Sequence: Synthetic oligonucleotide
ccaucgacguaguucccac

SEQ ID NO: 2081289 - RNA, 19 nt, Artificial Sequence
  Description of Artificial Sequence: Synthetic oligonucleotide
gcacauguucuuaaccauc

SEQ ID NO: 2081290 - RNA, 19 nt, Artificial Sequence
  Description of Artificial Sequence: Synthetic oligonucleotide
acgagggcagcaggauauc

SEQ ID NO: 2081291 - RNA, 19 nt, Artificial Sequence
  Description of Artificial Sequence: Synthetic oligonucleotide
gacguaguucccacaaaau

SEQ ID NO: 2081292 - RNA, 19 nt, Artificial Sequence
  Description of Artificial Sequence: Synthetic oligonucleotide
gcucaaggcaguucuccuc

SEQ ID NO: 2081293 - RNA, 19 nt, Artificial Sequence
  Description of Artificial Sequence: Synthetic oligonucleotide
aggcagauuugggagucau

SEQ ID NO: 2081294 - RNA, 19 nt, Artificial Sequence
  Description of Artificial Sequence: Synthetic oligonucleotide
gaugucccaugguccugga

SEQ ID NO: 2081295 - RNA, 19 nt, Artificial Sequence
  Description of Artificial Sequence: Synthetic oligonucleotide
agcuccccuacugugucaa

SEQ ID NO: 2081296 - RNA, 19 nt, Artificial Sequence
  Description of Artificial Sequence: Synthetic oligonucleotide
gugaugucccaugguccug

SEQ ID NO: 2081297 - RNA, 19 nt, Artificial Sequence
  Description of Artificial Sequence: Synthetic oligonucleotide
caucgacguaguucccaca

SEQ ID NO: 2081298 - RNA, 19 nt, Artificial Sequence
  Description of Artificial Sequence: Synthetic oligonucleotide
cugugaaccucuccaugua

SEQ ID NO: 2081299 - RNA, 19 nt, Artificial Sequence
  Description of Artificial Sequence: Synthetic oligonucleotide
gcaccugcaauaaguaaaa

SEQ ID NO: 2081300 - RNA, 19 nt, Artificial Sequence
  Description of Artificial Sequence: Synthetic oligonucleotide
guucugguugagauugagu

SEQ ID NO: 2081301 - RNA, 19 nt, Artificial Sequence
  Description of Artificial Sequence: Synthetic oligonucleotide
aguauggcgcaugccuaua

SEQ ID NO: 2081302 - RNA, 19 nt, Artificial Sequence
  Description of Artificial Sequence: Synthetic oligonucleotide
ccuauaauccccaguacuu

SEQ ID NO: 2081303 - RNA, 19 nt, Artificial Sequence
  Description of Artificial Sequence: Synthetic oligonucleotide
ccuggagaauaucaugcaa

SEQ ID NO: 2081304 - RNA, 19 nt, Artificial Sequence
  Description of Artificial Sequence: Synthetic oligonucleotide
gcuugcuuuaagauagcua

SEQ ID NO: 2081305 - RNA, 19 nt, Artificial Sequence
  Description of Artificial Sequence: Synthetic oligonucleotide
cacugagaucugagauauc

SEQ ID NO: 2081306 - RNA, 19 nt, Artificial Sequence
  Description of Artificial Sequence: Synthetic oligonucleotide
ggagaauaucaugcaaacu

SEQ ID NO: 2081307 - RNA, 19 nt, Artificial Sequence
  Description of Artificial Sequence: Synthetic oligonucleotide
gcuuuugaauuggcagaug

SEQ ID NO: 2081308 - RNA, 19 nt, Artificial Sequence
  Description of Artificial Sequence: Synthetic oligonucleotide
gugcuccucuugacaaagc

SEQ ID NO: 2081309 - RNA, 19 nt, Artificial Sequence
  Description of Artificial Sequence: Synthetic oligonucleotide
gcugaguauggcgcaugcc

SEQ ID NO: 2081310 - RNA, 19 nt, Artificial Sequence
  Description of Artificial Sequence: Synthetic oligonucleotide
ugguggcugugaaccucuc

SEQ ID NO: 2081311 - RNA, 19 nt, Artificial Sequence
  Description of Artificial Sequence: Synthetic oligonucleotide
cagagccuucuaccaauaa

SEQ ID NO: 2081312 - RNA, 19 nt, Artificial Sequence
  Description of Artificial Sequence: Synthetic oligonucleotide
ggaacauuucuugguggcu

SEQ ID NO: 2081313 - RNA, 19 nt, Artificial Sequence
  Description of Artificial Sequence: Synthetic oligonucleotide
auccucucauucagagaau

SEQ ID NO: 2081314 - RNA, 19 nt, Artificial Sequence
  Description of Artificial Sequence: Synthetic oligonucleotide
ugcucccagcugguuccca

SEQ ID NO: 2081315 - RNA, 19 nt, Artificial Sequence
  Description of Artificial Sequence: Synthetic oligonucleotide
cuacugcagccuugaggaa

SEQ ID NO: 2081316 - RNA, 19 nt, Artificial Sequence
  Description of Artificial Sequence: Synthetic oligonucleotide
ucccaugguccuggagaau

SEQ ID NO: 2081317 - RNA, 19 nt, Artificial Sequence
  Description of Artificial Sequence: Synthetic oligonucleotide
gcucucuaaguuucuuuau

SEQ ID NO: 2081318 - RNA, 19 nt, Artificial Sequence
  Description of Artificial Sequence: Synthetic oligonucleotide
agauugccuuccacagcaa

SEQ ID NO: 2081319 - RNA, 19 nt, Artificial Sequence
  Description of Artificial Sequence: Synthetic oligonucleotide
cagaugucgcaggcuacaa

SEQ ID NO: 2081320 - RNA, 19 nt, Artificial Sequence
  Description of Artificial Sequence: Synthetic oligonucleotide
cuuaaccaucgacguaguu

SEQ ID NO: 2081321 - RNA, 19 nt, Artificial Sequence
  Description of Artificial Sequence: Synthetic oligonucleotide
ccagaugucgcaggcuaca

SEQ ID NO: 2081322 - RNA, 19 nt, Artificial Sequence
  Description of Artificial Sequence: Synthetic oligonucleotide
gcuacaaaguugggguggu

SEQ ID NO: 2081323 - RNA, 19 nt, Artificial Sequence
  Description of Artificial Sequence: Synthetic oligonucleotide
cccaugguccuggagaaua

SEQ ID NO: 2081324 - RNA, 19 nt, Artificial Sequence
  Description of Artificial Sequence: Synthetic oligonucleotide
cauccagaugucgcaggcu

SEQ ID NO: 2081325 - RNA, 19 nt, Artificial Sequence
  Description of Artificial Sequence: Synthetic oligonucleotide
cuacugugucaaguauacu

SEQ ID NO: 2081326 - RNA, 19 nt, Artificial Sequence
  Description of Artificial Sequence: Synthetic oligonucleotide
cccaaguuccaagugcacu

SEQ ID NO: 2081327 - RNA, 19 nt, Artificial Sequence
  Description of Artificial Sequence: Synthetic oligonucleotide
cauaacccucuagcucucu

SEQ ID NO: 2081328 - RNA, 19 nt, Artificial Sequence
  Description of Artificial Sequence: Synthetic oligonucleotide
cagacgagggcagcaggau

SEQ ID NO: 2081329 - RNA, 19 nt, Artificial Sequence
  Description of Artificial Sequence: Synthetic oligonucleotide
gguugagauugaguucgau

SEQ ID NO: 2081330 - RNA, 19 nt, Artificial Sequence
  Description of Artificial Sequence: Synthetic oligonucleotide
cuguuguguuggugcuccu

SEQ ID NO: 2081331 - RNA, 19 nt, Artificial Sequence
  Description of Artificial Sequence: Synthetic oligonucleotide
guagugcucccagcugguu

SEQ ID NO: 2081332 - RNA, 19 nt, Artificial Sequence
  Description of Artificial Sequence: Synthetic oligonucleotide
ccaugguccuggagaauau

SEQ ID NO: 2081333 - RNA, 19 nt, Artificial Sequence
  Description of Artificial Sequence: Synthetic oligonucleotide
ccccuacugugucaaguau

SEQ ID NO: 2081334 - RNA, 19 nt, Artificial Sequence
  Description of Artificial Sequence: Synthetic oligonucleotide
acaccuaaaauccagaggc

SEQ ID NO: 2081335 - RNA, 19 nt, Artificial Sequence
  Description of Artificial Sequence: Synthetic oligonucleotide
aguacguucacauugaaca

SEQ ID NO: 2081336 - RNA, 19 nt, Artificial Sequence
  Description of Artificial Sequence: Synthetic oligonucleotide
uuuaugucuucauaggugg

SEQ ID NO: 2081337 - RNA, 19 nt, Artificial Sequence
  Description of Artificial Sequence: Synthetic oligonucleotide
aauggaaauaauuuggcaa

SEQ ID NO: 2081338 - RNA, 19 nt, Artificial Sequence
  Description of Artificial Sequence: Synthetic oligonucleotide
gaaaguaagauccaggguc

SEQ ID NO: 2081339 - RNA, 19 nt, Artificial Sequence
  Description of Artificial Sequence: Synthetic oligonucleotide
aauuuucuaucccuagugg

SEQ ID NO: 2081340 - RNA, 19 nt, Artificial Sequence
  Description of Artificial Sequence: Synthetic oligonucleotide
auuguugaugcagauaucc

SEQ ID NO: 2081341 - RNA, 19 nt, Artificial Sequence
  Description of Artificial Sequence: Synthetic oligonucleotide
uaaacagucaugaccaugc

SEQ ID NO: 2081342 - RNA, 19 nt, Artificial Sequence
  Description of Artificial Sequence: Synthetic oligonucleotide
gauguuaaugauauguccg

SEQ ID NO: 2081343 - RNA, 19 nt, Artificial Sequence
  Description of Artificial Sequence: Synthetic oligonucleotide
aacaccuaaaauccagagg

SEQ ID NO: 2081344 - RNA, 19 nt, Artificial Sequence
  Description of Artificial Sequence: Synthetic oligonucleotide
agaaauggaugauagacug

SEQ ID NO: 2081345 - RNA, 19 nt, Artificial Sequence
  Description of Artificial Sequence: Synthetic oligonucleotide
acauccuccgguuugagac

SEQ ID NO: 2081346 - RNA, 19 nt, Artificial Sequence
  Description of Artificial Sequence: Synthetic oligonucleotide
auguccgucauccacauuc

SEQ ID NO: 2081347 - RNA, 19 nt, Artificial Sequence
  Description of Artificial Sequence: Synthetic oligonucleotide
aaaguaagauccagggucc

SEQ ID NO: 2081348 - RNA, 19 nt, Artificial Sequence
  Description of Artificial Sequence: Synthetic oligonucleotide
cuauagaaauggaugauag

SEQ ID NO: 2081349 - RNA, 19 nt, Artificial Sequence
  Description of Artificial Sequence: Synthetic oligonucleotide
gaugcugagggccaguacg

SEQ ID NO: 2081350 - RNA, 19 nt, Artificial Sequence
  Description of Artificial Sequence: Synthetic oligonucleotide
uuuucuaucccuaguggag

SEQ ID NO: 2081351 - RNA, 19 nt, Artificial Sequence
  Description of Artificial Sequence: Synthetic oligonucleotide
ucuuuucacauguauaaug

SEQ ID NO: 2081352 - RNA, 19 nt, Artificial Sequence
  Description of Artificial Sequence: Synthetic oligonucleotide
gaugucuccaaccugaaca

SEQ ID NO: 2081353 - RNA, 19 nt, Artificial Sequence
  Description of Artificial Sequence: Synthetic oligonucleotide
aauuuggcaaauuuucuau

SEQ ID NO: 2081354 - RNA, 19 nt, Artificial Sequence
  Description of Artificial Sequence: Synthetic oligonucleotide
ugauguuaaugauaugucc

SEQ ID NO: 2081355 - RNA, 19 nt, Artificial Sequence
  Description of Artificial Sequence: Synthetic oligonucleotide
acauugaacauguccuucc

SEQ ID NO: 2081356 - RNA, 19 nt, Artificial Sequence
  Description of Artificial Sequence: Synthetic oligonucleotide
auaauggaaauaauuuggc

SEQ ID NO: 2081357 - RNA, 19 nt, Artificial Sequence
  Description of Artificial Sequence: Synthetic oligonucleotide
acacuuuaugucuucauag

SEQ ID NO: 2081358 - RNA, 19 nt, Artificial Sequence
  Description of Artificial Sequence: Synthetic oligonucleotide
uccaaccugaacauguggg

SEQ ID NO: 2081359 - RNA, 19 nt, Artificial Sequence
  Description of Artificial Sequence: Synthetic oligonucleotide
ucuuacauucagcagccag

SEQ ID NO: 2081360 - RNA, 19 nt, Artificial Sequence
  Description of Artificial Sequence: Synthetic oligonucleotide
cacucuuacauucagcagc

SEQ ID NO: 2081361 - RNA, 19 nt, Artificial Sequence
  Description of Artificial Sequence: Synthetic oligonucleotide
uuucacauguauaauggaa

SEQ ID NO: 2081362 - RNA, 19 nt, Artificial Sequence
  Description of Artificial Sequence: Synthetic oligonucleotide
ugcacucuuacauucagca

SEQ ID NO: 2081363 - RNA, 19 nt, Artificial Sequence
  Description of Artificial Sequence: Synthetic oligonucleotide
uucacauguauaauggaaa

SEQ ID NO: 2081364 - RNA, 19 nt, Artificial Sequence
  Description of Artificial Sequence: Synthetic oligonucleotide
ucugucagugcagugacgg

SEQ ID NO: 2081365 - RNA, 19 nt, Artificial Sequence
  Description of Artificial Sequence: Synthetic oligonucleotide
cuuuaugucuucauaggug

SEQ ID NO: 2081366 - RNA, 19 nt, Artificial Sequence
  Description of Artificial Sequence: Synthetic oligonucleotide
aacacuaggucaccugcuc

SEQ ID NO: 2081367 - RNA, 19 nt, Artificial Sequence
  Description of Artificial Sequence: Synthetic oligonucleotide
ucuguaggggaucaaaguc

SEQ ID NO: 2081368 - RNA, 19 nt, Artificial Sequence
  Description of Artificial Sequence: Synthetic oligonucleotide
ggaguuugaaggcaaaccg

SEQ ID NO: 2081369 - RNA, 19 nt, Artificial Sequence
  Description of Artificial Sequence: Synthetic oligonucleotide
uagaaauggaugauagacu

SEQ ID NO: 2081370 - RNA, 19 nt, Artificial Sequence
  Description of Artificial Sequence: Synthetic oligonucleotide
uucguaaggggucaccgag

SEQ ID NO: 2081371 - RNA, 19 nt, Artificial Sequence
  Description of Artificial Sequence: Synthetic oligonucleotide
gagagauacacguggcccg

SEQ ID NO: 2081372 - RNA, 19 nt, Artificial Sequence
  Description of Artificial Sequence: Synthetic oligonucleotide
ugacaggucacaucuguag

SEQ ID NO: 2081373 - RNA, 19 nt, Artificial Sequence
  Description of Artificial Sequence: Synthetic oligonucleotide
agugacggcauacuugguc

SEQ ID NO: 2081374 - RNA, 19 nt, Artificial Sequence
  Description of Artificial Sequence: Synthetic oligonucleotide
gugcugagaacauagauga

SEQ ID NO: 2081375 - RNA, 19 nt, Artificial Sequence
  Description of Artificial Sequence: Synthetic oligonucleotide
auuuucuaucccuagugga

SEQ ID NO: 2081376 - RNA, 19 nt, Artificial Sequence
  Description of Artificial Sequence: Synthetic oligonucleotide
guugaugcagauauccacg

SEQ ID NO: 2081377 - RNA, 19 nt, Artificial Sequence
  Description of Artificial Sequence: Synthetic oligonucleotide
cacuuuaugucuucauagg

SEQ ID NO: 2081378 - RNA, 19 nt, Artificial Sequence
  Description of Artificial Sequence: Synthetic oligonucleotide
acaggucacaucuguaggg

SEQ ID NO: 2081379 - RNA, 19 nt, Artificial Sequence
  Description of Artificial Sequence: Synthetic oligonucleotide
cuguaggggaucaaagucc

SEQ ID NO: 2081380 - RNA, 19 nt, Artificial Sequence
  Description of Artificial Sequence: Synthetic oligonucleotide
gacaggucacaucuguagg

SEQ ID NO: 2081381 - RNA, 19 nt, Artificial Sequence
  Description of Artificial Sequence: Synthetic oligonucleotide
gaugcagauauccacgcca

SEQ ID NO: 2081382 - RNA, 19 nt, Artificial Sequence
  Description of Artificial Sequence: Synthetic oligonucleotide
uuaaugauauguccgucau

SEQ ID NO: 2081383 - RNA, 19 nt, Artificial Sequence
  Description of Artificial Sequence: Synthetic oligonucleotide
agagcagggugucaggccg

SEQ ID NO: 2081384 - RNA, 19 nt, Artificial Sequence
  Description of Artificial Sequence: Synthetic oligonucleotide
gugacggcauacuuggucg

SEQ ID NO: 2081385 - RNA, 19 nt, Artificial Sequence
  Description of Artificial Sequence: Synthetic oligonucleotide
uggacuaaugcccggguca

SEQ ID NO: 2081386 - RNA, 19 nt, Artificial Sequence
  Description of Artificial Sequence: Synthetic oligonucleotide
uauagaaauggaugauaga

SEQ ID NO: 2081387 - RNA, 19 nt, Artificial Sequence
  Description of Artificial Sequence: Synthetic oligonucleotide
ugcagugacggcauacuug

SEQ ID NO: 2081388 - RNA, 19 nt, Artificial Sequence
  Description of Artificial Sequence: Synthetic oligonucleotide
uaaggggucaccgagguuc

SEQ ID NO: 2081389 - RNA, 19 nt, Artificial Sequence
  Description of Artificial Sequence: Synthetic oligonucleotide
aacggugcgggcacaaccc

SEQ ID NO: 2081390 - RNA, 19 nt, Artificial Sequence
  Description of Artificial Sequence: Synthetic oligonucleotide
uggauaaggaaaguaagau

SEQ ID NO: 2081391 - RNA, 19 nt, Artificial Sequence
  Description of Artificial Sequence: Synthetic oligonucleotide
aguggauaaggaaaguaag

SEQ ID NO: 2081392 - RNA, 19 nt, Artificial Sequence
  Description of Artificial Sequence: Synthetic oligonucleotide
cucgauguugccaacggug

SEQ ID NO: 2081393 - RNA, 19 nt, Artificial Sequence
  Description of Artificial Sequence: Synthetic oligonucleotide
acauuccgcuccuucaugg

SEQ ID NO: 2081394 - RNA, 19 nt, Artificial Sequence
  Description of Artificial Sequence: Synthetic oligonucleotide
ucgauguugccaacggugc

SEQ ID NO: 2081395 - RNA, 19 nt, Artificial Sequence
  Description of Artificial Sequence: Synthetic oligonucleotide
uaggggaucaaagucccgg

SEQ ID NO: 2081396 - RNA, 19 nt, Artificial Sequence
  Description of Artificial Sequence: Synthetic oligonucleotide
guuaaugauauguccguca

SEQ ID NO: 2081397 - RNA, 19 nt, Artificial Sequence
  Description of Artificial Sequence: Synthetic oligonucleotide
uccgguuugagacacuuua

SEQ ID NO: 2081398 - RNA, 19 nt, Artificial Sequence
  Description of Artificial Sequence: Synthetic oligonucleotide
uggaguuugaaggcaaacc

SEQ ID NO: 2081399 - RNA, 19 nt, Artificial Sequence
  Description of Artificial Sequence: Synthetic oligonucleotide
gaacauagaugacagccuc

SEQ ID NO: 2081400 - RNA, 19 nt, Artificial Sequence
  Description of Artificial Sequence: Synthetic oligonucleotide
accuaaaauccagaggcgg

SEQ ID NO: 2081401 - RNA, 19 nt, Artificial Sequence
  Description of Artificial Sequence: Synthetic oligonucleotide
caugcuguugauguuaaug

SEQ ID NO: 2081402 - RNA, 19 nt, Artificial Sequence
  Description of Artificial Sequence: Synthetic oligonucleotide
gauguugccaacggugcgg

SEQ ID NO: 2081403 - RNA, 19 nt, Artificial Sequence
  Description of Artificial Sequence: Synthetic oligonucleotide
acugagaucugggagcuuc

SEQ ID NO: 2081404 - RNA, 19 nt, Artificial Sequence
  Description of Artificial Sequence: Synthetic oligonucleotide
auauccacgccacugugcu

SEQ ID NO: 2081405 - RNA, 19 nt, Artificial Sequence
  Description of Artificial Sequence: Synthetic oligonucleotide
uccgucauccacauuccgc

SEQ ID NO: 2081406 - RNA, 19 nt, Artificial Sequence
  Description of Artificial Sequence: Synthetic oligonucleotide
caacaccuaaaauccagag

SEQ ID NO: 2081407 - RNA, 19 nt, Artificial Sequence
  Description of Artificial Sequence: Synthetic oligonucleotide
cugauaagcuucccgagug

SEQ ID NO: 2081408 - RNA, 19 nt, Artificial Sequence
  Description of Artificial Sequence: Synthetic oligonucleotide
uuggucgcacuauagaaau

SEQ ID NO: 2081409 - RNA, 19 nt, Artificial Sequence
  Description of Artificial Sequence: Synthetic oligonucleotide
ucgguggccacacaugcug

SEQ ID NO: 2081410 - RNA, 19 nt, Artificial Sequence
  Description of Artificial Sequence: Synthetic oligonucleotide
aaagucccgggguagccug

SEQ ID NO: 2081411 - RNA, 19 nt, Artificial Sequence
  Description of Artificial Sequence: Synthetic oligonucleotide
uggcaaauuuucuaucccu

SEQ ID NO: 2081412 - RNA, 19 nt, Artificial Sequence
  Description of Artificial Sequence: Synthetic oligonucleotide
uacuuggucgcacuauaga

SEQ ID NO: 2081413 - RNA, 19 nt, Artificial Sequence
  Description of Artificial Sequence: Synthetic oligonucleotide
gcagugacggcauacuugg

SEQ ID NO: 2081414 - RNA, 19 nt, Artificial Sequence
  Description of Artificial Sequence: Synthetic oligonucleotide
aaaccgugucuccaccaag

SEQ ID NO: 2081415 - RNA, 19 nt, Artificial Sequence
  Description of Artificial Sequence: Synthetic oligonucleotide
caucuguaggggaucaaag

SEQ ID NO: 2081416 - RNA, 19 nt, Artificial Sequence
  Description of Artificial Sequence: Synthetic oligonucleotide
acuaaugcccgggucacgg

SEQ ID NO: 2081417 - RNA, 19 nt, Artificial Sequence
  Description of Artificial Sequence: Synthetic oligonucleotide
ggucgcacuauagaaaugg

SEQ ID NO: 2081418 - RNA, 19 nt, Artificial Sequence
  Description of Artificial Sequence: Synthetic oligonucleotide
acuuggucgcacuauagaa

SEQ ID NO: 2081419 - RNA, 19 nt, Artificial Sequence
  Description of Artificial Sequence: Synthetic oligonucleotide
aguuugaaggcaaaccgug

SEQ ID NO: 2081420 - RNA, 19 nt, Artificial Sequence
  Description of Artificial Sequence: Synthetic oligonucleotide
aucaacaccuaaaauccag

SEQ ID NO: 2081421 - RNA, 19 nt, Artificial Sequence
  Description of Artificial Sequence: Synthetic oligonucleotide
aucuguaggggaucaaagu

SEQ ID NO: 2081422 - RNA, 19 nt, Artificial Sequence
  Description of Artificial Sequence: Synthetic oligonucleotide
uggagagauacacguggcc

SEQ ID NO: 2081423 - RNA, 19 nt, Artificial Sequence
  Description of Artificial Sequence: Synthetic oligonucleotide
acugauaagcuucccgagu

SEQ ID NO: 2081424 - RNA, 19 nt, Artificial Sequence
  Description of Artificial Sequence: Synthetic oligonucleotide
aacauggagaggauguccu

SEQ ID NO: 2081425 - RNA, 19 nt, Artificial Sequence
  Description of Artificial Sequence: Synthetic oligonucleotide
ugauaagcuucccgagugc

SEQ ID NO: 2081426 - RNA, 19 nt, Artificial Sequence
  Description of Artificial Sequence: Synthetic oligonucleotide
uuaugucuucauagguggc

SEQ ID NO: 2081427 - RNA, 19 nt, Artificial Sequence
  Description of Artificial Sequence: Synthetic oligonucleotide
agccugcacucuuacauuc

SEQ ID NO: 2081428 - RNA, 19 nt, Artificial Sequence
  Description of Artificial Sequence: Synthetic oligonucleotide
agagcggacagccgagaac

SEQ ID NO: 2081429 - RNA, 19 nt, Artificial Sequence
  Description of Artificial Sequence: Synthetic oligonucleotide
acauagaugacagccucag

SEQ ID NO: 2081430 - RNA, 19 nt, Artificial Sequence
  Description of Artificial Sequence: Synthetic oligonucleotide
agccuggagagauacacgu

SEQ ID NO: 2081431 - RNA, 19 nt, Artificial Sequence
  Description of Artificial Sequence: Synthetic oligonucleotide
cagccgagaacauggagag

SEQ ID NO: 2081432 - RNA, 19 nt, Artificial Sequence
  Description of Artificial Sequence: Synthetic oligonucleotide
ucuggaugucuccaaccug

SEQ ID NO: 2081433 - RNA, 19 nt, Artificial Sequence
  Description of Artificial Sequence: Synthetic oligonucleotide
ucguaaggggucaccgagg

SEQ ID NO: 2081434 - RNA, 19 nt, Artificial Sequence
  Description of Artificial Sequence: Synthetic oligonucleotide
cauggacugauaagcuucc

SEQ ID NO: 2081435 - RNA, 19 nt, Artificial Sequence
  Description of Artificial Sequence: Synthetic oligonucleotide
accagugccaggcggucgc

SEQ ID NO: 2081436 - RNA, 19 nt, Artificial Sequence
  Description of Artificial Sequence: Synthetic oligonucleotide
uaaugcccgggucacggcc

SEQ ID NO: 2081437 - RNA, 19 nt, Artificial Sequence
  Description of Artificial Sequence: Synthetic oligonucleotide
gaugauagacugggguggg

SEQ ID NO: 2081438 - RNA, 19 nt, Artificial Sequence
  Description of Artificial Sequence: Synthetic oligonucleotide
auaaacagucaugaccaug

SEQ ID NO: 2081439 - RNA, 19 nt, Artificial Sequence
  Description of Artificial Sequence: Synthetic oligonucleotide
auacacguggcccggauau

SEQ ID NO: 2081440 - RNA, 19 nt, Artificial Sequence
  Description of Artificial Sequence: Synthetic oligonucleotide
aguggaguggauaaggaaa

SEQ ID NO: 2081441 - RNA, 19 nt, Artificial Sequence
  Description of Artificial Sequence: Synthetic oligonucleotide
caucuggaugucuccaacc

SEQ ID NO: 2081442 - RNA, 19 nt, Artificial Sequence
  Description of Artificial Sequence: Synthetic oligonucleotide
ugaccaugccuucucuccc

SEQ ID NO: 2081443 - RNA, 19 nt, Artificial Sequence
  Description of Artificial Sequence: Synthetic oligonucleotide
cacgccacugugcugagag

SEQ ID NO: 2081444 - RNA, 19 nt, Artificial Sequence
  Description of Artificial Sequence: Synthetic oligonucleotide
uguccuuccaaccgcuggu

SEQ ID NO: 2081445 - RNA, 19 nt, Artificial Sequence
  Description of Artificial Sequence: Synthetic oligonucleotide
uuucuaucccuaguggagu

SEQ ID NO: 2081446 - RNA, 19 nt, Artificial Sequence
  Description of Artificial Sequence: Synthetic oligonucleotide
auagacuggggugggacuc

SEQ ID NO: 2081447 - RNA, 19 nt, Artificial Sequence
  Description of Artificial Sequence: Synthetic oligonucleotide
caccuaaaauccagaggcg

SEQ ID NO: 2081448 - RNA, 19 nt, Artificial Sequence
  Description of Artificial Sequence: Synthetic oligonucleotide
ucgcacuauagaaauggau

SEQ ID NO: 2081449 - RNA, 19 nt, Artificial Sequence
  Description of Artificial Sequence: Synthetic oligonucleotide
uucuaucccuaguggagug

SEQ ID NO: 2081450 - RNA, 19 nt, Artificial Sequence
  Description of Artificial Sequence: Synthetic oligonucleotide
ggaugauagacuggggugg

SEQ ID NO: 2081451 - RNA, 19 nt, Artificial Sequence
  Description of Artificial Sequence: Synthetic oligonucleotide
aggggaucaaagucccggg

SEQ ID NO: 2081452 - RNA, 19 nt, Artificial Sequence
  Description of Artificial Sequence: Synthetic oligonucleotide
uguccgucauccacauucc

SEQ ID NO: 2081453 - RNA, 19 nt, Artificial Sequence
  Description of Artificial Sequence: Synthetic oligonucleotide
gcaaauuuucuaucccuag

SEQ ID NO: 2081454 - RNA, 19 nt, Artificial Sequence
  Description of Artificial Sequence: Synthetic oligonucleotide
ggauaaggaaaguaagauc

SEQ ID NO: 2081455 - RNA, 19 nt, Artificial Sequence
  Description of Artificial Sequence: Synthetic oligonucleotide
aggucaccugcucuguggg

SEQ ID NO: 2081456 - RNA, 19 nt, Artificial Sequence
  Description of Artificial Sequence: Synthetic oligonucleotide
gaguggauaaggaaaguaa

SEQ ID NO: 2081457 - RNA, 19 nt, Artificial Sequence
  Description of Artificial Sequence: Synthetic oligonucleotide
cuggaugucuccaaccuga

SEQ ID NO: 2081458 - RNA, 19 nt, Artificial Sequence
  Description of Artificial Sequence: Synthetic oligonucleotide
acuauagaaauggaugaua

SEQ ID NO: 2081459 - RNA, 19 nt, Artificial Sequence
  Description of Artificial Sequence: Synthetic oligonucleotide
gauauccacgccacugugc

SEQ ID NO: 2081460 - RNA, 19 nt, Artificial Sequence
  Description of Artificial Sequence: Synthetic oligonucleotide
ucuaucccuaguggagugg

SEQ ID NO: 2081461 - RNA, 19 nt, Artificial Sequence
  Description of Artificial Sequence: Synthetic oligonucleotide
gucccugcuggacuaaugc

SEQ ID NO: 2081462 - RNA, 19 nt, Artificial Sequence
  Description of Artificial Sequence: Synthetic oligonucleotide
cuuagucccucugucagug

SEQ ID NO: 2081463 - RNA, 19 nt, Artificial Sequence
  Description of Artificial Sequence: Synthetic oligonucleotide
gacagccgagaacauggag

SEQ ID NO: 2081464 - RNA, 19 nt, Artificial Sequence
  Description of Artificial Sequence: Synthetic oligonucleotide
ugauagacuggggugggac

SEQ ID NO: 2081465 - RNA, 19 nt, Artificial Sequence
  Description of Artificial Sequence: Synthetic oligonucleotide
aggcaaaccgugucuccac

SEQ ID NO: 2081466 - RNA, 19 nt, Artificial Sequence
  Description of Artificial Sequence: Synthetic oligonucleotide
aaggcaaaccgugucucca

SEQ ID NO: 2081467 - RNA, 19 nt, Artificial Sequence
  Description of Artificial Sequence: Synthetic oligonucleotide
uucauggacugauaagcuu

SEQ ID NO: 2081468 - RNA, 19 nt, Artificial Sequence
  Description of Artificial Sequence: Synthetic oligonucleotide
acagccgagaacauggaga

SEQ ID NO: 2081469 - RNA, 19 nt, Artificial Sequence
  Description of Artificial Sequence: Synthetic oligonucleotide
agaugcugagggccaguac

SEQ ID NO: 2081470 - RNA, 19 nt, Artificial Sequence
  Description of Artificial Sequence: Synthetic oligonucleotide
gcacuauagaaauggauga

SEQ ID NO: 2081471 - RNA, 19 nt, Artificial Sequence
  Description of Artificial Sequence: Synthetic oligonucleotide
uaaugauauguccgucauc

SEQ ID NO: 2081472 - RNA, 19 nt, Artificial Sequence
  Description of Artificial Sequence: Synthetic oligonucleotide
gaucaaagucccgggguag

SEQ ID NO: 2081473 - RNA, 19 nt, Artificial Sequence
  Description of Artificial Sequence: Synthetic oligonucleotide
cgcacuauagaaauggaug

SEQ ID NO: 2081474 - RNA, 19 nt, Artificial Sequence
  Description of Artificial Sequence: Synthetic oligonucleotide
ggccaguacguucacauug

SEQ ID NO: 2081475 - RNA, 19 nt, Artificial Sequence
  Description of Artificial Sequence: Synthetic oligonucleotide
agaacauagaugacagccu

SEQ ID NO: 2081476 - RNA, 19 nt, Artificial Sequence
  Description of Artificial Sequence: Synthetic oligonucleotide
uguuaaugauauguccguc

SEQ ID NO: 2081477 - RNA, 19 nt, Artificial Sequence
  Description of Artificial Sequence: Synthetic oligonucleotide
cugggagcuucguaagggg

SEQ ID NO: 2081478 - RNA, 19 nt, Artificial Sequence
  Description of Artificial Sequence: Synthetic oligonucleotide
gagcggacagccgagaaca

SEQ ID NO: 2081479 - RNA, 19 nt, Artificial Sequence
  Description of Artificial Sequence: Synthetic oligonucleotide
gauaagcuucccgagugca

SEQ ID NO: 2081480 - RNA, 19 nt, Artificial Sequence
  Description of Artificial Sequence: Synthetic oligonucleotide
ccggauaugggacugggcc

SEQ ID NO: 2081481 - RNA, 19 nt, Artificial Sequence
  Description of Artificial Sequence: Synthetic oligonucleotide
aaugcccgggucacggccg

SEQ ID NO: 2081482 - RNA, 19 nt, Artificial Sequence
  Description of Artificial Sequence: Synthetic oligonucleotide
caacggugcgggcacaacc

SEQ ID NO: 2081483 - RNA, 19 nt, Artificial Sequence
  Description of Artificial Sequence: Synthetic oligonucleotide
ggagagauacacguggccc

SEQ ID NO: 2081484 - RNA, 19 nt, Artificial Sequence
  Description of Artificial Sequence: Synthetic oligonucleotide
augcagauauccacgccac

SEQ ID NO: 2081485 - RNA, 19 nt, Artificial Sequence
  Description of Artificial Sequence: Synthetic oligonucleotide
caguacguucacauugaac

SEQ ID NO: 2081486 - RNA, 19 nt, Artificial Sequence
  Description of Artificial Sequence: Synthetic oligonucleotide
ugagacacuuuaugucuuc

SEQ ID NO: 2081487 - RNA, 19 nt, Artificial Sequence
  Description of Artificial Sequence: Synthetic oligonucleotide
ucccugcuggacuaaugcc

SEQ ID NO: 2081488 - RNA, 19 nt, Artificial Sequence
  Description of Artificial Sequence: Synthetic oligonucleotide
ugggagcuucguaaggggu

SEQ ID NO: 2081489 - RNA, 19 nt, Artificial Sequence
  Description of Artificial Sequence: Synthetic oligonucleotide
guggauaaggaaaguaaga

SEQ ID NO: 2081490 - RNA, 19 nt, Artificial Sequence
  Description of Artificial Sequence: Synthetic oligonucleotide
agagauacacguggcccgg

SEQ ID NO: 2081491 - RNA, 19 nt, Artificial Sequence
  Description of Artificial Sequence: Synthetic oligonucleotide
cagggugucaggccgggcc

SEQ ID NO: 2081492 - RNA, 19 nt, Artificial Sequence
  Description of Artificial Sequence: Synthetic oligonucleotide
cugagaucugggagcuucg

SEQ ID NO: 2081493 - RNA, 19 nt, Artificial Sequence
  Description of Artificial Sequence: Synthetic oligonucleotide
cagaacacuaggucaccug

SEQ ID NO: 2081494 - RNA, 19 nt, Artificial Sequence
  Description of Artificial Sequence: Synthetic oligonucleotide
uggaaauaauuuggcaaau

SEQ ID NO: 2081495 - RNA, 19 nt, Artificial Sequence
  Description of Artificial Sequence: Synthetic oligonucleotide
accucguucggcgagccag

SEQ ID NO: 2081496 - RNA, 19 nt, Artificial Sequence
  Description of Artificial Sequence: Synthetic oligonucleotide
guggcagcggcucucucag

SEQ ID NO: 2081497 - RNA, 19 nt, Artificial Sequence
  Description of Artificial Sequence: Synthetic oligonucleotide
uccuuccaaccgcuggugc

SEQ ID NO: 2081498 - RNA, 19 nt, Artificial Sequence
  Description of Artificial Sequence: Synthetic oligonucleotide
caugccggcauuguugaug

SEQ ID NO: 2081499 - RNA, 19 nt, Artificial Sequence
  Description of Artificial Sequence: Synthetic oligonucleotide
guagccugcacucuuacau

SEQ ID NO: 2081500 - RNA, 19 nt, Artificial Sequence
  Description of Artificial Sequence: Synthetic oligonucleotide
cuuggucgcacuauagaaa

SEQ ID NO: 2081501 - RNA, 19 nt, Artificial Sequence
  Description of Artificial Sequence: Synthetic oligonucleotide
ucaaagucccgggguagcc

SEQ ID NO: 2081502 - RNA, 19 nt, Artificial Sequence
  Description of Artificial Sequence: Synthetic oligonucleotide
uucuuuucacauguauaau

SEQ ID NO: 2081503 - RNA, 19 nt, Artificial Sequence
  Description of Artificial Sequence: Synthetic oligonucleotide
gaccaugccuucucucccc

SEQ ID NO: 2081504 - RNA, 19 nt, Artificial Sequence
  Description of Artificial Sequence: Synthetic oligonucleotide
cuaguggaguggauaagga

SEQ ID NO: 2081505 - RNA, 19 nt, Artificial Sequence
  Description of Artificial Sequence: Synthetic oligonucleotide
auauguccgucauccacau

SEQ ID NO: 2081506 - RNA, 19 nt, Artificial Sequence
  Description of Artificial Sequence: Synthetic oligonucleotide
cauagaugacagccucagc

SEQ ID NO: 2081507 - RNA, 19 nt, Artificial Sequence
  Description of Artificial Sequence: Synthetic oligonucleotide
uugacaggucacaucugua

SEQ ID NO: 2081508 - RNA, 19 nt, Artificial Sequence
  Description of Artificial Sequence: Synthetic oligonucleotide
gucaggccgggccaugccg

SEQ ID NO: 2081509 - RNA, 19 nt, Artificial Sequence
  Description of Artificial Sequence: Synthetic oligonucleotide
ccuaguggaguggauaagg

SEQ ID NO: 2081510 - RNA, 19 nt, Artificial Sequence
  Description of Artificial Sequence: Synthetic oligonucleotide
auccuccgguuugagacac

SEQ ID NO: 2081511 - RNA, 19 nt, Artificial Sequence
  Description of Artificial Sequence: Synthetic oligonucleotide
uccgcuccuucauggacug

SEQ ID NO: 2081512 - RNA, 19 nt, Artificial Sequence
  Description of Artificial Sequence: Synthetic oligonucleotide
auacuuggucgcacuauag

SEQ ID NO: 2081513 - RNA, 19 nt, Artificial Sequence
  Description of Artificial Sequence: Synthetic oligonucleotide
aaggggucaccgagguucg

SEQ ID NO: 2081514 - RNA, 19 nt, Artificial Sequence
  Description of Artificial Sequence: Synthetic oligonucleotide
gguuugagacacuuuaugu

SEQ ID NO: 2081515 - RNA, 19 nt, Artificial Sequence
  Description of Artificial Sequence: Synthetic oligonucleotide
agcuucguaaggggucacc

SEQ ID NO: 2081516 - RNA, 19 nt, Artificial Sequence
  Description of Artificial Sequence: Synthetic oligonucleotide
ugacggcauacuuggucgc

SEQ ID NO: 2081517 - RNA, 19 nt, Artificial Sequence
  Description of Artificial Sequence: Synthetic oligonucleotide
ucacaucuguaggggauca

SEQ ID NO: 2081518 - RNA, 19 nt, Artificial Sequence
  Description of Artificial Sequence: Synthetic oligonucleotide
uggucgcacuauagaaaug

SEQ ID NO: 2081519 - RNA, 19 nt, Artificial Sequence
  Description of Artificial Sequence: Synthetic oligonucleotide
cggacagccgagaacaugg

SEQ ID NO: 2081520 - RNA, 19 nt, Artificial Sequence
  Description of Artificial Sequence: Synthetic oligonucleotide
gccuuagucccucugucag

SEQ ID NO: 2081521 - RNA, 19 nt, Artificial Sequence
  Description of Artificial Sequence: Synthetic oligonucleotide
auggacugauaagcuuccc

SEQ ID NO: 2081522 - RNA, 19 nt, Artificial Sequence
  Description of Artificial Sequence: Synthetic oligonucleotide
ugcugagaacauagaugac

SEQ ID NO: 2081523 - RNA, 19 nt, Artificial Sequence
  Description of Artificial Sequence: Synthetic oligonucleotide
gagccgcccgcccaccucg

SEQ ID NO: 2081524 - RNA, 19 nt, Artificial Sequence
  Description of Artificial Sequence: Synthetic oligonucleotide
uagacuggggugggacucg

SEQ ID NO: 2081525 - RNA, 19 nt, Artificial Sequence
  Description of Artificial Sequence: Synthetic oligonucleotide
uucccgagugcagaugcug

SEQ ID NO: 2081526 - RNA, 19 nt, Artificial Sequence
  Description of Artificial Sequence: Synthetic oligonucleotide
aggccagccaugaagggug

SEQ ID NO: 2081527 - RNA, 19 nt, Artificial Sequence
  Description of Artificial Sequence: Synthetic oligonucleotide
auaagcuucccgagugcag

SEQ ID NO: 2081528 - RNA, 19 nt, Artificial Sequence
  Description of Artificial Sequence: Synthetic oligonucleotide
cugagagcggacagccgag

SEQ ID NO: 2081529 - RNA, 19 nt, Artificial Sequence
  Description of Artificial Sequence: Synthetic oligonucleotide
ugcagauauccacgccacu

SEQ ID NO: 2081530 - RNA, 19 nt, Artificial Sequence
  Description of Artificial Sequence: Synthetic oligonucleotide
ggcacaacccaccaccuuc

SEQ ID NO: 2081531 - RNA, 19 nt, Artificial Sequence
  Description of Artificial Sequence: Synthetic oligonucleotide
gcuucccgagugcagaugc

SEQ ID NO: 2081532 - RNA, 19 nt, Artificial Sequence
  Description of Artificial Sequence: Synthetic oligonucleotide
gcuucguaaggggucaccg

SEQ ID NO: 2081533 - RNA, 19 nt, Artificial Sequence
  Description of Artificial Sequence: Synthetic oligonucleotide
acggccgcgccuaugcccc

SEQ ID NO: 2081534 - RNA, 19 nt, Artificial Sequence
  Description of Artificial Sequence: Synthetic oligonucleotide
acggcauacuuggucgcac

SEQ ID NO: 2081535 - RNA, 19 nt, Artificial Sequence
  Description of Artificial Sequence: Synthetic oligonucleotide
acaucuguaggggaucaaa

SEQ ID NO: 2081536 - RNA, 19 nt, Artificial Sequence
  Description of Artificial Sequence: Synthetic oligonucleotide
cauugaacauguccuucca

SEQ ID NO: 2081537 - RNA, 19 nt, Artificial Sequence
  Description of Artificial Sequence: Synthetic oligonucleotide
aagcuucccgagugcagau

SEQ ID NO: 2081538 - RNA, 19 nt, Artificial Sequence
  Description of Artificial Sequence: Synthetic oligonucleotide
augauauguccgucaucca

SEQ ID NO: 2081539 - RNA, 19 nt, Artificial Sequence
  Description of Artificial Sequence: Synthetic oligonucleotide
gcgggcacaacccaccacc

SEQ ID NO: 2081540 - RNA, 19 nt, Artificial Sequence
  Description of Artificial Sequence: Synthetic oligonucleotide
ggggaucaaagucccgggg

SEQ ID NO: 2081541 - RNA, 19 nt, Artificial Sequence
  Description of Artificial Sequence: Synthetic oligonucleotide
auggucccgagccgcccgc

SEQ ID NO: 2081542 - RNA, 19 nt, Artificial Sequence
  Description of Artificial Sequence: Synthetic oligonucleotide
cuuccaaccgcuggugcug

SEQ ID NO: 2081543 - RNA, 19 nt, Artificial Sequence
  Description of Artificial Sequence: Synthetic oligonucleotide
cuaaugcccgggucacggc

SEQ ID NO: 2081544 - RNA, 19 nt, Artificial Sequence
  Description of Artificial Sequence: Synthetic oligonucleotide
acgccacugugcugagagc

SEQ ID NO: 2081545 - RNA, 19 nt, Artificial Sequence
  Description of Artificial Sequence: Synthetic oligonucleotide
cauggucccgagccgcccg

SEQ ID NO: 2081546 - RNA, 19 nt, Artificial Sequence
  Description of Artificial Sequence: Synthetic oligonucleotide
agcggcucucucagggucc

SEQ ID NO: 2081547 - RNA, 19 nt, Artificial Sequence
  Description of Artificial Sequence: Synthetic oligonucleotide
cauuucuuuucacauguau

SEQ ID NO: 2081548 - RNA, 19 nt, Artificial Sequence
  Description of Artificial Sequence: Synthetic oligonucleotide
gucauggaguuugaaggca

SEQ ID NO: 2081549 - RNA, 19 nt, Artificial Sequence
  Description of Artificial Sequence: Synthetic oligonucleotide
guaagauccaggguccaaa

SEQ ID NO: 2081550 - RNA, 19 nt, Artificial Sequence
  Description of Artificial Sequence: Synthetic oligonucleotide
cacauuccgcuccuucaug

SEQ ID NO: 2081551 - RNA, 19 nt, Artificial Sequence
  Description of Artificial Sequence: Synthetic oligonucleotide
cacguggcccggauauggg

SEQ ID NO: 2081552 - RNA, 19 nt, Artificial Sequence
  Description of Artificial Sequence: Synthetic oligonucleotide
uggaugucuccaaccugaa

SEQ ID NO: 2081553 - RNA, 19 nt, Artificial Sequence
  Description of Artificial Sequence: Synthetic oligonucleotide
gauagacuggggugggacu

SEQ ID NO: 2081554 - RNA, 19 nt, Artificial Sequence
  Description of Artificial Sequence: Synthetic oligonucleotide
cacggccgcgccuaugccc

SEQ ID NO: 2081555 - RNA, 19 nt, Artificial Sequence
  Description of Artificial Sequence: Synthetic oligonucleotide
gacucgguggccacacaug

SEQ ID NO: 2081556 - RNA, 19 nt, Artificial Sequence
  Description of Artificial Sequence: Synthetic oligonucleotide
gaggcuccggucaccagug

SEQ ID NO: 2081557 - RNA, 19 nt, Artificial Sequence
  Description of Artificial Sequence: Synthetic oligonucleotide
gcugagagcggacagccga

SEQ ID NO: 2081558 - RNA, 19 nt, Artificial Sequence
  Description of Artificial Sequence: Synthetic oligonucleotide
gcacucuuacauucagcag

SEQ ID NO: 2081559 - RNA, 19 nt, Artificial Sequence
  Description of Artificial Sequence: Synthetic oligonucleotide
cuggacuaaugcccggguc

SEQ ID NO: 2081560 - RNA, 19 nt, Artificial Sequence
  Description of Artificial Sequence: Synthetic oligonucleotide
gacuaaugcccgggucacg

SEQ ID NO: 2081561 - RNA, 19 nt, Artificial Sequence
  Description of Artificial Sequence: Synthetic oligonucleotide
agauacacguggcccggau

SEQ ID NO: 2081562 - RNA, 19 nt, Artificial Sequence
  Description of Artificial Sequence: Synthetic oligonucleotide
agucaugaccaugccuucu

SEQ ID NO: 2081563 - RNA, 19 nt, Artificial Sequence
  Description of Artificial Sequence: Synthetic oligonucleotide
ugagaucugggagcuucgu

SEQ ID NO: 2081564 - RNA, 19 nt, Artificial Sequence
  Description of Artificial Sequence: Synthetic oligonucleotide
agggugucaggccgggcca

SEQ ID NO: 2081565 - RNA, 19 nt, Artificial Sequence
  Description of Artificial Sequence: Synthetic oligonucleotide
uagccugcacucuuacauu

SEQ ID NO: 2081566 - RNA, 19 nt, Artificial Sequence
  Description of Artificial Sequence: Synthetic oligonucleotide
cauguccuuccaaccgcug

SEQ ID NO: 2081567 - RNA, 19 nt, Artificial Sequence
  Description of Artificial Sequence: Synthetic oligonucleotide
gauaugggacugggccucc

SEQ ID NO: 2081568 - RNA, 19 nt, Artificial Sequence
  Description of Artificial Sequence: Synthetic oligonucleotide
cauguauaauggaaauaau

SEQ ID NO: 2081569 - RNA, 19 nt, Artificial Sequence
  Description of Artificial Sequence: Synthetic oligonucleotide
gauacacguggcccggaua

SEQ ID NO: 2081570 - RNA, 19 nt, Artificial Sequence
  Description of Artificial Sequence: Synthetic oligonucleotide
aaccgcuggugcugccuga

SEQ ID NO: 2081571 - RNA, 19 nt, Artificial Sequence
  Description of Artificial Sequence: Synthetic oligonucleotide
cagucaugaccaugccuuc

SEQ ID NO: 2081572 - RNA, 19 nt, Artificial Sequence
  Description of Artificial Sequence: Synthetic oligonucleotide
ggaggccagccaugaaggg

SEQ ID NO: 2081573 - RNA, 19 nt, Artificial Sequence
  Description of Artificial Sequence: Synthetic oligonucleotide
aguaagauccaggguccaa

SEQ ID NO: 2081574 - RNA, 19 nt, Artificial Sequence
  Description of Artificial Sequence: Synthetic oligonucleotide
ugagagcggacagccgaga

SEQ ID NO: 2081575 - RNA, 19 nt, Artificial Sequence
  Description of Artificial Sequence: Synthetic oligonucleotide
uucggcgagccagccacug

SEQ ID NO: 2081576 - RNA, 19 nt, Artificial Sequence
  Description of Artificial Sequence: Synthetic oligonucleotide
ggaaaguaagauccagggu

SEQ ID NO: 2081577 - RNA, 19 nt, Artificial Sequence
  Description of Artificial Sequence: Synthetic oligonucleotide
ucguucggcgagccagcca

SEQ ID NO: 2081578 - RNA, 19 nt, Artificial Sequence
  Description of Artificial Sequence: Synthetic oligonucleotide
guaggggaucaaagucccg

SEQ ID NO: 2081579 - RNA, 19 nt, Artificial Sequence
  Description of Artificial Sequence: Synthetic oligonucleotide
ucacggccgcgccuaugcc

SEQ ID NO: 2081580 - RNA, 19 nt, Artificial Sequence
  Description of Artificial Sequence: Synthetic oligonucleotide
ggcaaaccgugucuccacc

SEQ ID NO: 2081581 - RNA, 19 nt, Artificial Sequence
  Description of Artificial Sequence: Synthetic oligonucleotide
agaggcgggaggccagcca

SEQ ID NO: 2081582 - RNA, 19 nt, Artificial Sequence
  Description of Artificial Sequence: Synthetic oligonucleotide
ugcgggcacaacccaccac

SEQ ID NO: 2081583 - RNA, 19 nt, Artificial Sequence
  Description of Artificial Sequence: Synthetic oligonucleotide
cacaugcuguugauguuaa

SEQ ID NO: 2081584 - RNA, 19 nt, Artificial Sequence
  Description of Artificial Sequence: Synthetic oligonucleotide
cuaucccuaguggagugga

SEQ ID NO: 2081585 - RNA, 19 nt, Artificial Sequence
  Description of Artificial Sequence: Synthetic oligonucleotide
caaccgcuggugcugccug

SEQ ID NO: 2081586 - RNA, 19 nt, Artificial Sequence
  Description of Artificial Sequence: Synthetic oligonucleotide
gagaggauguccuccucau

SEQ ID NO: 2081587 - RNA, 19 nt, Artificial Sequence
  Description of Artificial Sequence: Synthetic oligonucleotide
cauggaguuugaaggcaaa

SEQ ID NO: 2081588 - RNA, 19 nt, Artificial Sequence
  Description of Artificial Sequence: Synthetic oligonucleotide
ucccucugucagugcagug

SEQ ID NO: 2081589 - RNA, 19 nt, Artificial Sequence
  Description of Artificial Sequence: Synthetic oligonucleotide
ugggacucgguggccacac

SEQ ID NO: 2081590 - RNA, 19 nt, Artificial Sequence
  Description of Artificial Sequence: Synthetic oligonucleotide
cacugugcugagagcggac

SEQ ID NO: 2081591 - RNA, 19 nt, Artificial Sequence
  Description of Artificial Sequence: Synthetic oligonucleotide
cucaucuggaugucuccaa

SEQ ID NO: 2081592 - RNA, 19 nt, Artificial Sequence
  Description of Artificial Sequence: Synthetic oligonucleotide
guacguucacauugaacau

SEQ ID NO: 2081593 - RNA, 19 nt, Artificial Sequence
  Description of Artificial Sequence: Synthetic oligonucleotide
ggccaugccggcauuguug

SEQ ID NO: 2081594 - RNA, 19 nt, Artificial Sequence
  Description of Artificial Sequence: Synthetic oligonucleotide
cauuccgcuccuucaugga

SEQ ID NO: 2081595 - RNA, 19 nt, Artificial Sequence
  Description of Artificial Sequence: Synthetic oligonucleotide
caaaccgugucuccaccaa

SEQ ID NO: 2081596 - RNA, 19 nt, Artificial Sequence
  Description of Artificial Sequence: Synthetic oligonucleotide
ggaucaaagucccggggua

SEQ ID NO: 2081597 - RNA, 19 nt, Artificial Sequence
  Description of Artificial Sequence: Synthetic oligonucleotide
caugaagggugggaaggca

SEQ ID NO: 2081598 - RNA, 19 nt, Artificial Sequence
  Description of Artificial Sequence: Synthetic oligonucleotide
ggauaugggacugggccuc

SEQ ID NO: 2081599 - RNA, 19 nt, Artificial Sequence
  Description of Artificial Sequence: Synthetic oligonucleotide
cgguuugagacacuuuaug

SEQ ID NO: 2081600 - RNA, 19 nt, Artificial Sequence
  Description of Artificial Sequence: Synthetic oligonucleotide
gacggcauacuuggucgca

SEQ ID NO: 2081601 - RNA, 19 nt, Artificial Sequence
  Description of Artificial Sequence: Synthetic oligonucleotide
ucgcgccaccgcuccaugc

SEQ ID NO: 2081602 - RNA, 19 nt, Artificial Sequence
  Description of Artificial Sequence: Synthetic oligonucleotide
agccgagaacauggagagg

SEQ ID NO: 2081603 - RNA, 19 nt, Artificial Sequence
  Description of Artificial Sequence: Synthetic oligonucleotide
cguucggcgagccagccac

SEQ ID NO: 2081604 - RNA, 19 nt, Artificial Sequence
  Description of Artificial Sequence: Synthetic oligonucleotide
gaacacuaggucaccugcu

SEQ ID NO: 2081605 - RNA, 19 nt, Artificial Sequence
  Description of Artificial Sequence: Synthetic oligonucleotide
guuugaaggcaaaccgugu

SEQ ID NO: 2081606 - RNA, 19 nt, Artificial Sequence
  Description of Artificial Sequence: Synthetic oligonucleotide
gucgcacuauagaaaugga

SEQ ID NO: 2081607 - RNA, 19 nt, Artificial Sequence
  Description of Artificial Sequence: Synthetic oligonucleotide
uggcccggauaugggacug

SEQ ID NO: 2081608 - RNA, 19 nt, Artificial Sequence
  Description of Artificial Sequence: Synthetic oligonucleotide
ggcaaauuuucuaucccua

SEQ ID NO: 2081609 - RNA, 19 nt, Artificial Sequence
  Description of Artificial Sequence: Synthetic oligonucleotide
acaugcuguugauguuaau

SEQ ID NO: 2081610 - RNA, 19 nt, Artificial Sequence
  Description of Artificial Sequence: Synthetic oligonucleotide
ggugcgggcacaacccacc

SEQ ID NO: 2081611 - RNA, 19 nt, Artificial Sequence
  Description of Artificial Sequence: Synthetic oligonucleotide
gccaugccggcauuguuga

SEQ ID NO: 2081612 - RNA, 19 nt, Artificial Sequence
  Description of Artificial Sequence: Synthetic oligonucleotide
cugccugagagcagggugu

SEQ ID NO: 2081613 - RNA, 19 nt, Artificial Sequence
  Description of Artificial Sequence: Synthetic oligonucleotide
accgcuccaugccggcucu

SEQ ID NO: 2081614 - RNA, 19 nt, Artificial Sequence
  Description of Artificial Sequence: Synthetic oligonucleotide
caggcggucgcgccaccgc

SEQ ID NO: 2081615 - RNA, 19 nt, Artificial Sequence
  Description of Artificial Sequence: Synthetic oligonucleotide
gggaucaaagucccggggu

SEQ ID NO: 2081616 - RNA, 19 nt, Artificial Sequence
  Description of Artificial Sequence: Synthetic oligonucleotide
caccgcuccaugccggcuc

SEQ ID NO: 2081617 - RNA, 19 nt, Artificial Sequence
  Description of Artificial Sequence: Synthetic oligonucleotide
ggagcuucguaagggguca

SEQ ID NO: 2081618 - RNA, 19 nt, Artificial Sequence
  Description of Artificial Sequence: Synthetic oligonucleotide
ggacuaaugcccgggucac

SEQ ID NO: 2081619 - RNA, 19 nt, Artificial Sequence
  Description of Artificial Sequence: Synthetic oligonucleotide
aggcggucgcgccaccgcu

SEQ ID NO: 2081620 - RNA, 19 nt, Artificial Sequence
  Description of Artificial Sequence: Synthetic oligonucleotide
augauagacugggguggga

SEQ ID NO: 2081621 - RNA, 19 nt, Artificial Sequence
  Description of Artificial Sequence: Synthetic oligonucleotide
caccagugccaggcggucg

SEQ ID NO: 2081622 - RNA, 19 nt, Artificial Sequence
  Description of Artificial Sequence: Synthetic oligonucleotide
uccaaccgcuggugcugcc

SEQ ID NO: 2081623 - RNA, 19 nt, Artificial Sequence
  Description of Artificial Sequence: Synthetic oligonucleotide
gcaaaccgugucuccacca

SEQ ID NO: 2081624 - RNA, 19 nt, Artificial Sequence
  Description of Artificial Sequence: Synthetic oligonucleotide
cucguucggcgagccagcc

SEQ ID NO: 2081625 - RNA, 19 nt, Artificial Sequence
  Description of Artificial Sequence: Synthetic oligonucleotide
uauguccgucauccacauu

SEQ ID NO: 2081626 - RNA, 19 nt, Artificial Sequence
  Description of Artificial Sequence: Synthetic oligonucleotide
ucccgagccgcccgcccac

SEQ ID NO: 2081627 - RNA, 19 nt, Artificial Sequence
  Description of Artificial Sequence: Synthetic oligonucleotide
gggagcuucguaagggguc

SEQ ID NO: 2081628 - RNA, 19 nt, Artificial Sequence
  Description of Artificial Sequence: Synthetic oligonucleotide
ccaugaagggugggaaggc

SEQ ID NO: 2081629 - RNA, 19 nt, Artificial Sequence
  Description of Artificial Sequence: Synthetic oligonucleotide
cgauguugccaacggugcg

SEQ ID NO: 2081630 - RNA, 19 nt, Artificial Sequence
  Description of Artificial Sequence: Synthetic oligonucleotide
gugucaggccgggccaugc

SEQ ID NO: 2081631 - RNA, 19 nt, Artificial Sequence
  Description of Artificial Sequence: Synthetic oligonucleotide
gccacugugcugagagcgg

SEQ ID NO: 2081632 - RNA, 19 nt, Artificial Sequence
  Description of Artificial Sequence: Synthetic oligonucleotide
gaggcgggaggccagccau

SEQ ID NO: 2081633 - RNA, 19 nt, Artificial Sequence
  Description of Artificial Sequence: Synthetic oligonucleotide
ccgcccaccucguucggcg

SEQ ID NO: 2081634 - RNA, 19 nt, Artificial Sequence
  Description of Artificial Sequence: Synthetic oligonucleotide
ccgagugcagaugcugagg

SEQ ID NO: 2081635 - RNA, 19 nt, Artificial Sequence
  Description of Artificial Sequence: Synthetic oligonucleotide
uccuccgguuugagacacu

SEQ ID NO: 2081636 - RNA, 19 nt, Artificial Sequence
  Description of Artificial Sequence: Synthetic oligonucleotide
gggugcugagaacauagau

SEQ ID NO: 2081637 - RNA, 19 nt, Artificial Sequence
  Description of Artificial Sequence: Synthetic oligonucleotide
ggguagccugcacucuuac

SEQ ID NO: 2081638 - RNA, 19 nt, Artificial Sequence
  Description of Artificial Sequence: Synthetic oligonucleotide
cacuauagaaauggaugau

SEQ ID NO: 2081639 - RNA, 19 nt, Artificial Sequence
  Description of Artificial Sequence: Synthetic oligonucleotide
gccaguacguucacauuga

SEQ ID NO: 2081640 - RNA, 19 nt, Artificial Sequence
  Description of Artificial Sequence: Synthetic oligonucleotide
cucauuugacaggucacau

SEQ ID NO: 2081641 - RNA, 19 nt, Artificial Sequence
  Description of Artificial Sequence: Synthetic oligonucleotide
gagauacacguggcccgga

SEQ ID NO: 2081642 - RNA, 19 nt, Artificial Sequence
  Description of Artificial Sequence: Synthetic oligonucleotide
gugcgggcacaacccacca

SEQ ID NO: 2081643 - RNA, 19 nt, Artificial Sequence
  Description of Artificial Sequence: Synthetic oligonucleotide
gugcugccugagagcaggg

SEQ ID NO: 2081644 - RNA, 19 nt, Artificial Sequence
  Description of Artificial Sequence: Synthetic oligonucleotide
ggccauggucccgagccgc

SEQ ID NO: 2081645 - RNA, 19 nt, Artificial Sequence
  Description of Artificial Sequence: Synthetic oligonucleotide
ccucguucggcgagccagc

SEQ ID NO: 2081646 - RNA, 19 nt, Artificial Sequence
  Description of Artificial Sequence: Synthetic oligonucleotide
ccagcccauuucuuuucac

SEQ ID NO: 2081647 - RNA, 19 nt, Artificial Sequence
  Description of Artificial Sequence: Synthetic oligonucleotide
cccggauaugggacugggc

SEQ ID NO: 2081648 - RNA, 19 nt, Artificial Sequence
  Description of Artificial Sequence: Synthetic oligonucleotide
ggcauuguugaugcagaua

SEQ ID NO: 2081649 - RNA, 19 nt, Artificial Sequence
  Description of Artificial Sequence: Synthetic oligonucleotide
gccggcucuggccaugguc

SEQ ID NO: 2081650 - RNA, 19 nt, Artificial Sequence
  Description of Artificial Sequence: Synthetic oligonucleotide
cagugccaggcggucgcgc

SEQ ID NO: 2081651 - RNA, 19 nt, Artificial Sequence
  Description of Artificial Sequence: Synthetic oligonucleotide
agucccgggguagccugca

SEQ ID NO: 2081652 - RNA, 19 nt, Artificial Sequence
  Description of Artificial Sequence: Synthetic oligonucleotide
ggcaggagcuccccacaga

SEQ ID NO: 2081653 - RNA, 19 nt, Artificial Sequence
  Description of Artificial Sequence: Synthetic oligonucleotide
gccuggagagauacacgug

SEQ ID NO: 2081654 - RNA, 19 nt, Artificial Sequence
  Description of Artificial Sequence: Synthetic oligonucleotide
gcggacagccgagaacaug

SEQ ID NO: 2081655 - RNA, 19 nt, Artificial Sequence
  Description of Artificial Sequence: Synthetic oligonucleotide
gucccgagccgcccgccca

SEQ ID NO: 2081656 - RNA, 19 nt, Artificial Sequence
  Description of Artificial Sequence: Synthetic oligonucleotide
gcggucgcgccaccgcucc

SEQ ID NO: 2081657 - RNA, 19 nt, Artificial Sequence
  Description of Artificial Sequence: Synthetic oligonucleotide
uggucccgagccgcccgcc

SEQ ID NO: 2081658 - RNA, 19 nt, Artificial Sequence
  Description of Artificial Sequence: Synthetic oligonucleotide
cccuaguggaguggauaag

SEQ ID NO: 2081659 - RNA, 19 nt, Artificial Sequence
  Description of Artificial Sequence: Synthetic oligonucleotide
cgcccgcccaccucguucg

SEQ ID NO: 2081660 - RNA, 19 nt, Artificial Sequence
  Description of Artificial Sequence: Synthetic oligonucleotide
caaagucccgggguagccu

SEQ ID NO: 2081661 - RNA, 19 nt, Artificial Sequence
  Description of Artificial Sequence: Synthetic oligonucleotide
cucgguggccacacaugcu

SEQ ID NO: 2081662 - RNA, 19 nt, Artificial Sequence
  Description of Artificial Sequence: Synthetic oligonucleotide
ugccaacggugcgggcaca

SEQ ID NO: 2081663 - RNA, 19 nt, Artificial Sequence
  Description of Artificial Sequence: Synthetic oligonucleotide
ccuccagaagcucuugccu

SEQ ID NO: 2081664 - RNA, 19 nt, Artificial Sequence
  Description of Artificial Sequence: Synthetic oligonucleotide
ugccggcucuggccauggu

SEQ ID NO: 2081665 - RNA, 19 nt, Artificial Sequence
  Description of Artificial Sequence: Synthetic oligonucleotide
cuucccgagugcagaugcu

SEQ ID NO: 2081666 - RNA, 19 nt, Artificial Sequence
  Description of Artificial Sequence: Synthetic oligonucleotide
ccucaucuggaugucucca

SEQ ID NO: 2081667 - RNA, 19 nt, Artificial Sequence
  Description of Artificial Sequence: Synthetic oligonucleotide
ggcccggauaugggacugg

SEQ ID NO: 2081668 - RNA, 19 nt, Artificial Sequence
  Description of Artificial Sequence: Synthetic oligonucleotide
ccaugccuucucuccccag

SEQ ID NO: 2081669 - RNA, 19 nt, Artificial Sequence
  Description of Artificial Sequence: Synthetic oligonucleotide
ccagccaugaaggguggga

SEQ ID NO: 2081670 - RNA, 19 nt, Artificial Sequence
  Description of Artificial Sequence: Synthetic oligonucleotide
gcuggacuaaugcccgggu

SEQ ID NO: 2081671 - RNA, 19 nt, Artificial Sequence
  Description of Artificial Sequence: Synthetic oligonucleotide
aggcgggaggccagccaug

SEQ ID NO: 2081672 - RNA, 19 nt, Artificial Sequence
  Description of Artificial Sequence: Synthetic oligonucleotide
ggcgggaggccagccauga

SEQ ID NO: 2081673 - RNA, 19 nt, Artificial Sequence
  Description of Artificial Sequence: Synthetic oligonucleotide
gucccgggguagccugcac

SEQ ID NO: 2081674 - RNA, 19 nt, Artificial Sequence
  Description of Artificial Sequence: Synthetic oligonucleotide
gccugcacucuuacauuca

SEQ ID NO: 2081675 - RNA, 19 nt, Artificial Sequence
  Description of Artificial Sequence: Synthetic oligonucleotide
ggacagccgagaacaugga

SEQ ID NO: 2081676 - RNA, 19 nt, Artificial Sequence
  Description of Artificial Sequence: Synthetic oligonucleotide
agcggacagccgagaacau

SEQ ID NO: 2081677 - RNA, 19 nt, Artificial Sequence
  Description of Artificial Sequence: Synthetic oligonucleotide
caccaagccuggagagaua

SEQ ID NO: 2081678 - RNA, 19 nt, Artificial Sequence
  Description of Artificial Sequence: Synthetic oligonucleotide
gcauacuuggucgcacuau

SEQ ID NO: 2081679 - RNA, 19 nt, Artificial Sequence
  Description of Artificial Sequence: Synthetic oligonucleotide
cccagcccauuucuuuuca

SEQ ID NO: 2081680 - RNA, 19 nt, Artificial Sequence
  Description of Artificial Sequence: Synthetic oligonucleotide
guaaggggucaccgagguu

SEQ ID NO: 2081681 - RNA, 19 nt, Artificial Sequence
  Description of Artificial Sequence: Synthetic oligonucleotide
cccaccucguucggcgagc

SEQ ID NO: 2081682 - RNA, 19 nt, Artificial Sequence
  Description of Artificial Sequence: Synthetic oligonucleotide
ccaguacguucacauugaa

SEQ ID NO: 2081683 - RNA, 19 nt, Artificial Sequence
  Description of Artificial Sequence: Synthetic oligonucleotide
ccaccucguucggcgagcc

SEQ ID NO: 2081684 - RNA, 19 nt, Artificial Sequence
  Description of Artificial Sequence: Synthetic oligonucleotide
caccucguucggcgagcca

SEQ ID NO: 2081685 - RNA, 19 nt, Artificial Sequence
  Description of Artificial Sequence: Synthetic oligonucleotide
cggugcgggcacaacccac

SEQ ID NO: 2081686 - RNA, 19 nt, Artificial Sequence
  Description of Artificial Sequence: Synthetic oligonucleotide
ccuuagucccucugucagu

SEQ ID NO: 2081687 - RNA, 19 nt, Artificial Sequence
  Description of Artificial Sequence: Synthetic oligonucleotide
ggggugggacucgguggcc

SEQ ID NO: 2081688 - RNA, 19 nt, Artificial Sequence
  Description of Artificial Sequence: Synthetic oligonucleotide
ccaacggugcgggcacaac

SEQ ID NO: 2081689 - RNA, 19 nt, Artificial Sequence
  Description of Artificial Sequence: Synthetic oligonucleotide
ccagugccaggcggucgcg

SEQ ID NO: 2081690 - RNA, 19 nt, Artificial Sequence
  Description of Artificial Sequence: Synthetic oligonucleotide
cggauaugggacugggccu

SEQ ID NO: 2081691 - RNA, 19 nt, Artificial Sequence
  Description of Artificial Sequence: Synthetic oligonucleotide
cuccgguuugagacacuuu

SEQ ID NO: 2081692 - RNA, 19 nt, Artificial Sequence
  Description of Artificial Sequence: Synthetic oligonucleotide
cagugacggcauacuuggu

SEQ ID NO: 2081693 - RNA, 19 nt, Artificial Sequence
  Description of Artificial Sequence: Synthetic oligonucleotide
ccgguuugagacacuuuau

SEQ ID NO: 2081694 - RNA, 19 nt, Artificial Sequence
  Description of Artificial Sequence: Synthetic oligonucleotide
gggacucgguggccacaca

SEQ ID NO: 2081695 - RNA, 19 nt, Artificial Sequence
  Description of Artificial Sequence: Synthetic oligonucleotide
ccgugucuccaccaagccu

SEQ ID NO: 2081696 - RNA, 19 nt, Artificial Sequence
  Description of Artificial Sequence: Synthetic oligonucleotide
gcccgcccaccucguucgg

SEQ ID NO: 2081697 - RNA, 19 nt, Artificial Sequence
  Description of Artificial Sequence: Synthetic oligonucleotide
ccucgauguugccaacggu

SEQ ID NO: 2081698 - RNA, 19 nt, Artificial Sequence
  Description of Artificial Sequence: Synthetic oligonucleotide
ggcggucgcgccaccgcuc

SEQ ID NO: 2081699 - RNA, 19 nt, Artificial Sequence
  Description of Artificial Sequence: Synthetic oligonucleotide
cccgcccaccucguucggc

SEQ ID NO: 2081700 - RNA, 19 nt, Artificial Sequence
  Description of Artificial Sequence: Synthetic oligonucleotide
gggccaguacguucacauu

SEQ ID NO: 2081701 - RNA, 19 nt, Artificial Sequence
  Description of Artificial Sequence: Synthetic oligonucleotide
gccaacggugcgggcacaa

SEQ ID NO: 2081702 - RNA, 19 nt, Artificial Sequence
  Description of Artificial Sequence: Synthetic oligonucleotide
guucggcgagccagccacu

SEQ ID NO: 2081703 - RNA, 19 nt, Artificial Sequence
  Description of Artificial Sequence: Synthetic oligonucleotide
ccgggccaugccggcauug

SEQ ID NO: 2081704 - RNA, 19 nt, Artificial Sequence
  Description of Artificial Sequence: Synthetic oligonucleotide
gggcacaacccaccaccuu

SEQ ID NO: 2081705 - RNA, 19 nt, Artificial Sequence
  Description of Artificial Sequence: Synthetic oligonucleotide
agccgcccgcccaccucgu

SEQ ID NO: 2081706 - RNA, 19 nt, Artificial Sequence
  Description of Artificial Sequence: Synthetic oligonucleotide
ggucgcgccaccgcuccau

SEQ ID NO: 2081707 - RNA, 19 nt, Artificial Sequence
  Description of Artificial Sequence: Synthetic oligonucleotide
cgagccgcccgcccaccuc

SEQ ID NO: 2081708 - RNA, 19 nt, Artificial Sequence
  Description of Artificial Sequence: Synthetic oligonucleotide
gcgggaggccagccaugaa

SEQ ID NO: 2081709 - RNA, 19 nt, Artificial Sequence
  Description of Artificial Sequence: Synthetic oligonucleotide
ccccgaggcuccggucacc

SEQ ID NO: 2081710 - RNA, 19 nt, Artificial Sequence
  Description of Artificial Sequence: Synthetic oligonucleotide
ccuccgguuugagacacuu

SEQ ID NO: 2081711 - RNA, 19 nt, Artificial Sequence
  Description of Artificial Sequence: Synthetic oligonucleotide
ccaaccgcuggugcugccu

SEQ ID NO: 2081712 - RNA, 19 nt, Artificial Sequence
  Description of Artificial Sequence: Synthetic oligonucleotide
gcggcucucucaggguccu

SEQ ID NO: 2081713 - RNA, 19 nt, Artificial Sequence
  Description of Artificial Sequence: Synthetic oligonucleotide
cccgagccgcccgcccacc

SEQ ID NO: 2081714 - RNA, 19 nt, Artificial Sequence
  Description of Artificial Sequence: Synthetic oligonucleotide
cgggcacaacccaccaccu

SEQ ID NO: 2081715 - RNA, 19 nt, Artificial Sequence
  Description of Artificial Sequence: Synthetic oligonucleotide
cauccacauuccgcuccuu

SEQ ID NO: 2081716 - RNA, 19 nt, Artificial Sequence
  Description of Artificial Sequence: Synthetic oligonucleotide
gggugucaggccgggccau

SEQ ID NO: 2081717 - RNA, 19 nt, Artificial Sequence
  Description of Artificial Sequence: Synthetic oligonucleotide
cgggucacggccgcgccua

SEQ ID NO: 2081718 - RNA, 19 nt, Artificial Sequence
  Description of Artificial Sequence: Synthetic oligonucleotide
ccacgccacugugcugaga

SEQ ID NO: 2081719 - RNA, 19 nt, Artificial Sequence
  Description of Artificial Sequence: Synthetic oligonucleotide
cgggguagccugcacucuu

SEQ ID NO: 2081720 - RNA, 19 nt, Artificial Sequence
  Description of Artificial Sequence: Synthetic oligonucleotide
ccgcuccaugccggcucug

SEQ ID NO: 2081721 - RNA, 19 nt, Artificial Sequence
  Description of Artificial Sequence: Synthetic oligonucleotide
ccaugccggcauuguugau

SEQ ID NO: 2081722 - RNA, 19 nt, Artificial Sequence
  Description of Artificial Sequence: Synthetic oligonucleotide
ccgggguagccugcacucu

SEQ ID NO: 2081723 - RNA, 19 nt, Artificial Sequence
  Description of Artificial Sequence: Synthetic oligonucleotide
gggucacggccgcgccuau

SEQ ID NO: 2081724 - RNA, 19 nt, Artificial Sequence
  Description of Artificial Sequence: Synthetic oligonucleotide
ccgggucacggccgcgccu

SEQ ID NO: 2081725 - RNA, 19 nt, Artificial Sequence
  Description of Artificial Sequence: Synthetic oligonucleotide
ccaccgcuccaugccggcu

SEQ ID NO: 2081726 - RNA, 19 nt, Artificial Sequence
  Description of Artificial Sequence: Synthetic oligonucleotide
ccgagccgcccgcccaccu

SEQ ID NO: 2081727 - RNA, 19 nt, Artificial Sequence
  Description of Artificial Sequence: Synthetic oligonucleotide
gccgggccaugccggcauu

SEQ ID NO: 2081728 - RNA, 19 nt, Artificial Sequence
  Description of Artificial Sequence: Synthetic oligonucleotide
cggucgcgccaccgcucca

SEQ ID NO: 2081729 - RNA, 19 nt, Artificial Sequence
  Description of Artificial Sequence: Synthetic oligonucleotide
gccgcccgcccaccucguu

SEQ ID NO: 2081730 - RNA, 19 nt, Artificial Sequence
  Description of Artificial Sequence: Synthetic oligonucleotide
uguauuuggaccuugacac

SEQ ID NO: 2081731 - RNA, 19 nt, Artificial Sequence
  Description of Artificial Sequence: Synthetic oligonucleotide
uuggucaccaagcugaagg

SEQ ID NO: 2081732 - RNA, 19 nt, Artificial Sequence
  Description of Artificial Sequence: Synthetic oligonucleotide
uuuagaaucugucauugca

SEQ ID NO: 2081733 - RNA, 19 nt, Artificial Sequence
  Description of Artificial Sequence: Synthetic oligonucleotide
uucaguuucacagaugagg

SEQ ID NO: 2081734 - RNA, 19 nt, Artificial Sequence
  Description of Artificial Sequence: Synthetic oligonucleotide
caugucauagugaacaggc

SEQ ID NO: 2081735 - RNA, 19 nt, Artificial Sequence
  Description of Artificial Sequence: Synthetic oligonucleotide
ugucuugccaccacgaugc

SEQ ID NO: 2081736 - RNA, 19 nt, Artificial Sequence
  Description of Artificial Sequence: Synthetic oligonucleotide
uggauauacgcucaucuag

SEQ ID NO: 2081737 - RNA, 19 nt, Artificial Sequence
  Description of Artificial Sequence: Synthetic oligonucleotide
uuagaaucugucauugcag

SEQ ID NO: 2081738 - RNA, 19 nt, Artificial Sequence
  Description of Artificial Sequence: Synthetic oligonucleotide
gaugggucaagauaguccc

SEQ ID NO: 2081739 - RNA, 19 nt, Artificial Sequence
  Description of Artificial Sequence: Synthetic oligonucleotide
gacuauuucugugaggugg

SEQ ID NO: 2081740 - RNA, 19 nt, Artificial Sequence
  Description of Artificial Sequence: Synthetic oligonucleotide
acuguugagaaacaguucu

SEQ ID NO: 2081741 - RNA, 19 nt, Artificial Sequence
  Description of Artificial Sequence: Synthetic oligonucleotide
uguggauauacgcucaucu

SEQ ID NO: 2081742 - RNA, 19 nt, Artificial Sequence
  Description of Artificial Sequence: Synthetic oligonucleotide
ugcuuugaggucaucagag

SEQ ID NO: 2081743 - RNA, 19 nt, Artificial Sequence
  Description of Artificial Sequence: Synthetic oligonucleotide
aguuucacagaugagggac

SEQ ID NO: 2081744 - RNA, 19 nt, Artificial Sequence
  Description of Artificial Sequence: Synthetic oligonucleotide
uauacgcucaucuaggauc

SEQ ID NO: 2081745 - RNA, 19 nt, Artificial Sequence
  Description of Artificial Sequence: Synthetic oligonucleotide
agagccaaugcucugcugg

SEQ ID NO: 2081746 - RNA, 19 nt, Artificial Sequence
  Description of Artificial Sequence: Synthetic oligonucleotide
auugagagacuguauuugg

SEQ ID NO: 2081747 - RNA, 19 nt, Artificial Sequence
  Description of Artificial Sequence: Synthetic oligonucleotide
ugugaggugggucucaugu

SEQ ID NO: 2081748 - RNA, 19 nt, Artificial Sequence
  Description of Artificial Sequence: Synthetic oligonucleotide
uguuuuggcgggcagcuag

SEQ ID NO: 2081749 - RNA, 19 nt, Artificial Sequence
  Description of Artificial Sequence: Synthetic oligonucleotide
aguuggccaugcuugaccc

SEQ ID NO: 2081750 - RNA, 19 nt, Artificial Sequence
  Description of Artificial Sequence: Synthetic oligonucleotide
aggcugucgaugcugaggc

SEQ ID NO: 2081751 - RNA, 19 nt, Artificial Sequence
  Description of Artificial Sequence: Synthetic oligonucleotide
ucuaggaucuggaggaggc

SEQ ID NO: 2081752 - RNA, 19 nt, Artificial Sequence
  Description of Artificial Sequence: Synthetic oligonucleotide
ugagaaacaguucuaucuc

SEQ ID NO: 2081753 - RNA, 19 nt, Artificial Sequence
  Description of Artificial Sequence: Synthetic oligonucleotide
gagaaaacggcugcgacag

SEQ ID NO: 2081754 - RNA, 19 nt, Artificial Sequence
  Description of Artificial Sequence: Synthetic oligonucleotide
agguguucgccauugagag

SEQ ID NO: 2081755 - RNA, 19 nt, Artificial Sequence
  Description of Artificial Sequence: Synthetic oligonucleotide
ucaagauagucccuucccc

SEQ ID NO: 2081756 - RNA, 19 nt, Artificial Sequence
  Description of Artificial Sequence: Synthetic oligonucleotide
ucuuuagaaucugucauug

SEQ ID NO: 2081757 - RNA, 19 nt, Artificial Sequence
  Description of Artificial Sequence: Synthetic oligonucleotide
uccaucuuuggucaccaag

SEQ ID NO: 2081758 - RNA, 19 nt, Artificial Sequence
  Description of Artificial Sequence: Synthetic oligonucleotide
gucacgugagcucugagag

SEQ ID NO: 2081759 - RNA, 19 nt, Artificial Sequence
  Description of Artificial Sequence: Synthetic oligonucleotide
aguugcaaugucucccacc

SEQ ID NO: 2081760 - RNA, 19 nt, Artificial Sequence
  Description of Artificial Sequence: Synthetic oligonucleotide
agugcaaaaugcugccggc

SEQ ID NO: 2081761 - RNA, 19 nt, Artificial Sequence
  Description of Artificial Sequence: Synthetic oligonucleotide
agaaucugucauugcagac

SEQ ID NO: 2081762 - RNA, 19 nt, Artificial Sequence
  Description of Artificial Sequence: Synthetic oligonucleotide
ugcaaaaugcugccggcag

SEQ ID NO: 2081763 - RNA, 19 nt, Artificial Sequence
  Description of Artificial Sequence: Synthetic oligonucleotide
ugcuugacccuccagcucc

SEQ ID NO: 2081764 - RNA, 19 nt, Artificial Sequence
  Description of Artificial Sequence: Synthetic oligonucleotide
ugagagacuguauuuggac

SEQ ID NO: 2081765 - RNA, 19 nt, Artificial Sequence
  Description of Artificial Sequence: Synthetic oligonucleotide
gagagacuguauuuggacc

SEQ ID NO: 2081766 - RNA, 19 nt, Artificial Sequence
  Description of Artificial Sequence: Synthetic oligonucleotide
gaauucccggaugugaagg

SEQ ID NO: 2081767 - RNA, 19 nt, Artificial Sequence
  Description of Artificial Sequence: Synthetic oligonucleotide
aaucugucauugcagacua

SEQ ID NO: 2081768 - RNA, 19 nt, Artificial Sequence
  Description of Artificial Sequence: Synthetic oligonucleotide
ugcagacuauuucugugag

SEQ ID NO: 2081769 - RNA, 19 nt, Artificial Sequence
  Description of Artificial Sequence: Synthetic oligonucleotide
gucaucagagugcaaaaug

SEQ ID NO: 2081770 - RNA, 19 nt, Artificial Sequence
  Description of Artificial Sequence: Synthetic oligonucleotide
uucuaucucuagcuguugc

SEQ ID NO: 2081771 - RNA, 19 nt, Artificial Sequence
  Description of Artificial Sequence: Synthetic oligonucleotide
gaagacagggcuagggccg

SEQ ID NO: 2081772 - RNA, 19 nt, Artificial Sequence
  Description of Artificial Sequence: Synthetic oligonucleotide
gaaaagugcuuugagguca

SEQ ID NO: 2081773 - RNA, 19 nt, Artificial Sequence
  Description of Artificial Sequence: Synthetic oligonucleotide
uauuuggaccuugacacca

SEQ ID NO: 2081774 - RNA, 19 nt, Artificial Sequence
  Description of Artificial Sequence: Synthetic oligonucleotide
gaaaagccugguuagggca

SEQ ID NO: 2081775 - RNA, 19 nt, Artificial Sequence
  Description of Artificial Sequence: Synthetic oligonucleotide
cacgaugcuggcaugcugg

SEQ ID NO: 2081776 - RNA, 19 nt, Artificial Sequence
  Description of Artificial Sequence: Synthetic oligonucleotide
gaccuugacaccauugaag

SEQ ID NO: 2081777 - RNA, 19 nt, Artificial Sequence
  Description of Artificial Sequence: Synthetic oligonucleotide
uggaccuugacaccauuga

SEQ ID NO: 2081778 - RNA, 19 nt, Artificial Sequence
  Description of Artificial Sequence: Synthetic oligonucleotide
ugcacgccggaacucaggg

SEQ ID NO: 2081779 - RNA, 19 nt, Artificial Sequence
  Description of Artificial Sequence: Synthetic oligonucleotide
cuuggaguaucugugggcc

SEQ ID NO: 2081780 - RNA, 19 nt, Artificial Sequence
  Description of Artificial Sequence: Synthetic oligonucleotide
aacucagggugucacguga

SEQ ID NO: 2081781 - RNA, 19 nt, Artificial Sequence
  Description of Artificial Sequence: Synthetic oligonucleotide
gaugugaagguguucgcca

SEQ ID NO: 2081782 - RNA, 19 nt, Artificial Sequence
  Description of Artificial Sequence: Synthetic oligonucleotide
ucuaucucuagcuguugca

SEQ ID NO: 2081783 - RNA, 19 nt, Artificial Sequence
  Description of Artificial Sequence: Synthetic oligonucleotide
aguaucugugggccguccc

SEQ ID NO: 2081784 - RNA, 19 nt, Artificial Sequence
  Description of Artificial Sequence: Synthetic oligonucleotide
uguuccuguuccuccagag

SEQ ID NO: 2081785 - RNA, 19 nt, Artificial Sequence
  Description of Artificial Sequence: Synthetic oligonucleotide
uagggugccagcuagccaa

SEQ ID NO: 2081786 - RNA, 19 nt, Artificial Sequence
  Description of Artificial Sequence: Synthetic oligonucleotide
aagguugccccuccggucu

SEQ ID NO: 2081787 - RNA, 19 nt, Artificial Sequence
  Description of Artificial Sequence: Synthetic oligonucleotide
gugcauugcaggucgaugc

SEQ ID NO: 2081788 - RNA, 19 nt, Artificial Sequence
  Description of Artificial Sequence: Synthetic oligonucleotide
agcuuggaguaucuguggg

SEQ ID NO: 2081789 - RNA, 19 nt, Artificial Sequence
  Description of Artificial Sequence: Synthetic oligonucleotide
uugcagacuauuucuguga

SEQ ID NO: 2081790 - RNA, 19 nt, Artificial Sequence
  Description of Artificial Sequence: Synthetic oligonucleotide
aggaaaagccugguuaggg

SEQ ID NO: 2081791 - RNA, 19 nt, Artificial Sequence
  Description of Artificial Sequence: Synthetic oligonucleotide
acuagggugccagcuagcc

SEQ ID NO: 2081792 - RNA, 19 nt, Artificial Sequence
  Description of Artificial Sequence: Synthetic oligonucleotide
gucaagauagucccuuccc

SEQ ID NO: 2081793 - RNA, 19 nt, Artificial Sequence
  Description of Artificial Sequence: Synthetic oligonucleotide
uaucucuagcuguugcagc

SEQ ID NO: 2081794 - RNA, 19 nt, Artificial Sequence
  Description of Artificial Sequence: Synthetic oligonucleotide
uagcuuggaguaucugugg

SEQ ID NO: 2081795 - RNA, 19 nt, Artificial Sequence
  Description of Artificial Sequence: Synthetic oligonucleotide
acaguucuaucucuagcug

SEQ ID NO: 2081796 - RNA, 19 nt, Artificial Sequence
  Description of Artificial Sequence: Synthetic oligonucleotide
aauucccggaugugaaggu

SEQ ID NO: 2081797 - RNA, 19 nt, Artificial Sequence
  Description of Artificial Sequence: Synthetic oligonucleotide
ugucacgugagcucugaga

SEQ ID NO: 2081798 - RNA, 19 nt, Artificial Sequence
  Description of Artificial Sequence: Synthetic oligonucleotide
uagccaagaguggagcugg

SEQ ID NO: 2081799 - RNA, 19 nt, Artificial Sequence
  Description of Artificial Sequence: Synthetic oligonucleotide
gacacugagaggcugucga

SEQ ID NO: 2081800 - RNA, 19 nt, Artificial Sequence
  Description of Artificial Sequence: Synthetic oligonucleotide
aagauagucccuuccccau

SEQ ID NO: 2081801 - RNA, 19 nt, Artificial Sequence
  Description of Artificial Sequence: Synthetic oligonucleotide
cuuuagaaucugucauugc

SEQ ID NO: 2081802 - RNA, 19 nt, Artificial Sequence
  Description of Artificial Sequence: Synthetic oligonucleotide
aagguguucgccauugaga

SEQ ID NO: 2081803 - RNA, 19 nt, Artificial Sequence
  Description of Artificial Sequence: Synthetic oligonucleotide
guguucgccauugagagac

SEQ ID NO: 2081804 - RNA, 19 nt, Artificial Sequence
  Description of Artificial Sequence: Synthetic oligonucleotide
guagcuuggaguaucugug

SEQ ID NO: 2081805 - RNA, 19 nt, Artificial Sequence
  Description of Artificial Sequence: Synthetic oligonucleotide
cacgugagcucugagaggc

SEQ ID NO: 2081806 - RNA, 19 nt, Artificial Sequence
  Description of Artificial Sequence: Synthetic oligonucleotide
ugcgacagacuguugagaa

SEQ ID NO: 2081807 - RNA, 19 nt, Artificial Sequence
  Description of Artificial Sequence: Synthetic oligonucleotide
gaaaacggcugcgacagac

SEQ ID NO: 2081808 - RNA, 19 nt, Artificial Sequence
  Description of Artificial Sequence: Synthetic oligonucleotide
ccugguuagggcaaugugg

SEQ ID NO: 2081809 - RNA, 19 nt, Artificial Sequence
  Description of Artificial Sequence: Synthetic oligonucleotide
uggaauucccggaugugaa

SEQ ID NO: 2081810 - RNA, 19 nt, Artificial Sequence
  Description of Artificial Sequence: Synthetic oligonucleotide
aagccggucaaaccugugu

SEQ ID NO: 2081811 - RNA, 19 nt, Artificial Sequence
  Description of Artificial Sequence: Synthetic oligonucleotide
uuggaccuugacaccauug

SEQ ID NO: 2081812 - RNA, 19 nt, Artificial Sequence
  Description of Artificial Sequence: Synthetic oligonucleotide
gauauacgcucaucuagga

SEQ ID NO: 2081813 - RNA, 19 nt, Artificial Sequence
  Description of Artificial Sequence: Synthetic oligonucleotide
ugcauugcaggucgaugcc

SEQ ID NO: 2081814 - RNA, 19 nt, Artificial Sequence
  Description of Artificial Sequence: Synthetic oligonucleotide
cagggugcauugcaggucg

SEQ ID NO: 2081815 - RNA, 19 nt, Artificial Sequence
  Description of Artificial Sequence: Synthetic oligonucleotide
uguugagaaacaguucuau

SEQ ID NO: 2081816 - RNA, 19 nt, Artificial Sequence
  Description of Artificial Sequence: Synthetic oligonucleotide
cuccaugucauagugaaca

SEQ ID NO: 2081817 - RNA, 19 nt, Artificial Sequence
  Description of Artificial Sequence: Synthetic oligonucleotide
ggauauacgcucaucuagg

SEQ ID NO: 2081818 - RNA, 19 nt, Artificial Sequence
  Description of Artificial Sequence: Synthetic oligonucleotide
aauguggauauacgcucau

SEQ ID NO: 2081819 - RNA, 19 nt, Artificial Sequence
  Description of Artificial Sequence: Synthetic oligonucleotide
uggaggaggcuugaagccg

SEQ ID NO: 2081820 - RNA, 19 nt, Artificial Sequence
  Description of Artificial Sequence: Synthetic oligonucleotide
agcuagccaagaguggagc

SEQ ID NO: 2081821 - RNA, 19 nt, Artificial Sequence
  Description of Artificial Sequence: Synthetic oligonucleotide
uucuuuagaaucugucauu

SEQ ID NO: 2081822 - RNA, 19 nt, Artificial Sequence
  Description of Artificial Sequence: Synthetic oligonucleotide
gaugcuggcaugcuggaua

SEQ ID NO: 2081823 - RNA, 19 nt, Artificial Sequence
  Description of Artificial Sequence: Synthetic oligonucleotide
ggcaaagcugccaucaggg

SEQ ID NO: 2081824 - RNA, 19 nt, Artificial Sequence
  Description of Artificial Sequence: Synthetic oligonucleotide
uguguuuuggcgggcagcu

SEQ ID NO: 2081825 - RNA, 19 nt, Artificial Sequence
  Description of Artificial Sequence: Synthetic oligonucleotide
cacgccggaacucagggug

SEQ ID NO: 2081826 - RNA, 19 nt, Artificial Sequence
  Description of Artificial Sequence: Synthetic oligonucleotide
uuggaguaucugugggccg

SEQ ID NO: 2081827 - RNA, 19 nt, Artificial Sequence
  Description of Artificial Sequence: Synthetic oligonucleotide
ugagggacuagggugccag

SEQ ID NO: 2081828 - RNA, 19 nt, Artificial Sequence
  Description of Artificial Sequence: Synthetic oligonucleotide
agauagucccuuccccauc

SEQ ID NO: 2081829 - RNA, 19 nt, Artificial Sequence
  Description of Artificial Sequence: Synthetic oligonucleotide
ucacgugagcucugagagg

SEQ ID NO: 2081830 - RNA, 19 nt, Artificial Sequence
  Description of Artificial Sequence: Synthetic oligonucleotide
ugacccgguggaauucccg

SEQ ID NO: 2081831 - RNA, 19 nt, Artificial Sequence
  Description of Artificial Sequence: Synthetic oligonucleotide
aaugcucugcuggaaggca

SEQ ID NO: 2081832 - RNA, 19 nt, Artificial Sequence
  Description of Artificial Sequence: Synthetic oligonucleotide
cauugaaguagcuuggagu

SEQ ID NO: 2081833 - RNA, 19 nt, Artificial Sequence
  Description of Artificial Sequence: Synthetic oligonucleotide
agccggucaaaccugugug

SEQ ID NO: 2081834 - RNA, 19 nt, Artificial Sequence
  Description of Artificial Sequence: Synthetic oligonucleotide
uucccggaugugaaggugu

SEQ ID NO: 2081835 - RNA, 19 nt, Artificial Sequence
  Description of Artificial Sequence: Synthetic oligonucleotide
aaccuguguggaugauggg

SEQ ID NO: 2081836 - RNA, 19 nt, Artificial Sequence
  Description of Artificial Sequence: Synthetic oligonucleotide
ccaagaguggagcuggugg

SEQ ID NO: 2081837 - RNA, 19 nt, Artificial Sequence
  Description of Artificial Sequence: Synthetic oligonucleotide
guauuuggaccuugacacc

SEQ ID NO: 2081838 - RNA, 19 nt, Artificial Sequence
  Description of Artificial Sequence: Synthetic oligonucleotide
caugagugcacgccggaac

SEQ ID NO: 2081839 - RNA, 19 nt, Artificial Sequence
  Description of Artificial Sequence: Synthetic oligonucleotide
augagugcacgccggaacu

SEQ ID NO: 2081840 - RNA, 19 nt, Artificial Sequence
  Description of Artificial Sequence: Synthetic oligonucleotide
cuugaagccggucaaaccu

SEQ ID NO: 2081841 - RNA, 19 nt, Artificial Sequence
  Description of Artificial Sequence: Synthetic oligonucleotide
ugguggaagacagggcuag

SEQ ID NO: 2081842 - RNA, 19 nt, Artificial Sequence
  Description of Artificial Sequence: Synthetic oligonucleotide
guugcaaugucucccaccu

SEQ ID NO: 2081843 - RNA, 19 nt, Artificial Sequence
  Description of Artificial Sequence: Synthetic oligonucleotide
cauugcaggucgaugccug

SEQ ID NO: 2081844 - RNA, 19 nt, Artificial Sequence
  Description of Artificial Sequence: Synthetic oligonucleotide
caagauagucccuucccca

SEQ ID NO: 2081845 - RNA, 19 nt, Artificial Sequence
  Description of Artificial Sequence: Synthetic oligonucleotide
ucugucauugcagacuauu

SEQ ID NO: 2081846 - RNA, 19 nt, Artificial Sequence
  Description of Artificial Sequence: Synthetic oligonucleotide
ugcuccaugagugcacgcc

SEQ ID NO: 2081847 - RNA, 19 nt, Artificial Sequence
  Description of Artificial Sequence: Synthetic oligonucleotide
caguuggccaugcuugacc

SEQ ID NO: 2081848 - RNA, 19 nt, Artificial Sequence
  Description of Artificial Sequence: Synthetic oligonucleotide
cuagcccugcaucuguggc

SEQ ID NO: 2081849 - RNA, 19 nt, Artificial Sequence
  Description of Artificial Sequence: Synthetic oligonucleotide
ggaaaagccugguuagggc

SEQ ID NO: 2081850 - RNA, 19 nt, Artificial Sequence
  Description of Artificial Sequence: Synthetic oligonucleotide
gugucuugccaccacgaug

SEQ ID NO: 2081851 - RNA, 19 nt, Artificial Sequence
  Description of Artificial Sequence: Synthetic oligonucleotide
agggcaauguggauauacg

SEQ ID NO: 2081852 - RNA, 19 nt, Artificial Sequence
  Description of Artificial Sequence: Synthetic oligonucleotide
auauacgcucaucuaggau

SEQ ID NO: 2081853 - RNA, 19 nt, Artificial Sequence
  Description of Artificial Sequence: Synthetic oligonucleotide
uucuuuucacuguccucug

SEQ ID NO: 2081854 - RNA, 19 nt, Artificial Sequence
  Description of Artificial Sequence: Synthetic oligonucleotide
guaucugugggccgucccc

SEQ ID NO: 2081855 - RNA, 19 nt, Artificial Sequence
  Description of Artificial Sequence: Synthetic oligonucleotide
uggcaugcuggauacugac

SEQ ID NO: 2081856 - RNA, 19 nt, Artificial Sequence
  Description of Artificial Sequence: Synthetic oligonucleotide
uuuggcgggcagcuagccc

SEQ ID NO: 2081857 - RNA, 19 nt, Artificial Sequence
  Description of Artificial Sequence: Synthetic oligonucleotide
aggucgaugccugagucug

SEQ ID NO: 2081858 - RNA, 19 nt, Artificial Sequence
  Description of Artificial Sequence: Synthetic oligonucleotide
ugagaggccuuugaugggu

SEQ ID NO: 2081859 - RNA, 19 nt, Artificial Sequence
  Description of Artificial Sequence: Synthetic oligonucleotide
auagucccuuccccauccc

SEQ ID NO: 2081860 - RNA, 19 nt, Artificial Sequence
  Description of Artificial Sequence: Synthetic oligonucleotide
augccaguugcaaugucuc

SEQ ID NO: 2081861 - RNA, 19 nt, Artificial Sequence
  Description of Artificial Sequence: Synthetic oligonucleotide
uguggaugaugggucaaga

SEQ ID NO: 2081862 - RNA, 19 nt, Artificial Sequence
  Description of Artificial Sequence: Synthetic oligonucleotide
uccaagccccaccaggaaa

SEQ ID NO: 2081863 - RNA, 19 nt, Artificial Sequence
  Description of Artificial Sequence: Synthetic oligonucleotide
uucgccauugagagacugu

SEQ ID NO: 2081864 - RNA, 19 nt, Artificial Sequence
  Description of Artificial Sequence: Synthetic oligonucleotide
uccuucaguuucacagaug

SEQ ID NO: 2081865 - RNA, 19 nt, Artificial Sequence
  Description of Artificial Sequence: Synthetic oligonucleotide
ucugucuggcugcuccaug

SEQ ID NO: 2081866 - RNA, 19 nt, Artificial Sequence
  Description of Artificial Sequence: Synthetic oligonucleotide
gggcaauguggauauacgc

SEQ ID NO: 2081867 - RNA, 19 nt, Artificial Sequence
  Description of Artificial Sequence: Synthetic oligonucleotide
aguccaugcagagccaaug

SEQ ID NO: 2081868 - RNA, 19 nt, Artificial Sequence
  Description of Artificial Sequence: Synthetic oligonucleotide
cuccaugagugcacgccgg

SEQ ID NO: 2081869 - RNA, 19 nt, Artificial Sequence
  Description of Artificial Sequence: Synthetic oligonucleotide
ccaggaaaagccugguuag

SEQ ID NO: 2081870 - RNA, 19 nt, Artificial Sequence
  Description of Artificial Sequence: Synthetic oligonucleotide
ugcaggucgaugccugagu

SEQ ID NO: 2081871 - RNA, 19 nt, Artificial Sequence
  Description of Artificial Sequence: Synthetic oligonucleotide
gagaaacaguucuaucucu

SEQ ID NO: 2081872 - RNA, 19 nt, Artificial Sequence
  Description of Artificial Sequence: Synthetic oligonucleotide
gaagguugccccuccgguc

SEQ ID NO: 2081873 - RNA, 19 nt, Artificial Sequence
  Description of Artificial Sequence: Synthetic oligonucleotide
agaggccuuugauggguuc

SEQ ID NO: 2081874 - RNA, 19 nt, Artificial Sequence
  Description of Artificial Sequence: Synthetic oligonucleotide
gaacucagggugucacgug

SEQ ID NO: 2081875 - RNA, 19 nt, Artificial Sequence
  Description of Artificial Sequence: Synthetic oligonucleotide
cauagugaacaggcugucc

SEQ ID NO: 2081876 - RNA, 19 nt, Artificial Sequence
  Description of Artificial Sequence: Synthetic oligonucleotide
aaaacggcugcgacagacu

SEQ ID NO: 2081877 - RNA, 19 nt, Artificial Sequence
  Description of Artificial Sequence: Synthetic oligonucleotide
caucuguggcuuucuuuag

SEQ ID NO: 2081878 - RNA, 19 nt, Artificial Sequence
  Description of Artificial Sequence: Synthetic oligonucleotide
auacgcucaucuaggaucu

SEQ ID NO: 2081879 - RNA, 19 nt, Artificial Sequence
  Description of Artificial Sequence: Synthetic oligonucleotide
guuagggcaauguggauau

SEQ ID NO: 2081880 - RNA, 19 nt, Artificial Sequence
  Description of Artificial Sequence: Synthetic oligonucleotide
ggucaagauagucccuucc

SEQ ID NO: 2081881 - RNA, 19 nt, Artificial Sequence
  Description of Artificial Sequence: Synthetic oligonucleotide
caauguggauauacgcuca

SEQ ID NO: 2081882 - RNA, 19 nt, Artificial Sequence
  Description of Artificial Sequence: Synthetic oligonucleotide
cuagccaagaguggagcug

SEQ ID NO: 2081883 - RNA, 19 nt, Artificial Sequence
  Description of Artificial Sequence: Synthetic oligonucleotide
caaugcucugcuggaaggc

SEQ ID NO: 2081884 - RNA, 19 nt, Artificial Sequence
  Description of Artificial Sequence: Synthetic oligonucleotide
uggaguaucugugggccgu

SEQ ID NO: 2081885 - RNA, 19 nt, Artificial Sequence
  Description of Artificial Sequence: Synthetic oligonucleotide
gugaagguguucgccauug

SEQ ID NO: 2081886 - RNA, 19 nt, Artificial Sequence
  Description of Artificial Sequence: Synthetic oligonucleotide
ugaagguguucgccauuga

SEQ ID NO: 2081887 - RNA, 19 nt, Artificial Sequence
  Description of Artificial Sequence: Synthetic oligonucleotide
uccaugagugcacgccgga

SEQ ID NO: 2081888 - RNA, 19 nt, Artificial Sequence
  Description of Artificial Sequence: Synthetic oligonucleotide
agucuggcaccuccauguc

SEQ ID NO: 2081889 - RNA, 19 nt, Artificial Sequence
  Description of Artificial Sequence: Synthetic oligonucleotide
gucaaaccuguguggauga

SEQ ID NO: 2081890 - RNA, 19 nt, Artificial Sequence
  Description of Artificial Sequence: Synthetic oligonucleotide
gauggguucuuuucacugu

SEQ ID NO: 2081891 - RNA, 19 nt, Artificial Sequence
  Description of Artificial Sequence: Synthetic oligonucleotide
ccaugugccagacuccucc

SEQ ID NO: 2081892 - RNA, 19 nt, Artificial Sequence
  Description of Artificial Sequence: Synthetic oligonucleotide
ggacuagggugccagcuag

SEQ ID NO: 2081893 - RNA, 19 nt, Artificial Sequence
  Description of Artificial Sequence: Synthetic oligonucleotide
uuggccaugcuugacccuc

SEQ ID NO: 2081894 - RNA, 19 nt, Artificial Sequence
  Description of Artificial Sequence: Synthetic oligonucleotide
acagggcuagggccgguuc

SEQ ID NO: 2081895 - RNA, 19 nt, Artificial Sequence
  Description of Artificial Sequence: Synthetic oligonucleotide
aaguagcuuggaguaucug

SEQ ID NO: 2081896 - RNA, 19 nt, Artificial Sequence
  Description of Artificial Sequence: Synthetic oligonucleotide
cuagcuguugcagcuccag

SEQ ID NO: 2081897 - RNA, 19 nt, Artificial Sequence
  Description of Artificial Sequence: Synthetic oligonucleotide
uagugaacaggcuguccau

SEQ ID NO: 2081898 - RNA, 19 nt, Artificial Sequence
  Description of Artificial Sequence: Synthetic oligonucleotide
gggaggacaaaggcaaggg

SEQ ID NO: 2081899 - RNA, 19 nt, Artificial Sequence
  Description of Artificial Sequence: Synthetic oligonucleotide
uugacccgguggaauuccc

SEQ ID NO: 2081900 - RNA, 19 nt, Artificial Sequence
  Description of Artificial Sequence: Synthetic oligonucleotide
auguggauauacgcucauc

SEQ ID NO: 2081901 - RNA, 19 nt, Artificial Sequence
  Description of Artificial Sequence: Synthetic oligonucleotide
augcuggauacugacugug

SEQ ID NO: 2081902 - RNA, 19 nt, Artificial Sequence
  Description of Artificial Sequence: Synthetic oligonucleotide
aggugggucucaugucauc

SEQ ID NO: 2081903 - RNA, 19 nt, Artificial Sequence
  Description of Artificial Sequence: Synthetic oligonucleotide
caggaaaagccugguuagg

SEQ ID NO: 2081904 - RNA, 19 nt, Artificial Sequence
  Description of Artificial Sequence: Synthetic oligonucleotide
ccggaugugaagguguucg

SEQ ID NO: 2081905 - RNA, 19 nt, Artificial Sequence
  Description of Artificial Sequence: Synthetic oligonucleotide
cuugacccgguggaauucc

SEQ ID NO: 2081906 - RNA, 19 nt, Artificial Sequence
  Description of Artificial Sequence: Synthetic oligonucleotide
ggaauucccggaugugaag

SEQ ID NO: 2081907 - RNA, 19 nt, Artificial Sequence
  Description of Artificial Sequence: Synthetic oligonucleotide
uuuuggcgggcagcuagcc

SEQ ID NO: 2081908 - RNA, 19 nt, Artificial Sequence
  Description of Artificial Sequence: Synthetic oligonucleotide
gaugccaguugcaaugucu

SEQ ID NO: 2081909 - RNA, 19 nt, Artificial Sequence
  Description of Artificial Sequence: Synthetic oligonucleotide
augugaagguguucgccau

SEQ ID NO: 2081910 - RNA, 19 nt, Artificial Sequence
  Description of Artificial Sequence: Synthetic oligonucleotide
uuucacagaugagggacua

SEQ ID NO: 2081911 - RNA, 19 nt, Artificial Sequence
  Description of Artificial Sequence: Synthetic oligonucleotide
aaaaugcugccggcagugu

SEQ ID NO: 2081912 - RNA, 19 nt, Artificial Sequence
  Description of Artificial Sequence: Synthetic oligonucleotide
ugcugaugccaguugcaau

SEQ ID NO: 2081913 - RNA, 19 nt, Artificial Sequence
  Description of Artificial Sequence: Synthetic oligonucleotide
ucgccauugagagacugua

SEQ ID NO: 2081914 - RNA, 19 nt, Artificial Sequence
  Description of Artificial Sequence: Synthetic oligonucleotide
agugucuugccaccacgau

SEQ ID NO: 2081915 - RNA, 19 nt, Artificial Sequence
  Description of Artificial Sequence: Synthetic oligonucleotide
ucauagugaacaggcuguc

SEQ ID NO: 2081916 - RNA, 19 nt, Artificial Sequence
  Description of Artificial Sequence: Synthetic oligonucleotide
aaaagugcuuugaggucau

SEQ ID NO: 2081917 - RNA, 19 nt, Artificial Sequence
  Description of Artificial Sequence: Synthetic oligonucleotide
aguucuaucucuagcuguu

SEQ ID NO: 2081918 - RNA, 19 nt, Artificial Sequence
  Description of Artificial Sequence: Synthetic oligonucleotide
cucagggugucacgugagc

SEQ ID NO: 2081919 - RNA, 19 nt, Artificial Sequence
  Description of Artificial Sequence: Synthetic oligonucleotide
ggcaaggguucccaugugc

SEQ ID NO: 2081920 - RNA, 19 nt, Artificial Sequence
  Description of Artificial Sequence: Synthetic oligonucleotide
cagcuagccaagaguggag

SEQ ID NO: 2081921 - RNA, 19 nt, Artificial Sequence
  Description of Artificial Sequence: Synthetic oligonucleotide
gcuugaagccggucaaacc

SEQ ID NO: 2081922 - RNA, 19 nt, Artificial Sequence
  Description of Artificial Sequence: Synthetic oligonucleotide
agaaacaguucuaucucua

SEQ ID NO: 2081923 - RNA, 19 nt, Artificial Sequence
  Description of Artificial Sequence: Synthetic oligonucleotide
ugugggccguccccgggcc

SEQ ID NO: 2081924 - RNA, 19 nt, Artificial Sequence
  Description of Artificial Sequence: Synthetic oligonucleotide
aaagugcuuugaggucauc

SEQ ID NO: 2081925 - RNA, 19 nt, Artificial Sequence
  Description of Artificial Sequence: Synthetic oligonucleotide
ggugggucucaugucaucc

SEQ ID NO: 2081926 - RNA, 19 nt, Artificial Sequence
  Description of Artificial Sequence: Synthetic oligonucleotide
ggaggcuugaagccgguca

SEQ ID NO: 2081927 - RNA, 19 nt, Artificial Sequence
  Description of Artificial Sequence: Synthetic oligonucleotide
cugucgaugcugaggcaug

SEQ ID NO: 2081928 - RNA, 19 nt, Artificial Sequence
  Description of Artificial Sequence: Synthetic oligonucleotide
uugcaggucgaugccugag

SEQ ID NO: 2081929 - RNA, 19 nt, Artificial Sequence
  Description of Artificial Sequence: Synthetic oligonucleotide
gcugcgacagacuguugag

SEQ ID NO: 2081930 - RNA, 19 nt, Artificial Sequence
  Description of Artificial Sequence: Synthetic oligonucleotide
gucauagugaacaggcugu

SEQ ID NO: 2081931 - RNA, 19 nt, Artificial Sequence
  Description of Artificial Sequence: Synthetic oligonucleotide
uuuggaccuugacaccauu

SEQ ID NO: 2081932 - RNA, 19 nt, Artificial Sequence
  Description of Artificial Sequence: Synthetic oligonucleotide
ggucuggggaagcuggggc

SEQ ID NO: 2081933 - RNA, 19 nt, Artificial Sequence
  Description of Artificial Sequence: Synthetic oligonucleotide
gcaucuguggcuuucuuua

SEQ ID NO: 2081934 - RNA, 19 nt, Artificial Sequence
  Description of Artificial Sequence: Synthetic oligonucleotide
ugggucaagauagucccuu

SEQ ID NO: 2081935 - RNA, 19 nt, Artificial Sequence
  Description of Artificial Sequence: Synthetic oligonucleotide
caugagagaaucuguuccu

SEQ ID NO: 2081936 - RNA, 19 nt, Artificial Sequence
  Description of Artificial Sequence: Synthetic oligonucleotide
ugugaagguguucgccauu

SEQ ID NO: 2081937 - RNA, 19 nt, Artificial Sequence
  Description of Artificial Sequence: Synthetic oligonucleotide
agggugucacgugagcucu

SEQ ID NO: 2081938 - RNA, 19 nt, Artificial Sequence
  Description of Artificial Sequence: Synthetic oligonucleotide
auugcaggucgaugccuga

SEQ ID NO: 2081939 - RNA, 19 nt, Artificial Sequence
  Description of Artificial Sequence: Synthetic oligonucleotide
gccaaugcucugcuggaag

SEQ ID NO: 2081940 - RNA, 19 nt, Artificial Sequence
  Description of Artificial Sequence: Synthetic oligonucleotide
auucccggaugugaaggug

SEQ ID NO: 2081941 - RNA, 19 nt, Artificial Sequence
  Description of Artificial Sequence: Synthetic oligonucleotide
cuguguuuuggcgggcagc

SEQ ID NO: 2081942 - RNA, 19 nt, Artificial Sequence
  Description of Artificial Sequence: Synthetic oligonucleotide
aucugugggccguccccgg

SEQ ID NO: 2081943 - RNA, 19 nt, Artificial Sequence
  Description of Artificial Sequence: Synthetic oligonucleotide
ugucgaugcugaggcauga

SEQ ID NO: 2081944 - RNA, 19 nt, Artificial Sequence
  Description of Artificial Sequence: Synthetic oligonucleotide
ccuguguggaugauggguc

SEQ ID NO: 2081945 - RNA, 19 nt, Artificial Sequence
  Description of Artificial Sequence: Synthetic oligonucleotide
ugaguccaugcagagccaa

SEQ ID NO: 2081946 - RNA, 19 nt, Artificial Sequence
  Description of Artificial Sequence: Synthetic oligonucleotide
caugcuugacccuccagcu

SEQ ID NO: 2081947 - RNA, 19 nt, Artificial Sequence
  Description of Artificial Sequence: Synthetic oligonucleotide
uggcugcugaugccaguug

SEQ ID NO: 2081948 - RNA, 19 nt, Artificial Sequence
  Description of Artificial Sequence: Synthetic oligonucleotide
ggaggaggcuugaagccgg

SEQ ID NO: 2081949 - RNA, 19 nt, Artificial Sequence
  Description of Artificial Sequence: Synthetic oligonucleotide
gggaagguugccccuccgg

SEQ ID NO: 2081950 - RNA, 19 nt, Artificial Sequence
  Description of Artificial Sequence: Synthetic oligonucleotide
ccauugaaguagcuuggag

SEQ ID NO: 2081951 - RNA, 19 nt, Artificial Sequence
  Description of Artificial Sequence: Synthetic oligonucleotide
ggucucaugucauccuuca

SEQ ID NO: 2081952 - RNA, 19 nt, Artificial Sequence
  Description of Artificial Sequence: Synthetic oligonucleotide
gcuggcaugcuggauacug

SEQ ID NO: 2081953 - RNA, 19 nt, Artificial Sequence
  Description of Artificial Sequence: Synthetic oligonucleotide
gucgaugccugagucuggc

SEQ ID NO: 2081954 - RNA, 19 nt, Artificial Sequence
  Description of Artificial Sequence: Synthetic oligonucleotide
agacuguauuuggaccuug

SEQ ID NO: 2081955 - RNA, 19 nt, Artificial Sequence
  Description of Artificial Sequence: Synthetic oligonucleotide
cauugcagacuauuucugu

SEQ ID NO: 2081956 - RNA, 19 nt, Artificial Sequence
  Description of Artificial Sequence: Synthetic oligonucleotide
ggcuccagggaggacaaag

SEQ ID NO: 2081957 - RNA, 19 nt, Artificial Sequence
  Description of Artificial Sequence: Synthetic oligonucleotide
gagagaaucuguuccuguu

SEQ ID NO: 2081958 - RNA, 19 nt, Artificial Sequence
  Description of Artificial Sequence: Synthetic oligonucleotide
uguguggaugaugggucaa

SEQ ID NO: 2081959 - RNA, 19 nt, Artificial Sequence
  Description of Artificial Sequence: Synthetic oligonucleotide
aaagccugguuagggcaau

SEQ ID NO: 2081960 - RNA, 19 nt, Artificial Sequence
  Description of Artificial Sequence: Synthetic oligonucleotide
accuugacccgguggaauu

SEQ ID NO: 2081961 - RNA, 19 nt, Artificial Sequence
  Description of Artificial Sequence: Synthetic oligonucleotide
guucgccauugagagacug

SEQ ID NO: 2081962 - RNA, 19 nt, Artificial Sequence
  Description of Artificial Sequence: Synthetic oligonucleotide
gcuagcccugcaucugugg

SEQ ID NO: 2081963 - RNA, 19 nt, Artificial Sequence
  Description of Artificial Sequence: Synthetic oligonucleotide
agggcuagggccgguucuc

SEQ ID NO: 2081964 - RNA, 19 nt, Artificial Sequence
  Description of Artificial Sequence: Synthetic oligonucleotide
caguucuaucucuagcugu

SEQ ID NO: 2081965 - RNA, 19 nt, Artificial Sequence
  Description of Artificial Sequence: Synthetic oligonucleotide
guuuuggcgggcagcuagc

SEQ ID NO: 2081966 - RNA, 19 nt, Artificial Sequence
  Description of Artificial Sequence: Synthetic oligonucleotide
gcugaggcaugagagaauc

SEQ ID NO: 2081967 - RNA, 19 nt, Artificial Sequence
  Description of Artificial Sequence: Synthetic oligonucleotide
cuguguggaugauggguca

SEQ ID NO: 2081968 - RNA, 19 nt, Artificial Sequence
  Description of Artificial Sequence: Synthetic oligonucleotide
cgacagacuguugagaaac

SEQ ID NO: 2081969 - RNA, 19 nt, Artificial Sequence
  Description of Artificial Sequence: Synthetic oligonucleotide
gacagacuguugagaaaca

SEQ ID NO: 2081970 - RNA, 19 nt, Artificial Sequence
  Description of Artificial Sequence: Synthetic oligonucleotide
ccaugucauagugaacagg

SEQ ID NO: 2081971 - RNA, 19 nt, Artificial Sequence
  Description of Artificial Sequence: Synthetic oligonucleotide
uccccuggccugcuugagu

SEQ ID NO: 2081972 - RNA, 19 nt, Artificial Sequence
  Description of Artificial Sequence: Synthetic oligonucleotide
cucugacacugagaggcug

SEQ ID NO: 2081973 - RNA, 19 nt, Artificial Sequence
  Description of Artificial Sequence: Synthetic oligonucleotide
acgaugcuggcaugcugga

SEQ ID NO: 2081974 - RNA, 19 nt, Artificial Sequence
  Description of Artificial Sequence: Synthetic oligonucleotide
gugaggugggucucauguc

SEQ ID NO: 2081975 - RNA, 19 nt, Artificial Sequence
  Description of Artificial Sequence: Synthetic oligonucleotide
acucagggugucacgugag

SEQ ID NO: 2081976 - RNA, 19 nt, Artificial Sequence
  Description of Artificial Sequence: Synthetic oligonucleotide
ucgaugccugagucuggca

SEQ ID NO: 2081977 - RNA, 19 nt, Artificial Sequence
  Description of Artificial Sequence: Synthetic oligonucleotide
gagugcacgccggaacuca

SEQ ID NO: 2081978 - RNA, 19 nt, Artificial Sequence
  Description of Artificial Sequence: Synthetic oligonucleotide
ugguuagggcaauguggau

SEQ ID NO: 2081979 - RNA, 19 nt, Artificial Sequence
  Description of Artificial Sequence: Synthetic oligonucleotide
acccgguggaauucccgga

SEQ ID NO: 2081980 - RNA, 19 nt, Artificial Sequence
  Description of Artificial Sequence: Synthetic oligonucleotide
gacuagggugccagcuagc

SEQ ID NO: 2081981 - RNA, 19 nt, Artificial Sequence
  Description of Artificial Sequence: Synthetic oligonucleotide
auguugcagcuggaacuuc

SEQ ID NO: 2081982 - RNA, 19 nt, Artificial Sequence
  Description of Artificial Sequence: Synthetic oligonucleotide
ccagcucugggaagguugc

SEQ ID NO: 2081983 - RNA, 19 nt, Artificial Sequence
  Description of Artificial Sequence: Synthetic oligonucleotide
cuggcaugcuggauacuga

SEQ ID NO: 2081984 - RNA, 19 nt, Artificial Sequence
  Description of Artificial Sequence: Synthetic oligonucleotide
cuguugagaaacaguucua

SEQ ID NO: 2081985 - RNA, 19 nt, Artificial Sequence
  Description of Artificial Sequence: Synthetic oligonucleotide
aggguucccaugugccaga

SEQ ID NO: 2081986 - RNA, 19 nt, Artificial Sequence
  Description of Artificial Sequence: Synthetic oligonucleotide
gguuagggcaauguggaua

SEQ ID NO: 2081987 - RNA, 19 nt, Artificial Sequence
  Description of Artificial Sequence: Synthetic oligonucleotide
ggcaauguggauauacgcu

SEQ ID NO: 2081988 - RNA, 19 nt, Artificial Sequence
  Description of Artificial Sequence: Synthetic oligonucleotide
ggauacugacuguguuuug

SEQ ID NO: 2081989 - RNA, 19 nt, Artificial Sequence
  Description of Artificial Sequence: Synthetic oligonucleotide
gacaccauugaaguagcuu

SEQ ID NO: 2081990 - RNA, 19 nt, Artificial Sequence
  Description of Artificial Sequence: Synthetic oligonucleotide
gugucacgugagcucugag

SEQ ID NO: 2081991 - RNA, 19 nt, Artificial Sequence
  Description of Artificial Sequence: Synthetic oligonucleotide
cugugggccguccccgggc

SEQ ID NO: 2081992 - RNA, 19 nt, Artificial Sequence
  Description of Artificial Sequence: Synthetic oligonucleotide
cuguccucugacacugaga

SEQ ID NO: 2081993 - RNA, 19 nt, Artificial Sequence
  Description of Artificial Sequence: Synthetic oligonucleotide
aagccugguuagggcaaug

SEQ ID NO: 2081994 - RNA, 19 nt, Artificial Sequence
  Description of Artificial Sequence: Synthetic oligonucleotide
agggccgguucuccaguug

SEQ ID NO: 2081995 - RNA, 19 nt, Artificial Sequence
  Description of Artificial Sequence: Synthetic oligonucleotide
gacuguguuuuggcgggca

SEQ ID NO: 2081996 - RNA, 19 nt, Artificial Sequence
  Description of Artificial Sequence: Synthetic oligonucleotide
ucccggaugugaagguguu

SEQ ID NO: 2081997 - RNA, 19 nt, Artificial Sequence
  Description of Artificial Sequence: Synthetic oligonucleotide
gaaguagcuuggaguaucu

SEQ ID NO: 2081998 - RNA, 19 nt, Artificial Sequence
  Description of Artificial Sequence: Synthetic oligonucleotide
agccugguuagggcaaugu

SEQ ID NO: 2081999 - RNA, 19 nt, Artificial Sequence
  Description of Artificial Sequence: Synthetic oligonucleotide
gccugguuagggcaaugug

SEQ ID NO: 2082000 - RNA, 19 nt, Artificial Sequence
  Description of Artificial Sequence: Synthetic oligonucleotide
cugccggcagugucuugcc

SEQ ID NO: 2082001 - RNA, 19 nt, Artificial Sequence
  Description of Artificial Sequence: Synthetic oligonucleotide
gugcaaaaugcugccggca

SEQ ID NO: 2082002 - RNA, 19 nt, Artificial Sequence
  Description of Artificial Sequence: Synthetic oligonucleotide
ugccggcagugucuugcca

SEQ ID NO: 2082003 - RNA, 19 nt, Artificial Sequence
  Description of Artificial Sequence: Synthetic oligonucleotide
ugacuguguuuuggcgggc

SEQ ID NO: 2082004 - RNA, 19 nt, Artificial Sequence
  Description of Artificial Sequence: Synthetic oligonucleotide
agaaaacggcugcgacaga

SEQ ID NO: 2082005 - RNA, 19 nt, Artificial Sequence
  Description of Artificial Sequence: Synthetic oligonucleotide
ugaggucaucagagugcaa

SEQ ID NO: 2082006 - RNA, 19 nt, Artificial Sequence
  Description of Artificial Sequence: Synthetic oligonucleotide
gcugccggcagugucuugc

SEQ ID NO: 2082007 - RNA, 19 nt, Artificial Sequence
  Description of Artificial Sequence: Synthetic oligonucleotide
caguugcaaugucucccac

SEQ ID NO: 2082008 - RNA, 19 nt, Artificial Sequence
  Description of Artificial Sequence: Synthetic oligonucleotide
ggaccuugacaccauugaa

SEQ ID NO: 2082009 - RNA, 19 nt, Artificial Sequence
  Description of Artificial Sequence: Synthetic oligonucleotide
aggcagccagaaaagugcu

SEQ ID NO: 2082010 - RNA, 19 nt, Artificial Sequence
  Description of Artificial Sequence: Synthetic oligonucleotide
gaugaugggucaagauagu

SEQ ID NO: 2082011 - RNA, 19 nt, Artificial Sequence
  Description of Artificial Sequence: Synthetic oligonucleotide
acgugagcucugagaggcc

SEQ ID NO: 2082012 - RNA, 19 nt, Artificial Sequence
  Description of Artificial Sequence: Synthetic oligonucleotide
uuggcaggggcuggcucca

SEQ ID NO: 2082013 - RNA, 19 nt, Artificial Sequence
  Description of Artificial Sequence: Synthetic oligonucleotide
cagagccaaugcucugcug

SEQ ID NO: 2082014 - RNA, 19 nt, Artificial Sequence
  Description of Artificial Sequence: Synthetic oligonucleotide
cuuuggucaccaagcugaa

SEQ ID NO: 2082015 - RNA, 19 nt, Artificial Sequence
  Description of Artificial Sequence: Synthetic oligonucleotide
ucaaaccuguguggaugau

SEQ ID NO: 2082016 - RNA, 19 nt, Artificial Sequence
  Description of Artificial Sequence: Synthetic oligonucleotide
gugcacgccggaacucagg

SEQ ID NO: 2082017 - RNA, 19 nt, Artificial Sequence
  Description of Artificial Sequence: Synthetic oligonucleotide
gccggcagugucuugccac

SEQ ID NO: 2082018 - RNA, 19 nt, Artificial Sequence
  Description of Artificial Sequence: Synthetic oligonucleotide
uggccugcuugaguccaug

SEQ ID NO: 2082019 - RNA, 19 nt, Artificial Sequence
  Description of Artificial Sequence: Synthetic oligonucleotide
cugugaggugggucucaug

SEQ ID NO: 2082020 - RNA, 19 nt, Artificial Sequence
  Description of Artificial Sequence: Synthetic oligonucleotide
auuuggaccuugacaccau

SEQ ID NO: 2082021 - RNA, 19 nt, Artificial Sequence
  Description of Artificial Sequence: Synthetic oligonucleotide
guggaugaugggucaagau

SEQ ID NO: 2082022 - RNA, 19 nt, Artificial Sequence
  Description of Artificial Sequence: Synthetic oligonucleotide
cgaugccugagucuggcac

SEQ ID NO: 2082023 - RNA, 19 nt, Artificial Sequence
  Description of Artificial Sequence: Synthetic oligonucleotide
gccagcuagccaagagugg

SEQ ID NO: 2082024 - RNA, 19 nt, Artificial Sequence
  Description of Artificial Sequence: Synthetic oligonucleotide
cugucauugcagacuauuu

SEQ ID NO: 2082025 - RNA, 19 nt, Artificial Sequence
  Description of Artificial Sequence: Synthetic oligonucleotide
ggaagguugccccuccggu

SEQ ID NO: 2082026 - RNA, 19 nt, Artificial Sequence
  Description of Artificial Sequence: Synthetic oligonucleotide
ccaguugcaaugucuccca

SEQ ID NO: 2082027 - RNA, 19 nt, Artificial Sequence
  Description of Artificial Sequence: Synthetic oligonucleotide
ggaacucagggugucacgu

SEQ ID NO: 2082028 - RNA, 19 nt, Artificial Sequence
  Description of Artificial Sequence: Synthetic oligonucleotide
gggucaagauagucccuuc

SEQ ID NO: 2082029 - RNA, 19 nt, Artificial Sequence
  Description of Artificial Sequence: Synthetic oligonucleotide
agcuagcccugcaucugug

SEQ ID NO: 2082030 - RNA, 19 nt, Artificial Sequence
  Description of Artificial Sequence: Synthetic oligonucleotide
augggucaagauagucccu

SEQ ID NO: 2082031 - RNA, 19 nt, Artificial Sequence
  Description of Artificial Sequence: Synthetic oligonucleotide
agguugccccuccggucug

SEQ ID NO: 2082032 - RNA, 19 nt, Artificial Sequence
  Description of Artificial Sequence: Synthetic oligonucleotide
ccagcuagccaagagugga

SEQ ID NO: 2082033 - RNA, 19 nt, Artificial Sequence
  Description of Artificial Sequence: Synthetic oligonucleotide
ccaggcaaagcugccauca

SEQ ID NO: 2082034 - RNA, 19 nt, Artificial Sequence
  Description of Artificial Sequence: Synthetic oligonucleotide
gguguucgccauugagaga

SEQ ID NO: 2082035 - RNA, 19 nt, Artificial Sequence
  Description of Artificial Sequence: Synthetic oligonucleotide
ccaagccccaccaggaaaa

SEQ ID NO: 2082036 - RNA, 19 nt, Artificial Sequence
  Description of Artificial Sequence: Synthetic oligonucleotide
gccaccacgaugcuggcau

SEQ ID NO: 2082037 - RNA, 19 nt, Artificial Sequence
  Description of Artificial Sequence: Synthetic oligonucleotide
gcugaaggcuguggcuggg

SEQ ID NO: 2082038 - RNA, 19 nt, Artificial Sequence
  Description of Artificial Sequence: Synthetic oligonucleotide
cuugacccuccagcuccag

SEQ ID NO: 2082039 - RNA, 19 nt, Artificial Sequence
  Description of Artificial Sequence: Synthetic oligonucleotide
auccccuggccugcuugag

SEQ ID NO: 2082040 - RNA, 19 nt, Artificial Sequence
  Description of Artificial Sequence: Synthetic oligonucleotide
ggucgaugccugagucugg

SEQ ID NO: 2082041 - RNA, 19 nt, Artificial Sequence
  Description of Artificial Sequence: Synthetic oligonucleotide
gccgguucuccaguuggcc

SEQ ID NO: 2082042 - RNA, 19 nt, Artificial Sequence
  Description of Artificial Sequence: Synthetic oligonucleotide
gccaugcuugacccuccag

SEQ ID NO: 2082043 - RNA, 19 nt, Artificial Sequence
  Description of Artificial Sequence: Synthetic oligonucleotide
cagcucugggaagguugcc

SEQ ID NO: 2082044 - RNA, 19 nt, Artificial Sequence
  Description of Artificial Sequence: Synthetic oligonucleotide
ccuccaugucauagugaac

SEQ ID NO: 2082045 - RNA, 19 nt, Artificial Sequence
  Description of Artificial Sequence: Synthetic oligonucleotide
agggugccagcuagccaag

SEQ ID NO: 2082046 - RNA, 19 nt, Artificial Sequence
  Description of Artificial Sequence: Synthetic oligonucleotide
ccauccccuggccugcuug

SEQ ID NO: 2082047 - RNA, 19 nt, Artificial Sequence
  Description of Artificial Sequence: Synthetic oligonucleotide
gcuagccaagaguggagcu

SEQ ID NO: 2082048 - RNA, 19 nt, Artificial Sequence
  Description of Artificial Sequence: Synthetic oligonucleotide
gcaaaaugcugccggcagu

SEQ ID NO: 2082049 - RNA, 19 nt, Artificial Sequence
  Description of Artificial Sequence: Synthetic oligonucleotide
caggucgaugccugagucu

SEQ ID NO: 2082050 - RNA, 19 nt, Artificial Sequence
  Description of Artificial Sequence: Synthetic oligonucleotide
ccacgaugcuggcaugcug

SEQ ID NO: 2082051 - RNA, 19 nt, Artificial Sequence
  Description of Artificial Sequence: Synthetic oligonucleotide
aggcuugaagccggucaaa

SEQ ID NO: 2082052 - RNA, 19 nt, Artificial Sequence
  Description of Artificial Sequence: Synthetic oligonucleotide
gccaagaguggagcuggug

SEQ ID NO: 2082053 - RNA, 19 nt, Artificial Sequence
  Description of Artificial Sequence: Synthetic oligonucleotide
ugcugccggcagugucuug

SEQ ID NO: 2082054 - RNA, 19 nt, Artificial Sequence
  Description of Artificial Sequence: Synthetic oligonucleotide
cuccaggcaaagcugccau

SEQ ID NO: 2082055 - RNA, 19 nt, Artificial Sequence
  Description of Artificial Sequence: Synthetic oligonucleotide
gagacuguauuuggaccuu

SEQ ID NO: 2082056 - RNA, 19 nt, Artificial Sequence
  Description of Artificial Sequence: Synthetic oligonucleotide
gggacuagggugccagcua

SEQ ID NO: 2082057 - RNA, 19 nt, Artificial Sequence
  Description of Artificial Sequence: Synthetic oligonucleotide
ccggaacucagggugucac

SEQ ID NO: 2082058 - RNA, 19 nt, Artificial Sequence
  Description of Artificial Sequence: Synthetic oligonucleotide
guuggccaugcuugacccu

SEQ ID NO: 2082059 - RNA, 19 nt, Artificial Sequence
  Description of Artificial Sequence: Synthetic oligonucleotide
acgccggaacucagggugu

SEQ ID NO: 2082060 - RNA, 19 nt, Artificial Sequence
  Description of Artificial Sequence: Synthetic oligonucleotide
cugaugccaguugcaaugu

SEQ ID NO: 2082061 - RNA, 19 nt, Artificial Sequence
  Description of Artificial Sequence: Synthetic oligonucleotide
ggcugcuccaugagugcac

SEQ ID NO: 2082062 - RNA, 19 nt, Artificial Sequence
  Description of Artificial Sequence: Synthetic oligonucleotide
ggaucuggaggaggcuuga

SEQ ID NO: 2082063 - RNA, 19 nt, Artificial Sequence
  Description of Artificial Sequence: Synthetic oligonucleotide
cuagggccgguucuccagu

SEQ ID NO: 2082064 - RNA, 19 nt, Artificial Sequence
  Description of Artificial Sequence: Synthetic oligonucleotide
ccgguggaauucccggaug

SEQ ID NO: 2082065 - RNA, 19 nt, Artificial Sequence
  Description of Artificial Sequence: Synthetic oligonucleotide
gaggugggucucaugucau

SEQ ID NO: 2082066 - RNA, 19 nt, Artificial Sequence
  Description of Artificial Sequence: Synthetic oligonucleotide
gguugccccuccggucugg

SEQ ID NO: 2082067 - RNA, 19 nt, Artificial Sequence
  Description of Artificial Sequence: Synthetic oligonucleotide
gcugucgaugcugaggcau

SEQ ID NO: 2082068 - RNA, 19 nt, Artificial Sequence
  Description of Artificial Sequence: Synthetic oligonucleotide
ggucaccaagcugaaggcu

SEQ ID NO: 2082069 - RNA, 19 nt, Artificial Sequence
  Description of Artificial Sequence: Synthetic oligonucleotide
cuaggaucuggaggaggcu

SEQ ID NO: 2082070 - RNA, 19 nt, Artificial Sequence
  Description of Artificial Sequence: Synthetic oligonucleotide
aucugucauugcagacuau

SEQ ID NO: 2082071 - RNA, 19 nt, Artificial Sequence
  Description of Artificial Sequence: Synthetic oligonucleotide
gggcccuuggcaggggcug

SEQ ID NO: 2082072 - RNA, 19 nt, Artificial Sequence
  Description of Artificial Sequence: Synthetic oligonucleotide
cagggcuagggccgguucu

SEQ ID NO: 2082073 - RNA, 19 nt, Artificial Sequence
  Description of Artificial Sequence: Synthetic oligonucleotide
guccaucuuuggucaccaa

SEQ ID NO: 2082074 - RNA, 19 nt, Artificial Sequence
  Description of Artificial Sequence: Synthetic oligonucleotide
ccuugacccgguggaauuc

SEQ ID NO: 2082075 - RNA, 19 nt, Artificial Sequence
  Description of Artificial Sequence: Synthetic oligonucleotide
ggccgguucuccaguuggc

SEQ ID NO: 2082076 - RNA, 19 nt, Artificial Sequence
  Description of Artificial Sequence: Synthetic oligonucleotide
ccaguuggccaugcuugac

SEQ ID NO: 2082077 - RNA, 19 nt, Artificial Sequence
  Description of Artificial Sequence: Synthetic oligonucleotide
ggcccuuggcaggggcugg

SEQ ID NO: 2082078 - RNA, 19 nt, Artificial Sequence
  Description of Artificial Sequence: Synthetic oligonucleotide
caucaggggccagggugca

SEQ ID NO: 2082079 - RNA, 19 nt, Artificial Sequence
  Description of Artificial Sequence: Synthetic oligonucleotide
agccaagaguggagcuggu

SEQ ID NO: 2082080 - RNA, 19 nt, Artificial Sequence
  Description of Artificial Sequence: Synthetic oligonucleotide
ggaguaucugugggccguc

SEQ ID NO: 2082081 - RNA, 19 nt, Artificial Sequence
  Description of Artificial Sequence: Synthetic oligonucleotide
ccuugacaccauugaagua

SEQ ID NO: 2082082 - RNA, 19 nt, Artificial Sequence
  Description of Artificial Sequence: Synthetic oligonucleotide
gggccagcaccauguugca

SEQ ID NO: 2082083 - RNA, 19 nt, Artificial Sequence
  Description of Artificial Sequence: Synthetic oligonucleotide
ggcugucgaugcugaggca

SEQ ID NO: 2082084 - RNA, 19 nt, Artificial Sequence
  Description of Artificial Sequence: Synthetic oligonucleotide
agggugcauugcaggucga

SEQ ID NO: 2082085 - RNA, 19 nt, Artificial Sequence
  Description of Artificial Sequence: Synthetic oligonucleotide
cccaugugccagacuccuc

SEQ ID NO: 2082086 - RNA, 19 nt, Artificial Sequence
  Description of Artificial Sequence: Synthetic oligonucleotide
gagaggccuuugauggguu

SEQ ID NO: 2082087 - RNA, 19 nt, Artificial Sequence
  Description of Artificial Sequence: Synthetic oligonucleotide
guguuuuggcgggcagcua

SEQ ID NO: 2082088 - RNA, 19 nt, Artificial Sequence
  Description of Artificial Sequence: Synthetic oligonucleotide
gugggccguccccgggcca

SEQ ID NO: 2082089 - RNA, 19 nt, Artificial Sequence
  Description of Artificial Sequence: Synthetic oligonucleotide
gacagggcuagggccgguu

SEQ ID NO: 2082090 - RNA, 19 nt, Artificial Sequence
  Description of Artificial Sequence: Synthetic oligonucleotide
gguucccaugugccagacu

SEQ ID NO: 2082091 - RNA, 19 nt, Artificial Sequence
  Description of Artificial Sequence: Synthetic oligonucleotide
gcuugacccuccagcucca

SEQ ID NO: 2082092 - RNA, 19 nt, Artificial Sequence
  Description of Artificial Sequence: Synthetic oligonucleotide
gccccuccggucuggggaa

SEQ ID NO: 2082093 - RNA, 19 nt, Artificial Sequence
  Description of Artificial Sequence: Synthetic oligonucleotide
cccggaugugaagguguuc

SEQ ID NO: 2082094 - RNA, 19 nt, Artificial Sequence
  Description of Artificial Sequence: Synthetic oligonucleotide
gcccuuggcaggggcuggc

SEQ ID NO: 2082095 - RNA, 19 nt, Artificial Sequence
  Description of Artificial Sequence: Synthetic oligonucleotide
gccggaacucaggguguca

SEQ ID NO: 2082096 - RNA, 19 nt, Artificial Sequence
  Description of Artificial Sequence: Synthetic oligonucleotide
cccuccggucuggggaagc

SEQ ID NO: 2082097 - RNA, 19 nt, Artificial Sequence
  Description of Artificial Sequence: Synthetic oligonucleotide
ggcugggaucuggcugcug

SEQ ID NO: 2082098 - RNA, 19 nt, Artificial Sequence
  Description of Artificial Sequence: Synthetic oligonucleotide
gcacgccggaacucagggu

SEQ ID NO: 2082099 - RNA, 19 nt, Artificial Sequence
  Description of Artificial Sequence: Synthetic oligonucleotide
cgguggaauucccggaugu

SEQ ID NO: 2082100 - RNA, 19 nt, Artificial Sequence
  Description of Artificial Sequence: Synthetic oligonucleotide
gggugccagcuagccaaga

SEQ ID NO: 2082101 - RNA, 19 nt, Artificial Sequence
  Description of Artificial Sequence: Synthetic oligonucleotide
cccgguggaauucccggau

SEQ ID NO: 2082102 - RNA, 19 nt, Artificial Sequence
  Description of Artificial Sequence: Synthetic oligonucleotide
ggcagccagaaaagugcuu

SEQ ID NO: 2082103 - RNA, 19 nt, Artificial Sequence
  Description of Artificial Sequence: Synthetic oligonucleotide
ccaccaggaaaagccuggu

SEQ ID NO: 2082104 - RNA, 19 nt, Artificial Sequence
  Description of Artificial Sequence: Synthetic oligonucleotide
cgccggaacucaggguguc

SEQ ID NO: 2082105 - RNA, 19 nt, Artificial Sequence
  Description of Artificial Sequence: Synthetic oligonucleotide
ccuccggucuggggaagcu

SEQ ID NO: 2082106 - RNA, 19 nt, Artificial Sequence
  Description of Artificial Sequence: Synthetic oligonucleotide
gcccugcaucuguggcuuu

SEQ ID NO: 2082107 - RNA, 19 nt, Artificial Sequence
  Description of Artificial Sequence: Synthetic oligonucleotide
cccgggccagcaccauguu

SEQ ID NO: 2082108 - RNA, 19 nt, Artificial Sequence
  Description of Artificial Sequence: Synthetic oligonucleotide
ccccauccccuggccugcu

SEQ ID NO: 2082109 - RNA, 19 nt, Artificial Sequence
  Description of Artificial Sequence: Synthetic oligonucleotide
aaaggaaugaaccaccacc

SEQ ID NO: 2082110 - RNA, 19 nt, Artificial Sequence
  Description of Artificial Sequence: Synthetic oligonucleotide
aacaaugcauuauuuaacc

SEQ ID NO: 2082111 - RNA, 19 nt, Artificial Sequence
  Description of Artificial Sequence: Synthetic oligonucleotide
uauuuaaccaucauuuucc

SEQ ID NO: 2082112 - RNA, 19 nt, Artificial Sequence
  Description of Artificial Sequence: Synthetic oligonucleotide
agaacauuccuacauaguc

SEQ ID NO: 2082113 - RNA, 19 nt, Artificial Sequence
  Description of Artificial Sequence: Synthetic oligonucleotide
uuaaccaucauuuuccaga

SEQ ID NO: 2082114 - RNA, 19 nt, Artificial Sequence
  Description of Artificial Sequence: Synthetic oligonucleotide
ucaauggcuacuauguggg

SEQ ID NO: 2082115 - RNA, 19 nt, Artificial Sequence
  Description of Artificial Sequence: Synthetic oligonucleotide
aaaagcucacacuccaggg

SEQ ID NO: 2082116 - RNA, 19 nt, Artificial Sequence
  Description of Artificial Sequence: Synthetic oligonucleotide
agauuucagacaaacagcc

SEQ ID NO: 2082117 - RNA, 19 nt, Artificial Sequence
  Description of Artificial Sequence: Synthetic oligonucleotide
aaggaaugaaccaccaccc

SEQ ID NO: 2082118 - RNA, 19 nt, Artificial Sequence
  Description of Artificial Sequence: Synthetic oligonucleotide
aaugcauuauuuaaccauc

SEQ ID NO: 2082119 - RNA, 19 nt, Artificial Sequence
  Description of Artificial Sequence: Synthetic oligonucleotide
aauguagcuugcucucucc

SEQ ID NO: 2082120 - RNA, 19 nt, Artificial Sequence
  Description of Artificial Sequence: Synthetic oligonucleotide
cagacaaacagccagggcc

SEQ ID NO: 2082121 - RNA, 19 nt, Artificial Sequence
  Description of Artificial Sequence: Synthetic oligonucleotide
uauuggaggagcuaccucc

SEQ ID NO: 2082122 - RNA, 19 nt, Artificial Sequence
  Description of Artificial Sequence: Synthetic oligonucleotide
auuguaauguagcuugcuc

SEQ ID NO: 2082123 - RNA, 19 nt, Artificial Sequence
  Description of Artificial Sequence: Synthetic oligonucleotide
uccuacauagucuucagcu

SEQ ID NO: 2082124 - RNA, 19 nt, Artificial Sequence
  Description of Artificial Sequence: Synthetic oligonucleotide
aagcaaaacagauuucaga

SEQ ID NO: 2082125 - RNA, 19 nt, Artificial Sequence
  Description of Artificial Sequence: Synthetic oligonucleotide
ucauuuuccagaacauucc

SEQ ID NO: 2082126 - RNA, 19 nt, Artificial Sequence
  Description of Artificial Sequence: Synthetic oligonucleotide
auuugaguaagcuaccagu

SEQ ID NO: 2082127 - RNA, 19 nt, Artificial Sequence
  Description of Artificial Sequence: Synthetic oligonucleotide
uuucagacaaacagccagg

SEQ ID NO: 2082128 - RNA, 19 nt, Artificial Sequence
  Description of Artificial Sequence: Synthetic oligonucleotide
auggcuacuaugugggagc

SEQ ID NO: 2082129 - RNA, 19 nt, Artificial Sequence
  Description of Artificial Sequence: Synthetic oligonucleotide
aaggagaauuccuugucug

SEQ ID NO: 2082130 - RNA, 19 nt, Artificial Sequence
  Description of Artificial Sequence: Synthetic oligonucleotide
uuugucacgguaaccacca

SEQ ID NO: 2082131 - RNA, 19 nt, Artificial Sequence
  Description of Artificial Sequence: Synthetic oligonucleotide
gauccuauuguaauguagc

SEQ ID NO: 2082132 - RNA, 19 nt, Artificial Sequence
  Description of Artificial Sequence: Synthetic oligonucleotide
caaauuugaggccagcuug

SEQ ID NO: 2082133 - RNA, 19 nt, Artificial Sequence
  Description of Artificial Sequence: Synthetic oligonucleotide
guaaccucagcuccuaggg

SEQ ID NO: 2082134 - RNA, 19 nt, Artificial Sequence
  Description of Artificial Sequence: Synthetic oligonucleotide
aaacucggaucucaucuuc

SEQ ID NO: 2082135 - RNA, 19 nt, Artificial Sequence
  Description of Artificial Sequence: Synthetic oligonucleotide
uuguaauguagcuugcucu

SEQ ID NO: 2082136 - RNA, 19 nt, Artificial Sequence
  Description of Artificial Sequence: Synthetic oligonucleotide
ugaguaagcuaccagucac

SEQ ID NO: 2082137 - RNA, 19 nt, Artificial Sequence
  Description of Artificial Sequence: Synthetic oligonucleotide
cagauuucagacaaacagc

SEQ ID NO: 2082138 - RNA, 19 nt, Artificial Sequence
  Description of Artificial Sequence: Synthetic oligonucleotide
uuugaguaagcuaccaguc

SEQ ID NO: 2082139 - RNA, 19 nt, Artificial Sequence
  Description of Artificial Sequence: Synthetic oligonucleotide
guaugagaggcuuugcugc

SEQ ID NO: 2082140 - RNA, 19 nt, Artificial Sequence
  Description of Artificial Sequence: Synthetic oligonucleotide
uguaaccucagcuccuagg

SEQ ID NO: 2082141 - RNA, 19 nt, Artificial Sequence
  Description of Artificial Sequence: Synthetic oligonucleotide
aacauuccuacauagucuu

SEQ ID NO: 2082142 - RNA, 19 nt, Artificial Sequence
  Description of Artificial Sequence: Synthetic oligonucleotide
ucugucaauggcuacuaug

SEQ ID NO: 2082143 - RNA, 19 nt, Artificial Sequence
  Description of Artificial Sequence: Synthetic oligonucleotide
aauggcuacuaugugggag

SEQ ID NO: 2082144 - RNA, 19 nt, Artificial Sequence
  Description of Artificial Sequence: Synthetic oligonucleotide
uccuguuuuccuauuggag

SEQ ID NO: 2082145 - RNA, 19 nt, Artificial Sequence
  Description of Artificial Sequence: Synthetic oligonucleotide
gauuugaguaagcuaccag

SEQ ID NO: 2082146 - RNA, 19 nt, Artificial Sequence
  Description of Artificial Sequence: Synthetic oligonucleotide
uucuuugucacgguaacca

SEQ ID NO: 2082147 - RNA, 19 nt, Artificial Sequence
  Description of Artificial Sequence: Synthetic oligonucleotide
ucauggacaaacugguggc

SEQ ID NO: 2082148 - RNA, 19 nt, Artificial Sequence
  Description of Artificial Sequence: Synthetic oligonucleotide
ccagauuugaguaagcuac

SEQ ID NO: 2082149 - RNA, 19 nt, Artificial Sequence
  Description of Artificial Sequence: Synthetic oligonucleotide
ucauccaugaaggagaauu

SEQ ID NO: 2082150 - RNA, 19 nt, Artificial Sequence
  Description of Artificial Sequence: Synthetic oligonucleotide
ccuauuguaauguagcuug

SEQ ID NO: 2082151 - RNA, 19 nt, Artificial Sequence
  Description of Artificial Sequence: Synthetic oligonucleotide
uaugcuagaucagaaggug

SEQ ID NO: 2082152 - RNA, 19 nt, Artificial Sequence
  Description of Artificial Sequence: Synthetic oligonucleotide
aaagcucacacuccaggga

SEQ ID NO: 2082153 - RNA, 19 nt, Artificial Sequence
  Description of Artificial Sequence: Synthetic oligonucleotide
uguacacccagauuugagu

SEQ ID NO: 2082154 - RNA, 19 nt, Artificial Sequence
  Description of Artificial Sequence: Synthetic oligonucleotide
acagcuauaaagguggggu

SEQ ID NO: 2082155 - RNA, 19 nt, Artificial Sequence
  Description of Artificial Sequence: Synthetic oligonucleotide
aaugaaccaccaccccugg

SEQ ID NO: 2082156 - RNA, 19 nt, Artificial Sequence
  Description of Artificial Sequence: Synthetic oligonucleotide
uggguagaguuacaggagc

SEQ ID NO: 2082157 - RNA, 19 nt, Artificial Sequence
  Description of Artificial Sequence: Synthetic oligonucleotide
uuuaaccaucauuuuccag

SEQ ID NO: 2082158 - RNA, 19 nt, Artificial Sequence
  Description of Artificial Sequence: Synthetic oligonucleotide
agccaagcaaaacagauuu

SEQ ID NO: 2082159 - RNA, 19 nt, Artificial Sequence
  Description of Artificial Sequence: Synthetic oligonucleotide
caaaacagauuucagacaa

SEQ ID NO: 2082160 - RNA, 19 nt, Artificial Sequence
  Description of Artificial Sequence: Synthetic oligonucleotide
aguuacaggagccaagcaa

SEQ ID NO: 2082161 - RNA, 19 nt, Artificial Sequence
  Description of Artificial Sequence: Synthetic oligonucleotide
ucuuccagagcauguuggg

SEQ ID NO: 2082162 - RNA, 19 nt, Artificial Sequence
  Description of Artificial Sequence: Synthetic oligonucleotide
uugaguaagcuaccaguca

SEQ ID NO: 2082163 - RNA, 19 nt, Artificial Sequence
  Description of Artificial Sequence: Synthetic oligonucleotide
uucuggguagaguuacagg

SEQ ID NO: 2082164 - RNA, 19 nt, Artificial Sequence
  Description of Artificial Sequence: Synthetic oligonucleotide
uggaccaugcugcuggggc

SEQ ID NO: 2082165 - RNA, 19 nt, Artificial Sequence
  Description of Artificial Sequence: Synthetic oligonucleotide
cuaccuccagcaaagcggg

SEQ ID NO: 2082166 - RNA, 19 nt, Artificial Sequence
  Description of Artificial Sequence: Synthetic oligonucleotide
auguagcuugcucucuccc

SEQ ID NO: 2082167 - RNA, 19 nt, Artificial Sequence
  Description of Artificial Sequence: Synthetic oligonucleotide
agcuauaaaggugggguuc

SEQ ID NO: 2082168 - RNA, 19 nt, Artificial Sequence
  Description of Artificial Sequence: Synthetic oligonucleotide
acaaugcauuauuuaacca

SEQ ID NO: 2082169 - RNA, 19 nt, Artificial Sequence
  Description of Artificial Sequence: Synthetic oligonucleotide
cuacccauguucuggguag

SEQ ID NO: 2082170 - RNA, 19 nt, Artificial Sequence
  Description of Artificial Sequence: Synthetic oligonucleotide
uuuuccuauuggaggagcu

SEQ ID NO: 2082171 - RNA, 19 nt, Artificial Sequence
  Description of Artificial Sequence: Synthetic oligonucleotide
agcuaccuccagcaaagcg

SEQ ID NO: 2082172 - RNA, 19 nt, Artificial Sequence
  Description of Artificial Sequence: Synthetic oligonucleotide
auguucuggguagaguuac

SEQ ID NO: 2082173 - RNA, 19 nt, Artificial Sequence
  Description of Artificial Sequence: Synthetic oligonucleotide
uguagcuugcucucucccc

SEQ ID NO: 2082174 - RNA, 19 nt, Artificial Sequence
  Description of Artificial Sequence: Synthetic oligonucleotide
agcuaccagucacugugcc

SEQ ID NO: 2082175 - RNA, 19 nt, Artificial Sequence
  Description of Artificial Sequence: Synthetic oligonucleotide
agaauuccuugucuggcug

SEQ ID NO: 2082176 - RNA, 19 nt, Artificial Sequence
  Description of Artificial Sequence: Synthetic oligonucleotide
auuuaaccaucauuuucca

SEQ ID NO: 2082177 - RNA, 19 nt, Artificial Sequence
  Description of Artificial Sequence: Synthetic oligonucleotide
uaacagcuauaaagguggg

SEQ ID NO: 2082178 - RNA, 19 nt, Artificial Sequence
  Description of Artificial Sequence: Synthetic oligonucleotide
cuagaucagaaggugggcc

SEQ ID NO: 2082179 - RNA, 19 nt, Artificial Sequence
  Description of Artificial Sequence: Synthetic oligonucleotide
agcuccuaggguaugagag

SEQ ID NO: 2082180 - RNA, 19 nt, Artificial Sequence
  Description of Artificial Sequence: Synthetic oligonucleotide
uccaggacgccugaggugc

SEQ ID NO: 2082181 - RNA, 19 nt, Artificial Sequence
  Description of Artificial Sequence: Synthetic oligonucleotide
gggagcaccagucaggagc

SEQ ID NO: 2082182 - RNA, 19 nt, Artificial Sequence
  Description of Artificial Sequence: Synthetic oligonucleotide
uucccagcacagaaaagga

SEQ ID NO: 2082183 - RNA, 19 nt, Artificial Sequence
  Description of Artificial Sequence: Synthetic oligonucleotide
aaccaucauuuuccagaac

SEQ ID NO: 2082184 - RNA, 19 nt, Artificial Sequence
  Description of Artificial Sequence: Synthetic oligonucleotide
cuaugugggagcaccaguc

SEQ ID NO: 2082185 - RNA, 19 nt, Artificial Sequence
  Description of Artificial Sequence: Synthetic oligonucleotide
gacucaacuuuucugucca

SEQ ID NO: 2082186 - RNA, 19 nt, Artificial Sequence
  Description of Artificial Sequence: Synthetic oligonucleotide
auuccuacauagucuucag

SEQ ID NO: 2082187 - RNA, 19 nt, Artificial Sequence
  Description of Artificial Sequence: Synthetic oligonucleotide
uucaaccuggacagggucu

SEQ ID NO: 2082188 - RNA, 19 nt, Artificial Sequence
  Description of Artificial Sequence: Synthetic oligonucleotide
ucggaagcagagcagccca

SEQ ID NO: 2082189 - RNA, 19 nt, Artificial Sequence
  Description of Artificial Sequence: Synthetic oligonucleotide
gucacgguaaccaccaccc

SEQ ID NO: 2082190 - RNA, 19 nt, Artificial Sequence
  Description of Artificial Sequence: Synthetic oligonucleotide
uuccuguuuuccuauugga

SEQ ID NO: 2082191 - RNA, 19 nt, Artificial Sequence
  Description of Artificial Sequence: Synthetic oligonucleotide
cuauuguaauguagcuugc

SEQ ID NO: 2082192 - RNA, 19 nt, Artificial Sequence
  Description of Artificial Sequence: Synthetic oligonucleotide
gcugcguuccuccaggacg

SEQ ID NO: 2082193 - RNA, 19 nt, Artificial Sequence
  Description of Artificial Sequence: Synthetic oligonucleotide
uaauguagcuugcucucuc

SEQ ID NO: 2082194 - RNA, 19 nt, Artificial Sequence
  Description of Artificial Sequence: Synthetic oligonucleotide
auccuauuguaauguagcu

SEQ ID NO: 2082195 - RNA, 19 nt, Artificial Sequence
  Description of Artificial Sequence: Synthetic oligonucleotide
gucuucagcuguuaacagc

SEQ ID NO: 2082196 - RNA, 19 nt, Artificial Sequence
  Description of Artificial Sequence: Synthetic oligonucleotide
gcuaccuccagcaaagcgg

SEQ ID NO: 2082197 - RNA, 19 nt, Artificial Sequence
  Description of Artificial Sequence: Synthetic oligonucleotide
ugacgcugcgugcugagcu

SEQ ID NO: 2082198 - RNA, 19 nt, Artificial Sequence
  Description of Artificial Sequence: Synthetic oligonucleotide
ugcauuauuuaaccaucau

SEQ ID NO: 2082199 - RNA, 19 nt, Artificial Sequence
  Description of Artificial Sequence: Synthetic oligonucleotide
ugcugcaaauuugaggcca

SEQ ID NO: 2082200 - RNA, 19 nt, Artificial Sequence
  Description of Artificial Sequence: Synthetic oligonucleotide
acgccugaggugcagcugg

SEQ ID NO: 2082201 - RNA, 19 nt, Artificial Sequence
  Description of Artificial Sequence: Synthetic oligonucleotide
uucagcuguuaacagcuau

SEQ ID NO: 2082202 - RNA, 19 nt, Artificial Sequence
  Description of Artificial Sequence: Synthetic oligonucleotide
uuggacuacagagggagac

SEQ ID NO: 2082203 - RNA, 19 nt, Artificial Sequence
  Description of Artificial Sequence: Synthetic oligonucleotide
cagauuugaguaagcuacc

SEQ ID NO: 2082204 - RNA, 19 nt, Artificial Sequence
  Description of Artificial Sequence: Synthetic oligonucleotide
uuccuacauagucuucagc

SEQ ID NO: 2082205 - RNA, 19 nt, Artificial Sequence
  Description of Artificial Sequence: Synthetic oligonucleotide
caccuguaaccucagcucc

SEQ ID NO: 2082206 - RNA, 19 nt, Artificial Sequence
  Description of Artificial Sequence: Synthetic oligonucleotide
ggguucauggacaaacugg

SEQ ID NO: 2082207 - RNA, 19 nt, Artificial Sequence
  Description of Artificial Sequence: Synthetic oligonucleotide
uuccuauuggaggagcuac

SEQ ID NO: 2082208 - RNA, 19 nt, Artificial Sequence
  Description of Artificial Sequence: Synthetic oligonucleotide
uccuauuggaggagcuacc

SEQ ID NO: 2082209 - RNA, 19 nt, Artificial Sequence
  Description of Artificial Sequence: Synthetic oligonucleotide
accaagacucaacuuuucu

SEQ ID NO: 2082210 - RNA, 19 nt, Artificial Sequence
  Description of Artificial Sequence: Synthetic oligonucleotide
cagaaggugggccagccug

SEQ ID NO: 2082211 - RNA, 19 nt, Artificial Sequence
  Description of Artificial Sequence: Synthetic oligonucleotide
cagucaggagcccagugag

SEQ ID NO: 2082212 - RNA, 19 nt, Artificial Sequence
  Description of Artificial Sequence: Synthetic oligonucleotide
uauuguaauguagcuugcu

SEQ ID NO: 2082213 - RNA, 19 nt, Artificial Sequence
  Description of Artificial Sequence: Synthetic oligonucleotide
acagggucuguacacccag

SEQ ID NO: 2082214 - RNA, 19 nt, Artificial Sequence
  Description of Artificial Sequence: Synthetic oligonucleotide
uguucccagcacagaaaag

SEQ ID NO: 2082215 - RNA, 19 nt, Artificial Sequence
  Description of Artificial Sequence: Synthetic oligonucleotide
ucuacccauguucugggua

SEQ ID NO: 2082216 - RNA, 19 nt, Artificial Sequence
  Description of Artificial Sequence: Synthetic oligonucleotide
uggaggagcuaccuccagc

SEQ ID NO: 2082217 - RNA, 19 nt, Artificial Sequence
  Description of Artificial Sequence: Synthetic oligonucleotide
uaggguaugagaggcuuug

SEQ ID NO: 2082218 - RNA, 19 nt, Artificial Sequence
  Description of Artificial Sequence: Synthetic oligonucleotide
acuaugugggagcaccagu

SEQ ID NO: 2082219 - RNA, 19 nt, Artificial Sequence
  Description of Artificial Sequence: Synthetic oligonucleotide
aguaagcuaccagucacug

SEQ ID NO: 2082220 - RNA, 19 nt, Artificial Sequence
  Description of Artificial Sequence: Synthetic oligonucleotide
caguucaaccuggacaggg

SEQ ID NO: 2082221 - RNA, 19 nt, Artificial Sequence
  Description of Artificial Sequence: Synthetic oligonucleotide
aagcuaccagucacugugc

SEQ ID NO: 2082222 - RNA, 19 nt, Artificial Sequence
  Description of Artificial Sequence: Synthetic oligonucleotide
uauaaaggugggguucaug

SEQ ID NO: 2082223 - RNA, 19 nt, Artificial Sequence
  Description of Artificial Sequence: Synthetic oligonucleotide
accuggacagggucuguac

SEQ ID NO: 2082224 - RNA, 19 nt, Artificial Sequence
  Description of Artificial Sequence: Synthetic oligonucleotide
cuguacacccagauuugag

SEQ ID NO: 2082225 - RNA, 19 nt, Artificial Sequence
  Description of Artificial Sequence: Synthetic oligonucleotide
guuacaggagccaagcaaa

SEQ ID NO: 2082226 - RNA, 19 nt, Artificial Sequence
  Description of Artificial Sequence: Synthetic oligonucleotide
ugugugugcugcuggccag

SEQ ID NO: 2082227 - RNA, 19 nt, Artificial Sequence
  Description of Artificial Sequence: Synthetic oligonucleotide
cugcguuccuccaggacgc

SEQ ID NO: 2082228 - RNA, 19 nt, Artificial Sequence
  Description of Artificial Sequence: Synthetic oligonucleotide
gcuuggacuacagagggag

SEQ ID NO: 2082229 - RNA, 19 nt, Artificial Sequence
  Description of Artificial Sequence: Synthetic oligonucleotide
accacccucaucuggccag

SEQ ID NO: 2082230 - RNA, 19 nt, Artificial Sequence
  Description of Artificial Sequence: Synthetic oligonucleotide
cugucaauggcuacuaugu

SEQ ID NO: 2082231 - RNA, 19 nt, Artificial Sequence
  Description of Artificial Sequence: Synthetic oligonucleotide
acacccagauuugaguaag

SEQ ID NO: 2082232 - RNA, 19 nt, Artificial Sequence
  Description of Artificial Sequence: Synthetic oligonucleotide
uuacaggagccaagcaaaa

SEQ ID NO: 2082233 - RNA, 19 nt, Artificial Sequence
  Description of Artificial Sequence: Synthetic oligonucleotide
gcuacuaugugggagcacc

SEQ ID NO: 2082234 - RNA, 19 nt, Artificial Sequence
  Description of Artificial Sequence: Synthetic oligonucleotide
guucuggguagaguuacag

SEQ ID NO: 2082235 - RNA, 19 nt, Artificial Sequence
  Description of Artificial Sequence: Synthetic oligonucleotide
ccagaacauuccuacauag

SEQ ID NO: 2082236 - RNA, 19 nt, Artificial Sequence
  Description of Artificial Sequence: Synthetic oligonucleotide
caaugcauuauuuaaccau

SEQ ID NO: 2082237 - RNA, 19 nt, Artificial Sequence
  Description of Artificial Sequence: Synthetic oligonucleotide
gcuucuacccauguucugg

SEQ ID NO: 2082238 - RNA, 19 nt, Artificial Sequence
  Description of Artificial Sequence: Synthetic oligonucleotide
cacuggcuaugcuagauca

SEQ ID NO: 2082239 - RNA, 19 nt, Artificial Sequence
  Description of Artificial Sequence: Synthetic oligonucleotide
uacuaugugggagcaccag

SEQ ID NO: 2082240 - RNA, 19 nt, Artificial Sequence
  Description of Artificial Sequence: Synthetic oligonucleotide
caggccucaaacucggauc

SEQ ID NO: 2082241 - RNA, 19 nt, Artificial Sequence
  Description of Artificial Sequence: Synthetic oligonucleotide
gaaggagaauuccuugucu

SEQ ID NO: 2082242 - RNA, 19 nt, Artificial Sequence
  Description of Artificial Sequence: Synthetic oligonucleotide
uccccagauucccacuggc

SEQ ID NO: 2082243 - RNA, 19 nt, Artificial Sequence
  Description of Artificial Sequence: Synthetic oligonucleotide
agauuugaguaagcuacca

SEQ ID NO: 2082244 - RNA, 19 nt, Artificial Sequence
  Description of Artificial Sequence: Synthetic oligonucleotide
ggacuacagagggagaccg

SEQ ID NO: 2082245 - RNA, 19 nt, Artificial Sequence
  Description of Artificial Sequence: Synthetic oligonucleotide
ucuguacacccagauuuga

SEQ ID NO: 2082246 - RNA, 19 nt, Artificial Sequence
  Description of Artificial Sequence: Synthetic oligonucleotide
accaccaccccugggacuc

SEQ ID NO: 2082247 - RNA, 19 nt, Artificial Sequence
  Description of Artificial Sequence: Synthetic oligonucleotide
ggauccuauuguaauguag

SEQ ID NO: 2082248 - RNA, 19 nt, Artificial Sequence
  Description of Artificial Sequence: Synthetic oligonucleotide
cauggacaaacugguggcg

SEQ ID NO: 2082249 - RNA, 19 nt, Artificial Sequence
  Description of Artificial Sequence: Synthetic oligonucleotide
uccuauuguaauguagcuu

SEQ ID NO: 2082250 - RNA, 19 nt, Artificial Sequence
  Description of Artificial Sequence: Synthetic oligonucleotide
gaacauuccuacauagucu

SEQ ID NO: 2082251 - RNA, 19 nt, Artificial Sequence
  Description of Artificial Sequence: Synthetic oligonucleotide
aggagcuaccuccagcaaa

SEQ ID NO: 2082252 - RNA, 19 nt, Artificial Sequence
  Description of Artificial Sequence: Synthetic oligonucleotide
cugugacucugucaauggc

SEQ ID NO: 2082253 - RNA, 19 nt, Artificial Sequence
  Description of Artificial Sequence: Synthetic oligonucleotide
ugcucucuccccagauucc

SEQ ID NO: 2082254 - RNA, 19 nt, Artificial Sequence
  Description of Artificial Sequence: Synthetic oligonucleotide
uacauagucuucagcuguu

SEQ ID NO: 2082255 - RNA, 19 nt, Artificial Sequence
  Description of Artificial Sequence: Synthetic oligonucleotide
uguucuggguagaguuaca

SEQ ID NO: 2082256 - RNA, 19 nt, Artificial Sequence
  Description of Artificial Sequence: Synthetic oligonucleotide
caccugucgucuuccagag

SEQ ID NO: 2082257 - RNA, 19 nt, Artificial Sequence
  Description of Artificial Sequence: Synthetic oligonucleotide
ccaagacucaacuuuucug

SEQ ID NO: 2082258 - RNA, 19 nt, Artificial Sequence
  Description of Artificial Sequence: Synthetic oligonucleotide
guacacccagauuugagua

SEQ ID NO: 2082259 - RNA, 19 nt, Artificial Sequence
  Description of Artificial Sequence: Synthetic oligonucleotide
cacgguaaccaccacccuc

SEQ ID NO: 2082260 - RNA, 19 nt, Artificial Sequence
  Description of Artificial Sequence: Synthetic oligonucleotide
acacuccagggaacaaugc

SEQ ID NO: 2082261 - RNA, 19 nt, Artificial Sequence
  Description of Artificial Sequence: Synthetic oligonucleotide
uccgagcuagccuugcuuu

SEQ ID NO: 2082262 - RNA, 19 nt, Artificial Sequence
  Description of Artificial Sequence: Synthetic oligonucleotide
uggacagggaacugcuguc

SEQ ID NO: 2082263 - RNA, 19 nt, Artificial Sequence
  Description of Artificial Sequence: Synthetic oligonucleotide
ggagaauuccuugucuggc

SEQ ID NO: 2082264 - RNA, 19 nt, Artificial Sequence
  Description of Artificial Sequence: Synthetic oligonucleotide
agcacagaaaaggaaugaa

SEQ ID NO: 2082265 - RNA, 19 nt, Artificial Sequence
  Description of Artificial Sequence: Synthetic oligonucleotide
uggacagggucuguacacc

SEQ ID NO: 2082266 - RNA, 19 nt, Artificial Sequence
  Description of Artificial Sequence: Synthetic oligonucleotide
guucaaccuggacaggguc

SEQ ID NO: 2082267 - RNA, 19 nt, Artificial Sequence
  Description of Artificial Sequence: Synthetic oligonucleotide
cugggaggaccucggaagc

SEQ ID NO: 2082268 - RNA, 19 nt, Artificial Sequence
  Description of Artificial Sequence: Synthetic oligonucleotide
agauucccacuggcuaugc

SEQ ID NO: 2082269 - RNA, 19 nt, Artificial Sequence
  Description of Artificial Sequence: Synthetic oligonucleotide
aggguaugagaggcuuugc

SEQ ID NO: 2082270 - RNA, 19 nt, Artificial Sequence
  Description of Artificial Sequence: Synthetic oligonucleotide
cuaugcuagaucagaaggu

SEQ ID NO: 2082271 - RNA, 19 nt, Artificial Sequence
  Description of Artificial Sequence: Synthetic oligonucleotide
ugucgucuuccagagcaug

SEQ ID NO: 2082272 - RNA, 19 nt, Artificial Sequence
  Description of Artificial Sequence: Synthetic oligonucleotide
ggucuguacacccagauuu

SEQ ID NO: 2082273 - RNA, 19 nt, Artificial Sequence
  Description of Artificial Sequence: Synthetic oligonucleotide
ugcgugcugagcuggggcu

SEQ ID NO: 2082274 - RNA, 19 nt, Artificial Sequence
  Description of Artificial Sequence: Synthetic oligonucleotide
gcuccuaggguaugagagg

SEQ ID NO: 2082275 - RNA, 19 nt, Artificial Sequence
  Description of Artificial Sequence: Synthetic oligonucleotide
ugcuucuacccauguucug

SEQ ID NO: 2082276 - RNA, 19 nt, Artificial Sequence
  Description of Artificial Sequence: Synthetic oligonucleotide
ucccgugugguguggcugc

SEQ ID NO: 2082277 - RNA, 19 nt, Artificial Sequence
  Description of Artificial Sequence: Synthetic oligonucleotide
acgguaaccaccacccucu

SEQ ID NO: 2082278 - RNA, 19 nt, Artificial Sequence
  Description of Artificial Sequence: Synthetic oligonucleotide
augcauuauuuaaccauca

SEQ ID NO: 2082279 - RNA, 19 nt, Artificial Sequence
  Description of Artificial Sequence: Synthetic oligonucleotide
cuacauagucuucagcugu

SEQ ID NO: 2082280 - RNA, 19 nt, Artificial Sequence
  Description of Artificial Sequence: Synthetic oligonucleotide
augaaccaccaccccuggg

SEQ ID NO: 2082281 - RNA, 19 nt, Artificial Sequence
  Description of Artificial Sequence: Synthetic oligonucleotide
gcaaaacagauuucagaca

SEQ ID NO: 2082282 - RNA, 19 nt, Artificial Sequence
  Description of Artificial Sequence: Synthetic oligonucleotide
gaguguuuccgggucagga

SEQ ID NO: 2082283 - RNA, 19 nt, Artificial Sequence
  Description of Artificial Sequence: Synthetic oligonucleotide
uccagggaacaaugcauua

SEQ ID NO: 2082284 - RNA, 19 nt, Artificial Sequence
  Description of Artificial Sequence: Synthetic oligonucleotide
acccagauuugaguaagcu

SEQ ID NO: 2082285 - RNA, 19 nt, Artificial Sequence
  Description of Artificial Sequence: Synthetic oligonucleotide
cucggaagcagagcagccc

SEQ ID NO: 2082286 - RNA, 19 nt, Artificial Sequence
  Description of Artificial Sequence: Synthetic oligonucleotide
acuccagggaacaaugcau

SEQ ID NO: 2082287 - RNA, 19 nt, Artificial Sequence
  Description of Artificial Sequence: Synthetic oligonucleotide
gagaauuccuugucuggcu

SEQ ID NO: 2082288 - RNA, 19 nt, Artificial Sequence
  Description of Artificial Sequence: Synthetic oligonucleotide
gacgcugcgugcugagcug

SEQ ID NO: 2082289 - RNA, 19 nt, Artificial Sequence
  Description of Artificial Sequence: Synthetic oligonucleotide
uuuccuauuggaggagcua

SEQ ID NO: 2082290 - RNA, 19 nt, Artificial Sequence
  Description of Artificial Sequence: Synthetic oligonucleotide
ucacacuccagggaacaau

SEQ ID NO: 2082291 - RNA, 19 nt, Artificial Sequence
  Description of Artificial Sequence: Synthetic oligonucleotide
agcuguuaacagcuauaaa

SEQ ID NO: 2082292 - RNA, 19 nt, Artificial Sequence
  Description of Artificial Sequence: Synthetic oligonucleotide
ggaccucggaagcagagca

SEQ ID NO: 2082293 - RNA, 19 nt, Artificial Sequence
  Description of Artificial Sequence: Synthetic oligonucleotide
aacugcugucccguguggu

SEQ ID NO: 2082294 - RNA, 19 nt, Artificial Sequence
  Description of Artificial Sequence: Synthetic oligonucleotide
cuugucuggcugccuuggg

SEQ ID NO: 2082295 - RNA, 19 nt, Artificial Sequence
  Description of Artificial Sequence: Synthetic oligonucleotide
ugaguguuuccgggucagg

SEQ ID NO: 2082296 - RNA, 19 nt, Artificial Sequence
  Description of Artificial Sequence: Synthetic oligonucleotide
ccagcacagaaaaggaaug

SEQ ID NO: 2082297 - RNA, 19 nt, Artificial Sequence
  Description of Artificial Sequence: Synthetic oligonucleotide
ccugucgucuuccagagca

SEQ ID NO: 2082298 - RNA, 19 nt, Artificial Sequence
  Description of Artificial Sequence: Synthetic oligonucleotide
cugcgugcugagcuggggc

SEQ ID NO: 2082299 - RNA, 19 nt, Artificial Sequence
  Description of Artificial Sequence: Synthetic oligonucleotide
gcacagaaaaggaaugaac

SEQ ID NO: 2082300 - RNA, 19 nt, Artificial Sequence
  Description of Artificial Sequence: Synthetic oligonucleotide
gaguuacaggagccaagca

SEQ ID NO: 2082301 - RNA, 19 nt, Artificial Sequence
  Description of Artificial Sequence: Synthetic oligonucleotide
gggguucauggacaaacug

SEQ ID NO: 2082302 - RNA, 19 nt, Artificial Sequence
  Description of Artificial Sequence: Synthetic oligonucleotide
accugucgucuuccagagc

SEQ ID NO: 2082303 - RNA, 19 nt, Artificial Sequence
  Description of Artificial Sequence: Synthetic oligonucleotide
gucuguacacccagauuug

SEQ ID NO: 2082304 - RNA, 19 nt, Artificial Sequence
  Description of Artificial Sequence: Synthetic oligonucleotide
cuggcuaugcuagaucaga

SEQ ID NO: 2082305 - RNA, 19 nt, Artificial Sequence
  Description of Artificial Sequence: Synthetic oligonucleotide
guucauggacaaacuggug

SEQ ID NO: 2082306 - RNA, 19 nt, Artificial Sequence
  Description of Artificial Sequence: Synthetic oligonucleotide
uucuacccauguucugggu

SEQ ID NO: 2082307 - RNA, 19 nt, Artificial Sequence
  Description of Artificial Sequence: Synthetic oligonucleotide
cacccagauuugaguaagc

SEQ ID NO: 2082308 - RNA, 19 nt, Artificial Sequence
  Description of Artificial Sequence: Synthetic oligonucleotide
uuuucuguccaggccucaa

SEQ ID NO: 2082309 - RNA, 19 nt, Artificial Sequence
  Description of Artificial Sequence: Synthetic oligonucleotide
gagcccagugaguguuucc

SEQ ID NO: 2082310 - RNA, 19 nt, Artificial Sequence
  Description of Artificial Sequence: Synthetic oligonucleotide
cauagucuucagcuguuaa

SEQ ID NO: 2082311 - RNA, 19 nt, Artificial Sequence
  Description of Artificial Sequence: Synthetic oligonucleotide
ucacgguaaccaccacccu

SEQ ID NO: 2082312 - RNA, 19 nt, Artificial Sequence
  Description of Artificial Sequence: Synthetic oligonucleotide
gugaguguuuccgggucag

SEQ ID NO: 2082313 - RNA, 19 nt, Artificial Sequence
  Description of Artificial Sequence: Synthetic oligonucleotide
acuggcuaugcuagaucag

SEQ ID NO: 2082314 - RNA, 19 nt, Artificial Sequence
  Description of Artificial Sequence: Synthetic oligonucleotide
caccaagacucaacuuuuc

SEQ ID NO: 2082315 - RNA, 19 nt, Artificial Sequence
  Description of Artificial Sequence: Synthetic oligonucleotide
gcuggugcacaccuguaac

SEQ ID NO: 2082316 - RNA, 19 nt, Artificial Sequence
  Description of Artificial Sequence: Synthetic oligonucleotide
agaggcuuugcugcaaauu

SEQ ID NO: 2082317 - RNA, 19 nt, Artificial Sequence
  Description of Artificial Sequence: Synthetic oligonucleotide
acauuccuacauagucuuc

SEQ ID NO: 2082318 - RNA, 19 nt, Artificial Sequence
  Description of Artificial Sequence: Synthetic oligonucleotide
caccccugggacucuggcc

SEQ ID NO: 2082319 - RNA, 19 nt, Artificial Sequence
  Description of Artificial Sequence: Synthetic oligonucleotide
uggggccuucuuugucacg

SEQ ID NO: 2082320 - RNA, 19 nt, Artificial Sequence
  Description of Artificial Sequence: Synthetic oligonucleotide
caaacugguggcggcugcc

SEQ ID NO: 2082321 - RNA, 19 nt, Artificial Sequence
  Description of Artificial Sequence: Synthetic oligonucleotide
gaccucggaagcagagcag

SEQ ID NO: 2082322 - RNA, 19 nt, Artificial Sequence
  Description of Artificial Sequence: Synthetic oligonucleotide
uggcuacuaugugggagca

SEQ ID NO: 2082323 - RNA, 19 nt, Artificial Sequence
  Description of Artificial Sequence: Synthetic oligonucleotide
uaccagucacugugccacc

SEQ ID NO: 2082324 - RNA, 19 nt, Artificial Sequence
  Description of Artificial Sequence: Synthetic oligonucleotide
agggagaccgugucucaaa

SEQ ID NO: 2082325 - RNA, 19 nt, Artificial Sequence
  Description of Artificial Sequence: Synthetic oligonucleotide
cuacuaugugggagcacca

SEQ ID NO: 2082326 - RNA, 19 nt, Artificial Sequence
  Description of Artificial Sequence: Synthetic oligonucleotide
ggguagaguuacaggagcc

SEQ ID NO: 2082327 - RNA, 19 nt, Artificial Sequence
  Description of Artificial Sequence: Synthetic oligonucleotide
agcagcccauggcaggcca

SEQ ID NO: 2082328 - RNA, 19 nt, Artificial Sequence
  Description of Artificial Sequence: Synthetic oligonucleotide
agcuagccuugcuuuccug

SEQ ID NO: 2082329 - RNA, 19 nt, Artificial Sequence
  Description of Artificial Sequence: Synthetic oligonucleotide
cauguucuggguagaguua

SEQ ID NO: 2082330 - RNA, 19 nt, Artificial Sequence
  Description of Artificial Sequence: Synthetic oligonucleotide
gacaaacagccagggccgc

SEQ ID NO: 2082331 - RNA, 19 nt, Artificial Sequence
  Description of Artificial Sequence: Synthetic oligonucleotide
ugucccgugugguguggcu

SEQ ID NO: 2082332 - RNA, 19 nt, Artificial Sequence
  Description of Artificial Sequence: Synthetic oligonucleotide
ugggaggaccucggaagca

SEQ ID NO: 2082333 - RNA, 19 nt, Artificial Sequence
  Description of Artificial Sequence: Synthetic oligonucleotide
ggaccaugcugcuggggcc

SEQ ID NO: 2082334 - RNA, 19 nt, Artificial Sequence
  Description of Artificial Sequence: Synthetic oligonucleotide
agaccgggcccugucuggg

SEQ ID NO: 2082335 - RNA, 19 nt, Artificial Sequence
  Description of Artificial Sequence: Synthetic oligonucleotide
gguagaguuacaggagcca

SEQ ID NO: 2082336 - RNA, 19 nt, Artificial Sequence
  Description of Artificial Sequence: Synthetic oligonucleotide
ggaucugggaggaccucgg

SEQ ID NO: 2082337 - RNA, 19 nt, Artificial Sequence
  Description of Artificial Sequence: Synthetic oligonucleotide
cagcuguuaacagcuauaa

SEQ ID NO: 2082338 - RNA, 19 nt, Artificial Sequence
  Description of Artificial Sequence: Synthetic oligonucleotide
cagauucccacuggcuaug

SEQ ID NO: 2082339 - RNA, 19 nt, Artificial Sequence
  Description of Artificial Sequence: Synthetic oligonucleotide
cuggacagggaacugcugu

SEQ ID NO: 2082340 - RNA, 19 nt, Artificial Sequence
  Description of Artificial Sequence: Synthetic oligonucleotide
ugggagcaccagucaggag

SEQ ID NO: 2082341 - RNA, 19 nt, Artificial Sequence
  Description of Artificial Sequence: Synthetic oligonucleotide
agggaacaaugcauuauuu

SEQ ID NO: 2082342 - RNA, 19 nt, Artificial Sequence
  Description of Artificial Sequence: Synthetic oligonucleotide
gcuauaaaggugggguuca

SEQ ID NO: 2082343 - RNA, 19 nt, Artificial Sequence
  Description of Artificial Sequence: Synthetic oligonucleotide
ucaucuggccaggauccua

SEQ ID NO: 2082344 - RNA, 19 nt, Artificial Sequence
  Description of Artificial Sequence: Synthetic oligonucleotide
cuuggacuacagagggaga

SEQ ID NO: 2082345 - RNA, 19 nt, Artificial Sequence
  Description of Artificial Sequence: Synthetic oligonucleotide
ugccuuggggcagcagacc

SEQ ID NO: 2082346 - RNA, 19 nt, Artificial Sequence
  Description of Artificial Sequence: Synthetic oligonucleotide
gcuagaucagaaggugggc

SEQ ID NO: 2082347 - RNA, 19 nt, Artificial Sequence
  Description of Artificial Sequence: Synthetic oligonucleotide
uggccccugcuucuaccca

SEQ ID NO: 2082348 - RNA, 19 nt, Artificial Sequence
  Description of Artificial Sequence: Synthetic oligonucleotide
cagaacauuccuacauagu

SEQ ID NO: 2082349 - RNA, 19 nt, Artificial Sequence
  Description of Artificial Sequence: Synthetic oligonucleotide
gacagggucuguacaccca

SEQ ID NO: 2082350 - RNA, 19 nt, Artificial Sequence
  Description of Artificial Sequence: Synthetic oligonucleotide
aggagccaagcaaaacaga

SEQ ID NO: 2082351 - RNA, 19 nt, Artificial Sequence
  Description of Artificial Sequence: Synthetic oligonucleotide
ugguguggcugcugacgcu

SEQ ID NO: 2082352 - RNA, 19 nt, Artificial Sequence
  Description of Artificial Sequence: Synthetic oligonucleotide
ugccaccaagacucaacuu

SEQ ID NO: 2082353 - RNA, 19 nt, Artificial Sequence
  Description of Artificial Sequence: Synthetic oligonucleotide
acccauguucuggguagag

SEQ ID NO: 2082354 - RNA, 19 nt, Artificial Sequence
  Description of Artificial Sequence: Synthetic oligonucleotide
aaccuggacagggucugua

SEQ ID NO: 2082355 - RNA, 19 nt, Artificial Sequence
  Description of Artificial Sequence: Synthetic oligonucleotide
acgcugcgugcugagcugg

SEQ ID NO: 2082356 - RNA, 19 nt, Artificial Sequence
  Description of Artificial Sequence: Synthetic oligonucleotide
gugggagcaccagucagga

SEQ ID NO: 2082357 - RNA, 19 nt, Artificial Sequence
  Description of Artificial Sequence: Synthetic oligonucleotide
agggaacugcugucccgug

SEQ ID NO: 2082358 - RNA, 19 nt, Artificial Sequence
  Description of Artificial Sequence: Synthetic oligonucleotide
gaguaagcuaccagucacu

SEQ ID NO: 2082359 - RNA, 19 nt, Artificial Sequence
  Description of Artificial Sequence: Synthetic oligonucleotide
guaagcuaccagucacugu

SEQ ID NO: 2082360 - RNA, 19 nt, Artificial Sequence
  Description of Artificial Sequence: Synthetic oligonucleotide
cauggaggccugguccgag

SEQ ID NO: 2082361 - RNA, 19 nt, Artificial Sequence
  Description of Artificial Sequence: Synthetic oligonucleotide
gcccagugaguguuuccgg

SEQ ID NO: 2082362 - RNA, 19 nt, Artificial Sequence
  Description of Artificial Sequence: Synthetic oligonucleotide
gccaccaagacucaacuuu

SEQ ID NO: 2082363 - RNA, 19 nt, Artificial Sequence
  Description of Artificial Sequence: Synthetic oligonucleotide
uacccauguucuggguaga

SEQ ID NO: 2082364 - RNA, 19 nt, Artificial Sequence
  Description of Artificial Sequence: Synthetic oligonucleotide
ugcugacgcugcgugcuga

SEQ ID NO: 2082365 - RNA, 19 nt, Artificial Sequence
  Description of Artificial Sequence: Synthetic oligonucleotide
gcugcaaauuugaggccag

SEQ ID NO: 2082366 - RNA, 19 nt, Artificial Sequence
  Description of Artificial Sequence: Synthetic oligonucleotide
ggacucuggccccugcuuc

SEQ ID NO: 2082367 - RNA, 19 nt, Artificial Sequence
  Description of Artificial Sequence: Synthetic oligonucleotide
ggagccaagcaaaacagau

SEQ ID NO: 2082368 - RNA, 19 nt, Artificial Sequence
  Description of Artificial Sequence: Synthetic oligonucleotide
acaaacagccagggccgcu

SEQ ID NO: 2082369 - RNA, 19 nt, Artificial Sequence
  Description of Artificial Sequence: Synthetic oligonucleotide
gucccgugugguguggcug

SEQ ID NO: 2082370 - RNA, 19 nt, Artificial Sequence
  Description of Artificial Sequence: Synthetic oligonucleotide
ggugcacaccuguaaccuc

SEQ ID NO: 2082371 - RNA, 19 nt, Artificial Sequence
  Description of Artificial Sequence: Synthetic oligonucleotide
guaauguagcuugcucucu

SEQ ID NO: 2082372 - RNA, 19 nt, Artificial Sequence
  Description of Artificial Sequence: Synthetic oligonucleotide
cugguccgagcuagccuug

SEQ ID NO: 2082373 - RNA, 19 nt, Artificial Sequence
  Description of Artificial Sequence: Synthetic oligonucleotide
gagcuaccuccagcaaagc

SEQ ID NO: 2082374 - RNA, 19 nt, Artificial Sequence
  Description of Artificial Sequence: Synthetic oligonucleotide
cagggaacaaugcauuauu

SEQ ID NO: 2082375 - RNA, 19 nt, Artificial Sequence
  Description of Artificial Sequence: Synthetic oligonucleotide
gaggagcuaccuccagcaa

SEQ ID NO: 2082376 - RNA, 19 nt, Artificial Sequence
  Description of Artificial Sequence: Synthetic oligonucleotide
ccuuggggcagcagaccgg

SEQ ID NO: 2082377 - RNA, 19 nt, Artificial Sequence
  Description of Artificial Sequence: Synthetic oligonucleotide
ccucggaagcagagcagcc

SEQ ID NO: 2082378 - RNA, 19 nt, Artificial Sequence
  Description of Artificial Sequence: Synthetic oligonucleotide
ggguaugagaggcuuugcu

SEQ ID NO: 2082379 - RNA, 19 nt, Artificial Sequence
  Description of Artificial Sequence: Synthetic oligonucleotide
gcaaauuugaggccagcuu

SEQ ID NO: 2082380 - RNA, 19 nt, Artificial Sequence
  Description of Artificial Sequence: Synthetic oligonucleotide
gcucucuccccagauuccc

SEQ ID NO: 2082381 - RNA, 19 nt, Artificial Sequence
  Description of Artificial Sequence: Synthetic oligonucleotide
auuccuugucuggcugccu

SEQ ID NO: 2082382 - RNA, 19 nt, Artificial Sequence
  Description of Artificial Sequence: Synthetic oligonucleotide
agucaggagcccagugagu

SEQ ID NO: 2082383 - RNA, 19 nt, Artificial Sequence
  Description of Artificial Sequence: Synthetic oligonucleotide
augagaggcuuugcugcaa

SEQ ID NO: 2082384 - RNA, 19 nt, Artificial Sequence
  Description of Artificial Sequence: Synthetic oligonucleotide
cugcccaccugucgucuuc

SEQ ID NO: 2082385 - RNA, 19 nt, Artificial Sequence
  Description of Artificial Sequence: Synthetic oligonucleotide
agcuuggacuacagaggga

SEQ ID NO: 2082386 - RNA, 19 nt, Artificial Sequence
  Description of Artificial Sequence: Synthetic oligonucleotide
accucagcuccuaggguau

SEQ ID NO: 2082387 - RNA, 19 nt, Artificial Sequence
  Description of Artificial Sequence: Synthetic oligonucleotide
gagcuagccuugcuuuccu

SEQ ID NO: 2082388 - RNA, 19 nt, Artificial Sequence
  Description of Artificial Sequence: Synthetic oligonucleotide
guuuccgggucaggaucug

SEQ ID NO: 2082389 - RNA, 19 nt, Artificial Sequence
  Description of Artificial Sequence: Synthetic oligonucleotide
cccagauuugaguaagcua

SEQ ID NO: 2082390 - RNA, 19 nt, Artificial Sequence
  Description of Artificial Sequence: Synthetic oligonucleotide
gggagaccgugucucaaaa

SEQ ID NO: 2082391 - RNA, 19 nt, Artificial Sequence
  Description of Artificial Sequence: Synthetic oligonucleotide
gcuagccuugcuuuccugu

SEQ ID NO: 2082392 - RNA, 19 nt, Artificial Sequence
  Description of Artificial Sequence: Synthetic oligonucleotide
ccagucaggagcccaguga

SEQ ID NO: 2082393 - RNA, 19 nt, Artificial Sequence
  Description of Artificial Sequence: Synthetic oligonucleotide
ccucggaaagcugggcugc

SEQ ID NO: 2082394 - RNA, 19 nt, Artificial Sequence
  Description of Artificial Sequence: Synthetic oligonucleotide
ccugaggugcagcuggaca

SEQ ID NO: 2082395 - RNA, 19 nt, Artificial Sequence
  Description of Artificial Sequence: Synthetic oligonucleotide
cugcugacgcugcgugcug

SEQ ID NO: 2082396 - RNA, 19 nt, Artificial Sequence
  Description of Artificial Sequence: Synthetic oligonucleotide
gagaggcuuugcugcaaau

SEQ ID NO: 2082397 - RNA, 19 nt, Artificial Sequence
  Description of Artificial Sequence: Synthetic oligonucleotide
acugcccaccugucgucuu

SEQ ID NO: 2082398 - RNA, 19 nt, Artificial Sequence
  Description of Artificial Sequence: Synthetic oligonucleotide
ugcguuccuccaggacgcc

SEQ ID NO: 2082399 - RNA, 19 nt, Artificial Sequence
  Description of Artificial Sequence: Synthetic oligonucleotide
cagcagaccgggcccuguc

SEQ ID NO: 2082400 - RNA, 19 nt, Artificial Sequence
  Description of Artificial Sequence: Synthetic oligonucleotide
acugugccaccaagacuca

SEQ ID NO: 2082401 - RNA, 19 nt, Artificial Sequence
  Description of Artificial Sequence: Synthetic oligonucleotide
cccagauucccacuggcua

SEQ ID NO: 2082402 - RNA, 19 nt, Artificial Sequence
  Description of Artificial Sequence: Synthetic oligonucleotide
agccuguucccagcacaga

SEQ ID NO: 2082403 - RNA, 19 nt, Artificial Sequence
  Description of Artificial Sequence: Synthetic oligonucleotide
cgagcuagccuugcuuucc

SEQ ID NO: 2082404 - RNA, 19 nt, Artificial Sequence
  Description of Artificial Sequence: Synthetic oligonucleotide
gccuucuuugucacgguaa

SEQ ID NO: 2082405 - RNA, 19 nt, Artificial Sequence
  Description of Artificial Sequence: Synthetic oligonucleotide
gcugcgugcugagcugggg

SEQ ID NO: 2082406 - RNA, 19 nt, Artificial Sequence
  Description of Artificial Sequence: Synthetic oligonucleotide
ccugucugggccucggaaa

SEQ ID NO: 2082407 - RNA, 19 nt, Artificial Sequence
  Description of Artificial Sequence: Synthetic oligonucleotide
cagcuauaaaggugggguu

SEQ ID NO: 2082408 - RNA, 19 nt, Artificial Sequence
  Description of Artificial Sequence: Synthetic oligonucleotide
gggucaggaucugggagga

SEQ ID NO: 2082409 - RNA, 19 nt, Artificial Sequence
  Description of Artificial Sequence: Synthetic oligonucleotide
gagcaccagucaggagccc

SEQ ID NO: 2082410 - RNA, 19 nt, Artificial Sequence
  Description of Artificial Sequence: Synthetic oligonucleotide
gacuacagagggagaccgu

SEQ ID NO: 2082411 - RNA, 19 nt, Artificial Sequence
  Description of Artificial Sequence: Synthetic oligonucleotide
ccgagcuagccuugcuuuc

SEQ ID NO: 2082412 - RNA, 19 nt, Artificial Sequence
  Description of Artificial Sequence: Synthetic oligonucleotide
ccaccccugggacucuggc

SEQ ID NO: 2082413 - RNA, 19 nt, Artificial Sequence
  Description of Artificial Sequence: Synthetic oligonucleotide
guccgagcuagccuugcuu

SEQ ID NO: 2082414 - RNA, 19 nt, Artificial Sequence
  Description of Artificial Sequence: Synthetic oligonucleotide
cuaggguaugagaggcuuu

SEQ ID NO: 2082415 - RNA, 19 nt, Artificial Sequence
  Description of Artificial Sequence: Synthetic oligonucleotide
cagggaacugcugucccgu

SEQ ID NO: 2082416 - RNA, 19 nt, Artificial Sequence
  Description of Artificial Sequence: Synthetic oligonucleotide
ggccucggaaagcugggcu

SEQ ID NO: 2082417 - RNA, 19 nt, Artificial Sequence
  Description of Artificial Sequence: Synthetic oligonucleotide
aagcgggagccuggaccau

SEQ ID NO: 2082418 - RNA, 19 nt, Artificial Sequence
  Description of Artificial Sequence: Synthetic oligonucleotide
gcugucccguguggugugg

SEQ ID NO: 2082419 - RNA, 19 nt, Artificial Sequence
  Description of Artificial Sequence: Synthetic oligonucleotide
ggccuucuuugucacggua

SEQ ID NO: 2082420 - RNA, 19 nt, Artificial Sequence
  Description of Artificial Sequence: Synthetic oligonucleotide
cagggccgcuggugcacac

SEQ ID NO: 2082421 - RNA, 19 nt, Artificial Sequence
  Description of Artificial Sequence: Synthetic oligonucleotide
gcgggagccuggaccaugc

SEQ ID NO: 2082422 - RNA, 19 nt, Artificial Sequence
  Description of Artificial Sequence: Synthetic oligonucleotide
gccgcuggugcacaccugu

SEQ ID NO: 2082423 - RNA, 19 nt, Artificial Sequence
  Description of Artificial Sequence: Synthetic oligonucleotide
ccagauucccacuggcuau

SEQ ID NO: 2082424 - RNA, 19 nt, Artificial Sequence
  Description of Artificial Sequence: Synthetic oligonucleotide
ggaggaccucggaagcaga

SEQ ID NO: 2082425 - RNA, 19 nt, Artificial Sequence
  Description of Artificial Sequence: Synthetic oligonucleotide
ggcuacuaugugggagcac

SEQ ID NO: 2082426 - RNA, 19 nt, Artificial Sequence
  Description of Artificial Sequence: Synthetic oligonucleotide
ccuauuggaggagcuaccu

SEQ ID NO: 2082427 - RNA, 19 nt, Artificial Sequence
  Description of Artificial Sequence: Synthetic oligonucleotide
ggcccugucugggccucgg

SEQ ID NO: 2082428 - RNA, 19 nt, Artificial Sequence
  Description of Artificial Sequence: Synthetic oligonucleotide
ggacgccugaggugcagcu

SEQ ID NO: 2082429 - RNA, 19 nt, Artificial Sequence
  Description of Artificial Sequence: Synthetic oligonucleotide
gcgugcugagcuggggcug

SEQ ID NO: 2082430 - RNA, 19 nt, Artificial Sequence
  Description of Artificial Sequence: Synthetic oligonucleotide
ccugguccgagcuagccuu

SEQ ID NO: 2082431 - RNA, 19 nt, Artificial Sequence
  Description of Artificial Sequence: Synthetic oligonucleotide
ggacaaacugguggcggcu

SEQ ID NO: 2082432 - RNA, 19 nt, Artificial Sequence
  Description of Artificial Sequence: Synthetic oligonucleotide
ggccagaggcacaguucug

SEQ ID NO: 2082433 - RNA, 19 nt, Artificial Sequence
  Description of Artificial Sequence: Synthetic oligonucleotide
ccacccucaucuggccagg

SEQ ID NO: 2082434 - RNA, 19 nt, Artificial Sequence
  Description of Artificial Sequence: Synthetic oligonucleotide
ccaccaagacucaacuuuu

SEQ ID NO: 2082435 - RNA, 19 nt, Artificial Sequence
  Description of Artificial Sequence: Synthetic oligonucleotide
caccaccccugggacucug

SEQ ID NO: 2082436 - RNA, 19 nt, Artificial Sequence
  Description of Artificial Sequence: Synthetic oligonucleotide
cugucgucuuccagagcau

SEQ ID NO: 2082437 - RNA, 19 nt, Artificial Sequence
  Description of Artificial Sequence: Synthetic oligonucleotide
cucugucaauggcuacuau

SEQ ID NO: 2082438 - RNA, 19 nt, Artificial Sequence
  Description of Artificial Sequence: Synthetic oligonucleotide
cuauaaaggugggguucau

SEQ ID NO: 2082439 - RNA, 19 nt, Artificial Sequence
  Description of Artificial Sequence: Synthetic oligonucleotide
cugugccaccaagacucaa

SEQ ID NO: 2082440 - RNA, 19 nt, Artificial Sequence
  Description of Artificial Sequence: Synthetic oligonucleotide
gggucuguacacccagauu

SEQ ID NO: 2082441 - RNA, 19 nt, Artificial Sequence
  Description of Artificial Sequence: Synthetic oligonucleotide
aggagcccagugaguguuu

SEQ ID NO: 2082442 - RNA, 19 nt, Artificial Sequence
  Description of Artificial Sequence: Synthetic oligonucleotide
gguccgagcuagccuugcu

SEQ ID NO: 2082443 - RNA, 19 nt, Artificial Sequence
  Description of Artificial Sequence: Synthetic oligonucleotide
ccaggccucaaacucggau

SEQ ID NO: 2082444 - RNA, 19 nt, Artificial Sequence
  Description of Artificial Sequence: Synthetic oligonucleotide
ccagggaacaaugcauuau

SEQ ID NO: 2082445 - RNA, 19 nt, Artificial Sequence
  Description of Artificial Sequence: Synthetic oligonucleotide
ggucaggaucugggaggac

SEQ ID NO: 2082446 - RNA, 19 nt, Artificial Sequence
  Description of Artificial Sequence: Synthetic oligonucleotide
cgcugcgugcugagcuggg

SEQ ID NO: 2082447 - RNA, 19 nt, Artificial Sequence
  Description of Artificial Sequence: Synthetic oligonucleotide
ggccucaaacucggaucuc

SEQ ID NO: 2082448 - RNA, 19 nt, Artificial Sequence
  Description of Artificial Sequence: Synthetic oligonucleotide
ccuaggguaugagaggcuu

SEQ ID NO: 2082449 - RNA, 19 nt, Artificial Sequence
  Description of Artificial Sequence: Synthetic oligonucleotide
gcagcccauggcaggccac

SEQ ID NO: 2082450 - RNA, 19 nt, Artificial Sequence
  Description of Artificial Sequence: Synthetic oligonucleotide
cgcuggugcacaccuguaa

SEQ ID NO: 2082451 - RNA, 19 nt, Artificial Sequence
  Description of Artificial Sequence: Synthetic oligonucleotide
ccccagauucccacuggcu

SEQ ID NO: 2082452 - RNA, 19 nt, Artificial Sequence
  Description of Artificial Sequence: Synthetic oligonucleotide
gggccuucuuugucacggu

SEQ ID NO: 2082453 - RNA, 19 nt, Artificial Sequence
  Description of Artificial Sequence: Synthetic oligonucleotide
ggccgcuggugcacaccug

SEQ ID NO: 2082454 - RNA, 19 nt, Artificial Sequence
  Description of Artificial Sequence: Synthetic oligonucleotide
cccauguucuggguagagu

SEQ ID NO: 2082455 - RNA, 19 nt, Artificial Sequence
  Description of Artificial Sequence: Synthetic oligonucleotide
ccaggacgccugaggugca

SEQ ID NO: 2082456 - RNA, 19 nt, Artificial Sequence
  Description of Artificial Sequence: Synthetic oligonucleotide
ccgugugguguggcugcug

SEQ ID NO: 2082457 - RNA, 19 nt, Artificial Sequence
  Description of Artificial Sequence: Synthetic oligonucleotide
cccacuggcuaugcuagau

SEQ ID NO: 2082458 - RNA, 19 nt, Artificial Sequence
  Description of Artificial Sequence: Synthetic oligonucleotide
gcguuccuccaggacgccu

SEQ ID NO: 2082459 - RNA, 19 nt, Artificial Sequence
  Description of Artificial Sequence: Synthetic oligonucleotide
ccgcuggugcacaccugua

SEQ ID NO: 2082460 - RNA, 19 nt, Artificial Sequence
  Description of Artificial Sequence: Synthetic oligonucleotide
cggaaagcugggcugcguu

SEQ ID NO: 2082461 - RNA, 19 nt, Artificial Sequence
  Description of Artificial Sequence: Synthetic oligonucleotide
cgccugaggugcagcugga

SEQ ID NO: 2082462 - RNA, 19 nt, Artificial Sequence
  Description of Artificial Sequence: Synthetic oligonucleotide
cgggcccugucugggccuc

SEQ ID NO: 2082463 - RNA, 19 nt, Artificial Sequence
  Description of Artificial Sequence: Synthetic oligonucleotide
cccgugugguguggcugcu

SEQ ID NO: 2082464 - RNA, 19 nt, Artificial Sequence
  Description of Artificial Sequence: Synthetic oligonucleotide
ccaccaccccugggacucu

SEQ ID NO: 2082465 - RNA, 19 nt, Artificial Sequence
  Description of Artificial Sequence: Synthetic oligonucleotide
aaacuuauccuggacaucc

SEQ ID NO: 2082466 - RNA, 19 nt, Artificial Sequence
  Description of Artificial Sequence: Synthetic oligonucleotide
aauaagugguuccuuggcc

SEQ ID NO: 2082467 - RNA, 19 nt, Artificial Sequence
  Description of Artificial Sequence: Synthetic oligonucleotide
uuaaguaauuauuuggaag

SEQ ID NO: 2082468 - RNA, 19 nt, Artificial Sequence
  Description of Artificial Sequence: Synthetic oligonucleotide
uaauuauuuggaaggaacg

SEQ ID NO: 2082469 - RNA, 19 nt, Artificial Sequence
  Description of Artificial Sequence: Synthetic oligonucleotide
agagcagucucucauaagc

SEQ ID NO: 2082470 - RNA, 19 nt, Artificial Sequence
  Description of Artificial Sequence: Synthetic oligonucleotide
aagaaggagggcuugauug

SEQ ID NO: 2082471 - RNA, 19 nt, Artificial Sequence
  Description of Artificial Sequence: Synthetic oligonucleotide
aacaccaugaggcugcauc

SEQ ID NO: 2082472 - RNA, 19 nt, Artificial Sequence
  Description of Artificial Sequence: Synthetic oligonucleotide
aauuauuuggaaggaacgg

SEQ ID NO: 2082473 - RNA, 19 nt, Artificial Sequence
  Description of Artificial Sequence: Synthetic oligonucleotide
auaagugguuccuuggccc

SEQ ID NO: 2082474 - RNA, 19 nt, Artificial Sequence
  Description of Artificial Sequence: Synthetic oligonucleotide
gaaaguaauaagugguucc

SEQ ID NO: 2082475 - RNA, 19 nt, Artificial Sequence
  Description of Artificial Sequence: Synthetic oligonucleotide
ucucucauaagcuucucgg

SEQ ID NO: 2082476 - RNA, 19 nt, Artificial Sequence
  Description of Artificial Sequence: Synthetic oligonucleotide
aagaaaacuuauccuggac

SEQ ID NO: 2082477 - RNA, 19 nt, Artificial Sequence
  Description of Artificial Sequence: Synthetic oligonucleotide
cauaguuguaguaacggcc

SEQ ID NO: 2082478 - RNA, 19 nt, Artificial Sequence
  Description of Artificial Sequence: Synthetic oligonucleotide
cuuugguucauguucaggc

SEQ ID NO: 2082479 - RNA, 19 nt, Artificial Sequence
  Description of Artificial Sequence: Synthetic oligonucleotide
uguaguaacggccauucca

SEQ ID NO: 2082480 - RNA, 19 nt, Artificial Sequence
  Description of Artificial Sequence: Synthetic oligonucleotide
aucaaacuucauuucagac

SEQ ID NO: 2082481 - RNA, 19 nt, Artificial Sequence
  Description of Artificial Sequence: Synthetic oligonucleotide
uucauuucagacuccauca

SEQ ID NO: 2082482 - RNA, 19 nt, Artificial Sequence
  Description of Artificial Sequence: Synthetic oligonucleotide
uccaucauaggucuggucu

SEQ ID NO: 2082483 - RNA, 19 nt, Artificial Sequence
  Description of Artificial Sequence: Synthetic oligonucleotide
gaugcugcgggacugaggc

SEQ ID NO: 2082484 - RNA, 19 nt, Artificial Sequence
  Description of Artificial Sequence: Synthetic oligonucleotide
acauugagcucaaagaugg

SEQ ID NO: 2082485 - RNA, 19 nt, Artificial Sequence
  Description of Artificial Sequence: Synthetic oligonucleotide
ucauguaggcuagugagcg

SEQ ID NO: 2082486 - RNA, 19 nt, Artificial Sequence
  Description of Artificial Sequence: Synthetic oligonucleotide
aagaccaguguauuggcug

SEQ ID NO: 2082487 - RNA, 19 nt, Artificial Sequence
  Description of Artificial Sequence: Synthetic oligonucleotide
cuuuuacuggcacaguugg

SEQ ID NO: 2082488 - RNA, 19 nt, Artificial Sequence
  Description of Artificial Sequence: Synthetic oligonucleotide
gagagcacggaccacaugc

SEQ ID NO: 2082489 - RNA, 19 nt, Artificial Sequence
  Description of Artificial Sequence: Synthetic oligonucleotide
uuauuuggaaggaacggga

SEQ ID NO: 2082490 - RNA, 19 nt, Artificial Sequence
  Description of Artificial Sequence: Synthetic oligonucleotide
uccacaguaagcacugggg

SEQ ID NO: 2082491 - RNA, 19 nt, Artificial Sequence
  Description of Artificial Sequence: Synthetic oligonucleotide
auuauuuggaaggaacggg

SEQ ID NO: 2082492 - RNA, 19 nt, Artificial Sequence
  Description of Artificial Sequence: Synthetic oligonucleotide
accuucccgagucagaccc

SEQ ID NO: 2082493 - RNA, 19 nt, Artificial Sequence
  Description of Artificial Sequence: Synthetic oligonucleotide
uggguagcaagaaggaggg

SEQ ID NO: 2082494 - RNA, 19 nt, Artificial Sequence
  Description of Artificial Sequence: Synthetic oligonucleotide
ucucauaagcuucucggcc

SEQ ID NO: 2082495 - RNA, 19 nt, Artificial Sequence
  Description of Artificial Sequence: Synthetic oligonucleotide
uggacauugagcucaaaga

SEQ ID NO: 2082496 - RNA, 19 nt, Artificial Sequence
  Description of Artificial Sequence: Synthetic oligonucleotide
guacacucgaucuaucagg

SEQ ID NO: 2082497 - RNA, 19 nt, Artificial Sequence
  Description of Artificial Sequence: Synthetic oligonucleotide
uguacacucgaucuaucag

SEQ ID NO: 2082498 - RNA, 19 nt, Artificial Sequence
  Description of Artificial Sequence: Synthetic oligonucleotide
uuuaaguaauuauuuggaa

SEQ ID NO: 2082499 - RNA, 19 nt, Artificial Sequence
  Description of Artificial Sequence: Synthetic oligonucleotide
uccaagauuucuuugguuc

SEQ ID NO: 2082500 - RNA, 19 nt, Artificial Sequence
  Description of Artificial Sequence: Synthetic oligonucleotide
guaauaagugguuccuugg

SEQ ID NO: 2082501 - RNA, 19 nt, Artificial Sequence
  Description of Artificial Sequence: Synthetic oligonucleotide
aaaccuucccgagucagac

SEQ ID NO: 2082502 - RNA, 19 nt, Artificial Sequence
  Description of Artificial Sequence: Synthetic oligonucleotide
uccuuaucaaacuucauuu

SEQ ID NO: 2082503 - RNA, 19 nt, Artificial Sequence
  Description of Artificial Sequence: Synthetic oligonucleotide
cacuggucagacaugaugc

SEQ ID NO: 2082504 - RNA, 19 nt, Artificial Sequence
  Description of Artificial Sequence: Synthetic oligonucleotide
agucagacccucuuggauc

SEQ ID NO: 2082505 - RNA, 19 nt, Artificial Sequence
  Description of Artificial Sequence: Synthetic oligonucleotide
uauuuggaaggaacgggag

SEQ ID NO: 2082506 - RNA, 19 nt, Artificial Sequence
  Description of Artificial Sequence: Synthetic oligonucleotide
agaaaguaauaagugguuc

SEQ ID NO: 2082507 - RNA, 19 nt, Artificial Sequence
  Description of Artificial Sequence: Synthetic oligonucleotide
aaaguaauaagugguuccu

SEQ ID NO: 2082508 - RNA, 19 nt, Artificial Sequence
  Description of Artificial Sequence: Synthetic oligonucleotide
agaacagccaucugaacca

SEQ ID NO: 2082509 - RNA, 19 nt, Artificial Sequence
  Description of Artificial Sequence: Synthetic oligonucleotide
ugcaggguaggaaauaccu

SEQ ID NO: 2082510 - RNA, 19 nt, Artificial Sequence
  Description of Artificial Sequence: Synthetic oligonucleotide
acaccaugaggcugcaucc

SEQ ID NO: 2082511 - RNA, 19 nt, Artificial Sequence
  Description of Artificial Sequence: Synthetic oligonucleotide
guaauuauuuggaaggaac

SEQ ID NO: 2082512 - RNA, 19 nt, Artificial Sequence
  Description of Artificial Sequence: Synthetic oligonucleotide
ucugugcuuagucuugugc

SEQ ID NO: 2082513 - RNA, 19 nt, Artificial Sequence
  Description of Artificial Sequence: Synthetic oligonucleotide
ucaucagacuguacacucg

SEQ ID NO: 2082514 - RNA, 19 nt, Artificial Sequence
  Description of Artificial Sequence: Synthetic oligonucleotide
auggaagaaaacuuauccu

SEQ ID NO: 2082515 - RNA, 19 nt, Artificial Sequence
  Description of Artificial Sequence: Synthetic oligonucleotide
uuuacuggcacaguugggu

SEQ ID NO: 2082516 - RNA, 19 nt, Artificial Sequence
  Description of Artificial Sequence: Synthetic oligonucleotide
gaugguuuggagagcacgg

SEQ ID NO: 2082517 - RNA, 19 nt, Artificial Sequence
  Description of Artificial Sequence: Synthetic oligonucleotide
gaacgggaggguaagaaag

SEQ ID NO: 2082518 - RNA, 19 nt, Artificial Sequence
  Description of Artificial Sequence: Synthetic oligonucleotide
gguaagaaaguaauaagug

SEQ ID NO: 2082519 - RNA, 19 nt, Artificial Sequence
  Description of Artificial Sequence: Synthetic oligonucleotide
cugugcuuagucuugugcc

SEQ ID NO: 2082520 - RNA, 19 nt, Artificial Sequence
  Description of Artificial Sequence: Synthetic oligonucleotide
uuguccuaguggcucaggg

SEQ ID NO: 2082521 - RNA, 19 nt, Artificial Sequence
  Description of Artificial Sequence: Synthetic oligonucleotide
uuuguccaagauuucuuug

SEQ ID NO: 2082522 - RNA, 19 nt, Artificial Sequence
  Description of Artificial Sequence: Synthetic oligonucleotide
aguaacggccauuccagag

SEQ ID NO: 2082523 - RNA, 19 nt, Artificial Sequence
  Description of Artificial Sequence: Synthetic oligonucleotide
auuucagacuccaucacag

SEQ ID NO: 2082524 - RNA, 19 nt, Artificial Sequence
  Description of Artificial Sequence: Synthetic oligonucleotide
aucaugguggcugccagcc

SEQ ID NO: 2082525 - RNA, 19 nt, Artificial Sequence
  Description of Artificial Sequence: Synthetic oligonucleotide
cuucauuucagacuccauc

SEQ ID NO: 2082526 - RNA, 19 nt, Artificial Sequence
  Description of Artificial Sequence: Synthetic oligonucleotide
ggaaagaccaguguauugg

SEQ ID NO: 2082527 - RNA, 19 nt, Artificial Sequence
  Description of Artificial Sequence: Synthetic oligonucleotide
uacacucgaucuaucagga

SEQ ID NO: 2082528 - RNA, 19 nt, Artificial Sequence
  Description of Artificial Sequence: Synthetic oligonucleotide
gacaacuggccuuuugccc

SEQ ID NO: 2082529 - RNA, 19 nt, Artificial Sequence
  Description of Artificial Sequence: Synthetic oligonucleotide
gaaagaccaguguauuggc

SEQ ID NO: 2082530 - RNA, 19 nt, Artificial Sequence
  Description of Artificial Sequence: Synthetic oligonucleotide
ugcccugugugacaacugg

SEQ ID NO: 2082531 - RNA, 19 nt, Artificial Sequence
  Description of Artificial Sequence: Synthetic oligonucleotide
ugagcggaacacuugcugc

SEQ ID NO: 2082532 - RNA, 19 nt, Artificial Sequence
  Description of Artificial Sequence: Synthetic oligonucleotide
cacucgaucuaucaggaac

SEQ ID NO: 2082533 - RNA, 19 nt, Artificial Sequence
  Description of Artificial Sequence: Synthetic oligonucleotide
acuacacccacccaaacuu

SEQ ID NO: 2082534 - RNA, 19 nt, Artificial Sequence
  Description of Artificial Sequence: Synthetic oligonucleotide
uugagcucaaagaugguuu

SEQ ID NO: 2082535 - RNA, 19 nt, Artificial Sequence
  Description of Artificial Sequence: Synthetic oligonucleotide
agaccaguguauuggcugg

SEQ ID NO: 2082536 - RNA, 19 nt, Artificial Sequence
  Description of Artificial Sequence: Synthetic oligonucleotide
gaacacuugcugcuggcag

SEQ ID NO: 2082537 - RNA, 19 nt, Artificial Sequence
  Description of Artificial Sequence: Synthetic oligonucleotide
ugacaacuggccuuuugcc

SEQ ID NO: 2082538 - RNA, 19 nt, Artificial Sequence
  Description of Artificial Sequence: Synthetic oligonucleotide
guaguaacggccauuccag

SEQ ID NO: 2082539 - RNA, 19 nt, Artificial Sequence
  Description of Artificial Sequence: Synthetic oligonucleotide
acaacuggccuuuugcccu

SEQ ID NO: 2082540 - RNA, 19 nt, Artificial Sequence
  Description of Artificial Sequence: Synthetic oligonucleotide
ucagacuguacacucgauc

SEQ ID NO: 2082541 - RNA, 19 nt, Artificial Sequence
  Description of Artificial Sequence: Synthetic oligonucleotide
gacauugagcucaaagaug

SEQ ID NO: 2082542 - RNA, 19 nt, Artificial Sequence
  Description of Artificial Sequence: Synthetic oligonucleotide
aaccuucccgagucagacc

SEQ ID NO: 2082543 - RNA, 19 nt, Artificial Sequence
  Description of Artificial Sequence: Synthetic oligonucleotide
gguaggaaauaccucagug

SEQ ID NO: 2082544 - RNA, 19 nt, Artificial Sequence
  Description of Artificial Sequence: Synthetic oligonucleotide
cagcccguagacuacaccc

SEQ ID NO: 2082545 - RNA, 19 nt, Artificial Sequence
  Description of Artificial Sequence: Synthetic oligonucleotide
aguguauuggcugggcuuc

SEQ ID NO: 2082546 - RNA, 19 nt, Artificial Sequence
  Description of Artificial Sequence: Synthetic oligonucleotide
ugcgguaacagcccucagc

SEQ ID NO: 2082547 - RNA, 19 nt, Artificial Sequence
  Description of Artificial Sequence: Synthetic oligonucleotide
caggcguucccauacagug

SEQ ID NO: 2082548 - RNA, 19 nt, Artificial Sequence
  Description of Artificial Sequence: Synthetic oligonucleotide
aaggagggcuugauugucc

SEQ ID NO: 2082549 - RNA, 19 nt, Artificial Sequence
  Description of Artificial Sequence: Synthetic oligonucleotide
gcuugauuguccuaguggc

SEQ ID NO: 2082550 - RNA, 19 nt, Artificial Sequence
  Description of Artificial Sequence: Synthetic oligonucleotide
uaacggccauuccagagca

SEQ ID NO: 2082551 - RNA, 19 nt, Artificial Sequence
  Description of Artificial Sequence: Synthetic oligonucleotide
guaacggccauuccagagc

SEQ ID NO: 2082552 - RNA, 19 nt, Artificial Sequence
  Description of Artificial Sequence: Synthetic oligonucleotide
gaaaacuuauccuggacau

SEQ ID NO: 2082553 - RNA, 19 nt, Artificial Sequence
  Description of Artificial Sequence: Synthetic oligonucleotide
uaggcuagugagcggaaca

SEQ ID NO: 2082554 - RNA, 19 nt, Artificial Sequence
  Description of Artificial Sequence: Synthetic oligonucleotide
ucugggcuuagguuugucc

SEQ ID NO: 2082555 - RNA, 19 nt, Artificial Sequence
  Description of Artificial Sequence: Synthetic oligonucleotide
cucucauaagcuucucggc

SEQ ID NO: 2082556 - RNA, 19 nt, Artificial Sequence
  Description of Artificial Sequence: Synthetic oligonucleotide
acaguuggguagcaagaag

SEQ ID NO: 2082557 - RNA, 19 nt, Artificial Sequence
  Description of Artificial Sequence: Synthetic oligonucleotide
caggguaggaaauaccuca

SEQ ID NO: 2082558 - RNA, 19 nt, Artificial Sequence
  Description of Artificial Sequence: Synthetic oligonucleotide
cucauguaggcuagugagc

SEQ ID NO: 2082559 - RNA, 19 nt, Artificial Sequence
  Description of Artificial Sequence: Synthetic oligonucleotide
agugucuccuucucccagg

SEQ ID NO: 2082560 - RNA, 19 nt, Artificial Sequence
  Description of Artificial Sequence: Synthetic oligonucleotide
uagccuccauucuacaaug

SEQ ID NO: 2082561 - RNA, 19 nt, Artificial Sequence
  Description of Artificial Sequence: Synthetic oligonucleotide
aggaaagaccaguguauug

SEQ ID NO: 2082562 - RNA, 19 nt, Artificial Sequence
  Description of Artificial Sequence: Synthetic oligonucleotide
uguggcgacccauccauca

SEQ ID NO: 2082563 - RNA, 19 nt, Artificial Sequence
  Description of Artificial Sequence: Synthetic oligonucleotide
aucuaucaggaacaccaug

SEQ ID NO: 2082564 - RNA, 19 nt, Artificial Sequence
  Description of Artificial Sequence: Synthetic oligonucleotide
ucggccucggcagagaaug

SEQ ID NO: 2082565 - RNA, 19 nt, Artificial Sequence
  Description of Artificial Sequence: Synthetic oligonucleotide
uccauucuacaaugagucc

SEQ ID NO: 2082566 - RNA, 19 nt, Artificial Sequence
  Description of Artificial Sequence: Synthetic oligonucleotide
auaguuguaguaacggcca

SEQ ID NO: 2082567 - RNA, 19 nt, Artificial Sequence
  Description of Artificial Sequence: Synthetic oligonucleotide
ucaggaaccacugcccagc

SEQ ID NO: 2082568 - RNA, 19 nt, Artificial Sequence
  Description of Artificial Sequence: Synthetic oligonucleotide
guagacuacacccacccaa

SEQ ID NO: 2082569 - RNA, 19 nt, Artificial Sequence
  Description of Artificial Sequence: Synthetic oligonucleotide
uguccuaguggcucagggc

SEQ ID NO: 2082570 - RNA, 19 nt, Artificial Sequence
  Description of Artificial Sequence: Synthetic oligonucleotide
acccucuuggaucauggug

SEQ ID NO: 2082571 - RNA, 19 nt, Artificial Sequence
  Description of Artificial Sequence: Synthetic oligonucleotide
uugauuguccuaguggcuc

SEQ ID NO: 2082572 - RNA, 19 nt, Artificial Sequence
  Description of Artificial Sequence: Synthetic oligonucleotide
aggaggaaagaccagugua

SEQ ID NO: 2082573 - RNA, 19 nt, Artificial Sequence
  Description of Artificial Sequence: Synthetic oligonucleotide
acagcggccaagccacagc

SEQ ID NO: 2082574 - RNA, 19 nt, Artificial Sequence
  Description of Artificial Sequence: Synthetic oligonucleotide
ggcguucccauacagugcg

SEQ ID NO: 2082575 - RNA, 19 nt, Artificial Sequence
  Description of Artificial Sequence: Synthetic oligonucleotide
ccucauguaggcuagugag

SEQ ID NO: 2082576 - RNA, 19 nt, Artificial Sequence
  Description of Artificial Sequence: Synthetic oligonucleotide
ugcguagccuccauucuac

SEQ ID NO: 2082577 - RNA, 19 nt, Artificial Sequence
  Description of Artificial Sequence: Synthetic oligonucleotide
ucaggcucugugcuuaguc

SEQ ID NO: 2082578 - RNA, 19 nt, Artificial Sequence
  Description of Artificial Sequence: Synthetic oligonucleotide
aacagcccucagcuguccg

SEQ ID NO: 2082579 - RNA, 19 nt, Artificial Sequence
  Description of Artificial Sequence: Synthetic oligonucleotide
guuguaguaacggccauuc

SEQ ID NO: 2082580 - RNA, 19 nt, Artificial Sequence
  Description of Artificial Sequence: Synthetic oligonucleotide
ccauucuacaaugaguccg

SEQ ID NO: 2082581 - RNA, 19 nt, Artificial Sequence
  Description of Artificial Sequence: Synthetic oligonucleotide
agcuucucggccucggcag

SEQ ID NO: 2082582 - RNA, 19 nt, Artificial Sequence
  Description of Artificial Sequence: Synthetic oligonucleotide
uauuggcugggcuuccaca

SEQ ID NO: 2082583 - RNA, 19 nt, Artificial Sequence
  Description of Artificial Sequence: Synthetic oligonucleotide
cucagcggccucauguagg

SEQ ID NO: 2082584 - RNA, 19 nt, Artificial Sequence
  Description of Artificial Sequence: Synthetic oligonucleotide
augcucagcggccucaugu

SEQ ID NO: 2082585 - RNA, 19 nt, Artificial Sequence
  Description of Artificial Sequence: Synthetic oligonucleotide
cuguccggaaaccuucccg

SEQ ID NO: 2082586 - RNA, 19 nt, Artificial Sequence
  Description of Artificial Sequence: Synthetic oligonucleotide
agacuacacccacccaaac

SEQ ID NO: 2082587 - RNA, 19 nt, Artificial Sequence
  Description of Artificial Sequence: Synthetic oligonucleotide
guuuggagagcacggacca

SEQ ID NO: 2082588 - RNA, 19 nt, Artificial Sequence
  Description of Artificial Sequence: Synthetic oligonucleotide
cuuggaucaugguggcugc

SEQ ID NO: 2082589 - RNA, 19 nt, Artificial Sequence
  Description of Artificial Sequence: Synthetic oligonucleotide
uggcaguaugccucugggg

SEQ ID NO: 2082590 - RNA, 19 nt, Artificial Sequence
  Description of Artificial Sequence: Synthetic oligonucleotide
ccauucacagcucccaugg

SEQ ID NO: 2082591 - RNA, 19 nt, Artificial Sequence
  Description of Artificial Sequence: Synthetic oligonucleotide
cuggcaguaugccucuggg

SEQ ID NO: 2082592 - RNA, 19 nt, Artificial Sequence
  Description of Artificial Sequence: Synthetic oligonucleotide
aguaauuauuuggaaggaa

SEQ ID NO: 2082593 - RNA, 19 nt, Artificial Sequence
  Description of Artificial Sequence: Synthetic oligonucleotide
ugauuguccuaguggcuca

SEQ ID NO: 2082594 - RNA, 19 nt, Artificial Sequence
  Description of Artificial Sequence: Synthetic oligonucleotide
uuggagagcacggaccaca

SEQ ID NO: 2082595 - RNA, 19 nt, Artificial Sequence
  Description of Artificial Sequence: Synthetic oligonucleotide
gaaggaacgggaggguaag

SEQ ID NO: 2082596 - RNA, 19 nt, Artificial Sequence
  Description of Artificial Sequence: Synthetic oligonucleotide
uaagugguuccuuggcccu

SEQ ID NO: 2082597 - RNA, 19 nt, Artificial Sequence
  Description of Artificial Sequence: Synthetic oligonucleotide
guaggaaauaccucagugu

SEQ ID NO: 2082598 - RNA, 19 nt, Artificial Sequence
  Description of Artificial Sequence: Synthetic oligonucleotide
cuagugagcggaacacuug

SEQ ID NO: 2082599 - RNA, 19 nt, Artificial Sequence
  Description of Artificial Sequence: Synthetic oligonucleotide
agaauggaagaaaacuuau

SEQ ID NO: 2082600 - RNA, 19 nt, Artificial Sequence
  Description of Artificial Sequence: Synthetic oligonucleotide
gguuccuuggcccuuuuac

SEQ ID NO: 2082601 - RNA, 19 nt, Artificial Sequence
  Description of Artificial Sequence: Synthetic oligonucleotide
aaagaccaguguauuggcu

SEQ ID NO: 2082602 - RNA, 19 nt, Artificial Sequence
  Description of Artificial Sequence: Synthetic oligonucleotide
gacccauccaucauagguc

SEQ ID NO: 2082603 - RNA, 19 nt, Artificial Sequence
  Description of Artificial Sequence: Synthetic oligonucleotide
gcacggaccacaugcaggg

SEQ ID NO: 2082604 - RNA, 19 nt, Artificial Sequence
  Description of Artificial Sequence: Synthetic oligonucleotide
caugcaggguaggaaauac

SEQ ID NO: 2082605 - RNA, 19 nt, Artificial Sequence
  Description of Artificial Sequence: Synthetic oligonucleotide
cgaucuaucaggaacacca

SEQ ID NO: 2082606 - RNA, 19 nt, Artificial Sequence
  Description of Artificial Sequence: Synthetic oligonucleotide
uuguaguaacggccauucc

SEQ ID NO: 2082607 - RNA, 19 nt, Artificial Sequence
  Description of Artificial Sequence: Synthetic oligonucleotide
acucgaucuaucaggaaca

SEQ ID NO: 2082608 - RNA, 19 nt, Artificial Sequence
  Description of Artificial Sequence: Synthetic oligonucleotide
aggcuagugagcggaacac

SEQ ID NO: 2082609 - RNA, 19 nt, Artificial Sequence
  Description of Artificial Sequence: Synthetic oligonucleotide
aggucuggucugcguagcc

SEQ ID NO: 2082610 - RNA, 19 nt, Artificial Sequence
  Description of Artificial Sequence: Synthetic oligonucleotide
uccugguccuuaucaaacu

SEQ ID NO: 2082611 - RNA, 19 nt, Artificial Sequence
  Description of Artificial Sequence: Synthetic oligonucleotide
ucccauacagugcgguaac

SEQ ID NO: 2082612 - RNA, 19 nt, Artificial Sequence
  Description of Artificial Sequence: Synthetic oligonucleotide
gaaauaccucagugucucc

SEQ ID NO: 2082613 - RNA, 19 nt, Artificial Sequence
  Description of Artificial Sequence: Synthetic oligonucleotide
cauguaggcuagugagcgg

SEQ ID NO: 2082614 - RNA, 19 nt, Artificial Sequence
  Description of Artificial Sequence: Synthetic oligonucleotide
uucccauacagugcgguaa

SEQ ID NO: 2082615 - RNA, 19 nt, Artificial Sequence
  Description of Artificial Sequence: Synthetic oligonucleotide
agcacggaccacaugcagg

SEQ ID NO: 2082616 - RNA, 19 nt, Artificial Sequence
  Description of Artificial Sequence: Synthetic oligonucleotide
gucugcguagccuccauuc

SEQ ID NO: 2082617 - RNA, 19 nt, Artificial Sequence
  Description of Artificial Sequence: Synthetic oligonucleotide
ggaaauaccucagugucuc

SEQ ID NO: 2082618 - RNA, 19 nt, Artificial Sequence
  Description of Artificial Sequence: Synthetic oligonucleotide
agguuuguccaagauuucu

SEQ ID NO: 2082619 - RNA, 19 nt, Artificial Sequence
  Description of Artificial Sequence: Synthetic oligonucleotide
agcucaaagaugguuugga

SEQ ID NO: 2082620 - RNA, 19 nt, Artificial Sequence
  Description of Artificial Sequence: Synthetic oligonucleotide
uccggaaaccuucccgagu

SEQ ID NO: 2082621 - RNA, 19 nt, Artificial Sequence
  Description of Artificial Sequence: Synthetic oligonucleotide
cagacuguacacucgaucu

SEQ ID NO: 2082622 - RNA, 19 nt, Artificial Sequence
  Description of Artificial Sequence: Synthetic oligonucleotide
auguaggcuagugagcgga

SEQ ID NO: 2082623 - RNA, 19 nt, Artificial Sequence
  Description of Artificial Sequence: Synthetic oligonucleotide
accaguguauuggcugggc

SEQ ID NO: 2082624 - RNA, 19 nt, Artificial Sequence
  Description of Artificial Sequence: Synthetic oligonucleotide
agacccucuuggaucaugg

SEQ ID NO: 2082625 - RNA, 19 nt, Artificial Sequence
  Description of Artificial Sequence: Synthetic oligonucleotide
cagccagacacacaggcca

SEQ ID NO: 2082626 - RNA, 19 nt, Artificial Sequence
  Description of Artificial Sequence: Synthetic oligonucleotide
aacgggaggguaagaaagu

SEQ ID NO: 2082627 - RNA, 19 nt, Artificial Sequence
  Description of Artificial Sequence: Synthetic oligonucleotide
uuggcccuuuuacuggcac

SEQ ID NO: 2082628 - RNA, 19 nt, Artificial Sequence
  Description of Artificial Sequence: Synthetic oligonucleotide
uguucaggcucugugcuua

SEQ ID NO: 2082629 - RNA, 19 nt, Artificial Sequence
  Description of Artificial Sequence: Synthetic oligonucleotide
ucuugugcccugugugaca

SEQ ID NO: 2082630 - RNA, 19 nt, Artificial Sequence
  Description of Artificial Sequence: Synthetic oligonucleotide
gacauccugggccccacac

SEQ ID NO: 2082631 - RNA, 19 nt, Artificial Sequence
  Description of Artificial Sequence: Synthetic oligonucleotide
uuacuggcacaguugggua

SEQ ID NO: 2082632 - RNA, 19 nt, Artificial Sequence
  Description of Artificial Sequence: Synthetic oligonucleotide
caaaggccuggacauugag

SEQ ID NO: 2082633 - RNA, 19 nt, Artificial Sequence
  Description of Artificial Sequence: Synthetic oligonucleotide
cuguacacucgaucuauca

SEQ ID NO: 2082634 - RNA, 19 nt, Artificial Sequence
  Description of Artificial Sequence: Synthetic oligonucleotide
aguuggguagcaagaagga

SEQ ID NO: 2082635 - RNA, 19 nt, Artificial Sequence
  Description of Artificial Sequence: Synthetic oligonucleotide
cucggcagagaauggaaga

SEQ ID NO: 2082636 - RNA, 19 nt, Artificial Sequence
  Description of Artificial Sequence: Synthetic oligonucleotide
ucggcagagaauggaagaa

SEQ ID NO: 2082637 - RNA, 19 nt, Artificial Sequence
  Description of Artificial Sequence: Synthetic oligonucleotide
ugcugucauaguuguagua

SEQ ID NO: 2082638 - RNA, 19 nt, Artificial Sequence
  Description of Artificial Sequence: Synthetic oligonucleotide
agugcgguaacagcccuca

SEQ ID NO: 2082639 - RNA, 19 nt, Artificial Sequence
  Description of Artificial Sequence: Synthetic oligonucleotide
caucauaggucuggucugc

SEQ ID NO: 2082640 - RNA, 19 nt, Artificial Sequence
  Description of Artificial Sequence: Synthetic oligonucleotide
ucgaucuaucaggaacacc

SEQ ID NO: 2082641 - RNA, 19 nt, Artificial Sequence
  Description of Artificial Sequence: Synthetic oligonucleotide
aggcguucccauacagugc

SEQ ID NO: 2082642 - RNA, 19 nt, Artificial Sequence
  Description of Artificial Sequence: Synthetic oligonucleotide
uaguaacggccauuccaga

SEQ ID NO: 2082643 - RNA, 19 nt, Artificial Sequence
  Description of Artificial Sequence: Synthetic oligonucleotide
cagcggccaagccacagcc

SEQ ID NO: 2082644 - RNA, 19 nt, Artificial Sequence
  Description of Artificial Sequence: Synthetic oligonucleotide
uggcccagaugcucagcgg

SEQ ID NO: 2082645 - RNA, 19 nt, Artificial Sequence
  Description of Artificial Sequence: Synthetic oligonucleotide
cccaaacuucaucagacug

SEQ ID NO: 2082646 - RNA, 19 nt, Artificial Sequence
  Description of Artificial Sequence: Synthetic oligonucleotide
uaccucagugucuccuucu

SEQ ID NO: 2082647 - RNA, 19 nt, Artificial Sequence
  Description of Artificial Sequence: Synthetic oligonucleotide
aucauaggucuggucugcg

SEQ ID NO: 2082648 - RNA, 19 nt, Artificial Sequence
  Description of Artificial Sequence: Synthetic oligonucleotide
gacuacacccacccaaacu

SEQ ID NO: 2082649 - RNA, 19 nt, Artificial Sequence
  Description of Artificial Sequence: Synthetic oligonucleotide
ccacaguaagcacuggggc

SEQ ID NO: 2082650 - RNA, 19 nt, Artificial Sequence
  Description of Artificial Sequence: Synthetic oligonucleotide
ggucagacaugaugcugcg

SEQ ID NO: 2082651 - RNA, 19 nt, Artificial Sequence
  Description of Artificial Sequence: Synthetic oligonucleotide
aggaaccacugcccagcac

SEQ ID NO: 2082652 - RNA, 19 nt, Artificial Sequence
  Description of Artificial Sequence: Synthetic oligonucleotide
cauuccagagcagucucuc

SEQ ID NO: 2082653 - RNA, 19 nt, Artificial Sequence
  Description of Artificial Sequence: Synthetic oligonucleotide
cuacacccacccaaacuuc

SEQ ID NO: 2082654 - RNA, 19 nt, Artificial Sequence
  Description of Artificial Sequence: Synthetic oligonucleotide
gauuguccuaguggcucag

SEQ ID NO: 2082655 - RNA, 19 nt, Artificial Sequence
  Description of Artificial Sequence: Synthetic oligonucleotide
aggaaauaccucagugucu

SEQ ID NO: 2082656 - RNA, 19 nt, Artificial Sequence
  Description of Artificial Sequence: Synthetic oligonucleotide
caaugaguccguccugguc

SEQ ID NO: 2082657 - RNA, 19 nt, Artificial Sequence
  Description of Artificial Sequence: Synthetic oligonucleotide
aggguaggaaauaccucag

SEQ ID NO: 2082658 - RNA, 19 nt, Artificial Sequence
  Description of Artificial Sequence: Synthetic oligonucleotide
agcggccucauguaggcua

SEQ ID NO: 2082659 - RNA, 19 nt, Artificial Sequence
  Description of Artificial Sequence: Synthetic oligonucleotide
uguaggcuagugagcggaa

SEQ ID NO: 2082660 - RNA, 19 nt, Artificial Sequence
  Description of Artificial Sequence: Synthetic oligonucleotide
uccuaguggcucagggcgu

SEQ ID NO: 2082661 - RNA, 19 nt, Artificial Sequence
  Description of Artificial Sequence: Synthetic oligonucleotide
cagagcagucucucauaag

SEQ ID NO: 2082662 - RNA, 19 nt, Artificial Sequence
  Description of Artificial Sequence: Synthetic oligonucleotide
acagugcgguaacagcccu

SEQ ID NO: 2082663 - RNA, 19 nt, Artificial Sequence
  Description of Artificial Sequence: Synthetic oligonucleotide
auucuacaaugaguccguc

SEQ ID NO: 2082664 - RNA, 19 nt, Artificial Sequence
  Description of Artificial Sequence: Synthetic oligonucleotide
cccugugugacaacuggcc

SEQ ID NO: 2082665 - RNA, 19 nt, Artificial Sequence
  Description of Artificial Sequence: Synthetic oligonucleotide
gaaggagggcuugauuguc

SEQ ID NO: 2082666 - RNA, 19 nt, Artificial Sequence
  Description of Artificial Sequence: Synthetic oligonucleotide
acuguacacucgaucuauc

SEQ ID NO: 2082667 - RNA, 19 nt, Artificial Sequence
  Description of Artificial Sequence: Synthetic oligonucleotide
guccuuaucaaacuucauu

SEQ ID NO: 2082668 - RNA, 19 nt, Artificial Sequence
  Description of Artificial Sequence: Synthetic oligonucleotide
agcuguccggaaaccuucc

SEQ ID NO: 2082669 - RNA, 19 nt, Artificial Sequence
  Description of Artificial Sequence: Synthetic oligonucleotide
agacuguacacucgaucua

SEQ ID NO: 2082670 - RNA, 19 nt, Artificial Sequence
  Description of Artificial Sequence: Synthetic oligonucleotide
ccguagacuacacccaccc

SEQ ID NO: 2082671 - RNA, 19 nt, Artificial Sequence
  Description of Artificial Sequence: Synthetic oligonucleotide
guagccuccauucuacaau

SEQ ID NO: 2082672 - RNA, 19 nt, Artificial Sequence
  Description of Artificial Sequence: Synthetic oligonucleotide
ggcaguaugccucuggggu

SEQ ID NO: 2082673 - RNA, 19 nt, Artificial Sequence
  Description of Artificial Sequence: Synthetic oligonucleotide
cauucuacaaugaguccgu

SEQ ID NO: 2082674 - RNA, 19 nt, Artificial Sequence
  Description of Artificial Sequence: Synthetic oligonucleotide
uagcaagaaggagggcuug

SEQ ID NO: 2082675 - RNA, 19 nt, Artificial Sequence
  Description of Artificial Sequence: Synthetic oligonucleotide
cauucacagcucccauggc

SEQ ID NO: 2082676 - RNA, 19 nt, Artificial Sequence
  Description of Artificial Sequence: Synthetic oligonucleotide
cucauaagcuucucggccu

SEQ ID NO: 2082677 - RNA, 19 nt, Artificial Sequence
  Description of Artificial Sequence: Synthetic oligonucleotide
augaguccguccugguccu

SEQ ID NO: 2082678 - RNA, 19 nt, Artificial Sequence
  Description of Artificial Sequence: Synthetic oligonucleotide
ugggccccacacagaacag

SEQ ID NO: 2082679 - RNA, 19 nt, Artificial Sequence
  Description of Artificial Sequence: Synthetic oligonucleotide
acggccauuccagagcagu

SEQ ID NO: 2082680 - RNA, 19 nt, Artificial Sequence
  Description of Artificial Sequence: Synthetic oligonucleotide
uggcccuuuuacuggcaca

SEQ ID NO: 2082681 - RNA, 19 nt, Artificial Sequence
  Description of Artificial Sequence: Synthetic oligonucleotide
ggaaaccuucccgagucag

SEQ ID NO: 2082682 - RNA, 19 nt, Artificial Sequence
  Description of Artificial Sequence: Synthetic oligonucleotide
auuguccuaguggcucagg

SEQ ID NO: 2082683 - RNA, 19 nt, Artificial Sequence
  Description of Artificial Sequence: Synthetic oligonucleotide
guccggaaaccuucccgag

SEQ ID NO: 2082684 - RNA, 19 nt, Artificial Sequence
  Description of Artificial Sequence: Synthetic oligonucleotide
cugcaucccauucacagcu

SEQ ID NO: 2082685 - RNA, 19 nt, Artificial Sequence
  Description of Artificial Sequence: Synthetic oligonucleotide
cauaggucuggucugcgua

SEQ ID NO: 2082686 - RNA, 19 nt, Artificial Sequence
  Description of Artificial Sequence: Synthetic oligonucleotide
uggagagcacggaccacau

SEQ ID NO: 2082687 - RNA, 19 nt, Artificial Sequence
  Description of Artificial Sequence: Synthetic oligonucleotide
acggaccacaugcagggua

SEQ ID NO: 2082688 - RNA, 19 nt, Artificial Sequence
  Description of Artificial Sequence: Synthetic oligonucleotide
ggcccagaugcucagcggc

SEQ ID NO: 2082689 - RNA, 19 nt, Artificial Sequence
  Description of Artificial Sequence: Synthetic oligonucleotide
ggcccuuuuacuggcacag

SEQ ID NO: 2082690 - RNA, 19 nt, Artificial Sequence
  Description of Artificial Sequence: Synthetic oligonucleotide
guauuggcugggcuuccac

SEQ ID NO: 2082691 - RNA, 19 nt, Artificial Sequence
  Description of Artificial Sequence: Synthetic oligonucleotide
ucccauucacagcucccau

SEQ ID NO: 2082692 - RNA, 19 nt, Artificial Sequence
  Description of Artificial Sequence: Synthetic oligonucleotide
uggcgacccauccaucaua

SEQ ID NO: 2082693 - RNA, 19 nt, Artificial Sequence
  Description of Artificial Sequence: Synthetic oligonucleotide
ucucggccucggcagagaa

SEQ ID NO: 2082694 - RNA, 19 nt, Artificial Sequence
  Description of Artificial Sequence: Synthetic oligonucleotide
gcugcaucccauucacagc

SEQ ID NO: 2082695 - RNA, 19 nt, Artificial Sequence
  Description of Artificial Sequence: Synthetic oligonucleotide
cucgaucuaucaggaacac

SEQ ID NO: 2082696 - RNA, 19 nt, Artificial Sequence
  Description of Artificial Sequence: Synthetic oligonucleotide
accacaugcaggguaggaa

SEQ ID NO: 2082697 - RNA, 19 nt, Artificial Sequence
  Description of Artificial Sequence: Synthetic oligonucleotide
guuccuuggcccuuuuacu

SEQ ID NO: 2082698 - RNA, 19 nt, Artificial Sequence
  Description of Artificial Sequence: Synthetic oligonucleotide
gaaccacugcccagcacac

SEQ ID NO: 2082699 - RNA, 19 nt, Artificial Sequence
  Description of Artificial Sequence: Synthetic oligonucleotide
guuuguccaagauuucuuu

SEQ ID NO: 2082700 - RNA, 19 nt, Artificial Sequence
  Description of Artificial Sequence: Synthetic oligonucleotide
gucagacaugaugcugcgg

SEQ ID NO: 2082701 - RNA, 19 nt, Artificial Sequence
  Description of Artificial Sequence: Synthetic oligonucleotide
gaugcucagcggccucaug

SEQ ID NO: 2082702 - RNA, 19 nt, Artificial Sequence
  Description of Artificial Sequence: Synthetic oligonucleotide
gucuugugcccugugugac

SEQ ID NO: 2082703 - RNA, 19 nt, Artificial Sequence
  Description of Artificial Sequence: Synthetic oligonucleotide
gagcggaacacuugcugcu

SEQ ID NO: 2082704 - RNA, 19 nt, Artificial Sequence
  Description of Artificial Sequence: Synthetic oligonucleotide
ugcaucccauucacagcuc

SEQ ID NO: 2082705 - RNA, 19 nt, Artificial Sequence
  Description of Artificial Sequence: Synthetic oligonucleotide
caccaugaggcugcauccc

SEQ ID NO: 2082706 - RNA, 19 nt, Artificial Sequence
  Description of Artificial Sequence: Synthetic oligonucleotide
agggcuugauuguccuagu

SEQ ID NO: 2082707 - RNA, 19 nt, Artificial Sequence
  Description of Artificial Sequence: Synthetic oligonucleotide
ccaagauuucuuugguuca

SEQ ID NO: 2082708 - RNA, 19 nt, Artificial Sequence
  Description of Artificial Sequence: Synthetic oligonucleotide
cucugugcuuagucuugug

SEQ ID NO: 2082709 - RNA, 19 nt, Artificial Sequence
  Description of Artificial Sequence: Synthetic oligonucleotide
uaacagcccucagcugucc

SEQ ID NO: 2082710 - RNA, 19 nt, Artificial Sequence
  Description of Artificial Sequence: Synthetic oligonucleotide
gagucagacccucuuggau

SEQ ID NO: 2082711 - RNA, 19 nt, Artificial Sequence
  Description of Artificial Sequence: Synthetic oligonucleotide
gcagagaauggaagaaaac

SEQ ID NO: 2082712 - RNA, 19 nt, Artificial Sequence
  Description of Artificial Sequence: Synthetic oligonucleotide
cacacagaacagccaucug

SEQ ID NO: 2082713 - RNA, 19 nt, Artificial Sequence
  Description of Artificial Sequence: Synthetic oligonucleotide
aaggaacgggaggguaaga

SEQ ID NO: 2082714 - RNA, 19 nt, Artificial Sequence
  Description of Artificial Sequence: Synthetic oligonucleotide
gacuguacacucgaucuau

SEQ ID NO: 2082715 - RNA, 19 nt, Artificial Sequence
  Description of Artificial Sequence: Synthetic oligonucleotide
agcggaacacuugcugcug

SEQ ID NO: 2082716 - RNA, 19 nt, Artificial Sequence
  Description of Artificial Sequence: Synthetic oligonucleotide
cuugauuguccuaguggcu

SEQ ID NO: 2082717 - RNA, 19 nt, Artificial Sequence
  Description of Artificial Sequence: Synthetic oligonucleotide
agcaagaaggagggcuuga

SEQ ID NO: 2082718 - RNA, 19 nt, Artificial Sequence
  Description of Artificial Sequence: Synthetic oligonucleotide
ucccgagucagacccucuu

SEQ ID NO: 2082719 - RNA, 19 nt, Artificial Sequence
  Description of Artificial Sequence: Synthetic oligonucleotide
ggcgacccauccaucauag

SEQ ID NO: 2082720 - RNA, 19 nt, Artificial Sequence
  Description of Artificial Sequence: Synthetic oligonucleotide
gcgguaacagcccucagcu

SEQ ID NO: 2082721 - RNA, 19 nt, Artificial Sequence
  Description of Artificial Sequence: Synthetic oligonucleotide
ccggaaaccuucccgaguc

SEQ ID NO: 2082722 - RNA, 19 nt, Artificial Sequence
  Description of Artificial Sequence: Synthetic oligonucleotide
ccucggcagagaauggaag

SEQ ID NO: 2082723 - RNA, 19 nt, Artificial Sequence
  Description of Artificial Sequence: Synthetic oligonucleotide
cagcacacuggucagacau

SEQ ID NO: 2082724 - RNA, 19 nt, Artificial Sequence
  Description of Artificial Sequence: Synthetic oligonucleotide
guaggcuagugagcggaac

SEQ ID NO: 2082725 - RNA, 19 nt, Artificial Sequence
  Description of Artificial Sequence: Synthetic oligonucleotide
guaacagcccucagcuguc

SEQ ID NO: 2082726 - RNA, 19 nt, Artificial Sequence
  Description of Artificial Sequence: Synthetic oligonucleotide
ccacaggcccucaggaacc

SEQ ID NO: 2082727 - RNA, 19 nt, Artificial Sequence
  Description of Artificial Sequence: Synthetic oligonucleotide
uucccgagucagacccucu

SEQ ID NO: 2082728 - RNA, 19 nt, Artificial Sequence
  Description of Artificial Sequence: Synthetic oligonucleotide
acacucgaucuaucaggaa

SEQ ID NO: 2082729 - RNA, 19 nt, Artificial Sequence
  Description of Artificial Sequence: Synthetic oligonucleotide
gaccacaugcaggguagga

SEQ ID NO: 2082730 - RNA, 19 nt, Artificial Sequence
  Description of Artificial Sequence: Synthetic oligonucleotide
acaugcaggguaggaaaua

SEQ ID NO: 2082731 - RNA, 19 nt, Artificial Sequence
  Description of Artificial Sequence: Synthetic oligonucleotide
agcacacuggucagacaug

SEQ ID NO: 2082732 - RNA, 19 nt, Artificial Sequence
  Description of Artificial Sequence: Synthetic oligonucleotide
cuugugcccugugugacaa

SEQ ID NO: 2082733 - RNA, 19 nt, Artificial Sequence
  Description of Artificial Sequence: Synthetic oligonucleotide
gggcuugauuguccuagug

SEQ ID NO: 2082734 - RNA, 19 nt, Artificial Sequence
  Description of Artificial Sequence: Synthetic oligonucleotide
uaguggcucagggcgugca

SEQ ID NO: 2082735 - RNA, 19 nt, Artificial Sequence
  Description of Artificial Sequence: Synthetic oligonucleotide
cacaguuggguagcaagaa

SEQ ID NO: 2082736 - RNA, 19 nt, Artificial Sequence
  Description of Artificial Sequence: Synthetic oligonucleotide
gcucagcggccucauguag

SEQ ID NO: 2082737 - RNA, 19 nt, Artificial Sequence
  Description of Artificial Sequence: Synthetic oligonucleotide
aaccacugcccagcacacu

SEQ ID NO: 2082738 - RNA, 19 nt, Artificial Sequence
  Description of Artificial Sequence: Synthetic oligonucleotide
gcaguaugccucugggguc

SEQ ID NO: 2082739 - RNA, 19 nt, Artificial Sequence
  Description of Artificial Sequence: Synthetic oligonucleotide
aguccguccugguccuuau

SEQ ID NO: 2082740 - RNA, 19 nt, Artificial Sequence
  Description of Artificial Sequence: Synthetic oligonucleotide
cugccagcccguagacuac

SEQ ID NO: 2082741 - RNA, 19 nt, Artificial Sequence
  Description of Artificial Sequence: Synthetic oligonucleotide
acgggaggguaagaaagua

SEQ ID NO: 2082742 - RNA, 19 nt, Artificial Sequence
  Description of Artificial Sequence: Synthetic oligonucleotide
aacggccauuccagagcag

SEQ ID NO: 2082743 - RNA, 19 nt, Artificial Sequence
  Description of Artificial Sequence: Synthetic oligonucleotide
uggucugcguagccuccau

SEQ ID NO: 2082744 - RNA, 19 nt, Artificial Sequence
  Description of Artificial Sequence: Synthetic oligonucleotide
guucccauacagugcggua

SEQ ID NO: 2082745 - RNA, 19 nt, Artificial Sequence
  Description of Artificial Sequence: Synthetic oligonucleotide
ccaaacuucaucagacugu

SEQ ID NO: 2082746 - RNA, 19 nt, Artificial Sequence
  Description of Artificial Sequence: Synthetic oligonucleotide
gccucauguaggcuaguga

SEQ ID NO: 2082747 - RNA, 19 nt, Artificial Sequence
  Description of Artificial Sequence: Synthetic oligonucleotide
acuucauuucagacuccau

SEQ ID NO: 2082748 - RNA, 19 nt, Artificial Sequence
  Description of Artificial Sequence: Synthetic oligonucleotide
aggcccucaggaaccacug

SEQ ID NO: 2082749 - RNA, 19 nt, Artificial Sequence
  Description of Artificial Sequence: Synthetic oligonucleotide
cacagcggccaagccacag

SEQ ID NO: 2082750 - RNA, 19 nt, Artificial Sequence
  Description of Artificial Sequence: Synthetic oligonucleotide
ggcccaggcguucccauac

SEQ ID NO: 2082751 - RNA, 19 nt, Artificial Sequence
  Description of Artificial Sequence: Synthetic oligonucleotide
cccauucacagcucccaug

SEQ ID NO: 2082752 - RNA, 19 nt, Artificial Sequence
  Description of Artificial Sequence: Synthetic oligonucleotide
guguauuggcugggcuucc

SEQ ID NO: 2082753 - RNA, 19 nt, Artificial Sequence
  Description of Artificial Sequence: Synthetic oligonucleotide
ccacaugcaggguaggaaa

SEQ ID NO: 2082754 - RNA, 19 nt, Artificial Sequence
  Description of Artificial Sequence: Synthetic oligonucleotide
cagacccucuuggaucaug

SEQ ID NO: 2082755 - RNA, 19 nt, Artificial Sequence
  Description of Artificial Sequence: Synthetic oligonucleotide
cagugcgguaacagcccuc

SEQ ID NO: 2082756 - RNA, 19 nt, Artificial Sequence
  Description of Artificial Sequence: Synthetic oligonucleotide
aagugguuccuuggcccuu

SEQ ID NO: 2082757 - RNA, 19 nt, Artificial Sequence
  Description of Artificial Sequence: Synthetic oligonucleotide
ggaaggaacgggaggguaa

SEQ ID NO: 2082758 - RNA, 19 nt, Artificial Sequence
  Description of Artificial Sequence: Synthetic oligonucleotide
ggaggaaagaccaguguau

SEQ ID NO: 2082759 - RNA, 19 nt, Artificial Sequence
  Description of Artificial Sequence: Synthetic oligonucleotide
gggaggguaagaaaguaau

SEQ ID NO: 2082760 - RNA, 19 nt, Artificial Sequence
  Description of Artificial Sequence: Synthetic oligonucleotide
cggaccacaugcaggguag

SEQ ID NO: 2082761 - RNA, 19 nt, Artificial Sequence
  Description of Artificial Sequence: Synthetic oligonucleotide
gaucuaucaggaacaccau

SEQ ID NO: 2082762 - RNA, 19 nt, Artificial Sequence
  Description of Artificial Sequence: Synthetic oligonucleotide
cuaguggcucagggcgugc

SEQ ID NO: 2082763 - RNA, 19 nt, Artificial Sequence
  Description of Artificial Sequence: Synthetic oligonucleotide
gguggcugccagcccguag

SEQ ID NO: 2082764 - RNA, 19 nt, Artificial Sequence
  Description of Artificial Sequence: Synthetic oligonucleotide
cugcguagccuccauucua

SEQ ID NO: 2082765 - RNA, 19 nt, Artificial Sequence
  Description of Artificial Sequence: Synthetic oligonucleotide
cccguagacuacacccacc

SEQ ID NO: 2082766 - RNA, 19 nt, Artificial Sequence
  Description of Artificial Sequence: Synthetic oligonucleotide
caguguauuggcugggcuu

SEQ ID NO: 2082767 - RNA, 19 nt, Artificial Sequence
  Description of Artificial Sequence: Synthetic oligonucleotide
agcucccauggcuccuccu

SEQ ID NO: 2082768 - RNA, 19 nt, Artificial Sequence
  Description of Artificial Sequence: Synthetic oligonucleotide
guaugccucuggggucugg

SEQ ID NO: 2082769 - RNA, 19 nt, Artificial Sequence
  Description of Artificial Sequence: Synthetic oligonucleotide
ggaacacuugcugcuggca

SEQ ID NO: 2082770 - RNA, 19 nt, Artificial Sequence
  Description of Artificial Sequence: Synthetic oligonucleotide
guagcaagaaggagggcuu

SEQ ID NO: 2082771 - RNA, 19 nt, Artificial Sequence
  Description of Artificial Sequence: Synthetic oligonucleotide
cuccugcaaaggccuggac

SEQ ID NO: 2082772 - RNA, 19 nt, Artificial Sequence
  Description of Artificial Sequence: Synthetic oligonucleotide
caugaugcugcgggacuga

SEQ ID NO: 2082773 - RNA, 19 nt, Artificial Sequence
  Description of Artificial Sequence: Synthetic oligonucleotide
gcccguagacuacacccac

SEQ ID NO: 2082774 - RNA, 19 nt, Artificial Sequence
  Description of Artificial Sequence: Synthetic oligonucleotide
ggcgugcaggagugguggg

SEQ ID NO: 2082775 - RNA, 19 nt, Artificial Sequence
  Description of Artificial Sequence: Synthetic oligonucleotide
cuguggcgacccauccauc

SEQ ID NO: 2082776 - RNA, 19 nt, Artificial Sequence
  Description of Artificial Sequence: Synthetic oligonucleotide
ggagagcacggaccacaug

SEQ ID NO: 2082777 - RNA, 19 nt, Artificial Sequence
  Description of Artificial Sequence: Synthetic oligonucleotide
ggcuuagguuuguccaaga

SEQ ID NO: 2082778 - RNA, 19 nt, Artificial Sequence
  Description of Artificial Sequence: Synthetic oligonucleotide
gugcccugugugacaacug

SEQ ID NO: 2082779 - RNA, 19 nt, Artificial Sequence
  Description of Artificial Sequence: Synthetic oligonucleotide
guccaagauuucuuugguu

SEQ ID NO: 2082780 - RNA, 19 nt, Artificial Sequence
  Description of Artificial Sequence: Synthetic oligonucleotide
ccacccaaacuucaucaga

SEQ ID NO: 2082781 - RNA, 19 nt, Artificial Sequence
  Description of Artificial Sequence: Synthetic oligonucleotide
cacaugcaggguaggaaau

SEQ ID NO: 2082782 - RNA, 19 nt, Artificial Sequence
  Description of Artificial Sequence: Synthetic oligonucleotide
ggaggguaagaaaguaaua

SEQ ID NO: 2082783 - RNA, 19 nt, Artificial Sequence
  Description of Artificial Sequence: Synthetic oligonucleotide
gugcgguaacagcccucag

SEQ ID NO: 2082784 - RNA, 19 nt, Artificial Sequence
  Description of Artificial Sequence: Synthetic oligonucleotide
ccagcccguagacuacacc

SEQ ID NO: 2082785 - RNA, 19 nt, Artificial Sequence
  Description of Artificial Sequence: Synthetic oligonucleotide
agccuccauucuacaauga

SEQ ID NO: 2082786 - RNA, 19 nt, Artificial Sequence
  Description of Artificial Sequence: Synthetic oligonucleotide
cccaggcguucccauacag

SEQ ID NO: 2082787 - RNA, 19 nt, Artificial Sequence
  Description of Artificial Sequence: Synthetic oligonucleotide
ggaucacucugggcuuagg

SEQ ID NO: 2082788 - RNA, 19 nt, Artificial Sequence
  Description of Artificial Sequence: Synthetic oligonucleotide
cagcucccauggcuccucc

SEQ ID NO: 2082789 - RNA, 19 nt, Artificial Sequence
  Description of Artificial Sequence: Synthetic oligonucleotide
caguaagcacuggggccug

SEQ ID NO: 2082790 - RNA, 19 nt, Artificial Sequence
  Description of Artificial Sequence: Synthetic oligonucleotide
ggaccacaugcaggguagg

SEQ ID NO: 2082791 - RNA, 19 nt, Artificial Sequence
  Description of Artificial Sequence: Synthetic oligonucleotide
gacccucuuggaucauggu

SEQ ID NO: 2082792 - RNA, 19 nt, Artificial Sequence
  Description of Artificial Sequence: Synthetic oligonucleotide
acacccacccaaacuucau

SEQ ID NO: 2082793 - RNA, 19 nt, Artificial Sequence
  Description of Artificial Sequence: Synthetic oligonucleotide
agaugcucagcggccucau

SEQ ID NO: 2082794 - RNA, 19 nt, Artificial Sequence
  Description of Artificial Sequence: Synthetic oligonucleotide
gcgacccauccaucauagg

SEQ ID NO: 2082795 - RNA, 19 nt, Artificial Sequence
  Description of Artificial Sequence: Synthetic oligonucleotide
aggcugggagcugcuguca

SEQ ID NO: 2082796 - RNA, 19 nt, Artificial Sequence
  Description of Artificial Sequence: Synthetic oligonucleotide
aguaugccucuggggucug

SEQ ID NO: 2082797 - RNA, 19 nt, Artificial Sequence
  Description of Artificial Sequence: Synthetic oligonucleotide
aguaagcacuggggccugu

SEQ ID NO: 2082798 - RNA, 19 nt, Artificial Sequence
  Description of Artificial Sequence: Synthetic oligonucleotide
cugaaccaucacagccaca

SEQ ID NO: 2082799 - RNA, 19 nt, Artificial Sequence
  Description of Artificial Sequence: Synthetic oligonucleotide
ccagagcagucucucauaa

SEQ ID NO: 2082800 - RNA, 19 nt, Artificial Sequence
  Description of Artificial Sequence: Synthetic oligonucleotide
cuggggccuguggcgaccc

SEQ ID NO: 2082801 - RNA, 19 nt, Artificial Sequence
  Description of Artificial Sequence: Synthetic oligonucleotide
cauugagcucaaagauggu

SEQ ID NO: 2082802 - RNA, 19 nt, Artificial Sequence
  Description of Artificial Sequence: Synthetic oligonucleotide
cccgagucagacccucuug

SEQ ID NO: 2082803 - RNA, 19 nt, Artificial Sequence
  Description of Artificial Sequence: Synthetic oligonucleotide
gaguccguccugguccuua

SEQ ID NO: 2082804 - RNA, 19 nt, Artificial Sequence
  Description of Artificial Sequence: Synthetic oligonucleotide
gcccugugugacaacuggc

SEQ ID NO: 2082805 - RNA, 19 nt, Artificial Sequence
  Description of Artificial Sequence: Synthetic oligonucleotide
gggaggaggaaagaccagu

SEQ ID NO: 2082806 - RNA, 19 nt, Artificial Sequence
  Description of Artificial Sequence: Synthetic oligonucleotide
gcuuagguuuguccaagau

SEQ ID NO: 2082807 - RNA, 19 nt, Artificial Sequence
  Description of Artificial Sequence: Synthetic oligonucleotide
gggccccacacagaacagc

SEQ ID NO: 2082808 - RNA, 19 nt, Artificial Sequence
  Description of Artificial Sequence: Synthetic oligonucleotide
ggguaggaaauaccucagu

SEQ ID NO: 2082809 - RNA, 19 nt, Artificial Sequence
  Description of Artificial Sequence: Synthetic oligonucleotide
gcggccucauguaggcuag

SEQ ID NO: 2082810 - RNA, 19 nt, Artificial Sequence
  Description of Artificial Sequence: Synthetic oligonucleotide
cggaacacuugcugcuggc

SEQ ID NO: 2082811 - RNA, 19 nt, Artificial Sequence
  Description of Artificial Sequence: Synthetic oligonucleotide
cagcccucagcuguccgga

SEQ ID NO: 2082812 - RNA, 19 nt, Artificial Sequence
  Description of Artificial Sequence: Synthetic oligonucleotide
cucagcuguccggaaaccu

SEQ ID NO: 2082813 - RNA, 19 nt, Artificial Sequence
  Description of Artificial Sequence: Synthetic oligonucleotide
cgacccauccaucauaggu

SEQ ID NO: 2082814 - RNA, 19 nt, Artificial Sequence
  Description of Artificial Sequence: Synthetic oligonucleotide
augguggcugccagcccgu

SEQ ID NO: 2082815 - RNA, 19 nt, Artificial Sequence
  Description of Artificial Sequence: Synthetic oligonucleotide
gaacagccaucugaaccau

SEQ ID NO: 2082816 - RNA, 19 nt, Artificial Sequence
  Description of Artificial Sequence: Synthetic oligonucleotide
aggcccaggcguucccaua

SEQ ID NO: 2082817 - RNA, 19 nt, Artificial Sequence
  Description of Artificial Sequence: Synthetic oligonucleotide
gcggccaagccacagcccu

SEQ ID NO: 2082818 - RNA, 19 nt, Artificial Sequence
  Description of Artificial Sequence: Synthetic oligonucleotide
uggggccuguggcgaccca

SEQ ID NO: 2082819 - RNA, 19 nt, Artificial Sequence
  Description of Artificial Sequence: Synthetic oligonucleotide
ccuaguggcucagggcgug

SEQ ID NO: 2082820 - RNA, 19 nt, Artificial Sequence
  Description of Artificial Sequence: Synthetic oligonucleotide
agcccucagcuguccggaa

SEQ ID NO: 2082821 - RNA, 19 nt, Artificial Sequence
  Description of Artificial Sequence: Synthetic oligonucleotide
caugaggcugcaucccauu

SEQ ID NO: 2082822 - RNA, 19 nt, Artificial Sequence
  Description of Artificial Sequence: Synthetic oligonucleotide
gcuagugagcggaacacuu

SEQ ID NO: 2082823 - RNA, 19 nt, Artificial Sequence
  Description of Artificial Sequence: Synthetic oligonucleotide
guccguccugguccuuauc

SEQ ID NO: 2082824 - RNA, 19 nt, Artificial Sequence
  Description of Artificial Sequence: Synthetic oligonucleotide
ucagacccucuuggaucau

SEQ ID NO: 2082825 - RNA, 19 nt, Artificial Sequence
  Description of Artificial Sequence: Synthetic oligonucleotide
ccucagcuguccggaaacc

SEQ ID NO: 2082826 - RNA, 19 nt, Artificial Sequence
  Description of Artificial Sequence: Synthetic oligonucleotide
ggccucggcagagaaugga

SEQ ID NO: 2082827 - RNA, 19 nt, Artificial Sequence
  Description of Artificial Sequence: Synthetic oligonucleotide
ggccauuccagagcagucu

SEQ ID NO: 2082828 - RNA, 19 nt, Artificial Sequence
  Description of Artificial Sequence: Synthetic oligonucleotide
guggcgacccauccaucau

SEQ ID NO: 2082829 - RNA, 19 nt, Artificial Sequence
  Description of Artificial Sequence: Synthetic oligonucleotide
aggcugcaucccauucaca

SEQ ID NO: 2082830 - RNA, 19 nt, Artificial Sequence
  Description of Artificial Sequence: Synthetic oligonucleotide
ggguagcaagaaggagggc

SEQ ID NO: 2082831 - RNA, 19 nt, Artificial Sequence
  Description of Artificial Sequence: Synthetic oligonucleotide
gcguagccuccauucuaca

SEQ ID NO: 2082832 - RNA, 19 nt, Artificial Sequence
  Description of Artificial Sequence: Synthetic oligonucleotide
cguagccuccauucuacaa

SEQ ID NO: 2082833 - RNA, 19 nt, Artificial Sequence
  Description of Artificial Sequence: Synthetic oligonucleotide
ccuguggcgacccauccau

SEQ ID NO: 2082834 - RNA, 19 nt, Artificial Sequence
  Description of Artificial Sequence: Synthetic oligonucleotide
cuggcacaguuggguagca

SEQ ID NO: 2082835 - RNA, 19 nt, Artificial Sequence
  Description of Artificial Sequence: Synthetic oligonucleotide
gccucggcagagaauggaa

SEQ ID NO: 2082836 - RNA, 19 nt, Artificial Sequence
  Description of Artificial Sequence: Synthetic oligonucleotide
gcguucccauacagugcgg

SEQ ID NO: 2082837 - RNA, 19 nt, Artificial Sequence
  Description of Artificial Sequence: Synthetic oligonucleotide
ggcuagugagcggaacacu

SEQ ID NO: 2082838 - RNA, 19 nt, Artificial Sequence
  Description of Artificial Sequence: Synthetic oligonucleotide
gcugggagcugcugucaua

SEQ ID NO: 2082839 - RNA, 19 nt, Artificial Sequence
  Description of Artificial Sequence: Synthetic oligonucleotide
gcccucagcuguccggaaa

SEQ ID NO: 2082840 - RNA, 19 nt, Artificial Sequence
  Description of Artificial Sequence: Synthetic oligonucleotide
cggccauuccagagcaguc

SEQ ID NO: 2082841 - RNA, 19 nt, Artificial Sequence
  Description of Artificial Sequence: Synthetic oligonucleotide
ccaguguauuggcugggcu

SEQ ID NO: 2082842 - RNA, 19 nt, Artificial Sequence
  Description of Artificial Sequence: Synthetic oligonucleotide
cgguaacagcccucagcug

SEQ ID NO: 2082843 - RNA, 19 nt, Artificial Sequence
  Description of Artificial Sequence: Synthetic oligonucleotide
gcaagaaggagggcuugau

SEQ ID NO: 2082844 - RNA, 19 nt, Artificial Sequence
  Description of Artificial Sequence: Synthetic oligonucleotide
cguagacuacacccaccca

SEQ ID NO: 2082845 - RNA, 19 nt, Artificial Sequence
  Description of Artificial Sequence: Synthetic oligonucleotide
caacuggccuuuugcccuu

SEQ ID NO: 2082846 - RNA, 19 nt, Artificial Sequence
  Description of Artificial Sequence: Synthetic oligonucleotide
gcccaggcguucccauaca

SEQ ID NO: 2082847 - RNA, 19 nt, Artificial Sequence
  Description of Artificial Sequence: Synthetic oligonucleotide
cucggccucggcagagaau

SEQ ID NO: 2082848 - RNA, 19 nt, Artificial Sequence
  Description of Artificial Sequence: Synthetic oligonucleotide
cccauacagugcgguaaca

SEQ ID NO: 2082849 - RNA, 19 nt, Artificial Sequence
  Description of Artificial Sequence: Synthetic oligonucleotide
caggcccaggcguucccau

SEQ ID NO: 2082850 - RNA, 19 nt, Artificial Sequence
  Description of Artificial Sequence: Synthetic oligonucleotide
ggcugggagcugcugucau

SEQ ID NO: 2082851 - RNA, 19 nt, Artificial Sequence
  Description of Artificial Sequence: Synthetic oligonucleotide
cggaaaccuucccgaguca

SEQ ID NO: 2082852 - RNA, 19 nt, Artificial Sequence
  Description of Artificial Sequence: Synthetic oligonucleotide
cacggaccacaugcagggu

SEQ ID NO: 2082853 - RNA, 19 nt, Artificial Sequence
  Description of Artificial Sequence: Synthetic oligonucleotide
cguucccauacagugcggu

SEQ ID NO: 2082854 - RNA, 19 nt, Artificial Sequence
  Description of Artificial Sequence: Synthetic oligonucleotide
gcccuuuuacuggcacagu

SEQ ID NO: 2082855 - RNA, 19 nt, Artificial Sequence
  Description of Artificial Sequence: Synthetic oligonucleotide
ccuucccgagucagacccu

SEQ ID NO: 2082856 - RNA, 19 nt, Artificial Sequence
  Description of Artificial Sequence: Synthetic oligonucleotide
cagcggccucauguaggcu

SEQ ID NO: 2082857 - RNA, 19 nt, Artificial Sequence
  Description of Artificial Sequence: Synthetic oligonucleotide
ccuggacauugagcucaaa

SEQ ID NO: 2082858 - RNA, 19 nt, Artificial Sequence
  Description of Artificial Sequence: Synthetic oligonucleotide
cggccucauguaggcuagu

SEQ ID NO: 2082859 - RNA, 19 nt, Artificial Sequence
  Description of Artificial Sequence: Synthetic oligonucleotide
auaguaaucaaucacauac

SEQ ID NO: 2082860 - RNA, 19 nt, Artificial Sequence
  Description of Artificial Sequence: Synthetic oligonucleotide
aauaucaucauccuuccac

SEQ ID NO: 2082861 - RNA, 19 nt, Artificial Sequence
  Description of Artificial Sequence: Synthetic oligonucleotide
aauucuaaugauauuauac

SEQ ID NO: 2082862 - RNA, 19 nt, Artificial Sequence
  Description of Artificial Sequence: Synthetic oligonucleotide
uuuaguuuggggaaaauag

SEQ ID NO: 2082863 - RNA, 19 nt, Artificial Sequence
  Description of Artificial Sequence: Synthetic oligonucleotide
aucaaguuugauuacacac

SEQ ID NO: 2082864 - RNA, 19 nt, Artificial Sequence
  Description of Artificial Sequence: Synthetic oligonucleotide
cugacuaauaucaucaucc

SEQ ID NO: 2082865 - RNA, 19 nt, Artificial Sequence
  Description of Artificial Sequence: Synthetic oligonucleotide
auaacaaacaaauucgugu

SEQ ID NO: 2082866 - RNA, 19 nt, Artificial Sequence
  Description of Artificial Sequence: Synthetic oligonucleotide
aacaaauucguguuuacga

SEQ ID NO: 2082867 - RNA, 19 nt, Artificial Sequence
  Description of Artificial Sequence: Synthetic oligonucleotide
uaugagugcauuuaguuug

SEQ ID NO: 2082868 - RNA, 19 nt, Artificial Sequence
  Description of Artificial Sequence: Synthetic oligonucleotide
acuaauaucaucauccuuc

SEQ ID NO: 2082869 - RNA, 19 nt, Artificial Sequence
  Description of Artificial Sequence: Synthetic oligonucleotide
cugagaaugaaucuaaggc

SEQ ID NO: 2082870 - RNA, 19 nt, Artificial Sequence
  Description of Artificial Sequence: Synthetic oligonucleotide
uuucuuuugccucucaugc

SEQ ID NO: 2082871 - RNA, 19 nt, Artificial Sequence
  Description of Artificial Sequence: Synthetic oligonucleotide
aaucggaccaaugaugggc

SEQ ID NO: 2082872 - RNA, 19 nt, Artificial Sequence
  Description of Artificial Sequence: Synthetic oligonucleotide
agguagacaaagcaaaugg

SEQ ID NO: 2082873 - RNA, 19 nt, Artificial Sequence
  Description of Artificial Sequence: Synthetic oligonucleotide
gugacucaaaauuuaaugg

SEQ ID NO: 2082874 - RNA, 19 nt, Artificial Sequence
  Description of Artificial Sequence: Synthetic oligonucleotide
ugauugugaauucuaauga

SEQ ID NO: 2082875 - RNA, 19 nt, Artificial Sequence
  Description of Artificial Sequence: Synthetic oligonucleotide
augaaucuaaggcaggacg

SEQ ID NO: 2082876 - RNA, 19 nt, Artificial Sequence
  Description of Artificial Sequence: Synthetic oligonucleotide
uuuaaaugcacauuuucaa

SEQ ID NO: 2082877 - RNA, 19 nt, Artificial Sequence
  Description of Artificial Sequence: Synthetic oligonucleotide
auuccacguacucauaggc

SEQ ID NO: 2082878 - RNA, 19 nt, Artificial Sequence
  Description of Artificial Sequence: Synthetic oligonucleotide
aguaacagggcauuccacg

SEQ ID NO: 2082879 - RNA, 19 nt, Artificial Sequence
  Description of Artificial Sequence: Synthetic oligonucleotide
caaaucggaccaaugaugg

SEQ ID NO: 2082880 - RNA, 19 nt, Artificial Sequence
  Description of Artificial Sequence: Synthetic oligonucleotide
uuuucaacugcaauggaaa

SEQ ID NO: 2082881 - RNA, 19 nt, Artificial Sequence
  Description of Artificial Sequence: Synthetic oligonucleotide
uuauacauaucuuucugac

SEQ ID NO: 2082882 - RNA, 19 nt, Artificial Sequence
  Description of Artificial Sequence: Synthetic oligonucleotide
aguuugauuacacacuuga

SEQ ID NO: 2082883 - RNA, 19 nt, Artificial Sequence
  Description of Artificial Sequence: Synthetic oligonucleotide
uguucagaaggguaaaccc

SEQ ID NO: 2082884 - RNA, 19 nt, Artificial Sequence
  Description of Artificial Sequence: Synthetic oligonucleotide
aacagggcauuccacguac

SEQ ID NO: 2082885 - RNA, 19 nt, Artificial Sequence
  Description of Artificial Sequence: Synthetic oligonucleotide
ugaaucuaaggcaggacgc

SEQ ID NO: 2082886 - RNA, 19 nt, Artificial Sequence
  Description of Artificial Sequence: Synthetic oligonucleotide
uucauucugucccauacug

SEQ ID NO: 2082887 - RNA, 19 nt, Artificial Sequence
  Description of Artificial Sequence: Synthetic oligonucleotide
aaucacagggacgacuccc

SEQ ID NO: 2082888 - RNA, 19 nt, Artificial Sequence
  Description of Artificial Sequence: Synthetic oligonucleotide
ucaacugcaauggaaaaug

SEQ ID NO: 2082889 - RNA, 19 nt, Artificial Sequence
  Description of Artificial Sequence: Synthetic oligonucleotide
auacauaucuuucugacua

SEQ ID NO: 2082890 - RNA, 19 nt, Artificial Sequence
  Description of Artificial Sequence: Synthetic oligonucleotide
ucuaaugauauuauacaua

SEQ ID NO: 2082891 - RNA, 19 nt, Artificial Sequence
  Description of Artificial Sequence: Synthetic oligonucleotide
aaacaaauucguguuuacg

SEQ ID NO: 2082892 - RNA, 19 nt, Artificial Sequence
  Description of Artificial Sequence: Synthetic oligonucleotide
uugugaauucuaaugauau

SEQ ID NO: 2082893 - RNA, 19 nt, Artificial Sequence
  Description of Artificial Sequence: Synthetic oligonucleotide
auaguuuaacaucuuucuc

SEQ ID NO: 2082894 - RNA, 19 nt, Artificial Sequence
  Description of Artificial Sequence: Synthetic oligonucleotide
cacugguuggaucagaugc

SEQ ID NO: 2082895 - RNA, 19 nt, Artificial Sequence
  Description of Artificial Sequence: Synthetic oligonucleotide
aaaggcaacucauacccca

SEQ ID NO: 2082896 - RNA, 19 nt, Artificial Sequence
  Description of Artificial Sequence: Synthetic oligonucleotide
aagcauuugggguguuugc

SEQ ID NO: 2082897 - RNA, 19 nt, Artificial Sequence
  Description of Artificial Sequence: Synthetic oligonucleotide
ugaaagaucaaguuugauu

SEQ ID NO: 2082898 - RNA, 19 nt, Artificial Sequence
  Description of Artificial Sequence: Synthetic oligonucleotide
cauccuuccacuuccaccc

SEQ ID NO: 2082899 - RNA, 19 nt, Artificial Sequence
  Description of Artificial Sequence: Synthetic oligonucleotide
uuggugaauauuuucuggc

SEQ ID NO: 2082900 - RNA, 19 nt, Artificial Sequence
  Description of Artificial Sequence: Synthetic oligonucleotide
uucguguuuacgaagucca

SEQ ID NO: 2082901 - RNA, 19 nt, Artificial Sequence
  Description of Artificial Sequence: Synthetic oligonucleotide
ugaaaagcacccuugguaa

SEQ ID NO: 2082902 - RNA, 19 nt, Artificial Sequence
  Description of Artificial Sequence: Synthetic oligonucleotide
aaugaaucuaaggcaggac

SEQ ID NO: 2082903 - RNA, 19 nt, Artificial Sequence
  Description of Artificial Sequence: Synthetic oligonucleotide
ucaaaaucucccuccaagc

SEQ ID NO: 2082904 - RNA, 19 nt, Artificial Sequence
  Description of Artificial Sequence: Synthetic oligonucleotide
ugugcuuugcucucacugg

SEQ ID NO: 2082905 - RNA, 19 nt, Artificial Sequence
  Description of Artificial Sequence: Synthetic oligonucleotide
ucauaacaaacaaauucgu

SEQ ID NO: 2082906 - RNA, 19 nt, Artificial Sequence
  Description of Artificial Sequence: Synthetic oligonucleotide
uuaguuuggggaaaauagu

SEQ ID NO: 2082907 - RNA, 19 nt, Artificial Sequence
  Description of Artificial Sequence: Synthetic oligonucleotide
uaguaaucaaucacauacc

SEQ ID NO: 2082908 - RNA, 19 nt, Artificial Sequence
  Description of Artificial Sequence: Synthetic oligonucleotide
gaauucuugcccuugguga

SEQ ID NO: 2082909 - RNA, 19 nt, Artificial Sequence
  Description of Artificial Sequence: Synthetic oligonucleotide
acuugaaaagcacccuugg

SEQ ID NO: 2082910 - RNA, 19 nt, Artificial Sequence
  Description of Artificial Sequence: Synthetic oligonucleotide
aacgaauucuugcccuugg

SEQ ID NO: 2082911 - RNA, 19 nt, Artificial Sequence
  Description of Artificial Sequence: Synthetic oligonucleotide
aacgguugaugauccaguc

SEQ ID NO: 2082912 - RNA, 19 nt, Artificial Sequence
  Description of Artificial Sequence: Synthetic oligonucleotide
uucugugccacaacgguug

SEQ ID NO: 2082913 - RNA, 19 nt, Artificial Sequence
  Description of Artificial Sequence: Synthetic oligonucleotide
acagggacgacucccaauc

SEQ ID NO: 2082914 - RNA, 19 nt, Artificial Sequence
  Description of Artificial Sequence: Synthetic oligonucleotide
ugaaggaucaagguucucc

SEQ ID NO: 2082915 - RNA, 19 nt, Artificial Sequence
  Description of Artificial Sequence: Synthetic oligonucleotide
auuaugagugcauuuaguu

SEQ ID NO: 2082916 - RNA, 19 nt, Artificial Sequence
  Description of Artificial Sequence: Synthetic oligonucleotide
uccacguacucauaggccc

SEQ ID NO: 2082917 - RNA, 19 nt, Artificial Sequence
  Description of Artificial Sequence: Synthetic oligonucleotide
cuaauaucaucauccuucc

SEQ ID NO: 2082918 - RNA, 19 nt, Artificial Sequence
  Description of Artificial Sequence: Synthetic oligonucleotide
aauucguguuuacgaaguc

SEQ ID NO: 2082919 - RNA, 19 nt, Artificial Sequence
  Description of Artificial Sequence: Synthetic oligonucleotide
auucguguuuacgaagucc

SEQ ID NO: 2082920 - RNA, 19 nt, Artificial Sequence
  Description of Artificial Sequence: Synthetic oligonucleotide
uucuccuuauccuuuguug

SEQ ID NO: 2082921 - RNA, 19 nt, Artificial Sequence
  Description of Artificial Sequence: Synthetic oligonucleotide
cacaaggacacucacgagc

SEQ ID NO: 2082922 - RNA, 19 nt, Artificial Sequence
  Description of Artificial Sequence: Synthetic oligonucleotide
cugaaggccgugaaggugg

SEQ ID NO: 2082923 - RNA, 19 nt, Artificial Sequence
  Description of Artificial Sequence: Synthetic oligonucleotide
ucauaguaaucaaucacau

SEQ ID NO: 2082924 - RNA, 19 nt, Artificial Sequence
  Description of Artificial Sequence: Synthetic oligonucleotide
ugcggaggaacccauagcu

SEQ ID NO: 2082925 - RNA, 19 nt, Artificial Sequence
  Description of Artificial Sequence: Synthetic oligonucleotide
auuauucugauugugaauu

SEQ ID NO: 2082926 - RNA, 19 nt, Artificial Sequence
  Description of Artificial Sequence: Synthetic oligonucleotide
cuuugcaugaaagaucaag

SEQ ID NO: 2082927 - RNA, 19 nt, Artificial Sequence
  Description of Artificial Sequence: Synthetic oligonucleotide
ucauaccccauccaggaac

SEQ ID NO: 2082928 - RNA, 19 nt, Artificial Sequence
  Description of Artificial Sequence: Synthetic oligonucleotide
uucagaaggguaaacccac

SEQ ID NO: 2082929 - RNA, 19 nt, Artificial Sequence
  Description of Artificial Sequence: Synthetic oligonucleotide
gauggagucugauuaggug

SEQ ID NO: 2082930 - RNA, 19 nt, Artificial Sequence
  Description of Artificial Sequence: Synthetic oligonucleotide
acauuaugagugcauuuag

SEQ ID NO: 2082931 - RNA, 19 nt, Artificial Sequence
  Description of Artificial Sequence: Synthetic oligonucleotide
uaacaaacaaauucguguu

SEQ ID NO: 2082932 - RNA, 19 nt, Artificial Sequence
  Description of Artificial Sequence: Synthetic oligonucleotide
aaaaucucccuccaagcuu

SEQ ID NO: 2082933 - RNA, 19 nt, Artificial Sequence
  Description of Artificial Sequence: Synthetic oligonucleotide
aaaucggaccaaugauggg

SEQ ID NO: 2082934 - RNA, 19 nt, Artificial Sequence
  Description of Artificial Sequence: Synthetic oligonucleotide
aaguccagcgccaccacgc

SEQ ID NO: 2082935 - RNA, 19 nt, Artificial Sequence
  Description of Artificial Sequence: Synthetic oligonucleotide
gguggcaucagauuugaag

SEQ ID NO: 2082936 - RNA, 19 nt, Artificial Sequence
  Description of Artificial Sequence: Synthetic oligonucleotide
aaauucguguuuacgaagu

SEQ ID NO: 2082937 - RNA, 19 nt, Artificial Sequence
  Description of Artificial Sequence: Synthetic oligonucleotide
acugcaauggaaaauguga

SEQ ID NO: 2082938 - RNA, 19 nt, Artificial Sequence
  Description of Artificial Sequence: Synthetic oligonucleotide
uauacauaucuuucugacu

SEQ ID NO: 2082939 - RNA, 19 nt, Artificial Sequence
  Description of Artificial Sequence: Synthetic oligonucleotide
caaauucguguuuacgaag

SEQ ID NO: 2082940 - RNA, 19 nt, Artificial Sequence
  Description of Artificial Sequence: Synthetic oligonucleotide
aucauaguaaucaaucaca

SEQ ID NO: 2082941 - RNA, 19 nt, Artificial Sequence
  Description of Artificial Sequence: Synthetic oligonucleotide
cucaaaauuuaauggaaca

SEQ ID NO: 2082942 - RNA, 19 nt, Artificial Sequence
  Description of Artificial Sequence: Synthetic oligonucleotide
uggggauggagucugauua

SEQ ID NO: 2082943 - RNA, 19 nt, Artificial Sequence
  Description of Artificial Sequence: Synthetic oligonucleotide
uuuacgaaguccagcgcca

SEQ ID NO: 2082944 - RNA, 19 nt, Artificial Sequence
  Description of Artificial Sequence: Synthetic oligonucleotide
gaugcggaggaacccauag

SEQ ID NO: 2082945 - RNA, 19 nt, Artificial Sequence
  Description of Artificial Sequence: Synthetic oligonucleotide
ucuuggaauagaugacucc

SEQ ID NO: 2082946 - RNA, 19 nt, Artificial Sequence
  Description of Artificial Sequence: Synthetic oligonucleotide
agcauggcauuccagaaca

SEQ ID NO: 2082947 - RNA, 19 nt, Artificial Sequence
  Description of Artificial Sequence: Synthetic oligonucleotide
aguuuaacaucuuucucaa

SEQ ID NO: 2082948 - RNA, 19 nt, Artificial Sequence
  Description of Artificial Sequence: Synthetic oligonucleotide
ugaugggccacaaggacac

SEQ ID NO: 2082949 - RNA, 19 nt, Artificial Sequence
  Description of Artificial Sequence: Synthetic oligonucleotide
ugaugauccagucgugucu

SEQ ID NO: 2082950 - RNA, 19 nt, Artificial Sequence
  Description of Artificial Sequence: Synthetic oligonucleotide
aacauuaugagugcauuua

SEQ ID NO: 2082951 - RNA, 19 nt, Artificial Sequence
  Description of Artificial Sequence: Synthetic oligonucleotide
aaaucucccuccaagcuug

SEQ ID NO: 2082952 - RNA, 19 nt, Artificial Sequence
  Description of Artificial Sequence: Synthetic oligonucleotide
cuaaugauauuauacauau

SEQ ID NO: 2082953 - RNA, 19 nt, Artificial Sequence
  Description of Artificial Sequence: Synthetic oligonucleotide
aacucauaccccauccagg

SEQ ID NO: 2082954 - RNA, 19 nt, Artificial Sequence
  Description of Artificial Sequence: Synthetic oligonucleotide
uccaaaucggaccaaugau

SEQ ID NO: 2082955 - RNA, 19 nt, Artificial Sequence
  Description of Artificial Sequence: Synthetic oligonucleotide
ucgaaaggcaacucauacc

SEQ ID NO: 2082956 - RNA, 19 nt, Artificial Sequence
  Description of Artificial Sequence: Synthetic oligonucleotide
ugcuacugcagucacugga

SEQ ID NO: 2082957 - RNA, 19 nt, Artificial Sequence
  Description of Artificial Sequence: Synthetic oligonucleotide
auagaugacuccucucuug

SEQ ID NO: 2082958 - RNA, 19 nt, Artificial Sequence
  Description of Artificial Sequence: Synthetic oligonucleotide
uaguuuggggaaaauaguu

SEQ ID NO: 2082959 - RNA, 19 nt, Artificial Sequence
  Description of Artificial Sequence: Synthetic oligonucleotide
aagcuugcucauuauucug

SEQ ID NO: 2082960 - RNA, 19 nt, Artificial Sequence
  Description of Artificial Sequence: Synthetic oligonucleotide
acaaauucguguuuacgaa

SEQ ID NO: 2082961 - RNA, 19 nt, Artificial Sequence
  Description of Artificial Sequence: Synthetic oligonucleotide
uugguaacauuaugagugc

SEQ ID NO: 2082962 - RNA, 19 nt, Artificial Sequence
  Description of Artificial Sequence: Synthetic oligonucleotide
uuaugagugcauuuaguuu

SEQ ID NO: 2082963 - RNA, 19 nt, Artificial Sequence
  Description of Artificial Sequence: Synthetic oligonucleotide
caucuuugcaugaaagauc

SEQ ID NO: 2082964 - RNA, 19 nt, Artificial Sequence
  Description of Artificial Sequence: Synthetic oligonucleotide
gaucuuggugggcaggugc

SEQ ID NO: 2082965 - RNA, 19 nt, Artificial Sequence
  Description of Artificial Sequence: Synthetic oligonucleotide
ucaugcauugggcauccug

SEQ ID NO: 2082966 - RNA, 19 nt, Artificial Sequence
  Description of Artificial Sequence: Synthetic oligonucleotide
agucgugucugucgaaagg

SEQ ID NO: 2082967 - RNA, 19 nt, Artificial Sequence
  Description of Artificial Sequence: Synthetic oligonucleotide
ugcaauggaaaaugugacu

SEQ ID NO: 2082968 - RNA, 19 nt, Artificial Sequence
  Description of Artificial Sequence: Synthetic oligonucleotide
aauagaugacuccucucuu

SEQ ID NO: 2082969 - RNA, 19 nt, Artificial Sequence
  Description of Artificial Sequence: Synthetic oligonucleotide
gaauagaugacuccucucu

SEQ ID NO: 2082970 - RNA, 19 nt, Artificial Sequence
  Description of Artificial Sequence: Synthetic oligonucleotide
cugcaauggaaaaugugac

SEQ ID NO: 2082971 - RNA, 19 nt, Artificial Sequence
  Description of Artificial Sequence: Synthetic oligonucleotide
accaguaacagggcauucc

SEQ ID NO: 2082972 - RNA, 19 nt, Artificial Sequence
  Description of Artificial Sequence: Synthetic oligonucleotide
gcaugaaagaucaaguuug

SEQ ID NO: 2082973 - RNA, 19 nt, Artificial Sequence
  Description of Artificial Sequence: Synthetic oligonucleotide
acucauaccccauccagga

SEQ ID NO: 2082974 - RNA, 19 nt, Artificial Sequence
  Description of Artificial Sequence: Synthetic oligonucleotide
aaaagcacccuugguaaca

SEQ ID NO: 2082975 - RNA, 19 nt, Artificial Sequence
  Description of Artificial Sequence: Synthetic oligonucleotide
cauaccccauccaggaacg

SEQ ID NO: 2082976 - RNA, 19 nt, Artificial Sequence
  Description of Artificial Sequence: Synthetic oligonucleotide
aaauggcugaucuggggau

SEQ ID NO: 2082977 - RNA, 19 nt, Artificial Sequence
  Description of Artificial Sequence: Synthetic oligonucleotide
gcugagaaugaaucuaagg

SEQ ID NO: 2082978 - RNA, 19 nt, Artificial Sequence
  Description of Artificial Sequence: Synthetic oligonucleotide
gacacucacgagcaugaag

SEQ ID NO: 2082979 - RNA, 19 nt, Artificial Sequence
  Description of Artificial Sequence: Synthetic oligonucleotide
augaucugaagcauuuggg

SEQ ID NO: 2082980 - RNA, 19 nt, Artificial Sequence
  Description of Artificial Sequence: Synthetic oligonucleotide
ucugauugugaauucuaau

SEQ ID NO: 2082981 - RNA, 19 nt, Artificial Sequence
  Description of Artificial Sequence: Synthetic oligonucleotide
ugacuaauaucaucauccu

SEQ ID NO: 2082982 - RNA, 19 nt, Artificial Sequence
  Description of Artificial Sequence: Synthetic oligonucleotide
gucgaaaggcaacucauac

SEQ ID NO: 2082983 - RNA, 19 nt, Artificial Sequence
  Description of Artificial Sequence: Synthetic oligonucleotide
uucugauugugaauucuaa

SEQ ID NO: 2082984 - RNA, 19 nt, Artificial Sequence
  Description of Artificial Sequence: Synthetic oligonucleotide
aacuucugugccacaacgg

SEQ ID NO: 2082985 - RNA, 19 nt, Artificial Sequence
  Description of Artificial Sequence: Synthetic oligonucleotide
acacucacgagcaugaaga

SEQ ID NO: 2082986 - RNA, 19 nt, Artificial Sequence
  Description of Artificial Sequence: Synthetic oligonucleotide
aggacgcacauccaggaug

SEQ ID NO: 2082987 - RNA, 19 nt, Artificial Sequence
  Description of Artificial Sequence: Synthetic oligonucleotide
auuuaauggaacauugcau

SEQ ID NO: 2082988 - RNA, 19 nt, Artificial Sequence
  Description of Artificial Sequence: Synthetic oligonucleotide
gaagcauuugggguguuug

SEQ ID NO: 2082989 - RNA, 19 nt, Artificial Sequence
  Description of Artificial Sequence: Synthetic oligonucleotide
caacucauaccccauccag

SEQ ID NO: 2082990 - RNA, 19 nt, Artificial Sequence
  Description of Artificial Sequence: Synthetic oligonucleotide
acgguugaugauccagucg

SEQ ID NO: 2082991 - RNA, 19 nt, Artificial Sequence
  Description of Artificial Sequence: Synthetic oligonucleotide
acgacucccaaucuaaaau

SEQ ID NO: 2082992 - RNA, 19 nt, Artificial Sequence
  Description of Artificial Sequence: Synthetic oligonucleotide
gaacaucuguucagaaggg

SEQ ID NO: 2082993 - RNA, 19 nt, Artificial Sequence
  Description of Artificial Sequence: Synthetic oligonucleotide
cacccuuuccguagcaugg

SEQ ID NO: 2082994 - RNA, 19 nt, Artificial Sequence
  Description of Artificial Sequence: Synthetic oligonucleotide
caccacgccaccuucauuc

SEQ ID NO: 2082995 - RNA, 19 nt, Artificial Sequence
  Description of Artificial Sequence: Synthetic oligonucleotide
uggagucugauuagguggu

SEQ ID NO: 2082996 - RNA, 19 nt, Artificial Sequence
  Description of Artificial Sequence: Synthetic oligonucleotide
aggaacgaauucuugcccu

SEQ ID NO: 2082997 - RNA, 19 nt, Artificial Sequence
  Description of Artificial Sequence: Synthetic oligonucleotide
acucacgagcaugaagagc

SEQ ID NO: 2082998 - RNA, 19 nt, Artificial Sequence
  Description of Artificial Sequence: Synthetic oligonucleotide
cuuugcucucacugguugg

SEQ ID NO: 2082999 - RNA, 19 nt, Artificial Sequence
  Description of Artificial Sequence: Synthetic oligonucleotide
ugagguagacaaagcaaau

SEQ ID NO: 2083000 - RNA, 19 nt, Artificial Sequence
  Description of Artificial Sequence: Synthetic oligonucleotide
cucacgagcaugaagagcu

SEQ ID NO: 2083001 - RNA, 19 nt, Artificial Sequence
  Description of Artificial Sequence: Synthetic oligonucleotide
caugcauugggcauccuga

SEQ ID NO: 2083002 - RNA, 19 nt, Artificial Sequence
  Description of Artificial Sequence: Synthetic oligonucleotide
acaacgguugaugauccag

SEQ ID NO: 2083003 - RNA, 19 nt, Artificial Sequence
  Description of Artificial Sequence: Synthetic oligonucleotide
augcggaggaacccauagc

SEQ ID NO: 2083004 - RNA, 19 nt, Artificial Sequence
  Description of Artificial Sequence: Synthetic oligonucleotide
uggcauuccagaacaucug

SEQ ID NO: 2083005 - RNA, 19 nt, Artificial Sequence
  Description of Artificial Sequence: Synthetic oligonucleotide
agucacuggacagucuuuc

SEQ ID NO: 2083006 - RNA, 19 nt, Artificial Sequence
  Description of Artificial Sequence: Synthetic oligonucleotide
gacuccucucuugagguag

SEQ ID NO: 2083007 - RNA, 19 nt, Artificial Sequence
  Description of Artificial Sequence: Synthetic oligonucleotide
caucagauuugaaggauca

SEQ ID NO: 2083008 - RNA, 19 nt, Artificial Sequence
  Description of Artificial Sequence: Synthetic oligonucleotide
uucccacuucaaaaucucc

SEQ ID NO: 2083009 - RNA, 19 nt, Artificial Sequence
  Description of Artificial Sequence: Synthetic oligonucleotide
ucugauuaggugguggcau

SEQ ID NO: 2083010 - RNA, 19 nt, Artificial Sequence
  Description of Artificial Sequence: Synthetic oligonucleotide
gaauucuaaugauauuaua

SEQ ID NO: 2083011 - RNA, 19 nt, Artificial Sequence
  Description of Artificial Sequence: Synthetic oligonucleotide
cacauaccuaacuucugug

SEQ ID NO: 2083012 - RNA, 19 nt, Artificial Sequence
  Description of Artificial Sequence: Synthetic oligonucleotide
agaaugaaucuaaggcagg

SEQ ID NO: 2083013 - RNA, 19 nt, Artificial Sequence
  Description of Artificial Sequence: Synthetic oligonucleotide
uaacauuaugagugcauuu

SEQ ID NO: 2083014 - RNA, 19 nt, Artificial Sequence
  Description of Artificial Sequence: Synthetic oligonucleotide
gaccucgccgccaucauag

SEQ ID NO: 2083015 - RNA, 19 nt, Artificial Sequence
  Description of Artificial Sequence: Synthetic oligonucleotide
uuggaauagaugacuccuc

SEQ ID NO: 2083016 - RNA, 19 nt, Artificial Sequence
  Description of Artificial Sequence: Synthetic oligonucleotide
gaaugaaucuaaggcagga

SEQ ID NO: 2083017 - RNA, 19 nt, Artificial Sequence
  Description of Artificial Sequence: Synthetic oligonucleotide
gaguagaugcggaggaacc

SEQ ID NO: 2083018 - RNA, 19 nt, Artificial Sequence
  Description of Artificial Sequence: Synthetic oligonucleotide
ugcucauuauucugauugu

SEQ ID NO: 2083019 - RNA, 19 nt, Artificial Sequence
  Description of Artificial Sequence: Synthetic oligonucleotide
agcaggaguagaugcggag

SEQ ID NO: 2083020 - RNA, 19 nt, Artificial Sequence
  Description of Artificial Sequence: Synthetic oligonucleotide
ugugaauucuaaugauauu

SEQ ID NO: 2083021 - RNA, 19 nt, Artificial Sequence
  Description of Artificial Sequence: Synthetic oligonucleotide
guaguccuuguugaccucg

SEQ ID NO: 2083022 - RNA, 19 nt, Artificial Sequence
  Description of Artificial Sequence: Synthetic oligonucleotide
uuugccucucaugcauugg

SEQ ID NO: 2083023 - RNA, 19 nt, Artificial Sequence
  Description of Artificial Sequence: Synthetic oligonucleotide
ucguguuuacgaaguccag

SEQ ID NO: 2083024 - RNA, 19 nt, Artificial Sequence
  Description of Artificial Sequence: Synthetic oligonucleotide
agaaggguaaacccacuuu

SEQ ID NO: 2083025 - RNA, 19 nt, Artificial Sequence
  Description of Artificial Sequence: Synthetic oligonucleotide
gauugugaauucuaaugau

SEQ ID NO: 2083026 - RNA, 19 nt, Artificial Sequence
  Description of Artificial Sequence: Synthetic oligonucleotide
aguccagcgccaccacgcc

SEQ ID NO: 2083027 - RNA, 19 nt, Artificial Sequence
  Description of Artificial Sequence: Synthetic oligonucleotide
gcaauggaaaaugugacuc

SEQ ID NO: 2083028 - RNA, 19 nt, Artificial Sequence
  Description of Artificial Sequence: Synthetic oligonucleotide
gaaggaucaagguucuccu

SEQ ID NO: 2083029 - RNA, 19 nt, Artificial Sequence
  Description of Artificial Sequence: Synthetic oligonucleotide
ggaacauugcaucuuugca

SEQ ID NO: 2083030 - RNA, 19 nt, Artificial Sequence
  Description of Artificial Sequence: Synthetic oligonucleotide
uccagcgccaccacgccac

SEQ ID NO: 2083031 - RNA, 19 nt, Artificial Sequence
  Description of Artificial Sequence: Synthetic oligonucleotide
ugccucucaugcauugggc

SEQ ID NO: 2083032 - RNA, 19 nt, Artificial Sequence
  Description of Artificial Sequence: Synthetic oligonucleotide
ucgugucugucgaaaggca

SEQ ID NO: 2083033 - RNA, 19 nt, Artificial Sequence
  Description of Artificial Sequence: Synthetic oligonucleotide
guacucauaggcccgaucu

SEQ ID NO: 2083034 - RNA, 19 nt, Artificial Sequence
  Description of Artificial Sequence: Synthetic oligonucleotide
ucugaagcauuuggggugu

SEQ ID NO: 2083035 - RNA, 19 nt, Artificial Sequence
  Description of Artificial Sequence: Synthetic oligonucleotide
ugucgaaaggcaacucaua

SEQ ID NO: 2083036 - RNA, 19 nt, Artificial Sequence
  Description of Artificial Sequence: Synthetic oligonucleotide
aaguuugauuacacacuug

SEQ ID NO: 2083037 - RNA, 19 nt, Artificial Sequence
  Description of Artificial Sequence: Synthetic oligonucleotide
uggaaucacagggacgacu

SEQ ID NO: 2083038 - RNA, 19 nt, Artificial Sequence
  Description of Artificial Sequence: Synthetic oligonucleotide
ucagaaggguaaacccacu

SEQ ID NO: 2083039 - RNA, 19 nt, Artificial Sequence
  Description of Artificial Sequence: Synthetic oligonucleotide
caugaaagaucaaguuuga

SEQ ID NO: 2083040 - RNA, 19 nt, Artificial Sequence
  Description of Artificial Sequence: Synthetic oligonucleotide
acacuugaaaagcacccuu

SEQ ID NO: 2083041 - RNA, 19 nt, Artificial Sequence
  Description of Artificial Sequence: Synthetic oligonucleotide
cuuugccuccaaaucggac

SEQ ID NO: 2083042 - RNA, 19 nt, Artificial Sequence
  Description of Artificial Sequence: Synthetic oligonucleotide
ucacugguuggaucagaug

SEQ ID NO: 2083043 - RNA, 19 nt, Artificial Sequence
  Description of Artificial Sequence: Synthetic oligonucleotide
gaaucacagggacgacucc

SEQ ID NO: 2083044 - RNA, 19 nt, Artificial Sequence
  Description of Artificial Sequence: Synthetic oligonucleotide
ugggguguuugcugcagca

SEQ ID NO: 2083045 - RNA, 19 nt, Artificial Sequence
  Description of Artificial Sequence: Synthetic oligonucleotide
caauggaaaaugugacuca

SEQ ID NO: 2083046 - RNA, 19 nt, Artificial Sequence
  Description of Artificial Sequence: Synthetic oligonucleotide
augagugcauuuaguuugg

SEQ ID NO: 2083047 - RNA, 19 nt, Artificial Sequence
  Description of Artificial Sequence: Synthetic oligonucleotide
acccuugguaacauuauga

SEQ ID NO: 2083048 - RNA, 19 nt, Artificial Sequence
  Description of Artificial Sequence: Synthetic oligonucleotide
auagcuggaaucacaggga

SEQ ID NO: 2083049 - RNA, 19 nt, Artificial Sequence
  Description of Artificial Sequence: Synthetic oligonucleotide
uccaagcuugcucauuauu

SEQ ID NO: 2083050 - RNA, 19 nt, Artificial Sequence
  Description of Artificial Sequence: Synthetic oligonucleotide
gaaucuaaggcaggacgca

SEQ ID NO: 2083051 - RNA, 19 nt, Artificial Sequence
  Description of Artificial Sequence: Synthetic oligonucleotide
ugaugaucugaagcauuug

SEQ ID NO: 2083052 - RNA, 19 nt, Artificial Sequence
  Description of Artificial Sequence: Synthetic oligonucleotide
ggcaacucauaccccaucc

SEQ ID NO: 2083053 - RNA, 19 nt, Artificial Sequence
  Description of Artificial Sequence: Synthetic oligonucleotide
ucucaugcauugggcaucc

SEQ ID NO: 2083054 - RNA, 19 nt, Artificial Sequence
  Description of Artificial Sequence: Synthetic oligonucleotide
uucugacuaauaucaucau

SEQ ID NO: 2083055 - RNA, 19 nt, Artificial Sequence
  Description of Artificial Sequence: Synthetic oligonucleotide
ugguuggaucagaugcuac

SEQ ID NO: 2083056 - RNA, 19 nt, Artificial Sequence
  Description of Artificial Sequence: Synthetic oligonucleotide
cauucugucccauacugcu

SEQ ID NO: 2083057 - RNA, 19 nt, Artificial Sequence
  Description of Artificial Sequence: Synthetic oligonucleotide
gaaaggcaacucauacccc

SEQ ID NO: 2083058 - RNA, 19 nt, Artificial Sequence
  Description of Artificial Sequence: Synthetic oligonucleotide
gcauuccacguacucauag

SEQ ID NO: 2083059 - RNA, 19 nt, Artificial Sequence
  Description of Artificial Sequence: Synthetic oligonucleotide
gugcauuuaguuuggggaa

SEQ ID NO: 2083060 - RNA, 19 nt, Artificial Sequence
  Description of Artificial Sequence: Synthetic oligonucleotide
aggcaacucauaccccauc

SEQ ID NO: 2083061 - RNA, 19 nt, Artificial Sequence
  Description of Artificial Sequence: Synthetic oligonucleotide
ugcauuuaguuuggggaaa

SEQ ID NO: 2083062 - RNA, 19 nt, Artificial Sequence
  Description of Artificial Sequence: Synthetic oligonucleotide
uaauggaacauugcaucuu

SEQ ID NO: 2083063 - RNA, 19 nt, Artificial Sequence
  Description of Artificial Sequence: Synthetic oligonucleotide
ugguaacauuaugagugca

SEQ ID NO: 2083064 - RNA, 19 nt, Artificial Sequence
  Description of Artificial Sequence: Synthetic oligonucleotide
cccuugguaacauuaugag

SEQ ID NO: 2083065 - RNA, 19 nt, Artificial Sequence
  Description of Artificial Sequence: Synthetic oligonucleotide
agcauuugggguguuugcu

SEQ ID NO: 2083066 - RNA, 19 nt, Artificial Sequence
  Description of Artificial Sequence: Synthetic oligonucleotide
gacgacucccaaucuaaaa

SEQ ID NO: 2083067 - RNA, 19 nt, Artificial Sequence
  Description of Artificial Sequence: Synthetic oligonucleotide
uccuuuguugcagcaccag

SEQ ID NO: 2083068 - RNA, 19 nt, Artificial Sequence
  Description of Artificial Sequence: Synthetic oligonucleotide
ugagugcauuuaguuuggg

SEQ ID NO: 2083069 - RNA, 19 nt, Artificial Sequence
  Description of Artificial Sequence: Synthetic oligonucleotide
uaacagggcauuccacgua

SEQ ID NO: 2083070 - RNA, 19 nt, Artificial Sequence
  Description of Artificial Sequence: Synthetic oligonucleotide
cauccugaaggccgugaag

SEQ ID NO: 2083071 - RNA, 19 nt, Artificial Sequence
  Description of Artificial Sequence: Synthetic oligonucleotide
cacucacgagcaugaagag

SEQ ID NO: 2083072 - RNA, 19 nt, Artificial Sequence
  Description of Artificial Sequence: Synthetic oligonucleotide
aaagcacccuugguaacau

SEQ ID NO: 2083073 - RNA, 19 nt, Artificial Sequence
  Description of Artificial Sequence: Synthetic oligonucleotide
uuuucuggcuuugccucca

SEQ ID NO: 2083074 - RNA, 19 nt, Artificial Sequence
  Description of Artificial Sequence: Synthetic oligonucleotide
cuuggaauagaugacuccu

SEQ ID NO: 2083075 - RNA, 19 nt, Artificial Sequence
  Description of Artificial Sequence: Synthetic oligonucleotide
uccugaaggccgugaaggu

SEQ ID NO: 2083076 - RNA, 19 nt, Artificial Sequence
  Description of Artificial Sequence: Synthetic oligonucleotide
acauugcaucuuugcauga

SEQ ID NO: 2083077 - RNA, 19 nt, Artificial Sequence
  Description of Artificial Sequence: Synthetic oligonucleotide
gcuggaaucacagggacga

SEQ ID NO: 2083078 - RNA, 19 nt, Artificial Sequence
  Description of Artificial Sequence: Synthetic oligonucleotide
ggcuuugccuccaaaucgg

SEQ ID NO: 2083079 - RNA, 19 nt, Artificial Sequence
  Description of Artificial Sequence: Synthetic oligonucleotide
cauggcauuccagaacauc

SEQ ID NO: 2083080 - RNA, 19 nt, Artificial Sequence
  Description of Artificial Sequence: Synthetic oligonucleotide
cugauuaggugguggcauc

SEQ ID NO: 2083081 - RNA, 19 nt, Artificial Sequence
  Description of Artificial Sequence: Synthetic oligonucleotide
acgaauucuugcccuuggu

SEQ ID NO: 2083082 - RNA, 19 nt, Artificial Sequence
  Description of Artificial Sequence: Synthetic oligonucleotide
gccgccaucauaguaauca

SEQ ID NO: 2083083 - RNA, 19 nt, Artificial Sequence
  Description of Artificial Sequence: Synthetic oligonucleotide
cucgccgccaucauaguaa

SEQ ID NO: 2083084 - RNA, 19 nt, Artificial Sequence
  Description of Artificial Sequence: Synthetic oligonucleotide
cagucgugucugucgaaag

SEQ ID NO: 2083085 - RNA, 19 nt, Artificial Sequence
  Description of Artificial Sequence: Synthetic oligonucleotide
ggacagucuuucuuuugcc

SEQ ID NO: 2083086 - RNA, 19 nt, Artificial Sequence
  Description of Artificial Sequence: Synthetic oligonucleotide
cacccuugguaacauuaug

SEQ ID NO: 2083087 - RNA, 19 nt, Artificial Sequence
  Description of Artificial Sequence: Synthetic oligonucleotide
caagcuugcucauuauucu

SEQ ID NO: 2083088 - RNA, 19 nt, Artificial Sequence
  Description of Artificial Sequence: Synthetic oligonucleotide
cauaguaaucaaucacaua

SEQ ID NO: 2083089 - RNA, 19 nt, Artificial Sequence
  Description of Artificial Sequence: Synthetic oligonucleotide
gcuuugcucucacugguug

SEQ ID NO: 2083090 - RNA, 19 nt, Artificial Sequence
  Description of Artificial Sequence: Synthetic oligonucleotide
ugcucucacugguuggauc

SEQ ID NO: 2083091 - RNA, 19 nt, Artificial Sequence
  Description of Artificial Sequence: Synthetic oligonucleotide
guuugcugcagcagcagga

SEQ ID NO: 2083092 - RNA, 19 nt, Artificial Sequence
  Description of Artificial Sequence: Synthetic oligonucleotide
cauuaugagugcauuuagu

SEQ ID NO: 2083093 - RNA, 19 nt, Artificial Sequence
  Description of Artificial Sequence: Synthetic oligonucleotide
agcuggaaucacagggacg

SEQ ID NO: 2083094 - RNA, 19 nt, Artificial Sequence
  Description of Artificial Sequence: Synthetic oligonucleotide
uacucauaggcccgaucuu

SEQ ID NO: 2083095 - RNA, 19 nt, Artificial Sequence
  Description of Artificial Sequence: Synthetic oligonucleotide
aggacacucacgagcauga

SEQ ID NO: 2083096 - RNA, 19 nt, Artificial Sequence
  Description of Artificial Sequence: Synthetic oligonucleotide
ccucucuugagguagacaa

SEQ ID NO: 2083097 - RNA, 19 nt, Artificial Sequence
  Description of Artificial Sequence: Synthetic oligonucleotide
gcaggaguagaugcggagg

SEQ ID NO: 2083098 - RNA, 19 nt, Artificial Sequence
  Description of Artificial Sequence: Synthetic oligonucleotide
caaaaucucccuccaagcu

SEQ ID NO: 2083099 - RNA, 19 nt, Artificial Sequence
  Description of Artificial Sequence: Synthetic oligonucleotide
guaacagggcauuccacgu

SEQ ID NO: 2083100 - RNA, 19 nt, Artificial Sequence
  Description of Artificial Sequence: Synthetic oligonucleotide
guagaugcggaggaaccca

SEQ ID NO: 2083101 - RNA, 19 nt, Artificial Sequence
  Description of Artificial Sequence: Synthetic oligonucleotide
cuuccacccuuuccguagc

SEQ ID NO: 2083102 - RNA, 19 nt, Artificial Sequence
  Description of Artificial Sequence: Synthetic oligonucleotide
ggaauagaugacuccucuc

SEQ ID NO: 2083103 - RNA, 19 nt, Artificial Sequence
  Description of Artificial Sequence: Synthetic oligonucleotide
ugccacaacgguugaugau

SEQ ID NO: 2083104 - RNA, 19 nt, Artificial Sequence
  Description of Artificial Sequence: Synthetic oligonucleotide
cauuuucaacugcaaugga

SEQ ID NO: 2083105 - RNA, 19 nt, Artificial Sequence
  Description of Artificial Sequence: Synthetic oligonucleotide
cucucaugcauugggcauc

SEQ ID NO: 2083106 - RNA, 19 nt, Artificial Sequence
  Description of Artificial Sequence: Synthetic oligonucleotide
ggggauggagucugauuag

SEQ ID NO: 2083107 - RNA, 19 nt, Artificial Sequence
  Description of Artificial Sequence: Synthetic oligonucleotide
ucuuugcaugaaagaucaa

SEQ ID NO: 2083108 - RNA, 19 nt, Artificial Sequence
  Description of Artificial Sequence: Synthetic oligonucleotide
ccacaacgguugaugaucc

SEQ ID NO: 2083109 - RNA, 19 nt, Artificial Sequence
  Description of Artificial Sequence: Synthetic oligonucleotide
uccucucuugagguagaca

SEQ ID NO: 2083110 - RNA, 19 nt, Artificial Sequence
  Description of Artificial Sequence: Synthetic oligonucleotide
ucucacugguuggaucaga

SEQ ID NO: 2083111 - RNA, 19 nt, Artificial Sequence
  Description of Artificial Sequence: Synthetic oligonucleotide
ggaguagaugcggaggaac

SEQ ID NO: 2083112 - RNA, 19 nt, Artificial Sequence
  Description of Artificial Sequence: Synthetic oligonucleotide
gacuaauaucaucauccuu

SEQ ID NO: 2083113 - RNA, 19 nt, Artificial Sequence
  Description of Artificial Sequence: Synthetic oligonucleotide
gcucauuauucugauugug

SEQ ID NO: 2083114 - RNA, 19 nt, Artificial Sequence
  Description of Artificial Sequence: Synthetic oligonucleotide
cauuauucugauugugaau

SEQ ID NO: 2083115 - RNA, 19 nt, Artificial Sequence
  Description of Artificial Sequence: Synthetic oligonucleotide
uuacgaaguccagcgccac

SEQ ID NO: 2083116 - RNA, 19 nt, Artificial Sequence
  Description of Artificial Sequence: Synthetic oligonucleotide
aaggcaacucauaccccau

SEQ ID NO: 2083117 - RNA, 19 nt, Artificial Sequence
  Description of Artificial Sequence: Synthetic oligonucleotide
acgccaccuucauucuguc

SEQ ID NO: 2083118 - RNA, 19 nt, Artificial Sequence
  Description of Artificial Sequence: Synthetic oligonucleotide
ugcuuugcucucacugguu

SEQ ID NO: 2083119 - RNA, 19 nt, Artificial Sequence
  Description of Artificial Sequence: Synthetic oligonucleotide
cagggcauuccacguacuc

SEQ ID NO: 2083120 - RNA, 19 nt, Artificial Sequence
  Description of Artificial Sequence: Synthetic oligonucleotide
gagcuucccacuucaaaau

SEQ ID NO: 2083121 - RNA, 19 nt, Artificial Sequence
  Description of Artificial Sequence: Synthetic oligonucleotide
aggaacccauagcuggaau

SEQ ID NO: 2083122 - RNA, 19 nt, Artificial Sequence
  Description of Artificial Sequence: Synthetic oligonucleotide
uuccacccuuuccguagca

SEQ ID NO: 2083123 - RNA, 19 nt, Artificial Sequence
  Description of Artificial Sequence: Synthetic oligonucleotide
gccacaacgguugaugauc

SEQ ID NO: 2083124 - RNA, 19 nt, Artificial Sequence
  Description of Artificial Sequence: Synthetic oligonucleotide
auggaacauugcaucuuug

SEQ ID NO: 2083125 - RNA, 19 nt, Artificial Sequence
  Description of Artificial Sequence: Synthetic oligonucleotide
aucacagggacgacuccca

SEQ ID NO: 2083126 - RNA, 19 nt, Artificial Sequence
  Description of Artificial Sequence: Synthetic oligonucleotide
ccacguacucauaggcccg

SEQ ID NO: 2083127 - RNA, 19 nt, Artificial Sequence
  Description of Artificial Sequence: Synthetic oligonucleotide
gcuacugcagucacuggac

SEQ ID NO: 2083128 - RNA, 19 nt, Artificial Sequence
  Description of Artificial Sequence: Synthetic oligonucleotide
ugaccucgccgccaucaua

SEQ ID NO: 2083129 - RNA, 19 nt, Artificial Sequence
  Description of Artificial Sequence: Synthetic oligonucleotide
uucuugcccuuggugaaua

SEQ ID NO: 2083130 - RNA, 19 nt, Artificial Sequence
  Description of Artificial Sequence: Synthetic oligonucleotide
ucgccgccaucauaguaau

SEQ ID NO: 2083131 - RNA, 19 nt, Artificial Sequence
  Description of Artificial Sequence: Synthetic oligonucleotide
gucugauuaggugguggca

SEQ ID NO: 2083132 - RNA, 19 nt, Artificial Sequence
  Description of Artificial Sequence: Synthetic oligonucleotide
caacgguugaugauccagu

SEQ ID NO: 2083133 - RNA, 19 nt, Artificial Sequence
  Description of Artificial Sequence: Synthetic oligonucleotide
ugaagcauuugggguguuu

SEQ ID NO: 2083134 - RNA, 19 nt, Artificial Sequence
  Description of Artificial Sequence: Synthetic oligonucleotide
cacgagcaugaagagcuuc

SEQ ID NO: 2083135 - RNA, 19 nt, Artificial Sequence
  Description of Artificial Sequence: Synthetic oligonucleotide
cugucgaaaggcaacucau

SEQ ID NO: 2083136 - RNA, 19 nt, Artificial Sequence
  Description of Artificial Sequence: Synthetic oligonucleotide
ggugaauauuuucuggcuu

SEQ ID NO: 2083137 - RNA, 19 nt, Artificial Sequence
  Description of Artificial Sequence: Synthetic oligonucleotide
cucucuugagguagacaaa

SEQ ID NO: 2083138 - RNA, 19 nt, Artificial Sequence
  Description of Artificial Sequence: Synthetic oligonucleotide
augauccagucgugucugu

SEQ ID NO: 2083139 - RNA, 19 nt, Artificial Sequence
  Description of Artificial Sequence: Synthetic oligonucleotide
gacaaagcaaauggcugau

SEQ ID NO: 2083140 - RNA, 19 nt, Artificial Sequence
  Description of Artificial Sequence: Synthetic oligonucleotide
gcaucagauuugaaggauc

SEQ ID NO: 2083141 - RNA, 19 nt, Artificial Sequence
  Description of Artificial Sequence: Synthetic oligonucleotide
gccucucaugcauugggca

SEQ ID NO: 2083142 - RNA, 19 nt, Artificial Sequence
  Description of Artificial Sequence: Synthetic oligonucleotide
gcaacucauaccccaucca

SEQ ID NO: 2083143 - RNA, 19 nt, Artificial Sequence
  Description of Artificial Sequence: Synthetic oligonucleotide
gugguggcaucagauuuga

SEQ ID NO: 2083144 - RNA, 19 nt, Artificial Sequence
  Description of Artificial Sequence: Synthetic oligonucleotide
ccaguaacagggcauucca

SEQ ID NO: 2083145 - RNA, 19 nt, Artificial Sequence
  Description of Artificial Sequence: Synthetic oligonucleotide
gugcuuugcucucacuggu

SEQ ID NO: 2083146 - RNA, 19 nt, Artificial Sequence
  Description of Artificial Sequence: Synthetic oligonucleotide
cuuguugaccucgccgcca

SEQ ID NO: 2083147 - RNA, 19 nt, Artificial Sequence
  Description of Artificial Sequence: Synthetic oligonucleotide
agcgccaccacgccaccuu

SEQ ID NO: 2083148 - RNA, 19 nt, Artificial Sequence
  Description of Artificial Sequence: Synthetic oligonucleotide
cucucacugguuggaucag

SEQ ID NO: 2083149 - RNA, 19 nt, Artificial Sequence
  Description of Artificial Sequence: Synthetic oligonucleotide
cauugcaucuuugcaugaa

SEQ ID NO: 2083150 - RNA, 19 nt, Artificial Sequence
  Description of Artificial Sequence: Synthetic oligonucleotide
auccuuuguugcagcacca

SEQ ID NO: 2083151 - RNA, 19 nt, Artificial Sequence
  Description of Artificial Sequence: Synthetic oligonucleotide
cacgccaccuucauucugu

SEQ ID NO: 2083152 - RNA, 19 nt, Artificial Sequence
  Description of Artificial Sequence: Synthetic oligonucleotide
gcccuuggugaauauuuuc

SEQ ID NO: 2083153 - RNA, 19 nt, Artificial Sequence
  Description of Artificial Sequence: Synthetic oligonucleotide
cagagucugcucuuggaau

SEQ ID NO: 2083154 - RNA, 19 nt, Artificial Sequence
  Description of Artificial Sequence: Synthetic oligonucleotide
ccuccaaaucggaccaaug

SEQ ID NO: 2083155 - RNA, 19 nt, Artificial Sequence
  Description of Artificial Sequence: Synthetic oligonucleotide
cuuuccguagcauggcauu

SEQ ID NO: 2083156 - RNA, 19 nt, Artificial Sequence
  Description of Artificial Sequence: Synthetic oligonucleotide
uugaaggaucaagguucuc

SEQ ID NO: 2083157 - RNA, 19 nt, Artificial Sequence
  Description of Artificial Sequence: Synthetic oligonucleotide
aggaguagaugcggaggaa

SEQ ID NO: 2083158 - RNA, 19 nt, Artificial Sequence
  Description of Artificial Sequence: Synthetic oligonucleotide
cucacugguuggaucagau

SEQ ID NO: 2083159 - RNA, 19 nt, Artificial Sequence
  Description of Artificial Sequence: Synthetic oligonucleotide
ccuuguugaccucgccgcc

SEQ ID NO: 2083160 - RNA, 19 nt, Artificial Sequence
  Description of Artificial Sequence: Synthetic oligonucleotide
gguaacauuaugagugcau

SEQ ID NO: 2083161 - RNA, 19 nt, Artificial Sequence
  Description of Artificial Sequence: Synthetic oligonucleotide
ugguggcaucagauuugaa

SEQ ID NO: 2083162 - RNA, 19 nt, Artificial Sequence
  Description of Artificial Sequence: Synthetic oligonucleotide
aggcccgaucuuggugggc

SEQ ID NO: 2083163 - RNA, 19 nt, Artificial Sequence
  Description of Artificial Sequence: Synthetic oligonucleotide
ccugaaggccgugaaggug

SEQ ID NO: 2083164 - RNA, 19 nt, Artificial Sequence
  Description of Artificial Sequence: Synthetic oligonucleotide
gucugucgaaaggcaacuc

SEQ ID NO: 2083165 - RNA, 19 nt, Artificial Sequence
  Description of Artificial Sequence: Synthetic oligonucleotide
ggaccaaugaugggccaca

SEQ ID NO: 2083166 - RNA, 19 nt, Artificial Sequence
  Description of Artificial Sequence: Synthetic oligonucleotide
cuccucucuugagguagac

SEQ ID NO: 2083167 - RNA, 19 nt, Artificial Sequence
  Description of Artificial Sequence: Synthetic oligonucleotide
ccgugaagguggcugauga

SEQ ID NO: 2083168 - RNA, 19 nt, Artificial Sequence
  Description of Artificial Sequence: Synthetic oligonucleotide
ccuugguaacauuaugagu

SEQ ID NO: 2083169 - RNA, 19 nt, Artificial Sequence
  Description of Artificial Sequence: Synthetic oligonucleotide
gugaacugguaguccuugu

SEQ ID NO: 2083170 - RNA, 19 nt, Artificial Sequence
  Description of Artificial Sequence: Synthetic oligonucleotide
cucauaccccauccaggaa

SEQ ID NO: 2083171 - RNA, 19 nt, Artificial Sequence
  Description of Artificial Sequence: Synthetic oligonucleotide
cugguuggaucagaugcua

SEQ ID NO: 2083172 - RNA, 19 nt, Artificial Sequence
  Description of Artificial Sequence: Synthetic oligonucleotide
caccaguaacagggcauuc

SEQ ID NO: 2083173 - RNA, 19 nt, Artificial Sequence
  Description of Artificial Sequence: Synthetic oligonucleotide
acuccucucuugagguaga

SEQ ID NO: 2083174 - RNA, 19 nt, Artificial Sequence
  Description of Artificial Sequence: Synthetic oligonucleotide
ucccuccaagcuugcucau

SEQ ID NO: 2083175 - RNA, 19 nt, Artificial Sequence
  Description of Artificial Sequence: Synthetic oligonucleotide
accucgccgccaucauagu

SEQ ID NO: 2083176 - RNA, 19 nt, Artificial Sequence
  Description of Artificial Sequence: Synthetic oligonucleotide
ggagucugauuagguggug

SEQ ID NO: 2083177 - RNA, 19 nt, Artificial Sequence
  Description of Artificial Sequence: Synthetic oligonucleotide
gcauccugaaggccgugaa

SEQ ID NO: 2083178 - RNA, 19 nt, Artificial Sequence
  Description of Artificial Sequence: Synthetic oligonucleotide
cagaaggguaaacccacuu

SEQ ID NO: 2083179 - RNA, 19 nt, Artificial Sequence
  Description of Artificial Sequence: Synthetic oligonucleotide
guccagcgccaccacgcca

SEQ ID NO: 2083180 - RNA, 19 nt, Artificial Sequence
  Description of Artificial Sequence: Synthetic oligonucleotide
auaccccauccaggaacga

SEQ ID NO: 2083181 - RNA, 19 nt, Artificial Sequence
  Description of Artificial Sequence: Synthetic oligonucleotide
ccauccaggaacgaauucu

SEQ ID NO: 2083182 - RNA, 19 nt, Artificial Sequence
  Description of Artificial Sequence: Synthetic oligonucleotide
cuugcucauuauucugauu

SEQ ID NO: 2083183 - RNA, 19 nt, Artificial Sequence
  Description of Artificial Sequence: Synthetic oligonucleotide
ggcccgaucuuggugggca

SEQ ID NO: 2083184 - RNA, 19 nt, Artificial Sequence
  Description of Artificial Sequence: Synthetic oligonucleotide
ggauggagucugauuaggu

SEQ ID NO: 2083185 - RNA, 19 nt, Artificial Sequence
  Description of Artificial Sequence: Synthetic oligonucleotide
gcugaucuggggauggagu

SEQ ID NO: 2083186 - RNA, 19 nt, Artificial Sequence
  Description of Artificial Sequence: Synthetic oligonucleotide
ggcaucagauuugaaggau

SEQ ID NO: 2083187 - RNA, 19 nt, Artificial Sequence
  Description of Artificial Sequence: Synthetic oligonucleotide
cuuuugccucucaugcauu

SEQ ID NO: 2083188 - RNA, 19 nt, Artificial Sequence
  Description of Artificial Sequence: Synthetic oligonucleotide
cugucccauacugcugaga

SEQ ID NO: 2083189 - RNA, 19 nt, Artificial Sequence
  Description of Artificial Sequence: Synthetic oligonucleotide
ugccuccaaaucggaccaa

SEQ ID NO: 2083190 - RNA, 19 nt, Artificial Sequence
  Description of Artificial Sequence: Synthetic oligonucleotide
ggaacgaauucuugcccuu

SEQ ID NO: 2083191 - RNA, 19 nt, Artificial Sequence
  Description of Artificial Sequence: Synthetic oligonucleotide
agaugcggaggaacccaua

SEQ ID NO: 2083192 - RNA, 19 nt, Artificial Sequence
  Description of Artificial Sequence: Synthetic oligonucleotide
gcccgaucuuggugggcag

SEQ ID NO: 2083193 - RNA, 19 nt, Artificial Sequence
  Description of Artificial Sequence: Synthetic oligonucleotide
cacagggacgacucccaau

SEQ ID NO: 2083194 - RNA, 19 nt, Artificial Sequence
  Description of Artificial Sequence: Synthetic oligonucleotide
cccgaucuuggugggcagg

SEQ ID NO: 2083195 - RNA, 19 nt, Artificial Sequence
  Description of Artificial Sequence: Synthetic oligonucleotide
ggcauccugaaggccguga

SEQ ID NO: 2083196 - RNA, 19 nt, Artificial Sequence
  Description of Artificial Sequence: Synthetic oligonucleotide
cgugucugucgaaaggcaa

SEQ ID NO: 2083197 - RNA, 19 nt, Artificial Sequence
  Description of Artificial Sequence: Synthetic oligonucleotide
gccgugaagguggcugaug

SEQ ID NO: 2083198 - RNA, 19 nt, Artificial Sequence
  Description of Artificial Sequence: Synthetic oligonucleotide
gcuuugccuccaaaucgga

SEQ ID NO: 2083199 - RNA, 19 nt, Artificial Sequence
  Description of Artificial Sequence: Synthetic oligonucleotide
acguacucauaggcccgau

SEQ ID NO: 2083200 - RNA, 19 nt, Artificial Sequence
  Description of Artificial Sequence: Synthetic oligonucleotide
ggacgacucccaaucuaaa

SEQ ID NO: 2083201 - RNA, 19 nt, Artificial Sequence
  Description of Artificial Sequence: Synthetic oligonucleotide
gcugaugaucugaagcauu

SEQ ID NO: 2083202 - RNA, 19 nt, Artificial Sequence
  Description of Artificial Sequence: Synthetic oligonucleotide
cuugcccuuggugaauauu

SEQ ID NO: 2083203 - RNA, 19 nt, Artificial Sequence
  Description of Artificial Sequence: Synthetic oligonucleotide
cagggacgacucccaaucu

SEQ ID NO: 2083204 - RNA, 19 nt, Artificial Sequence
  Description of Artificial Sequence: Synthetic oligonucleotide
ggcugaugaucugaagcau

SEQ ID NO: 2083205 - RNA, 19 nt, Artificial Sequence
  Description of Artificial Sequence: Synthetic oligonucleotide
cccuuuccguagcauggca

SEQ ID NO: 2083206 - RNA, 19 nt, Artificial Sequence
  Description of Artificial Sequence: Synthetic oligonucleotide
ccucucaugcauugggcau

SEQ ID NO: 2083207 - RNA, 19 nt, Artificial Sequence
  Description of Artificial Sequence: Synthetic oligonucleotide
ccgccaucauaguaaucaa

SEQ ID NO: 2083208 - RNA, 19 nt, Artificial Sequence
  Description of Artificial Sequence: Synthetic oligonucleotide
cagucacuggacagucuuu

SEQ ID NO: 2083209 - RNA, 19 nt, Artificial Sequence
  Description of Artificial Sequence: Synthetic oligonucleotide
cggaccaaugaugggccac

SEQ ID NO: 2083210 - RNA, 19 nt, Artificial Sequence
  Description of Artificial Sequence: Synthetic oligonucleotide
ccuuuccguagcauggcau

SEQ ID NO: 2083211 - RNA, 19 nt, Artificial Sequence
  Description of Artificial Sequence: Synthetic oligonucleotide
caggugcagagugugcuuu

SEQ ID NO: 2083212 - RNA, 19 nt, Artificial Sequence
  Description of Artificial Sequence: Synthetic oligonucleotide
gaugggccacaaggacacu

SEQ ID NO: 2083213 - RNA, 19 nt, Artificial Sequence
  Description of Artificial Sequence: Synthetic oligonucleotide
gcgccaccacgccaccuuc

SEQ ID NO: 2083214 - RNA, 19 nt, Artificial Sequence
  Description of Artificial Sequence: Synthetic oligonucleotide
ccagcgccaccacgccacc

SEQ ID NO: 2083215 - RNA, 19 nt, Artificial Sequence
  Description of Artificial Sequence: Synthetic oligonucleotide
gcaccaguaacagggcauu

SEQ ID NO: 2083216 - RNA, 19 nt, Artificial Sequence
  Description of Artificial Sequence: Synthetic oligonucleotide
gacgcacauccaggauggu

SEQ ID NO: 2083217 - RNA, 19 nt, Artificial Sequence
  Description of Artificial Sequence: Synthetic oligonucleotide
ccucgccgccaucauagua

SEQ ID NO: 2083218 - RNA, 19 nt, Artificial Sequence
  Description of Artificial Sequence: Synthetic oligonucleotide
gggcauccugaaggccgug

SEQ ID NO: 2083219 - RNA, 19 nt, Artificial Sequence
  Description of Artificial Sequence: Synthetic oligonucleotide
gccuccaaaucggaccaau

SEQ ID NO: 2083220 - RNA, 19 nt, Artificial Sequence
  Description of Artificial Sequence: Synthetic oligonucleotide
cgccaucauaguaaucaau

SEQ ID NO: 2083221 - RNA, 19 nt, Artificial Sequence
  Description of Artificial Sequence: Synthetic oligonucleotide
caccuucauucugucccau

SEQ ID NO: 2083222 - RNA, 19 nt, Artificial Sequence
  Description of Artificial Sequence: Synthetic oligonucleotide
cgccgccaucauaguaauc

SEQ ID NO: 2083223 - RNA, 19 nt, Artificial Sequence
  Description of Artificial Sequence: Synthetic oligonucleotide
cucaugcauugggcauccu

SEQ ID NO: 2083224 - RNA, 19 nt, Artificial Sequence
  Description of Artificial Sequence: Synthetic oligonucleotide
cugaagcauuugggguguu

SEQ ID NO: 2083225 - RNA, 19 nt, Artificial Sequence
  Description of Artificial Sequence: Synthetic oligonucleotide
cagcgccaccacgccaccu

SEQ ID NO: 2083226 - RNA, 19 nt, Artificial Sequence
  Description of Artificial Sequence: Synthetic oligonucleotide
cccuccaagcuugcucauu

SEQ ID NO: 2083227 - RNA, 19 nt, Artificial Sequence
  Description of Artificial Sequence: Synthetic oligonucleotide
uuauuaugaaguuagguca

SEQ ID NO: 2083228 - RNA, 19 nt, Artificial Sequence
  Description of Artificial Sequence: Synthetic oligonucleotide
uuuauuaugaaguuagguc

SEQ ID NO: 2083229 - RNA, 19 nt, Artificial Sequence
  Description of Artificial Sequence: Synthetic oligonucleotide
ugaacuaacuggcagagug

SEQ ID NO: 2083230 - RNA, 19 nt, Artificial Sequence
  Description of Artificial Sequence: Synthetic oligonucleotide
aauucggauugcuaauugc

SEQ ID NO: 2083231 - RNA, 19 nt, Artificial Sequence
  Description of Artificial Sequence: Synthetic oligonucleotide
aaugagacgacuuuguaua

SEQ ID NO: 2083232 - RNA, 19 nt, Artificial Sequence
  Description of Artificial Sequence: Synthetic oligonucleotide
uggaguuaaauucuggagc

SEQ ID NO: 2083233 - RNA, 19 nt, Artificial Sequence
  Description of Artificial Sequence: Synthetic oligonucleotide
uaaacuuuugugcaaccag

SEQ ID NO: 2083234 - RNA, 19 nt, Artificial Sequence
  Description of Artificial Sequence: Synthetic oligonucleotide
ugagcuuuuaaaugagacg

SEQ ID NO: 2083235 - RNA, 19 nt, Artificial Sequence
  Description of Artificial Sequence: Synthetic oligonucleotide
aacuaacuggcagaguggc

SEQ ID NO: 2083236 - RNA, 19 nt, Artificial Sequence
  Description of Artificial Sequence: Synthetic oligonucleotide
guaguggcgagucagcucg

SEQ ID NO: 2083237 - RNA, 19 nt, Artificial Sequence
  Description of Artificial Sequence: Synthetic oligonucleotide
aaaugagacgacuuuguau

SEQ ID NO: 2083238 - RNA, 19 nt, Artificial Sequence
  Description of Artificial Sequence: Synthetic oligonucleotide
uuuaaaugagacgacuuug

SEQ ID NO: 2083239 - RNA, 19 nt, Artificial Sequence
  Description of Artificial Sequence: Synthetic oligonucleotide
uuagaagcaauuguagcag

SEQ ID NO: 2083240 - RNA, 19 nt, Artificial Sequence
  Description of Artificial Sequence: Synthetic oligonucleotide
auuguagcagcauacgaug

SEQ ID NO: 2083241 - RNA, 19 nt, Artificial Sequence
  Description of Artificial Sequence: Synthetic oligonucleotide
aaacuuuugugcaaccagg

SEQ ID NO: 2083242 - RNA, 19 nt, Artificial Sequence
  Description of Artificial Sequence: Synthetic oligonucleotide
uuaaggcccgccauggccg

SEQ ID NO: 2083243 - RNA, 19 nt, Artificial Sequence
  Description of Artificial Sequence: Synthetic oligonucleotide
aaauucggauugcuaauug

SEQ ID NO: 2083244 - RNA, 19 nt, Artificial Sequence
  Description of Artificial Sequence: Synthetic oligonucleotide
auucggauugcuaauugcc

SEQ ID NO: 2083245 - RNA, 19 nt, Artificial Sequence
  Description of Artificial Sequence: Synthetic oligonucleotide
uuggugaacuaacuggcag

SEQ ID NO: 2083246 - RNA, 19 nt, Artificial Sequence
  Description of Artificial Sequence: Synthetic oligonucleotide
guaucugacagguuggaug

SEQ ID NO: 2083247 - RNA, 19 nt, Artificial Sequence
  Description of Artificial Sequence: Synthetic oligonucleotide
uucuauuguaucugacagg

SEQ ID NO: 2083248 - RNA, 19 nt, Artificial Sequence
  Description of Artificial Sequence: Synthetic oligonucleotide
augaaguuaggucagcggu

SEQ ID NO: 2083249 - RNA, 19 nt, Artificial Sequence
  Description of Artificial Sequence: Synthetic oligonucleotide
uguuuugagaucgucggcc

SEQ ID NO: 2083250 - RNA, 19 nt, Artificial Sequence
  Description of Artificial Sequence: Synthetic oligonucleotide
agcgguuuaaagcucagcu

SEQ ID NO: 2083251 - RNA, 19 nt, Artificial Sequence
  Description of Artificial Sequence: Synthetic oligonucleotide
aacuuuugugcaaccaggg

SEQ ID NO: 2083252 - RNA, 19 nt, Artificial Sequence
  Description of Artificial Sequence: Synthetic oligonucleotide
uuguagcagcauacgaugg

SEQ ID NO: 2083253 - RNA, 19 nt, Artificial Sequence
  Description of Artificial Sequence: Synthetic oligonucleotide
aauuguagcagcauacgau

SEQ ID NO: 2083254 - RNA, 19 nt, Artificial Sequence
  Description of Artificial Sequence: Synthetic oligonucleotide
acuuuguauaaacuuuugu

SEQ ID NO: 2083255 - RNA, 19 nt, Artificial Sequence
  Description of Artificial Sequence: Synthetic oligonucleotide
gagacgacuuuguauaaac

SEQ ID NO: 2083256 - RNA, 19 nt, Artificial Sequence
  Description of Artificial Sequence: Synthetic oligonucleotide
ucggauugcuaauugccag

SEQ ID NO: 2083257 - RNA, 19 nt, Artificial Sequence
  Description of Artificial Sequence: Synthetic oligonucleotide
ugcgcguguuuugagaucg

SEQ ID NO: 2083258 - RNA, 19 nt, Artificial Sequence
  Description of Artificial Sequence: Synthetic oligonucleotide
uugcuaauugccaguuuag

SEQ ID NO: 2083259 - RNA, 19 nt, Artificial Sequence
  Description of Artificial Sequence: Synthetic oligonucleotide
ucugcggaacagcagaggu

SEQ ID NO: 2083260 - RNA, 19 nt, Artificial Sequence
  Description of Artificial Sequence: Synthetic oligonucleotide
cagcauacgauggaggugg

SEQ ID NO: 2083261 - RNA, 19 nt, Artificial Sequence
  Description of Artificial Sequence: Synthetic oligonucleotide
ugucuaucgggacuuccag

SEQ ID NO: 2083262 - RNA, 19 nt, Artificial Sequence
  Description of Artificial Sequence: Synthetic oligonucleotide
uucggauugcuaauugcca

SEQ ID NO: 2083263 - RNA, 19 nt, Artificial Sequence
  Description of Artificial Sequence: Synthetic oligonucleotide
uuaggucagcgguuuaaag

SEQ ID NO: 2083264 - RNA, 19 nt, Artificial Sequence
  Description of Artificial Sequence: Synthetic oligonucleotide
guuuugagaucgucggccg

SEQ ID NO: 2083265 - RNA, 19 nt, Artificial Sequence
  Description of Artificial Sequence: Synthetic oligonucleotide
uguagcagcauacgaugga

SEQ ID NO: 2083266 - RNA, 19 nt, Artificial Sequence
  Description of Artificial Sequence: Synthetic oligonucleotide
guuucauugcagucugcgg

SEQ ID NO: 2083267 - RNA, 19 nt, Artificial Sequence
  Description of Artificial Sequence: Synthetic oligonucleotide
uuuugagaucgucggccgg

SEQ ID NO: 2083268 - RNA, 19 nt, Artificial Sequence
  Description of Artificial Sequence: Synthetic oligonucleotide
gguaaauucggauugcuaa

SEQ ID NO: 2083269 - RNA, 19 nt, Artificial Sequence
  Description of Artificial Sequence: Synthetic oligonucleotide
uuuaaagcucagcucuggu

SEQ ID NO: 2083270 - RNA, 19 nt, Artificial Sequence
  Description of Artificial Sequence: Synthetic oligonucleotide
ugcuguggaagaaacugac

SEQ ID NO: 2083271 - RNA, 19 nt, Artificial Sequence
  Description of Artificial Sequence: Synthetic oligonucleotide
auuguaucugacagguugg

SEQ ID NO: 2083272 - RNA, 19 nt, Artificial Sequence
  Description of Artificial Sequence: Synthetic oligonucleotide
auggucagcacccgcgugg

SEQ ID NO: 2083273 - RNA, 19 nt, Artificial Sequence
  Description of Artificial Sequence: Synthetic oligonucleotide
aucgcaguaguggaugcgc

SEQ ID NO: 2083274 - RNA, 19 nt, Artificial Sequence
  Description of Artificial Sequence: Synthetic oligonucleotide
gaucgcgauucccaccucg

SEQ ID NO: 2083275 - RNA, 19 nt, Artificial Sequence
  Description of Artificial Sequence: Synthetic oligonucleotide
uagcagcauacgauggagg

SEQ ID NO: 2083276 - RNA, 19 nt, Artificial Sequence
  Description of Artificial Sequence: Synthetic oligonucleotide
uggcgagucagcucguccg

SEQ ID NO: 2083277 - RNA, 19 nt, Artificial Sequence
  Description of Artificial Sequence: Synthetic oligonucleotide
uugucuaucgggacuucca

SEQ ID NO: 2083278 - RNA, 19 nt, Artificial Sequence
  Description of Artificial Sequence: Synthetic oligonucleotide
uccagaucgggguuacucc

SEQ ID NO: 2083279 - RNA, 19 nt, Artificial Sequence
  Description of Artificial Sequence: Synthetic oligonucleotide
uggcgcuucaugugcagcg

SEQ ID NO: 2083280 - RNA, 19 nt, Artificial Sequence
  Description of Artificial Sequence: Synthetic oligonucleotide
gagucagcucguccgaccg

SEQ ID NO: 2083281 - RNA, 19 nt, Artificial Sequence
  Description of Artificial Sequence: Synthetic oligonucleotide
ugcggaacagcagaggugu

SEQ ID NO: 2083282 - RNA, 19 nt, Artificial Sequence
  Description of Artificial Sequence: Synthetic oligonucleotide
agcagcauacgauggaggu

SEQ ID NO: 2083283 - RNA, 19 nt, Artificial Sequence
  Description of Artificial Sequence: Synthetic oligonucleotide
uggugaacuaacuggcaga

SEQ ID NO: 2083284 - RNA, 19 nt, Artificial Sequence
  Description of Artificial Sequence: Synthetic oligonucleotide
cacuggaacggcuuggcac

SEQ ID NO: 2083285 - RNA, 19 nt, Artificial Sequence
  Description of Artificial Sequence: Synthetic oligonucleotide
aaucgcaguaguggaugcg

SEQ ID NO: 2083286 - RNA, 19 nt, Artificial Sequence
  Description of Artificial Sequence: Synthetic oligonucleotide
caggugagcuuuuaaauga

SEQ ID NO: 2083287 - RNA, 19 nt, Artificial Sequence
  Description of Artificial Sequence: Synthetic oligonucleotide
ggcagguaaauucggauug

SEQ ID NO: 2083288 - RNA, 19 nt, Artificial Sequence
  Description of Artificial Sequence: Synthetic oligonucleotide
guaaucgcaguaguggaug

SEQ ID NO: 2083289 - RNA, 19 nt, Artificial Sequence
  Description of Artificial Sequence: Synthetic oligonucleotide
uccuguaguggcgagucag

SEQ ID NO: 2083290 - RNA, 19 nt, Artificial Sequence
  Description of Artificial Sequence: Synthetic oligonucleotide
ucggaucgggagaagcugc

SEQ ID NO: 2083291 - RNA, 19 nt, Artificial Sequence
  Description of Artificial Sequence: Synthetic oligonucleotide
cuuuugugcaaccagggua

SEQ ID NO: 2083292 - RNA, 19 nt, Artificial Sequence
  Description of Artificial Sequence: Synthetic oligonucleotide
uaucgggacuuccaggcuc

SEQ ID NO: 2083293 - RNA, 19 nt, Artificial Sequence
  Description of Artificial Sequence: Synthetic oligonucleotide
acgggcguggaucaccggg

SEQ ID NO: 2083294 - RNA, 19 nt, Artificial Sequence
  Description of Artificial Sequence: Synthetic oligonucleotide
gucuaucgggacuuccagg

SEQ ID NO: 2083295 - RNA, 19 nt, Artificial Sequence
  Description of Artificial Sequence: Synthetic oligonucleotide
agaucgggguuacuccuuc

SEQ ID NO: 2083296 - RNA, 19 nt, Artificial Sequence
  Description of Artificial Sequence: Synthetic oligonucleotide
acuuuugugcaaccagggu

SEQ ID NO: 2083297 - RNA, 19 nt, Artificial Sequence
  Description of Artificial Sequence: Synthetic oligonucleotide
guagcagcauacgauggag

SEQ ID NO: 2083298 - RNA, 19 nt, Artificial Sequence
  Description of Artificial Sequence: Synthetic oligonucleotide
agcuuuuaaaugagacgac

SEQ ID NO: 2083299 - RNA, 19 nt, Artificial Sequence
  Description of Artificial Sequence: Synthetic oligonucleotide
ugcuaauugccaguuuaga

SEQ ID NO: 2083300 - RNA, 19 nt, Artificial Sequence
  Description of Artificial Sequence: Synthetic oligonucleotide
uccgaccgagcaaaccucc

SEQ ID NO: 2083301 - RNA, 19 nt, Artificial Sequence
  Description of Artificial Sequence: Synthetic oligonucleotide
gacgacuuuguauaaacuu

SEQ ID NO: 2083302 - RNA, 19 nt, Artificial Sequence
  Description of Artificial Sequence: Synthetic oligonucleotide
uaaauucggauugcuaauu

SEQ ID NO: 2083303 - RNA, 19 nt, Artificial Sequence
  Description of Artificial Sequence: Synthetic oligonucleotide
ucggccacgcgucaccgcc

SEQ ID NO: 2083304 - RNA, 19 nt, Artificial Sequence
  Description of Artificial Sequence: Synthetic oligonucleotide
guguuaaggcccgccaugg

SEQ ID NO: 2083305 - RNA, 19 nt, Artificial Sequence
  Description of Artificial Sequence: Synthetic oligonucleotide
ucagcgguuuaaagcucag

SEQ ID NO: 2083306 - RNA, 19 nt, Artificial Sequence
  Description of Artificial Sequence: Synthetic oligonucleotide
gguggaguuaaauucugga

SEQ ID NO: 2083307 - RNA, 19 nt, Artificial Sequence
  Description of Artificial Sequence: Synthetic oligonucleotide
cuacgggcguggaucaccg

SEQ ID NO: 2083308 - RNA, 19 nt, Artificial Sequence
  Description of Artificial Sequence: Synthetic oligonucleotide
gcgccguuucuccagaucg

SEQ ID NO: 2083309 - RNA, 19 nt, Artificial Sequence
  Description of Artificial Sequence: Synthetic oligonucleotide
caauuguagcagcauacga

SEQ ID NO: 2083310 - RNA, 19 nt, Artificial Sequence
  Description of Artificial Sequence: Synthetic oligonucleotide
cagcggcucacgaaggcgg

SEQ ID NO: 2083311 - RNA, 19 nt, Artificial Sequence
  Description of Artificial Sequence: Synthetic oligonucleotide
guggaucaccgggugaucg

SEQ ID NO: 2083312 - RNA, 19 nt, Artificial Sequence
  Description of Artificial Sequence: Synthetic oligonucleotide
uggcagguaaauucggauu

SEQ ID NO: 2083313 - RNA, 19 nt, Artificial Sequence
  Description of Artificial Sequence: Synthetic oligonucleotide
ucuacgggcguggaucacc

SEQ ID NO: 2083314 - RNA, 19 nt, Artificial Sequence
  Description of Artificial Sequence: Synthetic oligonucleotide
uguaguggcgagucagcuc

SEQ ID NO: 2083315 - RNA, 19 nt, Artificial Sequence
  Description of Artificial Sequence: Synthetic oligonucleotide
caugcccuggaacuguuuc

SEQ ID NO: 2083316 - RNA, 19 nt, Artificial Sequence
  Description of Artificial Sequence: Synthetic oligonucleotide
accaggguaaucgcaguag

SEQ ID NO: 2083317 - RNA, 19 nt, Artificial Sequence
  Description of Artificial Sequence: Synthetic oligonucleotide
ucgcaguaguggaugcgcc

SEQ ID NO: 2083318 - RNA, 19 nt, Artificial Sequence
  Description of Artificial Sequence: Synthetic oligonucleotide
cugagcucgguggcgaugg

SEQ ID NO: 2083319 - RNA, 19 nt, Artificial Sequence
  Description of Artificial Sequence: Synthetic oligonucleotide
gaagcugcgguugcacacc

SEQ ID NO: 2083320 - RNA, 19 nt, Artificial Sequence
  Description of Artificial Sequence: Synthetic oligonucleotide
caggguaaucgcaguagug

SEQ ID NO: 2083321 - RNA, 19 nt, Artificial Sequence
  Description of Artificial Sequence: Synthetic oligonucleotide
uuacuccuucuauuguauc

SEQ ID NO: 2083322 - RNA, 19 nt, Artificial Sequence
  Description of Artificial Sequence: Synthetic oligonucleotide
acgacuuuguauaaacuuu

SEQ ID NO: 2083323 - RNA, 19 nt, Artificial Sequence
  Description of Artificial Sequence: Synthetic oligonucleotide
aaccaggguaaucgcagua

SEQ ID NO: 2083324 - RNA, 19 nt, Artificial Sequence
  Description of Artificial Sequence: Synthetic oligonucleotide
agaagcaauuguagcagca

SEQ ID NO: 2083325 - RNA, 19 nt, Artificial Sequence
  Description of Artificial Sequence: Synthetic oligonucleotide
uggaucaccgggugaucgc

SEQ ID NO: 2083326 - RNA, 19 nt, Artificial Sequence
  Description of Artificial Sequence: Synthetic oligonucleotide
guguuuugagaucgucggc

SEQ ID NO: 2083327 - RNA, 19 nt, Artificial Sequence
  Description of Artificial Sequence: Synthetic oligonucleotide
aucgcgauucccaccucgc

SEQ ID NO: 2083328 - RNA, 19 nt, Artificial Sequence
  Description of Artificial Sequence: Synthetic oligonucleotide
cugacagguuggaugcuug

SEQ ID NO: 2083329 - RNA, 19 nt, Artificial Sequence
  Description of Artificial Sequence: Synthetic oligonucleotide
gcugcgguugcacaccccg

SEQ ID NO: 2083330 - RNA, 19 nt, Artificial Sequence
  Description of Artificial Sequence: Synthetic oligonucleotide
gagguggaguuaaauucug

SEQ ID NO: 2083331 - RNA, 19 nt, Artificial Sequence
  Description of Artificial Sequence: Synthetic oligonucleotide
uuguaucugacagguugga

SEQ ID NO: 2083332 - RNA, 19 nt, Artificial Sequence
  Description of Artificial Sequence: Synthetic oligonucleotide
ucgggguuacuccuucuau

SEQ ID NO: 2083333 - RNA, 19 nt, Artificial Sequence
  Description of Artificial Sequence: Synthetic oligonucleotide
uugagaucgucggccgggg

SEQ ID NO: 2083334 - RNA, 19 nt, Artificial Sequence
  Description of Artificial Sequence: Synthetic oligonucleotide
uggugcgcguguuuugaga

SEQ ID NO: 2083335 - RNA, 19 nt, Artificial Sequence
  Description of Artificial Sequence: Synthetic oligonucleotide
ugagacgacuuuguauaaa

SEQ ID NO: 2083336 - RNA, 19 nt, Artificial Sequence
  Description of Artificial Sequence: Synthetic oligonucleotide
ccuggaacuguuucauugc

SEQ ID NO: 2083337 - RNA, 19 nt, Artificial Sequence
  Description of Artificial Sequence: Synthetic oligonucleotide
cagucugcggaacagcaga

SEQ ID NO: 2083338 - RNA, 19 nt, Artificial Sequence
  Description of Artificial Sequence: Synthetic oligonucleotide
guaaauucggauugcuaau

SEQ ID NO: 2083339 - RNA, 19 nt, Artificial Sequence
  Description of Artificial Sequence: Synthetic oligonucleotide
uaaggcccgccauggccgg

SEQ ID NO: 2083340 - RNA, 19 nt, Artificial Sequence
  Description of Artificial Sequence: Synthetic oligonucleotide
accucgcccgggcuggcgc

SEQ ID NO: 2083341 - RNA, 19 nt, Artificial Sequence
  Description of Artificial Sequence: Synthetic oligonucleotide
agaucgucggccggggaag

SEQ ID NO: 2083342 - RNA, 19 nt, Artificial Sequence
  Description of Artificial Sequence: Synthetic oligonucleotide
ucgcgauucccaccucgcc

SEQ ID NO: 2083343 - RNA, 19 nt, Artificial Sequence
  Description of Artificial Sequence: Synthetic oligonucleotide
aggugagcuuuuaaaugag

SEQ ID NO: 2083344 - RNA, 19 nt, Artificial Sequence
  Description of Artificial Sequence: Synthetic oligonucleotide
ggaacuguuucauugcagu

SEQ ID NO: 2083345 - RNA, 19 nt, Artificial Sequence
  Description of Artificial Sequence: Synthetic oligonucleotide
uaaguggccugcuguggaa

SEQ ID NO: 2083346 - RNA, 19 nt, Artificial Sequence
  Description of Artificial Sequence: Synthetic oligonucleotide
cugcggaacagcagaggug

SEQ ID NO: 2083347 - RNA, 19 nt, Artificial Sequence
  Description of Artificial Sequence: Synthetic oligonucleotide
gcguguuuugagaucgucg

SEQ ID NO: 2083348 - RNA, 19 nt, Artificial Sequence
  Description of Artificial Sequence: Synthetic oligonucleotide
uguaucugacagguuggau

SEQ ID NO: 2083349 - RNA, 19 nt, Artificial Sequence
  Description of Artificial Sequence: Synthetic oligonucleotide
aguuaggucagcgguuuaa

SEQ ID NO: 2083350 - RNA, 19 nt, Artificial Sequence
  Description of Artificial Sequence: Synthetic oligonucleotide
augagacgacuuuguauaa

SEQ ID NO: 2083351 - RNA, 19 nt, Artificial Sequence
  Description of Artificial Sequence: Synthetic oligonucleotide
cgagcaaaccuccagucgc

SEQ ID NO: 2083352 - RNA, 19 nt, Artificial Sequence
  Description of Artificial Sequence: Synthetic oligonucleotide
accgggugaucgcgauucc

SEQ ID NO: 2083353 - RNA, 19 nt, Artificial Sequence
  Description of Artificial Sequence: Synthetic oligonucleotide
gucagcucguccgaccgag

SEQ ID NO: 2083354 - RNA, 19 nt, Artificial Sequence
  Description of Artificial Sequence: Synthetic oligonucleotide
gucggaucgggagaagcug

SEQ ID NO: 2083355 - RNA, 19 nt, Artificial Sequence
  Description of Artificial Sequence: Synthetic oligonucleotide
agacgacuuuguauaaacu

SEQ ID NO: 2083356 - RNA, 19 nt, Artificial Sequence
  Description of Artificial Sequence: Synthetic oligonucleotide
gggaaaguaaguggccugc

SEQ ID NO: 2083357 - RNA, 19 nt, Artificial Sequence
  Description of Artificial Sequence: Synthetic oligonucleotide
gugaucgcgauucccaccu

SEQ ID NO: 2083358 - RNA, 19 nt, Artificial Sequence
  Description of Artificial Sequence: Synthetic oligonucleotide
cauacgauggagguggagu

SEQ ID NO: 2083359 - RNA, 19 nt, Artificial Sequence
  Description of Artificial Sequence: Synthetic oligonucleotide
ucugacagguuggaugcuu

SEQ ID NO: 2083360 - RNA, 19 nt, Artificial Sequence
  Description of Artificial Sequence: Synthetic oligonucleotide
gguuacuccuucuauugua

SEQ ID NO: 2083361 - RNA, 19 nt, Artificial Sequence
  Description of Artificial Sequence: Synthetic oligonucleotide
ggguaaucgcaguagugga

SEQ ID NO: 2083362 - RNA, 19 nt, Artificial Sequence
  Description of Artificial Sequence: Synthetic oligonucleotide
gaucgggagaagcugcggu

SEQ ID NO: 2083363 - RNA, 19 nt, Artificial Sequence
  Description of Artificial Sequence: Synthetic oligonucleotide
gacgcggggcggcugcggg

SEQ ID NO: 2083364 - RNA, 19 nt, Artificial Sequence
  Description of Artificial Sequence: Synthetic oligonucleotide
ugagcucgguggcgauggg

SEQ ID NO: 2083365 - RNA, 19 nt, Artificial Sequence
  Description of Artificial Sequence: Synthetic oligonucleotide
gucugcggaacagcagagg

SEQ ID NO: 2083366 - RNA, 19 nt, Artificial Sequence
  Description of Artificial Sequence: Synthetic oligonucleotide
ggugaucgcgauucccacc

SEQ ID NO: 2083367 - RNA, 19 nt, Artificial Sequence
  Description of Artificial Sequence: Synthetic oligonucleotide
guaguggaugcgccguuuc

SEQ ID NO: 2083368 - RNA, 19 nt, Artificial Sequence
  Description of Artificial Sequence: Synthetic oligonucleotide
agguuggaugcuuggugaa

SEQ ID NO: 2083369 - RNA, 19 nt, Artificial Sequence
  Description of Artificial Sequence: Synthetic oligonucleotide
gaagagcgccgcgucgcgg

SEQ ID NO: 2083370 - RNA, 19 nt, Artificial Sequence
  Description of Artificial Sequence: Synthetic oligonucleotide
uuccuguaguggcgaguca

SEQ ID NO: 2083371 - RNA, 19 nt, Artificial Sequence
  Description of Artificial Sequence: Synthetic oligonucleotide
ggaucaccgggugaucgcg

SEQ ID NO: 2083372 - RNA, 19 nt, Artificial Sequence
  Description of Artificial Sequence: Synthetic oligonucleotide
ugagaucgucggccgggga

SEQ ID NO: 2083373 - RNA, 19 nt, Artificial Sequence
  Description of Artificial Sequence: Synthetic oligonucleotide
cuccuucuauuguaucuga

SEQ ID NO: 2083374 - RNA, 19 nt, Artificial Sequence
  Description of Artificial Sequence: Synthetic oligonucleotide
ugguggugcgcguguuuug

SEQ ID NO: 2083375 - RNA, 19 nt, Artificial Sequence
  Description of Artificial Sequence: Synthetic oligonucleotide
agucugcggaacagcagag

SEQ ID NO: 2083376 - RNA, 19 nt, Artificial Sequence
  Description of Artificial Sequence: Synthetic oligonucleotide
aaguuaggucagcgguuua

SEQ ID NO: 2083377 - RNA, 19 nt, Artificial Sequence
  Description of Artificial Sequence: Synthetic oligonucleotide
aucgggguuacuccuucua

SEQ ID NO: 2083378 - RNA, 19 nt, Artificial Sequence
  Description of Artificial Sequence: Synthetic oligonucleotide
ucugagcucgguggcgaug

SEQ ID NO: 2083379 - RNA, 19 nt, Artificial Sequence
  Description of Artificial Sequence: Synthetic oligonucleotide
gucagcgguuuaaagcuca

SEQ ID NO: 2083380 - RNA, 19 nt, Artificial Sequence
  Description of Artificial Sequence: Synthetic oligonucleotide
ugcgcgaacaccggcucgu

SEQ ID NO: 2083381 - RNA, 19 nt, Artificial Sequence
  Description of Artificial Sequence: Synthetic oligonucleotide
acugcggacucgacgcggg

SEQ ID NO: 2083382 - RNA, 19 nt, Artificial Sequence
  Description of Artificial Sequence: Synthetic oligonucleotide
cggacugcggacucgacgc

SEQ ID NO: 2083383 - RNA, 19 nt, Artificial Sequence
  Description of Artificial Sequence: Synthetic oligonucleotide
ucauugcagucugcggaac

SEQ ID NO: 2083384 - RNA, 19 nt, Artificial Sequence
  Description of Artificial Sequence: Synthetic oligonucleotide
gcgguuuaaagcucagcuc

SEQ ID NO: 2083385 - RNA, 19 nt, Artificial Sequence
  Description of Artificial Sequence: Synthetic oligonucleotide
ucguccgaccgagcaaacc

SEQ ID NO: 2083386 - RNA, 19 nt, Artificial Sequence
  Description of Artificial Sequence: Synthetic oligonucleotide
cauugcagucugcggaaca

SEQ ID NO: 2083387 - RNA, 19 nt, Artificial Sequence
  Description of Artificial Sequence: Synthetic oligonucleotide
ccgagcaaaccuccagucg

SEQ ID NO: 2083388 - RNA, 19 nt, Artificial Sequence
  Description of Artificial Sequence: Synthetic oligonucleotide
ugcggacucgacgcggggc

SEQ ID NO: 2083389 - RNA, 19 nt, Artificial Sequence
  Description of Artificial Sequence: Synthetic oligonucleotide
uggucagcacccgcguggc

SEQ ID NO: 2083390 - RNA, 19 nt, Artificial Sequence
  Description of Artificial Sequence: Synthetic oligonucleotide
ucgucggccggggaagagc

SEQ ID NO: 2083391 - RNA, 19 nt, Artificial Sequence
  Description of Artificial Sequence: Synthetic oligonucleotide
gucaccgccgagguccucc

SEQ ID NO: 2083392 - RNA, 19 nt, Artificial Sequence
  Description of Artificial Sequence: Synthetic oligonucleotide
guuaggucagcgguuuaaa

SEQ ID NO: 2083393 - RNA, 19 nt, Artificial Sequence
  Description of Artificial Sequence: Synthetic oligonucleotide
aucaccgggugaucgcgau

SEQ ID NO: 2083394 - RNA, 19 nt, Artificial Sequence
  Description of Artificial Sequence: Synthetic oligonucleotide
ucgcgggccggguucgcag

SEQ ID NO: 2083395 - RNA, 19 nt, Artificial Sequence
  Description of Artificial Sequence: Synthetic oligonucleotide
guggugcgcguguuuugag

SEQ ID NO: 2083396 - RNA, 19 nt, Artificial Sequence
  Description of Artificial Sequence: Synthetic oligonucleotide
gcggacucgacgcggggcg

SEQ ID NO: 2083397 - RNA, 19 nt, Artificial Sequence
  Description of Artificial Sequence: Synthetic oligonucleotide
caggcgggcgcccaugguc

SEQ ID NO: 2083398 - RNA, 19 nt, Artificial Sequence
  Description of Artificial Sequence: Synthetic oligonucleotide
ggcacguagaucgggacuc

SEQ ID NO: 2083399 - RNA, 19 nt, Artificial Sequence
  Description of Artificial Sequence: Synthetic oligonucleotide
acacgggucccaggcgggc

SEQ ID NO: 2083400 - RNA, 19 nt, Artificial Sequence
  Description of Artificial Sequence: Synthetic oligonucleotide
cugcgcgaacaccggcucg

SEQ ID NO: 2083401 - RNA, 19 nt, Artificial Sequence
  Description of Artificial Sequence: Synthetic oligonucleotide
uggaacggcuuggcacccg

SEQ ID NO: 2083402 - RNA, 19 nt, Artificial Sequence
  Description of Artificial Sequence: Synthetic oligonucleotide
cugcgguugcacaccccgc

SEQ ID NO: 2083403 - RNA, 19 nt, Artificial Sequence
  Description of Artificial Sequence: Synthetic oligonucleotide
uacgggcguggaucaccgg

SEQ ID NO: 2083404 - RNA, 19 nt, Artificial Sequence
  Description of Artificial Sequence: Synthetic oligonucleotide
ggaagagcgccgcgucgcg

SEQ ID NO: 2083405 - RNA, 19 nt, Artificial Sequence
  Description of Artificial Sequence: Synthetic oligonucleotide
ggggaagagcgccgcgucg

SEQ ID NO: 2083406 - RNA, 19 nt, Artificial Sequence
  Description of Artificial Sequence: Synthetic oligonucleotide
guggcagguaaauucggau

SEQ ID NO: 2083407 - RNA, 19 nt, Artificial Sequence
  Description of Artificial Sequence: Synthetic oligonucleotide
gggucuacgggcguggauc

SEQ ID NO: 2083408 - RNA, 19 nt, Artificial Sequence
  Description of Artificial Sequence: Synthetic oligonucleotide
gcgccagguggucggaucg

SEQ ID NO: 2083409 - RNA, 19 nt, Artificial Sequence
  Description of Artificial Sequence: Synthetic oligonucleotide
cucgacgcggggcggcugc

SEQ ID NO: 2083410 - RNA, 19 nt, Artificial Sequence
  Description of Artificial Sequence: Synthetic oligonucleotide
cagcgguuuaaagcucagc

SEQ ID NO: 2083411 - RNA, 19 nt, Artificial Sequence
  Description of Artificial Sequence: Synthetic oligonucleotide
acuaacuggcagaguggca

SEQ ID NO: 2083412 - RNA, 19 nt, Artificial Sequence
  Description of Artificial Sequence: Synthetic oligonucleotide
agcacccgcguggccaugg

SEQ ID NO: 2083413 - RNA, 19 nt, Artificial Sequence
  Description of Artificial Sequence: Synthetic oligonucleotide
gacuuggcaugguguaugu

SEQ ID NO: 2083414 - RNA, 19 nt, Artificial Sequence
  Description of Artificial Sequence: Synthetic oligonucleotide
agcagagguguguguguua

SEQ ID NO: 2083415 - RNA, 19 nt, Artificial Sequence
  Description of Artificial Sequence: Synthetic oligonucleotide
aguaguggaugcgccguuu

SEQ ID NO: 2083416 - RNA, 19 nt, Artificial Sequence
  Description of Artificial Sequence: Synthetic oligonucleotide
ggcgcccauggucagcacc

SEQ ID NO: 2083417 - RNA, 19 nt, Artificial Sequence
  Description of Artificial Sequence: Synthetic oligonucleotide
cgcgucaccgccgaggucc

SEQ ID NO: 2083418 - RNA, 19 nt, Artificial Sequence
  Description of Artificial Sequence: Synthetic oligonucleotide
ccggacugcggacucgacg

SEQ ID NO: 2083419 - RNA, 19 nt, Artificial Sequence
  Description of Artificial Sequence: Synthetic oligonucleotide
uuugugcaaccaggguaau

SEQ ID NO: 2083420 - RNA, 19 nt, Artificial Sequence
  Description of Artificial Sequence: Synthetic oligonucleotide
agcggcucacgaaggcggg

SEQ ID NO: 2083421 - RNA, 19 nt, Artificial Sequence
  Description of Artificial Sequence: Synthetic oligonucleotide
gcagcauacgauggaggug

SEQ ID NO: 2083422 - RNA, 19 nt, Artificial Sequence
  Description of Artificial Sequence: Synthetic oligonucleotide
ugaucgcgauucccaccuc

SEQ ID NO: 2083423 - RNA, 19 nt, Artificial Sequence
  Description of Artificial Sequence: Synthetic oligonucleotide
ggucuacgggcguggauca

SEQ ID NO: 2083424 - RNA, 19 nt, Artificial Sequence
  Description of Artificial Sequence: Synthetic oligonucleotide
ggaucgggagaagcugcgg

SEQ ID NO: 2083425 - RNA, 19 nt, Artificial Sequence
  Description of Artificial Sequence: Synthetic oligonucleotide
gaccccuaggccggcggcc

SEQ ID NO: 2083426 - RNA, 19 nt, Artificial Sequence
  Description of Artificial Sequence: Synthetic oligonucleotide
gguuggaugcuuggugaac

SEQ ID NO: 2083427 - RNA, 19 nt, Artificial Sequence
  Description of Artificial Sequence: Synthetic oligonucleotide
gauugcuaauugccaguuu

SEQ ID NO: 2083428 - RNA, 19 nt, Artificial Sequence
  Description of Artificial Sequence: Synthetic oligonucleotide
gaucaccgggugaucgcga

SEQ ID NO: 2083429 - RNA, 19 nt, Artificial Sequence
  Description of Artificial Sequence: Synthetic oligonucleotide
uaguggcgagucagcucgu

SEQ ID NO: 2083430 - RNA, 19 nt, Artificial Sequence
  Description of Artificial Sequence: Synthetic oligonucleotide
cagcaccggcuugagcugc

SEQ ID NO: 2083431 - RNA, 19 nt, Artificial Sequence
  Description of Artificial Sequence: Synthetic oligonucleotide
cgguuuaaagcucagcucu

SEQ ID NO: 2083432 - RNA, 19 nt, Artificial Sequence
  Description of Artificial Sequence: Synthetic oligonucleotide
cugcggacucgacgcgggg

SEQ ID NO: 2083433 - RNA, 19 nt, Artificial Sequence
  Description of Artificial Sequence: Synthetic oligonucleotide
ucaccgggugaucgcgauu

SEQ ID NO: 2083434 - RNA, 19 nt, Artificial Sequence
  Description of Artificial Sequence: Synthetic oligonucleotide
cacgggucccaggcgggcg

SEQ ID NO: 2083435 - RNA, 19 nt, Artificial Sequence
  Description of Artificial Sequence: Synthetic oligonucleotide
cacccgcguggccaugggc

SEQ ID NO: 2083436 - RNA, 19 nt, Artificial Sequence
  Description of Artificial Sequence: Synthetic oligonucleotide
cucggccacgcgucaccgc

SEQ ID NO: 2083437 - RNA, 19 nt, Artificial Sequence
  Description of Artificial Sequence: Synthetic oligonucleotide
gaacggcuuggcacccgug

SEQ ID NO: 2083438 - RNA, 19 nt, Artificial Sequence
  Description of Artificial Sequence: Synthetic oligonucleotide
aggcgggcgcccaugguca

SEQ ID NO: 2083439 - RNA, 19 nt, Artificial Sequence
  Description of Artificial Sequence: Synthetic oligonucleotide
guguguuaaggcccgccau

SEQ ID NO: 2083440 - RNA, 19 nt, Artificial Sequence
  Description of Artificial Sequence: Synthetic oligonucleotide
ggagcaucucagcuugucu

SEQ ID NO: 2083441 - RNA, 19 nt, Artificial Sequence
  Description of Artificial Sequence: Synthetic oligonucleotide
gguggugcgcguguuuuga

SEQ ID NO: 2083442 - RNA, 19 nt, Artificial Sequence
  Description of Artificial Sequence: Synthetic oligonucleotide
gccgguggcugggacacgg

SEQ ID NO: 2083443 - RNA, 19 nt, Artificial Sequence
  Description of Artificial Sequence: Synthetic oligonucleotide
cuggcgccggacugcggac

SEQ ID NO: 2083444 - RNA, 19 nt, Artificial Sequence
  Description of Artificial Sequence: Synthetic oligonucleotide
gcucacgaaggcgggcacg

SEQ ID NO: 2083445 - RNA, 19 nt, Artificial Sequence
  Description of Artificial Sequence: Synthetic oligonucleotide
aucgucggccggggaagag

SEQ ID NO: 2083446 - RNA, 19 nt, Artificial Sequence
  Description of Artificial Sequence: Synthetic oligonucleotide
aucugacagguuggaugcu

SEQ ID NO: 2083447 - RNA, 19 nt, Artificial Sequence
  Description of Artificial Sequence: Synthetic oligonucleotide
ccagcggcucacgaaggcg

SEQ ID NO: 2083448 - RNA, 19 nt, Artificial Sequence
  Description of Artificial Sequence: Synthetic oligonucleotide
gcuggcgccggacugcgga

SEQ ID NO: 2083449 - RNA, 19 nt, Artificial Sequence
  Description of Artificial Sequence: Synthetic oligonucleotide
gaucgggguuacuccuucu

SEQ ID NO: 2083450 - RNA, 19 nt, Artificial Sequence
  Description of Artificial Sequence: Synthetic oligonucleotide
acgcgucaccgccgagguc

SEQ ID NO: 2083451 - RNA, 19 nt, Artificial Sequence
  Description of Artificial Sequence: Synthetic oligonucleotide
gccgccacuuucucccgcc

SEQ ID NO: 2083452 - RNA, 19 nt, Artificial Sequence
  Description of Artificial Sequence: Synthetic oligonucleotide
ggcgcuucaugugcagcgc

SEQ ID NO: 2083453 - RNA, 19 nt, Artificial Sequence
  Description of Artificial Sequence: Synthetic oligonucleotide
ggcucggccacgcgucacc

SEQ ID NO: 2083454 - RNA, 19 nt, Artificial Sequence
  Description of Artificial Sequence: Synthetic oligonucleotide
gcgaacaccggcucguccu

SEQ ID NO: 2083455 - RNA, 19 nt, Artificial Sequence
  Description of Artificial Sequence: Synthetic oligonucleotide
gcauacgauggagguggag

SEQ ID NO: 2083456 - RNA, 19 nt, Artificial Sequence
  Description of Artificial Sequence: Synthetic oligonucleotide
ggguucgcagcgcccagca

SEQ ID NO: 2083457 - RNA, 19 nt, Artificial Sequence
  Description of Artificial Sequence: Synthetic oligonucleotide
gaucgucggccggggaaga

SEQ ID NO: 2083458 - RNA, 19 nt, Artificial Sequence
  Description of Artificial Sequence: Synthetic oligonucleotide
ccacgcgucaccgccgagg

SEQ ID NO: 2083459 - RNA, 19 nt, Artificial Sequence
  Description of Artificial Sequence: Synthetic oligonucleotide
cggaucgggagaagcugcg

SEQ ID NO: 2083460 - RNA, 19 nt, Artificial Sequence
  Description of Artificial Sequence: Synthetic oligonucleotide
caccccgcacuggaacggc

SEQ ID NO: 2083461 - RNA, 19 nt, Artificial Sequence
  Description of Artificial Sequence: Synthetic oligonucleotide
gcucguccuguguggccgg

SEQ ID NO: 2083462 - RNA, 19 nt, Artificial Sequence
  Description of Artificial Sequence: Synthetic oligonucleotide
caaccaggguaaucgcagu

SEQ ID NO: 2083463 - RNA, 19 nt, Artificial Sequence
  Description of Artificial Sequence: Synthetic oligonucleotide
cuccagccgccacuuucuc

SEQ ID NO: 2083464 - RNA, 19 nt, Artificial Sequence
  Description of Artificial Sequence: Synthetic oligonucleotide
gcugcgcgaacaccggcuc

SEQ ID NO: 2083465 - RNA, 19 nt, Artificial Sequence
  Description of Artificial Sequence: Synthetic oligonucleotide
cuaggccggcggccagcgg

SEQ ID NO: 2083466 - RNA, 19 nt, Artificial Sequence
  Description of Artificial Sequence: Synthetic oligonucleotide
ggaccccuaggccggcggc

SEQ ID NO: 2083467 - RNA, 19 nt, Artificial Sequence
  Description of Artificial Sequence: Synthetic oligonucleotide
accccuaggccggcggcca

SEQ ID NO: 2083468 - RNA, 19 nt, Artificial Sequence
  Description of Artificial Sequence: Synthetic oligonucleotide
ggucagcgguuuaaagcuc

SEQ ID NO: 2083469 - RNA, 19 nt, Artificial Sequence
  Description of Artificial Sequence: Synthetic oligonucleotide
cggccagcggcucacgaag

SEQ ID NO: 2083470 - RNA, 19 nt, Artificial Sequence
  Description of Artificial Sequence: Synthetic oligonucleotide
ccgagguccuccagccgcc

SEQ ID NO: 2083471 - RNA, 19 nt, Artificial Sequence
  Description of Artificial Sequence: Synthetic oligonucleotide
agcauacgauggaggugga

SEQ ID NO: 2083472 - RNA, 19 nt, Artificial Sequence
  Description of Artificial Sequence: Synthetic oligonucleotide
cucacgaaggcgggcacgu

SEQ ID NO: 2083473 - RNA, 19 nt, Artificial Sequence
  Description of Artificial Sequence: Synthetic oligonucleotide
gcucggccacgcgucaccg

SEQ ID NO: 2083474 - RNA, 19 nt, Artificial Sequence
  Description of Artificial Sequence: Synthetic oligonucleotide
gguaaucgcaguaguggau

SEQ ID NO: 2083475 - RNA, 19 nt, Artificial Sequence
  Description of Artificial Sequence: Synthetic oligonucleotide
cacgcgucaccgccgaggu

SEQ ID NO: 2083476 - RNA, 19 nt, Artificial Sequence
  Description of Artificial Sequence: Synthetic oligonucleotide
gggccggguucgcagcgcc

SEQ ID NO: 2083477 - RNA, 19 nt, Artificial Sequence
  Description of Artificial Sequence: Synthetic oligonucleotide
aggcgggcacguagaucgg

SEQ ID NO: 2083478 - RNA, 19 nt, Artificial Sequence
  Description of Artificial Sequence: Synthetic oligonucleotide
cccgcacuggaacggcuug

SEQ ID NO: 2083479 - RNA, 19 nt, Artificial Sequence
  Description of Artificial Sequence: Synthetic oligonucleotide
gguucgcagcgcccagcac

SEQ ID NO: 2083480 - RNA, 19 nt, Artificial Sequence
  Description of Artificial Sequence: Synthetic oligonucleotide
ggaaaguaaguggccugcu

SEQ ID NO: 2083481 - RNA, 19 nt, Artificial Sequence
  Description of Artificial Sequence: Synthetic oligonucleotide
gggcacguagaucgggacu

SEQ ID NO: 2083482 - RNA, 19 nt, Artificial Sequence
  Description of Artificial Sequence: Synthetic oligonucleotide
gugaacuaacuggcagagu

SEQ ID NO: 2083483 - RNA, 19 nt, Artificial Sequence
  Description of Artificial Sequence: Synthetic oligonucleotide
gccggggaagagcgccgcg

SEQ ID NO: 2083484 - RNA, 19 nt, Artificial Sequence
  Description of Artificial Sequence: Synthetic oligonucleotide
ccgggugaucgcgauuccc

SEQ ID NO: 2083485 - RNA, 19 nt, Artificial Sequence
  Description of Artificial Sequence: Synthetic oligonucleotide
gcacccgugugcuuccugu

SEQ ID NO: 2083486 - RNA, 19 nt, Artificial Sequence
  Description of Artificial Sequence: Synthetic oligonucleotide
ccagaucgggguuacuccu

SEQ ID NO: 2083487 - RNA, 19 nt, Artificial Sequence
  Description of Artificial Sequence: Synthetic oligonucleotide
cccaggcgggcgcccaugg

SEQ ID NO: 2083488 - RNA, 19 nt, Artificial Sequence
  Description of Artificial Sequence: Synthetic oligonucleotide
gucuacgggcguggaucac

SEQ ID NO: 2083489 - RNA, 19 nt, Artificial Sequence
  Description of Artificial Sequence: Synthetic oligonucleotide
caccucgcccgggcuggcg

SEQ ID NO: 2083490 - RNA, 19 nt, Artificial Sequence
  Description of Artificial Sequence: Synthetic oligonucleotide
gcacccgcguggccauggg

SEQ ID NO: 2083491 - RNA, 19 nt, Artificial Sequence
  Description of Artificial Sequence: Synthetic oligonucleotide
gcuguggaagaaacugacu

SEQ ID NO: 2083492 - RNA, 19 nt, Artificial Sequence
  Description of Artificial Sequence: Synthetic oligonucleotide
ggacucgacgcggggcggc

SEQ ID NO: 2083493 - RNA, 19 nt, Artificial Sequence
  Description of Artificial Sequence: Synthetic oligonucleotide
cacccgugugcuuccugua

SEQ ID NO: 2083494 - RNA, 19 nt, Artificial Sequence
  Description of Artificial Sequence: Synthetic oligonucleotide
cgacuuuguauaaacuuuu

SEQ ID NO: 2083495 - RNA, 19 nt, Artificial Sequence
  Description of Artificial Sequence: Synthetic oligonucleotide
ccaggguaaucgcaguagu

SEQ ID NO: 2083496 - RNA, 19 nt, Artificial Sequence
  Description of Artificial Sequence: Synthetic oligonucleotide
accccgcacuggaacggcu

SEQ ID NO: 2083497 - RNA, 19 nt, Artificial Sequence
  Description of Artificial Sequence: Synthetic oligonucleotide
cguccgaccgagcaaaccu

SEQ ID NO: 2083498 - RNA, 19 nt, Artificial Sequence
  Description of Artificial Sequence: Synthetic oligonucleotide
cgaacaccggcucguccug

SEQ ID NO: 2083499 - RNA, 19 nt, Artificial Sequence
  Description of Artificial Sequence: Synthetic oligonucleotide
cgcgaacaccggcucgucc

SEQ ID NO: 2083500 - RNA, 19 nt, Artificial Sequence
  Description of Artificial Sequence: Synthetic oligonucleotide
ccgguggcugggacacggg

SEQ ID NO: 2083501 - RNA, 19 nt, Artificial Sequence
  Description of Artificial Sequence: Synthetic oligonucleotide
ggccacgcgucaccgccga

SEQ ID NO: 2083502 - RNA, 19 nt, Artificial Sequence
  Description of Artificial Sequence: Synthetic oligonucleotide
gccggguucgcagcgccca

SEQ ID NO: 2083503 - RNA, 19 nt, Artificial Sequence
  Description of Artificial Sequence: Synthetic oligonucleotide
ccggcucguccuguguggc

SEQ ID NO: 2083504 - RNA, 19 nt, Artificial Sequence
  Description of Artificial Sequence: Synthetic oligonucleotide
cacguagaucgggacuccu

SEQ ID NO: 2083505 - RNA, 19 nt, Artificial Sequence
  Description of Artificial Sequence: Synthetic oligonucleotide
ccgggcuggcgccggacug

SEQ ID NO: 2083506 - RNA, 19 nt, Artificial Sequence
  Description of Artificial Sequence: Synthetic oligonucleotide
ggcggccagcggcucacga

SEQ ID NO: 2083507 - RNA, 19 nt, Artificial Sequence
  Description of Artificial Sequence: Synthetic oligonucleotide
gucgcgggccggguucgca

SEQ ID NO: 2083508 - RNA, 19 nt, Artificial Sequence
  Description of Artificial Sequence: Synthetic oligonucleotide
gcgucgcgggccggguucg

SEQ ID NO: 2083509 - RNA, 19 nt, Artificial Sequence
  Description of Artificial Sequence: Synthetic oligonucleotide
cgcguguuuugagaucguc

SEQ ID NO: 2083510 - RNA, 19 nt, Artificial Sequence
  Description of Artificial Sequence: Synthetic oligonucleotide
ccgaccgagcaaaccucca

SEQ ID NO: 2083511 - RNA, 19 nt, Artificial Sequence
  Description of Artificial Sequence: Synthetic oligonucleotide
gcggcucacgaaggcgggc

SEQ ID NO: 2083512 - RNA, 19 nt, Artificial Sequence
  Description of Artificial Sequence: Synthetic oligonucleotide
ggggaccccuaggccggcg

SEQ ID NO: 2083513 - RNA, 19 nt, Artificial Sequence
  Description of Artificial Sequence: Synthetic oligonucleotide
gcggaacagcagaggugug

SEQ ID NO: 2083514 - RNA, 19 nt, Artificial Sequence
  Description of Artificial Sequence: Synthetic oligonucleotide
caguaguggaugcgccguu

SEQ ID NO: 2083515 - RNA, 19 nt, Artificial Sequence
  Description of Artificial Sequence: Synthetic oligonucleotide
ccggguucgcagcgcccag

SEQ ID NO: 2083516 - RNA, 19 nt, Artificial Sequence
  Description of Artificial Sequence: Synthetic oligonucleotide
cucugagcucgguggcgau

SEQ ID NO: 2083517 - RNA, 19 nt, Artificial Sequence
  Description of Artificial Sequence: Synthetic oligonucleotide
gcgccggacugcggacucg

SEQ ID NO: 2083518 - RNA, 19 nt, Artificial Sequence
  Description of Artificial Sequence: Synthetic oligonucleotide
cggccggggaagagcgccg

SEQ ID NO: 2083519 - RNA, 19 nt, Artificial Sequence
  Description of Artificial Sequence: Synthetic oligonucleotide
gggcaugcccuggaacugu

SEQ ID NO: 2083520 - RNA, 19 nt, Artificial Sequence
  Description of Artificial Sequence: Synthetic oligonucleotide
cccgugugcuuccuguagu

SEQ ID NO: 2083521 - RNA, 19 nt, Artificial Sequence
  Description of Artificial Sequence: Synthetic oligonucleotide
gccacgcgucaccgccgag

SEQ ID NO: 2083522 - RNA, 19 nt, Artificial Sequence
  Description of Artificial Sequence: Synthetic oligonucleotide
ggccggguucgcagcgccc

SEQ ID NO: 2083523 - RNA, 19 nt, Artificial Sequence
  Description of Artificial Sequence: Synthetic oligonucleotide
cgcgggccggguucgcagc

SEQ ID NO: 2083524 - RNA, 19 nt, Artificial Sequence
  Description of Artificial Sequence: Synthetic oligonucleotide
cgcgucgcgggccggguuc

SEQ ID NO: 2083525 - RNA, 19 nt, Artificial Sequence
  Description of Artificial Sequence: Synthetic oligonucleotide
cagcacccgcguggccaug

SEQ ID NO: 2083526 - RNA, 19 nt, Artificial Sequence
  Description of Artificial Sequence: Synthetic oligonucleotide
ggccgguggcugggacacg

SEQ ID NO: 2083527 - RNA, 19 nt, Artificial Sequence
  Description of Artificial Sequence: Synthetic oligonucleotide
ggggucuacgggcguggau

SEQ ID NO: 2083528 - RNA, 19 nt, Artificial Sequence
  Description of Artificial Sequence: Synthetic oligonucleotide
gggcucggccacgcgucac

SEQ ID NO: 2083529 - RNA, 19 nt, Artificial Sequence
  Description of Artificial Sequence: Synthetic oligonucleotide
cggacucgacgcggggcgg

SEQ ID NO: 2083530 - RNA, 19 nt, Artificial Sequence
  Description of Artificial Sequence: Synthetic oligonucleotide
gcgggcgcccauggucagc

SEQ ID NO: 2083531 - RNA, 19 nt, Artificial Sequence
  Description of Artificial Sequence: Synthetic oligonucleotide
ccccuaggccggcggccag

SEQ ID NO: 2083532 - RNA, 19 nt, Artificial Sequence
  Description of Artificial Sequence: Synthetic oligonucleotide
cggguucgcagcgcccagc

SEQ ID NO: 2083533 - RNA, 19 nt, Artificial Sequence
  Description of Artificial Sequence: Synthetic oligonucleotide
gggcgcccauggucagcac

SEQ ID NO: 2083534 - RNA, 19 nt, Artificial Sequence
  Description of Artificial Sequence: Synthetic oligonucleotide
cgggguuacuccuucuauu

SEQ ID NO: 2083535 - RNA, 19 nt, Artificial Sequence
  Description of Artificial Sequence: Synthetic oligonucleotide
cggcucacgaaggcgggca

SEQ ID NO: 2083536 - RNA, 19 nt, Artificial Sequence
  Description of Artificial Sequence: Synthetic oligonucleotide
gccggacugcggacucgac

SEQ ID NO: 2083537 - RNA, 19 nt, Artificial Sequence
  Description of Artificial Sequence: Synthetic oligonucleotide
gcccuggaacuguuucauu

SEQ ID NO: 2083538 - RNA, 19 nt, Artificial Sequence
  Description of Artificial Sequence: Synthetic oligonucleotide
cucguccuguguggccggu

SEQ ID NO: 2083539 - RNA, 19 nt, Artificial Sequence
  Description of Artificial Sequence: Synthetic oligonucleotide
cgguugcacaccccgcacu

SEQ ID NO: 2083540 - RNA, 19 nt, Artificial Sequence
  Description of Artificial Sequence: Synthetic oligonucleotide
cccucccaguugcacuugu

SEQ ID NO: 2083541 - RNA, 19 nt, Artificial Sequence
  Description of Artificial Sequence: Synthetic oligonucleotide
ccggggaagagcgccgcgu

SEQ ID NO: 2083542 - RNA, 19 nt, Artificial Sequence
  Description of Artificial Sequence: Synthetic oligonucleotide
cgccggacugcggacucga

SEQ ID NO: 2083543 - RNA, 19 nt, Artificial Sequence
  Description of Artificial Sequence: Synthetic oligonucleotide
ccccgcacuggaacggcuu

SEQ ID NO: 2083544 - RNA, 19 nt, Artificial Sequence
  Description of Artificial Sequence: Synthetic oligonucleotide
gcgcguguuuugagaucgu

SEQ ID NO: 2083545 - RNA, 19 nt, Artificial Sequence
  Description of Artificial Sequence: Synthetic oligonucleotide
gcgucaccgccgagguccu

SEQ ID NO: 2083546 - RNA, 19 nt, Artificial Sequence
  Description of Artificial Sequence: Synthetic oligonucleotide
gccgcgucgcgggccgggu

SEQ ID NO: 2083547 - RNA, 19 nt, Artificial Sequence
  Description of Artificial Sequence: Synthetic oligonucleotide
cgucaccgccgagguccuc

SEQ ID NO: 2083548 - RNA, 19 nt, Artificial Sequence
  Description of Artificial Sequence: Synthetic oligonucleotide
aauaucacaauagacauag

SEQ ID NO: 2083549 - RNA, 19 nt, Artificial Sequence
  Description of Artificial Sequence: Synthetic oligonucleotide
aaaucauauacauaugaag

SEQ ID NO: 2083550 - RNA, 19 nt, Artificial Sequence
  Description of Artificial Sequence: Synthetic oligonucleotide
agaaauguaaauaugacac

SEQ ID NO: 2083551 - RNA, 19 nt, Artificial Sequence
  Description of Artificial Sequence: Synthetic oligonucleotide
aaacucuuucuuuagguac

SEQ ID NO: 2083552 - RNA, 19 nt, Artificial Sequence
  Description of Artificial Sequence: Synthetic oligonucleotide
uauaaauccaucuuugucu

SEQ ID NO: 2083553 - RNA, 19 nt, Artificial Sequence
  Description of Artificial Sequence: Synthetic oligonucleotide
auucaugggaccuugggcc

SEQ ID NO: 2083554 - RNA, 19 nt, Artificial Sequence
  Description of Artificial Sequence: Synthetic oligonucleotide
uuuagguacacuuuaaccu

SEQ ID NO: 2083555 - RNA, 19 nt, Artificial Sequence
  Description of Artificial Sequence: Synthetic oligonucleotide
agucaaaucauauacauau

SEQ ID NO: 2083556 - RNA, 19 nt, Artificial Sequence
  Description of Artificial Sequence: Synthetic oligonucleotide
aaaagaauaucacaauaga

SEQ ID NO: 2083557 - RNA, 19 nt, Artificial Sequence
  Description of Artificial Sequence: Synthetic oligonucleotide
uucuaaauagcccucguag

SEQ ID NO: 2083558 - RNA, 19 nt, Artificial Sequence
  Description of Artificial Sequence: Synthetic oligonucleotide
ucaaaucauauacauauga

SEQ ID NO: 2083559 - RNA, 19 nt, Artificial Sequence
  Description of Artificial Sequence: Synthetic oligonucleotide
ugauuauucccgcucaugg

SEQ ID NO: 2083560 - RNA, 19 nt, Artificial Sequence
  Description of Artificial Sequence: Synthetic oligonucleotide
uacaauuggauaaucaaga

SEQ ID NO: 2083561 - RNA, 19 nt, Artificial Sequence
  Description of Artificial Sequence: Synthetic oligonucleotide
aagaauaucacaauagaca

SEQ ID NO: 2083562 - RNA, 19 nt, Artificial Sequence
  Description of Artificial Sequence: Synthetic oligonucleotide
auauaaauccaucuuuguc

SEQ ID NO: 2083563 - RNA, 19 nt, Artificial Sequence
  Description of Artificial Sequence: Synthetic oligonucleotide
aucauauacauaugaaguc

SEQ ID NO: 2083564 - RNA, 19 nt, Artificial Sequence
  Description of Artificial Sequence: Synthetic oligonucleotide
acagccaugacccacagug

SEQ ID NO: 2083565 - RNA, 19 nt, Artificial Sequence
  Description of Artificial Sequence: Synthetic oligonucleotide
uuugccauagcccaaggca

SEQ ID NO: 2083566 - RNA, 19 nt, Artificial Sequence
  Description of Artificial Sequence: Synthetic oligonucleotide
uugaauaucagugugcucu

SEQ ID NO: 2083567 - RNA, 19 nt, Artificial Sequence
  Description of Artificial Sequence: Synthetic oligonucleotide
uauguaaauucucuagcag

SEQ ID NO: 2083568 - RNA, 19 nt, Artificial Sequence
  Description of Artificial Sequence: Synthetic oligonucleotide
aaaauaugccgaaagcgac

SEQ ID NO: 2083569 - RNA, 19 nt, Artificial Sequence
  Description of Artificial Sequence: Synthetic oligonucleotide
acauauguaaauucucuag

SEQ ID NO: 2083570 - RNA, 19 nt, Artificial Sequence
  Description of Artificial Sequence: Synthetic oligonucleotide
aaccucauguuaccaaggc

SEQ ID NO: 2083571 - RNA, 19 nt, Artificial Sequence
  Description of Artificial Sequence: Synthetic oligonucleotide
uauacaauuggauaaucaa

SEQ ID NO: 2083572 - RNA, 19 nt, Artificial Sequence
  Description of Artificial Sequence: Synthetic oligonucleotide
cuuuagguacacuuuaacc

SEQ ID NO: 2083573 - RNA, 19 nt, Artificial Sequence
  Description of Artificial Sequence: Synthetic oligonucleotide
agaguucugagucaaauca

SEQ ID NO: 2083574 - RNA, 19 nt, Artificial Sequence
  Description of Artificial Sequence: Synthetic oligonucleotide
ugcagagcuauacaauugg

SEQ ID NO: 2083575 - RNA, 19 nt, Artificial Sequence
  Description of Artificial Sequence: Synthetic oligonucleotide
uggagugaaacagagagcc

SEQ ID NO: 2083576 - RNA, 19 nt, Artificial Sequence
  Description of Artificial Sequence: Synthetic oligonucleotide
uucucuagcagauauaaau

SEQ ID NO: 2083577 - RNA, 19 nt, Artificial Sequence
  Description of Artificial Sequence: Synthetic oligonucleotide
guuaccaaggcagagaaag

SEQ ID NO: 2083578 - RNA, 19 nt, Artificial Sequence
  Description of Artificial Sequence: Synthetic oligonucleotide
uaaccucauguuuagagag

SEQ ID NO: 2083579 - RNA, 19 nt, Artificial Sequence
  Description of Artificial Sequence: Synthetic oligonucleotide
uauacauaugaagucacag

SEQ ID NO: 2083580 - RNA, 19 nt, Artificial Sequence
  Description of Artificial Sequence: Synthetic oligonucleotide
aagaucgcguuccacaaag

SEQ ID NO: 2083581 - RNA, 19 nt, Artificial Sequence
  Description of Artificial Sequence: Synthetic oligonucleotide
ucguaguggaccaacauca

SEQ ID NO: 2083582 - RNA, 19 nt, Artificial Sequence
  Description of Artificial Sequence: Synthetic oligonucleotide
agaacuucgauuuucacuu

SEQ ID NO: 2083583 - RNA, 19 nt, Artificial Sequence
  Description of Artificial Sequence: Synthetic oligonucleotide
uaaauucucuagcagauau

SEQ ID NO: 2083584 - RNA, 19 nt, Artificial Sequence
  Description of Artificial Sequence: Synthetic oligonucleotide
cauagaagaguucugaguc

SEQ ID NO: 2083585 - RNA, 19 nt, Artificial Sequence
  Description of Artificial Sequence: Synthetic oligonucleotide
uguuggaauguuuagcuga

SEQ ID NO: 2083586 - RNA, 19 nt, Artificial Sequence
  Description of Artificial Sequence: Synthetic oligonucleotide
aagaguucugagucaaauc

SEQ ID NO: 2083587 - RNA, 19 nt, Artificial Sequence
  Description of Artificial Sequence: Synthetic oligonucleotide
aauaucccuccaccaaagc

SEQ ID NO: 2083588 - RNA, 19 nt, Artificial Sequence
  Description of Artificial Sequence: Synthetic oligonucleotide
aauaugacacauagaagag

SEQ ID NO: 2083589 - RNA, 19 nt, Artificial Sequence
  Description of Artificial Sequence: Synthetic oligonucleotide
aaggcagauggcuaaaaca

SEQ ID NO: 2083590 - RNA, 19 nt, Artificial Sequence
  Description of Artificial Sequence: Synthetic oligonucleotide
acaauagacauagaaaugu

SEQ ID NO: 2083591 - RNA, 19 nt, Artificial Sequence
  Description of Artificial Sequence: Synthetic oligonucleotide
uaugacacauagaagaguu

SEQ ID NO: 2083592 - RNA, 19 nt, Artificial Sequence
  Description of Artificial Sequence: Synthetic oligonucleotide
ucgauuuucacuucuggcu

SEQ ID NO: 2083593 - RNA, 19 nt, Artificial Sequence
  Description of Artificial Sequence: Synthetic oligonucleotide
agugucaagaucgcguucc

SEQ ID NO: 2083594 - RNA, 19 nt, Artificial Sequence
  Description of Artificial Sequence: Synthetic oligonucleotide
uaguggaccaacaucaggu

SEQ ID NO: 2083595 - RNA, 19 nt, Artificial Sequence
  Description of Artificial Sequence: Synthetic oligonucleotide
uccuuuucuaaauagcccu

SEQ ID NO: 2083596 - RNA, 19 nt, Artificial Sequence
  Description of Artificial Sequence: Synthetic oligonucleotide
uuauuucccaaauaaacuu

SEQ ID NO: 2083597 - RNA, 19 nt, Artificial Sequence
  Description of Artificial Sequence: Synthetic oligonucleotide
uugaaaugauucaugggac

SEQ ID NO: 2083598 - RNA, 19 nt, Artificial Sequence
  Description of Artificial Sequence: Synthetic oligonucleotide
gaacucacagccaugaccc

SEQ ID NO: 2083599 - RNA, 19 nt, Artificial Sequence
  Description of Artificial Sequence: Synthetic oligonucleotide
ugagucaaaucauauacau

SEQ ID NO: 2083600 - RNA, 19 nt, Artificial Sequence
  Description of Artificial Sequence: Synthetic oligonucleotide
ucaaagauauugcuauaca

SEQ ID NO: 2083601 - RNA, 19 nt, Artificial Sequence
  Description of Artificial Sequence: Synthetic oligonucleotide
ucgcguuccacaaagaaaa

SEQ ID NO: 2083602 - RNA, 19 nt, Artificial Sequence
  Description of Artificial Sequence: Synthetic oligonucleotide
aaagauauugcuauacaaa

SEQ ID NO: 2083603 - RNA, 19 nt, Artificial Sequence
  Description of Artificial Sequence: Synthetic oligonucleotide
ugauucaugggaccuuggg

SEQ ID NO: 2083604 - RNA, 19 nt, Artificial Sequence
  Description of Artificial Sequence: Synthetic oligonucleotide
gauuauucccgcucauggg

SEQ ID NO: 2083605 - RNA, 19 nt, Artificial Sequence
  Description of Artificial Sequence: Synthetic oligonucleotide
uaugccgaaagcgacgacg

SEQ ID NO: 2083606 - RNA, 19 nt, Artificial Sequence
  Description of Artificial Sequence: Synthetic oligonucleotide
ucucauucacuacugcacc

SEQ ID NO: 2083607 - RNA, 19 nt, Artificial Sequence
  Description of Artificial Sequence: Synthetic oligonucleotide
uguaaauaugacacauaga

SEQ ID NO: 2083608 - RNA, 19 nt, Artificial Sequence
  Description of Artificial Sequence: Synthetic oligonucleotide
uuaaccucauguuuagaga

SEQ ID NO: 2083609 - RNA, 19 nt, Artificial Sequence
  Description of Artificial Sequence: Synthetic oligonucleotide
ugagcuuucucuucucucc

SEQ ID NO: 2083610 - RNA, 19 nt, Artificial Sequence
  Description of Artificial Sequence: Synthetic oligonucleotide
aaauaugccgaaagcgacg

SEQ ID NO: 2083611 - RNA, 19 nt, Artificial Sequence
  Description of Artificial Sequence: Synthetic oligonucleotide
uaaaacaaccaugauuaca

SEQ ID NO: 2083612 - RNA, 19 nt, Artificial Sequence
  Description of Artificial Sequence: Synthetic oligonucleotide
uggcucaggaaucaaagcu

SEQ ID NO: 2083613 - RNA, 19 nt, Artificial Sequence
  Description of Artificial Sequence: Synthetic oligonucleotide
uuagguacacuuuaaccuc

SEQ ID NO: 2083614 - RNA, 19 nt, Artificial Sequence
  Description of Artificial Sequence: Synthetic oligonucleotide
ucucuagcagauauaaauc

SEQ ID NO: 2083615 - RNA, 19 nt, Artificial Sequence
  Description of Artificial Sequence: Synthetic oligonucleotide
uucgauuuucacuucuggc

SEQ ID NO: 2083616 - RNA, 19 nt, Artificial Sequence
  Description of Artificial Sequence: Synthetic oligonucleotide
uuucgaaucuccagaaggu

SEQ ID NO: 2083617 - RNA, 19 nt, Artificial Sequence
  Description of Artificial Sequence: Synthetic oligonucleotide
auuauucccgcucauggga

SEQ ID NO: 2083618 - RNA, 19 nt, Artificial Sequence
  Description of Artificial Sequence: Synthetic oligonucleotide
uuagagaguuuccagucgu

SEQ ID NO: 2083619 - RNA, 19 nt, Artificial Sequence
  Description of Artificial Sequence: Synthetic oligonucleotide
uggaccaacaucagguccc

SEQ ID NO: 2083620 - RNA, 19 nt, Artificial Sequence
  Description of Artificial Sequence: Synthetic oligonucleotide
agagcuauacaauuggaua

SEQ ID NO: 2083621 - RNA, 19 nt, Artificial Sequence
  Description of Artificial Sequence: Synthetic oligonucleotide
uguggguggagugaaacag

SEQ ID NO: 2083622 - RNA, 19 nt, Artificial Sequence
  Description of Artificial Sequence: Synthetic oligonucleotide
agaugaacggcuucuggag

SEQ ID NO: 2083623 - RNA, 19 nt, Artificial Sequence
  Description of Artificial Sequence: Synthetic oligonucleotide
cuaaauagcccucguagug

SEQ ID NO: 2083624 - RNA, 19 nt, Artificial Sequence
  Description of Artificial Sequence: Synthetic oligonucleotide
aggaaucaaagcugaacuc

SEQ ID NO: 2083625 - RNA, 19 nt, Artificial Sequence
  Description of Artificial Sequence: Synthetic oligonucleotide
auacaauuggauaaucaag

SEQ ID NO: 2083626 - RNA, 19 nt, Artificial Sequence
  Description of Artificial Sequence: Synthetic oligonucleotide
ucuaaauagcccucguagu

SEQ ID NO: 2083627 - RNA, 19 nt, Artificial Sequence
  Description of Artificial Sequence: Synthetic oligonucleotide
ucuuuagguacacuuuaac

SEQ ID NO: 2083628 - RNA, 19 nt, Artificial Sequence
  Description of Artificial Sequence: Synthetic oligonucleotide
uguuugauuauucccgcuc

SEQ ID NO: 2083629 - RNA, 19 nt, Artificial Sequence
  Description of Artificial Sequence: Synthetic oligonucleotide
uagacauagaaauguaaau

SEQ ID NO: 2083630 - RNA, 19 nt, Artificial Sequence
  Description of Artificial Sequence: Synthetic oligonucleotide
auacauaugaagucacagu

SEQ ID NO: 2083631 - RNA, 19 nt, Artificial Sequence
  Description of Artificial Sequence: Synthetic oligonucleotide
ucgaaucuccagaagguca

SEQ ID NO: 2083632 - RNA, 19 nt, Artificial Sequence
  Description of Artificial Sequence: Synthetic oligonucleotide
uauguuuguggguggagug

SEQ ID NO: 2083633 - RNA, 19 nt, Artificial Sequence
  Description of Artificial Sequence: Synthetic oligonucleotide
aaugauucaugggaccuug

SEQ ID NO: 2083634 - RNA, 19 nt, Artificial Sequence
  Description of Artificial Sequence: Synthetic oligonucleotide
acauagaagaguucugagu

SEQ ID NO: 2083635 - RNA, 19 nt, Artificial Sequence
  Description of Artificial Sequence: Synthetic oligonucleotide
uguugaauaucagugugcu

SEQ ID NO: 2083636 - RNA, 19 nt, Artificial Sequence
  Description of Artificial Sequence: Synthetic oligonucleotide
uccuucuuugccauagccc

SEQ ID NO: 2083637 - RNA, 19 nt, Artificial Sequence
  Description of Artificial Sequence: Synthetic oligonucleotide
uuaccaaggcagagaaagg

SEQ ID NO: 2083638 - RNA, 19 nt, Artificial Sequence
  Description of Artificial Sequence: Synthetic oligonucleotide
caugcacauauguaaauuc

SEQ ID NO: 2083639 - RNA, 19 nt, Artificial Sequence
  Description of Artificial Sequence: Synthetic oligonucleotide
uucacuacugcaccgugcu

SEQ ID NO: 2083640 - RNA, 19 nt, Artificial Sequence
  Description of Artificial Sequence: Synthetic oligonucleotide
auguuuagagaguuuccag

SEQ ID NO: 2083641 - RNA, 19 nt, Artificial Sequence
  Description of Artificial Sequence: Synthetic oligonucleotide
aauguuuagcugaggacug

SEQ ID NO: 2083642 - RNA, 19 nt, Artificial Sequence
  Description of Artificial Sequence: Synthetic oligonucleotide
uggguggagugaaacagag

SEQ ID NO: 2083643 - RNA, 19 nt, Artificial Sequence
  Description of Artificial Sequence: Synthetic oligonucleotide
cacaauagacauagaaaug

SEQ ID NO: 2083644 - RNA, 19 nt, Artificial Sequence
  Description of Artificial Sequence: Synthetic oligonucleotide
caagauucuugcuucuccc

SEQ ID NO: 2083645 - RNA, 19 nt, Artificial Sequence
  Description of Artificial Sequence: Synthetic oligonucleotide
aacuucgauuuucacuucu

SEQ ID NO: 2083646 - RNA, 19 nt, Artificial Sequence
  Description of Artificial Sequence: Synthetic oligonucleotide
gagcuauacaauuggauaa

SEQ ID NO: 2083647 - RNA, 19 nt, Artificial Sequence
  Description of Artificial Sequence: Synthetic oligonucleotide
aauaugccgaaagcgacga

SEQ ID NO: 2083648 - RNA, 19 nt, Artificial Sequence
  Description of Artificial Sequence: Synthetic oligonucleotide
uuauucccgcucaugggag

SEQ ID NO: 2083649 - RNA, 19 nt, Artificial Sequence
  Description of Artificial Sequence: Synthetic oligonucleotide
aucagugugcucucugggg

SEQ ID NO: 2083650 - RNA, 19 nt, Artificial Sequence
  Description of Artificial Sequence: Synthetic oligonucleotide
acccacagugucaagaucg

SEQ ID NO: 2083651 - RNA, 19 nt, Artificial Sequence
  Description of Artificial Sequence: Synthetic oligonucleotide
auguugaauaucagugugc

SEQ ID NO: 2083652 - RNA, 19 nt, Artificial Sequence
  Description of Artificial Sequence: Synthetic oligonucleotide
gcuaaaacaaccaugauua

SEQ ID NO: 2083653 - RNA, 19 nt, Artificial Sequence
  Description of Artificial Sequence: Synthetic oligonucleotide
ugcacauauguaaauucuc

SEQ ID NO: 2083654 - RNA, 19 nt, Artificial Sequence
  Description of Artificial Sequence: Synthetic oligonucleotide
cuucgauuuucacuucugg

SEQ ID NO: 2083655 - RNA, 19 nt, Artificial Sequence
  Description of Artificial Sequence: Synthetic oligonucleotide
accaacaucagguccccuc

SEQ ID NO: 2083656 - RNA, 19 nt, Artificial Sequence
  Description of Artificial Sequence: Synthetic oligonucleotide
cuacaauucgucaugcaca

SEQ ID NO: 2083657 - RNA, 19 nt, Artificial Sequence
  Description of Artificial Sequence: Synthetic oligonucleotide
ugcaccgugcuucucaaac

SEQ ID NO: 2083658 - RNA, 19 nt, Artificial Sequence
  Description of Artificial Sequence: Synthetic oligonucleotide
aaggcaggaggaaugauga

SEQ ID NO: 2083659 - RNA, 19 nt, Artificial Sequence
  Description of Artificial Sequence: Synthetic oligonucleotide
uacuuguuggaauguuuag

SEQ ID NO: 2083660 - RNA, 19 nt, Artificial Sequence
  Description of Artificial Sequence: Synthetic oligonucleotide
auggcuaaaacaaccauga

SEQ ID NO: 2083661 - RNA, 19 nt, Artificial Sequence
  Description of Artificial Sequence: Synthetic oligonucleotide
auagcccucguaguggacc

SEQ ID NO: 2083662 - RNA, 19 nt, Artificial Sequence
  Description of Artificial Sequence: Synthetic oligonucleotide
acaguuggguguuugauua

SEQ ID NO: 2083663 - RNA, 19 nt, Artificial Sequence
  Description of Artificial Sequence: Synthetic oligonucleotide
aagauucuugcuucucccu

SEQ ID NO: 2083664 - RNA, 19 nt, Artificial Sequence
  Description of Artificial Sequence: Synthetic oligonucleotide
cuuuucuaaauagcccucg

SEQ ID NO: 2083665 - RNA, 19 nt, Artificial Sequence
  Description of Artificial Sequence: Synthetic oligonucleotide
auaucccuccaccaaagca

SEQ ID NO: 2083666 - RNA, 19 nt, Artificial Sequence
  Description of Artificial Sequence: Synthetic oligonucleotide
ccagucgucauucaggucc

SEQ ID NO: 2083667 - RNA, 19 nt, Artificial Sequence
  Description of Artificial Sequence: Synthetic oligonucleotide
cuauacaauuggauaauca

SEQ ID NO: 2083668 - RNA, 19 nt, Artificial Sequence
  Description of Artificial Sequence: Synthetic oligonucleotide
ugaaacagagagccguccu

SEQ ID NO: 2083669 - RNA, 19 nt, Artificial Sequence
  Description of Artificial Sequence: Synthetic oligonucleotide
guaguggaccaacaucagg

SEQ ID NO: 2083670 - RNA, 19 nt, Artificial Sequence
  Description of Artificial Sequence: Synthetic oligonucleotide
cuugcgauggcagaugaac

SEQ ID NO: 2083671 - RNA, 19 nt, Artificial Sequence
  Description of Artificial Sequence: Synthetic oligonucleotide
agacauagaaauguaaaua

SEQ ID NO: 2083672 - RNA, 19 nt, Artificial Sequence
  Description of Artificial Sequence: Synthetic oligonucleotide
uuguuauguuugugggugg

SEQ ID NO: 2083673 - RNA, 19 nt, Artificial Sequence
  Description of Artificial Sequence: Synthetic oligonucleotide
gaggguucaaagauauugc

SEQ ID NO: 2083674 - RNA, 19 nt, Artificial Sequence
  Description of Artificial Sequence: Synthetic oligonucleotide
gggugaaccagauaggcug

SEQ ID NO: 2083675 - RNA, 19 nt, Artificial Sequence
  Description of Artificial Sequence: Synthetic oligonucleotide
aguggaccaacaucagguc

SEQ ID NO: 2083676 - RNA, 19 nt, Artificial Sequence
  Description of Artificial Sequence: Synthetic oligonucleotide
ggaggguucaaagauauug

SEQ ID NO: 2083677 - RNA, 19 nt, Artificial Sequence
  Description of Artificial Sequence: Synthetic oligonucleotide
cacauagaagaguucugag

SEQ ID NO: 2083678 - RNA, 19 nt, Artificial Sequence
  Description of Artificial Sequence: Synthetic oligonucleotide
uacaauucgucaugcacau

SEQ ID NO: 2083679 - RNA, 19 nt, Artificial Sequence
  Description of Artificial Sequence: Synthetic oligonucleotide
caaagauauugcuauacaa

SEQ ID NO: 2083680 - RNA, 19 nt, Artificial Sequence
  Description of Artificial Sequence: Synthetic oligonucleotide
acucucauucacuacugca

SEQ ID NO: 2083681 - RNA, 19 nt, Artificial Sequence
  Description of Artificial Sequence: Synthetic oligonucleotide
aggucaauguugaauauca

SEQ ID NO: 2083682 - RNA, 19 nt, Artificial Sequence
  Description of Artificial Sequence: Synthetic oligonucleotide
cuuggucuugcgauggcag

SEQ ID NO: 2083683 - RNA, 19 nt, Artificial Sequence
  Description of Artificial Sequence: Synthetic oligonucleotide
gauucuugcuucucccuac

SEQ ID NO: 2083684 - RNA, 19 nt, Artificial Sequence
  Description of Artificial Sequence: Synthetic oligonucleotide
acaauuggauaaucaagau

SEQ ID NO: 2083685 - RNA, 19 nt, Artificial Sequence
  Description of Artificial Sequence: Synthetic oligonucleotide
auagaagaguucugaguca

SEQ ID NO: 2083686 - RNA, 19 nt, Artificial Sequence
  Description of Artificial Sequence: Synthetic oligonucleotide
ugacucucauucacuacug

SEQ ID NO: 2083687 - RNA, 19 nt, Artificial Sequence
  Description of Artificial Sequence: Synthetic oligonucleotide
ucaagaucgcguuccacaa

SEQ ID NO: 2083688 - RNA, 19 nt, Artificial Sequence
  Description of Artificial Sequence: Synthetic oligonucleotide
uuguuggaauguuuagcug

SEQ ID NO: 2083689 - RNA, 19 nt, Artificial Sequence
  Description of Artificial Sequence: Synthetic oligonucleotide
uuucuaaauagcccucgua

SEQ ID NO: 2083690 - RNA, 19 nt, Artificial Sequence
  Description of Artificial Sequence: Synthetic oligonucleotide
ugggaggguucaaagauau

SEQ ID NO: 2083691 - RNA, 19 nt, Artificial Sequence
  Description of Artificial Sequence: Synthetic oligonucleotide
uagguacacuuuaaccuca

SEQ ID NO: 2083692 - RNA, 19 nt, Artificial Sequence
  Description of Artificial Sequence: Synthetic oligonucleotide
agguccauuucuugaaaug

SEQ ID NO: 2083693 - RNA, 19 nt, Artificial Sequence
  Description of Artificial Sequence: Synthetic oligonucleotide
uuccagucgucauucaggu

SEQ ID NO: 2083694 - RNA, 19 nt, Artificial Sequence
  Description of Artificial Sequence: Synthetic oligonucleotide
ugccauagcccaaggcagg

SEQ ID NO: 2083695 - RNA, 19 nt, Artificial Sequence
  Description of Artificial Sequence: Synthetic oligonucleotide
acauagaaauguaaauaug

SEQ ID NO: 2083696 - RNA, 19 nt, Artificial Sequence
  Description of Artificial Sequence: Synthetic oligonucleotide
ucaagccuuggucccagcc

SEQ ID NO: 2083697 - RNA, 19 nt, Artificial Sequence
  Description of Artificial Sequence: Synthetic oligonucleotide
uuauguuuguggguggagu

SEQ ID NO: 2083698 - RNA, 19 nt, Artificial Sequence
  Description of Artificial Sequence: Synthetic oligonucleotide
cucaugggaggguucaaag

SEQ ID NO: 2083699 - RNA, 19 nt, Artificial Sequence
  Description of Artificial Sequence: Synthetic oligonucleotide
guacacuuuaaccucaugu

SEQ ID NO: 2083700 - RNA, 19 nt, Artificial Sequence
  Description of Artificial Sequence: Synthetic oligonucleotide
gagaacuucgauuuucacu

SEQ ID NO: 2083701 - RNA, 19 nt, Artificial Sequence
  Description of Artificial Sequence: Synthetic oligonucleotide
ggguguuugauuauucccg

SEQ ID NO: 2083702 - RNA, 19 nt, Artificial Sequence
  Description of Artificial Sequence: Synthetic oligonucleotide
gggaccuugggccauuucg

SEQ ID NO: 2083703 - RNA, 19 nt, Artificial Sequence
  Description of Artificial Sequence: Synthetic oligonucleotide
gucaagaucgcguuccaca

SEQ ID NO: 2083704 - RNA, 19 nt, Artificial Sequence
  Description of Artificial Sequence: Synthetic oligonucleotide
uucgucaugcacauaugua

SEQ ID NO: 2083705 - RNA, 19 nt, Artificial Sequence
  Description of Artificial Sequence: Synthetic oligonucleotide
ucauguuaccaaggcagag

SEQ ID NO: 2083706 - RNA, 19 nt, Artificial Sequence
  Description of Artificial Sequence: Synthetic oligonucleotide
ucgucauucagguccauuu

SEQ ID NO: 2083707 - RNA, 19 nt, Artificial Sequence
  Description of Artificial Sequence: Synthetic oligonucleotide
ucuugcuucucccuacaau

SEQ ID NO: 2083708 - RNA, 19 nt, Artificial Sequence
  Description of Artificial Sequence: Synthetic oligonucleotide
aggguccccgacuucauag

SEQ ID NO: 2083709 - RNA, 19 nt, Artificial Sequence
  Description of Artificial Sequence: Synthetic oligonucleotide
agagaaaggguccccgacu

SEQ ID NO: 2083710 - RNA, 19 nt, Artificial Sequence
  Description of Artificial Sequence: Synthetic oligonucleotide
guuugauuauucccgcuca

SEQ ID NO: 2083711 - RNA, 19 nt, Artificial Sequence
  Description of Artificial Sequence: Synthetic oligonucleotide
ucucccuacaauucgucau

SEQ ID NO: 2083712 - RNA, 19 nt, Artificial Sequence
  Description of Artificial Sequence: Synthetic oligonucleotide
cuuggucccagccuuugag

SEQ ID NO: 2083713 - RNA, 19 nt, Artificial Sequence
  Description of Artificial Sequence: Synthetic oligonucleotide
uccaccaaagcaucauggu

SEQ ID NO: 2083714 - RNA, 19 nt, Artificial Sequence
  Description of Artificial Sequence: Synthetic oligonucleotide
auucacuacugcaccgugc

SEQ ID NO: 2083715 - RNA, 19 nt, Artificial Sequence
  Description of Artificial Sequence: Synthetic oligonucleotide
auaggcugaccauuguuau

SEQ ID NO: 2083716 - RNA, 19 nt, Artificial Sequence
  Description of Artificial Sequence: Synthetic oligonucleotide
uucugagucaaaucauaua

SEQ ID NO: 2083717 - RNA, 19 nt, Artificial Sequence
  Description of Artificial Sequence: Synthetic oligonucleotide
aggcugaccauuguuaugu

SEQ ID NO: 2083718 - RNA, 19 nt, Artificial Sequence
  Description of Artificial Sequence: Synthetic oligonucleotide
uuugauuauucccgcucau

SEQ ID NO: 2083719 - RNA, 19 nt, Artificial Sequence
  Description of Artificial Sequence: Synthetic oligonucleotide
uauucccgcucaugggagg

SEQ ID NO: 2083720 - RNA, 19 nt, Artificial Sequence
  Description of Artificial Sequence: Synthetic oligonucleotide
acauaugaagucacaguug

SEQ ID NO: 2083721 - RNA, 19 nt, Artificial Sequence
  Description of Artificial Sequence: Synthetic oligonucleotide
uucucccuacaauucguca

SEQ ID NO: 2083722 - RNA, 19 nt, Artificial Sequence
  Description of Artificial Sequence: Synthetic oligonucleotide
auaugacacauagaagagu

SEQ ID NO: 2083723 - RNA, 19 nt, Artificial Sequence
  Description of Artificial Sequence: Synthetic oligonucleotide
cucguaguggaccaacauc

SEQ ID NO: 2083724 - RNA, 19 nt, Artificial Sequence
  Description of Artificial Sequence: Synthetic oligonucleotide
gucaauguugaauaucagu

SEQ ID NO: 2083725 - RNA, 19 nt, Artificial Sequence
  Description of Artificial Sequence: Synthetic oligonucleotide
gauaaucaagauucuugcu

SEQ ID NO: 2083726 - RNA, 19 nt, Artificial Sequence
  Description of Artificial Sequence: Synthetic oligonucleotide
aaagcugaacucacagcca

SEQ ID NO: 2083727 - RNA, 19 nt, Artificial Sequence
  Description of Artificial Sequence: Synthetic oligonucleotide
uagaagaguucugagucaa

SEQ ID NO: 2083728 - RNA, 19 nt, Artificial Sequence
  Description of Artificial Sequence: Synthetic oligonucleotide
cuggcucaggaaucaaagc

SEQ ID NO: 2083729 - RNA, 19 nt, Artificial Sequence
  Description of Artificial Sequence: Synthetic oligonucleotide
uccccgacuucauagaguu

SEQ ID NO: 2083730 - RNA, 19 nt, Artificial Sequence
  Description of Artificial Sequence: Synthetic oligonucleotide
gguucaaagauauugcuau

SEQ ID NO: 2083731 - RNA, 19 nt, Artificial Sequence
  Description of Artificial Sequence: Synthetic oligonucleotide
gaugaacggcuucuggaga

SEQ ID NO: 2083732 - RNA, 19 nt, Artificial Sequence
  Description of Artificial Sequence: Synthetic oligonucleotide
gacugaugcagagcuauac

SEQ ID NO: 2083733 - RNA, 19 nt, Artificial Sequence
  Description of Artificial Sequence: Synthetic oligonucleotide
cauuucgaaucuccagaag

SEQ ID NO: 2083734 - RNA, 19 nt, Artificial Sequence
  Description of Artificial Sequence: Synthetic oligonucleotide
cuuugccauagcccaaggc

SEQ ID NO: 2083735 - RNA, 19 nt, Artificial Sequence
  Description of Artificial Sequence: Synthetic oligonucleotide
gguguuugauuauucccgc

SEQ ID NO: 2083736 - RNA, 19 nt, Artificial Sequence
  Description of Artificial Sequence: Synthetic oligonucleotide
aggcagauggcuaaaacaa

SEQ ID NO: 2083737 - RNA, 19 nt, Artificial Sequence
  Description of Artificial Sequence: Synthetic oligonucleotide
gacacauagaagaguucug

SEQ ID NO: 2083738 - RNA, 19 nt, Artificial Sequence
  Description of Artificial Sequence: Synthetic oligonucleotide
ucaugcacauauguaaauu

SEQ ID NO: 2083739 - RNA, 19 nt, Artificial Sequence
  Description of Artificial Sequence: Synthetic oligonucleotide
gaugcagagcuauacaauu

SEQ ID NO: 2083740 - RNA, 19 nt, Artificial Sequence
  Description of Artificial Sequence: Synthetic oligonucleotide
ggaauguuuagcugaggac

SEQ ID NO: 2083741 - RNA, 19 nt, Artificial Sequence
  Description of Artificial Sequence: Synthetic oligonucleotide
gaucgcguuccacaaagaa

SEQ ID NO: 2083742 - RNA, 19 nt, Artificial Sequence
  Description of Artificial Sequence: Synthetic oligonucleotide
uucaugggaccuugggcca

SEQ ID NO: 2083743 - RNA, 19 nt, Artificial Sequence
  Description of Artificial Sequence: Synthetic oligonucleotide
uguuauguuugugggugga

SEQ ID NO: 2083744 - RNA, 19 nt, Artificial Sequence
  Description of Artificial Sequence: Synthetic oligonucleotide
aauucgucaugcacauaug

SEQ ID NO: 2083745 - RNA, 19 nt, Artificial Sequence
  Description of Artificial Sequence: Synthetic oligonucleotide
cugagucaaaucauauaca

SEQ ID NO: 2083746 - RNA, 19 nt, Artificial Sequence
  Description of Artificial Sequence: Synthetic oligonucleotide
ccuacaauucgucaugcac

SEQ ID NO: 2083747 - RNA, 19 nt, Artificial Sequence
  Description of Artificial Sequence: Synthetic oligonucleotide
gacucucauucacuacugc

SEQ ID NO: 2083748 - RNA, 19 nt, Artificial Sequence
  Description of Artificial Sequence: Synthetic oligonucleotide
uucauacuuguuggaaugu

SEQ ID NO: 2083749 - RNA, 19 nt, Artificial Sequence
  Description of Artificial Sequence: Synthetic oligonucleotide
acaaccaugauuacagauu

SEQ ID NO: 2083750 - RNA, 19 nt, Artificial Sequence
  Description of Artificial Sequence: Synthetic oligonucleotide
cauguuuagagaguuucca

SEQ ID NO: 2083751 - RNA, 19 nt, Artificial Sequence
  Description of Artificial Sequence: Synthetic oligonucleotide
augcacauauguaaauucu

SEQ ID NO: 2083752 - RNA, 19 nt, Artificial Sequence
  Description of Artificial Sequence: Synthetic oligonucleotide
ggaaucaaagcugaacuca

SEQ ID NO: 2083753 - RNA, 19 nt, Artificial Sequence
  Description of Artificial Sequence: Synthetic oligonucleotide
agugaaacagagagccguc

SEQ ID NO: 2083754 - RNA, 19 nt, Artificial Sequence
  Description of Artificial Sequence: Synthetic oligonucleotide
gaaaugauucaugggaccu

SEQ ID NO: 2083755 - RNA, 19 nt, Artificial Sequence
  Description of Artificial Sequence: Synthetic oligonucleotide
ucauucacuacugcaccgu

SEQ ID NO: 2083756 - RNA, 19 nt, Artificial Sequence
  Description of Artificial Sequence: Synthetic oligonucleotide
accucauguuaccaaggca

SEQ ID NO: 2083757 - RNA, 19 nt, Artificial Sequence
  Description of Artificial Sequence: Synthetic oligonucleotide
agagccguccuuuucuaaa

SEQ ID NO: 2083758 - RNA, 19 nt, Artificial Sequence
  Description of Artificial Sequence: Synthetic oligonucleotide
cagaugaacggcuucugga

SEQ ID NO: 2083759 - RNA, 19 nt, Artificial Sequence
  Description of Artificial Sequence: Synthetic oligonucleotide
ugauuacagauuugucuuu

SEQ ID NO: 2083760 - RNA, 19 nt, Artificial Sequence
  Description of Artificial Sequence: Synthetic oligonucleotide
augccgaaagcgacgacgg

SEQ ID NO: 2083761 - RNA, 19 nt, Artificial Sequence
  Description of Artificial Sequence: Synthetic oligonucleotide
ucccuuggucuugcgaugg

SEQ ID NO: 2083762 - RNA, 19 nt, Artificial Sequence
  Description of Artificial Sequence: Synthetic oligonucleotide
agaguuuccagucgucauu

SEQ ID NO: 2083763 - RNA, 19 nt, Artificial Sequence
  Description of Artificial Sequence: Synthetic oligonucleotide
cucccuacaauucgucaug

SEQ ID NO: 2083764 - RNA, 19 nt, Artificial Sequence
  Description of Artificial Sequence: Synthetic oligonucleotide
ucauggugacucucauuca

SEQ ID NO: 2083765 - RNA, 19 nt, Artificial Sequence
  Description of Artificial Sequence: Synthetic oligonucleotide
agagaguuuccagucguca

SEQ ID NO: 2083766 - RNA, 19 nt, Artificial Sequence
  Description of Artificial Sequence: Synthetic oligonucleotide
caauucgucaugcacauau

SEQ ID NO: 2083767 - RNA, 19 nt, Artificial Sequence
  Description of Artificial Sequence: Synthetic oligonucleotide
acuacugcaccgugcuucu

SEQ ID NO: 2083768 - RNA, 19 nt, Artificial Sequence
  Description of Artificial Sequence: Synthetic oligonucleotide
cagauggcuaaaacaacca

SEQ ID NO: 2083769 - RNA, 19 nt, Artificial Sequence
  Description of Artificial Sequence: Synthetic oligonucleotide
agauucuugcuucucccua

SEQ ID NO: 2083770 - RNA, 19 nt, Artificial Sequence
  Description of Artificial Sequence: Synthetic oligonucleotide
aauccaucuuugucuucau

SEQ ID NO: 2083771 - RNA, 19 nt, Artificial Sequence
  Description of Artificial Sequence: Synthetic oligonucleotide
uggugacucucauucacua

SEQ ID NO: 2083772 - RNA, 19 nt, Artificial Sequence
  Description of Artificial Sequence: Synthetic oligonucleotide
augacccacagugucaaga

SEQ ID NO: 2083773 - RNA, 19 nt, Artificial Sequence
  Description of Artificial Sequence: Synthetic oligonucleotide
auauacauaugaagucaca

SEQ ID NO: 2083774 - RNA, 19 nt, Artificial Sequence
  Description of Artificial Sequence: Synthetic oligonucleotide
gagugaaacagagagccgu

SEQ ID NO: 2083775 - RNA, 19 nt, Artificial Sequence
  Description of Artificial Sequence: Synthetic oligonucleotide
aggacugaugcagagcuau

SEQ ID NO: 2083776 - RNA, 19 nt, Artificial Sequence
  Description of Artificial Sequence: Synthetic oligonucleotide
cacuacugcaccgugcuuc

SEQ ID NO: 2083777 - RNA, 19 nt, Artificial Sequence
  Description of Artificial Sequence: Synthetic oligonucleotide
guuauguuuguggguggag

SEQ ID NO: 2083778 - RNA, 19 nt, Artificial Sequence
  Description of Artificial Sequence: Synthetic oligonucleotide
uuggauaaucaagauucuu

SEQ ID NO: 2083779 - RNA, 19 nt, Artificial Sequence
  Description of Artificial Sequence: Synthetic oligonucleotide
cagagaaaggguccccgac

SEQ ID NO: 2083780 - RNA, 19 nt, Artificial Sequence
  Description of Artificial Sequence: Synthetic oligonucleotide
gugcuucucaaacucuuuc

SEQ ID NO: 2083781 - RNA, 19 nt, Artificial Sequence
  Description of Artificial Sequence: Synthetic oligonucleotide
cauucacuacugcaccgug

SEQ ID NO: 2083782 - RNA, 19 nt, Artificial Sequence
  Description of Artificial Sequence: Synthetic oligonucleotide
auaugccgaaagcgacgac

SEQ ID NO: 2083783 - RNA, 19 nt, Artificial Sequence
  Description of Artificial Sequence: Synthetic oligonucleotide
caauguugaauaucagugu

SEQ ID NO: 2083784 - RNA, 19 nt, Artificial Sequence
  Description of Artificial Sequence: Synthetic oligonucleotide
auuggauaaucaagauucu

SEQ ID NO: 2083785 - RNA, 19 nt, Artificial Sequence
  Description of Artificial Sequence: Synthetic oligonucleotide
aaccucauguuuagagagu

SEQ ID NO: 2083786 - RNA, 19 nt, Artificial Sequence
  Description of Artificial Sequence: Synthetic oligonucleotide
ucccuacaauucgucaugc

SEQ ID NO: 2083787 - RNA, 19 nt, Artificial Sequence
  Description of Artificial Sequence: Synthetic oligonucleotide
auucccgcucaugggaggg

SEQ ID NO: 2083788 - RNA, 19 nt, Artificial Sequence
  Description of Artificial Sequence: Synthetic oligonucleotide
aaauucucuagcagauaua

SEQ ID NO: 2083789 - RNA, 19 nt, Artificial Sequence
  Description of Artificial Sequence: Synthetic oligonucleotide
ccuucuuugccauagccca

SEQ ID NO: 2083790 - RNA, 19 nt, Artificial Sequence
  Description of Artificial Sequence: Synthetic oligonucleotide
uguuaccaaggcagagaaa

SEQ ID NO: 2083791 - RNA, 19 nt, Artificial Sequence
  Description of Artificial Sequence: Synthetic oligonucleotide
cuugcuucucccuacaauu

SEQ ID NO: 2083792 - RNA, 19 nt, Artificial Sequence
  Description of Artificial Sequence: Synthetic oligonucleotide
augcagagcuauacaauug

SEQ ID NO: 2083793 - RNA, 19 nt, Artificial Sequence
  Description of Artificial Sequence: Synthetic oligonucleotide
uguuuagcugaggacugau

SEQ ID NO: 2083794 - RNA, 19 nt, Artificial Sequence
  Description of Artificial Sequence: Synthetic oligonucleotide
cauguuaccaaggcagaga

SEQ ID NO: 2083795 - RNA, 19 nt, Artificial Sequence
  Description of Artificial Sequence: Synthetic oligonucleotide
gaccauuguuauguuugug

SEQ ID NO: 2083796 - RNA, 19 nt, Artificial Sequence
  Description of Artificial Sequence: Synthetic oligonucleotide
aacucacagccaugaccca

SEQ ID NO: 2083797 - RNA, 19 nt, Artificial Sequence
  Description of Artificial Sequence: Synthetic oligonucleotide
ucauacuuguuggaauguu

SEQ ID NO: 2083798 - RNA, 19 nt, Artificial Sequence
  Description of Artificial Sequence: Synthetic oligonucleotide
cucauguuaccaaggcaga

SEQ ID NO: 2083799 - RNA, 19 nt, Artificial Sequence
  Description of Artificial Sequence: Synthetic oligonucleotide
guugaauaucagugugcuc

SEQ ID NO: 2083800 - RNA, 19 nt, Artificial Sequence
  Description of Artificial Sequence: Synthetic oligonucleotide
aguucugagucaaaucaua

SEQ ID NO: 2083801 - RNA, 19 nt, Artificial Sequence
  Description of Artificial Sequence: Synthetic oligonucleotide
acuucgauuuucacuucug

SEQ ID NO: 2083802 - RNA, 19 nt, Artificial Sequence
  Description of Artificial Sequence: Synthetic oligonucleotide
cacagugucaagaucgcgu

SEQ ID NO: 2083803 - RNA, 19 nt, Artificial Sequence
  Description of Artificial Sequence: Synthetic oligonucleotide
auccccuucaagccuuggu

SEQ ID NO: 2083804 - RNA, 19 nt, Artificial Sequence
  Description of Artificial Sequence: Synthetic oligonucleotide
agcaucauggugacucuca

SEQ ID NO: 2083805 - RNA, 19 nt, Artificial Sequence
  Description of Artificial Sequence: Synthetic oligonucleotide
gaauaucacaauagacaua

SEQ ID NO: 2083806 - RNA, 19 nt, Artificial Sequence
  Description of Artificial Sequence: Synthetic oligonucleotide
caugggaggguucaaagau

SEQ ID NO: 2083807 - RNA, 19 nt, Artificial Sequence
  Description of Artificial Sequence: Synthetic oligonucleotide
cugaggacugaugcagagc

SEQ ID NO: 2083808 - RNA, 19 nt, Artificial Sequence
  Description of Artificial Sequence: Synthetic oligonucleotide
uggcuaaaacaaccaugau

SEQ ID NO: 2083809 - RNA, 19 nt, Artificial Sequence
  Description of Artificial Sequence: Synthetic oligonucleotide
auguuuguggguggaguga

SEQ ID NO: 2083810 - RNA, 19 nt, Artificial Sequence
  Description of Artificial Sequence: Synthetic oligonucleotide
aucgcguuccacaaagaaa

SEQ ID NO: 2083811 - RNA, 19 nt, Artificial Sequence
  Description of Artificial Sequence: Synthetic oligonucleotide
aucccuccaccaaagcauc

SEQ ID NO: 2083812 - RNA, 19 nt, Artificial Sequence
  Description of Artificial Sequence: Synthetic oligonucleotide
gcugaggacugaugcagag

SEQ ID NO: 2083813 - RNA, 19 nt, Artificial Sequence
  Description of Artificial Sequence: Synthetic oligonucleotide
ucuugcgauggcagaugaa

SEQ ID NO: 2083814 - RNA, 19 nt, Artificial Sequence
  Description of Artificial Sequence: Synthetic oligonucleotide
accucauguuuagagaguu

SEQ ID NO: 2083815 - RNA, 19 nt, Artificial Sequence
  Description of Artificial Sequence: Synthetic oligonucleotide
ccagauaggcugaccauug

SEQ ID NO: 2083816 - RNA, 19 nt, Artificial Sequence
  Description of Artificial Sequence: Synthetic oligonucleotide
agucacaguuggguguuug

SEQ ID NO: 2083817 - RNA, 19 nt, Artificial Sequence
  Description of Artificial Sequence: Synthetic oligonucleotide
gagucaaaucauauacaua

SEQ ID NO: 2083818 - RNA, 19 nt, Artificial Sequence
  Description of Artificial Sequence: Synthetic oligonucleotide
accagauaggcugaccauu

SEQ ID NO: 2083819 - RNA, 19 nt, Artificial Sequence
  Description of Artificial Sequence: Synthetic oligonucleotide
ugucaagaucgcguuccac

SEQ ID NO: 2083820 - RNA, 19 nt, Artificial Sequence
  Description of Artificial Sequence: Synthetic oligonucleotide
uggucuugcgauggcagau

SEQ ID NO: 2083821 - RNA, 19 nt, Artificial Sequence
  Description of Artificial Sequence: Synthetic oligonucleotide
gucuugcgauggcagauga

SEQ ID NO: 2083822 - RNA, 19 nt, Artificial Sequence
  Description of Artificial Sequence: Synthetic oligonucleotide
gguccccgacuucauagag

SEQ ID NO: 2083823 - RNA, 19 nt, Artificial Sequence
  Description of Artificial Sequence: Synthetic oligonucleotide
gucacaguuggguguuuga

SEQ ID NO: 2083824 - RNA, 19 nt, Artificial Sequence
  Description of Artificial Sequence: Synthetic oligonucleotide
cauuguuauguuugugggu

SEQ ID NO: 2083825 - RNA, 19 nt, Artificial Sequence
  Description of Artificial Sequence: Synthetic oligonucleotide
guucaaagauauugcuaua

SEQ ID NO: 2083826 - RNA, 19 nt, Artificial Sequence
  Description of Artificial Sequence: Synthetic oligonucleotide
ggugacucucauucacuac

SEQ ID NO: 2083827 - RNA, 19 nt, Artificial Sequence
  Description of Artificial Sequence: Synthetic oligonucleotide
aguuggguguuugauuauu

SEQ ID NO: 2083828 - RNA, 19 nt, Artificial Sequence
  Description of Artificial Sequence: Synthetic oligonucleotide
caauuggauaaucaagauu

SEQ ID NO: 2083829 - RNA, 19 nt, Artificial Sequence
  Description of Artificial Sequence: Synthetic oligonucleotide
auggugacucucauucacu

SEQ ID NO: 2083830 - RNA, 19 nt, Artificial Sequence
  Description of Artificial Sequence: Synthetic oligonucleotide
acugcaccgugcuucucaa

SEQ ID NO: 2083831 - RNA, 19 nt, Artificial Sequence
  Description of Artificial Sequence: Synthetic oligonucleotide
ugaacggcuucuggagaac

SEQ ID NO: 2083832 - RNA, 19 nt, Artificial Sequence
  Description of Artificial Sequence: Synthetic oligonucleotide
gaccuugggccauuucgaa

SEQ ID NO: 2083833 - RNA, 19 nt, Artificial Sequence
  Description of Artificial Sequence: Synthetic oligonucleotide
ccagggugaaccagauagg

SEQ ID NO: 2083834 - RNA, 19 nt, Artificial Sequence
  Description of Artificial Sequence: Synthetic oligonucleotide
ggaggaaugaugagcuuuc

SEQ ID NO: 2083835 - RNA, 19 nt, Artificial Sequence
  Description of Artificial Sequence: Synthetic oligonucleotide
gaaacagagagccguccuu

SEQ ID NO: 2083836 - RNA, 19 nt, Artificial Sequence
  Description of Artificial Sequence: Synthetic oligonucleotide
cagagcuauacaauuggau

SEQ ID NO: 2083837 - RNA, 19 nt, Artificial Sequence
  Description of Artificial Sequence: Synthetic oligonucleotide
agggugaaccagauaggcu

SEQ ID NO: 2083838 - RNA, 19 nt, Artificial Sequence
  Description of Artificial Sequence: Synthetic oligonucleotide
ccaugauuacagauuuguc

SEQ ID NO: 2083839 - RNA, 19 nt, Artificial Sequence
  Description of Artificial Sequence: Synthetic oligonucleotide
cgauuuucacuucuggcuc

SEQ ID NO: 2083840 - RNA, 19 nt, Artificial Sequence
  Description of Artificial Sequence: Synthetic oligonucleotide
gcugaacucacagccauga

SEQ ID NO: 2083841 - RNA, 19 nt, Artificial Sequence
  Description of Artificial Sequence: Synthetic oligonucleotide
gguacacuuuaaccucaug

SEQ ID NO: 2083842 - RNA, 19 nt, Artificial Sequence
  Description of Artificial Sequence: Synthetic oligonucleotide
cccaaauaaacuuuauuau

SEQ ID NO: 2083843 - RNA, 19 nt, Artificial Sequence
  Description of Artificial Sequence: Synthetic oligonucleotide
auguuuagcugaggacuga

SEQ ID NO: 2083844 - RNA, 19 nt, Artificial Sequence
  Description of Artificial Sequence: Synthetic oligonucleotide
uucaagccuuggucccagc

SEQ ID NO: 2083845 - RNA, 19 nt, Artificial Sequence
  Description of Artificial Sequence: Synthetic oligonucleotide
gcuauacaauuggauaauc

SEQ ID NO: 2083846 - RNA, 19 nt, Artificial Sequence
  Description of Artificial Sequence: Synthetic oligonucleotide
guaaauucucuagcagaua

SEQ ID NO: 2083847 - RNA, 19 nt, Artificial Sequence
  Description of Artificial Sequence: Synthetic oligonucleotide
caugacccacagugucaag

SEQ ID NO: 2083848 - RNA, 19 nt, Artificial Sequence
  Description of Artificial Sequence: Synthetic oligonucleotide
gucaugcacauauguaaau

SEQ ID NO: 2083849 - RNA, 19 nt, Artificial Sequence
  Description of Artificial Sequence: Synthetic oligonucleotide
gagccuccaggaugcccag

SEQ ID NO: 2083850 - RNA, 19 nt, Artificial Sequence
  Description of Artificial Sequence: Synthetic oligonucleotide
uccagucgucauucagguc

SEQ ID NO: 2083851 - RNA, 19 nt, Artificial Sequence
  Description of Artificial Sequence: Synthetic oligonucleotide
cagugucaagaucgcguuc

SEQ ID NO: 2083852 - RNA, 19 nt, Artificial Sequence
  Description of Artificial Sequence: Synthetic oligonucleotide
auucucuagcagauauaaa

SEQ ID NO: 2083853 - RNA, 19 nt, Artificial Sequence
  Description of Artificial Sequence: Synthetic oligonucleotide
ggcagauggcuaaaacaac

SEQ ID NO: 2083854 - RNA, 19 nt, Artificial Sequence
  Description of Artificial Sequence: Synthetic oligonucleotide
guucugagucaaaucauau

SEQ ID NO: 2083855 - RNA, 19 nt, Artificial Sequence
  Description of Artificial Sequence: Synthetic oligonucleotide
cuuuaaccucauguuuaga

SEQ ID NO: 2083856 - RNA, 19 nt, Artificial Sequence
  Description of Artificial Sequence: Synthetic oligonucleotide
gagagccguccuuuucuaa

SEQ ID NO: 2083857 - RNA, 19 nt, Artificial Sequence
  Description of Artificial Sequence: Synthetic oligonucleotide
cagucgucauucaggucca

SEQ ID NO: 2083858 - RNA, 19 nt, Artificial Sequence
  Description of Artificial Sequence: Synthetic oligonucleotide
gcgauggcagaugaacggc

SEQ ID NO: 2083859 - RNA, 19 nt, Artificial Sequence
  Description of Artificial Sequence: Synthetic oligonucleotide
guggguggagugaaacaga

SEQ ID NO: 2083860 - RNA, 19 nt, Artificial Sequence
  Description of Artificial Sequence: Synthetic oligonucleotide
ucacuacugcaccgugcuu

SEQ ID NO: 2083861 - RNA, 19 nt, Artificial Sequence
  Description of Artificial Sequence: Synthetic oligonucleotide
agcccaaggcaggaggaau

SEQ ID NO: 2083862 - RNA, 19 nt, Artificial Sequence
  Description of Artificial Sequence: Synthetic oligonucleotide
guguuugauuauucccgcu

SEQ ID NO: 2083863 - RNA, 19 nt, Artificial Sequence
  Description of Artificial Sequence: Synthetic oligonucleotide
gugucaagaucgcguucca

SEQ ID NO: 2083864 - RNA, 19 nt, Artificial Sequence
  Description of Artificial Sequence: Synthetic oligonucleotide
accgugcuucucaaacucu

SEQ ID NO: 2083865 - RNA, 19 nt, Artificial Sequence
  Description of Artificial Sequence: Synthetic oligonucleotide
ggguucaaagauauugcua

SEQ ID NO: 2083866 - RNA, 19 nt, Artificial Sequence
  Description of Artificial Sequence: Synthetic oligonucleotide
caagccuuggucccagccu

SEQ ID NO: 2083867 - RNA, 19 nt, Artificial Sequence
  Description of Artificial Sequence: Synthetic oligonucleotide
agcugaggacugaugcaga

SEQ ID NO: 2083868 - RNA, 19 nt, Artificial Sequence
  Description of Artificial Sequence: Synthetic oligonucleotide
ggucuugcgauggcagaug

SEQ ID NO: 2083869 - RNA, 19 nt, Artificial Sequence
  Description of Artificial Sequence: Synthetic oligonucleotide
cccgacuucauagaguuaa

SEQ ID NO: 2083870 - RNA, 19 nt, Artificial Sequence
  Description of Artificial Sequence: Synthetic oligonucleotide
ggaccuugggccauuucga

SEQ ID NO: 2083871 - RNA, 19 nt, Artificial Sequence
  Description of Artificial Sequence: Synthetic oligonucleotide
ugggaccuugggccauuuc

SEQ ID NO: 2083872 - RNA, 19 nt, Artificial Sequence
  Description of Artificial Sequence: Synthetic oligonucleotide
ucaugggaccuugggccau

SEQ ID NO: 2083873 - RNA, 19 nt, Artificial Sequence
  Description of Artificial Sequence: Synthetic oligonucleotide
caagaucgcguuccacaaa

SEQ ID NO: 2083874 - RNA, 19 nt, Artificial Sequence
  Description of Artificial Sequence: Synthetic oligonucleotide
agaagaguucugagucaaa

SEQ ID NO: 2083875 - RNA, 19 nt, Artificial Sequence
  Description of Artificial Sequence: Synthetic oligonucleotide
agaucgcguuccacaaaga

SEQ ID NO: 2083876 - RNA, 19 nt, Artificial Sequence
  Description of Artificial Sequence: Synthetic oligonucleotide
cauccccuucaagccuugg

SEQ ID NO: 2083877 - RNA, 19 nt, Artificial Sequence
  Description of Artificial Sequence: Synthetic oligonucleotide
ugagagccuccaggaugcc

SEQ ID NO: 2083878 - RNA, 19 nt, Artificial Sequence
  Description of Artificial Sequence: Synthetic oligonucleotide
cguaguggaccaacaucag

SEQ ID NO: 2083879 - RNA, 19 nt, Artificial Sequence
  Description of Artificial Sequence: Synthetic oligonucleotide
cacaguuggguguuugauu

SEQ ID NO: 2083880 - RNA, 19 nt, Artificial Sequence
  Description of Artificial Sequence: Synthetic oligonucleotide
gcagagcuauacaauugga

SEQ ID NO: 2083881 - RNA, 19 nt, Artificial Sequence
  Description of Artificial Sequence: Synthetic oligonucleotide
uccccucccuuggucuugc

SEQ ID NO: 2083882 - RNA, 19 nt, Artificial Sequence
  Description of Artificial Sequence: Synthetic oligonucleotide
agguacacuuuaaccucau

SEQ ID NO: 2083883 - RNA, 19 nt, Artificial Sequence
  Description of Artificial Sequence: Synthetic oligonucleotide
gaggaaugaugagcuuucu

SEQ ID NO: 2083884 - RNA, 19 nt, Artificial Sequence
  Description of Artificial Sequence: Synthetic oligonucleotide
ccacagugucaagaucgcg

SEQ ID NO: 2083885 - RNA, 19 nt, Artificial Sequence
  Description of Artificial Sequence: Synthetic oligonucleotide
cuuugagagccuccaggau

SEQ ID NO: 2083886 - RNA, 19 nt, Artificial Sequence
  Description of Artificial Sequence: Synthetic oligonucleotide
cgucauucagguccauuuc

SEQ ID NO: 2083887 - RNA, 19 nt, Artificial Sequence
  Description of Artificial Sequence: Synthetic oligonucleotide
cuugggccauuucgaaucu

SEQ ID NO: 2083888 - RNA, 19 nt, Artificial Sequence
  Description of Artificial Sequence: Synthetic oligonucleotide
cgucaugcacauauguaaa

SEQ ID NO: 2083889 - RNA, 19 nt, Artificial Sequence
  Description of Artificial Sequence: Synthetic oligonucleotide
ucccgcucaugggaggguu

SEQ ID NO: 2083890 - RNA, 19 nt, Artificial Sequence
  Description of Artificial Sequence: Synthetic oligonucleotide
gccaugacccacaguguca

SEQ ID NO: 2083891 - RNA, 19 nt, Artificial Sequence
  Description of Artificial Sequence: Synthetic oligonucleotide
ggguccccgacuucauaga

SEQ ID NO: 2083892 - RNA, 19 nt, Artificial Sequence
  Description of Artificial Sequence: Synthetic oligonucleotide
acaauucgucaugcacaua

SEQ ID NO: 2083893 - RNA, 19 nt, Artificial Sequence
  Description of Artificial Sequence: Synthetic oligonucleotide
gccgaaagcgacgacggcu

SEQ ID NO: 2083894 - RNA, 19 nt, Artificial Sequence
  Description of Artificial Sequence: Synthetic oligonucleotide
cagauaggcugaccauugu

SEQ ID NO: 2083895 - RNA, 19 nt, Artificial Sequence
  Description of Artificial Sequence: Synthetic oligonucleotide
gcaccgugcuucucaaacu

SEQ ID NO: 2083896 - RNA, 19 nt, Artificial Sequence
  Description of Artificial Sequence: Synthetic oligonucleotide
cuucuggcucaggaaucaa

SEQ ID NO: 2083897 - RNA, 19 nt, Artificial Sequence
  Description of Artificial Sequence: Synthetic oligonucleotide
gcugaccauuguuauguuu

SEQ ID NO: 2083898 - RNA, 19 nt, Artificial Sequence
  Description of Artificial Sequence: Synthetic oligonucleotide
cccuacaauucgucaugca

SEQ ID NO: 2083899 - RNA, 19 nt, Artificial Sequence
  Description of Artificial Sequence: Synthetic oligonucleotide
cccuuggucuugcgauggc

SEQ ID NO: 2083900 - RNA, 19 nt, Artificial Sequence
  Description of Artificial Sequence: Synthetic oligonucleotide
gcccucguaguggaccaac

SEQ ID NO: 2083901 - RNA, 19 nt, Artificial Sequence
  Description of Artificial Sequence: Synthetic oligonucleotide
caguuggguguuugauuau

SEQ ID NO: 2083902 - RNA, 19 nt, Artificial Sequence
  Description of Artificial Sequence: Synthetic oligonucleotide
cccaaggcaggaggaauga

SEQ ID NO: 2083903 - RNA, 19 nt, Artificial Sequence
  Description of Artificial Sequence: Synthetic oligonucleotide
agucgucauucagguccau

SEQ ID NO: 2083904 - RNA, 19 nt, Artificial Sequence
  Description of Artificial Sequence: Synthetic oligonucleotide
cugcaccgugcuucucaaa

SEQ ID NO: 2083905 - RNA, 19 nt, Artificial Sequence
  Description of Artificial Sequence: Synthetic oligonucleotide
ccgacuucauagaguuaaa

SEQ ID NO: 2083906 - RNA, 19 nt, Artificial Sequence
  Description of Artificial Sequence: Synthetic oligonucleotide
augggaccuugggccauuu

SEQ ID NO: 2083907 - RNA, 19 nt, Artificial Sequence
  Description of Artificial Sequence: Synthetic oligonucleotide
gucgucauucagguccauu

SEQ ID NO: 2083908 - RNA, 19 nt, Artificial Sequence
  Description of Artificial Sequence: Synthetic oligonucleotide
cccgcucaugggaggguuc

SEQ ID NO: 2083909 - RNA, 19 nt, Artificial Sequence
  Description of Artificial Sequence: Synthetic oligonucleotide
agcccucguaguggaccaa

SEQ ID NO: 2083910 - RNA, 19 nt, Artificial Sequence
  Description of Artificial Sequence: Synthetic oligonucleotide
ccuuggucccagccuuuga

SEQ ID NO: 2083911 - RNA, 19 nt, Artificial Sequence
  Description of Artificial Sequence: Synthetic oligonucleotide
ccgaaagcgacgacggcuu

SEQ ID NO: 2083912 - RNA, 19 nt, Artificial Sequence
  Description of Artificial Sequence: Synthetic oligonucleotide
ggacugaugcagagcuaua

SEQ ID NO: 2083913 - RNA, 19 nt, Artificial Sequence
  Description of Artificial Sequence: Synthetic oligonucleotide
cccucccuuggucuugcga

SEQ ID NO: 2083914 - RNA, 19 nt, Artificial Sequence
  Description of Artificial Sequence: Synthetic oligonucleotide
cccagccuuugagagccuc

SEQ ID NO: 2083915 - RNA, 19 nt, Artificial Sequence
  Description of Artificial Sequence: Synthetic oligonucleotide
gaccaacaucagguccccu

SEQ ID NO: 2083916 - RNA, 19 nt, Artificial Sequence
  Description of Artificial Sequence: Synthetic oligonucleotide
cgauggcagaugaacggcu

SEQ ID NO: 2083917 - RNA, 19 nt, Artificial Sequence
  Description of Artificial Sequence: Synthetic oligonucleotide
ccucguaguggaccaacau

SEQ ID NO: 2083918 - RNA, 19 nt, Artificial Sequence
  Description of Artificial Sequence: Synthetic oligonucleotide
ccgcucaugggaggguuca

SEQ ID NO: 2083919 - RNA, 19 nt, Artificial Sequence
  Description of Artificial Sequence: Synthetic oligonucleotide
ccgugcuucucaaacucuu

SEQ ID NO: 2083920 - RNA, 19 nt, Artificial Sequence
  Description of Artificial Sequence: Synthetic oligonucleotide
ggcugaccauuguuauguu

SEQ ID NO: 2083921 - RNA, 19 nt, Artificial Sequence
  Description of Artificial Sequence: Synthetic oligonucleotide
gguccccucccuuggucuu

SEQ ID NO: 2083922 - RNA, 19 nt, Artificial Sequence
  Description of Artificial Sequence: Synthetic oligonucleotide
gcccagggugaaccagaua

SEQ ID NO: 2083923 - RNA, 19 nt, Artificial Sequence
  Description of Artificial Sequence: Synthetic oligonucleotide
gggaggguucaaagauauu

SEQ ID NO: 2083924 - RNA, 19 nt, Artificial Sequence
  Description of Artificial Sequence: Synthetic oligonucleotide
ccccgacuucauagaguua

SEQ ID NO: 2083925 - RNA, 19 nt, Artificial Sequence
  Description of Artificial Sequence: Synthetic oligonucleotide
ccaaggcaggaggaaugau

SEQ ID NO: 2083926 - RNA, 19 nt, Artificial Sequence
  Description of Artificial Sequence: Synthetic oligonucleotide
aaugauaaucuucucuucc

SEQ ID NO: 2083927 - RNA, 19 nt, Artificial Sequence
  Description of Artificial Sequence: Synthetic oligonucleotide
aauuaucucgcacaccugc

SEQ ID NO: 2083928 - RNA, 19 nt, Artificial Sequence
  Description of Artificial Sequence: Synthetic oligonucleotide
uugauuauaucgaugacag

SEQ ID NO: 2083929 - RNA, 19 nt, Artificial Sequence
  Description of Artificial Sequence: Synthetic oligonucleotide
aucacuucgauauuucgcc

SEQ ID NO: 2083930 - RNA, 19 nt, Artificial Sequence
  Description of Artificial Sequence: Synthetic oligonucleotide
uaaaaugagcuucacgcgg

SEQ ID NO: 2083931 - RNA, 19 nt, Artificial Sequence
  Description of Artificial Sequence: Synthetic oligonucleotide
cucuccauugauuauaucg

SEQ ID NO: 2083932 - RNA, 19 nt, Artificial Sequence
  Description of Artificial Sequence: Synthetic oligonucleotide
gauuauaucgaugacagac

SEQ ID NO: 2083933 - RNA, 19 nt, Artificial Sequence
  Description of Artificial Sequence: Synthetic oligonucleotide
ucaauuaucucgcacaccu

SEQ ID NO: 2083934 - RNA, 19 nt, Artificial Sequence
  Description of Artificial Sequence: Synthetic oligonucleotide
agaacguugaacuuguuca

SEQ ID NO: 2083935 - RNA, 19 nt, Artificial Sequence
  Description of Artificial Sequence: Synthetic oligonucleotide
auugcauugaucauaaaag

SEQ ID NO: 2083936 - RNA, 19 nt, Artificial Sequence
  Description of Artificial Sequence: Synthetic oligonucleotide
gauguugaggaugacaagg

SEQ ID NO: 2083937 - RNA, 19 nt, Artificial Sequence
  Description of Artificial Sequence: Synthetic oligonucleotide
ugcucuuuuauuaaugaca

SEQ ID NO: 2083938 - RNA, 19 nt, Artificial Sequence
  Description of Artificial Sequence: Synthetic oligonucleotide
uucucuaaggggaauguag

SEQ ID NO: 2083939 - RNA, 19 nt, Artificial Sequence
  Description of Artificial Sequence: Synthetic oligonucleotide
gacaaggggaugaagagcg

SEQ ID NO: 2083940 - RNA, 19 nt, Artificial Sequence
  Description of Artificial Sequence: Synthetic oligonucleotide
acauggucuacaccgauac

SEQ ID NO: 2083941 - RNA, 19 nt, Artificial Sequence
  Description of Artificial Sequence: Synthetic oligonucleotide
ucuccauugauuauaucga

SEQ ID NO: 2083942 - RNA, 19 nt, Artificial Sequence
  Description of Artificial Sequence: Synthetic oligonucleotide
aacgcugacaggaagaucu

SEQ ID NO: 2083943 - RNA, 19 nt, Artificial Sequence
  Description of Artificial Sequence: Synthetic oligonucleotide
aaacaguccccgcauucgc

SEQ ID NO: 2083944 - RNA, 19 nt, Artificial Sequence
  Description of Artificial Sequence: Synthetic oligonucleotide
ugagcuaucagguguucgg

SEQ ID NO: 2083945 - RNA, 19 nt, Artificial Sequence
  Description of Artificial Sequence: Synthetic oligonucleotide
cuaaaaugagcuucacgcg

SEQ ID NO: 2083946 - RNA, 19 nt, Artificial Sequence
  Description of Artificial Sequence: Synthetic oligonucleotide
gauauuucgccccuccugc

SEQ ID NO: 2083947 - RNA, 19 nt, Artificial Sequence
  Description of Artificial Sequence: Synthetic oligonucleotide
ucguagagaacguugaacu

SEQ ID NO: 2083948 - RNA, 19 nt, Artificial Sequence
  Description of Artificial Sequence: Synthetic oligonucleotide
ugaacaccuguuuaaacug

SEQ ID NO: 2083949 - RNA, 19 nt, Artificial Sequence
  Description of Artificial Sequence: Synthetic oligonucleotide
gaucucaugguugaagggg

SEQ ID NO: 2083950 - RNA, 19 nt, Artificial Sequence
  Description of Artificial Sequence: Synthetic oligonucleotide
auuaaugacaguuucucua

SEQ ID NO: 2083951 - RNA, 19 nt, Artificial Sequence
  Description of Artificial Sequence: Synthetic oligonucleotide
ugucauccgugccacaugg

SEQ ID NO: 2083952 - RNA, 19 nt, Artificial Sequence
  Description of Artificial Sequence: Synthetic oligonucleotide
uuaaacugcuccuccuugg

SEQ ID NO: 2083953 - RNA, 19 nt, Artificial Sequence
  Description of Artificial Sequence: Synthetic oligonucleotide
ugguucauuguguugcacg

SEQ ID NO: 2083954 - RNA, 19 nt, Artificial Sequence
  Description of Artificial Sequence: Synthetic oligonucleotide
cuaaggggaauguagugcc

SEQ ID NO: 2083955 - RNA, 19 nt, Artificial Sequence
  Description of Artificial Sequence: Synthetic oligonucleotide
uaauauuccuugucaauga

SEQ ID NO: 2083956 - RNA, 19 nt, Artificial Sequence
  Description of Artificial Sequence: Synthetic oligonucleotide
caucaucccuucuagaacc

SEQ ID NO: 2083957 - RNA, 19 nt, Artificial Sequence
  Description of Artificial Sequence: Synthetic oligonucleotide
uuuaaacugcuccuccuug

SEQ ID NO: 2083958 - RNA, 19 nt, Artificial Sequence
  Description of Artificial Sequence: Synthetic oligonucleotide
uuauggacguggaugucgg

SEQ ID NO: 2083959 - RNA, 19 nt, Artificial Sequence
  Description of Artificial Sequence: Synthetic oligonucleotide
ugcauugaucauaaaaguc

SEQ ID NO: 2083960 - RNA, 19 nt, Artificial Sequence
  Description of Artificial Sequence: Synthetic oligonucleotide
agcucaaaagaguucauca

SEQ ID NO: 2083961 - RNA, 19 nt, Artificial Sequence
  Description of Artificial Sequence: Synthetic oligonucleotide
aaaacaguccccgcauucg

SEQ ID NO: 2083962 - RNA, 19 nt, Artificial Sequence
  Description of Artificial Sequence: Synthetic oligonucleotide
auugauuauaucgaugaca

SEQ ID NO: 2083963 - RNA, 19 nt, Artificial Sequence
  Description of Artificial Sequence: Synthetic oligonucleotide
acaucaucccuucuagaac

SEQ ID NO: 2083964 - RNA, 19 nt, Artificial Sequence
  Description of Artificial Sequence: Synthetic oligonucleotide
agaucugugugcuugguca

SEQ ID NO: 2083965 - RNA, 19 nt, Artificial Sequence
  Description of Artificial Sequence: Synthetic oligonucleotide
cacguuuuggugauggugc

SEQ ID NO: 2083966 - RNA, 19 nt, Artificial Sequence
  Description of Artificial Sequence: Synthetic oligonucleotide
uguacgugagcucagcaaa

SEQ ID NO: 2083967 - RNA, 19 nt, Artificial Sequence
  Description of Artificial Sequence: Synthetic oligonucleotide
guaauauuccuugucaaug

SEQ ID NO: 2083968 - RNA, 19 nt, Artificial Sequence
  Description of Artificial Sequence: Synthetic oligonucleotide
aacacucccagucacucca

SEQ ID NO: 2083969 - RNA, 19 nt, Artificial Sequence
  Description of Artificial Sequence: Synthetic oligonucleotide
cuugauggcacuaugcuga

SEQ ID NO: 2083970 - RNA, 19 nt, Artificial Sequence
  Description of Artificial Sequence: Synthetic oligonucleotide
uucucuuccacgguguggg

SEQ ID NO: 2083971 - RNA, 19 nt, Artificial Sequence
  Description of Artificial Sequence: Synthetic oligonucleotide
gguauaccaacccagaaac

SEQ ID NO: 2083972 - RNA, 19 nt, Artificial Sequence
  Description of Artificial Sequence: Synthetic oligonucleotide
aacuuguucacaaacuggu

SEQ ID NO: 2083973 - RNA, 19 nt, Artificial Sequence
  Description of Artificial Sequence: Synthetic oligonucleotide
ugaucauaaaagucugucu

SEQ ID NO: 2083974 - RNA, 19 nt, Artificial Sequence
  Description of Artificial Sequence: Synthetic oligonucleotide
aagagcgacggaaacacuc

SEQ ID NO: 2083975 - RNA, 19 nt, Artificial Sequence
  Description of Artificial Sequence: Synthetic oligonucleotide
uuaaugacaguuucucuaa

SEQ ID NO: 2083976 - RNA, 19 nt, Artificial Sequence
  Description of Artificial Sequence: Synthetic oligonucleotide
ucuaaggggaauguagugc

SEQ ID NO: 2083977 - RNA, 19 nt, Artificial Sequence
  Description of Artificial Sequence: Synthetic oligonucleotide
guaguaauauuccuuguca

SEQ ID NO: 2083978 - RNA, 19 nt, Artificial Sequence
  Description of Artificial Sequence: Synthetic oligonucleotide
cauugaucauaaaagucug

SEQ ID NO: 2083979 - RNA, 19 nt, Artificial Sequence
  Description of Artificial Sequence: Synthetic oligonucleotide
uauaccaacccagaaacuc

SEQ ID NO: 2083980 - RNA, 19 nt, Artificial Sequence
  Description of Artificial Sequence: Synthetic oligonucleotide
caaucaccugcauaggccg

SEQ ID NO: 2083981 - RNA, 19 nt, Artificial Sequence
  Description of Artificial Sequence: Synthetic oligonucleotide
caucacuucgauauuucgc

SEQ ID NO: 2083982 - RNA, 19 nt, Artificial Sequence
  Description of Artificial Sequence: Synthetic oligonucleotide
aguugucugagcccuguac

SEQ ID NO: 2083983 - RNA, 19 nt, Artificial Sequence
  Description of Artificial Sequence: Synthetic oligonucleotide
uacaccgauacguucagcu

SEQ ID NO: 2083984 - RNA, 19 nt, Artificial Sequence
  Description of Artificial Sequence: Synthetic oligonucleotide
uccauugauuauaucgaug

SEQ ID NO: 2083985 - RNA, 19 nt, Artificial Sequence
  Description of Artificial Sequence: Synthetic oligonucleotide
augacaaggggaugaagag

SEQ ID NO: 2083986 - RNA, 19 nt, Artificial Sequence
  Description of Artificial Sequence: Synthetic oligonucleotide
uacucuaaaaugagcuuca

SEQ ID NO: 2083987 - RNA, 19 nt, Artificial Sequence
  Description of Artificial Sequence: Synthetic oligonucleotide
uguguugcacguuuuggug

SEQ ID NO: 2083988 - RNA, 19 nt, Artificial Sequence
  Description of Artificial Sequence: Synthetic oligonucleotide
uuggucaugggguucaacu

SEQ ID NO: 2083989 - RNA, 19 nt, Artificial Sequence
  Description of Artificial Sequence: Synthetic oligonucleotide
aucgaugacagacucaaaa

SEQ ID NO: 2083990 - RNA, 19 nt, Artificial Sequence
  Description of Artificial Sequence: Synthetic oligonucleotide
gacaguuucucuaagggga

SEQ ID NO: 2083991 - RNA, 19 nt, Artificial Sequence
  Description of Artificial Sequence: Synthetic oligonucleotide
cagcaaacagcauuguagc

SEQ ID NO: 2083992 - RNA, 19 nt, Artificial Sequence
  Description of Artificial Sequence: Synthetic oligonucleotide
cugguagacagugacauag

SEQ ID NO: 2083993 - RNA, 19 nt, Artificial Sequence
  Description of Artificial Sequence: Synthetic oligonucleotide
gguguaguaauauuccuug

SEQ ID NO: 2083994 - RNA, 19 nt, Artificial Sequence
  Description of Artificial Sequence: Synthetic oligonucleotide
ucucaauuaucucgcacac

SEQ ID NO: 2083995 - RNA, 19 nt, Artificial Sequence
  Description of Artificial Sequence: Synthetic oligonucleotide
ugacaggaagaucugugug

SEQ ID NO: 2083996 - RNA, 19 nt, Artificial Sequence
  Description of Artificial Sequence: Synthetic oligonucleotide
gaugacaaggggaugaaga

SEQ ID NO: 2083997 - RNA, 19 nt, Artificial Sequence
  Description of Artificial Sequence: Synthetic oligonucleotide
ucucuaaggggaauguagu

SEQ ID NO: 2083998 - RNA, 19 nt, Artificial Sequence
  Description of Artificial Sequence: Synthetic oligonucleotide
gaguucaucacuucgauau

SEQ ID NO: 2083999 - RNA, 19 nt, Artificial Sequence
  Description of Artificial Sequence: Synthetic oligonucleotide
gacggaaacacucccaguc

SEQ ID NO: 2084000 - RNA, 19 nt, Artificial Sequence
  Description of Artificial Sequence: Synthetic oligonucleotide
aucagaaaacaguccccgc

SEQ ID NO: 2084001 - RNA, 19 nt, Artificial Sequence
  Description of Artificial Sequence: Synthetic oligonucleotide
auaccaacccagaaacucc

SEQ ID NO: 2084002 - RNA, 19 nt, Artificial Sequence
  Description of Artificial Sequence: Synthetic oligonucleotide
cugucggucguagagaacg

SEQ ID NO: 2084003 - RNA, 19 nt, Artificial Sequence
  Description of Artificial Sequence: Synthetic oligonucleotide
ugagaacugguagacagug

SEQ ID NO: 2084004 - RNA, 19 nt, Artificial Sequence
  Description of Artificial Sequence: Synthetic oligonucleotide
uccugcuucccgauuaaag

SEQ ID NO: 2084005 - RNA, 19 nt, Artificial Sequence
  Description of Artificial Sequence: Synthetic oligonucleotide
cauuguagccucuccauug

SEQ ID NO: 2084006 - RNA, 19 nt, Artificial Sequence
  Description of Artificial Sequence: Synthetic oligonucleotide
cucuaaaaugagcuucacg

SEQ ID NO: 2084007 - RNA, 19 nt, Artificial Sequence
  Description of Artificial Sequence: Synthetic oligonucleotide
ugguauaccaacccagaaa

SEQ ID NO: 2084008 - RNA, 19 nt, Artificial Sequence
  Description of Artificial Sequence: Synthetic oligonucleotide
uagagaacguugaacuugu

SEQ ID NO: 2084009 - RNA, 19 nt, Artificial Sequence
  Description of Artificial Sequence: Synthetic oligonucleotide
ugugguauaccaacccaga

SEQ ID NO: 2084010 - RNA, 19 nt, Artificial Sequence
  Description of Artificial Sequence: Synthetic oligonucleotide
aagaguucaucacuucgau

SEQ ID NO: 2084011 - RNA, 19 nt, Artificial Sequence
  Description of Artificial Sequence: Synthetic oligonucleotide
uaggccaugagccccacgu

SEQ ID NO: 2084012 - RNA, 19 nt, Artificial Sequence
  Description of Artificial Sequence: Synthetic oligonucleotide
cugcuucccgauuaaagcc

SEQ ID NO: 2084013 - RNA, 19 nt, Artificial Sequence
  Description of Artificial Sequence: Synthetic oligonucleotide
auuguguugcacguuuugg

SEQ ID NO: 2084014 - RNA, 19 nt, Artificial Sequence
  Description of Artificial Sequence: Synthetic oligonucleotide
uauaucgaugacagacuca

SEQ ID NO: 2084015 - RNA, 19 nt, Artificial Sequence
  Description of Artificial Sequence: Synthetic oligonucleotide
uucgauauuucgccccucc

SEQ ID NO: 2084016 - RNA, 19 nt, Artificial Sequence
  Description of Artificial Sequence: Synthetic oligonucleotide
aauguagugcccaguaaca

SEQ ID NO: 2084017 - RNA, 19 nt, Artificial Sequence
  Description of Artificial Sequence: Synthetic oligonucleotide
ugcuucccgauuaaagccc

SEQ ID NO: 2084018 - RNA, 19 nt, Artificial Sequence
  Description of Artificial Sequence: Synthetic oligonucleotide
uggacguggaugucggagg

SEQ ID NO: 2084019 - RNA, 19 nt, Artificial Sequence
  Description of Artificial Sequence: Synthetic oligonucleotide
ggggcucucaauuaucucg

SEQ ID NO: 2084020 - RNA, 19 nt, Artificial Sequence
  Description of Artificial Sequence: Synthetic oligonucleotide
caccuguuuaaacugcucc

SEQ ID NO: 2084021 - RNA, 19 nt, Artificial Sequence
  Description of Artificial Sequence: Synthetic oligonucleotide
gaugaagagcgacggaaac

SEQ ID NO: 2084022 - RNA, 19 nt, Artificial Sequence
  Description of Artificial Sequence: Synthetic oligonucleotide
guagagaacguugaacuug

SEQ ID NO: 2084023 - RNA, 19 nt, Artificial Sequence
  Description of Artificial Sequence: Synthetic oligonucleotide
cucacgcaggaucucaugg

SEQ ID NO: 2084024 - RNA, 19 nt, Artificial Sequence
  Description of Artificial Sequence: Synthetic oligonucleotide
agaacccucaucagaaaac

SEQ ID NO: 2084025 - RNA, 19 nt, Artificial Sequence
  Description of Artificial Sequence: Synthetic oligonucleotide
uggaguucuccccacugcc

SEQ ID NO: 2084026 - RNA, 19 nt, Artificial Sequence
  Description of Artificial Sequence: Synthetic oligonucleotide
ucggucguagagaacguug

SEQ ID NO: 2084027 - RNA, 19 nt, Artificial Sequence
  Description of Artificial Sequence: Synthetic oligonucleotide
uucauuguguugcacguuu

SEQ ID NO: 2084028 - RNA, 19 nt, Artificial Sequence
  Description of Artificial Sequence: Synthetic oligonucleotide
uguuuaaacugcuccuccu

SEQ ID NO: 2084029 - RNA, 19 nt, Artificial Sequence
  Description of Artificial Sequence: Synthetic oligonucleotide
gagauguugaggaugacaa

SEQ ID NO: 2084030 - RNA, 19 nt, Artificial Sequence
  Description of Artificial Sequence: Synthetic oligonucleotide
ucuacaccgauacguucag

SEQ ID NO: 2084031 - RNA, 19 nt, Artificial Sequence
  Description of Artificial Sequence: Synthetic oligonucleotide
gagaacguugaacuuguuc

SEQ ID NO: 2084032 - RNA, 19 nt, Artificial Sequence
  Description of Artificial Sequence: Synthetic oligonucleotide
cugugguauaccaacccag

SEQ ID NO: 2084033 - RNA, 19 nt, Artificial Sequence
  Description of Artificial Sequence: Synthetic oligonucleotide
cuugaacaccuguuuaaac

SEQ ID NO: 2084034 - RNA, 19 nt, Artificial Sequence
  Description of Artificial Sequence: Synthetic oligonucleotide
auaucgaugacagacucaa

SEQ ID NO: 2084035 - RNA, 19 nt, Artificial Sequence
  Description of Artificial Sequence: Synthetic oligonucleotide
auggucuacaccgauacgu

SEQ ID NO: 2084036 - RNA, 19 nt, Artificial Sequence
  Description of Artificial Sequence: Synthetic oligonucleotide
cuguuuaaacugcuccucc

SEQ ID NO: 2084037 - RNA, 19 nt, Artificial Sequence
  Description of Artificial Sequence: Synthetic oligonucleotide
ugaaggggaccucuccugc

SEQ ID NO: 2084038 - RNA, 19 nt, Artificial Sequence
  Description of Artificial Sequence: Synthetic oligonucleotide
uugguguaguaauauuccu

SEQ ID NO: 2084039 - RNA, 19 nt, Artificial Sequence
  Description of Artificial Sequence: Synthetic oligonucleotide
gcucuuuuauuaaugacag

SEQ ID NO: 2084040 - RNA, 19 nt, Artificial Sequence
  Description of Artificial Sequence: Synthetic oligonucleotide
aacaguccccgcauucgcc

SEQ ID NO: 2084041 - RNA, 19 nt, Artificial Sequence
  Description of Artificial Sequence: Synthetic oligonucleotide
gaacguugaacuuguucac

SEQ ID NO: 2084042 - RNA, 19 nt, Artificial Sequence
  Description of Artificial Sequence: Synthetic oligonucleotide
ugcccugucggucguagag

SEQ ID NO: 2084043 - RNA, 19 nt, Artificial Sequence
  Description of Artificial Sequence: Synthetic oligonucleotide
agagcgacggaaacacucc

SEQ ID NO: 2084044 - RNA, 19 nt, Artificial Sequence
  Description of Artificial Sequence: Synthetic oligonucleotide
uguucggccacaguggagu

SEQ ID NO: 2084045 - RNA, 19 nt, Artificial Sequence
  Description of Artificial Sequence: Synthetic oligonucleotide
auuauaucgaugacagacu

SEQ ID NO: 2084046 - RNA, 19 nt, Artificial Sequence
  Description of Artificial Sequence: Synthetic oligonucleotide
ucauccgugccacaugguc

SEQ ID NO: 2084047 - RNA, 19 nt, Artificial Sequence
  Description of Artificial Sequence: Synthetic oligonucleotide
cacuucgauauuucgcccc

SEQ ID NO: 2084048 - RNA, 19 nt, Artificial Sequence
  Description of Artificial Sequence: Synthetic oligonucleotide
accuguuuaaacugcuccu

SEQ ID NO: 2084049 - RNA, 19 nt, Artificial Sequence
  Description of Artificial Sequence: Synthetic oligonucleotide
ugguguaguaauauuccuu

SEQ ID NO: 2084050 - RNA, 19 nt, Artificial Sequence
  Description of Artificial Sequence: Synthetic oligonucleotide
ugggguucaacuucagaaa

SEQ ID NO: 2084051 - RNA, 19 nt, Artificial Sequence
  Description of Artificial Sequence: Synthetic oligonucleotide
uaccaacccagaaacucca

SEQ ID NO: 2084052 - RNA, 19 nt, Artificial Sequence
  Description of Artificial Sequence: Synthetic oligonucleotide
cacuccagaggccaucacg

SEQ ID NO: 2084053 - RNA, 19 nt, Artificial Sequence
  Description of Artificial Sequence: Synthetic oligonucleotide
agauguugaggaugacaag

SEQ ID NO: 2084054 - RNA, 19 nt, Artificial Sequence
  Description of Artificial Sequence: Synthetic oligonucleotide
uccuccuugguguaguaau

SEQ ID NO: 2084055 - RNA, 19 nt, Artificial Sequence
  Description of Artificial Sequence: Synthetic oligonucleotide
aaaugagcuucacgcggcu

SEQ ID NO: 2084056 - RNA, 19 nt, Artificial Sequence
  Description of Artificial Sequence: Synthetic oligonucleotide
gccccaaucaccugcauag

SEQ ID NO: 2084057 - RNA, 19 nt, Artificial Sequence
  Description of Artificial Sequence: Synthetic oligonucleotide
ucacuucgauauuucgccc

SEQ ID NO: 2084058 - RNA, 19 nt, Artificial Sequence
  Description of Artificial Sequence: Synthetic oligonucleotide
ccuucuagaacccucauca

SEQ ID NO: 2084059 - RNA, 19 nt, Artificial Sequence
  Description of Artificial Sequence: Synthetic oligonucleotide
accgauacguucagcuucc

SEQ ID NO: 2084060 - RNA, 19 nt, Artificial Sequence
  Description of Artificial Sequence: Synthetic oligonucleotide
aacguugaacuuguucaca

SEQ ID NO: 2084061 - RNA, 19 nt, Artificial Sequence
  Description of Artificial Sequence: Synthetic oligonucleotide
cucuaaggggaauguagug

SEQ ID NO: 2084062 - RNA, 19 nt, Artificial Sequence
  Description of Artificial Sequence: Synthetic oligonucleotide
ccauugauuauaucgauga

SEQ ID NO: 2084063 - RNA, 19 nt, Artificial Sequence
  Description of Artificial Sequence: Synthetic oligonucleotide
cauugauuauaucgaugac

SEQ ID NO: 2084064 - RNA, 19 nt, Artificial Sequence
  Description of Artificial Sequence: Synthetic oligonucleotide
uaaggggaauguagugccc

SEQ ID NO: 2084065 - RNA, 19 nt, Artificial Sequence
  Description of Artificial Sequence: Synthetic oligonucleotide
uguugcugucauccgugcc

SEQ ID NO: 2084066 - RNA, 19 nt, Artificial Sequence
  Description of Artificial Sequence: Synthetic oligonucleotide
uccucaguggccagugugu

SEQ ID NO: 2084067 - RNA, 19 nt, Artificial Sequence
  Description of Artificial Sequence: Synthetic oligonucleotide
gauggugccgagguaggcc

SEQ ID NO: 2084068 - RNA, 19 nt, Artificial Sequence
  Description of Artificial Sequence: Synthetic oligonucleotide
caugcggauccaguggucg

SEQ ID NO: 2084069 - RNA, 19 nt, Artificial Sequence
  Description of Artificial Sequence: Synthetic oligonucleotide
agcauuguagccucuccau

SEQ ID NO: 2084070 - RNA, 19 nt, Artificial Sequence
  Description of Artificial Sequence: Synthetic oligonucleotide
aaggggaauguagugccca

SEQ ID NO: 2084071 - RNA, 19 nt, Artificial Sequence
  Description of Artificial Sequence: Synthetic oligonucleotide
aaacgcugacaggaagauc

SEQ ID NO: 2084072 - RNA, 19 nt, Artificial Sequence
  Description of Artificial Sequence: Synthetic oligonucleotide
agcgcaugcggauccagug

SEQ ID NO: 2084073 - RNA, 19 nt, Artificial Sequence
  Description of Artificial Sequence: Synthetic oligonucleotide
gaacccucaucagaaaaca

SEQ ID NO: 2084074 - RNA, 19 nt, Artificial Sequence
  Description of Artificial Sequence: Synthetic oligonucleotide
caccgauacguucagcuuc

SEQ ID NO: 2084075 - RNA, 19 nt, Artificial Sequence
  Description of Artificial Sequence: Synthetic oligonucleotide
ugauuauaucgaugacaga

SEQ ID NO: 2084076 - RNA, 19 nt, Artificial Sequence
  Description of Artificial Sequence: Synthetic oligonucleotide
acguugaacuuguucacaa

SEQ ID NO: 2084077 - RNA, 19 nt, Artificial Sequence
  Description of Artificial Sequence: Synthetic oligonucleotide
cauuguguugcacguuuug

SEQ ID NO: 2084078 - RNA, 19 nt, Artificial Sequence
  Description of Artificial Sequence: Synthetic oligonucleotide
acgugagcucagcaaacag

SEQ ID NO: 2084079 - RNA, 19 nt, Artificial Sequence
  Description of Artificial Sequence: Synthetic oligonucleotide
acuucgauauuucgccccu

SEQ ID NO: 2084080 - RNA, 19 nt, Artificial Sequence
  Description of Artificial Sequence: Synthetic oligonucleotide
uaucucgcacaccugcuua

SEQ ID NO: 2084081 - RNA, 19 nt, Artificial Sequence
  Description of Artificial Sequence: Synthetic oligonucleotide
uggccaguguguacgugag

SEQ ID NO: 2084082 - RNA, 19 nt, Artificial Sequence
  Description of Artificial Sequence: Synthetic oligonucleotide
uguugcacguuuuggugau

SEQ ID NO: 2084083 - RNA, 19 nt, Artificial Sequence
  Description of Artificial Sequence: Synthetic oligonucleotide
agcucagcaaacagcauug

SEQ ID NO: 2084084 - RNA, 19 nt, Artificial Sequence
  Description of Artificial Sequence: Synthetic oligonucleotide
acaaacugguucauugugu

SEQ ID NO: 2084085 - RNA, 19 nt, Artificial Sequence
  Description of Artificial Sequence: Synthetic oligonucleotide
ugggagcgcaugcggaucc

SEQ ID NO: 2084086 - RNA, 19 nt, Artificial Sequence
  Description of Artificial Sequence: Synthetic oligonucleotide
uguagccucuccauugauu

SEQ ID NO: 2084087 - RNA, 19 nt, Artificial Sequence
  Description of Artificial Sequence: Synthetic oligonucleotide
guucaacuucagaaagagg

SEQ ID NO: 2084088 - RNA, 19 nt, Artificial Sequence
  Description of Artificial Sequence: Synthetic oligonucleotide
ucacgcaggaucucauggu

SEQ ID NO: 2084089 - RNA, 19 nt, Artificial Sequence
  Description of Artificial Sequence: Synthetic oligonucleotide
aacccucaucagaaaacag

SEQ ID NO: 2084090 - RNA, 19 nt, Artificial Sequence
  Description of Artificial Sequence: Synthetic oligonucleotide
acucuaaaaugagcuucac

SEQ ID NO: 2084091 - RNA, 19 nt, Artificial Sequence
  Description of Artificial Sequence: Synthetic oligonucleotide
uugucugagcccuguacau

SEQ ID NO: 2084092 - RNA, 19 nt, Artificial Sequence
  Description of Artificial Sequence: Synthetic oligonucleotide
cucaaaagaguucaucacu

SEQ ID NO: 2084093 - RNA, 19 nt, Artificial Sequence
  Description of Artificial Sequence: Synthetic oligonucleotide
ucgauauuucgccccuccu

SEQ ID NO: 2084094 - RNA, 19 nt, Artificial Sequence
  Description of Artificial Sequence: Synthetic oligonucleotide
aguccccgcauucgccugc

SEQ ID NO: 2084095 - RNA, 19 nt, Artificial Sequence
  Description of Artificial Sequence: Synthetic oligonucleotide
gucguagagaacguugaac

SEQ ID NO: 2084096 - RNA, 19 nt, Artificial Sequence
  Description of Artificial Sequence: Synthetic oligonucleotide
ucgcacaccugcuuaugga

SEQ ID NO: 2084097 - RNA, 19 nt, Artificial Sequence
  Description of Artificial Sequence: Synthetic oligonucleotide
ggaagaucugugugcuugg

SEQ ID NO: 2084098 - RNA, 19 nt, Artificial Sequence
  Description of Artificial Sequence: Synthetic oligonucleotide
aucaucccuucuagaaccc

SEQ ID NO: 2084099 - RNA, 19 nt, Artificial Sequence
  Description of Artificial Sequence: Synthetic oligonucleotide
ucucaugguugaaggggac

SEQ ID NO: 2084100 - RNA, 19 nt, Artificial Sequence
  Description of Artificial Sequence: Synthetic oligonucleotide
uuaucucgcacaccugcuu

SEQ ID NO: 2084101 - RNA, 19 nt, Artificial Sequence
  Description of Artificial Sequence: Synthetic oligonucleotide
agguguucggccacagugg

SEQ ID NO: 2084102 - RNA, 19 nt, Artificial Sequence
  Description of Artificial Sequence: Synthetic oligonucleotide
acccucaucagaaaacagu

SEQ ID NO: 2084103 - RNA, 19 nt, Artificial Sequence
  Description of Artificial Sequence: Synthetic oligonucleotide
ugagccccacgucauugca

SEQ ID NO: 2084104 - RNA, 19 nt, Artificial Sequence
  Description of Artificial Sequence: Synthetic oligonucleotide
gcucaaaagaguucaucac

SEQ ID NO: 2084105 - RNA, 19 nt, Artificial Sequence
  Description of Artificial Sequence: Synthetic oligonucleotide
ucggccacaguggaguucu

SEQ ID NO: 2084106 - RNA, 19 nt, Artificial Sequence
  Description of Artificial Sequence: Synthetic oligonucleotide
gucggagauguugaggaug

SEQ ID NO: 2084107 - RNA, 19 nt, Artificial Sequence
  Description of Artificial Sequence: Synthetic oligonucleotide
guguugcacguuuugguga

SEQ ID NO: 2084108 - RNA, 19 nt, Artificial Sequence
  Description of Artificial Sequence: Synthetic oligonucleotide
aaugagcuucacgcggcug

SEQ ID NO: 2084109 - RNA, 19 nt, Artificial Sequence
  Description of Artificial Sequence: Synthetic oligonucleotide
guuuuggugauggugccga

SEQ ID NO: 2084110 - RNA, 19 nt, Artificial Sequence
  Description of Artificial Sequence: Synthetic oligonucleotide
cauggucuacaccgauacg

SEQ ID NO: 2084111 - RNA, 19 nt, Artificial Sequence
  Description of Artificial Sequence: Synthetic oligonucleotide
uacgugagcucagcaaaca

SEQ ID NO: 2084112 - RNA, 19 nt, Artificial Sequence
  Description of Artificial Sequence: Synthetic oligonucleotide
uggucuacaccgauacguu

SEQ ID NO: 2084113 - RNA, 19 nt, Artificial Sequence
  Description of Artificial Sequence: Synthetic oligonucleotide
cugagcuaucagguguucg

SEQ ID NO: 2084114 - RNA, 19 nt, Artificial Sequence
  Description of Artificial Sequence: Synthetic oligonucleotide
gagcgacggaaacacuccc

SEQ ID NO: 2084115 - RNA, 19 nt, Artificial Sequence
  Description of Artificial Sequence: Synthetic oligonucleotide
caauuaucucgcacaccug

SEQ ID NO: 2084116 - RNA, 19 nt, Artificial Sequence
  Description of Artificial Sequence: Synthetic oligonucleotide
gagcuaucagguguucggc

SEQ ID NO: 2084117 - RNA, 19 nt, Artificial Sequence
  Description of Artificial Sequence: Synthetic oligonucleotide
agggcauaggccucacgca

SEQ ID NO: 2084118 - RNA, 19 nt, Artificial Sequence
  Description of Artificial Sequence: Synthetic oligonucleotide
cucaauuaucucgcacacc

SEQ ID NO: 2084119 - RNA, 19 nt, Artificial Sequence
  Description of Artificial Sequence: Synthetic oligonucleotide
gucuacaccgauacguuca

SEQ ID NO: 2084120 - RNA, 19 nt, Artificial Sequence
  Description of Artificial Sequence: Synthetic oligonucleotide
acugguucauuguguugca

SEQ ID NO: 2084121 - RNA, 19 nt, Artificial Sequence
  Description of Artificial Sequence: Synthetic oligonucleotide
aggggaauguagugcccag

SEQ ID NO: 2084122 - RNA, 19 nt, Artificial Sequence
  Description of Artificial Sequence: Synthetic oligonucleotide
gcugcucuuuuauuaauga

SEQ ID NO: 2084123 - RNA, 19 nt, Artificial Sequence
  Description of Artificial Sequence: Synthetic oligonucleotide
cuaucagguguucggccac

SEQ ID NO: 2084124 - RNA, 19 nt, Artificial Sequence
  Description of Artificial Sequence: Synthetic oligonucleotide
agcuucacgcggcugugca

SEQ ID NO: 2084125 - RNA, 19 nt, Artificial Sequence
  Description of Artificial Sequence: Synthetic oligonucleotide
aucucaugguugaagggga

SEQ ID NO: 2084126 - RNA, 19 nt, Artificial Sequence
  Description of Artificial Sequence: Synthetic oligonucleotide
cuugucugugcugagaacu

SEQ ID NO: 2084127 - RNA, 19 nt, Artificial Sequence
  Description of Artificial Sequence: Synthetic oligonucleotide
uagugcccaguaacaguug

SEQ ID NO: 2084128 - RNA, 19 nt, Artificial Sequence
  Description of Artificial Sequence: Synthetic oligonucleotide
uauuucgccccuccugcuu

SEQ ID NO: 2084129 - RNA, 19 nt, Artificial Sequence
  Description of Artificial Sequence: Synthetic oligonucleotide
ugaggaugacaaggggaug

SEQ ID NO: 2084130 - RNA, 19 nt, Artificial Sequence
  Description of Artificial Sequence: Synthetic oligonucleotide
ggacguggaugucggaggg

SEQ ID NO: 2084131 - RNA, 19 nt, Artificial Sequence
  Description of Artificial Sequence: Synthetic oligonucleotide
cuguugcugucauccgugc

SEQ ID NO: 2084132 - RNA, 19 nt, Artificial Sequence
  Description of Artificial Sequence: Synthetic oligonucleotide
uggcacuaugcugagcuau

SEQ ID NO: 2084133 - RNA, 19 nt, Artificial Sequence
  Description of Artificial Sequence: Synthetic oligonucleotide
agaguucaucacuucgaua

SEQ ID NO: 2084134 - RNA, 19 nt, Artificial Sequence
  Description of Artificial Sequence: Synthetic oligonucleotide
auuaucucgcacaccugcu

SEQ ID NO: 2084135 - RNA, 19 nt, Artificial Sequence
  Description of Artificial Sequence: Synthetic oligonucleotide
ugucggucguagagaacgu

SEQ ID NO: 2084136 - RNA, 19 nt, Artificial Sequence
  Description of Artificial Sequence: Synthetic oligonucleotide
uccuugguguaguaauauu

SEQ ID NO: 2084137 - RNA, 19 nt, Artificial Sequence
  Description of Artificial Sequence: Synthetic oligonucleotide
uuucucuaaggggaaugua

SEQ ID NO: 2084138 - RNA, 19 nt, Artificial Sequence
  Description of Artificial Sequence: Synthetic oligonucleotide
ucccgauuaaagccccaau

SEQ ID NO: 2084139 - RNA, 19 nt, Artificial Sequence
  Description of Artificial Sequence: Synthetic oligonucleotide
gcgacggaaacacucccag

SEQ ID NO: 2084140 - RNA, 19 nt, Artificial Sequence
  Description of Artificial Sequence: Synthetic oligonucleotide
ccgauuaaagccccaauca

SEQ ID NO: 2084141 - RNA, 19 nt, Artificial Sequence
  Description of Artificial Sequence: Synthetic oligonucleotide
aggccaugagccccacguc

SEQ ID NO: 2084142 - RNA, 19 nt, Artificial Sequence
  Description of Artificial Sequence: Synthetic oligonucleotide
cauaaaagucugucuugaa

SEQ ID NO: 2084143 - RNA, 19 nt, Artificial Sequence
  Description of Artificial Sequence: Synthetic oligonucleotide
cauucgccugccgaugccc

SEQ ID NO: 2084144 - RNA, 19 nt, Artificial Sequence
  Description of Artificial Sequence: Synthetic oligonucleotide
ccaguaacaguugucugag

SEQ ID NO: 2084145 - RNA, 19 nt, Artificial Sequence
  Description of Artificial Sequence: Synthetic oligonucleotide
ugagcucagcaaacagcau

SEQ ID NO: 2084146 - RNA, 19 nt, Artificial Sequence
  Description of Artificial Sequence: Synthetic oligonucleotide
acguggaugucggaggggu

SEQ ID NO: 2084147 - RNA, 19 nt, Artificial Sequence
  Description of Artificial Sequence: Synthetic oligonucleotide
guacaucaucccuucuaga

SEQ ID NO: 2084148 - RNA, 19 nt, Artificial Sequence
  Description of Artificial Sequence: Synthetic oligonucleotide
acgucauugcauugaucau

SEQ ID NO: 2084149 - RNA, 19 nt, Artificial Sequence
  Description of Artificial Sequence: Synthetic oligonucleotide
cuguacaucaucccuucua

SEQ ID NO: 2084150 - RNA, 19 nt, Artificial Sequence
  Description of Artificial Sequence: Synthetic oligonucleotide
ugauggugccgagguaggc

SEQ ID NO: 2084151 - RNA, 19 nt, Artificial Sequence
  Description of Artificial Sequence: Synthetic oligonucleotide
caguguguacgugagcuca

SEQ ID NO: 2084152 - RNA, 19 nt, Artificial Sequence
  Description of Artificial Sequence: Synthetic oligonucleotide
gugguauaccaacccagaa

SEQ ID NO: 2084153 - RNA, 19 nt, Artificial Sequence
  Description of Artificial Sequence: Synthetic oligonucleotide
auauuccuugucaaugaua

SEQ ID NO: 2084154 - RNA, 19 nt, Artificial Sequence
  Description of Artificial Sequence: Synthetic oligonucleotide
guugaaggggaccucuccu

SEQ ID NO: 2084155 - RNA, 19 nt, Artificial Sequence
  Description of Artificial Sequence: Synthetic oligonucleotide
acaccgauacguucagcuu

SEQ ID NO: 2084156 - RNA, 19 nt, Artificial Sequence
  Description of Artificial Sequence: Synthetic oligonucleotide
uguucacaaacugguucau

SEQ ID NO: 2084157 - RNA, 19 nt, Artificial Sequence
  Description of Artificial Sequence: Synthetic oligonucleotide
cccgauuaaagccccaauc

SEQ ID NO: 2084158 - RNA, 19 nt, Artificial Sequence
  Description of Artificial Sequence: Synthetic oligonucleotide
gcuaucagguguucggcca

SEQ ID NO: 2084159 - RNA, 19 nt, Artificial Sequence
  Description of Artificial Sequence: Synthetic oligonucleotide
ugguugaaggggaccucuc

SEQ ID NO: 2084160 - RNA, 19 nt, Artificial Sequence
  Description of Artificial Sequence: Synthetic oligonucleotide
uggaugucggaggggucag

SEQ ID NO: 2084161 - RNA, 19 nt, Artificial Sequence
  Description of Artificial Sequence: Synthetic oligonucleotide
caguggucggagauguuga

SEQ ID NO: 2084162 - RNA, 19 nt, Artificial Sequence
  Description of Artificial Sequence: Synthetic oligonucleotide
auaggccgccccuccuggg

SEQ ID NO: 2084163 - RNA, 19 nt, Artificial Sequence
  Description of Artificial Sequence: Synthetic oligonucleotide
gacguggaugucggagggg

SEQ ID NO: 2084164 - RNA, 19 nt, Artificial Sequence
  Description of Artificial Sequence: Synthetic oligonucleotide
auuccuugucaaugauaau

SEQ ID NO: 2084165 - RNA, 19 nt, Artificial Sequence
  Description of Artificial Sequence: Synthetic oligonucleotide
agccccacgucauugcauu

SEQ ID NO: 2084166 - RNA, 19 nt, Artificial Sequence
  Description of Artificial Sequence: Synthetic oligonucleotide
gccgaugcccugucggucg

SEQ ID NO: 2084167 - RNA, 19 nt, Artificial Sequence
  Description of Artificial Sequence: Synthetic oligonucleotide
ugcacguuuuggugauggu

SEQ ID NO: 2084168 - RNA, 19 nt, Artificial Sequence
  Description of Artificial Sequence: Synthetic oligonucleotide
ugcugagaacugguagaca

SEQ ID NO: 2084169 - RNA, 19 nt, Artificial Sequence
  Description of Artificial Sequence: Synthetic oligonucleotide
cgauuaaagccccaaucac

SEQ ID NO: 2084170 - RNA, 19 nt, Artificial Sequence
  Description of Artificial Sequence: Synthetic oligonucleotide
gcaucuugauggcacuaug

SEQ ID NO: 2084171 - RNA, 19 nt, Artificial Sequence
  Description of Artificial Sequence: Synthetic oligonucleotide
ucucgcacaccugcuuaug

SEQ ID NO: 2084172 - RNA, 19 nt, Artificial Sequence
  Description of Artificial Sequence: Synthetic oligonucleotide
ugcggauccaguggucgga

SEQ ID NO: 2084173 - RNA, 19 nt, Artificial Sequence
  Description of Artificial Sequence: Synthetic oligonucleotide
ccugccgaugcccugucgg

SEQ ID NO: 2084174 - RNA, 19 nt, Artificial Sequence
  Description of Artificial Sequence: Synthetic oligonucleotide
aucucgcacaccugcuuau

SEQ ID NO: 2084175 - RNA, 19 nt, Artificial Sequence
  Description of Artificial Sequence: Synthetic oligonucleotide
uauggacguggaugucgga

SEQ ID NO: 2084176 - RNA, 19 nt, Artificial Sequence
  Description of Artificial Sequence: Synthetic oligonucleotide
uucccgauuaaagccccaa

SEQ ID NO: 2084177 - RNA, 19 nt, Artificial Sequence
  Description of Artificial Sequence: Synthetic oligonucleotide
agcaucuugauggcacuau

SEQ ID NO: 2084178 - RNA, 19 nt, Artificial Sequence
  Description of Artificial Sequence: Synthetic oligonucleotide
ucaucccuucuagaacccu

SEQ ID NO: 2084179 - RNA, 19 nt, Artificial Sequence
  Description of Artificial Sequence: Synthetic oligonucleotide
cugcauaggccgccccucc

SEQ ID NO: 2084180 - RNA, 19 nt, Artificial Sequence
  Description of Artificial Sequence: Synthetic oligonucleotide
guacgugagcucagcaaac

SEQ ID NO: 2084181 - RNA, 19 nt, Artificial Sequence
  Description of Artificial Sequence: Synthetic oligonucleotide
cugucauccgugccacaug

SEQ ID NO: 2084182 - RNA, 19 nt, Artificial Sequence
  Description of Artificial Sequence: Synthetic oligonucleotide
caugccgcugcugccuccg

SEQ ID NO: 2084183 - RNA, 19 nt, Artificial Sequence
  Description of Artificial Sequence: Synthetic oligonucleotide
cauacucuaaaaugagcuu

SEQ ID NO: 2084184 - RNA, 19 nt, Artificial Sequence
  Description of Artificial Sequence: Synthetic oligonucleotide
cuccgcucccguucgcagc

SEQ ID NO: 2084185 - RNA, 19 nt, Artificial Sequence
  Description of Artificial Sequence: Synthetic oligonucleotide
gggcucucaauuaucucgc

SEQ ID NO: 2084186 - RNA, 19 nt, Artificial Sequence
  Description of Artificial Sequence: Synthetic oligonucleotide
cccaguaacaguugucuga

SEQ ID NO: 2084187 - RNA, 19 nt, Artificial Sequence
  Description of Artificial Sequence: Synthetic oligonucleotide
ucccguucgcagccgccgc

SEQ ID NO: 2084188 - RNA, 19 nt, Artificial Sequence
  Description of Artificial Sequence: Synthetic oligonucleotide
caaacugguucauuguguu

SEQ ID NO: 2084189 - RNA, 19 nt, Artificial Sequence
  Description of Artificial Sequence: Synthetic oligonucleotide
ggucuacaccgauacguuc

SEQ ID NO: 2084190 - RNA, 19 nt, Artificial Sequence
  Description of Artificial Sequence: Synthetic oligonucleotide
acgcaggaucucaugguug

SEQ ID NO: 2084191 - RNA, 19 nt, Artificial Sequence
  Description of Artificial Sequence: Synthetic oligonucleotide
cccugugguauaccaaccc

SEQ ID NO: 2084192 - RNA, 19 nt, Artificial Sequence
  Description of Artificial Sequence: Synthetic oligonucleotide
agccccaaucaccugcaua

SEQ ID NO: 2084193 - RNA, 19 nt, Artificial Sequence
  Description of Artificial Sequence: Synthetic oligonucleotide
cauccgugccacauggucu

SEQ ID NO: 2084194 - RNA, 19 nt, Artificial Sequence
  Description of Artificial Sequence: Synthetic oligonucleotide
uucgccugccgaugcccug

SEQ ID NO: 2084195 - RNA, 19 nt, Artificial Sequence
  Description of Artificial Sequence: Synthetic oligonucleotide
cuagaacccucaucagaaa

SEQ ID NO: 2084196 - RNA, 19 nt, Artificial Sequence
  Description of Artificial Sequence: Synthetic oligonucleotide
cuccuugaacaccuguuua

SEQ ID NO: 2084197 - RNA, 19 nt, Artificial Sequence
  Description of Artificial Sequence: Synthetic oligonucleotide
gguguucggccacagugga

SEQ ID NO: 2084198 - RNA, 19 nt, Artificial Sequence
  Description of Artificial Sequence: Synthetic oligonucleotide
ggugugggacagcagcuca

SEQ ID NO: 2084199 - RNA, 19 nt, Artificial Sequence
  Description of Artificial Sequence: Synthetic oligonucleotide
gugugcuuggucauggggu

SEQ ID NO: 2084200 - RNA, 19 nt, Artificial Sequence
  Description of Artificial Sequence: Synthetic oligonucleotide
cacgcggcugugcagcauc

SEQ ID NO: 2084201 - RNA, 19 nt, Artificial Sequence
  Description of Artificial Sequence: Synthetic oligonucleotide
ggccaugagccccacguca

SEQ ID NO: 2084202 - RNA, 19 nt, Artificial Sequence
  Description of Artificial Sequence: Synthetic oligonucleotide
ucaccugcauaggccgccc

SEQ ID NO: 2084203 - RNA, 19 nt, Artificial Sequence
  Description of Artificial Sequence: Synthetic oligonucleotide
ccacaguggaguucucccc

SEQ ID NO: 2084204 - RNA, 19 nt, Artificial Sequence
  Description of Artificial Sequence: Synthetic oligonucleotide
guagugcccaguaacaguu

SEQ ID NO: 2084205 - RNA, 19 nt, Artificial Sequence
  Description of Artificial Sequence: Synthetic oligonucleotide
cgauauuucgccccuccug

SEQ ID NO: 2084206 - RNA, 19 nt, Artificial Sequence
  Description of Artificial Sequence: Synthetic oligonucleotide
ggaggggucaggcggcccc

SEQ ID NO: 2084207 - RNA, 19 nt, Artificial Sequence
  Description of Artificial Sequence: Synthetic oligonucleotide
ggaauguagugcccaguaa

SEQ ID NO: 2084208 - RNA, 19 nt, Artificial Sequence
  Description of Artificial Sequence: Synthetic oligonucleotide
ccaguggucggagauguug

SEQ ID NO: 2084209 - RNA, 19 nt, Artificial Sequence
  Description of Artificial Sequence: Synthetic oligonucleotide
ggaugacaaggggaugaag

SEQ ID NO: 2084210 - RNA, 19 nt, Artificial Sequence
  Description of Artificial Sequence: Synthetic oligonucleotide
gcggcugugcagcaucuug

SEQ ID NO: 2084211 - RNA, 19 nt, Artificial Sequence
  Description of Artificial Sequence: Synthetic oligonucleotide
cuuggucaugggguucaac

SEQ ID NO: 2084212 - RNA, 19 nt, Artificial Sequence
  Description of Artificial Sequence: Synthetic oligonucleotide
agcgacggaaacacuccca

SEQ ID NO: 2084213 - RNA, 19 nt, Artificial Sequence
  Description of Artificial Sequence: Synthetic oligonucleotide
cugguucauuguguugcac

SEQ ID NO: 2084214 - RNA, 19 nt, Artificial Sequence
  Description of Artificial Sequence: Synthetic oligonucleotide
cuacaccgauacguucagc

SEQ ID NO: 2084215 - RNA, 19 nt, Artificial Sequence
  Description of Artificial Sequence: Synthetic oligonucleotide
caugguugaaggggaccuc

SEQ ID NO: 2084216 - RNA, 19 nt, Artificial Sequence
  Description of Artificial Sequence: Synthetic oligonucleotide
gccuugacauacucuaaaa

SEQ ID NO: 2084217 - RNA, 19 nt, Artificial Sequence
  Description of Artificial Sequence: Synthetic oligonucleotide
cuccauugauuauaucgau

SEQ ID NO: 2084218 - RNA, 19 nt, Artificial Sequence
  Description of Artificial Sequence: Synthetic oligonucleotide
gcccaguaacaguugucug

SEQ ID NO: 2084219 - RNA, 19 nt, Artificial Sequence
  Description of Artificial Sequence: Synthetic oligonucleotide
ugcuaaggggcugcucuuu

SEQ ID NO: 2084220 - RNA, 19 nt, Artificial Sequence
  Description of Artificial Sequence: Synthetic oligonucleotide
cugagaacugguagacagu

SEQ ID NO: 2084221 - RNA, 19 nt, Artificial Sequence
  Description of Artificial Sequence: Synthetic oligonucleotide
gagcuucacgcggcugugc

SEQ ID NO: 2084222 - RNA, 19 nt, Artificial Sequence
  Description of Artificial Sequence: Synthetic oligonucleotide
ggguucaacuucagaaaga

SEQ ID NO: 2084223 - RNA, 19 nt, Artificial Sequence
  Description of Artificial Sequence: Synthetic oligonucleotide
ugccgaugcccugucgguc

SEQ ID NO: 2084224 - RNA, 19 nt, Artificial Sequence
  Description of Artificial Sequence: Synthetic oligonucleotide
gcuucccgauuaaagcccc

SEQ ID NO: 2084225 - RNA, 19 nt, Artificial Sequence
  Description of Artificial Sequence: Synthetic oligonucleotide
cuaaggggcugcucuuuua

SEQ ID NO: 2084226 - RNA, 19 nt, Artificial Sequence
  Description of Artificial Sequence: Synthetic oligonucleotide
ccugugguauaccaaccca

SEQ ID NO: 2084227 - RNA, 19 nt, Artificial Sequence
  Description of Artificial Sequence: Synthetic oligonucleotide
cucuuuuauuaaugacagu

SEQ ID NO: 2084228 - RNA, 19 nt, Artificial Sequence
  Description of Artificial Sequence: Synthetic oligonucleotide
ucgccugccgaugcccugu

SEQ ID NO: 2084229 - RNA, 19 nt, Artificial Sequence
  Description of Artificial Sequence: Synthetic oligonucleotide
agacagugacauagggcau

SEQ ID NO: 2084230 - RNA, 19 nt, Artificial Sequence
  Description of Artificial Sequence: Synthetic oligonucleotide
uccccgcauucgccugccg

SEQ ID NO: 2084231 - RNA, 19 nt, Artificial Sequence
  Description of Artificial Sequence: Synthetic oligonucleotide
cccuguacaucaucccuuc

SEQ ID NO: 2084232 - RNA, 19 nt, Artificial Sequence
  Description of Artificial Sequence: Synthetic oligonucleotide
cgcacaccugcuuauggac

SEQ ID NO: 2084233 - RNA, 19 nt, Artificial Sequence
  Description of Artificial Sequence: Synthetic oligonucleotide
guguucggccacaguggag

SEQ ID NO: 2084234 - RNA, 19 nt, Artificial Sequence
  Description of Artificial Sequence: Synthetic oligonucleotide
gcauaggccucacgcagga

SEQ ID NO: 2084235 - RNA, 19 nt, Artificial Sequence
  Description of Artificial Sequence: Synthetic oligonucleotide
caguccccgcauucgccug

SEQ ID NO: 2084236 - RNA, 19 nt, Artificial Sequence
  Description of Artificial Sequence: Synthetic oligonucleotide
cauagggcauaggccucac

SEQ ID NO: 2084237 - RNA, 19 nt, Artificial Sequence
  Description of Artificial Sequence: Synthetic oligonucleotide
gaagaucugugugcuuggu

SEQ ID NO: 2084238 - RNA, 19 nt, Artificial Sequence
  Description of Artificial Sequence: Synthetic oligonucleotide
gcuucacgcggcugugcag

SEQ ID NO: 2084239 - RNA, 19 nt, Artificial Sequence
  Description of Artificial Sequence: Synthetic oligonucleotide
auucgccugccgaugcccu

SEQ ID NO: 2084240 - RNA, 19 nt, Artificial Sequence
  Description of Artificial Sequence: Synthetic oligonucleotide
ccccugugguauaccaacc

SEQ ID NO: 2084241 - RNA, 19 nt, Artificial Sequence
  Description of Artificial Sequence: Synthetic oligonucleotide
cuucgauauuucgccccuc

SEQ ID NO: 2084242 - RNA, 19 nt, Artificial Sequence
  Description of Artificial Sequence: Synthetic oligonucleotide
cgugccacauggucuacac

SEQ ID NO: 2084243 - RNA, 19 nt, Artificial Sequence
  Description of Artificial Sequence: Synthetic oligonucleotide
cggaaacacucccagucac

SEQ ID NO: 2084244 - RNA, 19 nt, Artificial Sequence
  Description of Artificial Sequence: Synthetic oligonucleotide
ggucguagagaacguugaa

SEQ ID NO: 2084245 - RNA, 19 nt, Artificial Sequence
  Description of Artificial Sequence: Synthetic oligonucleotide
cuucccgauuaaagcccca

SEQ ID NO: 2084246 - RNA, 19 nt, Artificial Sequence
  Description of Artificial Sequence: Synthetic oligonucleotide
ggccacaguggaguucucc

SEQ ID NO: 2084247 - RNA, 19 nt, Artificial Sequence
  Description of Artificial Sequence: Synthetic oligonucleotide
guugcacguuuuggugaug

SEQ ID NO: 2084248 - RNA, 19 nt, Artificial Sequence
  Description of Artificial Sequence: Synthetic oligonucleotide
ucggaggggucaggcggcc

SEQ ID NO: 2084249 - RNA, 19 nt, Artificial Sequence
  Description of Artificial Sequence: Synthetic oligonucleotide
agguaggccaugagcccca

SEQ ID NO: 2084250 - RNA, 19 nt, Artificial Sequence
  Description of Artificial Sequence: Synthetic oligonucleotide
acgcugacaggaagaucug

SEQ ID NO: 2084251 - RNA, 19 nt, Artificial Sequence
  Description of Artificial Sequence: Synthetic oligonucleotide
ggcacuaugcugagcuauc

SEQ ID NO: 2084252 - RNA, 19 nt, Artificial Sequence
  Description of Artificial Sequence: Synthetic oligonucleotide
augcccugucggucguaga

SEQ ID NO: 2084253 - RNA, 19 nt, Artificial Sequence
  Description of Artificial Sequence: Synthetic oligonucleotide
cccuucuagaacccucauc

SEQ ID NO: 2084254 - RNA, 19 nt, Artificial Sequence
  Description of Artificial Sequence: Synthetic oligonucleotide
gcauucgccugccgaugcc

SEQ ID NO: 2084255 - RNA, 19 nt, Artificial Sequence
  Description of Artificial Sequence: Synthetic oligonucleotide
uggugccgagguaggccau

SEQ ID NO: 2084256 - RNA, 19 nt, Artificial Sequence
  Description of Artificial Sequence: Synthetic oligonucleotide
ggaccucuccugcuucuga

SEQ ID NO: 2084257 - RNA, 19 nt, Artificial Sequence
  Description of Artificial Sequence: Synthetic oligonucleotide
ggcucucaauuaucucgca

SEQ ID NO: 2084258 - RNA, 19 nt, Artificial Sequence
  Description of Artificial Sequence: Synthetic oligonucleotide
gcacuaugcugagcuauca

SEQ ID NO: 2084259 - RNA, 19 nt, Artificial Sequence
  Description of Artificial Sequence: Synthetic oligonucleotide
cguuuuggugauggugccg

SEQ ID NO: 2084260 - RNA, 19 nt, Artificial Sequence
  Description of Artificial Sequence: Synthetic oligonucleotide
ggccaguguguacgugagc

SEQ ID NO: 2084261 - RNA, 19 nt, Artificial Sequence
  Description of Artificial Sequence: Synthetic oligonucleotide
ccuugacauacucuaaaau

SEQ ID NO: 2084262 - RNA, 19 nt, Artificial Sequence
  Description of Artificial Sequence: Synthetic oligonucleotide
cacucccagucacuccaga

SEQ ID NO: 2084263 - RNA, 19 nt, Artificial Sequence
  Description of Artificial Sequence: Synthetic oligonucleotide
ggagcgcaugcggauccag

SEQ ID NO: 2084264 - RNA, 19 nt, Artificial Sequence
  Description of Artificial Sequence: Synthetic oligonucleotide
ggggaugaagagcgacgga

SEQ ID NO: 2084265 - RNA, 19 nt, Artificial Sequence
  Description of Artificial Sequence: Synthetic oligonucleotide
cuccuugguguaguaauau

SEQ ID NO: 2084266 - RNA, 19 nt, Artificial Sequence
  Description of Artificial Sequence: Synthetic oligonucleotide
ggaugucggaggggucagg

SEQ ID NO: 2084267 - RNA, 19 nt, Artificial Sequence
  Description of Artificial Sequence: Synthetic oligonucleotide
cacgcaggaucucaugguu

SEQ ID NO: 2084268 - RNA, 19 nt, Artificial Sequence
  Description of Artificial Sequence: Synthetic oligonucleotide
ccuugaacaccuguuuaaa

SEQ ID NO: 2084269 - RNA, 19 nt, Artificial Sequence
  Description of Artificial Sequence: Synthetic oligonucleotide
ccuccgcucccguucgcag

SEQ ID NO: 2084270 - RNA, 19 nt, Artificial Sequence
  Description of Artificial Sequence: Synthetic oligonucleotide
uccgugccacauggucuac

SEQ ID NO: 2084271 - RNA, 19 nt, Artificial Sequence
  Description of Artificial Sequence: Synthetic oligonucleotide
gugccgagguaggccauga

SEQ ID NO: 2084272 - RNA, 19 nt, Artificial Sequence
  Description of Artificial Sequence: Synthetic oligonucleotide
ccccaaucaccugcauagg

SEQ ID NO: 2084273 - RNA, 19 nt, Artificial Sequence
  Description of Artificial Sequence: Synthetic oligonucleotide
gagcgcaugcggauccagu

SEQ ID NO: 2084274 - RNA, 19 nt, Artificial Sequence
  Description of Artificial Sequence: Synthetic oligonucleotide
ccugucggucguagagaac

SEQ ID NO: 2084275 - RNA, 19 nt, Artificial Sequence
  Description of Artificial Sequence: Synthetic oligonucleotide
guccccgcauucgccugcc

SEQ ID NO: 2084276 - RNA, 19 nt, Artificial Sequence
  Description of Artificial Sequence: Synthetic oligonucleotide
cccugucggucguagagaa

SEQ ID NO: 2084277 - RNA, 19 nt, Artificial Sequence
  Description of Artificial Sequence: Synthetic oligonucleotide
cuccuccuugguguaguaa

SEQ ID NO: 2084278 - RNA, 19 nt, Artificial Sequence
  Description of Artificial Sequence: Synthetic oligonucleotide
gccuguugcugucauccgu

SEQ ID NO: 2084279 - RNA, 19 nt, Artificial Sequence
  Description of Artificial Sequence: Synthetic oligonucleotide
ucacgcggcugugcagcau

SEQ ID NO: 2084280 - RNA, 19 nt, Artificial Sequence
  Description of Artificial Sequence: Synthetic oligonucleotide
cugccgaugcccugucggu

SEQ ID NO: 2084281 - RNA, 19 nt, Artificial Sequence
  Description of Artificial Sequence: Synthetic oligonucleotide
gccccacgucauugcauug

SEQ ID NO: 2084282 - RNA, 19 nt, Artificial Sequence
  Description of Artificial Sequence: Synthetic oligonucleotide
cgucauugcauugaucaua

SEQ ID NO: 2084283 - RNA, 19 nt, Artificial Sequence
  Description of Artificial Sequence: Synthetic oligonucleotide
gcuuauggacguggauguc

SEQ ID NO: 2084284 - RNA, 19 nt, Artificial Sequence
  Description of Artificial Sequence: Synthetic oligonucleotide
gccugccgaugcccugucg

SEQ ID NO: 2084285 - RNA, 19 nt, Artificial Sequence
  Description of Artificial Sequence: Synthetic oligonucleotide
agagaacguugaacuuguu

SEQ ID NO: 2084286 - RNA, 19 nt, Artificial Sequence
  Description of Artificial Sequence: Synthetic oligonucleotide
ccugcauaggccgccccuc

SEQ ID NO: 2084287 - RNA, 19 nt, Artificial Sequence
  Description of Artificial Sequence: Synthetic oligonucleotide
ggccucacgcaggaucuca

SEQ ID NO: 2084288 - RNA, 19 nt, Artificial Sequence
  Description of Artificial Sequence: Synthetic oligonucleotide
gcauuguagccucuccauu

SEQ ID NO: 2084289 - RNA, 19 nt, Artificial Sequence
  Description of Artificial Sequence: Synthetic oligonucleotide
acgcggcugugcagcaucu

SEQ ID NO: 2084290 - RNA, 19 nt, Artificial Sequence
  Description of Artificial Sequence: Synthetic oligonucleotide
cagcaucuugauggcacua

SEQ ID NO: 2084291 - RNA, 19 nt, Artificial Sequence
  Description of Artificial Sequence: Synthetic oligonucleotide
ggaguucuccccacugccu

SEQ ID NO: 2084292 - RNA, 19 nt, Artificial Sequence
  Description of Artificial Sequence: Synthetic oligonucleotide
gagccccacgucauugcau

SEQ ID NO: 2084293 - RNA, 19 nt, Artificial Sequence
  Description of Artificial Sequence: Synthetic oligonucleotide
gcccugucggucguagaga

SEQ ID NO: 2084294 - RNA, 19 nt, Artificial Sequence
  Description of Artificial Sequence: Synthetic oligonucleotide
ggucggagauguugaggau

SEQ ID NO: 2084295 - RNA, 19 nt, Artificial Sequence
  Description of Artificial Sequence: Synthetic oligonucleotide
caguggccaguguguacgu

SEQ ID NO: 2084296 - RNA, 19 nt, Artificial Sequence
  Description of Artificial Sequence: Synthetic oligonucleotide
gcaugcggauccagugguc

SEQ ID NO: 2084297 - RNA, 19 nt, Artificial Sequence
  Description of Artificial Sequence: Synthetic oligonucleotide
ccccacgucauugcauuga

SEQ ID NO: 2084298 - RNA, 19 nt, Artificial Sequence
  Description of Artificial Sequence: Synthetic oligonucleotide
gcucccguucgcagccgcc

SEQ ID NO: 2084299 - RNA, 19 nt, Artificial Sequence
  Description of Artificial Sequence: Synthetic oligonucleotide
ccgcauucgccugccgaug

SEQ ID NO: 2084300 - RNA, 19 nt, Artificial Sequence
  Description of Artificial Sequence: Synthetic oligonucleotide
cguggaugucggagggguc

SEQ ID NO: 2084301 - RNA, 19 nt, Artificial Sequence
  Description of Artificial Sequence: Synthetic oligonucleotide
gucggucguagagaacguu

SEQ ID NO: 2084302 - RNA, 19 nt, Artificial Sequence
  Description of Artificial Sequence: Synthetic oligonucleotide
ccccgcauucgccugccga

SEQ ID NO: 2084303 - RNA, 19 nt, Artificial Sequence
  Description of Artificial Sequence: Synthetic oligonucleotide
gucauccgugccacauggu

SEQ ID NO: 2084304 - RNA, 19 nt, Artificial Sequence
  Description of Artificial Sequence: Synthetic oligonucleotide
ggggaccucuccugcuucu

SEQ ID NO: 2084305 - RNA, 19 nt, Artificial Sequence
  Description of Artificial Sequence: Synthetic oligonucleotide
cagucacuccagaggccau

SEQ ID NO: 2084306 - RNA, 19 nt, Artificial Sequence
  Description of Artificial Sequence: Synthetic oligonucleotide
gcucagcaaacagcauugu

SEQ ID NO: 2084307 - RNA, 19 nt, Artificial Sequence
  Description of Artificial Sequence: Synthetic oligonucleotide
cgcaugcggauccaguggu

SEQ ID NO: 2084308 - RNA, 19 nt, Artificial Sequence
  Description of Artificial Sequence: Synthetic oligonucleotide
cggugugggacagcagcuc

SEQ ID NO: 2084309 - RNA, 19 nt, Artificial Sequence
  Description of Artificial Sequence: Synthetic oligonucleotide
cccgcauucgccugccgau

SEQ ID NO: 2084310 - RNA, 19 nt, Artificial Sequence
  Description of Artificial Sequence: Synthetic oligonucleotide
cccacgucauugcauugau

SEQ ID NO: 2084311 - RNA, 19 nt, Artificial Sequence
  Description of Artificial Sequence: Synthetic oligonucleotide
gggagcgcaugcggaucca

SEQ ID NO: 2084312 - RNA, 19 nt, Artificial Sequence
  Description of Artificial Sequence: Synthetic oligonucleotide
cgcucccguucgcagccgc

SEQ ID NO: 2084313 - RNA, 19 nt, Artificial Sequence
  Description of Artificial Sequence: Synthetic oligonucleotide
ccuguacaucaucccuucu

SEQ ID NO: 2084314 - RNA, 19 nt, Artificial Sequence
  Description of Artificial Sequence: Synthetic oligonucleotide
cauaggccucacgcaggau

SEQ ID NO: 2084315 - RNA, 19 nt, Artificial Sequence
  Description of Artificial Sequence: Synthetic oligonucleotide
cgccccuccugcuucccga

SEQ ID NO: 2084316 - RNA, 19 nt, Artificial Sequence
  Description of Artificial Sequence: Synthetic oligonucleotide
ccgugccacauggucuaca

SEQ ID NO: 2084317 - RNA, 19 nt, Artificial Sequence
  Description of Artificial Sequence: Synthetic oligonucleotide
cgacggaaacacucccagu

SEQ ID NO: 2084318 - RNA, 19 nt, Artificial Sequence
  Description of Artificial Sequence: Synthetic oligonucleotide
cugcugcauccaccuccau

SEQ ID NO: 2084319 - RNA, 19 nt, Artificial Sequence
  Description of Artificial Sequence: Synthetic oligonucleotide
cgccugccgaugcccuguc

SEQ ID NO: 2084320 - RNA, 19 nt, Artificial Sequence
  Description of Artificial Sequence: Synthetic oligonucleotide
ccgaugcccugucggucgu

SEQ ID NO: 2084321 - RNA, 19 nt, Artificial Sequence
  Description of Artificial Sequence: Synthetic oligonucleotide
ccccuccugcuucccgauu

SEQ ID NO: 2084322 - RNA, 19 nt, Artificial Sequence
  Description of Artificial Sequence: Synthetic oligonucleotide
cgaugcccugucggucgua

SEQ ID NO: 2084323 - RNA, 19 nt, Artificial Sequence
  Description of Artificial Sequence: Synthetic oligonucleotide
aauucgaagauccagacga

SEQ ID NO: 2084324 - RNA, 19 nt, Artificial Sequence
  Description of Artificial Sequence: Synthetic oligonucleotide
aauacgaccaauucgaaga

SEQ ID NO: 2084325 - RNA, 19 nt, Artificial Sequence
  Description of Artificial Sequence: Synthetic oligonucleotide
uuuaaugccacuauuggcc

SEQ ID NO: 2084326 - RNA, 19 nt, Artificial Sequence
  Description of Artificial Sequence: Synthetic oligonucleotide
uuuauuguuacuaagguuu

SEQ ID NO: 2084327 - RNA, 19 nt, Artificial Sequence
  Description of Artificial Sequence: Synthetic oligonucleotide
aaagcaucaaaaguaauuc

SEQ ID NO: 2084328 - RNA, 19 nt, Artificial Sequence
  Description of Artificial Sequence: Synthetic oligonucleotide
uauuuaaugccacuauugg

SEQ ID NO: 2084329 - RNA, 19 nt, Artificial Sequence
  Description of Artificial Sequence: Synthetic oligonucleotide
cagauuacaaaguaaaacc

SEQ ID NO: 2084330 - RNA, 19 nt, Artificial Sequence
  Description of Artificial Sequence: Synthetic oligonucleotide
uuugacaguaacaauacga

SEQ ID NO: 2084331 - RNA, 19 nt, Artificial Sequence
  Description of Artificial Sequence: Synthetic oligonucleotide
ugaacuagcacacaucacc

SEQ ID NO: 2084332 - RNA, 19 nt, Artificial Sequence
  Description of Artificial Sequence: Synthetic oligonucleotide
acgagaaacaucuacuggc

SEQ ID NO: 2084333 - RNA, 19 nt, Artificial Sequence
  Description of Artificial Sequence: Synthetic oligonucleotide
uaacaauacgaccaauucg

SEQ ID NO: 2084334 - RNA, 19 nt, Artificial Sequence
  Description of Artificial Sequence: Synthetic oligonucleotide
uuauuuaaugccacuauug

SEQ ID NO: 2084335 - RNA, 19 nt, Artificial Sequence
  Description of Artificial Sequence: Synthetic oligonucleotide
agaguacuuauuuaaugcc

SEQ ID NO: 2084336 - RNA, 19 nt, Artificial Sequence
  Description of Artificial Sequence: Synthetic oligonucleotide
auuuaaugccacuauuggc

SEQ ID NO: 2084337 - RNA, 19 nt, Artificial Sequence
  Description of Artificial Sequence: Synthetic oligonucleotide
gacuguaucacacuuguag

SEQ ID NO: 2084338 - RNA, 19 nt, Artificial Sequence
  Description of Artificial Sequence: Synthetic oligonucleotide
aaaguaaaaccaccauucg

SEQ ID NO: 2084339 - RNA, 19 nt, Artificial Sequence
  Description of Artificial Sequence: Synthetic oligonucleotide
ucaaaaguaauucugucuc

SEQ ID NO: 2084340 - RNA, 19 nt, Artificial Sequence
  Description of Artificial Sequence: Synthetic oligonucleotide
uggaguaucagauuggacu

SEQ ID NO: 2084341 - RNA, 19 nt, Artificial Sequence
  Description of Artificial Sequence: Synthetic oligonucleotide
uucuucuacauacagugag

SEQ ID NO: 2084342 - RNA, 19 nt, Artificial Sequence
  Description of Artificial Sequence: Synthetic oligonucleotide
auuacaaaguaaaaccacc

SEQ ID NO: 2084343 - RNA, 19 nt, Artificial Sequence
  Description of Artificial Sequence: Synthetic oligonucleotide
agcauuuucaacucgaagu

SEQ ID NO: 2084344 - RNA, 19 nt, Artificial Sequence
  Description of Artificial Sequence: Synthetic oligonucleotide
ucaguuuucucuuuuaccu

SEQ ID NO: 2084345 - RNA, 19 nt, Artificial Sequence
  Description of Artificial Sequence: Synthetic oligonucleotide
uuuuauacuauaagaggug

SEQ ID NO: 2084346 - RNA, 19 nt, Artificial Sequence
  Description of Artificial Sequence: Synthetic oligonucleotide
uuuauacuauaagaggugg

SEQ ID NO: 2084347 - RNA, 19 nt, Artificial Sequence
  Description of Artificial Sequence: Synthetic oligonucleotide
caaaguaaaaccaccauuc

SEQ ID NO: 2084348 - RNA, 19 nt, Artificial Sequence
  Description of Artificial Sequence: Synthetic oligonucleotide
uaagaggugguugauaccg

SEQ ID NO: 2084349 - RNA, 19 nt, Artificial Sequence
  Description of Artificial Sequence: Synthetic oligonucleotide
auccacuucuucuacauac

SEQ ID NO: 2084350 - RNA, 19 nt, Artificial Sequence
  Description of Artificial Sequence: Synthetic oligonucleotide
aacaauacgaccaauucga

SEQ ID NO: 2084351 - RNA, 19 nt, Artificial Sequence
  Description of Artificial Sequence: Synthetic oligonucleotide
uuugcaucuggucuagagg

SEQ ID NO: 2084352 - RNA, 19 nt, Artificial Sequence
  Description of Artificial Sequence: Synthetic oligonucleotide
ucuacauacagugagucug

SEQ ID NO: 2084353 - RNA, 19 nt, Artificial Sequence
  Description of Artificial Sequence: Synthetic oligonucleotide
cagaguacuuauuuaaugc

SEQ ID NO: 2084354 - RNA, 19 nt, Artificial Sequence
  Description of Artificial Sequence: Synthetic oligonucleotide
ucagauuacaaaguaaaac

SEQ ID NO: 2084355 - RNA, 19 nt, Artificial Sequence
  Description of Artificial Sequence: Synthetic oligonucleotide
uaagguuucuccauggccu

SEQ ID NO: 2084356 - RNA, 19 nt, Artificial Sequence
  Description of Artificial Sequence: Synthetic oligonucleotide
uugauaccgauguagacug

SEQ ID NO: 2084357 - RNA, 19 nt, Artificial Sequence
  Description of Artificial Sequence: Synthetic oligonucleotide
uuacaaaguaaaaccacca

SEQ ID NO: 2084358 - RNA, 19 nt, Artificial Sequence
  Description of Artificial Sequence: Synthetic oligonucleotide
uugacaguaacaauacgac

SEQ ID NO: 2084359 - RNA, 19 nt, Artificial Sequence
  Description of Artificial Sequence: Synthetic oligonucleotide
ucgauuuugcaucuggucu

SEQ ID NO: 2084360 - RNA, 19 nt, Artificial Sequence
  Description of Artificial Sequence: Synthetic oligonucleotide
ucggcagaaaaucaugaag

SEQ ID NO: 2084361 - RNA, 19 nt, Artificial Sequence
  Description of Artificial Sequence: Synthetic oligonucleotide
auacagugagucugcaucc

SEQ ID NO: 2084362 - RNA, 19 nt, Artificial Sequence
  Description of Artificial Sequence: Synthetic oligonucleotide
uaucagauuggacugggug

SEQ ID NO: 2084363 - RNA, 19 nt, Artificial Sequence
  Description of Artificial Sequence: Synthetic oligonucleotide
uuccccuucaccucaaagg

SEQ ID NO: 2084364 - RNA, 19 nt, Artificial Sequence
  Description of Artificial Sequence: Synthetic oligonucleotide
cuugagacaguauuccccg

SEQ ID NO: 2084365 - RNA, 19 nt, Artificial Sequence
  Description of Artificial Sequence: Synthetic oligonucleotide
uuuugcaggcuucagauua

SEQ ID NO: 2084366 - RNA, 19 nt, Artificial Sequence
  Description of Artificial Sequence: Synthetic oligonucleotide
aaacugcagagcuagcuug

SEQ ID NO: 2084367 - RNA, 19 nt, Artificial Sequence
  Description of Artificial Sequence: Synthetic oligonucleotide
aaaaucaugaagcggcgaa

SEQ ID NO: 2084368 - RNA, 19 nt, Artificial Sequence
  Description of Artificial Sequence: Synthetic oligonucleotide
uccccuucaccucaaaggg

SEQ ID NO: 2084369 - RNA, 19 nt, Artificial Sequence
  Description of Artificial Sequence: Synthetic oligonucleotide
aaguaaaaccaccauucga

SEQ ID NO: 2084370 - RNA, 19 nt, Artificial Sequence
  Description of Artificial Sequence: Synthetic oligonucleotide
gaacagauccauugggagg

SEQ ID NO: 2084371 - RNA, 19 nt, Artificial Sequence
  Description of Artificial Sequence: Synthetic oligonucleotide
gacaguaacaauacgacca

SEQ ID NO: 2084372 - RNA, 19 nt, Artificial Sequence
  Description of Artificial Sequence: Synthetic oligonucleotide
aucaaaaguaauucugucu

SEQ ID NO: 2084373 - RNA, 19 nt, Artificial Sequence
  Description of Artificial Sequence: Synthetic oligonucleotide
aguaauucugucuccagga

SEQ ID NO: 2084374 - RNA, 19 nt, Artificial Sequence
  Description of Artificial Sequence: Synthetic oligonucleotide
uuuugacaguaacaauacg

SEQ ID NO: 2084375 - RNA, 19 nt, Artificial Sequence
  Description of Artificial Sequence: Synthetic oligonucleotide
uugcaucuggucuagagga

SEQ ID NO: 2084376 - RNA, 19 nt, Artificial Sequence
  Description of Artificial Sequence: Synthetic oligonucleotide
gacgagaaacaucuacugg

SEQ ID NO: 2084377 - RNA, 19 nt, Artificial Sequence
  Description of Artificial Sequence: Synthetic oligonucleotide
acagaguacuuauuuaaug

SEQ ID NO: 2084378 - RNA, 19 nt, Artificial Sequence
  Description of Artificial Sequence: Synthetic oligonucleotide
cauacagugagucugcauc

SEQ ID NO: 2084379 - RNA, 19 nt, Artificial Sequence
  Description of Artificial Sequence: Synthetic oligonucleotide
aguacuuauuuaaugccac

SEQ ID NO: 2084380 - RNA, 19 nt, Artificial Sequence
  Description of Artificial Sequence: Synthetic oligonucleotide
aaaaguaauucugucucca

SEQ ID NO: 2084381 - RNA, 19 nt, Artificial Sequence
  Description of Artificial Sequence: Synthetic oligonucleotide
uacuauaagaggugguuga

SEQ ID NO: 2084382 - RNA, 19 nt, Artificial Sequence
  Description of Artificial Sequence: Synthetic oligonucleotide
uguuacuaagguuucucca

SEQ ID NO: 2084383 - RNA, 19 nt, Artificial Sequence
  Description of Artificial Sequence: Synthetic oligonucleotide
acuaagguuucuccauggc

SEQ ID NO: 2084384 - RNA, 19 nt, Artificial Sequence
  Description of Artificial Sequence: Synthetic oligonucleotide
guagaaacugcagagcuag

SEQ ID NO: 2084385 - RNA, 19 nt, Artificial Sequence
  Description of Artificial Sequence: Synthetic oligonucleotide
auggccuucaguaacagag

SEQ ID NO: 2084386 - RNA, 19 nt, Artificial Sequence
  Description of Artificial Sequence: Synthetic oligonucleotide
uuaccuucuuuucuucucc

SEQ ID NO: 2084387 - RNA, 19 nt, Artificial Sequence
  Description of Artificial Sequence: Synthetic oligonucleotide
auaagaggugguugauacc

SEQ ID NO: 2084388 - RNA, 19 nt, Artificial Sequence
  Description of Artificial Sequence: Synthetic oligonucleotide
auuguuacuaagguuucuc

SEQ ID NO: 2084389 - RNA, 19 nt, Artificial Sequence
  Description of Artificial Sequence: Synthetic oligonucleotide
ugaauuucugccugaauua

SEQ ID NO: 2084390 - RNA, 19 nt, Artificial Sequence
  Description of Artificial Sequence: Synthetic oligonucleotide
uguauguggccacacacuc

SEQ ID NO: 2084391 - RNA, 19 nt, Artificial Sequence
  Description of Artificial Sequence: Synthetic oligonucleotide
ugauucaccaguccacuga

SEQ ID NO: 2084392 - RNA, 19 nt, Artificial Sequence
  Description of Artificial Sequence: Synthetic oligonucleotide
uucugccugaauuagcucu

SEQ ID NO: 2084393 - RNA, 19 nt, Artificial Sequence
  Description of Artificial Sequence: Synthetic oligonucleotide
ugacaguaacaauacgacc

SEQ ID NO: 2084394 - RNA, 19 nt, Artificial Sequence
  Description of Artificial Sequence: Synthetic oligonucleotide
guaacaauacgaccaauuc

SEQ ID NO: 2084395 - RNA, 19 nt, Artificial Sequence
  Description of Artificial Sequence: Synthetic oligonucleotide
aaccugcugcuugagauac

SEQ ID NO: 2084396 - RNA, 19 nt, Artificial Sequence
  Description of Artificial Sequence: Synthetic oligonucleotide
ucaguuuagcauuuucaac

SEQ ID NO: 2084397 - RNA, 19 nt, Artificial Sequence
  Description of Artificial Sequence: Synthetic oligonucleotide
cuaagguuucuccauggcc

SEQ ID NO: 2084398 - RNA, 19 nt, Artificial Sequence
  Description of Artificial Sequence: Synthetic oligonucleotide
cauucgauuuugcaucugg

SEQ ID NO: 2084399 - RNA, 19 nt, Artificial Sequence
  Description of Artificial Sequence: Synthetic oligonucleotide
aguaaaaccaccauucgau

SEQ ID NO: 2084400 - RNA, 19 nt, Artificial Sequence
  Description of Artificial Sequence: Synthetic oligonucleotide
ucuagaggaacaugauuca

SEQ ID NO: 2084401 - RNA, 19 nt, Artificial Sequence
  Description of Artificial Sequence: Synthetic oligonucleotide
cuucagauuacaaaguaaa

SEQ ID NO: 2084402 - RNA, 19 nt, Artificial Sequence
  Description of Artificial Sequence: Synthetic oligonucleotide
uuacuaagguuucuccaug

SEQ ID NO: 2084403 - RNA, 19 nt, Artificial Sequence
  Description of Artificial Sequence: Synthetic oligonucleotide
uuguuacuaagguuucucc

SEQ ID NO: 2084404 - RNA, 19 nt, Artificial Sequence
  Description of Artificial Sequence: Synthetic oligonucleotide
uccagggaaagcaucaaaa

SEQ ID NO: 2084405 - RNA, 19 nt, Artificial Sequence
  Description of Artificial Sequence: Synthetic oligonucleotide
gucagguuggaucugcucc

SEQ ID NO: 2084406 - RNA, 19 nt, Artificial Sequence
  Description of Artificial Sequence: Synthetic oligonucleotide
acaaaguaaaaccaccauu

SEQ ID NO: 2084407 - RNA, 19 nt, Artificial Sequence
  Description of Artificial Sequence: Synthetic oligonucleotide
uagcauuuucaacucgaag

SEQ ID NO: 2084408 - RNA, 19 nt, Artificial Sequence
  Description of Artificial Sequence: Synthetic oligonucleotide
aacaucuacuggcuucgag

SEQ ID NO: 2084409 - RNA, 19 nt, Artificial Sequence
  Description of Artificial Sequence: Synthetic oligonucleotide
agacgagaaacaucuacug

SEQ ID NO: 2084410 - RNA, 19 nt, Artificial Sequence
  Description of Artificial Sequence: Synthetic oligonucleotide
acuguaucacacuuguaga

SEQ ID NO: 2084411 - RNA, 19 nt, Artificial Sequence
  Description of Artificial Sequence: Synthetic oligonucleotide
uuauacuauaagagguggu

SEQ ID NO: 2084412 - RNA, 19 nt, Artificial Sequence
  Description of Artificial Sequence: Synthetic oligonucleotide
cuugucaggcucuccaggg

SEQ ID NO: 2084413 - RNA, 19 nt, Artificial Sequence
  Description of Artificial Sequence: Synthetic oligonucleotide
uucgagucagcacuuggug

SEQ ID NO: 2084414 - RNA, 19 nt, Artificial Sequence
  Description of Artificial Sequence: Synthetic oligonucleotide
aucagauuggacugggugu

SEQ ID NO: 2084415 - RNA, 19 nt, Artificial Sequence
  Description of Artificial Sequence: Synthetic oligonucleotide
gucuagaggaacaugauuc

SEQ ID NO: 2084416 - RNA, 19 nt, Artificial Sequence
  Description of Artificial Sequence: Synthetic oligonucleotide
ucuacuggcuucgagucag

SEQ ID NO: 2084417 - RNA, 19 nt, Artificial Sequence
  Description of Artificial Sequence: Synthetic oligonucleotide
uguggcauuugcuucacuc

SEQ ID NO: 2084418 - RNA, 19 nt, Artificial Sequence
  Description of Artificial Sequence: Synthetic oligonucleotide
gauguagacuguaucacac

SEQ ID NO: 2084419 - RNA, 19 nt, Artificial Sequence
  Description of Artificial Sequence: Synthetic oligonucleotide
acaucuacuggcuucgagu

SEQ ID NO: 2084420 - RNA, 19 nt, Artificial Sequence
  Description of Artificial Sequence: Synthetic oligonucleotide
uucagauuacaaaguaaaa

SEQ ID NO: 2084421 - RNA, 19 nt, Artificial Sequence
  Description of Artificial Sequence: Synthetic oligonucleotide
agauuacaaaguaaaacca

SEQ ID NO: 2084422 - RNA, 19 nt, Artificial Sequence
  Description of Artificial Sequence: Synthetic oligonucleotide
agaucuucuucuuaggguu

SEQ ID NO: 2084423 - RNA, 19 nt, Artificial Sequence
  Description of Artificial Sequence: Synthetic oligonucleotide
uuaggguucagcuccuugu

SEQ ID NO: 2084424 - RNA, 19 nt, Artificial Sequence
  Description of Artificial Sequence: Synthetic oligonucleotide
aggugguugauaccgaugu

SEQ ID NO: 2084425 - RNA, 19 nt, Artificial Sequence
  Description of Artificial Sequence: Synthetic oligonucleotide
aaagggagaccccuuguau

SEQ ID NO: 2084426 - RNA, 19 nt, Artificial Sequence
  Description of Artificial Sequence: Synthetic oligonucleotide
uuauuguuacuaagguuuc

SEQ ID NO: 2084427 - RNA, 19 nt, Artificial Sequence
  Description of Artificial Sequence: Synthetic oligonucleotide
caccauucgauuuugcauc

SEQ ID NO: 2084428 - RNA, 19 nt, Artificial Sequence
  Description of Artificial Sequence: Synthetic oligonucleotide
acuuauuuaaugccacuau

SEQ ID NO: 2084429 - RNA, 19 nt, Artificial Sequence
  Description of Artificial Sequence: Synthetic oligonucleotide
uauacuauaagaggugguu

SEQ ID NO: 2084430 - RNA, 19 nt, Artificial Sequence
  Description of Artificial Sequence: Synthetic oligonucleotide
ugguugauaccgauguaga

SEQ ID NO: 2084431 - RNA, 19 nt, Artificial Sequence
  Description of Artificial Sequence: Synthetic oligonucleotide
ugagacaguauuccccgca

SEQ ID NO: 2084432 - RNA, 19 nt, Artificial Sequence
  Description of Artificial Sequence: Synthetic oligonucleotide
ggcagaaaaucaugaagcg

SEQ ID NO: 2084433 - RNA, 19 nt, Artificial Sequence
  Description of Artificial Sequence: Synthetic oligonucleotide
cugcuugagauacucaaug

SEQ ID NO: 2084434 - RNA, 19 nt, Artificial Sequence
  Description of Artificial Sequence: Synthetic oligonucleotide
auccagacgagaaacaucu

SEQ ID NO: 2084435 - RNA, 19 nt, Artificial Sequence
  Description of Artificial Sequence: Synthetic oligonucleotide
uggcauuugcuucacucca

SEQ ID NO: 2084436 - RNA, 19 nt, Artificial Sequence
  Description of Artificial Sequence: Synthetic oligonucleotide
caucaaaaguaauucuguc

SEQ ID NO: 2084437 - RNA, 19 nt, Artificial Sequence
  Description of Artificial Sequence: Synthetic oligonucleotide
uugcacuggaguaucagau

SEQ ID NO: 2084438 - RNA, 19 nt, Artificial Sequence
  Description of Artificial Sequence: Synthetic oligonucleotide
uuuuaccuucuuuucuucu

SEQ ID NO: 2084439 - RNA, 19 nt, Artificial Sequence
  Description of Artificial Sequence: Synthetic oligonucleotide
uuguauguggccacacacu

SEQ ID NO: 2084440 - RNA, 19 nt, Artificial Sequence
  Description of Artificial Sequence: Synthetic oligonucleotide
ucaccucaaagggagaccc

SEQ ID NO: 2084441 - RNA, 19 nt, Artificial Sequence
  Description of Artificial Sequence: Synthetic oligonucleotide
uucgauuuugcaucugguc

SEQ ID NO: 2084442 - RNA, 19 nt, Artificial Sequence
  Description of Artificial Sequence: Synthetic oligonucleotide
acaugauucaccaguccac

SEQ ID NO: 2084443 - RNA, 19 nt, Artificial Sequence
  Description of Artificial Sequence: Synthetic oligonucleotide
ugcucuagucucuucagaa

SEQ ID NO: 2084444 - RNA, 19 nt, Artificial Sequence
  Description of Artificial Sequence: Synthetic oligonucleotide
ggaguaucagauuggacug

SEQ ID NO: 2084445 - RNA, 19 nt, Artificial Sequence
  Description of Artificial Sequence: Synthetic oligonucleotide
uagucucuucagaacagca

SEQ ID NO: 2084446 - RNA, 19 nt, Artificial Sequence
  Description of Artificial Sequence: Synthetic oligonucleotide
aaucggcagaaaaucauga

SEQ ID NO: 2084447 - RNA, 19 nt, Artificial Sequence
  Description of Artificial Sequence: Synthetic oligonucleotide
caggaacagauccauuggg

SEQ ID NO: 2084448 - RNA, 19 nt, Artificial Sequence
  Description of Artificial Sequence: Synthetic oligonucleotide
agaagagcaaccugcugcu

SEQ ID NO: 2084449 - RNA, 19 nt, Artificial Sequence
  Description of Artificial Sequence: Synthetic oligonucleotide
ugagauacucaaugaucug

SEQ ID NO: 2084450 - RNA, 19 nt, Artificial Sequence
  Description of Artificial Sequence: Synthetic oligonucleotide
uugcuugagacaguauucc

SEQ ID NO: 2084451 - RNA, 19 nt, Artificial Sequence
  Description of Artificial Sequence: Synthetic oligonucleotide
caauucgaagauccagacg

SEQ ID NO: 2084452 - RNA, 19 nt, Artificial Sequence
  Description of Artificial Sequence: Synthetic oligonucleotide
ucgagucagcacuuggugc

SEQ ID NO: 2084453 - RNA, 19 nt, Artificial Sequence
  Description of Artificial Sequence: Synthetic oligonucleotide
ugaauuagcucuugcuuua

SEQ ID NO: 2084454 - RNA, 19 nt, Artificial Sequence
  Description of Artificial Sequence: Synthetic oligonucleotide
auuagcucuugcuuuaguu

SEQ ID NO: 2084455 - RNA, 19 nt, Artificial Sequence
  Description of Artificial Sequence: Synthetic oligonucleotide
cuacauacagugagucugc

SEQ ID NO: 2084456 - RNA, 19 nt, Artificial Sequence
  Description of Artificial Sequence: Synthetic oligonucleotide
aguaucagauuggacuggg

SEQ ID NO: 2084457 - RNA, 19 nt, Artificial Sequence
  Description of Artificial Sequence: Synthetic oligonucleotide
gaccaauucgaagauccag

SEQ ID NO: 2084458 - RNA, 19 nt, Artificial Sequence
  Description of Artificial Sequence: Synthetic oligonucleotide
ucuuuucuucucucaaagu

SEQ ID NO: 2084459 - RNA, 19 nt, Artificial Sequence
  Description of Artificial Sequence: Synthetic oligonucleotide
ucaacucgaaguuucuuuu

SEQ ID NO: 2084460 - RNA, 19 nt, Artificial Sequence
  Description of Artificial Sequence: Synthetic oligonucleotide
auacuauaagaggugguug

SEQ ID NO: 2084461 - RNA, 19 nt, Artificial Sequence
  Description of Artificial Sequence: Synthetic oligonucleotide
agcggcgaaccgcagcucc

SEQ ID NO: 2084462 - RNA, 19 nt, Artificial Sequence
  Description of Artificial Sequence: Synthetic oligonucleotide
acacucagcauuggugugc

SEQ ID NO: 2084463 - RNA, 19 nt, Artificial Sequence
  Description of Artificial Sequence: Synthetic oligonucleotide
cucccgagcagccucagcc

SEQ ID NO: 2084464 - RNA, 19 nt, Artificial Sequence
  Description of Artificial Sequence: Synthetic oligonucleotide
ggugaacuagcacacauca

SEQ ID NO: 2084465 - RNA, 19 nt, Artificial Sequence
  Description of Artificial Sequence: Synthetic oligonucleotide
agaaaaucaugaagcggcg

SEQ ID NO: 2084466 - RNA, 19 nt, Artificial Sequence
  Description of Artificial Sequence: Synthetic oligonucleotide
cuggucuagaggaacauga

SEQ ID NO: 2084467 - RNA, 19 nt, Artificial Sequence
  Description of Artificial Sequence: Synthetic oligonucleotide
agauccauugggaggggcc

SEQ ID NO: 2084468 - RNA, 19 nt, Artificial Sequence
  Description of Artificial Sequence: Synthetic oligonucleotide
uuugggcccugcaaacucc

SEQ ID NO: 2084469 - RNA, 19 nt, Artificial Sequence
  Description of Artificial Sequence: Synthetic oligonucleotide
caucuacuggcuucgaguc

SEQ ID NO: 2084470 - RNA, 19 nt, Artificial Sequence
  Description of Artificial Sequence: Synthetic oligonucleotide
gaguacuuauuuaaugcca

SEQ ID NO: 2084471 - RNA, 19 nt, Artificial Sequence
  Description of Artificial Sequence: Synthetic oligonucleotide
cuccuugagaagagcaacc

SEQ ID NO: 2084472 - RNA, 19 nt, Artificial Sequence
  Description of Artificial Sequence: Synthetic oligonucleotide
uucuacauacagugagucu

SEQ ID NO: 2084473 - RNA, 19 nt, Artificial Sequence
  Description of Artificial Sequence: Synthetic oligonucleotide
ugcuugagacaguauuccc

SEQ ID NO: 2084474 - RNA, 19 nt, Artificial Sequence
  Description of Artificial Sequence: Synthetic oligonucleotide
ucaugaagcggcgaaccgc

SEQ ID NO: 2084475 - RNA, 19 nt, Artificial Sequence
  Description of Artificial Sequence: Synthetic oligonucleotide
guggcauuugcuucacucc

SEQ ID NO: 2084476 - RNA, 19 nt, Artificial Sequence
  Description of Artificial Sequence: Synthetic oligonucleotide
uacuuauuuaaugccacua

SEQ ID NO: 2084477 - RNA, 19 nt, Artificial Sequence
  Description of Artificial Sequence: Synthetic oligonucleotide
uguagaaacugcagagcua

SEQ ID NO: 2084478 - RNA, 19 nt, Artificial Sequence
  Description of Artificial Sequence: Synthetic oligonucleotide
agagcuagcuugcacugga

SEQ ID NO: 2084479 - RNA, 19 nt, Artificial Sequence
  Description of Artificial Sequence: Synthetic oligonucleotide
acagugagucugcauccgg

SEQ ID NO: 2084480 - RNA, 19 nt, Artificial Sequence
  Description of Artificial Sequence: Synthetic oligonucleotide
cucuagucucuucagaaca

SEQ ID NO: 2084481 - RNA, 19 nt, Artificial Sequence
  Description of Artificial Sequence: Synthetic oligonucleotide
ucaaagggagaccccuugu

SEQ ID NO: 2084482 - RNA, 19 nt, Artificial Sequence
  Description of Artificial Sequence: Synthetic oligonucleotide
gauuuugcaucuggucuag

SEQ ID NO: 2084483 - RNA, 19 nt, Artificial Sequence
  Description of Artificial Sequence: Synthetic oligonucleotide
aacagaguacuuauuuaau

SEQ ID NO: 2084484 - RNA, 19 nt, Artificial Sequence
  Description of Artificial Sequence: Synthetic oligonucleotide
acaguaacaauacgaccaa

SEQ ID NO: 2084485 - RNA, 19 nt, Artificial Sequence
  Description of Artificial Sequence: Synthetic oligonucleotide
ugaagcggcgaaccgcagc

SEQ ID NO: 2084486 - RNA, 19 nt, Artificial Sequence
  Description of Artificial Sequence: Synthetic oligonucleotide
cuauuggccaugguuuggg

SEQ ID NO: 2084487 - RNA, 19 nt, Artificial Sequence
  Description of Artificial Sequence: Synthetic oligonucleotide
cucaaugaucuggucagcc

SEQ ID NO: 2084488 - RNA, 19 nt, Artificial Sequence
  Description of Artificial Sequence: Synthetic oligonucleotide
cacuggaguaucagauugg

SEQ ID NO: 2084489 - RNA, 19 nt, Artificial Sequence
  Description of Artificial Sequence: Synthetic oligonucleotide
agggagaccccuuguaugu

SEQ ID NO: 2084490 - RNA, 19 nt, Artificial Sequence
  Description of Artificial Sequence: Synthetic oligonucleotide
uuugcaggcuucagauuac

SEQ ID NO: 2084491 - RNA, 19 nt, Artificial Sequence
  Description of Artificial Sequence: Synthetic oligonucleotide
agauuggacuggguguggc

SEQ ID NO: 2084492 - RNA, 19 nt, Artificial Sequence
  Description of Artificial Sequence: Synthetic oligonucleotide
agcacuuggugcugcugac

SEQ ID NO: 2084493 - RNA, 19 nt, Artificial Sequence
  Description of Artificial Sequence: Synthetic oligonucleotide
aguccacugaugacugucc

SEQ ID NO: 2084494 - RNA, 19 nt, Artificial Sequence
  Description of Artificial Sequence: Synthetic oligonucleotide
acuagcacacaucaccauu

SEQ ID NO: 2084495 - RNA, 19 nt, Artificial Sequence
  Description of Artificial Sequence: Synthetic oligonucleotide
aaacugcuuucuccuugag

SEQ ID NO: 2084496 - RNA, 19 nt, Artificial Sequence
  Description of Artificial Sequence: Synthetic oligonucleotide
uacagugagucugcauccg

SEQ ID NO: 2084497 - RNA, 19 nt, Artificial Sequence
  Description of Artificial Sequence: Synthetic oligonucleotide
gauacucaaugaucugguc

SEQ ID NO: 2084498 - RNA, 19 nt, Artificial Sequence
  Description of Artificial Sequence: Synthetic oligonucleotide
gaguaucagauuggacugg

SEQ ID NO: 2084499 - RNA, 19 nt, Artificial Sequence
  Description of Artificial Sequence: Synthetic oligonucleotide
gccaucuuugcccagaauc

SEQ ID NO: 2084500 - RNA, 19 nt, Artificial Sequence
  Description of Artificial Sequence: Synthetic oligonucleotide
uaccgauguagacuguauc

SEQ ID NO: 2084501 - RNA, 19 nt, Artificial Sequence
  Description of Artificial Sequence: Synthetic oligonucleotide
gaacuagcacacaucacca

SEQ ID NO: 2084502 - RNA, 19 nt, Artificial Sequence
  Description of Artificial Sequence: Synthetic oligonucleotide
aguaacaauacgaccaauu

SEQ ID NO: 2084503 - RNA, 19 nt, Artificial Sequence
  Description of Artificial Sequence: Synthetic oligonucleotide
ugucaggcucuccagggaa

SEQ ID NO: 2084504 - RNA, 19 nt, Artificial Sequence
  Description of Artificial Sequence: Synthetic oligonucleotide
uagcacacaucaccauugc

SEQ ID NO: 2084505 - RNA, 19 nt, Artificial Sequence
  Description of Artificial Sequence: Synthetic oligonucleotide
guaacagaguacuuauuua

SEQ ID NO: 2084506 - RNA, 19 nt, Artificial Sequence
  Description of Artificial Sequence: Synthetic oligonucleotide
aaaccaccauucgauuuug

SEQ ID NO: 2084507 - RNA, 19 nt, Artificial Sequence
  Description of Artificial Sequence: Synthetic oligonucleotide
agugagucugcauccgggu

SEQ ID NO: 2084508 - RNA, 19 nt, Artificial Sequence
  Description of Artificial Sequence: Synthetic oligonucleotide
aacuagcacacaucaccau

SEQ ID NO: 2084509 - RNA, 19 nt, Artificial Sequence
  Description of Artificial Sequence: Synthetic oligonucleotide
cacaucaccauugcuugag

SEQ ID NO: 2084510 - RNA, 19 nt, Artificial Sequence
  Description of Artificial Sequence: Synthetic oligonucleotide
ugacugcaguuucuucucc

SEQ ID NO: 2084511 - RNA, 19 nt, Artificial Sequence
  Description of Artificial Sequence: Synthetic oligonucleotide
acuauuggccaugguuugg

SEQ ID NO: 2084512 - RNA, 19 nt, Artificial Sequence
  Description of Artificial Sequence: Synthetic oligonucleotide
accaauucgaagauccaga

SEQ ID NO: 2084513 - RNA, 19 nt, Artificial Sequence
  Description of Artificial Sequence: Synthetic oligonucleotide
uaccuucuuuucuucuccc

SEQ ID NO: 2084514 - RNA, 19 nt, Artificial Sequence
  Description of Artificial Sequence: Synthetic oligonucleotide
uggugaacuagcacacauc

SEQ ID NO: 2084515 - RNA, 19 nt, Artificial Sequence
  Description of Artificial Sequence: Synthetic oligonucleotide
uauuguuacuaagguuucu

SEQ ID NO: 2084516 - RNA, 19 nt, Artificial Sequence
  Description of Artificial Sequence: Synthetic oligonucleotide
gacuggguguggcauuugc

SEQ ID NO: 2084517 - RNA, 19 nt, Artificial Sequence
  Description of Artificial Sequence: Synthetic oligonucleotide
cacuauuggccaugguuug

SEQ ID NO: 2084518 - RNA, 19 nt, Artificial Sequence
  Description of Artificial Sequence: Synthetic oligonucleotide
uccuugagaagagcaaccu

SEQ ID NO: 2084519 - RNA, 19 nt, Artificial Sequence
  Description of Artificial Sequence: Synthetic oligonucleotide
augauucaccaguccacug

SEQ ID NO: 2084520 - RNA, 19 nt, Artificial Sequence
  Description of Artificial Sequence: Synthetic oligonucleotide
accauucgauuuugcaucu

SEQ ID NO: 2084521 - RNA, 19 nt, Artificial Sequence
  Description of Artificial Sequence: Synthetic oligonucleotide
uccuugucaggcucuccag

SEQ ID NO: 2084522 - RNA, 19 nt, Artificial Sequence
  Description of Artificial Sequence: Synthetic oligonucleotide
ugccugaauuagcucuugc

SEQ ID NO: 2084523 - RNA, 19 nt, Artificial Sequence
  Description of Artificial Sequence: Synthetic oligonucleotide
guugauaccgauguagacu

SEQ ID NO: 2084524 - RNA, 19 nt, Artificial Sequence
  Description of Artificial Sequence: Synthetic oligonucleotide
caugaagcggcgaaccgca

SEQ ID NO: 2084525 - RNA, 19 nt, Artificial Sequence
  Description of Artificial Sequence: Synthetic oligonucleotide
accccuuguauguggccac

SEQ ID NO: 2084526 - RNA, 19 nt, Artificial Sequence
  Description of Artificial Sequence: Synthetic oligonucleotide
uucaccucaaagggagacc

SEQ ID NO: 2084527 - RNA, 19 nt, Artificial Sequence
  Description of Artificial Sequence: Synthetic oligonucleotide
cauugguggccaucuuugc

SEQ ID NO: 2084528 - RNA, 19 nt, Artificial Sequence
  Description of Artificial Sequence: Synthetic oligonucleotide
auucugaauuucugccuga

SEQ ID NO: 2084529 - RNA, 19 nt, Artificial Sequence
  Description of Artificial Sequence: Synthetic oligonucleotide
ccagaucuucuucuuaggg

SEQ ID NO: 2084530 - RNA, 19 nt, Artificial Sequence
  Description of Artificial Sequence: Synthetic oligonucleotide
aagauccagacgagaaaca

SEQ ID NO: 2084531 - RNA, 19 nt, Artificial Sequence
  Description of Artificial Sequence: Synthetic oligonucleotide
acuggaguaucagauugga

SEQ ID NO: 2084532 - RNA, 19 nt, Artificial Sequence
  Description of Artificial Sequence: Synthetic oligonucleotide
guuacuaagguuucuccau

SEQ ID NO: 2084533 - RNA, 19 nt, Artificial Sequence
  Description of Artificial Sequence: Synthetic oligonucleotide
cuuaggguucagcuccuug

SEQ ID NO: 2084534 - RNA, 19 nt, Artificial Sequence
  Description of Artificial Sequence: Synthetic oligonucleotide
cuucaccucaaagggagac

SEQ ID NO: 2084535 - RNA, 19 nt, Artificial Sequence
  Description of Artificial Sequence: Synthetic oligonucleotide
cuagaggaacaugauucac

SEQ ID NO: 2084536 - RNA, 19 nt, Artificial Sequence
  Description of Artificial Sequence: Synthetic oligonucleotide
uccacuuucucuggugaac

SEQ ID NO: 2084537 - RNA, 19 nt, Artificial Sequence
  Description of Artificial Sequence: Synthetic oligonucleotide
agaaucggcagaaaaucau

SEQ ID NO: 2084538 - RNA, 19 nt, Artificial Sequence
  Description of Artificial Sequence: Synthetic oligonucleotide
aagguuucuccauggccuu

SEQ ID NO: 2084539 - RNA, 19 nt, Artificial Sequence
  Description of Artificial Sequence: Synthetic oligonucleotide
cuguaucacacuuguagaa

SEQ ID NO: 2084540 - RNA, 19 nt, Artificial Sequence
  Description of Artificial Sequence: Synthetic oligonucleotide
cagaaucggcagaaaauca

SEQ ID NO: 2084541 - RNA, 19 nt, Artificial Sequence
  Description of Artificial Sequence: Synthetic oligonucleotide
auacgaccaauucgaagau

SEQ ID NO: 2084542 - RNA, 19 nt, Artificial Sequence
  Description of Artificial Sequence: Synthetic oligonucleotide
uugcuuuaguucuucuauu

SEQ ID NO: 2084543 - RNA, 19 nt, Artificial Sequence
  Description of Artificial Sequence: Synthetic oligonucleotide
ugguuugggcccugcaaac

SEQ ID NO: 2084544 - RNA, 19 nt, Artificial Sequence
  Description of Artificial Sequence: Synthetic oligonucleotide
gauccagacgagaaacauc

SEQ ID NO: 2084545 - RNA, 19 nt, Artificial Sequence
  Description of Artificial Sequence: Synthetic oligonucleotide
cuugcacuggaguaucaga

SEQ ID NO: 2084546 - RNA, 19 nt, Artificial Sequence
  Description of Artificial Sequence: Synthetic oligonucleotide
ggagaccccuuguaugugg

SEQ ID NO: 2084547 - RNA, 19 nt, Artificial Sequence
  Description of Artificial Sequence: Synthetic oligonucleotide
uagaaacugcagagcuagc

SEQ ID NO: 2084548 - RNA, 19 nt, Artificial Sequence
  Description of Artificial Sequence: Synthetic oligonucleotide
uugggcccugcaaacuccc

SEQ ID NO: 2084549 - RNA, 19 nt, Artificial Sequence
  Description of Artificial Sequence: Synthetic oligonucleotide
guuugggcccugcaaacuc

SEQ ID NO: 2084550 - RNA, 19 nt, Artificial Sequence
  Description of Artificial Sequence: Synthetic oligonucleotide
aggaacagauccauuggga

SEQ ID NO: 2084551 - RNA, 19 nt, Artificial Sequence
  Description of Artificial Sequence: Synthetic oligonucleotide
uugagacaguauuccccgc

SEQ ID NO: 2084552 - RNA, 19 nt, Artificial Sequence
  Description of Artificial Sequence: Synthetic oligonucleotide
ucuuaucaguuuucucuuu

SEQ ID NO: 2084553 - RNA, 19 nt, Artificial Sequence
  Description of Artificial Sequence: Synthetic oligonucleotide
caacucgaaguuucuuuuc

SEQ ID NO: 2084554 - RNA, 19 nt, Artificial Sequence
  Description of Artificial Sequence: Synthetic oligonucleotide
ccagacgagaaacaucuac

SEQ ID NO: 2084555 - RNA, 19 nt, Artificial Sequence
  Description of Artificial Sequence: Synthetic oligonucleotide
ugcugcugacugcaguuuc

SEQ ID NO: 2084556 - RNA, 19 nt, Artificial Sequence
  Description of Artificial Sequence: Synthetic oligonucleotide
cuggaguaucagauuggac

SEQ ID NO: 2084557 - RNA, 19 nt, Artificial Sequence
  Description of Artificial Sequence: Synthetic oligonucleotide
ccucuuuauuguuacuaag

SEQ ID NO: 2084558 - RNA, 19 nt, Artificial Sequence
  Description of Artificial Sequence: Synthetic oligonucleotide
gauuggacuggguguggca

SEQ ID NO: 2084559 - RNA, 19 nt, Artificial Sequence
  Description of Artificial Sequence: Synthetic oligonucleotide
agcacacaucaccauugcu

SEQ ID NO: 2084560 - RNA, 19 nt, Artificial Sequence
  Description of Artificial Sequence: Synthetic oligonucleotide
ugcaucuggucuagaggaa

SEQ ID NO: 2084561 - RNA, 19 nt, Artificial Sequence
  Description of Artificial Sequence: Synthetic oligonucleotide
cuggcuucgagucagcacu

SEQ ID NO: 2084562 - RNA, 19 nt, Artificial Sequence
  Description of Artificial Sequence: Synthetic oligonucleotide
ccaauucgaagauccagac

SEQ ID NO: 2084563 - RNA, 19 nt, Artificial Sequence
  Description of Artificial Sequence: Synthetic oligonucleotide
gaacagcaucauugguggc

SEQ ID NO: 2084564 - RNA, 19 nt, Artificial Sequence
  Description of Artificial Sequence: Synthetic oligonucleotide
aggggccagaauuuccacu

SEQ ID NO: 2084565 - RNA, 19 nt, Artificial Sequence
  Description of Artificial Sequence: Synthetic oligonucleotide
gaagcggcgaaccgcagcu

SEQ ID NO: 2084566 - RNA, 19 nt, Artificial Sequence
  Description of Artificial Sequence: Synthetic oligonucleotide
acauacagugagucugcau

SEQ ID NO: 2084567 - RNA, 19 nt, Artificial Sequence
  Description of Artificial Sequence: Synthetic oligonucleotide
cagacgagaaacaucuacu

SEQ ID NO: 2084568 - RNA, 19 nt, Artificial Sequence
  Description of Artificial Sequence: Synthetic oligonucleotide
aucuacuggcuucgaguca

SEQ ID NO: 2084569 - RNA, 19 nt, Artificial Sequence
  Description of Artificial Sequence: Synthetic oligonucleotide
auuggacuggguguggcau

SEQ ID NO: 2084570 - RNA, 19 nt, Artificial Sequence
  Description of Artificial Sequence: Synthetic oligonucleotide
gaggugguugauaccgaug

SEQ ID NO: 2084571 - RNA, 19 nt, Artificial Sequence
  Description of Artificial Sequence: Synthetic oligonucleotide
gacaguauuccccgcauuu

SEQ ID NO: 2084572 - RNA, 19 nt, Artificial Sequence
  Description of Artificial Sequence: Synthetic oligonucleotide
ugguggccaucuuugccca

SEQ ID NO: 2084573 - RNA, 19 nt, Artificial Sequence
  Description of Artificial Sequence: Synthetic oligonucleotide
caucuggucuagaggaaca

SEQ ID NO: 2084574 - RNA, 19 nt, Artificial Sequence
  Description of Artificial Sequence: Synthetic oligonucleotide
cagggaaagcaucaaaagu

SEQ ID NO: 2084575 - RNA, 19 nt, Artificial Sequence
  Description of Artificial Sequence: Synthetic oligonucleotide
gauaccgauguagacugua

SEQ ID NO: 2084576 - RNA, 19 nt, Artificial Sequence
  Description of Artificial Sequence: Synthetic oligonucleotide
uacauacagugagucugca

SEQ ID NO: 2084577 - RNA, 19 nt, Artificial Sequence
  Description of Artificial Sequence: Synthetic oligonucleotide
cugaauuagcucuugcuuu

SEQ ID NO: 2084578 - RNA, 19 nt, Artificial Sequence
  Description of Artificial Sequence: Synthetic oligonucleotide
cauugcuugagacaguauu

SEQ ID NO: 2084579 - RNA, 19 nt, Artificial Sequence
  Description of Artificial Sequence: Synthetic oligonucleotide
auucgaagauccagacgag

SEQ ID NO: 2084580 - RNA, 19 nt, Artificial Sequence
  Description of Artificial Sequence: Synthetic oligonucleotide
auucugucuccaggaacag

SEQ ID NO: 2084581 - RNA, 19 nt, Artificial Sequence
  Description of Artificial Sequence: Synthetic oligonucleotide
gagaccccuuguauguggc

SEQ ID NO: 2084582 - RNA, 19 nt, Artificial Sequence
  Description of Artificial Sequence: Synthetic oligonucleotide
gaccccuuguauguggcca

SEQ ID NO: 2084583 - RNA, 19 nt, Artificial Sequence
  Description of Artificial Sequence: Synthetic oligonucleotide
cuguccuuggggcugccuc

SEQ ID NO: 2084584 - RNA, 19 nt, Artificial Sequence
  Description of Artificial Sequence: Synthetic oligonucleotide
uugcccagaaucggcagaa

SEQ ID NO: 2084585 - RNA, 19 nt, Artificial Sequence
  Description of Artificial Sequence: Synthetic oligonucleotide
accauugcuugagacagua

SEQ ID NO: 2084586 - RNA, 19 nt, Artificial Sequence
  Description of Artificial Sequence: Synthetic oligonucleotide
acacaucaccauugcuuga

SEQ ID NO: 2084587 - RNA, 19 nt, Artificial Sequence
  Description of Artificial Sequence: Synthetic oligonucleotide
ugauaccgauguagacugu

SEQ ID NO: 2084588 - RNA, 19 nt, Artificial Sequence
  Description of Artificial Sequence: Synthetic oligonucleotide
caugguuugggcccugcaa

SEQ ID NO: 2084589 - RNA, 19 nt, Artificial Sequence
  Description of Artificial Sequence: Synthetic oligonucleotide
ggaacaugauucaccaguc

SEQ ID NO: 2084590 - RNA, 19 nt, Artificial Sequence
  Description of Artificial Sequence: Synthetic oligonucleotide
aguugccuguaaaacugcu

SEQ ID NO: 2084591 - RNA, 19 nt, Artificial Sequence
  Description of Artificial Sequence: Synthetic oligonucleotide
caguccacugaugacuguc

SEQ ID NO: 2084592 - RNA, 19 nt, Artificial Sequence
  Description of Artificial Sequence: Synthetic oligonucleotide
caggucagguuggaucugc

SEQ ID NO: 2084593 - RNA, 19 nt, Artificial Sequence
  Description of Artificial Sequence: Synthetic oligonucleotide
agguuggaucugcucccag

SEQ ID NO: 2084594 - RNA, 19 nt, Artificial Sequence
  Description of Artificial Sequence: Synthetic oligonucleotide
gcucuagucucuucagaac

SEQ ID NO: 2084595 - RNA, 19 nt, Artificial Sequence
  Description of Artificial Sequence: Synthetic oligonucleotide
ggcuucagauuacaaagua

SEQ ID NO: 2084596 - RNA, 19 nt, Artificial Sequence
  Description of Artificial Sequence: Synthetic oligonucleotide
augccacuauuggccaugg

SEQ ID NO: 2084597 - RNA, 19 nt, Artificial Sequence
  Description of Artificial Sequence: Synthetic oligonucleotide
uacgaccaauucgaagauc

SEQ ID NO: 2084598 - RNA, 19 nt, Artificial Sequence
  Description of Artificial Sequence: Synthetic oligonucleotide
uagcuugcacuggaguauc

SEQ ID NO: 2084599 - RNA, 19 nt, Artificial Sequence
  Description of Artificial Sequence: Synthetic oligonucleotide
cccagaucuucuucuuagg

SEQ ID NO: 2084600 - RNA, 19 nt, Artificial Sequence
  Description of Artificial Sequence: Synthetic oligonucleotide
cauuggugugcaggucagg

SEQ ID NO: 2084601 - RNA, 19 nt, Artificial Sequence
  Description of Artificial Sequence: Synthetic oligonucleotide
gugaacuagcacacaucac

SEQ ID NO: 2084602 - RNA, 19 nt, Artificial Sequence
  Description of Artificial Sequence: Synthetic oligonucleotide
agacaguauuccccgcauu

SEQ ID NO: 2084603 - RNA, 19 nt, Artificial Sequence
  Description of Artificial Sequence: Synthetic oligonucleotide
acaguauuccccgcauuuu

SEQ ID NO: 2084604 - RNA, 19 nt, Artificial Sequence
  Description of Artificial Sequence: Synthetic oligonucleotide
acuggguguggcauuugcu

SEQ ID NO: 2084605 - RNA, 19 nt, Artificial Sequence
  Description of Artificial Sequence: Synthetic oligonucleotide
guaaaaccaccauucgauu

SEQ ID NO: 2084606 - RNA, 19 nt, Artificial Sequence
  Description of Artificial Sequence: Synthetic oligonucleotide
cuucgagucagcacuuggu

SEQ ID NO: 2084607 - RNA, 19 nt, Artificial Sequence
  Description of Artificial Sequence: Synthetic oligonucleotide
acagauccauugggagggg

SEQ ID NO: 2084608 - RNA, 19 nt, Artificial Sequence
  Description of Artificial Sequence: Synthetic oligonucleotide
gguuggaucugcucccaga

SEQ ID NO: 2084609 - RNA, 19 nt, Artificial Sequence
  Description of Artificial Sequence: Synthetic oligonucleotide
caaagggagaccccuugua

SEQ ID NO: 2084610 - RNA, 19 nt, Artificial Sequence
  Description of Artificial Sequence: Synthetic oligonucleotide
auaccgauguagacuguau

SEQ ID NO: 2084611 - RNA, 19 nt, Artificial Sequence
  Description of Artificial Sequence: Synthetic oligonucleotide
cuuaucaguuuucucuuuu

SEQ ID NO: 2084612 - RNA, 19 nt, Artificial Sequence
  Description of Artificial Sequence: Synthetic oligonucleotide
ccuguaaaacugcuuucuc

SEQ ID NO: 2084613 - RNA, 19 nt, Artificial Sequence
  Description of Artificial Sequence: Synthetic oligonucleotide
gagucagcacuuggugcug

SEQ ID NO: 2084614 - RNA, 19 nt, Artificial Sequence
  Description of Artificial Sequence: Synthetic oligonucleotide
uuggacuggguguggcauu

SEQ ID NO: 2084615 - RNA, 19 nt, Artificial Sequence
  Description of Artificial Sequence: Synthetic oligonucleotide
cuauaagaggugguugaua

SEQ ID NO: 2084616 - RNA, 19 nt, Artificial Sequence
  Description of Artificial Sequence: Synthetic oligonucleotide
aagcggcgaaccgcagcuc

SEQ ID NO: 2084617 - RNA, 19 nt, Artificial Sequence
  Description of Artificial Sequence: Synthetic oligonucleotide
uccagacgagaaacaucua

SEQ ID NO: 2084618 - RNA, 19 nt, Artificial Sequence
  Description of Artificial Sequence: Synthetic oligonucleotide
cagauccauugggaggggc

SEQ ID NO: 2084619 - RNA, 19 nt, Artificial Sequence
  Description of Artificial Sequence: Synthetic oligonucleotide
gagacaguauuccccgcau

SEQ ID NO: 2084620 - RNA, 19 nt, Artificial Sequence
  Description of Artificial Sequence: Synthetic oligonucleotide
aucuggucuagaggaacau

SEQ ID NO: 2084621 - RNA, 19 nt, Artificial Sequence
  Description of Artificial Sequence: Synthetic oligonucleotide
guauguggccacacacuca

SEQ ID NO: 2084622 - RNA, 19 nt, Artificial Sequence
  Description of Artificial Sequence: Synthetic oligonucleotide
gcaaccugcugcuugagau

SEQ ID NO: 2084623 - RNA, 19 nt, Artificial Sequence
  Description of Artificial Sequence: Synthetic oligonucleotide
ccgauguagacuguaucac

SEQ ID NO: 2084624 - RNA, 19 nt, Artificial Sequence
  Description of Artificial Sequence: Synthetic oligonucleotide
gcuugcacuggaguaucag

SEQ ID NO: 2084625 - RNA, 19 nt, Artificial Sequence
  Description of Artificial Sequence: Synthetic oligonucleotide
uggacuggguguggcauuu

SEQ ID NO: 2084626 - RNA, 19 nt, Artificial Sequence
  Description of Artificial Sequence: Synthetic oligonucleotide
ugugcaggucagguuggau

SEQ ID NO: 2084627 - RNA, 19 nt, Artificial Sequence
  Description of Artificial Sequence: Synthetic oligonucleotide
gcacccuucugcucuaguc

SEQ ID NO: 2084628 - RNA, 19 nt, Artificial Sequence
  Description of Artificial Sequence: Synthetic oligonucleotide
caugauucaccaguccacu

SEQ ID NO: 2084629 - RNA, 19 nt, Artificial Sequence
  Description of Artificial Sequence: Synthetic oligonucleotide
gcaucuggucuagaggaac

SEQ ID NO: 2084630 - RNA, 19 nt, Artificial Sequence
  Description of Artificial Sequence: Synthetic oligonucleotide
cugcucccagaucuucuuc

SEQ ID NO: 2084631 - RNA, 19 nt, Artificial Sequence
  Description of Artificial Sequence: Synthetic oligonucleotide
cacccuucugcucuagucu

SEQ ID NO: 2084632 - RNA, 19 nt, Artificial Sequence
  Description of Artificial Sequence: Synthetic oligonucleotide
cucccucccgagcagccuc

SEQ ID NO: 2084633 - RNA, 19 nt, Artificial Sequence
  Description of Artificial Sequence: Synthetic oligonucleotide
ccuucaguaacagaguacu

SEQ ID NO: 2084634 - RNA, 19 nt, Artificial Sequence
  Description of Artificial Sequence: Synthetic oligonucleotide
ggaggggccagaauuucca

SEQ ID NO: 2084635 - RNA, 19 nt, Artificial Sequence
  Description of Artificial Sequence: Synthetic oligonucleotide
gagcaaccugcugcuugag

SEQ ID NO: 2084636 - RNA, 19 nt, Artificial Sequence
  Description of Artificial Sequence: Synthetic oligonucleotide
ugggcccugcaaacucccu

SEQ ID NO: 2084637 - RNA, 19 nt, Artificial Sequence
  Description of Artificial Sequence: Synthetic oligonucleotide
ugccacuauuggccauggu

SEQ ID NO: 2084638 - RNA, 19 nt, Artificial Sequence
  Description of Artificial Sequence: Synthetic oligonucleotide
caccaguccacugaugacu

SEQ ID NO: 2084639 - RNA, 19 nt, Artificial Sequence
  Description of Artificial Sequence: Synthetic oligonucleotide
gccacuauuggccaugguu

SEQ ID NO: 2084640 - RNA, 19 nt, Artificial Sequence
  Description of Artificial Sequence: Synthetic oligonucleotide
ggccacacacucagcauug

SEQ ID NO: 2084641 - RNA, 19 nt, Artificial Sequence
  Description of Artificial Sequence: Synthetic oligonucleotide
gcauuggugugcaggucag

SEQ ID NO: 2084642 - RNA, 19 nt, Artificial Sequence
  Description of Artificial Sequence: Synthetic oligonucleotide
cuagcuugcacuggaguau

SEQ ID NO: 2084643 - RNA, 19 nt, Artificial Sequence
  Description of Artificial Sequence: Synthetic oligonucleotide
cugccugaauuagcucuug

SEQ ID NO: 2084644 - RNA, 19 nt, Artificial Sequence
  Description of Artificial Sequence: Synthetic oligonucleotide
gcgaaccgcagcucccucc

SEQ ID NO: 2084645 - RNA, 19 nt, Artificial Sequence
  Description of Artificial Sequence: Synthetic oligonucleotide
ggucuagaggaacaugauu

SEQ ID NO: 2084646 - RNA, 19 nt, Artificial Sequence
  Description of Artificial Sequence: Synthetic oligonucleotide
uggccaugguuugggcccu

SEQ ID NO: 2084647 - RNA, 19 nt, Artificial Sequence
  Description of Artificial Sequence: Synthetic oligonucleotide
ccacuauuggccaugguuu

SEQ ID NO: 2084648 - RNA, 19 nt, Artificial Sequence
  Description of Artificial Sequence: Synthetic oligonucleotide
ccugaauuagcucuugcuu

SEQ ID NO: 2084649 - RNA, 19 nt, Artificial Sequence
  Description of Artificial Sequence: Synthetic oligonucleotide
gccuguaaaacugcuuucu

SEQ ID NO: 2084650 - RNA, 19 nt, Artificial Sequence
  Description of Artificial Sequence: Synthetic oligonucleotide
gcagcucccucccgagcag

SEQ ID NO: 2084651 - RNA, 19 nt, Artificial Sequence
  Description of Artificial Sequence: Synthetic oligonucleotide
ccaccauucgauuuugcau

SEQ ID NO: 2084652 - RNA, 19 nt, Artificial Sequence
  Description of Artificial Sequence: Synthetic oligonucleotide
ggugcugcugacugcaguu

SEQ ID NO: 2084653 - RNA, 19 nt, Artificial Sequence
  Description of Artificial Sequence: Synthetic oligonucleotide
cuucaguaacagaguacuu

SEQ ID NO: 2084654 - RNA, 19 nt, Artificial Sequence
  Description of Artificial Sequence: Synthetic oligonucleotide
cgauuuugcaucuggucua

SEQ ID NO: 2084655 - RNA, 19 nt, Artificial Sequence
  Description of Artificial Sequence: Synthetic oligonucleotide
ccuuguauguggccacaca

SEQ ID NO: 2084656 - RNA, 19 nt, Artificial Sequence
  Description of Artificial Sequence: Synthetic oligonucleotide
ccccucuuuacucuguucu

SEQ ID NO: 2084657 - RNA, 19 nt, Artificial Sequence
  Description of Artificial Sequence: Synthetic oligonucleotide
gguguggcauuugcuucac

SEQ ID NO: 2084658 - RNA, 19 nt, Artificial Sequence
  Description of Artificial Sequence: Synthetic oligonucleotide
cccagaaucggcagaaaau

SEQ ID NO: 2084659 - RNA, 19 nt, Artificial Sequence
  Description of Artificial Sequence: Synthetic oligonucleotide
ggugguugauaccgaugua

SEQ ID NO: 2084660 - RNA, 19 nt, Artificial Sequence
  Description of Artificial Sequence: Synthetic oligonucleotide
gggagaccccuuguaugug

SEQ ID NO: 2084661 - RNA, 19 nt, Artificial Sequence
  Description of Artificial Sequence: Synthetic oligonucleotide
guaucagauuggacugggu

SEQ ID NO: 2084662 - RNA, 19 nt, Artificial Sequence
  Description of Artificial Sequence: Synthetic oligonucleotide
caguaacagaguacuuauu

SEQ ID NO: 2084663 - RNA, 19 nt, Artificial Sequence
  Description of Artificial Sequence: Synthetic oligonucleotide
cugcacccuucugcucuag

SEQ ID NO: 2084664 - RNA, 19 nt, Artificial Sequence
  Description of Artificial Sequence: Synthetic oligonucleotide
gugugcaggucagguugga

SEQ ID NO: 2084665 - RNA, 19 nt, Artificial Sequence
  Description of Artificial Sequence: Synthetic oligonucleotide
gguuugggcccugcaaacu

SEQ ID NO: 2084666 - RNA, 19 nt, Artificial Sequence
  Description of Artificial Sequence: Synthetic oligonucleotide
ccccuucaccucaaaggga

SEQ ID NO: 2084667 - RNA, 19 nt, Artificial Sequence
  Description of Artificial Sequence: Synthetic oligonucleotide
gcaggucagguuggaucug

SEQ ID NO: 2084668 - RNA, 19 nt, Artificial Sequence
  Description of Artificial Sequence: Synthetic oligonucleotide
ccauucgauuuugcaucug

SEQ ID NO: 2084669 - RNA, 19 nt, Artificial Sequence
  Description of Artificial Sequence: Synthetic oligonucleotide
ccuucaccucaaagggaga

SEQ ID NO: 2084670 - RNA, 19 nt, Artificial Sequence
  Description of Artificial Sequence: Synthetic oligonucleotide
caccauugcuugagacagu

SEQ ID NO: 2084671 - RNA, 19 nt, Artificial Sequence
  Description of Artificial Sequence: Synthetic oligonucleotide
caguaacaauacgaccaau

SEQ ID NO: 2084672 - RNA, 19 nt, Artificial Sequence
  Description of Artificial Sequence: Synthetic oligonucleotide
ggcgaaccgcagcucccuc

SEQ ID NO: 2084673 - RNA, 19 nt, Artificial Sequence
  Description of Artificial Sequence: Synthetic oligonucleotide
cauugggaggggccagaau

SEQ ID NO: 2084674 - RNA, 19 nt, Artificial Sequence
  Description of Artificial Sequence: Synthetic oligonucleotide
gcggcgaaccgcagcuccc

SEQ ID NO: 2084675 - RNA, 19 nt, Artificial Sequence
  Description of Artificial Sequence: Synthetic oligonucleotide
cgaccaauucgaagaucca

SEQ ID NO: 2084676 - RNA, 19 nt, Artificial Sequence
  Description of Artificial Sequence: Synthetic oligonucleotide
ccacuuucucuggugaacu

SEQ ID NO: 2084677 - RNA, 19 nt, Artificial Sequence
  Description of Artificial Sequence: Synthetic oligonucleotide
ggacuggguguggcauuug

SEQ ID NO: 2084678 - RNA, 19 nt, Artificial Sequence
  Description of Artificial Sequence: Synthetic oligonucleotide
ccaugguuugggcccugca

SEQ ID NO: 2084679 - RNA, 19 nt, Artificial Sequence
  Description of Artificial Sequence: Synthetic oligonucleotide
ccucccgagcagccucagc

SEQ ID NO: 2084680 - RNA, 19 nt, Artificial Sequence
  Description of Artificial Sequence: Synthetic oligonucleotide
cuccaggaacagauccauu

SEQ ID NO: 2084681 - RNA, 19 nt, Artificial Sequence
  Description of Artificial Sequence: Synthetic oligonucleotide
caucauugguggccaucuu

SEQ ID NO: 2084682 - RNA, 19 nt, Artificial Sequence
  Description of Artificial Sequence: Synthetic oligonucleotide
ccauugggaggggccagaa

SEQ ID NO: 2084683 - RNA, 19 nt, Artificial Sequence
  Description of Artificial Sequence: Synthetic oligonucleotide
ccccuuguauguggccaca

SEQ ID NO: 2084684 - RNA, 19 nt, Artificial Sequence
  Description of Artificial Sequence: Synthetic oligonucleotide
ccaguccacugaugacugu

SEQ ID NO: 2084685 - RNA, 19 nt, Artificial Sequence
  Description of Artificial Sequence: Synthetic oligonucleotide
ccuuccccuucaccucaaa

SEQ ID NO: 2084686 - RNA, 19 nt, Artificial Sequence
  Description of Artificial Sequence: Synthetic oligonucleotide
gcucccucccgagcagccu

SEQ ID NO: 2084687 - RNA, 19 nt, Artificial Sequence
  Description of Artificial Sequence: Synthetic oligonucleotide
cggcgaaccgcagcucccu

SEQ ID NO: 2084688 - RNA, 19 nt, Artificial Sequence
  Description of Artificial Sequence: Synthetic oligonucleotide
uccuuuacauguaagaugg

SEQ ID NO: 2084689 - RNA, 19 nt, Artificial Sequence
  Description of Artificial Sequence: Synthetic oligonucleotide
uguaagaugguucacaaac

SEQ ID NO: 2084690 - RNA, 19 nt, Artificial Sequence
  Description of Artificial Sequence: Synthetic oligonucleotide
ucgaaaacaaccuugucgg

SEQ ID NO: 2084691 - RNA, 19 nt, Artificial Sequence
  Description of Artificial Sequence: Synthetic oligonucleotide
acaaaaucgauguaggcgg

SEQ ID NO: 2084692 - RNA, 19 nt, Artificial Sequence
  Description of Artificial Sequence: Synthetic oligonucleotide
aaagaugugccuucucucc

SEQ ID NO: 2084693 - RNA, 19 nt, Artificial Sequence
  Description of Artificial Sequence: Synthetic oligonucleotide
aaaacaaccuugucggugg

SEQ ID NO: 2084694 - RNA, 19 nt, Artificial Sequence
  Description of Artificial Sequence: Synthetic oligonucleotide
uuagcaaacaagauggggc

SEQ ID NO: 2084695 - RNA, 19 nt, Artificial Sequence
  Description of Artificial Sequence: Synthetic oligonucleotide
gagacauuggauuucagcc

SEQ ID NO: 2084696 - RNA, 19 nt, Artificial Sequence
  Description of Artificial Sequence: Synthetic oligonucleotide
uguggauuagcaaacaaga

SEQ ID NO: 2084697 - RNA, 19 nt, Artificial Sequence
  Description of Artificial Sequence: Synthetic oligonucleotide
uggauuagcaaacaagaug

SEQ ID NO: 2084698 - RNA, 19 nt, Artificial Sequence
  Description of Artificial Sequence: Synthetic oligonucleotide
uuaacauuuggcauugaug

SEQ ID NO: 2084699 - RNA, 19 nt, Artificial Sequence
  Description of Artificial Sequence: Synthetic oligonucleotide
cucgaaaacaaccuugucg

SEQ ID NO: 2084700 - RNA, 19 nt, Artificial Sequence
  Description of Artificial Sequence: Synthetic oligonucleotide
agagacauuggauuucagc

SEQ ID NO: 2084701 - RNA, 19 nt, Artificial Sequence
  Description of Artificial Sequence: Synthetic oligonucleotide
gacaaaaucgauguaggcg

SEQ ID NO: 2084702 - RNA, 19 nt, Artificial Sequence
  Description of Artificial Sequence: Synthetic oligonucleotide
aagggauuggccugguccc

SEQ ID NO: 2084703 - RNA, 19 nt, Artificial Sequence
  Description of Artificial Sequence: Synthetic oligonucleotide
uuuacauguaagaugguuc

SEQ ID NO: 2084704 - RNA, 19 nt, Artificial Sequence
  Description of Artificial Sequence: Synthetic oligonucleotide
uucacauuaucugcgaugg

SEQ ID NO: 2084705 - RNA, 19 nt, Artificial Sequence
  Description of Artificial Sequence: Synthetic oligonucleotide
uguccaaucaacucaucgg

SEQ ID NO: 2084706 - RNA, 19 nt, Artificial Sequence
  Description of Artificial Sequence: Synthetic oligonucleotide
aagucuuugaucaugccag

SEQ ID NO: 2084707 - RNA, 19 nt, Artificial Sequence
  Description of Artificial Sequence: Synthetic oligonucleotide
uucacaaacacaguacuag

SEQ ID NO: 2084708 - RNA, 19 nt, Artificial Sequence
  Description of Artificial Sequence: Synthetic oligonucleotide
uaagucuuugaucaugcca

SEQ ID NO: 2084709 - RNA, 19 nt, Artificial Sequence
  Description of Artificial Sequence: Synthetic oligonucleotide
cuugccaguaccaauggcc

SEQ ID NO: 2084710 - RNA, 19 nt, Artificial Sequence
  Description of Artificial Sequence: Synthetic oligonucleotide
uuacauguaagaugguuca

SEQ ID NO: 2084711 - RNA, 19 nt, Artificial Sequence
  Description of Artificial Sequence: Synthetic oligonucleotide
uuucaggugacauuguuuc

SEQ ID NO: 2084712 - RNA, 19 nt, Artificial Sequence
  Description of Artificial Sequence: Synthetic oligonucleotide
uaagaugguucacaaacac

SEQ ID NO: 2084713 - RNA, 19 nt, Artificial Sequence
  Description of Artificial Sequence: Synthetic oligonucleotide
ucuagcuucugccugacaa

SEQ ID NO: 2084714 - RNA, 19 nt, Artificial Sequence
  Description of Artificial Sequence: Synthetic oligonucleotide
ucacaaacacaguacuagg

SEQ ID NO: 2084715 - RNA, 19 nt, Artificial Sequence
  Description of Artificial Sequence: Synthetic oligonucleotide
uauagggaggugucaaagg

SEQ ID NO: 2084716 - RNA, 19 nt, Artificial Sequence
  Description of Artificial Sequence: Synthetic oligonucleotide
uccauaaaugauucgggug

SEQ ID NO: 2084717 - RNA, 19 nt, Artificial Sequence
  Description of Artificial Sequence: Synthetic oligonucleotide
aagaugugccuucucuccg

SEQ ID NO: 2084718 - RNA, 19 nt, Artificial Sequence
  Description of Artificial Sequence: Synthetic oligonucleotide
aguuccuaagcuccugggc

SEQ ID NO: 2084719 - RNA, 19 nt, Artificial Sequence
  Description of Artificial Sequence: Synthetic oligonucleotide
uucagcgugcaaaugagcu

SEQ ID NO: 2084720 - RNA, 19 nt, Artificial Sequence
  Description of Artificial Sequence: Synthetic oligonucleotide
agaacuuccuggaaggcgc

SEQ ID NO: 2084721 - RNA, 19 nt, Artificial Sequence
  Description of Artificial Sequence: Synthetic oligonucleotide
aaucaacucaucggacucc

SEQ ID NO: 2084722 - RNA, 19 nt, Artificial Sequence
  Description of Artificial Sequence: Synthetic oligonucleotide
auuagcaaacaagaugggg

SEQ ID NO: 2084723 - RNA, 19 nt, Artificial Sequence
  Description of Artificial Sequence: Synthetic oligonucleotide
ugcaaaugagcucucccag

SEQ ID NO: 2084724 - RNA, 19 nt, Artificial Sequence
  Description of Artificial Sequence: Synthetic oligonucleotide
gugucaaagguguaggaag

SEQ ID NO: 2084725 - RNA, 19 nt, Artificial Sequence
  Description of Artificial Sequence: Synthetic oligonucleotide
ucauuguaagugguaaagg

SEQ ID NO: 2084726 - RNA, 19 nt, Artificial Sequence
  Description of Artificial Sequence: Synthetic oligonucleotide
ucggacuccccaaagaugu

SEQ ID NO: 2084727 - RNA, 19 nt, Artificial Sequence
  Description of Artificial Sequence: Synthetic oligonucleotide
aaaugauucgggugcuuug

SEQ ID NO: 2084728 - RNA, 19 nt, Artificial Sequence
  Description of Artificial Sequence: Synthetic oligonucleotide
ucugcgauggccuugguuu

SEQ ID NO: 2084729 - RNA, 19 nt, Artificial Sequence
  Description of Artificial Sequence: Synthetic oligonucleotide
agcacuacccauucggcuc

SEQ ID NO: 2084730 - RNA, 19 nt, Artificial Sequence
  Description of Artificial Sequence: Synthetic oligonucleotide
accuccauaaaugauucgg

SEQ ID NO: 2084731 - RNA, 19 nt, Artificial Sequence
  Description of Artificial Sequence: Synthetic oligonucleotide
auuucagccauccccgaag

SEQ ID NO: 2084732 - RNA, 19 nt, Artificial Sequence
  Description of Artificial Sequence: Synthetic oligonucleotide
ggucccaaccuuuauaggg

SEQ ID NO: 2084733 - RNA, 19 nt, Artificial Sequence
  Description of Artificial Sequence: Synthetic oligonucleotide
uugcucgaaaacaaccuug

SEQ ID NO: 2084734 - RNA, 19 nt, Artificial Sequence
  Description of Artificial Sequence: Synthetic oligonucleotide
uuauagggaggugucaaag

SEQ ID NO: 2084735 - RNA, 19 nt, Artificial Sequence
  Description of Artificial Sequence: Synthetic oligonucleotide
aaaucgauguaggcggcgg

SEQ ID NO: 2084736 - RNA, 19 nt, Artificial Sequence
  Description of Artificial Sequence: Synthetic oligonucleotide
cacauuaucugcgauggcc

SEQ ID NO: 2084737 - RNA, 19 nt, Artificial Sequence
  Description of Artificial Sequence: Synthetic oligonucleotide
gaaaacaaccuugucggug

SEQ ID NO: 2084738 - RNA, 19 nt, Artificial Sequence
  Description of Artificial Sequence: Synthetic oligonucleotide
caggcgaucacuccaaggc

SEQ ID NO: 2084739 - RNA, 19 nt, Artificial Sequence
  Description of Artificial Sequence: Synthetic oligonucleotide
auagggaggugucaaaggu

SEQ ID NO: 2084740 - RNA, 19 nt, Artificial Sequence
  Description of Artificial Sequence: Synthetic oligonucleotide
ccaacgaagaacuuccugg

SEQ ID NO: 2084741 - RNA, 19 nt, Artificial Sequence
  Description of Artificial Sequence: Synthetic oligonucleotide
uugccaguaccaauggccc

SEQ ID NO: 2084742 - RNA, 19 nt, Artificial Sequence
  Description of Artificial Sequence: Synthetic oligonucleotide
aaucgauguaggcggcggg

SEQ ID NO: 2084743 - RNA, 19 nt, Artificial Sequence
  Description of Artificial Sequence: Synthetic oligonucleotide
ugacaaaaucgauguaggc

SEQ ID NO: 2084744 - RNA, 19 nt, Artificial Sequence
  Description of Artificial Sequence: Synthetic oligonucleotide
agguguuuauuuccuuuac

SEQ ID NO: 2084745 - RNA, 19 nt, Artificial Sequence
  Description of Artificial Sequence: Synthetic oligonucleotide
uucauucauuguaaguggu

SEQ ID NO: 2084746 - RNA, 19 nt, Artificial Sequence
  Description of Artificial Sequence: Synthetic oligonucleotide
aacuuuguuccaguccuuc

SEQ ID NO: 2084747 - RNA, 19 nt, Artificial Sequence
  Description of Artificial Sequence: Synthetic oligonucleotide
ugaugauguccacaaacuc

SEQ ID NO: 2084748 - RNA, 19 nt, Artificial Sequence
  Description of Artificial Sequence: Synthetic oligonucleotide
aaccuuuauagggaggugu

SEQ ID NO: 2084749 - RNA, 19 nt, Artificial Sequence
  Description of Artificial Sequence: Synthetic oligonucleotide
cuucucguguacuuccugg

SEQ ID NO: 2084750 - RNA, 19 nt, Artificial Sequence
  Description of Artificial Sequence: Synthetic oligonucleotide
uucuucgucccguucaucu

SEQ ID NO: 2084751 - RNA, 19 nt, Artificial Sequence
  Description of Artificial Sequence: Synthetic oligonucleotide
acauuuggcauugaugaug

SEQ ID NO: 2084752 - RNA, 19 nt, Artificial Sequence
  Description of Artificial Sequence: Synthetic oligonucleotide
aaaaucgauguaggcggcg

SEQ ID NO: 2084753 - RNA, 19 nt, Artificial Sequence
  Description of Artificial Sequence: Synthetic oligonucleotide
gccaggacaacuuuguucc

SEQ ID NO: 2084754 - RNA, 19 nt, Artificial Sequence
  Description of Artificial Sequence: Synthetic oligonucleotide
gaagccguccacaucaggc

SEQ ID NO: 2084755 - RNA, 19 nt, Artificial Sequence
  Description of Artificial Sequence: Synthetic oligonucleotide
acaguacuagggcuucggc

SEQ ID NO: 2084756 - RNA, 19 nt, Artificial Sequence
  Description of Artificial Sequence: Synthetic oligonucleotide
agacauuggauuucagcca

SEQ ID NO: 2084757 - RNA, 19 nt, Artificial Sequence
  Description of Artificial Sequence: Synthetic oligonucleotide
gguguaggaagguacagug

SEQ ID NO: 2084758 - RNA, 19 nt, Artificial Sequence
  Description of Artificial Sequence: Synthetic oligonucleotide
uuauuuccuuuacauguaa

SEQ ID NO: 2084759 - RNA, 19 nt, Artificial Sequence
  Description of Artificial Sequence: Synthetic oligonucleotide
aaugauucgggugcuuuga

SEQ ID NO: 2084760 - RNA, 19 nt, Artificial Sequence
  Description of Artificial Sequence: Synthetic oligonucleotide
ugcucgaaaacaaccuugu

SEQ ID NO: 2084761 - RNA, 19 nt, Artificial Sequence
  Description of Artificial Sequence: Synthetic oligonucleotide
gaagguacaguguggauua

SEQ ID NO: 2084762 - RNA, 19 nt, Artificial Sequence
  Description of Artificial Sequence: Synthetic oligonucleotide
cugaucuccccagugaagg

SEQ ID NO: 2084763 - RNA, 19 nt, Artificial Sequence
  Description of Artificial Sequence: Synthetic oligonucleotide
ugugcagccacagcaaucu

SEQ ID NO: 2084764 - RNA, 19 nt, Artificial Sequence
  Description of Artificial Sequence: Synthetic oligonucleotide
uucugccugacaaaaucga

SEQ ID NO: 2084765 - RNA, 19 nt, Artificial Sequence
  Description of Artificial Sequence: Synthetic oligonucleotide
cuugggaucuagcuucugc

SEQ ID NO: 2084766 - RNA, 19 nt, Artificial Sequence
  Description of Artificial Sequence: Synthetic oligonucleotide
guaagugguaaagggauug

SEQ ID NO: 2084767 - RNA, 19 nt, Artificial Sequence
  Description of Artificial Sequence: Synthetic oligonucleotide
acaguguggauuagcaaac

SEQ ID NO: 2084768 - RNA, 19 nt, Artificial Sequence
  Description of Artificial Sequence: Synthetic oligonucleotide
gguguugcagucuugccag

SEQ ID NO: 2084769 - RNA, 19 nt, Artificial Sequence
  Description of Artificial Sequence: Synthetic oligonucleotide
aucaacucaucggacuccc

SEQ ID NO: 2084770 - RNA, 19 nt, Artificial Sequence
  Description of Artificial Sequence: Synthetic oligonucleotide
gaggugucaaagguguagg

SEQ ID NO: 2084771 - RNA, 19 nt, Artificial Sequence
  Description of Artificial Sequence: Synthetic oligonucleotide
auugugggagaugggacac

SEQ ID NO: 2084772 - RNA, 19 nt, Artificial Sequence
  Description of Artificial Sequence: Synthetic oligonucleotide
ugguaaagggauuggccug

SEQ ID NO: 2084773 - RNA, 19 nt, Artificial Sequence
  Description of Artificial Sequence: Synthetic oligonucleotide
gauuagcaaacaagauggg

SEQ ID NO: 2084774 - RNA, 19 nt, Artificial Sequence
  Description of Artificial Sequence: Synthetic oligonucleotide
cauacagguucauaggcca

SEQ ID NO: 2084775 - RNA, 19 nt, Artificial Sequence
  Description of Artificial Sequence: Synthetic oligonucleotide
guguggauuagcaaacaag

SEQ ID NO: 2084776 - RNA, 19 nt, Artificial Sequence
  Description of Artificial Sequence: Synthetic oligonucleotide
uagggcaugggccacuuuc

SEQ ID NO: 2084777 - RNA, 19 nt, Artificial Sequence
  Description of Artificial Sequence: Synthetic oligonucleotide
uagggaggugucaaaggug

SEQ ID NO: 2084778 - RNA, 19 nt, Artificial Sequence
  Description of Artificial Sequence: Synthetic oligonucleotide
uuugcucgaaaacaaccuu

SEQ ID NO: 2084779 - RNA, 19 nt, Artificial Sequence
  Description of Artificial Sequence: Synthetic oligonucleotide
ucggauagggcaugggcca

SEQ ID NO: 2084780 - RNA, 19 nt, Artificial Sequence
  Description of Artificial Sequence: Synthetic oligonucleotide
uugcagucuugccaguacc

SEQ ID NO: 2084781 - RNA, 19 nt, Artificial Sequence
  Description of Artificial Sequence: Synthetic oligonucleotide
aagccguccacaucaggcu

SEQ ID NO: 2084782 - RNA, 19 nt, Artificial Sequence
  Description of Artificial Sequence: Synthetic oligonucleotide
accuaauccuggccuagcg

SEQ ID NO: 2084783 - RNA, 19 nt, Artificial Sequence
  Description of Artificial Sequence: Synthetic oligonucleotide
ugagggaagcaccacccac

SEQ ID NO: 2084784 - RNA, 19 nt, Artificial Sequence
  Description of Artificial Sequence: Synthetic oligonucleotide
cucguguacuuccugggcc

SEQ ID NO: 2084785 - RNA, 19 nt, Artificial Sequence
  Description of Artificial Sequence: Synthetic oligonucleotide
uccaaucaacucaucggac

SEQ ID NO: 2084786 - RNA, 19 nt, Artificial Sequence
  Description of Artificial Sequence: Synthetic oligonucleotide
aaccuaauccuggccuagc

SEQ ID NO: 2084787 - RNA, 19 nt, Artificial Sequence
  Description of Artificial Sequence: Synthetic oligonucleotide
ucaucggacuccccaaaga

SEQ ID NO: 2084788 - RNA, 19 nt, Artificial Sequence
  Description of Artificial Sequence: Synthetic oligonucleotide
cuaauccuggccuagcgga

SEQ ID NO: 2084789 - RNA, 19 nt, Artificial Sequence
  Description of Artificial Sequence: Synthetic oligonucleotide
cugggcaaccuaauccugg

SEQ ID NO: 2084790 - RNA, 19 nt, Artificial Sequence
  Description of Artificial Sequence: Synthetic oligonucleotide
caaagaugugccuucucuc

SEQ ID NO: 2084791 - RNA, 19 nt, Artificial Sequence
  Description of Artificial Sequence: Synthetic oligonucleotide
cuagcacuacccauucggc

SEQ ID NO: 2084792 - RNA, 19 nt, Artificial Sequence
  Description of Artificial Sequence: Synthetic oligonucleotide
gagccacugcaucagagac

SEQ ID NO: 2084793 - RNA, 19 nt, Artificial Sequence
  Description of Artificial Sequence: Synthetic oligonucleotide
ucucguguacuuccugggc

SEQ ID NO: 2084794 - RNA, 19 nt, Artificial Sequence
  Description of Artificial Sequence: Synthetic oligonucleotide
uccuaagucuuugaucaug

SEQ ID NO: 2084795 - RNA, 19 nt, Artificial Sequence
  Description of Artificial Sequence: Synthetic oligonucleotide
caaucaacucaucggacuc

SEQ ID NO: 2084796 - RNA, 19 nt, Artificial Sequence
  Description of Artificial Sequence: Synthetic oligonucleotide
aaacaagauggggcgauga

SEQ ID NO: 2084797 - RNA, 19 nt, Artificial Sequence
  Description of Artificial Sequence: Synthetic oligonucleotide
guccaaucaacucaucgga

SEQ ID NO: 2084798 - RNA, 19 nt, Artificial Sequence
  Description of Artificial Sequence: Synthetic oligonucleotide
aaaugagcucucccaggca

SEQ ID NO: 2084799 - RNA, 19 nt, Artificial Sequence
  Description of Artificial Sequence: Synthetic oligonucleotide
ccuagcacuacccauucgg

SEQ ID NO: 2084800 - RNA, 19 nt, Artificial Sequence
  Description of Artificial Sequence: Synthetic oligonucleotide
uaauccuggccuagcggag

SEQ ID NO: 2084801 - RNA, 19 nt, Artificial Sequence
  Description of Artificial Sequence: Synthetic oligonucleotide
ucauucauuguaaguggua

SEQ ID NO: 2084802 - RNA, 19 nt, Artificial Sequence
  Description of Artificial Sequence: Synthetic oligonucleotide
uuuauagggaggugucaaa

SEQ ID NO: 2084803 - RNA, 19 nt, Artificial Sequence
  Description of Artificial Sequence: Synthetic oligonucleotide
aagaugguucacaaacaca

SEQ ID NO: 2084804 - RNA, 19 nt, Artificial Sequence
  Description of Artificial Sequence: Synthetic oligonucleotide
aauccuggccuagcggagg

SEQ ID NO: 2084805 - RNA, 19 nt, Artificial Sequence
  Description of Artificial Sequence: Synthetic oligonucleotide
acauguaagaugguucaca

SEQ ID NO: 2084806 - RNA, 19 nt, Artificial Sequence
  Description of Artificial Sequence: Synthetic oligonucleotide
uacccauucggcuccuaag

SEQ ID NO: 2084807 - RNA, 19 nt, Artificial Sequence
  Description of Artificial Sequence: Synthetic oligonucleotide
aaccuugucgguggugccg

SEQ ID NO: 2084808 - RNA, 19 nt, Artificial Sequence
  Description of Artificial Sequence: Synthetic oligonucleotide
aguaccaauggcccauaca

SEQ ID NO: 2084809 - RNA, 19 nt, Artificial Sequence
  Description of Artificial Sequence: Synthetic oligonucleotide
gaaccuccauaaaugauuc

SEQ ID NO: 2084810 - RNA, 19 nt, Artificial Sequence
  Description of Artificial Sequence: Synthetic oligonucleotide
ucccaaccuuuauagggag

SEQ ID NO: 2084811 - RNA, 19 nt, Artificial Sequence
  Description of Artificial Sequence: Synthetic oligonucleotide
ucuugccaguaccaauggc

SEQ ID NO: 2084812 - RNA, 19 nt, Artificial Sequence
  Description of Artificial Sequence: Synthetic oligonucleotide
agaaccuccauaaaugauu

SEQ ID NO: 2084813 - RNA, 19 nt, Artificial Sequence
  Description of Artificial Sequence: Synthetic oligonucleotide
aacucaucggacuccccaa

SEQ ID NO: 2084814 - RNA, 19 nt, Artificial Sequence
  Description of Artificial Sequence: Synthetic oligonucleotide
ucuccgagugcccuagcac

SEQ ID NO: 2084815 - RNA, 19 nt, Artificial Sequence
  Description of Artificial Sequence: Synthetic oligonucleotide
caaaaucgauguaggcggc

SEQ ID NO: 2084816 - RNA, 19 nt, Artificial Sequence
  Description of Artificial Sequence: Synthetic oligonucleotide
agguacaguguggauuagc

SEQ ID NO: 2084817 - RNA, 19 nt, Artificial Sequence
  Description of Artificial Sequence: Synthetic oligonucleotide
ccuaagucuuugaucaugc

SEQ ID NO: 2084818 - RNA, 19 nt, Artificial Sequence
  Description of Artificial Sequence: Synthetic oligonucleotide
aagauggggcgaugacauc

SEQ ID NO: 2084819 - RNA, 19 nt, Artificial Sequence
  Description of Artificial Sequence: Synthetic oligonucleotide
agauggggcgaugacauca

SEQ ID NO: 2084820 - RNA, 19 nt, Artificial Sequence
  Description of Artificial Sequence: Synthetic oligonucleotide
cuagcggaggguagggaag

SEQ ID NO: 2084821 - RNA, 19 nt, Artificial Sequence
  Description of Artificial Sequence: Synthetic oligonucleotide
ugguuugcucgaaaacaac

SEQ ID NO: 2084822 - RNA, 19 nt, Artificial Sequence
  Description of Artificial Sequence: Synthetic oligonucleotide
uggucccaaccuuuauagg

SEQ ID NO: 2084823 - RNA, 19 nt, Artificial Sequence
  Description of Artificial Sequence: Synthetic oligonucleotide
uguaagugguaaagggauu

SEQ ID NO: 2084824 - RNA, 19 nt, Artificial Sequence
  Description of Artificial Sequence: Synthetic oligonucleotide
ucauaggccaggacaacuu

SEQ ID NO: 2084825 - RNA, 19 nt, Artificial Sequence
  Description of Artificial Sequence: Synthetic oligonucleotide
gguuugcucgaaaacaacc

SEQ ID NO: 2084826 - RNA, 19 nt, Artificial Sequence
  Description of Artificial Sequence: Synthetic oligonucleotide
ugugacuugugggagcagu

SEQ ID NO: 2084827 - RNA, 19 nt, Artificial Sequence
  Description of Artificial Sequence: Synthetic oligonucleotide
ugggcaaccuaauccuggc

SEQ ID NO: 2084828 - RNA, 19 nt, Artificial Sequence
  Description of Artificial Sequence: Synthetic oligonucleotide
cucucagaguuucagguga

SEQ ID NO: 2084829 - RNA, 19 nt, Artificial Sequence
  Description of Artificial Sequence: Synthetic oligonucleotide
uggggcgaugacaucagaa

SEQ ID NO: 2084830 - RNA, 19 nt, Artificial Sequence
  Description of Artificial Sequence: Synthetic oligonucleotide
aggacaacuuuguuccagu

SEQ ID NO: 2084831 - RNA, 19 nt, Artificial Sequence
  Description of Artificial Sequence: Synthetic oligonucleotide
uagcacuacccauucggcu

SEQ ID NO: 2084832 - RNA, 19 nt, Artificial Sequence
  Description of Artificial Sequence: Synthetic oligonucleotide
uccuucacauuaucugcga

SEQ ID NO: 2084833 - RNA, 19 nt, Artificial Sequence
  Description of Artificial Sequence: Synthetic oligonucleotide
acaagauggggcgaugaca

SEQ ID NO: 2084834 - RNA, 19 nt, Artificial Sequence
  Description of Artificial Sequence: Synthetic oligonucleotide
uugaucaugccagggcuga

SEQ ID NO: 2084835 - RNA, 19 nt, Artificial Sequence
  Description of Artificial Sequence: Synthetic oligonucleotide
uuugagccacugcaucaga

SEQ ID NO: 2084836 - RNA, 19 nt, Artificial Sequence
  Description of Artificial Sequence: Synthetic oligonucleotide
accuuuauagggagguguc

SEQ ID NO: 2084837 - RNA, 19 nt, Artificial Sequence
  Description of Artificial Sequence: Synthetic oligonucleotide
ggggcgaugacaucagaag

SEQ ID NO: 2084838 - RNA, 19 nt, Artificial Sequence
  Description of Artificial Sequence: Synthetic oligonucleotide
uccagucacagaaccucca

SEQ ID NO: 2084839 - RNA, 19 nt, Artificial Sequence
  Description of Artificial Sequence: Synthetic oligonucleotide
aucuccccagugaaggccc

SEQ ID NO: 2084840 - RNA, 19 nt, Artificial Sequence
  Description of Artificial Sequence: Synthetic oligonucleotide
gugcaaaugagcucuccca

SEQ ID NO: 2084841 - RNA, 19 nt, Artificial Sequence
  Description of Artificial Sequence: Synthetic oligonucleotide
agcaugugacuugugggag

SEQ ID NO: 2084842 - RNA, 19 nt, Artificial Sequence
  Description of Artificial Sequence: Synthetic oligonucleotide
ucguguacuuccugggccu

SEQ ID NO: 2084843 - RNA, 19 nt, Artificial Sequence
  Description of Artificial Sequence: Synthetic oligonucleotide
uucaggugacauuguuuca

SEQ ID NO: 2084844 - RNA, 19 nt, Artificial Sequence
  Description of Artificial Sequence: Synthetic oligonucleotide
gugguaaagggauuggccu

SEQ ID NO: 2084845 - RNA, 19 nt, Artificial Sequence
  Description of Artificial Sequence: Synthetic oligonucleotide
gcaaaugagcucucccagg

SEQ ID NO: 2084846 - RNA, 19 nt, Artificial Sequence
  Description of Artificial Sequence: Synthetic oligonucleotide
caaugcaggcgaucacucc

SEQ ID NO: 2084847 - RNA, 19 nt, Artificial Sequence
  Description of Artificial Sequence: Synthetic oligonucleotide
gucuuugaucaugccaggg

SEQ ID NO: 2084848 - RNA, 19 nt, Artificial Sequence
  Description of Artificial Sequence: Synthetic oligonucleotide
gguaaagggauuggccugg

SEQ ID NO: 2084849 - RNA, 19 nt, Artificial Sequence
  Description of Artificial Sequence: Synthetic oligonucleotide
gaugggacaccccuggccu

SEQ ID NO: 2084850 - RNA, 19 nt, Artificial Sequence
  Description of Artificial Sequence: Synthetic oligonucleotide
guaagaugguucacaaaca

SEQ ID NO: 2084851 - RNA, 19 nt, Artificial Sequence
  Description of Artificial Sequence: Synthetic oligonucleotide
cuccaaggcccucggauag

SEQ ID NO: 2084852 - RNA, 19 nt, Artificial Sequence
  Description of Artificial Sequence: Synthetic oligonucleotide
caacgaagaacuuccugga

SEQ ID NO: 2084853 - RNA, 19 nt, Artificial Sequence
  Description of Artificial Sequence: Synthetic oligonucleotide
agugcccuagcacuaccca

SEQ ID NO: 2084854 - RNA, 19 nt, Artificial Sequence
  Description of Artificial Sequence: Synthetic oligonucleotide
ucacauuaucugcgauggc

SEQ ID NO: 2084855 - RNA, 19 nt, Artificial Sequence
  Description of Artificial Sequence: Synthetic oligonucleotide
caaaccaccucggugucug

SEQ ID NO: 2084856 - RNA, 19 nt, Artificial Sequence
  Description of Artificial Sequence: Synthetic oligonucleotide
uccccaaugcaggcgauca

SEQ ID NO: 2084857 - RNA, 19 nt, Artificial Sequence
  Description of Artificial Sequence: Synthetic oligonucleotide
guugcagucuugccaguac

SEQ ID NO: 2084858 - RNA, 19 nt, Artificial Sequence
  Description of Artificial Sequence: Synthetic oligonucleotide
ccauacagguucauaggcc

SEQ ID NO: 2084859 - RNA, 19 nt, Artificial Sequence
  Description of Artificial Sequence: Synthetic oligonucleotide
ugcuccagucacagaaccu

SEQ ID NO: 2084860 - RNA, 19 nt, Artificial Sequence
  Description of Artificial Sequence: Synthetic oligonucleotide
aaacaaccuugucgguggu

SEQ ID NO: 2084861 - RNA, 19 nt, Artificial Sequence
  Description of Artificial Sequence: Synthetic oligonucleotide
accacccacaaggaagccg

SEQ ID NO: 2084862 - RNA, 19 nt, Artificial Sequence
  Description of Artificial Sequence: Synthetic oligonucleotide
gggcgaugacaucagaagc

SEQ ID NO: 2084863 - RNA, 19 nt, Artificial Sequence
  Description of Artificial Sequence: Synthetic oligonucleotide
cccauacagguucauaggc

SEQ ID NO: 2084864 - RNA, 19 nt, Artificial Sequence
  Description of Artificial Sequence: Synthetic oligonucleotide
gacauuggauuucagccau

SEQ ID NO: 2084865 - RNA, 19 nt, Artificial Sequence
  Description of Artificial Sequence: Synthetic oligonucleotide
cuucgucccguucaucuuc

SEQ ID NO: 2084866 - RNA, 19 nt, Artificial Sequence
  Description of Artificial Sequence: Synthetic oligonucleotide
caaacacaguacuagggcu

SEQ ID NO: 2084867 - RNA, 19 nt, Artificial Sequence
  Description of Artificial Sequence: Synthetic oligonucleotide
cacaguacuagggcuucgg

SEQ ID NO: 2084868 - RNA, 19 nt, Artificial Sequence
  Description of Artificial Sequence: Synthetic oligonucleotide
cccacuguucacuuuguag

SEQ ID NO: 2084869 - RNA, 19 nt, Artificial Sequence
  Description of Artificial Sequence: Synthetic oligonucleotide
cacuguucacuuuguagca

SEQ ID NO: 2084870 - RNA, 19 nt, Artificial Sequence
  Description of Artificial Sequence: Synthetic oligonucleotide
caguacuagggcuucggca

SEQ ID NO: 2084871 - RNA, 19 nt, Artificial Sequence
  Description of Artificial Sequence: Synthetic oligonucleotide
uacauguaagaugguucac

SEQ ID NO: 2084872 - RNA, 19 nt, Artificial Sequence
  Description of Artificial Sequence: Synthetic oligonucleotide
cuuuauagggaggugucaa

SEQ ID NO: 2084873 - RNA, 19 nt, Artificial Sequence
  Description of Artificial Sequence: Synthetic oligonucleotide
gcccauacagguucauagg

SEQ ID NO: 2084874 - RNA, 19 nt, Artificial Sequence
  Description of Artificial Sequence: Synthetic oligonucleotide
ucaacucaucggacucccc

SEQ ID NO: 2084875 - RNA, 19 nt, Artificial Sequence
  Description of Artificial Sequence: Synthetic oligonucleotide
uugagguguugcagucuug

SEQ ID NO: 2084876 - RNA, 19 nt, Artificial Sequence
  Description of Artificial Sequence: Synthetic oligonucleotide
caaacucaggcuugaggga

SEQ ID NO: 2084877 - RNA, 19 nt, Artificial Sequence
  Description of Artificial Sequence: Synthetic oligonucleotide
uucggcuccuaagucuuug

SEQ ID NO: 2084878 - RNA, 19 nt, Artificial Sequence
  Description of Artificial Sequence: Synthetic oligonucleotide
acaucaggcuggcuugcca

SEQ ID NO: 2084879 - RNA, 19 nt, Artificial Sequence
  Description of Artificial Sequence: Synthetic oligonucleotide
cggaggguagggaagaugc

SEQ ID NO: 2084880 - RNA, 19 nt, Artificial Sequence
  Description of Artificial Sequence: Synthetic oligonucleotide
uucgggugcuuugagccac

SEQ ID NO: 2084881 - RNA, 19 nt, Artificial Sequence
  Description of Artificial Sequence: Synthetic oligonucleotide
ucccguucaucuuccaauu

SEQ ID NO: 2084882 - RNA, 19 nt, Artificial Sequence
  Description of Artificial Sequence: Synthetic oligonucleotide
caccccuggccucucagag

SEQ ID NO: 2084883 - RNA, 19 nt, Artificial Sequence
  Description of Artificial Sequence: Synthetic oligonucleotide
gggaucuagcuucugccug

SEQ ID NO: 2084884 - RNA, 19 nt, Artificial Sequence
  Description of Artificial Sequence: Synthetic oligonucleotide
uggccuagcggaggguagg

SEQ ID NO: 2084885 - RNA, 19 nt, Artificial Sequence
  Description of Artificial Sequence: Synthetic oligonucleotide
accuugucgguggugccgg

SEQ ID NO: 2084886 - RNA, 19 nt, Artificial Sequence
  Description of Artificial Sequence: Synthetic oligonucleotide
gguguuuaacauuuggcau

SEQ ID NO: 2084887 - RNA, 19 nt, Artificial Sequence
  Description of Artificial Sequence: Synthetic oligonucleotide
gguucacaaacacaguacu

SEQ ID NO: 2084888 - RNA, 19 nt, Artificial Sequence
  Description of Artificial Sequence: Synthetic oligonucleotide
uugccagcucuuugcaggu

SEQ ID NO: 2084889 - RNA, 19 nt, Artificial Sequence
  Description of Artificial Sequence: Synthetic oligonucleotide
ugacuugugggagcaguuc

SEQ ID NO: 2084890 - RNA, 19 nt, Artificial Sequence
  Description of Artificial Sequence: Synthetic oligonucleotide
agguguaggaagguacagu

SEQ ID NO: 2084891 - RNA, 19 nt, Artificial Sequence
  Description of Artificial Sequence: Synthetic oligonucleotide
cuucuccccaaugcaggcg

SEQ ID NO: 2084892 - RNA, 19 nt, Artificial Sequence
  Description of Artificial Sequence: Synthetic oligonucleotide
ccuaauccuggccuagcgg

SEQ ID NO: 2084893 - RNA, 19 nt, Artificial Sequence
  Description of Artificial Sequence: Synthetic oligonucleotide
guuugcucgaaaacaaccu

SEQ ID NO: 2084894 - RNA, 19 nt, Artificial Sequence
  Description of Artificial Sequence: Synthetic oligonucleotide
uacuagggcuucggcauug

SEQ ID NO: 2084895 - RNA, 19 nt, Artificial Sequence
  Description of Artificial Sequence: Synthetic oligonucleotide
aucggacuccccaaagaug

SEQ ID NO: 2084896 - RNA, 19 nt, Artificial Sequence
  Description of Artificial Sequence: Synthetic oligonucleotide
auacagguucauaggccag

SEQ ID NO: 2084897 - RNA, 19 nt, Artificial Sequence
  Description of Artificial Sequence: Synthetic oligonucleotide
ggcuucggcauugugggag

SEQ ID NO: 2084898 - RNA, 19 nt, Artificial Sequence
  Description of Artificial Sequence: Synthetic oligonucleotide
uccgagugcccuagcacua

SEQ ID NO: 2084899 - RNA, 19 nt, Artificial Sequence
  Description of Artificial Sequence: Synthetic oligonucleotide
ggcuccuaagucuuugauc

SEQ ID NO: 2084900 - RNA, 19 nt, Artificial Sequence
  Description of Artificial Sequence: Synthetic oligonucleotide
caaccuugucgguggugcc

SEQ ID NO: 2084901 - RNA, 19 nt, Artificial Sequence
  Description of Artificial Sequence: Synthetic oligonucleotide
uugugggagcaguuccuaa

SEQ ID NO: 2084902 - RNA, 19 nt, Artificial Sequence
  Description of Artificial Sequence: Synthetic oligonucleotide
gaagcaccacccacaagga

SEQ ID NO: 2084903 - RNA, 19 nt, Artificial Sequence
  Description of Artificial Sequence: Synthetic oligonucleotide
cuccauaaaugauucgggu

SEQ ID NO: 2084904 - RNA, 19 nt, Artificial Sequence
  Description of Artificial Sequence: Synthetic oligonucleotide
caaccuaauccuggccuag

SEQ ID NO: 2084905 - RNA, 19 nt, Artificial Sequence
  Description of Artificial Sequence: Synthetic oligonucleotide
gagugcccuagcacuaccc

SEQ ID NO: 2084906 - RNA, 19 nt, Artificial Sequence
  Description of Artificial Sequence: Synthetic oligonucleotide
gucccaaccuuuauaggga

SEQ ID NO: 2084907 - RNA, 19 nt, Artificial Sequence
  Description of Artificial Sequence: Synthetic oligonucleotide
gcaggcgaucacuccaagg

SEQ ID NO: 2084908 - RNA, 19 nt, Artificial Sequence
  Description of Artificial Sequence: Synthetic oligonucleotide
ggcgaugacaucagaagca

SEQ ID NO: 2084909 - RNA, 19 nt, Artificial Sequence
  Description of Artificial Sequence: Synthetic oligonucleotide
ggccucucagaguuucagg

SEQ ID NO: 2084910 - RNA, 19 nt, Artificial Sequence
  Description of Artificial Sequence: Synthetic oligonucleotide
caugugacuugugggagca

SEQ ID NO: 2084911 - RNA, 19 nt, Artificial Sequence
  Description of Artificial Sequence: Synthetic oligonucleotide
uagggaagaugcugguguu

SEQ ID NO: 2084912 - RNA, 19 nt, Artificial Sequence
  Description of Artificial Sequence: Synthetic oligonucleotide
ugucugccggcaccuuggc

SEQ ID NO: 2084913 - RNA, 19 nt, Artificial Sequence
  Description of Artificial Sequence: Synthetic oligonucleotide
cugcaucagagacauugga

SEQ ID NO: 2084914 - RNA, 19 nt, Artificial Sequence
  Description of Artificial Sequence: Synthetic oligonucleotide
ggcgaucacuccaaggccc

SEQ ID NO: 2084915 - RNA, 19 nt, Artificial Sequence
  Description of Artificial Sequence: Synthetic oligonucleotide
ucuucgucccguucaucuu

SEQ ID NO: 2084916 - RNA, 19 nt, Artificial Sequence
  Description of Artificial Sequence: Synthetic oligonucleotide
cuggccuagcggaggguag

SEQ ID NO: 2084917 - RNA, 19 nt, Artificial Sequence
  Description of Artificial Sequence: Synthetic oligonucleotide
gcguucagcgugcaaauga

SEQ ID NO: 2084918 - RNA, 19 nt, Artificial Sequence
  Description of Artificial Sequence: Synthetic oligonucleotide
uagcggaggguagggaaga

SEQ ID NO: 2084919 - RNA, 19 nt, Artificial Sequence
  Description of Artificial Sequence: Synthetic oligonucleotide
gaacuuccuggaaggcgcc

SEQ ID NO: 2084920 - RNA, 19 nt, Artificial Sequence
  Description of Artificial Sequence: Synthetic oligonucleotide
ggccccacuguucacuuug

SEQ ID NO: 2084921 - RNA, 19 nt, Artificial Sequence
  Description of Artificial Sequence: Synthetic oligonucleotide
ucccaggcacuucuucguc

SEQ ID NO: 2084922 - RNA, 19 nt, Artificial Sequence
  Description of Artificial Sequence: Synthetic oligonucleotide
cugcgauggccuugguuug

SEQ ID NO: 2084923 - RNA, 19 nt, Artificial Sequence
  Description of Artificial Sequence: Synthetic oligonucleotide
acucaucggacuccccaaa

SEQ ID NO: 2084924 - RNA, 19 nt, Artificial Sequence
  Description of Artificial Sequence: Synthetic oligonucleotide
aggaagguacaguguggau

SEQ ID NO: 2084925 - RNA, 19 nt, Artificial Sequence
  Description of Artificial Sequence: Synthetic oligonucleotide
ccucggauagggcaugggc

SEQ ID NO: 2084926 - RNA, 19 nt, Artificial Sequence
  Description of Artificial Sequence: Synthetic oligonucleotide
agcaaacaagauggggcga

SEQ ID NO: 2084927 - RNA, 19 nt, Artificial Sequence
  Description of Artificial Sequence: Synthetic oligonucleotide
ugcgauggccuugguuugc

SEQ ID NO: 2084928 - RNA, 19 nt, Artificial Sequence
  Description of Artificial Sequence: Synthetic oligonucleotide
caaacaagauggggcgaug

SEQ ID NO: 2084929 - RNA, 19 nt, Artificial Sequence
  Description of Artificial Sequence: Synthetic oligonucleotide
acacaguacuagggcuucg

SEQ ID NO: 2084930 - RNA, 19 nt, Artificial Sequence
  Description of Artificial Sequence: Synthetic oligonucleotide
ggaagccguccacaucagg

SEQ ID NO: 2084931 - RNA, 19 nt, Artificial Sequence
  Description of Artificial Sequence: Synthetic oligonucleotide
augccagggcugaucuccc

SEQ ID NO: 2084932 - RNA, 19 nt, Artificial Sequence
  Description of Artificial Sequence: Synthetic oligonucleotide
gcaucagagacauuggauu

SEQ ID NO: 2084933 - RNA, 19 nt, Artificial Sequence
  Description of Artificial Sequence: Synthetic oligonucleotide
gaucuagcuucugccugac

SEQ ID NO: 2084934 - RNA, 19 nt, Artificial Sequence
  Description of Artificial Sequence: Synthetic oligonucleotide
acauuggauuucagccauc

SEQ ID NO: 2084935 - RNA, 19 nt, Artificial Sequence
  Description of Artificial Sequence: Synthetic oligonucleotide
uggccuggucccaaccuuu

SEQ ID NO: 2084936 - RNA, 19 nt, Artificial Sequence
  Description of Artificial Sequence: Synthetic oligonucleotide
cguucagcgugcaaaugag

SEQ ID NO: 2084937 - RNA, 19 nt, Artificial Sequence
  Description of Artificial Sequence: Synthetic oligonucleotide
caaccuuuauagggaggug

SEQ ID NO: 2084938 - RNA, 19 nt, Artificial Sequence
  Description of Artificial Sequence: Synthetic oligonucleotide
cuugucgguggugccggcc

SEQ ID NO: 2084939 - RNA, 19 nt, Artificial Sequence
  Description of Artificial Sequence: Synthetic oligonucleotide
gcacuacccauucggcucc

SEQ ID NO: 2084940 - RNA, 19 nt, Artificial Sequence
  Description of Artificial Sequence: Synthetic oligonucleotide
caucagagacauuggauuu

SEQ ID NO: 2084941 - RNA, 19 nt, Artificial Sequence
  Description of Artificial Sequence: Synthetic oligonucleotide
cacaaggaagccguccaca

SEQ ID NO: 2084942 - RNA, 19 nt, Artificial Sequence
  Description of Artificial Sequence: Synthetic oligonucleotide
cgugcaaaugagcucuccc

SEQ ID NO: 2084943 - RNA, 19 nt, Artificial Sequence
  Description of Artificial Sequence: Synthetic oligonucleotide
cuagggcuucggcauugug

SEQ ID NO: 2084944 - RNA, 19 nt, Artificial Sequence
  Description of Artificial Sequence: Synthetic oligonucleotide
ucggugucugccggcaccu

SEQ ID NO: 2084945 - RNA, 19 nt, Artificial Sequence
  Description of Artificial Sequence: Synthetic oligonucleotide
gaugguucacaaacacagu

SEQ ID NO: 2084946 - RNA, 19 nt, Artificial Sequence
  Description of Artificial Sequence: Synthetic oligonucleotide
ccaaugcaggcgaucacuc

SEQ ID NO: 2084947 - RNA, 19 nt, Artificial Sequence
  Description of Artificial Sequence: Synthetic oligonucleotide
ccucucagaguuucaggug

SEQ ID NO: 2084948 - RNA, 19 nt, Artificial Sequence
  Description of Artificial Sequence: Synthetic oligonucleotide
auaaaugauucgggugcuu

SEQ ID NO: 2084949 - RNA, 19 nt, Artificial Sequence
  Description of Artificial Sequence: Synthetic oligonucleotide
cuccgagugcccuagcacu

SEQ ID NO: 2084950 - RNA, 19 nt, Artificial Sequence
  Description of Artificial Sequence: Synthetic oligonucleotide
cccaaccuuuauagggagg

SEQ ID NO: 2084951 - RNA, 19 nt, Artificial Sequence
  Description of Artificial Sequence: Synthetic oligonucleotide
caguaccaauggcccauac

SEQ ID NO: 2084952 - RNA, 19 nt, Artificial Sequence
  Description of Artificial Sequence: Synthetic oligonucleotide
ucucuccgagugcccuagc

SEQ ID NO: 2084953 - RNA, 19 nt, Artificial Sequence
  Description of Artificial Sequence: Synthetic oligonucleotide
cucuccgagugcccuagca

SEQ ID NO: 2084954 - RNA, 19 nt, Artificial Sequence
  Description of Artificial Sequence: Synthetic oligonucleotide
cacuuuguagcaguucugu

SEQ ID NO: 2084955 - RNA, 19 nt, Artificial Sequence
  Description of Artificial Sequence: Synthetic oligonucleotide
caucggacuccccaaagau

SEQ ID NO: 2084956 - RNA, 19 nt, Artificial Sequence
  Description of Artificial Sequence: Synthetic oligonucleotide
ugagcucucccaggcacuu

SEQ ID NO: 2084957 - RNA, 19 nt, Artificial Sequence
  Description of Artificial Sequence: Synthetic oligonucleotide
cagcgugcaaaugagcucu

SEQ ID NO: 2084958 - RNA, 19 nt, Artificial Sequence
  Description of Artificial Sequence: Synthetic oligonucleotide
ggcgcacaaaccaccucgg

SEQ ID NO: 2084959 - RNA, 19 nt, Artificial Sequence
  Description of Artificial Sequence: Synthetic oligonucleotide
accccuggccucucagagu

SEQ ID NO: 2084960 - RNA, 19 nt, Artificial Sequence
  Description of Artificial Sequence: Synthetic oligonucleotide
cuacccauucggcuccuaa

SEQ ID NO: 2084961 - RNA, 19 nt, Artificial Sequence
  Description of Artificial Sequence: Synthetic oligonucleotide
cauaaaugauucgggugcu

SEQ ID NO: 2084962 - RNA, 19 nt, Artificial Sequence
  Description of Artificial Sequence: Synthetic oligonucleotide
ggcugaucuccccagugaa

SEQ ID NO: 2084963 - RNA, 19 nt, Artificial Sequence
  Description of Artificial Sequence: Synthetic oligonucleotide
gcugaucuccccagugaag

SEQ ID NO: 2084964 - RNA, 19 nt, Artificial Sequence
  Description of Artificial Sequence: Synthetic oligonucleotide
uccccagugaaggccccac

SEQ ID NO: 2084965 - RNA, 19 nt, Artificial Sequence
  Description of Artificial Sequence: Synthetic oligonucleotide
guggauuagcaaacaagau

SEQ ID NO: 2084966 - RNA, 19 nt, Artificial Sequence
  Description of Artificial Sequence: Synthetic oligonucleotide
cauucggcuccuaagucuu

SEQ ID NO: 2084967 - RNA, 19 nt, Artificial Sequence
  Description of Artificial Sequence: Synthetic oligonucleotide
aucuugggaucuagcuucu

SEQ ID NO: 2084968 - RNA, 19 nt, Artificial Sequence
  Description of Artificial Sequence: Synthetic oligonucleotide
ccaaagaugugccuucucu

SEQ ID NO: 2084969 - RNA, 19 nt, Artificial Sequence
  Description of Artificial Sequence: Synthetic oligonucleotide
ccaaucaacucaucggacu

SEQ ID NO: 2084970 - RNA, 19 nt, Artificial Sequence
  Description of Artificial Sequence: Synthetic oligonucleotide
ggaagguacaguguggauu

SEQ ID NO: 2084971 - RNA, 19 nt, Artificial Sequence
  Description of Artificial Sequence: Synthetic oligonucleotide
ccaaggcccucggauaggg

SEQ ID NO: 2084972 - RNA, 19 nt, Artificial Sequence
  Description of Artificial Sequence: Synthetic oligonucleotide
agcuucucguguacuuccu

SEQ ID NO: 2084973 - RNA, 19 nt, Artificial Sequence
  Description of Artificial Sequence: Synthetic oligonucleotide
agcgugcaaaugagcucuc

SEQ ID NO: 2084974 - RNA, 19 nt, Artificial Sequence
  Description of Artificial Sequence: Synthetic oligonucleotide
gggugcuuugagccacugc

SEQ ID NO: 2084975 - RNA, 19 nt, Artificial Sequence
  Description of Artificial Sequence: Synthetic oligonucleotide
cucagaguuucaggugaca

SEQ ID NO: 2084976 - RNA, 19 nt, Artificial Sequence
  Description of Artificial Sequence: Synthetic oligonucleotide
gccguccacaucaggcugg

SEQ ID NO: 2084977 - RNA, 19 nt, Artificial Sequence
  Description of Artificial Sequence: Synthetic oligonucleotide
gcucgaaaacaaccuuguc

SEQ ID NO: 2084978 - RNA, 19 nt, Artificial Sequence
  Description of Artificial Sequence: Synthetic oligonucleotide
uggcccauacagguucaua

SEQ ID NO: 2084979 - RNA, 19 nt, Artificial Sequence
  Description of Artificial Sequence: Synthetic oligonucleotide
caguguggauuagcaaaca

SEQ ID NO: 2084980 - RNA, 19 nt, Artificial Sequence
  Description of Artificial Sequence: Synthetic oligonucleotide
gccuugguuugcucgaaaa

SEQ ID NO: 2084981 - RNA, 19 nt, Artificial Sequence
  Description of Artificial Sequence: Synthetic oligonucleotide
gggcugaucuccccaguga

SEQ ID NO: 2084982 - RNA, 19 nt, Artificial Sequence
  Description of Artificial Sequence: Synthetic oligonucleotide
gcaaccuaauccuggccua

SEQ ID NO: 2084983 - RNA, 19 nt, Artificial Sequence
  Description of Artificial Sequence: Synthetic oligonucleotide
cccauucggcuccuaaguc

SEQ ID NO: 2084984 - RNA, 19 nt, Artificial Sequence
  Description of Artificial Sequence: Synthetic oligonucleotide
ggauuucagccauccccga

SEQ ID NO: 2084985 - RNA, 19 nt, Artificial Sequence
  Description of Artificial Sequence: Synthetic oligonucleotide
ugggccuguugagguguug

SEQ ID NO: 2084986 - RNA, 19 nt, Artificial Sequence
  Description of Artificial Sequence: Synthetic oligonucleotide
ccuagcggaggguagggaa

SEQ ID NO: 2084987 - RNA, 19 nt, Artificial Sequence
  Description of Artificial Sequence: Synthetic oligonucleotide
cucccaggcacuucuucgu

SEQ ID NO: 2084988 - RNA, 19 nt, Artificial Sequence
  Description of Artificial Sequence: Synthetic oligonucleotide
ggccuagcggaggguaggg

SEQ ID NO: 2084989 - RNA, 19 nt, Artificial Sequence
  Description of Artificial Sequence: Synthetic oligonucleotide
ccaccucggugucugccgg

SEQ ID NO: 2084990 - RNA, 19 nt, Artificial Sequence
  Description of Artificial Sequence: Synthetic oligonucleotide
uggccuugguuugcucgaa

SEQ ID NO: 2084991 - RNA, 19 nt, Artificial Sequence
  Description of Artificial Sequence: Synthetic oligonucleotide
ggauuggccuggucccaac

SEQ ID NO: 2084992 - RNA, 19 nt, Artificial Sequence
  Description of Artificial Sequence: Synthetic oligonucleotide
ccaaccuuuauagggaggu

SEQ ID NO: 2084993 - RNA, 19 nt, Artificial Sequence
  Description of Artificial Sequence: Synthetic oligonucleotide
cagucuugccaguaccaau

SEQ ID NO: 2084994 - RNA, 19 nt, Artificial Sequence
  Description of Artificial Sequence: Synthetic oligonucleotide
cccguucaucuuccaauug

SEQ ID NO: 2084995 - RNA, 19 nt, Artificial Sequence
  Description of Artificial Sequence: Synthetic oligonucleotide
gcuucggcauugugggaga

SEQ ID NO: 2084996 - RNA, 19 nt, Artificial Sequence
  Description of Artificial Sequence: Synthetic oligonucleotide
cuccccaaugcaggcgauc

SEQ ID NO: 2084997 - RNA, 19 nt, Artificial Sequence
  Description of Artificial Sequence: Synthetic oligonucleotide
gccgcguucagcgugcaaa

SEQ ID NO: 2084998 - RNA, 19 nt, Artificial Sequence
  Description of Artificial Sequence: Synthetic oligonucleotide
ccacaaggaagccguccac

SEQ ID NO: 2084999 - RNA, 19 nt, Artificial Sequence
  Description of Artificial Sequence: Synthetic oligonucleotide
cauccccgaagcuucucgu

SEQ ID NO: 2085000 - RNA, 19 nt, Artificial Sequence
  Description of Artificial Sequence: Synthetic oligonucleotide
cuggccucucagaguuuca

SEQ ID NO: 2085001 - RNA, 19 nt, Artificial Sequence
  Description of Artificial Sequence: Synthetic oligonucleotide
gcccuagcacuacccauuc

SEQ ID NO: 2085002 - RNA, 19 nt, Artificial Sequence
  Description of Artificial Sequence: Synthetic oligonucleotide
ccauucggcuccuaagucu

SEQ ID NO: 2085003 - RNA, 19 nt, Artificial Sequence
  Description of Artificial Sequence: Synthetic oligonucleotide
ccuaagcuccugggcaacc

SEQ ID NO: 2085004 - RNA, 19 nt, Artificial Sequence
  Description of Artificial Sequence: Synthetic oligonucleotide
ggcaugggccacuuucugu

SEQ ID NO: 2085005 - RNA, 19 nt, Artificial Sequence
  Description of Artificial Sequence: Synthetic oligonucleotide
cuucucuccgagugcccua

SEQ ID NO: 2085006 - RNA, 19 nt, Artificial Sequence
  Description of Artificial Sequence: Synthetic oligonucleotide
ugccggccucccuuucauc

SEQ ID NO: 2085007 - RNA, 19 nt, Artificial Sequence
  Description of Artificial Sequence: Synthetic oligonucleotide
uggugccggccucccuuuc

SEQ ID NO: 2085008 - RNA, 19 nt, Artificial Sequence
  Description of Artificial Sequence: Synthetic oligonucleotide
ccacccacaaggaagccgu

SEQ ID NO: 2085009 - RNA, 19 nt, Artificial Sequence
  Description of Artificial Sequence: Synthetic oligonucleotide
cccuagcacuacccauucg

SEQ ID NO: 2085010 - RNA, 19 nt, Artificial Sequence
  Description of Artificial Sequence: Synthetic oligonucleotide
cccgaagcuucucguguac

SEQ ID NO: 2085011 - RNA, 19 nt, Artificial Sequence
  Description of Artificial Sequence: Synthetic oligonucleotide
cuaagcuccugggcaaccu

SEQ ID NO: 2085012 - RNA, 19 nt, Artificial Sequence
  Description of Artificial Sequence: Synthetic oligonucleotide
gcggaggguagggaagaug

SEQ ID NO: 2085013 - RNA, 19 nt, Artificial Sequence
  Description of Artificial Sequence: Synthetic oligonucleotide
gcgugcaaaugagcucucc

SEQ ID NO: 2085014 - RNA, 19 nt, Artificial Sequence
  Description of Artificial Sequence: Synthetic oligonucleotide
gagcaguuccuaagcuccu

SEQ ID NO: 2085015 - RNA, 19 nt, Artificial Sequence
  Description of Artificial Sequence: Synthetic oligonucleotide
gcaaacaagauggggcgau

SEQ ID NO: 2085016 - RNA, 19 nt, Artificial Sequence
  Description of Artificial Sequence: Synthetic oligonucleotide
ccuggucccaaccuuuaua

SEQ ID NO: 2085017 - RNA, 19 nt, Artificial Sequence
  Description of Artificial Sequence: Synthetic oligonucleotide
agcggaggguagggaagau

SEQ ID NO: 2085018 - RNA, 19 nt, Artificial Sequence
  Description of Artificial Sequence: Synthetic oligonucleotide
auggcccauacagguucau

SEQ ID NO: 2085019 - RNA, 19 nt, Artificial Sequence
  Description of Artificial Sequence: Synthetic oligonucleotide
cgagugcccuagcacuacc

SEQ ID NO: 2085020 - RNA, 19 nt, Artificial Sequence
  Description of Artificial Sequence: Synthetic oligonucleotide
ugccagcucuuugcagguu

SEQ ID NO: 2085021 - RNA, 19 nt, Artificial Sequence
  Description of Artificial Sequence: Synthetic oligonucleotide
agccauccccgaagcuucu

SEQ ID NO: 2085022 - RNA, 19 nt, Artificial Sequence
  Description of Artificial Sequence: Synthetic oligonucleotide
gugacuugugggagcaguu

SEQ ID NO: 2085023 - RNA, 19 nt, Artificial Sequence
  Description of Artificial Sequence: Synthetic oligonucleotide
cuccuaagucuuugaucau

SEQ ID NO: 2085024 - RNA, 19 nt, Artificial Sequence
  Description of Artificial Sequence: Synthetic oligonucleotide
guacuagggcuucggcauu

SEQ ID NO: 2085025 - RNA, 19 nt, Artificial Sequence
  Description of Artificial Sequence: Synthetic oligonucleotide
ggccuugguuugcucgaaa

SEQ ID NO: 2085026 - RNA, 19 nt, Artificial Sequence
  Description of Artificial Sequence: Synthetic oligonucleotide
gcccucggauagggcaugg

SEQ ID NO: 2085027 - RNA, 19 nt, Artificial Sequence
  Description of Artificial Sequence: Synthetic oligonucleotide
gccugacaaaaucgaugua

SEQ ID NO: 2085028 - RNA, 19 nt, Artificial Sequence
  Description of Artificial Sequence: Synthetic oligonucleotide
cccaaugcaggcgaucacu

SEQ ID NO: 2085029 - RNA, 19 nt, Artificial Sequence
  Description of Artificial Sequence: Synthetic oligonucleotide
gccaguaccaauggcccau

SEQ ID NO: 2085030 - RNA, 19 nt, Artificial Sequence
  Description of Artificial Sequence: Synthetic oligonucleotide
ccgagugcccuagcacuac

SEQ ID NO: 2085031 - RNA, 19 nt, Artificial Sequence
  Description of Artificial Sequence: Synthetic oligonucleotide
gugccggccucccuuucau

SEQ ID NO: 2085032 - RNA, 19 nt, Artificial Sequence
  Description of Artificial Sequence: Synthetic oligonucleotide
uggccgcguucagcgugca

SEQ ID NO: 2085033 - RNA, 19 nt, Artificial Sequence
  Description of Artificial Sequence: Synthetic oligonucleotide
acuacccauucggcuccua

SEQ ID NO: 2085034 - RNA, 19 nt, Artificial Sequence
  Description of Artificial Sequence: Synthetic oligonucleotide
gggauuggccuggucccaa

SEQ ID NO: 2085035 - RNA, 19 nt, Artificial Sequence
  Description of Artificial Sequence: Synthetic oligonucleotide
gggcuucggcauuguggga

SEQ ID NO: 2085036 - RNA, 19 nt, Artificial Sequence
  Description of Artificial Sequence: Synthetic oligonucleotide
cggacuccccaaagaugug

SEQ ID NO: 2085037 - RNA, 19 nt, Artificial Sequence
  Description of Artificial Sequence: Synthetic oligonucleotide
ggcacuucuucgucccguu

SEQ ID NO: 2085038 - RNA, 19 nt, Artificial Sequence
  Description of Artificial Sequence: Synthetic oligonucleotide
ccucggugucugccggcac

SEQ ID NO: 2085039 - RNA, 19 nt, Artificial Sequence
  Description of Artificial Sequence: Synthetic oligonucleotide
guggugccggccucccuuu

SEQ ID NO: 2085040 - RNA, 19 nt, Artificial Sequence
  Description of Artificial Sequence: Synthetic oligonucleotide
ggauagggcaugggccacu

SEQ ID NO: 2085041 - RNA, 19 nt, Artificial Sequence
  Description of Artificial Sequence: Synthetic oligonucleotide
cguguacuuccugggccug

SEQ ID NO: 2085042 - RNA, 19 nt, Artificial Sequence
  Description of Artificial Sequence: Synthetic oligonucleotide
gccuagcggaggguaggga

SEQ ID NO: 2085043 - RNA, 19 nt, Artificial Sequence
  Description of Artificial Sequence: Synthetic oligonucleotide
gcgcacaaaccaccucggu

SEQ ID NO: 2085044 - RNA, 19 nt, Artificial Sequence
  Description of Artificial Sequence: Synthetic oligonucleotide
cgaaaacaaccuugucggu

SEQ ID NO: 2085045 - RNA, 19 nt, Artificial Sequence
  Description of Artificial Sequence: Synthetic oligonucleotide
cgcguucagcgugcaaaug

SEQ ID NO: 2085046 - RNA, 19 nt, Artificial Sequence
  Description of Artificial Sequence: Synthetic oligonucleotide
gggaggugucaaaggugua

SEQ ID NO: 2085047 - RNA, 19 nt, Artificial Sequence
  Description of Artificial Sequence: Synthetic oligonucleotide
ggccuggucccaaccuuua

SEQ ID NO: 2085048 - RNA, 19 nt, Artificial Sequence
  Description of Artificial Sequence: Synthetic oligonucleotide
cuucggcauugugggagau

SEQ ID NO: 2085049 - RNA, 19 nt, Artificial Sequence
  Description of Artificial Sequence: Synthetic oligonucleotide
gcgauggccuugguuugcu

SEQ ID NO: 2085050 - RNA, 19 nt, Artificial Sequence
  Description of Artificial Sequence: Synthetic oligonucleotide
gccuggucccaaccuuuau

SEQ ID NO: 2085051 - RNA, 19 nt, Artificial Sequence
  Description of Artificial Sequence: Synthetic oligonucleotide
ccggccucccuuucaucua

SEQ ID NO: 2085052 - RNA, 19 nt, Artificial Sequence
  Description of Artificial Sequence: Synthetic oligonucleotide
ccgcguucagcgugcaaau

SEQ ID NO: 2085053 - RNA, 19 nt, Artificial Sequence
  Description of Artificial Sequence: Synthetic oligonucleotide
cccuuucaucuagcuucuc

SEQ ID NO: 2085054 - RNA, 19 nt, Artificial Sequence
  Description of Artificial Sequence: Synthetic oligonucleotide
ccccaacgaagaacuuccu

SEQ ID NO: 2085055 - RNA, 19 nt, Artificial Sequence
  Description of Artificial Sequence: Synthetic oligonucleotide
ggccgcguucagcgugcaa

SEQ ID NO: 2085056 - RNA, 19 nt, Artificial Sequence
  Description of Artificial Sequence: Synthetic oligonucleotide
cacuacccauucggcuccu

SEQ ID NO: 2085057 - RNA, 19 nt, Artificial Sequence
  Description of Artificial Sequence: Synthetic oligonucleotide
ccccaaagaugugccuucu

SEQ ID NO: 2085058 - RNA, 19 nt, Artificial Sequence
  Description of Artificial Sequence: Synthetic oligonucleotide
gggccacuuucuguccaau

SEQ ID NO: 2085059 - RNA, 19 nt, Artificial Sequence
  Description of Artificial Sequence: Synthetic oligonucleotide
cggcaccuuggccgcguuc

SEQ ID NO: 2085060 - RNA, 19 nt, Artificial Sequence
  Description of Artificial Sequence: Synthetic oligonucleotide
ccggcaccuuggccgcguu

SEQ ID NO: 2085061 - RNA, 19 nt, Artificial Sequence
  Description of Artificial Sequence: Synthetic oligonucleotide
aaauugacuuuucagaugg

SEQ ID NO: 2085062 - RNA, 19 nt, Artificial Sequence
  Description of Artificial Sequence: Synthetic oligonucleotide
auuagcagagcacugaucc

SEQ ID NO: 2085063 - RNA, 19 nt, Artificial Sequence
  Description of Artificial Sequence: Synthetic oligonucleotide
ugaacuaaaaggaaaacug

SEQ ID NO: 2085064 - RNA, 19 nt, Artificial Sequence
  Description of Artificial Sequence: Synthetic oligonucleotide
aaggaaaacaaaaggaugc

SEQ ID NO: 2085065 - RNA, 19 nt, Artificial Sequence
  Description of Artificial Sequence: Synthetic oligonucleotide
aagaauaguaguaacauag

SEQ ID NO: 2085066 - RNA, 19 nt, Artificial Sequence
  Description of Artificial Sequence: Synthetic oligonucleotide
uuauuuauaccuacaaaag

SEQ ID NO: 2085067 - RNA, 19 nt, Artificial Sequence
  Description of Artificial Sequence: Synthetic oligonucleotide
auaaaucugaauuugguug

SEQ ID NO: 2085068 - RNA, 19 nt, Artificial Sequence
  Description of Artificial Sequence: Synthetic oligonucleotide
uaacucaacacuaaccugg

SEQ ID NO: 2085069 - RNA, 19 nt, Artificial Sequence
  Description of Artificial Sequence: Synthetic oligonucleotide
agaaauuuaauuucuaacu

SEQ ID NO: 2085070 - RNA, 19 nt, Artificial Sequence
  Description of Artificial Sequence: Synthetic oligonucleotide
aacaagaugguaucaaaag

SEQ ID NO: 2085071 - RNA, 19 nt, Artificial Sequence
  Description of Artificial Sequence: Synthetic oligonucleotide
aacacugacgcuuaugcuc

SEQ ID NO: 2085072 - RNA, 19 nt, Artificial Sequence
  Description of Artificial Sequence: Synthetic oligonucleotide
aaaagauaugcuugaacuc

SEQ ID NO: 2085073 - RNA, 19 nt, Artificial Sequence
  Description of Artificial Sequence: Synthetic oligonucleotide
aagaaaacaagaugguauc

SEQ ID NO: 2085074 - RNA, 19 nt, Artificial Sequence
  Description of Artificial Sequence: Synthetic oligonucleotide
aaauuuaauuucuaacuca

SEQ ID NO: 2085075 - RNA, 19 nt, Artificial Sequence
  Description of Artificial Sequence: Synthetic oligonucleotide
aguagguugauugagcucc

SEQ ID NO: 2085076 - RNA, 19 nt, Artificial Sequence
  Description of Artificial Sequence: Synthetic oligonucleotide
aguaacauagcucuuagca

SEQ ID NO: 2085077 - RNA, 19 nt, Artificial Sequence
  Description of Artificial Sequence: Synthetic oligonucleotide
auauaauugaaggagaaag

SEQ ID NO: 2085078 - RNA, 19 nt, Artificial Sequence
  Description of Artificial Sequence: Synthetic oligonucleotide
aauguguugagagaccagc

SEQ ID NO: 2085079 - RNA, 19 nt, Artificial Sequence
  Description of Artificial Sequence: Synthetic oligonucleotide
aauaguaguaacauagcuc

SEQ ID NO: 2085080 - RNA, 19 nt, Artificial Sequence
  Description of Artificial Sequence: Synthetic oligonucleotide
ucuaacucaacacuaaccu

SEQ ID NO: 2085081 - RNA, 19 nt, Artificial Sequence
  Description of Artificial Sequence: Synthetic oligonucleotide
caagaugguaucaaaaggg

SEQ ID NO: 2085082 - RNA, 19 nt, Artificial Sequence
  Description of Artificial Sequence: Synthetic oligonucleotide
ugguuaauauauauaauug

SEQ ID NO: 2085083 - RNA, 19 nt, Artificial Sequence
  Description of Artificial Sequence: Synthetic oligonucleotide
ugcacaaccacauaagcag

SEQ ID NO: 2085084 - RNA, 19 nt, Artificial Sequence
  Description of Artificial Sequence: Synthetic oligonucleotide
uucguauucuguaaaacag

SEQ ID NO: 2085085 - RNA, 19 nt, Artificial Sequence
  Description of Artificial Sequence: Synthetic oligonucleotide
uaauugaaggagaaagagg

SEQ ID NO: 2085086 - RNA, 19 nt, Artificial Sequence
  Description of Artificial Sequence: Synthetic oligonucleotide
uauauauaauugaaggaga

SEQ ID NO: 2085087 - RNA, 19 nt, Artificial Sequence
  Description of Artificial Sequence: Synthetic oligonucleotide
aaagaaguaucuguaacag

SEQ ID NO: 2085088 - RNA, 19 nt, Artificial Sequence
  Description of Artificial Sequence: Synthetic oligonucleotide
uguagaaagaaguaucugu

SEQ ID NO: 2085089 - RNA, 19 nt, Artificial Sequence
  Description of Artificial Sequence: Synthetic oligonucleotide
acaagaugguaucaaaagg

SEQ ID NO: 2085090 - RNA, 19 nt, Artificial Sequence
  Description of Artificial Sequence: Synthetic oligonucleotide
uuaugcuucugguagacag

SEQ ID NO: 2085091 - RNA, 19 nt, Artificial Sequence
  Description of Artificial Sequence: Synthetic oligonucleotide
uccaugauuagacacuucc

SEQ ID NO: 2085092 - RNA, 19 nt, Artificial Sequence
  Description of Artificial Sequence: Synthetic oligonucleotide
ugagagaccagcaaaggca

SEQ ID NO: 2085093 - RNA, 19 nt, Artificial Sequence
  Description of Artificial Sequence: Synthetic oligonucleotide
aaaauugacuuuucagaug

SEQ ID NO: 2085094 - RNA, 19 nt, Artificial Sequence
  Description of Artificial Sequence: Synthetic oligonucleotide
cuaaaaggaaaacugcuag

SEQ ID NO: 2085095 - RNA, 19 nt, Artificial Sequence
  Description of Artificial Sequence: Synthetic oligonucleotide
acagcuuaauacugaagcc

SEQ ID NO: 2085096 - RNA, 19 nt, Artificial Sequence
  Description of Artificial Sequence: Synthetic oligonucleotide
uauaauugaaggagaaaga

SEQ ID NO: 2085097 - RNA, 19 nt, Artificial Sequence
  Description of Artificial Sequence: Synthetic oligonucleotide
cacagcuuaauacugaagc

SEQ ID NO: 2085098 - RNA, 19 nt, Artificial Sequence
  Description of Artificial Sequence: Synthetic oligonucleotide
aaagaaaacaagaugguau

SEQ ID NO: 2085099 - RNA, 19 nt, Artificial Sequence
  Description of Artificial Sequence: Synthetic oligonucleotide
uauaccuacaaaagaaaac

SEQ ID NO: 2085100 - RNA, 19 nt, Artificial Sequence
  Description of Artificial Sequence: Synthetic oligonucleotide
aauaaaucugaauuugguu

SEQ ID NO: 2085101 - RNA, 19 nt, Artificial Sequence
  Description of Artificial Sequence: Synthetic oligonucleotide
aaagauaugcuugaacuca

SEQ ID NO: 2085102 - RNA, 19 nt, Artificial Sequence
  Description of Artificial Sequence: Synthetic oligonucleotide
aagaugguaucaaaagggc

SEQ ID NO: 2085103 - RNA, 19 nt, Artificial Sequence
  Description of Artificial Sequence: Synthetic oligonucleotide
aagcagaacucauugaacu

SEQ ID NO: 2085104 - RNA, 19 nt, Artificial Sequence
  Description of Artificial Sequence: Synthetic oligonucleotide
aaaggagcucaugaaaugg

SEQ ID NO: 2085105 - RNA, 19 nt, Artificial Sequence
  Description of Artificial Sequence: Synthetic oligonucleotide
auaaauaaaucugaauuug

SEQ ID NO: 2085106 - RNA, 19 nt, Artificial Sequence
  Description of Artificial Sequence: Synthetic oligonucleotide
uccugcuaaacacugacgc

SEQ ID NO: 2085107 - RNA, 19 nt, Artificial Sequence
  Description of Artificial Sequence: Synthetic oligonucleotide
aggcaagcaaccuagcuac

SEQ ID NO: 2085108 - RNA, 19 nt, Artificial Sequence
  Description of Artificial Sequence: Synthetic oligonucleotide
aaugacaggaauguguuga

SEQ ID NO: 2085109 - RNA, 19 nt, Artificial Sequence
  Description of Artificial Sequence: Synthetic oligonucleotide
aauugugugacugcacaac

SEQ ID NO: 2085110 - RNA, 19 nt, Artificial Sequence
  Description of Artificial Sequence: Synthetic oligonucleotide
aagcaugcugcucagaagu

SEQ ID NO: 2085111 - RNA, 19 nt, Artificial Sequence
  Description of Artificial Sequence: Synthetic oligonucleotide
acaccuacaauucaagucu

SEQ ID NO: 2085112 - RNA, 19 nt, Artificial Sequence
  Description of Artificial Sequence: Synthetic oligonucleotide
uguugagagaccagcaaag

SEQ ID NO: 2085113 - RNA, 19 nt, Artificial Sequence
  Description of Artificial Sequence: Synthetic oligonucleotide
acaaacuaagaauaguagu

SEQ ID NO: 2085114 - RNA, 19 nt, Artificial Sequence
  Description of Artificial Sequence: Synthetic oligonucleotide
uucuaacucaacacuaacc

SEQ ID NO: 2085115 - RNA, 19 nt, Artificial Sequence
  Description of Artificial Sequence: Synthetic oligonucleotide
uuuuagaugagaagucaca

SEQ ID NO: 2085116 - RNA, 19 nt, Artificial Sequence
  Description of Artificial Sequence: Synthetic oligonucleotide
acugcacaaccacauaagc

SEQ ID NO: 2085117 - RNA, 19 nt, Artificial Sequence
  Description of Artificial Sequence: Synthetic oligonucleotide
ugaauugugugacugcaca

SEQ ID NO: 2085118 - RNA, 19 nt, Artificial Sequence
  Description of Artificial Sequence: Synthetic oligonucleotide
uuuauaccuacaaaagaaa

SEQ ID NO: 2085119 - RNA, 19 nt, Artificial Sequence
  Description of Artificial Sequence: Synthetic oligonucleotide
auagccugugguaugaugc

SEQ ID NO: 2085120 - RNA, 19 nt, Artificial Sequence
  Description of Artificial Sequence: Synthetic oligonucleotide
aaggaaaacugcuaguuuu

SEQ ID NO: 2085121 - RNA, 19 nt, Artificial Sequence
  Description of Artificial Sequence: Synthetic oligonucleotide
uuauaccuacaaaagaaaa

SEQ ID NO: 2085122 - RNA, 19 nt, Artificial Sequence
  Description of Artificial Sequence: Synthetic oligonucleotide
aguaaggaaaacaaaagga

SEQ ID NO: 2085123 - RNA, 19 nt, Artificial Sequence
  Description of Artificial Sequence: Synthetic oligonucleotide
gaaagaaguaucuguaaca

SEQ ID NO: 2085124 - RNA, 19 nt, Artificial Sequence
  Description of Artificial Sequence: Synthetic oligonucleotide
aaggcguuuacagaagggg

SEQ ID NO: 2085125 - RNA, 19 nt, Artificial Sequence
  Description of Artificial Sequence: Synthetic oligonucleotide
aacaucacaccuacaauuc

SEQ ID NO: 2085126 - RNA, 19 nt, Artificial Sequence
  Description of Artificial Sequence: Synthetic oligonucleotide
agcuguuaauucuaucugg

SEQ ID NO: 2085127 - RNA, 19 nt, Artificial Sequence
  Description of Artificial Sequence: Synthetic oligonucleotide
uaaaucugaauuugguugu

SEQ ID NO: 2085128 - RNA, 19 nt, Artificial Sequence
  Description of Artificial Sequence: Synthetic oligonucleotide
aacauagcucuuagcaucc

SEQ ID NO: 2085129 - RNA, 19 nt, Artificial Sequence
  Description of Artificial Sequence: Synthetic oligonucleotide
aaauaaaucugaauuuggu

SEQ ID NO: 2085130 - RNA, 19 nt, Artificial Sequence
  Description of Artificial Sequence: Synthetic oligonucleotide
aagggguguuuucaagagc

SEQ ID NO: 2085131 - RNA, 19 nt, Artificial Sequence
  Description of Artificial Sequence: Synthetic oligonucleotide
aaaacaagaugguaucaaa

SEQ ID NO: 2085132 - RNA, 19 nt, Artificial Sequence
  Description of Artificial Sequence: Synthetic oligonucleotide
ugaaaugggaaaucagcug

SEQ ID NO: 2085133 - RNA, 19 nt, Artificial Sequence
  Description of Artificial Sequence: Synthetic oligonucleotide
cuaguuuucugcuguaccc

SEQ ID NO: 2085134 - RNA, 19 nt, Artificial Sequence
  Description of Artificial Sequence: Synthetic oligonucleotide
ugacuuuucagaugguccc

SEQ ID NO: 2085135 - RNA, 19 nt, Artificial Sequence
  Description of Artificial Sequence: Synthetic oligonucleotide
uguacccggaccaaaggag

SEQ ID NO: 2085136 - RNA, 19 nt, Artificial Sequence
  Description of Artificial Sequence: Synthetic oligonucleotide
auuuauaccuacaaaagaa

SEQ ID NO: 2085137 - RNA, 19 nt, Artificial Sequence
  Description of Artificial Sequence: Synthetic oligonucleotide
ugaacucagaaauuuaauu

SEQ ID NO: 2085138 - RNA, 19 nt, Artificial Sequence
  Description of Artificial Sequence: Synthetic oligonucleotide
gaggaagcagaacucauug

SEQ ID NO: 2085139 - RNA, 19 nt, Artificial Sequence
  Description of Artificial Sequence: Synthetic oligonucleotide
uaaguagguugauugagcu

SEQ ID NO: 2085140 - RNA, 19 nt, Artificial Sequence
  Description of Artificial Sequence: Synthetic oligonucleotide
cugaucccaagcaaaagcc

SEQ ID NO: 2085141 - RNA, 19 nt, Artificial Sequence
  Description of Artificial Sequence: Synthetic oligonucleotide
ucuguaacaggcuggucag

SEQ ID NO: 2085142 - RNA, 19 nt, Artificial Sequence
  Description of Artificial Sequence: Synthetic oligonucleotide
acucauugaacuaaaagga

SEQ ID NO: 2085143 - RNA, 19 nt, Artificial Sequence
  Description of Artificial Sequence: Synthetic oligonucleotide
uuuagaugagaagucacac

SEQ ID NO: 2085144 - RNA, 19 nt, Artificial Sequence
  Description of Artificial Sequence: Synthetic oligonucleotide
cuaaguagguugauugagc

SEQ ID NO: 2085145 - RNA, 19 nt, Artificial Sequence
  Description of Artificial Sequence: Synthetic oligonucleotide
agaauaguaguaacauagc

SEQ ID NO: 2085146 - RNA, 19 nt, Artificial Sequence
  Description of Artificial Sequence: Synthetic oligonucleotide
acacaaugaauugugugac

SEQ ID NO: 2085147 - RNA, 19 nt, Artificial Sequence
  Description of Artificial Sequence: Synthetic oligonucleotide
aggaaaacaaaaggaugcc

SEQ ID NO: 2085148 - RNA, 19 nt, Artificial Sequence
  Description of Artificial Sequence: Synthetic oligonucleotide
aaguagguugauugagcuc

SEQ ID NO: 2085149 - RNA, 19 nt, Artificial Sequence
  Description of Artificial Sequence: Synthetic oligonucleotide
ucugaauuugguuguagaa

SEQ ID NO: 2085150 - RNA, 19 nt, Artificial Sequence
  Description of Artificial Sequence: Synthetic oligonucleotide
caaaggacagaugaggaag

SEQ ID NO: 2085151 - RNA, 19 nt, Artificial Sequence
  Description of Artificial Sequence: Synthetic oligonucleotide
uuucaagagcugcaguagc

SEQ ID NO: 2085152 - RNA, 19 nt, Artificial Sequence
  Description of Artificial Sequence: Synthetic oligonucleotide
gaagggguguuuucaagag

SEQ ID NO: 2085153 - RNA, 19 nt, Artificial Sequence
  Description of Artificial Sequence: Synthetic oligonucleotide
cuuuuagaugagaagucac

SEQ ID NO: 2085154 - RNA, 19 nt, Artificial Sequence
  Description of Artificial Sequence: Synthetic oligonucleotide
agcccuuuccccuaaguag

SEQ ID NO: 2085155 - RNA, 19 nt, Artificial Sequence
  Description of Artificial Sequence: Synthetic oligonucleotide
uggucaguguccaugauua

SEQ ID NO: 2085156 - RNA, 19 nt, Artificial Sequence
  Description of Artificial Sequence: Synthetic oligonucleotide
agcucuuagcauccugugc

SEQ ID NO: 2085157 - RNA, 19 nt, Artificial Sequence
  Description of Artificial Sequence: Synthetic oligonucleotide
cuagcuacugcuucauccc

SEQ ID NO: 2085158 - RNA, 19 nt, Artificial Sequence
  Description of Artificial Sequence: Synthetic oligonucleotide
auucuguaaaacaguaagg

SEQ ID NO: 2085159 - RNA, 19 nt, Artificial Sequence
  Description of Artificial Sequence: Synthetic oligonucleotide
ucaacacuaaccugguuaa

SEQ ID NO: 2085160 - RNA, 19 nt, Artificial Sequence
  Description of Artificial Sequence: Synthetic oligonucleotide
gguuaauauauauaauuga

SEQ ID NO: 2085161 - RNA, 19 nt, Artificial Sequence
  Description of Artificial Sequence: Synthetic oligonucleotide
acaaugaauugugugacug

SEQ ID NO: 2085162 - RNA, 19 nt, Artificial Sequence
  Description of Artificial Sequence: Synthetic oligonucleotide
uuaacaucacaccuacaau

SEQ ID NO: 2085163 - RNA, 19 nt, Artificial Sequence
  Description of Artificial Sequence: Synthetic oligonucleotide
aaaggaaaacugcuaguuu

SEQ ID NO: 2085164 - RNA, 19 nt, Artificial Sequence
  Description of Artificial Sequence: Synthetic oligonucleotide
guaguaacauagcucuuag

SEQ ID NO: 2085165 - RNA, 19 nt, Artificial Sequence
  Description of Artificial Sequence: Synthetic oligonucleotide
ugacugcacaaccacauaa

SEQ ID NO: 2085166 - RNA, 19 nt, Artificial Sequence
  Description of Artificial Sequence: Synthetic oligonucleotide
gauuagacacuuccuuuug

SEQ ID NO: 2085167 - RNA, 19 nt, Artificial Sequence
  Description of Artificial Sequence: Synthetic oligonucleotide
cacaccuacaauucaaguc

SEQ ID NO: 2085168 - RNA, 19 nt, Artificial Sequence
  Description of Artificial Sequence: Synthetic oligonucleotide
aauuucuaacucaacacua

SEQ ID NO: 2085169 - RNA, 19 nt, Artificial Sequence
  Description of Artificial Sequence: Synthetic oligonucleotide
ucguauucuguaaaacagu

SEQ ID NO: 2085170 - RNA, 19 nt, Artificial Sequence
  Description of Artificial Sequence: Synthetic oligonucleotide
gcucacaauagcuaucugg

SEQ ID NO: 2085171 - RNA, 19 nt, Artificial Sequence
  Description of Artificial Sequence: Synthetic oligonucleotide
aguuuucugcuguacccgg

SEQ ID NO: 2085172 - RNA, 19 nt, Artificial Sequence
  Description of Artificial Sequence: Synthetic oligonucleotide
acugcuaguuuucugcugu

SEQ ID NO: 2085173 - RNA, 19 nt, Artificial Sequence
  Description of Artificial Sequence: Synthetic oligonucleotide
acuaagaauaguaguaaca

SEQ ID NO: 2085174 - RNA, 19 nt, Artificial Sequence
  Description of Artificial Sequence: Synthetic oligonucleotide
uccuguucugacaaaggac

SEQ ID NO: 2085175 - RNA, 19 nt, Artificial Sequence
  Description of Artificial Sequence: Synthetic oligonucleotide
aaggagcucaugaaauggg

SEQ ID NO: 2085176 - RNA, 19 nt, Artificial Sequence
  Description of Artificial Sequence: Synthetic oligonucleotide
gaauaguaguaacauagcu

SEQ ID NO: 2085177 - RNA, 19 nt, Artificial Sequence
  Description of Artificial Sequence: Synthetic oligonucleotide
cuucguauucuguaaaaca

SEQ ID NO: 2085178 - RNA, 19 nt, Artificial Sequence
  Description of Artificial Sequence: Synthetic oligonucleotide
agaagggguguuuucaaga

SEQ ID NO: 2085179 - RNA, 19 nt, Artificial Sequence
  Description of Artificial Sequence: Synthetic oligonucleotide
gaugguaucaaaagggcaa

SEQ ID NO: 2085180 - RNA, 19 nt, Artificial Sequence
  Description of Artificial Sequence: Synthetic oligonucleotide
aaaggcguuuacagaaggg

SEQ ID NO: 2085181 - RNA, 19 nt, Artificial Sequence
  Description of Artificial Sequence: Synthetic oligonucleotide
aaacacugacgcuuaugcu

SEQ ID NO: 2085182 - RNA, 19 nt, Artificial Sequence
  Description of Artificial Sequence: Synthetic oligonucleotide
ugguaugaugcuuaauaaa

SEQ ID NO: 2085183 - RNA, 19 nt, Artificial Sequence
  Description of Artificial Sequence: Synthetic oligonucleotide
cuuuccccuaaguagguug

SEQ ID NO: 2085184 - RNA, 19 nt, Artificial Sequence
  Description of Artificial Sequence: Synthetic oligonucleotide
gaaaucagcuguuaauucu

SEQ ID NO: 2085185 - RNA, 19 nt, Artificial Sequence
  Description of Artificial Sequence: Synthetic oligonucleotide
uuccugcuaaacacugacg

SEQ ID NO: 2085186 - RNA, 19 nt, Artificial Sequence
  Description of Artificial Sequence: Synthetic oligonucleotide
cagcuuaauacugaagccc

SEQ ID NO: 2085187 - RNA, 19 nt, Artificial Sequence
  Description of Artificial Sequence: Synthetic oligonucleotide
aaacaagaugguaucaaaa

SEQ ID NO: 2085188 - RNA, 19 nt, Artificial Sequence
  Description of Artificial Sequence: Synthetic oligonucleotide
aaucugaauuugguuguag

SEQ ID NO: 2085189 - RNA, 19 nt, Artificial Sequence
  Description of Artificial Sequence: Synthetic oligonucleotide
caaaggcguuuacagaagg

SEQ ID NO: 2085190 - RNA, 19 nt, Artificial Sequence
  Description of Artificial Sequence: Synthetic oligonucleotide
ugaucccaagcaaaagcca

SEQ ID NO: 2085191 - RNA, 19 nt, Artificial Sequence
  Description of Artificial Sequence: Synthetic oligonucleotide
uauauaauugaaggagaaa

SEQ ID NO: 2085192 - RNA, 19 nt, Artificial Sequence
  Description of Artificial Sequence: Synthetic oligonucleotide
ugauuagacacuuccuuuu

SEQ ID NO: 2085193 - RNA, 19 nt, Artificial Sequence
  Description of Artificial Sequence: Synthetic oligonucleotide
aagauaugcuugaacucag

SEQ ID NO: 2085194 - RNA, 19 nt, Artificial Sequence
  Description of Artificial Sequence: Synthetic oligonucleotide
auucuaucuggauuaugcu

SEQ ID NO: 2085195 - RNA, 19 nt, Artificial Sequence
  Description of Artificial Sequence: Synthetic oligonucleotide
augaaaugggaaaucagcu

SEQ ID NO: 2085196 - RNA, 19 nt, Artificial Sequence
  Description of Artificial Sequence: Synthetic oligonucleotide
uguguugagagaccagcaa

SEQ ID NO: 2085197 - RNA, 19 nt, Artificial Sequence
  Description of Artificial Sequence: Synthetic oligonucleotide
caaugaauugugugacugc

SEQ ID NO: 2085198 - RNA, 19 nt, Artificial Sequence
  Description of Artificial Sequence: Synthetic oligonucleotide
guugauugagcuccaggug

SEQ ID NO: 2085199 - RNA, 19 nt, Artificial Sequence
  Description of Artificial Sequence: Synthetic oligonucleotide
acaauagcuaucuggcuaa

SEQ ID NO: 2085200 - RNA, 19 nt, Artificial Sequence
  Description of Artificial Sequence: Synthetic oligonucleotide
uucagauggucccugguua

SEQ ID NO: 2085201 - RNA, 19 nt, Artificial Sequence
  Description of Artificial Sequence: Synthetic oligonucleotide
uguuuucaagagcugcagu

SEQ ID NO: 2085202 - RNA, 19 nt, Artificial Sequence
  Description of Artificial Sequence: Synthetic oligonucleotide
cuugaacucagaaauuuaa

SEQ ID NO: 2085203 - RNA, 19 nt, Artificial Sequence
  Description of Artificial Sequence: Synthetic oligonucleotide
gacgcuuaugcucacaaua

SEQ ID NO: 2085204 - RNA, 19 nt, Artificial Sequence
  Description of Artificial Sequence: Synthetic oligonucleotide
gauaugcuugaacucagaa

SEQ ID NO: 2085205 - RNA, 19 nt, Artificial Sequence
  Description of Artificial Sequence: Synthetic oligonucleotide
uucuaucuggauuaugcuu

SEQ ID NO: 2085206 - RNA, 19 nt, Artificial Sequence
  Description of Artificial Sequence: Synthetic oligonucleotide
acuuccuuuuggcagguga

SEQ ID NO: 2085207 - RNA, 19 nt, Artificial Sequence
  Description of Artificial Sequence: Synthetic oligonucleotide
aacacuaaccugguuaaua

SEQ ID NO: 2085208 - RNA, 19 nt, Artificial Sequence
  Description of Artificial Sequence: Synthetic oligonucleotide
acacuaaccugguuaauau

SEQ ID NO: 2085209 - RNA, 19 nt, Artificial Sequence
  Description of Artificial Sequence: Synthetic oligonucleotide
uuuccccuaaguagguuga

SEQ ID NO: 2085210 - RNA, 19 nt, Artificial Sequence
  Description of Artificial Sequence: Synthetic oligonucleotide
uucaagucucaaugacagg

SEQ ID NO: 2085211 - RNA, 19 nt, Artificial Sequence
  Description of Artificial Sequence: Synthetic oligonucleotide
gauagccugugguaugaug

SEQ ID NO: 2085212 - RNA, 19 nt, Artificial Sequence
  Description of Artificial Sequence: Synthetic oligonucleotide
agaagucacacaaugaauu

SEQ ID NO: 2085213 - RNA, 19 nt, Artificial Sequence
  Description of Artificial Sequence: Synthetic oligonucleotide
aaacccaggcagccucuac

SEQ ID NO: 2085214 - RNA, 19 nt, Artificial Sequence
  Description of Artificial Sequence: Synthetic oligonucleotide
gcucuuagcauccugugcc

SEQ ID NO: 2085215 - RNA, 19 nt, Artificial Sequence
  Description of Artificial Sequence: Synthetic oligonucleotide
ugccagucuaccuagcaaa

SEQ ID NO: 2085216 - RNA, 19 nt, Artificial Sequence
  Description of Artificial Sequence: Synthetic oligonucleotide
ugcuguacccggaccaaag

SEQ ID NO: 2085217 - RNA, 19 nt, Artificial Sequence
  Description of Artificial Sequence: Synthetic oligonucleotide
uggucccugguuauacggg

SEQ ID NO: 2085218 - RNA, 19 nt, Artificial Sequence
  Description of Artificial Sequence: Synthetic oligonucleotide
agcaaaggcauuagcagag

SEQ ID NO: 2085219 - RNA, 19 nt, Artificial Sequence
  Description of Artificial Sequence: Synthetic oligonucleotide
augccaagcaugcugcuca

SEQ ID NO: 2085220 - RNA, 19 nt, Artificial Sequence
  Description of Artificial Sequence: Synthetic oligonucleotide
aucagcuguuaauucuauc

SEQ ID NO: 2085221 - RNA, 19 nt, Artificial Sequence
  Description of Artificial Sequence: Synthetic oligonucleotide
agucacacaaugaauugug

SEQ ID NO: 2085222 - RNA, 19 nt, Artificial Sequence
  Description of Artificial Sequence: Synthetic oligonucleotide
aucaaaagggcaauuuaca

SEQ ID NO: 2085223 - RNA, 19 nt, Artificial Sequence
  Description of Artificial Sequence: Synthetic oligonucleotide
cuucugguagacaggggag

SEQ ID NO: 2085224 - RNA, 19 nt, Artificial Sequence
  Description of Artificial Sequence: Synthetic oligonucleotide
aacccaggcagccucuacu

SEQ ID NO: 2085225 - RNA, 19 nt, Artificial Sequence
  Description of Artificial Sequence: Synthetic oligonucleotide
auaagcaguccacagcuua

SEQ ID NO: 2085226 - RNA, 19 nt, Artificial Sequence
  Description of Artificial Sequence: Synthetic oligonucleotide
agauggucccugguuauac

SEQ ID NO: 2085227 - RNA, 19 nt, Artificial Sequence
  Description of Artificial Sequence: Synthetic oligonucleotide
uaugcucacaauagcuauc

SEQ ID NO: 2085228 - RNA, 19 nt, Artificial Sequence
  Description of Artificial Sequence: Synthetic oligonucleotide
accuuuuagaugagaaguc

SEQ ID NO: 2085229 - RNA, 19 nt, Artificial Sequence
  Description of Artificial Sequence: Synthetic oligonucleotide
ccuagcuacugcuucaucc

SEQ ID NO: 2085230 - RNA, 19 nt, Artificial Sequence
  Description of Artificial Sequence: Synthetic oligonucleotide
uuuucagauggucccuggu

SEQ ID NO: 2085231 - RNA, 19 nt, Artificial Sequence
  Description of Artificial Sequence: Synthetic oligonucleotide
guuuucaagagcugcagua

SEQ ID NO: 2085232 - RNA, 19 nt, Artificial Sequence
  Description of Artificial Sequence: Synthetic oligonucleotide
cuuuucagauggucccugg

SEQ ID NO: 2085233 - RNA, 19 nt, Artificial Sequence
  Description of Artificial Sequence: Synthetic oligonucleotide
cucaacacuaaccugguua

SEQ ID NO: 2085234 - RNA, 19 nt, Artificial Sequence
  Description of Artificial Sequence: Synthetic oligonucleotide
gaucccaagcaaaagccac

SEQ ID NO: 2085235 - RNA, 19 nt, Artificial Sequence
  Description of Artificial Sequence: Synthetic oligonucleotide
acuucugugcccaccacuc

SEQ ID NO: 2085236 - RNA, 19 nt, Artificial Sequence
  Description of Artificial Sequence: Synthetic oligonucleotide
uuucagauggucccugguu

SEQ ID NO: 2085237 - RNA, 19 nt, Artificial Sequence
  Description of Artificial Sequence: Synthetic oligonucleotide
gacugcacaaccacauaag

SEQ ID NO: 2085238 - RNA, 19 nt, Artificial Sequence
  Description of Artificial Sequence: Synthetic oligonucleotide
agacggacagacaggacac

SEQ ID NO: 2085239 - RNA, 19 nt, Artificial Sequence
  Description of Artificial Sequence: Synthetic oligonucleotide
cugugccuuaacaucacac

SEQ ID NO: 2085240 - RNA, 19 nt, Artificial Sequence
  Description of Artificial Sequence: Synthetic oligonucleotide
aaguuccugcuaaacacug

SEQ ID NO: 2085241 - RNA, 19 nt, Artificial Sequence
  Description of Artificial Sequence: Synthetic oligonucleotide
aggaaaacugcuaguuuuc

SEQ ID NO: 2085242 - RNA, 19 nt, Artificial Sequence
  Description of Artificial Sequence: Synthetic oligonucleotide
gauuaugcuucugguagac

SEQ ID NO: 2085243 - RNA, 19 nt, Artificial Sequence
  Description of Artificial Sequence: Synthetic oligonucleotide
agggguguuuucaagagcu

SEQ ID NO: 2085244 - RNA, 19 nt, Artificial Sequence
  Description of Artificial Sequence: Synthetic oligonucleotide
ucagaaguuccugcuaaac

SEQ ID NO: 2085245 - RNA, 19 nt, Artificial Sequence
  Description of Artificial Sequence: Synthetic oligonucleotide
uaagcaguccacagcuuaa

SEQ ID NO: 2085246 - RNA, 19 nt, Artificial Sequence
  Description of Artificial Sequence: Synthetic oligonucleotide
ugguuguagaaagaaguau

SEQ ID NO: 2085247 - RNA, 19 nt, Artificial Sequence
  Description of Artificial Sequence: Synthetic oligonucleotide
uaguaacauagcucuuagc

SEQ ID NO: 2085248 - RNA, 19 nt, Artificial Sequence
  Description of Artificial Sequence: Synthetic oligonucleotide
aggaauguguugagagacc

SEQ ID NO: 2085249 - RNA, 19 nt, Artificial Sequence
  Description of Artificial Sequence: Synthetic oligonucleotide
ugcuugaacucagaaauuu

SEQ ID NO: 2085250 - RNA, 19 nt, Artificial Sequence
  Description of Artificial Sequence: Synthetic oligonucleotide
uccacagcuuaauacugaa

SEQ ID NO: 2085251 - RNA, 19 nt, Artificial Sequence
  Description of Artificial Sequence: Synthetic oligonucleotide
aucccaagcaaaagccacc

SEQ ID NO: 2085252 - RNA, 19 nt, Artificial Sequence
  Description of Artificial Sequence: Synthetic oligonucleotide
aagcccuuuccccuaagua

SEQ ID NO: 2085253 - RNA, 19 nt, Artificial Sequence
  Description of Artificial Sequence: Synthetic oligonucleotide
gagcucaugaaaugggaaa

SEQ ID NO: 2085254 - RNA, 19 nt, Artificial Sequence
  Description of Artificial Sequence: Synthetic oligonucleotide
ugcaguagcacaggauagc

SEQ ID NO: 2085255 - RNA, 19 nt, Artificial Sequence
  Description of Artificial Sequence: Synthetic oligonucleotide
aguaguaacauagcucuua

SEQ ID NO: 2085256 - RNA, 19 nt, Artificial Sequence
  Description of Artificial Sequence: Synthetic oligonucleotide
cucaaugacaggaaugugu

SEQ ID NO: 2085257 - RNA, 19 nt, Artificial Sequence
  Description of Artificial Sequence: Synthetic oligonucleotide
acaggggaggcaagcaacc

SEQ ID NO: 2085258 - RNA, 19 nt, Artificial Sequence
  Description of Artificial Sequence: Synthetic oligonucleotide
ugccuuaacaucacaccua

SEQ ID NO: 2085259 - RNA, 19 nt, Artificial Sequence
  Description of Artificial Sequence: Synthetic oligonucleotide
gguuguagaaagaaguauc

SEQ ID NO: 2085260 - RNA, 19 nt, Artificial Sequence
  Description of Artificial Sequence: Synthetic oligonucleotide
agcuuaauacugaagcccu

SEQ ID NO: 2085261 - RNA, 19 nt, Artificial Sequence
  Description of Artificial Sequence: Synthetic oligonucleotide
uguucugacaaaggacaga

SEQ ID NO: 2085262 - RNA, 19 nt, Artificial Sequence
  Description of Artificial Sequence: Synthetic oligonucleotide
cacuuugguuucaaagcac

SEQ ID NO: 2085263 - RNA, 19 nt, Artificial Sequence
  Description of Artificial Sequence: Synthetic oligonucleotide
agucucaaugacaggaaug

SEQ ID NO: 2085264 - RNA, 19 nt, Artificial Sequence
  Description of Artificial Sequence: Synthetic oligonucleotide
uagcuacugcuucaucccc

SEQ ID NO: 2085265 - RNA, 19 nt, Artificial Sequence
  Description of Artificial Sequence: Synthetic oligonucleotide
acaucacaccuacaauuca

SEQ ID NO: 2085266 - RNA, 19 nt, Artificial Sequence
  Description of Artificial Sequence: Synthetic oligonucleotide
cuuaugcucacaauagcua

SEQ ID NO: 2085267 - RNA, 19 nt, Artificial Sequence
  Description of Artificial Sequence: Synthetic oligonucleotide
acgcuuaugcucacaauag

SEQ ID NO: 2085268 - RNA, 19 nt, Artificial Sequence
  Description of Artificial Sequence: Synthetic oligonucleotide
gaggcaagcaaccuagcua

SEQ ID NO: 2085269 - RNA, 19 nt, Artificial Sequence
  Description of Artificial Sequence: Synthetic oligonucleotide
guagaaagaaguaucugua

SEQ ID NO: 2085270 - RNA, 19 nt, Artificial Sequence
  Description of Artificial Sequence: Synthetic oligonucleotide
gaugccagucuaccuagca

SEQ ID NO: 2085271 - RNA, 19 nt, Artificial Sequence
  Description of Artificial Sequence: Synthetic oligonucleotide
caagcaugcugcucagaag

SEQ ID NO: 2085272 - RNA, 19 nt, Artificial Sequence
  Description of Artificial Sequence: Synthetic oligonucleotide
gcuaguuuucugcuguacc

SEQ ID NO: 2085273 - RNA, 19 nt, Artificial Sequence
  Description of Artificial Sequence: Synthetic oligonucleotide
gugguaugaugcuuaauaa

SEQ ID NO: 2085274 - RNA, 19 nt, Artificial Sequence
  Description of Artificial Sequence: Synthetic oligonucleotide
uagcucuuagcauccugug

SEQ ID NO: 2085275 - RNA, 19 nt, Artificial Sequence
  Description of Artificial Sequence: Synthetic oligonucleotide
uaauucuaucuggauuaug

SEQ ID NO: 2085276 - RNA, 19 nt, Artificial Sequence
  Description of Artificial Sequence: Synthetic oligonucleotide
ccaccaaccuuuuagauga

SEQ ID NO: 2085277 - RNA, 19 nt, Artificial Sequence
  Description of Artificial Sequence: Synthetic oligonucleotide
auagcucuuagcauccugu

SEQ ID NO: 2085278 - RNA, 19 nt, Artificial Sequence
  Description of Artificial Sequence: Synthetic oligonucleotide
ggaaaucagcuguuaauuc

SEQ ID NO: 2085279 - RNA, 19 nt, Artificial Sequence
  Description of Artificial Sequence: Synthetic oligonucleotide
uucugacaaaggacagaug

SEQ ID NO: 2085280 - RNA, 19 nt, Artificial Sequence
  Description of Artificial Sequence: Synthetic oligonucleotide
cacaaccacauaagcaguc

SEQ ID NO: 2085281 - RNA, 19 nt, Artificial Sequence
  Description of Artificial Sequence: Synthetic oligonucleotide
gaauugugugacugcacaa

SEQ ID NO: 2085282 - RNA, 19 nt, Artificial Sequence
  Description of Artificial Sequence: Synthetic oligonucleotide
ugcuaaacacugacgcuua

SEQ ID NO: 2085283 - RNA, 19 nt, Artificial Sequence
  Description of Artificial Sequence: Synthetic oligonucleotide
ccaagcaaaagccaccaac

SEQ ID NO: 2085284 - RNA, 19 nt, Artificial Sequence
  Description of Artificial Sequence: Synthetic oligonucleotide
gcaguccacagcuuaauac

SEQ ID NO: 2085285 - RNA, 19 nt, Artificial Sequence
  Description of Artificial Sequence: Synthetic oligonucleotide
uuacagaagggguguuuuc

SEQ ID NO: 2085286 - RNA, 19 nt, Artificial Sequence
  Description of Artificial Sequence: Synthetic oligonucleotide
cugaauuugguuguagaaa

SEQ ID NO: 2085287 - RNA, 19 nt, Artificial Sequence
  Description of Artificial Sequence: Synthetic oligonucleotide
aaagggcaauuuacaaacu

SEQ ID NO: 2085288 - RNA, 19 nt, Artificial Sequence
  Description of Artificial Sequence: Synthetic oligonucleotide
aauagcuaucuggcuaaaa

SEQ ID NO: 2085289 - RNA, 19 nt, Artificial Sequence
  Description of Artificial Sequence: Synthetic oligonucleotide
aaugggaaaucagcuguua

SEQ ID NO: 2085290 - RNA, 19 nt, Artificial Sequence
  Description of Artificial Sequence: Synthetic oligonucleotide
aacucaacacuaaccuggu

SEQ ID NO: 2085291 - RNA, 19 nt, Artificial Sequence
  Description of Artificial Sequence: Synthetic oligonucleotide
ggucccugguuauacgggg

SEQ ID NO: 2085292 - RNA, 19 nt, Artificial Sequence
  Description of Artificial Sequence: Synthetic oligonucleotide
cagcaaaggcauuagcaga

SEQ ID NO: 2085293 - RNA, 19 nt, Artificial Sequence
  Description of Artificial Sequence: Synthetic oligonucleotide
ugauugagcuccagguguu

SEQ ID NO: 2085294 - RNA, 19 nt, Artificial Sequence
  Description of Artificial Sequence: Synthetic oligonucleotide
ucagauggucccugguuau

SEQ ID NO: 2085295 - RNA, 19 nt, Artificial Sequence
  Description of Artificial Sequence: Synthetic oligonucleotide
gacaggggaggcaagcaac

SEQ ID NO: 2085296 - RNA, 19 nt, Artificial Sequence
  Description of Artificial Sequence: Synthetic oligonucleotide
agcucaugaaaugggaaau

SEQ ID NO: 2085297 - RNA, 19 nt, Artificial Sequence
  Description of Artificial Sequence: Synthetic oligonucleotide
cauuagcagagcacugauc

SEQ ID NO: 2085298 - RNA, 19 nt, Artificial Sequence
  Description of Artificial Sequence: Synthetic oligonucleotide
uacuuggaugccagucuac

SEQ ID NO: 2085299 - RNA, 19 nt, Artificial Sequence
  Description of Artificial Sequence: Synthetic oligonucleotide
accacauaagcaguccaca

SEQ ID NO: 2085300 - RNA, 19 nt, Artificial Sequence
  Description of Artificial Sequence: Synthetic oligonucleotide
uacccggaccaaaggagcu

SEQ ID NO: 2085301 - RNA, 19 nt, Artificial Sequence
  Description of Artificial Sequence: Synthetic oligonucleotide
aaccugguuaauauauaua

SEQ ID NO: 2085302 - RNA, 19 nt, Artificial Sequence
  Description of Artificial Sequence: Synthetic oligonucleotide
guaacauagcucuuagcau

SEQ ID NO: 2085303 - RNA, 19 nt, Artificial Sequence
  Description of Artificial Sequence: Synthetic oligonucleotide
caucacaccuacaauucaa

SEQ ID NO: 2085304 - RNA, 19 nt, Artificial Sequence
  Description of Artificial Sequence: Synthetic oligonucleotide
gcuucugguagacagggga

SEQ ID NO: 2085305 - RNA, 19 nt, Artificial Sequence
  Description of Artificial Sequence: Synthetic oligonucleotide
auccugugccuuaacauca

SEQ ID NO: 2085306 - RNA, 19 nt, Artificial Sequence
  Description of Artificial Sequence: Synthetic oligonucleotide
acacugacgcuuaugcuca

SEQ ID NO: 2085307 - RNA, 19 nt, Artificial Sequence
  Description of Artificial Sequence: Synthetic oligonucleotide
cucuacuuggaugccaguc

SEQ ID NO: 2085308 - RNA, 19 nt, Artificial Sequence
  Description of Artificial Sequence: Synthetic oligonucleotide
gguugauugagcuccaggu

SEQ ID NO: 2085309 - RNA, 19 nt, Artificial Sequence
  Description of Artificial Sequence: Synthetic oligonucleotide
agcuccagguguuuggguu

SEQ ID NO: 2085310 - RNA, 19 nt, Artificial Sequence
  Description of Artificial Sequence: Synthetic oligonucleotide
caaaggcauuagcagagca

SEQ ID NO: 2085311 - RNA, 19 nt, Artificial Sequence
  Description of Artificial Sequence: Synthetic oligonucleotide
ucccuuagcuucguauucu

SEQ ID NO: 2085312 - RNA, 19 nt, Artificial Sequence
  Description of Artificial Sequence: Synthetic oligonucleotide
gcugcucagaaguuccugc

SEQ ID NO: 2085313 - RNA, 19 nt, Artificial Sequence
  Description of Artificial Sequence: Synthetic oligonucleotide
ugcucacaauagcuaucug

SEQ ID NO: 2085314 - RNA, 19 nt, Artificial Sequence
  Description of Artificial Sequence: Synthetic oligonucleotide
ucaaagcacagagcagggu

SEQ ID NO: 2085315 - RNA, 19 nt, Artificial Sequence
  Description of Artificial Sequence: Synthetic oligonucleotide
ggcaauuuacaaacuaaga

SEQ ID NO: 2085316 - RNA, 19 nt, Artificial Sequence
  Description of Artificial Sequence: Synthetic oligonucleotide
gccuuaacaucacaccuac

SEQ ID NO: 2085317 - RNA, 19 nt, Artificial Sequence
  Description of Artificial Sequence: Synthetic oligonucleotide
caggauagccugugguaug

SEQ ID NO: 2085318 - RNA, 19 nt, Artificial Sequence
  Description of Artificial Sequence: Synthetic oligonucleotide
aaaugggaaaucagcuguu

SEQ ID NO: 2085319 - RNA, 19 nt, Artificial Sequence
  Description of Artificial Sequence: Synthetic oligonucleotide
uugccuguuccuguucuga

SEQ ID NO: 2085320 - RNA, 19 nt, Artificial Sequence
  Description of Artificial Sequence: Synthetic oligonucleotide
ugcuaguuuucugcuguac

SEQ ID NO: 2085321 - RNA, 19 nt, Artificial Sequence
  Description of Artificial Sequence: Synthetic oligonucleotide
uagacaggggaggcaagca

SEQ ID NO: 2085322 - RNA, 19 nt, Artificial Sequence
  Description of Artificial Sequence: Synthetic oligonucleotide
uccugugccuuaacaucac

SEQ ID NO: 2085323 - RNA, 19 nt, Artificial Sequence
  Description of Artificial Sequence: Synthetic oligonucleotide
uuagcauccugugccuuaa

SEQ ID NO: 2085324 - RNA, 19 nt, Artificial Sequence
  Description of Artificial Sequence: Synthetic oligonucleotide
gugccuuaacaucacaccu

SEQ ID NO: 2085325 - RNA, 19 nt, Artificial Sequence
  Description of Artificial Sequence: Synthetic oligonucleotide
augccagucuaccuagcaa

SEQ ID NO: 2085326 - RNA, 19 nt, Artificial Sequence
  Description of Artificial Sequence: Synthetic oligonucleotide
agacaggggaggcaagcaa

SEQ ID NO: 2085327 - RNA, 19 nt, Artificial Sequence
  Description of Artificial Sequence: Synthetic oligonucleotide
caugauuagacacuuccuu

SEQ ID NO: 2085328 - RNA, 19 nt, Artificial Sequence
  Description of Artificial Sequence: Synthetic oligonucleotide
caagagcugcaguagcaca

SEQ ID NO: 2085329 - RNA, 19 nt, Artificial Sequence
  Description of Artificial Sequence: Synthetic oligonucleotide
ugagacggacagacaggac

SEQ ID NO: 2085330 - RNA, 19 nt, Artificial Sequence
  Description of Artificial Sequence: Synthetic oligonucleotide
caccuacaauucaagucuc

SEQ ID NO: 2085331 - RNA, 19 nt, Artificial Sequence
  Description of Artificial Sequence: Synthetic oligonucleotide
accuagcuacugcuucauc

SEQ ID NO: 2085332 - RNA, 19 nt, Artificial Sequence
  Description of Artificial Sequence: Synthetic oligonucleotide
ggugagacggacagacagg

SEQ ID NO: 2085333 - RNA, 19 nt, Artificial Sequence
  Description of Artificial Sequence: Synthetic oligonucleotide
aauugacuuuucagauggu

SEQ ID NO: 2085334 - RNA, 19 nt, Artificial Sequence
  Description of Artificial Sequence: Synthetic oligonucleotide
gcuguacccggaccaaagg

SEQ ID NO: 2085335 - RNA, 19 nt, Artificial Sequence
  Description of Artificial Sequence: Synthetic oligonucleotide
cacugaucccaagcaaaag

SEQ ID NO: 2085336 - RNA, 19 nt, Artificial Sequence
  Description of Artificial Sequence: Synthetic oligonucleotide
ggcguuuacagaaggggug

SEQ ID NO: 2085337 - RNA, 19 nt, Artificial Sequence
  Description of Artificial Sequence: Synthetic oligonucleotide
cuguacccggaccaaagga

SEQ ID NO: 2085338 - RNA, 19 nt, Artificial Sequence
  Description of Artificial Sequence: Synthetic oligonucleotide
uagcacaggauagccugug

SEQ ID NO: 2085339 - RNA, 19 nt, Artificial Sequence
  Description of Artificial Sequence: Synthetic oligonucleotide
aggcguuuacagaaggggu

SEQ ID NO: 2085340 - RNA, 19 nt, Artificial Sequence
  Description of Artificial Sequence: Synthetic oligonucleotide
agcaggguugccacacuuc

SEQ ID NO: 2085341 - RNA, 19 nt, Artificial Sequence
  Description of Artificial Sequence: Synthetic oligonucleotide
ugccaagcaugcugcucag

SEQ ID NO: 2085342 - RNA, 19 nt, Artificial Sequence
  Description of Artificial Sequence: Synthetic oligonucleotide
aggauagccugugguauga

SEQ ID NO: 2085343 - RNA, 19 nt, Artificial Sequence
  Description of Artificial Sequence: Synthetic oligonucleotide
caaccuagcuacugcuuca

SEQ ID NO: 2085344 - RNA, 19 nt, Artificial Sequence
  Description of Artificial Sequence: Synthetic oligonucleotide
guucugacaaaggacagau

SEQ ID NO: 2085345 - RNA, 19 nt, Artificial Sequence
  Description of Artificial Sequence: Synthetic oligonucleotide
caaccacauaagcagucca

SEQ ID NO: 2085346 - RNA, 19 nt, Artificial Sequence
  Description of Artificial Sequence: Synthetic oligonucleotide
auguguugagagaccagca

SEQ ID NO: 2085347 - RNA, 19 nt, Artificial Sequence
  Description of Artificial Sequence: Synthetic oligonucleotide
aagcaguccacagcuuaau

SEQ ID NO: 2085348 - RNA, 19 nt, Artificial Sequence
  Description of Artificial Sequence: Synthetic oligonucleotide
ggcagccucuacuuggaug

SEQ ID NO: 2085349 - RNA, 19 nt, Artificial Sequence
  Description of Artificial Sequence: Synthetic oligonucleotide
cuggauuaugcuucuggua

SEQ ID NO: 2085350 - RNA, 19 nt, Artificial Sequence
  Description of Artificial Sequence: Synthetic oligonucleotide
uuuuggcaggugagacgga

SEQ ID NO: 2085351 - RNA, 19 nt, Artificial Sequence
  Description of Artificial Sequence: Synthetic oligonucleotide
gcaguagcacaggauagcc

SEQ ID NO: 2085352 - RNA, 19 nt, Artificial Sequence
  Description of Artificial Sequence: Synthetic oligonucleotide
aaccuagcuacugcuucau

SEQ ID NO: 2085353 - RNA, 19 nt, Artificial Sequence
  Description of Artificial Sequence: Synthetic oligonucleotide
auuaugcuucugguagaca

SEQ ID NO: 2085354 - RNA, 19 nt, Artificial Sequence
  Description of Artificial Sequence: Synthetic oligonucleotide
gcuguuaauucuaucugga

SEQ ID NO: 2085355 - RNA, 19 nt, Artificial Sequence
  Description of Artificial Sequence: Synthetic oligonucleotide
ugacgcuuaugcucacaau

SEQ ID NO: 2085356 - RNA, 19 nt, Artificial Sequence
  Description of Artificial Sequence: Synthetic oligonucleotide
cccaaaggcguuuacagaa

SEQ ID NO: 2085357 - RNA, 19 nt, Artificial Sequence
  Description of Artificial Sequence: Synthetic oligonucleotide
aggcuggucaguguccaug

SEQ ID NO: 2085358 - RNA, 19 nt, Artificial Sequence
  Description of Artificial Sequence: Synthetic oligonucleotide
agcaguccacagcuuaaua

SEQ ID NO: 2085359 - RNA, 19 nt, Artificial Sequence
  Description of Artificial Sequence: Synthetic oligonucleotide
uagguugauugagcuccag

SEQ ID NO: 2085360 - RNA, 19 nt, Artificial Sequence
  Description of Artificial Sequence: Synthetic oligonucleotide
gcuucguauucuguaaaac

SEQ ID NO: 2085361 - RNA, 19 nt, Artificial Sequence
  Description of Artificial Sequence: Synthetic oligonucleotide
cacaggauagccuguggua

SEQ ID NO: 2085362 - RNA, 19 nt, Artificial Sequence
  Description of Artificial Sequence: Synthetic oligonucleotide
ggauuaugcuucugguaga

SEQ ID NO: 2085363 - RNA, 19 nt, Artificial Sequence
  Description of Artificial Sequence: Synthetic oligonucleotide
uaucuggauuaugcuucug

SEQ ID NO: 2085364 - RNA, 19 nt, Artificial Sequence
  Description of Artificial Sequence: Synthetic oligonucleotide
ucugcuguacccggaccaa

SEQ ID NO: 2085365 - RNA, 19 nt, Artificial Sequence
  Description of Artificial Sequence: Synthetic oligonucleotide
cuuagcauccugugccuua

SEQ ID NO: 2085366 - RNA, 19 nt, Artificial Sequence
  Description of Artificial Sequence: Synthetic oligonucleotide
aggggaggcaagcaaccua

SEQ ID NO: 2085367 - RNA, 19 nt, Artificial Sequence
  Description of Artificial Sequence: Synthetic oligonucleotide
caggguugccacacuucug

SEQ ID NO: 2085368 - RNA, 19 nt, Artificial Sequence
  Description of Artificial Sequence: Synthetic oligonucleotide
agauaugcuugaacucaga

SEQ ID NO: 2085369 - RNA, 19 nt, Artificial Sequence
  Description of Artificial Sequence: Synthetic oligonucleotide
gcucagaaguuccugcuaa

SEQ ID NO: 2085370 - RNA, 19 nt, Artificial Sequence
  Description of Artificial Sequence: Synthetic oligonucleotide
agaugagaagucacacaau

SEQ ID NO: 2085371 - RNA, 19 nt, Artificial Sequence
  Description of Artificial Sequence: Synthetic oligonucleotide
gcagaacucauugaacuaa

SEQ ID NO: 2085372 - RNA, 19 nt, Artificial Sequence
  Description of Artificial Sequence: Synthetic oligonucleotide
guaucuguaacaggcuggu

SEQ ID NO: 2085373 - RNA, 19 nt, Artificial Sequence
  Description of Artificial Sequence: Synthetic oligonucleotide
acccggaccaaaggagcuc

SEQ ID NO: 2085374 - RNA, 19 nt, Artificial Sequence
  Description of Artificial Sequence: Synthetic oligonucleotide
gcaagcaaccuagcuacug

SEQ ID NO: 2085375 - RNA, 19 nt, Artificial Sequence
  Description of Artificial Sequence: Synthetic oligonucleotide
gcuuaugcucacaauagcu

SEQ ID NO: 2085376 - RNA, 19 nt, Artificial Sequence
  Description of Artificial Sequence: Synthetic oligonucleotide
caguguccaugauuagaca

SEQ ID NO: 2085377 - RNA, 19 nt, Artificial Sequence
  Description of Artificial Sequence: Synthetic oligonucleotide
gaagcccuuuccccuaagu

SEQ ID NO: 2085378 - RNA, 19 nt, Artificial Sequence
  Description of Artificial Sequence: Synthetic oligonucleotide
accuacaauucaagucuca

SEQ ID NO: 2085379 - RNA, 19 nt, Artificial Sequence
  Description of Artificial Sequence: Synthetic oligonucleotide
ggucaguguccaugauuag

SEQ ID NO: 2085380 - RNA, 19 nt, Artificial Sequence
  Description of Artificial Sequence: Synthetic oligonucleotide
ccacagcuuaauacugaag

SEQ ID NO: 2085381 - RNA, 19 nt, Artificial Sequence
  Description of Artificial Sequence: Synthetic oligonucleotide
cacuaaccugguuaauaua

SEQ ID NO: 2085382 - RNA, 19 nt, Artificial Sequence
  Description of Artificial Sequence: Synthetic oligonucleotide
aggcauuagcagagcacug

SEQ ID NO: 2085383 - RNA, 19 nt, Artificial Sequence
  Description of Artificial Sequence: Synthetic oligonucleotide
cucagaaguuccugcuaaa

SEQ ID NO: 2085384 - RNA, 19 nt, Artificial Sequence
  Description of Artificial Sequence: Synthetic oligonucleotide
uaucuguaacaggcugguc

SEQ ID NO: 2085385 - RNA, 19 nt, Artificial Sequence
  Description of Artificial Sequence: Synthetic oligonucleotide
cguauucuguaaaacagua

SEQ ID NO: 2085386 - RNA, 19 nt, Artificial Sequence
  Description of Artificial Sequence: Synthetic oligonucleotide
cuaucuggauuaugcuucu

SEQ ID NO: 2085387 - RNA, 19 nt, Artificial Sequence
  Description of Artificial Sequence: Synthetic oligonucleotide
uagcauccugugccuuaac

SEQ ID NO: 2085388 - RNA, 19 nt, Artificial Sequence
  Description of Artificial Sequence: Synthetic oligonucleotide
cuguuaauucuaucuggau

SEQ ID NO: 2085389 - RNA, 19 nt, Artificial Sequence
  Description of Artificial Sequence: Synthetic oligonucleotide
ucauccccaaaggcguuua

SEQ ID NO: 2085390 - RNA, 19 nt, Artificial Sequence
  Description of Artificial Sequence: Synthetic oligonucleotide
uucauccccaaaggcguuu

SEQ ID NO: 2085391 - RNA, 19 nt, Artificial Sequence
  Description of Artificial Sequence: Synthetic oligonucleotide
guuuucugcuguacccgga

SEQ ID NO: 2085392 - RNA, 19 nt, Artificial Sequence
  Description of Artificial Sequence: Synthetic oligonucleotide
acucaacacuaaccugguu

SEQ ID NO: 2085393 - RNA, 19 nt, Artificial Sequence
  Description of Artificial Sequence: Synthetic oligonucleotide
caccaaccuuuuagaugag

SEQ ID NO: 2085394 - RNA, 19 nt, Artificial Sequence
  Description of Artificial Sequence: Synthetic oligonucleotide
cauccccaaaggcguuuac

SEQ ID NO: 2085395 - RNA, 19 nt, Artificial Sequence
  Description of Artificial Sequence: Synthetic oligonucleotide
agccucuacuuggaugcca

SEQ ID NO: 2085396 - RNA, 19 nt, Artificial Sequence
  Description of Artificial Sequence: Synthetic oligonucleotide
acugacgcuuaugcucaca

SEQ ID NO: 2085397 - RNA, 19 nt, Artificial Sequence
  Description of Artificial Sequence: Synthetic oligonucleotide
cuuaauacugaagcccuuu

SEQ ID NO: 2085398 - RNA, 19 nt, Artificial Sequence
  Description of Artificial Sequence: Synthetic oligonucleotide
caggcagccucuacuugga

SEQ ID NO: 2085399 - RNA, 19 nt, Artificial Sequence
  Description of Artificial Sequence: Synthetic oligonucleotide
gacuuuucagauggucccu

SEQ ID NO: 2085400 - RNA, 19 nt, Artificial Sequence
  Description of Artificial Sequence: Synthetic oligonucleotide
cgcuuaugcucacaauagc

SEQ ID NO: 2085401 - RNA, 19 nt, Artificial Sequence
  Description of Artificial Sequence: Synthetic oligonucleotide
gcuucauccccaaaggcgu

SEQ ID NO: 2085402 - RNA, 19 nt, Artificial Sequence
  Description of Artificial Sequence: Synthetic oligonucleotide
gcaaaggcauuagcagagc

SEQ ID NO: 2085403 - RNA, 19 nt, Artificial Sequence
  Description of Artificial Sequence: Synthetic oligonucleotide
cucucccuuagcuucguau

SEQ ID NO: 2085404 - RNA, 19 nt, Artificial Sequence
  Description of Artificial Sequence: Synthetic oligonucleotide
ggaggcaagcaaccuagcu

SEQ ID NO: 2085405 - RNA, 19 nt, Artificial Sequence
  Description of Artificial Sequence: Synthetic oligonucleotide
gucacacaaugaauugugu

SEQ ID NO: 2085406 - RNA, 19 nt, Artificial Sequence
  Description of Artificial Sequence: Synthetic oligonucleotide
guagguugauugagcucca

SEQ ID NO: 2085407 - RNA, 19 nt, Artificial Sequence
  Description of Artificial Sequence: Synthetic oligonucleotide
gacggacagacaggacaca

SEQ ID NO: 2085408 - RNA, 19 nt, Artificial Sequence
  Description of Artificial Sequence: Synthetic oligonucleotide
uccagguguuuggguuugc

SEQ ID NO: 2085409 - RNA, 19 nt, Artificial Sequence
  Description of Artificial Sequence: Synthetic oligonucleotide
gcaggguugccacacuucu

SEQ ID NO: 2085410 - RNA, 19 nt, Artificial Sequence
  Description of Artificial Sequence: Synthetic oligonucleotide
cccuaaguagguugauuga

SEQ ID NO: 2085411 - RNA, 19 nt, Artificial Sequence
  Description of Artificial Sequence: Synthetic oligonucleotide
uuccccuaaguagguugau

SEQ ID NO: 2085412 - RNA, 19 nt, Artificial Sequence
  Description of Artificial Sequence: Synthetic oligonucleotide
ggguugccacacuucugug

SEQ ID NO: 2085413 - RNA, 19 nt, Artificial Sequence
  Description of Artificial Sequence: Synthetic oligonucleotide
cacuucugugcccaccacu

SEQ ID NO: 2085414 - RNA, 19 nt, Artificial Sequence
  Description of Artificial Sequence: Synthetic oligonucleotide
cacugacgcuuaugcucac

SEQ ID NO: 2085415 - RNA, 19 nt, Artificial Sequence
  Description of Artificial Sequence: Synthetic oligonucleotide
caguagcacaggauagccu

SEQ ID NO: 2085416 - RNA, 19 nt, Artificial Sequence
  Description of Artificial Sequence: Synthetic oligonucleotide
gcacaggauagccuguggu

SEQ ID NO: 2085417 - RNA, 19 nt, Artificial Sequence
  Description of Artificial Sequence: Synthetic oligonucleotide
gcuugaacucagaaauuua

SEQ ID NO: 2085418 - RNA, 19 nt, Artificial Sequence
  Description of Artificial Sequence: Synthetic oligonucleotide
agcaugcugcucagaaguu

SEQ ID NO: 2085419 - RNA, 19 nt, Artificial Sequence
  Description of Artificial Sequence: Synthetic oligonucleotide
guccaugauuagacacuuc

SEQ ID NO: 2085420 - RNA, 19 nt, Artificial Sequence
  Description of Artificial Sequence: Synthetic oligonucleotide
cagccucuacuuggaugcc

SEQ ID NO: 2085421 - RNA, 19 nt, Artificial Sequence
  Description of Artificial Sequence: Synthetic oligonucleotide
gagcuccagguguuugggu

SEQ ID NO: 2085422 - RNA, 19 nt, Artificial Sequence
  Description of Artificial Sequence: Synthetic oligonucleotide
gggguguuuucaagagcug

SEQ ID NO: 2085423 - RNA, 19 nt, Artificial Sequence
  Description of Artificial Sequence: Synthetic oligonucleotide
aggcagccucuacuuggau

SEQ ID NO: 2085424 - RNA, 19 nt, Artificial Sequence
  Description of Artificial Sequence: Synthetic oligonucleotide
ugcccaccacucucccuua

SEQ ID NO: 2085425 - RNA, 19 nt, Artificial Sequence
  Description of Artificial Sequence: Synthetic oligonucleotide
cugaagcccuuuccccuaa

SEQ ID NO: 2085426 - RNA, 19 nt, Artificial Sequence
  Description of Artificial Sequence: Synthetic oligonucleotide
cugcuaguuuucugcugua

SEQ ID NO: 2085427 - RNA, 19 nt, Artificial Sequence
  Description of Artificial Sequence: Synthetic oligonucleotide
guagcacaggauagccugu

SEQ ID NO: 2085428 - RNA, 19 nt, Artificial Sequence
  Description of Artificial Sequence: Synthetic oligonucleotide
ggaugccagucuaccuagc

SEQ ID NO: 2085429 - RNA, 19 nt, Artificial Sequence
  Description of Artificial Sequence: Synthetic oligonucleotide
cauaagcaguccacagcuu

SEQ ID NO: 2085430 - RNA, 19 nt, Artificial Sequence
  Description of Artificial Sequence: Synthetic oligonucleotide
ccugcuaaacacugacgcu

SEQ ID NO: 2085431 - RNA, 19 nt, Artificial Sequence
  Description of Artificial Sequence: Synthetic oligonucleotide
gcguuuacagaaggggugu

SEQ ID NO: 2085432 - RNA, 19 nt, Artificial Sequence
  Description of Artificial Sequence: Synthetic oligonucleotide
caauagcuaucuggcuaaa

SEQ ID NO: 2085433 - RNA, 19 nt, Artificial Sequence
  Description of Artificial Sequence: Synthetic oligonucleotide
gggaggcaagcaaccuagc

SEQ ID NO: 2085434 - RNA, 19 nt, Artificial Sequence
  Description of Artificial Sequence: Synthetic oligonucleotide
gccugugguaugaugcuua

SEQ ID NO: 2085435 - RNA, 19 nt, Artificial Sequence
  Description of Artificial Sequence: Synthetic oligonucleotide
gccagucuaccuagcaaaa

SEQ ID NO: 2085436 - RNA, 19 nt, Artificial Sequence
  Description of Artificial Sequence: Synthetic oligonucleotide
cacuuccuuuuggcaggug

SEQ ID NO: 2085437 - RNA, 19 nt, Artificial Sequence
  Description of Artificial Sequence: Synthetic oligonucleotide
ccuuaacaucacaccuaca

SEQ ID NO: 2085438 - RNA, 19 nt, Artificial Sequence
  Description of Artificial Sequence: Synthetic oligonucleotide
caccacucucccuuagcuu

SEQ ID NO: 2085439 - RNA, 19 nt, Artificial Sequence
  Description of Artificial Sequence: Synthetic oligonucleotide
cugcuguacccggaccaaa

SEQ ID NO: 2085440 - RNA, 19 nt, Artificial Sequence
  Description of Artificial Sequence: Synthetic oligonucleotide
cggacagacaggacacaca

SEQ ID NO: 2085441 - RNA, 19 nt, Artificial Sequence
  Description of Artificial Sequence: Synthetic oligonucleotide
cccggaccaaaggagcuca

SEQ ID NO: 2085442 - RNA, 19 nt, Artificial Sequence
  Description of Artificial Sequence: Synthetic oligonucleotide
gccacacuucugugcccac

SEQ ID NO: 2085443 - RNA, 19 nt, Artificial Sequence
  Description of Artificial Sequence: Synthetic oligonucleotide
caacacuaaccugguuaau

SEQ ID NO: 2085444 - RNA, 19 nt, Artificial Sequence
  Description of Artificial Sequence: Synthetic oligonucleotide
ggguuugccuguuccuguu

SEQ ID NO: 2085445 - RNA, 19 nt, Artificial Sequence
  Description of Artificial Sequence: Synthetic oligonucleotide
cuguaacaggcuggucagu

SEQ ID NO: 2085446 - RNA, 19 nt, Artificial Sequence
  Description of Artificial Sequence: Synthetic oligonucleotide
cugugguaugaugcuuaau

SEQ ID NO: 2085447 - RNA, 19 nt, Artificial Sequence
  Description of Artificial Sequence: Synthetic oligonucleotide
gcuuaauacugaagcccuu

SEQ ID NO: 2085448 - RNA, 19 nt, Artificial Sequence
  Description of Artificial Sequence: Synthetic oligonucleotide
guguuuggguuugccuguu

SEQ ID NO: 2085449 - RNA, 19 nt, Artificial Sequence
  Description of Artificial Sequence: Synthetic oligonucleotide
cccuuuccccuaaguaggu

SEQ ID NO: 2085450 - RNA, 19 nt, Artificial Sequence
  Description of Artificial Sequence: Synthetic oligonucleotide
ggcaagcaaccuagcuacu

SEQ ID NO: 2085451 - RNA, 19 nt, Artificial Sequence
  Description of Artificial Sequence: Synthetic oligonucleotide
caggcuggucaguguccau

SEQ ID NO: 2085452 - RNA, 19 nt, Artificial Sequence
  Description of Artificial Sequence: Synthetic oligonucleotide
ggauagccugugguaugau

SEQ ID NO: 2085453 - RNA, 19 nt, Artificial Sequence
  Description of Artificial Sequence: Synthetic oligonucleotide
ccucuacuuggaugccagu

SEQ ID NO: 2085454 - RNA, 19 nt, Artificial Sequence
  Description of Artificial Sequence: Synthetic oligonucleotide
ccuuuccccuaaguagguu

SEQ ID NO: 2085455 - RNA, 19 nt, Artificial Sequence
  Description of Artificial Sequence: Synthetic oligonucleotide
ccggaccaaaggagcucau

SEQ ID NO: 2085456 - RNA, 19 nt, Artificial Sequence
  Description of Artificial Sequence: Synthetic oligonucleotide
cguuuacagaagggguguu

SEQ ID NO: 2085457 - RNA, 19 nt, Artificial Sequence
  Description of Artificial Sequence: Synthetic oligonucleotide
uuauagaccgcgaagaggc

SEQ ID NO: 2085458 - RNA, 19 nt, Artificial Sequence
  Description of Artificial Sequence: Synthetic oligonucleotide
cuaaaaggaacucaggagg

SEQ ID NO: 2085459 - RNA, 19 nt, Artificial Sequence
  Description of Artificial Sequence: Synthetic oligonucleotide
ucuaaaaggaacucaggag

SEQ ID NO: 2085460 - RNA, 19 nt, Artificial Sequence
  Description of Artificial Sequence: Synthetic oligonucleotide
gugagcaucauacacgucg

SEQ ID NO: 2085461 - RNA, 19 nt, Artificial Sequence
  Description of Artificial Sequence: Synthetic oligonucleotide
uucuaaaaggaacucagga

SEQ ID NO: 2085462 - RNA, 19 nt, Artificial Sequence
  Description of Artificial Sequence: Synthetic oligonucleotide
aacucaugaagccaaagau

SEQ ID NO: 2085463 - RNA, 19 nt, Artificial Sequence
  Description of Artificial Sequence: Synthetic oligonucleotide
uacacugcacuucuaaaag

SEQ ID NO: 2085464 - RNA, 19 nt, Artificial Sequence
  Description of Artificial Sequence: Synthetic oligonucleotide
ugcacuucuaaaaggaacu

SEQ ID NO: 2085465 - RNA, 19 nt, Artificial Sequence
  Description of Artificial Sequence: Synthetic oligonucleotide
uuuauagaccgcgaagagg

SEQ ID NO: 2085466 - RNA, 19 nt, Artificial Sequence
  Description of Artificial Sequence: Synthetic oligonucleotide
uuggauucuagccaggauc

SEQ ID NO: 2085467 - RNA, 19 nt, Artificial Sequence
  Description of Artificial Sequence: Synthetic oligonucleotide
uggauucuagccaggaucc

SEQ ID NO: 2085468 - RNA, 19 nt, Artificial Sequence
  Description of Artificial Sequence: Synthetic oligonucleotide
uuguucaugggccggauca

SEQ ID NO: 2085469 - RNA, 19 nt, Artificial Sequence
  Description of Artificial Sequence: Synthetic oligonucleotide
uguagccuagaacucauga

SEQ ID NO: 2085470 - RNA, 19 nt, Artificial Sequence
  Description of Artificial Sequence: Synthetic oligonucleotide
uguauaauccuuggugagg

SEQ ID NO: 2085471 - RNA, 19 nt, Artificial Sequence
  Description of Artificial Sequence: Synthetic oligonucleotide
ugaggugagcaucauacac

SEQ ID NO: 2085472 - RNA, 19 nt, Artificial Sequence
  Description of Artificial Sequence: Synthetic oligonucleotide
uaugucgucuucucuauca

SEQ ID NO: 2085473 - RNA, 19 nt, Artificial Sequence
  Description of Artificial Sequence: Synthetic oligonucleotide
cacuguauaauccuuggug

SEQ ID NO: 2085474 - RNA, 19 nt, Artificial Sequence
  Description of Artificial Sequence: Synthetic oligonucleotide
ugagcaucauacacgucgg

SEQ ID NO: 2085475 - RNA, 19 nt, Artificial Sequence
  Description of Artificial Sequence: Synthetic oligonucleotide
cucaugaagccaaagauga

SEQ ID NO: 2085476 - RNA, 19 nt, Artificial Sequence
  Description of Artificial Sequence: Synthetic oligonucleotide
cuccaggccaauuucaugc

SEQ ID NO: 2085477 - RNA, 19 nt, Artificial Sequence
  Description of Artificial Sequence: Synthetic oligonucleotide
gaagcgaacacgcuguuca

SEQ ID NO: 2085478 - RNA, 19 nt, Artificial Sequence
  Description of Artificial Sequence: Synthetic oligonucleotide
ucggugagcagucugaguc

SEQ ID NO: 2085479 - RNA, 19 nt, Artificial Sequence
  Description of Artificial Sequence: Synthetic oligonucleotide
gaagaagccaucgcgagug

SEQ ID NO: 2085480 - RNA, 19 nt, Artificial Sequence
  Description of Artificial Sequence: Synthetic oligonucleotide
acuucuaaaaggaacucag

SEQ ID NO: 2085481 - RNA, 19 nt, Artificial Sequence
  Description of Artificial Sequence: Synthetic oligonucleotide
agugaugagcaucggggac

SEQ ID NO: 2085482 - RNA, 19 nt, Artificial Sequence
  Description of Artificial Sequence: Synthetic oligonucleotide
caagugauguccaacacca

SEQ ID NO: 2085483 - RNA, 19 nt, Artificial Sequence
  Description of Artificial Sequence: Synthetic oligonucleotide
ugauguccaacaccaaucu

SEQ ID NO: 2085484 - RNA, 19 nt, Artificial Sequence
  Description of Artificial Sequence: Synthetic oligonucleotide
agcggcagucuucagcucc

SEQ ID NO: 2085485 - RNA, 19 nt, Artificial Sequence
  Description of Artificial Sequence: Synthetic oligonucleotide
cuugcgugcagacagcggc

SEQ ID NO: 2085486 - RNA, 19 nt, Artificial Sequence
  Description of Artificial Sequence: Synthetic oligonucleotide
uguagauuccacuggguuc

SEQ ID NO: 2085487 - RNA, 19 nt, Artificial Sequence
  Description of Artificial Sequence: Synthetic oligonucleotide
agcacaagcacaccagaag

SEQ ID NO: 2085488 - RNA, 19 nt, Artificial Sequence
  Description of Artificial Sequence: Synthetic oligonucleotide
gaacacgcuguucaggagc

SEQ ID NO: 2085489 - RNA, 19 nt, Artificial Sequence
  Description of Artificial Sequence: Synthetic oligonucleotide
caugccgggagguuuauag

SEQ ID NO: 2085490 - RNA, 19 nt, Artificial Sequence
  Description of Artificial Sequence: Synthetic oligonucleotide
cuucuaaaaggaacucagg

SEQ ID NO: 2085491 - RNA, 19 nt, Artificial Sequence
  Description of Artificial Sequence: Synthetic oligonucleotide
uggaguacaucaccagugc

SEQ ID NO: 2085492 - RNA, 19 nt, Artificial Sequence
  Description of Artificial Sequence: Synthetic oligonucleotide
ugaaugcugggccacguac

SEQ ID NO: 2085493 - RNA, 19 nt, Artificial Sequence
  Description of Artificial Sequence: Synthetic oligonucleotide
gauuccacuggguucucag

SEQ ID NO: 2085494 - RNA, 19 nt, Artificial Sequence
  Description of Artificial Sequence: Synthetic oligonucleotide
guuuauagaccgcgaagag

SEQ ID NO: 2085495 - RNA, 19 nt, Artificial Sequence
  Description of Artificial Sequence: Synthetic oligonucleotide
ucauacacgucggugagca

SEQ ID NO: 2085496 - RNA, 19 nt, Artificial Sequence
  Description of Artificial Sequence: Synthetic oligonucleotide
agccuagaacucaugaagc

SEQ ID NO: 2085497 - RNA, 19 nt, Artificial Sequence
  Description of Artificial Sequence: Synthetic oligonucleotide
gaacucaugaagccaaaga

SEQ ID NO: 2085498 - RNA, 19 nt, Artificial Sequence
  Description of Artificial Sequence: Synthetic oligonucleotide
aucggggacuuguucaugg

SEQ ID NO: 2085499 - RNA, 19 nt, Artificial Sequence
  Description of Artificial Sequence: Synthetic oligonucleotide
guagcuuugccuaggaggc

SEQ ID NO: 2085500 - RNA, 19 nt, Artificial Sequence
  Description of Artificial Sequence: Synthetic oligonucleotide
gauucuagccaggauccgg

SEQ ID NO: 2085501 - RNA, 19 nt, Artificial Sequence
  Description of Artificial Sequence: Synthetic oligonucleotide
ugaucacugccccgaauag

SEQ ID NO: 2085502 - RNA, 19 nt, Artificial Sequence
  Description of Artificial Sequence: Synthetic oligonucleotide
agugccuuuuggugggagc

SEQ ID NO: 2085503 - RNA, 19 nt, Artificial Sequence
  Description of Artificial Sequence: Synthetic oligonucleotide
ucaccagugccuuuuggug

SEQ ID NO: 2085504 - RNA, 19 nt, Artificial Sequence
  Description of Artificial Sequence: Synthetic oligonucleotide
cuguauaauccuuggugag

SEQ ID NO: 2085505 - RNA, 19 nt, Artificial Sequence
  Description of Artificial Sequence: Synthetic oligonucleotide
cuguguagauuccacuggg

SEQ ID NO: 2085506 - RNA, 19 nt, Artificial Sequence
  Description of Artificial Sequence: Synthetic oligonucleotide
guaccagugaugagcaucg

SEQ ID NO: 2085507 - RNA, 19 nt, Artificial Sequence
  Description of Artificial Sequence: Synthetic oligonucleotide
acagcggcagucuucagcu

SEQ ID NO: 2085508 - RNA, 19 nt, Artificial Sequence
  Description of Artificial Sequence: Synthetic oligonucleotide
cugcacuucuaaaaggaac

SEQ ID NO: 2085509 - RNA, 19 nt, Artificial Sequence
  Description of Artificial Sequence: Synthetic oligonucleotide
ucuagccaggauccggucc

SEQ ID NO: 2085510 - RNA, 19 nt, Artificial Sequence
  Description of Artificial Sequence: Synthetic oligonucleotide
accagugaugagcaucggg

SEQ ID NO: 2085511 - RNA, 19 nt, Artificial Sequence
  Description of Artificial Sequence: Synthetic oligonucleotide
cuugaacuccugaucacug

SEQ ID NO: 2085512 - RNA, 19 nt, Artificial Sequence
  Description of Artificial Sequence: Synthetic oligonucleotide
agugauguccaacaccaau

SEQ ID NO: 2085513 - RNA, 19 nt, Artificial Sequence
  Description of Artificial Sequence: Synthetic oligonucleotide
aagaagccaucgcgagugc

SEQ ID NO: 2085514 - RNA, 19 nt, Artificial Sequence
  Description of Artificial Sequence: Synthetic oligonucleotide
ucuguggguagugagggug

SEQ ID NO: 2085515 - RNA, 19 nt, Artificial Sequence
  Description of Artificial Sequence: Synthetic oligonucleotide
cagucugaguccauguccc

SEQ ID NO: 2085516 - RNA, 19 nt, Artificial Sequence
  Description of Artificial Sequence: Synthetic oligonucleotide
acagcgagcacaagcacac

SEQ ID NO: 2085517 - RNA, 19 nt, Artificial Sequence
  Description of Artificial Sequence: Synthetic oligonucleotide
aggugagcaucauacacgu

SEQ ID NO: 2085518 - RNA, 19 nt, Artificial Sequence
  Description of Artificial Sequence: Synthetic oligonucleotide
ucagucucaaguuccuuuc

SEQ ID NO: 2085519 - RNA, 19 nt, Artificial Sequence
  Description of Artificial Sequence: Synthetic oligonucleotide
ucauguagccuagaacuca

SEQ ID NO: 2085520 - RNA, 19 nt, Artificial Sequence
  Description of Artificial Sequence: Synthetic oligonucleotide
uucaggcuagugaaugcug

SEQ ID NO: 2085521 - RNA, 19 nt, Artificial Sequence
  Description of Artificial Sequence: Synthetic oligonucleotide
uucauguagccuagaacuc

SEQ ID NO: 2085522 - RNA, 19 nt, Artificial Sequence
  Description of Artificial Sequence: Synthetic oligonucleotide
cuaucagccgcccaucuuc

SEQ ID NO: 2085523 - RNA, 19 nt, Artificial Sequence
  Description of Artificial Sequence: Synthetic oligonucleotide
ccaaagaugaccuugaacu

SEQ ID NO: 2085524 - RNA, 19 nt, Artificial Sequence
  Description of Artificial Sequence: Synthetic oligonucleotide
ccaacaccaaucuucaggc

SEQ ID NO: 2085525 - RNA, 19 nt, Artificial Sequence
  Description of Artificial Sequence: Synthetic oligonucleotide
agcaucggggacuuguuca

SEQ ID NO: 2085526 - RNA, 19 nt, Artificial Sequence
  Description of Artificial Sequence: Synthetic oligonucleotide
ucaaguuccuuuccagcuc

SEQ ID NO: 2085527 - RNA, 19 nt, Artificial Sequence
  Description of Artificial Sequence: Synthetic oligonucleotide
ggagccuuggauucuagcc

SEQ ID NO: 2085528 - RNA, 19 nt, Artificial Sequence
  Description of Artificial Sequence: Synthetic oligonucleotide
caaagaugaccuugaacuc

SEQ ID NO: 2085529 - RNA, 19 nt, Artificial Sequence
  Description of Artificial Sequence: Synthetic oligonucleotide
uugaacuccugaucacugc

SEQ ID NO: 2085530 - RNA, 19 nt, Artificial Sequence
  Description of Artificial Sequence: Synthetic oligonucleotide
cugggucucaugcauacac

SEQ ID NO: 2085531 - RNA, 19 nt, Artificial Sequence
  Description of Artificial Sequence: Synthetic oligonucleotide
gacagcggcagucuucagc

SEQ ID NO: 2085532 - RNA, 19 nt, Artificial Sequence
  Description of Artificial Sequence: Synthetic oligonucleotide
aaugcugggccacguacaa

SEQ ID NO: 2085533 - RNA, 19 nt, Artificial Sequence
  Description of Artificial Sequence: Synthetic oligonucleotide
ucgucuucucuaucagccg

SEQ ID NO: 2085534 - RNA, 19 nt, Artificial Sequence
  Description of Artificial Sequence: Synthetic oligonucleotide
ugccgggagguuuauagac

SEQ ID NO: 2085535 - RNA, 19 nt, Artificial Sequence
  Description of Artificial Sequence: Synthetic oligonucleotide
ugaagaagccaucgcgagu

SEQ ID NO: 2085536 - RNA, 19 nt, Artificial Sequence
  Description of Artificial Sequence: Synthetic oligonucleotide
agcagucugaguccauguc

SEQ ID NO: 2085537 - RNA, 19 nt, Artificial Sequence
  Description of Artificial Sequence: Synthetic oligonucleotide
ucgcacuguauaauccuug

SEQ ID NO: 2085538 - RNA, 19 nt, Artificial Sequence
  Description of Artificial Sequence: Synthetic oligonucleotide
ucguaugucgucuucucua

SEQ ID NO: 2085539 - RNA, 19 nt, Artificial Sequence
  Description of Artificial Sequence: Synthetic oligonucleotide
uguguagauuccacugggu

SEQ ID NO: 2085540 - RNA, 19 nt, Artificial Sequence
  Description of Artificial Sequence: Synthetic oligonucleotide
gaggcuucgcugcauugag

SEQ ID NO: 2085541 - RNA, 19 nt, Artificial Sequence
  Description of Artificial Sequence: Synthetic oligonucleotide
cauugagaccuuucagcag

SEQ ID NO: 2085542 - RNA, 19 nt, Artificial Sequence
  Description of Artificial Sequence: Synthetic oligonucleotide
cuagaacucaugaagccaa

SEQ ID NO: 2085543 - RNA, 19 nt, Artificial Sequence
  Description of Artificial Sequence: Synthetic oligonucleotide
ugcagccauuucaugccgg

SEQ ID NO: 2085544 - RNA, 19 nt, Artificial Sequence
  Description of Artificial Sequence: Synthetic oligonucleotide
augcauacacugcacuucu

SEQ ID NO: 2085545 - RNA, 19 nt, Artificial Sequence
  Description of Artificial Sequence: Synthetic oligonucleotide
ccacguacaagucuguggg

SEQ ID NO: 2085546 - RNA, 19 nt, Artificial Sequence
  Description of Artificial Sequence: Synthetic oligonucleotide
cagguuggaguacaucacc

SEQ ID NO: 2085547 - RNA, 19 nt, Artificial Sequence
  Description of Artificial Sequence: Synthetic oligonucleotide
gucucaugcauacacugca

SEQ ID NO: 2085548 - RNA, 19 nt, Artificial Sequence
  Description of Artificial Sequence: Synthetic oligonucleotide
gagccuuggauucuagcca

SEQ ID NO: 2085549 - RNA, 19 nt, Artificial Sequence
  Description of Artificial Sequence: Synthetic oligonucleotide
ucucaugcauacacugcac

SEQ ID NO: 2085550 - RNA, 19 nt, Artificial Sequence
  Description of Artificial Sequence: Synthetic oligonucleotide
agucucaaguuccuuucca

SEQ ID NO: 2085551 - RNA, 19 nt, Artificial Sequence
  Description of Artificial Sequence: Synthetic oligonucleotide
gccugaagaagccaucgcg

SEQ ID NO: 2085552 - RNA, 19 nt, Artificial Sequence
  Description of Artificial Sequence: Synthetic oligonucleotide
agcuccacggucucccgcg

SEQ ID NO: 2085553 - RNA, 19 nt, Artificial Sequence
  Description of Artificial Sequence: Synthetic oligonucleotide
uggguagugagggugggca

SEQ ID NO: 2085554 - RNA, 19 nt, Artificial Sequence
  Description of Artificial Sequence: Synthetic oligonucleotide
ugucuguagcuuugccuag

SEQ ID NO: 2085555 - RNA, 19 nt, Artificial Sequence
  Description of Artificial Sequence: Synthetic oligonucleotide
aagcacaccagaagcccgg

SEQ ID NO: 2085556 - RNA, 19 nt, Artificial Sequence
  Description of Artificial Sequence: Synthetic oligonucleotide
cacuggguucucaggaggg

SEQ ID NO: 2085557 - RNA, 19 nt, Artificial Sequence
  Description of Artificial Sequence: Synthetic oligonucleotide
agcaucauacacgucggug

SEQ ID NO: 2085558 - RNA, 19 nt, Artificial Sequence
  Description of Artificial Sequence: Synthetic oligonucleotide
cugcauugagaccuuucag

SEQ ID NO: 2085559 - RNA, 19 nt, Artificial Sequence
  Description of Artificial Sequence: Synthetic oligonucleotide
uucucucgucacguggucg

SEQ ID NO: 2085560 - RNA, 19 nt, Artificial Sequence
  Description of Artificial Sequence: Synthetic oligonucleotide
uauagaccgcgaagaggcc

SEQ ID NO: 2085561 - RNA, 19 nt, Artificial Sequence
  Description of Artificial Sequence: Synthetic oligonucleotide
ucucucgucacguggucgu

SEQ ID NO: 2085562 - RNA, 19 nt, Artificial Sequence
  Description of Artificial Sequence: Synthetic oligonucleotide
cuguggguagugagggugg

SEQ ID NO: 2085563 - RNA, 19 nt, Artificial Sequence
  Description of Artificial Sequence: Synthetic oligonucleotide
auacacgucggugagcagu

SEQ ID NO: 2085564 - RNA, 19 nt, Artificial Sequence
  Description of Artificial Sequence: Synthetic oligonucleotide
gguuuauagaccgcgaaga

SEQ ID NO: 2085565 - RNA, 19 nt, Artificial Sequence
  Description of Artificial Sequence: Synthetic oligonucleotide
gaagccaucgcgagugcgc

SEQ ID NO: 2085566 - RNA, 19 nt, Artificial Sequence
  Description of Artificial Sequence: Synthetic oligonucleotide
aggcccgaagaccccaugg

SEQ ID NO: 2085567 - RNA, 19 nt, Artificial Sequence
  Description of Artificial Sequence: Synthetic oligonucleotide
caugcauacacugcacuuc

SEQ ID NO: 2085568 - RNA, 19 nt, Artificial Sequence
  Description of Artificial Sequence: Synthetic oligonucleotide
uauaauccuuggugaggug

SEQ ID NO: 2085569 - RNA, 19 nt, Artificial Sequence
  Description of Artificial Sequence: Synthetic oligonucleotide
acaccaaucuucaggcuag

SEQ ID NO: 2085570 - RNA, 19 nt, Artificial Sequence
  Description of Artificial Sequence: Synthetic oligonucleotide
aggccaauuucaugcacca

SEQ ID NO: 2085571 - RNA, 19 nt, Artificial Sequence
  Description of Artificial Sequence: Synthetic oligonucleotide
cagcauuucucucgucacg

SEQ ID NO: 2085572 - RNA, 19 nt, Artificial Sequence
  Description of Artificial Sequence: Synthetic oligonucleotide
ggaggugcaaagugcaggc

SEQ ID NO: 2085573 - RNA, 19 nt, Artificial Sequence
  Description of Artificial Sequence: Synthetic oligonucleotide
agcauuucucucgucacgu

SEQ ID NO: 2085574 - RNA, 19 nt, Artificial Sequence
  Description of Artificial Sequence: Synthetic oligonucleotide
gugauguccaacaccaauc

SEQ ID NO: 2085575 - RNA, 19 nt, Artificial Sequence
  Description of Artificial Sequence: Synthetic oligonucleotide
ugucccacagcgagcacaa

SEQ ID NO: 2085576 - RNA, 19 nt, Artificial Sequence
  Description of Artificial Sequence: Synthetic oligonucleotide
aucauacacgucggugagc

SEQ ID NO: 2085577 - RNA, 19 nt, Artificial Sequence
  Description of Artificial Sequence: Synthetic oligonucleotide
gagguuuauagaccgcgaa

SEQ ID NO: 2085578 - RNA, 19 nt, Artificial Sequence
  Description of Artificial Sequence: Synthetic oligonucleotide
uacacgucggugagcaguc

SEQ ID NO: 2085579 - RNA, 19 nt, Artificial Sequence
  Description of Artificial Sequence: Synthetic oligonucleotide
uuucaugccgggagguuua

SEQ ID NO: 2085580 - RNA, 19 nt, Artificial Sequence
  Description of Artificial Sequence: Synthetic oligonucleotide
aacacgcuguucaggagca

SEQ ID NO: 2085581 - RNA, 19 nt, Artificial Sequence
  Description of Artificial Sequence: Synthetic oligonucleotide
ugggucucaugcauacacu

SEQ ID NO: 2085582 - RNA, 19 nt, Artificial Sequence
  Description of Artificial Sequence: Synthetic oligonucleotide
cuuuuggugggagccuugg

SEQ ID NO: 2085583 - RNA, 19 nt, Artificial Sequence
  Description of Artificial Sequence: Synthetic oligonucleotide
uagaccgcgaagaggcccu

SEQ ID NO: 2085584 - RNA, 19 nt, Artificial Sequence
  Description of Artificial Sequence: Synthetic oligonucleotide
ggcuagugaaugcugggcc

SEQ ID NO: 2085585 - RNA, 19 nt, Artificial Sequence
  Description of Artificial Sequence: Synthetic oligonucleotide
ucggggacuuguucauggg

SEQ ID NO: 2085586 - RNA, 19 nt, Artificial Sequence
  Description of Artificial Sequence: Synthetic oligonucleotide
ugcaaagugcaggcagcgg

SEQ ID NO: 2085587 - RNA, 19 nt, Artificial Sequence
  Description of Artificial Sequence: Synthetic oligonucleotide
cugucuguagcuuugccua

SEQ ID NO: 2085588 - RNA, 19 nt, Artificial Sequence
  Description of Artificial Sequence: Synthetic oligonucleotide
ucacguggucguaugucgu

SEQ ID NO: 2085589 - RNA, 19 nt, Artificial Sequence
  Description of Artificial Sequence: Synthetic oligonucleotide
ucaugggccggaucacacc

SEQ ID NO: 2085590 - RNA, 19 nt, Artificial Sequence
  Description of Artificial Sequence: Synthetic oligonucleotide
cagccgcccaucuucacag

SEQ ID NO: 2085591 - RNA, 19 nt, Artificial Sequence
  Description of Artificial Sequence: Synthetic oligonucleotide
gagccaggcccgaagaccc

SEQ ID NO: 2085592 - RNA, 19 nt, Artificial Sequence
  Description of Artificial Sequence: Synthetic oligonucleotide
ggcuucgcugcauugagac

SEQ ID NO: 2085593 - RNA, 19 nt, Artificial Sequence
  Description of Artificial Sequence: Synthetic oligonucleotide
cagggccuagcaagaagcg

SEQ ID NO: 2085594 - RNA, 19 nt, Artificial Sequence
  Description of Artificial Sequence: Synthetic oligonucleotide
uugccuaggaggccucgca

SEQ ID NO: 2085595 - RNA, 19 nt, Artificial Sequence
  Description of Artificial Sequence: Synthetic oligonucleotide
augagcaucggggacuugu

SEQ ID NO: 2085596 - RNA, 19 nt, Artificial Sequence
  Description of Artificial Sequence: Synthetic oligonucleotide
ccaagugauguccaacacc

SEQ ID NO: 2085597 - RNA, 19 nt, Artificial Sequence
  Description of Artificial Sequence: Synthetic oligonucleotide
guagccuagaacucaugaa

SEQ ID NO: 2085598 - RNA, 19 nt, Artificial Sequence
  Description of Artificial Sequence: Synthetic oligonucleotide
agcccgggcauccaaguga

SEQ ID NO: 2085599 - RNA, 19 nt, Artificial Sequence
  Description of Artificial Sequence: Synthetic oligonucleotide
uacaagucuguggguagug

SEQ ID NO: 2085600 - RNA, 19 nt, Artificial Sequence
  Description of Artificial Sequence: Synthetic oligonucleotide
uugagaccuuucagcagcu

SEQ ID NO: 2085601 - RNA, 19 nt, Artificial Sequence
  Description of Artificial Sequence: Synthetic oligonucleotide
gggucucaugcauacacug

SEQ ID NO: 2085602 - RNA, 19 nt, Artificial Sequence
  Description of Artificial Sequence: Synthetic oligonucleotide
gggacuuguucaugggccg

SEQ ID NO: 2085603 - RNA, 19 nt, Artificial Sequence
  Description of Artificial Sequence: Synthetic oligonucleotide
auuucucucgucacguggu

SEQ ID NO: 2085604 - RNA, 19 nt, Artificial Sequence
  Description of Artificial Sequence: Synthetic oligonucleotide
agaagccaucgcgagugcg

SEQ ID NO: 2085605 - RNA, 19 nt, Artificial Sequence
  Description of Artificial Sequence: Synthetic oligonucleotide
caucaccagugccuuuugg

SEQ ID NO: 2085606 - RNA, 19 nt, Artificial Sequence
  Description of Artificial Sequence: Synthetic oligonucleotide
caggcagcggguaccagug

SEQ ID NO: 2085607 - RNA, 19 nt, Artificial Sequence
  Description of Artificial Sequence: Synthetic oligonucleotide
agcgaacacgcuguucagg

SEQ ID NO: 2085608 - RNA, 19 nt, Artificial Sequence
  Description of Artificial Sequence: Synthetic oligonucleotide
agaagcgaacacgcuguuc

SEQ ID NO: 2085609 - RNA, 19 nt, Artificial Sequence
  Description of Artificial Sequence: Synthetic oligonucleotide
agugcgccgcacuugcgug

SEQ ID NO: 2085610 - RNA, 19 nt, Artificial Sequence
  Description of Artificial Sequence: Synthetic oligonucleotide
ugcagacuggauggcaccc

SEQ ID NO: 2085611 - RNA, 19 nt, Artificial Sequence
  Description of Artificial Sequence: Synthetic oligonucleotide
gugcaaagugcaggcagcg

SEQ ID NO: 2085612 - RNA, 19 nt, Artificial Sequence
  Description of Artificial Sequence: Synthetic oligonucleotide
cagucucaaguuccuuucc

SEQ ID NO: 2085613 - RNA, 19 nt, Artificial Sequence
  Description of Artificial Sequence: Synthetic oligonucleotide
gugcagccauuucaugccg

SEQ ID NO: 2085614 - RNA, 19 nt, Artificial Sequence
  Description of Artificial Sequence: Synthetic oligonucleotide
ccgggagguuuauagaccg

SEQ ID NO: 2085615 - RNA, 19 nt, Artificial Sequence
  Description of Artificial Sequence: Synthetic oligonucleotide
uagugaaugcugggccacg

SEQ ID NO: 2085616 - RNA, 19 nt, Artificial Sequence
  Description of Artificial Sequence: Synthetic oligonucleotide
uuucucucgucacgugguc

SEQ ID NO: 2085617 - RNA, 19 nt, Artificial Sequence
  Description of Artificial Sequence: Synthetic oligonucleotide
guauaauccuuggugaggu

SEQ ID NO: 2085618 - RNA, 19 nt, Artificial Sequence
  Description of Artificial Sequence: Synthetic oligonucleotide
ggaguacaucaccagugcc

SEQ ID NO: 2085619 - RNA, 19 nt, Artificial Sequence
  Description of Artificial Sequence: Synthetic oligonucleotide
cuagugaaugcugggccac

SEQ ID NO: 2085620 - RNA, 19 nt, Artificial Sequence
  Description of Artificial Sequence: Synthetic oligonucleotide
gccauuucaugccgggagg

SEQ ID NO: 2085621 - RNA, 19 nt, Artificial Sequence
  Description of Artificial Sequence: Synthetic oligonucleotide
ccccgaauagcuuuccacc

SEQ ID NO: 2085622 - RNA, 19 nt, Artificial Sequence
  Description of Artificial Sequence: Synthetic oligonucleotide
ugccuaggaggccucgcac

SEQ ID NO: 2085623 - RNA, 19 nt, Artificial Sequence
  Description of Artificial Sequence: Synthetic oligonucleotide
ugggccggaucacacccug

SEQ ID NO: 2085624 - RNA, 19 nt, Artificial Sequence
  Description of Artificial Sequence: Synthetic oligonucleotide
auucuagccaggauccggu

SEQ ID NO: 2085625 - RNA, 19 nt, Artificial Sequence
  Description of Artificial Sequence: Synthetic oligonucleotide
gcugcauugagaccuuuca

SEQ ID NO: 2085626 - RNA, 19 nt, Artificial Sequence
  Description of Artificial Sequence: Synthetic oligonucleotide
auuucaugccgggagguuu

SEQ ID NO: 2085627 - RNA, 19 nt, Artificial Sequence
  Description of Artificial Sequence: Synthetic oligonucleotide
cacuugcgugcagacagcg

SEQ ID NO: 2085628 - RNA, 19 nt, Artificial Sequence
  Description of Artificial Sequence: Synthetic oligonucleotide
gaaugcugggccacguaca

SEQ ID NO: 2085629 - RNA, 19 nt, Artificial Sequence
  Description of Artificial Sequence: Synthetic oligonucleotide
ccggaucacacccugcacg

SEQ ID NO: 2085630 - RNA, 19 nt, Artificial Sequence
  Description of Artificial Sequence: Synthetic oligonucleotide
uuugccuaggaggccucgc

SEQ ID NO: 2085631 - RNA, 19 nt, Artificial Sequence
  Description of Artificial Sequence: Synthetic oligonucleotide
gcggguaccagugaugagc

SEQ ID NO: 2085632 - RNA, 19 nt, Artificial Sequence
  Description of Artificial Sequence: Synthetic oligonucleotide
cuucgcugcauugagaccu

SEQ ID NO: 2085633 - RNA, 19 nt, Artificial Sequence
  Description of Artificial Sequence: Synthetic oligonucleotide
uggucguaugucgucuucu

SEQ ID NO: 2085634 - RNA, 19 nt, Artificial Sequence
  Description of Artificial Sequence: Synthetic oligonucleotide
aaucuucaggcuagugaau

SEQ ID NO: 2085635 - RNA, 19 nt, Artificial Sequence
  Description of Artificial Sequence: Synthetic oligonucleotide
cuguagcuuugccuaggag

SEQ ID NO: 2085636 - RNA, 19 nt, Artificial Sequence
  Description of Artificial Sequence: Synthetic oligonucleotide
cgcacuugcgugcagacag

SEQ ID NO: 2085637 - RNA, 19 nt, Artificial Sequence
  Description of Artificial Sequence: Synthetic oligonucleotide
cucgucacguggucguaug

SEQ ID NO: 2085638 - RNA, 19 nt, Artificial Sequence
  Description of Artificial Sequence: Synthetic oligonucleotide
gaggccucgcacuguauaa

SEQ ID NO: 2085639 - RNA, 19 nt, Artificial Sequence
  Description of Artificial Sequence: Synthetic oligonucleotide
uggcccaaccucagucuca

SEQ ID NO: 2085640 - RNA, 19 nt, Artificial Sequence
  Description of Artificial Sequence: Synthetic oligonucleotide
uguucaugggccggaucac

SEQ ID NO: 2085641 - RNA, 19 nt, Artificial Sequence
  Description of Artificial Sequence: Synthetic oligonucleotide
ugagcaucggggacuuguu

SEQ ID NO: 2085642 - RNA, 19 nt, Artificial Sequence
  Description of Artificial Sequence: Synthetic oligonucleotide
augucccacagcgagcaca

SEQ ID NO: 2085643 - RNA, 19 nt, Artificial Sequence
  Description of Artificial Sequence: Synthetic oligonucleotide
ugcgugcagacagcggcag

SEQ ID NO: 2085644 - RNA, 19 nt, Artificial Sequence
  Description of Artificial Sequence: Synthetic oligonucleotide
ucgucacguggucguaugu

SEQ ID NO: 2085645 - RNA, 19 nt, Artificial Sequence
  Description of Artificial Sequence: Synthetic oligonucleotide
augccgggagguuuauaga

SEQ ID NO: 2085646 - RNA, 19 nt, Artificial Sequence
  Description of Artificial Sequence: Synthetic oligonucleotide
acguacaagucugugggua

SEQ ID NO: 2085647 - RNA, 19 nt, Artificial Sequence
  Description of Artificial Sequence: Synthetic oligonucleotide
aggaggcuucgcugcauug

SEQ ID NO: 2085648 - RNA, 19 nt, Artificial Sequence
  Description of Artificial Sequence: Synthetic oligonucleotide
uaggaggccucgcacugua

SEQ ID NO: 2085649 - RNA, 19 nt, Artificial Sequence
  Description of Artificial Sequence: Synthetic oligonucleotide
ccgaagaccccauggcugg

SEQ ID NO: 2085650 - RNA, 19 nt, Artificial Sequence
  Description of Artificial Sequence: Synthetic oligonucleotide
acugccccgaauagcuuuc

SEQ ID NO: 2085651 - RNA, 19 nt, Artificial Sequence
  Description of Artificial Sequence: Synthetic oligonucleotide
cgaauagcuuuccaccucc

SEQ ID NO: 2085652 - RNA, 19 nt, Artificial Sequence
  Description of Artificial Sequence: Synthetic oligonucleotide
acaagucuguggguaguga

SEQ ID NO: 2085653 - RNA, 19 nt, Artificial Sequence
  Description of Artificial Sequence: Synthetic oligonucleotide
gauccgguccagcauuucu

SEQ ID NO: 2085654 - RNA, 19 nt, Artificial Sequence
  Description of Artificial Sequence: Synthetic oligonucleotide
cgugcagccauuucaugcc

SEQ ID NO: 2085655 - RNA, 19 nt, Artificial Sequence
  Description of Artificial Sequence: Synthetic oligonucleotide
accgcgaagaggcccugca

SEQ ID NO: 2085656 - RNA, 19 nt, Artificial Sequence
  Description of Artificial Sequence: Synthetic oligonucleotide
ccacaguggagcuuggguc

SEQ ID NO: 2085657 - RNA, 19 nt, Artificial Sequence
  Description of Artificial Sequence: Synthetic oligonucleotide
uucaugcaccagcuuccuc

SEQ ID NO: 2085658 - RNA, 19 nt, Artificial Sequence
  Description of Artificial Sequence: Synthetic oligonucleotide
cuuguucaugggccggauc

SEQ ID NO: 2085659 - RNA, 19 nt, Artificial Sequence
  Description of Artificial Sequence: Synthetic oligonucleotide
ggugcaaagugcaggcagc

SEQ ID NO: 2085660 - RNA, 19 nt, Artificial Sequence
  Description of Artificial Sequence: Synthetic oligonucleotide
ugccccgaauagcuuucca

SEQ ID NO: 2085661 - RNA, 19 nt, Artificial Sequence
  Description of Artificial Sequence: Synthetic oligonucleotide
gcgaacacgcuguucagga

SEQ ID NO: 2085662 - RNA, 19 nt, Artificial Sequence
  Description of Artificial Sequence: Synthetic oligonucleotide
agucugaguccauguccca

SEQ ID NO: 2085663 - RNA, 19 nt, Artificial Sequence
  Description of Artificial Sequence: Synthetic oligonucleotide
cacgucggugagcagucug

SEQ ID NO: 2085664 - RNA, 19 nt, Artificial Sequence
  Description of Artificial Sequence: Synthetic oligonucleotide
acuugcgugcagacagcgg

SEQ ID NO: 2085665 - RNA, 19 nt, Artificial Sequence
  Description of Artificial Sequence: Synthetic oligonucleotide
ucucuaucagccgcccauc

SEQ ID NO: 2085666 - RNA, 19 nt, Artificial Sequence
  Description of Artificial Sequence: Synthetic oligonucleotide
ggucucaugcauacacugc

SEQ ID NO: 2085667 - RNA, 19 nt, Artificial Sequence
  Description of Artificial Sequence: Synthetic oligonucleotide
agaagcccgggcauccaag

SEQ ID NO: 2085668 - RNA, 19 nt, Artificial Sequence
  Description of Artificial Sequence: Synthetic oligonucleotide
cacguggucguaugucguc

SEQ ID NO: 2085669 - RNA, 19 nt, Artificial Sequence
  Description of Artificial Sequence: Synthetic oligonucleotide
cgcacuguauaauccuugg

SEQ ID NO: 2085670 - RNA, 19 nt, Artificial Sequence
  Description of Artificial Sequence: Synthetic oligonucleotide
gcuagugaaugcugggcca

SEQ ID NO: 2085671 - RNA, 19 nt, Artificial Sequence
  Description of Artificial Sequence: Synthetic oligonucleotide
aaagugcaggcagcgggua

SEQ ID NO: 2085672 - RNA, 19 nt, Artificial Sequence
  Description of Artificial Sequence: Synthetic oligonucleotide
gcauacacugcacuucuaa

SEQ ID NO: 2085673 - RNA, 19 nt, Artificial Sequence
  Description of Artificial Sequence: Synthetic oligonucleotide
cuuugccuaggaggccucg

SEQ ID NO: 2085674 - RNA, 19 nt, Artificial Sequence
  Description of Artificial Sequence: Synthetic oligonucleotide
ccagcauuucucucgucac

SEQ ID NO: 2085675 - RNA, 19 nt, Artificial Sequence
  Description of Artificial Sequence: Synthetic oligonucleotide
uaccagugaugagcaucgg

SEQ ID NO: 2085676 - RNA, 19 nt, Artificial Sequence
  Description of Artificial Sequence: Synthetic oligonucleotide
agcaagaagcgaacacgcu

SEQ ID NO: 2085677 - RNA, 19 nt, Artificial Sequence
  Description of Artificial Sequence: Synthetic oligonucleotide
ugcauacacugcacuucua

SEQ ID NO: 2085678 - RNA, 19 nt, Artificial Sequence
  Description of Artificial Sequence: Synthetic oligonucleotide
agcggguaccagugaugag

SEQ ID NO: 2085679 - RNA, 19 nt, Artificial Sequence
  Description of Artificial Sequence: Synthetic oligonucleotide
aggcgagccaggcccgaag

SEQ ID NO: 2085680 - RNA, 19 nt, Artificial Sequence
  Description of Artificial Sequence: Synthetic oligonucleotide
gagcacaagcacaccagaa

SEQ ID NO: 2085681 - RNA, 19 nt, Artificial Sequence
  Description of Artificial Sequence: Synthetic oligonucleotide
agccaucgcgagugcgccg

SEQ ID NO: 2085682 - RNA, 19 nt, Artificial Sequence
  Description of Artificial Sequence: Synthetic oligonucleotide
agcacaccagaagcccggg

SEQ ID NO: 2085683 - RNA, 19 nt, Artificial Sequence
  Description of Artificial Sequence: Synthetic oligonucleotide
ugaugagcaucggggacuu

SEQ ID NO: 2085684 - RNA, 19 nt, Artificial Sequence
  Description of Artificial Sequence: Synthetic oligonucleotide
uagcuuugccuaggaggcc

SEQ ID NO: 2085685 - RNA, 19 nt, Artificial Sequence
  Description of Artificial Sequence: Synthetic oligonucleotide
acguggucguaugucgucu

SEQ ID NO: 2085686 - RNA, 19 nt, Artificial Sequence
  Description of Artificial Sequence: Synthetic oligonucleotide
cauacacgucggugagcag

SEQ ID NO: 2085687 - RNA, 19 nt, Artificial Sequence
  Description of Artificial Sequence: Synthetic oligonucleotide
acccugcacggccaucuca

SEQ ID NO: 2085688 - RNA, 19 nt, Artificial Sequence
  Description of Artificial Sequence: Synthetic oligonucleotide
agggccuagcaagaagcga

SEQ ID NO: 2085689 - RNA, 19 nt, Artificial Sequence
  Description of Artificial Sequence: Synthetic oligonucleotide
cguacaagucuguggguag

SEQ ID NO: 2085690 - RNA, 19 nt, Artificial Sequence
  Description of Artificial Sequence: Synthetic oligonucleotide
cggaucacacccugcacgg

SEQ ID NO: 2085691 - RNA, 19 nt, Artificial Sequence
  Description of Artificial Sequence: Synthetic oligonucleotide
guggcccaaccucagucuc

SEQ ID NO: 2085692 - RNA, 19 nt, Artificial Sequence
  Description of Artificial Sequence: Synthetic oligonucleotide
agcuuuccaccuccacagu

SEQ ID NO: 2085693 - RNA, 19 nt, Artificial Sequence
  Description of Artificial Sequence: Synthetic oligonucleotide
ggcccgaagaccccauggc

SEQ ID NO: 2085694 - RNA, 19 nt, Artificial Sequence
  Description of Artificial Sequence: Synthetic oligonucleotide
ggucguaugucgucuucuc

SEQ ID NO: 2085695 - RNA, 19 nt, Artificial Sequence
  Description of Artificial Sequence: Synthetic oligonucleotide
gcacggccaucucauaggc

SEQ ID NO: 2085696 - RNA, 19 nt, Artificial Sequence
  Description of Artificial Sequence: Synthetic oligonucleotide
cucaugcauacacugcacu

SEQ ID NO: 2085697 - RNA, 19 nt, Artificial Sequence
  Description of Artificial Sequence: Synthetic oligonucleotide
uccugaucacugccccgaa

SEQ ID NO: 2085698 - RNA, 19 nt, Artificial Sequence
  Description of Artificial Sequence: Synthetic oligonucleotide
gccccgaauagcuuuccac

SEQ ID NO: 2085699 - RNA, 19 nt, Artificial Sequence
  Description of Artificial Sequence: Synthetic oligonucleotide
gaagcccgggcauccaagu

SEQ ID NO: 2085700 - RNA, 19 nt, Artificial Sequence
  Description of Artificial Sequence: Synthetic oligonucleotide
acgcuguucaggagcagga

SEQ ID NO: 2085701 - RNA, 19 nt, Artificial Sequence
  Description of Artificial Sequence: Synthetic oligonucleotide
gcuccaggccaauuucaug

SEQ ID NO: 2085702 - RNA, 19 nt, Artificial Sequence
  Description of Artificial Sequence: Synthetic oligonucleotide
ggauucuagccaggauccg

SEQ ID NO: 2085703 - RNA, 19 nt, Artificial Sequence
  Description of Artificial Sequence: Synthetic oligonucleotide
cagcggguaccagugauga

SEQ ID NO: 2085704 - RNA, 19 nt, Artificial Sequence
  Description of Artificial Sequence: Synthetic oligonucleotide
caaagugcaggcagcgggu

SEQ ID NO: 2085705 - RNA, 19 nt, Artificial Sequence
  Description of Artificial Sequence: Synthetic oligonucleotide
ucucgucacguggucguau

SEQ ID NO: 2085706 - RNA, 19 nt, Artificial Sequence
  Description of Artificial Sequence: Synthetic oligonucleotide
uucgcugcauugagaccuu

SEQ ID NO: 2085707 - RNA, 19 nt, Artificial Sequence
  Description of Artificial Sequence: Synthetic oligonucleotide
gcgagugcgccgcacuugc

SEQ ID NO: 2085708 - RNA, 19 nt, Artificial Sequence
  Description of Artificial Sequence: Synthetic oligonucleotide
acccuggaugcuguguaga

SEQ ID NO: 2085709 - RNA, 19 nt, Artificial Sequence
  Description of Artificial Sequence: Synthetic oligonucleotide
guggucguaugucgucuuc

SEQ ID NO: 2085710 - RNA, 19 nt, Artificial Sequence
  Description of Artificial Sequence: Synthetic oligonucleotide
gagugcgccgcacuugcgu

SEQ ID NO: 2085711 - RNA, 19 nt, Artificial Sequence
  Description of Artificial Sequence: Synthetic oligonucleotide
cuccacggucucccgcgcg

SEQ ID NO: 2085712 - RNA, 19 nt, Artificial Sequence
  Description of Artificial Sequence: Synthetic oligonucleotide
guucaugggccggaucaca

SEQ ID NO: 2085713 - RNA, 19 nt, Artificial Sequence
  Description of Artificial Sequence: Synthetic oligonucleotide
gcgagcacaagcacaccag

SEQ ID NO: 2085714 - RNA, 19 nt, Artificial Sequence
  Description of Artificial Sequence: Synthetic oligonucleotide
cuccugaucacugccccga

SEQ ID NO: 2085715 - RNA, 19 nt, Artificial Sequence
  Description of Artificial Sequence: Synthetic oligonucleotide
acgucggugagcagucuga

SEQ ID NO: 2085716 - RNA, 19 nt, Artificial Sequence
  Description of Artificial Sequence: Synthetic oligonucleotide
gucucccgcgcgugcagcc

SEQ ID NO: 2085717 - RNA, 19 nt, Artificial Sequence
  Description of Artificial Sequence: Synthetic oligonucleotide
cauguagccuagaacucau

SEQ ID NO: 2085718 - RNA, 19 nt, Artificial Sequence
  Description of Artificial Sequence: Synthetic oligonucleotide
ccuaggaggccucgcacug

SEQ ID NO: 2085719 - RNA, 19 nt, Artificial Sequence
  Description of Artificial Sequence: Synthetic oligonucleotide
gucguaugucgucuucucu

SEQ ID NO: 2085720 - RNA, 19 nt, Artificial Sequence
  Description of Artificial Sequence: Synthetic oligonucleotide
ccuagaacucaugaagcca

SEQ ID NO: 2085721 - RNA, 19 nt, Artificial Sequence
  Description of Artificial Sequence: Synthetic oligonucleotide
gcauuucucucgucacgug

SEQ ID NO: 2085722 - RNA, 19 nt, Artificial Sequence
  Description of Artificial Sequence: Synthetic oligonucleotide
ggccucgcacuguauaauc

SEQ ID NO: 2085723 - RNA, 19 nt, Artificial Sequence
  Description of Artificial Sequence: Synthetic oligonucleotide
ugcgccgcacuugcgugca

SEQ ID NO: 2085724 - RNA, 19 nt, Artificial Sequence
  Description of Artificial Sequence: Synthetic oligonucleotide
gggccuagcaagaagcgaa

SEQ ID NO: 2085725 - RNA, 19 nt, Artificial Sequence
  Description of Artificial Sequence: Synthetic oligonucleotide
gugcgccgcacuugcgugc

SEQ ID NO: 2085726 - RNA, 19 nt, Artificial Sequence
  Description of Artificial Sequence: Synthetic oligonucleotide
gcugcagacuggauggcac

SEQ ID NO: 2085727 - RNA, 19 nt, Artificial Sequence
  Description of Artificial Sequence: Synthetic oligonucleotide
cuucaggcuagugaaugcu

SEQ ID NO: 2085728 - RNA, 19 nt, Artificial Sequence
  Description of Artificial Sequence: Synthetic oligonucleotide
gauguccaacaccaaucuu

SEQ ID NO: 2085729 - RNA, 19 nt, Artificial Sequence
  Description of Artificial Sequence: Synthetic oligonucleotide
gccucgcacuguauaaucc

SEQ ID NO: 2085730 - RNA, 19 nt, Artificial Sequence
  Description of Artificial Sequence: Synthetic oligonucleotide
auguagccuagaacucaug

SEQ ID NO: 2085731 - RNA, 19 nt, Artificial Sequence
  Description of Artificial Sequence: Synthetic oligonucleotide
agggcaucauccagccuga

SEQ ID NO: 2085732 - RNA, 19 nt, Artificial Sequence
  Description of Artificial Sequence: Synthetic oligonucleotide
ggccggaucacacccugca

SEQ ID NO: 2085733 - RNA, 19 nt, Artificial Sequence
  Description of Artificial Sequence: Synthetic oligonucleotide
agacagcggcagucuucag

SEQ ID NO: 2085734 - RNA, 19 nt, Artificial Sequence
  Description of Artificial Sequence: Synthetic oligonucleotide
gccgggagguuuauagacc

SEQ ID NO: 2085735 - RNA, 19 nt, Artificial Sequence
  Description of Artificial Sequence: Synthetic oligonucleotide
ggugagcagucugagucca

SEQ ID NO: 2085736 - RNA, 19 nt, Artificial Sequence
  Description of Artificial Sequence: Synthetic oligonucleotide
caucggggacuuguucaug

SEQ ID NO: 2085737 - RNA, 19 nt, Artificial Sequence
  Description of Artificial Sequence: Synthetic oligonucleotide
cacggucucccgcgcgugc

SEQ ID NO: 2085738 - RNA, 19 nt, Artificial Sequence
  Description of Artificial Sequence: Synthetic oligonucleotide
acuuguucaugggccggau

SEQ ID NO: 2085739 - RNA, 19 nt, Artificial Sequence
  Description of Artificial Sequence: Synthetic oligonucleotide
guggguagugagggugggc

SEQ ID NO: 2085740 - RNA, 19 nt, Artificial Sequence
  Description of Artificial Sequence: Synthetic oligonucleotide
gaagaccccauggcuggaa

SEQ ID NO: 2085741 - RNA, 19 nt, Artificial Sequence
  Description of Artificial Sequence: Synthetic oligonucleotide
ggagguuuauagaccgcga

SEQ ID NO: 2085742 - RNA, 19 nt, Artificial Sequence
  Description of Artificial Sequence: Synthetic oligonucleotide
auaggccuccugggacuuc

SEQ ID NO: 2085743 - RNA, 19 nt, Artificial Sequence
  Description of Artificial Sequence: Synthetic oligonucleotide
auggcacccuggaugcugu

SEQ ID NO: 2085744 - RNA, 19 nt, Artificial Sequence
  Description of Artificial Sequence: Synthetic oligonucleotide
ccgaauagcuuuccaccuc

SEQ ID NO: 2085745 - RNA, 19 nt, Artificial Sequence
  Description of Artificial Sequence: Synthetic oligonucleotide
ggaggcuucgcugcauuga

SEQ ID NO: 2085746 - RNA, 19 nt, Artificial Sequence
  Description of Artificial Sequence: Synthetic oligonucleotide
ggaugcuguguagauucca

SEQ ID NO: 2085747 - RNA, 19 nt, Artificial Sequence
  Description of Artificial Sequence: Synthetic oligonucleotide
ccgcccaucuucacagaag

SEQ ID NO: 2085748 - RNA, 19 nt, Artificial Sequence
  Description of Artificial Sequence: Synthetic oligonucleotide
ucucccgcgcgugcagcca

SEQ ID NO: 2085749 - RNA, 19 nt, Artificial Sequence
  Description of Artificial Sequence: Synthetic oligonucleotide
ggguagugagggugggcac

SEQ ID NO: 2085750 - RNA, 19 nt, Artificial Sequence
  Description of Artificial Sequence: Synthetic oligonucleotide
cuuggauucuagccaggau

SEQ ID NO: 2085751 - RNA, 19 nt, Artificial Sequence
  Description of Artificial Sequence: Synthetic oligonucleotide
acuucagguccagguugga

SEQ ID NO: 2085752 - RNA, 19 nt, Artificial Sequence
  Description of Artificial Sequence: Synthetic oligonucleotide
gagcaucauacacgucggu

SEQ ID NO: 2085753 - RNA, 19 nt, Artificial Sequence
  Description of Artificial Sequence: Synthetic oligonucleotide
ggaggccucgcacuguaua

SEQ ID NO: 2085754 - RNA, 19 nt, Artificial Sequence
  Description of Artificial Sequence: Synthetic oligonucleotide
caugucccacagcgagcac

SEQ ID NO: 2085755 - RNA, 19 nt, Artificial Sequence
  Description of Artificial Sequence: Synthetic oligonucleotide
gugaaugcugggccacgua

SEQ ID NO: 2085756 - RNA, 19 nt, Artificial Sequence
  Description of Artificial Sequence: Synthetic oligonucleotide
cugccccgaauagcuuucc

SEQ ID NO: 2085757 - RNA, 19 nt, Artificial Sequence
  Description of Artificial Sequence: Synthetic oligonucleotide
ggccaauuucaugcaccag

SEQ ID NO: 2085758 - RNA, 19 nt, Artificial Sequence
  Description of Artificial Sequence: Synthetic oligonucleotide
uucaugccgggagguuuau

SEQ ID NO: 2085759 - RNA, 19 nt, Artificial Sequence
  Description of Artificial Sequence: Synthetic oligonucleotide
uggcacccuggaugcugug

SEQ ID NO: 2085760 - RNA, 19 nt, Artificial Sequence
  Description of Artificial Sequence: Synthetic oligonucleotide
guacaagucuguggguagu

SEQ ID NO: 2085761 - RNA, 19 nt, Artificial Sequence
  Description of Artificial Sequence: Synthetic oligonucleotide
gccaucgcgagugcgccgc

SEQ ID NO: 2085762 - RNA, 19 nt, Artificial Sequence
  Description of Artificial Sequence: Synthetic oligonucleotide
gaccgcgaagaggcccugc

SEQ ID NO: 2085763 - RNA, 19 nt, Artificial Sequence
  Description of Artificial Sequence: Synthetic oligonucleotide
acacgcuguucaggagcag

SEQ ID NO: 2085764 - RNA, 19 nt, Artificial Sequence
  Description of Artificial Sequence: Synthetic oligonucleotide
ggcauccaagugaugucca

SEQ ID NO: 2085765 - RNA, 19 nt, Artificial Sequence
  Description of Artificial Sequence: Synthetic oligonucleotide
ggcgagccaggcccgaaga

SEQ ID NO: 2085766 - RNA, 19 nt, Artificial Sequence
  Description of Artificial Sequence: Synthetic oligonucleotide
caggcccgaagaccccaug

SEQ ID NO: 2085767 - RNA, 19 nt, Artificial Sequence
  Description of Artificial Sequence: Synthetic oligonucleotide
cugggccacguacaagucu

SEQ ID NO: 2085768 - RNA, 19 nt, Artificial Sequence
  Description of Artificial Sequence: Synthetic oligonucleotide
gcagcggguaccagugaug

SEQ ID NO: 2085769 - RNA, 19 nt, Artificial Sequence
  Description of Artificial Sequence: Synthetic oligonucleotide
cgagccaggcccgaagacc

SEQ ID NO: 2085770 - RNA, 19 nt, Artificial Sequence
  Description of Artificial Sequence: Synthetic oligonucleotide
ggccuagcaagaagcgaac

SEQ ID NO: 2085771 - RNA, 19 nt, Artificial Sequence
  Description of Artificial Sequence: Synthetic oligonucleotide
gguccagcauuucucucgu

SEQ ID NO: 2085772 - RNA, 19 nt, Artificial Sequence
  Description of Artificial Sequence: Synthetic oligonucleotide
acggucucccgcgcgugca

SEQ ID NO: 2085773 - RNA, 19 nt, Artificial Sequence
  Description of Artificial Sequence: Synthetic oligonucleotide
cagcgagcacaagcacacc

SEQ ID NO: 2085774 - RNA, 19 nt, Artificial Sequence
  Description of Artificial Sequence: Synthetic oligonucleotide
aggcuucgcugcauugaga

SEQ ID NO: 2085775 - RNA, 19 nt, Artificial Sequence
  Description of Artificial Sequence: Synthetic oligonucleotide
ggccacguacaagucugug

SEQ ID NO: 2085776 - RNA, 19 nt, Artificial Sequence
  Description of Artificial Sequence: Synthetic oligonucleotide
cgaacacgcuguucaggag

SEQ ID NO: 2085777 - RNA, 19 nt, Artificial Sequence
  Description of Artificial Sequence: Synthetic oligonucleotide
caacaccaaucuucaggcu

SEQ ID NO: 2085778 - RNA, 19 nt, Artificial Sequence
  Description of Artificial Sequence: Synthetic oligonucleotide
cagaagcccgggcauccaa

SEQ ID NO: 2085779 - RNA, 19 nt, Artificial Sequence
  Description of Artificial Sequence: Synthetic oligonucleotide
gccgcacuugcgugcagac

SEQ ID NO: 2085780 - RNA, 19 nt, Artificial Sequence
  Description of Artificial Sequence: Synthetic oligonucleotide
ucaugccgggagguuuaua

SEQ ID NO: 2085781 - RNA, 19 nt, Artificial Sequence
  Description of Artificial Sequence: Synthetic oligonucleotide
gccggaucacacccugcac

SEQ ID NO: 2085782 - RNA, 19 nt, Artificial Sequence
  Description of Artificial Sequence: Synthetic oligonucleotide
cacguacaagucugugggu

SEQ ID NO: 2085783 - RNA, 19 nt, Artificial Sequence
  Description of Artificial Sequence: Synthetic oligonucleotide
caggauccgguccagcauu

SEQ ID NO: 2085784 - RNA, 19 nt, Artificial Sequence
  Description of Artificial Sequence: Synthetic oligonucleotide
gcacuguauaauccuuggu

SEQ ID NO: 2085785 - RNA, 19 nt, Artificial Sequence
  Description of Artificial Sequence: Synthetic oligonucleotide
cacugccccgaauagcuuu

SEQ ID NO: 2085786 - RNA, 19 nt, Artificial Sequence
  Description of Artificial Sequence: Synthetic oligonucleotide
caucgcgagugcgccgcac

SEQ ID NO: 2085787 - RNA, 19 nt, Artificial Sequence
  Description of Artificial Sequence: Synthetic oligonucleotide
guccagcauuucucucguc

SEQ ID NO: 2085788 - RNA, 19 nt, Artificial Sequence
  Description of Artificial Sequence: Synthetic oligonucleotide
cugcugggucucaugcaua

SEQ ID NO: 2085789 - RNA, 19 nt, Artificial Sequence
  Description of Artificial Sequence: Synthetic oligonucleotide
gcaggcagcggguaccagu

SEQ ID NO: 2085790 - RNA, 19 nt, Artificial Sequence
  Description of Artificial Sequence: Synthetic oligonucleotide
cagccauuucaugccggga

SEQ ID NO: 2085791 - RNA, 19 nt, Artificial Sequence
  Description of Artificial Sequence: Synthetic oligonucleotide
gcgagccaggcccgaagac

SEQ ID NO: 2085792 - RNA, 19 nt, Artificial Sequence
  Description of Artificial Sequence: Synthetic oligonucleotide
gccuagcaagaagcgaaca

SEQ ID NO: 2085793 - RNA, 19 nt, Artificial Sequence
  Description of Artificial Sequence: Synthetic oligonucleotide
ccuuggauucuagccagga

SEQ ID NO: 2085794 - RNA, 19 nt, Artificial Sequence
  Description of Artificial Sequence: Synthetic oligonucleotide
ccaaccucagucucaaguu

SEQ ID NO: 2085795 - RNA, 19 nt, Artificial Sequence
  Description of Artificial Sequence: Synthetic oligonucleotide
ccaucucauaggccuccug

SEQ ID NO: 2085796 - RNA, 19 nt, Artificial Sequence
  Description of Artificial Sequence: Synthetic oligonucleotide
cccgaauagcuuuccaccu

SEQ ID NO: 2085797 - RNA, 19 nt, Artificial Sequence
  Description of Artificial Sequence: Synthetic oligonucleotide
acacgucggugagcagucu

SEQ ID NO: 2085798 - RNA, 19 nt, Artificial Sequence
  Description of Artificial Sequence: Synthetic oligonucleotide
gcacuugcgugcagacagc

SEQ ID NO: 2085799 - RNA, 19 nt, Artificial Sequence
  Description of Artificial Sequence: Synthetic oligonucleotide
cgcgcgugcagccauuuca

SEQ ID NO: 2085800 - RNA, 19 nt, Artificial Sequence
  Description of Artificial Sequence: Synthetic oligonucleotide
agaccgcgaagaggcccug

SEQ ID NO: 2085801 - RNA, 19 nt, Artificial Sequence
  Description of Artificial Sequence: Synthetic oligonucleotide
gccgcccaucuucacagaa

SEQ ID NO: 2085802 - RNA, 19 nt, Artificial Sequence
  Description of Artificial Sequence: Synthetic oligonucleotide
gccuaggaggccucgcacu

SEQ ID NO: 2085803 - RNA, 19 nt, Artificial Sequence
  Description of Artificial Sequence: Synthetic oligonucleotide
gugggagccuuggauucua

SEQ ID NO: 2085804 - RNA, 19 nt, Artificial Sequence
  Description of Artificial Sequence: Synthetic oligonucleotide
cgggcauccaagugauguc

SEQ ID NO: 2085805 - RNA, 19 nt, Artificial Sequence
  Description of Artificial Sequence: Synthetic oligonucleotide
cgggagguuuauagaccgc

SEQ ID NO: 2085806 - RNA, 19 nt, Artificial Sequence
  Description of Artificial Sequence: Synthetic oligonucleotide
ggucucccgcgcgugcagc

SEQ ID NO: 2085807 - RNA, 19 nt, Artificial Sequence
  Description of Artificial Sequence: Synthetic oligonucleotide
gcuccacggucucccgcgc

SEQ ID NO: 2085808 - RNA, 19 nt, Artificial Sequence
  Description of Artificial Sequence: Synthetic oligonucleotide
gugcagacagcggcagucu

SEQ ID NO: 2085809 - RNA, 19 nt, Artificial Sequence
  Description of Artificial Sequence: Synthetic oligonucleotide
cgcugcauugagaccuuuc

SEQ ID NO: 2085810 - RNA, 19 nt, Artificial Sequence
  Description of Artificial Sequence: Synthetic oligonucleotide
ccgggcauccaagugaugu

SEQ ID NO: 2085811 - RNA, 19 nt, Artificial Sequence
  Description of Artificial Sequence: Synthetic oligonucleotide
ucgcugcauugagaccuuu

SEQ ID NO: 2085812 - RNA, 19 nt, Artificial Sequence
  Description of Artificial Sequence: Synthetic oligonucleotide
gcaucggggacuuguucau

SEQ ID NO: 2085813 - RNA, 19 nt, Artificial Sequence
  Description of Artificial Sequence: Synthetic oligonucleotide
cacacccugcacggccauc

SEQ ID NO: 2085814 - RNA, 19 nt, Artificial Sequence
  Description of Artificial Sequence: Synthetic oligonucleotide
ccgguccagcauuucucuc

SEQ ID NO: 2085815 - RNA, 19 nt, Artificial Sequence
  Description of Artificial Sequence: Synthetic oligonucleotide
cgucggugagcagucugag

SEQ ID NO: 2085816 - RNA, 19 nt, Artificial Sequence
  Description of Artificial Sequence: Synthetic oligonucleotide
cauuucaugccgggagguu

SEQ ID NO: 2085817 - RNA, 19 nt, Artificial Sequence
  Description of Artificial Sequence: Synthetic oligonucleotide
guacaucaccagugccuuu

SEQ ID NO: 2085818 - RNA, 19 nt, Artificial Sequence
  Description of Artificial Sequence: Synthetic oligonucleotide
cuaggaggccucgcacugu

SEQ ID NO: 2085819 - RNA, 19 nt, Artificial Sequence
  Description of Artificial Sequence: Synthetic oligonucleotide
gcggcagucuucagcucca

SEQ ID NO: 2085820 - RNA, 19 nt, Artificial Sequence
  Description of Artificial Sequence: Synthetic oligonucleotide
gcccaaccucagucucaag

SEQ ID NO: 2085821 - RNA, 19 nt, Artificial Sequence
  Description of Artificial Sequence: Synthetic oligonucleotide
cgagugcgccgcacuugcg

SEQ ID NO: 2085822 - RNA, 19 nt, Artificial Sequence
  Description of Artificial Sequence: Synthetic oligonucleotide
cgcgugcagccauuucaug

SEQ ID NO: 2085823 - RNA, 19 nt, Artificial Sequence
  Description of Artificial Sequence: Synthetic oligonucleotide
cguaugucgucuucucuau

SEQ ID NO: 2085824 - RNA, 19 nt, Artificial Sequence
  Description of Artificial Sequence: Synthetic oligonucleotide
caggaggcuucgcugcauu

SEQ ID NO: 2085825 - RNA, 19 nt, Artificial Sequence
  Description of Artificial Sequence: Synthetic oligonucleotide
ggugggcacacugguggcu

SEQ ID NO: 2085826 - RNA, 19 nt, Artificial Sequence
  Description of Artificial Sequence: Synthetic oligonucleotide
ccauuucaugccgggaggu

SEQ ID NO: 2085827 - RNA, 19 nt, Artificial Sequence
  Description of Artificial Sequence: Synthetic oligonucleotide
cucucgucacguggucgua

SEQ ID NO: 2085828 - RNA, 19 nt, Artificial Sequence
  Description of Artificial Sequence: Synthetic oligonucleotide
gcagacuggauggcacccu

SEQ ID NO: 2085829 - RNA, 19 nt, Artificial Sequence
  Description of Artificial Sequence: Synthetic oligonucleotide
caccaaucuucaggcuagu

SEQ ID NO: 2085830 - RNA, 19 nt, Artificial Sequence
  Description of Artificial Sequence: Synthetic oligonucleotide
ccaggauccgguccagcau

SEQ ID NO: 2085831 - RNA, 19 nt, Artificial Sequence
  Description of Artificial Sequence: Synthetic oligonucleotide
cgcgagugcgccgcacuug

SEQ ID NO: 2085832 - RNA, 19 nt, Artificial Sequence
  Description of Artificial Sequence: Synthetic oligonucleotide
cccgggcauccaagugaug

SEQ ID NO: 2085833 - RNA, 19 nt, Artificial Sequence
  Description of Artificial Sequence: Synthetic oligonucleotide
gugagcagucugaguccau

SEQ ID NO: 2085834 - RNA, 19 nt, Artificial Sequence
  Description of Artificial Sequence: Synthetic oligonucleotide
gcgcgugcagccauuucau

SEQ ID NO: 2085835 - RNA, 19 nt, Artificial Sequence
  Description of Artificial Sequence: Synthetic oligonucleotide
gcgccgcacuugcgugcag

SEQ ID NO: 2085836 - RNA, 19 nt, Artificial Sequence
  Description of Artificial Sequence: Synthetic oligonucleotide
gcccgggcauccaagugau

SEQ ID NO: 2085837 - RNA, 19 nt, Artificial Sequence
  Description of Artificial Sequence: Synthetic oligonucleotide
ccgcacuugcgugcagaca

SEQ ID NO: 2085838 - RNA, 19 nt, Artificial Sequence
  Description of Artificial Sequence: Synthetic oligonucleotide
ccugaucacugccccgaau

SEQ ID NO: 2085839 - RNA, 19 nt, Artificial Sequence
  Description of Artificial Sequence: Synthetic oligonucleotide
gcgugcagacagcggcagu

SEQ ID NO: 2085840 - RNA, 19 nt, Artificial Sequence
  Description of Artificial Sequence: Synthetic oligonucleotide
ccgcgcgugcagccauuuc

SEQ ID NO: 2085841 - RNA, 19 nt, Artificial Sequence
  Description of Artificial Sequence: Synthetic oligonucleotide
gggcaucauccagccugaa

SEQ ID NO: 2085842 - RNA, 19 nt, Artificial Sequence
  Description of Artificial Sequence: Synthetic oligonucleotide
ccaucgcgagugcgccgca

SEQ ID NO: 2085843 - RNA, 19 nt, Artificial Sequence
  Description of Artificial Sequence: Synthetic oligonucleotide
ccagugccuuuugguggga

SEQ ID NO: 2085844 - RNA, 19 nt, Artificial Sequence
  Description of Artificial Sequence: Synthetic oligonucleotide
caccuccacaguggagcuu

SEQ ID NO: 2085845 - RNA, 19 nt, Artificial Sequence
  Description of Artificial Sequence: Synthetic oligonucleotide
cgccgcacuugcgugcaga

SEQ ID NO: 2085846 - RNA, 19 nt, Artificial Sequence
  Description of Artificial Sequence: Synthetic oligonucleotide
cgaagaccccauggcugga

SEQ ID NO: 2085847 - RNA, 19 nt, Artificial Sequence
  Description of Artificial Sequence: Synthetic oligonucleotide
cguggucguaugucgucuu

SEQ ID NO: 2085848 - RNA, 19 nt, Artificial Sequence
  Description of Artificial Sequence: Synthetic oligonucleotide
cccgcgcgugcagccauuu

SEQ ID NO: 2085849 - RNA, 19 nt, Artificial Sequence
  Description of Artificial Sequence: Synthetic oligonucleotide
augguaaucagccugaauc

SEQ ID NO: 2085850 - RNA, 19 nt, Artificial Sequence
  Description of Artificial Sequence: Synthetic oligonucleotide
gaaauugauaucuccaggg

SEQ ID NO: 2085851 - RNA, 19 nt, Artificial Sequence
  Description of Artificial Sequence: Synthetic oligonucleotide
gaauugaggacacagaggc

SEQ ID NO: 2085852 - RNA, 19 nt, Artificial Sequence
  Description of Artificial Sequence: Synthetic oligonucleotide
agaugaaugaaguaguuag

SEQ ID NO: 2085853 - RNA, 19 nt, Artificial Sequence
  Description of Artificial Sequence: Synthetic oligonucleotide
aagacaauggcgauguugc

SEQ ID NO: 2085854 - RNA, 19 nt, Artificial Sequence
  Description of Artificial Sequence: Synthetic oligonucleotide
ucugcguucuguauuagcg

SEQ ID NO: 2085855 - RNA, 19 nt, Artificial Sequence
  Description of Artificial Sequence: Synthetic oligonucleotide
uaugaguccuccuuggugg

SEQ ID NO: 2085856 - RNA, 19 nt, Artificial Sequence
  Description of Artificial Sequence: Synthetic oligonucleotide
ugaaauugauaucuccagg

SEQ ID NO: 2085857 - RNA, 19 nt, Artificial Sequence
  Description of Artificial Sequence: Synthetic oligonucleotide
uguauuagcgcuucaacca

SEQ ID NO: 2085858 - RNA, 19 nt, Artificial Sequence
  Description of Artificial Sequence: Synthetic oligonucleotide
agggacaccccauauaccc

SEQ ID NO: 2085859 - RNA, 19 nt, Artificial Sequence
  Description of Artificial Sequence: Synthetic oligonucleotide
gauaacagcauuaggacgc

SEQ ID NO: 2085860 - RNA, 19 nt, Artificial Sequence
  Description of Artificial Sequence: Synthetic oligonucleotide
ugauaacagcauuaggacg

SEQ ID NO: 2085861 - RNA, 19 nt, Artificial Sequence
  Description of Artificial Sequence: Synthetic oligonucleotide
ugaauugaggacacagagg

SEQ ID NO: 2085862 - RNA, 19 nt, Artificial Sequence
  Description of Artificial Sequence: Synthetic oligonucleotide
aguaguuagcauaugaguc

SEQ ID NO: 2085863 - RNA, 19 nt, Artificial Sequence
  Description of Artificial Sequence: Synthetic oligonucleotide
ggagauaggacuuaagggc

SEQ ID NO: 2085864 - RNA, 19 nt, Artificial Sequence
  Description of Artificial Sequence: Synthetic oligonucleotide
acagcauuaggacgcacgc

SEQ ID NO: 2085865 - RNA, 19 nt, Artificial Sequence
  Description of Artificial Sequence: Synthetic oligonucleotide
uagcgcuucaaccacaccc

SEQ ID NO: 2085866 - RNA, 19 nt, Artificial Sequence
  Description of Artificial Sequence: Synthetic oligonucleotide
aauugauaucuccagggaa

SEQ ID NO: 2085867 - RNA, 19 nt, Artificial Sequence
  Description of Artificial Sequence: Synthetic oligonucleotide
aaauugauaucuccaggga

SEQ ID NO: 2085868 - RNA, 19 nt, Artificial Sequence
  Description of Artificial Sequence: Synthetic oligonucleotide
cugaauugaggacacagag

SEQ ID NO: 2085869 - RNA, 19 nt, Artificial Sequence
  Description of Artificial Sequence: Synthetic oligonucleotide
guaguuagcauaugagucc

SEQ ID NO: 2085870 - RNA, 19 nt, Artificial Sequence
  Description of Artificial Sequence: Synthetic oligonucleotide
ucagggacaccccauauac

SEQ ID NO: 2085871 - RNA, 19 nt, Artificial Sequence
  Description of Artificial Sequence: Synthetic oligonucleotide
cuguauuagcgcuucaacc

SEQ ID NO: 2085872 - RNA, 19 nt, Artificial Sequence
  Description of Artificial Sequence: Synthetic oligonucleotide
cugaaauugauaucuccag

SEQ ID NO: 2085873 - RNA, 19 nt, Artificial Sequence
  Description of Artificial Sequence: Synthetic oligonucleotide
ugcgaugguaaucagccug

SEQ ID NO: 2085874 - RNA, 19 nt, Artificial Sequence
  Description of Artificial Sequence: Synthetic oligonucleotide
aaugaaguaguuagcauau

SEQ ID NO: 2085875 - RNA, 19 nt, Artificial Sequence
  Description of Artificial Sequence: Synthetic oligonucleotide
ucuguauuagcgcuucaac

SEQ ID NO: 2085876 - RNA, 19 nt, Artificial Sequence
  Description of Artificial Sequence: Synthetic oligonucleotide
cugagaagaugccugauac

SEQ ID NO: 2085877 - RNA, 19 nt, Artificial Sequence
  Description of Artificial Sequence: Synthetic oligonucleotide
aacagcauuaggacgcacg

SEQ ID NO: 2085878 - RNA, 19 nt, Artificial Sequence
  Description of Artificial Sequence: Synthetic oligonucleotide
caggagaugaaugaaguag

SEQ ID NO: 2085879 - RNA, 19 nt, Artificial Sequence
  Description of Artificial Sequence: Synthetic oligonucleotide
auugaggacacagaggcug

SEQ ID NO: 2085880 - RNA, 19 nt, Artificial Sequence
  Description of Artificial Sequence: Synthetic oligonucleotide
acuuaagggcaccugccac

SEQ ID NO: 2085881 - RNA, 19 nt, Artificial Sequence
  Description of Artificial Sequence: Synthetic oligonucleotide
acacccaccaccugaauug

SEQ ID NO: 2085882 - RNA, 19 nt, Artificial Sequence
  Description of Artificial Sequence: Synthetic oligonucleotide
ugguaaucagccugaaucu

SEQ ID NO: 2085883 - RNA, 19 nt, Artificial Sequence
  Description of Artificial Sequence: Synthetic oligonucleotide
gaugucacggccuagcucu

SEQ ID NO: 2085884 - RNA, 19 nt, Artificial Sequence
  Description of Artificial Sequence: Synthetic oligonucleotide
cacugaaauugauaucucc

SEQ ID NO: 2085885 - RNA, 19 nt, Artificial Sequence
  Description of Artificial Sequence: Synthetic oligonucleotide
auacacugaaauugauauc

SEQ ID NO: 2085886 - RNA, 19 nt, Artificial Sequence
  Description of Artificial Sequence: Synthetic oligonucleotide
auaugaguccuccuuggug

SEQ ID NO: 2085887 - RNA, 19 nt, Artificial Sequence
  Description of Artificial Sequence: Synthetic oligonucleotide
augaaugaaguaguuagca

SEQ ID NO: 2085888 - RNA, 19 nt, Artificial Sequence
  Description of Artificial Sequence: Synthetic oligonucleotide
caucuuguucacuucuugc

SEQ ID NO: 2085889 - RNA, 19 nt, Artificial Sequence
  Description of Artificial Sequence: Synthetic oligonucleotide
gaugaaugaaguaguuagc

SEQ ID NO: 2085890 - RNA, 19 nt, Artificial Sequence
  Description of Artificial Sequence: Synthetic oligonucleotide
cugggugucaucuuguuca

SEQ ID NO: 2085891 - RNA, 19 nt, Artificial Sequence
  Description of Artificial Sequence: Synthetic oligonucleotide
aggacgcacgccucgaugg

SEQ ID NO: 2085892 - RNA, 19 nt, Artificial Sequence
  Description of Artificial Sequence: Synthetic oligonucleotide
augccugauacacugaaau

SEQ ID NO: 2085893 - RNA, 19 nt, Artificial Sequence
  Description of Artificial Sequence: Synthetic oligonucleotide
cauugucugcuugagacgc

SEQ ID NO: 2085894 - RNA, 19 nt, Artificial Sequence
  Description of Artificial Sequence: Synthetic oligonucleotide
aacaucacggagggccucc

SEQ ID NO: 2085895 - RNA, 19 nt, Artificial Sequence
  Description of Artificial Sequence: Synthetic oligonucleotide
agcauaugaguccuccuug

SEQ ID NO: 2085896 - RNA, 19 nt, Artificial Sequence
  Description of Artificial Sequence: Synthetic oligonucleotide
gcaaacaucacggagggcc

SEQ ID NO: 2085897 - RNA, 19 nt, Artificial Sequence
  Description of Artificial Sequence: Synthetic oligonucleotide
acugaaauugauaucucca

SEQ ID NO: 2085898 - RNA, 19 nt, Artificial Sequence
  Description of Artificial Sequence: Synthetic oligonucleotide
ugcuugagacgcuucagca

SEQ ID NO: 2085899 - RNA, 19 nt, Artificial Sequence
  Description of Artificial Sequence: Synthetic oligonucleotide
agccagacggaagaggccc

SEQ ID NO: 2085900 - RNA, 19 nt, Artificial Sequence
  Description of Artificial Sequence: Synthetic oligonucleotide
caaguacucauccuugcac

SEQ ID NO: 2085901 - RNA, 19 nt, Artificial Sequence
  Description of Artificial Sequence: Synthetic oligonucleotide
agguccguuggcuacugac

SEQ ID NO: 2085902 - RNA, 19 nt, Artificial Sequence
  Description of Artificial Sequence: Synthetic oligonucleotide
agggaagagcguuucugcg

SEQ ID NO: 2085903 - RNA, 19 nt, Artificial Sequence
  Description of Artificial Sequence: Synthetic oligonucleotide
ugaccugcgaugguaauca

SEQ ID NO: 2085904 - RNA, 19 nt, Artificial Sequence
  Description of Artificial Sequence: Synthetic oligonucleotide
gagcagaacuccucuaggc

SEQ ID NO: 2085905 - RNA, 19 nt, Artificial Sequence
  Description of Artificial Sequence: Synthetic oligonucleotide
ccugcgaugguaaucagcc

SEQ ID NO: 2085906 - RNA, 19 nt, Artificial Sequence
  Description of Artificial Sequence: Synthetic oligonucleotide
cauacccucugauaacagc

SEQ ID NO: 2085907 - RNA, 19 nt, Artificial Sequence
  Description of Artificial Sequence: Synthetic oligonucleotide
ugcguucuguauuagcgcu

SEQ ID NO: 2085908 - RNA, 19 nt, Artificial Sequence
  Description of Artificial Sequence: Synthetic oligonucleotide
cucagcucagcuagggccg

SEQ ID NO: 2085909 - RNA, 19 nt, Artificial Sequence
  Description of Artificial Sequence: Synthetic oligonucleotide
guuagcauaugaguccucc

SEQ ID NO: 2085910 - RNA, 19 nt, Artificial Sequence
  Description of Artificial Sequence: Synthetic oligonucleotide
guugcugaaguucucuuga

SEQ ID NO: 2085911 - RNA, 19 nt, Artificial Sequence
  Description of Artificial Sequence: Synthetic oligonucleotide
accugaauugaggacacag

SEQ ID NO: 2085912 - RNA, 19 nt, Artificial Sequence
  Description of Artificial Sequence: Synthetic oligonucleotide
aaguucucuugaggcaggc

SEQ ID NO: 2085913 - RNA, 19 nt, Artificial Sequence
  Description of Artificial Sequence: Synthetic oligonucleotide
ccauauacccuggagaugg

SEQ ID NO: 2085914 - RNA, 19 nt, Artificial Sequence
  Description of Artificial Sequence: Synthetic oligonucleotide
caucauagaggucagaggu

SEQ ID NO: 2085915 - RNA, 19 nt, Artificial Sequence
  Description of Artificial Sequence: Synthetic oligonucleotide
guaaucagccugaaucucc

SEQ ID NO: 2085916 - RNA, 19 nt, Artificial Sequence
  Description of Artificial Sequence: Synthetic oligonucleotide
uauuagcgcuucaaccaca

SEQ ID NO: 2085917 - RNA, 19 nt, Artificial Sequence
  Description of Artificial Sequence: Synthetic oligonucleotide
cuugagacgcuucagcaca

SEQ ID NO: 2085918 - RNA, 19 nt, Artificial Sequence
  Description of Artificial Sequence: Synthetic oligonucleotide
cugagcagaacuccucuag

SEQ ID NO: 2085919 - RNA, 19 nt, Artificial Sequence
  Description of Artificial Sequence: Synthetic oligonucleotide
gccauugucugcuugagac

SEQ ID NO: 2085920 - RNA, 19 nt, Artificial Sequence
  Description of Artificial Sequence: Synthetic oligonucleotide
auggcgauguugcugggug

SEQ ID NO: 2085921 - RNA, 19 nt, Artificial Sequence
  Description of Artificial Sequence: Synthetic oligonucleotide
ggcaauuccucugaggucc

SEQ ID NO: 2085922 - RNA, 19 nt, Artificial Sequence
  Description of Artificial Sequence: Synthetic oligonucleotide
accaccugaauugaggaca

SEQ ID NO: 2085923 - RNA, 19 nt, Artificial Sequence
  Description of Artificial Sequence: Synthetic oligonucleotide
gagauaggacuuaagggca

SEQ ID NO: 2085924 - RNA, 19 nt, Artificial Sequence
  Description of Artificial Sequence: Synthetic oligonucleotide
aggucagugaccugcgaug

SEQ ID NO: 2085925 - RNA, 19 nt, Artificial Sequence
  Description of Artificial Sequence: Synthetic oligonucleotide
ugcauacccucugauaaca

SEQ ID NO: 2085926 - RNA, 19 nt, Artificial Sequence
  Description of Artificial Sequence: Synthetic oligonucleotide
uacucauccuugcacugcu

SEQ ID NO: 2085927 - RNA, 19 nt, Artificial Sequence
  Description of Artificial Sequence: Synthetic oligonucleotide
auccuugcacugcuccacc

SEQ ID NO: 2085928 - RNA, 19 nt, Artificial Sequence
  Description of Artificial Sequence: Synthetic oligonucleotide
uccaggggaggucagugac

SEQ ID NO: 2085929 - RNA, 19 nt, Artificial Sequence
  Description of Artificial Sequence: Synthetic oligonucleotide
guauuagcgcuucaaccac

SEQ ID NO: 2085930 - RNA, 19 nt, Artificial Sequence
  Description of Artificial Sequence: Synthetic oligonucleotide
auuagcgcuucaaccacac

SEQ ID NO: 2085931 - RNA, 19 nt, Artificial Sequence
  Description of Artificial Sequence: Synthetic oligonucleotide
gagacgcuucagcacagag

SEQ ID NO: 2085932 - RNA, 19 nt, Artificial Sequence
  Description of Artificial Sequence: Synthetic oligonucleotide
cauuaggacgcacgccucg

SEQ ID NO: 2085933 - RNA, 19 nt, Artificial Sequence
  Description of Artificial Sequence: Synthetic oligonucleotide
auacccucugauaacagca

SEQ ID NO: 2085934 - RNA, 19 nt, Artificial Sequence
  Description of Artificial Sequence: Synthetic oligonucleotide
uagcauaugaguccuccuu

SEQ ID NO: 2085935 - RNA, 19 nt, Artificial Sequence
  Description of Artificial Sequence: Synthetic oligonucleotide
uuagcauaugaguccuccu

SEQ ID NO: 2085936 - RNA, 19 nt, Artificial Sequence
  Description of Artificial Sequence: Synthetic oligonucleotide
uaguuagcauaugaguccu

SEQ ID NO: 2085937 - RNA, 19 nt, Artificial Sequence
  Description of Artificial Sequence: Synthetic oligonucleotide
uugauaucuccagggaaga

SEQ ID NO: 2085938 - RNA, 19 nt, Artificial Sequence
  Description of Artificial Sequence: Synthetic oligonucleotide
gccugauacacugaaauug

SEQ ID NO: 2085939 - RNA, 19 nt, Artificial Sequence
  Description of Artificial Sequence: Synthetic oligonucleotide
cugcguucuguauuagcgc

SEQ ID NO: 2085940 - RNA, 19 nt, Artificial Sequence
  Description of Artificial Sequence: Synthetic oligonucleotide
ggccauagcagguugggcc

SEQ ID NO: 2085941 - RNA, 19 nt, Artificial Sequence
  Description of Artificial Sequence: Synthetic oligonucleotide
uucugcguucuguauuagc

SEQ ID NO: 2085942 - RNA, 19 nt, Artificial Sequence
  Description of Artificial Sequence: Synthetic oligonucleotide
ucuggcagcucccggagau

SEQ ID NO: 2085943 - RNA, 19 nt, Artificial Sequence
  Description of Artificial Sequence: Synthetic oligonucleotide
ucagccaaguacucauccu

SEQ ID NO: 2085944 - RNA, 19 nt, Artificial Sequence
  Description of Artificial Sequence: Synthetic oligonucleotide
ccggagauaggacuuaagg

SEQ ID NO: 2085945 - RNA, 19 nt, Artificial Sequence
  Description of Artificial Sequence: Synthetic oligonucleotide
gucugcuuggcugugguug

SEQ ID NO: 2085946 - RNA, 19 nt, Artificial Sequence
  Description of Artificial Sequence: Synthetic oligonucleotide
acggccuagcucuuccagg

SEQ ID NO: 2085947 - RNA, 19 nt, Artificial Sequence
  Description of Artificial Sequence: Synthetic oligonucleotide
auauacccuggagaugggg

SEQ ID NO: 2085948 - RNA, 19 nt, Artificial Sequence
  Description of Artificial Sequence: Synthetic oligonucleotide
uugacugccuccugaguuc

SEQ ID NO: 2085949 - RNA, 19 nt, Artificial Sequence
  Description of Artificial Sequence: Synthetic oligonucleotide
agauaggacuuaagggcac

SEQ ID NO: 2085950 - RNA, 19 nt, Artificial Sequence
  Description of Artificial Sequence: Synthetic oligonucleotide
gauaggacuuaagggcacc

SEQ ID NO: 2085951 - RNA, 19 nt, Artificial Sequence
  Description of Artificial Sequence: Synthetic oligonucleotide
gcauaugaguccuccuugg

SEQ ID NO: 2085952 - RNA, 19 nt, Artificial Sequence
  Description of Artificial Sequence: Synthetic oligonucleotide
agacgcuucagcacagagg

SEQ ID NO: 2085953 - RNA, 19 nt, Artificial Sequence
  Description of Artificial Sequence: Synthetic oligonucleotide
agcagguugggccccaaga

SEQ ID NO: 2085954 - RNA, 19 nt, Artificial Sequence
  Description of Artificial Sequence: Synthetic oligonucleotide
cggagauaggacuuaaggg

SEQ ID NO: 2085955 - RNA, 19 nt, Artificial Sequence
  Description of Artificial Sequence: Synthetic oligonucleotide
ugggccccaagacaauggc

SEQ ID NO: 2085956 - RNA, 19 nt, Artificial Sequence
  Description of Artificial Sequence: Synthetic oligonucleotide
gcggcugcaaacaucacgg

SEQ ID NO: 2085957 - RNA, 19 nt, Artificial Sequence
  Description of Artificial Sequence: Synthetic oligonucleotide
agccugaaucuccaggaga

SEQ ID NO: 2085958 - RNA, 19 nt, Artificial Sequence
  Description of Artificial Sequence: Synthetic oligonucleotide
aucauagaggucagagguc

SEQ ID NO: 2085959 - RNA, 19 nt, Artificial Sequence
  Description of Artificial Sequence: Synthetic oligonucleotide
ugauaucuccagggaagag

SEQ ID NO: 2085960 - RNA, 19 nt, Artificial Sequence
  Description of Artificial Sequence: Synthetic oligonucleotide
uaggacgcacgccucgaug

SEQ ID NO: 2085961 - RNA, 19 nt, Artificial Sequence
  Description of Artificial Sequence: Synthetic oligonucleotide
gaggccauagcagguuggg

SEQ ID NO: 2085962 - RNA, 19 nt, Artificial Sequence
  Description of Artificial Sequence: Synthetic oligonucleotide
aaacaucacggagggccuc

SEQ ID NO: 2085963 - RNA, 19 nt, Artificial Sequence
  Description of Artificial Sequence: Synthetic oligonucleotide
uccucugagguccguuggc

SEQ ID NO: 2085964 - RNA, 19 nt, Artificial Sequence
  Description of Artificial Sequence: Synthetic oligonucleotide
accugcgaugguaaucagc

SEQ ID NO: 2085965 - RNA, 19 nt, Artificial Sequence
  Description of Artificial Sequence: Synthetic oligonucleotide
ggcggcugcaaacaucacg

SEQ ID NO: 2085966 - RNA, 19 nt, Artificial Sequence
  Description of Artificial Sequence: Synthetic oligonucleotide
acacagaggcugcauccag

SEQ ID NO: 2085967 - RNA, 19 nt, Artificial Sequence
  Description of Artificial Sequence: Synthetic oligonucleotide
aagagcguuucugcguucu

SEQ ID NO: 2085968 - RNA, 19 nt, Artificial Sequence
  Description of Artificial Sequence: Synthetic oligonucleotide
acuucaucagguaccugag

SEQ ID NO: 2085969 - RNA, 19 nt, Artificial Sequence
  Description of Artificial Sequence: Synthetic oligonucleotide
gguggcaauuccucugagg

SEQ ID NO: 2085970 - RNA, 19 nt, Artificial Sequence
  Description of Artificial Sequence: Synthetic oligonucleotide
cugaaucuccaggagauga

SEQ ID NO: 2085971 - RNA, 19 nt, Artificial Sequence
  Description of Artificial Sequence: Synthetic oligonucleotide
ggcugcaaacaucacggag

SEQ ID NO: 2085972 - RNA, 19 nt, Artificial Sequence
  Description of Artificial Sequence: Synthetic oligonucleotide
guuucugcguucuguauua

SEQ ID NO: 2085973 - RNA, 19 nt, Artificial Sequence
  Description of Artificial Sequence: Synthetic oligonucleotide
cuucucaggaggccauagc

SEQ ID NO: 2085974 - RNA, 19 nt, Artificial Sequence
  Description of Artificial Sequence: Synthetic oligonucleotide
cucagcuagggccgugucc

SEQ ID NO: 2085975 - RNA, 19 nt, Artificial Sequence
  Description of Artificial Sequence: Synthetic oligonucleotide
ugauguggcugugacugcu

SEQ ID NO: 2085976 - RNA, 19 nt, Artificial Sequence
  Description of Artificial Sequence: Synthetic oligonucleotide
cuggcguaggcgcugcagc

SEQ ID NO: 2085977 - RNA, 19 nt, Artificial Sequence
  Description of Artificial Sequence: Synthetic oligonucleotide
gaggcaggcggcugcaaac

SEQ ID NO: 2085978 - RNA, 19 nt, Artificial Sequence
  Description of Artificial Sequence: Synthetic oligonucleotide
acacugaaauugauaucuc

SEQ ID NO: 2085979 - RNA, 19 nt, Artificial Sequence
  Description of Artificial Sequence: Synthetic oligonucleotide
cauauacccuggagauggg

SEQ ID NO: 2085980 - RNA, 19 nt, Artificial Sequence
  Description of Artificial Sequence: Synthetic oligonucleotide
uuagcgcuucaaccacacc

SEQ ID NO: 2085981 - RNA, 19 nt, Artificial Sequence
  Description of Artificial Sequence: Synthetic oligonucleotide
caaagugguacaggucagc

SEQ ID NO: 2085982 - RNA, 19 nt, Artificial Sequence
  Description of Artificial Sequence: Synthetic oligonucleotide
ucagugaccugcgauggua

SEQ ID NO: 2085983 - RNA, 19 nt, Artificial Sequence
  Description of Artificial Sequence: Synthetic oligonucleotide
ugcucucauccagucauca

SEQ ID NO: 2085984 - RNA, 19 nt, Artificial Sequence
  Description of Artificial Sequence: Synthetic oligonucleotide
gagaugaaugaaguaguua

SEQ ID NO: 2085985 - RNA, 19 nt, Artificial Sequence
  Description of Artificial Sequence: Synthetic oligonucleotide
cugaguucuuggcugccug

SEQ ID NO: 2085986 - RNA, 19 nt, Artificial Sequence
  Description of Artificial Sequence: Synthetic oligonucleotide
ucgaugggcagggcgaugu

SEQ ID NO: 2085987 - RNA, 19 nt, Artificial Sequence
  Description of Artificial Sequence: Synthetic oligonucleotide
cugcauacccucugauaac

SEQ ID NO: 2085988 - RNA, 19 nt, Artificial Sequence
  Description of Artificial Sequence: Synthetic oligonucleotide
ugccugauacacugaaauu

SEQ ID NO: 2085989 - RNA, 19 nt, Artificial Sequence
  Description of Artificial Sequence: Synthetic oligonucleotide
ugguugucccucagcucag

SEQ ID NO: 2085990 - RNA, 19 nt, Artificial Sequence
  Description of Artificial Sequence: Synthetic oligonucleotide
gcuagggccguguccaggg

SEQ ID NO: 2085991 - RNA, 19 nt, Artificial Sequence
  Description of Artificial Sequence: Synthetic oligonucleotide
gucacggccuagcucuucc

SEQ ID NO: 2085992 - RNA, 19 nt, Artificial Sequence
  Description of Artificial Sequence: Synthetic oligonucleotide
uccugcauacccucugaua

SEQ ID NO: 2085993 - RNA, 19 nt, Artificial Sequence
  Description of Artificial Sequence: Synthetic oligonucleotide
uaggacuuaagggcaccug

SEQ ID NO: 2085994 - RNA, 19 nt, Artificial Sequence
  Description of Artificial Sequence: Synthetic oligonucleotide
gucaucaggggcucuggca

SEQ ID NO: 2085995 - RNA, 19 nt, Artificial Sequence
  Description of Artificial Sequence: Synthetic oligonucleotide
cagguggguucucagggac

SEQ ID NO: 2085996 - RNA, 19 nt, Artificial Sequence
  Description of Artificial Sequence: Synthetic oligonucleotide
guacucauccuugcacugc

SEQ ID NO: 2085997 - RNA, 19 nt, Artificial Sequence
  Description of Artificial Sequence: Synthetic oligonucleotide
uggcaauuccucugagguc

SEQ ID NO: 2085998 - RNA, 19 nt, Artificial Sequence
  Description of Artificial Sequence: Synthetic oligonucleotide
uggcguaggcgcugcagca

SEQ ID NO: 2085999 - RNA, 19 nt, Artificial Sequence
  Description of Artificial Sequence: Synthetic oligonucleotide
cagggacaccccauauacc

SEQ ID NO: 2086000 - RNA, 19 nt, Artificial Sequence
  Description of Artificial Sequence: Synthetic oligonucleotide
gacaccccauauacccugg

SEQ ID NO: 2086001 - RNA, 19 nt, Artificial Sequence
  Description of Artificial Sequence: Synthetic oligonucleotide
agcguuucugcguucugua

SEQ ID NO: 2086002 - RNA, 19 nt, Artificial Sequence
  Description of Artificial Sequence: Synthetic oligonucleotide
cauccuugcacugcuccac

SEQ ID NO: 2086003 - RNA, 19 nt, Artificial Sequence
  Description of Artificial Sequence: Synthetic oligonucleotide
uuucugcguucuguauuag

SEQ ID NO: 2086004 - RNA, 19 nt, Artificial Sequence
  Description of Artificial Sequence: Synthetic oligonucleotide
ugggugucaucuuguucac

SEQ ID NO: 2086005 - RNA, 19 nt, Artificial Sequence
  Description of Artificial Sequence: Synthetic oligonucleotide
ccauugucugcuugagacg

SEQ ID NO: 2086006 - RNA, 19 nt, Artificial Sequence
  Description of Artificial Sequence: Synthetic oligonucleotide
ccugauacacugaaauuga

SEQ ID NO: 2086007 - RNA, 19 nt, Artificial Sequence
  Description of Artificial Sequence: Synthetic oligonucleotide
agacaauggcgauguugcu

SEQ ID NO: 2086008 - RNA, 19 nt, Artificial Sequence
  Description of Artificial Sequence: Synthetic oligonucleotide
ccugcauacccucugauaa

SEQ ID NO: 2086009 - RNA, 19 nt, Artificial Sequence
  Description of Artificial Sequence: Synthetic oligonucleotide
ggggaggucagugaccugc

SEQ ID NO: 2086010 - RNA, 19 nt, Artificial Sequence
  Description of Artificial Sequence: Synthetic oligonucleotide
auaacagcauuaggacgca

SEQ ID NO: 2086011 - RNA, 19 nt, Artificial Sequence
  Description of Artificial Sequence: Synthetic oligonucleotide
caccuuguuggcaguggug

SEQ ID NO: 2086012 - RNA, 19 nt, Artificial Sequence
  Description of Artificial Sequence: Synthetic oligonucleotide
cacgccucgaugggcaggg

SEQ ID NO: 2086013 - RNA, 19 nt, Artificial Sequence
  Description of Artificial Sequence: Synthetic oligonucleotide
cacggccuagcucuuccag

SEQ ID NO: 2086014 - RNA, 19 nt, Artificial Sequence
  Description of Artificial Sequence: Synthetic oligonucleotide
acaggucagccaaguacuc

SEQ ID NO: 2086015 - RNA, 19 nt, Artificial Sequence
  Description of Artificial Sequence: Synthetic oligonucleotide
uuaggacgcacgccucgau

SEQ ID NO: 2086016 - RNA, 19 nt, Artificial Sequence
  Description of Artificial Sequence: Synthetic oligonucleotide
gcuugagacgcuucagcac

SEQ ID NO: 2086017 - RNA, 19 nt, Artificial Sequence
  Description of Artificial Sequence: Synthetic oligonucleotide
gccaaguacucauccuugc

SEQ ID NO: 2086018 - RNA, 19 nt, Artificial Sequence
  Description of Artificial Sequence: Synthetic oligonucleotide
agguugggccccaagacaa

SEQ ID NO: 2086019 - RNA, 19 nt, Artificial Sequence
  Description of Artificial Sequence: Synthetic oligonucleotide
agguggcaauuccucugag

SEQ ID NO: 2086020 - RNA, 19 nt, Artificial Sequence
  Description of Artificial Sequence: Synthetic oligonucleotide
uaucuccagggaagagcgu

SEQ ID NO: 2086021 - RNA, 19 nt, Artificial Sequence
  Description of Artificial Sequence: Synthetic oligonucleotide
auuaggacgcacgccucga

SEQ ID NO: 2086022 - RNA, 19 nt, Artificial Sequence
  Description of Artificial Sequence: Synthetic oligonucleotide
agagcguuucugcguucug

SEQ ID NO: 2086023 - RNA, 19 nt, Artificial Sequence
  Description of Artificial Sequence: Synthetic oligonucleotide
ugacugccuccugaguucu

SEQ ID NO: 2086024 - RNA, 19 nt, Artificial Sequence
  Description of Artificial Sequence: Synthetic oligonucleotide
cagcauuaggacgcacgcc

SEQ ID NO: 2086025 - RNA, 19 nt, Artificial Sequence
  Description of Artificial Sequence: Synthetic oligonucleotide
gcugcauccaguugggucu

SEQ ID NO: 2086026 - RNA, 19 nt, Artificial Sequence
  Description of Artificial Sequence: Synthetic oligonucleotide
ccucugauaacagcauuag

SEQ ID NO: 2086027 - RNA, 19 nt, Artificial Sequence
  Description of Artificial Sequence: Synthetic oligonucleotide
cacggagggccuccaggcg

SEQ ID NO: 2086028 - RNA, 19 nt, Artificial Sequence
  Description of Artificial Sequence: Synthetic oligonucleotide
agugaccugcgaugguaau

SEQ ID NO: 2086029 - RNA, 19 nt, Artificial Sequence
  Description of Artificial Sequence: Synthetic oligonucleotide
aguuagcauaugaguccuc

SEQ ID NO: 2086030 - RNA, 19 nt, Artificial Sequence
  Description of Artificial Sequence: Synthetic oligonucleotide
gguccguuggcuacugacc

SEQ ID NO: 2086031 - RNA, 19 nt, Artificial Sequence
  Description of Artificial Sequence: Synthetic oligonucleotide
gaccugcgaugguaaucag

SEQ ID NO: 2086032 - RNA, 19 nt, Artificial Sequence
  Description of Artificial Sequence: Synthetic oligonucleotide
caauggcgauguugcuggg

SEQ ID NO: 2086033 - RNA, 19 nt, Artificial Sequence
  Description of Artificial Sequence: Synthetic oligonucleotide
gggaucugaggccauuguc

SEQ ID NO: 2086034 - RNA, 19 nt, Artificial Sequence
  Description of Artificial Sequence: Synthetic oligonucleotide
gaugccugauacacugaaa

SEQ ID NO: 2086035 - RNA, 19 nt, Artificial Sequence
  Description of Artificial Sequence: Synthetic oligonucleotide
uggcgauguugcugggugu

SEQ ID NO: 2086036 - RNA, 19 nt, Artificial Sequence
  Description of Artificial Sequence: Synthetic oligonucleotide
gguaaucagccugaaucuc

SEQ ID NO: 2086037 - RNA, 19 nt, Artificial Sequence
  Description of Artificial Sequence: Synthetic oligonucleotide
acccucugauaacagcauu

SEQ ID NO: 2086038 - RNA, 19 nt, Artificial Sequence
  Description of Artificial Sequence: Synthetic oligonucleotide
cugugguugucccucagcu

SEQ ID NO: 2086039 - RNA, 19 nt, Artificial Sequence
  Description of Artificial Sequence: Synthetic oligonucleotide
gaggucagugaccugcgau

SEQ ID NO: 2086040 - RNA, 19 nt, Artificial Sequence
  Description of Artificial Sequence: Synthetic oligonucleotide
gacgcacgccucgaugggc

SEQ ID NO: 2086041 - RNA, 19 nt, Artificial Sequence
  Description of Artificial Sequence: Synthetic oligonucleotide
guccguuggcuacugaccu

SEQ ID NO: 2086042 - RNA, 19 nt, Artificial Sequence
  Description of Artificial Sequence: Synthetic oligonucleotide
ggccccaagacaauggcga

SEQ ID NO: 2086043 - RNA, 19 nt, Artificial Sequence
  Description of Artificial Sequence: Synthetic oligonucleotide
ugagguccguuggcuacug

SEQ ID NO: 2086044 - RNA, 19 nt, Artificial Sequence
  Description of Artificial Sequence: Synthetic oligonucleotide
ucacggccuagcucuucca

SEQ ID NO: 2086045 - RNA, 19 nt, Artificial Sequence
  Description of Artificial Sequence: Synthetic oligonucleotide
cuagggccguguccagggg

SEQ ID NO: 2086046 - RNA, 19 nt, Artificial Sequence
  Description of Artificial Sequence: Synthetic oligonucleotide
ccugagguugcugaaguuc

SEQ ID NO: 2086047 - RNA, 19 nt, Artificial Sequence
  Description of Artificial Sequence: Synthetic oligonucleotide
uguugcugggugucaucuu

SEQ ID NO: 2086048 - RNA, 19 nt, Artificial Sequence
  Description of Artificial Sequence: Synthetic oligonucleotide
gugaccugcgaugguaauc

SEQ ID NO: 2086049 - RNA, 19 nt, Artificial Sequence
  Description of Artificial Sequence: Synthetic oligonucleotide
gguggguucucagggacac

SEQ ID NO: 2086050 - RNA, 19 nt, Artificial Sequence
  Description of Artificial Sequence: Synthetic oligonucleotide
ugagacgcuucagcacaga

SEQ ID NO: 2086051 - RNA, 19 nt, Artificial Sequence
  Description of Artificial Sequence: Synthetic oligonucleotide
ggaucugaggccauugucu

SEQ ID NO: 2086052 - RNA, 19 nt, Artificial Sequence
  Description of Artificial Sequence: Synthetic oligonucleotide
cuccucuaggcugugggga

SEQ ID NO: 2086053 - RNA, 19 nt, Artificial Sequence
  Description of Artificial Sequence: Synthetic oligonucleotide
uccaggcgagccccaggcu

SEQ ID NO: 2086054 - RNA, 19 nt, Artificial Sequence
  Description of Artificial Sequence: Synthetic oligonucleotide
gcguaggcgcugcagcagg

SEQ ID NO: 2086055 - RNA, 19 nt, Artificial Sequence
  Description of Artificial Sequence: Synthetic oligonucleotide
cuucaggcuggcugcucuc

SEQ ID NO: 2086056 - RNA, 19 nt, Artificial Sequence
  Description of Artificial Sequence: Synthetic oligonucleotide
agggccguguccaggggag

SEQ ID NO: 2086057 - RNA, 19 nt, Artificial Sequence
  Description of Artificial Sequence: Synthetic oligonucleotide
agggcgaugucacggccua

SEQ ID NO: 2086058 - RNA, 19 nt, Artificial Sequence
  Description of Artificial Sequence: Synthetic oligonucleotide
cagaggccccagcagccag

SEQ ID NO: 2086059 - RNA, 19 nt, Artificial Sequence
  Description of Artificial Sequence: Synthetic oligonucleotide
caccugccacagcaugggg

SEQ ID NO: 2086060 - RNA, 19 nt, Artificial Sequence
  Description of Artificial Sequence: Synthetic oligonucleotide
ggacgcacgccucgauggg

SEQ ID NO: 2086061 - RNA, 19 nt, Artificial Sequence
  Description of Artificial Sequence: Synthetic oligonucleotide
acaccccauauacccugga

SEQ ID NO: 2086062 - RNA, 19 nt, Artificial Sequence
  Description of Artificial Sequence: Synthetic oligonucleotide
ccaccugaauugaggacac

SEQ ID NO: 2086063 - RNA, 19 nt, Artificial Sequence
  Description of Artificial Sequence: Synthetic oligonucleotide
cagacggaagaggcccucc

SEQ ID NO: 2086064 - RNA, 19 nt, Artificial Sequence
  Description of Artificial Sequence: Synthetic oligonucleotide
ggcgaugucacggccuagc

SEQ ID NO: 2086065 - RNA, 19 nt, Artificial Sequence
  Description of Artificial Sequence: Synthetic oligonucleotide
gagucugcuuggcuguggu

SEQ ID NO: 2086066 - RNA, 19 nt, Artificial Sequence
  Description of Artificial Sequence: Synthetic oligonucleotide
ggcagggcgaugucacggc

SEQ ID NO: 2086067 - RNA, 19 nt, Artificial Sequence
  Description of Artificial Sequence: Synthetic oligonucleotide
uccguuggcuacugaccuu

SEQ ID NO: 2086068 - RNA, 19 nt, Artificial Sequence
  Description of Artificial Sequence: Synthetic oligonucleotide
ccccuuccuucucaggagg

SEQ ID NO: 2086069 - RNA, 19 nt, Artificial Sequence
  Description of Artificial Sequence: Synthetic oligonucleotide
gguaccugagguugcugaa

SEQ ID NO: 2086070 - RNA, 19 nt, Artificial Sequence
  Description of Artificial Sequence: Synthetic oligonucleotide
guccaggggaggucaguga

SEQ ID NO: 2086071 - RNA, 19 nt, Artificial Sequence
  Description of Artificial Sequence: Synthetic oligonucleotide
auugucugcuugagacgcu

SEQ ID NO: 2086072 - RNA, 19 nt, Artificial Sequence
  Description of Artificial Sequence: Synthetic oligonucleotide
cagugaccugcgaugguaa

SEQ ID NO: 2086073 - RNA, 19 nt, Artificial Sequence
  Description of Artificial Sequence: Synthetic oligonucleotide
gggccccaagacaauggcg

SEQ ID NO: 2086074 - RNA, 19 nt, Artificial Sequence
  Description of Artificial Sequence: Synthetic oligonucleotide
aguugggucugguccccuu

SEQ ID NO: 2086075 - RNA, 19 nt, Artificial Sequence
  Description of Artificial Sequence: Synthetic oligonucleotide
agcucagcuagggccgugu

SEQ ID NO: 2086076 - RNA, 19 nt, Artificial Sequence
  Description of Artificial Sequence: Synthetic oligonucleotide
ucccggagauaggacuuaa

SEQ ID NO: 2086077 - RNA, 19 nt, Artificial Sequence
  Description of Artificial Sequence: Synthetic oligonucleotide
ggagucugcuuggcugugg

SEQ ID NO: 2086078 - RNA, 19 nt, Artificial Sequence
  Description of Artificial Sequence: Synthetic oligonucleotide
gggaggucagugaccugcg

SEQ ID NO: 2086079 - RNA, 19 nt, Artificial Sequence
  Description of Artificial Sequence: Synthetic oligonucleotide
gagcguuucugcguucugu

SEQ ID NO: 2086080 - RNA, 19 nt, Artificial Sequence
  Description of Artificial Sequence: Synthetic oligonucleotide
gcauacccucugauaacag

SEQ ID NO: 2086081 - RNA, 19 nt, Artificial Sequence
  Description of Artificial Sequence: Synthetic oligonucleotide
ggaacuucaucagguaccu

SEQ ID NO: 2086082 - RNA, 19 nt, Artificial Sequence
  Description of Artificial Sequence: Synthetic oligonucleotide
agucugcuuggcugugguu

SEQ ID NO: 2086083 - RNA, 19 nt, Artificial Sequence
  Description of Artificial Sequence: Synthetic oligonucleotide
gggaagagcguuucugcgu

SEQ ID NO: 2086084 - RNA, 19 nt, Artificial Sequence
  Description of Artificial Sequence: Synthetic oligonucleotide
ccagggcugagaagaugcc

SEQ ID NO: 2086085 - RNA, 19 nt, Artificial Sequence
  Description of Artificial Sequence: Synthetic oligonucleotide
ccaaguacucauccuugca

SEQ ID NO: 2086086 - RNA, 19 nt, Artificial Sequence
  Description of Artificial Sequence: Synthetic oligonucleotide
gcaauuccucugagguccg

SEQ ID NO: 2086087 - RNA, 19 nt, Artificial Sequence
  Description of Artificial Sequence: Synthetic oligonucleotide
ugucacggccuagcucuuc

SEQ ID NO: 2086088 - RNA, 19 nt, Artificial Sequence
  Description of Artificial Sequence: Synthetic oligonucleotide
gcgaugguaaucagccuga

SEQ ID NO: 2086089 - RNA, 19 nt, Artificial Sequence
  Description of Artificial Sequence: Synthetic oligonucleotide
cugcauccaguugggucug

SEQ ID NO: 2086090 - RNA, 19 nt, Artificial Sequence
  Description of Artificial Sequence: Synthetic oligonucleotide
cagccaaguacucauccuu

SEQ ID NO: 2086091 - RNA, 19 nt, Artificial Sequence
  Description of Artificial Sequence: Synthetic oligonucleotide
ggcgauguugcuggguguc

SEQ ID NO: 2086092 - RNA, 19 nt, Artificial Sequence
  Description of Artificial Sequence: Synthetic oligonucleotide
caggggaggucagugaccu

SEQ ID NO: 2086093 - RNA, 19 nt, Artificial Sequence
  Description of Artificial Sequence: Synthetic oligonucleotide
aggggaggucagugaccug

SEQ ID NO: 2086094 - RNA, 19 nt, Artificial Sequence
  Description of Artificial Sequence: Synthetic oligonucleotide
aggccccagcagccagacg

SEQ ID NO: 2086095 - RNA, 19 nt, Artificial Sequence
  Description of Artificial Sequence: Synthetic oligonucleotide
ggcguaggcgcugcagcag

SEQ ID NO: 2086096 - RNA, 19 nt, Artificial Sequence
  Description of Artificial Sequence: Synthetic oligonucleotide
cccggagauaggacuuaag

SEQ ID NO: 2086097 - RNA, 19 nt, Artificial Sequence
  Description of Artificial Sequence: Synthetic oligonucleotide
gcuggcguaggcgcugcag

SEQ ID NO: 2086098 - RNA, 19 nt, Artificial Sequence
  Description of Artificial Sequence: Synthetic oligonucleotide
ggcugugguugucccucag

SEQ ID NO: 2086099 - RNA, 19 nt, Artificial Sequence
  Description of Artificial Sequence: Synthetic oligonucleotide
acaucacggagggccucca

SEQ ID NO: 2086100 - RNA, 19 nt, Artificial Sequence
  Description of Artificial Sequence: Synthetic oligonucleotide
gagguccguuggcuacuga

SEQ ID NO: 2086101 - RNA, 19 nt, Artificial Sequence
  Description of Artificial Sequence: Synthetic oligonucleotide
agaggucaucaggggcucu

SEQ ID NO: 2086102 - RNA, 19 nt, Artificial Sequence
  Description of Artificial Sequence: Synthetic oligonucleotide
cacacccaccaccugaauu

SEQ ID NO: 2086103 - RNA, 19 nt, Artificial Sequence
  Description of Artificial Sequence: Synthetic oligonucleotide
cccauauacccuggagaug

SEQ ID NO: 2086104 - RNA, 19 nt, Artificial Sequence
  Description of Artificial Sequence: Synthetic oligonucleotide
guggguucucagggacacc

SEQ ID NO: 2086105 - RNA, 19 nt, Artificial Sequence
  Description of Artificial Sequence: Synthetic oligonucleotide
cucgaugggcagggcgaug

SEQ ID NO: 2086106 - RNA, 19 nt, Artificial Sequence
  Description of Artificial Sequence: Synthetic oligonucleotide
ccaggagaugaaugaagua

SEQ ID NO: 2086107 - RNA, 19 nt, Artificial Sequence
  Description of Artificial Sequence: Synthetic oligonucleotide
ggggagucugcuuggcugu

SEQ ID NO: 2086108 - RNA, 19 nt, Artificial Sequence
  Description of Artificial Sequence: Synthetic oligonucleotide
gccugaaucuccaggagau

SEQ ID NO: 2086109 - RNA, 19 nt, Artificial Sequence
  Description of Artificial Sequence: Synthetic oligonucleotide
gccucgaugggcagggcga

SEQ ID NO: 2086110 - RNA, 19 nt, Artificial Sequence
  Description of Artificial Sequence: Synthetic oligonucleotide
cgccucgaugggcagggcg

SEQ ID NO: 2086111 - RNA, 19 nt, Artificial Sequence
  Description of Artificial Sequence: Synthetic oligonucleotide
acgccucgaugggcagggc

SEQ ID NO: 2086112 - RNA, 19 nt, Artificial Sequence
  Description of Artificial Sequence: Synthetic oligonucleotide
gcgcuucaaccacacccac

SEQ ID NO: 2086113 - RNA, 19 nt, Artificial Sequence
  Description of Artificial Sequence: Synthetic oligonucleotide
ggaggucagugaccugcga

SEQ ID NO: 2086114 - RNA, 19 nt, Artificial Sequence
  Description of Artificial Sequence: Synthetic oligonucleotide
cagggcgaugucacggccu

SEQ ID NO: 2086115 - RNA, 19 nt, Artificial Sequence
  Description of Artificial Sequence: Synthetic oligonucleotide
ggagaugaaugaaguaguu

SEQ ID NO: 2086116 - RNA, 19 nt, Artificial Sequence
  Description of Artificial Sequence: Synthetic oligonucleotide
cucuaggcuguggggaucu

SEQ ID NO: 2086117 - RNA, 19 nt, Artificial Sequence
  Description of Artificial Sequence: Synthetic oligonucleotide
cugcuugggccaccaccca

SEQ ID NO: 2086118 - RNA, 19 nt, Artificial Sequence
  Description of Artificial Sequence: Synthetic oligonucleotide
caguggugauguggcugug

SEQ ID NO: 2086119 - RNA, 19 nt, Artificial Sequence
  Description of Artificial Sequence: Synthetic oligonucleotide
gcauuaggacgcacgccuc

SEQ ID NO: 2086120 - RNA, 19 nt, Artificial Sequence
  Description of Artificial Sequence: Synthetic oligonucleotide
cauagaggucagaggucau

SEQ ID NO: 2086121 - RNA, 19 nt, Artificial Sequence
  Description of Artificial Sequence: Synthetic oligonucleotide
ccauagcagguugggcccc

SEQ ID NO: 2086122 - RNA, 19 nt, Artificial Sequence
  Description of Artificial Sequence: Synthetic oligonucleotide
gcacgccucgaugggcagg

SEQ ID NO: 2086123 - RNA, 19 nt, Artificial Sequence
  Description of Artificial Sequence: Synthetic oligonucleotide
auagcagguugggccccaa

SEQ ID NO: 2086124 - RNA, 19 nt, Artificial Sequence
  Description of Artificial Sequence: Synthetic oligonucleotide
aggcugcauccaguugggu

SEQ ID NO: 2086125 - RNA, 19 nt, Artificial Sequence
  Description of Artificial Sequence: Synthetic oligonucleotide
ggggaucugaggccauugu

SEQ ID NO: 2086126 - RNA, 19 nt, Artificial Sequence
  Description of Artificial Sequence: Synthetic oligonucleotide
gcucagcuagggccguguc

SEQ ID NO: 2086127 - RNA, 19 nt, Artificial Sequence
  Description of Artificial Sequence: Synthetic oligonucleotide
cuccugcauacccucugau

SEQ ID NO: 2086128 - RNA, 19 nt, Artificial Sequence
  Description of Artificial Sequence: Synthetic oligonucleotide
cugagguccguuggcuacu

SEQ ID NO: 2086129 - RNA, 19 nt, Artificial Sequence
  Description of Artificial Sequence: Synthetic oligonucleotide
gcgaugucacggccuagcu

SEQ ID NO: 2086130 - RNA, 19 nt, Artificial Sequence
  Description of Artificial Sequence: Synthetic oligonucleotide
gcgauguugcuggguguca

SEQ ID NO: 2086131 - RNA, 19 nt, Artificial Sequence
  Description of Artificial Sequence: Synthetic oligonucleotide
cagcucagcuagggccgug

SEQ ID NO: 2086132 - RNA, 19 nt, Artificial Sequence
  Description of Artificial Sequence: Synthetic oligonucleotide
gggccguguccaggggagg

SEQ ID NO: 2086133 - RNA, 19 nt, Artificial Sequence
  Description of Artificial Sequence: Synthetic oligonucleotide
cguguccaggggaggucag

SEQ ID NO: 2086134 - RNA, 19 nt, Artificial Sequence
  Description of Artificial Sequence: Synthetic oligonucleotide
cucccggagauaggacuua

SEQ ID NO: 2086135 - RNA, 19 nt, Artificial Sequence
  Description of Artificial Sequence: Synthetic oligonucleotide
ccuucaggcuggcugcucu

SEQ ID NO: 2086136 - RNA, 19 nt, Artificial Sequence
  Description of Artificial Sequence: Synthetic oligonucleotide
ccucuaggcuguggggauc

SEQ ID NO: 2086137 - RNA, 19 nt, Artificial Sequence
  Description of Artificial Sequence: Synthetic oligonucleotide
gcguuucugcguucuguau

SEQ ID NO: 2086138 - RNA, 19 nt, Artificial Sequence
  Description of Artificial Sequence: Synthetic oligonucleotide
guguccaggggaggucagu

SEQ ID NO: 2086139 - RNA, 19 nt, Artificial Sequence
  Description of Artificial Sequence: Synthetic oligonucleotide
ccguguccaggggagguca

SEQ ID NO: 2086140 - RNA, 19 nt, Artificial Sequence
  Description of Artificial Sequence: Synthetic oligonucleotide
gggcgaugucacggccuag

SEQ ID NO: 2086141 - RNA, 19 nt, Artificial Sequence
  Description of Artificial Sequence: Synthetic oligonucleotide
aggcuccuucaggcuggcu

SEQ ID NO: 2086142 - RNA, 19 nt, Artificial Sequence
  Description of Artificial Sequence: Synthetic oligonucleotide
ccaccuuguuggcaguggu

SEQ ID NO: 2086143 - RNA, 19 nt, Artificial Sequence
  Description of Artificial Sequence: Synthetic oligonucleotide
gccguguccaggggagguc

SEQ ID NO: 2086144 - RNA, 19 nt, Artificial Sequence
  Description of Artificial Sequence: Synthetic oligonucleotide
cuggcagcucccggagaua

SEQ ID NO: 2086145 - RNA, 19 nt, Artificial Sequence
  Description of Artificial Sequence: Synthetic oligonucleotide
cgcacgccucgaugggcag

SEQ ID NO: 2086146 - RNA, 19 nt, Artificial Sequence
  Description of Artificial Sequence: Synthetic oligonucleotide
ggcugagaagaugccugau

SEQ ID NO: 2086147 - RNA, 19 nt, Artificial Sequence
  Description of Artificial Sequence: Synthetic oligonucleotide
ccuugacugccuccugagu

SEQ ID NO: 2086148 - RNA, 19 nt, Artificial Sequence
  Description of Artificial Sequence: Synthetic oligonucleotide
ggccguguccaggggaggu

SEQ ID NO: 2086149 - RNA, 19 nt, Artificial Sequence
  Description of Artificial Sequence: Synthetic oligonucleotide
cggcugcaaacaucacgga

SEQ ID NO: 2086150 - RNA, 19 nt, Artificial Sequence
  Description of Artificial Sequence: Synthetic oligonucleotide
gcguucuguauuagcgcuu

SEQ ID NO: 2086151 - RNA, 19 nt, Artificial Sequence
  Description of Artificial Sequence: Synthetic oligonucleotide
caguugggucugguccccu

SEQ ID NO: 2086152 - RNA, 19 nt, Artificial Sequence
  Description of Artificial Sequence: Synthetic oligonucleotide
cgaugguaaucagccugaa

SEQ ID NO: 2086153 - RNA, 19 nt, Artificial Sequence
  Description of Artificial Sequence: Synthetic oligonucleotide
cgauguugcugggugucau

SEQ ID NO: 2086154 - RNA, 19 nt, Artificial Sequence
  Description of Artificial Sequence: Synthetic oligonucleotide
ccucgaugggcagggcgau

SEQ ID NO: 2086155 - RNA, 19 nt, Artificial Sequence
  Description of Artificial Sequence: Synthetic oligonucleotide
cguuggcuacugaccuuuu

SEQ ID NO: 2086156 - RNA, 19 nt, Artificial Sequence
  Description of Artificial Sequence: Synthetic oligonucleotide
uuuacaacaguccacaucu

SEQ ID NO: 2086157 - RNA, 19 nt, Artificial Sequence
  Description of Artificial Sequence: Synthetic oligonucleotide
uuuaucacaguauaaacca

SEQ ID NO: 2086158 - RNA, 19 nt, Artificial Sequence
  Description of Artificial Sequence: Synthetic oligonucleotide
aacggcuucuuucucaacc

SEQ ID NO: 2086159 - RNA, 19 nt, Artificial Sequence
  Description of Artificial Sequence: Synthetic oligonucleotide
ucacuuuuaauauagcagc

SEQ ID NO: 2086160 - RNA, 19 nt, Artificial Sequence
  Description of Artificial Sequence: Synthetic oligonucleotide
acugcuuugcucuagacag

SEQ ID NO: 2086161 - RNA, 19 nt, Artificial Sequence
  Description of Artificial Sequence: Synthetic oligonucleotide
aauauagcagcuauugacg

SEQ ID NO: 2086162 - RNA, 19 nt, Artificial Sequence
  Description of Artificial Sequence: Synthetic oligonucleotide
aagaaagcuaacuagacuu

SEQ ID NO: 2086163 - RNA, 19 nt, Artificial Sequence
  Description of Artificial Sequence: Synthetic oligonucleotide
uuugcucuagacaggaugg

SEQ ID NO: 2086164 - RNA, 19 nt, Artificial Sequence
  Description of Artificial Sequence: Synthetic oligonucleotide
aaaagguuucuuguaaccg

SEQ ID NO: 2086165 - RNA, 19 nt, Artificial Sequence
  Description of Artificial Sequence: Synthetic oligonucleotide
cuuucaaugccuucggugg

SEQ ID NO: 2086166 - RNA, 19 nt, Artificial Sequence
  Description of Artificial Sequence: Synthetic oligonucleotide
ucuacgaguagucccauag

SEQ ID NO: 2086167 - RNA, 19 nt, Artificial Sequence
  Description of Artificial Sequence: Synthetic oligonucleotide
uuucuuguaaccgagcccc

SEQ ID NO: 2086168 - RNA, 19 nt, Artificial Sequence
  Description of Artificial Sequence: Synthetic oligonucleotide
acugcaaagaaaguucgcc

SEQ ID NO: 2086169 - RNA, 19 nt, Artificial Sequence
  Description of Artificial Sequence: Synthetic oligonucleotide
uucuugauuguccuuaaga

SEQ ID NO: 2086170 - RNA, 19 nt, Artificial Sequence
  Description of Artificial Sequence: Synthetic oligonucleotide
ugcacuaagggccaacugc

SEQ ID NO: 2086171 - RNA, 19 nt, Artificial Sequence
  Description of Artificial Sequence: Synthetic oligonucleotide
uuugagaagguccaaggaa

SEQ ID NO: 2086172 - RNA, 19 nt, Artificial Sequence
  Description of Artificial Sequence: Synthetic oligonucleotide
aaagguuucuuguaaccga

SEQ ID NO: 2086173 - RNA, 19 nt, Artificial Sequence
  Description of Artificial Sequence: Synthetic oligonucleotide
gaaaagguuucuuguaacc

SEQ ID NO: 2086174 - RNA, 19 nt, Artificial Sequence
  Description of Artificial Sequence: Synthetic oligonucleotide
ucugugaauccguagagcu

SEQ ID NO: 2086175 - RNA, 19 nt, Artificial Sequence
  Description of Artificial Sequence: Synthetic oligonucleotide
agaaaguucgccgcaauac

SEQ ID NO: 2086176 - RNA, 19 nt, Artificial Sequence
  Description of Artificial Sequence: Synthetic oligonucleotide
uucgccgcaauacaggcag

SEQ ID NO: 2086177 - RNA, 19 nt, Artificial Sequence
  Description of Artificial Sequence: Synthetic oligonucleotide
guuuugagaagguccaagg

SEQ ID NO: 2086178 - RNA, 19 nt, Artificial Sequence
  Description of Artificial Sequence: Synthetic oligonucleotide
aagaaacugugugaggcac

SEQ ID NO: 2086179 - RNA, 19 nt, Artificial Sequence
  Description of Artificial Sequence: Synthetic oligonucleotide
uuguauuuccgcaugguaa

SEQ ID NO: 2086180 - RNA, 19 nt, Artificial Sequence
  Description of Artificial Sequence: Synthetic oligonucleotide
gcuaacuagacuuucaaug

SEQ ID NO: 2086181 - RNA, 19 nt, Artificial Sequence
  Description of Artificial Sequence: Synthetic oligonucleotide
uguagcagggcuccaauca

SEQ ID NO: 2086182 - RNA, 19 nt, Artificial Sequence
  Description of Artificial Sequence: Synthetic oligonucleotide
ugaugaaaagugcagcccu

SEQ ID NO: 2086183 - RNA, 19 nt, Artificial Sequence
  Description of Artificial Sequence: Synthetic oligonucleotide
caguaagaaagcuaacuag

SEQ ID NO: 2086184 - RNA, 19 nt, Artificial Sequence
  Description of Artificial Sequence: Synthetic oligonucleotide
aguucgccgcaauacaggc

SEQ ID NO: 2086185 - RNA, 19 nt, Artificial Sequence
  Description of Artificial Sequence: Synthetic oligonucleotide
aaccccaaguuucugacgu

SEQ ID NO: 2086186 - RNA, 19 nt, Artificial Sequence
  Description of Artificial Sequence: Synthetic oligonucleotide
ugcaaagaaaguucgccgc

SEQ ID NO: 2086187 - RNA, 19 nt, Artificial Sequence
  Description of Artificial Sequence: Synthetic oligonucleotide
uuuugagaagguccaagga

SEQ ID NO: 2086188 - RNA, 19 nt, Artificial Sequence
  Description of Artificial Sequence: Synthetic oligonucleotide
ugagucuagacucgggagc

SEQ ID NO: 2086189 - RNA, 19 nt, Artificial Sequence
  Description of Artificial Sequence: Synthetic oligonucleotide
uacgaguagucccauagga

SEQ ID NO: 2086190 - RNA, 19 nt, Artificial Sequence
  Description of Artificial Sequence: Synthetic oligonucleotide
auuuccgcaugguaauccc

SEQ ID NO: 2086191 - RNA, 19 nt, Artificial Sequence
  Description of Artificial Sequence: Synthetic oligonucleotide
uaagauucagaagaacggc

SEQ ID NO: 2086192 - RNA, 19 nt, Artificial Sequence
  Description of Artificial Sequence: Synthetic oligonucleotide
acgaaagcaguuuugagaa

SEQ ID NO: 2086193 - RNA, 19 nt, Artificial Sequence
  Description of Artificial Sequence: Synthetic oligonucleotide
cacaugacagacaacugcc

SEQ ID NO: 2086194 - RNA, 19 nt, Artificial Sequence
  Description of Artificial Sequence: Synthetic oligonucleotide
agauaguucuugauugucc

SEQ ID NO: 2086195 - RNA, 19 nt, Artificial Sequence
  Description of Artificial Sequence: Synthetic oligonucleotide
acuaguaccguuuccccag

SEQ ID NO: 2086196 - RNA, 19 nt, Artificial Sequence
  Description of Artificial Sequence: Synthetic oligonucleotide
aauccguagagcuuccuaa

SEQ ID NO: 2086197 - RNA, 19 nt, Artificial Sequence
  Description of Artificial Sequence: Synthetic oligonucleotide
ugucauuuguguaauuaaa

SEQ ID NO: 2086198 - RNA, 19 nt, Artificial Sequence
  Description of Artificial Sequence: Synthetic oligonucleotide
caaguuucuagccacauga

SEQ ID NO: 2086199 - RNA, 19 nt, Artificial Sequence
  Description of Artificial Sequence: Synthetic oligonucleotide
uguaaccgagccccaaagg

SEQ ID NO: 2086200 - RNA, 19 nt, Artificial Sequence
  Description of Artificial Sequence: Synthetic oligonucleotide
aacugugugaggcacuuau

SEQ ID NO: 2086201 - RNA, 19 nt, Artificial Sequence
  Description of Artificial Sequence: Synthetic oligonucleotide
cugcaaagaaaguucgccg

SEQ ID NO: 2086202 - RNA, 19 nt, Artificial Sequence
  Description of Artificial Sequence: Synthetic oligonucleotide
uuucaaugccuucgguggg

SEQ ID NO: 2086203 - RNA, 19 nt, Artificial Sequence
  Description of Artificial Sequence: Synthetic oligonucleotide
aguaagaaagcuaacuaga

SEQ ID NO: 2086204 - RNA, 19 nt, Artificial Sequence
  Description of Artificial Sequence: Synthetic oligonucleotide
cuucaagaaacugugugag

SEQ ID NO: 2086205 - RNA, 19 nt, Artificial Sequence
  Description of Artificial Sequence: Synthetic oligonucleotide
uacaacaguccacaucuca

SEQ ID NO: 2086206 - RNA, 19 nt, Artificial Sequence
  Description of Artificial Sequence: Synthetic oligonucleotide
augguaaucccaguuuggc

SEQ ID NO: 2086207 - RNA, 19 nt, Artificial Sequence
  Description of Artificial Sequence: Synthetic oligonucleotide
aguuuggcuucucggaacg

SEQ ID NO: 2086208 - RNA, 19 nt, Artificial Sequence
  Description of Artificial Sequence: Synthetic oligonucleotide
aaugcugguuuucucugcu

SEQ ID NO: 2086209 - RNA, 19 nt, Artificial Sequence
  Description of Artificial Sequence: Synthetic oligonucleotide
aagaacggcuucuuucuca

SEQ ID NO: 2086210 - RNA, 19 nt, Artificial Sequence
  Description of Artificial Sequence: Synthetic oligonucleotide
uguauuuccgcaugguaau

SEQ ID NO: 2086211 - RNA, 19 nt, Artificial Sequence
  Description of Artificial Sequence: Synthetic oligonucleotide
guuuucucugcuuucgcgc

SEQ ID NO: 2086212 - RNA, 19 nt, Artificial Sequence
  Description of Artificial Sequence: Synthetic oligonucleotide
aaaguucgccgcaauacag

SEQ ID NO: 2086213 - RNA, 19 nt, Artificial Sequence
  Description of Artificial Sequence: Synthetic oligonucleotide
cagcuauugacgaaagcag

SEQ ID NO: 2086214 - RNA, 19 nt, Artificial Sequence
  Description of Artificial Sequence: Synthetic oligonucleotide
aacuaguaccguuucccca

SEQ ID NO: 2086215 - RNA, 19 nt, Artificial Sequence
  Description of Artificial Sequence: Synthetic oligonucleotide
uuguaaccgagccccaaag

SEQ ID NO: 2086216 - RNA, 19 nt, Artificial Sequence
  Description of Artificial Sequence: Synthetic oligonucleotide
ugugaauccguagagcuuc

SEQ ID NO: 2086217 - RNA, 19 nt, Artificial Sequence
  Description of Artificial Sequence: Synthetic oligonucleotide
cacucgagcagcuucuucc

SEQ ID NO: 2086218 - RNA, 19 nt, Artificial Sequence
  Description of Artificial Sequence: Synthetic oligonucleotide
auauagcagcuauugacga

SEQ ID NO: 2086219 - RNA, 19 nt, Artificial Sequence
  Description of Artificial Sequence: Synthetic oligonucleotide
uggaguagucccagggccg

SEQ ID NO: 2086220 - RNA, 19 nt, Artificial Sequence
  Description of Artificial Sequence: Synthetic oligonucleotide
augguguuacccugcuugc

SEQ ID NO: 2086221 - RNA, 19 nt, Artificial Sequence
  Description of Artificial Sequence: Synthetic oligonucleotide
uccuaagugccacucgagc

SEQ ID NO: 2086222 - RNA, 19 nt, Artificial Sequence
  Description of Artificial Sequence: Synthetic oligonucleotide
ucuguucucugugaauccg

SEQ ID NO: 2086223 - RNA, 19 nt, Artificial Sequence
  Description of Artificial Sequence: Synthetic oligonucleotide
caugguaaucccaguuugg

SEQ ID NO: 2086224 - RNA, 19 nt, Artificial Sequence
  Description of Artificial Sequence: Synthetic oligonucleotide
uuccgcaugguaaucccag

SEQ ID NO: 2086225 - RNA, 19 nt, Artificial Sequence
  Description of Artificial Sequence: Synthetic oligonucleotide
ugugugaggcacuuaugug

SEQ ID NO: 2086226 - RNA, 19 nt, Artificial Sequence
  Description of Artificial Sequence: Synthetic oligonucleotide
aguuucuagccacaugaca

SEQ ID NO: 2086227 - RNA, 19 nt, Artificial Sequence
  Description of Artificial Sequence: Synthetic oligonucleotide
cacaguauaaaccaacaaa

SEQ ID NO: 2086228 - RNA, 19 nt, Artificial Sequence
  Description of Artificial Sequence: Synthetic oligonucleotide
ugccuaacuggcaaugcug

SEQ ID NO: 2086229 - RNA, 19 nt, Artificial Sequence
  Description of Artificial Sequence: Synthetic oligonucleotide
uuccucuacgaguaguccc

SEQ ID NO: 2086230 - RNA, 19 nt, Artificial Sequence
  Description of Artificial Sequence: Synthetic oligonucleotide
aagcuaacuagacuuucaa

SEQ ID NO: 2086231 - RNA, 19 nt, Artificial Sequence
  Description of Artificial Sequence: Synthetic oligonucleotide
agguccgcugcucuguagc

SEQ ID NO: 2086232 - RNA, 19 nt, Artificial Sequence
  Description of Artificial Sequence: Synthetic oligonucleotide
ucuucacuuuuaauauagc

SEQ ID NO: 2086233 - RNA, 19 nt, Artificial Sequence
  Description of Artificial Sequence: Synthetic oligonucleotide
cuucggugggcaaaucugg

SEQ ID NO: 2086234 - RNA, 19 nt, Artificial Sequence
  Description of Artificial Sequence: Synthetic oligonucleotide
guaccguuuccccaggucc

SEQ ID NO: 2086235 - RNA, 19 nt, Artificial Sequence
  Description of Artificial Sequence: Synthetic oligonucleotide
agccacaugacagacaacu

SEQ ID NO: 2086236 - RNA, 19 nt, Artificial Sequence
  Description of Artificial Sequence: Synthetic oligonucleotide
ucugcaacuaguaccguuu

SEQ ID NO: 2086237 - RNA, 19 nt, Artificial Sequence
  Description of Artificial Sequence: Synthetic oligonucleotide
agagcuuccuaagugccac

SEQ ID NO: 2086238 - RNA, 19 nt, Artificial Sequence
  Description of Artificial Sequence: Synthetic oligonucleotide
ucacaguauaaaccaacaa

SEQ ID NO: 2086239 - RNA, 19 nt, Artificial Sequence
  Description of Artificial Sequence: Synthetic oligonucleotide
cugcuugcugccuaacugg

SEQ ID NO: 2086240 - RNA, 19 nt, Artificial Sequence
  Description of Artificial Sequence: Synthetic oligonucleotide
uauuuccgcaugguaaucc

SEQ ID NO: 2086241 - RNA, 19 nt, Artificial Sequence
  Description of Artificial Sequence: Synthetic oligonucleotide
uccucuacgaguaguccca

SEQ ID NO: 2086242 - RNA, 19 nt, Artificial Sequence
  Description of Artificial Sequence: Synthetic oligonucleotide
uucggugggcaaaucuggg

SEQ ID NO: 2086243 - RNA, 19 nt, Artificial Sequence
  Description of Artificial Sequence: Synthetic oligonucleotide
aaggcuuguauuuccgcau

SEQ ID NO: 2086244 - RNA, 19 nt, Artificial Sequence
  Description of Artificial Sequence: Synthetic oligonucleotide
agcagcuauugacgaaagc

SEQ ID NO: 2086245 - RNA, 19 nt, Artificial Sequence
  Description of Artificial Sequence: Synthetic oligonucleotide
uugacgaaagcaguuuuga

SEQ ID NO: 2086246 - RNA, 19 nt, Artificial Sequence
  Description of Artificial Sequence: Synthetic oligonucleotide
gaaaguucgccgcaauaca

SEQ ID NO: 2086247 - RNA, 19 nt, Artificial Sequence
  Description of Artificial Sequence: Synthetic oligonucleotide
uuucuagccacaugacaga

SEQ ID NO: 2086248 - RNA, 19 nt, Artificial Sequence
  Description of Artificial Sequence: Synthetic oligonucleotide
ucaaccccaaguuucugac

SEQ ID NO: 2086249 - RNA, 19 nt, Artificial Sequence
  Description of Artificial Sequence: Synthetic oligonucleotide
aacuagacuuucaaugccu

SEQ ID NO: 2086250 - RNA, 19 nt, Artificial Sequence
  Description of Artificial Sequence: Synthetic oligonucleotide
guuucuuguaaccgagccc

SEQ ID NO: 2086251 - RNA, 19 nt, Artificial Sequence
  Description of Artificial Sequence: Synthetic oligonucleotide
aaguucgccgcaauacagg

SEQ ID NO: 2086252 - RNA, 19 nt, Artificial Sequence
  Description of Artificial Sequence: Synthetic oligonucleotide
aaguuucuagccacaugac

SEQ ID NO: 2086253 - RNA, 19 nt, Artificial Sequence
  Description of Artificial Sequence: Synthetic oligonucleotide
uccuucugcaaccagcuuu

SEQ ID NO: 2086254 - RNA, 19 nt, Artificial Sequence
  Description of Artificial Sequence: Synthetic oligonucleotide
uuaucacaguauaaaccaa

SEQ ID NO: 2086255 - RNA, 19 nt, Artificial Sequence
  Description of Artificial Sequence: Synthetic oligonucleotide
accaguaagaaagcuaacu

SEQ ID NO: 2086256 - RNA, 19 nt, Artificial Sequence
  Description of Artificial Sequence: Synthetic oligonucleotide
aaagcuaacuagacuuuca

SEQ ID NO: 2086257 - RNA, 19 nt, Artificial Sequence
  Description of Artificial Sequence: Synthetic oligonucleotide
uauugacgaaagcaguuuu

SEQ ID NO: 2086258 - RNA, 19 nt, Artificial Sequence
  Description of Artificial Sequence: Synthetic oligonucleotide
guaagaaagcuaacuagac

SEQ ID NO: 2086259 - RNA, 19 nt, Artificial Sequence
  Description of Artificial Sequence: Synthetic oligonucleotide
gugugaggcacuuauguga

SEQ ID NO: 2086260 - RNA, 19 nt, Artificial Sequence
  Description of Artificial Sequence: Synthetic oligonucleotide
uucccugucauuuguguaa

SEQ ID NO: 2086261 - RNA, 19 nt, Artificial Sequence
  Description of Artificial Sequence: Synthetic oligonucleotide
aaagaaaguucgccgcaau

SEQ ID NO: 2086262 - RNA, 19 nt, Artificial Sequence
  Description of Artificial Sequence: Synthetic oligonucleotide
agugcagcccuuucagguc

SEQ ID NO: 2086263 - RNA, 19 nt, Artificial Sequence
  Description of Artificial Sequence: Synthetic oligonucleotide
ggaauucugcacuaagggc

SEQ ID NO: 2086264 - RNA, 19 nt, Artificial Sequence
  Description of Artificial Sequence: Synthetic oligonucleotide
gauaguucuugauuguccu

SEQ ID NO: 2086265 - RNA, 19 nt, Artificial Sequence
  Description of Artificial Sequence: Synthetic oligonucleotide
cuuggaguagucccagggc

SEQ ID NO: 2086266 - RNA, 19 nt, Artificial Sequence
  Description of Artificial Sequence: Synthetic oligonucleotide
uucucggaacgucgcacgg

SEQ ID NO: 2086267 - RNA, 19 nt, Artificial Sequence
  Description of Artificial Sequence: Synthetic oligonucleotide
ugcaacuaguaccguuucc

SEQ ID NO: 2086268 - RNA, 19 nt, Artificial Sequence
  Description of Artificial Sequence: Synthetic oligonucleotide
uaacuggcaaugcugguuu

SEQ ID NO: 2086269 - RNA, 19 nt, Artificial Sequence
  Description of Artificial Sequence: Synthetic oligonucleotide
agggaauucugcacuaagg

SEQ ID NO: 2086270 - RNA, 19 nt, Artificial Sequence
  Description of Artificial Sequence: Synthetic oligonucleotide
gugagucuagacucgggag

SEQ ID NO: 2086271 - RNA, 19 nt, Artificial Sequence
  Description of Artificial Sequence: Synthetic oligonucleotide
ucuucacuccccgaaccgg

SEQ ID NO: 2086272 - RNA, 19 nt, Artificial Sequence
  Description of Artificial Sequence: Synthetic oligonucleotide
cuucucggaacgucgcacg

SEQ ID NO: 2086273 - RNA, 19 nt, Artificial Sequence
  Description of Artificial Sequence: Synthetic oligonucleotide
cuucacuccccgaaccggg

SEQ ID NO: 2086274 - RNA, 19 nt, Artificial Sequence
  Description of Artificial Sequence: Synthetic oligonucleotide
caacuaguaccguuucccc

SEQ ID NO: 2086275 - RNA, 19 nt, Artificial Sequence
  Description of Artificial Sequence: Synthetic oligonucleotide
uuccuaagugccacucgag

SEQ ID NO: 2086276 - RNA, 19 nt, Artificial Sequence
  Description of Artificial Sequence: Synthetic oligonucleotide
gguuuucucugcuuucgcg

SEQ ID NO: 2086277 - RNA, 19 nt, Artificial Sequence
  Description of Artificial Sequence: Synthetic oligonucleotide
cugaugaaaagugcagccc

SEQ ID NO: 2086278 - RNA, 19 nt, Artificial Sequence
  Description of Artificial Sequence: Synthetic oligonucleotide
aagaaaguucgccgcaaua

SEQ ID NO: 2086279 - RNA, 19 nt, Artificial Sequence
  Description of Artificial Sequence: Synthetic oligonucleotide
guuucugacguuucgccuc

SEQ ID NO: 2086280 - RNA, 19 nt, Artificial Sequence
  Description of Artificial Sequence: Synthetic oligonucleotide
cuagccacaugacagacaa

SEQ ID NO: 2086281 - RNA, 19 nt, Artificial Sequence
  Description of Artificial Sequence: Synthetic oligonucleotide
ugaaaagugcagcccuuuc

SEQ ID NO: 2086282 - RNA, 19 nt, Artificial Sequence
  Description of Artificial Sequence: Synthetic oligonucleotide
auccguagagcuuccuaag

SEQ ID NO: 2086283 - RNA, 19 nt, Artificial Sequence
  Description of Artificial Sequence: Synthetic oligonucleotide
ugguaaucccaguuuggcu

SEQ ID NO: 2086284 - RNA, 19 nt, Artificial Sequence
  Description of Artificial Sequence: Synthetic oligonucleotide
ugcuuucgcgcucucuuug

SEQ ID NO: 2086285 - RNA, 19 nt, Artificial Sequence
  Description of Artificial Sequence: Synthetic oligonucleotide
caaguuucugacguuucgc

SEQ ID NO: 2086286 - RNA, 19 nt, Artificial Sequence
  Description of Artificial Sequence: Synthetic oligonucleotide
uucgcgcucucuuugggcu

SEQ ID NO: 2086287 - RNA, 19 nt, Artificial Sequence
  Description of Artificial Sequence: Synthetic oligonucleotide
gagucuagacucgggagcc

SEQ ID NO: 2086288 - RNA, 19 nt, Artificial Sequence
  Description of Artificial Sequence: Synthetic oligonucleotide
aguuccucuacgaguaguc

SEQ ID NO: 2086289 - RNA, 19 nt, Artificial Sequence
  Description of Artificial Sequence: Synthetic oligonucleotide
gaagcggaaggcugcccgg

SEQ ID NO: 2086290 - RNA, 19 nt, Artificial Sequence
  Description of Artificial Sequence: Synthetic oligonucleotide
uauagcagcuauugacgaa

SEQ ID NO: 2086291 - RNA, 19 nt, Artificial Sequence
  Description of Artificial Sequence: Synthetic oligonucleotide
ucuagccacaugacagaca

SEQ ID NO: 2086292 - RNA, 19 nt, Artificial Sequence
  Description of Artificial Sequence: Synthetic oligonucleotide
cuacgaguagucccauagg

SEQ ID NO: 2086293 - RNA, 19 nt, Artificial Sequence
  Description of Artificial Sequence: Synthetic oligonucleotide
auagcagcuauugacgaaa

SEQ ID NO: 2086294 - RNA, 19 nt, Artificial Sequence
  Description of Artificial Sequence: Synthetic oligonucleotide
aaagcaguuuugagaaggu

SEQ ID NO: 2086295 - RNA, 19 nt, Artificial Sequence
  Description of Artificial Sequence: Synthetic oligonucleotide
uagagcuuccuaagugcca

SEQ ID NO: 2086296 - RNA, 19 nt, Artificial Sequence
  Description of Artificial Sequence: Synthetic oligonucleotide
ggaaaagguuucuuguaac

SEQ ID NO: 2086297 - RNA, 19 nt, Artificial Sequence
  Description of Artificial Sequence: Synthetic oligonucleotide
ugguuuucucugcuuucgc

SEQ ID NO: 2086298 - RNA, 19 nt, Artificial Sequence
  Description of Artificial Sequence: Synthetic oligonucleotide
uuucgcgcucucuuugggc

SEQ ID NO: 2086299 - RNA, 19 nt, Artificial Sequence
  Description of Artificial Sequence: Synthetic oligonucleotide
uggugagucuagacucggg

SEQ ID NO: 2086300 - RNA, 19 nt, Artificial Sequence
  Description of Artificial Sequence: Synthetic oligonucleotide
guagagcuuccuaagugcc

SEQ ID NO: 2086301 - RNA, 19 nt, Artificial Sequence
  Description of Artificial Sequence: Synthetic oligonucleotide
uuuccgcaugguaauccca

SEQ ID NO: 2086302 - RNA, 19 nt, Artificial Sequence
  Description of Artificial Sequence: Synthetic oligonucleotide
gcuuggaguagucccaggg

SEQ ID NO: 2086303 - RNA, 19 nt, Artificial Sequence
  Description of Artificial Sequence: Synthetic oligonucleotide
agcgcugcagccgccaucg

SEQ ID NO: 2086304 - RNA, 19 nt, Artificial Sequence
  Description of Artificial Sequence: Synthetic oligonucleotide
ugggcuuggaguaguccca

SEQ ID NO: 2086305 - RNA, 19 nt, Artificial Sequence
  Description of Artificial Sequence: Synthetic oligonucleotide
ucgggagccgaaaugucuc

SEQ ID NO: 2086306 - RNA, 19 nt, Artificial Sequence
  Description of Artificial Sequence: Synthetic oligonucleotide
caaugcugguuuucucugc

SEQ ID NO: 2086307 - RNA, 19 nt, Artificial Sequence
  Description of Artificial Sequence: Synthetic oligonucleotide
ggaagcggaaggcugcccg

SEQ ID NO: 2086308 - RNA, 19 nt, Artificial Sequence
  Description of Artificial Sequence: Synthetic oligonucleotide
gcaacuaguaccguuuccc

SEQ ID NO: 2086309 - RNA, 19 nt, Artificial Sequence
  Description of Artificial Sequence: Synthetic oligonucleotide
agcuaacuagacuuucaau

SEQ ID NO: 2086310 - RNA, 19 nt, Artificial Sequence
  Description of Artificial Sequence: Synthetic oligonucleotide
ccaaggaaaagguuucuug

SEQ ID NO: 2086311 - RNA, 19 nt, Artificial Sequence
  Description of Artificial Sequence: Synthetic oligonucleotide
aaugccuucggugggcaaa

SEQ ID NO: 2086312 - RNA, 19 nt, Artificial Sequence
  Description of Artificial Sequence: Synthetic oligonucleotide
caagaggcagcgagggccc

SEQ ID NO: 2086313 - RNA, 19 nt, Artificial Sequence
  Description of Artificial Sequence: Synthetic oligonucleotide
uguucucugugaauccgua

SEQ ID NO: 2086314 - RNA, 19 nt, Artificial Sequence
  Description of Artificial Sequence: Synthetic oligonucleotide
ucaguuccucuacgaguag

SEQ ID NO: 2086315 - RNA, 19 nt, Artificial Sequence
  Description of Artificial Sequence: Synthetic oligonucleotide
ugcucuagacaggauggug

SEQ ID NO: 2086316 - RNA, 19 nt, Artificial Sequence
  Description of Artificial Sequence: Synthetic oligonucleotide
auucagaagaacggcuucu

SEQ ID NO: 2086317 - RNA, 19 nt, Artificial Sequence
  Description of Artificial Sequence: Synthetic oligonucleotide
uucgccucuucacuuuuaa

SEQ ID NO: 2086318 - RNA, 19 nt, Artificial Sequence
  Description of Artificial Sequence: Synthetic oligonucleotide
aacugccucaccaguaaga

SEQ ID NO: 2086319 - RNA, 19 nt, Artificial Sequence
  Description of Artificial Sequence: Synthetic oligonucleotide
agcccuuucagguccgcug

SEQ ID NO: 2086320 - RNA, 19 nt, Artificial Sequence
  Description of Artificial Sequence: Synthetic oligonucleotide
accccuucuucacuccccg

SEQ ID NO: 2086321 - RNA, 19 nt, Artificial Sequence
  Description of Artificial Sequence: Synthetic oligonucleotide
uuucccugucauuugugua

SEQ ID NO: 2086322 - RNA, 19 nt, Artificial Sequence
  Description of Artificial Sequence: Synthetic oligonucleotide
agaacggcuucuuucucaa

SEQ ID NO: 2086323 - RNA, 19 nt, Artificial Sequence
  Description of Artificial Sequence: Synthetic oligonucleotide
cacugcaaagaaaguucgc

SEQ ID NO: 2086324 - RNA, 19 nt, Artificial Sequence
  Description of Artificial Sequence: Synthetic oligonucleotide
aacgucgcacggguggcgg

SEQ ID NO: 2086325 - RNA, 19 nt, Artificial Sequence
  Description of Artificial Sequence: Synthetic oligonucleotide
ugacagacaacugccucac

SEQ ID NO: 2086326 - RNA, 19 nt, Artificial Sequence
  Description of Artificial Sequence: Synthetic oligonucleotide
gcaugguaaucccaguuug

SEQ ID NO: 2086327 - RNA, 19 nt, Artificial Sequence
  Description of Artificial Sequence: Synthetic oligonucleotide
uaccguuuccccagguccu

SEQ ID NO: 2086328 - RNA, 19 nt, Artificial Sequence
  Description of Artificial Sequence: Synthetic oligonucleotide
guguuacccugcuugcugc

SEQ ID NO: 2086329 - RNA, 19 nt, Artificial Sequence
  Description of Artificial Sequence: Synthetic oligonucleotide
agacucgggagccgaaaug

SEQ ID NO: 2086330 - RNA, 19 nt, Artificial Sequence
  Description of Artificial Sequence: Synthetic oligonucleotide
cuuccuaagugccacucga

SEQ ID NO: 2086331 - RNA, 19 nt, Artificial Sequence
  Description of Artificial Sequence: Synthetic oligonucleotide
cuagacuuucaaugccuuc

SEQ ID NO: 2086332 - RNA, 19 nt, Artificial Sequence
  Description of Artificial Sequence: Synthetic oligonucleotide
cuuucgcgcucucuuuggg

SEQ ID NO: 2086333 - RNA, 19 nt, Artificial Sequence
  Description of Artificial Sequence: Synthetic oligonucleotide
gguguuacccugcuugcug

SEQ ID NO: 2086334 - RNA, 19 nt, Artificial Sequence
  Description of Artificial Sequence: Synthetic oligonucleotide
guccacaucucaaagagcu

SEQ ID NO: 2086335 - RNA, 19 nt, Artificial Sequence
  Description of Artificial Sequence: Synthetic oligonucleotide
uguuacccugcuugcugcc

SEQ ID NO: 2086336 - RNA, 19 nt, Artificial Sequence
  Description of Artificial Sequence: Synthetic oligonucleotide
ucugcacuaagggccaacu

SEQ ID NO: 2086337 - RNA, 19 nt, Artificial Sequence
  Description of Artificial Sequence: Synthetic oligonucleotide
agagcucuuucccugucau

SEQ ID NO: 2086338 - RNA, 19 nt, Artificial Sequence
  Description of Artificial Sequence: Synthetic oligonucleotide
caaccccaaguuucugacg

SEQ ID NO: 2086339 - RNA, 19 nt, Artificial Sequence
  Description of Artificial Sequence: Synthetic oligonucleotide
uuucagguccgcugcucug

SEQ ID NO: 2086340 - RNA, 19 nt, Artificial Sequence
  Description of Artificial Sequence: Synthetic oligonucleotide
caguuuggcuucucggaac

SEQ ID NO: 2086341 - RNA, 19 nt, Artificial Sequence
  Description of Artificial Sequence: Synthetic oligonucleotide
ucucggaacgucgcacggg

SEQ ID NO: 2086342 - RNA, 19 nt, Artificial Sequence
  Description of Artificial Sequence: Synthetic oligonucleotide
ucggugggcaaaucuggga

SEQ ID NO: 2086343 - RNA, 19 nt, Artificial Sequence
  Description of Artificial Sequence: Synthetic oligonucleotide
agcuauugacgaaagcagu

SEQ ID NO: 2086344 - RNA, 19 nt, Artificial Sequence
  Description of Artificial Sequence: Synthetic oligonucleotide
agcuuccuaagugccacuc

SEQ ID NO: 2086345 - RNA, 19 nt, Artificial Sequence
  Description of Artificial Sequence: Synthetic oligonucleotide
caagaaacugugugaggca

SEQ ID NO: 2086346 - RNA, 19 nt, Artificial Sequence
  Description of Artificial Sequence: Synthetic oligonucleotide
uagacucgggagccgaaau

SEQ ID NO: 2086347 - RNA, 19 nt, Artificial Sequence
  Description of Artificial Sequence: Synthetic oligonucleotide
ugccacucgagcagcuucu

SEQ ID NO: 2086348 - RNA, 19 nt, Artificial Sequence
  Description of Artificial Sequence: Synthetic oligonucleotide
gaagaacggcuucuuucuc

SEQ ID NO: 2086349 - RNA, 19 nt, Artificial Sequence
  Description of Artificial Sequence: Synthetic oligonucleotide
cuaagggccaacugcucca

SEQ ID NO: 2086350 - RNA, 19 nt, Artificial Sequence
  Description of Artificial Sequence: Synthetic oligonucleotide
cucaccaguaagaaagcua

SEQ ID NO: 2086351 - RNA, 19 nt, Artificial Sequence
  Description of Artificial Sequence: Synthetic oligonucleotide
cagauaguucuugauuguc

SEQ ID NO: 2086352 - RNA, 19 nt, Artificial Sequence
  Description of Artificial Sequence: Synthetic oligonucleotide
agccccaaaggcuuguauu

SEQ ID NO: 2086353 - RNA, 19 nt, Artificial Sequence
  Description of Artificial Sequence: Synthetic oligonucleotide
cuaguaccguuuccccagg

SEQ ID NO: 2086354 - RNA, 19 nt, Artificial Sequence
  Description of Artificial Sequence: Synthetic oligonucleotide
uagacaggaugguguuacc

SEQ ID NO: 2086355 - RNA, 19 nt, Artificial Sequence
  Description of Artificial Sequence: Synthetic oligonucleotide
ggcuuguauuuccgcaugg

SEQ ID NO: 2086356 - RNA, 19 nt, Artificial Sequence
  Description of Artificial Sequence: Synthetic oligonucleotide
cuuguauuuccgcauggua

SEQ ID NO: 2086357 - RNA, 19 nt, Artificial Sequence
  Description of Artificial Sequence: Synthetic oligonucleotide
ucugacguuucgccucuuc

SEQ ID NO: 2086358 - RNA, 19 nt, Artificial Sequence
  Description of Artificial Sequence: Synthetic oligonucleotide
ccaagaggcagcgagggcc

SEQ ID NO: 2086359 - RNA, 19 nt, Artificial Sequence
  Description of Artificial Sequence: Synthetic oligonucleotide
ggugagucuagacucggga

SEQ ID NO: 2086360 - RNA, 19 nt, Artificial Sequence
  Description of Artificial Sequence: Synthetic oligonucleotide
ugcugccuaacuggcaaug

SEQ ID NO: 2086361 - RNA, 19 nt, Artificial Sequence
  Description of Artificial Sequence: Synthetic oligonucleotide
gaauccguagagcuuccua

SEQ ID NO: 2086362 - RNA, 19 nt, Artificial Sequence
  Description of Artificial Sequence: Synthetic oligonucleotide
gccuaacuggcaaugcugg

SEQ ID NO: 2086363 - RNA, 19 nt, Artificial Sequence
  Description of Artificial Sequence: Synthetic oligonucleotide
agauucagaagaacggcuu

SEQ ID NO: 2086364 - RNA, 19 nt, Artificial Sequence
  Description of Artificial Sequence: Synthetic oligonucleotide
ucacugcuuugcucuagac

SEQ ID NO: 2086365 - RNA, 19 nt, Artificial Sequence
  Description of Artificial Sequence: Synthetic oligonucleotide
uuacaacaguccacaucuc

SEQ ID NO: 2086366 - RNA, 19 nt, Artificial Sequence
  Description of Artificial Sequence: Synthetic oligonucleotide
cacugcuuugcucuagaca

SEQ ID NO: 2086367 - RNA, 19 nt, Artificial Sequence
  Description of Artificial Sequence: Synthetic oligonucleotide
ucucacugcuuugcucuag

SEQ ID NO: 2086368 - RNA, 19 nt, Artificial Sequence
  Description of Artificial Sequence: Synthetic oligonucleotide
guuccucuacgaguagucc

SEQ ID NO: 2086369 - RNA, 19 nt, Artificial Sequence
  Description of Artificial Sequence: Synthetic oligonucleotide
uucuuguaaccgagcccca

SEQ ID NO: 2086370 - RNA, 19 nt, Artificial Sequence
  Description of Artificial Sequence: Synthetic oligonucleotide
gacguuucgccucuucacu

SEQ ID NO: 2086371 - RNA, 19 nt, Artificial Sequence
  Description of Artificial Sequence: Synthetic oligonucleotide
gccuggugagucuagacuc

SEQ ID NO: 2086372 - RNA, 19 nt, Artificial Sequence
  Description of Artificial Sequence: Synthetic oligonucleotide
ggcuccaaucacugcaaag

SEQ ID NO: 2086373 - RNA, 19 nt, Artificial Sequence
  Description of Artificial Sequence: Synthetic oligonucleotide
uucagguccgcugcucugu

SEQ ID NO: 2086374 - RNA, 19 nt, Artificial Sequence
  Description of Artificial Sequence: Synthetic oligonucleotide
uuacccugcuugcugccua

SEQ ID NO: 2086375 - RNA, 19 nt, Artificial Sequence
  Description of Artificial Sequence: Synthetic oligonucleotide
aggaugguguuacccugcu

SEQ ID NO: 2086376 - RNA, 19 nt, Artificial Sequence
  Description of Artificial Sequence: Synthetic oligonucleotide
cuggugagucuagacucgg

SEQ ID NO: 2086377 - RNA, 19 nt, Artificial Sequence
  Description of Artificial Sequence: Synthetic oligonucleotide
ucuagacucgggagccgaa

SEQ ID NO: 2086378 - RNA, 19 nt, Artificial Sequence
  Description of Artificial Sequence: Synthetic oligonucleotide
gggacagggaauucugcac

SEQ ID NO: 2086379 - RNA, 19 nt, Artificial Sequence
  Description of Artificial Sequence: Synthetic oligonucleotide
cacagcagaagccauggcu

SEQ ID NO: 2086380 - RNA, 19 nt, Artificial Sequence
  Description of Artificial Sequence: Synthetic oligonucleotide
ggccaacugcuccacagcc

SEQ ID NO: 2086381 - RNA, 19 nt, Artificial Sequence
  Description of Artificial Sequence: Synthetic oligonucleotide
caacugccucaccaguaag

SEQ ID NO: 2086382 - RNA, 19 nt, Artificial Sequence
  Description of Artificial Sequence: Synthetic oligonucleotide
ucaaugccuucggugggca

SEQ ID NO: 2086383 - RNA, 19 nt, Artificial Sequence
  Description of Artificial Sequence: Synthetic oligonucleotide
gguaaucccaguuuggcuu

SEQ ID NO: 2086384 - RNA, 19 nt, Artificial Sequence
  Description of Artificial Sequence: Synthetic oligonucleotide
agaaagcuaacuagacuuu

SEQ ID NO: 2086385 - RNA, 19 nt, Artificial Sequence
  Description of Artificial Sequence: Synthetic oligonucleotide
caacaguccacaucucaaa

SEQ ID NO: 2086386 - RNA, 19 nt, Artificial Sequence
  Description of Artificial Sequence: Synthetic oligonucleotide
gcuuucgcgcucucuuugg

SEQ ID NO: 2086387 - RNA, 19 nt, Artificial Sequence
  Description of Artificial Sequence: Synthetic oligonucleotide
ccuucggugggcaaaucug

SEQ ID NO: 2086388 - RNA, 19 nt, Artificial Sequence
  Description of Artificial Sequence: Synthetic oligonucleotide
caccaguaagaaagcuaac

SEQ ID NO: 2086389 - RNA, 19 nt, Artificial Sequence
  Description of Artificial Sequence: Synthetic oligonucleotide
gacagggaauucugcacua

SEQ ID NO: 2086390 - RNA, 19 nt, Artificial Sequence
  Description of Artificial Sequence: Synthetic oligonucleotide
cuguagcagggcuccaauc

SEQ ID NO: 2086391 - RNA, 19 nt, Artificial Sequence
  Description of Artificial Sequence: Synthetic oligonucleotide
cugccuggugagucuagac

SEQ ID NO: 2086392 - RNA, 19 nt, Artificial Sequence
  Description of Artificial Sequence: Synthetic oligonucleotide
gcaaagaaaguucgccgca

SEQ ID NO: 2086393 - RNA, 19 nt, Artificial Sequence
  Description of Artificial Sequence: Synthetic oligonucleotide
agggccgucuguucucugu

SEQ ID NO: 2086394 - RNA, 19 nt, Artificial Sequence
  Description of Artificial Sequence: Synthetic oligonucleotide
cugcacuaagggccaacug

SEQ ID NO: 2086395 - RNA, 19 nt, Artificial Sequence
  Description of Artificial Sequence: Synthetic oligonucleotide
ucucaaccccaaguuucug

SEQ ID NO: 2086396 - RNA, 19 nt, Artificial Sequence
  Description of Artificial Sequence: Synthetic oligonucleotide
cugcaacuaguaccguuuc

SEQ ID NO: 2086397 - RNA, 19 nt, Artificial Sequence
  Description of Artificial Sequence: Synthetic oligonucleotide
gacucgggagccgaaaugu

SEQ ID NO: 2086398 - RNA, 19 nt, Artificial Sequence
  Description of Artificial Sequence: Synthetic oligonucleotide
ccuaagugccacucgagca

SEQ ID NO: 2086399 - RNA, 19 nt, Artificial Sequence
  Description of Artificial Sequence: Synthetic oligonucleotide
acguuucgccucuucacuu

SEQ ID NO: 2086400 - RNA, 19 nt, Artificial Sequence
  Description of Artificial Sequence: Synthetic oligonucleotide
uaguaccguuuccccaggu

SEQ ID NO: 2086401 - RNA, 19 nt, Artificial Sequence
  Description of Artificial Sequence: Synthetic oligonucleotide
gacagacaacugccucacc

SEQ ID NO: 2086402 - RNA, 19 nt, Artificial Sequence
  Description of Artificial Sequence: Synthetic oligonucleotide
cuuugggcuuggaguaguc

SEQ ID NO: 2086403 - RNA, 19 nt, Artificial Sequence
  Description of Artificial Sequence: Synthetic oligonucleotide
agucuagacucgggagccg

SEQ ID NO: 2086404 - RNA, 19 nt, Artificial Sequence
  Description of Artificial Sequence: Synthetic oligonucleotide
ucgccgcaauacaggcagg

SEQ ID NO: 2086405 - RNA, 19 nt, Artificial Sequence
  Description of Artificial Sequence: Synthetic oligonucleotide
acgucgcacggguggcggc

SEQ ID NO: 2086406 - RNA, 19 nt, Artificial Sequence
  Description of Artificial Sequence: Synthetic oligonucleotide
cuuguaaccgagccccaaa

SEQ ID NO: 2086407 - RNA, 19 nt, Artificial Sequence
  Description of Artificial Sequence: Synthetic oligonucleotide
gaacgucgcacggguggcg

SEQ ID NO: 2086408 - RNA, 19 nt, Artificial Sequence
  Description of Artificial Sequence: Synthetic oligonucleotide
aguagucccagggccgucu

SEQ ID NO: 2086409 - RNA, 19 nt, Artificial Sequence
  Description of Artificial Sequence: Synthetic oligonucleotide
gguccaaggaaaagguuuc

SEQ ID NO: 2086410 - RNA, 19 nt, Artificial Sequence
  Description of Artificial Sequence: Synthetic oligonucleotide
agaaacugugugaggcacu

SEQ ID NO: 2086411 - RNA, 19 nt, Artificial Sequence
  Description of Artificial Sequence: Synthetic oligonucleotide
aacuggcaaugcugguuuu

SEQ ID NO: 2086412 - RNA, 19 nt, Artificial Sequence
  Description of Artificial Sequence: Synthetic oligonucleotide
uuucgccucuucacuuuua

SEQ ID NO: 2086413 - RNA, 19 nt, Artificial Sequence
  Description of Artificial Sequence: Synthetic oligonucleotide
acgaguagucccauaggau

SEQ ID NO: 2086414 - RNA, 19 nt, Artificial Sequence
  Description of Artificial Sequence: Synthetic oligonucleotide
ugguguuacccugcuugcu

SEQ ID NO: 2086415 - RNA, 19 nt, Artificial Sequence
  Description of Artificial Sequence: Synthetic oligonucleotide
ggugggcaaaucugggaac

SEQ ID NO: 2086416 - RNA, 19 nt, Artificial Sequence
  Description of Artificial Sequence: Synthetic oligonucleotide
aagggccaacugcuccaca

SEQ ID NO: 2086417 - RNA, 19 nt, Artificial Sequence
  Description of Artificial Sequence: Synthetic oligonucleotide
uugcucuagacaggauggu

SEQ ID NO: 2086418 - RNA, 19 nt, Artificial Sequence
  Description of Artificial Sequence: Synthetic oligonucleotide
ucggaacgucgcacgggug

SEQ ID NO: 2086419 - RNA, 19 nt, Artificial Sequence
  Description of Artificial Sequence: Synthetic oligonucleotide
acuagacuuucaaugccuu

SEQ ID NO: 2086420 - RNA, 19 nt, Artificial Sequence
  Description of Artificial Sequence: Synthetic oligonucleotide
ccguagagcuuccuaagug

SEQ ID NO: 2086421 - RNA, 19 nt, Artificial Sequence
  Description of Artificial Sequence: Synthetic oligonucleotide
ggaacucaucuucaagaaa

SEQ ID NO: 2086422 - RNA, 19 nt, Artificial Sequence
  Description of Artificial Sequence: Synthetic oligonucleotide
augaaaagugcagcccuuu

SEQ ID NO: 2086423 - RNA, 19 nt, Artificial Sequence
  Description of Artificial Sequence: Synthetic oligonucleotide
gacaacugccucaccagua

SEQ ID NO: 2086424 - RNA, 19 nt, Artificial Sequence
  Description of Artificial Sequence: Synthetic oligonucleotide
ccaguaagaaagcuaacua

SEQ ID NO: 2086425 - RNA, 19 nt, Artificial Sequence
  Description of Artificial Sequence: Synthetic oligonucleotide
cucuuugggcuuggaguag

SEQ ID NO: 2086426 - RNA, 19 nt, Artificial Sequence
  Description of Artificial Sequence: Synthetic oligonucleotide
gcggccggagccaagaggc

SEQ ID NO: 2086427 - RNA, 19 nt, Artificial Sequence
  Description of Artificial Sequence: Synthetic oligonucleotide
gaacggcuucuuucucaac

SEQ ID NO: 2086428 - RNA, 19 nt, Artificial Sequence
  Description of Artificial Sequence: Synthetic oligonucleotide
uucugcacuaagggccaac

SEQ ID NO: 2086429 - RNA, 19 nt, Artificial Sequence
  Description of Artificial Sequence: Synthetic oligonucleotide
ugaauccguagagcuuccu

SEQ ID NO: 2086430 - RNA, 19 nt, Artificial Sequence
  Description of Artificial Sequence: Synthetic oligonucleotide
ucgccucuucacuuuuaau

SEQ ID NO: 2086431 - RNA, 19 nt, Artificial Sequence
  Description of Artificial Sequence: Synthetic oligonucleotide
aguagucccauaggauuua

SEQ ID NO: 2086432 - RNA, 19 nt, Artificial Sequence
  Description of Artificial Sequence: Synthetic oligonucleotide
cuggaagcggaaggcugcc

SEQ ID NO: 2086433 - RNA, 19 nt, Artificial Sequence
  Description of Artificial Sequence: Synthetic oligonucleotide
guauuuccgcaugguaauc

SEQ ID NO: 2086434 - RNA, 19 nt, Artificial Sequence
  Description of Artificial Sequence: Synthetic oligonucleotide
caaagaaaguucgccgcaa

SEQ ID NO: 2086435 - RNA, 19 nt, Artificial Sequence
  Description of Artificial Sequence: Synthetic oligonucleotide
ucagguccgcugcucugua

SEQ ID NO: 2086436 - RNA, 19 nt, Artificial Sequence
  Description of Artificial Sequence: Synthetic oligonucleotide
guagucccauaggauuuac

SEQ ID NO: 2086437 - RNA, 19 nt, Artificial Sequence
  Description of Artificial Sequence: Synthetic oligonucleotide
gaaacugugugaggcacuu

SEQ ID NO: 2086438 - RNA, 19 nt, Artificial Sequence
  Description of Artificial Sequence: Synthetic oligonucleotide
ugggcaaaucugggaacuc

SEQ ID NO: 2086439 - RNA, 19 nt, Artificial Sequence
  Description of Artificial Sequence: Synthetic oligonucleotide
uugcugccuaacuggcaau

SEQ ID NO: 2086440 - RNA, 19 nt, Artificial Sequence
  Description of Artificial Sequence: Synthetic oligonucleotide
acugccuggugagucuaga

SEQ ID NO: 2086441 - RNA, 19 nt, Artificial Sequence
  Description of Artificial Sequence: Synthetic oligonucleotide
uggaagcggaaggcugccc

SEQ ID NO: 2086442 - RNA, 19 nt, Artificial Sequence
  Description of Artificial Sequence: Synthetic oligonucleotide
cucgggagccgaaaugucu

SEQ ID NO: 2086443 - RNA, 19 nt, Artificial Sequence
  Description of Artificial Sequence: Synthetic oligonucleotide
guagucccagggccgucug

SEQ ID NO: 2086444 - RNA, 19 nt, Artificial Sequence
  Description of Artificial Sequence: Synthetic oligonucleotide
uagucccagggccgucugu

SEQ ID NO: 2086445 - RNA, 19 nt, Artificial Sequence
  Description of Artificial Sequence: Synthetic oligonucleotide
gaguagucccauaggauuu

SEQ ID NO: 2086446 - RNA, 19 nt, Artificial Sequence
  Description of Artificial Sequence: Synthetic oligonucleotide
gugaauccguagagcuucc

SEQ ID NO: 2086447 - RNA, 19 nt, Artificial Sequence
  Description of Artificial Sequence: Synthetic oligonucleotide
acagggaauucugcacuaa

SEQ ID NO: 2086448 - RNA, 19 nt, Artificial Sequence
  Description of Artificial Sequence: Synthetic oligonucleotide
ccuucuucacuccccgaac

SEQ ID NO: 2086449 - RNA, 19 nt, Artificial Sequence
  Description of Artificial Sequence: Synthetic oligonucleotide
gacugccuggugagucuag

SEQ ID NO: 2086450 - RNA, 19 nt, Artificial Sequence
  Description of Artificial Sequence: Synthetic oligonucleotide
guccgcugcucuguagcag

SEQ ID NO: 2086451 - RNA, 19 nt, Artificial Sequence
  Description of Artificial Sequence: Synthetic oligonucleotide
ucgcacggguggcggcggg

SEQ ID NO: 2086452 - RNA, 19 nt, Artificial Sequence
  Description of Artificial Sequence: Synthetic oligonucleotide
gucuagacucgggagccga

SEQ ID NO: 2086453 - RNA, 19 nt, Artificial Sequence
  Description of Artificial Sequence: Synthetic oligonucleotide
cagguccgcugcucuguag

SEQ ID NO: 2086454 - RNA, 19 nt, Artificial Sequence
  Description of Artificial Sequence: Synthetic oligonucleotide
ggcuuggaguagucccagg

SEQ ID NO: 2086455 - RNA, 19 nt, Artificial Sequence
  Description of Artificial Sequence: Synthetic oligonucleotide
caucgcuccagcuccuucu

SEQ ID NO: 2086456 - RNA, 19 nt, Artificial Sequence
  Description of Artificial Sequence: Synthetic oligonucleotide
gcagccgcaccacagcaga

SEQ ID NO: 2086457 - RNA, 19 nt, Artificial Sequence
  Description of Artificial Sequence: Synthetic oligonucleotide
cccaguuuggcuucucgga

SEQ ID NO: 2086458 - RNA, 19 nt, Artificial Sequence
  Description of Artificial Sequence: Synthetic oligonucleotide
uccccagguccuucugcaa

SEQ ID NO: 2086459 - RNA, 19 nt, Artificial Sequence
  Description of Artificial Sequence: Synthetic oligonucleotide
aaacugugugaggcacuua

SEQ ID NO: 2086460 - RNA, 19 nt, Artificial Sequence
  Description of Artificial Sequence: Synthetic oligonucleotide
cucuuucccugucauuugu

SEQ ID NO: 2086461 - RNA, 19 nt, Artificial Sequence
  Description of Artificial Sequence: Synthetic oligonucleotide
cuauugacgaaagcaguuu

SEQ ID NO: 2086462 - RNA, 19 nt, Artificial Sequence
  Description of Artificial Sequence: Synthetic oligonucleotide
gccgcaauacaggcagggg

SEQ ID NO: 2086463 - RNA, 19 nt, Artificial Sequence
  Description of Artificial Sequence: Synthetic oligonucleotide
ggaacgucgcacggguggc

SEQ ID NO: 2086464 - RNA, 19 nt, Artificial Sequence
  Description of Artificial Sequence: Synthetic oligonucleotide
cucggaacgucgcacgggu

SEQ ID NO: 2086465 - RNA, 19 nt, Artificial Sequence
  Description of Artificial Sequence: Synthetic oligonucleotide
cccaaguuucugacguuuc

SEQ ID NO: 2086466 - RNA, 19 nt, Artificial Sequence
  Description of Artificial Sequence: Synthetic oligonucleotide
agccaaguuucuagccaca

SEQ ID NO: 2086467 - RNA, 19 nt, Artificial Sequence
  Description of Artificial Sequence: Synthetic oligonucleotide
cugccuaacuggcaaugcu

SEQ ID NO: 2086468 - RNA, 19 nt, Artificial Sequence
  Description of Artificial Sequence: Synthetic oligonucleotide
gggccgucuguucucugug

SEQ ID NO: 2086469 - RNA, 19 nt, Artificial Sequence
  Description of Artificial Sequence: Synthetic oligonucleotide
cuaacuggcaaugcugguu

SEQ ID NO: 2086470 - RNA, 19 nt, Artificial Sequence
  Description of Artificial Sequence: Synthetic oligonucleotide
gccacaugacagacaacug

SEQ ID NO: 2086471 - RNA, 19 nt, Artificial Sequence
  Description of Artificial Sequence: Synthetic oligonucleotide
augccuucggugggcaaau

SEQ ID NO: 2086472 - RNA, 19 nt, Artificial Sequence
  Description of Artificial Sequence: Synthetic oligonucleotide
ggagccgaaaugucucucu

SEQ ID NO: 2086473 - RNA, 19 nt, Artificial Sequence
  Description of Artificial Sequence: Synthetic oligonucleotide
acccugcuugcugccuaac

SEQ ID NO: 2086474 - RNA, 19 nt, Artificial Sequence
  Description of Artificial Sequence: Synthetic oligonucleotide
guucgccgcaauacaggca

SEQ ID NO: 2086475 - RNA, 19 nt, Artificial Sequence
  Description of Artificial Sequence: Synthetic oligonucleotide
cucuagacaggaugguguu

SEQ ID NO: 2086476 - RNA, 19 nt, Artificial Sequence
  Description of Artificial Sequence: Synthetic oligonucleotide
cccggaaccccuucuucac

SEQ ID NO: 2086477 - RNA, 19 nt, Artificial Sequence
  Description of Artificial Sequence: Synthetic oligonucleotide
cuagacucgggagccgaaa

SEQ ID NO: 2086478 - RNA, 19 nt, Artificial Sequence
  Description of Artificial Sequence: Synthetic oligonucleotide
ccgcaccacagcagaagcc

SEQ ID NO: 2086479 - RNA, 19 nt, Artificial Sequence
  Description of Artificial Sequence: Synthetic oligonucleotide
accccaaguuucugacguu

SEQ ID NO: 2086480 - RNA, 19 nt, Artificial Sequence
  Description of Artificial Sequence: Synthetic oligonucleotide
gagccgaaaugucucucuu

SEQ ID NO: 2086481 - RNA, 19 nt, Artificial Sequence
  Description of Artificial Sequence: Synthetic oligonucleotide
agcgagggccccgcugcag

SEQ ID NO: 2086482 - RNA, 19 nt, Artificial Sequence
  Description of Artificial Sequence: Synthetic oligonucleotide
gggcuuggaguagucccag

SEQ ID NO: 2086483 - RNA, 19 nt, Artificial Sequence
  Description of Artificial Sequence: Synthetic oligonucleotide
gguccgcugcucuguagca

SEQ ID NO: 2086484 - RNA, 19 nt, Artificial Sequence
  Description of Artificial Sequence: Synthetic oligonucleotide
cucugcaacuaguaccguu

SEQ ID NO: 2086485 - RNA, 19 nt, Artificial Sequence
  Description of Artificial Sequence: Synthetic oligonucleotide
ucgcgcucucuuugggcuu

SEQ ID NO: 2086486 - RNA, 19 nt, Artificial Sequence
  Description of Artificial Sequence: Synthetic oligonucleotide
gucgcacggguggcggcgg

SEQ ID NO: 2086487 - RNA, 19 nt, Artificial Sequence
  Description of Artificial Sequence: Synthetic oligonucleotide
agacugccuggugagucua

SEQ ID NO: 2086488 - RNA, 19 nt, Artificial Sequence
  Description of Artificial Sequence: Synthetic oligonucleotide
gccaagaggcagcgagggc

SEQ ID NO: 2086489 - RNA, 19 nt, Artificial Sequence
  Description of Artificial Sequence: Synthetic oligonucleotide
gcuauugacgaaagcaguu

SEQ ID NO: 2086490 - RNA, 19 nt, Artificial Sequence
  Description of Artificial Sequence: Synthetic oligonucleotide
cagacugccuggugagucu

SEQ ID NO: 2086491 - RNA, 19 nt, Artificial Sequence
  Description of Artificial Sequence: Synthetic oligonucleotide
cugugaauccguagagcuu

SEQ ID NO: 2086492 - RNA, 19 nt, Artificial Sequence
  Description of Artificial Sequence: Synthetic oligonucleotide
gcgagggccccgcugcagc

SEQ ID NO: 2086493 - RNA, 19 nt, Artificial Sequence
  Description of Artificial Sequence: Synthetic oligonucleotide
gagccccaaaggcuuguau

SEQ ID NO: 2086494 - RNA, 19 nt, Artificial Sequence
  Description of Artificial Sequence: Synthetic oligonucleotide
cucuguagcagggcuccaa

SEQ ID NO: 2086495 - RNA, 19 nt, Artificial Sequence
  Description of Artificial Sequence: Synthetic oligonucleotide
ggcuucucggaacgucgca

SEQ ID NO: 2086496 - RNA, 19 nt, Artificial Sequence
  Description of Artificial Sequence: Synthetic oligonucleotide
guuucgccucuucacuuuu

SEQ ID NO: 2086497 - RNA, 19 nt, Artificial Sequence
  Description of Artificial Sequence: Synthetic oligonucleotide
cggaaccccuucuucacuc

SEQ ID NO: 2086498 - RNA, 19 nt, Artificial Sequence
  Description of Artificial Sequence: Synthetic oligonucleotide
gucucacugcuuugcucua

SEQ ID NO: 2086499 - RNA, 19 nt, Artificial Sequence
  Description of Artificial Sequence: Synthetic oligonucleotide
gccgucuguucucugugaa

SEQ ID NO: 2086500 - RNA, 19 nt, Artificial Sequence
  Description of Artificial Sequence: Synthetic oligonucleotide
accgagccccaaaggcuug

SEQ ID NO: 2086501 - RNA, 19 nt, Artificial Sequence
  Description of Artificial Sequence: Synthetic oligonucleotide
gccggagccaagaggcagc

SEQ ID NO: 2086502 - RNA, 19 nt, Artificial Sequence
  Description of Artificial Sequence: Synthetic oligonucleotide
cagcgcugcagccgccauc

SEQ ID NO: 2086503 - RNA, 19 nt, Artificial Sequence
  Description of Artificial Sequence: Synthetic oligonucleotide
cacaucucaaagagcucuu

SEQ ID NO: 2086504 - RNA, 19 nt, Artificial Sequence
  Description of Artificial Sequence: Synthetic oligonucleotide
guccaaggaaaagguuucu

SEQ ID NO: 2086505 - RNA, 19 nt, Artificial Sequence
  Description of Artificial Sequence: Synthetic oligonucleotide
cucuacgaguagucccaua

SEQ ID NO: 2086506 - RNA, 19 nt, Artificial Sequence
  Description of Artificial Sequence: Synthetic oligonucleotide
guuacccugcuugcugccu

SEQ ID NO: 2086507 - RNA, 19 nt, Artificial Sequence
  Description of Artificial Sequence: Synthetic oligonucleotide
gaguagucccagggccguc

SEQ ID NO: 2086508 - RNA, 19 nt, Artificial Sequence
  Description of Artificial Sequence: Synthetic oligonucleotide
ggccgucuguucucuguga

SEQ ID NO: 2086509 - RNA, 19 nt, Artificial Sequence
  Description of Artificial Sequence: Synthetic oligonucleotide
gcccuuguucagauaguuc

SEQ ID NO: 2086510 - RNA, 19 nt, Artificial Sequence
  Description of Artificial Sequence: Synthetic oligonucleotide
gccuucggugggcaaaucu

SEQ ID NO: 2086511 - RNA, 19 nt, Artificial Sequence
  Description of Artificial Sequence: Synthetic oligonucleotide
cgccgcaauacaggcaggg

SEQ ID NO: 2086512 - RNA, 19 nt, Artificial Sequence
  Description of Artificial Sequence: Synthetic oligonucleotide
cagggccgucuguucucug

SEQ ID NO: 2086513 - RNA, 19 nt, Artificial Sequence
  Description of Artificial Sequence: Synthetic oligonucleotide
ccggagccaagaggcagcg

SEQ ID NO: 2086514 - RNA, 19 nt, Artificial Sequence
  Description of Artificial Sequence: Synthetic oligonucleotide
caguuccucuacgaguagu

SEQ ID NO: 2086515 - RNA, 19 nt, Artificial Sequence
  Description of Artificial Sequence: Synthetic oligonucleotide
cgaguagucccauaggauu

SEQ ID NO: 2086516 - RNA, 19 nt, Artificial Sequence
  Description of Artificial Sequence: Synthetic oligonucleotide
gcuuguauuuccgcauggu

SEQ ID NO: 2086517 - RNA, 19 nt, Artificial Sequence
  Description of Artificial Sequence: Synthetic oligonucleotide
accguuuccccagguccuu

SEQ ID NO: 2086518 - RNA, 19 nt, Artificial Sequence
  Description of Artificial Sequence: Synthetic oligonucleotide
gggagccgaaaugucucuc

SEQ ID NO: 2086519 - RNA, 19 nt, Artificial Sequence
  Description of Artificial Sequence: Synthetic oligonucleotide
ugccuucggugggcaaauc

SEQ ID NO: 2086520 - RNA, 19 nt, Artificial Sequence
  Description of Artificial Sequence: Synthetic oligonucleotide
ccuuucagguccgcugcuc

SEQ ID NO: 2086521 - RNA, 19 nt, Artificial Sequence
  Description of Artificial Sequence: Synthetic oligonucleotide
ccacucgagcagcuucuuc

SEQ ID NO: 2086522 - RNA, 19 nt, Artificial Sequence
  Description of Artificial Sequence: Synthetic oligonucleotide
ccaucgcuccagcuccuuc

SEQ ID NO: 2086523 - RNA, 19 nt, Artificial Sequence
  Description of Artificial Sequence: Synthetic oligonucleotide
ccauaggauuuacaacagu

SEQ ID NO: 2086524 - RNA, 19 nt, Artificial Sequence
  Description of Artificial Sequence: Synthetic oligonucleotide
cagcccuuguucagauagu

SEQ ID NO: 2086525 - RNA, 19 nt, Artificial Sequence
  Description of Artificial Sequence: Synthetic oligonucleotide
ggccccgcugcagcagccg

SEQ ID NO: 2086526 - RNA, 19 nt, Artificial Sequence
  Description of Artificial Sequence: Synthetic oligonucleotide
gggcuccaaucacugcaaa

SEQ ID NO: 2086527 - RNA, 19 nt, Artificial Sequence
  Description of Artificial Sequence: Synthetic oligonucleotide
cugcuuucgcgcucucuuu

SEQ ID NO: 2086528 - RNA, 19 nt, Artificial Sequence
  Description of Artificial Sequence: Synthetic oligonucleotide
ggaguagucccagggccgu

SEQ ID NO: 2086529 - RNA, 19 nt, Artificial Sequence
  Description of Artificial Sequence: Synthetic oligonucleotide
cagccgcaccacagcagaa

SEQ ID NO: 2086530 - RNA, 19 nt, Artificial Sequence
  Description of Artificial Sequence: Synthetic oligonucleotide
cgucgcacggguggcggcg

SEQ ID NO: 2086531 - RNA, 19 nt, Artificial Sequence
  Description of Artificial Sequence: Synthetic oligonucleotide
gcugcccggaaccccuucu

SEQ ID NO: 2086532 - RNA, 19 nt, Artificial Sequence
  Description of Artificial Sequence: Synthetic oligonucleotide
gccaaguuucuagccacau

SEQ ID NO: 2086533 - RNA, 19 nt, Artificial Sequence
  Description of Artificial Sequence: Synthetic oligonucleotide
cagcgagggccccgcugca

SEQ ID NO: 2086534 - RNA, 19 nt, Artificial Sequence
  Description of Artificial Sequence: Synthetic oligonucleotide
gcagcccuuucagguccgc

SEQ ID NO: 2086535 - RNA, 19 nt, Artificial Sequence
  Description of Artificial Sequence: Synthetic oligonucleotide
cgcaugguaaucccaguuu

SEQ ID NO: 2086536 - RNA, 19 nt, Artificial Sequence
  Description of Artificial Sequence: Synthetic oligonucleotide
cugcccggaaccccuucuu

SEQ ID NO: 2086537 - RNA, 19 nt, Artificial Sequence
  Description of Artificial Sequence: Synthetic oligonucleotide
ccguuuccccagguccuuc

SEQ ID NO: 2086538 - RNA, 19 nt, Artificial Sequence
  Description of Artificial Sequence: Synthetic oligonucleotide
cagcccuuucagguccgcu

SEQ ID NO: 2086539 - RNA, 19 nt, Artificial Sequence
  Description of Artificial Sequence: Synthetic oligonucleotide
ccgcaugguaaucccaguu

SEQ ID NO: 2086540 - RNA, 19 nt, Artificial Sequence
  Description of Artificial Sequence: Synthetic oligonucleotide
cccugcuugcugccuaacu

SEQ ID NO: 2086541 - RNA, 19 nt, Artificial Sequence
  Description of Artificial Sequence: Synthetic oligonucleotide
ccgucuguucucugugaau

SEQ ID NO: 2086542 - RNA, 19 nt, Artificial Sequence
  Description of Artificial Sequence: Synthetic oligonucleotide
ccggaaccccuucuucacu

SEQ ID NO: 2086543 - RNA, 19 nt, Artificial Sequence
  Description of Artificial Sequence: Synthetic oligonucleotide
cguuuccccagguccuucu

SEQ ID NO: 2086544 - RNA, 19 nt, Artificial Sequence
  Description of Artificial Sequence: Synthetic oligonucleotide
cguuucgccucuucacuuu

SEQ ID NO: 2086545 - RNA, 19 nt, Artificial Sequence
  Description of Artificial Sequence: Synthetic oligonucleotide
cgggagccgaaaugucucu

SEQ ID NO: 2086546 - RNA, 19 nt, Artificial Sequence
  Description of Artificial Sequence: Synthetic oligonucleotide
cccugucauuuguguaauu

SEQ ID NO: 2086547 - RNA, 19 nt, Artificial Sequence
  Description of Artificial Sequence: Synthetic oligonucleotide
gccacucgagcagcuucuu

SEQ ID NO: 2086548 - RNA, 19 nt, Artificial Sequence
  Description of Artificial Sequence: Synthetic oligonucleotide
ccucuacgaguagucccau

SEQ ID NO: 2086549 - RNA, 19 nt, Artificial Sequence
  Description of Artificial Sequence: Synthetic oligonucleotide
ccucugcaacuaguaccgu

SEQ ID NO: 2086550 - RNA, 19 nt, Artificial Sequence
  Description of Artificial Sequence: Synthetic oligonucleotide
ccgagccccaaaggcuugu

SEQ ID NO: 2086551 - RNA, 19 nt, Artificial Sequence
  Description of Artificial Sequence: Synthetic oligonucleotide
cgagccccaaaggcuugua

SEQ ID NO: 2086552 - RNA, 19 nt, Artificial Sequence
  Description of Artificial Sequence: Synthetic oligonucleotide
cgcucucuuugggcuugga

SEQ ID NO: 2086553 - RNA, 19 nt, Artificial Sequence
  Description of Artificial Sequence: Synthetic oligonucleotide
aagagauuucuucagagcc

SEQ ID NO: 2086554 - RNA, 19 nt, Artificial Sequence
  Description of Artificial Sequence: Synthetic oligonucleotide
acuauuaagacuuagguga

SEQ ID NO: 2086555 - RNA, 19 nt, Artificial Sequence
  Description of Artificial Sequence: Synthetic oligonucleotide
aauuagacaggugagauuc

SEQ ID NO: 2086556 - RNA, 19 nt, Artificial Sequence
  Description of Artificial Sequence: Synthetic oligonucleotide
uuaguggugauaaagacug

SEQ ID NO: 2086557 - RNA, 19 nt, Artificial Sequence
  Description of Artificial Sequence: Synthetic oligonucleotide
auuccaaugucacucaucc

SEQ ID NO: 2086558 - RNA, 19 nt, Artificial Sequence
  Description of Artificial Sequence: Synthetic oligonucleotide
uguucuuucaucaaagggc

SEQ ID NO: 2086559 - RNA, 19 nt, Artificial Sequence
  Description of Artificial Sequence: Synthetic oligonucleotide
auaggauugaucaaaaucg

SEQ ID NO: 2086560 - RNA, 19 nt, Artificial Sequence
  Description of Artificial Sequence: Synthetic oligonucleotide
uguaaaacaaaucuugagu

SEQ ID NO: 2086561 - RNA, 19 nt, Artificial Sequence
  Description of Artificial Sequence: Synthetic oligonucleotide
aaguaguagaacuauuaag

SEQ ID NO: 2086562 - RNA, 19 nt, Artificial Sequence
  Description of Artificial Sequence: Synthetic oligonucleotide
aaaaguauguguaucaucu

SEQ ID NO: 2086563 - RNA, 19 nt, Artificial Sequence
  Description of Artificial Sequence: Synthetic oligonucleotide
acuacaagaagcuugugag

SEQ ID NO: 2086564 - RNA, 19 nt, Artificial Sequence
  Description of Artificial Sequence: Synthetic oligonucleotide
uaugagaauagccugaaaa

SEQ ID NO: 2086565 - RNA, 19 nt, Artificial Sequence
  Description of Artificial Sequence: Synthetic oligonucleotide
uguaauauuccaaugucac

SEQ ID NO: 2086566 - RNA, 19 nt, Artificial Sequence
  Description of Artificial Sequence: Synthetic oligonucleotide
aacuauuaagacuuaggug

SEQ ID NO: 2086567 - RNA, 19 nt, Artificial Sequence
  Description of Artificial Sequence: Synthetic oligonucleotide
agaaacuuuaguuaguggu

SEQ ID NO: 2086568 - RNA, 19 nt, Artificial Sequence
  Description of Artificial Sequence: Synthetic oligonucleotide
augagaauagccugaaaac

SEQ ID NO: 2086569 - RNA, 19 nt, Artificial Sequence
  Description of Artificial Sequence: Synthetic oligonucleotide
auguguaucaucugcuugc

SEQ ID NO: 2086570 - RNA, 19 nt, Artificial Sequence
  Description of Artificial Sequence: Synthetic oligonucleotide
uuuguuaagagauuucuuc

SEQ ID NO: 2086571 - RNA, 19 nt, Artificial Sequence
  Description of Artificial Sequence: Synthetic oligonucleotide
gauuauucaguacagguga

SEQ ID NO: 2086572 - RNA, 19 nt, Artificial Sequence
  Description of Artificial Sequence: Synthetic oligonucleotide
cauaacuaugagaauagcc

SEQ ID NO: 2086573 - RNA, 19 nt, Artificial Sequence
  Description of Artificial Sequence: Synthetic oligonucleotide
uugacaucuacuagaaucc

SEQ ID NO: 2086574 - RNA, 19 nt, Artificial Sequence
  Description of Artificial Sequence: Synthetic oligonucleotide
auucccugagacuacaugg

SEQ ID NO: 2086575 - RNA, 19 nt, Artificial Sequence
  Description of Artificial Sequence: Synthetic oligonucleotide
aguuaguggugauaaagac

SEQ ID NO: 2086576 - RNA, 19 nt, Artificial Sequence
  Description of Artificial Sequence: Synthetic oligonucleotide
uuugguuccagucuaaaau

SEQ ID NO: 2086577 - RNA, 19 nt, Artificial Sequence
  Description of Artificial Sequence: Synthetic oligonucleotide
aagguucacuacaagaagc

SEQ ID NO: 2086578 - RNA, 19 nt, Artificial Sequence
  Description of Artificial Sequence: Synthetic oligonucleotide
acuucuauuaucuucaguu

SEQ ID NO: 2086579 - RNA, 19 nt, Artificial Sequence
  Description of Artificial Sequence: Synthetic oligonucleotide
uguaucaucugcuugcaug

SEQ ID NO: 2086580 - RNA, 19 nt, Artificial Sequence
  Description of Artificial Sequence: Synthetic oligonucleotide
acuagaaucccuucugaac

SEQ ID NO: 2086581 - RNA, 19 nt, Artificial Sequence
  Description of Artificial Sequence: Synthetic oligonucleotide
uuaguuaguggugauaaag

SEQ ID NO: 2086582 - RNA, 19 nt, Artificial Sequence
  Description of Artificial Sequence: Synthetic oligonucleotide
ugugcacauaacuauuugg

SEQ ID NO: 2086583 - RNA, 19 nt, Artificial Sequence
  Description of Artificial Sequence: Synthetic oligonucleotide
ugauuauucaguacaggug

SEQ ID NO: 2086584 - RNA, 19 nt, Artificial Sequence
  Description of Artificial Sequence: Synthetic oligonucleotide
aauagccaugcuuaguucu

SEQ ID NO: 2086585 - RNA, 19 nt, Artificial Sequence
  Description of Artificial Sequence: Synthetic oligonucleotide
aggcaaauaggauugauca

SEQ ID NO: 2086586 - RNA, 19 nt, Artificial Sequence
  Description of Artificial Sequence: Synthetic oligonucleotide
ucuauuaucuucaguuuca

SEQ ID NO: 2086587 - RNA, 19 nt, Artificial Sequence
  Description of Artificial Sequence: Synthetic oligonucleotide
ucugaaaagagucccagaa

SEQ ID NO: 2086588 - RNA, 19 nt, Artificial Sequence
  Description of Artificial Sequence: Synthetic oligonucleotide
ucuaaaauuggucucugaa

SEQ ID NO: 2086589 - RNA, 19 nt, Artificial Sequence
  Description of Artificial Sequence: Synthetic oligonucleotide
aguaguagaacuauuaaga

SEQ ID NO: 2086590 - RNA, 19 nt, Artificial Sequence
  Description of Artificial Sequence: Synthetic oligonucleotide
auaaagacuguguucuuuc

SEQ ID NO: 2086591 - RNA, 19 nt, Artificial Sequence
  Description of Artificial Sequence: Synthetic oligonucleotide
aaguuaggcagaaauuccc

SEQ ID NO: 2086592 - RNA, 19 nt, Artificial Sequence
  Description of Artificial Sequence: Synthetic oligonucleotide
cuaaaauuggucucugaag

SEQ ID NO: 2086593 - RNA, 19 nt, Artificial Sequence
  Description of Artificial Sequence: Synthetic oligonucleotide
uuuuguaaacuuuuaaguu

SEQ ID NO: 2086594 - RNA, 19 nt, Artificial Sequence
  Description of Artificial Sequence: Synthetic oligonucleotide
aacuauuugguuccagucu

SEQ ID NO: 2086595 - RNA, 19 nt, Artificial Sequence
  Description of Artificial Sequence: Synthetic oligonucleotide
uaaguuaggcagaaauucc

SEQ ID NO: 2086596 - RNA, 19 nt, Artificial Sequence
  Description of Artificial Sequence: Synthetic oligonucleotide
uauugaauuuccuaauuuc

SEQ ID NO: 2086597 - RNA, 19 nt, Artificial Sequence
  Description of Artificial Sequence: Synthetic oligonucleotide
uccaaugucacucauccuc

SEQ ID NO: 2086598 - RNA, 19 nt, Artificial Sequence
  Description of Artificial Sequence: Synthetic oligonucleotide
ucuacuagaaucccuucug

SEQ ID NO: 2086599 - RNA, 19 nt, Artificial Sequence
  Description of Artificial Sequence: Synthetic oligonucleotide
uaggauugaucaaaaucgg

SEQ ID NO: 2086600 - RNA, 19 nt, Artificial Sequence
  Description of Artificial Sequence: Synthetic oligonucleotide
auaacuaugagaauagccu

SEQ ID NO: 2086601 - RNA, 19 nt, Artificial Sequence
  Description of Artificial Sequence: Synthetic oligonucleotide
uguuaagagauuucuucag

SEQ ID NO: 2086602 - RNA, 19 nt, Artificial Sequence
  Description of Artificial Sequence: Synthetic oligonucleotide
aaauuggucucugaaguag

SEQ ID NO: 2086603 - RNA, 19 nt, Artificial Sequence
  Description of Artificial Sequence: Synthetic oligonucleotide
uguguaaaacaaaucuuga

SEQ ID NO: 2086604 - RNA, 19 nt, Artificial Sequence
  Description of Artificial Sequence: Synthetic oligonucleotide
ucuucagagccucauaacu

SEQ ID NO: 2086605 - RNA, 19 nt, Artificial Sequence
  Description of Artificial Sequence: Synthetic oligonucleotide
uuucuucaggcaaauagga

SEQ ID NO: 2086606 - RNA, 19 nt, Artificial Sequence
  Description of Artificial Sequence: Synthetic oligonucleotide
uacaugguaacguaguccu

SEQ ID NO: 2086607 - RNA, 19 nt, Artificial Sequence
  Description of Artificial Sequence: Synthetic oligonucleotide
aaauagccaugcuuaguuc

SEQ ID NO: 2086608 - RNA, 19 nt, Artificial Sequence
  Description of Artificial Sequence: Synthetic oligonucleotide
uccagucuaaaauuggucu

SEQ ID NO: 2086609 - RNA, 19 nt, Artificial Sequence
  Description of Artificial Sequence: Synthetic oligonucleotide
auuucuuauuuaccaaguc

SEQ ID NO: 2086610 - RNA, 19 nt, Artificial Sequence
  Description of Artificial Sequence: Synthetic oligonucleotide
aaauuuucuggaguucggg

SEQ ID NO: 2086611 - RNA, 19 nt, Artificial Sequence
  Description of Artificial Sequence: Synthetic oligonucleotide
uuuugaggcacacuucuga

SEQ ID NO: 2086612 - RNA, 19 nt, Artificial Sequence
  Description of Artificial Sequence: Synthetic oligonucleotide
aguagaacuauuaagacuu

SEQ ID NO: 2086613 - RNA, 19 nt, Artificial Sequence
  Description of Artificial Sequence: Synthetic oligonucleotide
uaacuaugagaauagccug

SEQ ID NO: 2086614 - RNA, 19 nt, Artificial Sequence
  Description of Artificial Sequence: Synthetic oligonucleotide
ugaaguaguagaacuauua

SEQ ID NO: 2086615 - RNA, 19 nt, Artificial Sequence
  Description of Artificial Sequence: Synthetic oligonucleotide
uuggaauuagacaggugag

SEQ ID NO: 2086616 - RNA, 19 nt, Artificial Sequence
  Description of Artificial Sequence: Synthetic oligonucleotide
ucugacuuguuaccagugg

SEQ ID NO: 2086617 - RNA, 19 nt, Artificial Sequence
  Description of Artificial Sequence: Synthetic oligonucleotide
auugaucaaaaucggagga

SEQ ID NO: 2086618 - RNA, 19 nt, Artificial Sequence
  Description of Artificial Sequence: Synthetic oligonucleotide
aacuggaauccacuucugg

SEQ ID NO: 2086619 - RNA, 19 nt, Artificial Sequence
  Description of Artificial Sequence: Synthetic oligonucleotide
aguuucauguaauauucca

SEQ ID NO: 2086620 - RNA, 19 nt, Artificial Sequence
  Description of Artificial Sequence: Synthetic oligonucleotide
uacaagaagcuugugagug

SEQ ID NO: 2086621 - RNA, 19 nt, Artificial Sequence
  Description of Artificial Sequence: Synthetic oligonucleotide
uauguguaucaucugcuug

SEQ ID NO: 2086622 - RNA, 19 nt, Artificial Sequence
  Description of Artificial Sequence: Synthetic oligonucleotide
uguguucuuucaucaaagg

SEQ ID NO: 2086623 - RNA, 19 nt, Artificial Sequence
  Description of Artificial Sequence: Synthetic oligonucleotide
guguucuuucaucaaaggg

SEQ ID NO: 2086624 - RNA, 19 nt, Artificial Sequence
  Description of Artificial Sequence: Synthetic oligonucleotide
ugccuuauuuuguuaagag

SEQ ID NO: 2086625 - RNA, 19 nt, Artificial Sequence
  Description of Artificial Sequence: Synthetic oligonucleotide
guuaucaaauuuucuggag

SEQ ID NO: 2086626 - RNA, 19 nt, Artificial Sequence
  Description of Artificial Sequence: Synthetic oligonucleotide
ugaauuuccuaauuucagu

SEQ ID NO: 2086627 - RNA, 19 nt, Artificial Sequence
  Description of Artificial Sequence: Synthetic oligonucleotide
uaguuaguggugauaaaga

SEQ ID NO: 2086628 - RNA, 19 nt, Artificial Sequence
  Description of Artificial Sequence: Synthetic oligonucleotide
uuuuacguguggaagguuc

SEQ ID NO: 2086629 - RNA, 19 nt, Artificial Sequence
  Description of Artificial Sequence: Synthetic oligonucleotide
aauucccugagacuacaug

SEQ ID NO: 2086630 - RNA, 19 nt, Artificial Sequence
  Description of Artificial Sequence: Synthetic oligonucleotide
uaguagaacuauuaagacu

SEQ ID NO: 2086631 - RNA, 19 nt, Artificial Sequence
  Description of Artificial Sequence: Synthetic oligonucleotide
uucacuacaagaagcuugu

SEQ ID NO: 2086632 - RNA, 19 nt, Artificial Sequence
  Description of Artificial Sequence: Synthetic oligonucleotide
aguuaucaaauuuucugga

SEQ ID NO: 2086633 - RNA, 19 nt, Artificial Sequence
  Description of Artificial Sequence: Synthetic oligonucleotide
guguaaaacaaaucuugag

SEQ ID NO: 2086634 - RNA, 19 nt, Artificial Sequence
  Description of Artificial Sequence: Synthetic oligonucleotide
ucgaaaagaguccucuucu

SEQ ID NO: 2086635 - RNA, 19 nt, Artificial Sequence
  Description of Artificial Sequence: Synthetic oligonucleotide
acacucuaaaucuugcuca

SEQ ID NO: 2086636 - RNA, 19 nt, Artificial Sequence
  Description of Artificial Sequence: Synthetic oligonucleotide
ucugauucgucuucuguug

SEQ ID NO: 2086637 - RNA, 19 nt, Artificial Sequence
  Description of Artificial Sequence: Synthetic oligonucleotide
ucuucaggcaaauaggauu

SEQ ID NO: 2086638 - RNA, 19 nt, Artificial Sequence
  Description of Artificial Sequence: Synthetic oligonucleotide
ugagaauagccugaaaacu

SEQ ID NO: 2086639 - RNA, 19 nt, Artificial Sequence
  Description of Artificial Sequence: Synthetic oligonucleotide
ucugagcugaucuggaaca

SEQ ID NO: 2086640 - RNA, 19 nt, Artificial Sequence
  Description of Artificial Sequence: Synthetic oligonucleotide
ugucuuggaauuagacagg

SEQ ID NO: 2086641 - RNA, 19 nt, Artificial Sequence
  Description of Artificial Sequence: Synthetic oligonucleotide
ucuuauuuaccaagucuga

SEQ ID NO: 2086642 - RNA, 19 nt, Artificial Sequence
  Description of Artificial Sequence: Synthetic oligonucleotide
uuaucuucaguuucaacua

SEQ ID NO: 2086643 - RNA, 19 nt, Artificial Sequence
  Description of Artificial Sequence: Synthetic oligonucleotide
auaacuauuugguuccagu

SEQ ID NO: 2086644 - RNA, 19 nt, Artificial Sequence
  Description of Artificial Sequence: Synthetic oligonucleotide
uguucaagugucuuggaau

SEQ ID NO: 2086645 - RNA, 19 nt, Artificial Sequence
  Description of Artificial Sequence: Synthetic oligonucleotide
gagaaacuuuaguuagugg

SEQ ID NO: 2086646 - RNA, 19 nt, Artificial Sequence
  Description of Artificial Sequence: Synthetic oligonucleotide
gagaauagccugaaaacug

SEQ ID NO: 2086647 - RNA, 19 nt, Artificial Sequence
  Description of Artificial Sequence: Synthetic oligonucleotide
acaucuauuccacugucca

SEQ ID NO: 2086648 - RNA, 19 nt, Artificial Sequence
  Description of Artificial Sequence: Synthetic oligonucleotide
agcuuugacaucuacuaga

SEQ ID NO: 2086649 - RNA, 19 nt, Artificial Sequence
  Description of Artificial Sequence: Synthetic oligonucleotide
uaucuucaguuucaacuag

SEQ ID NO: 2086650 - RNA, 19 nt, Artificial Sequence
  Description of Artificial Sequence: Synthetic oligonucleotide
guaguagaacuauuaagac

SEQ ID NO: 2086651 - RNA, 19 nt, Artificial Sequence
  Description of Artificial Sequence: Synthetic oligonucleotide
gaacuauuaagacuuaggu

SEQ ID NO: 2086652 - RNA, 19 nt, Artificial Sequence
  Description of Artificial Sequence: Synthetic oligonucleotide
uacuuugucuuguucaagu

SEQ ID NO: 2086653 - RNA, 19 nt, Artificial Sequence
  Description of Artificial Sequence: Synthetic oligonucleotide
guaaacuuuuaaguuaggc

SEQ ID NO: 2086654 - RNA, 19 nt, Artificial Sequence
  Description of Artificial Sequence: Synthetic oligonucleotide
uauucaguacaggugaaga

SEQ ID NO: 2086655 - RNA, 19 nt, Artificial Sequence
  Description of Artificial Sequence: Synthetic oligonucleotide
aaaugccuccauuugucca

SEQ ID NO: 2086656 - RNA, 19 nt, Artificial Sequence
  Description of Artificial Sequence: Synthetic oligonucleotide
acuacaugguaacguaguc

SEQ ID NO: 2086657 - RNA, 19 nt, Artificial Sequence
  Description of Artificial Sequence: Synthetic oligonucleotide
uucgaaaagaguccucuuc

SEQ ID NO: 2086658 - RNA, 19 nt, Artificial Sequence
  Description of Artificial Sequence: Synthetic oligonucleotide
agaguuuuacguguggaag

SEQ ID NO: 2086659 - RNA, 19 nt, Artificial Sequence
  Description of Artificial Sequence: Synthetic oligonucleotide
uaaaucuugcucagaaaau

SEQ ID NO: 2086660 - RNA, 19 nt, Artificial Sequence
  Description of Artificial Sequence: Synthetic oligonucleotide
aaaucuugagugcccaaaa

SEQ ID NO: 2086661 - RNA, 19 nt, Artificial Sequence
  Description of Artificial Sequence: Synthetic oligonucleotide
ugucuuuggcuacagggcu

SEQ ID NO: 2086662 - RNA, 19 nt, Artificial Sequence
  Description of Artificial Sequence: Synthetic oligonucleotide
cuggaauccacuucuggag

SEQ ID NO: 2086663 - RNA, 19 nt, Artificial Sequence
  Description of Artificial Sequence: Synthetic oligonucleotide
uuauuuuguuaagagauuu

SEQ ID NO: 2086664 - RNA, 19 nt, Artificial Sequence
  Description of Artificial Sequence: Synthetic oligonucleotide
ucaguacaggugaagacuc

SEQ ID NO: 2086665 - RNA, 19 nt, Artificial Sequence
  Description of Artificial Sequence: Synthetic oligonucleotide
cuacccaccacaucuauuc

SEQ ID NO: 2086666 - RNA, 19 nt, Artificial Sequence
  Description of Artificial Sequence: Synthetic oligonucleotide
uuuaccaagucugauucgu

SEQ ID NO: 2086667 - RNA, 19 nt, Artificial Sequence
  Description of Artificial Sequence: Synthetic oligonucleotide
uuccuaauuucaguuauca

SEQ ID NO: 2086668 - RNA, 19 nt, Artificial Sequence
  Description of Artificial Sequence: Synthetic oligonucleotide
auccucugaaaagaguccc

SEQ ID NO: 2086669 - RNA, 19 nt, Artificial Sequence
  Description of Artificial Sequence: Synthetic oligonucleotide
gauggcucuguguaaaaca

SEQ ID NO: 2086670 - RNA, 19 nt, Artificial Sequence
  Description of Artificial Sequence: Synthetic oligonucleotide
acuggaauccacuucugga

SEQ ID NO: 2086671 - RNA, 19 nt, Artificial Sequence
  Description of Artificial Sequence: Synthetic oligonucleotide
auagccugaaaacuggaau

SEQ ID NO: 2086672 - RNA, 19 nt, Artificial Sequence
  Description of Artificial Sequence: Synthetic oligonucleotide
gaaaacuggaauccacuuc

SEQ ID NO: 2086673 - RNA, 19 nt, Artificial Sequence
  Description of Artificial Sequence: Synthetic oligonucleotide
acaagaagcuugugagugg

SEQ ID NO: 2086674 - RNA, 19 nt, Artificial Sequence
  Description of Artificial Sequence: Synthetic oligonucleotide
ugguuccagucuaaaauug

SEQ ID NO: 2086675 - RNA, 19 nt, Artificial Sequence
  Description of Artificial Sequence: Synthetic oligonucleotide
uuggcuacagggcucaauc

SEQ ID NO: 2086676 - RNA, 19 nt, Artificial Sequence
  Description of Artificial Sequence: Synthetic oligonucleotide
uggaguucgggguaauuug

SEQ ID NO: 2086677 - RNA, 19 nt, Artificial Sequence
  Description of Artificial Sequence: Synthetic oligonucleotide
uuuacguguggaagguuca

SEQ ID NO: 2086678 - RNA, 19 nt, Artificial Sequence
  Description of Artificial Sequence: Synthetic oligonucleotide
gaaguaguagaacuauuaa

SEQ ID NO: 2086679 - RNA, 19 nt, Artificial Sequence
  Description of Artificial Sequence: Synthetic oligonucleotide
agagaaacuuuaguuagug

SEQ ID NO: 2086680 - RNA, 19 nt, Artificial Sequence
  Description of Artificial Sequence: Synthetic oligonucleotide
acuuaggugaccaacuucu

SEQ ID NO: 2086681 - RNA, 19 nt, Artificial Sequence
  Description of Artificial Sequence: Synthetic oligonucleotide
ugagacuacaugguaacgu

SEQ ID NO: 2086682 - RNA, 19 nt, Artificial Sequence
  Description of Artificial Sequence: Synthetic oligonucleotide
aaucuugcucagaaaauga

SEQ ID NO: 2086683 - RNA, 19 nt, Artificial Sequence
  Description of Artificial Sequence: Synthetic oligonucleotide
guucacuacaagaagcuug

SEQ ID NO: 2086684 - RNA, 19 nt, Artificial Sequence
  Description of Artificial Sequence: Synthetic oligonucleotide
guucucucugauuauucag

SEQ ID NO: 2086685 - RNA, 19 nt, Artificial Sequence
  Description of Artificial Sequence: Synthetic oligonucleotide
uucgggguaauuuguuucc

SEQ ID NO: 2086686 - RNA, 19 nt, Artificial Sequence
  Description of Artificial Sequence: Synthetic oligonucleotide
uccaccagagaaacuuuag

SEQ ID NO: 2086687 - RNA, 19 nt, Artificial Sequence
  Description of Artificial Sequence: Synthetic oligonucleotide
ugauucgucuucuguuggg

SEQ ID NO: 2086688 - RNA, 19 nt, Artificial Sequence
  Description of Artificial Sequence: Synthetic oligonucleotide
uaagacuuaggugaccaac

SEQ ID NO: 2086689 - RNA, 19 nt, Artificial Sequence
  Description of Artificial Sequence: Synthetic oligonucleotide
cagaacagaguuuuacgug

SEQ ID NO: 2086690 - RNA, 19 nt, Artificial Sequence
  Description of Artificial Sequence: Synthetic oligonucleotide
uagcuuugacaucuacuag

SEQ ID NO: 2086691 - RNA, 19 nt, Artificial Sequence
  Description of Artificial Sequence: Synthetic oligonucleotide
gggauuuucgaaaagaguc

SEQ ID NO: 2086692 - RNA, 19 nt, Artificial Sequence
  Description of Artificial Sequence: Synthetic oligonucleotide
aacuucuauuaucuucagu

SEQ ID NO: 2086693 - RNA, 19 nt, Artificial Sequence
  Description of Artificial Sequence: Synthetic oligonucleotide
uuucugaaagccugguggu

SEQ ID NO: 2086694 - RNA, 19 nt, Artificial Sequence
  Description of Artificial Sequence: Synthetic oligonucleotide
uagccugaaaacuggaauc

SEQ ID NO: 2086695 - RNA, 19 nt, Artificial Sequence
  Description of Artificial Sequence: Synthetic oligonucleotide
aguggugggauuuucgaaa

SEQ ID NO: 2086696 - RNA, 19 nt, Artificial Sequence
  Description of Artificial Sequence: Synthetic oligonucleotide
uuuugcuccaccagagaaa

SEQ ID NO: 2086697 - RNA, 19 nt, Artificial Sequence
  Description of Artificial Sequence: Synthetic oligonucleotide
ucuccuauugaauuuccua

SEQ ID NO: 2086698 - RNA, 19 nt, Artificial Sequence
  Description of Artificial Sequence: Synthetic oligonucleotide
cuauuaagacuuaggugac

SEQ ID NO: 2086699 - RNA, 19 nt, Artificial Sequence
  Description of Artificial Sequence: Synthetic oligonucleotide
gauucgucuucuguugggg

SEQ ID NO: 2086700 - RNA, 19 nt, Artificial Sequence
  Description of Artificial Sequence: Synthetic oligonucleotide
acuauuugguuccagucua

SEQ ID NO: 2086701 - RNA, 19 nt, Artificial Sequence
  Description of Artificial Sequence: Synthetic oligonucleotide
uuaggugaccaacuucuuc

SEQ ID NO: 2086702 - RNA, 19 nt, Artificial Sequence
  Description of Artificial Sequence: Synthetic oligonucleotide
cuaauuucaguuaucaaau

SEQ ID NO: 2086703 - RNA, 19 nt, Artificial Sequence
  Description of Artificial Sequence: Synthetic oligonucleotide
ugaguggugggauuuucga

SEQ ID NO: 2086704 - RNA, 19 nt, Artificial Sequence
  Description of Artificial Sequence: Synthetic oligonucleotide
uguggaagguucacuacaa

SEQ ID NO: 2086705 - RNA, 19 nt, Artificial Sequence
  Description of Artificial Sequence: Synthetic oligonucleotide
ucugaaguaguagaacuau

SEQ ID NO: 2086706 - RNA, 19 nt, Artificial Sequence
  Description of Artificial Sequence: Synthetic oligonucleotide
uuauucaguacaggugaag

SEQ ID NO: 2086707 - RNA, 19 nt, Artificial Sequence
  Description of Artificial Sequence: Synthetic oligonucleotide
ucuugcucagaaaaugauu

SEQ ID NO: 2086708 - RNA, 19 nt, Artificial Sequence
  Description of Artificial Sequence: Synthetic oligonucleotide
ucugaaagccuggugguca

SEQ ID NO: 2086709 - RNA, 19 nt, Artificial Sequence
  Description of Artificial Sequence: Synthetic oligonucleotide
cuacaugguaacguagucc

SEQ ID NO: 2086710 - RNA, 19 nt, Artificial Sequence
  Description of Artificial Sequence: Synthetic oligonucleotide
aucuacuagaaucccuucu

SEQ ID NO: 2086711 - RNA, 19 nt, Artificial Sequence
  Description of Artificial Sequence: Synthetic oligonucleotide
aacuaugagaauagccuga

SEQ ID NO: 2086712 - RNA, 19 nt, Artificial Sequence
  Description of Artificial Sequence: Synthetic oligonucleotide
cucuguguaaaacaaaucu

SEQ ID NO: 2086713 - RNA, 19 nt, Artificial Sequence
  Description of Artificial Sequence: Synthetic oligonucleotide
uucagagccucauaacuau

SEQ ID NO: 2086714 - RNA, 19 nt, Artificial Sequence
  Description of Artificial Sequence: Synthetic oligonucleotide
uuccagucuaaaauugguc

SEQ ID NO: 2086715 - RNA, 19 nt, Artificial Sequence
  Description of Artificial Sequence: Synthetic oligonucleotide
guuaagagauuucuucaga

SEQ ID NO: 2086716 - RNA, 19 nt, Artificial Sequence
  Description of Artificial Sequence: Synthetic oligonucleotide
agagccucauaacuaugag

SEQ ID NO: 2086717 - RNA, 19 nt, Artificial Sequence
  Description of Artificial Sequence: Synthetic oligonucleotide
uuguucaagugucuuggaa

SEQ ID NO: 2086718 - RNA, 19 nt, Artificial Sequence
  Description of Artificial Sequence: Synthetic oligonucleotide
uggugauaaagacuguguu

SEQ ID NO: 2086719 - RNA, 19 nt, Artificial Sequence
  Description of Artificial Sequence: Synthetic oligonucleotide
uggaauccacuucuggagu

SEQ ID NO: 2086720 - RNA, 19 nt, Artificial Sequence
  Description of Artificial Sequence: Synthetic oligonucleotide
agggcaugugggaagaugg

SEQ ID NO: 2086721 - RNA, 19 nt, Artificial Sequence
  Description of Artificial Sequence: Synthetic oligonucleotide
uauuccaaugucacucauc

SEQ ID NO: 2086722 - RNA, 19 nt, Artificial Sequence
  Description of Artificial Sequence: Synthetic oligonucleotide
uagacaggugagauucuug

SEQ ID NO: 2086723 - RNA, 19 nt, Artificial Sequence
  Description of Artificial Sequence: Synthetic oligonucleotide
guuaggcagaaauucccug

SEQ ID NO: 2086724 - RNA, 19 nt, Artificial Sequence
  Description of Artificial Sequence: Synthetic oligonucleotide
ggcagaaauucccugagac

SEQ ID NO: 2086725 - RNA, 19 nt, Artificial Sequence
  Description of Artificial Sequence: Synthetic oligonucleotide
uggaagaguuucauguaau

SEQ ID NO: 2086726 - RNA, 19 nt, Artificial Sequence
  Description of Artificial Sequence: Synthetic oligonucleotide
guucuuucaucaaagggca

SEQ ID NO: 2086727 - RNA, 19 nt, Artificial Sequence
  Description of Artificial Sequence: Synthetic oligonucleotide
ccuaauuucaguuaucaaa

SEQ ID NO: 2086728 - RNA, 19 nt, Artificial Sequence
  Description of Artificial Sequence: Synthetic oligonucleotide
uccuauugaauuuccuaau

SEQ ID NO: 2086729 - RNA, 19 nt, Artificial Sequence
  Description of Artificial Sequence: Synthetic oligonucleotide
gcacauaacuauuugguuc

SEQ ID NO: 2086730 - RNA, 19 nt, Artificial Sequence
  Description of Artificial Sequence: Synthetic oligonucleotide
agggaaaaugccuccauuu

SEQ ID NO: 2086731 - RNA, 19 nt, Artificial Sequence
  Description of Artificial Sequence: Synthetic oligonucleotide
cugaaaagagucccagaac

SEQ ID NO: 2086732 - RNA, 19 nt, Artificial Sequence
  Description of Artificial Sequence: Synthetic oligonucleotide
uugaggcacacuucugagc

SEQ ID NO: 2086733 - RNA, 19 nt, Artificial Sequence
  Description of Artificial Sequence: Synthetic oligonucleotide
cuuuaguuaguggugauaa

SEQ ID NO: 2086734 - RNA, 19 nt, Artificial Sequence
  Description of Artificial Sequence: Synthetic oligonucleotide
auguaauauuccaauguca

SEQ ID NO: 2086735 - RNA, 19 nt, Artificial Sequence
  Description of Artificial Sequence: Synthetic oligonucleotide
aguuucugaaagccuggug

SEQ ID NO: 2086736 - RNA, 19 nt, Artificial Sequence
  Description of Artificial Sequence: Synthetic oligonucleotide
gaauccacuucuggagugg

SEQ ID NO: 2086737 - RNA, 19 nt, Artificial Sequence
  Description of Artificial Sequence: Synthetic oligonucleotide
uacuagaaucccuucugaa

SEQ ID NO: 2086738 - RNA, 19 nt, Artificial Sequence
  Description of Artificial Sequence: Synthetic oligonucleotide
gugauaaagacuguguucu

SEQ ID NO: 2086739 - RNA, 19 nt, Artificial Sequence
  Description of Artificial Sequence: Synthetic oligonucleotide
cugauucgucuucuguugg

SEQ ID NO: 2086740 - RNA, 19 nt, Artificial Sequence
  Description of Artificial Sequence: Synthetic oligonucleotide
ugcacauaacuauuugguu

SEQ ID NO: 2086741 - RNA, 19 nt, Artificial Sequence
  Description of Artificial Sequence: Synthetic oligonucleotide
uauuaagacuuaggugacc

SEQ ID NO: 2086742 - RNA, 19 nt, Artificial Sequence
  Description of Artificial Sequence: Synthetic oligonucleotide
caggcaaauaggauugauc

SEQ ID NO: 2086743 - RNA, 19 nt, Artificial Sequence
  Description of Artificial Sequence: Synthetic oligonucleotide
gaauuuccuaauuucaguu

SEQ ID NO: 2086744 - RNA, 19 nt, Artificial Sequence
  Description of Artificial Sequence: Synthetic oligonucleotide
cuagaaucccuucugaacu

SEQ ID NO: 2086745 - RNA, 19 nt, Artificial Sequence
  Description of Artificial Sequence: Synthetic oligonucleotide
uuuccuaauuucaguuauc

SEQ ID NO: 2086746 - RNA, 19 nt, Artificial Sequence
  Description of Artificial Sequence: Synthetic oligonucleotide
cuccuauugaauuuccuaa

SEQ ID NO: 2086747 - RNA, 19 nt, Artificial Sequence
  Description of Artificial Sequence: Synthetic oligonucleotide
aauuggucucugaaguagu

SEQ ID NO: 2086748 - RNA, 19 nt, Artificial Sequence
  Description of Artificial Sequence: Synthetic oligonucleotide
agauggcucuguguaaaac

SEQ ID NO: 2086749 - RNA, 19 nt, Artificial Sequence
  Description of Artificial Sequence: Synthetic oligonucleotide
aagggaaaaugccuccauu

SEQ ID NO: 2086750 - RNA, 19 nt, Artificial Sequence
  Description of Artificial Sequence: Synthetic oligonucleotide
cauuuguccaguuucugaa

SEQ ID NO: 2086751 - RNA, 19 nt, Artificial Sequence
  Description of Artificial Sequence: Synthetic oligonucleotide
uucuucaggcaaauaggau

SEQ ID NO: 2086752 - RNA, 19 nt, Artificial Sequence
  Description of Artificial Sequence: Synthetic oligonucleotide
uugccuuauuuuguuaaga

SEQ ID NO: 2086753 - RNA, 19 nt, Artificial Sequence
  Description of Artificial Sequence: Synthetic oligonucleotide
ucaauccuacuuugucuug

SEQ ID NO: 2086754 - RNA, 19 nt, Artificial Sequence
  Description of Artificial Sequence: Synthetic oligonucleotide
ugacuuguuaccagugguu

SEQ ID NO: 2086755 - RNA, 19 nt, Artificial Sequence
  Description of Artificial Sequence: Synthetic oligonucleotide
uuuaguuaguggugauaaa

SEQ ID NO: 2086756 - RNA, 19 nt, Artificial Sequence
  Description of Artificial Sequence: Synthetic oligonucleotide
cuugcaugucuuuggcuac

SEQ ID NO: 2086757 - RNA, 19 nt, Artificial Sequence
  Description of Artificial Sequence: Synthetic oligonucleotide
guucgggguaauuuguuuc

SEQ ID NO: 2086758 - RNA, 19 nt, Artificial Sequence
  Description of Artificial Sequence: Synthetic oligonucleotide
cucuaaaucuugcucagaa

SEQ ID NO: 2086759 - RNA, 19 nt, Artificial Sequence
  Description of Artificial Sequence: Synthetic oligonucleotide
ggauuuucgaaaagagucc

SEQ ID NO: 2086760 - RNA, 19 nt, Artificial Sequence
  Description of Artificial Sequence: Synthetic oligonucleotide
uugaucaaaaucggaggaa

SEQ ID NO: 2086761 - RNA, 19 nt, Artificial Sequence
  Description of Artificial Sequence: Synthetic oligonucleotide
ugcuccaccagagaaacuu

SEQ ID NO: 2086762 - RNA, 19 nt, Artificial Sequence
  Description of Artificial Sequence: Synthetic oligonucleotide
aguuuuacguguggaaggu

SEQ ID NO: 2086763 - RNA, 19 nt, Artificial Sequence
  Description of Artificial Sequence: Synthetic oligonucleotide
aauagccugaaaacuggaa

SEQ ID NO: 2086764 - RNA, 19 nt, Artificial Sequence
  Description of Artificial Sequence: Synthetic oligonucleotide
gaguuucauguaauauucc

SEQ ID NO: 2086765 - RNA, 19 nt, Artificial Sequence
  Description of Artificial Sequence: Synthetic oligonucleotide
cacuacaagaagcuuguga

SEQ ID NO: 2086766 - RNA, 19 nt, Artificial Sequence
  Description of Artificial Sequence: Synthetic oligonucleotide
uaauuucaguuaucaaauu

SEQ ID NO: 2086767 - RNA, 19 nt, Artificial Sequence
  Description of Artificial Sequence: Synthetic oligonucleotide
aagggcaugugggaagaug

SEQ ID NO: 2086768 - RNA, 19 nt, Artificial Sequence
  Description of Artificial Sequence: Synthetic oligonucleotide
uccuaauuucaguuaucaa

SEQ ID NO: 2086769 - RNA, 19 nt, Artificial Sequence
  Description of Artificial Sequence: Synthetic oligonucleotide
gagacuacaugguaacgua

SEQ ID NO: 2086770 - RNA, 19 nt, Artificial Sequence
  Description of Artificial Sequence: Synthetic oligonucleotide
cucucugauuauucaguac

SEQ ID NO: 2086771 - RNA, 19 nt, Artificial Sequence
  Description of Artificial Sequence: Synthetic oligonucleotide
cagaaauucccugagacua

SEQ ID NO: 2086772 - RNA, 19 nt, Artificial Sequence
  Description of Artificial Sequence: Synthetic oligonucleotide
ugacaucuacuagaauccc

SEQ ID NO: 2086773 - RNA, 19 nt, Artificial Sequence
  Description of Artificial Sequence: Synthetic oligonucleotide
ucccagaacagaguuuuac

SEQ ID NO: 2086774 - RNA, 19 nt, Artificial Sequence
  Description of Artificial Sequence: Synthetic oligonucleotide
aguacaggugaagacucug

SEQ ID NO: 2086775 - RNA, 19 nt, Artificial Sequence
  Description of Artificial Sequence: Synthetic oligonucleotide
uguguaucaucugcuugca

SEQ ID NO: 2086776 - RNA, 19 nt, Artificial Sequence
  Description of Artificial Sequence: Synthetic oligonucleotide
augucacucauccucugaa

SEQ ID NO: 2086777 - RNA, 19 nt, Artificial Sequence
  Description of Artificial Sequence: Synthetic oligonucleotide
auagccaugcuuaguucuc

SEQ ID NO: 2086778 - RNA, 19 nt, Artificial Sequence
  Description of Artificial Sequence: Synthetic oligonucleotide
gguuccagucuaaaauugg

SEQ ID NO: 2086779 - RNA, 19 nt, Artificial Sequence
  Description of Artificial Sequence: Synthetic oligonucleotide
auuuucgaaaagaguccuc

SEQ ID NO: 2086780 - RNA, 19 nt, Artificial Sequence
  Description of Artificial Sequence: Synthetic oligonucleotide
cugugcacauaacuauuug

SEQ ID NO: 2086781 - RNA, 19 nt, Artificial Sequence
  Description of Artificial Sequence: Synthetic oligonucleotide
gauuucuuauuuaccaagu

SEQ ID NO: 2086782 - RNA, 19 nt, Artificial Sequence
  Description of Artificial Sequence: Synthetic oligonucleotide
agucccagaacagaguuuu

SEQ ID NO: 2086783 - RNA, 19 nt, Artificial Sequence
  Description of Artificial Sequence: Synthetic oligonucleotide
guguggaagguucacuaca

SEQ ID NO: 2086784 - RNA, 19 nt, Artificial Sequence
  Description of Artificial Sequence: Synthetic oligonucleotide
caucuauuccacuguccac

SEQ ID NO: 2086785 - RNA, 19 nt, Artificial Sequence
  Description of Artificial Sequence: Synthetic oligonucleotide
guaucaucugcuugcaugu

SEQ ID NO: 2086786 - RNA, 19 nt, Artificial Sequence
  Description of Artificial Sequence: Synthetic oligonucleotide
uacccaccacaucuauucc

SEQ ID NO: 2086787 - RNA, 19 nt, Artificial Sequence
  Description of Artificial Sequence: Synthetic oligonucleotide
cccagaacagaguuuuacg

SEQ ID NO: 2086788 - RNA, 19 nt, Artificial Sequence
  Description of Artificial Sequence: Synthetic oligonucleotide
acagaguuuuacgugugga

SEQ ID NO: 2086789 - RNA, 19 nt, Artificial Sequence
  Description of Artificial Sequence: Synthetic oligonucleotide
gauuuucgaaaagaguccu

SEQ ID NO: 2086790 - RNA, 19 nt, Artificial Sequence
  Description of Artificial Sequence: Synthetic oligonucleotide
caugguaacguaguccuca

SEQ ID NO: 2086791 - RNA, 19 nt, Artificial Sequence
  Description of Artificial Sequence: Synthetic oligonucleotide
ugggaagauggcucugugu

SEQ ID NO: 2086792 - RNA, 19 nt, Artificial Sequence
  Description of Artificial Sequence: Synthetic oligonucleotide
acuuuuaaguuaggcagaa

SEQ ID NO: 2086793 - RNA, 19 nt, Artificial Sequence
  Description of Artificial Sequence: Synthetic oligonucleotide
aagauggcucuguguaaaa

SEQ ID NO: 2086794 - RNA, 19 nt, Artificial Sequence
  Description of Artificial Sequence: Synthetic oligonucleotide
ccuuauuuuguuaagagau

SEQ ID NO: 2086795 - RNA, 19 nt, Artificial Sequence
  Description of Artificial Sequence: Synthetic oligonucleotide
cauaacuauuugguuccag

SEQ ID NO: 2086796 - RNA, 19 nt, Artificial Sequence
  Description of Artificial Sequence: Synthetic oligonucleotide
ugucacucauccucugaaa

SEQ ID NO: 2086797 - RNA, 19 nt, Artificial Sequence
  Description of Artificial Sequence: Synthetic oligonucleotide
agacuacaugguaacguag

SEQ ID NO: 2086798 - RNA, 19 nt, Artificial Sequence
  Description of Artificial Sequence: Synthetic oligonucleotide
gaaagccugguggucacac

SEQ ID NO: 2086799 - RNA, 19 nt, Artificial Sequence
  Description of Artificial Sequence: Synthetic oligonucleotide
agccaugcuuaguucucuc

SEQ ID NO: 2086800 - RNA, 19 nt, Artificial Sequence
  Description of Artificial Sequence: Synthetic oligonucleotide
gugaguggugggauuuucg

SEQ ID NO: 2086801 - RNA, 19 nt, Artificial Sequence
  Description of Artificial Sequence: Synthetic oligonucleotide
aguuaggcagaaauucccu

SEQ ID NO: 2086802 - RNA, 19 nt, Artificial Sequence
  Description of Artificial Sequence: Synthetic oligonucleotide
cacacuucugagcugaucu

SEQ ID NO: 2086803 - RNA, 19 nt, Artificial Sequence
  Description of Artificial Sequence: Synthetic oligonucleotide
acccaccacaucuauucca

SEQ ID NO: 2086804 - RNA, 19 nt, Artificial Sequence
  Description of Artificial Sequence: Synthetic oligonucleotide
acguguggaagguucacua

SEQ ID NO: 2086805 - RNA, 19 nt, Artificial Sequence
  Description of Artificial Sequence: Synthetic oligonucleotide
uuucgaaaagaguccucuu

SEQ ID NO: 2086806 - RNA, 19 nt, Artificial Sequence
  Description of Artificial Sequence: Synthetic oligonucleotide
cugcuugcaugucuuuggc

SEQ ID NO: 2086807 - RNA, 19 nt, Artificial Sequence
  Description of Artificial Sequence: Synthetic oligonucleotide
ggugaccaacuucuucugg

SEQ ID NO: 2086808 - RNA, 19 nt, Artificial Sequence
  Description of Artificial Sequence: Synthetic oligonucleotide
aguucgggguaauuuguuu

SEQ ID NO: 2086809 - RNA, 19 nt, Artificial Sequence
  Description of Artificial Sequence: Synthetic oligonucleotide
guaauauuccaaugucacu

SEQ ID NO: 2086810 - RNA, 19 nt, Artificial Sequence
  Description of Artificial Sequence: Synthetic oligonucleotide
guggaagguucacuacaag

SEQ ID NO: 2086811 - RNA, 19 nt, Artificial Sequence
  Description of Artificial Sequence: Synthetic oligonucleotide
cugagacuacaugguaacg

SEQ ID NO: 2086812 - RNA, 19 nt, Artificial Sequence
  Description of Artificial Sequence: Synthetic oligonucleotide
agucuaaaauuggucucug

SEQ ID NO: 2086813 - RNA, 19 nt, Artificial Sequence
  Description of Artificial Sequence: Synthetic oligonucleotide
gaucugacuuguuaccagu

SEQ ID NO: 2086814 - RNA, 19 nt, Artificial Sequence
  Description of Artificial Sequence: Synthetic oligonucleotide
uauuugguuccagucuaaa

SEQ ID NO: 2086815 - RNA, 19 nt, Artificial Sequence
  Description of Artificial Sequence: Synthetic oligonucleotide
ugcuugcaugucuuuggcu

SEQ ID NO: 2086816 - RNA, 19 nt, Artificial Sequence
  Description of Artificial Sequence: Synthetic oligonucleotide
ucgccgaucugacuuguua

SEQ ID NO: 2086817 - RNA, 19 nt, Artificial Sequence
  Description of Artificial Sequence: Synthetic oligonucleotide
uucuacccaccacaucuau

SEQ ID NO: 2086818 - RNA, 19 nt, Artificial Sequence
  Description of Artificial Sequence: Synthetic oligonucleotide
acuaugagaauagccugaa

SEQ ID NO: 2086819 - RNA, 19 nt, Artificial Sequence
  Description of Artificial Sequence: Synthetic oligonucleotide
ggaauccacuucuggagug

SEQ ID NO: 2086820 - RNA, 19 nt, Artificial Sequence
  Description of Artificial Sequence: Synthetic oligonucleotide
caucaaagggcauguggga

SEQ ID NO: 2086821 - RNA, 19 nt, Artificial Sequence
  Description of Artificial Sequence: Synthetic oligonucleotide
uagaaucccuucugaacuu

SEQ ID NO: 2086822 - RNA, 19 nt, Artificial Sequence
  Description of Artificial Sequence: Synthetic oligonucleotide
aaacuggaauccacuucug

SEQ ID NO: 2086823 - RNA, 19 nt, Artificial Sequence
  Description of Artificial Sequence: Synthetic oligonucleotide
caucuacuagaaucccuuc

SEQ ID NO: 2086824 - RNA, 19 nt, Artificial Sequence
  Description of Artificial Sequence: Synthetic oligonucleotide
gaucaaaaucggaggaaaa

SEQ ID NO: 2086825 - RNA, 19 nt, Artificial Sequence
  Description of Artificial Sequence: Synthetic oligonucleotide
agacuuaggugaccaacuu

SEQ ID NO: 2086826 - RNA, 19 nt, Artificial Sequence
  Description of Artificial Sequence: Synthetic oligonucleotide
augcuuaguucucucugau

SEQ ID NO: 2086827 - RNA, 19 nt, Artificial Sequence
  Description of Artificial Sequence: Synthetic oligonucleotide
aggauugaucaaaaucgga

SEQ ID NO: 2086828 - RNA, 19 nt, Artificial Sequence
  Description of Artificial Sequence: Synthetic oligonucleotide
acagggcucaauccuacuu

SEQ ID NO: 2086829 - RNA, 19 nt, Artificial Sequence
  Description of Artificial Sequence: Synthetic oligonucleotide
acuuguuaccagugguuuu

SEQ ID NO: 2086830 - RNA, 19 nt, Artificial Sequence
  Description of Artificial Sequence: Synthetic oligonucleotide
aucaaagggcaugugggaa

SEQ ID NO: 2086831 - RNA, 19 nt, Artificial Sequence
  Description of Artificial Sequence: Synthetic oligonucleotide
uuagacaggugagauucuu

SEQ ID NO: 2086832 - RNA, 19 nt, Artificial Sequence
  Description of Artificial Sequence: Synthetic oligonucleotide
ucuacccaccacaucuauu

SEQ ID NO: 2086833 - RNA, 19 nt, Artificial Sequence
  Description of Artificial Sequence: Synthetic oligonucleotide
ucccugagacuacauggua

SEQ ID NO: 2086834 - RNA, 19 nt, Artificial Sequence
  Description of Artificial Sequence: Synthetic oligonucleotide
gaguggugggauuuucgaa

SEQ ID NO: 2086835 - RNA, 19 nt, Artificial Sequence
  Description of Artificial Sequence: Synthetic oligonucleotide
cucuagcuuugacaucuac

SEQ ID NO: 2086836 - RNA, 19 nt, Artificial Sequence
  Description of Artificial Sequence: Synthetic oligonucleotide
cagaguuuuacguguggaa

SEQ ID NO: 2086837 - RNA, 19 nt, Artificial Sequence
  Description of Artificial Sequence: Synthetic oligonucleotide
uacguguggaagguucacu

SEQ ID NO: 2086838 - RNA, 19 nt, Artificial Sequence
  Description of Artificial Sequence: Synthetic oligonucleotide
gccuuauuuuguuaagaga

SEQ ID NO: 2086839 - RNA, 19 nt, Artificial Sequence
  Description of Artificial Sequence: Synthetic oligonucleotide
uucuugccuuauuuuguua

SEQ ID NO: 2086840 - RNA, 19 nt, Artificial Sequence
  Description of Artificial Sequence: Synthetic oligonucleotide
cucugaaguaguagaacua

SEQ ID NO: 2086841 - RNA, 19 nt, Artificial Sequence
  Description of Artificial Sequence: Synthetic oligonucleotide
guaacguaguccucaauuu

SEQ ID NO: 2086842 - RNA, 19 nt, Artificial Sequence
  Description of Artificial Sequence: Synthetic oligonucleotide
cuauugaauuuccuaauuu

SEQ ID NO: 2086843 - RNA, 19 nt, Artificial Sequence
  Description of Artificial Sequence: Synthetic oligonucleotide
gugcacauaacuauuuggu

SEQ ID NO: 2086844 - RNA, 19 nt, Artificial Sequence
  Description of Artificial Sequence: Synthetic oligonucleotide
gucuaaaauuggucucuga

SEQ ID NO: 2086845 - RNA, 19 nt, Artificial Sequence
  Description of Artificial Sequence: Synthetic oligonucleotide
gacuacaugguaacguagu

SEQ ID NO: 2086846 - RNA, 19 nt, Artificial Sequence
  Description of Artificial Sequence: Synthetic oligonucleotide
uuccaaugucacucauccu

SEQ ID NO: 2086847 - RNA, 19 nt, Artificial Sequence
  Description of Artificial Sequence: Synthetic oligonucleotide
guucaagugucuuggaauu

SEQ ID NO: 2086848 - RNA, 19 nt, Artificial Sequence
  Description of Artificial Sequence: Synthetic oligonucleotide
ggcucaauccuacuuuguc

SEQ ID NO: 2086849 - RNA, 19 nt, Artificial Sequence
  Description of Artificial Sequence: Synthetic oligonucleotide
uucuuucaucaaagggcau

SEQ ID NO: 2086850 - RNA, 19 nt, Artificial Sequence
  Description of Artificial Sequence: Synthetic oligonucleotide
uaguggugauaaagacugu

SEQ ID NO: 2086851 - RNA, 19 nt, Artificial Sequence
  Description of Artificial Sequence: Synthetic oligonucleotide
uuacguguggaagguucac

SEQ ID NO: 2086852 - RNA, 19 nt, Artificial Sequence
  Description of Artificial Sequence: Synthetic oligonucleotide
ugugaguggugggauuuuc

SEQ ID NO: 2086853 - RNA, 19 nt, Artificial Sequence
  Description of Artificial Sequence: Synthetic oligonucleotide
ccagucuaaaauuggucuc

SEQ ID NO: 2086854 - RNA, 19 nt, Artificial Sequence
  Description of Artificial Sequence: Synthetic oligonucleotide
gguaacguaguccucaauu

SEQ ID NO: 2086855 - RNA, 19 nt, Artificial Sequence
  Description of Artificial Sequence: Synthetic oligonucleotide
uucaagugucuuggaauua

SEQ ID NO: 2086856 - RNA, 19 nt, Artificial Sequence
  Description of Artificial Sequence: Synthetic oligonucleotide
acuuuaguuaguggugaua

SEQ ID NO: 2086857 - RNA, 19 nt, Artificial Sequence
  Description of Artificial Sequence: Synthetic oligonucleotide
augguaacguaguccucaa

SEQ ID NO: 2086858 - RNA, 19 nt, Artificial Sequence
  Description of Artificial Sequence: Synthetic oligonucleotide
gccgaucugacuuguuacc

SEQ ID NO: 2086859 - RNA, 19 nt, Artificial Sequence
  Description of Artificial Sequence: Synthetic oligonucleotide
auuauucaguacaggugaa

SEQ ID NO: 2086860 - RNA, 19 nt, Artificial Sequence
  Description of Artificial Sequence: Synthetic oligonucleotide
aagaagcuugugaguggug

SEQ ID NO: 2086861 - RNA, 19 nt, Artificial Sequence
  Description of Artificial Sequence: Synthetic oligonucleotide
cucugaaaagagucccaga

SEQ ID NO: 2086862 - RNA, 19 nt, Artificial Sequence
  Description of Artificial Sequence: Synthetic oligonucleotide
uacagggcucaauccuacu

SEQ ID NO: 2086863 - RNA, 19 nt, Artificial Sequence
  Description of Artificial Sequence: Synthetic oligonucleotide
cugagcugaucuggaacag

SEQ ID NO: 2086864 - RNA, 19 nt, Artificial Sequence
  Description of Artificial Sequence: Synthetic oligonucleotide
caccagagaaacuuuaguu

SEQ ID NO: 2086865 - RNA, 19 nt, Artificial Sequence
  Description of Artificial Sequence: Synthetic oligonucleotide
caaaucuugagugcccaaa

SEQ ID NO: 2086866 - RNA, 19 nt, Artificial Sequence
  Description of Artificial Sequence: Synthetic oligonucleotide
gaauuagacaggugagauu

SEQ ID NO: 2086867 - RNA, 19 nt, Artificial Sequence
  Description of Artificial Sequence: Synthetic oligonucleotide
aaauucccugagacuacau

SEQ ID NO: 2086868 - RNA, 19 nt, Artificial Sequence
  Description of Artificial Sequence: Synthetic oligonucleotide
ugguggucacacacucuaa

SEQ ID NO: 2086869 - RNA, 19 nt, Artificial Sequence
  Description of Artificial Sequence: Synthetic oligonucleotide
cuuguucaagugucuugga

SEQ ID NO: 2086870 - RNA, 19 nt, Artificial Sequence
  Description of Artificial Sequence: Synthetic oligonucleotide
uagccaugcuuaguucucu

SEQ ID NO: 2086871 - RNA, 19 nt, Artificial Sequence
  Description of Artificial Sequence: Synthetic oligonucleotide
ccaugcuuaguucucucug

SEQ ID NO: 2086872 - RNA, 19 nt, Artificial Sequence
  Description of Artificial Sequence: Synthetic oligonucleotide
uuucuggaguucgggguaa

SEQ ID NO: 2086873 - RNA, 19 nt, Artificial Sequence
  Description of Artificial Sequence: Synthetic oligonucleotide
ucgggguaauuuguuuccu

SEQ ID NO: 2086874 - RNA, 19 nt, Artificial Sequence
  Description of Artificial Sequence: Synthetic oligonucleotide
acaugguaacguaguccuc

SEQ ID NO: 2086875 - RNA, 19 nt, Artificial Sequence
  Description of Artificial Sequence: Synthetic oligonucleotide
ugguaacguaguccucaau

SEQ ID NO: 2086876 - RNA, 19 nt, Artificial Sequence
  Description of Artificial Sequence: Synthetic oligonucleotide
guuccagucuaaaauuggu

SEQ ID NO: 2086877 - RNA, 19 nt, Artificial Sequence
  Description of Artificial Sequence: Synthetic oligonucleotide
cuggugccacuucucuagc

SEQ ID NO: 2086878 - RNA, 19 nt, Artificial Sequence
  Description of Artificial Sequence: Synthetic oligonucleotide
ggcaaauaggauugaucaa

SEQ ID NO: 2086879 - RNA, 19 nt, Artificial Sequence
  Description of Artificial Sequence: Synthetic oligonucleotide
auuagacaggugagauucu

SEQ ID NO: 2086880 - RNA, 19 nt, Artificial Sequence
  Description of Artificial Sequence: Synthetic oligonucleotide
gucugauucgucuucuguu

SEQ ID NO: 2086881 - RNA, 19 nt, Artificial Sequence
  Description of Artificial Sequence: Synthetic oligonucleotide
caugugggaagauggcucu

SEQ ID NO: 2086882 - RNA, 19 nt, Artificial Sequence
  Description of Artificial Sequence: Synthetic oligonucleotide
cuauuugguuccagucuaa

SEQ ID NO: 2086883 - RNA, 19 nt, Artificial Sequence
  Description of Artificial Sequence: Synthetic oligonucleotide
gguggucacacacucuaaa

SEQ ID NO: 2086884 - RNA, 19 nt, Artificial Sequence
  Description of Artificial Sequence: Synthetic oligonucleotide
acauaacuauuugguucca

SEQ ID NO: 2086885 - RNA, 19 nt, Artificial Sequence
  Description of Artificial Sequence: Synthetic oligonucleotide
guggugauaaagacugugu

SEQ ID NO: 2086886 - RNA, 19 nt, Artificial Sequence
  Description of Artificial Sequence: Synthetic oligonucleotide
ggaauuagacaggugagau

SEQ ID NO: 2086887 - RNA, 19 nt, Artificial Sequence
  Description of Artificial Sequence: Synthetic oligonucleotide
cuuauuuaccaagucugau

SEQ ID NO: 2086888 - RNA, 19 nt, Artificial Sequence
  Description of Artificial Sequence: Synthetic oligonucleotide
gcucaauccuacuuugucu

SEQ ID NO: 2086889 - RNA, 19 nt, Artificial Sequence
  Description of Artificial Sequence: Synthetic oligonucleotide
ccucugaaaagagucccag

SEQ ID NO: 2086890 - RNA, 19 nt, Artificial Sequence
  Description of Artificial Sequence: Synthetic oligonucleotide
gacuuguuaccagugguuu

SEQ ID NO: 2086891 - RNA, 19 nt, Artificial Sequence
  Description of Artificial Sequence: Synthetic oligonucleotide
ccauuuguccaguuucuga

SEQ ID NO: 2086892 - RNA, 19 nt, Artificial Sequence
  Description of Artificial Sequence: Synthetic oligonucleotide
ccaagucugauucgucuuc

SEQ ID NO: 2086893 - RNA, 19 nt, Artificial Sequence
  Description of Artificial Sequence: Synthetic oligonucleotide
agcuugugaguggugggau

SEQ ID NO: 2086894 - RNA, 19 nt, Artificial Sequence
  Description of Artificial Sequence: Synthetic oligonucleotide
gacucuggugccacuucuc

SEQ ID NO: 2086895 - RNA, 19 nt, Artificial Sequence
  Description of Artificial Sequence: Synthetic oligonucleotide
cuuaguucucucugauuau

SEQ ID NO: 2086896 - RNA, 19 nt, Artificial Sequence
  Description of Artificial Sequence: Synthetic oligonucleotide
gucuuggaauuagacaggu

SEQ ID NO: 2086897 - RNA, 19 nt, Artificial Sequence
  Description of Artificial Sequence: Synthetic oligonucleotide
cgaucugacuuguuaccag

SEQ ID NO: 2086898 - RNA, 19 nt, Artificial Sequence
  Description of Artificial Sequence: Synthetic oligonucleotide
cuccauuuguccaguuucu

SEQ ID NO: 2086899 - RNA, 19 nt, Artificial Sequence
  Description of Artificial Sequence: Synthetic oligonucleotide
cuucuacccaccacaucua

SEQ ID NO: 2086900 - RNA, 19 nt, Artificial Sequence
  Description of Artificial Sequence: Synthetic oligonucleotide
caagaagcuugugaguggu

SEQ ID NO: 2086901 - RNA, 19 nt, Artificial Sequence
  Description of Artificial Sequence: Synthetic oligonucleotide
gcagaaauucccugagacu

SEQ ID NO: 2086902 - RNA, 19 nt, Artificial Sequence
  Description of Artificial Sequence: Synthetic oligonucleotide
ggcuacagggcucaauccu

SEQ ID NO: 2086903 - RNA, 19 nt, Artificial Sequence
  Description of Artificial Sequence: Synthetic oligonucleotide
gagcugaucuggaacaguu

SEQ ID NO: 2086904 - RNA, 19 nt, Artificial Sequence
  Description of Artificial Sequence: Synthetic oligonucleotide
gcugaucuggaacaguuuu

SEQ ID NO: 2086905 - RNA, 19 nt, Artificial Sequence
  Description of Artificial Sequence: Synthetic oligonucleotide
gcucuguguaaaacaaauc

SEQ ID NO: 2086906 - RNA, 19 nt, Artificial Sequence
  Description of Artificial Sequence: Synthetic oligonucleotide
gaaucccuucugaacuucu

SEQ ID NO: 2086907 - RNA, 19 nt, Artificial Sequence
  Description of Artificial Sequence: Synthetic oligonucleotide
ggcucuguguaaaacaaau

SEQ ID NO: 2086908 - RNA, 19 nt, Artificial Sequence
  Description of Artificial Sequence: Synthetic oligonucleotide
cugaaguaguagaacuauu

SEQ ID NO: 2086909 - RNA, 19 nt, Artificial Sequence
  Description of Artificial Sequence: Synthetic oligonucleotide
guagaacuauuaagacuua

SEQ ID NO: 2086910 - RNA, 19 nt, Artificial Sequence
  Description of Artificial Sequence: Synthetic oligonucleotide
cgccgaucugacuuguuac

SEQ ID NO: 2086911 - RNA, 19 nt, Artificial Sequence
  Description of Artificial Sequence: Synthetic oligonucleotide
cccugagacuacaugguaa

SEQ ID NO: 2086912 - RNA, 19 nt, Artificial Sequence
  Description of Artificial Sequence: Synthetic oligonucleotide
cacugugcacauaacuauu

SEQ ID NO: 2086913 - RNA, 19 nt, Artificial Sequence
  Description of Artificial Sequence: Synthetic oligonucleotide
gggucgccgaucugacuug

SEQ ID NO: 2086914 - RNA, 19 nt, Artificial Sequence
  Description of Artificial Sequence: Synthetic oligonucleotide
cuugugaguggugggauuu

SEQ ID NO: 2086915 - RNA, 19 nt, Artificial Sequence
  Description of Artificial Sequence: Synthetic oligonucleotide
gggcaugugggaagauggc

SEQ ID NO: 2086916 - RNA, 19 nt, Artificial Sequence
  Description of Artificial Sequence: Synthetic oligonucleotide
uucuggaguucgggguaau

SEQ ID NO: 2086917 - RNA, 19 nt, Artificial Sequence
  Description of Artificial Sequence: Synthetic oligonucleotide
cagggcucaauccuacuuu

SEQ ID NO: 2086918 - RNA, 19 nt, Artificial Sequence
  Description of Artificial Sequence: Synthetic oligonucleotide
ggaguucgggguaauuugu

SEQ ID NO: 2086919 - RNA, 19 nt, Artificial Sequence
  Description of Artificial Sequence: Synthetic oligonucleotide
ggggucgccgaucugacuu

SEQ ID NO: 2086920 - RNA, 19 nt, Artificial Sequence
  Description of Artificial Sequence: Synthetic oligonucleotide
caguacaggugaagacucu

SEQ ID NO: 2086921 - RNA, 19 nt, Artificial Sequence
  Description of Artificial Sequence: Synthetic oligonucleotide
gcuacagggcucaauccua

SEQ ID NO: 2086922 - RNA, 19 nt, Artificial Sequence
  Description of Artificial Sequence: Synthetic oligonucleotide
ugccuccauuuguccaguu

SEQ ID NO: 2086923 - RNA, 19 nt, Artificial Sequence
  Description of Artificial Sequence: Synthetic oligonucleotide
gaguucgggguaauuuguu

SEQ ID NO: 2086924 - RNA, 19 nt, Artificial Sequence
  Description of Artificial Sequence: Synthetic oligonucleotide
ccgaucugacuuguuacca

SEQ ID NO: 2086925 - RNA, 19 nt, Artificial Sequence
  Description of Artificial Sequence: Synthetic oligonucleotide
gccaugcuuaguucucucu

SEQ ID NO: 2086926 - RNA, 19 nt, Artificial Sequence
  Description of Artificial Sequence: Synthetic oligonucleotide
ccaccagagaaacuuuagu

SEQ ID NO: 2086927 - RNA, 19 nt, Artificial Sequence
  Description of Artificial Sequence: Synthetic oligonucleotide
guguaucaucugcuugcau

SEQ ID NO: 2086928 - RNA, 19 nt, Artificial Sequence
  Description of Artificial Sequence: Synthetic oligonucleotide
ggugagauucuugccuuau

SEQ ID NO: 2086929 - RNA, 19 nt, Artificial Sequence
  Description of Artificial Sequence: Synthetic oligonucleotide
gcacacuucugagcugauc

SEQ ID NO: 2086930 - RNA, 19 nt, Artificial Sequence
  Description of Artificial Sequence: Synthetic oligonucleotide
gagucccagaacagaguuu

SEQ ID NO: 2086931 - RNA, 19 nt, Artificial Sequence
  Description of Artificial Sequence: Synthetic oligonucleotide
guuuuacguguggaagguu

SEQ ID NO: 2086932 - RNA, 19 nt, Artificial Sequence
  Description of Artificial Sequence: Synthetic oligonucleotide
gccucauaacuaugagaau

SEQ ID NO: 2086933 - RNA, 19 nt, Artificial Sequence
  Description of Artificial Sequence: Synthetic oligonucleotide
gcuugugaguggugggauu

SEQ ID NO: 2086934 - RNA, 19 nt, Artificial Sequence
  Description of Artificial Sequence: Synthetic oligonucleotide
ccugguggucacacacucu

SEQ ID NO: 2086935 - RNA, 19 nt, Artificial Sequence
  Description of Artificial Sequence: Synthetic oligonucleotide
ggucgccgaucugacuugu

SEQ ID NO: 2086936 - RNA, 19 nt, Artificial Sequence
  Description of Artificial Sequence: Synthetic oligonucleotide
gucgccgaucugacuuguu

SEQ ID NO: 2086937 - RNA, 19 nt, Artificial Sequence
  Description of Artificial Sequence: Synthetic oligonucleotide
ggcacacuucugagcugau

SEQ ID NO: 2086938 - RNA, 19 nt, Artificial Sequence
  Description of Artificial Sequence: Synthetic oligonucleotide
uuuggagucuauuuaaugg

SEQ ID NO: 2086939 - RNA, 19 nt, Artificial Sequence
  Description of Artificial Sequence: Synthetic oligonucleotide
auauacgagaaauggagcc

SEQ ID NO: 2086940 - RNA, 19 nt, Artificial Sequence
  Description of Artificial Sequence: Synthetic oligonucleotide
cuuauuaguucguugaugg

SEQ ID NO: 2086941 - RNA, 19 nt, Artificial Sequence
  Description of Artificial Sequence: Synthetic oligonucleotide
aaguauauacgagaaaugg

SEQ ID NO: 2086942 - RNA, 19 nt, Artificial Sequence
  Description of Artificial Sequence: Synthetic oligonucleotide
aaagcaaaacccuuggacu

SEQ ID NO: 2086943 - RNA, 19 nt, Artificial Sequence
  Description of Artificial Sequence: Synthetic oligonucleotide
ugucauggagacaucaucg

SEQ ID NO: 2086944 - RNA, 19 nt, Artificial Sequence
  Description of Artificial Sequence: Synthetic oligonucleotide
agaaauggagccaaaaggc

SEQ ID NO: 2086945 - RNA, 19 nt, Artificial Sequence
  Description of Artificial Sequence: Synthetic oligonucleotide
cuagugaugaaugucaugg

SEQ ID NO: 2086946 - RNA, 19 nt, Artificial Sequence
  Description of Artificial Sequence: Synthetic oligonucleotide
uuuacguucccguugauga

SEQ ID NO: 2086947 - RNA, 19 nt, Artificial Sequence
  Description of Artificial Sequence: Synthetic oligonucleotide
aaugcggcaggacacaauc

SEQ ID NO: 2086948 - RNA, 19 nt, Artificial Sequence
  Description of Artificial Sequence: Synthetic oligonucleotide
auaaaagcaaaacccuugg

SEQ ID NO: 2086949 - RNA, 19 nt, Artificial Sequence
  Description of Artificial Sequence: Synthetic oligonucleotide
aguagacaggcccaguugc

SEQ ID NO: 2086950 - RNA, 19 nt, Artificial Sequence
  Description of Artificial Sequence: Synthetic oligonucleotide
agguuagugacucggaugg

SEQ ID NO: 2086951 - RNA, 19 nt, Artificial Sequence
  Description of Artificial Sequence: Synthetic oligonucleotide
guauauacgagaaauggag

SEQ ID NO: 2086952 - RNA, 19 nt, Artificial Sequence
  Description of Artificial Sequence: Synthetic oligonucleotide
aauaaaagcaaaacccuug

SEQ ID NO: 2086953 - RNA, 19 nt, Artificial Sequence
  Description of Artificial Sequence: Synthetic oligonucleotide
agggauucccuucaggagc

SEQ ID NO: 2086954 - RNA, 19 nt, Artificial Sequence
  Description of Artificial Sequence: Synthetic oligonucleotide
ugucuuauuaguucguuga

SEQ ID NO: 2086955 - RNA, 19 nt, Artificial Sequence
  Description of Artificial Sequence: Synthetic oligonucleotide
uauauacgagaaauggagc

SEQ ID NO: 2086956 - RNA, 19 nt, Artificial Sequence
  Description of Artificial Sequence: Synthetic oligonucleotide
aaaaggccggaagaguucc

SEQ ID NO: 2086957 - RNA, 19 nt, Artificial Sequence
  Description of Artificial Sequence: Synthetic oligonucleotide
uuagugacucggauggugg

SEQ ID NO: 2086958 - RNA, 19 nt, Artificial Sequence
  Description of Artificial Sequence: Synthetic oligonucleotide
uuccaauucuuccuccugg

SEQ ID NO: 2086959 - RNA, 19 nt, Artificial Sequence
  Description of Artificial Sequence: Synthetic oligonucleotide
ugggcuucgagucaaaguc

SEQ ID NO: 2086960 - RNA, 19 nt, Artificial Sequence
  Description of Artificial Sequence: Synthetic oligonucleotide
ucuaccuuguacucgguca

SEQ ID NO: 2086961 - RNA, 19 nt, Artificial Sequence
  Description of Artificial Sequence: Synthetic oligonucleotide
cuugccaucuucaucuacc

SEQ ID NO: 2086962 - RNA, 19 nt, Artificial Sequence
  Description of Artificial Sequence: Synthetic oligonucleotide
auuuaauggaagcuuucug

SEQ ID NO: 2086963 - RNA, 19 nt, Artificial Sequence
  Description of Artificial Sequence: Synthetic oligonucleotide
uuggagucuauuuaaugga

SEQ ID NO: 2086964 - RNA, 19 nt, Artificial Sequence
  Description of Artificial Sequence: Synthetic oligonucleotide
ucaucgcugacuguggugg

SEQ ID NO: 2086965 - RNA, 19 nt, Artificial Sequence
  Description of Artificial Sequence: Synthetic oligonucleotide
uccuuggccaaguauauac

SEQ ID NO: 2086966 - RNA, 19 nt, Artificial Sequence
  Description of Artificial Sequence: Synthetic oligonucleotide
aauggcucgugcagcaucc

SEQ ID NO: 2086967 - RNA, 19 nt, Artificial Sequence
  Description of Artificial Sequence: Synthetic oligonucleotide
uucguugauggcuuggccc

SEQ ID NO: 2086968 - RNA, 19 nt, Artificial Sequence
  Description of Artificial Sequence: Synthetic oligonucleotide
uuaauggaagcuuucuguc

SEQ ID NO: 2086969 - RNA, 19 nt, Artificial Sequence
  Description of Artificial Sequence: Synthetic oligonucleotide
ucuccuuuuccccaguaga

SEQ ID NO: 2086970 - RNA, 19 nt, Artificial Sequence
  Description of Artificial Sequence: Synthetic oligonucleotide
aaaacccuuggacuggcca

SEQ ID NO: 2086971 - RNA, 19 nt, Artificial Sequence
  Description of Artificial Sequence: Synthetic oligonucleotide
augaaugucauggagacau

SEQ ID NO: 2086972 - RNA, 19 nt, Artificial Sequence
  Description of Artificial Sequence: Synthetic oligonucleotide
aauggagccaaaaggccgg

SEQ ID NO: 2086973 - RNA, 19 nt, Artificial Sequence
  Description of Artificial Sequence: Synthetic oligonucleotide
aaacucagaguagccaaac

SEQ ID NO: 2086974 - RNA, 19 nt, Artificial Sequence
  Description of Artificial Sequence: Synthetic oligonucleotide
uucgagucaaagucgcccg

SEQ ID NO: 2086975 - RNA, 19 nt, Artificial Sequence
  Description of Artificial Sequence: Synthetic oligonucleotide
ucaaacucagaguagccaa

SEQ ID NO: 2086976 - RNA, 19 nt, Artificial Sequence
  Description of Artificial Sequence: Synthetic oligonucleotide
caggacacaaucuucuggc

SEQ ID NO: 2086977 - RNA, 19 nt, Artificial Sequence
  Description of Artificial Sequence: Synthetic oligonucleotide
uaauggaagcuuucugucc

SEQ ID NO: 2086978 - RNA, 19 nt, Artificial Sequence
  Description of Artificial Sequence: Synthetic oligonucleotide
uccuuguaagggcagcggg

SEQ ID NO: 2086979 - RNA, 19 nt, Artificial Sequence
  Description of Artificial Sequence: Synthetic oligonucleotide
caggugucuuauuaguucg

SEQ ID NO: 2086980 - RNA, 19 nt, Artificial Sequence
  Description of Artificial Sequence: Synthetic oligonucleotide
gaagucuagcuccacgcag

SEQ ID NO: 2086981 - RNA, 19 nt, Artificial Sequence
  Description of Artificial Sequence: Synthetic oligonucleotide
gguggaagcuaauaaaagc

SEQ ID NO: 2086982 - RNA, 19 nt, Artificial Sequence
  Description of Artificial Sequence: Synthetic oligonucleotide
ucuucgguuaggcugcaug

SEQ ID NO: 2086983 - RNA, 19 nt, Artificial Sequence
  Description of Artificial Sequence: Synthetic oligonucleotide
gaaauggagccaaaaggcc

SEQ ID NO: 2086984 - RNA, 19 nt, Artificial Sequence
  Description of Artificial Sequence: Synthetic oligonucleotide
uucaucuaccuuguacucg

SEQ ID NO: 2086985 - RNA, 19 nt, Artificial Sequence
  Description of Artificial Sequence: Synthetic oligonucleotide
caaguauauacgagaaaug

SEQ ID NO: 2086986 - RNA, 19 nt, Artificial Sequence
  Description of Artificial Sequence: Synthetic oligonucleotide
ugcaaaugcggcaggacac

SEQ ID NO: 2086987 - RNA, 19 nt, Artificial Sequence
  Description of Artificial Sequence: Synthetic oligonucleotide
cuucgguuaggcugcaugg

SEQ ID NO: 2086988 - RNA, 19 nt, Artificial Sequence
  Description of Artificial Sequence: Synthetic oligonucleotide
caucgcgaagucuagcucc

SEQ ID NO: 2086989 - RNA, 19 nt, Artificial Sequence
  Description of Artificial Sequence: Synthetic oligonucleotide
ucuuauuaguucguugaug

SEQ ID NO: 2086990 - RNA, 19 nt, Artificial Sequence
  Description of Artificial Sequence: Synthetic oligonucleotide
uggaagcuaauaaaagcaa

SEQ ID NO: 2086991 - RNA, 19 nt, Artificial Sequence
  Description of Artificial Sequence: Synthetic oligonucleotide
gaagcuuucugucccugag

SEQ ID NO: 2086992 - RNA, 19 nt, Artificial Sequence
  Description of Artificial Sequence: Synthetic oligonucleotide
cuuguacucggucacaguc

SEQ ID NO: 2086993 - RNA, 19 nt, Artificial Sequence
  Description of Artificial Sequence: Synthetic oligonucleotide
gcuggugacacacuugucg

SEQ ID NO: 2086994 - RNA, 19 nt, Artificial Sequence
  Description of Artificial Sequence: Synthetic oligonucleotide
uugagcuuguucauugggu

SEQ ID NO: 2086995 - RNA, 19 nt, Artificial Sequence
  Description of Artificial Sequence: Synthetic oligonucleotide
uaaaagcaaaacccuugga

SEQ ID NO: 2086996 - RNA, 19 nt, Artificial Sequence
  Description of Artificial Sequence: Synthetic oligonucleotide
gaguagccaaacuucuucc

SEQ ID NO: 2086997 - RNA, 19 nt, Artificial Sequence
  Description of Artificial Sequence: Synthetic oligonucleotide
uggccaaguauauacgaga

SEQ ID NO: 2086998 - RNA, 19 nt, Artificial Sequence
  Description of Artificial Sequence: Synthetic oligonucleotide
auugaggaugagguggucg

SEQ ID NO: 2086999 - RNA, 19 nt, Artificial Sequence
  Description of Artificial Sequence: Synthetic oligonucleotide
uccucagacagguuaguga

SEQ ID NO: 2087000 - RNA, 19 nt, Artificial Sequence
  Description of Artificial Sequence: Synthetic oligonucleotide
accuggucggcccagcugg

SEQ ID NO: 2087001 - RNA, 19 nt, Artificial Sequence
  Description of Artificial Sequence: Synthetic oligonucleotide
uauacgagaaauggagcca

SEQ ID NO: 2087002 - RNA, 19 nt, Artificial Sequence
  Description of Artificial Sequence: Synthetic oligonucleotide
aggacacaaucuucuggcc

SEQ ID NO: 2087003 - RNA, 19 nt, Artificial Sequence
  Description of Artificial Sequence: Synthetic oligonucleotide
uuugcuagugaugaauguc

SEQ ID NO: 2087004 - RNA, 19 nt, Artificial Sequence
  Description of Artificial Sequence: Synthetic oligonucleotide
agucuuuacguucccguug

SEQ ID NO: 2087005 - RNA, 19 nt, Artificial Sequence
  Description of Artificial Sequence: Synthetic oligonucleotide
uuauuaguucguugauggc

SEQ ID NO: 2087006 - RNA, 19 nt, Artificial Sequence
  Description of Artificial Sequence: Synthetic oligonucleotide
gaagcuaauaaaagcaaaa

SEQ ID NO: 2087007 - RNA, 19 nt, Artificial Sequence
  Description of Artificial Sequence: Synthetic oligonucleotide
uagccaaaaccagacaccc

SEQ ID NO: 2087008 - RNA, 19 nt, Artificial Sequence
  Description of Artificial Sequence: Synthetic oligonucleotide
uugucaucggcucuucggu

SEQ ID NO: 2087009 - RNA, 19 nt, Artificial Sequence
  Description of Artificial Sequence: Synthetic oligonucleotide
acggcgacuggccccaucc

SEQ ID NO: 2087010 - RNA, 19 nt, Artificial Sequence
  Description of Artificial Sequence: Synthetic oligonucleotide
aaagucgcccgucggcauc

SEQ ID NO: 2087011 - RNA, 19 nt, Artificial Sequence
  Description of Artificial Sequence: Synthetic oligonucleotide
gagucaaagucgcccgucg

SEQ ID NO: 2087012 - RNA, 19 nt, Artificial Sequence
  Description of Artificial Sequence: Synthetic oligonucleotide
ugaugacuuccuugggagg

SEQ ID NO: 2087013 - RNA, 19 nt, Artificial Sequence
  Description of Artificial Sequence: Synthetic oligonucleotide
acagucuuuacguucccgu

SEQ ID NO: 2087014 - RNA, 19 nt, Artificial Sequence
  Description of Artificial Sequence: Synthetic oligonucleotide
aguucguugauggcuuggc

SEQ ID NO: 2087015 - RNA, 19 nt, Artificial Sequence
  Description of Artificial Sequence: Synthetic oligonucleotide
uggagucuauuuaauggaa

SEQ ID NO: 2087016 - RNA, 19 nt, Artificial Sequence
  Description of Artificial Sequence: Synthetic oligonucleotide
agacagguuagugacucgg

SEQ ID NO: 2087017 - RNA, 19 nt, Artificial Sequence
  Description of Artificial Sequence: Synthetic oligonucleotide
cuuggcccauucaacauug

SEQ ID NO: 2087018 - RNA, 19 nt, Artificial Sequence
  Description of Artificial Sequence: Synthetic oligonucleotide
cauucaacauugaggauga

SEQ ID NO: 2087019 - RNA, 19 nt, Artificial Sequence
  Description of Artificial Sequence: Synthetic oligonucleotide
ucguugauggcuuggccca

SEQ ID NO: 2087020 - RNA, 19 nt, Artificial Sequence
  Description of Artificial Sequence: Synthetic oligonucleotide
ucgcuggugacacacuugu

SEQ ID NO: 2087021 - RNA, 19 nt, Artificial Sequence
  Description of Artificial Sequence: Synthetic oligonucleotide
ucggaugguggcauuguca

SEQ ID NO: 2087022 - RNA, 19 nt, Artificial Sequence
  Description of Artificial Sequence: Synthetic oligonucleotide
uggcccauucaacauugag

SEQ ID NO: 2087023 - RNA, 19 nt, Artificial Sequence
  Description of Artificial Sequence: Synthetic oligonucleotide
uuguacucggucacagucu

SEQ ID NO: 2087024 - RNA, 19 nt, Artificial Sequence
  Description of Artificial Sequence: Synthetic oligonucleotide
caguguguccuuguaaggg

SEQ ID NO: 2087025 - RNA, 19 nt, Artificial Sequence
  Description of Artificial Sequence: Synthetic oligonucleotide
guccugacaaucuugaacu

SEQ ID NO: 2087026 - RNA, 19 nt, Artificial Sequence
  Description of Artificial Sequence: Synthetic oligonucleotide
uguccuuguaagggcagcg

SEQ ID NO: 2087027 - RNA, 19 nt, Artificial Sequence
  Description of Artificial Sequence: Synthetic oligonucleotide
aaccagacaccccugcaau

SEQ ID NO: 2087028 - RNA, 19 nt, Artificial Sequence
  Description of Artificial Sequence: Synthetic oligonucleotide
cucggucacagucuuuacg

SEQ ID NO: 2087029 - RNA, 19 nt, Artificial Sequence
  Description of Artificial Sequence: Synthetic oligonucleotide
acacacuugucguccucgc

SEQ ID NO: 2087030 - RNA, 19 nt, Artificial Sequence
  Description of Artificial Sequence: Synthetic oligonucleotide
gauggcuuggcccauucaa

SEQ ID NO: 2087031 - RNA, 19 nt, Artificial Sequence
  Description of Artificial Sequence: Synthetic oligonucleotide
uucgaugccuuccgggucu

SEQ ID NO: 2087032 - RNA, 19 nt, Artificial Sequence
  Description of Artificial Sequence: Synthetic oligonucleotide
uuguaagggcagcgggugg

SEQ ID NO: 2087033 - RNA, 19 nt, Artificial Sequence
  Description of Artificial Sequence: Synthetic oligonucleotide
ucuuccaccuggucggccc

SEQ ID NO: 2087034 - RNA, 19 nt, Artificial Sequence
  Description of Artificial Sequence: Synthetic oligonucleotide
cuuccuccuggccacagcc

SEQ ID NO: 2087035 - RNA, 19 nt, Artificial Sequence
  Description of Artificial Sequence: Synthetic oligonucleotide
aucuaccuuguacucgguc

SEQ ID NO: 2087036 - RNA, 19 nt, Artificial Sequence
  Description of Artificial Sequence: Synthetic oligonucleotide
agucaaagucgcccgucgg

SEQ ID NO: 2087037 - RNA, 19 nt, Artificial Sequence
  Description of Artificial Sequence: Synthetic oligonucleotide
uggagaucagucucacgug

SEQ ID NO: 2087038 - RNA, 19 nt, Artificial Sequence
  Description of Artificial Sequence: Synthetic oligonucleotide
guagccaaaaccagacacc

SEQ ID NO: 2087039 - RNA, 19 nt, Artificial Sequence
  Description of Artificial Sequence: Synthetic oligonucleotide
auggagacaucaucgcuga

SEQ ID NO: 2087040 - RNA, 19 nt, Artificial Sequence
  Description of Artificial Sequence: Synthetic oligonucleotide
caaaaccagacaccccugc

SEQ ID NO: 2087041 - RNA, 19 nt, Artificial Sequence
  Description of Artificial Sequence: Synthetic oligonucleotide
cucacguguguccucagac

SEQ ID NO: 2087042 - RNA, 19 nt, Artificial Sequence
  Description of Artificial Sequence: Synthetic oligonucleotide
aguagccaaacuucuucca

SEQ ID NO: 2087043 - RNA, 19 nt, Artificial Sequence
  Description of Artificial Sequence: Synthetic oligonucleotide
ucgguuaggcugcauggac

SEQ ID NO: 2087044 - RNA, 19 nt, Artificial Sequence
  Description of Artificial Sequence: Synthetic oligonucleotide
cagguuagugacucggaug

SEQ ID NO: 2087045 - RNA, 19 nt, Artificial Sequence
  Description of Artificial Sequence: Synthetic oligonucleotide
gugucuuauuaguucguug

SEQ ID NO: 2087046 - RNA, 19 nt, Artificial Sequence
  Description of Artificial Sequence: Synthetic oligonucleotide
uggcuuggcccauucaaca

SEQ ID NO: 2087047 - RNA, 19 nt, Artificial Sequence
  Description of Artificial Sequence: Synthetic oligonucleotide
guuccuggagaucagucuc

SEQ ID NO: 2087048 - RNA, 19 nt, Artificial Sequence
  Description of Artificial Sequence: Synthetic oligonucleotide
cuccuuuuccccaguagac

SEQ ID NO: 2087049 - RNA, 19 nt, Artificial Sequence
  Description of Artificial Sequence: Synthetic oligonucleotide
ucaaagucgcccgucggca

SEQ ID NO: 2087050 - RNA, 19 nt, Artificial Sequence
  Description of Artificial Sequence: Synthetic oligonucleotide
gugggucaaacucagagua

SEQ ID NO: 2087051 - RNA, 19 nt, Artificial Sequence
  Description of Artificial Sequence: Synthetic oligonucleotide
ucaucggcucuucgguuag

SEQ ID NO: 2087052 - RNA, 19 nt, Artificial Sequence
  Description of Artificial Sequence: Synthetic oligonucleotide
ucgcccuugcaaaugcggc

SEQ ID NO: 2087053 - RNA, 19 nt, Artificial Sequence
  Description of Artificial Sequence: Synthetic oligonucleotide
gaagguccugacaaucuug

SEQ ID NO: 2087054 - RNA, 19 nt, Artificial Sequence
  Description of Artificial Sequence: Synthetic oligonucleotide
gguggucguagccaaaacc

SEQ ID NO: 2087055 - RNA, 19 nt, Artificial Sequence
  Description of Artificial Sequence: Synthetic oligonucleotide
agaucagucucacgugugu

SEQ ID NO: 2087056 - RNA, 19 nt, Artificial Sequence
  Description of Artificial Sequence: Synthetic oligonucleotide
ucucaauccugaagguccu

SEQ ID NO: 2087057 - RNA, 19 nt, Artificial Sequence
  Description of Artificial Sequence: Synthetic oligonucleotide
ggcccauucaacauugagg

SEQ ID NO: 2087058 - RNA, 19 nt, Artificial Sequence
  Description of Artificial Sequence: Synthetic oligonucleotide
uguacucggucacagucuu

SEQ ID NO: 2087059 - RNA, 19 nt, Artificial Sequence
  Description of Artificial Sequence: Synthetic oligonucleotide
aagguccugacaaucuuga

SEQ ID NO: 2087060 - RNA, 19 nt, Artificial Sequence
  Description of Artificial Sequence: Synthetic oligonucleotide
gguccugacaaucuugaac

SEQ ID NO: 2087061 - RNA, 19 nt, Artificial Sequence
  Description of Artificial Sequence: Synthetic oligonucleotide
guuagugacucggauggug

SEQ ID NO: 2087062 - RNA, 19 nt, Artificial Sequence
  Description of Artificial Sequence: Synthetic oligonucleotide
agcaaaacccuuggacugg

SEQ ID NO: 2087063 - RNA, 19 nt, Artificial Sequence
  Description of Artificial Sequence: Synthetic oligonucleotide
uguccuuggccaaguauau

SEQ ID NO: 2087064 - RNA, 19 nt, Artificial Sequence
  Description of Artificial Sequence: Synthetic oligonucleotide
uagugaugaaugucaugga

SEQ ID NO: 2087065 - RNA, 19 nt, Artificial Sequence
  Description of Artificial Sequence: Synthetic oligonucleotide
gucaaagucgcccgucggc

SEQ ID NO: 2087066 - RNA, 19 nt, Artificial Sequence
  Description of Artificial Sequence: Synthetic oligonucleotide
ccauucaacauugaggaug

SEQ ID NO: 2087067 - RNA, 19 nt, Artificial Sequence
  Description of Artificial Sequence: Synthetic oligonucleotide
cuaccuuguacucggucac

SEQ ID NO: 2087068 - RNA, 19 nt, Artificial Sequence
  Description of Artificial Sequence: Synthetic oligonucleotide
ucucccggaagcuucuccu

SEQ ID NO: 2087069 - RNA, 19 nt, Artificial Sequence
  Description of Artificial Sequence: Synthetic oligonucleotide
ugaagguccugacaaucuu

SEQ ID NO: 2087070 - RNA, 19 nt, Artificial Sequence
  Description of Artificial Sequence: Synthetic oligonucleotide
guggucguagccaaaacca

SEQ ID NO: 2087071 - RNA, 19 nt, Artificial Sequence
  Description of Artificial Sequence: Synthetic oligonucleotide
aaugucauggagacaucau

SEQ ID NO: 2087072 - RNA, 19 nt, Artificial Sequence
  Description of Artificial Sequence: Synthetic oligonucleotide
cuuguaagggcagcgggug

SEQ ID NO: 2087073 - RNA, 19 nt, Artificial Sequence
  Description of Artificial Sequence: Synthetic oligonucleotide
aucggcucuucgguuaggc

SEQ ID NO: 2087074 - RNA, 19 nt, Artificial Sequence
  Description of Artificial Sequence: Synthetic oligonucleotide
cuggagaucagucucacgu

SEQ ID NO: 2087075 - RNA, 19 nt, Artificial Sequence
  Description of Artificial Sequence: Synthetic oligonucleotide
uggucgcccuugcaaaugc

SEQ ID NO: 2087076 - RNA, 19 nt, Artificial Sequence
  Description of Artificial Sequence: Synthetic oligonucleotide
uccggcucuggacuggugu

SEQ ID NO: 2087077 - RNA, 19 nt, Artificial Sequence
  Description of Artificial Sequence: Synthetic oligonucleotide
aggagcucgcuggugacac

SEQ ID NO: 2087078 - RNA, 19 nt, Artificial Sequence
  Description of Artificial Sequence: Synthetic oligonucleotide
auggacuccccacggcgac

SEQ ID NO: 2087079 - RNA, 19 nt, Artificial Sequence
  Description of Artificial Sequence: Synthetic oligonucleotide
ugcggcaggacacaaucuu

SEQ ID NO: 2087080 - RNA, 19 nt, Artificial Sequence
  Description of Artificial Sequence: Synthetic oligonucleotide
ucuugccaucuucaucuac

SEQ ID NO: 2087081 - RNA, 19 nt, Artificial Sequence
  Description of Artificial Sequence: Synthetic oligonucleotide
caaaaggccggaagaguuc

SEQ ID NO: 2087082 - RNA, 19 nt, Artificial Sequence
  Description of Artificial Sequence: Synthetic oligonucleotide
uagccaaacuucuuccaau

SEQ ID NO: 2087083 - RNA, 19 nt, Artificial Sequence
  Description of Artificial Sequence: Synthetic oligonucleotide
ucgcugacugugguggugg

SEQ ID NO: 2087084 - RNA, 19 nt, Artificial Sequence
  Description of Artificial Sequence: Synthetic oligonucleotide
uuccgggucucaauccuga

SEQ ID NO: 2087085 - RNA, 19 nt, Artificial Sequence
  Description of Artificial Sequence: Synthetic oligonucleotide
acagguuagugacucggau

SEQ ID NO: 2087086 - RNA, 19 nt, Artificial Sequence
  Description of Artificial Sequence: Synthetic oligonucleotide
guucccguugaugacuucc

SEQ ID NO: 2087087 - RNA, 19 nt, Artificial Sequence
  Description of Artificial Sequence: Synthetic oligonucleotide
ugcuagugaugaaugucau

SEQ ID NO: 2087088 - RNA, 19 nt, Artificial Sequence
  Description of Artificial Sequence: Synthetic oligonucleotide
gucguagccaaaaccagac

SEQ ID NO: 2087089 - RNA, 19 nt, Artificial Sequence
  Description of Artificial Sequence: Synthetic oligonucleotide
uuaguucguugauggcuug

SEQ ID NO: 2087090 - RNA, 19 nt, Artificial Sequence
  Description of Artificial Sequence: Synthetic oligonucleotide
cucuccgggcaguagcucc

SEQ ID NO: 2087091 - RNA, 19 nt, Artificial Sequence
  Description of Artificial Sequence: Synthetic oligonucleotide
ccucagacagguuagugac

SEQ ID NO: 2087092 - RNA, 19 nt, Artificial Sequence
  Description of Artificial Sequence: Synthetic oligonucleotide
agguggucguagccaaaac

SEQ ID NO: 2087093 - RNA, 19 nt, Artificial Sequence
  Description of Artificial Sequence: Synthetic oligonucleotide
gucuuuacguucccguuga

SEQ ID NO: 2087094 - RNA, 19 nt, Artificial Sequence
  Description of Artificial Sequence: Synthetic oligonucleotide
agccaaaaggccggaagag

SEQ ID NO: 2087095 - RNA, 19 nt, Artificial Sequence
  Description of Artificial Sequence: Synthetic oligonucleotide
aucaucgcugacuguggug

SEQ ID NO: 2087096 - RNA, 19 nt, Artificial Sequence
  Description of Artificial Sequence: Synthetic oligonucleotide
uaguucguugauggcuugg

SEQ ID NO: 2087097 - RNA, 19 nt, Artificial Sequence
  Description of Artificial Sequence: Synthetic oligonucleotide
cugacaaucuugaacuucu

SEQ ID NO: 2087098 - RNA, 19 nt, Artificial Sequence
  Description of Artificial Sequence: Synthetic oligonucleotide
cuuuacguucccguugaug

SEQ ID NO: 2087099 - RNA, 19 nt, Artificial Sequence
  Description of Artificial Sequence: Synthetic oligonucleotide
aagucgcccgucggcaucg

SEQ ID NO: 2087100 - RNA, 19 nt, Artificial Sequence
  Description of Artificial Sequence: Synthetic oligonucleotide
uggacugguguccccggug

SEQ ID NO: 2087101 - RNA, 19 nt, Artificial Sequence
  Description of Artificial Sequence: Synthetic oligonucleotide
gcugcauggacuccccacg

SEQ ID NO: 2087102 - RNA, 19 nt, Artificial Sequence
  Description of Artificial Sequence: Synthetic oligonucleotide
uuacguucccguugaugac

SEQ ID NO: 2087103 - RNA, 19 nt, Artificial Sequence
  Description of Artificial Sequence: Synthetic oligonucleotide
guuuagguccucuuugcua

SEQ ID NO: 2087104 - RNA, 19 nt, Artificial Sequence
  Description of Artificial Sequence: Synthetic oligonucleotide
guucguugauggcuuggcc

SEQ ID NO: 2087105 - RNA, 19 nt, Artificial Sequence
  Description of Artificial Sequence: Synthetic oligonucleotide
ugcauggacuccccacggc

SEQ ID NO: 2087106 - RNA, 19 nt, Artificial Sequence
  Description of Artificial Sequence: Synthetic oligonucleotide
auuaguucguugauggcuu

SEQ ID NO: 2087107 - RNA, 19 nt, Artificial Sequence
  Description of Artificial Sequence: Synthetic oligonucleotide
acucggucacagucuuuac

SEQ ID NO: 2087108 - RNA, 19 nt, Artificial Sequence
  Description of Artificial Sequence: Synthetic oligonucleotide
uguaagggcagcggguggu

SEQ ID NO: 2087109 - RNA, 19 nt, Artificial Sequence
  Description of Artificial Sequence: Synthetic oligonucleotide
ucguagccaaaaccagaca

SEQ ID NO: 2087110 - RNA, 19 nt, Artificial Sequence
  Description of Artificial Sequence: Synthetic oligonucleotide
ggagucuauuuaauggaag

SEQ ID NO: 2087111 - RNA, 19 nt, Artificial Sequence
  Description of Artificial Sequence: Synthetic oligonucleotide
cgggucucaauccugaagg

SEQ ID NO: 2087112 - RNA, 19 nt, Artificial Sequence
  Description of Artificial Sequence: Synthetic oligonucleotide
aaggccggaagaguuccug

SEQ ID NO: 2087113 - RNA, 19 nt, Artificial Sequence
  Description of Artificial Sequence: Synthetic oligonucleotide
uuggacuggccaguggucu

SEQ ID NO: 2087114 - RNA, 19 nt, Artificial Sequence
  Description of Artificial Sequence: Synthetic oligonucleotide
gcauggacuccccacggcg

SEQ ID NO: 2087115 - RNA, 19 nt, Artificial Sequence
  Description of Artificial Sequence: Synthetic oligonucleotide
ucucacguguguccucaga

SEQ ID NO: 2087116 - RNA, 19 nt, Artificial Sequence
  Description of Artificial Sequence: Synthetic oligonucleotide
ggugacacacuugucgucc

SEQ ID NO: 2087117 - RNA, 19 nt, Artificial Sequence
  Description of Artificial Sequence: Synthetic oligonucleotide
ucggcaucgcgaagucuag

SEQ ID NO: 2087118 - RNA, 19 nt, Artificial Sequence
  Description of Artificial Sequence: Synthetic oligonucleotide
caguagacaggcccaguug

SEQ ID NO: 2087119 - RNA, 19 nt, Artificial Sequence
  Description of Artificial Sequence: Synthetic oligonucleotide
cacauugggccccgguggg

SEQ ID NO: 2087120 - RNA, 19 nt, Artificial Sequence
  Description of Artificial Sequence: Synthetic oligonucleotide
auacgagaaauggagccaa

SEQ ID NO: 2087121 - RNA, 19 nt, Artificial Sequence
  Description of Artificial Sequence: Synthetic oligonucleotide
gucaaacucagaguagcca

SEQ ID NO: 2087122 - RNA, 19 nt, Artificial Sequence
  Description of Artificial Sequence: Synthetic oligonucleotide
guagccaaacuucuuccaa

SEQ ID NO: 2087123 - RNA, 19 nt, Artificial Sequence
  Description of Artificial Sequence: Synthetic oligonucleotide
gcgaagucuagcuccacgc

SEQ ID NO: 2087124 - RNA, 19 nt, Artificial Sequence
  Description of Artificial Sequence: Synthetic oligonucleotide
cugcauggacuccccacgg

SEQ ID NO: 2087125 - RNA, 19 nt, Artificial Sequence
  Description of Artificial Sequence: Synthetic oligonucleotide
acaccccugcaauggcucg

SEQ ID NO: 2087126 - RNA, 19 nt, Artificial Sequence
  Description of Artificial Sequence: Synthetic oligonucleotide
gagaucagucucacgugug

SEQ ID NO: 2087127 - RNA, 19 nt, Artificial Sequence
  Description of Artificial Sequence: Synthetic oligonucleotide
accuuguacucggucacag

SEQ ID NO: 2087128 - RNA, 19 nt, Artificial Sequence
  Description of Artificial Sequence: Synthetic oligonucleotide
uucgguuaggcugcaugga

SEQ ID NO: 2087129 - RNA, 19 nt, Artificial Sequence
  Description of Artificial Sequence: Synthetic oligonucleotide
gcaggugucuuauuaguuc

SEQ ID NO: 2087130 - RNA, 19 nt, Artificial Sequence
  Description of Artificial Sequence: Synthetic oligonucleotide
gggucaaacucagaguagc

SEQ ID NO: 2087131 - RNA, 19 nt, Artificial Sequence
  Description of Artificial Sequence: Synthetic oligonucleotide
agucuagcuccacgcagcu

SEQ ID NO: 2087132 - RNA, 19 nt, Artificial Sequence
  Description of Artificial Sequence: Synthetic oligonucleotide
ucgcccgucggcaucgcga

SEQ ID NO: 2087133 - RNA, 19 nt, Artificial Sequence
  Description of Artificial Sequence: Synthetic oligonucleotide
ugauggcuuggcccauuca

SEQ ID NO: 2087134 - RNA, 19 nt, Artificial Sequence
  Description of Artificial Sequence: Synthetic oligonucleotide
cuugcaaaugcggcaggac

SEQ ID NO: 2087135 - RNA, 19 nt, Artificial Sequence
  Description of Artificial Sequence: Synthetic oligonucleotide
ucgagucaaagucgcccgu

SEQ ID NO: 2087136 - RNA, 19 nt, Artificial Sequence
  Description of Artificial Sequence: Synthetic oligonucleotide
ggacugguguccccggugg

SEQ ID NO: 2087137 - RNA, 19 nt, Artificial Sequence
  Description of Artificial Sequence: Synthetic oligonucleotide
uggcauugucaucggcucu

SEQ ID NO: 2087138 - RNA, 19 nt, Artificial Sequence
  Description of Artificial Sequence: Synthetic oligonucleotide
cagacagguuagugacucg

SEQ ID NO: 2087139 - RNA, 19 nt, Artificial Sequence
  Description of Artificial Sequence: Synthetic oligonucleotide
cuuggacuggccagugguc

SEQ ID NO: 2087140 - RNA, 19 nt, Artificial Sequence
  Description of Artificial Sequence: Synthetic oligonucleotide
gguuaggcugcauggacuc

SEQ ID NO: 2087141 - RNA, 19 nt, Artificial Sequence
  Description of Artificial Sequence: Synthetic oligonucleotide
cucuggacugguguccccg

SEQ ID NO: 2087142 - RNA, 19 nt, Artificial Sequence
  Description of Artificial Sequence: Synthetic oligonucleotide
gacugguguccccgguggg

SEQ ID NO: 2087143 - RNA, 19 nt, Artificial Sequence
  Description of Artificial Sequence: Synthetic oligonucleotide
caauggcucgugcagcauc

SEQ ID NO: 2087144 - RNA, 19 nt, Artificial Sequence
  Description of Artificial Sequence: Synthetic oligonucleotide
uguucuggguggccugcac

SEQ ID NO: 2087145 - RNA, 19 nt, Artificial Sequence
  Description of Artificial Sequence: Synthetic oligonucleotide
cuucccugucuuguucugg

SEQ ID NO: 2087146 - RNA, 19 nt, Artificial Sequence
  Description of Artificial Sequence: Synthetic oligonucleotide
cacacuugucguccucgcc

SEQ ID NO: 2087147 - RNA, 19 nt, Artificial Sequence
  Description of Artificial Sequence: Synthetic oligonucleotide
guccuuguaagggcagcgg

SEQ ID NO: 2087148 - RNA, 19 nt, Artificial Sequence
  Description of Artificial Sequence: Synthetic oligonucleotide
gaucagucucacguguguc

SEQ ID NO: 2087149 - RNA, 19 nt, Artificial Sequence
  Description of Artificial Sequence: Synthetic oligonucleotide
uggucggcccagcugggcu

SEQ ID NO: 2087150 - RNA, 19 nt, Artificial Sequence
  Description of Artificial Sequence: Synthetic oligonucleotide
cucgcuggugacacacuug

SEQ ID NO: 2087151 - RNA, 19 nt, Artificial Sequence
  Description of Artificial Sequence: Synthetic oligonucleotide
cuugucguccucgcccucc

SEQ ID NO: 2087152 - RNA, 19 nt, Artificial Sequence
  Description of Artificial Sequence: Synthetic oligonucleotide
agucucacguguguccuca

SEQ ID NO: 2087153 - RNA, 19 nt, Artificial Sequence
  Description of Artificial Sequence: Synthetic oligonucleotide
caauggucgcccuugcaaa

SEQ ID NO: 2087154 - RNA, 19 nt, Artificial Sequence
  Description of Artificial Sequence: Synthetic oligonucleotide
agcgggugguccaaugguc

SEQ ID NO: 2087155 - RNA, 19 nt, Artificial Sequence
  Description of Artificial Sequence: Synthetic oligonucleotide
cucucccggaagcuucucc

SEQ ID NO: 2087156 - RNA, 19 nt, Artificial Sequence
  Description of Artificial Sequence: Synthetic oligonucleotide
uacgagaaauggagccaaa

SEQ ID NO: 2087157 - RNA, 19 nt, Artificial Sequence
  Description of Artificial Sequence: Synthetic oligonucleotide
ccacauugggccccggugg

SEQ ID NO: 2087158 - RNA, 19 nt, Artificial Sequence
  Description of Artificial Sequence: Synthetic oligonucleotide
caaaacccuuggacuggcc

SEQ ID NO: 2087159 - RNA, 19 nt, Artificial Sequence
  Description of Artificial Sequence: Synthetic oligonucleotide
agugacucggaugguggca

SEQ ID NO: 2087160 - RNA, 19 nt, Artificial Sequence
  Description of Artificial Sequence: Synthetic oligonucleotide
uggucuuguccuuggccaa

SEQ ID NO: 2087161 - RNA, 19 nt, Artificial Sequence
  Description of Artificial Sequence: Synthetic oligonucleotide
ugagggucugggugacagc

SEQ ID NO: 2087162 - RNA, 19 nt, Artificial Sequence
  Description of Artificial Sequence: Synthetic oligonucleotide
uuagguccucuuugcuagu

SEQ ID NO: 2087163 - RNA, 19 nt, Artificial Sequence
  Description of Artificial Sequence: Synthetic oligonucleotide
agccuucgaugccuuccgg

SEQ ID NO: 2087164 - RNA, 19 nt, Artificial Sequence
  Description of Artificial Sequence: Synthetic oligonucleotide
gccuucgaugccuuccggg

SEQ ID NO: 2087165 - RNA, 19 nt, Artificial Sequence
  Description of Artificial Sequence: Synthetic oligonucleotide
gcagcgggugguccaaugg

SEQ ID NO: 2087166 - RNA, 19 nt, Artificial Sequence
  Description of Artificial Sequence: Synthetic oligonucleotide
ugacacacuugucguccuc

SEQ ID NO: 2087167 - RNA, 19 nt, Artificial Sequence
  Description of Artificial Sequence: Synthetic oligonucleotide
acgagaaauggagccaaaa

SEQ ID NO: 2087168 - RNA, 19 nt, Artificial Sequence
  Description of Artificial Sequence: Synthetic oligonucleotide
gccaaaaccagacaccccu

SEQ ID NO: 2087169 - RNA, 19 nt, Artificial Sequence
  Description of Artificial Sequence: Synthetic oligonucleotide
uagacaggcccaguugcuc

SEQ ID NO: 2087170 - RNA, 19 nt, Artificial Sequence
  Description of Artificial Sequence: Synthetic oligonucleotide
ggaagcuaauaaaagcaaa

SEQ ID NO: 2087171 - RNA, 19 nt, Artificial Sequence
  Description of Artificial Sequence: Synthetic oligonucleotide
ugucaucggcucuucgguu

SEQ ID NO: 2087172 - RNA, 19 nt, Artificial Sequence
  Description of Artificial Sequence: Synthetic oligonucleotide
ucggcucuucgguuaggcu

SEQ ID NO: 2087173 - RNA, 19 nt, Artificial Sequence
  Description of Artificial Sequence: Synthetic oligonucleotide
cccuugagcuuguucauug

SEQ ID NO: 2087174 - RNA, 19 nt, Artificial Sequence
  Description of Artificial Sequence: Synthetic oligonucleotide
agaguuccuggagaucagu

SEQ ID NO: 2087175 - RNA, 19 nt, Artificial Sequence
  Description of Artificial Sequence: Synthetic oligonucleotide
ucccggaagcuucuccuuu

SEQ ID NO: 2087176 - RNA, 19 nt, Artificial Sequence
  Description of Artificial Sequence: Synthetic oligonucleotide
gacagguuagugacucgga

SEQ ID NO: 2087177 - RNA, 19 nt, Artificial Sequence
  Description of Artificial Sequence: Synthetic oligonucleotide
ggucaaacucagaguagcc

SEQ ID NO: 2087178 - RNA, 19 nt, Artificial Sequence
  Description of Artificial Sequence: Synthetic oligonucleotide
ggcuucgagucaaagucgc

SEQ ID NO: 2087179 - RNA, 19 nt, Artificial Sequence
  Description of Artificial Sequence: Synthetic oligonucleotide
aaaugcggcaggacacaau

SEQ ID NO: 2087180 - RNA, 19 nt, Artificial Sequence
  Description of Artificial Sequence: Synthetic oligonucleotide
uccugacaaucuugaacuu

SEQ ID NO: 2087181 - RNA, 19 nt, Artificial Sequence
  Description of Artificial Sequence: Synthetic oligonucleotide
cggugggucaaacucagag

SEQ ID NO: 2087182 - RNA, 19 nt, Artificial Sequence
  Description of Artificial Sequence: Synthetic oligonucleotide
gucaucggcucuucgguua

SEQ ID NO: 2087183 - RNA, 19 nt, Artificial Sequence
  Description of Artificial Sequence: Synthetic oligonucleotide
uccccacggcgacuggccc

SEQ ID NO: 2087184 - RNA, 19 nt, Artificial Sequence
  Description of Artificial Sequence: Synthetic oligonucleotide
ggcgguggaagcuaauaaa

SEQ ID NO: 2087185 - RNA, 19 nt, Artificial Sequence
  Description of Artificial Sequence: Synthetic oligonucleotide
auggucgcccuugcaaaug

SEQ ID NO: 2087186 - RNA, 19 nt, Artificial Sequence
  Description of Artificial Sequence: Synthetic oligonucleotide
augacuuccuugggaggug

SEQ ID NO: 2087187 - RNA, 19 nt, Artificial Sequence
  Description of Artificial Sequence: Synthetic oligonucleotide
uguccucagacagguuagu

SEQ ID NO: 2087188 - RNA, 19 nt, Artificial Sequence
  Description of Artificial Sequence: Synthetic oligonucleotide
cccguugaugacuuccuug

SEQ ID NO: 2087189 - RNA, 19 nt, Artificial Sequence
  Description of Artificial Sequence: Synthetic oligonucleotide
cugaagguccugacaaucu

SEQ ID NO: 2087190 - RNA, 19 nt, Artificial Sequence
  Description of Artificial Sequence: Synthetic oligonucleotide
gucggcaucgcgaagucua

SEQ ID NO: 2087191 - RNA, 19 nt, Artificial Sequence
  Description of Artificial Sequence: Synthetic oligonucleotide
cucggaugguggcauuguc

SEQ ID NO: 2087192 - RNA, 19 nt, Artificial Sequence
  Description of Artificial Sequence: Synthetic oligonucleotide
gguccaauggucgcccuug

SEQ ID NO: 2087193 - RNA, 19 nt, Artificial Sequence
  Description of Artificial Sequence: Synthetic oligonucleotide
uggcucgugcagcauccuc

SEQ ID NO: 2087194 - RNA, 19 nt, Artificial Sequence
  Description of Artificial Sequence: Synthetic oligonucleotide
gccggaagaguuccuggag

SEQ ID NO: 2087195 - RNA, 19 nt, Artificial Sequence
  Description of Artificial Sequence: Synthetic oligonucleotide
gccacauugggccccggug

SEQ ID NO: 2087196 - RNA, 19 nt, Artificial Sequence
  Description of Artificial Sequence: Synthetic oligonucleotide
ggcagcaggugucuuauua

SEQ ID NO: 2087197 - RNA, 19 nt, Artificial Sequence
  Description of Artificial Sequence: Synthetic oligonucleotide
agcaggugucuuauuaguu

SEQ ID NO: 2087198 - RNA, 19 nt, Artificial Sequence
  Description of Artificial Sequence: Synthetic oligonucleotide
ucuuuacguucccguugau

SEQ ID NO: 2087199 - RNA, 19 nt, Artificial Sequence
  Description of Artificial Sequence: Synthetic oligonucleotide
guguccuuguaagggcagc

SEQ ID NO: 2087200 - RNA, 19 nt, Artificial Sequence
  Description of Artificial Sequence: Synthetic oligonucleotide
uggagacaucaucgcugac

SEQ ID NO: 2087201 - RNA, 19 nt, Artificial Sequence
  Description of Artificial Sequence: Synthetic oligonucleotide
ccaguggucuuguccuugg

SEQ ID NO: 2087202 - RNA, 19 nt, Artificial Sequence
  Description of Artificial Sequence: Synthetic oligonucleotide
guccaauggucgcccuugc

SEQ ID NO: 2087203 - RNA, 19 nt, Artificial Sequence
  Description of Artificial Sequence: Synthetic oligonucleotide
ucccguugaugacuuccuu

SEQ ID NO: 2087204 - RNA, 19 nt, Artificial Sequence
  Description of Artificial Sequence: Synthetic oligonucleotide
gcgggugguccaauggucg

SEQ ID NO: 2087205 - RNA, 19 nt, Artificial Sequence
  Description of Artificial Sequence: Synthetic oligonucleotide
ugacuguggugguggccac

SEQ ID NO: 2087206 - RNA, 19 nt, Artificial Sequence
  Description of Artificial Sequence: Synthetic oligonucleotide
ggagaucagucucacgugu

SEQ ID NO: 2087207 - RNA, 19 nt, Artificial Sequence
  Description of Artificial Sequence: Synthetic oligonucleotide
auugggccccgguggguca

SEQ ID NO: 2087208 - RNA, 19 nt, Artificial Sequence
  Description of Artificial Sequence: Synthetic oligonucleotide
ggcugcauggacuccccac

SEQ ID NO: 2087209 - RNA, 19 nt, Artificial Sequence
  Description of Artificial Sequence: Synthetic oligonucleotide
gacuggccccaucccggag

SEQ ID NO: 2087210 - RNA, 19 nt, Artificial Sequence
  Description of Artificial Sequence: Synthetic oligonucleotide
gucuuauuaguucguugau

SEQ ID NO: 2087211 - RNA, 19 nt, Artificial Sequence
  Description of Artificial Sequence: Synthetic oligonucleotide
caguggucuuguccuuggc

SEQ ID NO: 2087212 - RNA, 19 nt, Artificial Sequence
  Description of Artificial Sequence: Synthetic oligonucleotide
aaaggccggaagaguuccu

SEQ ID NO: 2087213 - RNA, 19 nt, Artificial Sequence
  Description of Artificial Sequence: Synthetic oligonucleotide
aucgcgaagucuagcucca

SEQ ID NO: 2087214 - RNA, 19 nt, Artificial Sequence
  Description of Artificial Sequence: Synthetic oligonucleotide
ccugacaaucuugaacuuc

SEQ ID NO: 2087215 - RNA, 19 nt, Artificial Sequence
  Description of Artificial Sequence: Synthetic oligonucleotide
ggagacaucaucgcugacu

SEQ ID NO: 2087216 - RNA, 19 nt, Artificial Sequence
  Description of Artificial Sequence: Synthetic oligonucleotide
ggugggucaaacucagagu

SEQ ID NO: 2087217 - RNA, 19 nt, Artificial Sequence
  Description of Artificial Sequence: Synthetic oligonucleotide
ggucguagccaaaaccaga

SEQ ID NO: 2087218 - RNA, 19 nt, Artificial Sequence
  Description of Artificial Sequence: Synthetic oligonucleotide
cauugggccccgguggguc

SEQ ID NO: 2087219 - RNA, 19 nt, Artificial Sequence
  Description of Artificial Sequence: Synthetic oligonucleotide
uggacuggccaguggucuu

SEQ ID NO: 2087220 - RNA, 19 nt, Artificial Sequence
  Description of Artificial Sequence: Synthetic oligonucleotide
uccgggcaguagcuccggc

SEQ ID NO: 2087221 - RNA, 19 nt, Artificial Sequence
  Description of Artificial Sequence: Synthetic oligonucleotide
aggugucuuauuaguucgu

SEQ ID NO: 2087222 - RNA, 19 nt, Artificial Sequence
  Description of Artificial Sequence: Synthetic oligonucleotide
gcccuugcaaaugcggcag

SEQ ID NO: 2087223 - RNA, 19 nt, Artificial Sequence
  Description of Artificial Sequence: Synthetic oligonucleotide
gcgguggaagcuaauaaaa

SEQ ID NO: 2087224 - RNA, 19 nt, Artificial Sequence
  Description of Artificial Sequence: Synthetic oligonucleotide
ggccaaguauauacgagaa

SEQ ID NO: 2087225 - RNA, 19 nt, Artificial Sequence
  Description of Artificial Sequence: Synthetic oligonucleotide
auucaacauugaggaugag

SEQ ID NO: 2087226 - RNA, 19 nt, Artificial Sequence
  Description of Artificial Sequence: Synthetic oligonucleotide
caccuggucggcccagcug

SEQ ID NO: 2087227 - RNA, 19 nt, Artificial Sequence
  Description of Artificial Sequence: Synthetic oligonucleotide
ccaucccggagacucgggg

SEQ ID NO: 2087228 - RNA, 19 nt, Artificial Sequence
  Description of Artificial Sequence: Synthetic oligonucleotide
ggcaucgcgaagucuagcu

SEQ ID NO: 2087229 - RNA, 19 nt, Artificial Sequence
  Description of Artificial Sequence: Synthetic oligonucleotide
gccccggugggucaaacuc

SEQ ID NO: 2087230 - RNA, 19 nt, Artificial Sequence
  Description of Artificial Sequence: Synthetic oligonucleotide
gcgacuggccccaucccgg

SEQ ID NO: 2087231 - RNA, 19 nt, Artificial Sequence
  Description of Artificial Sequence: Synthetic oligonucleotide
gacuccccacggcgacugg

SEQ ID NO: 2087232 - RNA, 19 nt, Artificial Sequence
  Description of Artificial Sequence: Synthetic oligonucleotide
ccaauggucgcccuugcaa

SEQ ID NO: 2087233 - RNA, 19 nt, Artificial Sequence
  Description of Artificial Sequence: Synthetic oligonucleotide
cccggugggucaaacucag

SEQ ID NO: 2087234 - RNA, 19 nt, Artificial Sequence
  Description of Artificial Sequence: Synthetic oligonucleotide
gcaaaacccuuggacuggc

SEQ ID NO: 2087235 - RNA, 19 nt, Artificial Sequence
  Description of Artificial Sequence: Synthetic oligonucleotide
ccuggagaucagucucacg

SEQ ID NO: 2087236 - RNA, 19 nt, Artificial Sequence
  Description of Artificial Sequence: Synthetic oligonucleotide
ccgggucucaauccugaag

SEQ ID NO: 2087237 - RNA, 19 nt, Artificial Sequence
  Description of Artificial Sequence: Synthetic oligonucleotide
gcaucgcgaagucuagcuc

SEQ ID NO: 2087238 - RNA, 19 nt, Artificial Sequence
  Description of Artificial Sequence: Synthetic oligonucleotide
ggcacauacuucccugucu

SEQ ID NO: 2087239 - RNA, 19 nt, Artificial Sequence
  Description of Artificial Sequence: Synthetic oligonucleotide
gucgcccgucggcaucgcg

SEQ ID NO: 2087240 - RNA, 19 nt, Artificial Sequence
  Description of Artificial Sequence: Synthetic oligonucleotide
ggugggcagagggauuccc

SEQ ID NO: 2087241 - RNA, 19 nt, Artificial Sequence
  Description of Artificial Sequence: Synthetic oligonucleotide
uccaccuggucggcccagc

SEQ ID NO: 2087242 - RNA, 19 nt, Artificial Sequence
  Description of Artificial Sequence: Synthetic oligonucleotide
augcggcaggacacaaucu

SEQ ID NO: 2087243 - RNA, 19 nt, Artificial Sequence
  Description of Artificial Sequence: Synthetic oligonucleotide
cauacuucccugucuuguu

SEQ ID NO: 2087244 - RNA, 19 nt, Artificial Sequence
  Description of Artificial Sequence: Synthetic oligonucleotide
ucccggcgguggaagcuaa

SEQ ID NO: 2087245 - RNA, 19 nt, Artificial Sequence
  Description of Artificial Sequence: Synthetic oligonucleotide
ggucgcccuugcaaaugcg

SEQ ID NO: 2087246 - RNA, 19 nt, Artificial Sequence
  Description of Artificial Sequence: Synthetic oligonucleotide
caucggcucuucgguuagg

SEQ ID NO: 2087247 - RNA, 19 nt, Artificial Sequence
  Description of Artificial Sequence: Synthetic oligonucleotide
gcugggcuucgagucaaag

SEQ ID NO: 2087248 - RNA, 19 nt, Artificial Sequence
  Description of Artificial Sequence: Synthetic oligonucleotide
ggcagcgggugguccaaug

SEQ ID NO: 2087249 - RNA, 19 nt, Artificial Sequence
  Description of Artificial Sequence: Synthetic oligonucleotide
gggcacauacuucccuguc

SEQ ID NO: 2087250 - RNA, 19 nt, Artificial Sequence
  Description of Artificial Sequence: Synthetic oligonucleotide
cucagacagguuagugacu

SEQ ID NO: 2087251 - RNA, 19 nt, Artificial Sequence
  Description of Artificial Sequence: Synthetic oligonucleotide
caaaugcggcaggacacaa

SEQ ID NO: 2087252 - RNA, 19 nt, Artificial Sequence
  Description of Artificial Sequence: Synthetic oligonucleotide
cacuugucguccucgcccu

SEQ ID NO: 2087253 - RNA, 19 nt, Artificial Sequence
  Description of Artificial Sequence: Synthetic oligonucleotide
caucaucgcugacuguggu

SEQ ID NO: 2087254 - RNA, 19 nt, Artificial Sequence
  Description of Artificial Sequence: Synthetic oligonucleotide
ggacuccccacggcgacug

SEQ ID NO: 2087255 - RNA, 19 nt, Artificial Sequence
  Description of Artificial Sequence: Synthetic oligonucleotide
guagacaggcccaguugcu

SEQ ID NO: 2087256 - RNA, 19 nt, Artificial Sequence
  Description of Artificial Sequence: Synthetic oligonucleotide
cuccgggcaguagcuccgg

SEQ ID NO: 2087257 - RNA, 19 nt, Artificial Sequence
  Description of Artificial Sequence: Synthetic oligonucleotide
cuggucggcccagcugggc

SEQ ID NO: 2087258 - RNA, 19 nt, Artificial Sequence
  Description of Artificial Sequence: Synthetic oligonucleotide
ggcccagcugggcuucgag

SEQ ID NO: 2087259 - RNA, 19 nt, Artificial Sequence
  Description of Artificial Sequence: Synthetic oligonucleotide
gacuguggugguggccaca

SEQ ID NO: 2087260 - RNA, 19 nt, Artificial Sequence
  Description of Artificial Sequence: Synthetic oligonucleotide
gugacacacuugucguccu

SEQ ID NO: 2087261 - RNA, 19 nt, Artificial Sequence
  Description of Artificial Sequence: Synthetic oligonucleotide
ccaaaaggccggaagaguu

SEQ ID NO: 2087262 - RNA, 19 nt, Artificial Sequence
  Description of Artificial Sequence: Synthetic oligonucleotide
ggcaguuuagguccucuuu

SEQ ID NO: 2087263 - RNA, 19 nt, Artificial Sequence
  Description of Artificial Sequence: Synthetic oligonucleotide
ucgcgaagucuagcuccac

SEQ ID NO: 2087264 - RNA, 19 nt, Artificial Sequence
  Description of Artificial Sequence: Synthetic oligonucleotide
cagucuuuacguucccguu

SEQ ID NO: 2087265 - RNA, 19 nt, Artificial Sequence
  Description of Artificial Sequence: Synthetic oligonucleotide
guguccccggugggcagag

SEQ ID NO: 2087266 - RNA, 19 nt, Artificial Sequence
  Description of Artificial Sequence: Synthetic oligonucleotide
caguagcuccggcucugga

SEQ ID NO: 2087267 - RNA, 19 nt, Artificial Sequence
  Description of Artificial Sequence: Synthetic oligonucleotide
auggcucgugcagcauccu

SEQ ID NO: 2087268 - RNA, 19 nt, Artificial Sequence
  Description of Artificial Sequence: Synthetic oligonucleotide
cccugcaauggcucgugca

SEQ ID NO: 2087269 - RNA, 19 nt, Artificial Sequence
  Description of Artificial Sequence: Synthetic oligonucleotide
ccuuguaagggcagcgggu

SEQ ID NO: 2087270 - RNA, 19 nt, Artificial Sequence
  Description of Artificial Sequence: Synthetic oligonucleotide
cgggcaguagcuccggcuc

SEQ ID NO: 2087271 - RNA, 19 nt, Artificial Sequence
  Description of Artificial Sequence: Synthetic oligonucleotide
ucgaugccuuccgggucuc

SEQ ID NO: 2087272 - RNA, 19 nt, Artificial Sequence
  Description of Artificial Sequence: Synthetic oligonucleotide
ccuggucggcccagcuggg

SEQ ID NO: 2087273 - RNA, 19 nt, Artificial Sequence
  Description of Artificial Sequence: Synthetic oligonucleotide
agcucgcuggugacacacu

SEQ ID NO: 2087274 - RNA, 19 nt, Artificial Sequence
  Description of Artificial Sequence: Synthetic oligonucleotide
cgggugguccaauggucgc

SEQ ID NO: 2087275 - RNA, 19 nt, Artificial Sequence
  Description of Artificial Sequence: Synthetic oligonucleotide
cccaucccggagacucggg

SEQ ID NO: 2087276 - RNA, 19 nt, Artificial Sequence
  Description of Artificial Sequence: Synthetic oligonucleotide
uugggccccggugggucaa

SEQ ID NO: 2087277 - RNA, 19 nt, Artificial Sequence
  Description of Artificial Sequence: Synthetic oligonucleotide
ccggaagcuucuccuuuuc

SEQ ID NO: 2087278 - RNA, 19 nt, Artificial Sequence
  Description of Artificial Sequence: Synthetic oligonucleotide
ggggcacauacuucccugu

SEQ ID NO: 2087279 - RNA, 19 nt, Artificial Sequence
  Description of Artificial Sequence: Synthetic oligonucleotide
caaagucgcccgucggcau

SEQ ID NO: 2087280 - RNA, 19 nt, Artificial Sequence
  Description of Artificial Sequence: Synthetic oligonucleotide
cgaagucuagcuccacgca

SEQ ID NO: 2087281 - RNA, 19 nt, Artificial Sequence
  Description of Artificial Sequence: Synthetic oligonucleotide
ggcuuggcccauucaacau

SEQ ID NO: 2087282 - RNA, 19 nt, Artificial Sequence
  Description of Artificial Sequence: Synthetic oligonucleotide
ggugucuuauuaguucguu

SEQ ID NO: 2087283 - RNA, 19 nt, Artificial Sequence
  Description of Artificial Sequence: Synthetic oligonucleotide
agggcagcgggugguccaa

SEQ ID NO: 2087284 - RNA, 19 nt, Artificial Sequence
  Description of Artificial Sequence: Synthetic oligonucleotide
ccccaucccggagacucgg

SEQ ID NO: 2087285 - RNA, 19 nt, Artificial Sequence
  Description of Artificial Sequence: Synthetic oligonucleotide
ccccggugggucaaacuca

SEQ ID NO: 2087286 - RNA, 19 nt, Artificial Sequence
  Description of Artificial Sequence: Synthetic oligonucleotide
cacggcgacuggccccauc

SEQ ID NO: 2087287 - RNA, 19 nt, Artificial Sequence
  Description of Artificial Sequence: Synthetic oligonucleotide
caucuaccuuguacucggu

SEQ ID NO: 2087288 - RNA, 19 nt, Artificial Sequence
  Description of Artificial Sequence: Synthetic oligonucleotide
caucgcugacugugguggu

SEQ ID NO: 2087289 - RNA, 19 nt, Artificial Sequence
  Description of Artificial Sequence: Synthetic oligonucleotide
ggcauugucaucggcucuu

SEQ ID NO: 2087290 - RNA, 19 nt, Artificial Sequence
  Description of Artificial Sequence: Synthetic oligonucleotide
ggagcucgcuggugacaca

SEQ ID NO: 2087291 - RNA, 19 nt, Artificial Sequence
  Description of Artificial Sequence: Synthetic oligonucleotide
gcucgcuggugacacacuu

SEQ ID NO: 2087292 - RNA, 19 nt, Artificial Sequence
  Description of Artificial Sequence: Synthetic oligonucleotide
ccaguagacaggcccaguu

SEQ ID NO: 2087293 - RNA, 19 nt, Artificial Sequence
  Description of Artificial Sequence: Synthetic oligonucleotide
ccccaguguguccuuguaa

SEQ ID NO: 2087294 - RNA, 19 nt, Artificial Sequence
  Description of Artificial Sequence: Synthetic oligonucleotide
cauccucccggcgguggaa

SEQ ID NO: 2087295 - RNA, 19 nt, Artificial Sequence
  Description of Artificial Sequence: Synthetic oligonucleotide
ccucuuugcuagugaugaa

SEQ ID NO: 2087296 - RNA, 19 nt, Artificial Sequence
  Description of Artificial Sequence: Synthetic oligonucleotide
gguguccccggugggcaga

SEQ ID NO: 2087297 - RNA, 19 nt, Artificial Sequence
  Description of Artificial Sequence: Synthetic oligonucleotide
cucccggaagcuucuccuu

SEQ ID NO: 2087298 - RNA, 19 nt, Artificial Sequence
  Description of Artificial Sequence: Synthetic oligonucleotide
cucccggcgguggaagcua

SEQ ID NO: 2087299 - RNA, 19 nt, Artificial Sequence
  Description of Artificial Sequence: Synthetic oligonucleotide
gggcaguagcuccggcucu

SEQ ID NO: 2087300 - RNA, 19 nt, Artificial Sequence
  Description of Artificial Sequence: Synthetic oligonucleotide
gguuagugacucggauggu

SEQ ID NO: 2087301 - RNA, 19 nt, Artificial Sequence
  Description of Artificial Sequence: Synthetic oligonucleotide
cggcgguggaagcuaauaa

SEQ ID NO: 2087302 - RNA, 19 nt, Artificial Sequence
  Description of Artificial Sequence: Synthetic oligonucleotide
cggaagaguuccuggagau

SEQ ID NO: 2087303 - RNA, 19 nt, Artificial Sequence
  Description of Artificial Sequence: Synthetic oligonucleotide
ccuuguacucggucacagu

SEQ ID NO: 2087304 - RNA, 19 nt, Artificial Sequence
  Description of Artificial Sequence: Synthetic oligonucleotide
gcucuccgggcaguagcuc

SEQ ID NO: 2087305 - RNA, 19 nt, Artificial Sequence
  Description of Artificial Sequence: Synthetic oligonucleotide
agcugggcuucgagucaaa

SEQ ID NO: 2087306 - RNA, 19 nt, Artificial Sequence
  Description of Artificial Sequence: Synthetic oligonucleotide
cgguuaggcugcauggacu

SEQ ID NO: 2087307 - RNA, 19 nt, Artificial Sequence
  Description of Artificial Sequence: Synthetic oligonucleotide
gcccgucggcaucgcgaag

SEQ ID NO: 2087308 - RNA, 19 nt, Artificial Sequence
  Description of Artificial Sequence: Synthetic oligonucleotide
ugggccccggugggucaaa

SEQ ID NO: 2087309 - RNA, 19 nt, Artificial Sequence
  Description of Artificial Sequence: Synthetic oligonucleotide
ggauucccuucaggagcuc

SEQ ID NO: 2087310 - RNA, 19 nt, Artificial Sequence
  Description of Artificial Sequence: Synthetic oligonucleotide
gccccaguguguccuugua

SEQ ID NO: 2087311 - RNA, 19 nt, Artificial Sequence
  Description of Artificial Sequence: Synthetic oligonucleotide
caccccugcaauggcucgu

SEQ ID NO: 2087312 - RNA, 19 nt, Artificial Sequence
  Description of Artificial Sequence: Synthetic oligonucleotide
cggcaucgcgaagucuagc

SEQ ID NO: 2087313 - RNA, 19 nt, Artificial Sequence
  Description of Artificial Sequence: Synthetic oligonucleotide
ccgggcaguagcuccggcu

SEQ ID NO: 2087314 - RNA, 19 nt, Artificial Sequence
  Description of Artificial Sequence: Synthetic oligonucleotide
ggccccggugggucaaacu

SEQ ID NO: 2087315 - RNA, 19 nt, Artificial Sequence
  Description of Artificial Sequence: Synthetic oligonucleotide
cccgucggcaucgcgaagu

SEQ ID NO: 2087316 - RNA, 19 nt, Artificial Sequence
  Description of Artificial Sequence: Synthetic oligonucleotide
cccacggcgacuggcccca

SEQ ID NO: 2087317 - RNA, 19 nt, Artificial Sequence
  Description of Artificial Sequence: Synthetic oligonucleotide
cccauucaacauugaggau

SEQ ID NO: 2087318 - RNA, 19 nt, Artificial Sequence
  Description of Artificial Sequence: Synthetic oligonucleotide
ccggcgguggaagcuaaua

SEQ ID NO: 2087319 - RNA, 19 nt, Artificial Sequence
  Description of Artificial Sequence: Synthetic oligonucleotide
gcucucccggaagcuucuc

SEQ ID NO: 2087320 - RNA, 19 nt, Artificial Sequence
  Description of Artificial Sequence: Synthetic oligonucleotide
ccggugggucaaacucaga

SEQ ID NO: 2087321 - RNA, 19 nt, Artificial Sequence
  Description of Artificial Sequence: Synthetic oligonucleotide
gggccccggugggucaaac

SEQ ID NO: 2087322 - RNA, 19 nt, Artificial Sequence
  Description of Artificial Sequence: Synthetic oligonucleotide
cgacuggccccaucccgga

SEQ ID NO: 2087323 - RNA, 19 nt, Artificial Sequence
  Description of Artificial Sequence: Synthetic oligonucleotide
cccggaagcuucuccuuuu

SEQ ID NO: 2087324 - RNA, 19 nt, Artificial Sequence
  Description of Artificial Sequence: Synthetic oligonucleotide
cgcccgucggcaucgcgaa

SEQ ID NO: 2087325 - RNA, 19 nt, Artificial Sequence
  Description of Artificial Sequence: Synthetic oligonucleotide
gcccuugagcuuguucauu

SEQ ID NO: 2087326 - RNA, 19 nt, Artificial Sequence
  Description of Artificial Sequence: Synthetic oligonucleotide
guguguccucagacagguu

SEQ ID NO: 2087327 - RNA, 19 nt, Artificial Sequence
  Description of Artificial Sequence: Synthetic oligonucleotide
gcuccggcucuggacuggu

SEQ ID NO: 2087328 - RNA, 19 nt, Artificial Sequence
  Description of Artificial Sequence: Synthetic oligonucleotide
cucuucgguuaggcugcau

SEQ ID NO: 2087329 - RNA, 19 nt, Artificial Sequence
  Description of Artificial Sequence: Synthetic oligonucleotide
ccaccuggucggcccagcu

SEQ ID NO: 2087330 - RNA, 19 nt, Artificial Sequence
  Description of Artificial Sequence: Synthetic oligonucleotide
cccggcgguggaagcuaau

SEQ ID NO: 2087331 - RNA, 19 nt, Artificial Sequence
  Description of Artificial Sequence: Synthetic oligonucleotide
gggcagcgggugguccaau

SEQ ID NO: 2087332 - RNA, 19 nt, Artificial Sequence
  Description of Artificial Sequence: Synthetic oligonucleotide
ccacggcgacuggccccau

SEQ ID NO: 2087333 - RNA, 19 nt, Artificial Sequence
  Description of Artificial Sequence: Synthetic oligonucleotide
aauguuucccaacagacag

SEQ ID NO: 2087334 - RNA, 19 nt, Artificial Sequence
  Description of Artificial Sequence: Synthetic oligonucleotide
uauucugcgaaucugcucg

SEQ ID NO: 2087335 - RNA, 19 nt, Artificial Sequence
  Description of Artificial Sequence: Synthetic oligonucleotide
aaaguaucuguacagguuc

SEQ ID NO: 2087336 - RNA, 19 nt, Artificial Sequence
  Description of Artificial Sequence: Synthetic oligonucleotide
caagacuucagcaacaucg

SEQ ID NO: 2087337 - RNA, 19 nt, Artificial Sequence
  Description of Artificial Sequence: Synthetic oligonucleotide
uaaagaaagagacucgacc

SEQ ID NO: 2087338 - RNA, 19 nt, Artificial Sequence
  Description of Artificial Sequence: Synthetic oligonucleotide
aaugugaucagagcaagac

SEQ ID NO: 2087339 - RNA, 19 nt, Artificial Sequence
  Description of Artificial Sequence: Synthetic oligonucleotide
aaagcagugaaguguaguc

SEQ ID NO: 2087340 - RNA, 19 nt, Artificial Sequence
  Description of Artificial Sequence: Synthetic oligonucleotide
aacaucgucaucaaucccc

SEQ ID NO: 2087341 - RNA, 19 nt, Artificial Sequence
  Description of Artificial Sequence: Synthetic oligonucleotide
aguacuggguccucgaugc

SEQ ID NO: 2087342 - RNA, 19 nt, Artificial Sequence
  Description of Artificial Sequence: Synthetic oligonucleotide
ugugaucagagcaagaccu

SEQ ID NO: 2087343 - RNA, 19 nt, Artificial Sequence
  Description of Artificial Sequence: Synthetic oligonucleotide
uauuuuguauuuuaucccc

SEQ ID NO: 2087344 - RNA, 19 nt, Artificial Sequence
  Description of Artificial Sequence: Synthetic oligonucleotide
aagaccuacuccaagggcc

SEQ ID NO: 2087345 - RNA, 19 nt, Artificial Sequence
  Description of Artificial Sequence: Synthetic oligonucleotide
uaaguaauccgacagguaa

SEQ ID NO: 2087346 - RNA, 19 nt, Artificial Sequence
  Description of Artificial Sequence: Synthetic oligonucleotide
uguauuuuauccccaaagu

SEQ ID NO: 2087347 - RNA, 19 nt, Artificial Sequence
  Description of Artificial Sequence: Synthetic oligonucleotide
aaguccucuaaguaauccg

SEQ ID NO: 2087348 - RNA, 19 nt, Artificial Sequence
  Description of Artificial Sequence: Synthetic oligonucleotide
aaugaaccugccuucuagg

SEQ ID NO: 2087349 - RNA, 19 nt, Artificial Sequence
  Description of Artificial Sequence: Synthetic oligonucleotide
uaauccgacagguaaagca

SEQ ID NO: 2087350 - RNA, 19 nt, Artificial Sequence
  Description of Artificial Sequence: Synthetic oligonucleotide
uguacagguucacaaaaug

SEQ ID NO: 2087351 - RNA, 19 nt, Artificial Sequence
  Description of Artificial Sequence: Synthetic oligonucleotide
aucaccaugucagugacac

SEQ ID NO: 2087352 - RNA, 19 nt, Artificial Sequence
  Description of Artificial Sequence: Synthetic oligonucleotide
agguucacaaaauguuucc

SEQ ID NO: 2087353 - RNA, 19 nt, Artificial Sequence
  Description of Artificial Sequence: Synthetic oligonucleotide
ucggugaccaucauagucc

SEQ ID NO: 2087354 - RNA, 19 nt, Artificial Sequence
  Description of Artificial Sequence: Synthetic oligonucleotide
cuggugaucaccaugucag

SEQ ID NO: 2087355 - RNA, 19 nt, Artificial Sequence
  Description of Artificial Sequence: Synthetic oligonucleotide
gauagaugccccuccaucc

SEQ ID NO: 2087356 - RNA, 19 nt, Artificial Sequence
  Description of Artificial Sequence: Synthetic oligonucleotide
auccgauccaccuagggag

SEQ ID NO: 2087357 - RNA, 19 nt, Artificial Sequence
  Description of Artificial Sequence: Synthetic oligonucleotide
augugaucagagcaagacc

SEQ ID NO: 2087358 - RNA, 19 nt, Artificial Sequence
  Description of Artificial Sequence: Synthetic oligonucleotide
acacaaagcgcccuccacc

SEQ ID NO: 2087359 - RNA, 19 nt, Artificial Sequence
  Description of Artificial Sequence: Synthetic oligonucleotide
uaggaccucaccucgacgg

SEQ ID NO: 2087360 - RNA, 19 nt, Artificial Sequence
  Description of Artificial Sequence: Synthetic oligonucleotide
aagagacucgaccagcucu

SEQ ID NO: 2087361 - RNA, 19 nt, Artificial Sequence
  Description of Artificial Sequence: Synthetic oligonucleotide
aaguguagucaaaggagcc

SEQ ID NO: 2087362 - RNA, 19 nt, Artificial Sequence
  Description of Artificial Sequence: Synthetic oligonucleotide
aucccuauauaacuggaag

SEQ ID NO: 2087363 - RNA, 19 nt, Artificial Sequence
  Description of Artificial Sequence: Synthetic oligonucleotide
ugcaugccaguacucaucg

SEQ ID NO: 2087364 - RNA, 19 nt, Artificial Sequence
  Description of Artificial Sequence: Synthetic oligonucleotide
agagcagggaaccucaaug

SEQ ID NO: 2087365 - RNA, 19 nt, Artificial Sequence
  Description of Artificial Sequence: Synthetic oligonucleotide
ucuaaguaauccgacaggu

SEQ ID NO: 2087366 - RNA, 19 nt, Artificial Sequence
  Description of Artificial Sequence: Synthetic oligonucleotide
aauccgacagguaaagcag

SEQ ID NO: 2087367 - RNA, 19 nt, Artificial Sequence
  Description of Artificial Sequence: Synthetic oligonucleotide
aucagagcaagaccuacuc

SEQ ID NO: 2087368 - RNA, 19 nt, Artificial Sequence
  Description of Artificial Sequence: Synthetic oligonucleotide
gaaguguagucaaaggagc

SEQ ID NO: 2087369 - RNA, 19 nt, Artificial Sequence
  Description of Artificial Sequence: Synthetic oligonucleotide
agauacagcaaggaugcac

SEQ ID NO: 2087370 - RNA, 19 nt, Artificial Sequence
  Description of Artificial Sequence: Synthetic oligonucleotide
uuccguacuauugauucgg

SEQ ID NO: 2087371 - RNA, 19 nt, Artificial Sequence
  Description of Artificial Sequence: Synthetic oligonucleotide
acagguaaagcagugaagu

SEQ ID NO: 2087372 - RNA, 19 nt, Artificial Sequence
  Description of Artificial Sequence: Synthetic oligonucleotide
aaagagacucgaccagcuc

SEQ ID NO: 2087373 - RNA, 19 nt, Artificial Sequence
  Description of Artificial Sequence: Synthetic oligonucleotide
uacuccaagggccacaguc

SEQ ID NO: 2087374 - RNA, 19 nt, Artificial Sequence
  Description of Artificial Sequence: Synthetic oligonucleotide
uaucuguacagguucacaa

SEQ ID NO: 2087375 - RNA, 19 nt, Artificial Sequence
  Description of Artificial Sequence: Synthetic oligonucleotide
ucugcuauucugcgaaucu

SEQ ID NO: 2087376 - RNA, 19 nt, Artificial Sequence
  Description of Artificial Sequence: Synthetic oligonucleotide
ugagguaaagaaagagacu

SEQ ID NO: 2087377 - RNA, 19 nt, Artificial Sequence
  Description of Artificial Sequence: Synthetic oligonucleotide
uucggugaccaucauaguc

SEQ ID NO: 2087378 - RNA, 19 nt, Artificial Sequence
  Description of Artificial Sequence: Synthetic oligonucleotide
uuuuauccccaaaguaucu

SEQ ID NO: 2087379 - RNA, 19 nt, Artificial Sequence
  Description of Artificial Sequence: Synthetic oligonucleotide
acacgagagccgcuaagcc

SEQ ID NO: 2087380 - RNA, 19 nt, Artificial Sequence
  Description of Artificial Sequence: Synthetic oligonucleotide
aggguugcaggugaaagcg

SEQ ID NO: 2087381 - RNA, 19 nt, Artificial Sequence
  Description of Artificial Sequence: Synthetic oligonucleotide
uucguuacgugaguacugg

SEQ ID NO: 2087382 - RNA, 19 nt, Artificial Sequence
  Description of Artificial Sequence: Synthetic oligonucleotide
ucaucaauccccagacuac

SEQ ID NO: 2087383 - RNA, 19 nt, Artificial Sequence
  Description of Artificial Sequence: Synthetic oligonucleotide
cacaucccuauauaacugg

SEQ ID NO: 2087384 - RNA, 19 nt, Artificial Sequence
  Description of Artificial Sequence: Synthetic oligonucleotide
auagaugccccuccauccg

SEQ ID NO: 2087385 - RNA, 19 nt, Artificial Sequence
  Description of Artificial Sequence: Synthetic oligonucleotide
gugaaguguagucaaagga

SEQ ID NO: 2087386 - RNA, 19 nt, Artificial Sequence
  Description of Artificial Sequence: Synthetic oligonucleotide
ucccuauauaacuggaagu

SEQ ID NO: 2087387 - RNA, 19 nt, Artificial Sequence
  Description of Artificial Sequence: Synthetic oligonucleotide
aauggugagcuggaccuuc

SEQ ID NO: 2087388 - RNA, 19 nt, Artificial Sequence
  Description of Artificial Sequence: Synthetic oligonucleotide
uauaacuggaaguccuccu

SEQ ID NO: 2087389 - RNA, 19 nt, Artificial Sequence
  Description of Artificial Sequence: Synthetic oligonucleotide
agucaaaggagccguaggu

SEQ ID NO: 2087390 - RNA, 19 nt, Artificial Sequence
  Description of Artificial Sequence: Synthetic oligonucleotide
uuacgugaguacugggucc

SEQ ID NO: 2087391 - RNA, 19 nt, Artificial Sequence
  Description of Artificial Sequence: Synthetic oligonucleotide
caaugaaccugccuucuag

SEQ ID NO: 2087392 - RNA, 19 nt, Artificial Sequence
  Description of Artificial Sequence: Synthetic oligonucleotide
gacucgaccagcucugggc

SEQ ID NO: 2087393 - RNA, 19 nt, Artificial Sequence
  Description of Artificial Sequence: Synthetic oligonucleotide
ugggcuuccguacuauuga

SEQ ID NO: 2087394 - RNA, 19 nt, Artificial Sequence
  Description of Artificial Sequence: Synthetic oligonucleotide
aguaauccgacagguaaag

SEQ ID NO: 2087395 - RNA, 19 nt, Artificial Sequence
  Description of Artificial Sequence: Synthetic oligonucleotide
agcuucguuacgugaguac

SEQ ID NO: 2087396 - RNA, 19 nt, Artificial Sequence
  Description of Artificial Sequence: Synthetic oligonucleotide
ucaggguugcaggugaaag

SEQ ID NO: 2087397 - RNA, 19 nt, Artificial Sequence
  Description of Artificial Sequence: Synthetic oligonucleotide
augaacacaaagcgcccuc

SEQ ID NO: 2087398 - RNA, 19 nt, Artificial Sequence
  Description of Artificial Sequence: Synthetic oligonucleotide
guuacgugaguacuggguc

SEQ ID NO: 2087399 - RNA, 19 nt, Artificial Sequence
  Description of Artificial Sequence: Synthetic oligonucleotide
cagacuacuccagagcagg

SEQ ID NO: 2087400 - RNA, 19 nt, Artificial Sequence
  Description of Artificial Sequence: Synthetic oligonucleotide
ucugcgaaucugcucggcc

SEQ ID NO: 2087401 - RNA, 19 nt, Artificial Sequence
  Description of Artificial Sequence: Synthetic oligonucleotide
guacuauugauucgggaga

SEQ ID NO: 2087402 - RNA, 19 nt, Artificial Sequence
  Description of Artificial Sequence: Synthetic oligonucleotide
cagagcaagaccuacucca

SEQ ID NO: 2087403 - RNA, 19 nt, Artificial Sequence
  Description of Artificial Sequence: Synthetic oligonucleotide
uccucuaaguaauccgaca

SEQ ID NO: 2087404 - RNA, 19 nt, Artificial Sequence
  Description of Artificial Sequence: Synthetic oligonucleotide
ucuuggugccguucgcgcg

SEQ ID NO: 2087405 - RNA, 19 nt, Artificial Sequence
  Description of Artificial Sequence: Synthetic oligonucleotide
gcaacaucgucaucaaucc

SEQ ID NO: 2087406 - RNA, 19 nt, Artificial Sequence
  Description of Artificial Sequence: Synthetic oligonucleotide
cuuccguacuauugauucg

SEQ ID NO: 2087407 - RNA, 19 nt, Artificial Sequence
  Description of Artificial Sequence: Synthetic oligonucleotide
uccguacuauugauucggg

SEQ ID NO: 2087408 - RNA, 19 nt, Artificial Sequence
  Description of Artificial Sequence: Synthetic oligonucleotide
uguccuguuggacccuucc

SEQ ID NO: 2087409 - RNA, 19 nt, Artificial Sequence
  Description of Artificial Sequence: Synthetic oligonucleotide
cagagcaggaaugugauca

SEQ ID NO: 2087410 - RNA, 19 nt, Artificial Sequence
  Description of Artificial Sequence: Synthetic oligonucleotide
ugucagugacaccucugcc

SEQ ID NO: 2087411 - RNA, 19 nt, Artificial Sequence
  Description of Artificial Sequence: Synthetic oligonucleotide
ucaucgugagccgucuggg

SEQ ID NO: 2087412 - RNA, 19 nt, Artificial Sequence
  Description of Artificial Sequence: Synthetic oligonucleotide
cacgagagccgcuaagccc

SEQ ID NO: 2087413 - RNA, 19 nt, Artificial Sequence
  Description of Artificial Sequence: Synthetic oligonucleotide
uccucgaugccauggucag

SEQ ID NO: 2087414 - RNA, 19 nt, Artificial Sequence
  Description of Artificial Sequence: Synthetic oligonucleotide
cguacuauugauucgggag

SEQ ID NO: 2087415 - RNA, 19 nt, Artificial Sequence
  Description of Artificial Sequence: Synthetic oligonucleotide
agccuucaaaucuucggug

SEQ ID NO: 2087416 - RNA, 19 nt, Artificial Sequence
  Description of Artificial Sequence: Synthetic oligonucleotide
aaugugggcuuugucagau

SEQ ID NO: 2087417 - RNA, 19 nt, Artificial Sequence
  Description of Artificial Sequence: Synthetic oligonucleotide
agcgcccuccaccaaaguc

SEQ ID NO: 2087418 - RNA, 19 nt, Artificial Sequence
  Description of Artificial Sequence: Synthetic oligonucleotide
uccgacagguaaagcagug

SEQ ID NO: 2087419 - RNA, 19 nt, Artificial Sequence
  Description of Artificial Sequence: Synthetic oligonucleotide
gaguacuggguccucgaug

SEQ ID NO: 2087420 - RNA, 19 nt, Artificial Sequence
  Description of Artificial Sequence: Synthetic oligonucleotide
gacccuuccuccaugaaca

SEQ ID NO: 2087421 - RNA, 19 nt, Artificial Sequence
  Description of Artificial Sequence: Synthetic oligonucleotide
caagaccuacuccaagggc

SEQ ID NO: 2087422 - RNA, 19 nt, Artificial Sequence
  Description of Artificial Sequence: Synthetic oligonucleotide
aguaucuguacagguucac

SEQ ID NO: 2087423 - RNA, 19 nt, Artificial Sequence
  Description of Artificial Sequence: Synthetic oligonucleotide
agguaaagaaagagacucg

SEQ ID NO: 2087424 - RNA, 19 nt, Artificial Sequence
  Description of Artificial Sequence: Synthetic oligonucleotide
aagacuucagcaacaucgu

SEQ ID NO: 2087425 - RNA, 19 nt, Artificial Sequence
  Description of Artificial Sequence: Synthetic oligonucleotide
cuucguuacgugaguacug

SEQ ID NO: 2087426 - RNA, 19 nt, Artificial Sequence
  Description of Artificial Sequence: Synthetic oligonucleotide
uggucaggguugcagguga

SEQ ID NO: 2087427 - RNA, 19 nt, Artificial Sequence
  Description of Artificial Sequence: Synthetic oligonucleotide
gacacgagagccgcuaagc

SEQ ID NO: 2087428 - RNA, 19 nt, Artificial Sequence
  Description of Artificial Sequence: Synthetic oligonucleotide
uccgcugaggcgccauugg

SEQ ID NO: 2087429 - RNA, 19 nt, Artificial Sequence
  Description of Artificial Sequence: Synthetic oligonucleotide
uccaccuagggagagcccc

SEQ ID NO: 2087430 - RNA, 19 nt, Artificial Sequence
  Description of Artificial Sequence: Synthetic oligonucleotide
cuucaaaucuucggugacc

SEQ ID NO: 2087431 - RNA, 19 nt, Artificial Sequence
  Description of Artificial Sequence: Synthetic oligonucleotide
aaccuagcuucguuacgug

SEQ ID NO: 2087432 - RNA, 19 nt, Artificial Sequence
  Description of Artificial Sequence: Synthetic oligonucleotide
caggguugcaggugaaagc

SEQ ID NO: 2087433 - RNA, 19 nt, Artificial Sequence
  Description of Artificial Sequence: Synthetic oligonucleotide
uagcgggugccccacagga

SEQ ID NO: 2087434 - RNA, 19 nt, Artificial Sequence
  Description of Artificial Sequence: Synthetic oligonucleotide
uccccagacuacuccagag

SEQ ID NO: 2087435 - RNA, 19 nt, Artificial Sequence
  Description of Artificial Sequence: Synthetic oligonucleotide
aucgugagccgucugggcu

SEQ ID NO: 2087436 - RNA, 19 nt, Artificial Sequence
  Description of Artificial Sequence: Synthetic oligonucleotide
ggaaccucaaugaaccugc

SEQ ID NO: 2087437 - RNA, 19 nt, Artificial Sequence
  Description of Artificial Sequence: Synthetic oligonucleotide
gagcagggaaccucaauga

SEQ ID NO: 2087438 - RNA, 19 nt, Artificial Sequence
  Description of Artificial Sequence: Synthetic oligonucleotide
cuccauccgauccaccuag

SEQ ID NO: 2087439 - RNA, 19 nt, Artificial Sequence
  Description of Artificial Sequence: Synthetic oligonucleotide
gauucgggagaagaaugug

SEQ ID NO: 2087440 - RNA, 19 nt, Artificial Sequence
  Description of Artificial Sequence: Synthetic oligonucleotide
ugaacacaaagcgcccucc

SEQ ID NO: 2087441 - RNA, 19 nt, Artificial Sequence
  Description of Artificial Sequence: Synthetic oligonucleotide
ugaucagagcaagaccuac

SEQ ID NO: 2087442 - RNA, 19 nt, Artificial Sequence
  Description of Artificial Sequence: Synthetic oligonucleotide
accucgacgggccaagacu

SEQ ID NO: 2087443 - RNA, 19 nt, Artificial Sequence
  Description of Artificial Sequence: Synthetic oligonucleotide
ucguuacgugaguacuggg

SEQ ID NO: 2087444 - RNA, 19 nt, Artificial Sequence
  Description of Artificial Sequence: Synthetic oligonucleotide
cuauugauucgggagaaga

SEQ ID NO: 2087445 - RNA, 19 nt, Artificial Sequence
  Description of Artificial Sequence: Synthetic oligonucleotide
gcaagaccuacuccaaggg

SEQ ID NO: 2087446 - RNA, 19 nt, Artificial Sequence
  Description of Artificial Sequence: Synthetic oligonucleotide
cugggcuuccguacuauug

SEQ ID NO: 2087447 - RNA, 19 nt, Artificial Sequence
  Description of Artificial Sequence: Synthetic oligonucleotide
caggugaaagcgaugguga

SEQ ID NO: 2087448 - RNA, 19 nt, Artificial Sequence
  Description of Artificial Sequence: Synthetic oligonucleotide
uccucccuggugaucacca

SEQ ID NO: 2087449 - RNA, 19 nt, Artificial Sequence
  Description of Artificial Sequence: Synthetic oligonucleotide
uacgugugcaugccaguac

SEQ ID NO: 2087450 - RNA, 19 nt, Artificial Sequence
  Description of Artificial Sequence: Synthetic oligonucleotide
gaaagcgauggugauggca

SEQ ID NO: 2087451 - RNA, 19 nt, Artificial Sequence
  Description of Artificial Sequence: Synthetic oligonucleotide
uacuauugauucgggagaa

SEQ ID NO: 2087452 - RNA, 19 nt, Artificial Sequence
  Description of Artificial Sequence: Synthetic oligonucleotide
ugugcaugccaguacucau

SEQ ID NO: 2087453 - RNA, 19 nt, Artificial Sequence
  Description of Artificial Sequence: Synthetic oligonucleotide
acgugugcaugccaguacu

SEQ ID NO: 2087454 - RNA, 19 nt, Artificial Sequence
  Description of Artificial Sequence: Synthetic oligonucleotide
auucugcgaaucugcucgg

SEQ ID NO: 2087455 - RNA, 19 nt, Artificial Sequence
  Description of Artificial Sequence: Synthetic oligonucleotide
guaaagaaagagacucgac

SEQ ID NO: 2087456 - RNA, 19 nt, Artificial Sequence
  Description of Artificial Sequence: Synthetic oligonucleotide
cuauucugcgaaucugcuc

SEQ ID NO: 2087457 - RNA, 19 nt, Artificial Sequence
  Description of Artificial Sequence: Synthetic oligonucleotide
gacagccuacgcgaggcgg

SEQ ID NO: 2087458 - RNA, 19 nt, Artificial Sequence
  Description of Artificial Sequence: Synthetic oligonucleotide
aaguaauccgacagguaaa

SEQ ID NO: 2087459 - RNA, 19 nt, Artificial Sequence
  Description of Artificial Sequence: Synthetic oligonucleotide
uauccccaaaguaucugua

SEQ ID NO: 2087460 - RNA, 19 nt, Artificial Sequence
  Description of Artificial Sequence: Synthetic oligonucleotide
ugcagagcuucccuccgga

SEQ ID NO: 2087461 - RNA, 19 nt, Artificial Sequence
  Description of Artificial Sequence: Synthetic oligonucleotide
aguccucuaaguaauccga

SEQ ID NO: 2087462 - RNA, 19 nt, Artificial Sequence
  Description of Artificial Sequence: Synthetic oligonucleotide
aaguaucuguacagguuca

SEQ ID NO: 2087463 - RNA, 19 nt, Artificial Sequence
  Description of Artificial Sequence: Synthetic oligonucleotide
uggguccucgaugccaugg

SEQ ID NO: 2087464 - RNA, 19 nt, Artificial Sequence
  Description of Artificial Sequence: Synthetic oligonucleotide
cuuggugccguucgcgcgc

SEQ ID NO: 2087465 - RNA, 19 nt, Artificial Sequence
  Description of Artificial Sequence: Synthetic oligonucleotide
gguaaagaaagagacucga

SEQ ID NO: 2087466 - RNA, 19 nt, Artificial Sequence
  Description of Artificial Sequence: Synthetic oligonucleotide
acucgaccagcucugggcu

SEQ ID NO: 2087467 - RNA, 19 nt, Artificial Sequence
  Description of Artificial Sequence: Synthetic oligonucleotide
ccuagcuucguuacgugag

SEQ ID NO: 2087468 - RNA, 19 nt, Artificial Sequence
  Description of Artificial Sequence: Synthetic oligonucleotide
auagcgggugccccacagg

SEQ ID NO: 2087469 - RNA, 19 nt, Artificial Sequence
  Description of Artificial Sequence: Synthetic oligonucleotide
uugucuacgugugcaugcc

SEQ ID NO: 2087470 - RNA, 19 nt, Artificial Sequence
  Description of Artificial Sequence: Synthetic oligonucleotide
ucuacgugugcaugccagu

SEQ ID NO: 2087471 - RNA, 19 nt, Artificial Sequence
  Description of Artificial Sequence: Synthetic oligonucleotide
auacagcaaggaugcacug

SEQ ID NO: 2087472 - RNA, 19 nt, Artificial Sequence
  Description of Artificial Sequence: Synthetic oligonucleotide
ggaaugugaucagagcaag

SEQ ID NO: 2087473 - RNA, 19 nt, Artificial Sequence
  Description of Artificial Sequence: Synthetic oligonucleotide
gucuacgugugcaugccag

SEQ ID NO: 2087474 - RNA, 19 nt, Artificial Sequence
  Description of Artificial Sequence: Synthetic oligonucleotide
cuaggaccucaccucgacg

SEQ ID NO: 2087475 - RNA, 19 nt, Artificial Sequence
  Description of Artificial Sequence: Synthetic oligonucleotide
aggaccucaccucgacggg

SEQ ID NO: 2087476 - RNA, 19 nt, Artificial Sequence
  Description of Artificial Sequence: Synthetic oligonucleotide
uggaccuucugccgcacau

SEQ ID NO: 2087477 - RNA, 19 nt, Artificial Sequence
  Description of Artificial Sequence: Synthetic oligonucleotide
ugucuacgugugcaugcca

SEQ ID NO: 2087478 - RNA, 19 nt, Artificial Sequence
  Description of Artificial Sequence: Synthetic oligonucleotide
cagagcuucccuccggaac

SEQ ID NO: 2087479 - RNA, 19 nt, Artificial Sequence
  Description of Artificial Sequence: Synthetic oligonucleotide
uagaugccccuccauccga

SEQ ID NO: 2087480 - RNA, 19 nt, Artificial Sequence
  Description of Artificial Sequence: Synthetic oligonucleotide
caacaucgucaucaauccc

SEQ ID NO: 2087481 - RNA, 19 nt, Artificial Sequence
  Description of Artificial Sequence: Synthetic oligonucleotide
accuagcuucguuacguga

SEQ ID NO: 2087482 - RNA, 19 nt, Artificial Sequence
  Description of Artificial Sequence: Synthetic oligonucleotide
uccgauccaccuagggaga

SEQ ID NO: 2087483 - RNA, 19 nt, Artificial Sequence
  Description of Artificial Sequence: Synthetic oligonucleotide
caguacucaucgugagccg

SEQ ID NO: 2087484 - RNA, 19 nt, Artificial Sequence
  Description of Artificial Sequence: Synthetic oligonucleotide
uccauccgauccaccuagg

SEQ ID NO: 2087485 - RNA, 19 nt, Artificial Sequence
  Description of Artificial Sequence: Synthetic oligonucleotide
ccuauauaacuggaagucc

SEQ ID NO: 2087486 - RNA, 19 nt, Artificial Sequence
  Description of Artificial Sequence: Synthetic oligonucleotide
guaggucaccuugucuacg

SEQ ID NO: 2087487 - RNA, 19 nt, Artificial Sequence
  Description of Artificial Sequence: Synthetic oligonucleotide
agcgauggugauggcauag

SEQ ID NO: 2087488 - RNA, 19 nt, Artificial Sequence
  Description of Artificial Sequence: Synthetic oligonucleotide
aggaaugugaucagagcaa

SEQ ID NO: 2087489 - RNA, 19 nt, Artificial Sequence
  Description of Artificial Sequence: Synthetic oligonucleotide
cacaaagcgcccuccacca

SEQ ID NO: 2087490 - RNA, 19 nt, Artificial Sequence
  Description of Artificial Sequence: Synthetic oligonucleotide
cauagcgggugccccacag

SEQ ID NO: 2087491 - RNA, 19 nt, Artificial Sequence
  Description of Artificial Sequence: Synthetic oligonucleotide
uuggacccuuccuccauga

SEQ ID NO: 2087492 - RNA, 19 nt, Artificial Sequence
  Description of Artificial Sequence: Synthetic oligonucleotide
gacgggccaagacuucagc

SEQ ID NO: 2087493 - RNA, 19 nt, Artificial Sequence
  Description of Artificial Sequence: Synthetic oligonucleotide
uguuggacccuuccuccau

SEQ ID NO: 2087494 - RNA, 19 nt, Artificial Sequence
  Description of Artificial Sequence: Synthetic oligonucleotide
uacgugaguacuggguccu

SEQ ID NO: 2087495 - RNA, 19 nt, Artificial Sequence
  Description of Artificial Sequence: Synthetic oligonucleotide
aguacucaucgugagccgu

SEQ ID NO: 2087496 - RNA, 19 nt, Artificial Sequence
  Description of Artificial Sequence: Synthetic oligonucleotide
cauccgauccaccuaggga

SEQ ID NO: 2087497 - RNA, 19 nt, Artificial Sequence
  Description of Artificial Sequence: Synthetic oligonucleotide
ggauagaugccccuccauc

SEQ ID NO: 2087498 - RNA, 19 nt, Artificial Sequence
  Description of Artificial Sequence: Synthetic oligonucleotide
agaagaaugugggcuuugu

SEQ ID NO: 2087499 - RNA, 19 nt, Artificial Sequence
  Description of Artificial Sequence: Synthetic oligonucleotide
ugaguacuggguccucgau

SEQ ID NO: 2087500 - RNA, 19 nt, Artificial Sequence
  Description of Artificial Sequence: Synthetic oligonucleotide
agagacucgaccagcucug

SEQ ID NO: 2087501 - RNA, 19 nt, Artificial Sequence
  Description of Artificial Sequence: Synthetic oligonucleotide
ugcaggugaaagcgauggu

SEQ ID NO: 2087502 - RNA, 19 nt, Artificial Sequence
  Description of Artificial Sequence: Synthetic oligonucleotide
ucgaccagcucugggcucc

SEQ ID NO: 2087503 - RNA, 19 nt, Artificial Sequence
  Description of Artificial Sequence: Synthetic oligonucleotide
acuauugauucgggagaag

SEQ ID NO: 2087504 - RNA, 19 nt, Artificial Sequence
  Description of Artificial Sequence: Synthetic oligonucleotide
cccuauauaacuggaaguc

SEQ ID NO: 2087505 - RNA, 19 nt, Artificial Sequence
  Description of Artificial Sequence: Synthetic oligonucleotide
ucugggugguccccuccgc

SEQ ID NO: 2087506 - RNA, 19 nt, Artificial Sequence
  Description of Artificial Sequence: Synthetic oligonucleotide
caucgugagccgucugggc

SEQ ID NO: 2087507 - RNA, 19 nt, Artificial Sequence
  Description of Artificial Sequence: Synthetic oligonucleotide
gcaaggaugcacugaugcc

SEQ ID NO: 2087508 - RNA, 19 nt, Artificial Sequence
  Description of Artificial Sequence: Synthetic oligonucleotide
cuaagccccgggcaaccgc

SEQ ID NO: 2087509 - RNA, 19 nt, Artificial Sequence
  Description of Artificial Sequence: Synthetic oligonucleotide
gcgccauugggccaggcag

SEQ ID NO: 2087510 - RNA, 19 nt, Artificial Sequence
  Description of Artificial Sequence: Synthetic oligonucleotide
ugggugguccccuccgcug

SEQ ID NO: 2087511 - RNA, 19 nt, Artificial Sequence
  Description of Artificial Sequence: Synthetic oligonucleotide
guuggacccuuccuccaug

SEQ ID NO: 2087512 - RNA, 19 nt, Artificial Sequence
  Description of Artificial Sequence: Synthetic oligonucleotide
guaauccgacagguaaagc

SEQ ID NO: 2087513 - RNA, 19 nt, Artificial Sequence
  Description of Artificial Sequence: Synthetic oligonucleotide
guaaagcagugaaguguag

SEQ ID NO: 2087514 - RNA, 19 nt, Artificial Sequence
  Description of Artificial Sequence: Synthetic oligonucleotide
cugcuauucugcgaaucug

SEQ ID NO: 2087515 - RNA, 19 nt, Artificial Sequence
  Description of Artificial Sequence: Synthetic oligonucleotide
acagccuacgcgaggcggg

SEQ ID NO: 2087516 - RNA, 19 nt, Artificial Sequence
  Description of Artificial Sequence: Synthetic oligonucleotide
ccuucuaggaccucaccuc

SEQ ID NO: 2087517 - RNA, 19 nt, Artificial Sequence
  Description of Artificial Sequence: Synthetic oligonucleotide
ggacccuuccuccaugaac

SEQ ID NO: 2087518 - RNA, 19 nt, Artificial Sequence
  Description of Artificial Sequence: Synthetic oligonucleotide
gaaugugaucagagcaaga

SEQ ID NO: 2087519 - RNA, 19 nt, Artificial Sequence
  Description of Artificial Sequence: Synthetic oligonucleotide
caccaugucagugacaccu

SEQ ID NO: 2087520 - RNA, 19 nt, Artificial Sequence
  Description of Artificial Sequence: Synthetic oligonucleotide
uggugaucaccaugucagu

SEQ ID NO: 2087521 - RNA, 19 nt, Artificial Sequence
  Description of Artificial Sequence: Synthetic oligonucleotide
acaucccuauauaacugga

SEQ ID NO: 2087522 - RNA, 19 nt, Artificial Sequence
  Description of Artificial Sequence: Synthetic oligonucleotide
acaucgucaucaaucccca

SEQ ID NO: 2087523 - RNA, 19 nt, Artificial Sequence
  Description of Artificial Sequence: Synthetic oligonucleotide
uccaggauagaugccccuc

SEQ ID NO: 2087524 - RNA, 19 nt, Artificial Sequence
  Description of Artificial Sequence: Synthetic oligonucleotide
cuaaguaauccgacaggua

SEQ ID NO: 2087525 - RNA, 19 nt, Artificial Sequence
  Description of Artificial Sequence: Synthetic oligonucleotide
ugagccgucugggcuuccg

SEQ ID NO: 2087526 - RNA, 19 nt, Artificial Sequence
  Description of Artificial Sequence: Synthetic oligonucleotide
aggauagaugccccuccau

SEQ ID NO: 2087527 - RNA, 19 nt, Artificial Sequence
  Description of Artificial Sequence: Synthetic oligonucleotide
gaccucaccucgacgggcc

SEQ ID NO: 2087528 - RNA, 19 nt, Artificial Sequence
  Description of Artificial Sequence: Synthetic oligonucleotide
ugccgcacaucccuauaua

SEQ ID NO: 2087529 - RNA, 19 nt, Artificial Sequence
  Description of Artificial Sequence: Synthetic oligonucleotide
caucccuauauaacuggaa

SEQ ID NO: 2087530 - RNA, 19 nt, Artificial Sequence
  Description of Artificial Sequence: Synthetic oligonucleotide
uacucaucgugagccgucu

SEQ ID NO: 2087531 - RNA, 19 nt, Artificial Sequence
  Description of Artificial Sequence: Synthetic oligonucleotide
gggaaccucaaugaaccug

SEQ ID NO: 2087532 - RNA, 19 nt, Artificial Sequence
  Description of Artificial Sequence: Synthetic oligonucleotide
gagacucgaccagcucugg

SEQ ID NO: 2087533 - RNA, 19 nt, Artificial Sequence
  Description of Artificial Sequence: Synthetic oligonucleotide
aaggagccguaggucaccu

SEQ ID NO: 2087534 - RNA, 19 nt, Artificial Sequence
  Description of Artificial Sequence: Synthetic oligonucleotide
aaucuucggugaccaucau

SEQ ID NO: 2087535 - RNA, 19 nt, Artificial Sequence
  Description of Artificial Sequence: Synthetic oligonucleotide
gccuucaaaucuucgguga

SEQ ID NO: 2087536 - RNA, 19 nt, Artificial Sequence
  Description of Artificial Sequence: Synthetic oligonucleotide
agccgcuaagccccgggca

SEQ ID NO: 2087537 - RNA, 19 nt, Artificial Sequence
  Description of Artificial Sequence: Synthetic oligonucleotide
agaccuacuccaagggcca

SEQ ID NO: 2087538 - RNA, 19 nt, Artificial Sequence
  Description of Artificial Sequence: Synthetic oligonucleotide
guugcaggugaaagcgaug

SEQ ID NO: 2087539 - RNA, 19 nt, Artificial Sequence
  Description of Artificial Sequence: Synthetic oligonucleotide
acccaaccuagcuucguua

SEQ ID NO: 2087540 - RNA, 19 nt, Artificial Sequence
  Description of Artificial Sequence: Synthetic oligonucleotide
gaaccucaaugaaccugcc

SEQ ID NO: 2087541 - RNA, 19 nt, Artificial Sequence
  Description of Artificial Sequence: Synthetic oligonucleotide
gugaguacuggguccucga

SEQ ID NO: 2087542 - RNA, 19 nt, Artificial Sequence
  Description of Artificial Sequence: Synthetic oligonucleotide
ucugccgcacaucccuaua

SEQ ID NO: 2087543 - RNA, 19 nt, Artificial Sequence
  Description of Artificial Sequence: Synthetic oligonucleotide
gagccgcuaagccccgggc

SEQ ID NO: 2087544 - RNA, 19 nt, Artificial Sequence
  Description of Artificial Sequence: Synthetic oligonucleotide
caccaaaguccucuaagua

SEQ ID NO: 2087545 - RNA, 19 nt, Artificial Sequence
  Description of Artificial Sequence: Synthetic oligonucleotide
uucugcgaaucugcucggc

SEQ ID NO: 2087546 - RNA, 19 nt, Artificial Sequence
  Description of Artificial Sequence: Synthetic oligonucleotide
aagcgauggugauggcaua

SEQ ID NO: 2087547 - RNA, 19 nt, Artificial Sequence
  Description of Artificial Sequence: Synthetic oligonucleotide
ucgugagccgucugggcuu

SEQ ID NO: 2087548 - RNA, 19 nt, Artificial Sequence
  Description of Artificial Sequence: Synthetic oligonucleotide
gcgggugccccacaggacc

SEQ ID NO: 2087549 - RNA, 19 nt, Artificial Sequence
  Description of Artificial Sequence: Synthetic oligonucleotide
gacuacuccagagcaggaa

SEQ ID NO: 2087550 - RNA, 19 nt, Artificial Sequence
  Description of Artificial Sequence: Synthetic oligonucleotide
gcgcccuccaccaaagucc

SEQ ID NO: 2087551 - RNA, 19 nt, Artificial Sequence
  Description of Artificial Sequence: Synthetic oligonucleotide
accgccgcgacagccuacg

SEQ ID NO: 2087552 - RNA, 19 nt, Artificial Sequence
  Description of Artificial Sequence: Synthetic oligonucleotide
gcagggaaccucaaugaac

SEQ ID NO: 2087553 - RNA, 19 nt, Artificial Sequence
  Description of Artificial Sequence: Synthetic oligonucleotide
uucugccgcacaucccuau

SEQ ID NO: 2087554 - RNA, 19 nt, Artificial Sequence
  Description of Artificial Sequence: Synthetic oligonucleotide
ccuucaaaucuucggugac

SEQ ID NO: 2087555 - RNA, 19 nt, Artificial Sequence
  Description of Artificial Sequence: Synthetic oligonucleotide
ccaaccuagcuucguuacg

SEQ ID NO: 2087556 - RNA, 19 nt, Artificial Sequence
  Description of Artificial Sequence: Synthetic oligonucleotide
ggacacgagagccgcuaag

SEQ ID NO: 2087557 - RNA, 19 nt, Artificial Sequence
  Description of Artificial Sequence: Synthetic oligonucleotide
ccucaaugaaccugccuuc

SEQ ID NO: 2087558 - RNA, 19 nt, Artificial Sequence
  Description of Artificial Sequence: Synthetic oligonucleotide
cgauggugauggcauagcg

SEQ ID NO: 2087559 - RNA, 19 nt, Artificial Sequence
  Description of Artificial Sequence: Synthetic oligonucleotide
gaucagagcaagaccuacu

SEQ ID NO: 2087560 - RNA, 19 nt, Artificial Sequence
  Description of Artificial Sequence: Synthetic oligonucleotide
gccgcgacagccuacgcga

SEQ ID NO: 2087561 - RNA, 19 nt, Artificial Sequence
  Description of Artificial Sequence: Synthetic oligonucleotide
auccgacagguaaagcagu

SEQ ID NO: 2087562 - RNA, 19 nt, Artificial Sequence
  Description of Artificial Sequence: Synthetic oligonucleotide
ucucugcuauucugcgaau

SEQ ID NO: 2087563 - RNA, 19 nt, Artificial Sequence
  Description of Artificial Sequence: Synthetic oligonucleotide
ucugggcuuccguacuauu

SEQ ID NO: 2087564 - RNA, 19 nt, Artificial Sequence
  Description of Artificial Sequence: Synthetic oligonucleotide
cucaccucgacgggccaag

SEQ ID NO: 2087565 - RNA, 19 nt, Artificial Sequence
  Description of Artificial Sequence: Synthetic oligonucleotide
cagccuucaaaucuucggu

SEQ ID NO: 2087566 - RNA, 19 nt, Artificial Sequence
  Description of Artificial Sequence: Synthetic oligonucleotide
ccgcacaucccuauauaac

SEQ ID NO: 2087567 - RNA, 19 nt, Artificial Sequence
  Description of Artificial Sequence: Synthetic oligonucleotide
aagcgcccuccaccaaagu

SEQ ID NO: 2087568 - RNA, 19 nt, Artificial Sequence
  Description of Artificial Sequence: Synthetic oligonucleotide
ccagacuacuccagagcag

SEQ ID NO: 2087569 - RNA, 19 nt, Artificial Sequence
  Description of Artificial Sequence: Synthetic oligonucleotide
ccauccgauccaccuaggg

SEQ ID NO: 2087570 - RNA, 19 nt, Artificial Sequence
  Description of Artificial Sequence: Synthetic oligonucleotide
gaugccccuccauccgauc

SEQ ID NO: 2087571 - RNA, 19 nt, Artificial Sequence
  Description of Artificial Sequence: Synthetic oligonucleotide
gugcaugccaguacucauc

SEQ ID NO: 2087572 - RNA, 19 nt, Artificial Sequence
  Description of Artificial Sequence: Synthetic oligonucleotide
uagcuucguuacgugagua

SEQ ID NO: 2087573 - RNA, 19 nt, Artificial Sequence
  Description of Artificial Sequence: Synthetic oligonucleotide
uggacccuuccuccaugaa

SEQ ID NO: 2087574 - RNA, 19 nt, Artificial Sequence
  Description of Artificial Sequence: Synthetic oligonucleotide
agugcaaguccaggauaga

SEQ ID NO: 2087575 - RNA, 19 nt, Artificial Sequence
  Description of Artificial Sequence: Synthetic oligonucleotide
cccagacuacuccagagca

SEQ ID NO: 2087576 - RNA, 19 nt, Artificial Sequence
  Description of Artificial Sequence: Synthetic oligonucleotide
caaccuagcuucguuacgu

SEQ ID NO: 2087577 - RNA, 19 nt, Artificial Sequence
  Description of Artificial Sequence: Synthetic oligonucleotide
ccuccggaacucugggugg

SEQ ID NO: 2087578 - RNA, 19 nt, Artificial Sequence
  Description of Artificial Sequence: Synthetic oligonucleotide
guacucaucgugagccguc

SEQ ID NO: 2087579 - RNA, 19 nt, Artificial Sequence
  Description of Artificial Sequence: Synthetic oligonucleotide
caccucgacgggccaagac

SEQ ID NO: 2087580 - RNA, 19 nt, Artificial Sequence
  Description of Artificial Sequence: Synthetic oligonucleotide
auugggccaggcagccgcg

SEQ ID NO: 2087581 - RNA, 19 nt, Artificial Sequence
  Description of Artificial Sequence: Synthetic oligonucleotide
agcgggugccccacaggac

SEQ ID NO: 2087582 - RNA, 19 nt, Artificial Sequence
  Description of Artificial Sequence: Synthetic oligonucleotide
cuguuggacccuuccucca

SEQ ID NO: 2087583 - RNA, 19 nt, Artificial Sequence
  Description of Artificial Sequence: Synthetic oligonucleotide
ccccagacuacuccagagc

SEQ ID NO: 2087584 - RNA, 19 nt, Artificial Sequence
  Description of Artificial Sequence: Synthetic oligonucleotide
ccuggugaucaccauguca

SEQ ID NO: 2087585 - RNA, 19 nt, Artificial Sequence
  Description of Artificial Sequence: Synthetic oligonucleotide
aaccgccgcgacagccuac

SEQ ID NO: 2087586 - RNA, 19 nt, Artificial Sequence
  Description of Artificial Sequence: Synthetic oligonucleotide
acaaagcgcccuccaccaa

SEQ ID NO: 2087587 - RNA, 19 nt, Artificial Sequence
  Description of Artificial Sequence: Synthetic oligonucleotide
uccaagggccacaguccuu

SEQ ID NO: 2087588 - RNA, 19 nt, Artificial Sequence
  Description of Artificial Sequence: Synthetic oligonucleotide
cucgaccagcucugggcuc

SEQ ID NO: 2087589 - RNA, 19 nt, Artificial Sequence
  Description of Artificial Sequence: Synthetic oligonucleotide
agccgucugggcuuccgua

SEQ ID NO: 2087590 - RNA, 19 nt, Artificial Sequence
  Description of Artificial Sequence: Synthetic oligonucleotide
ggucaccuugucuacgugu

SEQ ID NO: 2087591 - RNA, 19 nt, Artificial Sequence
  Description of Artificial Sequence: Synthetic oligonucleotide
accuacuccaagggccaca

SEQ ID NO: 2087592 - RNA, 19 nt, Artificial Sequence
  Description of Artificial Sequence: Synthetic oligonucleotide
gccgcacaucccuauauaa

SEQ ID NO: 2087593 - RNA, 19 nt, Artificial Sequence
  Description of Artificial Sequence: Synthetic oligonucleotide
ggaacucuggguggucccc

SEQ ID NO: 2087594 - RNA, 19 nt, Artificial Sequence
  Description of Artificial Sequence: Synthetic oligonucleotide
agacuacuccagagcagga

SEQ ID NO: 2087595 - RNA, 19 nt, Artificial Sequence
  Description of Artificial Sequence: Synthetic oligonucleotide
cuccgcugaggcgccauug

SEQ ID NO: 2087596 - RNA, 19 nt, Artificial Sequence
  Description of Artificial Sequence: Synthetic oligonucleotide
uuggugccguucgcgcgcc

SEQ ID NO: 2087597 - RNA, 19 nt, Artificial Sequence
  Description of Artificial Sequence: Synthetic oligonucleotide
guucgcgcgccggcgcucg

SEQ ID NO: 2087598 - RNA, 19 nt, Artificial Sequence
  Description of Artificial Sequence: Synthetic oligonucleotide
gccgucugggcuuccguac

SEQ ID NO: 2087599 - RNA, 19 nt, Artificial Sequence
  Description of Artificial Sequence: Synthetic oligonucleotide
caaaagcuuuggcaauggu

SEQ ID NO: 2087600 - RNA, 19 nt, Artificial Sequence
  Description of Artificial Sequence: Synthetic oligonucleotide
cuacgugugcaugccagua

SEQ ID NO: 2087601 - RNA, 19 nt, Artificial Sequence
  Description of Artificial Sequence: Synthetic oligonucleotide
gugccguucgcgcgccggc

SEQ ID NO: 2087602 - RNA, 19 nt, Artificial Sequence
  Description of Artificial Sequence: Synthetic oligonucleotide
gguccucgaugccaugguc

SEQ ID NO: 2087603 - RNA, 19 nt, Artificial Sequence
  Description of Artificial Sequence: Synthetic oligonucleotide
acgugaguacuggguccuc

SEQ ID NO: 2087604 - RNA, 19 nt, Artificial Sequence
  Description of Artificial Sequence: Synthetic oligonucleotide
ggaccucaccucgacgggc

SEQ ID NO: 2087605 - RNA, 19 nt, Artificial Sequence
  Description of Artificial Sequence: Synthetic oligonucleotide
gcuucguuacgugaguacu

SEQ ID NO: 2087606 - RNA, 19 nt, Artificial Sequence
  Description of Artificial Sequence: Synthetic oligonucleotide
ggugccguucgcgcgccgg

SEQ ID NO: 2087607 - RNA, 19 nt, Artificial Sequence
  Description of Artificial Sequence: Synthetic oligonucleotide
cuccaagggccacaguccu

SEQ ID NO: 2087608 - RNA, 19 nt, Artificial Sequence
  Description of Artificial Sequence: Synthetic oligonucleotide
gagagccgcuaagccccgg

SEQ ID NO: 2087609 - RNA, 19 nt, Artificial Sequence
  Description of Artificial Sequence: Synthetic oligonucleotide
gugaucagagcaagaccua

SEQ ID NO: 2087610 - RNA, 19 nt, Artificial Sequence
  Description of Artificial Sequence: Synthetic oligonucleotide
accucaccucgacgggcca

SEQ ID NO: 2087611 - RNA, 19 nt, Artificial Sequence
  Description of Artificial Sequence: Synthetic oligonucleotide
uggugccguucgcgcgccg

SEQ ID NO: 2087612 - RNA, 19 nt, Artificial Sequence
  Description of Artificial Sequence: Synthetic oligonucleotide
gugcaaguccaggauagau

SEQ ID NO: 2087613 - RNA, 19 nt, Artificial Sequence
  Description of Artificial Sequence: Synthetic oligonucleotide
gacccaaccuagcuucguu

SEQ ID NO: 2087614 - RNA, 19 nt, Artificial Sequence
  Description of Artificial Sequence: Synthetic oligonucleotide
ucaccucgacgggccaaga

SEQ ID NO: 2087615 - RNA, 19 nt, Artificial Sequence
  Description of Artificial Sequence: Synthetic oligonucleotide
ccaacagacagggccccag

SEQ ID NO: 2087616 - RNA, 19 nt, Artificial Sequence
  Description of Artificial Sequence: Synthetic oligonucleotide
gcuaagccccgggcaaccg

SEQ ID NO: 2087617 - RNA, 19 nt, Artificial Sequence
  Description of Artificial Sequence: Synthetic oligonucleotide
ggugguccccuccgcugag

SEQ ID NO: 2087618 - RNA, 19 nt, Artificial Sequence
  Description of Artificial Sequence: Synthetic oligonucleotide
ccaagacuucagcaacauc

SEQ ID NO: 2087619 - RNA, 19 nt, Artificial Sequence
  Description of Artificial Sequence: Synthetic oligonucleotide
uucgcgcgccggcgcucgg

SEQ ID NO: 2087620 - RNA, 19 nt, Artificial Sequence
  Description of Artificial Sequence: Synthetic oligonucleotide
ccgcugaggcgccauuggg

SEQ ID NO: 2087621 - RNA, 19 nt, Artificial Sequence
  Description of Artificial Sequence: Synthetic oligonucleotide
augugggcuuugucagaua

SEQ ID NO: 2087622 - RNA, 19 nt, Artificial Sequence
  Description of Artificial Sequence: Synthetic oligonucleotide
cgggcaaccgccgcgacag

SEQ ID NO: 2087623 - RNA, 19 nt, Artificial Sequence
  Description of Artificial Sequence: Synthetic oligonucleotide
cgugaguacuggguccucg

SEQ ID NO: 2087624 - RNA, 19 nt, Artificial Sequence
  Description of Artificial Sequence: Synthetic oligonucleotide
agaugccccuccauccgau

SEQ ID NO: 2087625 - RNA, 19 nt, Artificial Sequence
  Description of Artificial Sequence: Synthetic oligonucleotide
cgacagguaaagcagugaa

SEQ ID NO: 2087626 - RNA, 19 nt, Artificial Sequence
  Description of Artificial Sequence: Synthetic oligonucleotide
cccacaggaccuucuccac

SEQ ID NO: 2087627 - RNA, 19 nt, Artificial Sequence
  Description of Artificial Sequence: Synthetic oligonucleotide
ggccaagacuucagcaaca

SEQ ID NO: 2087628 - RNA, 19 nt, Artificial Sequence
  Description of Artificial Sequence: Synthetic oligonucleotide
cacaguccuuagccauguc

SEQ ID NO: 2087629 - RNA, 19 nt, Artificial Sequence
  Description of Artificial Sequence: Synthetic oligonucleotide
ccguacuauugauucggga

SEQ ID NO: 2087630 - RNA, 19 nt, Artificial Sequence
  Description of Artificial Sequence: Synthetic oligonucleotide
ggcgccauugggccaggca

SEQ ID NO: 2087631 - RNA, 19 nt, Artificial Sequence
  Description of Artificial Sequence: Synthetic oligonucleotide
gaacucugggugguccccu

SEQ ID NO: 2087632 - RNA, 19 nt, Artificial Sequence
  Description of Artificial Sequence: Synthetic oligonucleotide
gggugguccccuccgcuga

SEQ ID NO: 2087633 - RNA, 19 nt, Artificial Sequence
  Description of Artificial Sequence: Synthetic oligonucleotide
ucuccacccggugcagguu

SEQ ID NO: 2087634 - RNA, 19 nt, Artificial Sequence
  Description of Artificial Sequence: Synthetic oligonucleotide
guccaggauagaugccccu

SEQ ID NO: 2087635 - RNA, 19 nt, Artificial Sequence
  Description of Artificial Sequence: Synthetic oligonucleotide
gccgcuaagccccgggcaa

SEQ ID NO: 2087636 - RNA, 19 nt, Artificial Sequence
  Description of Artificial Sequence: Synthetic oligonucleotide
gcuauucugcgaaucugcu

SEQ ID NO: 2087637 - RNA, 19 nt, Artificial Sequence
  Description of Artificial Sequence: Synthetic oligonucleotide
cuucggugaccaucauagu

SEQ ID NO: 2087638 - RNA, 19 nt, Artificial Sequence
  Description of Artificial Sequence: Synthetic oligonucleotide
cuucugccgcacaucccua

SEQ ID NO: 2087639 - RNA, 19 nt, Artificial Sequence
  Description of Artificial Sequence: Synthetic oligonucleotide
ggccacaguccuuagccau

SEQ ID NO: 2087640 - RNA, 19 nt, Artificial Sequence
  Description of Artificial Sequence: Synthetic oligonucleotide
ggcauagcgggugccccac

SEQ ID NO: 2087641 - RNA, 19 nt, Artificial Sequence
  Description of Artificial Sequence: Synthetic oligonucleotide
cgccgcgacagccuacgcg

SEQ ID NO: 2087642 - RNA, 19 nt, Artificial Sequence
  Description of Artificial Sequence: Synthetic oligonucleotide
cguuacgugaguacugggu

SEQ ID NO: 2087643 - RNA, 19 nt, Artificial Sequence
  Description of Artificial Sequence: Synthetic oligonucleotide
gagccgucugggcuuccgu

SEQ ID NO: 2087644 - RNA, 19 nt, Artificial Sequence
  Description of Artificial Sequence: Synthetic oligonucleotide
aggagccguaggucaccuu

SEQ ID NO: 2087645 - RNA, 19 nt, Artificial Sequence
  Description of Artificial Sequence: Synthetic oligonucleotide
cugccgcacaucccuauau

SEQ ID NO: 2087646 - RNA, 19 nt, Artificial Sequence
  Description of Artificial Sequence: Synthetic oligonucleotide
cgugugcaugccaguacuc

SEQ ID NO: 2087647 - RNA, 19 nt, Artificial Sequence
  Description of Artificial Sequence: Synthetic oligonucleotide
accugccuucuaggaccuc

SEQ ID NO: 2087648 - RNA, 19 nt, Artificial Sequence
  Description of Artificial Sequence: Synthetic oligonucleotide
ggguugcaggugaaagcga

SEQ ID NO: 2087649 - RNA, 19 nt, Artificial Sequence
  Description of Artificial Sequence: Synthetic oligonucleotide
cgggccaagacuucagcaa

SEQ ID NO: 2087650 - RNA, 19 nt, Artificial Sequence
  Description of Artificial Sequence: Synthetic oligonucleotide
cagagcagggaaccucaau

SEQ ID NO: 2087651 - RNA, 19 nt, Artificial Sequence
  Description of Artificial Sequence: Synthetic oligonucleotide
ccgauccaccuagggagag

SEQ ID NO: 2087652 - RNA, 19 nt, Artificial Sequence
  Description of Artificial Sequence: Synthetic oligonucleotide
cgacgggccaagacuucag

SEQ ID NO: 2087653 - RNA, 19 nt, Artificial Sequence
  Description of Artificial Sequence: Synthetic oligonucleotide
cacccggugcagguucuca

SEQ ID NO: 2087654 - RNA, 19 nt, Artificial Sequence
  Description of Artificial Sequence: Synthetic oligonucleotide
caaccgccgcgacagccua

SEQ ID NO: 2087655 - RNA, 19 nt, Artificial Sequence
  Description of Artificial Sequence: Synthetic oligonucleotide
gggacacgagagccgcuaa

SEQ ID NO: 2087656 - RNA, 19 nt, Artificial Sequence
  Description of Artificial Sequence: Synthetic oligonucleotide
cccggugcagguucucaga

SEQ ID NO: 2087657 - RNA, 19 nt, Artificial Sequence
  Description of Artificial Sequence: Synthetic oligonucleotide
ggggacacgagagccgcua

SEQ ID NO: 2087658 - RNA, 19 nt, Artificial Sequence
  Description of Artificial Sequence: Synthetic oligonucleotide
gaccagcucugggcuccac

SEQ ID NO: 2087659 - RNA, 19 nt, Artificial Sequence
  Description of Artificial Sequence: Synthetic oligonucleotide
cgagagccgcuaagccccg

SEQ ID NO: 2087660 - RNA, 19 nt, Artificial Sequence
  Description of Artificial Sequence: Synthetic oligonucleotide
gggcuuccguacuauugau

SEQ ID NO: 2087661 - RNA, 19 nt, Artificial Sequence
  Description of Artificial Sequence: Synthetic oligonucleotide
ccgcgacagccuacgcgag

SEQ ID NO: 2087662 - RNA, 19 nt, Artificial Sequence
  Description of Artificial Sequence: Synthetic oligonucleotide
gggccccagagugcaaguc

SEQ ID NO: 2087663 - RNA, 19 nt, Artificial Sequence
  Description of Artificial Sequence: Synthetic oligonucleotide
cagcaacaucgucaucaau

SEQ ID NO: 2087664 - RNA, 19 nt, Artificial Sequence
  Description of Artificial Sequence: Synthetic oligonucleotide
gucugggcuuccguacuau

SEQ ID NO: 2087665 - RNA, 19 nt, Artificial Sequence
  Description of Artificial Sequence: Synthetic oligonucleotide
ccuccauccgauccaccua

SEQ ID NO: 2087666 - RNA, 19 nt, Artificial Sequence
  Description of Artificial Sequence: Synthetic oligonucleotide
cccuggugaucaccauguc

SEQ ID NO: 2087667 - RNA, 19 nt, Artificial Sequence
  Description of Artificial Sequence: Synthetic oligonucleotide
cgcgccggcgcucggcugc

SEQ ID NO: 2087668 - RNA, 19 nt, Artificial Sequence
  Description of Artificial Sequence: Synthetic oligonucleotide
gcauagcgggugccccaca

SEQ ID NO: 2087669 - RNA, 19 nt, Artificial Sequence
  Description of Artificial Sequence: Synthetic oligonucleotide
gugagccgucugggcuucc

SEQ ID NO: 2087670 - RNA, 19 nt, Artificial Sequence
  Description of Artificial Sequence: Synthetic oligonucleotide
gcaaccgccgcgacagccu

SEQ ID NO: 2087671 - RNA, 19 nt, Artificial Sequence
  Description of Artificial Sequence: Synthetic oligonucleotide
gcagccgguccuucuuggu

SEQ ID NO: 2087672 - RNA, 19 nt, Artificial Sequence
  Description of Artificial Sequence: Synthetic oligonucleotide
ccgcuaagccccgggcaac

SEQ ID NO: 2087673 - RNA, 19 nt, Artificial Sequence
  Description of Artificial Sequence: Synthetic oligonucleotide
cuacuccaagggccacagu

SEQ ID NO: 2087674 - RNA, 19 nt, Artificial Sequence
  Description of Artificial Sequence: Synthetic oligonucleotide
ggcuuccguacuauugauu

SEQ ID NO: 2087675 - RNA, 19 nt, Artificial Sequence
  Description of Artificial Sequence: Synthetic oligonucleotide
gggcaaccgccgcgacagc

SEQ ID NO: 2087676 - RNA, 19 nt, Artificial Sequence
  Description of Artificial Sequence: Synthetic oligonucleotide
cggugaccaucauaguccu

SEQ ID NO: 2087677 - RNA, 19 nt, Artificial Sequence
  Description of Artificial Sequence: Synthetic oligonucleotide
ccaccuagggagagccccu

SEQ ID NO: 2087678 - RNA, 19 nt, Artificial Sequence
  Description of Artificial Sequence: Synthetic oligonucleotide
ccgggcaaccgccgcgaca

SEQ ID NO: 2087679 - RNA, 19 nt, Artificial Sequence
  Description of Artificial Sequence: Synthetic oligonucleotide
cacuguccuguuggacccu

SEQ ID NO: 2087680 - RNA, 19 nt, Artificial Sequence
  Description of Artificial Sequence: Synthetic oligonucleotide
cgugagccgucugggcuuc

SEQ ID NO: 2087681 - RNA, 19 nt, Artificial Sequence
  Description of Artificial Sequence: Synthetic oligonucleotide
ccgucugggcuuccguacu

SEQ ID NO: 2087682 - RNA, 19 nt, Artificial Sequence
  Description of Artificial Sequence: Synthetic oligonucleotide
cggcgcucggcugcagagc

SEQ ID NO: 2087683 - RNA, 19 nt, Artificial Sequence
  Description of Artificial Sequence: Synthetic oligonucleotide
ccgccgcgacagccuacgc

SEQ ID NO: 2087684 - RNA, 19 nt, Artificial Sequence
  Description of Artificial Sequence: Synthetic oligonucleotide
cgcccuccaccaaaguccu

SEQ ID NO: 2087685 - RNA, 19 nt, Artificial Sequence
  Description of Artificial Sequence: Synthetic oligonucleotide
cccgggcaaccgccgcgac

SEQ ID NO: 2087686 - RNA, 19 nt, Artificial Sequence
  Description of Artificial Sequence: Synthetic oligonucleotide
ccgaggcagccgguccuuc

SEQ ID NO: 2087687 - RNA, 19 nt, Artificial Sequence
  Description of Artificial Sequence: Synthetic oligonucleotide
ccucaccucgacgggccaa

SEQ ID NO: 2087688 - RNA, 19 nt, Artificial Sequence
  Description of Artificial Sequence: Synthetic oligonucleotide
cgucugggcuuccguacua

SEQ ID NO: 2087689 - RNA, 19 nt, Artificial Sequence
  Description of Artificial Sequence: Synthetic oligonucleotide
ccacccggugcagguucuc

SEQ ID NO: 2087690 - RNA, 19 nt, Artificial Sequence
  Description of Artificial Sequence: Synthetic oligonucleotide
ccccgggcaaccgccgcga

SEQ ID NO: 2087691 - RNA, 19 nt, Artificial Sequence
  Description of Artificial Sequence: Synthetic oligonucleotide
ccucccuggugaucaccau

SEQ ID NO: 2087692 - RNA, 19 nt, Artificial Sequence
  Description of Artificial Sequence: Synthetic oligonucleotide
gcccuccaccaaaguccuc

SEQ ID NO: 2087693 - RNA, 19 nt, Artificial Sequence
  Description of Artificial Sequence: Synthetic oligonucleotide
cguucgcgcgccggcgcuc

SEQ ID NO: 2087694 - RNA, 19 nt, Artificial Sequence
  Description of Artificial Sequence: Synthetic oligonucleotide
ccguucgcgcgccggcgcu

SEQ ID NO: 2087695 - RNA, 19 nt, Artificial Sequence
  Description of Artificial Sequence: Synthetic oligonucleotide
cgaccagcucugggcucca

SEQ ID NO: 2087696 - RNA, 19 nt, Artificial Sequence
  Description of Artificial Sequence: Synthetic oligonucleotide
ccuccgcugaggcgccauu

SEQ ID NO: 2087697 - RNA, 19 nt, Artificial Sequence
  Description of Artificial Sequence: Synthetic oligonucleotide
cccuccgcugaggcgccau

SEQ ID NO: 2087698 - RNA, 19 nt, Artificial Sequence
  Description of Artificial Sequence: Synthetic oligonucleotide
gcgcucggcugcagagcuu

SEQ ID NO: 2087699 - RNA, 19 nt, Artificial Sequence
  Description of Artificial Sequence: Synthetic oligonucleotide
aauaaucucagucaugauc

SEQ ID NO: 2087700 - RNA, 19 nt, Artificial Sequence
  Description of Artificial Sequence: Synthetic oligonucleotide
aacaauaccaucuccacuc

SEQ ID NO: 2087701 - RNA, 19 nt, Artificial Sequence
  Description of Artificial Sequence: Synthetic oligonucleotide
aauauagaugcucuucucg

SEQ ID NO: 2087702 - RNA, 19 nt, Artificial Sequence
  Description of Artificial Sequence: Synthetic oligonucleotide
ucugauaucuucuugaaca

SEQ ID NO: 2087703 - RNA, 19 nt, Artificial Sequence
  Description of Artificial Sequence: Synthetic oligonucleotide
uuaauaaugacucgugacc

SEQ ID NO: 2087704 - RNA, 19 nt, Artificial Sequence
  Description of Artificial Sequence: Synthetic oligonucleotide
uuuauugggaauaaucuca

SEQ ID NO: 2087705 - RNA, 19 nt, Artificial Sequence
  Description of Artificial Sequence: Synthetic oligonucleotide
aaugacucgugaccuaugc

SEQ ID NO: 2087706 - RNA, 19 nt, Artificial Sequence
  Description of Artificial Sequence: Synthetic oligonucleotide
uucgaaaccacacagaaua

SEQ ID NO: 2087707 - RNA, 19 nt, Artificial Sequence
  Description of Artificial Sequence: Synthetic oligonucleotide
ucuuucuucuuuacgacgg

SEQ ID NO: 2087708 - RNA, 19 nt, Artificial Sequence
  Description of Artificial Sequence: Synthetic oligonucleotide
aaaauaaggcucaauuugg

SEQ ID NO: 2087709 - RNA, 19 nt, Artificial Sequence
  Description of Artificial Sequence: Synthetic oligonucleotide
auauagaugcucuucucgc

SEQ ID NO: 2087710 - RNA, 19 nt, Artificial Sequence
  Description of Artificial Sequence: Synthetic oligonucleotide
uguuuugacauugagagga

SEQ ID NO: 2087711 - RNA, 19 nt, Artificial Sequence
  Description of Artificial Sequence: Synthetic oligonucleotide
uccguuuuaauaaugacuc

SEQ ID NO: 2087712 - RNA, 19 nt, Artificial Sequence
  Description of Artificial Sequence: Synthetic oligonucleotide
acagaauacauacaggucu

SEQ ID NO: 2087713 - RNA, 19 nt, Artificial Sequence
  Description of Artificial Sequence: Synthetic oligonucleotide
caucuuuuggagcagagcg

SEQ ID NO: 2087714 - RNA, 19 nt, Artificial Sequence
  Description of Artificial Sequence: Synthetic oligonucleotide
uuuaauaaugacucgugac

SEQ ID NO: 2087715 - RNA, 19 nt, Artificial Sequence
  Description of Artificial Sequence: Synthetic oligonucleotide
agauagaucuucuuuaucu

SEQ ID NO: 2087716 - RNA, 19 nt, Artificial Sequence
  Description of Artificial Sequence: Synthetic oligonucleotide
ucuucuuuaucuucguagg

SEQ ID NO: 2087717 - RNA, 19 nt, Artificial Sequence
  Description of Artificial Sequence: Synthetic oligonucleotide
gucaguuccacuuugcagg

SEQ ID NO: 2087718 - RNA, 19 nt, Artificial Sequence
  Description of Artificial Sequence: Synthetic oligonucleotide
uagaucuucuuuaucuucg

SEQ ID NO: 2087719 - RNA, 19 nt, Artificial Sequence
  Description of Artificial Sequence: Synthetic oligonucleotide
aauagacgcaaacugucag

SEQ ID NO: 2087720 - RNA, 19 nt, Artificial Sequence
  Description of Artificial Sequence: Synthetic oligonucleotide
ugaacagcucaauagacgc

SEQ ID NO: 2087721 - RNA, 19 nt, Artificial Sequence
  Description of Artificial Sequence: Synthetic oligonucleotide
cucaauuuggcuaaaggac

SEQ ID NO: 2087722 - RNA, 19 nt, Artificial Sequence
  Description of Artificial Sequence: Synthetic oligonucleotide
ucuccuucgaguuucaucu

SEQ ID NO: 2087723 - RNA, 19 nt, Artificial Sequence
  Description of Artificial Sequence: Synthetic oligonucleotide
cuucauaugacaacacugc

SEQ ID NO: 2087724 - RNA, 19 nt, Artificial Sequence
  Description of Artificial Sequence: Synthetic oligonucleotide
aauguccaugcuuuauugg

SEQ ID NO: 2087725 - RNA, 19 nt, Artificial Sequence
  Description of Artificial Sequence: Synthetic oligonucleotide
uggcuaaaggacuuguucg

SEQ ID NO: 2087726 - RNA, 19 nt, Artificial Sequence
  Description of Artificial Sequence: Synthetic oligonucleotide
ucaauuuggcuaaaggacu

SEQ ID NO: 2087727 - RNA, 19 nt, Artificial Sequence
  Description of Artificial Sequence: Synthetic oligonucleotide
uucuugaacauuaaugaaa

SEQ ID NO: 2087728 - RNA, 19 nt, Artificial Sequence
  Description of Artificial Sequence: Synthetic oligonucleotide
uuuacgacgggccucccgg

SEQ ID NO: 2087729 - RNA, 19 nt, Artificial Sequence
  Description of Artificial Sequence: Synthetic oligonucleotide
ucuucucgcaaguagcugg

SEQ ID NO: 2087730 - RNA, 19 nt, Artificial Sequence
  Description of Artificial Sequence: Synthetic oligonucleotide
acacagaauacauacaggu

SEQ ID NO: 2087731 - RNA, 19 nt, Artificial Sequence
  Description of Artificial Sequence: Synthetic oligonucleotide
aaauaaggcucaauuuggc

SEQ ID NO: 2087732 - RNA, 19 nt, Artificial Sequence
  Description of Artificial Sequence: Synthetic oligonucleotide
aacccuuuguuuucacagc

SEQ ID NO: 2087733 - RNA, 19 nt, Artificial Sequence
  Description of Artificial Sequence: Synthetic oligonucleotide
uuccguuuuaauaaugacu

SEQ ID NO: 2087734 - RNA, 19 nt, Artificial Sequence
  Description of Artificial Sequence: Synthetic oligonucleotide
uuauugggaauaaucucag

SEQ ID NO: 2087735 - RNA, 19 nt, Artificial Sequence
  Description of Artificial Sequence: Synthetic oligonucleotide
uuucagauuagcuuccugu

SEQ ID NO: 2087736 - RNA, 19 nt, Artificial Sequence
  Description of Artificial Sequence: Synthetic oligonucleotide
uguucaacuucauaugaca

SEQ ID NO: 2087737 - RNA, 19 nt, Artificial Sequence
  Description of Artificial Sequence: Synthetic oligonucleotide
aauaaggcucaauuuggcu

SEQ ID NO: 2087738 - RNA, 19 nt, Artificial Sequence
  Description of Artificial Sequence: Synthetic oligonucleotide
uugggaauaaucucaguca

SEQ ID NO: 2087739 - RNA, 19 nt, Artificial Sequence
  Description of Artificial Sequence: Synthetic oligonucleotide
gacgcaaacugucaguucc

SEQ ID NO: 2087740 - RNA, 19 nt, Artificial Sequence
  Description of Artificial Sequence: Synthetic oligonucleotide
auguccaugcuuuauuggg

SEQ ID NO: 2087741 - RNA, 19 nt, Artificial Sequence
  Description of Artificial Sequence: Synthetic oligonucleotide
auaaucucagucaugaucu

SEQ ID NO: 2087742 - RNA, 19 nt, Artificial Sequence
  Description of Artificial Sequence: Synthetic oligonucleotide
ugcuuuauugggaauaauc

SEQ ID NO: 2087743 - RNA, 19 nt, Artificial Sequence
  Description of Artificial Sequence: Synthetic oligonucleotide
uguucgaaaccacacagaa

SEQ ID NO: 2087744 - RNA, 19 nt, Artificial Sequence
  Description of Artificial Sequence: Synthetic oligonucleotide
gaugucacgucuuuccugc

SEQ ID NO: 2087745 - RNA, 19 nt, Artificial Sequence
  Description of Artificial Sequence: Synthetic oligonucleotide
aaucucagucaugaucugc

SEQ ID NO: 2087746 - RNA, 19 nt, Artificial Sequence
  Description of Artificial Sequence: Synthetic oligonucleotide
aacuucauaugacaacacu

SEQ ID NO: 2087747 - RNA, 19 nt, Artificial Sequence
  Description of Artificial Sequence: Synthetic oligonucleotide
ugaagauagaucuucuuua

SEQ ID NO: 2087748 - RNA, 19 nt, Artificial Sequence
  Description of Artificial Sequence: Synthetic oligonucleotide
cuuguucgaaaccacacag

SEQ ID NO: 2087749 - RNA, 19 nt, Artificial Sequence
  Description of Artificial Sequence: Synthetic oligonucleotide
uguaaucuucuucuucugc

SEQ ID NO: 2087750 - RNA, 19 nt, Artificial Sequence
  Description of Artificial Sequence: Synthetic oligonucleotide
aacauuaaugaaagaaucu

SEQ ID NO: 2087751 - RNA, 19 nt, Artificial Sequence
  Description of Artificial Sequence: Synthetic oligonucleotide
ucaauagacgcaaacuguc

SEQ ID NO: 2087752 - RNA, 19 nt, Artificial Sequence
  Description of Artificial Sequence: Synthetic oligonucleotide
aaucugacauguaaucuuc

SEQ ID NO: 2087753 - RNA, 19 nt, Artificial Sequence
  Description of Artificial Sequence: Synthetic oligonucleotide
uagugcauucuucaacccg

SEQ ID NO: 2087754 - RNA, 19 nt, Artificial Sequence
  Description of Artificial Sequence: Synthetic oligonucleotide
uucauaugacaacacugcc

SEQ ID NO: 2087755 - RNA, 19 nt, Artificial Sequence
  Description of Artificial Sequence: Synthetic oligonucleotide
gaacauuaaugaaagaauc

SEQ ID NO: 2087756 - RNA, 19 nt, Artificial Sequence
  Description of Artificial Sequence: Synthetic oligonucleotide
ugacucgugaccuaugcca

SEQ ID NO: 2087757 - RNA, 19 nt, Artificial Sequence
  Description of Artificial Sequence: Synthetic oligonucleotide
ucuccuguaguuuucuagc

SEQ ID NO: 2087758 - RNA, 19 nt, Artificial Sequence
  Description of Artificial Sequence: Synthetic oligonucleotide
cuuuauugggaauaaucuc

SEQ ID NO: 2087759 - RNA, 19 nt, Artificial Sequence
  Description of Artificial Sequence: Synthetic oligonucleotide
uugaagauagaucuucuuu

SEQ ID NO: 2087760 - RNA, 19 nt, Artificial Sequence
  Description of Artificial Sequence: Synthetic oligonucleotide
uuuuggagcagagcgaacc

SEQ ID NO: 2087761 - RNA, 19 nt, Artificial Sequence
  Description of Artificial Sequence: Synthetic oligonucleotide
aguuccacuuugcagguag

SEQ ID NO: 2087762 - RNA, 19 nt, Artificial Sequence
  Description of Artificial Sequence: Synthetic oligonucleotide
ugaauauucuucuggguau

SEQ ID NO: 2087763 - RNA, 19 nt, Artificial Sequence
  Description of Artificial Sequence: Synthetic oligonucleotide
uaauaaugacucgugaccu

SEQ ID NO: 2087764 - RNA, 19 nt, Artificial Sequence
  Description of Artificial Sequence: Synthetic oligonucleotide
ugucaguuccacuuugcag

SEQ ID NO: 2087765 - RNA, 19 nt, Artificial Sequence
  Description of Artificial Sequence: Synthetic oligonucleotide
uucuccuguaguuuucuag

SEQ ID NO: 2087766 - RNA, 19 nt, Artificial Sequence
  Description of Artificial Sequence: Synthetic oligonucleotide
ucagauuagcuuccuguug

SEQ ID NO: 2087767 - RNA, 19 nt, Artificial Sequence
  Description of Artificial Sequence: Synthetic oligonucleotide
uuggcuaaaggacuuguuc

SEQ ID NO: 2087768 - RNA, 19 nt, Artificial Sequence
  Description of Artificial Sequence: Synthetic oligonucleotide
cauugagaggaauugguuc

SEQ ID NO: 2087769 - RNA, 19 nt, Artificial Sequence
  Description of Artificial Sequence: Synthetic oligonucleotide
cugggcaauuugaagauag

SEQ ID NO: 2087770 - RNA, 19 nt, Artificial Sequence
  Description of Artificial Sequence: Synthetic oligonucleotide
uuuucuagccuuucuucug

SEQ ID NO: 2087771 - RNA, 19 nt, Artificial Sequence
  Description of Artificial Sequence: Synthetic oligonucleotide
uuuaaccaguaccaugccu

SEQ ID NO: 2087772 - RNA, 19 nt, Artificial Sequence
  Description of Artificial Sequence: Synthetic oligonucleotide
acuucauaugacaacacug

SEQ ID NO: 2087773 - RNA, 19 nt, Artificial Sequence
  Description of Artificial Sequence: Synthetic oligonucleotide
uggucugauaucuucuuga

SEQ ID NO: 2087774 - RNA, 19 nt, Artificial Sequence
  Description of Artificial Sequence: Synthetic oligonucleotide
ucuucaacccgaugucacg

SEQ ID NO: 2087775 - RNA, 19 nt, Artificial Sequence
  Description of Artificial Sequence: Synthetic oligonucleotide
uaaucuugcucggaugggg

SEQ ID NO: 2087776 - RNA, 19 nt, Artificial Sequence
  Description of Artificial Sequence: Synthetic oligonucleotide
gcaauuugaagauagaucu

SEQ ID NO: 2087777 - RNA, 19 nt, Artificial Sequence
  Description of Artificial Sequence: Synthetic oligonucleotide
augaaagaaucugacaugu

SEQ ID NO: 2087778 - RNA, 19 nt, Artificial Sequence
  Description of Artificial Sequence: Synthetic oligonucleotide
ucuuguaccccaucuuuug

SEQ ID NO: 2087779 - RNA, 19 nt, Artificial Sequence
  Description of Artificial Sequence: Synthetic oligonucleotide
uucacucgugcauucaucu

SEQ ID NO: 2087780 - RNA, 19 nt, Artificial Sequence
  Description of Artificial Sequence: Synthetic oligonucleotide
auaaggcucaauuuggcua

SEQ ID NO: 2087781 - RNA, 19 nt, Artificial Sequence
  Description of Artificial Sequence: Synthetic oligonucleotide
uguaccccaucuuuuggag

SEQ ID NO: 2087782 - RNA, 19 nt, Artificial Sequence
  Description of Artificial Sequence: Synthetic oligonucleotide
uuuccguuuuaauaaugac

SEQ ID NO: 2087783 - RNA, 19 nt, Artificial Sequence
  Description of Artificial Sequence: Synthetic oligonucleotide
cugacgucgguauuggcag

SEQ ID NO: 2087784 - RNA, 19 nt, Artificial Sequence
  Description of Artificial Sequence: Synthetic oligonucleotide
agaggaauugguucaacaa

SEQ ID NO: 2087785 - RNA, 19 nt, Artificial Sequence
  Description of Artificial Sequence: Synthetic oligonucleotide
uauagaugcucuucucgca

SEQ ID NO: 2087786 - RNA, 19 nt, Artificial Sequence
  Description of Artificial Sequence: Synthetic oligonucleotide
uuuucagucgcauccggaa

SEQ ID NO: 2087787 - RNA, 19 nt, Artificial Sequence
  Description of Artificial Sequence: Synthetic oligonucleotide
uuuggagcagagcgaaccc

SEQ ID NO: 2087788 - RNA, 19 nt, Artificial Sequence
  Description of Artificial Sequence: Synthetic oligonucleotide
augacucgugaccuaugcc

SEQ ID NO: 2087789 - RNA, 19 nt, Artificial Sequence
  Description of Artificial Sequence: Synthetic oligonucleotide
augaacagcucaauagacg

SEQ ID NO: 2087790 - RNA, 19 nt, Artificial Sequence
  Description of Artificial Sequence: Synthetic oligonucleotide
uguccaugcuuuauuggga

SEQ ID NO: 2087791 - RNA, 19 nt, Artificial Sequence
  Description of Artificial Sequence: Synthetic oligonucleotide
caggucuugguaaucuugc

SEQ ID NO: 2087792 - RNA, 19 nt, Artificial Sequence
  Description of Artificial Sequence: Synthetic oligonucleotide
uaugacaacacugccuagu

SEQ ID NO: 2087793 - RNA, 19 nt, Artificial Sequence
  Description of Artificial Sequence: Synthetic oligonucleotide
ucgcauccggaacugcucg

SEQ ID NO: 2087794 - RNA, 19 nt, Artificial Sequence
  Description of Artificial Sequence: Synthetic oligonucleotide
cuuuccguuuuaauaauga

SEQ ID NO: 2087795 - RNA, 19 nt, Artificial Sequence
  Description of Artificial Sequence: Synthetic oligonucleotide
uagcuggugaguaucugca

SEQ ID NO: 2087796 - RNA, 19 nt, Artificial Sequence
  Description of Artificial Sequence: Synthetic oligonucleotide
aacagcucaauagacgcaa

SEQ ID NO: 2087797 - RNA, 19 nt, Artificial Sequence
  Description of Artificial Sequence: Synthetic oligonucleotide
ucucgcaaguagcugguga

SEQ ID NO: 2087798 - RNA, 19 nt, Artificial Sequence
  Description of Artificial Sequence: Synthetic oligonucleotide
ugcaauauagaugcucuuc

SEQ ID NO: 2087799 - RNA, 19 nt, Artificial Sequence
  Description of Artificial Sequence: Synthetic oligonucleotide
gcucaauagacgcaaacug

SEQ ID NO: 2087800 - RNA, 19 nt, Artificial Sequence
  Description of Artificial Sequence: Synthetic oligonucleotide
gcuuuaaccaguaccaugc

SEQ ID NO: 2087801 - RNA, 19 nt, Artificial Sequence
  Description of Artificial Sequence: Synthetic oligonucleotide
agagcgaacccuuuguuuu

SEQ ID NO: 2087802 - RNA, 19 nt, Artificial Sequence
  Description of Artificial Sequence: Synthetic oligonucleotide
cugacauguaaucuucuuc

SEQ ID NO: 2087803 - RNA, 19 nt, Artificial Sequence
  Description of Artificial Sequence: Synthetic oligonucleotide
acuuguucgaaaccacaca

SEQ ID NO: 2087804 - RNA, 19 nt, Artificial Sequence
  Description of Artificial Sequence: Synthetic oligonucleotide
uugguaaucuugcucggau

SEQ ID NO: 2087805 - RNA, 19 nt, Artificial Sequence
  Description of Artificial Sequence: Synthetic oligonucleotide
guagcuggugaguaucugc

SEQ ID NO: 2087806 - RNA, 19 nt, Artificial Sequence
  Description of Artificial Sequence: Synthetic oligonucleotide
cuuguaccccaucuuuugg

SEQ ID NO: 2087807 - RNA, 19 nt, Artificial Sequence
  Description of Artificial Sequence: Synthetic oligonucleotide
ggaauaaucucagucauga

SEQ ID NO: 2087808 - RNA, 19 nt, Artificial Sequence
  Description of Artificial Sequence: Synthetic oligonucleotide
uccuucgaguuucaucuca

SEQ ID NO: 2087809 - RNA, 19 nt, Artificial Sequence
  Description of Artificial Sequence: Synthetic oligonucleotide
cauaugacaacacugccua

SEQ ID NO: 2087810 - RNA, 19 nt, Artificial Sequence
  Description of Artificial Sequence: Synthetic oligonucleotide
uuguucgaaaccacacaga

SEQ ID NO: 2087811 - RNA, 19 nt, Artificial Sequence
  Description of Artificial Sequence: Synthetic oligonucleotide
auguucaacuucauaugac

SEQ ID NO: 2087812 - RNA, 19 nt, Artificial Sequence
  Description of Artificial Sequence: Synthetic oligonucleotide
agcauuggcacgccugguc

SEQ ID NO: 2087813 - RNA, 19 nt, Artificial Sequence
  Description of Artificial Sequence: Synthetic oligonucleotide
ggcucaauuuggcuaaagg

SEQ ID NO: 2087814 - RNA, 19 nt, Artificial Sequence
  Description of Artificial Sequence: Synthetic oligonucleotide
uuguaccccaucuuuugga

SEQ ID NO: 2087815 - RNA, 19 nt, Artificial Sequence
  Description of Artificial Sequence: Synthetic oligonucleotide
gagaggaauugguucaaca

SEQ ID NO: 2087816 - RNA, 19 nt, Artificial Sequence
  Description of Artificial Sequence: Synthetic oligonucleotide
auagacgcaaacugucagu

SEQ ID NO: 2087817 - RNA, 19 nt, Artificial Sequence
  Description of Artificial Sequence: Synthetic oligonucleotide
acugccuaguucaugaaca

SEQ ID NO: 2087818 - RNA, 19 nt, Artificial Sequence
  Description of Artificial Sequence: Synthetic oligonucleotide
uuucagucgcauccggaac

SEQ ID NO: 2087819 - RNA, 19 nt, Artificial Sequence
  Description of Artificial Sequence: Synthetic oligonucleotide
cucgcaaguagcuggugag

SEQ ID NO: 2087820 - RNA, 19 nt, Artificial Sequence
  Description of Artificial Sequence: Synthetic oligonucleotide
aaaucuucacucgugcauu

SEQ ID NO: 2087821 - RNA, 19 nt, Artificial Sequence
  Description of Artificial Sequence: Synthetic oligonucleotide
auccggaacugcucggugg

SEQ ID NO: 2087822 - RNA, 19 nt, Artificial Sequence
  Description of Artificial Sequence: Synthetic oligonucleotide
uucagauuagcuuccuguu

SEQ ID NO: 2087823 - RNA, 19 nt, Artificial Sequence
  Description of Artificial Sequence: Synthetic oligonucleotide
cauucuucaacccgauguc

SEQ ID NO: 2087824 - RNA, 19 nt, Artificial Sequence
  Description of Artificial Sequence: Synthetic oligonucleotide
agauuagcuuccuguuguc

SEQ ID NO: 2087825 - RNA, 19 nt, Artificial Sequence
  Description of Artificial Sequence: Synthetic oligonucleotide
uaggcugucccacaccaaa

SEQ ID NO: 2087826 - RNA, 19 nt, Artificial Sequence
  Description of Artificial Sequence: Synthetic oligonucleotide
ugguaaucuugcucggaug

SEQ ID NO: 2087827 - RNA, 19 nt, Artificial Sequence
  Description of Artificial Sequence: Synthetic oligonucleotide
gcucaauuuggcuaaagga

SEQ ID NO: 2087828 - RNA, 19 nt, Artificial Sequence
  Description of Artificial Sequence: Synthetic oligonucleotide
uucuuuacgacgggccucc

SEQ ID NO: 2087829 - RNA, 19 nt, Artificial Sequence
  Description of Artificial Sequence: Synthetic oligonucleotide
cugcuuuccguuuuaauaa

SEQ ID NO: 2087830 - RNA, 19 nt, Artificial Sequence
  Description of Artificial Sequence: Synthetic oligonucleotide
ucaacccgaugucacgucu

SEQ ID NO: 2087831 - RNA, 19 nt, Artificial Sequence
  Description of Artificial Sequence: Synthetic oligonucleotide
caauauagaugcucuucuc

SEQ ID NO: 2087832 - RNA, 19 nt, Artificial Sequence
  Description of Artificial Sequence: Synthetic oligonucleotide
gacuuguucgaaaccacac

SEQ ID NO: 2087833 - RNA, 19 nt, Artificial Sequence
  Description of Artificial Sequence: Synthetic oligonucleotide
aucuugcucggauggggcg

SEQ ID NO: 2087834 - RNA, 19 nt, Artificial Sequence
  Description of Artificial Sequence: Synthetic oligonucleotide
uccggaacugcucgguggc

SEQ ID NO: 2087835 - RNA, 19 nt, Artificial Sequence
  Description of Artificial Sequence: Synthetic oligonucleotide
auagaugcucuucucgcaa

SEQ ID NO: 2087836 - RNA, 19 nt, Artificial Sequence
  Description of Artificial Sequence: Synthetic oligonucleotide
cuagugcauucuucaaccc

SEQ ID NO: 2087837 - RNA, 19 nt, Artificial Sequence
  Description of Artificial Sequence: Synthetic oligonucleotide
uuauuucaauguccaugcu

SEQ ID NO: 2087838 - RNA, 19 nt, Artificial Sequence
  Description of Artificial Sequence: Synthetic oligonucleotide
ucggauggggcgcugcuga

SEQ ID NO: 2087839 - RNA, 19 nt, Artificial Sequence
  Description of Artificial Sequence: Synthetic oligonucleotide
uuaucuucguaggcugucc

SEQ ID NO: 2087840 - RNA, 19 nt, Artificial Sequence
  Description of Artificial Sequence: Synthetic oligonucleotide
ucgaaaccacacagaauac

SEQ ID NO: 2087841 - RNA, 19 nt, Artificial Sequence
  Description of Artificial Sequence: Synthetic oligonucleotide
aaccaguaccaugccuccc

SEQ ID NO: 2087842 - RNA, 19 nt, Artificial Sequence
  Description of Artificial Sequence: Synthetic oligonucleotide
cacucgugcauucaucuuc

SEQ ID NO: 2087843 - RNA, 19 nt, Artificial Sequence
  Description of Artificial Sequence: Synthetic oligonucleotide
agugcauucuucaacccga

SEQ ID NO: 2087844 - RNA, 19 nt, Artificial Sequence
  Description of Artificial Sequence: Synthetic oligonucleotide
cuuuaaccaguaccaugcc

SEQ ID NO: 2087845 - RNA, 19 nt, Artificial Sequence
  Description of Artificial Sequence: Synthetic oligonucleotide
ucugacauguaaucuucuu

SEQ ID NO: 2087846 - RNA, 19 nt, Artificial Sequence
  Description of Artificial Sequence: Synthetic oligonucleotide
agacgcaaacugucaguuc

SEQ ID NO: 2087847 - RNA, 19 nt, Artificial Sequence
  Description of Artificial Sequence: Synthetic oligonucleotide
uaaugacucgugaccuaug

SEQ ID NO: 2087848 - RNA, 19 nt, Artificial Sequence
  Description of Artificial Sequence: Synthetic oligonucleotide
guauccagcugcuggcaag

SEQ ID NO: 2087849 - RNA, 19 nt, Artificial Sequence
  Description of Artificial Sequence: Synthetic oligonucleotide
gaaucugacauguaaucuu

SEQ ID NO: 2087850 - RNA, 19 nt, Artificial Sequence
  Description of Artificial Sequence: Synthetic oligonucleotide
agcagagcgaacccuuugu

SEQ ID NO: 2087851 - RNA, 19 nt, Artificial Sequence
  Description of Artificial Sequence: Synthetic oligonucleotide
uuuaucuucguaggcuguc

SEQ ID NO: 2087852 - RNA, 19 nt, Artificial Sequence
  Description of Artificial Sequence: Synthetic oligonucleotide
auuugaagauagaucuucu

SEQ ID NO: 2087853 - RNA, 19 nt, Artificial Sequence
  Description of Artificial Sequence: Synthetic oligonucleotide
gaagauagaucuucuuuau

SEQ ID NO: 2087854 - RNA, 19 nt, Artificial Sequence
  Description of Artificial Sequence: Synthetic oligonucleotide
uauugggaauaaucucagu

SEQ ID NO: 2087855 - RNA, 19 nt, Artificial Sequence
  Description of Artificial Sequence: Synthetic oligonucleotide
ggcaauuugaagauagauc

SEQ ID NO: 2087856 - RNA, 19 nt, Artificial Sequence
  Description of Artificial Sequence: Synthetic oligonucleotide
ugggcaauuugaagauaga

SEQ ID NO: 2087857 - RNA, 19 nt, Artificial Sequence
  Description of Artificial Sequence: Synthetic oligonucleotide
auaugacaacacugccuag

SEQ ID NO: 2087858 - RNA, 19 nt, Artificial Sequence
  Description of Artificial Sequence: Synthetic oligonucleotide
uucaucucaucuugcuuau

SEQ ID NO: 2087859 - RNA, 19 nt, Artificial Sequence
  Description of Artificial Sequence: Synthetic oligonucleotide
ucgugcauucaucuucauc

SEQ ID NO: 2087860 - RNA, 19 nt, Artificial Sequence
  Description of Artificial Sequence: Synthetic oligonucleotide
gaggaauugguucaacaau

SEQ ID NO: 2087861 - RNA, 19 nt, Artificial Sequence
  Description of Artificial Sequence: Synthetic oligonucleotide
auaaugacucgugaccuau

SEQ ID NO: 2087862 - RNA, 19 nt, Artificial Sequence
  Description of Artificial Sequence: Synthetic oligonucleotide
uugguucaacaauaccauc

SEQ ID NO: 2087863 - RNA, 19 nt, Artificial Sequence
  Description of Artificial Sequence: Synthetic oligonucleotide
uggggcgcugcugacgucg

SEQ ID NO: 2087864 - RNA, 19 nt, Artificial Sequence
  Description of Artificial Sequence: Synthetic oligonucleotide
aggacuuguucgaaaccac

SEQ ID NO: 2087865 - RNA, 19 nt, Artificial Sequence
  Description of Artificial Sequence: Synthetic oligonucleotide
uccucaggucuccuucgag

SEQ ID NO: 2087866 - RNA, 19 nt, Artificial Sequence
  Description of Artificial Sequence: Synthetic oligonucleotide
ugaaagaaucugacaugua

SEQ ID NO: 2087867 - RNA, 19 nt, Artificial Sequence
  Description of Artificial Sequence: Synthetic oligonucleotide
caauagacgcaaacuguca

SEQ ID NO: 2087868 - RNA, 19 nt, Artificial Sequence
  Description of Artificial Sequence: Synthetic oligonucleotide
acagccuagugcauucuuc

SEQ ID NO: 2087869 - RNA, 19 nt, Artificial Sequence
  Description of Artificial Sequence: Synthetic oligonucleotide
gucgguauuggcagucacg

SEQ ID NO: 2087870 - RNA, 19 nt, Artificial Sequence
  Description of Artificial Sequence: Synthetic oligonucleotide
ggcuuuaaccaguaccaug

SEQ ID NO: 2087871 - RNA, 19 nt, Artificial Sequence
  Description of Artificial Sequence: Synthetic oligonucleotide
aagcucgcuggcuucuccu

SEQ ID NO: 2087872 - RNA, 19 nt, Artificial Sequence
  Description of Artificial Sequence: Synthetic oligonucleotide
uucaauguccaugcuuuau

SEQ ID NO: 2087873 - RNA, 19 nt, Artificial Sequence
  Description of Artificial Sequence: Synthetic oligonucleotide
cagagguugguccugggca

SEQ ID NO: 2087874 - RNA, 19 nt, Artificial Sequence
  Description of Artificial Sequence: Synthetic oligonucleotide
acaauaccaucuccacucu

SEQ ID NO: 2087875 - RNA, 19 nt, Artificial Sequence
  Description of Artificial Sequence: Synthetic oligonucleotide
uguaguuuucuagccuuuc

SEQ ID NO: 2087876 - RNA, 19 nt, Artificial Sequence
  Description of Artificial Sequence: Synthetic oligonucleotide
cuuuacgacgggccucccg

SEQ ID NO: 2087877 - RNA, 19 nt, Artificial Sequence
  Description of Artificial Sequence: Synthetic oligonucleotide
cucaauagacgcaaacugu

SEQ ID NO: 2087878 - RNA, 19 nt, Artificial Sequence
  Description of Artificial Sequence: Synthetic oligonucleotide
acucaaaucuucacucgug

SEQ ID NO: 2087879 - RNA, 19 nt, Artificial Sequence
  Description of Artificial Sequence: Synthetic oligonucleotide
agaugcucuucucgcaagu

SEQ ID NO: 2087880 - RNA, 19 nt, Artificial Sequence
  Description of Artificial Sequence: Synthetic oligonucleotide
cuucacucgugcauucauc

SEQ ID NO: 2087881 - RNA, 19 nt, Artificial Sequence
  Description of Artificial Sequence: Synthetic oligonucleotide
uagacgcaaacugucaguu

SEQ ID NO: 2087882 - RNA, 19 nt, Artificial Sequence
  Description of Artificial Sequence: Synthetic oligonucleotide
augacaacacugccuaguu

SEQ ID NO: 2087883 - RNA, 19 nt, Artificial Sequence
  Description of Artificial Sequence: Synthetic oligonucleotide
gacauugagaggaauuggu

SEQ ID NO: 2087884 - RNA, 19 nt, Artificial Sequence
  Description of Artificial Sequence: Synthetic oligonucleotide
agagccugcccacucuugu

SEQ ID NO: 2087885 - RNA, 19 nt, Artificial Sequence
  Description of Artificial Sequence: Synthetic oligonucleotide
uucacacucuucugccugu

SEQ ID NO: 2087886 - RNA, 19 nt, Artificial Sequence
  Description of Artificial Sequence: Synthetic oligonucleotide
ucuugcucggauggggcgc

SEQ ID NO: 2087887 - RNA, 19 nt, Artificial Sequence
  Description of Artificial Sequence: Synthetic oligonucleotide
ccauguucaacuucauaug

SEQ ID NO: 2087888 - RNA, 19 nt, Artificial Sequence
  Description of Artificial Sequence: Synthetic oligonucleotide
cuggucugauaucuucuug

SEQ ID NO: 2087889 - RNA, 19 nt, Artificial Sequence
  Description of Artificial Sequence: Synthetic oligonucleotide
cacugccuaguucaugaac

SEQ ID NO: 2087890 - RNA, 19 nt, Artificial Sequence
  Description of Artificial Sequence: Synthetic oligonucleotide
guaccccaucuuuuggagc

SEQ ID NO: 2087891 - RNA, 19 nt, Artificial Sequence
  Description of Artificial Sequence: Synthetic oligonucleotide
gccauguucaacuucauau

SEQ ID NO: 2087892 - RNA, 19 nt, Artificial Sequence
  Description of Artificial Sequence: Synthetic oligonucleotide
agagguugguccugggcaa

SEQ ID NO: 2087893 - RNA, 19 nt, Artificial Sequence
  Description of Artificial Sequence: Synthetic oligonucleotide
gaguuucaucucaucuugc

SEQ ID NO: 2087894 - RNA, 19 nt, Artificial Sequence
  Description of Artificial Sequence: Synthetic oligonucleotide
uggagcagagcgaacccuu

SEQ ID NO: 2087895 - RNA, 19 nt, Artificial Sequence
  Description of Artificial Sequence: Synthetic oligonucleotide
gacucgugaccuaugccac

SEQ ID NO: 2087896 - RNA, 19 nt, Artificial Sequence
  Description of Artificial Sequence: Synthetic oligonucleotide
auauucuucuggguaucca

SEQ ID NO: 2087897 - RNA, 19 nt, Artificial Sequence
  Description of Artificial Sequence: Synthetic oligonucleotide
ccugggaaccugaauauuc

SEQ ID NO: 2087898 - RNA, 19 nt, Artificial Sequence
  Description of Artificial Sequence: Synthetic oligonucleotide
ugcucgguggccuuuucuu

SEQ ID NO: 2087899 - RNA, 19 nt, Artificial Sequence
  Description of Artificial Sequence: Synthetic oligonucleotide
ucguaggcugucccacacc

SEQ ID NO: 2087900 - RNA, 19 nt, Artificial Sequence
  Description of Artificial Sequence: Synthetic oligonucleotide
aggucuugguaaucuugcu

SEQ ID NO: 2087901 - RNA, 19 nt, Artificial Sequence
  Description of Artificial Sequence: Synthetic oligonucleotide
cugucccacaccaaaugca

SEQ ID NO: 2087902 - RNA, 19 nt, Artificial Sequence
  Description of Artificial Sequence: Synthetic oligonucleotide
uuucaauguccaugcuuua

SEQ ID NO: 2087903 - RNA, 19 nt, Artificial Sequence
  Description of Artificial Sequence: Synthetic oligonucleotide
ucagucgcauccggaacug

SEQ ID NO: 2087904 - RNA, 19 nt, Artificial Sequence
  Description of Artificial Sequence: Synthetic oligonucleotide
gcugucccacaccaaaugc

SEQ ID NO: 2087905 - RNA, 19 nt, Artificial Sequence
  Description of Artificial Sequence: Synthetic oligonucleotide
cccgaugucacgucuuucc

SEQ ID NO: 2087906 - RNA, 19 nt, Artificial Sequence
  Description of Artificial Sequence: Synthetic oligonucleotide
gcuuuauugggaauaaucu

SEQ ID NO: 2087907 - RNA, 19 nt, Artificial Sequence
  Description of Artificial Sequence: Synthetic oligonucleotide
cagauuagcuuccuguugu

SEQ ID NO: 2087908 - RNA, 19 nt, Artificial Sequence
  Description of Artificial Sequence: Synthetic oligonucleotide
ggucuugguaaucuugcuc

SEQ ID NO: 2087909 - RNA, 19 nt, Artificial Sequence
  Description of Artificial Sequence: Synthetic oligonucleotide
agcucgcuggcuucuccuc

SEQ ID NO: 2087910 - RNA, 19 nt, Artificial Sequence
  Description of Artificial Sequence: Synthetic oligonucleotide
aacccgaugucacgucuuu

SEQ ID NO: 2087911 - RNA, 19 nt, Artificial Sequence
  Description of Artificial Sequence: Synthetic oligonucleotide
ugcagagguugguccuggg

SEQ ID NO: 2087912 - RNA, 19 nt, Artificial Sequence
  Description of Artificial Sequence: Synthetic oligonucleotide
ugauaucuucuugaacauu

SEQ ID NO: 2087913 - RNA, 19 nt, Artificial Sequence
  Description of Artificial Sequence: Synthetic oligonucleotide
cacucuugcccagagccug

SEQ ID NO: 2087914 - RNA, 19 nt, Artificial Sequence
  Description of Artificial Sequence: Synthetic oligonucleotide
guccaugcuuuauugggaa

SEQ ID NO: 2087915 - RNA, 19 nt, Artificial Sequence
  Description of Artificial Sequence: Synthetic oligonucleotide
ggcuaaaggacuuguucga

SEQ ID NO: 2087916 - RNA, 19 nt, Artificial Sequence
  Description of Artificial Sequence: Synthetic oligonucleotide
caguaccaugccucccugg

SEQ ID NO: 2087917 - RNA, 19 nt, Artificial Sequence
  Description of Artificial Sequence: Synthetic oligonucleotide
acgacgggccucccggauc

SEQ ID NO: 2087918 - RNA, 19 nt, Artificial Sequence
  Description of Artificial Sequence: Synthetic oligonucleotide
gcaauauagaugcucuucu

SEQ ID NO: 2087919 - RNA, 19 nt, Artificial Sequence
  Description of Artificial Sequence: Synthetic oligonucleotide
ugagaggaauugguucaac

SEQ ID NO: 2087920 - RNA, 19 nt, Artificial Sequence
  Description of Artificial Sequence: Synthetic oligonucleotide
gagcgaacccuuuguuuuc

SEQ ID NO: 2087921 - RNA, 19 nt, Artificial Sequence
  Description of Artificial Sequence: Synthetic oligonucleotide
aguagcuggugaguaucug

SEQ ID NO: 2087922 - RNA, 19 nt, Artificial Sequence
  Description of Artificial Sequence: Synthetic oligonucleotide
ccguuuuaauaaugacucg

SEQ ID NO: 2087923 - RNA, 19 nt, Artificial Sequence
  Description of Artificial Sequence: Synthetic oligonucleotide
cucgcuggcuucuccucag

SEQ ID NO: 2087924 - RNA, 19 nt, Artificial Sequence
  Description of Artificial Sequence: Synthetic oligonucleotide
caagcucgcuggcuucucc

SEQ ID NO: 2087925 - RNA, 19 nt, Artificial Sequence
  Description of Artificial Sequence: Synthetic oligonucleotide
acauugagaggaauugguu

SEQ ID NO: 2087926 - RNA, 19 nt, Artificial Sequence
  Description of Artificial Sequence: Synthetic oligonucleotide
acucgugcauucaucuuca

SEQ ID NO: 2087927 - RNA, 19 nt, Artificial Sequence
  Description of Artificial Sequence: Synthetic oligonucleotide
cuucuuuacgacgggccuc

SEQ ID NO: 2087928 - RNA, 19 nt, Artificial Sequence
  Description of Artificial Sequence: Synthetic oligonucleotide
cauuggcacgccuggucug

SEQ ID NO: 2087929 - RNA, 19 nt, Artificial Sequence
  Description of Artificial Sequence: Synthetic oligonucleotide
uacaggucuugguaaucuu

SEQ ID NO: 2087930 - RNA, 19 nt, Artificial Sequence
  Description of Artificial Sequence: Synthetic oligonucleotide
cgaguuucaucucaucuug

SEQ ID NO: 2087931 - RNA, 19 nt, Artificial Sequence
  Description of Artificial Sequence: Synthetic oligonucleotide
ucgcuggcuucuccucagg

SEQ ID NO: 2087932 - RNA, 19 nt, Artificial Sequence
  Description of Artificial Sequence: Synthetic oligonucleotide
acucuugcccagagccugc

SEQ ID NO: 2087933 - RNA, 19 nt, Artificial Sequence
  Description of Artificial Sequence: Synthetic oligonucleotide
cauacaggucuugguaauc

SEQ ID NO: 2087934 - RNA, 19 nt, Artificial Sequence
  Description of Artificial Sequence: Synthetic oligonucleotide
gauggggcgcugcugacgu

SEQ ID NO: 2087935 - RNA, 19 nt, Artificial Sequence
  Description of Artificial Sequence: Synthetic oligonucleotide
ugcccacucuuguacccca

SEQ ID NO: 2087936 - RNA, 19 nt, Artificial Sequence
  Description of Artificial Sequence: Synthetic oligonucleotide
augcaauauagaugcucuu

SEQ ID NO: 2087937 - RNA, 19 nt, Artificial Sequence
  Description of Artificial Sequence: Synthetic oligonucleotide
ggcugucccacaccaaaug

SEQ ID NO: 2087938 - RNA, 19 nt, Artificial Sequence
  Description of Artificial Sequence: Synthetic oligonucleotide
acucgugaccuaugccacu

SEQ ID NO: 2087939 - RNA, 19 nt, Artificial Sequence
  Description of Artificial Sequence: Synthetic oligonucleotide
cugcugacgucgguauugg

SEQ ID NO: 2087940 - RNA, 19 nt, Artificial Sequence
  Description of Artificial Sequence: Synthetic oligonucleotide
agucgcauccggaacugcu

SEQ ID NO: 2087941 - RNA, 19 nt, Artificial Sequence
  Description of Artificial Sequence: Synthetic oligonucleotide
caugcuuuauugggaauaa

SEQ ID NO: 2087942 - RNA, 19 nt, Artificial Sequence
  Description of Artificial Sequence: Synthetic oligonucleotide
gucacgucuuuccugcucu

SEQ ID NO: 2087943 - RNA, 19 nt, Artificial Sequence
  Description of Artificial Sequence: Synthetic oligonucleotide
ucuggguauccagcugcug

SEQ ID NO: 2087944 - RNA, 19 nt, Artificial Sequence
  Description of Artificial Sequence: Synthetic oligonucleotide
cucuucucgcaaguagcug

SEQ ID NO: 2087945 - RNA, 19 nt, Artificial Sequence
  Description of Artificial Sequence: Synthetic oligonucleotide
gacgucgguauuggcaguc

SEQ ID NO: 2087946 - RNA, 19 nt, Artificial Sequence
  Description of Artificial Sequence: Synthetic oligonucleotide
uuacgacgggccucccgga

SEQ ID NO: 2087947 - RNA, 19 nt, Artificial Sequence
  Description of Artificial Sequence: Synthetic oligonucleotide
gauuagcuuccuguugucu

SEQ ID NO: 2087948 - RNA, 19 nt, Artificial Sequence
  Description of Artificial Sequence: Synthetic oligonucleotide
augaucugcagagguuggu

SEQ ID NO: 2087949 - RNA, 19 nt, Artificial Sequence
  Description of Artificial Sequence: Synthetic oligonucleotide
ugcugacgucgguauuggc

SEQ ID NO: 2087950 - RNA, 19 nt, Artificial Sequence
  Description of Artificial Sequence: Synthetic oligonucleotide
cugggaaccugaauauucu

SEQ ID NO: 2087951 - RNA, 19 nt, Artificial Sequence
  Description of Artificial Sequence: Synthetic oligonucleotide
auuggcacgccuggucuga

SEQ ID NO: 2087952 - RNA, 19 nt, Artificial Sequence
  Description of Artificial Sequence: Synthetic oligonucleotide
gcugacgucgguauuggca

SEQ ID NO: 2087953 - RNA, 19 nt, Artificial Sequence
  Description of Artificial Sequence: Synthetic oligonucleotide
ugacgucgguauuggcagu

SEQ ID NO: 2087954 - RNA, 19 nt, Artificial Sequence
  Description of Artificial Sequence: Synthetic oligonucleotide
gaauaaucucagucaugau

SEQ ID NO: 2087955 - RNA, 19 nt, Artificial Sequence
  Description of Artificial Sequence: Synthetic oligonucleotide
caacaauaccaucuccacu

SEQ ID NO: 2087956 - RNA, 19 nt, Artificial Sequence
  Description of Artificial Sequence: Synthetic oligonucleotide
agcgaacccuuuguuuuca

SEQ ID NO: 2087957 - RNA, 19 nt, Artificial Sequence
  Description of Artificial Sequence: Synthetic oligonucleotide
gggaauaaucucagucaug

SEQ ID NO: 2087958 - RNA, 19 nt, Artificial Sequence
  Description of Artificial Sequence: Synthetic oligonucleotide
ccuaguucaugaacagcuc

SEQ ID NO: 2087959 - RNA, 19 nt, Artificial Sequence
  Description of Artificial Sequence: Synthetic oligonucleotide
cugauaucuucuugaacau

SEQ ID NO: 2087960 - RNA, 19 nt, Artificial Sequence
  Description of Artificial Sequence: Synthetic oligonucleotide
caucuccacucuugcccag

SEQ ID NO: 2087961 - RNA, 19 nt, Artificial Sequence
  Description of Artificial Sequence: Synthetic oligonucleotide
cacucaaaucuucacucgu

SEQ ID NO: 2087962 - RNA, 19 nt, Artificial Sequence
  Description of Artificial Sequence: Synthetic oligonucleotide
uacgacgggccucccggau

SEQ ID NO: 2087963 - RNA, 19 nt, Artificial Sequence
  Description of Artificial Sequence: Synthetic oligonucleotide
cuguugucuuucuucuuua

SEQ ID NO: 2087964 - RNA, 19 nt, Artificial Sequence
  Description of Artificial Sequence: Synthetic oligonucleotide
uucucgcaaguagcuggug

SEQ ID NO: 2087965 - RNA, 19 nt, Artificial Sequence
  Description of Artificial Sequence: Synthetic oligonucleotide
gaugcucuucucgcaagua

SEQ ID NO: 2087966 - RNA, 19 nt, Artificial Sequence
  Description of Artificial Sequence: Synthetic oligonucleotide
acccgaugucacgucuuuc

SEQ ID NO: 2087967 - RNA, 19 nt, Artificial Sequence
  Description of Artificial Sequence: Synthetic oligonucleotide
cuucguaggcugucccaca

SEQ ID NO: 2087968 - RNA, 19 nt, Artificial Sequence
  Description of Artificial Sequence: Synthetic oligonucleotide
ccaucuuuuggagcagagc

SEQ ID NO: 2087969 - RNA, 19 nt, Artificial Sequence
  Description of Artificial Sequence: Synthetic oligonucleotide
cuccuucgaguuucaucuc

SEQ ID NO: 2087970 - RNA, 19 nt, Artificial Sequence
  Description of Artificial Sequence: Synthetic oligonucleotide
cccaucuuuuggagcagag

SEQ ID NO: 2087971 - RNA, 19 nt, Artificial Sequence
  Description of Artificial Sequence: Synthetic oligonucleotide
augucacgucuuuccugcu

SEQ ID NO: 2087972 - RNA, 19 nt, Artificial Sequence
  Description of Artificial Sequence: Synthetic oligonucleotide
cuuucacacucuucugccu

SEQ ID NO: 2087973 - RNA, 19 nt, Artificial Sequence
  Description of Artificial Sequence: Synthetic oligonucleotide
ggacuuguucgaaaccaca

SEQ ID NO: 2087974 - RNA, 19 nt, Artificial Sequence
  Description of Artificial Sequence: Synthetic oligonucleotide
gucgcauccggaacugcuc

SEQ ID NO: 2087975 - RNA, 19 nt, Artificial Sequence
  Description of Artificial Sequence: Synthetic oligonucleotide
aggcuuuaaccaguaccau

SEQ ID NO: 2087976 - RNA, 19 nt, Artificial Sequence
  Description of Artificial Sequence: Synthetic oligonucleotide
ggauggggcgcugcugacg

SEQ ID NO: 2087977 - RNA, 19 nt, Artificial Sequence
  Description of Artificial Sequence: Synthetic oligonucleotide
augcuuuauugggaauaau

SEQ ID NO: 2087978 - RNA, 19 nt, Artificial Sequence
  Description of Artificial Sequence: Synthetic oligonucleotide
acgcaaacugucaguucca

SEQ ID NO: 2087979 - RNA, 19 nt, Artificial Sequence
  Description of Artificial Sequence: Synthetic oligonucleotide
gcuggugaguaucugcagu

SEQ ID NO: 2087980 - RNA, 19 nt, Artificial Sequence
  Description of Artificial Sequence: Synthetic oligonucleotide
cacgucuuuccugcucuuc

SEQ ID NO: 2087981 - RNA, 19 nt, Artificial Sequence
  Description of Artificial Sequence: Synthetic oligonucleotide
cacgccuggucugauaucu

SEQ ID NO: 2087982 - RNA, 19 nt, Artificial Sequence
  Description of Artificial Sequence: Synthetic oligonucleotide
cuucucgcaaguagcuggu

SEQ ID NO: 2087983 - RNA, 19 nt, Artificial Sequence
  Description of Artificial Sequence: Synthetic oligonucleotide
aacugcucgguggccuuuu

SEQ ID NO: 2087984 - RNA, 19 nt, Artificial Sequence
  Description of Artificial Sequence: Synthetic oligonucleotide
ucgugaccuaugccacuuu

SEQ ID NO: 2087985 - RNA, 19 nt, Artificial Sequence
  Description of Artificial Sequence: Synthetic oligonucleotide
cucaggucuccuucgaguu

SEQ ID NO: 2087986 - RNA, 19 nt, Artificial Sequence
  Description of Artificial Sequence: Synthetic oligonucleotide
ucuuuacgacgggccuccc

SEQ ID NO: 2087987 - RNA, 19 nt, Artificial Sequence
  Description of Artificial Sequence: Synthetic oligonucleotide
cgaugucacgucuuuccug

SEQ ID NO: 2087988 - RNA, 19 nt, Artificial Sequence
  Description of Artificial Sequence: Synthetic oligonucleotide
caaaugcaauauagaugcu

SEQ ID NO: 2087989 - RNA, 19 nt, Artificial Sequence
  Description of Artificial Sequence: Synthetic oligonucleotide
cucuuguaccccaucuuuu

SEQ ID NO: 2087990 - RNA, 19 nt, Artificial Sequence
  Description of Artificial Sequence: Synthetic oligonucleotide
gguauccagcugcuggcaa

SEQ ID NO: 2087991 - RNA, 19 nt, Artificial Sequence
  Description of Artificial Sequence: Synthetic oligonucleotide
gcucgguggccuuuucuuc

SEQ ID NO: 2087992 - RNA, 19 nt, Artificial Sequence
  Description of Artificial Sequence: Synthetic oligonucleotide
cucggauggggcgcugcug

SEQ ID NO: 2087993 - RNA, 19 nt, Artificial Sequence
  Description of Artificial Sequence: Synthetic oligonucleotide
auggggcgcugcugacguc

SEQ ID NO: 2087994 - RNA, 19 nt, Artificial Sequence
  Description of Artificial Sequence: Synthetic oligonucleotide
acgucgguauuggcaguca

SEQ ID NO: 2087995 - RNA, 19 nt, Artificial Sequence
  Description of Artificial Sequence: Synthetic oligonucleotide
gggcaauuugaagauagau

SEQ ID NO: 2087996 - RNA, 19 nt, Artificial Sequence
  Description of Artificial Sequence: Synthetic oligonucleotide
cagagcgaacccuuuguuu

SEQ ID NO: 2087997 - RNA, 19 nt, Artificial Sequence
  Description of Artificial Sequence: Synthetic oligonucleotide
cguuuuaauaaugacucgu

SEQ ID NO: 2087998 - RNA, 19 nt, Artificial Sequence
  Description of Artificial Sequence: Synthetic oligonucleotide
cagucgcauccggaacugc

SEQ ID NO: 2087999 - RNA, 19 nt, Artificial Sequence
  Description of Artificial Sequence: Synthetic oligonucleotide
guucgaaaccacacagaau

SEQ ID NO: 2088000 - RNA, 19 nt, Artificial Sequence
  Description of Artificial Sequence: Synthetic oligonucleotide
cuccucaggucuccuucga

SEQ ID NO: 2088001 - RNA, 19 nt, Artificial Sequence
  Description of Artificial Sequence: Synthetic oligonucleotide
cguaggcugucccacacca

SEQ ID NO: 2088002 - RNA, 19 nt, Artificial Sequence
  Description of Artificial Sequence: Synthetic oligonucleotide
ccaugcuuuauugggaaua

SEQ ID NO: 2088003 - RNA, 19 nt, Artificial Sequence
  Description of Artificial Sequence: Synthetic oligonucleotide
ggcacgccuggucugauau

SEQ ID NO: 2088004 - RNA, 19 nt, Artificial Sequence
  Description of Artificial Sequence: Synthetic oligonucleotide
uggcacgccuggucugaua

SEQ ID NO: 2088005 - RNA, 19 nt, Artificial Sequence
  Description of Artificial Sequence: Synthetic oligonucleotide
gcaaacugucaguuccacu

SEQ ID NO: 2088006 - RNA, 19 nt, Artificial Sequence
  Description of Artificial Sequence: Synthetic oligonucleotide
gucaugaucugcagagguu

SEQ ID NO: 2088007 - RNA, 19 nt, Artificial Sequence
  Description of Artificial Sequence: Synthetic oligonucleotide
gcgaacccuuuguuuucac

SEQ ID NO: 2088008 - RNA, 19 nt, Artificial Sequence
  Description of Artificial Sequence: Synthetic oligonucleotide
agguugguccugggcaauu

SEQ ID NO: 2088009 - RNA, 19 nt, Artificial Sequence
  Description of Artificial Sequence: Synthetic oligonucleotide
uuggcacgccuggucugau

SEQ ID NO: 2088010 - RNA, 19 nt, Artificial Sequence
  Description of Artificial Sequence: Synthetic oligonucleotide
cgcauccggaacugcucgg

SEQ ID NO: 2088011 - RNA, 19 nt, Artificial Sequence
  Description of Artificial Sequence: Synthetic oligonucleotide
cgguauuggcagucacggc

SEQ ID NO: 2088012 - RNA, 19 nt, Artificial Sequence
  Description of Artificial Sequence: Synthetic oligonucleotide
ccucaggucuccuucgagu

SEQ ID NO: 2088013 - RNA, 19 nt, Artificial Sequence
  Description of Artificial Sequence: Synthetic oligonucleotide
gcucuucucgcaaguagcu

SEQ ID NO: 2088014 - RNA, 19 nt, Artificial Sequence
  Description of Artificial Sequence: Synthetic oligonucleotide
cgucgguauuggcagucac

SEQ ID NO: 2088015 - RNA, 19 nt, Artificial Sequence
  Description of Artificial Sequence: Synthetic oligonucleotide
cccacucuuguaccccauc

SEQ ID NO: 2088016 - RNA, 19 nt, Artificial Sequence
  Description of Artificial Sequence: Synthetic oligonucleotide
ccacucuuguaccccaucu

SEQ ID NO: 2088017 - RNA, 19 nt, Artificial Sequence
  Description of Artificial Sequence: Synthetic oligonucleotide
caauaccaucuccacucuu

SEQ ID NO: 2088018 - RNA, 19 nt, Artificial Sequence
  Description of Artificial Sequence: Synthetic oligonucleotide
uugcucggauggggcgcug

SEQ ID NO: 2088019 - RNA, 19 nt, Artificial Sequence
  Description of Artificial Sequence: Synthetic oligonucleotide
cugcucgguggccuuuucu

SEQ ID NO: 2088020 - RNA, 19 nt, Artificial Sequence
  Description of Artificial Sequence: Synthetic oligonucleotide
caacccgaugucacgucuu

SEQ ID NO: 2088021 - RNA, 19 nt, Artificial Sequence
  Description of Artificial Sequence: Synthetic oligonucleotide
cucgugaccuaugccacuu

SEQ ID NO: 2088022 - RNA, 19 nt, Artificial Sequence
  Description of Artificial Sequence: Synthetic oligonucleotide
cacagccuagugcauucuu

SEQ ID NO: 2088023 - RNA, 19 nt, Artificial Sequence
  Description of Artificial Sequence: Synthetic oligonucleotide
gagguugguccugggcaau

SEQ ID NO: 2088024 - RNA, 19 nt, Artificial Sequence
  Description of Artificial Sequence: Synthetic oligonucleotide
gcagagcgaacccuuuguu

SEQ ID NO: 2088025 - RNA, 19 nt, Artificial Sequence
  Description of Artificial Sequence: Synthetic oligonucleotide
gcacgccuggucugauauc

SEQ ID NO: 2088026 - RNA, 19 nt, Artificial Sequence
  Description of Artificial Sequence: Synthetic oligonucleotide
cccuuuguuuucacagccu

SEQ ID NO: 2088027 - RNA, 19 nt, Artificial Sequence
  Description of Artificial Sequence: Synthetic oligonucleotide
gacgggccucccggaucug

SEQ ID NO: 2088028 - RNA, 19 nt, Artificial Sequence
  Description of Artificial Sequence: Synthetic oligonucleotide
acgccuggucugauaucuu

SEQ ID NO: 2088029 - RNA, 19 nt, Artificial Sequence
  Description of Artificial Sequence: Synthetic oligonucleotide
ccgaugucacgucuuuccu

SEQ ID NO: 2088030 - RNA, 19 nt, Artificial Sequence
  Description of Artificial Sequence: Synthetic oligonucleotide
cgcaaguagcuggugagua

SEQ ID NO: 2088031 - RNA, 19 nt, Artificial Sequence
  Description of Artificial Sequence: Synthetic oligonucleotide
gcaagcucgcuggcuucuc

SEQ ID NO: 2088032 - RNA, 19 nt, Artificial Sequence
  Description of Artificial Sequence: Synthetic oligonucleotide
ggcaagcucgcuggcuucu

SEQ ID NO: 2088033 - RNA, 19 nt, Artificial Sequence
  Description of Artificial Sequence: Synthetic oligonucleotide
gcuggcaagcucgcuggcu

SEQ ID NO: 2088034 - RNA, 19 nt, Artificial Sequence
  Description of Artificial Sequence: Synthetic oligonucleotide
cucgugcauucaucuucau

SEQ ID NO: 2088035 - RNA, 19 nt, Artificial Sequence
  Description of Artificial Sequence: Synthetic oligonucleotide
ccacucuugcccagagccu

SEQ ID NO: 2088036 - RNA, 19 nt, Artificial Sequence
  Description of Artificial Sequence: Synthetic oligonucleotide
gcucggauggggcgcugcu

SEQ ID NO: 2088037 - RNA, 19 nt, Artificial Sequence
  Description of Artificial Sequence: Synthetic oligonucleotide
caguuccacuuugcaggua

SEQ ID NO: 2088038 - RNA, 19 nt, Artificial Sequence
  Description of Artificial Sequence: Synthetic oligonucleotide
gcgcugcugacgucgguau

SEQ ID NO: 2088039 - RNA, 19 nt, Artificial Sequence
  Description of Artificial Sequence: Synthetic oligonucleotide
cggauggggcgcugcugac

SEQ ID NO: 2088040 - RNA, 19 nt, Artificial Sequence
  Description of Artificial Sequence: Synthetic oligonucleotide
ggagcagagcgaacccuuu

SEQ ID NO: 2088041 - RNA, 19 nt, Artificial Sequence
  Description of Artificial Sequence: Synthetic oligonucleotide
cccggaucugccucagcau

SEQ ID NO: 2088042 - RNA, 19 nt, Artificial Sequence
  Description of Artificial Sequence: Synthetic oligonucleotide
cgugaccuaugccacuuuu

SEQ ID NO: 2088043 - RNA, 19 nt, Artificial Sequence
  Description of Artificial Sequence: Synthetic oligonucleotide
cgacgggccucccggaucu

SEQ ID NO: 2088044 - RNA, 19 nt, Artificial Sequence
  Description of Artificial Sequence: Synthetic oligonucleotide
ggucuccuucgaguuucau

SEQ ID NO: 2088045 - RNA, 19 nt, Artificial Sequence
  Description of Artificial Sequence: Synthetic oligonucleotide
ccucagcauuggcacgccu

SEQ ID NO: 2088046 - RNA, 19 nt, Artificial Sequence
  Description of Artificial Sequence: Synthetic oligonucleotide
gcccacucuuguaccccau

SEQ ID NO: 2088047 - RNA, 19 nt, Artificial Sequence
  Description of Artificial Sequence: Synthetic oligonucleotide
aauuaagagcauuucagcc

SEQ ID NO: 2088048 - RNA, 19 nt, Artificial Sequence
  Description of Artificial Sequence: Synthetic oligonucleotide
aaauuaauaauuguagacc

SEQ ID NO: 2088049 - RNA, 19 nt, Artificial Sequence
  Description of Artificial Sequence: Synthetic oligonucleotide
aauuauauaaccuuggcaa

SEQ ID NO: 2088050 - RNA, 19 nt, Artificial Sequence
  Description of Artificial Sequence: Synthetic oligonucleotide
aauaaaaucugauccugcc

SEQ ID NO: 2088051 - RNA, 19 nt, Artificial Sequence
  Description of Artificial Sequence: Synthetic oligonucleotide
auucuuaaauuauauaacc

SEQ ID NO: 2088052 - RNA, 19 nt, Artificial Sequence
  Description of Artificial Sequence: Synthetic oligonucleotide
uuuugaguuaguuucaggg

SEQ ID NO: 2088053 - RNA, 19 nt, Artificial Sequence
  Description of Artificial Sequence: Synthetic oligonucleotide
uccuuuauaagagagagcc

SEQ ID NO: 2088054 - RNA, 19 nt, Artificial Sequence
  Description of Artificial Sequence: Synthetic oligonucleotide
auaaccuuggcaauuaugc

SEQ ID NO: 2088055 - RNA, 19 nt, Artificial Sequence
  Description of Artificial Sequence: Synthetic oligonucleotide
aaauuauauaaccuuggca

SEQ ID NO: 2088056 - RNA, 19 nt, Artificial Sequence
  Description of Artificial Sequence: Synthetic oligonucleotide
uuuuaagaggucuugccgg

SEQ ID NO: 2088057 - RNA, 19 nt, Artificial Sequence
  Description of Artificial Sequence: Synthetic oligonucleotide
aggauaaacacagacggcc

SEQ ID NO: 2088058 - RNA, 19 nt, Artificial Sequence
  Description of Artificial Sequence: Synthetic oligonucleotide
uguaacagccuucaggagc

SEQ ID NO: 2088059 - RNA, 19 nt, Artificial Sequence
  Description of Artificial Sequence: Synthetic oligonucleotide
uuugaguuaguuucagggg

SEQ ID NO: 2088060 - RNA, 19 nt, Artificial Sequence
  Description of Artificial Sequence: Synthetic oligonucleotide
aucaugauaagcugcguac

SEQ ID NO: 2088061 - RNA, 19 nt, Artificial Sequence
  Description of Artificial Sequence: Synthetic oligonucleotide
cuccuaauaauuaagagca

SEQ ID NO: 2088062 - RNA, 19 nt, Artificial Sequence
  Description of Artificial Sequence: Synthetic oligonucleotide
uaagagagagccaugcaag

SEQ ID NO: 2088063 - RNA, 19 nt, Artificial Sequence
  Description of Artificial Sequence: Synthetic oligonucleotide
cuauucuuaaauuauauaa

SEQ ID NO: 2088064 - RNA, 19 nt, Artificial Sequence
  Description of Artificial Sequence: Synthetic oligonucleotide
ugaccuaagacaucggaag

SEQ ID NO: 2088065 - RNA, 19 nt, Artificial Sequence
  Description of Artificial Sequence: Synthetic oligonucleotide
aaaagucaguuaccuauuc

SEQ ID NO: 2088066 - RNA, 19 nt, Artificial Sequence
  Description of Artificial Sequence: Synthetic oligonucleotide
uucuuaaauuauauaaccu

SEQ ID NO: 2088067 - RNA, 19 nt, Artificial Sequence
  Description of Artificial Sequence: Synthetic oligonucleotide
ucuuaaauuauauaaccuu

SEQ ID NO: 2088068 - RNA, 19 nt, Artificial Sequence
  Description of Artificial Sequence: Synthetic oligonucleotide
uugucgugcauauuuaaag

SEQ ID NO: 2088069 - RNA, 19 nt, Artificial Sequence
  Description of Artificial Sequence: Synthetic oligonucleotide
agagaacuggccccuaucc

SEQ ID NO: 2088070 - RNA, 19 nt, Artificial Sequence
  Description of Artificial Sequence: Synthetic oligonucleotide
uggauauuuggcuuuguag

SEQ ID NO: 2088071 - RNA, 19 nt, Artificial Sequence
  Description of Artificial Sequence: Synthetic oligonucleotide
gcaggauaaacacagacgg

SEQ ID NO: 2088072 - RNA, 19 nt, Artificial Sequence
  Description of Artificial Sequence: Synthetic oligonucleotide
uugaguuaguuucagggga

SEQ ID NO: 2088073 - RNA, 19 nt, Artificial Sequence
  Description of Artificial Sequence: Synthetic oligonucleotide
cuuuuaagaggucuugccg

SEQ ID NO: 2088074 - RNA, 19 nt, Artificial Sequence
  Description of Artificial Sequence: Synthetic oligonucleotide
uuggggaaaagucaguuac

SEQ ID NO: 2088075 - RNA, 19 nt, Artificial Sequence
  Description of Artificial Sequence: Synthetic oligonucleotide
auuaagagcauuucagccu

SEQ ID NO: 2088076 - RNA, 19 nt, Artificial Sequence
  Description of Artificial Sequence: Synthetic oligonucleotide
uccaccgccagucugaucu

SEQ ID NO: 2088077 - RNA, 19 nt, Artificial Sequence
  Description of Artificial Sequence: Synthetic oligonucleotide
agguuuaaagccuaccuug

SEQ ID NO: 2088078 - RNA, 19 nt, Artificial Sequence
  Description of Artificial Sequence: Synthetic oligonucleotide
uuuaccguuucuuuuccag

SEQ ID NO: 2088079 - RNA, 19 nt, Artificial Sequence
  Description of Artificial Sequence: Synthetic oligonucleotide
aagaucaugauaagcugcg

SEQ ID NO: 2088080 - RNA, 19 nt, Artificial Sequence
  Description of Artificial Sequence: Synthetic oligonucleotide
ggauauuuggcuuuguagc

SEQ ID NO: 2088081 - RNA, 19 nt, Artificial Sequence
  Description of Artificial Sequence: Synthetic oligonucleotide
aacauuagagaacguguca

SEQ ID NO: 2088082 - RNA, 19 nt, Artificial Sequence
  Description of Artificial Sequence: Synthetic oligonucleotide
agucugaucucuuccaguc

SEQ ID NO: 2088083 - RNA, 19 nt, Artificial Sequence
  Description of Artificial Sequence: Synthetic oligonucleotide
uucaggggagauuuuauug

SEQ ID NO: 2088084 - RNA, 19 nt, Artificial Sequence
  Description of Artificial Sequence: Synthetic oligonucleotide
uuauaagagagagccaugc

SEQ ID NO: 2088085 - RNA, 19 nt, Artificial Sequence
  Description of Artificial Sequence: Synthetic oligonucleotide
aucucuaauggcccguagc

SEQ ID NO: 2088086 - RNA, 19 nt, Artificial Sequence
  Description of Artificial Sequence: Synthetic oligonucleotide
uauaucugccucucgaugu

SEQ ID NO: 2088087 - RNA, 19 nt, Artificial Sequence
  Description of Artificial Sequence: Synthetic oligonucleotide
uuaccuauucuuaaauuau

SEQ ID NO: 2088088 - RNA, 19 nt, Artificial Sequence
  Description of Artificial Sequence: Synthetic oligonucleotide
ugucgugcauauuuaaagc

SEQ ID NO: 2088089 - RNA, 19 nt, Artificial Sequence
  Description of Artificial Sequence: Synthetic oligonucleotide
aaaaucugauccugccauc

SEQ ID NO: 2088090 - RNA, 19 nt, Artificial Sequence
  Description of Artificial Sequence: Synthetic oligonucleotide
uauaaccuuggcaauuaug

SEQ ID NO: 2088091 - RNA, 19 nt, Artificial Sequence
  Description of Artificial Sequence: Synthetic oligonucleotide
uucacagcgucgcauaccc

SEQ ID NO: 2088092 - RNA, 19 nt, Artificial Sequence
  Description of Artificial Sequence: Synthetic oligonucleotide
uuaagagcauuucagccuc

SEQ ID NO: 2088093 - RNA, 19 nt, Artificial Sequence
  Description of Artificial Sequence: Synthetic oligonucleotide
uugaacauuagagaacgug

SEQ ID NO: 2088094 - RNA, 19 nt, Artificial Sequence
  Description of Artificial Sequence: Synthetic oligonucleotide
uuaaagccuaccuuguuuc

SEQ ID NO: 2088095 - RNA, 19 nt, Artificial Sequence
  Description of Artificial Sequence: Synthetic oligonucleotide
aaccuuggcaauuaugcaa

SEQ ID NO: 2088096 - RNA, 19 nt, Artificial Sequence
  Description of Artificial Sequence: Synthetic oligonucleotide
uagagaacgugucaucccc

SEQ ID NO: 2088097 - RNA, 19 nt, Artificial Sequence
  Description of Artificial Sequence: Synthetic oligonucleotide
guaccguccagucacgugg

SEQ ID NO: 2088098 - RNA, 19 nt, Artificial Sequence
  Description of Artificial Sequence: Synthetic oligonucleotide
gaagaucaugauaagcugc

SEQ ID NO: 2088099 - RNA, 19 nt, Artificial Sequence
  Description of Artificial Sequence: Synthetic oligonucleotide
aauuguagaccuccuaaua

SEQ ID NO: 2088100 - RNA, 19 nt, Artificial Sequence
  Description of Artificial Sequence: Synthetic oligonucleotide
uuuaaagccuaccuuguuu

SEQ ID NO: 2088101 - RNA, 19 nt, Artificial Sequence
  Description of Artificial Sequence: Synthetic oligonucleotide
ugaguuaguuucaggggag

SEQ ID NO: 2088102 - RNA, 19 nt, Artificial Sequence
  Description of Artificial Sequence: Synthetic oligonucleotide
uuuauaagagagagccaug

SEQ ID NO: 2088103 - RNA, 19 nt, Artificial Sequence
  Description of Artificial Sequence: Synthetic oligonucleotide
ugaucagaguuccacauua

SEQ ID NO: 2088104 - RNA, 19 nt, Artificial Sequence
  Description of Artificial Sequence: Synthetic oligonucleotide
uagaagucuuaauaaaauc

SEQ ID NO: 2088105 - RNA, 19 nt, Artificial Sequence
  Description of Artificial Sequence: Synthetic oligonucleotide
aauaauuguagaccuccua

SEQ ID NO: 2088106 - RNA, 19 nt, Artificial Sequence
  Description of Artificial Sequence: Synthetic oligonucleotide
ucugaucucuuccagucgu

SEQ ID NO: 2088107 - RNA, 19 nt, Artificial Sequence
  Description of Artificial Sequence: Synthetic oligonucleotide
uccggaagaggucaggugu

SEQ ID NO: 2088108 - RNA, 19 nt, Artificial Sequence
  Description of Artificial Sequence: Synthetic oligonucleotide
gagccguugaacauuagag

SEQ ID NO: 2088109 - RNA, 19 nt, Artificial Sequence
  Description of Artificial Sequence: Synthetic oligonucleotide
ugccggauuggauauuugg

SEQ ID NO: 2088110 - RNA, 19 nt, Artificial Sequence
  Description of Artificial Sequence: Synthetic oligonucleotide
aaaugagucuguccagcug

SEQ ID NO: 2088111 - RNA, 19 nt, Artificial Sequence
  Description of Artificial Sequence: Synthetic oligonucleotide
accuccuaauaauuaagag

SEQ ID NO: 2088112 - RNA, 19 nt, Artificial Sequence
  Description of Artificial Sequence: Synthetic oligonucleotide
gggaagguggcauuuaccg

SEQ ID NO: 2088113 - RNA, 19 nt, Artificial Sequence
  Description of Artificial Sequence: Synthetic oligonucleotide
caugauaagcugcguaccg

SEQ ID NO: 2088114 - RNA, 19 nt, Artificial Sequence
  Description of Artificial Sequence: Synthetic oligonucleotide
ugguauaucugccucucga

SEQ ID NO: 2088115 - RNA, 19 nt, Artificial Sequence
  Description of Artificial Sequence: Synthetic oligonucleotide
uuugaucagaguuccacau

SEQ ID NO: 2088116 - RNA, 19 nt, Artificial Sequence
  Description of Artificial Sequence: Synthetic oligonucleotide
auaaaaucugauccugcca

SEQ ID NO: 2088117 - RNA, 19 nt, Artificial Sequence
  Description of Artificial Sequence: Synthetic oligonucleotide
aggucuauacauguaacag

SEQ ID NO: 2088118 - RNA, 19 nt, Artificial Sequence
  Description of Artificial Sequence: Synthetic oligonucleotide
uauacauguaacagccuuc

SEQ ID NO: 2088119 - RNA, 19 nt, Artificial Sequence
  Description of Artificial Sequence: Synthetic oligonucleotide
gauaaacacagacggccgc

SEQ ID NO: 2088120 - RNA, 19 nt, Artificial Sequence
  Description of Artificial Sequence: Synthetic oligonucleotide
caucggaagaucaugauaa

SEQ ID NO: 2088121 - RNA, 19 nt, Artificial Sequence
  Description of Artificial Sequence: Synthetic oligonucleotide
uuaguuucaggggagauuu

SEQ ID NO: 2088122 - RNA, 19 nt, Artificial Sequence
  Description of Artificial Sequence: Synthetic oligonucleotide
gucuuaauaaaaucugauc

SEQ ID NO: 2088123 - RNA, 19 nt, Artificial Sequence
  Description of Artificial Sequence: Synthetic oligonucleotide
auugcuaccaggcuggcuu

SEQ ID NO: 2088124 - RNA, 19 nt, Artificial Sequence
  Description of Artificial Sequence: Synthetic oligonucleotide
aagccuaccuuguuuccag

SEQ ID NO: 2088125 - RNA, 19 nt, Artificial Sequence
  Description of Artificial Sequence: Synthetic oligonucleotide
aagacaucggaagaucaug

SEQ ID NO: 2088126 - RNA, 19 nt, Artificial Sequence
  Description of Artificial Sequence: Synthetic oligonucleotide
accacgucgauuucaguag

SEQ ID NO: 2088127 - RNA, 19 nt, Artificial Sequence
  Description of Artificial Sequence: Synthetic oligonucleotide
uauaagagagagccaugca

SEQ ID NO: 2088128 - RNA, 19 nt, Artificial Sequence
  Description of Artificial Sequence: Synthetic oligonucleotide
ccagucagcaccaaggucc

SEQ ID NO: 2088129 - RNA, 19 nt, Artificial Sequence
  Description of Artificial Sequence: Synthetic oligonucleotide
cagcuugcggccuucagcg

SEQ ID NO: 2088130 - RNA, 19 nt, Artificial Sequence
  Description of Artificial Sequence: Synthetic oligonucleotide
ccuccuaauaauuaagagc

SEQ ID NO: 2088131 - RNA, 19 nt, Artificial Sequence
  Description of Artificial Sequence: Synthetic oligonucleotide
aagaggucuugccggauug

SEQ ID NO: 2088132 - RNA, 19 nt, Artificial Sequence
  Description of Artificial Sequence: Synthetic oligonucleotide
aagucuuaauaaaaucuga

SEQ ID NO: 2088133 - RNA, 19 nt, Artificial Sequence
  Description of Artificial Sequence: Synthetic oligonucleotide
aucgcuacugggaaggugg

SEQ ID NO: 2088134 - RNA, 19 nt, Artificial Sequence
  Description of Artificial Sequence: Synthetic oligonucleotide
uuuguagcagagccguuga

SEQ ID NO: 2088135 - RNA, 19 nt, Artificial Sequence
  Description of Artificial Sequence: Synthetic oligonucleotide
ucaaaugagucuguccagc

SEQ ID NO: 2088136 - RNA, 19 nt, Artificial Sequence
  Description of Artificial Sequence: Synthetic oligonucleotide
uuugucgugcauauuuaaa

SEQ ID NO: 2088137 - RNA, 19 nt, Artificial Sequence
  Description of Artificial Sequence: Synthetic oligonucleotide
agcauuacgaucgcuacug

SEQ ID NO: 2088138 - RNA, 19 nt, Artificial Sequence
  Description of Artificial Sequence: Synthetic oligonucleotide
cauuacgaucgcuacuggg

SEQ ID NO: 2088139 - RNA, 19 nt, Artificial Sequence
  Description of Artificial Sequence: Synthetic oligonucleotide
ccuguuaaugaccacgucg

SEQ ID NO: 2088140 - RNA, 19 nt, Artificial Sequence
  Description of Artificial Sequence: Synthetic oligonucleotide
aauggcccguagcauuacg

SEQ ID NO: 2088141 - RNA, 19 nt, Artificial Sequence
  Description of Artificial Sequence: Synthetic oligonucleotide
ugcaagggacuccuuugcg

SEQ ID NO: 2088142 - RNA, 19 nt, Artificial Sequence
  Description of Artificial Sequence: Synthetic oligonucleotide
aaaucugauccugccauca

SEQ ID NO: 2088143 - RNA, 19 nt, Artificial Sequence
  Description of Artificial Sequence: Synthetic oligonucleotide
cacguggugguauaucugc

SEQ ID NO: 2088144 - RNA, 19 nt, Artificial Sequence
  Description of Artificial Sequence: Synthetic oligonucleotide
aucauugcuaccaggcugg

SEQ ID NO: 2088145 - RNA, 19 nt, Artificial Sequence
  Description of Artificial Sequence: Synthetic oligonucleotide
gagaacuggccccuauccg

SEQ ID NO: 2088146 - RNA, 19 nt, Artificial Sequence
  Description of Artificial Sequence: Synthetic oligonucleotide
uccuuugcggugcggaugc

SEQ ID NO: 2088147 - RNA, 19 nt, Artificial Sequence
  Description of Artificial Sequence: Synthetic oligonucleotide
uaauuguagaccuccuaau

SEQ ID NO: 2088148 - RNA, 19 nt, Artificial Sequence
  Description of Artificial Sequence: Synthetic oligonucleotide
uagaccuccuaauaauuaa

SEQ ID NO: 2088149 - RNA, 19 nt, Artificial Sequence
  Description of Artificial Sequence: Synthetic oligonucleotide
ugcggaugccuccugcagg

SEQ ID NO: 2088150 - RNA, 19 nt, Artificial Sequence
  Description of Artificial Sequence: Synthetic oligonucleotide
uuguagaccuccuaauaau

SEQ ID NO: 2088151 - RNA, 19 nt, Artificial Sequence
  Description of Artificial Sequence: Synthetic oligonucleotide
gauuuuauuggggaaaagu

SEQ ID NO: 2088152 - RNA, 19 nt, Artificial Sequence
  Description of Artificial Sequence: Synthetic oligonucleotide
aguagaagucuuaauaaaa

SEQ ID NO: 2088153 - RNA, 19 nt, Artificial Sequence
  Description of Artificial Sequence: Synthetic oligonucleotide
guagcagagccguugaaca

SEQ ID NO: 2088154 - RNA, 19 nt, Artificial Sequence
  Description of Artificial Sequence: Synthetic oligonucleotide
ucaugauaagcugcguacc

SEQ ID NO: 2088155 - RNA, 19 nt, Artificial Sequence
  Description of Artificial Sequence: Synthetic oligonucleotide
auuacgaucgcuacuggga

SEQ ID NO: 2088156 - RNA, 19 nt, Artificial Sequence
  Description of Artificial Sequence: Synthetic oligonucleotide
agcaccaagguccuguuaa

SEQ ID NO: 2088157 - RNA, 19 nt, Artificial Sequence
  Description of Artificial Sequence: Synthetic oligonucleotide
guagcuccauccuccaccg

SEQ ID NO: 2088158 - RNA, 19 nt, Artificial Sequence
  Description of Artificial Sequence: Synthetic oligonucleotide
caggggagauuuuauuggg

SEQ ID NO: 2088159 - RNA, 19 nt, Artificial Sequence
  Description of Artificial Sequence: Synthetic oligonucleotide
acccgggcaggauaaacac

SEQ ID NO: 2088160 - RNA, 19 nt, Artificial Sequence
  Description of Artificial Sequence: Synthetic oligonucleotide
ucuaauggcccguagcauu

SEQ ID NO: 2088161 - RNA, 19 nt, Artificial Sequence
  Description of Artificial Sequence: Synthetic oligonucleotide
aaugaccacgucgauuuca

SEQ ID NO: 2088162 - RNA, 19 nt, Artificial Sequence
  Description of Artificial Sequence: Synthetic oligonucleotide
gaggucuauacauguaaca

SEQ ID NO: 2088163 - RNA, 19 nt, Artificial Sequence
  Description of Artificial Sequence: Synthetic oligonucleotide
ucggaagaucaugauaagc

SEQ ID NO: 2088164 - RNA, 19 nt, Artificial Sequence
  Description of Artificial Sequence: Synthetic oligonucleotide
guauaucugccucucgaug

SEQ ID NO: 2088165 - RNA, 19 nt, Artificial Sequence
  Description of Artificial Sequence: Synthetic oligonucleotide
uuacgaucgcuacugggaa

SEQ ID NO: 2088166 - RNA, 19 nt, Artificial Sequence
  Description of Artificial Sequence: Synthetic oligonucleotide
guagcauuacgaucgcuac

SEQ ID NO: 2088167 - RNA, 19 nt, Artificial Sequence
  Description of Artificial Sequence: Synthetic oligonucleotide
cugcugaccuaagacaucg

SEQ ID NO: 2088168 - RNA, 19 nt, Artificial Sequence
  Description of Artificial Sequence: Synthetic oligonucleotide
caugcaagggacuccuuug

SEQ ID NO: 2088169 - RNA, 19 nt, Artificial Sequence
  Description of Artificial Sequence: Synthetic oligonucleotide
gaacauuagagaacguguc

SEQ ID NO: 2088170 - RNA, 19 nt, Artificial Sequence
  Description of Artificial Sequence: Synthetic oligonucleotide
uguagcagagccguugaac

SEQ ID NO: 2088171 - RNA, 19 nt, Artificial Sequence
  Description of Artificial Sequence: Synthetic oligonucleotide
ugauaagcugcguaccguc

SEQ ID NO: 2088172 - RNA, 19 nt, Artificial Sequence
  Description of Artificial Sequence: Synthetic oligonucleotide
aagcuuuuaagaggucuug

SEQ ID NO: 2088173 - RNA, 19 nt, Artificial Sequence
  Description of Artificial Sequence: Synthetic oligonucleotide
uaccuauucuuaaauuaua

SEQ ID NO: 2088174 - RNA, 19 nt, Artificial Sequence
  Description of Artificial Sequence: Synthetic oligonucleotide
agaguuccacauuacaguu

SEQ ID NO: 2088175 - RNA, 19 nt, Artificial Sequence
  Description of Artificial Sequence: Synthetic oligonucleotide
agccguugaacauuagaga

SEQ ID NO: 2088176 - RNA, 19 nt, Artificial Sequence
  Description of Artificial Sequence: Synthetic oligonucleotide
auauuuggcuuuguagcag

SEQ ID NO: 2088177 - RNA, 19 nt, Artificial Sequence
  Description of Artificial Sequence: Synthetic oligonucleotide
uaaagccuaccuuguuucc

SEQ ID NO: 2088178 - RNA, 19 nt, Artificial Sequence
  Description of Artificial Sequence: Synthetic oligonucleotide
agcgccuucacagcgucgc

SEQ ID NO: 2088179 - RNA, 19 nt, Artificial Sequence
  Description of Artificial Sequence: Synthetic oligonucleotide
aguuaccuauucuuaaauu

SEQ ID NO: 2088180 - RNA, 19 nt, Artificial Sequence
  Description of Artificial Sequence: Synthetic oligonucleotide
ucuauacauguaacagccu

SEQ ID NO: 2088181 - RNA, 19 nt, Artificial Sequence
  Description of Artificial Sequence: Synthetic oligonucleotide
ucgugcauauuuaaagcuu

SEQ ID NO: 2088182 - RNA, 19 nt, Artificial Sequence
  Description of Artificial Sequence: Synthetic oligonucleotide
uuauuggggaaaagucagu

SEQ ID NO: 2088183 - RNA, 19 nt, Artificial Sequence
  Description of Artificial Sequence: Synthetic oligonucleotide
acgaucgcuacugggaagg

SEQ ID NO: 2088184 - RNA, 19 nt, Artificial Sequence
  Description of Artificial Sequence: Synthetic oligonucleotide
ucgugucuucaaaugaguc

SEQ ID NO: 2088185 - RNA, 19 nt, Artificial Sequence
  Description of Artificial Sequence: Synthetic oligonucleotide
cuaagacaucggaagauca

SEQ ID NO: 2088186 - RNA, 19 nt, Artificial Sequence
  Description of Artificial Sequence: Synthetic oligonucleotide
aaagccuaccuuguuucca

SEQ ID NO: 2088187 - RNA, 19 nt, Artificial Sequence
  Description of Artificial Sequence: Synthetic oligonucleotide
gguccuguuaaugaccacg

SEQ ID NO: 2088188 - RNA, 19 nt, Artificial Sequence
  Description of Artificial Sequence: Synthetic oligonucleotide
uaagcugcguaccguccag

SEQ ID NO: 2088189 - RNA, 19 nt, Artificial Sequence
  Description of Artificial Sequence: Synthetic oligonucleotide
uuggauauuuggcuuugua

SEQ ID NO: 2088190 - RNA, 19 nt, Artificial Sequence
  Description of Artificial Sequence: Synthetic oligonucleotide
uacccgggcaggauaaaca

SEQ ID NO: 2088191 - RNA, 19 nt, Artificial Sequence
  Description of Artificial Sequence: Synthetic oligonucleotide
ggcaggauaaacacagacg

SEQ ID NO: 2088192 - RNA, 19 nt, Artificial Sequence
  Description of Artificial Sequence: Synthetic oligonucleotide
agucuuaauaaaaucugau

SEQ ID NO: 2088193 - RNA, 19 nt, Artificial Sequence
  Description of Artificial Sequence: Synthetic oligonucleotide
cugcguaccguccagucac

SEQ ID NO: 2088194 - RNA, 19 nt, Artificial Sequence
  Description of Artificial Sequence: Synthetic oligonucleotide
gaucaugauaagcugcgua

SEQ ID NO: 2088195 - RNA, 19 nt, Artificial Sequence
  Description of Artificial Sequence: Synthetic oligonucleotide
uccccagaaagugugguga

SEQ ID NO: 2088196 - RNA, 19 nt, Artificial Sequence
  Description of Artificial Sequence: Synthetic oligonucleotide
cuuuguagcagagccguug

SEQ ID NO: 2088197 - RNA, 19 nt, Artificial Sequence
  Description of Artificial Sequence: Synthetic oligonucleotide
caggauaaacacagacggc

SEQ ID NO: 2088198 - RNA, 19 nt, Artificial Sequence
  Description of Artificial Sequence: Synthetic oligonucleotide
agucgugucuucaaaugag

SEQ ID NO: 2088199 - RNA, 19 nt, Artificial Sequence
  Description of Artificial Sequence: Synthetic oligonucleotide
auccugccaucauugcuac

SEQ ID NO: 2088200 - RNA, 19 nt, Artificial Sequence
  Description of Artificial Sequence: Synthetic oligonucleotide
ggaaaagucaguuaccuau

SEQ ID NO: 2088201 - RNA, 19 nt, Artificial Sequence
  Description of Artificial Sequence: Synthetic oligonucleotide
cauuagagaacgugucauc

SEQ ID NO: 2088202 - RNA, 19 nt, Artificial Sequence
  Description of Artificial Sequence: Synthetic oligonucleotide
acauuagagaacgugucau

SEQ ID NO: 2088203 - RNA, 19 nt, Artificial Sequence
  Description of Artificial Sequence: Synthetic oligonucleotide
gauuggauauuuggcuuug

SEQ ID NO: 2088204 - RNA, 19 nt, Artificial Sequence
  Description of Artificial Sequence: Synthetic oligonucleotide
gaccacgucgauuucagua

SEQ ID NO: 2088205 - RNA, 19 nt, Artificial Sequence
  Description of Artificial Sequence: Synthetic oligonucleotide
uauuggggaaaagucaguu

SEQ ID NO: 2088206 - RNA, 19 nt, Artificial Sequence
  Description of Artificial Sequence: Synthetic oligonucleotide
acaucggaagaucaugaua

SEQ ID NO: 2088207 - RNA, 19 nt, Artificial Sequence
  Description of Artificial Sequence: Synthetic oligonucleotide
aucggaagaucaugauaag

SEQ ID NO: 2088208 - RNA, 19 nt, Artificial Sequence
  Description of Artificial Sequence: Synthetic oligonucleotide
cuuggcaauuaugcaaaag

SEQ ID NO: 2088209 - RNA, 19 nt, Artificial Sequence
  Description of Artificial Sequence: Synthetic oligonucleotide
uuacaaguuguugcaagau

SEQ ID NO: 2088210 - RNA, 19 nt, Artificial Sequence
  Description of Artificial Sequence: Synthetic oligonucleotide
gauaagcugcguaccgucc

SEQ ID NO: 2088211 - RNA, 19 nt, Artificial Sequence
  Description of Artificial Sequence: Synthetic oligonucleotide
gcccguagcauuacgaucg

SEQ ID NO: 2088212 - RNA, 19 nt, Artificial Sequence
  Description of Artificial Sequence: Synthetic oligonucleotide
uagcauuacgaucgcuacu

SEQ ID NO: 2088213 - RNA, 19 nt, Artificial Sequence
  Description of Artificial Sequence: Synthetic oligonucleotide
uuugcggugcggaugccuc

SEQ ID NO: 2088214 - RNA, 19 nt, Artificial Sequence
  Description of Artificial Sequence: Synthetic oligonucleotide
cguugaacauuagagaacg

SEQ ID NO: 2088215 - RNA, 19 nt, Artificial Sequence
  Description of Artificial Sequence: Synthetic oligonucleotide
acggccgcuguggugaugc

SEQ ID NO: 2088216 - RNA, 19 nt, Artificial Sequence
  Description of Artificial Sequence: Synthetic oligonucleotide
gaccuaagacaucggaaga

SEQ ID NO: 2088217 - RNA, 19 nt, Artificial Sequence
  Description of Artificial Sequence: Synthetic oligonucleotide
agaccuccuaauaauuaag

SEQ ID NO: 2088218 - RNA, 19 nt, Artificial Sequence
  Description of Artificial Sequence: Synthetic oligonucleotide
ccuccugcagguuuaaagc

SEQ ID NO: 2088219 - RNA, 19 nt, Artificial Sequence
  Description of Artificial Sequence: Synthetic oligonucleotide
uacgaucgcuacugggaag

SEQ ID NO: 2088220 - RNA, 19 nt, Artificial Sequence
  Description of Artificial Sequence: Synthetic oligonucleotide
gagcauuucagccucacuu

SEQ ID NO: 2088221 - RNA, 19 nt, Artificial Sequence
  Description of Artificial Sequence: Synthetic oligonucleotide
cuuuauaagagagagccau

SEQ ID NO: 2088222 - RNA, 19 nt, Artificial Sequence
  Description of Artificial Sequence: Synthetic oligonucleotide
ugcagguuuaaagccuacc

SEQ ID NO: 2088223 - RNA, 19 nt, Artificial Sequence
  Description of Artificial Sequence: Synthetic oligonucleotide
auguaacagccuucaggag

SEQ ID NO: 2088224 - RNA, 19 nt, Artificial Sequence
  Description of Artificial Sequence: Synthetic oligonucleotide
ggauaaacacagacggccg

SEQ ID NO: 2088225 - RNA, 19 nt, Artificial Sequence
  Description of Artificial Sequence: Synthetic oligonucleotide
gucaguuaccuauucuuaa

SEQ ID NO: 2088226 - RNA, 19 nt, Artificial Sequence
  Description of Artificial Sequence: Synthetic oligonucleotide
gcaagggacuccuuugcgg

SEQ ID NO: 2088227 - RNA, 19 nt, Artificial Sequence
  Description of Artificial Sequence: Synthetic oligonucleotide
aggcuggcuuuguagaugu

SEQ ID NO: 2088228 - RNA, 19 nt, Artificial Sequence
  Description of Artificial Sequence: Synthetic oligonucleotide
agcugcguaccguccaguc

SEQ ID NO: 2088229 - RNA, 19 nt, Artificial Sequence
  Description of Artificial Sequence: Synthetic oligonucleotide
accuauucuuaaauuauau

SEQ ID NO: 2088230 - RNA, 19 nt, Artificial Sequence
  Description of Artificial Sequence: Synthetic oligonucleotide
gaccuccuaauaauuaaga

SEQ ID NO: 2088231 - RNA, 19 nt, Artificial Sequence
  Description of Artificial Sequence: Synthetic oligonucleotide
aagggacuccuuugcggug

SEQ ID NO: 2088232 - RNA, 19 nt, Artificial Sequence
  Description of Artificial Sequence: Synthetic oligonucleotide
gaagguggcauuuaccguu

SEQ ID NO: 2088233 - RNA, 19 nt, Artificial Sequence
  Description of Artificial Sequence: Synthetic oligonucleotide
uccuaauaauuaagagcau

SEQ ID NO: 2088234 - RNA, 19 nt, Artificial Sequence
  Description of Artificial Sequence: Synthetic oligonucleotide
aacgugucauccccagaaa

SEQ ID NO: 2088235 - RNA, 19 nt, Artificial Sequence
  Description of Artificial Sequence: Synthetic oligonucleotide
agauuuuauuggggaaaag

SEQ ID NO: 2088236 - RNA, 19 nt, Artificial Sequence
  Description of Artificial Sequence: Synthetic oligonucleotide
uugaucagaguuccacauu

SEQ ID NO: 2088237 - RNA, 19 nt, Artificial Sequence
  Description of Artificial Sequence: Synthetic oligonucleotide
uguuaaugaccacgucgau

SEQ ID NO: 2088238 - RNA, 19 nt, Artificial Sequence
  Description of Artificial Sequence: Synthetic oligonucleotide
auacccgggcaggauaaac

SEQ ID NO: 2088239 - RNA, 19 nt, Artificial Sequence
  Description of Artificial Sequence: Synthetic oligonucleotide
gaucucuuccagucguguc

SEQ ID NO: 2088240 - RNA, 19 nt, Artificial Sequence
  Description of Artificial Sequence: Synthetic oligonucleotide
gagauuuuauuggggaaaa

SEQ ID NO: 2088241 - RNA, 19 nt, Artificial Sequence
  Description of Artificial Sequence: Synthetic oligonucleotide
ugcugaccuaagacaucgg

SEQ ID NO: 2088242 - RNA, 19 nt, Artificial Sequence
  Description of Artificial Sequence: Synthetic oligonucleotide
gauccugccaucauugcua

SEQ ID NO: 2088243 - RNA, 19 nt, Artificial Sequence
  Description of Artificial Sequence: Synthetic oligonucleotide
gcauuuaccguuucuuuuc

SEQ ID NO: 2088244 - RNA, 19 nt, Artificial Sequence
  Description of Artificial Sequence: Synthetic oligonucleotide
auuuaccguuucuuuucca

SEQ ID NO: 2088245 - RNA, 19 nt, Artificial Sequence
  Description of Artificial Sequence: Synthetic oligonucleotide
ucacgcuucugcgagccug

SEQ ID NO: 2088246 - RNA, 19 nt, Artificial Sequence
  Description of Artificial Sequence: Synthetic oligonucleotide
agggcuucccacuggccag

SEQ ID NO: 2088247 - RNA, 19 nt, Artificial Sequence
  Description of Artificial Sequence: Synthetic oligonucleotide
acgucgauuucaguagcuc

SEQ ID NO: 2088248 - RNA, 19 nt, Artificial Sequence
  Description of Artificial Sequence: Synthetic oligonucleotide
ccgggcaggauaaacacag

SEQ ID NO: 2088249 - RNA, 19 nt, Artificial Sequence
  Description of Artificial Sequence: Synthetic oligonucleotide
gcuucugcgagccuggauc

SEQ ID NO: 2088250 - RNA, 19 nt, Artificial Sequence
  Description of Artificial Sequence: Synthetic oligonucleotide
gucgugcauauuuaaagcu

SEQ ID NO: 2088251 - RNA, 19 nt, Artificial Sequence
  Description of Artificial Sequence: Synthetic oligonucleotide
gccguugaacauuagagaa

SEQ ID NO: 2088252 - RNA, 19 nt, Artificial Sequence
  Description of Artificial Sequence: Synthetic oligonucleotide
cagaguuccacauuacagu

SEQ ID NO: 2088253 - RNA, 19 nt, Artificial Sequence
  Description of Artificial Sequence: Synthetic oligonucleotide
cugaccuaagacaucggaa

SEQ ID NO: 2088254 - RNA, 19 nt, Artificial Sequence
  Description of Artificial Sequence: Synthetic oligonucleotide
augccuuugucgugcauau

SEQ ID NO: 2088255 - RNA, 19 nt, Artificial Sequence
  Description of Artificial Sequence: Synthetic oligonucleotide
ugaucucuuccagucgugu

SEQ ID NO: 2088256 - RNA, 19 nt, Artificial Sequence
  Description of Artificial Sequence: Synthetic oligonucleotide
gugguauaucugccucucg

SEQ ID NO: 2088257 - RNA, 19 nt, Artificial Sequence
  Description of Artificial Sequence: Synthetic oligonucleotide
ggugaugccuuugucgugc

SEQ ID NO: 2088258 - RNA, 19 nt, Artificial Sequence
  Description of Artificial Sequence: Synthetic oligonucleotide
ggggagauuuuauugggga

SEQ ID NO: 2088259 - RNA, 19 nt, Artificial Sequence
  Description of Artificial Sequence: Synthetic oligonucleotide
guagaagucuuaauaaaau

SEQ ID NO: 2088260 - RNA, 19 nt, Artificial Sequence
  Description of Artificial Sequence: Synthetic oligonucleotide
uuccagucgugucuucaaa

SEQ ID NO: 2088261 - RNA, 19 nt, Artificial Sequence
  Description of Artificial Sequence: Synthetic oligonucleotide
uucagcgccuucacagcgu

SEQ ID NO: 2088262 - RNA, 19 nt, Artificial Sequence
  Description of Artificial Sequence: Synthetic oligonucleotide
gggcaggauaaacacagac

SEQ ID NO: 2088263 - RNA, 19 nt, Artificial Sequence
  Description of Artificial Sequence: Synthetic oligonucleotide
ugcguaccguccagucacg

SEQ ID NO: 2088264 - RNA, 19 nt, Artificial Sequence
  Description of Artificial Sequence: Synthetic oligonucleotide
cacgcuucugcgagccugg

SEQ ID NO: 2088265 - RNA, 19 nt, Artificial Sequence
  Description of Artificial Sequence: Synthetic oligonucleotide
ucacagcgucgcauacccg

SEQ ID NO: 2088266 - RNA, 19 nt, Artificial Sequence
  Description of Artificial Sequence: Synthetic oligonucleotide
ucuucacgcuucugcgagc

SEQ ID NO: 2088267 - RNA, 19 nt, Artificial Sequence
  Description of Artificial Sequence: Synthetic oligonucleotide
augauaagcugcguaccgu

SEQ ID NO: 2088268 - RNA, 19 nt, Artificial Sequence
  Description of Artificial Sequence: Synthetic oligonucleotide
agagcauuucagccucacu

SEQ ID NO: 2088269 - RNA, 19 nt, Artificial Sequence
  Description of Artificial Sequence: Synthetic oligonucleotide
gaugccuuugucgugcaua

SEQ ID NO: 2088270 - RNA, 19 nt, Artificial Sequence
  Description of Artificial Sequence: Synthetic oligonucleotide
auuaugcaaaagauauuuu

SEQ ID NO: 2088271 - RNA, 19 nt, Artificial Sequence
  Description of Artificial Sequence: Synthetic oligonucleotide
cuuugucgugcauauuuaa

SEQ ID NO: 2088272 - RNA, 19 nt, Artificial Sequence
  Description of Artificial Sequence: Synthetic oligonucleotide
gaucagaguuccacauuac

SEQ ID NO: 2088273 - RNA, 19 nt, Artificial Sequence
  Description of Artificial Sequence: Synthetic oligonucleotide
aguuucaggggagauuuua

SEQ ID NO: 2088274 - RNA, 19 nt, Artificial Sequence
  Description of Artificial Sequence: Synthetic oligonucleotide
cauuucagccucacuuuga

SEQ ID NO: 2088275 - RNA, 19 nt, Artificial Sequence
  Description of Artificial Sequence: Synthetic oligonucleotide
accuaagacaucggaagau

SEQ ID NO: 2088276 - RNA, 19 nt, Artificial Sequence
  Description of Artificial Sequence: Synthetic oligonucleotide
cagucgugucuucaaauga

SEQ ID NO: 2088277 - RNA, 19 nt, Artificial Sequence
  Description of Artificial Sequence: Synthetic oligonucleotide
aaaucucuaauggcccgua

SEQ ID NO: 2088278 - RNA, 19 nt, Artificial Sequence
  Description of Artificial Sequence: Synthetic oligonucleotide
cuucacagcgucgcauacc

SEQ ID NO: 2088279 - RNA, 19 nt, Artificial Sequence
  Description of Artificial Sequence: Synthetic oligonucleotide
accuuggcaauuaugcaaa

SEQ ID NO: 2088280 - RNA, 19 nt, Artificial Sequence
  Description of Artificial Sequence: Synthetic oligonucleotide
caagaugcuuuucugggcu

SEQ ID NO: 2088281 - RNA, 19 nt, Artificial Sequence
  Description of Artificial Sequence: Synthetic oligonucleotide
gaucgcuacugggaaggug

SEQ ID NO: 2088282 - RNA, 19 nt, Artificial Sequence
  Description of Artificial Sequence: Synthetic oligonucleotide
acuggccccuauccggaag

SEQ ID NO: 2088283 - RNA, 19 nt, Artificial Sequence
  Description of Artificial Sequence: Synthetic oligonucleotide
uggugaugccuuugucgug

SEQ ID NO: 2088284 - RNA, 19 nt, Artificial Sequence
  Description of Artificial Sequence: Synthetic oligonucleotide
cuggaaagccaguggccac

SEQ ID NO: 2088285 - RNA, 19 nt, Artificial Sequence
  Description of Artificial Sequence: Synthetic oligonucleotide
uugccggauuggauauuug

SEQ ID NO: 2088286 - RNA, 19 nt, Artificial Sequence
  Description of Artificial Sequence: Synthetic oligonucleotide
ccaagguccuguuaaugac

SEQ ID NO: 2088287 - RNA, 19 nt, Artificial Sequence
  Description of Artificial Sequence: Synthetic oligonucleotide
cuauccggaagaggucagg

SEQ ID NO: 2088288 - RNA, 19 nt, Artificial Sequence
  Description of Artificial Sequence: Synthetic oligonucleotide
cagaaaguguggugagguc

SEQ ID NO: 2088289 - RNA, 19 nt, Artificial Sequence
  Description of Artificial Sequence: Synthetic oligonucleotide
ucgcuacugggaagguggc

SEQ ID NO: 2088290 - RNA, 19 nt, Artificial Sequence
  Description of Artificial Sequence: Synthetic oligonucleotide
agaacgugucauccccaga

SEQ ID NO: 2088291 - RNA, 19 nt, Artificial Sequence
  Description of Artificial Sequence: Synthetic oligonucleotide
agucaguuaccuauucuua

SEQ ID NO: 2088292 - RNA, 19 nt, Artificial Sequence
  Description of Artificial Sequence: Synthetic oligonucleotide
aguuaguuucaggggagau

SEQ ID NO: 2088293 - RNA, 19 nt, Artificial Sequence
  Description of Artificial Sequence: Synthetic oligonucleotide
cugaucucuuccagucgug

SEQ ID NO: 2088294 - RNA, 19 nt, Artificial Sequence
  Description of Artificial Sequence: Synthetic oligonucleotide
cuaauggcccguagcauua

SEQ ID NO: 2088295 - RNA, 19 nt, Artificial Sequence
  Description of Artificial Sequence: Synthetic oligonucleotide
cagcuccuccuuuauaaga

SEQ ID NO: 2088296 - RNA, 19 nt, Artificial Sequence
  Description of Artificial Sequence: Synthetic oligonucleotide
uuggugaggagggcuuccc

SEQ ID NO: 2088297 - RNA, 19 nt, Artificial Sequence
  Description of Artificial Sequence: Synthetic oligonucleotide
uuguagcagagccguugaa

SEQ ID NO: 2088298 - RNA, 19 nt, Artificial Sequence
  Description of Artificial Sequence: Synthetic oligonucleotide
guagaccuccuaauaauua

SEQ ID NO: 2088299 - RNA, 19 nt, Artificial Sequence
  Description of Artificial Sequence: Synthetic oligonucleotide
acagccgccugguucacuu

SEQ ID NO: 2088300 - RNA, 19 nt, Artificial Sequence
  Description of Artificial Sequence: Synthetic oligonucleotide
uaccguccagucacguggu

SEQ ID NO: 2088301 - RNA, 19 nt, Artificial Sequence
  Description of Artificial Sequence: Synthetic oligonucleotide
uccagucacguggugguau

SEQ ID NO: 2088302 - RNA, 19 nt, Artificial Sequence
  Description of Artificial Sequence: Synthetic oligonucleotide
agcgucgcauacccgggca

SEQ ID NO: 2088303 - RNA, 19 nt, Artificial Sequence
  Description of Artificial Sequence: Synthetic oligonucleotide
ggcaauuaugcaaaagaua

SEQ ID NO: 2088304 - RNA, 19 nt, Artificial Sequence
  Description of Artificial Sequence: Synthetic oligonucleotide
gcugaccuaagacaucgga

SEQ ID NO: 2088305 - RNA, 19 nt, Artificial Sequence
  Description of Artificial Sequence: Synthetic oligonucleotide
ccguugaacauuagagaac

SEQ ID NO: 2088306 - RNA, 19 nt, Artificial Sequence
  Description of Artificial Sequence: Synthetic oligonucleotide
agaucaugauaagcugcgu

SEQ ID NO: 2088307 - RNA, 19 nt, Artificial Sequence
  Description of Artificial Sequence: Synthetic oligonucleotide
caggugucagccacucauc

SEQ ID NO: 2088308 - RNA, 19 nt, Artificial Sequence
  Description of Artificial Sequence: Synthetic oligonucleotide
caccaagguccuguuaaug

SEQ ID NO: 2088309 - RNA, 19 nt, Artificial Sequence
  Description of Artificial Sequence: Synthetic oligonucleotide
ggucuugccggauuggaua

SEQ ID NO: 2088310 - RNA, 19 nt, Artificial Sequence
  Description of Artificial Sequence: Synthetic oligonucleotide
gaguuaguuucaggggaga

SEQ ID NO: 2088311 - RNA, 19 nt, Artificial Sequence
  Description of Artificial Sequence: Synthetic oligonucleotide
gcagguuuaaagccuaccu

SEQ ID NO: 2088312 - RNA, 19 nt, Artificial Sequence
  Description of Artificial Sequence: Synthetic oligonucleotide
caagggacuccuuugcggu

SEQ ID NO: 2088313 - RNA, 19 nt, Artificial Sequence
  Description of Artificial Sequence: Synthetic oligonucleotide
gccucagacagccgccugg

SEQ ID NO: 2088314 - RNA, 19 nt, Artificial Sequence
  Description of Artificial Sequence: Synthetic oligonucleotide
gaacuggccccuauccgga

SEQ ID NO: 2088315 - RNA, 19 nt, Artificial Sequence
  Description of Artificial Sequence: Synthetic oligonucleotide
gaaaucucuaauggcccgu

SEQ ID NO: 2088316 - RNA, 19 nt, Artificial Sequence
  Description of Artificial Sequence: Synthetic oligonucleotide
caaaugagucuguccagcu

SEQ ID NO: 2088317 - RNA, 19 nt, Artificial Sequence
  Description of Artificial Sequence: Synthetic oligonucleotide
uggaucuguucugcccgcc

SEQ ID NO: 2088318 - RNA, 19 nt, Artificial Sequence
  Description of Artificial Sequence: Synthetic oligonucleotide
gacaucggaagaucaugau

SEQ ID NO: 2088319 - RNA, 19 nt, Artificial Sequence
  Description of Artificial Sequence: Synthetic oligonucleotide
cuccuuugcggugcggaug

SEQ ID NO: 2088320 - RNA, 19 nt, Artificial Sequence
  Description of Artificial Sequence: Synthetic oligonucleotide
cugcagguuuaaagccuac

SEQ ID NO: 2088321 - RNA, 19 nt, Artificial Sequence
  Description of Artificial Sequence: Synthetic oligonucleotide
ugaccacgucgauuucagu

SEQ ID NO: 2088322 - RNA, 19 nt, Artificial Sequence
  Description of Artificial Sequence: Synthetic oligonucleotide
agagaacgugucaucccca

SEQ ID NO: 2088323 - RNA, 19 nt, Artificial Sequence
  Description of Artificial Sequence: Synthetic oligonucleotide
auggcccguagcauuacga

SEQ ID NO: 2088324 - RNA, 19 nt, Artificial Sequence
  Description of Artificial Sequence: Synthetic oligonucleotide
aacuggccccuauccggaa

SEQ ID NO: 2088325 - RNA, 19 nt, Artificial Sequence
  Description of Artificial Sequence: Synthetic oligonucleotide
aagguggcauuuaccguuu

SEQ ID NO: 2088326 - RNA, 19 nt, Artificial Sequence
  Description of Artificial Sequence: Synthetic oligonucleotide
ccuaagacaucggaagauc

SEQ ID NO: 2088327 - RNA, 19 nt, Artificial Sequence
  Description of Artificial Sequence: Synthetic oligonucleotide
ucauugcuaccaggcuggc

SEQ ID NO: 2088328 - RNA, 19 nt, Artificial Sequence
  Description of Artificial Sequence: Synthetic oligonucleotide
guuaaugaccacgucgauu

SEQ ID NO: 2088329 - RNA, 19 nt, Artificial Sequence
  Description of Artificial Sequence: Synthetic oligonucleotide
uaauggcccguagcauuac

SEQ ID NO: 2088330 - RNA, 19 nt, Artificial Sequence
  Description of Artificial Sequence: Synthetic oligonucleotide
ggugguauaucugccucuc

SEQ ID NO: 2088331 - RNA, 19 nt, Artificial Sequence
  Description of Artificial Sequence: Synthetic oligonucleotide
uucacgcuucugcgagccu

SEQ ID NO: 2088332 - RNA, 19 nt, Artificial Sequence
  Description of Artificial Sequence: Synthetic oligonucleotide
agccuaccuuguuuccagu

SEQ ID NO: 2088333 - RNA, 19 nt, Artificial Sequence
  Description of Artificial Sequence: Synthetic oligonucleotide
aagcugcguaccguccagu

SEQ ID NO: 2088334 - RNA, 19 nt, Artificial Sequence
  Description of Artificial Sequence: Synthetic oligonucleotide
uaguuucaggggagauuuu

SEQ ID NO: 2088335 - RNA, 19 nt, Artificial Sequence
  Description of Artificial Sequence: Synthetic oligonucleotide
ugaugccuuugucgugcau

SEQ ID NO: 2088336 - RNA, 19 nt, Artificial Sequence
  Description of Artificial Sequence: Synthetic oligonucleotide
ugcgagccuggaucuguuc

SEQ ID NO: 2088337 - RNA, 19 nt, Artificial Sequence
  Description of Artificial Sequence: Synthetic oligonucleotide
ugcggugcggaugccuccu

SEQ ID NO: 2088338 - RNA, 19 nt, Artificial Sequence
  Description of Artificial Sequence: Synthetic oligonucleotide
cagcgucgcauacccgggc

SEQ ID NO: 2088339 - RNA, 19 nt, Artificial Sequence
  Description of Artificial Sequence: Synthetic oligonucleotide
cagguuuaaagccuaccuu

SEQ ID NO: 2088340 - RNA, 19 nt, Artificial Sequence
  Description of Artificial Sequence: Synthetic oligonucleotide
uugcuaccaggcuggcuuu

SEQ ID NO: 2088341 - RNA, 19 nt, Artificial Sequence
  Description of Artificial Sequence: Synthetic oligonucleotide
cuggccccuauccggaaga

SEQ ID NO: 2088342 - RNA, 19 nt, Artificial Sequence
  Description of Artificial Sequence: Synthetic oligonucleotide
cuucugcgagccuggaucu

SEQ ID NO: 2088343 - RNA, 19 nt, Artificial Sequence
  Description of Artificial Sequence: Synthetic oligonucleotide
cccagcuccuccuuuauaa

SEQ ID NO: 2088344 - RNA, 19 nt, Artificial Sequence
  Description of Artificial Sequence: Synthetic oligonucleotide
gguauaucugccucucgau

SEQ ID NO: 2088345 - RNA, 19 nt, Artificial Sequence
  Description of Artificial Sequence: Synthetic oligonucleotide
uggccccuauccggaagag

SEQ ID NO: 2088346 - RNA, 19 nt, Artificial Sequence
  Description of Artificial Sequence: Synthetic oligonucleotide
ccacgucgauuucaguagc

SEQ ID NO: 2088347 - RNA, 19 nt, Artificial Sequence
  Description of Artificial Sequence: Synthetic oligonucleotide
guuaguuucaggggagauu

SEQ ID NO: 2088348 - RNA, 19 nt, Artificial Sequence
  Description of Artificial Sequence: Synthetic oligonucleotide
ggcauuuaccguuucuuuu

SEQ ID NO: 2088349 - RNA, 19 nt, Artificial Sequence
  Description of Artificial Sequence: Synthetic oligonucleotide
ccuauccggaagaggucag

SEQ ID NO: 2088350 - RNA, 19 nt, Artificial Sequence
  Description of Artificial Sequence: Synthetic oligonucleotide
cagagccguugaacauuag

SEQ ID NO: 2088351 - RNA, 19 nt, Artificial Sequence
  Description of Artificial Sequence: Synthetic oligonucleotide
cagcgccuucacagcgucg

SEQ ID NO: 2088352 - RNA, 19 nt, Artificial Sequence
  Description of Artificial Sequence: Synthetic oligonucleotide
ggugcggaugccuccugca

SEQ ID NO: 2088353 - RNA, 19 nt, Artificial Sequence
  Description of Artificial Sequence: Synthetic oligonucleotide
cguagcauuacgaucgcua

SEQ ID NO: 2088354 - RNA, 19 nt, Artificial Sequence
  Description of Artificial Sequence: Synthetic oligonucleotide
ggaagguggcauuuaccgu

SEQ ID NO: 2088355 - RNA, 19 nt, Artificial Sequence
  Description of Artificial Sequence: Synthetic oligonucleotide
ugcccgccucagacagccg

SEQ ID NO: 2088356 - RNA, 19 nt, Artificial Sequence
  Description of Artificial Sequence: Synthetic oligonucleotide
ccggauuggauauuuggcu

SEQ ID NO: 2088357 - RNA, 19 nt, Artificial Sequence
  Description of Artificial Sequence: Synthetic oligonucleotide
gggacuccuuugcggugcg

SEQ ID NO: 2088358 - RNA, 19 nt, Artificial Sequence
  Description of Artificial Sequence: Synthetic oligonucleotide
gcccgccucagacagccgc

SEQ ID NO: 2088359 - RNA, 19 nt, Artificial Sequence
  Description of Artificial Sequence: Synthetic oligonucleotide
ccguccagucacguggugg

SEQ ID NO: 2088360 - RNA, 19 nt, Artificial Sequence
  Description of Artificial Sequence: Synthetic oligonucleotide
cccagaaaguguggugagg

SEQ ID NO: 2088361 - RNA, 19 nt, Artificial Sequence
  Description of Artificial Sequence: Synthetic oligonucleotide
gcugcguaccguccaguca

SEQ ID NO: 2088362 - RNA, 19 nt, Artificial Sequence
  Description of Artificial Sequence: Synthetic oligonucleotide
gccaguggccacugaugcc

SEQ ID NO: 2088363 - RNA, 19 nt, Artificial Sequence
  Description of Artificial Sequence: Synthetic oligonucleotide
ccuucacagcgucgcauac

SEQ ID NO: 2088364 - RNA, 19 nt, Artificial Sequence
  Description of Artificial Sequence: Synthetic oligonucleotide
gucgcauacccgggcagga

SEQ ID NO: 2088365 - RNA, 19 nt, Artificial Sequence
  Description of Artificial Sequence: Synthetic oligonucleotide
ggucaggugucagccacuc

SEQ ID NO: 2088366 - RNA, 19 nt, Artificial Sequence
  Description of Artificial Sequence: Synthetic oligonucleotide
ucgcauacccgggcaggau

SEQ ID NO: 2088367 - RNA, 19 nt, Artificial Sequence
  Description of Artificial Sequence: Synthetic oligonucleotide
ggccccuauccggaagagg

SEQ ID NO: 2088368 - RNA, 19 nt, Artificial Sequence
  Description of Artificial Sequence: Synthetic oligonucleotide
ucuugccggauuggauauu

SEQ ID NO: 2088369 - RNA, 19 nt, Artificial Sequence
  Description of Artificial Sequence: Synthetic oligonucleotide
gcgucgcauacccgggcag

SEQ ID NO: 2088370 - RNA, 19 nt, Artificial Sequence
  Description of Artificial Sequence: Synthetic oligonucleotide
ccuaauaauuaagagcauu

SEQ ID NO: 2088371 - RNA, 19 nt, Artificial Sequence
  Description of Artificial Sequence: Synthetic oligonucleotide
gaguuccacauuacaguuu

SEQ ID NO: 2088372 - RNA, 19 nt, Artificial Sequence
  Description of Artificial Sequence: Synthetic oligonucleotide
guugaacauuagagaacgu

SEQ ID NO: 2088373 - RNA, 19 nt, Artificial Sequence
  Description of Artificial Sequence: Synthetic oligonucleotide
ccuuugucgugcauauuua

SEQ ID NO: 2088374 - RNA, 19 nt, Artificial Sequence
  Description of Artificial Sequence: Synthetic oligonucleotide
ggugaggucuauacaugua

SEQ ID NO: 2088375 - RNA, 19 nt, Artificial Sequence
  Description of Artificial Sequence: Synthetic oligonucleotide
cccgccucagacagccgcc

SEQ ID NO: 2088376 - RNA, 19 nt, Artificial Sequence
  Description of Artificial Sequence: Synthetic oligonucleotide
cuugccggauuggauauuu

SEQ ID NO: 2088377 - RNA, 19 nt, Artificial Sequence
  Description of Artificial Sequence: Synthetic oligonucleotide
cccuauccggaagagguca

SEQ ID NO: 2088378 - RNA, 19 nt, Artificial Sequence
  Description of Artificial Sequence: Synthetic oligonucleotide
ccugcagguuuaaagccua

SEQ ID NO: 2088379 - RNA, 19 nt, Artificial Sequence
  Description of Artificial Sequence: Synthetic oligonucleotide
gcgagccuggaucuguucu

SEQ ID NO: 2088380 - RNA, 19 nt, Artificial Sequence
  Description of Artificial Sequence: Synthetic oligonucleotide
cguaccguccagucacgug

SEQ ID NO: 2088381 - RNA, 19 nt, Artificial Sequence
  Description of Artificial Sequence: Synthetic oligonucleotide
cuaccaggcuggcuuugua

SEQ ID NO: 2088382 - RNA, 19 nt, Artificial Sequence
  Description of Artificial Sequence: Synthetic oligonucleotide
cccguagcauuacgaucgc

SEQ ID NO: 2088383 - RNA, 19 nt, Artificial Sequence
  Description of Artificial Sequence: Synthetic oligonucleotide
gccuucacagcgucgcaua

SEQ ID NO: 2088384 - RNA, 19 nt, Artificial Sequence
  Description of Artificial Sequence: Synthetic oligonucleotide
gcauacccgggcaggauaa

SEQ ID NO: 2088385 - RNA, 19 nt, Artificial Sequence
  Description of Artificial Sequence: Synthetic oligonucleotide
gcugcugaccuaagacauc

SEQ ID NO: 2088386 - RNA, 19 nt, Artificial Sequence
  Description of Artificial Sequence: Synthetic oligonucleotide
cuuugcggugcggaugccu

SEQ ID NO: 2088387 - RNA, 19 nt, Artificial Sequence
  Description of Artificial Sequence: Synthetic oligonucleotide
cucuaauggcccguagcau

SEQ ID NO: 2088388 - RNA, 19 nt, Artificial Sequence
  Description of Artificial Sequence: Synthetic oligonucleotide
cgugucauccccagaaagu

SEQ ID NO: 2088389 - RNA, 19 nt, Artificial Sequence
  Description of Artificial Sequence: Synthetic oligonucleotide
ugccuuugucgugcauauu

SEQ ID NO: 2088390 - RNA, 19 nt, Artificial Sequence
  Description of Artificial Sequence: Synthetic oligonucleotide
gcagagccguugaacauua

SEQ ID NO: 2088391 - RNA, 19 nt, Artificial Sequence
  Description of Artificial Sequence: Synthetic oligonucleotide
ccgccugguucacuugaac

SEQ ID NO: 2088392 - RNA, 19 nt, Artificial Sequence
  Description of Artificial Sequence: Synthetic oligonucleotide
ccgccagucugaucucuuc

SEQ ID NO: 2088393 - RNA, 19 nt, Artificial Sequence
  Description of Artificial Sequence: Synthetic oligonucleotide
ggaugccuccugcagguuu

SEQ ID NO: 2088394 - RNA, 19 nt, Artificial Sequence
  Description of Artificial Sequence: Synthetic oligonucleotide
ggacuccuuugcggugcgg

SEQ ID NO: 2088395 - RNA, 19 nt, Artificial Sequence
  Description of Artificial Sequence: Synthetic oligonucleotide
accgccagucugaucucuu

SEQ ID NO: 2088396 - RNA, 19 nt, Artificial Sequence
  Description of Artificial Sequence: Synthetic oligonucleotide
cccgggcaggauaaacaca

SEQ ID NO: 2088397 - RNA, 19 nt, Artificial Sequence
  Description of Artificial Sequence: Synthetic oligonucleotide
ccuuggcaauuaugcaaaa

SEQ ID NO: 2088398 - RNA, 19 nt, Artificial Sequence
  Description of Artificial Sequence: Synthetic oligonucleotide
cauacccgggcaggauaaa

SEQ ID NO: 2088399 - RNA, 19 nt, Artificial Sequence
  Description of Artificial Sequence: Synthetic oligonucleotide
cauugcuaccaggcuggcu

SEQ ID NO: 2088400 - RNA, 19 nt, Artificial Sequence
  Description of Artificial Sequence: Synthetic oligonucleotide
acgcuucugcgagccugga

SEQ ID NO: 2088401 - RNA, 19 nt, Artificial Sequence
  Description of Artificial Sequence: Synthetic oligonucleotide
cagcaccaagguccuguua

SEQ ID NO: 2088402 - RNA, 19 nt, Artificial Sequence
  Description of Artificial Sequence: Synthetic oligonucleotide
ccuaccuuguuuccaguuu

SEQ ID NO: 2088403 - RNA, 19 nt, Artificial Sequence
  Description of Artificial Sequence: Synthetic oligonucleotide
cggugcggaugccuccugc

SEQ ID NO: 2088404 - RNA, 19 nt, Artificial Sequence
  Description of Artificial Sequence: Synthetic oligonucleotide
guccagucacgugguggua

SEQ ID NO: 2088405 - RNA, 19 nt, Artificial Sequence
  Description of Artificial Sequence: Synthetic oligonucleotide
gacagccgccugguucacu

SEQ ID NO: 2088406 - RNA, 19 nt, Artificial Sequence
  Description of Artificial Sequence: Synthetic oligonucleotide
gcggugcggaugccuccug

SEQ ID NO: 2088407 - RNA, 19 nt, Artificial Sequence
  Description of Artificial Sequence: Synthetic oligonucleotide
gccgcuguggugaugccuu

SEQ ID NO: 2088408 - RNA, 19 nt, Artificial Sequence
  Description of Artificial Sequence: Synthetic oligonucleotide
cugcgagccuggaucuguu

SEQ ID NO: 2088409 - RNA, 19 nt, Artificial Sequence
  Description of Artificial Sequence: Synthetic oligonucleotide
cgcauacccgggcaggaua

SEQ ID NO: 2088410 - RNA, 19 nt, Artificial Sequence
  Description of Artificial Sequence: Synthetic oligonucleotide
cagucacguggugguauau

SEQ ID NO: 2088411 - RNA, 19 nt, Artificial Sequence
  Description of Artificial Sequence: Synthetic oligonucleotide
ggccgcuguggugaugccu

SEQ ID NO: 2088412 - RNA, 19 nt, Artificial Sequence
  Description of Artificial Sequence: Synthetic oligonucleotide
gccgccugguucacuugaa

SEQ ID NO: 2088413 - RNA, 19 nt, Artificial Sequence
  Description of Artificial Sequence: Synthetic oligonucleotide
gcguaccguccagucacgu

SEQ ID NO: 2088414 - RNA, 19 nt, Artificial Sequence
  Description of Artificial Sequence: Synthetic oligonucleotide
gcuuuguagcagagccguu

SEQ ID NO: 2088415 - RNA, 19 nt, Artificial Sequence
  Description of Artificial Sequence: Synthetic oligonucleotide
cggccgcuguggugaugcc

SEQ ID NO: 2088416 - RNA, 19 nt, Artificial Sequence
  Description of Artificial Sequence: Synthetic oligonucleotide
ccguagcauuacgaucgcu

SEQ ID NO: 2088417 - RNA, 19 nt, Artificial Sequence
  Description of Artificial Sequence: Synthetic oligonucleotide
cgccuucacagcgucgcau

SEQ ID NO: 2088418 - RNA, 19 nt, Artificial Sequence
  Description of Artificial Sequence: Synthetic oligonucleotide
cgcuucugcgagccuggau

SEQ ID NO: 2088419 - RNA, 19 nt, Artificial Sequence
  Description of Artificial Sequence: Synthetic oligonucleotide
ccuccaccgccagucugau

SEQ ID NO: 2088420 - RNA, 19 nt, Artificial Sequence
  Description of Artificial Sequence: Synthetic oligonucleotide
cgaucgcuacugggaaggu

SEQ ID NO: 2088421 - RNA, 19 nt, Artificial Sequence
  Description of Artificial Sequence: Synthetic oligonucleotide
ccgcuguggugaugccuuu

SEQ ID NO: 2088422 - RNA, 19 nt, Artificial Sequence
  Description of Artificial Sequence: Synthetic oligonucleotide
aaaugcaccgucuggaagc

SEQ ID NO: 2088423 - RNA, 19 nt, Artificial Sequence
  Description of Artificial Sequence: Synthetic oligonucleotide
guaaauagaacuuguaucc

SEQ ID NO: 2088424 - RNA, 19 nt, Artificial Sequence
  Description of Artificial Sequence: Synthetic oligonucleotide
aaugaucauccucaggccc

SEQ ID NO: 2088425 - RNA, 19 nt, Artificial Sequence
  Description of Artificial Sequence: Synthetic oligonucleotide
ugcaacaaaaugaucaucc

SEQ ID NO: 2088426 - RNA, 19 nt, Artificial Sequence
  Description of Artificial Sequence: Synthetic oligonucleotide
ugaucuuguaaauagaacu

SEQ ID NO: 2088427 - RNA, 19 nt, Artificial Sequence
  Description of Artificial Sequence: Synthetic oligonucleotide
aaaugaucauccucaggcc

SEQ ID NO: 2088428 - RNA, 19 nt, Artificial Sequence
  Description of Artificial Sequence: Synthetic oligonucleotide
aauagaacuuguauccucc

SEQ ID NO: 2088429 - RNA, 19 nt, Artificial Sequence
  Description of Artificial Sequence: Synthetic oligonucleotide
aaauagaacuuguauccuc

SEQ ID NO: 2088430 - RNA, 19 nt, Artificial Sequence
  Description of Artificial Sequence: Synthetic oligonucleotide
aaugccauaauuguacguc

SEQ ID NO: 2088431 - RNA, 19 nt, Artificial Sequence
  Description of Artificial Sequence: Synthetic oligonucleotide
ucauccauuaacccgaagc

SEQ ID NO: 2088432 - RNA, 19 nt, Artificial Sequence
  Description of Artificial Sequence: Synthetic oligonucleotide
aauuguacgucaguucugc

SEQ ID NO: 2088433 - RNA, 19 nt, Artificial Sequence
  Description of Artificial Sequence: Synthetic oligonucleotide
aaagaaaugcaccgucugg

SEQ ID NO: 2088434 - RNA, 19 nt, Artificial Sequence
  Description of Artificial Sequence: Synthetic oligonucleotide
auuacaugcagcuuugcag

SEQ ID NO: 2088435 - RNA, 19 nt, Artificial Sequence
  Description of Artificial Sequence: Synthetic oligonucleotide
aauugcaccuuugaugccc

SEQ ID NO: 2088436 - RNA, 19 nt, Artificial Sequence
  Description of Artificial Sequence: Synthetic oligonucleotide
uuuguuuugacuggagucg

SEQ ID NO: 2088437 - RNA, 19 nt, Artificial Sequence
  Description of Artificial Sequence: Synthetic oligonucleotide
auucccaugaagucguugc

SEQ ID NO: 2088438 - RNA, 19 nt, Artificial Sequence
  Description of Artificial Sequence: Synthetic oligonucleotide
cauaaggcccauuacaugc

SEQ ID NO: 2088439 - RNA, 19 nt, Artificial Sequence
  Description of Artificial Sequence: Synthetic oligonucleotide
ucucgaaagaaaugcaccg

SEQ ID NO: 2088440 - RNA, 19 nt, Artificial Sequence
  Description of Artificial Sequence: Synthetic oligonucleotide
uuagaaaguucucggaaag

SEQ ID NO: 2088441 - RNA, 19 nt, Artificial Sequence
  Description of Artificial Sequence: Synthetic oligonucleotide
aaaacuuccuucugcaacu

SEQ ID NO: 2088442 - RNA, 19 nt, Artificial Sequence
  Description of Artificial Sequence: Synthetic oligonucleotide
aaucccaccauuguuuuac

SEQ ID NO: 2088443 - RNA, 19 nt, Artificial Sequence
  Description of Artificial Sequence: Synthetic oligonucleotide
uagacuuugaucuuguaaa

SEQ ID NO: 2088444 - RNA, 19 nt, Artificial Sequence
  Description of Artificial Sequence: Synthetic oligonucleotide
uuuaauacaggaucugacu

SEQ ID NO: 2088445 - RNA, 19 nt, Artificial Sequence
  Description of Artificial Sequence: Synthetic oligonucleotide
cuagaguuacuuuuaauac

SEQ ID NO: 2088446 - RNA, 19 nt, Artificial Sequence
  Description of Artificial Sequence: Synthetic oligonucleotide
uguaguuccaguuuacacu

SEQ ID NO: 2088447 - RNA, 19 nt, Artificial Sequence
  Description of Artificial Sequence: Synthetic oligonucleotide
acuuguauccucccggggc

SEQ ID NO: 2088448 - RNA, 19 nt, Artificial Sequence
  Description of Artificial Sequence: Synthetic oligonucleotide
uuugaucuuguaaauagaa

SEQ ID NO: 2088449 - RNA, 19 nt, Artificial Sequence
  Description of Artificial Sequence: Synthetic oligonucleotide
ucauccaguaacuugcugc

SEQ ID NO: 2088450 - RNA, 19 nt, Artificial Sequence
  Description of Artificial Sequence: Synthetic oligonucleotide
uccaaugccauaauuguac

SEQ ID NO: 2088451 - RNA, 19 nt, Artificial Sequence
  Description of Artificial Sequence: Synthetic oligonucleotide
ugugauucccaugaagucg

SEQ ID NO: 2088452 - RNA, 19 nt, Artificial Sequence
  Description of Artificial Sequence: Synthetic oligonucleotide
uuggaucccucuuagaaag

SEQ ID NO: 2088453 - RNA, 19 nt, Artificial Sequence
  Description of Artificial Sequence: Synthetic oligonucleotide
agaacuuguauccucccgg

SEQ ID NO: 2088454 - RNA, 19 nt, Artificial Sequence
  Description of Artificial Sequence: Synthetic oligonucleotide
aguuacuuuuaauacagga

SEQ ID NO: 2088455 - RNA, 19 nt, Artificial Sequence
  Description of Artificial Sequence: Synthetic oligonucleotide
caaagcaaauuucaugucc

SEQ ID NO: 2088456 - RNA, 19 nt, Artificial Sequence
  Description of Artificial Sequence: Synthetic oligonucleotide
gacaucucgaaagaaaugc

SEQ ID NO: 2088457 - RNA, 19 nt, Artificial Sequence
  Description of Artificial Sequence: Synthetic oligonucleotide
aaaucuggcaacucuuucu

SEQ ID NO: 2088458 - RNA, 19 nt, Artificial Sequence
  Description of Artificial Sequence: Synthetic oligonucleotide
agaccaguaguucaaggac

SEQ ID NO: 2088459 - RNA, 19 nt, Artificial Sequence
  Description of Artificial Sequence: Synthetic oligonucleotide
ugcaugaucaauugcaccu

SEQ ID NO: 2088460 - RNA, 19 nt, Artificial Sequence
  Description of Artificial Sequence: Synthetic oligonucleotide
aucacuuuugucugcugcc

SEQ ID NO: 2088461 - RNA, 19 nt, Artificial Sequence
  Description of Artificial Sequence: Synthetic oligonucleotide
aaucuggcaacucuuucug

SEQ ID NO: 2088462 - RNA, 19 nt, Artificial Sequence
  Description of Artificial Sequence: Synthetic oligonucleotide
auugcugauagccuggcug

SEQ ID NO: 2088463 - RNA, 19 nt, Artificial Sequence
  Description of Artificial Sequence: Synthetic oligonucleotide
aaauguucauucccaggag

SEQ ID NO: 2088464 - RNA, 19 nt, Artificial Sequence
  Description of Artificial Sequence: Synthetic oligonucleotide
acaugucauccauuaaccc

SEQ ID NO: 2088465 - RNA, 19 nt, Artificial Sequence
  Description of Artificial Sequence: Synthetic oligonucleotide
ucaguucugcaacaaaaug

SEQ ID NO: 2088466 - RNA, 19 nt, Artificial Sequence
  Description of Artificial Sequence: Synthetic oligonucleotide
agaguuacuuuuaauacag

SEQ ID NO: 2088467 - RNA, 19 nt, Artificial Sequence
  Description of Artificial Sequence: Synthetic oligonucleotide
aguuucaaaacuuccuucu

SEQ ID NO: 2088468 - RNA, 19 nt, Artificial Sequence
  Description of Artificial Sequence: Synthetic oligonucleotide
aagacggaaucacaagcag

SEQ ID NO: 2088469 - RNA, 19 nt, Artificial Sequence
  Description of Artificial Sequence: Synthetic oligonucleotide
uguacgucaguucugcaac

SEQ ID NO: 2088470 - RNA, 19 nt, Artificial Sequence
  Description of Artificial Sequence: Synthetic oligonucleotide
caaagacggaaucacaagc

SEQ ID NO: 2088471 - RNA, 19 nt, Artificial Sequence
  Description of Artificial Sequence: Synthetic oligonucleotide
aauacaggaucugacugag

SEQ ID NO: 2088472 - RNA, 19 nt, Artificial Sequence
  Description of Artificial Sequence: Synthetic oligonucleotide
ugcucauaaauguucauuc

SEQ ID NO: 2088473 - RNA, 19 nt, Artificial Sequence
  Description of Artificial Sequence: Synthetic oligonucleotide
aucuucuaaaucuggcaac

SEQ ID NO: 2088474 - RNA, 19 nt, Artificial Sequence
  Description of Artificial Sequence: Synthetic oligonucleotide
uucaaaacuuccuucugca

SEQ ID NO: 2088475 - RNA, 19 nt, Artificial Sequence
  Description of Artificial Sequence: Synthetic oligonucleotide
auaucagucacugcuagag

SEQ ID NO: 2088476 - RNA, 19 nt, Artificial Sequence
  Description of Artificial Sequence: Synthetic oligonucleotide
cauccauuaacccgaagcc

SEQ ID NO: 2088477 - RNA, 19 nt, Artificial Sequence
  Description of Artificial Sequence: Synthetic oligonucleotide
uucuaaaucuggcaacucu

SEQ ID NO: 2088478 - RNA, 19 nt, Artificial Sequence
  Description of Artificial Sequence: Synthetic oligonucleotide
guaacuugcugccuuuugg

SEQ ID NO: 2088479 - RNA, 19 nt, Artificial Sequence
  Description of Artificial Sequence: Synthetic oligonucleotide
cacaugucauccauuaacc

SEQ ID NO: 2088480 - RNA, 19 nt, Artificial Sequence
  Description of Artificial Sequence: Synthetic oligonucleotide
aucucgaaagaaaugcacc

SEQ ID NO: 2088481 - RNA, 19 nt, Artificial Sequence
  Description of Artificial Sequence: Synthetic oligonucleotide
uggcaaaccacucaucacu

SEQ ID NO: 2088482 - RNA, 19 nt, Artificial Sequence
  Description of Artificial Sequence: Synthetic oligonucleotide
gacggaaucacaagcagag

SEQ ID NO: 2088483 - RNA, 19 nt, Artificial Sequence
  Description of Artificial Sequence: Synthetic oligonucleotide
uuagaccaguaguucaagg

SEQ ID NO: 2088484 - RNA, 19 nt, Artificial Sequence
  Description of Artificial Sequence: Synthetic oligonucleotide
aaccaguggugucaggauc

SEQ ID NO: 2088485 - RNA, 19 nt, Artificial Sequence
  Description of Artificial Sequence: Synthetic oligonucleotide
auagaacuuguauccuccc

SEQ ID NO: 2088486 - RNA, 19 nt, Artificial Sequence
  Description of Artificial Sequence: Synthetic oligonucleotide
uagaacuuguauccucccg

SEQ ID NO: 2088487 - RNA, 19 nt, Artificial Sequence
  Description of Artificial Sequence: Synthetic oligonucleotide
uuugacuggagucguaggu

SEQ ID NO: 2088488 - RNA, 19 nt, Artificial Sequence
  Description of Artificial Sequence: Synthetic oligonucleotide
acucccaccgcaaagacgg

SEQ ID NO: 2088489 - RNA, 19 nt, Artificial Sequence
  Description of Artificial Sequence: Synthetic oligonucleotide
aggagauuagaccaguagu

SEQ ID NO: 2088490 - RNA, 19 nt, Artificial Sequence
  Description of Artificial Sequence: Synthetic oligonucleotide
uugaucuuguaaauagaac

SEQ ID NO: 2088491 - RNA, 19 nt, Artificial Sequence
  Description of Artificial Sequence: Synthetic oligonucleotide
aaagcaaauuucaugucca

SEQ ID NO: 2088492 - RNA, 19 nt, Artificial Sequence
  Description of Artificial Sequence: Synthetic oligonucleotide
ugcaucauccaguaacuug

SEQ ID NO: 2088493 - RNA, 19 nt, Artificial Sequence
  Description of Artificial Sequence: Synthetic oligonucleotide
auggcguagaaccugcauc

SEQ ID NO: 2088494 - RNA, 19 nt, Artificial Sequence
  Description of Artificial Sequence: Synthetic oligonucleotide
uugcugauagccuggcugg

SEQ ID NO: 2088495 - RNA, 19 nt, Artificial Sequence
  Description of Artificial Sequence: Synthetic oligonucleotide
agcguagcccagcacagcc

SEQ ID NO: 2088496 - RNA, 19 nt, Artificial Sequence
  Description of Artificial Sequence: Synthetic oligonucleotide
uagaccaguaguucaagga

SEQ ID NO: 2088497 - RNA, 19 nt, Artificial Sequence
  Description of Artificial Sequence: Synthetic oligonucleotide
uguuuguuuugacuggagu

SEQ ID NO: 2088498 - RNA, 19 nt, Artificial Sequence
  Description of Artificial Sequence: Synthetic oligonucleotide
aggaugacuacuugcacug

SEQ ID NO: 2088499 - RNA, 19 nt, Artificial Sequence
  Description of Artificial Sequence: Synthetic oligonucleotide
gaagucguugccaagcuug

SEQ ID NO: 2088500 - RNA, 19 nt, Artificial Sequence
  Description of Artificial Sequence: Synthetic oligonucleotide
uuugcagccuucuucaaau

SEQ ID NO: 2088501 - RNA, 19 nt, Artificial Sequence
  Description of Artificial Sequence: Synthetic oligonucleotide
agauuagaccaguaguuca

SEQ ID NO: 2088502 - RNA, 19 nt, Artificial Sequence
  Description of Artificial Sequence: Synthetic oligonucleotide
aagaaaugcaccgucugga

SEQ ID NO: 2088503 - RNA, 19 nt, Artificial Sequence
  Description of Artificial Sequence: Synthetic oligonucleotide
acaaagcaaauuucauguc

SEQ ID NO: 2088504 - RNA, 19 nt, Artificial Sequence
  Description of Artificial Sequence: Synthetic oligonucleotide
gaacuuguauccucccggg

SEQ ID NO: 2088505 - RNA, 19 nt, Artificial Sequence
  Description of Artificial Sequence: Synthetic oligonucleotide
cugguuaucagcguagccc

SEQ ID NO: 2088506 - RNA, 19 nt, Artificial Sequence
  Description of Artificial Sequence: Synthetic oligonucleotide
cauaauuguacgucaguuc

SEQ ID NO: 2088507 - RNA, 19 nt, Artificial Sequence
  Description of Artificial Sequence: Synthetic oligonucleotide
agccaggaugacuacuugc

SEQ ID NO: 2088508 - RNA, 19 nt, Artificial Sequence
  Description of Artificial Sequence: Synthetic oligonucleotide
uuuugacuggagucguagg

SEQ ID NO: 2088509 - RNA, 19 nt, Artificial Sequence
  Description of Artificial Sequence: Synthetic oligonucleotide
aaaggcugcugcaugauca

SEQ ID NO: 2088510 - RNA, 19 nt, Artificial Sequence
  Description of Artificial Sequence: Synthetic oligonucleotide
ucuaaaucuggcaacucuu

SEQ ID NO: 2088511 - RNA, 19 nt, Artificial Sequence
  Description of Artificial Sequence: Synthetic oligonucleotide
aaagacggaaucacaagca

SEQ ID NO: 2088512 - RNA, 19 nt, Artificial Sequence
  Description of Artificial Sequence: Synthetic oligonucleotide
uuugaagacgaagugcaga

SEQ ID NO: 2088513 - RNA, 19 nt, Artificial Sequence
  Description of Artificial Sequence: Synthetic oligonucleotide
aguucaaggacuucuggau

SEQ ID NO: 2088514 - RNA, 19 nt, Artificial Sequence
  Description of Artificial Sequence: Synthetic oligonucleotide
ugguuaucagcguagccca

SEQ ID NO: 2088515 - RNA, 19 nt, Artificial Sequence
  Description of Artificial Sequence: Synthetic oligonucleotide
gcaaauuucauguccauca

SEQ ID NO: 2088516 - RNA, 19 nt, Artificial Sequence
  Description of Artificial Sequence: Synthetic oligonucleotide
aacuuguauccucccgggg

SEQ ID NO: 2088517 - RNA, 19 nt, Artificial Sequence
  Description of Artificial Sequence: Synthetic oligonucleotide
ucgaaagaaaugcaccguc

SEQ ID NO: 2088518 - RNA, 19 nt, Artificial Sequence
  Description of Artificial Sequence: Synthetic oligonucleotide
ugggguauccagacuaacc

SEQ ID NO: 2088519 - RNA, 19 nt, Artificial Sequence
  Description of Artificial Sequence: Synthetic oligonucleotide
uaguucaaggacuucugga

SEQ ID NO: 2088520 - RNA, 19 nt, Artificial Sequence
  Description of Artificial Sequence: Synthetic oligonucleotide
auccagacuaaccaguggu

SEQ ID NO: 2088521 - RNA, 19 nt, Artificial Sequence
  Description of Artificial Sequence: Synthetic oligonucleotide
caucucgaaagaaaugcac

SEQ ID NO: 2088522 - RNA, 19 nt, Artificial Sequence
  Description of Artificial Sequence: Synthetic oligonucleotide
aucagcguagcccagcaca

SEQ ID NO: 2088523 - RNA, 19 nt, Artificial Sequence
  Description of Artificial Sequence: Synthetic oligonucleotide
auuaacccgaagccuuugg

SEQ ID NO: 2088524 - RNA, 19 nt, Artificial Sequence
  Description of Artificial Sequence: Synthetic oligonucleotide
caguucugcaacaaaauga

SEQ ID NO: 2088525 - RNA, 19 nt, Artificial Sequence
  Description of Artificial Sequence: Synthetic oligonucleotide
cuggcuggaagcaagugug

SEQ ID NO: 2088526 - RNA, 19 nt, Artificial Sequence
  Description of Artificial Sequence: Synthetic oligonucleotide
uuccccacuuugaagacga

SEQ ID NO: 2088527 - RNA, 19 nt, Artificial Sequence
  Description of Artificial Sequence: Synthetic oligonucleotide
auuucccaucauaaggccc

SEQ ID NO: 2088528 - RNA, 19 nt, Artificial Sequence
  Description of Artificial Sequence: Synthetic oligonucleotide
uuugaguggccacuccagc

SEQ ID NO: 2088529 - RNA, 19 nt, Artificial Sequence
  Description of Artificial Sequence: Synthetic oligonucleotide
acuacuugcacugucgccu

SEQ ID NO: 2088530 - RNA, 19 nt, Artificial Sequence
  Description of Artificial Sequence: Synthetic oligonucleotide
ucauaaggcccauuacaug

SEQ ID NO: 2088531 - RNA, 19 nt, Artificial Sequence
  Description of Artificial Sequence: Synthetic oligonucleotide
gucguugccaagcuuguag

SEQ ID NO: 2088532 - RNA, 19 nt, Artificial Sequence
  Description of Artificial Sequence: Synthetic oligonucleotide
cuggaagcaagugugauuc

SEQ ID NO: 2088533 - RNA, 19 nt, Artificial Sequence
  Description of Artificial Sequence: Synthetic oligonucleotide
ucuucuaaaucuggcaacu

SEQ ID NO: 2088534 - RNA, 19 nt, Artificial Sequence
  Description of Artificial Sequence: Synthetic oligonucleotide
uccauuaacccgaagccuu

SEQ ID NO: 2088535 - RNA, 19 nt, Artificial Sequence
  Description of Artificial Sequence: Synthetic oligonucleotide
agacgaagugcagagcucg

SEQ ID NO: 2088536 - RNA, 19 nt, Artificial Sequence
  Description of Artificial Sequence: Synthetic oligonucleotide
uucaaggacuucuggauau

SEQ ID NO: 2088537 - RNA, 19 nt, Artificial Sequence
  Description of Artificial Sequence: Synthetic oligonucleotide
aacccgaagccuuugguuu

SEQ ID NO: 2088538 - RNA, 19 nt, Artificial Sequence
  Description of Artificial Sequence: Synthetic oligonucleotide
ugccauaauuguacgucag

SEQ ID NO: 2088539 - RNA, 19 nt, Artificial Sequence
  Description of Artificial Sequence: Synthetic oligonucleotide
accgcaaagacggaaucac

SEQ ID NO: 2088540 - RNA, 19 nt, Artificial Sequence
  Description of Artificial Sequence: Synthetic oligonucleotide
ugacuacuugcacugucgc

SEQ ID NO: 2088541 - RNA, 19 nt, Artificial Sequence
  Description of Artificial Sequence: Synthetic oligonucleotide
uccugcucauaaauguuca

SEQ ID NO: 2088542 - RNA, 19 nt, Artificial Sequence
  Description of Artificial Sequence: Synthetic oligonucleotide
aucuuguaaauagaacuug

SEQ ID NO: 2088543 - RNA, 19 nt, Artificial Sequence
  Description of Artificial Sequence: Synthetic oligonucleotide
gaagcgguuccccacuuug

SEQ ID NO: 2088544 - RNA, 19 nt, Artificial Sequence
  Description of Artificial Sequence: Synthetic oligonucleotide
cauuucccaucauaaggcc

SEQ ID NO: 2088545 - RNA, 19 nt, Artificial Sequence
  Description of Artificial Sequence: Synthetic oligonucleotide
gaagacgaagugcagagcu

SEQ ID NO: 2088546 - RNA, 19 nt, Artificial Sequence
  Description of Artificial Sequence: Synthetic oligonucleotide
aaugcaccgucuggaagcg

SEQ ID NO: 2088547 - RNA, 19 nt, Artificial Sequence
  Description of Artificial Sequence: Synthetic oligonucleotide
uuaucagcguagcccagca

SEQ ID NO: 2088548 - RNA, 19 nt, Artificial Sequence
  Description of Artificial Sequence: Synthetic oligonucleotide
ucaaauuccucauggcgua

SEQ ID NO: 2088549 - RNA, 19 nt, Artificial Sequence
  Description of Artificial Sequence: Synthetic oligonucleotide
aaccacucaucacuuuugu

SEQ ID NO: 2088550 - RNA, 19 nt, Artificial Sequence
  Description of Artificial Sequence: Synthetic oligonucleotide
uuaacccgaagccuuuggu

SEQ ID NO: 2088551 - RNA, 19 nt, Artificial Sequence
  Description of Artificial Sequence: Synthetic oligonucleotide
uugguuuauuucugguggc

SEQ ID NO: 2088552 - RNA, 19 nt, Artificial Sequence
  Description of Artificial Sequence: Synthetic oligonucleotide
uucauucccaggagauuag

SEQ ID NO: 2088553 - RNA, 19 nt, Artificial Sequence
  Description of Artificial Sequence: Synthetic oligonucleotide
cucggaaagcuucaucccc

SEQ ID NO: 2088554 - RNA, 19 nt, Artificial Sequence
  Description of Artificial Sequence: Synthetic oligonucleotide
ucucggaaagcuucauccc

SEQ ID NO: 2088555 - RNA, 19 nt, Artificial Sequence
  Description of Artificial Sequence: Synthetic oligonucleotide
aucacaagcagagggccac

SEQ ID NO: 2088556 - RNA, 19 nt, Artificial Sequence
  Description of Artificial Sequence: Synthetic oligonucleotide
uccagacuaaccaguggug

SEQ ID NO: 2088557 - RNA, 19 nt, Artificial Sequence
  Description of Artificial Sequence: Synthetic oligonucleotide
caggagauuagaccaguag

SEQ ID NO: 2088558 - RNA, 19 nt, Artificial Sequence
  Description of Artificial Sequence: Synthetic oligonucleotide
guggugucaggaucgauug

SEQ ID NO: 2088559 - RNA, 19 nt, Artificial Sequence
  Description of Artificial Sequence: Synthetic oligonucleotide
aagugcagagcucgacgag

SEQ ID NO: 2088560 - RNA, 19 nt, Artificial Sequence
  Description of Artificial Sequence: Synthetic oligonucleotide
aucagucacugcuagaguu

SEQ ID NO: 2088561 - RNA, 19 nt, Artificial Sequence
  Description of Artificial Sequence: Synthetic oligonucleotide
caagcagagggccacuccc

SEQ ID NO: 2088562 - RNA, 19 nt, Artificial Sequence
  Description of Artificial Sequence: Synthetic oligonucleotide
accgucuggaagcgguucc

SEQ ID NO: 2088563 - RNA, 19 nt, Artificial Sequence
  Description of Artificial Sequence: Synthetic oligonucleotide
uuguacgucaguucugcaa

SEQ ID NO: 2088564 - RNA, 19 nt, Artificial Sequence
  Description of Artificial Sequence: Synthetic oligonucleotide
uaaggcccauuacaugcag

SEQ ID NO: 2088565 - RNA, 19 nt, Artificial Sequence
  Description of Artificial Sequence: Synthetic oligonucleotide
ucgacgaguggccaugacu

SEQ ID NO: 2088566 - RNA, 19 nt, Artificial Sequence
  Description of Artificial Sequence: Synthetic oligonucleotide
agcaaauuucauguccauc

SEQ ID NO: 2088567 - RNA, 19 nt, Artificial Sequence
  Description of Artificial Sequence: Synthetic oligonucleotide
uacacugguuaucagcgua

SEQ ID NO: 2088568 - RNA, 19 nt, Artificial Sequence
  Description of Artificial Sequence: Synthetic oligonucleotide
guagacuuugaucuuguaa

SEQ ID NO: 2088569 - RNA, 19 nt, Artificial Sequence
  Description of Artificial Sequence: Synthetic oligonucleotide
guuuugacuggagucguag

SEQ ID NO: 2088570 - RNA, 19 nt, Artificial Sequence
  Description of Artificial Sequence: Synthetic oligonucleotide
augacuacuugcacugucg

SEQ ID NO: 2088571 - RNA, 19 nt, Artificial Sequence
  Description of Artificial Sequence: Synthetic oligonucleotide
gaugacuacuugcacuguc

SEQ ID NO: 2088572 - RNA, 19 nt, Artificial Sequence
  Description of Artificial Sequence: Synthetic oligonucleotide
gcuagaguuacuuuuaaua

SEQ ID NO: 2088573 - RNA, 19 nt, Artificial Sequence
  Description of Artificial Sequence: Synthetic oligonucleotide
aaaccacucaucacuuuug

SEQ ID NO: 2088574 - RNA, 19 nt, Artificial Sequence
  Description of Artificial Sequence: Synthetic oligonucleotide
uacuccauuucccaucaua

SEQ ID NO: 2088575 - RNA, 19 nt, Artificial Sequence
  Description of Artificial Sequence: Synthetic oligonucleotide
uccaguuuacacugguuau

SEQ ID NO: 2088576 - RNA, 19 nt, Artificial Sequence
  Description of Artificial Sequence: Synthetic oligonucleotide
ugcagccuucuucaaauuc

SEQ ID NO: 2088577 - RNA, 19 nt, Artificial Sequence
  Description of Artificial Sequence: Synthetic oligonucleotide
acuuuuaauacaggaucug

SEQ ID NO: 2088578 - RNA, 19 nt, Artificial Sequence
  Description of Artificial Sequence: Synthetic oligonucleotide
ugauagccuggcuggaagc

SEQ ID NO: 2088579 - RNA, 19 nt, Artificial Sequence
  Description of Artificial Sequence: Synthetic oligonucleotide
cuguucucacaugucaucc

SEQ ID NO: 2088580 - RNA, 19 nt, Artificial Sequence
  Description of Artificial Sequence: Synthetic oligonucleotide
aggcccauuacaugcagcu

SEQ ID NO: 2088581 - RNA, 19 nt, Artificial Sequence
  Description of Artificial Sequence: Synthetic oligonucleotide
accuuugaugcccuguagu

SEQ ID NO: 2088582 - RNA, 19 nt, Artificial Sequence
  Description of Artificial Sequence: Synthetic oligonucleotide
uugacuggagucguaggug

SEQ ID NO: 2088583 - RNA, 19 nt, Artificial Sequence
  Description of Artificial Sequence: Synthetic oligonucleotide
uugaguggccacuccagcu

SEQ ID NO: 2088584 - RNA, 19 nt, Artificial Sequence
  Description of Artificial Sequence: Synthetic oligonucleotide
uguucucacaugucaucca

SEQ ID NO: 2088585 - RNA, 19 nt, Artificial Sequence
  Description of Artificial Sequence: Synthetic oligonucleotide
aacuugcugccuuuuggau

SEQ ID NO: 2088586 - RNA, 19 nt, Artificial Sequence
  Description of Artificial Sequence: Synthetic oligonucleotide
gagauuagaccaguaguuc

SEQ ID NO: 2088587 - RNA, 19 nt, Artificial Sequence
  Description of Artificial Sequence: Synthetic oligonucleotide
uucccaugaagucguugcc

SEQ ID NO: 2088588 - RNA, 19 nt, Artificial Sequence
  Description of Artificial Sequence: Synthetic oligonucleotide
agcaauucuuccaaaggcu

SEQ ID NO: 2088589 - RNA, 19 nt, Artificial Sequence
  Description of Artificial Sequence: Synthetic oligonucleotide
accaguggugucaggaucg

SEQ ID NO: 2088590 - RNA, 19 nt, Artificial Sequence
  Description of Artificial Sequence: Synthetic oligonucleotide
aaggcccauuacaugcagc

SEQ ID NO: 2088591 - RNA, 19 nt, Artificial Sequence
  Description of Artificial Sequence: Synthetic oligonucleotide
acuugcacugucgccuucc

SEQ ID NO: 2088592 - RNA, 19 nt, Artificial Sequence
  Description of Artificial Sequence: Synthetic oligonucleotide
cauucccaggagauuagac

SEQ ID NO: 2088593 - RNA, 19 nt, Artificial Sequence
  Description of Artificial Sequence: Synthetic oligonucleotide
gacuacuugcacugucgcc

SEQ ID NO: 2088594 - RNA, 19 nt, Artificial Sequence
  Description of Artificial Sequence: Synthetic oligonucleotide
aguuuacacugguuaucag

SEQ ID NO: 2088595 - RNA, 19 nt, Artificial Sequence
  Description of Artificial Sequence: Synthetic oligonucleotide
auccugcucauaaauguuc

SEQ ID NO: 2088596 - RNA, 19 nt, Artificial Sequence
  Description of Artificial Sequence: Synthetic oligonucleotide
ucagucacugcuagaguua

SEQ ID NO: 2088597 - RNA, 19 nt, Artificial Sequence
  Description of Artificial Sequence: Synthetic oligonucleotide
aucauaaggcccauuacau

SEQ ID NO: 2088598 - RNA, 19 nt, Artificial Sequence
  Description of Artificial Sequence: Synthetic oligonucleotide
ccucuuagaaaguucucgg

SEQ ID NO: 2088599 - RNA, 19 nt, Artificial Sequence
  Description of Artificial Sequence: Synthetic oligonucleotide
aggugcuguucucacaugu

SEQ ID NO: 2088600 - RNA, 19 nt, Artificial Sequence
  Description of Artificial Sequence: Synthetic oligonucleotide
agacuuugaucuuguaaau

SEQ ID NO: 2088601 - RNA, 19 nt, Artificial Sequence
  Description of Artificial Sequence: Synthetic oligonucleotide
cugauagccuggcuggaag

SEQ ID NO: 2088602 - RNA, 19 nt, Artificial Sequence
  Description of Artificial Sequence: Synthetic oligonucleotide
gagguagacuuugaucuug

SEQ ID NO: 2088603 - RNA, 19 nt, Artificial Sequence
  Description of Artificial Sequence: Synthetic oligonucleotide
uacaugcagcuuugcagcc

SEQ ID NO: 2088604 - RNA, 19 nt, Artificial Sequence
  Description of Artificial Sequence: Synthetic oligonucleotide
ggauaucagucacugcuag

SEQ ID NO: 2088605 - RNA, 19 nt, Artificial Sequence
  Description of Artificial Sequence: Synthetic oligonucleotide
uggauaucagucacugcua

SEQ ID NO: 2088606 - RNA, 19 nt, Artificial Sequence
  Description of Artificial Sequence: Synthetic oligonucleotide
acgaguggccaugacuccc

SEQ ID NO: 2088607 - RNA, 19 nt, Artificial Sequence
  Description of Artificial Sequence: Synthetic oligonucleotide
auuagaccaguaguucaag

SEQ ID NO: 2088608 - RNA, 19 nt, Artificial Sequence
  Description of Artificial Sequence: Synthetic oligonucleotide
cugacugagguagacuuug

SEQ ID NO: 2088609 - RNA, 19 nt, Artificial Sequence
  Description of Artificial Sequence: Synthetic oligonucleotide
cugccauugcaucauccag

SEQ ID NO: 2088610 - RNA, 19 nt, Artificial Sequence
  Description of Artificial Sequence: Synthetic oligonucleotide
ugcagagcucgacgagugg

SEQ ID NO: 2088611 - RNA, 19 nt, Artificial Sequence
  Description of Artificial Sequence: Synthetic oligonucleotide
acugucgccuucccugggg

SEQ ID NO: 2088612 - RNA, 19 nt, Artificial Sequence
  Description of Artificial Sequence: Synthetic oligonucleotide
ucguugccaagcuuguagu

SEQ ID NO: 2088613 - RNA, 19 nt, Artificial Sequence
  Description of Artificial Sequence: Synthetic oligonucleotide
aguaguucaaggacuucug

SEQ ID NO: 2088614 - RNA, 19 nt, Artificial Sequence
  Description of Artificial Sequence: Synthetic oligonucleotide
augaagucguugccaagcu

SEQ ID NO: 2088615 - RNA, 19 nt, Artificial Sequence
  Description of Artificial Sequence: Synthetic oligonucleotide
gauaucagucacugcuaga

SEQ ID NO: 2088616 - RNA, 19 nt, Artificial Sequence
  Description of Artificial Sequence: Synthetic oligonucleotide
gcaaagacggaaucacaag

SEQ ID NO: 2088617 - RNA, 19 nt, Artificial Sequence
  Description of Artificial Sequence: Synthetic oligonucleotide
cggaaucacaagcagaggg

SEQ ID NO: 2088618 - RNA, 19 nt, Artificial Sequence
  Description of Artificial Sequence: Synthetic oligonucleotide
uaacccgaagccuuugguu

SEQ ID NO: 2088619 - RNA, 19 nt, Artificial Sequence
  Description of Artificial Sequence: Synthetic oligonucleotide
cauuacaugcagcuuugca

SEQ ID NO: 2088620 - RNA, 19 nt, Artificial Sequence
  Description of Artificial Sequence: Synthetic oligonucleotide
agacuaaccagugguguca

SEQ ID NO: 2088621 - RNA, 19 nt, Artificial Sequence
  Description of Artificial Sequence: Synthetic oligonucleotide
ugguuuauuucugguggca

SEQ ID NO: 2088622 - RNA, 19 nt, Artificial Sequence
  Description of Artificial Sequence: Synthetic oligonucleotide
ugucaggaucgauuggcuc

SEQ ID NO: 2088623 - RNA, 19 nt, Artificial Sequence
  Description of Artificial Sequence: Synthetic oligonucleotide
agcaagugugauucccaug

SEQ ID NO: 2088624 - RNA, 19 nt, Artificial Sequence
  Description of Artificial Sequence: Synthetic oligonucleotide
ggugucaggaucgauuggc

SEQ ID NO: 2088625 - RNA, 19 nt, Artificial Sequence
  Description of Artificial Sequence: Synthetic oligonucleotide
uccucauggcguagaaccu

SEQ ID NO: 2088626 - RNA, 19 nt, Artificial Sequence
  Description of Artificial Sequence: Synthetic oligonucleotide
guauccagacuaaccagug

SEQ ID NO: 2088627 - RNA, 19 nt, Artificial Sequence
  Description of Artificial Sequence: Synthetic oligonucleotide
cuaaccaguggugucagga

SEQ ID NO: 2088628 - RNA, 19 nt, Artificial Sequence
  Description of Artificial Sequence: Synthetic oligonucleotide
ugaguggccacuccagcuu

SEQ ID NO: 2088629 - RNA, 19 nt, Artificial Sequence
  Description of Artificial Sequence: Synthetic oligonucleotide
uguccaucagggucagcca

SEQ ID NO: 2088630 - RNA, 19 nt, Artificial Sequence
  Description of Artificial Sequence: Synthetic oligonucleotide
ugcuagaguuacuuuuaau

SEQ ID NO: 2088631 - RNA, 19 nt, Artificial Sequence
  Description of Artificial Sequence: Synthetic oligonucleotide
ggaaucacaagcagagggc

SEQ ID NO: 2088632 - RNA, 19 nt, Artificial Sequence
  Description of Artificial Sequence: Synthetic oligonucleotide
cagacuaaccagugguguc

SEQ ID NO: 2088633 - RNA, 19 nt, Artificial Sequence
  Description of Artificial Sequence: Synthetic oligonucleotide
cucuuagaaaguucucgga

SEQ ID NO: 2088634 - RNA, 19 nt, Artificial Sequence
  Description of Artificial Sequence: Synthetic oligonucleotide
uuacacugguuaucagcgu

SEQ ID NO: 2088635 - RNA, 19 nt, Artificial Sequence
  Description of Artificial Sequence: Synthetic oligonucleotide
auccauuaacccgaagccu

SEQ ID NO: 2088636 - RNA, 19 nt, Artificial Sequence
  Description of Artificial Sequence: Synthetic oligonucleotide
guucauucccaggagauua

SEQ ID NO: 2088637 - RNA, 19 nt, Artificial Sequence
  Description of Artificial Sequence: Synthetic oligonucleotide
guuaucagcguagcccagc

SEQ ID NO: 2088638 - RNA, 19 nt, Artificial Sequence
  Description of Artificial Sequence: Synthetic oligonucleotide
ugaccacaacaacuuuaac

SEQ ID NO: 2088639 - RNA, 19 nt, Artificial Sequence
  Description of Artificial Sequence: Synthetic oligonucleotide
uaaccaguggugucaggau

SEQ ID NO: 2088640 - RNA, 19 nt, Artificial Sequence
  Description of Artificial Sequence: Synthetic oligonucleotide
gacgaguggccaugacucc

SEQ ID NO: 2088641 - RNA, 19 nt, Artificial Sequence
  Description of Artificial Sequence: Synthetic oligonucleotide
gacuaaccaguggugucag

SEQ ID NO: 2088642 - RNA, 19 nt, Artificial Sequence
  Description of Artificial Sequence: Synthetic oligonucleotide
gucaggaucgauuggcucu

SEQ ID NO: 2088643 - RNA, 19 nt, Artificial Sequence
  Description of Artificial Sequence: Synthetic oligonucleotide
acuaaccaguggugucagg

SEQ ID NO: 2088644 - RNA, 19 nt, Artificial Sequence
  Description of Artificial Sequence: Synthetic oligonucleotide
ggaagcaagugugauuccc

SEQ ID NO: 2088645 - RNA, 19 nt, Artificial Sequence
  Description of Artificial Sequence: Synthetic oligonucleotide
agugcagagcucgacgagu

SEQ ID NO: 2088646 - RNA, 19 nt, Artificial Sequence
  Description of Artificial Sequence: Synthetic oligonucleotide
acaucucgaaagaaaugca

SEQ ID NO: 2088647 - RNA, 19 nt, Artificial Sequence
  Description of Artificial Sequence: Synthetic oligonucleotide
acacugguuaucagcguag

SEQ ID NO: 2088648 - RNA, 19 nt, Artificial Sequence
  Description of Artificial Sequence: Synthetic oligonucleotide
guggcaaaccacucaucac

SEQ ID NO: 2088649 - RNA, 19 nt, Artificial Sequence
  Description of Artificial Sequence: Synthetic oligonucleotide
uucugguggcaaaccacuc

SEQ ID NO: 2088650 - RNA, 19 nt, Artificial Sequence
  Description of Artificial Sequence: Synthetic oligonucleotide
cccucuuagaaaguucucg

SEQ ID NO: 2088651 - RNA, 19 nt, Artificial Sequence
  Description of Artificial Sequence: Synthetic oligonucleotide
ugcccuguaguuccaguuu

SEQ ID NO: 2088652 - RNA, 19 nt, Artificial Sequence
  Description of Artificial Sequence: Synthetic oligonucleotide
guuccccacuuugaagacg

SEQ ID NO: 2088653 - RNA, 19 nt, Artificial Sequence
  Description of Artificial Sequence: Synthetic oligonucleotide
gaucccucuuagaaaguuc

SEQ ID NO: 2088654 - RNA, 19 nt, Artificial Sequence
  Description of Artificial Sequence: Synthetic oligonucleotide
ugaagucguugccaagcuu

SEQ ID NO: 2088655 - RNA, 19 nt, Artificial Sequence
  Description of Artificial Sequence: Synthetic oligonucleotide
ugccaagcuuguagucucc

SEQ ID NO: 2088656 - RNA, 19 nt, Artificial Sequence
  Description of Artificial Sequence: Synthetic oligonucleotide
augaucauccucaggccca

SEQ ID NO: 2088657 - RNA, 19 nt, Artificial Sequence
  Description of Artificial Sequence: Synthetic oligonucleotide
gaucgauuggcucuccuuu

SEQ ID NO: 2088658 - RNA, 19 nt, Artificial Sequence
  Description of Artificial Sequence: Synthetic oligonucleotide
auguucauucccaggagau

SEQ ID NO: 2088659 - RNA, 19 nt, Artificial Sequence
  Description of Artificial Sequence: Synthetic oligonucleotide
auuguacgucaguucugca

SEQ ID NO: 2088660 - RNA, 19 nt, Artificial Sequence
  Description of Artificial Sequence: Synthetic oligonucleotide
ucauucccaggagauuaga

SEQ ID NO: 2088661 - RNA, 19 nt, Artificial Sequence
  Description of Artificial Sequence: Synthetic oligonucleotide
agacggaaucacaagcaga

SEQ ID NO: 2088662 - RNA, 19 nt, Artificial Sequence
  Description of Artificial Sequence: Synthetic oligonucleotide
acggaaucacaagcagagg

SEQ ID NO: 2088663 - RNA, 19 nt, Artificial Sequence
  Description of Artificial Sequence: Synthetic oligonucleotide
uguuuugacuggagucgua

SEQ ID NO: 2088664 - RNA, 19 nt, Artificial Sequence
  Description of Artificial Sequence: Synthetic oligonucleotide
ucaggaucgauuggcucuc

SEQ ID NO: 2088665 - RNA, 19 nt, Artificial Sequence
  Description of Artificial Sequence: Synthetic oligonucleotide
ugcaccuuugaugcccugu

SEQ ID NO: 2088666 - RNA, 19 nt, Artificial Sequence
  Description of Artificial Sequence: Synthetic oligonucleotide
agcgguuccccacuuugaa

SEQ ID NO: 2088667 - RNA, 19 nt, Artificial Sequence
  Description of Artificial Sequence: Synthetic oligonucleotide
uucucacaugucauccauu

SEQ ID NO: 2088668 - RNA, 19 nt, Artificial Sequence
  Description of Artificial Sequence: Synthetic oligonucleotide
guucucggaaagcuucauc

SEQ ID NO: 2088669 - RNA, 19 nt, Artificial Sequence
  Description of Artificial Sequence: Synthetic oligonucleotide
aagucguugccaagcuugu

SEQ ID NO: 2088670 - RNA, 19 nt, Artificial Sequence
  Description of Artificial Sequence: Synthetic oligonucleotide
guaggugcuguucucacau

SEQ ID NO: 2088671 - RNA, 19 nt, Artificial Sequence
  Description of Artificial Sequence: Synthetic oligonucleotide
uggaucccucuuagaaagu

SEQ ID NO: 2088672 - RNA, 19 nt, Artificial Sequence
  Description of Artificial Sequence: Synthetic oligonucleotide
uaucagcguagcccagcac

SEQ ID NO: 2088673 - RNA, 19 nt, Artificial Sequence
  Description of Artificial Sequence: Synthetic oligonucleotide
auaaggcccauuacaugca

SEQ ID NO: 2088674 - RNA, 19 nt, Artificial Sequence
  Description of Artificial Sequence: Synthetic oligonucleotide
auccccaggacaucucgaa

SEQ ID NO: 2088675 - RNA, 19 nt, Artificial Sequence
  Description of Artificial Sequence: Synthetic oligonucleotide
aucuggcaacucuuucuga

SEQ ID NO: 2088676 - RNA, 19 nt, Artificial Sequence
  Description of Artificial Sequence: Synthetic oligonucleotide
aucgauuggcucuccuuuu

SEQ ID NO: 2088677 - RNA, 19 nt, Artificial Sequence
  Description of Artificial Sequence: Synthetic oligonucleotide
ugucauccauuaacccgaa

SEQ ID NO: 2088678 - RNA, 19 nt, Artificial Sequence
  Description of Artificial Sequence: Synthetic oligonucleotide
caccuuugaugcccuguag

SEQ ID NO: 2088679 - RNA, 19 nt, Artificial Sequence
  Description of Artificial Sequence: Synthetic oligonucleotide
uccccaggacaucucgaaa

SEQ ID NO: 2088680 - RNA, 19 nt, Artificial Sequence
  Description of Artificial Sequence: Synthetic oligonucleotide
uacgucaguucugcaacaa

SEQ ID NO: 2088681 - RNA, 19 nt, Artificial Sequence
  Description of Artificial Sequence: Synthetic oligonucleotide
uagucuccaaugccauaau

SEQ ID NO: 2088682 - RNA, 19 nt, Artificial Sequence
  Description of Artificial Sequence: Synthetic oligonucleotide
cuucuaaaucuggcaacuc

SEQ ID NO: 2088683 - RNA, 19 nt, Artificial Sequence
  Description of Artificial Sequence: Synthetic oligonucleotide
caggaugacuacuugcacu

SEQ ID NO: 2088684 - RNA, 19 nt, Artificial Sequence
  Description of Artificial Sequence: Synthetic oligonucleotide
cacugguuaucagcguagc

SEQ ID NO: 2088685 - RNA, 19 nt, Artificial Sequence
  Description of Artificial Sequence: Synthetic oligonucleotide
gaccaguaguucaaggacu

SEQ ID NO: 2088686 - RNA, 19 nt, Artificial Sequence
  Description of Artificial Sequence: Synthetic oligonucleotide
gaguggccacuccagcuuc

SEQ ID NO: 2088687 - RNA, 19 nt, Artificial Sequence
  Description of Artificial Sequence: Synthetic oligonucleotide
caaauuccucauggcguag

SEQ ID NO: 2088688 - RNA, 19 nt, Artificial Sequence
  Description of Artificial Sequence: Synthetic oligonucleotide
uugcacugucgccuucccu

SEQ ID NO: 2088689 - RNA, 19 nt, Artificial Sequence
  Description of Artificial Sequence: Synthetic oligonucleotide
cuuuuggaucccucuuaga

SEQ ID NO: 2088690 - RNA, 19 nt, Artificial Sequence
  Description of Artificial Sequence: Synthetic oligonucleotide
ucaaggacuucuggauauc

SEQ ID NO: 2088691 - RNA, 19 nt, Artificial Sequence
  Description of Artificial Sequence: Synthetic oligonucleotide
acgucaguucugcaacaaa

SEQ ID NO: 2088692 - RNA, 19 nt, Artificial Sequence
  Description of Artificial Sequence: Synthetic oligonucleotide
cgacgaguggccaugacuc

SEQ ID NO: 2088693 - RNA, 19 nt, Artificial Sequence
  Description of Artificial Sequence: Synthetic oligonucleotide
guacgucaguucugcaaca

SEQ ID NO: 2088694 - RNA, 19 nt, Artificial Sequence
  Description of Artificial Sequence: Synthetic oligonucleotide
aggaucgauuggcucuccu

SEQ ID NO: 2088695 - RNA, 19 nt, Artificial Sequence
  Description of Artificial Sequence: Synthetic oligonucleotide
aagcgguuccccacuuuga

SEQ ID NO: 2088696 - RNA, 19 nt, Artificial Sequence
  Description of Artificial Sequence: Synthetic oligonucleotide
gugcagagcucgacgagug

SEQ ID NO: 2088697 - RNA, 19 nt, Artificial Sequence
  Description of Artificial Sequence: Synthetic oligonucleotide
auacaggaucugacugagg

SEQ ID NO: 2088698 - RNA, 19 nt, Artificial Sequence
  Description of Artificial Sequence: Synthetic oligonucleotide
gcaacucuuucugaggaca

SEQ ID NO: 2088699 - RNA, 19 nt, Artificial Sequence
  Description of Artificial Sequence: Synthetic oligonucleotide
gucauccauuaacccgaag

SEQ ID NO: 2088700 - RNA, 19 nt, Artificial Sequence
  Description of Artificial Sequence: Synthetic oligonucleotide
uagcccagcacagcccucu

SEQ ID NO: 2088701 - RNA, 19 nt, Artificial Sequence
  Description of Artificial Sequence: Synthetic oligonucleotide
caaggacuucuggauauca

SEQ ID NO: 2088702 - RNA, 19 nt, Artificial Sequence
  Description of Artificial Sequence: Synthetic oligonucleotide
agguagacuuugaucuugu

SEQ ID NO: 2088703 - RNA, 19 nt, Artificial Sequence
  Description of Artificial Sequence: Synthetic oligonucleotide
ugcauccccaggacaucuc

SEQ ID NO: 2088704 - RNA, 19 nt, Artificial Sequence
  Description of Artificial Sequence: Synthetic oligonucleotide
gcguagaaccugcaucccc

SEQ ID NO: 2088705 - RNA, 19 nt, Artificial Sequence
  Description of Artificial Sequence: Synthetic oligonucleotide
agcucgacgaguggccaug

SEQ ID NO: 2088706 - RNA, 19 nt, Artificial Sequence
  Description of Artificial Sequence: Synthetic oligonucleotide
cccauuacaugcagcuuug

SEQ ID NO: 2088707 - RNA, 19 nt, Artificial Sequence
  Description of Artificial Sequence: Synthetic oligonucleotide
ugaucauccucaggcccaa

SEQ ID NO: 2088708 - RNA, 19 nt, Artificial Sequence
  Description of Artificial Sequence: Synthetic oligonucleotide
ccaucauaaggcccauuac

SEQ ID NO: 2088709 - RNA, 19 nt, Artificial Sequence
  Description of Artificial Sequence: Synthetic oligonucleotide
auugcaccuuugaugcccu

SEQ ID NO: 2088710 - RNA, 19 nt, Artificial Sequence
  Description of Artificial Sequence: Synthetic oligonucleotide
caagcuuguagucuccaau

SEQ ID NO: 2088711 - RNA, 19 nt, Artificial Sequence
  Description of Artificial Sequence: Synthetic oligonucleotide
cuaaaucuggcaacucuuu

SEQ ID NO: 2088712 - RNA, 19 nt, Artificial Sequence
  Description of Artificial Sequence: Synthetic oligonucleotide
caaaccacucaucacuuuu

SEQ ID NO: 2088713 - RNA, 19 nt, Artificial Sequence
  Description of Artificial Sequence: Synthetic oligonucleotide
caguaguucaaggacuucu

SEQ ID NO: 2088714 - RNA, 19 nt, Artificial Sequence
  Description of Artificial Sequence: Synthetic oligonucleotide
gguuccccacuuugaagac

SEQ ID NO: 2088715 - RNA, 19 nt, Artificial Sequence
  Description of Artificial Sequence: Synthetic oligonucleotide
cugggguauccagacuaac

SEQ ID NO: 2088716 - RNA, 19 nt, Artificial Sequence
  Description of Artificial Sequence: Synthetic oligonucleotide
acccgaagccuuugguuua

SEQ ID NO: 2088717 - RNA, 19 nt, Artificial Sequence
  Description of Artificial Sequence: Synthetic oligonucleotide
gcgguuccccacuuugaag

SEQ ID NO: 2088718 - RNA, 19 nt, Artificial Sequence
  Description of Artificial Sequence: Synthetic oligonucleotide
ggagauuagaccaguaguu

SEQ ID NO: 2088719 - RNA, 19 nt, Artificial Sequence
  Description of Artificial Sequence: Synthetic oligonucleotide
uugcaucauccaguaacuu

SEQ ID NO: 2088720 - RNA, 19 nt, Artificial Sequence
  Description of Artificial Sequence: Synthetic oligonucleotide
gguuuauuucugguggcaa

SEQ ID NO: 2088721 - RNA, 19 nt, Artificial Sequence
  Description of Artificial Sequence: Synthetic oligonucleotide
gcaacaaaaugaucauccu

SEQ ID NO: 2088722 - RNA, 19 nt, Artificial Sequence
  Description of Artificial Sequence: Synthetic oligonucleotide
gguauccagacuaaccagu

SEQ ID NO: 2088723 - RNA, 19 nt, Artificial Sequence
  Description of Artificial Sequence: Synthetic oligonucleotide
ucccaccgcaaagacggaa

SEQ ID NO: 2088724 - RNA, 19 nt, Artificial Sequence
  Description of Artificial Sequence: Synthetic oligonucleotide
uacuugcacugucgccuuc

SEQ ID NO: 2088725 - RNA, 19 nt, Artificial Sequence
  Description of Artificial Sequence: Synthetic oligonucleotide
cucacaugucauccauuaa

SEQ ID NO: 2088726 - RNA, 19 nt, Artificial Sequence
  Description of Artificial Sequence: Synthetic oligonucleotide
cacugucgccuucccuggg

SEQ ID NO: 2088727 - RNA, 19 nt, Artificial Sequence
  Description of Artificial Sequence: Synthetic oligonucleotide
aguucucggaaagcuucau

SEQ ID NO: 2088728 - RNA, 19 nt, Artificial Sequence
  Description of Artificial Sequence: Synthetic oligonucleotide
cacagcccucugcuucucc

SEQ ID NO: 2088729 - RNA, 19 nt, Artificial Sequence
  Description of Artificial Sequence: Synthetic oligonucleotide
cauccccaggacaucucga

SEQ ID NO: 2088730 - RNA, 19 nt, Artificial Sequence
  Description of Artificial Sequence: Synthetic oligonucleotide
gaguggccaugacucccac

SEQ ID NO: 2088731 - RNA, 19 nt, Artificial Sequence
  Description of Artificial Sequence: Synthetic oligonucleotide
gccauugcaucauccagua

SEQ ID NO: 2088732 - RNA, 19 nt, Artificial Sequence
  Description of Artificial Sequence: Synthetic oligonucleotide
caccgcaaagacggaauca

SEQ ID NO: 2088733 - RNA, 19 nt, Artificial Sequence
  Description of Artificial Sequence: Synthetic oligonucleotide
cacaagcagagggccacuc

SEQ ID NO: 2088734 - RNA, 19 nt, Artificial Sequence
  Description of Artificial Sequence: Synthetic oligonucleotide
uugcaccuuugaugcccug

SEQ ID NO: 2088735 - RNA, 19 nt, Artificial Sequence
  Description of Artificial Sequence: Synthetic oligonucleotide
gacgaagugcagagcucga

SEQ ID NO: 2088736 - RNA, 19 nt, Artificial Sequence
  Description of Artificial Sequence: Synthetic oligonucleotide
cgucaguucugcaacaaaa

SEQ ID NO: 2088737 - RNA, 19 nt, Artificial Sequence
  Description of Artificial Sequence: Synthetic oligonucleotide
cguagaaccugcaucccca

SEQ ID NO: 2088738 - RNA, 19 nt, Artificial Sequence
  Description of Artificial Sequence: Synthetic oligonucleotide
ugucgccuucccuggggua

SEQ ID NO: 2088739 - RNA, 19 nt, Artificial Sequence
  Description of Artificial Sequence: Synthetic oligonucleotide
cucgaaagaaaugcaccgu

SEQ ID NO: 2088740 - RNA, 19 nt, Artificial Sequence
  Description of Artificial Sequence: Synthetic oligonucleotide
cgcaaagacggaaucacaa

SEQ ID NO: 2088741 - RNA, 19 nt, Artificial Sequence
  Description of Artificial Sequence: Synthetic oligonucleotide
ggagucguaggugcuguuc

SEQ ID NO: 2088742 - RNA, 19 nt, Artificial Sequence
  Description of Artificial Sequence: Synthetic oligonucleotide
cucgacgaguggccaugac

SEQ ID NO: 2088743 - RNA, 19 nt, Artificial Sequence
  Description of Artificial Sequence: Synthetic oligonucleotide
cgguuccccacuuugaaga

SEQ ID NO: 2088744 - RNA, 19 nt, Artificial Sequence
  Description of Artificial Sequence: Synthetic oligonucleotide
uguauccucccggggccuc

SEQ ID NO: 2088745 - RNA, 19 nt, Artificial Sequence
  Description of Artificial Sequence: Synthetic oligonucleotide
ucccggggccucaguuuca

SEQ ID NO: 2088746 - RNA, 19 nt, Artificial Sequence
  Description of Artificial Sequence: Synthetic oligonucleotide
gguuaucagcguagcccag

SEQ ID NO: 2088747 - RNA, 19 nt, Artificial Sequence
  Description of Artificial Sequence: Synthetic oligonucleotide
cauccugcucauaaauguu

SEQ ID NO: 2088748 - RNA, 19 nt, Artificial Sequence
  Description of Artificial Sequence: Synthetic oligonucleotide
ccccacuuugaagacgaag

SEQ ID NO: 2088749 - RNA, 19 nt, Artificial Sequence
  Description of Artificial Sequence: Synthetic oligonucleotide
cagcguagcccagcacagc

SEQ ID NO: 2088750 - RNA, 19 nt, Artificial Sequence
  Description of Artificial Sequence: Synthetic oligonucleotide
aggaucugacugagguaga

SEQ ID NO: 2088751 - RNA, 19 nt, Artificial Sequence
  Description of Artificial Sequence: Synthetic oligonucleotide
gcccauuacaugcagcuuu

SEQ ID NO: 2088752 - RNA, 19 nt, Artificial Sequence
  Description of Artificial Sequence: Synthetic oligonucleotide
cccuguaguuccaguuuac

SEQ ID NO: 2088753 - RNA, 19 nt, Artificial Sequence
  Description of Artificial Sequence: Synthetic oligonucleotide
uccccacuuugaagacgaa

SEQ ID NO: 2088754 - RNA, 19 nt, Artificial Sequence
  Description of Artificial Sequence: Synthetic oligonucleotide
cacuccagcuuccuggcau

SEQ ID NO: 2088755 - RNA, 19 nt, Artificial Sequence
  Description of Artificial Sequence: Synthetic oligonucleotide
augcaccgucuggaagcgg

SEQ ID NO: 2088756 - RNA, 19 nt, Artificial Sequence
  Description of Artificial Sequence: Synthetic oligonucleotide
cauggcguagaaccugcau

SEQ ID NO: 2088757 - RNA, 19 nt, Artificial Sequence
  Description of Artificial Sequence: Synthetic oligonucleotide
ccaccgcaaagacggaauc

SEQ ID NO: 2088758 - RNA, 19 nt, Artificial Sequence
  Description of Artificial Sequence: Synthetic oligonucleotide
cugcugccauugcaucauc

SEQ ID NO: 2088759 - RNA, 19 nt, Artificial Sequence
  Description of Artificial Sequence: Synthetic oligonucleotide
gguagacuuugaucuugua

SEQ ID NO: 2088760 - RNA, 19 nt, Artificial Sequence
  Description of Artificial Sequence: Synthetic oligonucleotide
gcccuguaguuccaguuua

SEQ ID NO: 2088761 - RNA, 19 nt, Artificial Sequence
  Description of Artificial Sequence: Synthetic oligonucleotide
cuggaagcgguuccccacu

SEQ ID NO: 2088762 - RNA, 19 nt, Artificial Sequence
  Description of Artificial Sequence: Synthetic oligonucleotide
gugucaggaucgauuggcu

SEQ ID NO: 2088763 - RNA, 19 nt, Artificial Sequence
  Description of Artificial Sequence: Synthetic oligonucleotide
cccugggguauccagacua

SEQ ID NO: 2088764 - RNA, 19 nt, Artificial Sequence
  Description of Artificial Sequence: Synthetic oligonucleotide
agucguugccaagcuugua

SEQ ID NO: 2088765 - RNA, 19 nt, Artificial Sequence
  Description of Artificial Sequence: Synthetic oligonucleotide
ccuuugguuuauuucuggu

SEQ ID NO: 2088766 - RNA, 19 nt, Artificial Sequence
  Description of Artificial Sequence: Synthetic oligonucleotide
ccuguaguuccaguuuaca

SEQ ID NO: 2088767 - RNA, 19 nt, Artificial Sequence
  Description of Artificial Sequence: Synthetic oligonucleotide
ucgccuucccugggguauc

SEQ ID NO: 2088768 - RNA, 19 nt, Artificial Sequence
  Description of Artificial Sequence: Synthetic oligonucleotide
aggcugcugcaugaucaau

SEQ ID NO: 2088769 - RNA, 19 nt, Artificial Sequence
  Description of Artificial Sequence: Synthetic oligonucleotide
ggaucgauuggcucuccuu

SEQ ID NO: 2088770 - RNA, 19 nt, Artificial Sequence
  Description of Artificial Sequence: Synthetic oligonucleotide
cauugcugauagccuggcu

SEQ ID NO: 2088771 - RNA, 19 nt, Artificial Sequence
  Description of Artificial Sequence: Synthetic oligonucleotide
gcuggaagcaagugugauu

SEQ ID NO: 2088772 - RNA, 19 nt, Artificial Sequence
  Description of Artificial Sequence: Synthetic oligonucleotide
ccauaauuguacgucaguu

SEQ ID NO: 2088773 - RNA, 19 nt, Artificial Sequence
  Description of Artificial Sequence: Synthetic oligonucleotide
ccgcaaagacggaaucaca

SEQ ID NO: 2088774 - RNA, 19 nt, Artificial Sequence
  Description of Artificial Sequence: Synthetic oligonucleotide
cuggagucguaggugcugu

SEQ ID NO: 2088775 - RNA, 19 nt, Artificial Sequence
  Description of Artificial Sequence: Synthetic oligonucleotide
gcguagcccagcacagccc

SEQ ID NO: 2088776 - RNA, 19 nt, Artificial Sequence
  Description of Artificial Sequence: Synthetic oligonucleotide
ucccaucauaaggcccauu

SEQ ID NO: 2088777 - RNA, 19 nt, Artificial Sequence
  Description of Artificial Sequence: Synthetic oligonucleotide
gagcucgacgaguggccau

SEQ ID NO: 2088778 - RNA, 19 nt, Artificial Sequence
  Description of Artificial Sequence: Synthetic oligonucleotide
cuacuugcacugucgccuu

SEQ ID NO: 2088779 - RNA, 19 nt, Artificial Sequence
  Description of Artificial Sequence: Synthetic oligonucleotide
gucgccuucccugggguau

SEQ ID NO: 2088780 - RNA, 19 nt, Artificial Sequence
  Description of Artificial Sequence: Synthetic oligonucleotide
ccgucuggaagcgguuccc

SEQ ID NO: 2088781 - RNA, 19 nt, Artificial Sequence
  Description of Artificial Sequence: Synthetic oligonucleotide
ccaagcuuguagucuccaa

SEQ ID NO: 2088782 - RNA, 19 nt, Artificial Sequence
  Description of Artificial Sequence: Synthetic oligonucleotide
ccagacuaaccaguggugu

SEQ ID NO: 2088783 - RNA, 19 nt, Artificial Sequence
  Description of Artificial Sequence: Synthetic oligonucleotide
gccaagcuuguagucucca

SEQ ID NO: 2088784 - RNA, 19 nt, Artificial Sequence
  Description of Artificial Sequence: Synthetic oligonucleotide
gcugauagccuggcuggaa

SEQ ID NO: 2088785 - RNA, 19 nt, Artificial Sequence
  Description of Artificial Sequence: Synthetic oligonucleotide
cugucgccuucccuggggu

SEQ ID NO: 2088786 - RNA, 19 nt, Artificial Sequence
  Description of Artificial Sequence: Synthetic oligonucleotide
ggcugcugcaugaucaauu

SEQ ID NO: 2088787 - RNA, 19 nt, Artificial Sequence
  Description of Artificial Sequence: Synthetic oligonucleotide
guagcccagcacagcccuc

SEQ ID NO: 2088788 - RNA, 19 nt, Artificial Sequence
  Description of Artificial Sequence: Synthetic oligonucleotide
gaucauccucaggcccaaa

SEQ ID NO: 2088789 - RNA, 19 nt, Artificial Sequence
  Description of Artificial Sequence: Synthetic oligonucleotide
ggcaaaccacucaucacuu

SEQ ID NO: 2088790 - RNA, 19 nt, Artificial Sequence
  Description of Artificial Sequence: Synthetic oligonucleotide
ccugggguauccagacuaa

SEQ ID NO: 2088791 - RNA, 19 nt, Artificial Sequence
  Description of Artificial Sequence: Synthetic oligonucleotide
cucccaccgcaaagacgga

SEQ ID NO: 2088792 - RNA, 19 nt, Artificial Sequence
  Description of Artificial Sequence: Synthetic oligonucleotide
ccaggagauuagaccagua

SEQ ID NO: 2088793 - RNA, 19 nt, Artificial Sequence
  Description of Artificial Sequence: Synthetic oligonucleotide
cccaaaucccaccauuguu

SEQ ID NO: 2088794 - RNA, 19 nt, Artificial Sequence
  Description of Artificial Sequence: Synthetic oligonucleotide
cgaguggccaugacuccca

SEQ ID NO: 2088795 - RNA, 19 nt, Artificial Sequence
  Description of Artificial Sequence: Synthetic oligonucleotide
gcaugaucaauugcaccuu

SEQ ID NO: 2088796 - RNA, 19 nt, Artificial Sequence
  Description of Artificial Sequence: Synthetic oligonucleotide
ggaugacuacuugcacugu

SEQ ID NO: 2088797 - RNA, 19 nt, Artificial Sequence
  Description of Artificial Sequence: Synthetic oligonucleotide
ccacaacaacuuuaacuuu

SEQ ID NO: 2088798 - RNA, 19 nt, Artificial Sequence
  Description of Artificial Sequence: Synthetic oligonucleotide
ccaugacucccaccgcaaa

SEQ ID NO: 2088799 - RNA, 19 nt, Artificial Sequence
  Description of Artificial Sequence: Synthetic oligonucleotide
gcucgacgaguggccauga

SEQ ID NO: 2088800 - RNA, 19 nt, Artificial Sequence
  Description of Artificial Sequence: Synthetic oligonucleotide
ccauugcaucauccaguaa

SEQ ID NO: 2088801 - RNA, 19 nt, Artificial Sequence
  Description of Artificial Sequence: Synthetic oligonucleotide
ggaagcgguuccccacuuu

SEQ ID NO: 2088802 - RNA, 19 nt, Artificial Sequence
  Description of Artificial Sequence: Synthetic oligonucleotide
ggcccauuacaugcagcuu

SEQ ID NO: 2088803 - RNA, 19 nt, Artificial Sequence
  Description of Artificial Sequence: Synthetic oligonucleotide
cccggggccucaguuucaa

SEQ ID NO: 2088804 - RNA, 19 nt, Artificial Sequence
  Description of Artificial Sequence: Synthetic oligonucleotide
ccggggccucaguuucaaa

SEQ ID NO: 2088805 - RNA, 19 nt, Artificial Sequence
  Description of Artificial Sequence: Synthetic oligonucleotide
cccgaagccuuugguuuau

SEQ ID NO: 2088806 - RNA, 19 nt, Artificial Sequence
  Description of Artificial Sequence: Synthetic oligonucleotide
ccgaagccuuugguuuauu

SEQ ID NO: 2088807 - RNA, 19 nt, Artificial Sequence
  Description of Artificial Sequence: Synthetic oligonucleotide
aauacuaaguuugucagcc

SEQ ID NO: 2088808 - RNA, 19 nt, Artificial Sequence
  Description of Artificial Sequence: Synthetic oligonucleotide
  modified_base (7)..(7): a, c, u, g, unknown or other
aaaaccnuguuacagaaga

SEQ ID NO: 2088809 - RNA, 19 nt, Artificial Sequence
  Description of Artificial Sequence: Synthetic oligonucleotide
auaaucuuuaaaauggucc

SEQ ID NO: 2088810 - RNA, 19 nt, Artificial Sequence
  Description of Artificial Sequence: Synthetic oligonucleotide
aaaauauuuauagucagca

SEQ ID NO: 2088811 - RNA, 19 nt, Artificial Sequence
  Description of Artificial Sequence: Synthetic oligonucleotide
aaguuugucagccauagga

SEQ ID NO: 2088812 - RNA, 19 nt, Artificial Sequence
  Description of Artificial Sequence: Synthetic oligonucleotide
uguuacagaagauugcagg

SEQ ID NO: 2088813 - RNA, 19 nt, Artificial Sequence
  Description of Artificial Sequence: Synthetic oligonucleotide
uguaaagacauuauaauuu

SEQ ID NO: 2088814 - RNA, 19 nt, Artificial Sequence
  Description of Artificial Sequence: Synthetic oligonucleotide
uuaaguagcagcaauugac

SEQ ID NO: 2088815 - RNA, 19 nt, Artificial Sequence
  Description of Artificial Sequence: Synthetic oligonucleotide
ucuggggacaaacagaacc

SEQ ID NO: 2088816 - RNA, 19 nt, Artificial Sequence
  Description of Artificial Sequence: Synthetic oligonucleotide
auuuggaauggucauaauc

SEQ ID NO: 2088817 - RNA, 19 nt, Artificial Sequence
  Description of Artificial Sequence: Synthetic oligonucleotide
aaaauucuaggguugacaa

SEQ ID NO: 2088818 - RNA, 19 nt, Artificial Sequence
  Description of Artificial Sequence: Synthetic oligonucleotide
aaggcauaucuucaggagg

SEQ ID NO: 2088819 - RNA, 19 nt, Artificial Sequence
  Description of Artificial Sequence: Synthetic oligonucleotide
auuugucuugucuucaaac

SEQ ID NO: 2088820 - RNA, 19 nt, Artificial Sequence
  Description of Artificial Sequence: Synthetic oligonucleotide
gauuuuacugaacacacuc

SEQ ID NO: 2088821 - RNA, 19 nt, Artificial Sequence
  Description of Artificial Sequence: Synthetic oligonucleotide
ucaaaguguagcauccacg

SEQ ID NO: 2088822 - RNA, 19 nt, Artificial Sequence
  Description of Artificial Sequence: Synthetic oligonucleotide
augagauguuucuucaacc

SEQ ID NO: 2088823 - RNA, 19 nt, Artificial Sequence
  Description of Artificial Sequence: Synthetic oligonucleotide
ucugaaucggaucugcuug

SEQ ID NO: 2088824 - RNA, 19 nt, Artificial Sequence
  Description of Artificial Sequence: Synthetic oligonucleotide
uugauuuuacugaacacac

SEQ ID NO: 2088825 - RNA, 19 nt, Artificial Sequence
  Description of Artificial Sequence: Synthetic oligonucleotide
uggaauacuaaguuuguca

SEQ ID NO: 2088826 - RNA, 19 nt, Artificial Sequence
  Description of Artificial Sequence: Synthetic oligonucleotide
aaacugaggaacuguaucu

SEQ ID NO: 2088827 - RNA, 19 nt, Artificial Sequence
  Description of Artificial Sequence: Synthetic oligonucleotide
uuuuacugaacacacucga

SEQ ID NO: 2088828 - RNA, 19 nt, Artificial Sequence
  Description of Artificial Sequence: Synthetic oligonucleotide
augucuucgagcuuucugg

SEQ ID NO: 2088829 - RNA, 19 nt, Artificial Sequence
  Description of Artificial Sequence: Synthetic oligonucleotide
aaugccaccagugucuggg

SEQ ID NO: 2088830 - RNA, 19 nt, Artificial Sequence
  Description of Artificial Sequence: Synthetic oligonucleotide
aacagaaccugcccugggc

SEQ ID NO: 2088831 - RNA, 19 nt, Artificial Sequence
  Description of Artificial Sequence: Synthetic oligonucleotide
caggaguuuauacugacgg

SEQ ID NO: 2088832 - RNA, 19 nt, Artificial Sequence
  Description of Artificial Sequence: Synthetic oligonucleotide
aaauucuaggguugacaac

SEQ ID NO: 2088833 - RNA, 19 nt, Artificial Sequence
  Description of Artificial Sequence: Synthetic oligonucleotide
ucugguuggauaaaggaaa

SEQ ID NO: 2088834 - RNA, 19 nt, Artificial Sequence
  Description of Artificial Sequence: Synthetic oligonucleotide
aguaugggcucccagagag

SEQ ID NO: 2088835 - RNA, 19 nt, Artificial Sequence
  Description of Artificial Sequence: Synthetic oligonucleotide
acuacaugcaguuucaaaa

SEQ ID NO: 2088836 - RNA, 19 nt, Artificial Sequence
  Description of Artificial Sequence: Synthetic oligonucleotide
aaaagcacaaacagcauca

SEQ ID NO: 2088837 - RNA, 19 nt, Artificial Sequence
  Description of Artificial Sequence: Synthetic oligonucleotide
gacacauucaccuuccuuc

SEQ ID NO: 2088838 - RNA, 19 nt, Artificial Sequence
  Description of Artificial Sequence: Synthetic oligonucleotide
ucagcauaagcccagaauu

SEQ ID NO: 2088839 - RNA, 19 nt, Artificial Sequence
  Description of Artificial Sequence: Synthetic oligonucleotide
uauacugacggugacagga

SEQ ID NO: 2088840 - RNA, 19 nt, Artificial Sequence
  Description of Artificial Sequence: Synthetic oligonucleotide
aaacuccucaaaguguagc

SEQ ID NO: 2088841 - RNA, 19 nt, Artificial Sequence
  Description of Artificial Sequence: Synthetic oligonucleotide
uggaacuugaggguaaacg

SEQ ID NO: 2088842 - RNA, 19 nt, Artificial Sequence
  Description of Artificial Sequence: Synthetic oligonucleotide
uuacugaacacacucgacu

SEQ ID NO: 2088843 - RNA, 19 nt, Artificial Sequence
  Description of Artificial Sequence: Synthetic oligonucleotide
uuugucuugucuucaaaca

SEQ ID NO: 2088844 - RNA, 19 nt, Artificial Sequence
  Description of Artificial Sequence: Synthetic oligonucleotide
uguaccuggaauacuaagu

SEQ ID NO: 2088845 - RNA, 19 nt, Artificial Sequence
  Description of Artificial Sequence: Synthetic oligonucleotide
agguuugacacauucaccu

SEQ ID NO: 2088846 - RNA, 19 nt, Artificial Sequence
  Description of Artificial Sequence: Synthetic oligonucleotide
agagacacuagacugguca

SEQ ID NO: 2088847 - RNA, 19 nt, Artificial Sequence
  Description of Artificial Sequence: Synthetic oligonucleotide
uuuaaguagcagcaauuga

SEQ ID NO: 2088848 - RNA, 19 nt, Artificial Sequence
  Description of Artificial Sequence: Synthetic oligonucleotide
aguagcagcaauugacuuc

SEQ ID NO: 2088849 - RNA, 19 nt, Artificial Sequence
  Description of Artificial Sequence: Synthetic oligonucleotide
acauaaugccaccaguguc

SEQ ID NO: 2088850 - RNA, 19 nt, Artificial Sequence
  Description of Artificial Sequence: Synthetic oligonucleotide
guuacagaagauugcaggc

SEQ ID NO: 2088851 - RNA, 19 nt, Artificial Sequence
  Description of Artificial Sequence: Synthetic oligonucleotide
aaucggaucugcuugcccu

SEQ ID NO: 2088852 - RNA, 19 nt, Artificial Sequence
  Description of Artificial Sequence: Synthetic oligonucleotide
uuagcuuuuccacaauggu

SEQ ID NO: 2088853 - RNA, 19 nt, Artificial Sequence
  Description of Artificial Sequence: Synthetic oligonucleotide
uaaguagcagcaauugacu

SEQ ID NO: 2088854 - RNA, 19 nt, Artificial Sequence
  Description of Artificial Sequence: Synthetic oligonucleotide
guaucugugcuucucaggc

SEQ ID NO: 2088855 - RNA, 19 nt, Artificial Sequence
  Description of Artificial Sequence: Synthetic oligonucleotide
aagacauuauaauuucuuu

SEQ ID NO: 2088856 - RNA, 19 nt, Artificial Sequence
  Description of Artificial Sequence: Synthetic oligonucleotide
aaauauuuauagucagcau

SEQ ID NO: 2088857 - RNA, 19 nt, Artificial Sequence
  Description of Artificial Sequence: Synthetic oligonucleotide
uucuuaaaauucuaggguu

SEQ ID NO: 2088858 - RNA, 19 nt, Artificial Sequence
  Description of Artificial Sequence: Synthetic oligonucleotide
agugucuggggacaaacag

SEQ ID NO: 2088859 - RNA, 19 nt, Artificial Sequence
  Description of Artificial Sequence: Synthetic oligonucleotide
aagguuugacacauucacc

SEQ ID NO: 2088860 - RNA, 19 nt, Artificial Sequence
  Description of Artificial Sequence: Synthetic oligonucleotide
uaaacgucuucuuaaaauu

SEQ ID NO: 2088861 - RNA, 19 nt, Artificial Sequence
  Description of Artificial Sequence: Synthetic oligonucleotide
uaaaauucuaggguugaca

SEQ ID NO: 2088862 - RNA, 19 nt, Artificial Sequence
  Description of Artificial Sequence: Synthetic oligonucleotide
ucauuuaaguagcagcaau

SEQ ID NO: 2088863 - RNA, 19 nt, Artificial Sequence
  Description of Artificial Sequence: Synthetic oligonucleotide
guagcauccacguaacuac

SEQ ID NO: 2088864 - RNA, 19 nt, Artificial Sequence
  Description of Artificial Sequence: Synthetic oligonucleotide
ggucauaaucuuuaaaaug

SEQ ID NO: 2088865 - RNA, 19 nt, Artificial Sequence
  Description of Artificial Sequence: Synthetic oligonucleotide
uaugucuucgagcuuucug

SEQ ID NO: 2088866 - RNA, 19 nt, Artificial Sequence
  Description of Artificial Sequence: Synthetic oligonucleotide
cauccacguaacuacaugc

SEQ ID NO: 2088867 - RNA, 19 nt, Artificial Sequence
  Description of Artificial Sequence: Synthetic oligonucleotide
auuuaaguagcagcaauug

SEQ ID NO: 2088868 - RNA, 19 nt, Artificial Sequence
  Description of Artificial Sequence: Synthetic oligonucleotide
ucuucgagcuuucuggaac

SEQ ID NO: 2088869 - RNA, 19 nt, Artificial Sequence
  Description of Artificial Sequence: Synthetic oligonucleotide
acauucaccuuccuucccg

SEQ ID NO: 2088870 - RNA, 19 nt, Artificial Sequence
  Description of Artificial Sequence: Synthetic oligonucleotide
ugucuggggacaaacagaa

SEQ ID NO: 2088871 - RNA, 19 nt, Artificial Sequence
  Description of Artificial Sequence: Synthetic oligonucleotide
cuagacuggucacaguucc

SEQ ID NO: 2088872 - RNA, 19 nt, Artificial Sequence
  Description of Artificial Sequence: Synthetic oligonucleotide
uaaagacauuauaauuucu

SEQ ID NO: 2088873 - RNA, 19 nt, Artificial Sequence
  Description of Artificial Sequence: Synthetic oligonucleotide
acggugacaggaucaaugg

SEQ ID NO: 2088874 - RNA, 19 nt, Artificial Sequence
  Description of Artificial Sequence: Synthetic oligonucleotide
uccacguaacuacaugcag

SEQ ID NO: 2088875 - RNA, 19 nt, Artificial Sequence
  Description of Artificial Sequence: Synthetic oligonucleotide
uuugucagccauaggaguc

SEQ ID NO: 2088876 - RNA, 19 nt, Artificial Sequence
  Description of Artificial Sequence: Synthetic oligonucleotide
aaagacauuauaauuucuu

SEQ ID NO: 2088877 - RNA, 19 nt, Artificial Sequence
  Description of Artificial Sequence: Synthetic oligonucleotide
agucagaccacaucaccuc

SEQ ID NO: 2088878 - RNA, 19 nt, Artificial Sequence
  Description of Artificial Sequence: Synthetic oligonucleotide
agagagccgauccacagug

SEQ ID NO: 2088879 - RNA, 19 nt, Artificial Sequence
  Description of Artificial Sequence: Synthetic oligonucleotide
ugaggaacuguaucugugc

SEQ ID NO: 2088880 - RNA, 19 nt, Artificial Sequence
  Description of Artificial Sequence: Synthetic oligonucleotide
uuuacugaacacacucgac

SEQ ID NO: 2088881 - RNA, 19 nt, Artificial Sequence
  Description of Artificial Sequence: Synthetic oligonucleotide
cuaaguuugucagccauag

SEQ ID NO: 2088882 - RNA, 19 nt, Artificial Sequence
  Description of Artificial Sequence: Synthetic oligonucleotide
ucaauccaggaguuuauac

SEQ ID NO: 2088883 - RNA, 19 nt, Artificial Sequence
  Description of Artificial Sequence: Synthetic oligonucleotide
agacauuauaauuucuuuu

SEQ ID NO: 2088884 - RNA, 19 nt, Artificial Sequence
  Description of Artificial Sequence: Synthetic oligonucleotide
gauucugguuggauaaagg

SEQ ID NO: 2088885 - RNA, 19 nt, Artificial Sequence
  Description of Artificial Sequence: Synthetic oligonucleotide
auauuuauagucagcauaa

SEQ ID NO: 2088886 - RNA, 19 nt, Artificial Sequence
  Description of Artificial Sequence: Synthetic oligonucleotide
agugugaccguaugucuuc

SEQ ID NO: 2088887 - RNA, 19 nt, Artificial Sequence
  Description of Artificial Sequence: Synthetic oligonucleotide
guuucagccaggcucuggg

SEQ ID NO: 2088888 - RNA, 19 nt, Artificial Sequence
  Description of Artificial Sequence: Synthetic oligonucleotide
auuuuacugaacacacucg

SEQ ID NO: 2088889 - RNA, 19 nt, Artificial Sequence
  Description of Artificial Sequence: Synthetic oligonucleotide
  modified_base (4)..(4): a, c, u, g, unknown or other
accnuguuacagaagauug

SEQ ID NO: 2088890 - RNA, 19 nt, Artificial Sequence
  Description of Artificial Sequence: Synthetic oligonucleotide
agcaauugacuucaugaga

SEQ ID NO: 2088891 - RNA, 19 nt, Artificial Sequence
  Description of Artificial Sequence: Synthetic oligonucleotide
aaaugguccagagacacua

SEQ ID NO: 2088892 - RNA, 19 nt, Artificial Sequence
  Description of Artificial Sequence: Synthetic oligonucleotide
uguacuuuccuguccauuu

SEQ ID NO: 2088893 - RNA, 19 nt, Artificial Sequence
  Description of Artificial Sequence: Synthetic oligonucleotide
ugugaaagguuugacacau

SEQ ID NO: 2088894 - RNA, 19 nt, Artificial Sequence
  Description of Artificial Sequence: Synthetic oligonucleotide
guccagagacacuagacug

SEQ ID NO: 2088895 - RNA, 19 nt, Artificial Sequence
  Description of Artificial Sequence: Synthetic oligonucleotide
auaggaguccagaugacag

SEQ ID NO: 2088896 - RNA, 19 nt, Artificial Sequence
  Description of Artificial Sequence: Synthetic oligonucleotide
uuccacauaaugccaccag

SEQ ID NO: 2088897 - RNA, 19 nt, Artificial Sequence
  Description of Artificial Sequence: Synthetic oligonucleotide
uuugcucucagugccugcg

SEQ ID NO: 2088898 - RNA, 19 nt, Artificial Sequence
  Description of Artificial Sequence: Synthetic oligonucleotide
ugcgucucuacuucuuuag

SEQ ID NO: 2088899 - RNA, 19 nt, Artificial Sequence
  Description of Artificial Sequence: Synthetic oligonucleotide
ucuucaaccucaguggggu

SEQ ID NO: 2088900 - RNA, 19 nt, Artificial Sequence
  Description of Artificial Sequence: Synthetic oligonucleotide
cagcaauugacuucaugag

SEQ ID NO: 2088901 - RNA, 19 nt, Artificial Sequence
  Description of Artificial Sequence: Synthetic oligonucleotide
gugauugccucuuccaccc

SEQ ID NO: 2088902 - RNA, 19 nt, Artificial Sequence
  Description of Artificial Sequence: Synthetic oligonucleotide
uacuaaguuugucagccau

SEQ ID NO: 2088903 - RNA, 19 nt, Artificial Sequence
  Description of Artificial Sequence: Synthetic oligonucleotide
uuccacccgggcuaggugg

SEQ ID NO: 2088904 - RNA, 19 nt, Artificial Sequence
  Description of Artificial Sequence: Synthetic oligonucleotide
uggugugaaagguuugaca

SEQ ID NO: 2088905 - RNA, 19 nt, Artificial Sequence
  Description of Artificial Sequence: Synthetic oligonucleotide
accuggaauacuaaguuug

SEQ ID NO: 2088906 - RNA, 19 nt, Artificial Sequence
  Description of Artificial Sequence: Synthetic oligonucleotide
gauuccacauaaugccacc

SEQ ID NO: 2088907 - RNA, 19 nt, Artificial Sequence
  Description of Artificial Sequence: Synthetic oligonucleotide
gauugccucuuccacccgg

SEQ ID NO: 2088908 - RNA, 19 nt, Artificial Sequence
  Description of Artificial Sequence: Synthetic oligonucleotide
gacacuagacuggucacag

SEQ ID NO: 2088909 - RNA, 19 nt, Artificial Sequence
  Description of Artificial Sequence: Synthetic oligonucleotide
ugauuuuacugaacacacu

SEQ ID NO: 2088910 - RNA, 19 nt, Artificial Sequence
  Description of Artificial Sequence: Synthetic oligonucleotide
gcagcaauugacuucauga

SEQ ID NO: 2088911 - RNA, 19 nt, Artificial Sequence
  Description of Artificial Sequence: Synthetic oligonucleotide
uaaguuugucagccauagg

SEQ ID NO: 2088912 - RNA, 19 nt, Artificial Sequence
  Description of Artificial Sequence: Synthetic oligonucleotide
uguagcauccacguaacua

SEQ ID NO: 2088913 - RNA, 19 nt, Artificial Sequence
  Description of Artificial Sequence: Synthetic oligonucleotide
gacggugacaggaucaaug

SEQ ID NO: 2088914 - RNA, 19 nt, Artificial Sequence
  Description of Artificial Sequence: Synthetic oligonucleotide
ugaccguaugucuucgagc

SEQ ID NO: 2088915 - RNA, 19 nt, Artificial Sequence
  Description of Artificial Sequence: Synthetic oligonucleotide
uguugugcgggccaaucaa

SEQ ID NO: 2088916 - RNA, 19 nt, Artificial Sequence
  Description of Artificial Sequence: Synthetic oligonucleotide
aguuugucagccauaggag

SEQ ID NO: 2088917 - RNA, 19 nt, Artificial Sequence
  Description of Artificial Sequence: Synthetic oligonucleotide
aagggauucugguuggaua

SEQ ID NO: 2088918 - RNA, 19 nt, Artificial Sequence
  Description of Artificial Sequence: Synthetic oligonucleotide
  modified_base (5)..(5): a, c, u, g, unknown or other
aaccnuguuacagaagauu

SEQ ID NO: 2088919 - RNA, 19 nt, Artificial Sequence
  Description of Artificial Sequence: Synthetic oligonucleotide
gaauuuggaauggucauaa

SEQ ID NO: 2088920 - RNA, 19 nt, Artificial Sequence
  Description of Artificial Sequence: Synthetic oligonucleotide
aagucagaccacaucaccu

SEQ ID NO: 2088921 - RNA, 19 nt, Artificial Sequence
  Description of Artificial Sequence: Synthetic oligonucleotide
ucagugugaccguaugucu

SEQ ID NO: 2088922 - RNA, 19 nt, Artificial Sequence
  Description of Artificial Sequence: Synthetic oligonucleotide
acuggucacaguuccaggu

SEQ ID NO: 2088923 - RNA, 19 nt, Artificial Sequence
  Description of Artificial Sequence: Synthetic oligonucleotide
uugaggguaaacgucuucu

SEQ ID NO: 2088924 - RNA, 19 nt, Artificial Sequence
  Description of Artificial Sequence: Synthetic oligonucleotide
uuacagaagauugcaggcu

SEQ ID NO: 2088925 - RNA, 19 nt, Artificial Sequence
  Description of Artificial Sequence: Synthetic oligonucleotide
aaguagcagcaauugacuu

SEQ ID NO: 2088926 - RNA, 19 nt, Artificial Sequence
  Description of Artificial Sequence: Synthetic oligonucleotide
agggauucugguuggauaa

SEQ ID NO: 2088927 - RNA, 19 nt, Artificial Sequence
  Description of Artificial Sequence: Synthetic oligonucleotide
gcacauacgagcaugcggg

SEQ ID NO: 2088928 - RNA, 19 nt, Artificial Sequence
  Description of Artificial Sequence: Synthetic oligonucleotide
ucaggcccauucugaaucg

SEQ ID NO: 2088929 - RNA, 19 nt, Artificial Sequence
  Description of Artificial Sequence: Synthetic oligonucleotide
cugguuggauaaaggaaag

SEQ ID NO: 2088930 - RNA, 19 nt, Artificial Sequence
  Description of Artificial Sequence: Synthetic oligonucleotide
uguuccgcaguccaguguu

SEQ ID NO: 2088931 - RNA, 19 nt, Artificial Sequence
  Description of Artificial Sequence: Synthetic oligonucleotide
guuggauaaaggaaaggca

SEQ ID NO: 2088932 - RNA, 19 nt, Artificial Sequence
  Description of Artificial Sequence: Synthetic oligonucleotide
aguccaguguugugcgggc

SEQ ID NO: 2088933 - RNA, 19 nt, Artificial Sequence
  Description of Artificial Sequence: Synthetic oligonucleotide
cuucuuaaaauucuagggu

SEQ ID NO: 2088934 - RNA, 19 nt, Artificial Sequence
  Description of Artificial Sequence: Synthetic oligonucleotide
ggaaaggcauaucuucagg

SEQ ID NO: 2088935 - RNA, 19 nt, Artificial Sequence
  Description of Artificial Sequence: Synthetic oligonucleotide
ggaguuuauacugacggug

SEQ ID NO: 2088936 - RNA, 19 nt, Artificial Sequence
  Description of Artificial Sequence: Synthetic oligonucleotide
  modified_base (2)..(2): a, c, u, g, unknown or other
cnuguuacagaagauugca

SEQ ID NO: 2088937 - RNA, 19 nt, Artificial Sequence
  Description of Artificial Sequence: Synthetic oligonucleotide
gagauguuucuucaaccuc

SEQ ID NO: 2088938 - RNA, 19 nt, Artificial Sequence
  Description of Artificial Sequence: Synthetic oligonucleotide
ggcacauacgagcaugcgg

SEQ ID NO: 2088939 - RNA, 19 nt, Artificial Sequence
  Description of Artificial Sequence: Synthetic oligonucleotide
caugcaguuucaaaacuga

SEQ ID NO: 2088940 - RNA, 19 nt, Artificial Sequence
  Description of Artificial Sequence: Synthetic oligonucleotide
cucaaaguguagcauccac

SEQ ID NO: 2088941 - RNA, 19 nt, Artificial Sequence
  Description of Artificial Sequence: Synthetic oligonucleotide
gaccacaucaccuccugga

SEQ ID NO: 2088942 - RNA, 19 nt, Artificial Sequence
  Description of Artificial Sequence: Synthetic oligonucleotide
ucgacucuucguaagggau

SEQ ID NO: 2088943 - RNA, 19 nt, Artificial Sequence
  Description of Artificial Sequence: Synthetic oligonucleotide
gauguuucuucaaccucag

SEQ ID NO: 2088944 - RNA, 19 nt, Artificial Sequence
  Description of Artificial Sequence: Synthetic oligonucleotide
guaaacgucuucuuaaaau

SEQ ID NO: 2088945 - RNA, 19 nt, Artificial Sequence
  Description of Artificial Sequence: Synthetic oligonucleotide
agccauaggaguccagaug

SEQ ID NO: 2088946 - RNA, 19 nt, Artificial Sequence
  Description of Artificial Sequence: Synthetic oligonucleotide
uuucucuggugugaaaggu

SEQ ID NO: 2088947 - RNA, 19 nt, Artificial Sequence
  Description of Artificial Sequence: Synthetic oligonucleotide
agcauaagcccagaauuug

SEQ ID NO: 2088948 - RNA, 19 nt, Artificial Sequence
  Description of Artificial Sequence: Synthetic oligonucleotide
uccaggaguuuauacugac

SEQ ID NO: 2088949 - RNA, 19 nt, Artificial Sequence
  Description of Artificial Sequence: Synthetic oligonucleotide
cugaaucggaucugcuugc

SEQ ID NO: 2088950 - RNA, 19 nt, Artificial Sequence
  Description of Artificial Sequence: Synthetic oligonucleotide
gacuggucacaguuccagg

SEQ ID NO: 2088951 - RNA, 19 nt, Artificial Sequence
  Description of Artificial Sequence: Synthetic oligonucleotide
gaccguaugucuucgagcu

SEQ ID NO: 2088952 - RNA, 19 nt, Artificial Sequence
  Description of Artificial Sequence: Synthetic oligonucleotide
ucagccauaggaguccaga

SEQ ID NO: 2088953 - RNA, 19 nt, Artificial Sequence
  Description of Artificial Sequence: Synthetic oligonucleotide
uuaaaauucuaggguugac

SEQ ID NO: 2088954 - RNA, 19 nt, Artificial Sequence
  Description of Artificial Sequence: Synthetic oligonucleotide
acugaacacacucgacucu

SEQ ID NO: 2088955 - RNA, 19 nt, Artificial Sequence
  Description of Artificial Sequence: Synthetic oligonucleotide
agugggguuucagccaggc

SEQ ID NO: 2088956 - RNA, 19 nt, Artificial Sequence
  Description of Artificial Sequence: Synthetic oligonucleotide
acagaaccugcccugggcu

SEQ ID NO: 2088957 - RNA, 19 nt, Artificial Sequence
  Description of Artificial Sequence: Synthetic oligonucleotide
gugaccguaugucuucgag

SEQ ID NO: 2088958 - RNA, 19 nt, Artificial Sequence
  Description of Artificial Sequence: Synthetic oligonucleotide
cauaaugccaccagugucu

SEQ ID NO: 2088959 - RNA, 19 nt, Artificial Sequence
  Description of Artificial Sequence: Synthetic oligonucleotide
ggugauugccucuuccacc

SEQ ID NO: 2088960 - RNA, 19 nt, Artificial Sequence
  Description of Artificial Sequence: Synthetic oligonucleotide
gaaagguuugacacauuca

SEQ ID NO: 2088961 - RNA, 19 nt, Artificial Sequence
  Description of Artificial Sequence: Synthetic oligonucleotide
gagacacuagacuggucac

SEQ ID NO: 2088962 - RNA, 19 nt, Artificial Sequence
  Description of Artificial Sequence: Synthetic oligonucleotide
aagauugcaggcugcugua

SEQ ID NO: 2088963 - RNA, 19 nt, Artificial Sequence
  Description of Artificial Sequence: Synthetic oligonucleotide
uucugaaucggaucugcuu

SEQ ID NO: 2088964 - RNA, 19 nt, Artificial Sequence
  Description of Artificial Sequence: Synthetic oligonucleotide
ggaguaugggcucccagag

SEQ ID NO: 2088965 - RNA, 19 nt, Artificial Sequence
  Description of Artificial Sequence: Synthetic oligonucleotide
acacucgacucuucguaag

SEQ ID NO: 2088966 - RNA, 19 nt, Artificial Sequence
  Description of Artificial Sequence: Synthetic oligonucleotide
auaagcccagaauuuggaa

SEQ ID NO: 2088967 - RNA, 19 nt, Artificial Sequence
  Description of Artificial Sequence: Synthetic oligonucleotide
uugucagccauaggagucc

SEQ ID NO: 2088968 - RNA, 19 nt, Artificial Sequence
  Description of Artificial Sequence: Synthetic oligonucleotide
aauuuggaauggucauaau

SEQ ID NO: 2088969 - RNA, 19 nt, Artificial Sequence
  Description of Artificial Sequence: Synthetic oligonucleotide
aggaguuuauacugacggu

SEQ ID NO: 2088970 - RNA, 19 nt, Artificial Sequence
  Description of Artificial Sequence: Synthetic oligonucleotide
ucucuacuucuuuagcuuu

SEQ ID NO: 2088971 - RNA, 19 nt, Artificial Sequence
  Description of Artificial Sequence: Synthetic oligonucleotide
ugacaggaucaauggauuc

SEQ ID NO: 2088972 - RNA, 19 nt, Artificial Sequence
  Description of Artificial Sequence: Synthetic oligonucleotide
ugacuucaugagauguuuc

SEQ ID NO: 2088973 - RNA, 19 nt, Artificial Sequence
  Description of Artificial Sequence: Synthetic oligonucleotide
caauugacuucaugagaug

SEQ ID NO: 2088974 - RNA, 19 nt, Artificial Sequence
  Description of Artificial Sequence: Synthetic oligonucleotide
uccaguguugugcgggcca

SEQ ID NO: 2088975 - RNA, 19 nt, Artificial Sequence
  Description of Artificial Sequence: Synthetic oligonucleotide
acgagcaugcgggugauug

SEQ ID NO: 2088976 - RNA, 19 nt, Artificial Sequence
  Description of Artificial Sequence: Synthetic oligonucleotide
acuagacuggucacaguuc

SEQ ID NO: 2088977 - RNA, 19 nt, Artificial Sequence
  Description of Artificial Sequence: Synthetic oligonucleotide
cuuaaaauucuaggguuga

SEQ ID NO: 2088978 - RNA, 19 nt, Artificial Sequence
  Description of Artificial Sequence: Synthetic oligonucleotide
uucguaagggauucugguu

SEQ ID NO: 2088979 - RNA, 19 nt, Artificial Sequence
  Description of Artificial Sequence: Synthetic oligonucleotide
aaaguguagcauccacgua

SEQ ID NO: 2088980 - RNA, 19 nt, Artificial Sequence
  Description of Artificial Sequence: Synthetic oligonucleotide
uaggguugacaacauugau

SEQ ID NO: 2088981 - RNA, 19 nt, Artificial Sequence
  Description of Artificial Sequence: Synthetic oligonucleotide
caaacagaaccugcccugg

SEQ ID NO: 2088982 - RNA, 19 nt, Artificial Sequence
  Description of Artificial Sequence: Synthetic oligonucleotide
uugacuucaugagauguuu

SEQ ID NO: 2088983 - RNA, 19 nt, Artificial Sequence
  Description of Artificial Sequence: Synthetic oligonucleotide
cacucgacucuucguaagg

SEQ ID NO: 2088984 - RNA, 19 nt, Artificial Sequence
  Description of Artificial Sequence: Synthetic oligonucleotide
auucaccuuccuucccgac

SEQ ID NO: 2088985 - RNA, 19 nt, Artificial Sequence
  Description of Artificial Sequence: Synthetic oligonucleotide
caaaguguagcauccacgu

SEQ ID NO: 2088986 - RNA, 19 nt, Artificial Sequence
  Description of Artificial Sequence: Synthetic oligonucleotide
gauaaaggaaaggcauauc

SEQ ID NO: 2088987 - RNA, 19 nt, Artificial Sequence
  Description of Artificial Sequence: Synthetic oligonucleotide
cuuccuuguaccuggaaua

SEQ ID NO: 2088988 - RNA, 19 nt, Artificial Sequence
  Description of Artificial Sequence: Synthetic oligonucleotide
cauacgagcaugcggguga

SEQ ID NO: 2088989 - RNA, 19 nt, Artificial Sequence
  Description of Artificial Sequence: Synthetic oligonucleotide
aggcauaucuucaggagga

SEQ ID NO: 2088990 - RNA, 19 nt, Artificial Sequence
  Description of Artificial Sequence: Synthetic oligonucleotide
acacacucgacucuucgua

SEQ ID NO: 2088991 - RNA, 19 nt, Artificial Sequence
  Description of Artificial Sequence: Synthetic oligonucleotide
gucagaccacaucaccucc

SEQ ID NO: 2088992 - RNA, 19 nt, Artificial Sequence
  Description of Artificial Sequence: Synthetic oligonucleotide
aguguugugcgggccaauc

SEQ ID NO: 2088993 - RNA, 19 nt, Artificial Sequence
  Description of Artificial Sequence: Synthetic oligonucleotide
aaugguccagagacacuag

SEQ ID NO: 2088994 - RNA, 19 nt, Artificial Sequence
  Description of Artificial Sequence: Synthetic oligonucleotide
uuccuuguaccuggaauac

SEQ ID NO: 2088995 - RNA, 19 nt, Artificial Sequence
  Description of Artificial Sequence: Synthetic oligonucleotide
  modified_base (3)..(3): a, c, u, g, unknown or other
ccnuguuacagaagauugc

SEQ ID NO: 2088996 - RNA, 19 nt, Artificial Sequence
  Description of Artificial Sequence: Synthetic oligonucleotide
guaacuacaugcaguuuca

SEQ ID NO: 2088997 - RNA, 19 nt, Artificial Sequence
  Description of Artificial Sequence: Synthetic oligonucleotide
gaaacuccucaaaguguag

SEQ ID NO: 2088998 - RNA, 19 nt, Artificial Sequence
  Description of Artificial Sequence: Synthetic oligonucleotide
cuaggugguccucuuccag

SEQ ID NO: 2088999 - RNA, 19 nt, Artificial Sequence
  Description of Artificial Sequence: Synthetic oligonucleotide
cuucaggggcacauacgag

SEQ ID NO: 2089000 - RNA, 19 nt, Artificial Sequence
  Description of Artificial Sequence: Synthetic oligonucleotide
cacaucaccuccuggaaaa

SEQ ID NO: 2089001 - RNA, 19 nt, Artificial Sequence
  Description of Artificial Sequence: Synthetic oligonucleotide
ccagaauuuggaaugguca

SEQ ID NO: 2089002 - RNA, 19 nt, Artificial Sequence
  Description of Artificial Sequence: Synthetic oligonucleotide
ggacaaacagaaccugccc

SEQ ID NO: 2089003 - RNA, 19 nt, Artificial Sequence
  Description of Artificial Sequence: Synthetic oligonucleotide
uucucaggcccauucugaa

SEQ ID NO: 2089004 - RNA, 19 nt, Artificial Sequence
  Description of Artificial Sequence: Synthetic oligonucleotide
gaucaauggauuccacaua

SEQ ID NO: 2089005 - RNA, 19 nt, Artificial Sequence
  Description of Artificial Sequence: Synthetic oligonucleotide
cacaguguacuuuccuguc

SEQ ID NO: 2089006 - RNA, 19 nt, Artificial Sequence
  Description of Artificial Sequence: Synthetic oligonucleotide
caauccaggaguuuauacu

SEQ ID NO: 2089007 - RNA, 19 nt, Artificial Sequence
  Description of Artificial Sequence: Synthetic oligonucleotide
auacuaaguuugucagcca

SEQ ID NO: 2089008 - RNA, 19 nt, Artificial Sequence
  Description of Artificial Sequence: Synthetic oligonucleotide
uaccuggaauacuaaguuu

SEQ ID NO: 2089009 - RNA, 19 nt, Artificial Sequence
  Description of Artificial Sequence: Synthetic oligonucleotide
agugccugcgucucuacuu

SEQ ID NO: 2089010 - RNA, 19 nt, Artificial Sequence
  Description of Artificial Sequence: Synthetic oligonucleotide
ucuuuagcuuuuccacaau

SEQ ID NO: 2089011 - RNA, 19 nt, Artificial Sequence
  Description of Artificial Sequence: Synthetic oligonucleotide
ugauugccucuuccacccg

SEQ ID NO: 2089012 - RNA, 19 nt, Artificial Sequence
  Description of Artificial Sequence: Synthetic oligonucleotide
cguaacuacaugcaguuuc

SEQ ID NO: 2089013 - RNA, 19 nt, Artificial Sequence
  Description of Artificial Sequence: Synthetic oligonucleotide
auccacaguguacuuuccu

SEQ ID NO: 2089014 - RNA, 19 nt, Artificial Sequence
  Description of Artificial Sequence: Synthetic oligonucleotide
gaggguaaacgucuucuua

SEQ ID NO: 2089015 - RNA, 19 nt, Artificial Sequence
  Description of Artificial Sequence: Synthetic oligonucleotide
ggaacuugaggguaaacgu

SEQ ID NO: 2089016 - RNA, 19 nt, Artificial Sequence
  Description of Artificial Sequence: Synthetic oligonucleotide
guuuauacugacggugaca

SEQ ID NO: 2089017 - RNA, 19 nt, Artificial Sequence
  Description of Artificial Sequence: Synthetic oligonucleotide
ccacauaaugccaccagug

SEQ ID NO: 2089018 - RNA, 19 nt, Artificial Sequence
  Description of Artificial Sequence: Synthetic oligonucleotide
agaugacagggaguauggg

SEQ ID NO: 2089019 - RNA, 19 nt, Artificial Sequence
  Description of Artificial Sequence: Synthetic oligonucleotide
ugaaucggaucugcuugcc

SEQ ID NO: 2089020 - RNA, 19 nt, Artificial Sequence
  Description of Artificial Sequence: Synthetic oligonucleotide
  modified_base (6)..(6): a, c, u, g, unknown or other
aaaccnuguuacagaagau

SEQ ID NO: 2089021 - RNA, 19 nt, Artificial Sequence
  Description of Artificial Sequence: Synthetic oligonucleotide
cuuuugcuuuucucuggug

SEQ ID NO: 2089022 - RNA, 19 nt, Artificial Sequence
  Description of Artificial Sequence: Synthetic oligonucleotide
gauugcaggcugcuguaaa

SEQ ID NO: 2089023 - RNA, 19 nt, Artificial Sequence
  Description of Artificial Sequence: Synthetic oligonucleotide
gugugaaagguuugacaca

SEQ ID NO: 2089024 - RNA, 19 nt, Artificial Sequence
  Description of Artificial Sequence: Synthetic oligonucleotide
augcaguuucaaaacugag

SEQ ID NO: 2089025 - RNA, 19 nt, Artificial Sequence
  Description of Artificial Sequence: Synthetic oligonucleotide
agcccagaauuuggaaugg

SEQ ID NO: 2089026 - RNA, 19 nt, Artificial Sequence
  Description of Artificial Sequence: Synthetic oligonucleotide
acugacggugacaggauca

SEQ ID NO: 2089027 - RNA, 19 nt, Artificial Sequence
  Description of Artificial Sequence: Synthetic oligonucleotide
uacugacggugacaggauc

SEQ ID NO: 2089028 - RNA, 19 nt, Artificial Sequence
  Description of Artificial Sequence: Synthetic oligonucleotide
guuugucagccauaggagu

SEQ ID NO: 2089029 - RNA, 19 nt, Artificial Sequence
  Description of Artificial Sequence: Synthetic oligonucleotide
uuucagccaggcucuggga

SEQ ID NO: 2089030 - RNA, 19 nt, Artificial Sequence
  Description of Artificial Sequence: Synthetic oligonucleotide
auuccacauaaugccacca

SEQ ID NO: 2089031 - RNA, 19 nt, Artificial Sequence
  Description of Artificial Sequence: Synthetic oligonucleotide
ucgagcuuucuggaacuug

SEQ ID NO: 2089032 - RNA, 19 nt, Artificial Sequence
  Description of Artificial Sequence: Synthetic oligonucleotide
agagccgauccacagugua

SEQ ID NO: 2089033 - RNA, 19 nt, Artificial Sequence
  Description of Artificial Sequence: Synthetic oligonucleotide
agggaguaugggcucccag

SEQ ID NO: 2089034 - RNA, 19 nt, Artificial Sequence
  Description of Artificial Sequence: Synthetic oligonucleotide
caguguacuuuccugucca

SEQ ID NO: 2089035 - RNA, 19 nt, Artificial Sequence
  Description of Artificial Sequence: Synthetic oligonucleotide
agaauuuggaauggucaua

SEQ ID NO: 2089036 - RNA, 19 nt, Artificial Sequence
  Description of Artificial Sequence: Synthetic oligonucleotide
ggaucaauggauuccacau

SEQ ID NO: 2089037 - RNA, 19 nt, Artificial Sequence
  Description of Artificial Sequence: Synthetic oligonucleotide
ggauucugguuggauaaag

SEQ ID NO: 2089038 - RNA, 19 nt, Artificial Sequence
  Description of Artificial Sequence: Synthetic oligonucleotide
ccugggcucagugugaccg

SEQ ID NO: 2089039 - RNA, 19 nt, Artificial Sequence
  Description of Artificial Sequence: Synthetic oligonucleotide
ugcucucagugccugcguc

SEQ ID NO: 2089040 - RNA, 19 nt, Artificial Sequence
  Description of Artificial Sequence: Synthetic oligonucleotide
uaagggauucugguuggau

SEQ ID NO: 2089041 - RNA, 19 nt, Artificial Sequence
  Description of Artificial Sequence: Synthetic oligonucleotide
aaccucagugggguuucag

SEQ ID NO: 2089042 - RNA, 19 nt, Artificial Sequence
  Description of Artificial Sequence: Synthetic oligonucleotide
acaucaccuccuggaaaac

SEQ ID NO: 2089043 - RNA, 19 nt, Artificial Sequence
  Description of Artificial Sequence: Synthetic oligonucleotide
cuucguaagggauucuggu

SEQ ID NO: 2089044 - RNA, 19 nt, Artificial Sequence
  Description of Artificial Sequence: Synthetic oligonucleotide
guaccuggaauacuaaguu

SEQ ID NO: 2089045 - RNA, 19 nt, Artificial Sequence
  Description of Artificial Sequence: Synthetic oligonucleotide
gagcuuucuggaacuugag

SEQ ID NO: 2089046 - RNA, 19 nt, Artificial Sequence
  Description of Artificial Sequence: Synthetic oligonucleotide
uugacacauucaccuuccu

SEQ ID NO: 2089047 - RNA, 19 nt, Artificial Sequence
  Description of Artificial Sequence: Synthetic oligonucleotide
auccacguaacuacaugca

SEQ ID NO: 2089048 - RNA, 19 nt, Artificial Sequence
  Description of Artificial Sequence: Synthetic oligonucleotide
ggaauggucauaaucuuua

SEQ ID NO: 2089049 - RNA, 19 nt, Artificial Sequence
  Description of Artificial Sequence: Synthetic oligonucleotide
ccaggaguuuauacugacg

SEQ ID NO: 2089050 - RNA, 19 nt, Artificial Sequence
  Description of Artificial Sequence: Synthetic oligonucleotide
gacagggaguaugggcucc

SEQ ID NO: 2089051 - RNA, 19 nt, Artificial Sequence
  Description of Artificial Sequence: Synthetic oligonucleotide
ugugaccguaugucuucga

SEQ ID NO: 2089052 - RNA, 19 nt, Artificial Sequence
  Description of Artificial Sequence: Synthetic oligonucleotide
acauacgagcaugcgggug

SEQ ID NO: 2089053 - RNA, 19 nt, Artificial Sequence
  Description of Artificial Sequence: Synthetic oligonucleotide
ucaaccucagugggguuuc

SEQ ID NO: 2089054 - RNA, 19 nt, Artificial Sequence
  Description of Artificial Sequence: Synthetic oligonucleotide
ucccagagagccgauccac

SEQ ID NO: 2089055 - RNA, 19 nt, Artificial Sequence
  Description of Artificial Sequence: Synthetic oligonucleotide
ucuuccacccgggcuaggu

SEQ ID NO: 2089056 - RNA, 19 nt, Artificial Sequence
  Description of Artificial Sequence: Synthetic oligonucleotide
ucuugucuucaaacagauu

SEQ ID NO: 2089057 - RNA, 19 nt, Artificial Sequence
  Description of Artificial Sequence: Synthetic oligonucleotide
uccgcaguccaguguugug

SEQ ID NO: 2089058 - RNA, 19 nt, Artificial Sequence
  Description of Artificial Sequence: Synthetic oligonucleotide
auugacuucaugagauguu

SEQ ID NO: 2089059 - RNA, 19 nt, Artificial Sequence
  Description of Artificial Sequence: Synthetic oligonucleotide
ucucaggcccauucugaau

SEQ ID NO: 2089060 - RNA, 19 nt, Artificial Sequence
  Description of Artificial Sequence: Synthetic oligonucleotide
agacacuagacuggucaca

SEQ ID NO: 2089061 - RNA, 19 nt, Artificial Sequence
  Description of Artificial Sequence: Synthetic oligonucleotide
cauuuaaguagcagcaauu

SEQ ID NO: 2089062 - RNA, 19 nt, Artificial Sequence
  Description of Artificial Sequence: Synthetic oligonucleotide
uucuaggguugacaacauu

SEQ ID NO: 2089063 - RNA, 19 nt, Artificial Sequence
  Description of Artificial Sequence: Synthetic oligonucleotide
guuccaggucagaaacucc

SEQ ID NO: 2089064 - RNA, 19 nt, Artificial Sequence
  Description of Artificial Sequence: Synthetic oligonucleotide
gcauccacguaacuacaug

SEQ ID NO: 2089065 - RNA, 19 nt, Artificial Sequence
  Description of Artificial Sequence: Synthetic oligonucleotide
cgucuucuuaaaauucuag

SEQ ID NO: 2089066 - RNA, 19 nt, Artificial Sequence
  Description of Artificial Sequence: Synthetic oligonucleotide
uccuuguaccuggaauacu

SEQ ID NO: 2089067 - RNA, 19 nt, Artificial Sequence
  Description of Artificial Sequence: Synthetic oligonucleotide
cagaauuuggaauggucau

SEQ ID NO: 2089068 - RNA, 19 nt, Artificial Sequence
  Description of Artificial Sequence: Synthetic oligonucleotide
gugugaccguaugucuucg

SEQ ID NO: 2089069 - RNA, 19 nt, Artificial Sequence
  Description of Artificial Sequence: Synthetic oligonucleotide
ucuggaacuugaggguaaa

SEQ ID NO: 2089070 - RNA, 19 nt, Artificial Sequence
  Description of Artificial Sequence: Synthetic oligonucleotide
agguguuccgcaguccagu

SEQ ID NO: 2089071 - RNA, 19 nt, Artificial Sequence
  Description of Artificial Sequence: Synthetic oligonucleotide
gucagcauaagcccagaau

SEQ ID NO: 2089072 - RNA, 19 nt, Artificial Sequence
  Description of Artificial Sequence: Synthetic oligonucleotide
gugucuggggacaaacaga

SEQ ID NO: 2089073 - RNA, 19 nt, Artificial Sequence
  Description of Artificial Sequence: Synthetic oligonucleotide
cacauaaugccaccagugu

SEQ ID NO: 2089074 - RNA, 19 nt, Artificial Sequence
  Description of Artificial Sequence: Synthetic oligonucleotide
uugcucucagugccugcgu

SEQ ID NO: 2089075 - RNA, 19 nt, Artificial Sequence
  Description of Artificial Sequence: Synthetic oligonucleotide
gagccgauccacaguguac

SEQ ID NO: 2089076 - RNA, 19 nt, Artificial Sequence
  Description of Artificial Sequence: Synthetic oligonucleotide
aguguacuuuccuguccau

SEQ ID NO: 2089077 - RNA, 19 nt, Artificial Sequence
  Description of Artificial Sequence: Synthetic oligonucleotide
uaacuacaugcaguuucaa

SEQ ID NO: 2089078 - RNA, 19 nt, Artificial Sequence
  Description of Artificial Sequence: Synthetic oligonucleotide
gggugauugccucuuccac

SEQ ID NO: 2089079 - RNA, 19 nt, Artificial Sequence
  Description of Artificial Sequence: Synthetic oligonucleotide
ugggaugguguggaucuuc

SEQ ID NO: 2089080 - RNA, 19 nt, Artificial Sequence
  Description of Artificial Sequence: Synthetic oligonucleotide
guguugugcgggccaauca

SEQ ID NO: 2089081 - RNA, 19 nt, Artificial Sequence
  Description of Artificial Sequence: Synthetic oligonucleotide
cauucaccuuccuucccga

SEQ ID NO: 2089082 - RNA, 19 nt, Artificial Sequence
  Description of Artificial Sequence: Synthetic oligonucleotide
aguccagaugacagggagu

SEQ ID NO: 2089083 - RNA, 19 nt, Artificial Sequence
  Description of Artificial Sequence: Synthetic oligonucleotide
ucucagugccugcgucucu

SEQ ID NO: 2089084 - RNA, 19 nt, Artificial Sequence
  Description of Artificial Sequence: Synthetic oligonucleotide
acacuagacuggucacagu

SEQ ID NO: 2089085 - RNA, 19 nt, Artificial Sequence
  Description of Artificial Sequence: Synthetic oligonucleotide
caguuucaaaacugaggaa

SEQ ID NO: 2089086 - RNA, 19 nt, Artificial Sequence
  Description of Artificial Sequence: Synthetic oligonucleotide
acuaaguuugucagccaua

SEQ ID NO: 2089087 - RNA, 19 nt, Artificial Sequence
  Description of Artificial Sequence: Synthetic oligonucleotide
cagaaccugcccugggcuc

SEQ ID NO: 2089088 - RNA, 19 nt, Artificial Sequence
  Description of Artificial Sequence: Synthetic oligonucleotide
cuuccacccgggcuaggug

SEQ ID NO: 2089089 - RNA, 19 nt, Artificial Sequence
  Description of Artificial Sequence: Synthetic oligonucleotide
cugcuguaaagacauuaua

SEQ ID NO: 2089090 - RNA, 19 nt, Artificial Sequence
  Description of Artificial Sequence: Synthetic oligonucleotide
cacguaacuacaugcaguu

SEQ ID NO: 2089091 - RNA, 19 nt, Artificial Sequence
  Description of Artificial Sequence: Synthetic oligonucleotide
gguccagagacacuagacu

SEQ ID NO: 2089092 - RNA, 19 nt, Artificial Sequence
  Description of Artificial Sequence: Synthetic oligonucleotide
ggugacaggaucaauggau

SEQ ID NO: 2089093 - RNA, 19 nt, Artificial Sequence
  Description of Artificial Sequence: Synthetic oligonucleotide
ucggaucugcuugcccugc

SEQ ID NO: 2089094 - RNA, 19 nt, Artificial Sequence
  Description of Artificial Sequence: Synthetic oligonucleotide
gguguuccgcaguccagug

SEQ ID NO: 2089095 - RNA, 19 nt, Artificial Sequence
  Description of Artificial Sequence: Synthetic oligonucleotide
cacacucgacucuucguaa

SEQ ID NO: 2089096 - RNA, 19 nt, Artificial Sequence
  Description of Artificial Sequence: Synthetic oligonucleotide
cacuagacuggucacaguu

SEQ ID NO: 2089097 - RNA, 19 nt, Artificial Sequence
  Description of Artificial Sequence: Synthetic oligonucleotide
caucuuuuccuuccuugua

SEQ ID NO: 2089098 - RNA, 19 nt, Artificial Sequence
  Description of Artificial Sequence: Synthetic oligonucleotide
ggcucagugugaccguaug

SEQ ID NO: 2089099 - RNA, 19 nt, Artificial Sequence
  Description of Artificial Sequence: Synthetic oligonucleotide
cagugucuggggacaaaca

SEQ ID NO: 2089100 - RNA, 19 nt, Artificial Sequence
  Description of Artificial Sequence: Synthetic oligonucleotide
cucucagugccugcgucuc

SEQ ID NO: 2089101 - RNA, 19 nt, Artificial Sequence
  Description of Artificial Sequence: Synthetic oligonucleotide
ggguaaacgucuucuuaaa

SEQ ID NO: 2089102 - RNA, 19 nt, Artificial Sequence
  Description of Artificial Sequence: Synthetic oligonucleotide
gcgucucuacuucuuuagc

SEQ ID NO: 2089103 - RNA, 19 nt, Artificial Sequence
  Description of Artificial Sequence: Synthetic oligonucleotide
ggauaaaggaaaggcauau

SEQ ID NO: 2089104 - RNA, 19 nt, Artificial Sequence
  Description of Artificial Sequence: Synthetic oligonucleotide
acgucuucuuaaaauucua

SEQ ID NO: 2089105 - RNA, 19 nt, Artificial Sequence
  Description of Artificial Sequence: Synthetic oligonucleotide
caucaccuccuggaaaaca

SEQ ID NO: 2089106 - RNA, 19 nt, Artificial Sequence
  Description of Artificial Sequence: Synthetic oligonucleotide
caggcccauucugaaucgg

SEQ ID NO: 2089107 - RNA, 19 nt, Artificial Sequence
  Description of Artificial Sequence: Synthetic oligonucleotide
gucuucgagcuuucuggaa

SEQ ID NO: 2089108 - RNA, 19 nt, Artificial Sequence
  Description of Artificial Sequence: Synthetic oligonucleotide
gguuucagccaggcucugg

SEQ ID NO: 2089109 - RNA, 19 nt, Artificial Sequence
  Description of Artificial Sequence: Synthetic oligonucleotide
auacugacggugacaggau

SEQ ID NO: 2089110 - RNA, 19 nt, Artificial Sequence
  Description of Artificial Sequence: Synthetic oligonucleotide
gccaccagugucuggggac

SEQ ID NO: 2089111 - RNA, 19 nt, Artificial Sequence
  Description of Artificial Sequence: Synthetic oligonucleotide
auucuaggguugacaacau

SEQ ID NO: 2089112 - RNA, 19 nt, Artificial Sequence
  Description of Artificial Sequence: Synthetic oligonucleotide
cgcaguccaguguugugcg

SEQ ID NO: 2089113 - RNA, 19 nt, Artificial Sequence
  Description of Artificial Sequence: Synthetic oligonucleotide
guaugggcucccagagagc

SEQ ID NO: 2089114 - RNA, 19 nt, Artificial Sequence
  Description of Artificial Sequence: Synthetic oligonucleotide
gcccauucugaaucggauc

SEQ ID NO: 2089115 - RNA, 19 nt, Artificial Sequence
  Description of Artificial Sequence: Synthetic oligonucleotide
agauugcaggcugcuguaa

SEQ ID NO: 2089116 - RNA, 19 nt, Artificial Sequence
  Description of Artificial Sequence: Synthetic oligonucleotide
ccccguuugcucucagugc

SEQ ID NO: 2089117 - RNA, 19 nt, Artificial Sequence
  Description of Artificial Sequence: Synthetic oligonucleotide
gcgggugauugccucuucc

SEQ ID NO: 2089118 - RNA, 19 nt, Artificial Sequence
  Description of Artificial Sequence: Synthetic oligonucleotide
aggcccauucugaaucgga

SEQ ID NO: 2089119 - RNA, 19 nt, Artificial Sequence
  Description of Artificial Sequence: Synthetic oligonucleotide
ugcgggugauugccucuuc

SEQ ID NO: 2089120 - RNA, 19 nt, Artificial Sequence
  Description of Artificial Sequence: Synthetic oligonucleotide
gcaguccaguguugugcgg

SEQ ID NO: 2089121 - RNA, 19 nt, Artificial Sequence
  Description of Artificial Sequence: Synthetic oligonucleotide
ggcugcuguaaagacauua

SEQ ID NO: 2089122 - RNA, 19 nt, Artificial Sequence
  Description of Artificial Sequence: Synthetic oligonucleotide
cagcauaagcccagaauuu

SEQ ID NO: 2089123 - RNA, 19 nt, Artificial Sequence
  Description of Artificial Sequence: Synthetic oligonucleotide
cacccgggcuagguggucc

SEQ ID NO: 2089124 - RNA, 19 nt, Artificial Sequence
  Description of Artificial Sequence: Synthetic oligonucleotide
ccagugucuggggacaaac

SEQ ID NO: 2089125 - RNA, 19 nt, Artificial Sequence
  Description of Artificial Sequence: Synthetic oligonucleotide
uucgagcuuucuggaacuu

SEQ ID NO: 2089126 - RNA, 19 nt, Artificial Sequence
  Description of Artificial Sequence: Synthetic oligonucleotide
gggcacauacgagcaugcg

SEQ ID NO: 2089127 - RNA, 19 nt, Artificial Sequence
  Description of Artificial Sequence: Synthetic oligonucleotide
caggacccuggaaaggugu

SEQ ID NO: 2089128 - RNA, 19 nt, Artificial Sequence
  Description of Artificial Sequence: Synthetic oligonucleotide
ugacggugacaggaucaau

SEQ ID NO: 2089129 - RNA, 19 nt, Artificial Sequence
  Description of Artificial Sequence: Synthetic oligonucleotide
gcuaggugguccucuucca

SEQ ID NO: 2089130 - RNA, 19 nt, Artificial Sequence
  Description of Artificial Sequence: Synthetic oligonucleotide
accguaugucuucgagcuu

SEQ ID NO: 2089131 - RNA, 19 nt, Artificial Sequence
  Description of Artificial Sequence: Synthetic oligonucleotide
ugggcucagugugaccgua

SEQ ID NO: 2089132 - RNA, 19 nt, Artificial Sequence
  Description of Artificial Sequence: Synthetic oligonucleotide
cugcgucucuacuucuuua

SEQ ID NO: 2089133 - RNA, 19 nt, Artificial Sequence
  Description of Artificial Sequence: Synthetic oligonucleotide
guuccgcaguccaguguug

SEQ ID NO: 2089134 - RNA, 19 nt, Artificial Sequence
  Description of Artificial Sequence: Synthetic oligonucleotide
agcaugcgggugauugccu

SEQ ID NO: 2089135 - RNA, 19 nt, Artificial Sequence
  Description of Artificial Sequence: Synthetic oligonucleotide
gugacaggaucaauggauu

SEQ ID NO: 2089136 - RNA, 19 nt, Artificial Sequence
  Description of Artificial Sequence: Synthetic oligonucleotide
acccgggcuaggugguccu

SEQ ID NO: 2089137 - RNA, 19 nt, Artificial Sequence
  Description of Artificial Sequence: Synthetic oligonucleotide
gcaugcgggugauugccuc

SEQ ID NO: 2089138 - RNA, 19 nt, Artificial Sequence
  Description of Artificial Sequence: Synthetic oligonucleotide
gucacaguuccaggucaga

SEQ ID NO: 2089139 - RNA, 19 nt, Artificial Sequence
  Description of Artificial Sequence: Synthetic oligonucleotide
cugacggugacaggaucaa

SEQ ID NO: 2089140 - RNA, 19 nt, Artificial Sequence
  Description of Artificial Sequence: Synthetic oligonucleotide
gucagccauaggaguccag

SEQ ID NO: 2089141 - RNA, 19 nt, Artificial Sequence
  Description of Artificial Sequence: Synthetic oligonucleotide
acguaacuacaugcaguuu

SEQ ID NO: 2089142 - RNA, 19 nt, Artificial Sequence
  Description of Artificial Sequence: Synthetic oligonucleotide
cccugcaggacccuggaaa

SEQ ID NO: 2089143 - RNA, 19 nt, Artificial Sequence
  Description of Artificial Sequence: Synthetic oligonucleotide
cagugugaccguaugucuu

SEQ ID NO: 2089144 - RNA, 19 nt, Artificial Sequence
  Description of Artificial Sequence: Synthetic oligonucleotide
acccaaagucagaccacau

SEQ ID NO: 2089145 - RNA, 19 nt, Artificial Sequence
  Description of Artificial Sequence: Synthetic oligonucleotide
uagcagcaauugacuucau

SEQ ID NO: 2089146 - RNA, 19 nt, Artificial Sequence
  Description of Artificial Sequence: Synthetic oligonucleotide
gucuggggacaaacagaac

SEQ ID NO: 2089147 - RNA, 19 nt, Artificial Sequence
  Description of Artificial Sequence: Synthetic oligonucleotide
gcauaucuucaggaggaaa

SEQ ID NO: 2089148 - RNA, 19 nt, Artificial Sequence
  Description of Artificial Sequence: Synthetic oligonucleotide
caugcgggugauugccucu

SEQ ID NO: 2089149 - RNA, 19 nt, Artificial Sequence
  Description of Artificial Sequence: Synthetic oligonucleotide
cgagcaugcgggugauugc

SEQ ID NO: 2089150 - RNA, 19 nt, Artificial Sequence
  Description of Artificial Sequence: Synthetic oligonucleotide
ccacaguguacuuuccugu

SEQ ID NO: 2089151 - RNA, 19 nt, Artificial Sequence
  Description of Artificial Sequence: Synthetic oligonucleotide
cagccauaggaguccagau

SEQ ID NO: 2089152 - RNA, 19 nt, Artificial Sequence
  Description of Artificial Sequence: Synthetic oligonucleotide
guguuccgcaguccagugu

SEQ ID NO: 2089153 - RNA, 19 nt, Artificial Sequence
  Description of Artificial Sequence: Synthetic oligonucleotide
augcgggugauugccucuu

SEQ ID NO: 2089154 - RNA, 19 nt, Artificial Sequence
  Description of Artificial Sequence: Synthetic oligonucleotide
gguuugacacauucaccuu

SEQ ID NO: 2089155 - RNA, 19 nt, Artificial Sequence
  Description of Artificial Sequence: Synthetic oligonucleotide
gcugcuguaaagacauuau

SEQ ID NO: 2089156 - RNA, 19 nt, Artificial Sequence
  Description of Artificial Sequence: Synthetic oligonucleotide
cacauacgagcaugcgggu

SEQ ID NO: 2089157 - RNA, 19 nt, Artificial Sequence
  Description of Artificial Sequence: Synthetic oligonucleotide
ggacccuggaaagguguuc

SEQ ID NO: 2089158 - RNA, 19 nt, Artificial Sequence
  Description of Artificial Sequence: Synthetic oligonucleotide
cgucucuacuucuuuagcu

SEQ ID NO: 2089159 - RNA, 19 nt, Artificial Sequence
  Description of Artificial Sequence: Synthetic oligonucleotide
gggguuucagccaggcucu

SEQ ID NO: 2089160 - RNA, 19 nt, Artificial Sequence
  Description of Artificial Sequence: Synthetic oligonucleotide
gcucagugugaccguaugu

SEQ ID NO: 2089161 - RNA, 19 nt, Artificial Sequence
  Description of Artificial Sequence: Synthetic oligonucleotide
cguaugucuucgagcuuuc

SEQ ID NO: 2089162 - RNA, 19 nt, Artificial Sequence
  Description of Artificial Sequence: Synthetic oligonucleotide
gcucucagugccugcgucu

SEQ ID NO: 2089163 - RNA, 19 nt, Artificial Sequence
  Description of Artificial Sequence: Synthetic oligonucleotide
ccacaucaccuccuggaaa

SEQ ID NO: 2089164 - RNA, 19 nt, Artificial Sequence
  Description of Artificial Sequence: Synthetic oligonucleotide
cccagagagccgauccaca

SEQ ID NO: 2089165 - RNA, 19 nt, Artificial Sequence
  Description of Artificial Sequence: Synthetic oligonucleotide
guaugucuucgagcuuucu

SEQ ID NO: 2089166 - RNA, 19 nt, Artificial Sequence
  Description of Artificial Sequence: Synthetic oligonucleotide
gagagccgauccacagugu

SEQ ID NO: 2089167 - RNA, 19 nt, Artificial Sequence
  Description of Artificial Sequence: Synthetic oligonucleotide
gggauucugguuggauaaa

SEQ ID NO: 2089168 - RNA, 19 nt, Artificial Sequence
  Description of Artificial Sequence: Synthetic oligonucleotide
cgggugauugccucuucca

SEQ ID NO: 2089169 - RNA, 19 nt, Artificial Sequence
  Description of Artificial Sequence: Synthetic oligonucleotide
cagggaguaugggcuccca

SEQ ID NO: 2089170 - RNA, 19 nt, Artificial Sequence
  Description of Artificial Sequence: Synthetic oligonucleotide
ccucaaaguguagcaucca

SEQ ID NO: 2089171 - RNA, 19 nt, Artificial Sequence
  Description of Artificial Sequence: Synthetic oligonucleotide
cugggcucagugugaccgu

SEQ ID NO: 2089172 - RNA, 19 nt, Artificial Sequence
  Description of Artificial Sequence: Synthetic oligonucleotide
cagucuucaggggcacaua

SEQ ID NO: 2089173 - RNA, 19 nt, Artificial Sequence
  Description of Artificial Sequence: Synthetic oligonucleotide
ggcccauucugaaucggau

SEQ ID NO: 2089174 - RNA, 19 nt, Artificial Sequence
  Description of Artificial Sequence: Synthetic oligonucleotide
gguugacaacauugauuuu

SEQ ID NO: 2089175 - RNA, 19 nt, Artificial Sequence
  Description of Artificial Sequence: Synthetic oligonucleotide
caaccucagugggguuuca

SEQ ID NO: 2089176 - RNA, 19 nt, Artificial Sequence
  Description of Artificial Sequence: Synthetic oligonucleotide
ggguuucagccaggcucug

SEQ ID NO: 2089177 - RNA, 19 nt, Artificial Sequence
  Description of Artificial Sequence: Synthetic oligonucleotide
ccguaugucuucgagcuuu

SEQ ID NO: 2089178 - RNA, 19 nt, Artificial Sequence
  Description of Artificial Sequence: Synthetic oligonucleotide
ccagcucaauccaggaguu

SEQ ID NO: 2089179 - RNA, 19 nt, Artificial Sequence
  Description of Artificial Sequence: Synthetic oligonucleotide
gugaaagguuugacacauu

SEQ ID NO: 2089180 - RNA, 19 nt, Artificial Sequence
  Description of Artificial Sequence: Synthetic oligonucleotide
ccugcgucucuacuucuuu

SEQ ID NO: 2089181 - RNA, 19 nt, Artificial Sequence
  Description of Artificial Sequence: Synthetic oligonucleotide
ccguuugcucucagugccu

SEQ ID NO: 2089182 - RNA, 19 nt, Artificial Sequence
  Description of Artificial Sequence: Synthetic oligonucleotide
cagcucaauccaggaguuu

SEQ ID NO: 2089183 - RNA, 19 nt, Artificial Sequence
  Description of Artificial Sequence: Synthetic oligonucleotide
ccgauccacaguguacuuu

SEQ ID NO: 2089184 - RNA, 19 nt, Artificial Sequence
  Description of Artificial Sequence: Synthetic oligonucleotide
gccugcgucucuacuucuu

SEQ ID NO: 2089185 - RNA, 19 nt, Artificial Sequence
  Description of Artificial Sequence: Synthetic oligonucleotide
ccacccgggcuaggugguc

SEQ ID NO: 2089186 - RNA, 19 nt, Artificial Sequence
  Description of Artificial Sequence: Synthetic oligonucleotide
cccgggcuaggugguccuc

SEQ ID NO: 2089187 - RNA, 19 nt, Artificial Sequence
  Description of Artificial Sequence: Synthetic oligonucleotide
  modified_base (1)..(1): a, c, u, g, unknown or other
nuguuacagaagauugcag

SEQ ID NO: 2089188 - RNA, 19 nt, Artificial Sequence
  Description of Artificial Sequence: Synthetic oligonucleotide
aaugaagacagguugaucu

SEQ ID NO: 2089189 - RNA, 19 nt, Artificial Sequence
  Description of Artificial Sequence: Synthetic oligonucleotide
uaaagaaaugcuaaucacg

SEQ ID NO: 2089190 - RNA, 19 nt, Artificial Sequence
  Description of Artificial Sequence: Synthetic oligonucleotide
aaagagucgguguucaagc

SEQ ID NO: 2089191 - RNA, 19 nt, Artificial Sequence
  Description of Artificial Sequence: Synthetic oligonucleotide
uuugccaguacuaucaccg

SEQ ID NO: 2089192 - RNA, 19 nt, Artificial Sequence
  Description of Artificial Sequence: Synthetic oligonucleotide
aaagaaaugcuaaucacgg

SEQ ID NO: 2089193 - RNA, 19 nt, Artificial Sequence
  Description of Artificial Sequence: Synthetic oligonucleotide
agaagcacaaauuguaucg

SEQ ID NO: 2089194 - RNA, 19 nt, Artificial Sequence
  Description of Artificial Sequence: Synthetic oligonucleotide
uguccaguaaugaagacag

SEQ ID NO: 2089195 - RNA, 19 nt, Artificial Sequence
  Description of Artificial Sequence: Synthetic oligonucleotide
ucccuuuucacuuagagga

SEQ ID NO: 2089196 - RNA, 19 nt, Artificial Sequence
  Description of Artificial Sequence: Synthetic oligonucleotide
aagaaacaaucuuuccucc

SEQ ID NO: 2089197 - RNA, 19 nt, Artificial Sequence
  Description of Artificial Sequence: Synthetic oligonucleotide
aguucuggaaacugaaugc

SEQ ID NO: 2089198 - RNA, 19 nt, Artificial Sequence
  Description of Artificial Sequence: Synthetic oligonucleotide
aagacuuugcggcugaauc

SEQ ID NO: 2089199 - RNA, 19 nt, Artificial Sequence
  Description of Artificial Sequence: Synthetic oligonucleotide
aagaacuucaaucaauggu

SEQ ID NO: 2089200 - RNA, 19 nt, Artificial Sequence
  Description of Artificial Sequence: Synthetic oligonucleotide
aacugcuacagaugaaucg

SEQ ID NO: 2089201 - RNA, 19 nt, Artificial Sequence
  Description of Artificial Sequence: Synthetic oligonucleotide
aaagugaagcaauagccug

SEQ ID NO: 2089202 - RNA, 19 nt, Artificial Sequence
  Description of Artificial Sequence: Synthetic oligonucleotide
ucuucaucaagaaacaauc

SEQ ID NO: 2089203 - RNA, 19 nt, Artificial Sequence
  Description of Artificial Sequence: Synthetic oligonucleotide
uguugaguagguagcaucg

SEQ ID NO: 2089204 - RNA, 19 nt, Artificial Sequence
  Description of Artificial Sequence: Synthetic oligonucleotide
ugaagcaauagccugaguc

SEQ ID NO: 2089205 - RNA, 19 nt, Artificial Sequence
  Description of Artificial Sequence: Synthetic oligonucleotide
uucaagaaacucauuaaca

SEQ ID NO: 2089206 - RNA, 19 nt, Artificial Sequence
  Description of Artificial Sequence: Synthetic oligonucleotide
aagucaaggagucuucguc

SEQ ID NO: 2089207 - RNA, 19 nt, Artificial Sequence
  Description of Artificial Sequence: Synthetic oligonucleotide
uuuccagacagcaugugag

SEQ ID NO: 2089208 - RNA, 19 nt, Artificial Sequence
  Description of Artificial Sequence: Synthetic oligonucleotide
gaugaaucggaaucagugg

SEQ ID NO: 2089209 - RNA, 19 nt, Artificial Sequence
  Description of Artificial Sequence: Synthetic oligonucleotide
gaaucagugguagaggugg

SEQ ID NO: 2089210 - RNA, 19 nt, Artificial Sequence
  Description of Artificial Sequence: Synthetic oligonucleotide
aaggagggcacaauggucc

SEQ ID NO: 2089211 - RNA, 19 nt, Artificial Sequence
  Description of Artificial Sequence: Synthetic oligonucleotide
accacuacauucuugcaac

SEQ ID NO: 2089212 - RNA, 19 nt, Artificial Sequence
  Description of Artificial Sequence: Synthetic oligonucleotide
uuuauauuuuccuuuuccu

SEQ ID NO: 2089213 - RNA, 19 nt, Artificial Sequence
  Description of Artificial Sequence: Synthetic oligonucleotide
aucaagaaacaaucuuucc

SEQ ID NO: 2089214 - RNA, 19 nt, Artificial Sequence
  Description of Artificial Sequence: Synthetic oligonucleotide
ugcaaagugaagcaauagc

SEQ ID NO: 2089215 - RNA, 19 nt, Artificial Sequence
  Description of Artificial Sequence: Synthetic oligonucleotide
gauugcacugcaaaggagg

SEQ ID NO: 2089216 - RNA, 19 nt, Artificial Sequence
  Description of Artificial Sequence: Synthetic oligonucleotide
uuugaugcucucaaaguca

SEQ ID NO: 2089217 - RNA, 19 nt, Artificial Sequence
  Description of Artificial Sequence: Synthetic oligonucleotide
uuaauaaucugcacacuac

SEQ ID NO: 2089218 - RNA, 19 nt, Artificial Sequence
  Description of Artificial Sequence: Synthetic oligonucleotide
ugaacugccguuuugucca

SEQ ID NO: 2089219 - RNA, 19 nt, Artificial Sequence
  Description of Artificial Sequence: Synthetic oligonucleotide
ucaagaaacucauuaacau

SEQ ID NO: 2089220 - RNA, 19 nt, Artificial Sequence
  Description of Artificial Sequence: Synthetic oligonucleotide
aaucugcacacuaccaucc

SEQ ID NO: 2089221 - RNA, 19 nt, Artificial Sequence
  Description of Artificial Sequence: Synthetic oligonucleotide
cucauuaacauuuucuuca

SEQ ID NO: 2089222 - RNA, 19 nt, Artificial Sequence
  Description of Artificial Sequence: Synthetic oligonucleotide
aaaugcuaaucacggguuc

SEQ ID NO: 2089223 - RNA, 19 nt, Artificial Sequence
  Description of Artificial Sequence: Synthetic oligonucleotide
aacucauuaacauuuucuu

SEQ ID NO: 2089224 - RNA, 19 nt, Artificial Sequence
  Description of Artificial Sequence: Synthetic oligonucleotide
uuuauaaacucaggguccg

SEQ ID NO: 2089225 - RNA, 19 nt, Artificial Sequence
  Description of Artificial Sequence: Synthetic oligonucleotide
aagaaaugcuaaucacggg

SEQ ID NO: 2089226 - RNA, 19 nt, Artificial Sequence
  Description of Artificial Sequence: Synthetic oligonucleotide
uguaaccugaagaacuuca

SEQ ID NO: 2089227 - RNA, 19 nt, Artificial Sequence
  Description of Artificial Sequence: Synthetic oligonucleotide
gaguucuggaaacugaaug

SEQ ID NO: 2089228 - RNA, 19 nt, Artificial Sequence
  Description of Artificial Sequence: Synthetic oligonucleotide
aagagucgguguucaagcc

SEQ ID NO: 2089229 - RNA, 19 nt, Artificial Sequence
  Description of Artificial Sequence: Synthetic oligonucleotide
cacaaauuguaucggaggg

SEQ ID NO: 2089230 - RNA, 19 nt, Artificial Sequence
  Description of Artificial Sequence: Synthetic oligonucleotide
uuucacuuagaggacaucc

SEQ ID NO: 2089231 - RNA, 19 nt, Artificial Sequence
  Description of Artificial Sequence: Synthetic oligonucleotide
aagaucaggacaaaugugu

SEQ ID NO: 2089232 - RNA, 19 nt, Artificial Sequence
  Description of Artificial Sequence: Synthetic oligonucleotide
uuugugugaucuuuaauaa

SEQ ID NO: 2089233 - RNA, 19 nt, Artificial Sequence
  Description of Artificial Sequence: Synthetic oligonucleotide
uacucaauuuauucucugg

SEQ ID NO: 2089234 - RNA, 19 nt, Artificial Sequence
  Description of Artificial Sequence: Synthetic oligonucleotide
aagaaacucauuaacauuu

SEQ ID NO: 2089235 - RNA, 19 nt, Artificial Sequence
  Description of Artificial Sequence: Synthetic oligonucleotide
acugaaugcacauuugagu

SEQ ID NO: 2089236 - RNA, 19 nt, Artificial Sequence
  Description of Artificial Sequence: Synthetic oligonucleotide
aaacucauuaacauuuucu

SEQ ID NO: 2089237 - RNA, 19 nt, Artificial Sequence
  Description of Artificial Sequence: Synthetic oligonucleotide
cuugaagcccaucaggacc

SEQ ID NO: 2089238 - RNA, 19 nt, Artificial Sequence
  Description of Artificial Sequence: Synthetic oligonucleotide
ucugguacucaauuuauuc

SEQ ID NO: 2089239 - RNA, 19 nt, Artificial Sequence
  Description of Artificial Sequence: Synthetic oligonucleotide
ucuggaaacugaaugcaca

SEQ ID NO: 2089240 - RNA, 19 nt, Artificial Sequence
  Description of Artificial Sequence: Synthetic oligonucleotide
aacuucaaucaaugguggg

SEQ ID NO: 2089241 - RNA, 19 nt, Artificial Sequence
  Description of Artificial Sequence: Synthetic oligonucleotide
ucagcuuugucuugaacug

SEQ ID NO: 2089242 - RNA, 19 nt, Artificial Sequence
  Description of Artificial Sequence: Synthetic oligonucleotide
ucucccuuuucacuuagag

SEQ ID NO: 2089243 - RNA, 19 nt, Artificial Sequence
  Description of Artificial Sequence: Synthetic oligonucleotide
aaugguccgaugcucccgg

SEQ ID NO: 2089244 - RNA, 19 nt, Artificial Sequence
  Description of Artificial Sequence: Synthetic oligonucleotide
ucuccggagauuuugccag

SEQ ID NO: 2089245 - RNA, 19 nt, Artificial Sequence
  Description of Artificial Sequence: Synthetic oligonucleotide
caguaaugaagacagguug

SEQ ID NO: 2089246 - RNA, 19 nt, Artificial Sequence
  Description of Artificial Sequence: Synthetic oligonucleotide
cuacagaugaaucggaauc

SEQ ID NO: 2089247 - RNA, 19 nt, Artificial Sequence
  Description of Artificial Sequence: Synthetic oligonucleotide
gauuuugccaguacuauca

SEQ ID NO: 2089248 - RNA, 19 nt, Artificial Sequence
  Description of Artificial Sequence: Synthetic oligonucleotide
aauaccauucucgccagug

SEQ ID NO: 2089249 - RNA, 19 nt, Artificial Sequence
  Description of Artificial Sequence: Synthetic oligonucleotide
guuugugugaucuuuaaua

SEQ ID NO: 2089250 - RNA, 19 nt, Artificial Sequence
  Description of Artificial Sequence: Synthetic oligonucleotide
agaugaaucggaaucagug

SEQ ID NO: 2089251 - RNA, 19 nt, Artificial Sequence
  Description of Artificial Sequence: Synthetic oligonucleotide
ugagcaaagucaaggaguc

SEQ ID NO: 2089252 - RNA, 19 nt, Artificial Sequence
  Description of Artificial Sequence: Synthetic oligonucleotide
gacaaauguguugagggcc

SEQ ID NO: 2089253 - RNA, 19 nt, Artificial Sequence
  Description of Artificial Sequence: Synthetic oligonucleotide
acuaucaccgcauuguuua

SEQ ID NO: 2089254 - RNA, 19 nt, Artificial Sequence
  Description of Artificial Sequence: Synthetic oligonucleotide
acucaauuuauucucugga

SEQ ID NO: 2089255 - RNA, 19 nt, Artificial Sequence
  Description of Artificial Sequence: Synthetic oligonucleotide
uggagcaaacugcaaagug

SEQ ID NO: 2089256 - RNA, 19 nt, Artificial Sequence
  Description of Artificial Sequence: Synthetic oligonucleotide
agauuuugccaguacuauc

SEQ ID NO: 2089257 - RNA, 19 nt, Artificial Sequence
  Description of Artificial Sequence: Synthetic oligonucleotide
aguacuaucaccgcauugu

SEQ ID NO: 2089258 - RNA, 19 nt, Artificial Sequence
  Description of Artificial Sequence: Synthetic oligonucleotide
ugcaacuuugcaugaaucu

SEQ ID NO: 2089259 - RNA, 19 nt, Artificial Sequence
  Description of Artificial Sequence: Synthetic oligonucleotide
uccuugaagcccaucagga

SEQ ID NO: 2089260 - RNA, 19 nt, Artificial Sequence
  Description of Artificial Sequence: Synthetic oligonucleotide
augaaucggaaucaguggu

SEQ ID NO: 2089261 - RNA, 19 nt, Artificial Sequence
  Description of Artificial Sequence: Synthetic oligonucleotide
ugugaucuuuaauaaucug

SEQ ID NO: 2089262 - RNA, 19 nt, Artificial Sequence
  Description of Artificial Sequence: Synthetic oligonucleotide
uccaguaaugaagacaggu

SEQ ID NO: 2089263 - RNA, 19 nt, Artificial Sequence
  Description of Artificial Sequence: Synthetic oligonucleotide
ugaaucugaaucuucucau

SEQ ID NO: 2089264 - RNA, 19 nt, Artificial Sequence
  Description of Artificial Sequence: Synthetic oligonucleotide
uguuuaaagaaaugcuaau

SEQ ID NO: 2089265 - RNA, 19 nt, Artificial Sequence
  Description of Artificial Sequence: Synthetic oligonucleotide
aaucuuuccuccaaagagu

SEQ ID NO: 2089266 - RNA, 19 nt, Artificial Sequence
  Description of Artificial Sequence: Synthetic oligonucleotide
gaacuucaaucaauggugg

SEQ ID NO: 2089267 - RNA, 19 nt, Artificial Sequence
  Description of Artificial Sequence: Synthetic oligonucleotide
aucacggguucucugguac

SEQ ID NO: 2089268 - RNA, 19 nt, Artificial Sequence
  Description of Artificial Sequence: Synthetic oligonucleotide
aucugaggcacuuggauga

SEQ ID NO: 2089269 - RNA, 19 nt, Artificial Sequence
  Description of Artificial Sequence: Synthetic oligonucleotide
ugguacucaauuuauucuc

SEQ ID NO: 2089270 - RNA, 19 nt, Artificial Sequence
  Description of Artificial Sequence: Synthetic oligonucleotide
auuugaguuugugugaucu

SEQ ID NO: 2089271 - RNA, 19 nt, Artificial Sequence
  Description of Artificial Sequence: Synthetic oligonucleotide
aaagucaaggagucuucgu

SEQ ID NO: 2089272 - RNA, 19 nt, Artificial Sequence
  Description of Artificial Sequence: Synthetic oligonucleotide
gaagcacaaauuguaucgg

SEQ ID NO: 2089273 - RNA, 19 nt, Artificial Sequence
  Description of Artificial Sequence: Synthetic oligonucleotide
gaucaggacaaauguguug

SEQ ID NO: 2089274 - RNA, 19 nt, Artificial Sequence
  Description of Artificial Sequence: Synthetic oligonucleotide
aucaccgcauuguuuaaag

SEQ ID NO: 2089275 - RNA, 19 nt, Artificial Sequence
  Description of Artificial Sequence: Synthetic oligonucleotide
acaaauguguugagggccc

SEQ ID NO: 2089276 - RNA, 19 nt, Artificial Sequence
  Description of Artificial Sequence: Synthetic oligonucleotide
ugaaucuucucaucuguaa

SEQ ID NO: 2089277 - RNA, 19 nt, Artificial Sequence
  Description of Artificial Sequence: Synthetic oligonucleotide
guuuaaagaaaugcuaauc

SEQ ID NO: 2089278 - RNA, 19 nt, Artificial Sequence
  Description of Artificial Sequence: Synthetic oligonucleotide
uuugcggcugaaucugagg

SEQ ID NO: 2089279 - RNA, 19 nt, Artificial Sequence
  Description of Artificial Sequence: Synthetic oligonucleotide
uucucugguacucaauuua

SEQ ID NO: 2089280 - RNA, 19 nt, Artificial Sequence
  Description of Artificial Sequence: Synthetic oligonucleotide
aucggaaucagugguagag

SEQ ID NO: 2089281 - RNA, 19 nt, Artificial Sequence
  Description of Artificial Sequence: Synthetic oligonucleotide
acaaugguccgaugcuccc

SEQ ID NO: 2089282 - RNA, 19 nt, Artificial Sequence
  Description of Artificial Sequence: Synthetic oligonucleotide
ugucaacggggaaugcagg

SEQ ID NO: 2089283 - RNA, 19 nt, Artificial Sequence
  Description of Artificial Sequence: Synthetic oligonucleotide
uaaucugcacacuaccauc

SEQ ID NO: 2089284 - RNA, 19 nt, Artificial Sequence
  Description of Artificial Sequence: Synthetic oligonucleotide
gcaaagugaagcaauagcc

SEQ ID NO: 2089285 - RNA, 19 nt, Artificial Sequence
  Description of Artificial Sequence: Synthetic oligonucleotide
acaaauuguaucggagggg

SEQ ID NO: 2089286 - RNA, 19 nt, Artificial Sequence
  Description of Artificial Sequence: Synthetic oligonucleotide
uacauucuugcaacuuugc

SEQ ID NO: 2089287 - RNA, 19 nt, Artificial Sequence
  Description of Artificial Sequence: Synthetic oligonucleotide
uucacuuagaggacauccu

SEQ ID NO: 2089288 - RNA, 19 nt, Artificial Sequence
  Description of Artificial Sequence: Synthetic oligonucleotide
gaaucggaaucagugguag

SEQ ID NO: 2089289 - RNA, 19 nt, Artificial Sequence
  Description of Artificial Sequence: Synthetic oligonucleotide
ugauugcacugcaaaggag

SEQ ID NO: 2089290 - RNA, 19 nt, Artificial Sequence
  Description of Artificial Sequence: Synthetic oligonucleotide
gagaagcacaaauuguauc

SEQ ID NO: 2089291 - RNA, 19 nt, Artificial Sequence
  Description of Artificial Sequence: Synthetic oligonucleotide
ggugguaaaauguucugug

SEQ ID NO: 2089292 - RNA, 19 nt, Artificial Sequence
  Description of Artificial Sequence: Synthetic oligonucleotide
aaagaguucuggaaacuga

SEQ ID NO: 2089293 - RNA, 19 nt, Artificial Sequence
  Description of Artificial Sequence: Synthetic oligonucleotide
uuccagacagcaugugagg

SEQ ID NO: 2089294 - RNA, 19 nt, Artificial Sequence
  Description of Artificial Sequence: Synthetic oligonucleotide
uccugauugcacugcaaag

SEQ ID NO: 2089295 - RNA, 19 nt, Artificial Sequence
  Description of Artificial Sequence: Synthetic oligonucleotide
auuguuuaaagaaaugcua

SEQ ID NO: 2089296 - RNA, 19 nt, Artificial Sequence
  Description of Artificial Sequence: Synthetic oligonucleotide
caucaggaccacuacauuc

SEQ ID NO: 2089297 - RNA, 19 nt, Artificial Sequence
  Description of Artificial Sequence: Synthetic oligonucleotide
aaauguucugugucucccu

SEQ ID NO: 2089298 - RNA, 19 nt, Artificial Sequence
  Description of Artificial Sequence: Synthetic oligonucleotide
cuacauucuugcaacuuug

SEQ ID NO: 2089299 - RNA, 19 nt, Artificial Sequence
  Description of Artificial Sequence: Synthetic oligonucleotide
caugugaggaagaucagga

SEQ ID NO: 2089300 - RNA, 19 nt, Artificial Sequence
  Description of Artificial Sequence: Synthetic oligonucleotide
cugcacacuaccauccugc

SEQ ID NO: 2089301 - RNA, 19 nt, Artificial Sequence
  Description of Artificial Sequence: Synthetic oligonucleotide
aaugcuaaucacggguucu

SEQ ID NO: 2089302 - RNA, 19 nt, Artificial Sequence
  Description of Artificial Sequence: Synthetic oligonucleotide
aucuguaaccugaagaacu

SEQ ID NO: 2089303 - RNA, 19 nt, Artificial Sequence
  Description of Artificial Sequence: Synthetic oligonucleotide
gcauuguuuaaagaaaugc

SEQ ID NO: 2089304 - RNA, 19 nt, Artificial Sequence
  Description of Artificial Sequence: Synthetic oligonucleotide
gagucuuguguggagaagc

SEQ ID NO: 2089305 - RNA, 19 nt, Artificial Sequence
  Description of Artificial Sequence: Synthetic oligonucleotide
uccccgugaagacuuugcg

SEQ ID NO: 2089306 - RNA, 19 nt, Artificial Sequence
  Description of Artificial Sequence: Synthetic oligonucleotide
agccacaauaccauucucg

SEQ ID NO: 2089307 - RNA, 19 nt, Artificial Sequence
  Description of Artificial Sequence: Synthetic oligonucleotide
gcacaaauuguaucggagg

SEQ ID NO: 2089308 - RNA, 19 nt, Artificial Sequence
  Description of Artificial Sequence: Synthetic oligonucleotide
gaagcaauagccugagucu

SEQ ID NO: 2089309 - RNA, 19 nt, Artificial Sequence
  Description of Artificial Sequence: Synthetic oligonucleotide
caggaccucuucaagaaac

SEQ ID NO: 2089310 - RNA, 19 nt, Artificial Sequence
  Description of Artificial Sequence: Synthetic oligonucleotide
acuacauucuugcaacuuu

SEQ ID NO: 2089311 - RNA, 19 nt, Artificial Sequence
  Description of Artificial Sequence: Synthetic oligonucleotide
gcaaacugcaaagugaagc

SEQ ID NO: 2089312 - RNA, 19 nt, Artificial Sequence
  Description of Artificial Sequence: Synthetic oligonucleotide
uuugccuccgguugcugag

SEQ ID NO: 2089313 - RNA, 19 nt, Artificial Sequence
  Description of Artificial Sequence: Synthetic oligonucleotide
aguagguagcaucguuuuc

SEQ ID NO: 2089314 - RNA, 19 nt, Artificial Sequence
  Description of Artificial Sequence: Synthetic oligonucleotide
agacuuugcggcugaaucu

SEQ ID NO: 2089315 - RNA, 19 nt, Artificial Sequence
  Description of Artificial Sequence: Synthetic oligonucleotide
ugcucucaaagucagcuuu

SEQ ID NO: 2089316 - RNA, 19 nt, Artificial Sequence
  Description of Artificial Sequence: Synthetic oligonucleotide
aggaagaucaggacaaaug

SEQ ID NO: 2089317 - RNA, 19 nt, Artificial Sequence
  Description of Artificial Sequence: Synthetic oligonucleotide
cacaaugguccgaugcucc

SEQ ID NO: 2089318 - RNA, 19 nt, Artificial Sequence
  Description of Artificial Sequence: Synthetic oligonucleotide
uagaggugguaaaauguuc

SEQ ID NO: 2089319 - RNA, 19 nt, Artificial Sequence
  Description of Artificial Sequence: Synthetic oligonucleotide
cauuguuuaaagaaaugcu

SEQ ID NO: 2089320 - RNA, 19 nt, Artificial Sequence
  Description of Artificial Sequence: Synthetic oligonucleotide
ugaaucugaggcacuugga

SEQ ID NO: 2089321 - RNA, 19 nt, Artificial Sequence
  Description of Artificial Sequence: Synthetic oligonucleotide
aguaaugaagacagguuga

SEQ ID NO: 2089322 - RNA, 19 nt, Artificial Sequence
  Description of Artificial Sequence: Synthetic oligonucleotide
ucuugaacugccguuuugu

SEQ ID NO: 2089323 - RNA, 19 nt, Artificial Sequence
  Description of Artificial Sequence: Synthetic oligonucleotide
uuugucuugaacugccguu

SEQ ID NO: 2089324 - RNA, 19 nt, Artificial Sequence
  Description of Artificial Sequence: Synthetic oligonucleotide
ucuguaaccugaagaacuu

SEQ ID NO: 2089325 - RNA, 19 nt, Artificial Sequence
  Description of Artificial Sequence: Synthetic oligonucleotide
guguucaagccacaauacc

SEQ ID NO: 2089326 - RNA, 19 nt, Artificial Sequence
  Description of Artificial Sequence: Synthetic oligonucleotide
ucucugguacucaauuuau

SEQ ID NO: 2089327 - RNA, 19 nt, Artificial Sequence
  Description of Artificial Sequence: Synthetic oligonucleotide
ucggaaucagugguagagg

SEQ ID NO: 2089328 - RNA, 19 nt, Artificial Sequence
  Description of Artificial Sequence: Synthetic oligonucleotide
uugcaacuuugcaugaauc

SEQ ID NO: 2089329 - RNA, 19 nt, Artificial Sequence
  Description of Artificial Sequence: Synthetic oligonucleotide
auugcacugcaaaggaggg

SEQ ID NO: 2089330 - RNA, 19 nt, Artificial Sequence
  Description of Artificial Sequence: Synthetic oligonucleotide
agcacaaauuguaucggag

SEQ ID NO: 2089331 - RNA, 19 nt, Artificial Sequence
  Description of Artificial Sequence: Synthetic oligonucleotide
cuguugaguagguagcauc

SEQ ID NO: 2089332 - RNA, 19 nt, Artificial Sequence
  Description of Artificial Sequence: Synthetic oligonucleotide
agaggugguaaaauguucu

SEQ ID NO: 2089333 - RNA, 19 nt, Artificial Sequence
  Description of Artificial Sequence: Synthetic oligonucleotide
cuuggaugagcaaagucaa

SEQ ID NO: 2089334 - RNA, 19 nt, Artificial Sequence
  Description of Artificial Sequence: Synthetic oligonucleotide
ugugucaacggggaaugca

SEQ ID NO: 2089335 - RNA, 19 nt, Artificial Sequence
  Description of Artificial Sequence: Synthetic oligonucleotide
ugaaucggaaucaguggua

SEQ ID NO: 2089336 - RNA, 19 nt, Artificial Sequence
  Description of Artificial Sequence: Synthetic oligonucleotide
uccuccaaagagucggugu

SEQ ID NO: 2089337 - RNA, 19 nt, Artificial Sequence
  Description of Artificial Sequence: Synthetic oligonucleotide
gacuuugcggcugaaucug

SEQ ID NO: 2089338 - RNA, 19 nt, Artificial Sequence
  Description of Artificial Sequence: Synthetic oligonucleotide
aacugcaaagugaagcaau

SEQ ID NO: 2089339 - RNA, 19 nt, Artificial Sequence
  Description of Artificial Sequence: Synthetic oligonucleotide
uaaucacggguucucuggu

SEQ ID NO: 2089340 - RNA, 19 nt, Artificial Sequence
  Description of Artificial Sequence: Synthetic oligonucleotide
aauguguugagggcccaca

SEQ ID NO: 2089341 - RNA, 19 nt, Artificial Sequence
  Description of Artificial Sequence: Synthetic oligonucleotide
cacacuaccauccugcaua

SEQ ID NO: 2089342 - RNA, 19 nt, Artificial Sequence
  Description of Artificial Sequence: Synthetic oligonucleotide
gaugcucucaaagucagcu

SEQ ID NO: 2089343 - RNA, 19 nt, Artificial Sequence
  Description of Artificial Sequence: Synthetic oligonucleotide
ugcuacagaugaaucggaa

SEQ ID NO: 2089344 - RNA, 19 nt, Artificial Sequence
  Description of Artificial Sequence: Synthetic oligonucleotide
ugggcauugaggucuccgc

SEQ ID NO: 2089345 - RNA, 19 nt, Artificial Sequence
  Description of Artificial Sequence: Synthetic oligonucleotide
gaugcucccggcuccggag

SEQ ID NO: 2089346 - RNA, 19 nt, Artificial Sequence
  Description of Artificial Sequence: Synthetic oligonucleotide
uuuguccaguaaugaagac

SEQ ID NO: 2089347 - RNA, 19 nt, Artificial Sequence
  Description of Artificial Sequence: Synthetic oligonucleotide
uugugugaucuuuaauaau

SEQ ID NO: 2089348 - RNA, 19 nt, Artificial Sequence
  Description of Artificial Sequence: Synthetic oligonucleotide
uccaaagagucgguguuca

SEQ ID NO: 2089349 - RNA, 19 nt, Artificial Sequence
  Description of Artificial Sequence: Synthetic oligonucleotide
aaucggaaucagugguaga

SEQ ID NO: 2089350 - RNA, 19 nt, Artificial Sequence
  Description of Artificial Sequence: Synthetic oligonucleotide
acagaugaaucggaaucag

SEQ ID NO: 2089351 - RNA, 19 nt, Artificial Sequence
  Description of Artificial Sequence: Synthetic oligonucleotide
gaccacuacauucuugcaa

SEQ ID NO: 2089352 - RNA, 19 nt, Artificial Sequence
  Description of Artificial Sequence: Synthetic oligonucleotide
cagacagcaugugaggaag

SEQ ID NO: 2089353 - RNA, 19 nt, Artificial Sequence
  Description of Artificial Sequence: Synthetic oligonucleotide
uugaguagguagcaucguu

SEQ ID NO: 2089354 - RNA, 19 nt, Artificial Sequence
  Description of Artificial Sequence: Synthetic oligonucleotide
caggacaaauguguugagg

SEQ ID NO: 2089355 - RNA, 19 nt, Artificial Sequence
  Description of Artificial Sequence: Synthetic oligonucleotide
gccacaauaccauucucgc

SEQ ID NO: 2089356 - RNA, 19 nt, Artificial Sequence
  Description of Artificial Sequence: Synthetic oligonucleotide
auguguugagggcccacag

SEQ ID NO: 2089357 - RNA, 19 nt, Artificial Sequence
  Description of Artificial Sequence: Synthetic oligonucleotide
aguuugugugaucuuuaau

SEQ ID NO: 2089358 - RNA, 19 nt, Artificial Sequence
  Description of Artificial Sequence: Synthetic oligonucleotide
gugucaacggggaaugcag

SEQ ID NO: 2089359 - RNA, 19 nt, Artificial Sequence
  Description of Artificial Sequence: Synthetic oligonucleotide
ccugauugcacugcaaagg

SEQ ID NO: 2089360 - RNA, 19 nt, Artificial Sequence
  Description of Artificial Sequence: Synthetic oligonucleotide
auaaacucaggguccguuu

SEQ ID NO: 2089361 - RNA, 19 nt, Artificial Sequence
  Description of Artificial Sequence: Synthetic oligonucleotide
cugauugcacugcaaagga

SEQ ID NO: 2089362 - RNA, 19 nt, Artificial Sequence
  Description of Artificial Sequence: Synthetic oligonucleotide
ggaagaucaggacaaaugu

SEQ ID NO: 2089363 - RNA, 19 nt, Artificial Sequence
  Description of Artificial Sequence: Synthetic oligonucleotide
caccgcauuguuuaaagaa

SEQ ID NO: 2089364 - RNA, 19 nt, Artificial Sequence
  Description of Artificial Sequence: Synthetic oligonucleotide
acagcaugugaggaagauc

SEQ ID NO: 2089365 - RNA, 19 nt, Artificial Sequence
  Description of Artificial Sequence: Synthetic oligonucleotide
uucucgccaguguccacgg

SEQ ID NO: 2089366 - RNA, 19 nt, Artificial Sequence
  Description of Artificial Sequence: Synthetic oligonucleotide
auaccauucucgccagugu

SEQ ID NO: 2089367 - RNA, 19 nt, Artificial Sequence
  Description of Artificial Sequence: Synthetic oligonucleotide
uguugagggcccacagcug

SEQ ID NO: 2089368 - RNA, 19 nt, Artificial Sequence
  Description of Artificial Sequence: Synthetic oligonucleotide
cacauuugaguuuguguga

SEQ ID NO: 2089369 - RNA, 19 nt, Artificial Sequence
  Description of Artificial Sequence: Synthetic oligonucleotide
cuuugcggcugaaucugag

SEQ ID NO: 2089370 - RNA, 19 nt, Artificial Sequence
  Description of Artificial Sequence: Synthetic oligonucleotide
caaagugaagcaauagccu

SEQ ID NO: 2089371 - RNA, 19 nt, Artificial Sequence
  Description of Artificial Sequence: Synthetic oligonucleotide
auuuauucucuggagcaaa

SEQ ID NO: 2089372 - RNA, 19 nt, Artificial Sequence
  Description of Artificial Sequence: Synthetic oligonucleotide
guugagggcccacagcuga

SEQ ID NO: 2089373 - RNA, 19 nt, Artificial Sequence
  Description of Artificial Sequence: Synthetic oligonucleotide
uucucaucuguaaccugaa

SEQ ID NO: 2089374 - RNA, 19 nt, Artificial Sequence
  Description of Artificial Sequence: Synthetic oligonucleotide
cuugaacugccguuuuguc

SEQ ID NO: 2089375 - RNA, 19 nt, Artificial Sequence
  Description of Artificial Sequence: Synthetic oligonucleotide
ggacaaauguguugagggc

SEQ ID NO: 2089376 - RNA, 19 nt, Artificial Sequence
  Description of Artificial Sequence: Synthetic oligonucleotide
ucaccgcauuguuuaaaga

SEQ ID NO: 2089377 - RNA, 19 nt, Artificial Sequence
  Description of Artificial Sequence: Synthetic oligonucleotide
gagucgguguucaagccac

SEQ ID NO: 2089378 - RNA, 19 nt, Artificial Sequence
  Description of Artificial Sequence: Synthetic oligonucleotide
aggagggcacaaugguccg

SEQ ID NO: 2089379 - RNA, 19 nt, Artificial Sequence
  Description of Artificial Sequence: Synthetic oligonucleotide
cauucuugcaacuuugcau

SEQ ID NO: 2089380 - RNA, 19 nt, Artificial Sequence
  Description of Artificial Sequence: Synthetic oligonucleotide
caacugcuacagaugaauc

SEQ ID NO: 2089381 - RNA, 19 nt, Artificial Sequence
  Description of Artificial Sequence: Synthetic oligonucleotide
cucuccuugaagcccauca

SEQ ID NO: 2089382 - RNA, 19 nt, Artificial Sequence
  Description of Artificial Sequence: Synthetic oligonucleotide
agccacaaguguuuguuuu

SEQ ID NO: 2089383 - RNA, 19 nt, Artificial Sequence
  Description of Artificial Sequence: Synthetic oligonucleotide
gguugcugagguuuuccag

SEQ ID NO: 2089384 - RNA, 19 nt, Artificial Sequence
  Description of Artificial Sequence: Synthetic oligonucleotide
uugguuaugacuggcucuu

SEQ ID NO: 2089385 - RNA, 19 nt, Artificial Sequence
  Description of Artificial Sequence: Synthetic oligonucleotide
ugcggcugaaucugaggca

SEQ ID NO: 2089386 - RNA, 19 nt, Artificial Sequence
  Description of Artificial Sequence: Synthetic oligonucleotide
acauuugaguuugugugau

SEQ ID NO: 2089387 - RNA, 19 nt, Artificial Sequence
  Description of Artificial Sequence: Synthetic oligonucleotide
aacuuugcaugaaucugaa

SEQ ID NO: 2089388 - RNA, 19 nt, Artificial Sequence
  Description of Artificial Sequence: Synthetic oligonucleotide
ucaacggggaaugcaggac

SEQ ID NO: 2089389 - RNA, 19 nt, Artificial Sequence
  Description of Artificial Sequence: Synthetic oligonucleotide
cugaaugcacauuugaguu

SEQ ID NO: 2089390 - RNA, 19 nt, Artificial Sequence
  Description of Artificial Sequence: Synthetic oligonucleotide
gaggcgucguggcagcgcc

SEQ ID NO: 2089391 - RNA, 19 nt, Artificial Sequence
  Description of Artificial Sequence: Synthetic oligonucleotide
aggugguaaaauguucugu

SEQ ID NO: 2089392 - RNA, 19 nt, Artificial Sequence
  Description of Artificial Sequence: Synthetic oligonucleotide
cuuagaggacauccuucac

SEQ ID NO: 2089393 - RNA, 19 nt, Artificial Sequence
  Description of Artificial Sequence: Synthetic oligonucleotide
gcaacuuugcaugaaucug

SEQ ID NO: 2089394 - RNA, 19 nt, Artificial Sequence
  Description of Artificial Sequence: Synthetic oligonucleotide
uugccaguacuaucaccgc

SEQ ID NO: 2089395 - RNA, 19 nt, Artificial Sequence
  Description of Artificial Sequence: Synthetic oligonucleotide
cacacgucugggcauugag

SEQ ID NO: 2089396 - RNA, 19 nt, Artificial Sequence
  Description of Artificial Sequence: Synthetic oligonucleotide
gaguuugugugaucuuuaa

SEQ ID NO: 2089397 - RNA, 19 nt, Artificial Sequence
  Description of Artificial Sequence: Synthetic oligonucleotide
ggaugagcaaagucaagga

SEQ ID NO: 2089398 - RNA, 19 nt, Artificial Sequence
  Description of Artificial Sequence: Synthetic oligonucleotide
ucguccugauugcacugca

SEQ ID NO: 2089399 - RNA, 19 nt, Artificial Sequence
  Description of Artificial Sequence: Synthetic oligonucleotide
acacgucugggcauugagg

SEQ ID NO: 2089400 - RNA, 19 nt, Artificial Sequence
  Description of Artificial Sequence: Synthetic oligonucleotide
aaucacggguucucuggua

SEQ ID NO: 2089401 - RNA, 19 nt, Artificial Sequence
  Description of Artificial Sequence: Synthetic oligonucleotide
agcaucguuuucuuuuaua

SEQ ID NO: 2089402 - RNA, 19 nt, Artificial Sequence
  Description of Artificial Sequence: Synthetic oligonucleotide
agugguagaggugguaaaa

SEQ ID NO: 2089403 - RNA, 19 nt, Artificial Sequence
  Description of Artificial Sequence: Synthetic oligonucleotide
acgucugggcauugagguc

SEQ ID NO: 2089404 - RNA, 19 nt, Artificial Sequence
  Description of Artificial Sequence: Synthetic oligonucleotide
gggcacaaugguccgaugc

SEQ ID NO: 2089405 - RNA, 19 nt, Artificial Sequence
  Description of Artificial Sequence: Synthetic oligonucleotide
uccugugucaacggggaau

SEQ ID NO: 2089406 - RNA, 19 nt, Artificial Sequence
  Description of Artificial Sequence: Synthetic oligonucleotide
accgcauuguuuaaagaaa

SEQ ID NO: 2089407 - RNA, 19 nt, Artificial Sequence
  Description of Artificial Sequence: Synthetic oligonucleotide
gcaugugaggaagaucagg

SEQ ID NO: 2089408 - RNA, 19 nt, Artificial Sequence
  Description of Artificial Sequence: Synthetic oligonucleotide
ucgguguucaagccacaau

SEQ ID NO: 2089409 - RNA, 19 nt, Artificial Sequence
  Description of Artificial Sequence: Synthetic oligonucleotide
cugguacucaauuuauucu

SEQ ID NO: 2089410 - RNA, 19 nt, Artificial Sequence
  Description of Artificial Sequence: Synthetic oligonucleotide
cauugaggucuccgcacag

SEQ ID NO: 2089411 - RNA, 19 nt, Artificial Sequence
  Description of Artificial Sequence: Synthetic oligonucleotide
caguacuaucaccgcauug

SEQ ID NO: 2089412 - RNA, 19 nt, Artificial Sequence
  Description of Artificial Sequence: Synthetic oligonucleotide
ugagcccgaggcgucgugg

SEQ ID NO: 2089413 - RNA, 19 nt, Artificial Sequence
  Description of Artificial Sequence: Synthetic oligonucleotide
aacggggaaugcaggaccu

SEQ ID NO: 2089414 - RNA, 19 nt, Artificial Sequence
  Description of Artificial Sequence: Synthetic oligonucleotide
gucaacggggaaugcagga

SEQ ID NO: 2089415 - RNA, 19 nt, Artificial Sequence
  Description of Artificial Sequence: Synthetic oligonucleotide
cucagguccccgugaagac

SEQ ID NO: 2089416 - RNA, 19 nt, Artificial Sequence
  Description of Artificial Sequence: Synthetic oligonucleotide
auggcugagcccgaggcgu

SEQ ID NO: 2089417 - RNA, 19 nt, Artificial Sequence
  Description of Artificial Sequence: Synthetic oligonucleotide
gucuugaacugccguuuug

SEQ ID NO: 2089418 - RNA, 19 nt, Artificial Sequence
  Description of Artificial Sequence: Synthetic oligonucleotide
cugggcauugaggucuccg

SEQ ID NO: 2089419 - RNA, 19 nt, Artificial Sequence
  Description of Artificial Sequence: Synthetic oligonucleotide
ugucuugaacugccguuuu

SEQ ID NO: 2089420 - RNA, 19 nt, Artificial Sequence
  Description of Artificial Sequence: Synthetic oligonucleotide
cucuccggagauuuugcca

SEQ ID NO: 2089421 - RNA, 19 nt, Artificial Sequence
  Description of Artificial Sequence: Synthetic oligonucleotide
cuucaucaagaaacaaucu

SEQ ID NO: 2089422 - RNA, 19 nt, Artificial Sequence
  Description of Artificial Sequence: Synthetic oligonucleotide
uccacggcucuccggagau

SEQ ID NO: 2089423 - RNA, 19 nt, Artificial Sequence
  Description of Artificial Sequence: Synthetic oligonucleotide
aaggagucuucguccugau

SEQ ID NO: 2089424 - RNA, 19 nt, Artificial Sequence
  Description of Artificial Sequence: Synthetic oligonucleotide
gcuaaucacggguucucug

SEQ ID NO: 2089425 - RNA, 19 nt, Artificial Sequence
  Description of Artificial Sequence: Synthetic oligonucleotide
ugcuaaucacggguucucu

SEQ ID NO: 2089426 - RNA, 19 nt, Artificial Sequence
  Description of Artificial Sequence: Synthetic oligonucleotide
ucuugcaacuuugcaugaa

SEQ ID NO: 2089427 - RNA, 19 nt, Artificial Sequence
  Description of Artificial Sequence: Synthetic oligonucleotide
guagcaucguuuucuuuua

SEQ ID NO: 2089428 - RNA, 19 nt, Artificial Sequence
  Description of Artificial Sequence: Synthetic oligonucleotide
uaucaccgcauuguuuaaa

SEQ ID NO: 2089429 - RNA, 19 nt, Artificial Sequence
  Description of Artificial Sequence: Synthetic oligonucleotide
cauuugaguuugugugauc

SEQ ID NO: 2089430 - RNA, 19 nt, Artificial Sequence
  Description of Artificial Sequence: Synthetic oligonucleotide
ucgccaguguccacggcuc

SEQ ID NO: 2089431 - RNA, 19 nt, Artificial Sequence
  Description of Artificial Sequence: Synthetic oligonucleotide
uuuucacuuagaggacauc

SEQ ID NO: 2089432 - RNA, 19 nt, Artificial Sequence
  Description of Artificial Sequence: Synthetic oligonucleotide
uagguagcaucguuuucuu

SEQ ID NO: 2089433 - RNA, 19 nt, Artificial Sequence
  Description of Artificial Sequence: Synthetic oligonucleotide
ugguccgaugcucccggcu

SEQ ID NO: 2089434 - RNA, 19 nt, Artificial Sequence
  Description of Artificial Sequence: Synthetic oligonucleotide
aucugcacacuaccauccu

SEQ ID NO: 2089435 - RNA, 19 nt, Artificial Sequence
  Description of Artificial Sequence: Synthetic oligonucleotide
cugaagaacuucaaucaau

SEQ ID NO: 2089436 - RNA, 19 nt, Artificial Sequence
  Description of Artificial Sequence: Synthetic oligonucleotide
augcacauuugaguuugug

SEQ ID NO: 2089437 - RNA, 19 nt, Artificial Sequence
  Description of Artificial Sequence: Synthetic oligonucleotide
ucagguccccgugaagacu

SEQ ID NO: 2089438 - RNA, 19 nt, Artificial Sequence
  Description of Artificial Sequence: Synthetic oligonucleotide
gugguaaaauguucugugu

SEQ ID NO: 2089439 - RNA, 19 nt, Artificial Sequence
  Description of Artificial Sequence: Synthetic oligonucleotide
caagaaacucauuaacauu

SEQ ID NO: 2089440 - RNA, 19 nt, Artificial Sequence
  Description of Artificial Sequence: Synthetic oligonucleotide
acacuaccauccugcauau

SEQ ID NO: 2089441 - RNA, 19 nt, Artificial Sequence
  Description of Artificial Sequence: Synthetic oligonucleotide
augguccgaugcucccggc

SEQ ID NO: 2089442 - RNA, 19 nt, Artificial Sequence
  Description of Artificial Sequence: Synthetic oligonucleotide
acugccguuuuguccagua

SEQ ID NO: 2089443 - RNA, 19 nt, Artificial Sequence
  Description of Artificial Sequence: Synthetic oligonucleotide
gagauuuugccaguacuau

SEQ ID NO: 2089444 - RNA, 19 nt, Artificial Sequence
  Description of Artificial Sequence: Synthetic oligonucleotide
gaacugccguuuuguccag

SEQ ID NO: 2089445 - RNA, 19 nt, Artificial Sequence
  Description of Artificial Sequence: Synthetic oligonucleotide
agcaauagccugagucuug

SEQ ID NO: 2089446 - RNA, 19 nt, Artificial Sequence
  Description of Artificial Sequence: Synthetic oligonucleotide
gguagaggugguaaaaugu

SEQ ID NO: 2089447 - RNA, 19 nt, Artificial Sequence
  Description of Artificial Sequence: Synthetic oligonucleotide
gagcccgaggcgucguggc

SEQ ID NO: 2089448 - RNA, 19 nt, Artificial Sequence
  Description of Artificial Sequence: Synthetic oligonucleotide
uccucacacgucugggcau

SEQ ID NO: 2089449 - RNA, 19 nt, Artificial Sequence
  Description of Artificial Sequence: Synthetic oligonucleotide
gugugaucuuuaauaaucu

SEQ ID NO: 2089450 - RNA, 19 nt, Artificial Sequence
  Description of Artificial Sequence: Synthetic oligonucleotide
agaucaggacaaauguguu

SEQ ID NO: 2089451 - RNA, 19 nt, Artificial Sequence
  Description of Artificial Sequence: Synthetic oligonucleotide
cugagucuuguguggagaa

SEQ ID NO: 2089452 - RNA, 19 nt, Artificial Sequence
  Description of Artificial Sequence: Synthetic oligonucleotide
ggaaugcaggaccucuuca

SEQ ID NO: 2089453 - RNA, 19 nt, Artificial Sequence
  Description of Artificial Sequence: Synthetic oligonucleotide
uccgaugcucccggcuccg

SEQ ID NO: 2089454 - RNA, 19 nt, Artificial Sequence
  Description of Artificial Sequence: Synthetic oligonucleotide
caaggagucuucguccuga

SEQ ID NO: 2089455 - RNA, 19 nt, Artificial Sequence
  Description of Artificial Sequence: Synthetic oligonucleotide
cugcuacagaugaaucgga

SEQ ID NO: 2089456 - RNA, 19 nt, Artificial Sequence
  Description of Artificial Sequence: Synthetic oligonucleotide
aaugcacauuugaguuugu

SEQ ID NO: 2089457 - RNA, 19 nt, Artificial Sequence
  Description of Artificial Sequence: Synthetic oligonucleotide
ggaaucagugguagaggug

SEQ ID NO: 2089458 - RNA, 19 nt, Artificial Sequence
  Description of Artificial Sequence: Synthetic oligonucleotide
ggagauuuugccaguacua

SEQ ID NO: 2089459 - RNA, 19 nt, Artificial Sequence
  Description of Artificial Sequence: Synthetic oligonucleotide
gccguuuuguccaguaaug

SEQ ID NO: 2089460 - RNA, 19 nt, Artificial Sequence
  Description of Artificial Sequence: Synthetic oligonucleotide
cuguaaccugaagaacuuc

SEQ ID NO: 2089461 - RNA, 19 nt, Artificial Sequence
  Description of Artificial Sequence: Synthetic oligonucleotide
gcuccggagccacccaugg

SEQ ID NO: 2089462 - RNA, 19 nt, Artificial Sequence
  Description of Artificial Sequence: Synthetic oligonucleotide
caauagccugagucuugug

SEQ ID NO: 2089463 - RNA, 19 nt, Artificial Sequence
  Description of Artificial Sequence: Synthetic oligonucleotide
guccgaugcucccggcucc

SEQ ID NO: 2089464 - RNA, 19 nt, Artificial Sequence
  Description of Artificial Sequence: Synthetic oligonucleotide
gucuucguccugauugcac

SEQ ID NO: 2089465 - RNA, 19 nt, Artificial Sequence
  Description of Artificial Sequence: Synthetic oligonucleotide
cagguugaucuccaucuaa

SEQ ID NO: 2089466 - RNA, 19 nt, Artificial Sequence
  Description of Artificial Sequence: Synthetic oligonucleotide
cuugcaacuuugcaugaau

SEQ ID NO: 2089467 - RNA, 19 nt, Artificial Sequence
  Description of Artificial Sequence: Synthetic oligonucleotide
guccaguaaugaagacagg

SEQ ID NO: 2089468 - RNA, 19 nt, Artificial Sequence
  Description of Artificial Sequence: Synthetic oligonucleotide
cuggaaacugaaugcacau

SEQ ID NO: 2089469 - RNA, 19 nt, Artificial Sequence
  Description of Artificial Sequence: Synthetic oligonucleotide
gucguggcagcgccccucc

SEQ ID NO: 2089470 - RNA, 19 nt, Artificial Sequence
  Description of Artificial Sequence: Synthetic oligonucleotide
gcuuugucuugaacugccg

SEQ ID NO: 2089471 - RNA, 19 nt, Artificial Sequence
  Description of Artificial Sequence: Synthetic oligonucleotide
agucuucguccugauugca

SEQ ID NO: 2089472 - RNA, 19 nt, Artificial Sequence
  Description of Artificial Sequence: Synthetic oligonucleotide
gcucuccggagauuuugcc

SEQ ID NO: 2089473 - RNA, 19 nt, Artificial Sequence
  Description of Artificial Sequence: Synthetic oligonucleotide
cacggguucucugguacuc

SEQ ID NO: 2089474 - RNA, 19 nt, Artificial Sequence
  Description of Artificial Sequence: Synthetic oligonucleotide
uccugcauauugguuucuu

SEQ ID NO: 2089475 - RNA, 19 nt, Artificial Sequence
  Description of Artificial Sequence: Synthetic oligonucleotide
ucacacgucugggcauuga

SEQ ID NO: 2089476 - RNA, 19 nt, Artificial Sequence
  Description of Artificial Sequence: Synthetic oligonucleotide
gguccgaugcucccggcuc

SEQ ID NO: 2089477 - RNA, 19 nt, Artificial Sequence
  Description of Artificial Sequence: Synthetic oligonucleotide
gcuagggaccucuccugug

SEQ ID NO: 2089478 - RNA, 19 nt, Artificial Sequence
  Description of Artificial Sequence: Synthetic oligonucleotide
agccugagucuugugugga

SEQ ID NO: 2089479 - RNA, 19 nt, Artificial Sequence
  Description of Artificial Sequence: Synthetic oligonucleotide
cauucucgccaguguccac

SEQ ID NO: 2089480 - RNA, 19 nt, Artificial Sequence
  Description of Artificial Sequence: Synthetic oligonucleotide
uccggagauuuugccagua

SEQ ID NO: 2089481 - RNA, 19 nt, Artificial Sequence
  Description of Artificial Sequence: Synthetic oligonucleotide
gcggcugaaucugaggcac

SEQ ID NO: 2089482 - RNA, 19 nt, Artificial Sequence
  Description of Artificial Sequence: Synthetic oligonucleotide
cagaugaaucggaaucagu

SEQ ID NO: 2089483 - RNA, 19 nt, Artificial Sequence
  Description of Artificial Sequence: Synthetic oligonucleotide
cuagggaccucuccugugu

SEQ ID NO: 2089484 - RNA, 19 nt, Artificial Sequence
  Description of Artificial Sequence: Synthetic oligonucleotide
cuaucaccgcauuguuuaa

SEQ ID NO: 2089485 - RNA, 19 nt, Artificial Sequence
  Description of Artificial Sequence: Synthetic oligonucleotide
acggggaaugcaggaccuc

SEQ ID NO: 2089486 - RNA, 19 nt, Artificial Sequence
  Description of Artificial Sequence: Synthetic oligonucleotide
gguacucaauuuauucucu

SEQ ID NO: 2089487 - RNA, 19 nt, Artificial Sequence
  Description of Artificial Sequence: Synthetic oligonucleotide
cuccggagccacccauggc

SEQ ID NO: 2089488 - RNA, 19 nt, Artificial Sequence
  Description of Artificial Sequence: Synthetic oligonucleotide
cagugguagaggugguaaa

SEQ ID NO: 2089489 - RNA, 19 nt, Artificial Sequence
  Description of Artificial Sequence: Synthetic oligonucleotide
gacagcaugugaggaagau

SEQ ID NO: 2089490 - RNA, 19 nt, Artificial Sequence
  Description of Artificial Sequence: Synthetic oligonucleotide
ggcacaaugguccgaugcu

SEQ ID NO: 2089491 - RNA, 19 nt, Artificial Sequence
  Description of Artificial Sequence: Synthetic oligonucleotide
gggcuagggaccucuccug

SEQ ID NO: 2089492 - RNA, 19 nt, Artificial Sequence
  Description of Artificial Sequence: Synthetic oligonucleotide
aacugccguuuuguccagu

SEQ ID NO: 2089493 - RNA, 19 nt, Artificial Sequence
  Description of Artificial Sequence: Synthetic oligonucleotide
gcuacagaugaaucggaau

SEQ ID NO: 2089494 - RNA, 19 nt, Artificial Sequence
  Description of Artificial Sequence: Synthetic oligonucleotide
cugugucaacggggaaugc

SEQ ID NO: 2089495 - RNA, 19 nt, Artificial Sequence
  Description of Artificial Sequence: Synthetic oligonucleotide
ugaagacuuugcggcugaa

SEQ ID NO: 2089496 - RNA, 19 nt, Artificial Sequence
  Description of Artificial Sequence: Synthetic oligonucleotide
agacagcaugugaggaaga

SEQ ID NO: 2089497 - RNA, 19 nt, Artificial Sequence
  Description of Artificial Sequence: Synthetic oligonucleotide
aggagucuucguccugauu

SEQ ID NO: 2089498 - RNA, 19 nt, Artificial Sequence
  Description of Artificial Sequence: Synthetic oligonucleotide
acuuugcggcugaaucuga

SEQ ID NO: 2089499 - RNA, 19 nt, Artificial Sequence
  Description of Artificial Sequence: Synthetic oligonucleotide
uggcugagcccgaggcguc

SEQ ID NO: 2089500 - RNA, 19 nt, Artificial Sequence
  Description of Artificial Sequence: Synthetic oligonucleotide
gaagacuuugcggcugaau

SEQ ID NO: 2089501 - RNA, 19 nt, Artificial Sequence
  Description of Artificial Sequence: Synthetic oligonucleotide
ggcucuccggagauuuugc

SEQ ID NO: 2089502 - RNA, 19 nt, Artificial Sequence
  Description of Artificial Sequence: Synthetic oligonucleotide
uuccucuguugaguaggua

SEQ ID NO: 2089503 - RNA, 19 nt, Artificial Sequence
  Description of Artificial Sequence: Synthetic oligonucleotide
ucugggcauugaggucucc

SEQ ID NO: 2089504 - RNA, 19 nt, Artificial Sequence
  Description of Artificial Sequence: Synthetic oligonucleotide
guugaguagguagcaucgu

SEQ ID NO: 2089505 - RNA, 19 nt, Artificial Sequence
  Description of Artificial Sequence: Synthetic oligonucleotide
gucgguguucaagccacaa

SEQ ID NO: 2089506 - RNA, 19 nt, Artificial Sequence
  Description of Artificial Sequence: Synthetic oligonucleotide
caaauguguugagggccca

SEQ ID NO: 2089507 - RNA, 19 nt, Artificial Sequence
  Description of Artificial Sequence: Synthetic oligonucleotide
cacugcaaaggagggcaca

SEQ ID NO: 2089508 - RNA, 19 nt, Artificial Sequence
  Description of Artificial Sequence: Synthetic oligonucleotide
cgguguucaagccacaaua

SEQ ID NO: 2089509 - RNA, 19 nt, Artificial Sequence
  Description of Artificial Sequence: Synthetic oligonucleotide
ggggcuagggaccucuccu

SEQ ID NO: 2089510 - RNA, 19 nt, Artificial Sequence
  Description of Artificial Sequence: Synthetic oligonucleotide
gagccacaaguguuuguuu

SEQ ID NO: 2089511 - RNA, 19 nt, Artificial Sequence
  Description of Artificial Sequence: Synthetic oligonucleotide
gguuaugacuggcucuuuu

SEQ ID NO: 2089512 - RNA, 19 nt, Artificial Sequence
  Description of Artificial Sequence: Synthetic oligonucleotide
cucacacgucugggcauug

SEQ ID NO: 2089513 - RNA, 19 nt, Artificial Sequence
  Description of Artificial Sequence: Synthetic oligonucleotide
cugagcccgaggcgucgug

SEQ ID NO: 2089514 - RNA, 19 nt, Artificial Sequence
  Description of Artificial Sequence: Synthetic oligonucleotide
acccauggcugagcccgag

SEQ ID NO: 2089515 - RNA, 19 nt, Artificial Sequence
  Description of Artificial Sequence: Synthetic oligonucleotide
ugguuaugacuggcucuuu

SEQ ID NO: 2089516 - RNA, 19 nt, Artificial Sequence
  Description of Artificial Sequence: Synthetic oligonucleotide
cagguccccgugaagacuu

SEQ ID NO: 2089517 - RNA, 19 nt, Artificial Sequence
  Description of Artificial Sequence: Synthetic oligonucleotide
ccguuuuguccaguaauga

SEQ ID NO: 2089518 - RNA, 19 nt, Artificial Sequence
  Description of Artificial Sequence: Synthetic oligonucleotide
ccugagucuuguguggaga

SEQ ID NO: 2089519 - RNA, 19 nt, Artificial Sequence
  Description of Artificial Sequence: Synthetic oligonucleotide
ggcugagcccgaggcgucg

SEQ ID NO: 2089520 - RNA, 19 nt, Artificial Sequence
  Description of Artificial Sequence: Synthetic oligonucleotide
cccauggcugagcccgagg

SEQ ID NO: 2089521 - RNA, 19 nt, Artificial Sequence
  Description of Artificial Sequence: Synthetic oligonucleotide
ccgcauuguuuaaagaaau

SEQ ID NO: 2089522 - RNA, 19 nt, Artificial Sequence
  Description of Artificial Sequence: Synthetic oligonucleotide
gcccgaggcgucguggcag

SEQ ID NO: 2089523 - RNA, 19 nt, Artificial Sequence
  Description of Artificial Sequence: Synthetic oligonucleotide
agucgguguucaagccaca

SEQ ID NO: 2089524 - RNA, 19 nt, Artificial Sequence
  Description of Artificial Sequence: Synthetic oligonucleotide
cccacagcugagccacaag

SEQ ID NO: 2089525 - RNA, 19 nt, Artificial Sequence
  Description of Artificial Sequence: Synthetic oligonucleotide
cacuacauucuugcaacuu

SEQ ID NO: 2089526 - RNA, 19 nt, Artificial Sequence
  Description of Artificial Sequence: Synthetic oligonucleotide
ccauucucgccagugucca

SEQ ID NO: 2089527 - RNA, 19 nt, Artificial Sequence
  Description of Artificial Sequence: Synthetic oligonucleotide
ucccggcuccggagccacc

SEQ ID NO: 2089528 - RNA, 19 nt, Artificial Sequence
  Description of Artificial Sequence: Synthetic oligonucleotide
gucugggcauugaggucuc

SEQ ID NO: 2089529 - RNA, 19 nt, Artificial Sequence
  Description of Artificial Sequence: Synthetic oligonucleotide
gugaagcaauagccugagu

SEQ ID NO: 2089530 - RNA, 19 nt, Artificial Sequence
  Description of Artificial Sequence: Synthetic oligonucleotide
ggcuagggaccucuccugu

SEQ ID NO: 2089531 - RNA, 19 nt, Artificial Sequence
  Description of Artificial Sequence: Synthetic oligonucleotide
cggaaucagugguagaggu

SEQ ID NO: 2089532 - RNA, 19 nt, Artificial Sequence
  Description of Artificial Sequence: Synthetic oligonucleotide
cccgaggcgucguggcagc

SEQ ID NO: 2089533 - RNA, 19 nt, Artificial Sequence
  Description of Artificial Sequence: Synthetic oligonucleotide
ggcuccggagccacccaug

SEQ ID NO: 2089534 - RNA, 19 nt, Artificial Sequence
  Description of Artificial Sequence: Synthetic oligonucleotide
cuccugugucaacggggaa

SEQ ID NO: 2089535 - RNA, 19 nt, Artificial Sequence
  Description of Artificial Sequence: Synthetic oligonucleotide
cacggcucuccggagauuu

SEQ ID NO: 2089536 - RNA, 19 nt, Artificial Sequence
  Description of Artificial Sequence: Synthetic oligonucleotide
cuccggagauuuugccagu

SEQ ID NO: 2089537 - RNA, 19 nt, Artificial Sequence
  Description of Artificial Sequence: Synthetic oligonucleotide
ggagggcacaaugguccga

SEQ ID NO: 2089538 - RNA, 19 nt, Artificial Sequence
  Description of Artificial Sequence: Synthetic oligonucleotide
cgucugggcauugaggucu

SEQ ID NO: 2089539 - RNA, 19 nt, Artificial Sequence
  Description of Artificial Sequence: Synthetic oligonucleotide
ccaaagagucgguguucaa

SEQ ID NO: 2089540 - RNA, 19 nt, Artificial Sequence
  Description of Artificial Sequence: Synthetic oligonucleotide
gcacacuaccauccugcau

SEQ ID NO: 2089541 - RNA, 19 nt, Artificial Sequence
  Description of Artificial Sequence: Synthetic oligonucleotide
ggcugaaucugaggcacuu

SEQ ID NO: 2089542 - RNA, 19 nt, Artificial Sequence
  Description of Artificial Sequence: Synthetic oligonucleotide
acggcucuccggagauuuu

SEQ ID NO: 2089543 - RNA, 19 nt, Artificial Sequence
  Description of Artificial Sequence: Synthetic oligonucleotide
cuccgguugcugagguuuu

SEQ ID NO: 2089544 - RNA, 19 nt, Artificial Sequence
  Description of Artificial Sequence: Synthetic oligonucleotide
cgaggcgucguggcagcgc

SEQ ID NO: 2089545 - RNA, 19 nt, Artificial Sequence
  Description of Artificial Sequence: Synthetic oligonucleotide
ccgugaagacuuugcggcu

SEQ ID NO: 2089546 - RNA, 19 nt, Artificial Sequence
  Description of Artificial Sequence: Synthetic oligonucleotide
cguccugauugcacugcaa

SEQ ID NO: 2089547 - RNA, 19 nt, Artificial Sequence
  Description of Artificial Sequence: Synthetic oligonucleotide
cggguucucugguacucaa

SEQ ID NO: 2089548 - RNA, 19 nt, Artificial Sequence
  Description of Artificial Sequence: Synthetic oligonucleotide
agguccccgugaagacuuu

SEQ ID NO: 2089549 - RNA, 19 nt, Artificial Sequence
  Description of Artificial Sequence: Synthetic oligonucleotide
gcgccccuccugcuccuca

SEQ ID NO: 2089550 - RNA, 19 nt, Artificial Sequence
  Description of Artificial Sequence: Synthetic oligonucleotide
ccgaggcgucguggcagcg

SEQ ID NO: 2089551 - RNA, 19 nt, Artificial Sequence
  Description of Artificial Sequence: Synthetic oligonucleotide
ccaucaggaccacuacauu

SEQ ID NO: 2089552 - RNA, 19 nt, Artificial Sequence
  Description of Artificial Sequence: Synthetic oligonucleotide
ggguucucugguacucaau

SEQ ID NO: 2089553 - RNA, 19 nt, Artificial Sequence
  Description of Artificial Sequence: Synthetic oligonucleotide
cgaugcucccggcuccgga

SEQ ID NO: 2089554 - RNA, 19 nt, Artificial Sequence
  Description of Artificial Sequence: Synthetic oligonucleotide
ccaguacuaucaccgcauu

SEQ ID NO: 2089555 - RNA, 19 nt, Artificial Sequence
  Description of Artificial Sequence: Synthetic oligonucleotide
cgucguggcagcgccccuc

SEQ ID NO: 2089556 - RNA, 19 nt, Artificial Sequence
  Description of Artificial Sequence: Synthetic oligonucleotide
gcugagcccgaggcgucgu

SEQ ID NO: 2089557 - RNA, 19 nt, Artificial Sequence
  Description of Artificial Sequence: Synthetic oligonucleotide
ccucacacgucugggcauu

SEQ ID NO: 2089558 - RNA, 19 nt, Artificial Sequence
  Description of Artificial Sequence: Synthetic oligonucleotide
cggcugaaucugaggcacu

SEQ ID NO: 2089559 - RNA, 19 nt, Artificial Sequence
  Description of Artificial Sequence: Synthetic oligonucleotide
cggcuccggagccacccau

SEQ ID NO: 2089560 - RNA, 19 nt, Artificial Sequence
  Description of Artificial Sequence: Synthetic oligonucleotide
ccacggcucuccggagauu

SEQ ID NO: 2089561 - RNA, 19 nt, Artificial Sequence
  Description of Artificial Sequence: Synthetic oligonucleotide
gaugaaagggagucgaggg

SEQ ID NO: 2089562 - RNA, 19 nt, Artificial Sequence
  Description of Artificial Sequence: Synthetic oligonucleotide
ucugcuuuugcaaggacag

SEQ ID NO: 2089563 - RNA, 19 nt, Artificial Sequence
  Description of Artificial Sequence: Synthetic oligonucleotide
uggauuuuggcuguguugg

SEQ ID NO: 2089564 - RNA, 19 nt, Artificial Sequence
  Description of Artificial Sequence: Synthetic oligonucleotide
aagagugcgggcauggugc

SEQ ID NO: 2089565 - RNA, 19 nt, Artificial Sequence
  Description of Artificial Sequence: Synthetic oligonucleotide
gaauuguccauguucuggg

SEQ ID NO: 2089566 - RNA, 19 nt, Artificial Sequence
  Description of Artificial Sequence: Synthetic oligonucleotide
cugaaaguggccaugcacg

SEQ ID NO: 2089567 - RNA, 19 nt, Artificial Sequence
  Description of Artificial Sequence: Synthetic oligonucleotide
gaaucguggauuuuggcug

SEQ ID NO: 2089568 - RNA, 19 nt, Artificial Sequence
  Description of Artificial Sequence: Synthetic oligonucleotide
uguguuggaugaaagggag

SEQ ID NO: 2089569 - RNA, 19 nt, Artificial Sequence
  Description of Artificial Sequence: Synthetic oligonucleotide
aaguuucuccuguaguuuc

SEQ ID NO: 2089570 - RNA, 19 nt, Artificial Sequence
  Description of Artificial Sequence: Synthetic oligonucleotide
gaugaaucagagaagcuag

SEQ ID NO: 2089571 - RNA, 19 nt, Artificial Sequence
  Description of Artificial Sequence: Synthetic oligonucleotide
aaaaguuucuccuguaguu

SEQ ID NO: 2089572 - RNA, 19 nt, Artificial Sequence
  Description of Artificial Sequence: Synthetic oligonucleotide
ugaaaaguuucuccuguag

SEQ ID NO: 2089573 - RNA, 19 nt, Artificial Sequence
  Description of Artificial Sequence: Synthetic oligonucleotide
  modified_base (6)..(6): a, c, u, g, unknown or other
ucccgnuccaucaugaugu

SEQ ID NO: 2089574 - RNA, 19 nt, Artificial Sequence
  Description of Artificial Sequence: Synthetic oligonucleotide
uucagaauuuguuccuugg

SEQ ID NO: 2089575 - RNA, 19 nt, Artificial Sequence
  Description of Artificial Sequence: Synthetic oligonucleotide
gaagcuagucugcugauug

SEQ ID NO: 2089576 - RNA, 19 nt, Artificial Sequence
  Description of Artificial Sequence: Synthetic oligonucleotide
uguagagcugaaaaguuuc

SEQ ID NO: 2089577 - RNA, 19 nt, Artificial Sequence
  Description of Artificial Sequence: Synthetic oligonucleotide
aaaguggccaugcacggca

SEQ ID NO: 2089578 - RNA, 19 nt, Artificial Sequence
  Description of Artificial Sequence: Synthetic oligonucleotide
agaaucguggauuuuggcu

SEQ ID NO: 2089579 - RNA, 19 nt, Artificial Sequence
  Description of Artificial Sequence: Synthetic oligonucleotide
cuuggggaugcauaggccg

SEQ ID NO: 2089580 - RNA, 19 nt, Artificial Sequence
  Description of Artificial Sequence: Synthetic oligonucleotide
cuugcaucugcacagggag

SEQ ID NO: 2089581 - RNA, 19 nt, Artificial Sequence
  Description of Artificial Sequence: Synthetic oligonucleotide
augaaagggagucgagggc

SEQ ID NO: 2089582 - RNA, 19 nt, Artificial Sequence
  Description of Artificial Sequence: Synthetic oligonucleotide
ugcacggcaggaaaugccg

SEQ ID NO: 2089583 - RNA, 19 nt, Artificial Sequence
  Description of Artificial Sequence: Synthetic oligonucleotide
agcaguuccauaagcaccc

SEQ ID NO: 2089584 - RNA, 19 nt, Artificial Sequence
  Description of Artificial Sequence: Synthetic oligonucleotide
ugucugagugggcugaaag

SEQ ID NO: 2089585 - RNA, 19 nt, Artificial Sequence
  Description of Artificial Sequence: Synthetic oligonucleotide
agagaagcuagucugcuga

SEQ ID NO: 2089586 - RNA, 19 nt, Artificial Sequence
  Description of Artificial Sequence: Synthetic oligonucleotide
guugaugacgcuugggcag

SEQ ID NO: 2089587 - RNA, 19 nt, Artificial Sequence
  Description of Artificial Sequence: Synthetic oligonucleotide
auaggguuguggcugcggc

SEQ ID NO: 2089588 - RNA, 19 nt, Artificial Sequence
  Description of Artificial Sequence: Synthetic oligonucleotide
guaguuucagaauuuguuc

SEQ ID NO: 2089589 - RNA, 19 nt, Artificial Sequence
  Description of Artificial Sequence: Synthetic oligonucleotide
uaggccgcagagaagauga

SEQ ID NO: 2089590 - RNA, 19 nt, Artificial Sequence
  Description of Artificial Sequence: Synthetic oligonucleotide
auagguacugcacggcagg

SEQ ID NO: 2089591 - RNA, 19 nt, Artificial Sequence
  Description of Artificial Sequence: Synthetic oligonucleotide
cagagaagaugaaucagag

SEQ ID NO: 2089592 - RNA, 19 nt, Artificial Sequence
  Description of Artificial Sequence: Synthetic oligonucleotide
uuuugcaaggacagggcac

SEQ ID NO: 2089593 - RNA, 19 nt, Artificial Sequence
  Description of Artificial Sequence: Synthetic oligonucleotide
uauaggcuggcuguguagg

SEQ ID NO: 2089594 - RNA, 19 nt, Artificial Sequence
  Description of Artificial Sequence: Synthetic oligonucleotide
agagcuuggggaugcauag

SEQ ID NO: 2089595 - RNA, 19 nt, Artificial Sequence
  Description of Artificial Sequence: Synthetic oligonucleotide
uguugaugacgcuugggca

SEQ ID NO: 2089596 - RNA, 19 nt, Artificial Sequence
  Description of Artificial Sequence: Synthetic oligonucleotide
ugaaagggagucgagggcc

SEQ ID NO: 2089597 - RNA, 19 nt, Artificial Sequence
  Description of Artificial Sequence: Synthetic oligonucleotide
ucuagugacauccucucuu

SEQ ID NO: 2089598 - RNA, 19 nt, Artificial Sequence
  Description of Artificial Sequence: Synthetic oligonucleotide
agcguuggaaagcuugggg

SEQ ID NO: 2089599 - RNA, 19 nt, Artificial Sequence
  Description of Artificial Sequence: Synthetic oligonucleotide
cuuggucucuucuagugac

SEQ ID NO: 2089600 - RNA, 19 nt, Artificial Sequence
  Description of Artificial Sequence: Synthetic oligonucleotide
aagcuagucugcugauugg

SEQ ID NO: 2089601 - RNA, 19 nt, Artificial Sequence
  Description of Artificial Sequence: Synthetic oligonucleotide
cugugauagguacugcacg

SEQ ID NO: 2089602 - RNA, 19 nt, Artificial Sequence
  Description of Artificial Sequence: Synthetic oligonucleotide
uguuggaugaaagggaguc

SEQ ID NO: 2089603 - RNA, 19 nt, Artificial Sequence
  Description of Artificial Sequence: Synthetic oligonucleotide
uuugcaaggacagggcacc

SEQ ID NO: 2089604 - RNA, 19 nt, Artificial Sequence
  Description of Artificial Sequence: Synthetic oligonucleotide
uccuguagagcugaaaagu

SEQ ID NO: 2089605 - RNA, 19 nt, Artificial Sequence
  Description of Artificial Sequence: Synthetic oligonucleotide
ugauagguacugcacggca

SEQ ID NO: 2089606 - RNA, 19 nt, Artificial Sequence
  Description of Artificial Sequence: Synthetic oligonucleotide
ugagugggcugaaaguggc

SEQ ID NO: 2089607 - RNA, 19 nt, Artificial Sequence
  Description of Artificial Sequence: Synthetic oligonucleotide
acuugugguagaaucgugg

SEQ ID NO: 2089608 - RNA, 19 nt, Artificial Sequence
  Description of Artificial Sequence: Synthetic oligonucleotide
aaucguggauuuuggcugu

SEQ ID NO: 2089609 - RNA, 19 nt, Artificial Sequence
  Description of Artificial Sequence: Synthetic oligonucleotide
ugugguagaaucguggauu

SEQ ID NO: 2089610 - RNA, 19 nt, Artificial Sequence
  Description of Artificial Sequence: Synthetic oligonucleotide
cagaauuuguuccuugguc

SEQ ID NO: 2089611 - RNA, 19 nt, Artificial Sequence
  Description of Artificial Sequence: Synthetic oligonucleotide
uccuuggucucuucuagug

SEQ ID NO: 2089612 - RNA, 19 nt, Artificial Sequence
  Description of Artificial Sequence: Synthetic oligonucleotide
ucccgugugaacagucagg

SEQ ID NO: 2089613 - RNA, 19 nt, Artificial Sequence
  Description of Artificial Sequence: Synthetic oligonucleotide
gagugguuaggucacucug

SEQ ID NO: 2089614 - RNA, 19 nt, Artificial Sequence
  Description of Artificial Sequence: Synthetic oligonucleotide
gguuacuugugguagaauc

SEQ ID NO: 2089615 - RNA, 19 nt, Artificial Sequence
  Description of Artificial Sequence: Synthetic oligonucleotide
uccaucaugaugugccugu

SEQ ID NO: 2089616 - RNA, 19 nt, Artificial Sequence
  Description of Artificial Sequence: Synthetic oligonucleotide
agugccgggucguaagcac

SEQ ID NO: 2089617 - RNA, 19 nt, Artificial Sequence
  Description of Artificial Sequence: Synthetic oligonucleotide
guagaaucguggauuuugg

SEQ ID NO: 2089618 - RNA, 19 nt, Artificial Sequence
  Description of Artificial Sequence: Synthetic oligonucleotide
agucugcugauuggcaugc

SEQ ID NO: 2089619 - RNA, 19 nt, Artificial Sequence
  Description of Artificial Sequence: Synthetic oligonucleotide
uucccgugugaacagucag

SEQ ID NO: 2089620 - RNA, 19 nt, Artificial Sequence
  Description of Artificial Sequence: Synthetic oligonucleotide
cacggcauaggguuguggc

SEQ ID NO: 2089621 - RNA, 19 nt, Artificial Sequence
  Description of Artificial Sequence: Synthetic oligonucleotide
agaugaaucagagaagcua

SEQ ID NO: 2089622 - RNA, 19 nt, Artificial Sequence
  Description of Artificial Sequence: Synthetic oligonucleotide
uuacuugugguagaaucgu

SEQ ID NO: 2089623 - RNA, 19 nt, Artificial Sequence
  Description of Artificial Sequence: Synthetic oligonucleotide
ugauuggcaugcuccaucu

SEQ ID NO: 2089624 - RNA, 19 nt, Artificial Sequence
  Description of Artificial Sequence: Synthetic oligonucleotide
cauguucugggguuccugc

SEQ ID NO: 2089625 - RNA, 19 nt, Artificial Sequence
  Description of Artificial Sequence: Synthetic oligonucleotide
gauagguacugcacggcag

SEQ ID NO: 2089626 - RNA, 19 nt, Artificial Sequence
  Description of Artificial Sequence: Synthetic oligonucleotide
ggaauuguccauguucugg

SEQ ID NO: 2089627 - RNA, 19 nt, Artificial Sequence
  Description of Artificial Sequence: Synthetic oligonucleotide
aaagcagcugccgauccca

SEQ ID NO: 2089628 - RNA, 19 nt, Artificial Sequence
  Description of Artificial Sequence: Synthetic oligonucleotide
uccaggacuccccugcaug

SEQ ID NO: 2089629 - RNA, 19 nt, Artificial Sequence
  Description of Artificial Sequence: Synthetic oligonucleotide
uccguuucucuucuucaug

SEQ ID NO: 2089630 - RNA, 19 nt, Artificial Sequence
  Description of Artificial Sequence: Synthetic oligonucleotide
ugacugccagaccucaggc

SEQ ID NO: 2089631 - RNA, 19 nt, Artificial Sequence
  Description of Artificial Sequence: Synthetic oligonucleotide
gucguaagcacuugggguc

SEQ ID NO: 2089632 - RNA, 19 nt, Artificial Sequence
  Description of Artificial Sequence: Synthetic oligonucleotide
uagaaucguggauuuuggc

SEQ ID NO: 2089633 - RNA, 19 nt, Artificial Sequence
  Description of Artificial Sequence: Synthetic oligonucleotide
cuucuagugacauccucuc

SEQ ID NO: 2089634 - RNA, 19 nt, Artificial Sequence
  Description of Artificial Sequence: Synthetic oligonucleotide
ugaguucccgugugaacag

SEQ ID NO: 2089635 - RNA, 19 nt, Artificial Sequence
  Description of Artificial Sequence: Synthetic oligonucleotide
uuggggcgcuccaagagug

SEQ ID NO: 2089636 - RNA, 19 nt, Artificial Sequence
  Description of Artificial Sequence: Synthetic oligonucleotide
gcuguguagguccauagug

SEQ ID NO: 2089637 - RNA, 19 nt, Artificial Sequence
  Description of Artificial Sequence: Synthetic oligonucleotide
auuguccauguucuggggu

SEQ ID NO: 2089638 - RNA, 19 nt, Artificial Sequence
  Description of Artificial Sequence: Synthetic oligonucleotide
gaggaggugaguucccgug

SEQ ID NO: 2089639 - RNA, 19 nt, Artificial Sequence
  Description of Artificial Sequence: Synthetic oligonucleotide
aggacagggcaccaccagg

SEQ ID NO: 2089640 - RNA, 19 nt, Artificial Sequence
  Description of Artificial Sequence: Synthetic oligonucleotide
cugccaugagaguaccugg

SEQ ID NO: 2089641 - RNA, 19 nt, Artificial Sequence
  Description of Artificial Sequence: Synthetic oligonucleotide
augacgcuugggcaguggg

SEQ ID NO: 2089642 - RNA, 19 nt, Artificial Sequence
  Description of Artificial Sequence: Synthetic oligonucleotide
uuggggaugcauaggccgc

SEQ ID NO: 2089643 - RNA, 19 nt, Artificial Sequence
  Description of Artificial Sequence: Synthetic oligonucleotide
gacugccagaccucaggcg

SEQ ID NO: 2089644 - RNA, 19 nt, Artificial Sequence
  Description of Artificial Sequence: Synthetic oligonucleotide
ugcaaaagcagcugccgau

SEQ ID NO: 2089645 - RNA, 19 nt, Artificial Sequence
  Description of Artificial Sequence: Synthetic oligonucleotide
gcuguugucacugacugcc

SEQ ID NO: 2089646 - RNA, 19 nt, Artificial Sequence
  Description of Artificial Sequence: Synthetic oligonucleotide
uacuugugguagaaucgug

SEQ ID NO: 2089647 - RNA, 19 nt, Artificial Sequence
  Description of Artificial Sequence: Synthetic oligonucleotide
aagcuuggggcgcuccaag

SEQ ID NO: 2089648 - RNA, 19 nt, Artificial Sequence
  Description of Artificial Sequence: Synthetic oligonucleotide
auagcguuggaaagcuugg

SEQ ID NO: 2089649 - RNA, 19 nt, Artificial Sequence
  Description of Artificial Sequence: Synthetic oligonucleotide
acugcacggcaggaaaugc

SEQ ID NO: 2089650 - RNA, 19 nt, Artificial Sequence
  Description of Artificial Sequence: Synthetic oligonucleotide
uagucugcugauuggcaug

SEQ ID NO: 2089651 - RNA, 19 nt, Artificial Sequence
  Description of Artificial Sequence: Synthetic oligonucleotide
ugcugaggaggugaguucc

SEQ ID NO: 2089652 - RNA, 19 nt, Artificial Sequence
  Description of Artificial Sequence: Synthetic oligonucleotide
cugaugucagagugguuag

SEQ ID NO: 2089653 - RNA, 19 nt, Artificial Sequence
  Description of Artificial Sequence: Synthetic oligonucleotide
  modified_base (3)..(3): a, c, u, g, unknown or other
cgnuccaucaugaugugcc

SEQ ID NO: 2089654 - RNA, 19 nt, Artificial Sequence
  Description of Artificial Sequence: Synthetic oligonucleotide
uccaagagugcgggcaugg

SEQ ID NO: 2089655 - RNA, 19 nt, Artificial Sequence
  Description of Artificial Sequence: Synthetic oligonucleotide
  modified_base (7)..(7): a, c, u, g, unknown or other
cucccgnuccaucaugaug

SEQ ID NO: 2089656 - RNA, 19 nt, Artificial Sequence
  Description of Artificial Sequence: Synthetic oligonucleotide
ugcuguugaugacgcuugg

SEQ ID NO: 2089657 - RNA, 19 nt, Artificial Sequence
  Description of Artificial Sequence: Synthetic oligonucleotide
cuagugacauccucucuuc

SEQ ID NO: 2089658 - RNA, 19 nt, Artificial Sequence
  Description of Artificial Sequence: Synthetic oligonucleotide
guuggaugaaagggagucg

SEQ ID NO: 2089659 - RNA, 19 nt, Artificial Sequence
  Description of Artificial Sequence: Synthetic oligonucleotide
ugcaugcugaggaggugag

SEQ ID NO: 2089660 - RNA, 19 nt, Artificial Sequence
  Description of Artificial Sequence: Synthetic oligonucleotide
gagucgagggccagguugg

SEQ ID NO: 2089661 - RNA, 19 nt, Artificial Sequence
  Description of Artificial Sequence: Synthetic oligonucleotide
gacgcuugggcagugggug

SEQ ID NO: 2089662 - RNA, 19 nt, Artificial Sequence
  Description of Artificial Sequence: Synthetic oligonucleotide
uuccuuucgucuccguuuc

SEQ ID NO: 2089663 - RNA, 19 nt, Artificial Sequence
  Description of Artificial Sequence: Synthetic oligonucleotide
ggaugcauaggccgcagag

SEQ ID NO: 2089664 - RNA, 19 nt, Artificial Sequence
  Description of Artificial Sequence: Synthetic oligonucleotide
ugcugauuggcaugcucca

SEQ ID NO: 2089665 - RNA, 19 nt, Artificial Sequence
  Description of Artificial Sequence: Synthetic oligonucleotide
uugucacugacugccagac

SEQ ID NO: 2089666 - RNA, 19 nt, Artificial Sequence
  Description of Artificial Sequence: Synthetic oligonucleotide
cuugugguagaaucgugga

SEQ ID NO: 2089667 - RNA, 19 nt, Artificial Sequence
  Description of Artificial Sequence: Synthetic oligonucleotide
aagaugaaucagagaagcu

SEQ ID NO: 2089668 - RNA, 19 nt, Artificial Sequence
  Description of Artificial Sequence: Synthetic oligonucleotide
ggcagcugaugucagagug

SEQ ID NO: 2089669 - RNA, 19 nt, Artificial Sequence
  Description of Artificial Sequence: Synthetic oligonucleotide
uuguuccuuggucucuucu

SEQ ID NO: 2089670 - RNA, 19 nt, Artificial Sequence
  Description of Artificial Sequence: Synthetic oligonucleotide
ggaugaaagggagucgagg

SEQ ID NO: 2089671 - RNA, 19 nt, Artificial Sequence
  Description of Artificial Sequence: Synthetic oligonucleotide
guggcaaagccugacuugc

SEQ ID NO: 2089672 - RNA, 19 nt, Artificial Sequence
  Description of Artificial Sequence: Synthetic oligonucleotide
uugugguagaaucguggau

SEQ ID NO: 2089673 - RNA, 19 nt, Artificial Sequence
  Description of Artificial Sequence: Synthetic oligonucleotide
ugcauaggccgcagagaag

SEQ ID NO: 2089674 - RNA, 19 nt, Artificial Sequence
  Description of Artificial Sequence: Synthetic oligonucleotide
uggaauuguccauguucug

SEQ ID NO: 2089675 - RNA, 19 nt, Artificial Sequence
  Description of Artificial Sequence: Synthetic oligonucleotide
uucuagugacauccucucu

SEQ ID NO: 2089676 - RNA, 19 nt, Artificial Sequence
  Description of Artificial Sequence: Synthetic oligonucleotide
gaucccacguagugccggg

SEQ ID NO: 2089677 - RNA, 19 nt, Artificial Sequence
  Description of Artificial Sequence: Synthetic oligonucleotide
gugaguucccgugugaaca

SEQ ID NO: 2089678 - RNA, 19 nt, Artificial Sequence
  Description of Artificial Sequence: Synthetic oligonucleotide
cuguguagguccauaguga

SEQ ID NO: 2089679 - RNA, 19 nt, Artificial Sequence
  Description of Artificial Sequence: Synthetic oligonucleotide
uccuccugccguuuugcgc

SEQ ID NO: 2089680 - RNA, 19 nt, Artificial Sequence
  Description of Artificial Sequence: Synthetic oligonucleotide
caagagugcgggcauggug

SEQ ID NO: 2089681 - RNA, 19 nt, Artificial Sequence
  Description of Artificial Sequence: Synthetic oligonucleotide
uucgucuccguuucucuuc

SEQ ID NO: 2089682 - RNA, 19 nt, Artificial Sequence
  Description of Artificial Sequence: Synthetic oligonucleotide
cugauuggcaugcuccauc

SEQ ID NO: 2089683 - RNA, 19 nt, Artificial Sequence
  Description of Artificial Sequence: Synthetic oligonucleotide
uugcaucugcacagggagc

SEQ ID NO: 2089684 - RNA, 19 nt, Artificial Sequence
  Description of Artificial Sequence: Synthetic oligonucleotide
cuuuugcaaggacagggca

SEQ ID NO: 2089685 - RNA, 19 nt, Artificial Sequence
  Description of Artificial Sequence: Synthetic oligonucleotide
cugcacggcaggaaaugcc

SEQ ID NO: 2089686 - RNA, 19 nt, Artificial Sequence
  Description of Artificial Sequence: Synthetic oligonucleotide
uguuccuuucgucuccguu

SEQ ID NO: 2089687 - RNA, 19 nt, Artificial Sequence
  Description of Artificial Sequence: Synthetic oligonucleotide
gggucguaagcacuugggg

SEQ ID NO: 2089688 - RNA, 19 nt, Artificial Sequence
  Description of Artificial Sequence: Synthetic oligonucleotide
uuggucucuucuagugaca

SEQ ID NO: 2089689 - RNA, 19 nt, Artificial Sequence
  Description of Artificial Sequence: Synthetic oligonucleotide
uuguccauguucugggguu

SEQ ID NO: 2089690 - RNA, 19 nt, Artificial Sequence
  Description of Artificial Sequence: Synthetic oligonucleotide
uccuguaguuucagaauuu

SEQ ID NO: 2089691 - RNA, 19 nt, Artificial Sequence
  Description of Artificial Sequence: Synthetic oligonucleotide
uagcguuggaaagcuuggg

SEQ ID NO: 2089692 - RNA, 19 nt, Artificial Sequence
  Description of Artificial Sequence: Synthetic oligonucleotide
  modified_base (19)..(19): a, c, u, g, unknown or other
ugccguuuugcgcucccgn

SEQ ID NO: 2089693 - RNA, 19 nt, Artificial Sequence
  Description of Artificial Sequence: Synthetic oligonucleotide
gcguuggaaagcuuggggc

SEQ ID NO: 2089694 - RNA, 19 nt, Artificial Sequence
  Description of Artificial Sequence: Synthetic oligonucleotide
uacugcacggcaggaaaug

SEQ ID NO: 2089695 - RNA, 19 nt, Artificial Sequence
  Description of Artificial Sequence: Synthetic oligonucleotide
gugacauccucucuuccuc

SEQ ID NO: 2089696 - RNA, 19 nt, Artificial Sequence
  Description of Artificial Sequence: Synthetic oligonucleotide
aaugccgacggugcucuga

SEQ ID NO: 2089697 - RNA, 19 nt, Artificial Sequence
  Description of Artificial Sequence: Synthetic oligonucleotide
guuggaaagcuuggggcgc

SEQ ID NO: 2089698 - RNA, 19 nt, Artificial Sequence
  Description of Artificial Sequence: Synthetic oligonucleotide
caucugcacagggagcugg

SEQ ID NO: 2089699 - RNA, 19 nt, Artificial Sequence
  Description of Artificial Sequence: Synthetic oligonucleotide
gagaguaccugggcgguug

SEQ ID NO: 2089700 - RNA, 19 nt, Artificial Sequence
  Description of Artificial Sequence: Synthetic oligonucleotide
ucgucuccguuucucuucu

SEQ ID NO: 2089701 - RNA, 19 nt, Artificial Sequence
  Description of Artificial Sequence: Synthetic oligonucleotide
  modified_base (12)..(12): a, c, u, g, unknown or other
uugcgcucccgnuccauca

SEQ ID NO: 2089702 - RNA, 19 nt, Artificial Sequence
  Description of Artificial Sequence: Synthetic oligonucleotide
ucguaagcacuuggggucc

SEQ ID NO: 2089703 - RNA, 19 nt, Artificial Sequence
  Description of Artificial Sequence: Synthetic oligonucleotide
ucucuucuagugacauccu

SEQ ID NO: 2089704 - RNA, 19 nt, Artificial Sequence
  Description of Artificial Sequence: Synthetic oligonucleotide
ggaacccugucugaguggg

SEQ ID NO: 2089705 - RNA, 19 nt, Artificial Sequence
  Description of Artificial Sequence: Synthetic oligonucleotide
ccaugagaguaccugggcg

SEQ ID NO: 2089706 - RNA, 19 nt, Artificial Sequence
  Description of Artificial Sequence: Synthetic oligonucleotide
cugcuggcuaggacuauag

SEQ ID NO: 2089707 - RNA, 19 nt, Artificial Sequence
  Description of Artificial Sequence: Synthetic oligonucleotide
ccguuucucuucuucaugc

SEQ ID NO: 2089708 - RNA, 19 nt, Artificial Sequence
  Description of Artificial Sequence: Synthetic oligonucleotide
agguccauagugagguggg

SEQ ID NO: 2089709 - RNA, 19 nt, Artificial Sequence
  Description of Artificial Sequence: Synthetic oligonucleotide
ggugcuucuccuccuguag

SEQ ID NO: 2089710 - RNA, 19 nt, Artificial Sequence
  Description of Artificial Sequence: Synthetic oligonucleotide
ggucacucuguuccuuucg

SEQ ID NO: 2089711 - RNA, 19 nt, Artificial Sequence
  Description of Artificial Sequence: Synthetic oligonucleotide
ugucacugacugccagacc

SEQ ID NO: 2089712 - RNA, 19 nt, Artificial Sequence
  Description of Artificial Sequence: Synthetic oligonucleotide
acuugggguccaaacaucu

SEQ ID NO: 2089713 - RNA, 19 nt, Artificial Sequence
  Description of Artificial Sequence: Synthetic oligonucleotide
  modified_base (13)..(13): a, c, u, g, unknown or other
uuugcgcucccgnuccauc

SEQ ID NO: 2089714 - RNA, 19 nt, Artificial Sequence
  Description of Artificial Sequence: Synthetic oligonucleotide
ugacgcuugggcagugggu

SEQ ID NO: 2089715 - RNA, 19 nt, Artificial Sequence
  Description of Artificial Sequence: Synthetic oligonucleotide
aguucccgugugaacaguc

SEQ ID NO: 2089716 - RNA, 19 nt, Artificial Sequence
  Description of Artificial Sequence: Synthetic oligonucleotide
ggccaugcacggcauaggg

SEQ ID NO: 2089717 - RNA, 19 nt, Artificial Sequence
  Description of Artificial Sequence: Synthetic oligonucleotide
ugaggaggugaguucccgu

SEQ ID NO: 2089718 - RNA, 19 nt, Artificial Sequence
  Description of Artificial Sequence: Synthetic oligonucleotide
agugguuaggucacucugu

SEQ ID NO: 2089719 - RNA, 19 nt, Artificial Sequence
  Description of Artificial Sequence: Synthetic oligonucleotide
gccgaucccacguagugcc

SEQ ID NO: 2089720 - RNA, 19 nt, Artificial Sequence
  Description of Artificial Sequence: Synthetic oligonucleotide
guuguguccuccaggacuc

SEQ ID NO: 2089721 - RNA, 19 nt, Artificial Sequence
  Description of Artificial Sequence: Synthetic oligonucleotide
gaugucagagugguuaggu

SEQ ID NO: 2089722 - RNA, 19 nt, Artificial Sequence
  Description of Artificial Sequence: Synthetic oligonucleotide
acggcauaggguuguggcu

SEQ ID NO: 2089723 - RNA, 19 nt, Artificial Sequence
  Description of Artificial Sequence: Synthetic oligonucleotide
uggacugccuuggaauugu

SEQ ID NO: 2089724 - RNA, 19 nt, Artificial Sequence
  Description of Artificial Sequence: Synthetic oligonucleotide
gguggcaaagccugacuug

SEQ ID NO: 2089725 - RNA, 19 nt, Artificial Sequence
  Description of Artificial Sequence: Synthetic oligonucleotide
cguuggaaagcuuggggcg

SEQ ID NO: 2089726 - RNA, 19 nt, Artificial Sequence
  Description of Artificial Sequence: Synthetic oligonucleotide
agcagcugccgaucccacg

SEQ ID NO: 2089727 - RNA, 19 nt, Artificial Sequence
  Description of Artificial Sequence: Synthetic oligonucleotide
uggcaaagccugacuugcc

SEQ ID NO: 2089728 - RNA, 19 nt, Artificial Sequence
  Description of Artificial Sequence: Synthetic oligonucleotide
guugucacugacugccaga

SEQ ID NO: 2089729 - RNA, 19 nt, Artificial Sequence
  Description of Artificial Sequence: Synthetic oligonucleotide
cucuucuagugacauccuc

SEQ ID NO: 2089730 - RNA, 19 nt, Artificial Sequence
  Description of Artificial Sequence: Synthetic oligonucleotide
aaagggagucgagggccag

SEQ ID NO: 2089731 - RNA, 19 nt, Artificial Sequence
  Description of Artificial Sequence: Synthetic oligonucleotide
auaggcuggcuguguaggu

SEQ ID NO: 2089732 - RNA, 19 nt, Artificial Sequence
  Description of Artificial Sequence: Synthetic oligonucleotide
aggaggugaguucccgugu

SEQ ID NO: 2089733 - RNA, 19 nt, Artificial Sequence
  Description of Artificial Sequence: Synthetic oligonucleotide
gaaagcuuggggcgcucca

SEQ ID NO: 2089734 - RNA, 19 nt, Artificial Sequence
  Description of Artificial Sequence: Synthetic oligonucleotide
guagugccgggucguaagc

SEQ ID NO: 2089735 - RNA, 19 nt, Artificial Sequence
  Description of Artificial Sequence: Synthetic oligonucleotide
uaccugggcgguugugucc

SEQ ID NO: 2089736 - RNA, 19 nt, Artificial Sequence
  Description of Artificial Sequence: Synthetic oligonucleotide
gaugacgcuugggcagugg

SEQ ID NO: 2089737 - RNA, 19 nt, Artificial Sequence
  Description of Artificial Sequence: Synthetic oligonucleotide
aggacuccccugcaugcug

SEQ ID NO: 2089738 - RNA, 19 nt, Artificial Sequence
  Description of Artificial Sequence: Synthetic oligonucleotide
uuucgucuccguuucucuu

SEQ ID NO: 2089739 - RNA, 19 nt, Artificial Sequence
  Description of Artificial Sequence: Synthetic oligonucleotide
caugcacggcauaggguug

SEQ ID NO: 2089740 - RNA, 19 nt, Artificial Sequence
  Description of Artificial Sequence: Synthetic oligonucleotide
auaggccgcagagaagaug

SEQ ID NO: 2089741 - RNA, 19 nt, Artificial Sequence
  Description of Artificial Sequence: Synthetic oligonucleotide
ucacugacugccagaccuc

SEQ ID NO: 2089742 - RNA, 19 nt, Artificial Sequence
  Description of Artificial Sequence: Synthetic oligonucleotide
cugcggcugugauagguac

SEQ ID NO: 2089743 - RNA, 19 nt, Artificial Sequence
  Description of Artificial Sequence: Synthetic oligonucleotide
uugaugacgcuugggcagu

SEQ ID NO: 2089744 - RNA, 19 nt, Artificial Sequence
  Description of Artificial Sequence: Synthetic oligonucleotide
agcugccgaucccacguag

SEQ ID NO: 2089745 - RNA, 19 nt, Artificial Sequence
  Description of Artificial Sequence: Synthetic oligonucleotide
aaagcuuggggcgcuccaa

SEQ ID NO: 2089746 - RNA, 19 nt, Artificial Sequence
  Description of Artificial Sequence: Synthetic oligonucleotide
cauaggguuguggcugcgg

SEQ ID NO: 2089747 - RNA, 19 nt, Artificial Sequence
  Description of Artificial Sequence: Synthetic oligonucleotide
ugcggcugugauagguacu

SEQ ID NO: 2089748 - RNA, 19 nt, Artificial Sequence
  Description of Artificial Sequence: Synthetic oligonucleotide
  modified_base (16)..(16): a, c, u, g, unknown or other
cguuuugcgcucccgnucc

SEQ ID NO: 2089749 - RNA, 19 nt, Artificial Sequence
  Description of Artificial Sequence: Synthetic oligonucleotide
cugccgaucccacguagug

SEQ ID NO: 2089750 - RNA, 19 nt, Artificial Sequence
  Description of Artificial Sequence: Synthetic oligonucleotide
gugauagguacugcacggc

SEQ ID NO: 2089751 - RNA, 19 nt, Artificial Sequence
  Description of Artificial Sequence: Synthetic oligonucleotide
ugccgaucccacguagugc

SEQ ID NO: 2089752 - RNA, 19 nt, Artificial Sequence
  Description of Artificial Sequence: Synthetic oligonucleotide
ugggcugaaaguggccaug

SEQ ID NO: 2089753 - RNA, 19 nt, Artificial Sequence
  Description of Artificial Sequence: Synthetic oligonucleotide
cacuugggguccaaacauc

SEQ ID NO: 2089754 - RNA, 19 nt, Artificial Sequence
  Description of Artificial Sequence: Synthetic oligonucleotide
cugguaggcagcugauguc

SEQ ID NO: 2089755 - RNA, 19 nt, Artificial Sequence
  Description of Artificial Sequence: Synthetic oligonucleotide
gugcuguugaugacgcuug

SEQ ID NO: 2089756 - RNA, 19 nt, Artificial Sequence
  Description of Artificial Sequence: Synthetic oligonucleotide
gagcuuggggaugcauagg

SEQ ID NO: 2089757 - RNA, 19 nt, Artificial Sequence
  Description of Artificial Sequence: Synthetic oligonucleotide
ggcgguuguguccuccagg

SEQ ID NO: 2089758 - RNA, 19 nt, Artificial Sequence
  Description of Artificial Sequence: Synthetic oligonucleotide
gcauaggccgcagagaaga

SEQ ID NO: 2089759 - RNA, 19 nt, Artificial Sequence
  Description of Artificial Sequence: Synthetic oligonucleotide
gguacugcacggcaggaaa

SEQ ID NO: 2089760 - RNA, 19 nt, Artificial Sequence
  Description of Artificial Sequence: Synthetic oligonucleotide
  modified_base (14)..(14): a, c, u, g, unknown or other
uuuugcgcucccgnuccau

SEQ ID NO: 2089761 - RNA, 19 nt, Artificial Sequence
  Description of Artificial Sequence: Synthetic oligonucleotide
ugcccggcuguugucacug

SEQ ID NO: 2089762 - RNA, 19 nt, Artificial Sequence
  Description of Artificial Sequence: Synthetic oligonucleotide
uucugggguuccugcaaaa

SEQ ID NO: 2089763 - RNA, 19 nt, Artificial Sequence
  Description of Artificial Sequence: Synthetic oligonucleotide
ugccagaccucaggcgggg

SEQ ID NO: 2089764 - RNA, 19 nt, Artificial Sequence
  Description of Artificial Sequence: Synthetic oligonucleotide
  modified_base (2)..(2): a, c, u, g, unknown or other
gnuccaucaugaugugccu

SEQ ID NO: 2089765 - RNA, 19 nt, Artificial Sequence
  Description of Artificial Sequence: Synthetic oligonucleotide
augaaucagagaagcuagu

SEQ ID NO: 2089766 - RNA, 19 nt, Artificial Sequence
  Description of Artificial Sequence: Synthetic oligonucleotide
ggucguaagcacuuggggu

SEQ ID NO: 2089767 - RNA, 19 nt, Artificial Sequence
  Description of Artificial Sequence: Synthetic oligonucleotide
ugucagcugccaugagagu

SEQ ID NO: 2089768 - RNA, 19 nt, Artificial Sequence
  Description of Artificial Sequence: Synthetic oligonucleotide
augagaguaccugggcggu

SEQ ID NO: 2089769 - RNA, 19 nt, Artificial Sequence
  Description of Artificial Sequence: Synthetic oligonucleotide
gccgcagagaagaugaauc

SEQ ID NO: 2089770 - RNA, 19 nt, Artificial Sequence
  Description of Artificial Sequence: Synthetic oligonucleotide
ggaggugaguucccgugug

SEQ ID NO: 2089771 - RNA, 19 nt, Artificial Sequence
  Description of Artificial Sequence: Synthetic oligonucleotide
uagugccgggucguaagca

SEQ ID NO: 2089772 - RNA, 19 nt, Artificial Sequence
  Description of Artificial Sequence: Synthetic oligonucleotide
agagugcgggcauggugcu

SEQ ID NO: 2089773 - RNA, 19 nt, Artificial Sequence
  Description of Artificial Sequence: Synthetic oligonucleotide
guaccugggcgguuguguc

SEQ ID NO: 2089774 - RNA, 19 nt, Artificial Sequence
  Description of Artificial Sequence: Synthetic oligonucleotide
agcuuggggcgcuccaaga

SEQ ID NO: 2089775 - RNA, 19 nt, Artificial Sequence
  Description of Artificial Sequence: Synthetic oligonucleotide
gaaagggagucgagggcca

SEQ ID NO: 2089776 - RNA, 19 nt, Artificial Sequence
  Description of Artificial Sequence: Synthetic oligonucleotide
cugagcugcuggcuaggac

SEQ ID NO: 2089777 - RNA, 19 nt, Artificial Sequence
  Description of Artificial Sequence: Synthetic oligonucleotide
gcugugauagguacugcac

SEQ ID NO: 2089778 - RNA, 19 nt, Artificial Sequence
  Description of Artificial Sequence: Synthetic oligonucleotide
guagguccauagugaggug

SEQ ID NO: 2089779 - RNA, 19 nt, Artificial Sequence
  Description of Artificial Sequence: Synthetic oligonucleotide
uggggcgcuccaagagugc

SEQ ID NO: 2089780 - RNA, 19 nt, Artificial Sequence
  Description of Artificial Sequence: Synthetic oligonucleotide
gucugagugggcugaaagu

SEQ ID NO: 2089781 - RNA, 19 nt, Artificial Sequence
  Description of Artificial Sequence: Synthetic oligonucleotide
ggcuaggacuauaggcugg

SEQ ID NO: 2089782 - RNA, 19 nt, Artificial Sequence
  Description of Artificial Sequence: Synthetic oligonucleotide
ggcgcuccaagagugcggg

SEQ ID NO: 2089783 - RNA, 19 nt, Artificial Sequence
  Description of Artificial Sequence: Synthetic oligonucleotide
uuaggucacucuguuccuu

SEQ ID NO: 2089784 - RNA, 19 nt, Artificial Sequence
  Description of Artificial Sequence: Synthetic oligonucleotide
cuggacugccuuggaauug

SEQ ID NO: 2089785 - RNA, 19 nt, Artificial Sequence
  Description of Artificial Sequence: Synthetic oligonucleotide
ugcaaggacagggcaccac

SEQ ID NO: 2089786 - RNA, 19 nt, Artificial Sequence
  Description of Artificial Sequence: Synthetic oligonucleotide
ugggcgguuguguccucca

SEQ ID NO: 2089787 - RNA, 19 nt, Artificial Sequence
  Description of Artificial Sequence: Synthetic oligonucleotide
uggggaugcauaggccgca

SEQ ID NO: 2089788 - RNA, 19 nt, Artificial Sequence
  Description of Artificial Sequence: Synthetic oligonucleotide
  modified_base (11)..(11): a, c, u, g, unknown or other
ugcgcucccgnuccaucau

SEQ ID NO: 2089789 - RNA, 19 nt, Artificial Sequence
  Description of Artificial Sequence: Synthetic oligonucleotide
gcuguugaugacgcuuggg

SEQ ID NO: 2089790 - RNA, 19 nt, Artificial Sequence
  Description of Artificial Sequence: Synthetic oligonucleotide
agaguaccugggcgguugu

SEQ ID NO: 2089791 - RNA, 19 nt, Artificial Sequence
  Description of Artificial Sequence: Synthetic oligonucleotide
uaagcacuugggguccaaa

SEQ ID NO: 2089792 - RNA, 19 nt, Artificial Sequence
  Description of Artificial Sequence: Synthetic oligonucleotide
gauuuuggcuguguuggau

SEQ ID NO: 2089793 - RNA, 19 nt, Artificial Sequence
  Description of Artificial Sequence: Synthetic oligonucleotide
ugccgggucguaagcacuu

SEQ ID NO: 2089794 - RNA, 19 nt, Artificial Sequence
  Description of Artificial Sequence: Synthetic oligonucleotide
agucgagggccagguuggc

SEQ ID NO: 2089795 - RNA, 19 nt, Artificial Sequence
  Description of Artificial Sequence: Synthetic oligonucleotide
caugcuccaucugcuuuug

SEQ ID NO: 2089796 - RNA, 19 nt, Artificial Sequence
  Description of Artificial Sequence: Synthetic oligonucleotide
guaggcagcugaugucaga

SEQ ID NO: 2089797 - RNA, 19 nt, Artificial Sequence
  Description of Artificial Sequence: Synthetic oligonucleotide
cuagucugcugauuggcau

SEQ ID NO: 2089798 - RNA, 19 nt, Artificial Sequence
  Description of Artificial Sequence: Synthetic oligonucleotide
ccaggacuccccugcaugc

SEQ ID NO: 2089799 - RNA, 19 nt, Artificial Sequence
  Description of Artificial Sequence: Synthetic oligonucleotide
agggagucgagggccaggu

SEQ ID NO: 2089800 - RNA, 19 nt, Artificial Sequence
  Description of Artificial Sequence: Synthetic oligonucleotide
ggcauaggguuguggcugc

SEQ ID NO: 2089801 - RNA, 19 nt, Artificial Sequence
  Description of Artificial Sequence: Synthetic oligonucleotide
gcgguuguguccuccagga

SEQ ID NO: 2089802 - RNA, 19 nt, Artificial Sequence
  Description of Artificial Sequence: Synthetic oligonucleotide
cuuucgucuccguuucucu

SEQ ID NO: 2089803 - RNA, 19 nt, Artificial Sequence
  Description of Artificial Sequence: Synthetic oligonucleotide
aggugaguucccgugugaa

SEQ ID NO: 2089804 - RNA, 19 nt, Artificial Sequence
  Description of Artificial Sequence: Synthetic oligonucleotide
accugggcgguuguguccu

SEQ ID NO: 2089805 - RNA, 19 nt, Artificial Sequence
  Description of Artificial Sequence: Synthetic oligonucleotide
guuaggucacucuguuccu

SEQ ID NO: 2089806 - RNA, 19 nt, Artificial Sequence
  Description of Artificial Sequence: Synthetic oligonucleotide
cuugggcagugggugcccg

SEQ ID NO: 2089807 - RNA, 19 nt, Artificial Sequence
  Description of Artificial Sequence: Synthetic oligonucleotide
agaagcuagucugcugauu

SEQ ID NO: 2089808 - RNA, 19 nt, Artificial Sequence
  Description of Artificial Sequence: Synthetic oligonucleotide
gcuaggacuauaggcuggc

SEQ ID NO: 2089809 - RNA, 19 nt, Artificial Sequence
  Description of Artificial Sequence: Synthetic oligonucleotide
ugguuacuugugguagaau

SEQ ID NO: 2089810 - RNA, 19 nt, Artificial Sequence
  Description of Artificial Sequence: Synthetic oligonucleotide
cuguagagcugaaaaguuu

SEQ ID NO: 2089811 - RNA, 19 nt, Artificial Sequence
  Description of Artificial Sequence: Synthetic oligonucleotide
augcacggcauaggguugu

SEQ ID NO: 2089812 - RNA, 19 nt, Artificial Sequence
  Description of Artificial Sequence: Synthetic oligonucleotide
uccuccuguagagcugaaa

SEQ ID NO: 2089813 - RNA, 19 nt, Artificial Sequence
  Description of Artificial Sequence: Synthetic oligonucleotide
cugcugcuugcaucugcac

SEQ ID NO: 2089814 - RNA, 19 nt, Artificial Sequence
  Description of Artificial Sequence: Synthetic oligonucleotide
guucccgugugaacaguca

SEQ ID NO: 2089815 - RNA, 19 nt, Artificial Sequence
  Description of Artificial Sequence: Synthetic oligonucleotide
gugugaacagucaggcucu

SEQ ID NO: 2089816 - RNA, 19 nt, Artificial Sequence
  Description of Artificial Sequence: Synthetic oligonucleotide
ggaaaugccgacggugcuc

SEQ ID NO: 2089817 - RNA, 19 nt, Artificial Sequence
  Description of Artificial Sequence: Synthetic oligonucleotide
cguagugccgggucguaag

SEQ ID NO: 2089818 - RNA, 19 nt, Artificial Sequence
  Description of Artificial Sequence: Synthetic oligonucleotide
uugcaaggacagggcacca

SEQ ID NO: 2089819 - RNA, 19 nt, Artificial Sequence
  Description of Artificial Sequence: Synthetic oligonucleotide
guagagcugaaaaguuucu

SEQ ID NO: 2089820 - RNA, 19 nt, Artificial Sequence
  Description of Artificial Sequence: Synthetic oligonucleotide
ggcuguugucacugacugc

SEQ ID NO: 2089821 - RNA, 19 nt, Artificial Sequence
  Description of Artificial Sequence: Synthetic oligonucleotide
caugcugaggaggugaguu

SEQ ID NO: 2089822 - RNA, 19 nt, Artificial Sequence
  Description of Artificial Sequence: Synthetic oligonucleotide
gugguagaaucguggauuu

SEQ ID NO: 2089823 - RNA, 19 nt, Artificial Sequence
  Description of Artificial Sequence: Synthetic oligonucleotide
ggggcgcuccaagagugcg

SEQ ID NO: 2089824 - RNA, 19 nt, Artificial Sequence
  Description of Artificial Sequence: Synthetic oligonucleotide
gaacccugucugagugggc

SEQ ID NO: 2089825 - RNA, 19 nt, Artificial Sequence
  Description of Artificial Sequence: Synthetic oligonucleotide
ggauuuuggcuguguugga

SEQ ID NO: 2089826 - RNA, 19 nt, Artificial Sequence
  Description of Artificial Sequence: Synthetic oligonucleotide
cuuggggcgcuccaagagu

SEQ ID NO: 2089827 - RNA, 19 nt, Artificial Sequence
  Description of Artificial Sequence: Synthetic oligonucleotide
ggacuauaggcuggcugug

SEQ ID NO: 2089828 - RNA, 19 nt, Artificial Sequence
  Description of Artificial Sequence: Synthetic oligonucleotide
gaguaccugggcgguugug

SEQ ID NO: 2089829 - RNA, 19 nt, Artificial Sequence
  Description of Artificial Sequence: Synthetic oligonucleotide
gggcugaaaguggccaugc

SEQ ID NO: 2089830 - RNA, 19 nt, Artificial Sequence
  Description of Artificial Sequence: Synthetic oligonucleotide
cugggcgguuguguccucc

SEQ ID NO: 2089831 - RNA, 19 nt, Artificial Sequence
  Description of Artificial Sequence: Synthetic oligonucleotide
agguacugcacggcaggaa

SEQ ID NO: 2089832 - RNA, 19 nt, Artificial Sequence
  Description of Artificial Sequence: Synthetic oligonucleotide
ugcacggcauaggguugug

SEQ ID NO: 2089833 - RNA, 19 nt, Artificial Sequence
  Description of Artificial Sequence: Synthetic oligonucleotide
gacuauaggcuggcugugu

SEQ ID NO: 2089834 - RNA, 19 nt, Artificial Sequence
  Description of Artificial Sequence: Synthetic oligonucleotide
gggcuggaugcagagcuug

SEQ ID NO: 2089835 - RNA, 19 nt, Artificial Sequence
  Description of Artificial Sequence: Synthetic oligonucleotide
ugguagaaucguggauuuu

SEQ ID NO: 2089836 - RNA, 19 nt, Artificial Sequence
  Description of Artificial Sequence: Synthetic oligonucleotide
ccgggucguaagcacuugg

SEQ ID NO: 2089837 - RNA, 19 nt, Artificial Sequence
  Description of Artificial Sequence: Synthetic oligonucleotide
aucguggauuuuggcugug

SEQ ID NO: 2089838 - RNA, 19 nt, Artificial Sequence
  Description of Artificial Sequence: Synthetic oligonucleotide
cugccguuuugcgcucccg

SEQ ID NO: 2089839 - RNA, 19 nt, Artificial Sequence
  Description of Artificial Sequence: Synthetic oligonucleotide
ggaugcagagcuuggggau

SEQ ID NO: 2089840 - RNA, 19 nt, Artificial Sequence
  Description of Artificial Sequence: Synthetic oligonucleotide
gcuagucugcugauuggca

SEQ ID NO: 2089841 - RNA, 19 nt, Artificial Sequence
  Description of Artificial Sequence: Synthetic oligonucleotide
aguggccaugcacggcaua

SEQ ID NO: 2089842 - RNA, 19 nt, Artificial Sequence
  Description of Artificial Sequence: Synthetic oligonucleotide
cuccaagagugcgggcaug

SEQ ID NO: 2089843 - RNA, 19 nt, Artificial Sequence
  Description of Artificial Sequence: Synthetic oligonucleotide
caagaguccaggggcugga

SEQ ID NO: 2089844 - RNA, 19 nt, Artificial Sequence
  Description of Artificial Sequence: Synthetic oligonucleotide
ugagaguaccugggcgguu

SEQ ID NO: 2089845 - RNA, 19 nt, Artificial Sequence
  Description of Artificial Sequence: Synthetic oligonucleotide
  modified_base (17)..(17): a, c, u, g, unknown or other
ccguuuugcgcucccgnuc

SEQ ID NO: 2089846 - RNA, 19 nt, Artificial Sequence
  Description of Artificial Sequence: Synthetic oligonucleotide
uccugccguuuugcgcucc

SEQ ID NO: 2089847 - RNA, 19 nt, Artificial Sequence
  Description of Artificial Sequence: Synthetic oligonucleotide
ugggugcccggcuguuguc

SEQ ID NO: 2089848 - RNA, 19 nt, Artificial Sequence
  Description of Artificial Sequence: Synthetic oligonucleotide
  modified_base (4)..(4): a, c, u, g, unknown or other
ccgnuccaucaugaugugc

SEQ ID NO: 2089849 - RNA, 19 nt, Artificial Sequence
  Description of Artificial Sequence: Synthetic oligonucleotide
ccaugcacggcauaggguu

SEQ ID NO: 2089850 - RNA, 19 nt, Artificial Sequence
  Description of Artificial Sequence: Synthetic oligonucleotide
gccagguuggcugguggug

SEQ ID NO: 2089851 - RNA, 19 nt, Artificial Sequence
  Description of Artificial Sequence: Synthetic oligonucleotide
ggugcuguugaugacgcuu

SEQ ID NO: 2089852 - RNA, 19 nt, Artificial Sequence
  Description of Artificial Sequence: Synthetic oligonucleotide
agguuggcuggugguggca

SEQ ID NO: 2089853 - RNA, 19 nt, Artificial Sequence
  Description of Artificial Sequence: Synthetic oligonucleotide
gagugcgggcauggugcug

SEQ ID NO: 2089854 - RNA, 19 nt, Artificial Sequence
  Description of Artificial Sequence: Synthetic oligonucleotide
ggaggaacccugucugagu

SEQ ID NO: 2089855 - RNA, 19 nt, Artificial Sequence
  Description of Artificial Sequence: Synthetic oligonucleotide
ggcugaaaguggccaugca

SEQ ID NO: 2089856 - RNA, 19 nt, Artificial Sequence
  Description of Artificial Sequence: Synthetic oligonucleotide
acguagugccgggucguaa

SEQ ID NO: 2089857 - RNA, 19 nt, Artificial Sequence
  Description of Artificial Sequence: Synthetic oligonucleotide
gacuugccugcugcuugca

SEQ ID NO: 2089858 - RNA, 19 nt, Artificial Sequence
  Description of Artificial Sequence: Synthetic oligonucleotide
gggcgcuccaagagugcgg

SEQ ID NO: 2089859 - RNA, 19 nt, Artificial Sequence
  Description of Artificial Sequence: Synthetic oligonucleotide
gggcgguuguguccuccag

SEQ ID NO: 2089860 - RNA, 19 nt, Artificial Sequence
  Description of Artificial Sequence: Synthetic oligonucleotide
guguuggaugaaagggagu

SEQ ID NO: 2089861 - RNA, 19 nt, Artificial Sequence
  Description of Artificial Sequence: Synthetic oligonucleotide
ggcuguguagguccauagu

SEQ ID NO: 2089862 - RNA, 19 nt, Artificial Sequence
  Description of Artificial Sequence: Synthetic oligonucleotide
ggggaugcauaggccgcag

SEQ ID NO: 2089863 - RNA, 19 nt, Artificial Sequence
  Description of Artificial Sequence: Synthetic oligonucleotide
ccccugcaugcugaggagg

SEQ ID NO: 2089864 - RNA, 19 nt, Artificial Sequence
  Description of Artificial Sequence: Synthetic oligonucleotide
gcauaggguuguggcugcg

SEQ ID NO: 2089865 - RNA, 19 nt, Artificial Sequence
  Description of Artificial Sequence: Synthetic oligonucleotide
ccuguagagcugaaaaguu

SEQ ID NO: 2089866 - RNA, 19 nt, Artificial Sequence
  Description of Artificial Sequence: Synthetic oligonucleotide
ccgaucccacguagugccg

SEQ ID NO: 2089867 - RNA, 19 nt, Artificial Sequence
  Description of Artificial Sequence: Synthetic oligonucleotide
gugggcugaaaguggccau

SEQ ID NO: 2089868 - RNA, 19 nt, Artificial Sequence
  Description of Artificial Sequence: Synthetic oligonucleotide
  modified_base (5)..(5): a, c, u, g, unknown or other
cccgnuccaucaugaugug

SEQ ID NO: 2089869 - RNA, 19 nt, Artificial Sequence
  Description of Artificial Sequence: Synthetic oligonucleotide
cgaucccacguagugccgg

SEQ ID NO: 2089870 - RNA, 19 nt, Artificial Sequence
  Description of Artificial Sequence: Synthetic oligonucleotide
cuggcuguguagguccaua

SEQ ID NO: 2089871 - RNA, 19 nt, Artificial Sequence
  Description of Artificial Sequence: Synthetic oligonucleotide
gggaugcauaggccgcaga

SEQ ID NO: 2089872 - RNA, 19 nt, Artificial Sequence
  Description of Artificial Sequence: Synthetic oligonucleotide
guaagcacuugggguccaa

SEQ ID NO: 2089873 - RNA, 19 nt, Artificial Sequence
  Description of Artificial Sequence: Synthetic oligonucleotide
ggggcugagcaguuccaua

SEQ ID NO: 2089874 - RNA, 19 nt, Artificial Sequence
  Description of Artificial Sequence: Synthetic oligonucleotide
ggacuccccugcaugcuga

SEQ ID NO: 2089875 - RNA, 19 nt, Artificial Sequence
  Description of Artificial Sequence: Synthetic oligonucleotide
guacugcacggcaggaaau

SEQ ID NO: 2089876 - RNA, 19 nt, Artificial Sequence
  Description of Artificial Sequence: Synthetic oligonucleotide
gcaugcuccaucugcuuuu

SEQ ID NO: 2089877 - RNA, 19 nt, Artificial Sequence
  Description of Artificial Sequence: Synthetic oligonucleotide
gguuggcuggugguggcaa

SEQ ID NO: 2089878 - RNA, 19 nt, Artificial Sequence
  Description of Artificial Sequence: Synthetic oligonucleotide
cauaggccgcagagaagau

SEQ ID NO: 2089879 - RNA, 19 nt, Artificial Sequence
  Description of Artificial Sequence: Synthetic oligonucleotide
gugccgggucguaagcacu

SEQ ID NO: 2089880 - RNA, 19 nt, Artificial Sequence
  Description of Artificial Sequence: Synthetic oligonucleotide
ggcugcggcugugauaggu

SEQ ID NO: 2089881 - RNA, 19 nt, Artificial Sequence
  Description of Artificial Sequence: Synthetic oligonucleotide
gcacggcaggaaaugccga

SEQ ID NO: 2089882 - RNA, 19 nt, Artificial Sequence
  Description of Artificial Sequence: Synthetic oligonucleotide
  modified_base (18)..(18): a, c, u, g, unknown or other
gccguuuugcgcucccgnu

SEQ ID NO: 2089883 - RNA, 19 nt, Artificial Sequence
  Description of Artificial Sequence: Synthetic oligonucleotide
  modified_base (9)..(9): a, c, u, g, unknown or other
cgcucccgnuccaucauga

SEQ ID NO: 2089884 - RNA, 19 nt, Artificial Sequence
  Description of Artificial Sequence: Synthetic oligonucleotide
cgcuccaagagugcgggca

SEQ ID NO: 2089885 - RNA, 19 nt, Artificial Sequence
  Description of Artificial Sequence: Synthetic oligonucleotide
cuaggacuauaggcuggcu

SEQ ID NO: 2089886 - RNA, 19 nt, Artificial Sequence
  Description of Artificial Sequence: Synthetic oligonucleotide
gcugcggcugugauaggua

SEQ ID NO: 2089887 - RNA, 19 nt, Artificial Sequence
  Description of Artificial Sequence: Synthetic oligonucleotide
gcuccaagagugcgggcau

SEQ ID NO: 2089888 - RNA, 19 nt, Artificial Sequence
  Description of Artificial Sequence: Synthetic oligonucleotide
gucgagggccagguuggcu

SEQ ID NO: 2089889 - RNA, 19 nt, Artificial Sequence
  Description of Artificial Sequence: Synthetic oligonucleotide
ccggcuguugucacugacu

SEQ ID NO: 2089890 - RNA, 19 nt, Artificial Sequence
  Description of Artificial Sequence: Synthetic oligonucleotide
gccgggucguaagcacuug

SEQ ID NO: 2089891 - RNA, 19 nt, Artificial Sequence
  Description of Artificial Sequence: Synthetic oligonucleotide
gcagugggugcccggcugu

SEQ ID NO: 2089892 - RNA, 19 nt, Artificial Sequence
  Description of Artificial Sequence: Synthetic oligonucleotide
ccuggacugccuuggaauu

SEQ ID NO: 2089893 - RNA, 19 nt, Artificial Sequence
  Description of Artificial Sequence: Synthetic oligonucleotide
cccugucugagugggcuga

SEQ ID NO: 2089894 - RNA, 19 nt, Artificial Sequence
  Description of Artificial Sequence: Synthetic oligonucleotide
gcgcuccaagagugcgggc

SEQ ID NO: 2089895 - RNA, 19 nt, Artificial Sequence
  Description of Artificial Sequence: Synthetic oligonucleotide
cagcugccgaucccacgua

SEQ ID NO: 2089896 - RNA, 19 nt, Artificial Sequence
  Description of Artificial Sequence: Synthetic oligonucleotide
gccaugcacggcauagggu

SEQ ID NO: 2089897 - RNA, 19 nt, Artificial Sequence
  Description of Artificial Sequence: Synthetic oligonucleotide
gugcccggcuguugucacu

SEQ ID NO: 2089898 - RNA, 19 nt, Artificial Sequence
  Description of Artificial Sequence: Synthetic oligonucleotide
ggccgcagagaagaugaau

SEQ ID NO: 2089899 - RNA, 19 nt, Artificial Sequence
  Description of Artificial Sequence: Synthetic oligonucleotide
cacguagugccgggucgua

SEQ ID NO: 2089900 - RNA, 19 nt, Artificial Sequence
  Description of Artificial Sequence: Synthetic oligonucleotide
gcugccgaucccacguagu

SEQ ID NO: 2089901 - RNA, 19 nt, Artificial Sequence
  Description of Artificial Sequence: Synthetic oligonucleotide
gccugacuugccugcugcu

SEQ ID NO: 2089902 - RNA, 19 nt, Artificial Sequence
  Description of Artificial Sequence: Synthetic oligonucleotide
  modified_base (8)..(8): a, c, u, g, unknown or other
gcucccgnuccaucaugau

SEQ ID NO: 2089903 - RNA, 19 nt, Artificial Sequence
  Description of Artificial Sequence: Synthetic oligonucleotide
cggcugugauagguacugc

SEQ ID NO: 2089904 - RNA, 19 nt, Artificial Sequence
  Description of Artificial Sequence: Synthetic oligonucleotide
ccccuggacugccuuggaa

SEQ ID NO: 2089905 - RNA, 19 nt, Artificial Sequence
  Description of Artificial Sequence: Synthetic oligonucleotide
ccgugugaacagucaggcu

SEQ ID NO: 2089906 - RNA, 19 nt, Artificial Sequence
  Description of Artificial Sequence: Synthetic oligonucleotide
cguggauuuuggcuguguu

SEQ ID NO: 2089907 - RNA, 19 nt, Artificial Sequence
  Description of Artificial Sequence: Synthetic oligonucleotide
gcccggcuguugucacuga

SEQ ID NO: 2089908 - RNA, 19 nt, Artificial Sequence
  Description of Artificial Sequence: Synthetic oligonucleotide
ccugggcgguuguguccuc

SEQ ID NO: 2089909 - RNA, 19 nt, Artificial Sequence
  Description of Artificial Sequence: Synthetic oligonucleotide
ccaagagugcgggcauggu

SEQ ID NO: 2089910 - RNA, 19 nt, Artificial Sequence
  Description of Artificial Sequence: Synthetic oligonucleotide
gugcgggcauggugcuguu

SEQ ID NO: 2089911 - RNA, 19 nt, Artificial Sequence
  Description of Artificial Sequence: Synthetic oligonucleotide
cagugggugcccggcuguu

SEQ ID NO: 2089912 - RNA, 19 nt, Artificial Sequence
  Description of Artificial Sequence: Synthetic oligonucleotide
cgucuccguuucucuucuu

SEQ ID NO: 2089913 - RNA, 19 nt, Artificial Sequence
  Description of Artificial Sequence: Synthetic oligonucleotide
  modified_base (1)..(1): a, c, u, g, unknown or other
nuccaucaugaugugccug

SEQ ID NO: 2089914 - RNA, 19 nt, Artificial Sequence
  Description of Artificial Sequence: Synthetic oligonucleotide
aaaguuuaacccuuaaugu

SEQ ID NO: 2089915 - RNA, 19 nt, Artificial Sequence
  Description of Artificial Sequence: Synthetic oligonucleotide
uacaucauagaauugauac

SEQ ID NO: 2089916 - RNA, 19 nt, Artificial Sequence
  Description of Artificial Sequence: Synthetic oligonucleotide
ucaaaugcagaaaauucgg

SEQ ID NO: 2089917 - RNA, 19 nt, Artificial Sequence
  Description of Artificial Sequence: Synthetic oligonucleotide
acugugaggagauacagcg

SEQ ID NO: 2089918 - RNA, 19 nt, Artificial Sequence
  Description of Artificial Sequence: Synthetic oligonucleotide
auuuauaucaaaucaguga

SEQ ID NO: 2089919 - RNA, 19 nt, Artificial Sequence
  Description of Artificial Sequence: Synthetic oligonucleotide
aacagcagaggguuuaaac

SEQ ID NO: 2089920 - RNA, 19 nt, Artificial Sequence
  Description of Artificial Sequence: Synthetic oligonucleotide
auagaauugauacagcaga

SEQ ID NO: 2089921 - RNA, 19 nt, Artificial Sequence
  Description of Artificial Sequence: Synthetic oligonucleotide
aauucgggaucuuuaaaag

SEQ ID NO: 2089922 - RNA, 19 nt, Artificial Sequence
  Description of Artificial Sequence: Synthetic oligonucleotide
uuuaaaagcucuagguucc

SEQ ID NO: 2089923 - RNA, 19 nt, Artificial Sequence
  Description of Artificial Sequence: Synthetic oligonucleotide
acaggguaaacacugggcc

SEQ ID NO: 2089924 - RNA, 19 nt, Artificial Sequence
  Description of Artificial Sequence: Synthetic oligonucleotide
uuucaugccagauuuaaca

SEQ ID NO: 2089925 - RNA, 19 nt, Artificial Sequence
  Description of Artificial Sequence: Synthetic oligonucleotide
cucaauuggaaaaugcucc

SEQ ID NO: 2089926 - RNA, 19 nt, Artificial Sequence
  Description of Artificial Sequence: Synthetic oligonucleotide
auagucauaguucugccuc

SEQ ID NO: 2089927 - RNA, 19 nt, Artificial Sequence
  Description of Artificial Sequence: Synthetic oligonucleotide
aaaugcagaaaauucggga

SEQ ID NO: 2089928 - RNA, 19 nt, Artificial Sequence
  Description of Artificial Sequence: Synthetic oligonucleotide
agauucuuuguacugagag

SEQ ID NO: 2089929 - RNA, 19 nt, Artificial Sequence
  Description of Artificial Sequence: Synthetic oligonucleotide
uuaauguuaccacucgugc

SEQ ID NO: 2089930 - RNA, 19 nt, Artificial Sequence
  Description of Artificial Sequence: Synthetic oligonucleotide
ucacagugccuuuugaucg

SEQ ID NO: 2089931 - RNA, 19 nt, Artificial Sequence
  Description of Artificial Sequence: Synthetic oligonucleotide
cuugaguugaacaaugcac

SEQ ID NO: 2089932 - RNA, 19 nt, Artificial Sequence
  Description of Artificial Sequence: Synthetic oligonucleotide
ugggguuucgaaccgaugg

SEQ ID NO: 2089933 - RNA, 19 nt, Artificial Sequence
  Description of Artificial Sequence: Synthetic oligonucleotide
auugugagcacaucagugg

SEQ ID NO: 2089934 - RNA, 19 nt, Artificial Sequence
  Description of Artificial Sequence: Synthetic oligonucleotide
gaauugauacagcagacac

SEQ ID NO: 2089935 - RNA, 19 nt, Artificial Sequence
  Description of Artificial Sequence: Synthetic oligonucleotide
aauuggaaaaugcuccuca

SEQ ID NO: 2089936 - RNA, 19 nt, Artificial Sequence
  Description of Artificial Sequence: Synthetic oligonucleotide
uuuuccaagacucauggua

SEQ ID NO: 2089937 - RNA, 19 nt, Artificial Sequence
  Description of Artificial Sequence: Synthetic oligonucleotide
auucgggaucuuuaaaagc

SEQ ID NO: 2089938 - RNA, 19 nt, Artificial Sequence
  Description of Artificial Sequence: Synthetic oligonucleotide
caucauagaauugauacag

SEQ ID NO: 2089939 - RNA, 19 nt, Artificial Sequence
  Description of Artificial Sequence: Synthetic oligonucleotide
uugaguugaacaaugcacu

SEQ ID NO: 2089940 - RNA, 19 nt, Artificial Sequence
  Description of Artificial Sequence: Synthetic oligonucleotide
ugugaggagauacagcgca

SEQ ID NO: 2089941 - RNA, 19 nt, Artificial Sequence
  Description of Artificial Sequence: Synthetic oligonucleotide
uguaucaaccucaauugga

SEQ ID NO: 2089942 - RNA, 19 nt, Artificial Sequence
  Description of Artificial Sequence: Synthetic oligonucleotide
ugguauaggacugugagga

SEQ ID NO: 2089943 - RNA, 19 nt, Artificial Sequence
  Description of Artificial Sequence: Synthetic oligonucleotide
auugauacagcagacaccu

SEQ ID NO: 2089944 - RNA, 19 nt, Artificial Sequence
  Description of Artificial Sequence: Synthetic oligonucleotide
uccuacaaguuuaauaagu

SEQ ID NO: 2089945 - RNA, 19 nt, Artificial Sequence
  Description of Artificial Sequence: Synthetic oligonucleotide
gucaaaugcagaaaauucg

SEQ ID NO: 2089946 - RNA, 19 nt, Artificial Sequence
  Description of Artificial Sequence: Synthetic oligonucleotide
uuaauggccguucacuucu

SEQ ID NO: 2089947 - RNA, 19 nt, Artificial Sequence
  Description of Artificial Sequence: Synthetic oligonucleotide
caugguauaggacugugag

SEQ ID NO: 2089948 - RNA, 19 nt, Artificial Sequence
  Description of Artificial Sequence: Synthetic oligonucleotide
ucuucuccguccuaggagg

SEQ ID NO: 2089949 - RNA, 19 nt, Artificial Sequence
  Description of Artificial Sequence: Synthetic oligonucleotide
gacuaaauacaucauagaa

SEQ ID NO: 2089950 - RNA, 19 nt, Artificial Sequence
  Description of Artificial Sequence: Synthetic oligonucleotide
ugguuuaaauuucaugcca

SEQ ID NO: 2089951 - RNA, 19 nt, Artificial Sequence
  Description of Artificial Sequence: Synthetic oligonucleotide
gaaccgaugguccugauga

SEQ ID NO: 2089952 - RNA, 19 nt, Artificial Sequence
  Description of Artificial Sequence: Synthetic oligonucleotide
gugacuaaauacaucauag

SEQ ID NO: 2089953 - RNA, 19 nt, Artificial Sequence
  Description of Artificial Sequence: Synthetic oligonucleotide
agacucaugguauaggacu

SEQ ID NO: 2089954 - RNA, 19 nt, Artificial Sequence
  Description of Artificial Sequence: Synthetic oligonucleotide
cauagaauugauacagcag

SEQ ID NO: 2089955 - RNA, 19 nt, Artificial Sequence
  Description of Artificial Sequence: Synthetic oligonucleotide
uuuugaucgccacaggagu

SEQ ID NO: 2089956 - RNA, 19 nt, Artificial Sequence
  Description of Artificial Sequence: Synthetic oligonucleotide
aaccucaauuggaaaaugc

SEQ ID NO: 2089957 - RNA, 19 nt, Artificial Sequence
  Description of Artificial Sequence: Synthetic oligonucleotide
aaguuuaacccuuaauguu

SEQ ID NO: 2089958 - RNA, 19 nt, Artificial Sequence
  Description of Artificial Sequence: Synthetic oligonucleotide
aaaugcuccucacauuucu

SEQ ID NO: 2089959 - RNA, 19 nt, Artificial Sequence
  Description of Artificial Sequence: Synthetic oligonucleotide
uucccauacauacucuucc

SEQ ID NO: 2089960 - RNA, 19 nt, Artificial Sequence
  Description of Artificial Sequence: Synthetic oligonucleotide
ugcaugguugucuaaauuc

SEQ ID NO: 2089961 - RNA, 19 nt, Artificial Sequence
  Description of Artificial Sequence: Synthetic oligonucleotide
auaaguuucuucuuugcau

SEQ ID NO: 2089962 - RNA, 19 nt, Artificial Sequence
  Description of Artificial Sequence: Synthetic oligonucleotide
ucuugaguugaacaaugca

SEQ ID NO: 2089963 - RNA, 19 nt, Artificial Sequence
  Description of Artificial Sequence: Synthetic oligonucleotide
uauaucaaaucagugacua

SEQ ID NO: 2089964 - RNA, 19 nt, Artificial Sequence
  Description of Artificial Sequence: Synthetic oligonucleotide
agcuguaucaaccucaauu

SEQ ID NO: 2089965 - RNA, 19 nt, Artificial Sequence
  Description of Artificial Sequence: Synthetic oligonucleotide
auccgaagcucucaucugc

SEQ ID NO: 2089966 - RNA, 19 nt, Artificial Sequence
  Description of Artificial Sequence: Synthetic oligonucleotide
uucuggaugccgaacgcgg

SEQ ID NO: 2089967 - RNA, 19 nt, Artificial Sequence
  Description of Artificial Sequence: Synthetic oligonucleotide
ugcaguaccgaucuccuac

SEQ ID NO: 2089968 - RNA, 19 nt, Artificial Sequence
  Description of Artificial Sequence: Synthetic oligonucleotide
uuacuggauaccccauucg

SEQ ID NO: 2089969 - RNA, 19 nt, Artificial Sequence
  Description of Artificial Sequence: Synthetic oligonucleotide
ucauucuugaguugaacaa

SEQ ID NO: 2089970 - RNA, 19 nt, Artificial Sequence
  Description of Artificial Sequence: Synthetic oligonucleotide
cucacauuucucaucagug

SEQ ID NO: 2089971 - RNA, 19 nt, Artificial Sequence
  Description of Artificial Sequence: Synthetic oligonucleotide
caaaugcagaaaauucggg

SEQ ID NO: 2089972 - RNA, 19 nt, Artificial Sequence
  Description of Artificial Sequence: Synthetic oligonucleotide
ugguugucuaaauucaaac

SEQ ID NO: 2089973 - RNA, 19 nt, Artificial Sequence
  Description of Artificial Sequence: Synthetic oligonucleotide
uuuacuggauaccccauuc

SEQ ID NO: 2089974 - RNA, 19 nt, Artificial Sequence
  Description of Artificial Sequence: Synthetic oligonucleotide
ugcuuugggguuucgaacc

SEQ ID NO: 2089975 - RNA, 19 nt, Artificial Sequence
  Description of Artificial Sequence: Synthetic oligonucleotide
uuaacagucucuucacaga

SEQ ID NO: 2089976 - RNA, 19 nt, Artificial Sequence
  Description of Artificial Sequence: Synthetic oligonucleotide
uuauaucaaaucagugacu

SEQ ID NO: 2089977 - RNA, 19 nt, Artificial Sequence
  Description of Artificial Sequence: Synthetic oligonucleotide
aacccuuaauguuaccacu

SEQ ID NO: 2089978 - RNA, 19 nt, Artificial Sequence
  Description of Artificial Sequence: Synthetic oligonucleotide
uuuccaagacucaugguau

SEQ ID NO: 2089979 - RNA, 19 nt, Artificial Sequence
  Description of Artificial Sequence: Synthetic oligonucleotide
uuaaacggcgcugcgacag

SEQ ID NO: 2089980 - RNA, 19 nt, Artificial Sequence
  Description of Artificial Sequence: Synthetic oligonucleotide
agauacagcgcauagucau

SEQ ID NO: 2089981 - RNA, 19 nt, Artificial Sequence
  Description of Artificial Sequence: Synthetic oligonucleotide
uuuguacugagagagguuc

SEQ ID NO: 2089982 - RNA, 19 nt, Artificial Sequence
  Description of Artificial Sequence: Synthetic oligonucleotide
ucuuuuagagcuucacagu

SEQ ID NO: 2089983 - RNA, 19 nt, Artificial Sequence
  Description of Artificial Sequence: Synthetic oligonucleotide
ugacuaaauacaucauaga

SEQ ID NO: 2089984 - RNA, 19 nt, Artificial Sequence
  Description of Artificial Sequence: Synthetic oligonucleotide
aaaauucgggaucuuuaaa

SEQ ID NO: 2089985 - RNA, 19 nt, Artificial Sequence
  Description of Artificial Sequence: Synthetic oligonucleotide
ugaaaguuuaacccuuaau

SEQ ID NO: 2089986 - RNA, 19 nt, Artificial Sequence
  Description of Artificial Sequence: Synthetic oligonucleotide
agagguucuccucauucuc

SEQ ID NO: 2089987 - RNA, 19 nt, Artificial Sequence
  Description of Artificial Sequence: Synthetic oligonucleotide
ucuuuguacugagagaggu

SEQ ID NO: 2089988 - RNA, 19 nt, Artificial Sequence
  Description of Artificial Sequence: Synthetic oligonucleotide
guuuaaacggcgcugcgac

SEQ ID NO: 2089989 - RNA, 19 nt, Artificial Sequence
  Description of Artificial Sequence: Synthetic oligonucleotide
agcgcauagucauaguucu

SEQ ID NO: 2089990 - RNA, 19 nt, Artificial Sequence
  Description of Artificial Sequence: Synthetic oligonucleotide
aagacucaugguauaggac

SEQ ID NO: 2089991 - RNA, 19 nt, Artificial Sequence
  Description of Artificial Sequence: Synthetic oligonucleotide
aguucugccucuugagagg

SEQ ID NO: 2089992 - RNA, 19 nt, Artificial Sequence
  Description of Artificial Sequence: Synthetic oligonucleotide
gaagcucucaucugcagca

SEQ ID NO: 2089993 - RNA, 19 nt, Artificial Sequence
  Description of Artificial Sequence: Synthetic oligonucleotide
ucaauuggaaaaugcuccu

SEQ ID NO: 2089994 - RNA, 19 nt, Artificial Sequence
  Description of Artificial Sequence: Synthetic oligonucleotide
uaacccuuaauguuaccac

SEQ ID NO: 2089995 - RNA, 19 nt, Artificial Sequence
  Description of Artificial Sequence: Synthetic oligonucleotide
uaauguuaccacucgugcu

SEQ ID NO: 2089996 - RNA, 19 nt, Artificial Sequence
  Description of Artificial Sequence: Synthetic oligonucleotide
acaucauagaauugauaca

SEQ ID NO: 2089997 - RNA, 19 nt, Artificial Sequence
  Description of Artificial Sequence: Synthetic oligonucleotide
aucaaccucaauuggaaaa

SEQ ID NO: 2089998 - RNA, 19 nt, Artificial Sequence
  Description of Artificial Sequence: Synthetic oligonucleotide
uggucaacauccaucuucu

SEQ ID NO: 2089999 - RNA, 19 nt, Artificial Sequence
  Description of Artificial Sequence: Synthetic oligonucleotide
uuuaaauuucaugccagau

SEQ ID NO: 2090000 - RNA, 19 nt, Artificial Sequence
  Description of Artificial Sequence: Synthetic oligonucleotide
uacuggauaccccauucga

SEQ ID NO: 2090001 - RNA, 19 nt, Artificial Sequence
  Description of Artificial Sequence: Synthetic oligonucleotide
uucuuuguacugagagagg

SEQ ID NO: 2090002 - RNA, 19 nt, Artificial Sequence
  Description of Artificial Sequence: Synthetic oligonucleotide
cucggugccacacugcugc

SEQ ID NO: 2090003 - RNA, 19 nt, Artificial Sequence
  Description of Artificial Sequence: Synthetic oligonucleotide
agugccuuuugaucgccac

SEQ ID NO: 2090004 - RNA, 19 nt, Artificial Sequence
  Description of Artificial Sequence: Synthetic oligonucleotide
ucuagguuccccuccuuug

SEQ ID NO: 2090005 - RNA, 19 nt, Artificial Sequence
  Description of Artificial Sequence: Synthetic oligonucleotide
aggguuuaaacggcgcugc

SEQ ID NO: 2090006 - RNA, 19 nt, Artificial Sequence
  Description of Artificial Sequence: Synthetic oligonucleotide
ggagauacagcgcauaguc

SEQ ID NO: 2090007 - RNA, 19 nt, Artificial Sequence
  Description of Artificial Sequence: Synthetic oligonucleotide
gaggagauacagcgcauag

SEQ ID NO: 2090008 - RNA, 19 nt, Artificial Sequence
  Description of Artificial Sequence: Synthetic oligonucleotide
cuguaucaaccucaauugg

SEQ ID NO: 2090009 - RNA, 19 nt, Artificial Sequence
  Description of Artificial Sequence: Synthetic oligonucleotide
agugcagccggccacucag

SEQ ID NO: 2090010 - RNA, 19 nt, Artificial Sequence
  Description of Artificial Sequence: Synthetic oligonucleotide
aauggccguucacuucugg

SEQ ID NO: 2090011 - RNA, 19 nt, Artificial Sequence
  Description of Artificial Sequence: Synthetic oligonucleotide
acacauagucagcuguauc

SEQ ID NO: 2090012 - RNA, 19 nt, Artificial Sequence
  Description of Artificial Sequence: Synthetic oligonucleotide
ucuggaugccgaacgcggg

SEQ ID NO: 2090013 - RNA, 19 nt, Artificial Sequence
  Description of Artificial Sequence: Synthetic oligonucleotide
uugagagggcaucugucug

SEQ ID NO: 2090014 - RNA, 19 nt, Artificial Sequence
  Description of Artificial Sequence: Synthetic oligonucleotide
uaccacucgugcuuugggg

SEQ ID NO: 2090015 - RNA, 19 nt, Artificial Sequence
  Description of Artificial Sequence: Synthetic oligonucleotide
uucgaaugggcagaggaac

SEQ ID NO: 2090016 - RNA, 19 nt, Artificial Sequence
  Description of Artificial Sequence: Synthetic oligonucleotide
uccugaugacacauaguca

SEQ ID NO: 2090017 - RNA, 19 nt, Artificial Sequence
  Description of Artificial Sequence: Synthetic oligonucleotide
ugaugacacauagucagcu

SEQ ID NO: 2090018 - RNA, 19 nt, Artificial Sequence
  Description of Artificial Sequence: Synthetic oligonucleotide
cuucuuuacuggauacccc

SEQ ID NO: 2090019 - RNA, 19 nt, Artificial Sequence
  Description of Artificial Sequence: Synthetic oligonucleotide
uuucccauacauacucuuc

SEQ ID NO: 2090020 - RNA, 19 nt, Artificial Sequence
  Description of Artificial Sequence: Synthetic oligonucleotide
uggauaccccauucgaaug

SEQ ID NO: 2090021 - RNA, 19 nt, Artificial Sequence
  Description of Artificial Sequence: Synthetic oligonucleotide
cauucgaaugggcagagga

SEQ ID NO: 2090022 - RNA, 19 nt, Artificial Sequence
  Description of Artificial Sequence: Synthetic oligonucleotide
uucuucaguuuuccaagac

SEQ ID NO: 2090023 - RNA, 19 nt, Artificial Sequence
  Description of Artificial Sequence: Synthetic oligonucleotide
aggagcuguuuucccauac

SEQ ID NO: 2090024 - RNA, 19 nt, Artificial Sequence
  Description of Artificial Sequence: Synthetic oligonucleotide
uuugaucgccacaggaguc

SEQ ID NO: 2090025 - RNA, 19 nt, Artificial Sequence
  Description of Artificial Sequence: Synthetic oligonucleotide
ucuuaauggccguucacuu

SEQ ID NO: 2090026 - RNA, 19 nt, Artificial Sequence
  Description of Artificial Sequence: Synthetic oligonucleotide
guaaacacugggccagucc

SEQ ID NO: 2090027 - RNA, 19 nt, Artificial Sequence
  Description of Artificial Sequence: Synthetic oligonucleotide
ucaugguauaggacuguga

SEQ ID NO: 2090028 - RNA, 19 nt, Artificial Sequence
  Description of Artificial Sequence: Synthetic oligonucleotide
aaccgaugguccugaugac

SEQ ID NO: 2090029 - RNA, 19 nt, Artificial Sequence
  Description of Artificial Sequence: Synthetic oligonucleotide
gacaggguaaacacugggc

SEQ ID NO: 2090030 - RNA, 19 nt, Artificial Sequence
  Description of Artificial Sequence: Synthetic oligonucleotide
ucaaccucaauuggaaaau

SEQ ID NO: 2090031 - RNA, 19 nt, Artificial Sequence
  Description of Artificial Sequence: Synthetic oligonucleotide
agcagaggguuuaaacggc

SEQ ID NO: 2090032 - RNA, 19 nt, Artificial Sequence
  Description of Artificial Sequence: Synthetic oligonucleotide
auuucaugccagauuuaac

SEQ ID NO: 2090033 - RNA, 19 nt, Artificial Sequence
  Description of Artificial Sequence: Synthetic oligonucleotide
gauaccccauucgaauggg

SEQ ID NO: 2090034 - RNA, 19 nt, Artificial Sequence
  Description of Artificial Sequence: Synthetic oligonucleotide
gguuuaaauuucaugccag

SEQ ID NO: 2090035 - RNA, 19 nt, Artificial Sequence
  Description of Artificial Sequence: Synthetic oligonucleotide
caagacucaugguauagga

SEQ ID NO: 2090036 - RNA, 19 nt, Artificial Sequence
  Description of Artificial Sequence: Synthetic oligonucleotide
aguuuaacccuuaauguua

SEQ ID NO: 2090037 - RNA, 19 nt, Artificial Sequence
  Description of Artificial Sequence: Synthetic oligonucleotide
uagucagcuguaucaaccu

SEQ ID NO: 2090038 - RNA, 19 nt, Artificial Sequence
  Description of Artificial Sequence: Synthetic oligonucleotide
agaauugauacagcagaca

SEQ ID NO: 2090039 - RNA, 19 nt, Artificial Sequence
  Description of Artificial Sequence: Synthetic oligonucleotide
agaggguuuaaacggcgcu

SEQ ID NO: 2090040 - RNA, 19 nt, Artificial Sequence
  Description of Artificial Sequence: Synthetic oligonucleotide
ggauaccccauucgaaugg

SEQ ID NO: 2090041 - RNA, 19 nt, Artificial Sequence
  Description of Artificial Sequence: Synthetic oligonucleotide
cacaucaguggucuugcag

SEQ ID NO: 2090042 - RNA, 19 nt, Artificial Sequence
  Description of Artificial Sequence: Synthetic oligonucleotide
ggugauugugagcacauca

SEQ ID NO: 2090043 - RNA, 19 nt, Artificial Sequence
  Description of Artificial Sequence: Synthetic oligonucleotide
auacagcgcauagucauag

SEQ ID NO: 2090044 - RNA, 19 nt, Artificial Sequence
  Description of Artificial Sequence: Synthetic oligonucleotide
ggaucuuuaaaagcucuag

SEQ ID NO: 2090045 - RNA, 19 nt, Artificial Sequence
  Description of Artificial Sequence: Synthetic oligonucleotide
uggucuugcaguaccgauc

SEQ ID NO: 2090046 - RNA, 19 nt, Artificial Sequence
  Description of Artificial Sequence: Synthetic oligonucleotide
ugagagggcaucugucugu

SEQ ID NO: 2090047 - RNA, 19 nt, Artificial Sequence
  Description of Artificial Sequence: Synthetic oligonucleotide
gacucaugguauaggacug

SEQ ID NO: 2090048 - RNA, 19 nt, Artificial Sequence
  Description of Artificial Sequence: Synthetic oligonucleotide
acccuuaauguuaccacuc

SEQ ID NO: 2090049 - RNA, 19 nt, Artificial Sequence
  Description of Artificial Sequence: Synthetic oligonucleotide
agaggaacagcagaggguu

SEQ ID NO: 2090050 - RNA, 19 nt, Artificial Sequence
  Description of Artificial Sequence: Synthetic oligonucleotide
cagugucuagugcagccgg

SEQ ID NO: 2090051 - RNA, 19 nt, Artificial Sequence
  Description of Artificial Sequence: Synthetic oligonucleotide
cagcgcauagucauaguuc

SEQ ID NO: 2090052 - RNA, 19 nt, Artificial Sequence
  Description of Artificial Sequence: Synthetic oligonucleotide
ugaguugaacaaugcacuu

SEQ ID NO: 2090053 - RNA, 19 nt, Artificial Sequence
  Description of Artificial Sequence: Synthetic oligonucleotide
caguuuuccaagacucaug

SEQ ID NO: 2090054 - RNA, 19 nt, Artificial Sequence
  Description of Artificial Sequence: Synthetic oligonucleotide
accacucgugcuuuggggu

SEQ ID NO: 2090055 - RNA, 19 nt, Artificial Sequence
  Description of Artificial Sequence: Synthetic oligonucleotide
accucaauuggaaaaugcu

SEQ ID NO: 2090056 - RNA, 19 nt, Artificial Sequence
  Description of Artificial Sequence: Synthetic oligonucleotide
ucgggaucuuuaaaagcuc

SEQ ID NO: 2090057 - RNA, 19 nt, Artificial Sequence
  Description of Artificial Sequence: Synthetic oligonucleotide
ugucuagugcagccggcca

SEQ ID NO: 2090058 - RNA, 19 nt, Artificial Sequence
  Description of Artificial Sequence: Synthetic oligonucleotide
agaaaauucgggaucuuua

SEQ ID NO: 2090059 - RNA, 19 nt, Artificial Sequence
  Description of Artificial Sequence: Synthetic oligonucleotide
uagguuccccuccuuugcc

SEQ ID NO: 2090060 - RNA, 19 nt, Artificial Sequence
  Description of Artificial Sequence: Synthetic oligonucleotide
ugaggagcuguuuucccau

SEQ ID NO: 2090061 - RNA, 19 nt, Artificial Sequence
  Description of Artificial Sequence: Synthetic oligonucleotide
ugcucggugccacacugcu

SEQ ID NO: 2090062 - RNA, 19 nt, Artificial Sequence
  Description of Artificial Sequence: Synthetic oligonucleotide
gaggguuuaaacggcgcug

SEQ ID NO: 2090063 - RNA, 19 nt, Artificial Sequence
  Description of Artificial Sequence: Synthetic oligonucleotide
uuuaaacggcgcugcgaca

SEQ ID NO: 2090064 - RNA, 19 nt, Artificial Sequence
  Description of Artificial Sequence: Synthetic oligonucleotide
guucugccucuugagaggg

SEQ ID NO: 2090065 - RNA, 19 nt, Artificial Sequence
  Description of Artificial Sequence: Synthetic oligonucleotide
uagucauaguucugccucu

SEQ ID NO: 2090066 - RNA, 19 nt, Artificial Sequence
  Description of Artificial Sequence: Synthetic oligonucleotide
uugaucgccacaggaguca

SEQ ID NO: 2090067 - RNA, 19 nt, Artificial Sequence
  Description of Artificial Sequence: Synthetic oligonucleotide
cuucuggaugccgaacgcg

SEQ ID NO: 2090068 - RNA, 19 nt, Artificial Sequence
  Description of Artificial Sequence: Synthetic oligonucleotide
agcugcagcgccgcgaccg

SEQ ID NO: 2090069 - RNA, 19 nt, Artificial Sequence
  Description of Artificial Sequence: Synthetic oligonucleotide
cguccuaggaggcagagcc

SEQ ID NO: 2090070 - RNA, 19 nt, Artificial Sequence
  Description of Artificial Sequence: Synthetic oligonucleotide
cuucuuaauggccguucac

SEQ ID NO: 2090071 - RNA, 19 nt, Artificial Sequence
  Description of Artificial Sequence: Synthetic oligonucleotide
cagaggguuuaaacggcgc

SEQ ID NO: 2090072 - RNA, 19 nt, Artificial Sequence
  Description of Artificial Sequence: Synthetic oligonucleotide
uguacugagagagguucuc

SEQ ID NO: 2090073 - RNA, 19 nt, Artificial Sequence
  Description of Artificial Sequence: Synthetic oligonucleotide
uucacuucuggaugccgaa

SEQ ID NO: 2090074 - RNA, 19 nt, Artificial Sequence
  Description of Artificial Sequence: Synthetic oligonucleotide
uugcaugguugucuaaauu

SEQ ID NO: 2090075 - RNA, 19 nt, Artificial Sequence
  Description of Artificial Sequence: Synthetic oligonucleotide
cugugaggagauacagcgc

SEQ ID NO: 2090076 - RNA, 19 nt, Artificial Sequence
  Description of Artificial Sequence: Synthetic oligonucleotide
uccuuugccaugggcacgc

SEQ ID NO: 2090077 - RNA, 19 nt, Artificial Sequence
  Description of Artificial Sequence: Synthetic oligonucleotide
gugcuuugggguuucgaac

SEQ ID NO: 2090078 - RNA, 19 nt, Artificial Sequence
  Description of Artificial Sequence: Synthetic oligonucleotide
uggccguucacuucuggau

SEQ ID NO: 2090079 - RNA, 19 nt, Artificial Sequence
  Description of Artificial Sequence: Synthetic oligonucleotide
guauaggacugugaggaga

SEQ ID NO: 2090080 - RNA, 19 nt, Artificial Sequence
  Description of Artificial Sequence: Synthetic oligonucleotide
uuucgaaccgaugguccug

SEQ ID NO: 2090081 - RNA, 19 nt, Artificial Sequence
  Description of Artificial Sequence: Synthetic oligonucleotide
ccauacauacucuuccaug

SEQ ID NO: 2090082 - RNA, 19 nt, Artificial Sequence
  Description of Artificial Sequence: Synthetic oligonucleotide
agugucuagugcagccggc

SEQ ID NO: 2090083 - RNA, 19 nt, Artificial Sequence
  Description of Artificial Sequence: Synthetic oligonucleotide
caguggucuugcaguaccg

SEQ ID NO: 2090084 - RNA, 19 nt, Artificial Sequence
  Description of Artificial Sequence: Synthetic oligonucleotide
uugggguuucgaaccgaug

SEQ ID NO: 2090085 - RNA, 19 nt, Artificial Sequence
  Description of Artificial Sequence: Synthetic oligonucleotide
acuugaaaguuuaacccuu

SEQ ID NO: 2090086 - RNA, 19 nt, Artificial Sequence
  Description of Artificial Sequence: Synthetic oligonucleotide
ugcagccggccacucagug

SEQ ID NO: 2090087 - RNA, 19 nt, Artificial Sequence
  Description of Artificial Sequence: Synthetic oligonucleotide
cuucaaccuccuugguccc

SEQ ID NO: 2090088 - RNA, 19 nt, Artificial Sequence
  Description of Artificial Sequence: Synthetic oligonucleotide
gaggcgaagcugcgcaggc

SEQ ID NO: 2090089 - RNA, 19 nt, Artificial Sequence
  Description of Artificial Sequence: Synthetic oligonucleotide
cuggaugccgaacgcgggc

SEQ ID NO: 2090090 - RNA, 19 nt, Artificial Sequence
  Description of Artificial Sequence: Synthetic oligonucleotide
aucgccacaggagucaaau

SEQ ID NO: 2090091 - RNA, 19 nt, Artificial Sequence
  Description of Artificial Sequence: Synthetic oligonucleotide
accgaucuccuacaaguuu

SEQ ID NO: 2090092 - RNA, 19 nt, Artificial Sequence
  Description of Artificial Sequence: Synthetic oligonucleotide
auaccccauucgaaugggc

SEQ ID NO: 2090093 - RNA, 19 nt, Artificial Sequence
  Description of Artificial Sequence: Synthetic oligonucleotide
gguuucgaaccgauggucc

SEQ ID NO: 2090094 - RNA, 19 nt, Artificial Sequence
  Description of Artificial Sequence: Synthetic oligonucleotide
cauccgaagcucucaucug

SEQ ID NO: 2090095 - RNA, 19 nt, Artificial Sequence
  Description of Artificial Sequence: Synthetic oligonucleotide
uucgaaccgaugguccuga

SEQ ID NO: 2090096 - RNA, 19 nt, Artificial Sequence
  Description of Artificial Sequence: Synthetic oligonucleotide
ucuagugcagccggccacu

SEQ ID NO: 2090097 - RNA, 19 nt, Artificial Sequence
  Description of Artificial Sequence: Synthetic oligonucleotide
augcacuucugguagucuu

SEQ ID NO: 2090098 - RNA, 19 nt, Artificial Sequence
  Description of Artificial Sequence: Synthetic oligonucleotide
cauggcuggaggaggacga

SEQ ID NO: 2090099 - RNA, 19 nt, Artificial Sequence
  Description of Artificial Sequence: Synthetic oligonucleotide
cuuugccaugggcacgccc

SEQ ID NO: 2090100 - RNA, 19 nt, Artificial Sequence
  Description of Artificial Sequence: Synthetic oligonucleotide
caugguugucuaaauucaa

SEQ ID NO: 2090101 - RNA, 19 nt, Artificial Sequence
  Description of Artificial Sequence: Synthetic oligonucleotide
gagauacagcgcauaguca

SEQ ID NO: 2090102 - RNA, 19 nt, Artificial Sequence
  Description of Artificial Sequence: Synthetic oligonucleotide
cucaugguauaggacugug

SEQ ID NO: 2090103 - RNA, 19 nt, Artificial Sequence
  Description of Artificial Sequence: Synthetic oligonucleotide
uggaugccgaacgcgggcc

SEQ ID NO: 2090104 - RNA, 19 nt, Artificial Sequence
  Description of Artificial Sequence: Synthetic oligonucleotide
uuccaagacucaugguaua

SEQ ID NO: 2090105 - RNA, 19 nt, Artificial Sequence
  Description of Artificial Sequence: Synthetic oligonucleotide
agcucuagguuccccuccu

SEQ ID NO: 2090106 - RNA, 19 nt, Artificial Sequence
  Description of Artificial Sequence: Synthetic oligonucleotide
uaauggccguucacuucug

SEQ ID NO: 2090107 - RNA, 19 nt, Artificial Sequence
  Description of Artificial Sequence: Synthetic oligonucleotide
uaccgaucuccuacaaguu

SEQ ID NO: 2090108 - RNA, 19 nt, Artificial Sequence
  Description of Artificial Sequence: Synthetic oligonucleotide
cccuuaauguuaccacucg

SEQ ID NO: 2090109 - RNA, 19 nt, Artificial Sequence
  Description of Artificial Sequence: Synthetic oligonucleotide
augggcacgcccuucuuua

SEQ ID NO: 2090110 - RNA, 19 nt, Artificial Sequence
  Description of Artificial Sequence: Synthetic oligonucleotide
caaccucaauuggaaaaug

SEQ ID NO: 2090111 - RNA, 19 nt, Artificial Sequence
  Description of Artificial Sequence: Synthetic oligonucleotide
gagagggcaucugucugug

SEQ ID NO: 2090112 - RNA, 19 nt, Artificial Sequence
  Description of Artificial Sequence: Synthetic oligonucleotide
gcuuugggguuucgaaccg

SEQ ID NO: 2090113 - RNA, 19 nt, Artificial Sequence
  Description of Artificial Sequence: Synthetic oligonucleotide
aacgcgggccgccucucga

SEQ ID NO: 2090114 - RNA, 19 nt, Artificial Sequence
  Description of Artificial Sequence: Synthetic oligonucleotide
aggagauacagcgcauagu

SEQ ID NO: 2090115 - RNA, 19 nt, Artificial Sequence
  Description of Artificial Sequence: Synthetic oligonucleotide
augguugucuaaauucaaa

SEQ ID NO: 2090116 - RNA, 19 nt, Artificial Sequence
  Description of Artificial Sequence: Synthetic oligonucleotide
gucuagugcagccggccac

SEQ ID NO: 2090117 - RNA, 19 nt, Artificial Sequence
  Description of Artificial Sequence: Synthetic oligonucleotide
caucagugucuagugcagc

SEQ ID NO: 2090118 - RNA, 19 nt, Artificial Sequence
  Description of Artificial Sequence: Synthetic oligonucleotide
ugcugccauccgaagcucu

SEQ ID NO: 2090119 - RNA, 19 nt, Artificial Sequence
  Description of Artificial Sequence: Synthetic oligonucleotide
agagggcaucugucugugg

SEQ ID NO: 2090120 - RNA, 19 nt, Artificial Sequence
  Description of Artificial Sequence: Synthetic oligonucleotide
cuugaaaguuuaacccuua

SEQ ID NO: 2090121 - RNA, 19 nt, Artificial Sequence
  Description of Artificial Sequence: Synthetic oligonucleotide
acaccugguuuaaauuuca

SEQ ID NO: 2090122 - RNA, 19 nt, Artificial Sequence
  Description of Artificial Sequence: Synthetic oligonucleotide
ccgaugguccugaugacac

SEQ ID NO: 2090123 - RNA, 19 nt, Artificial Sequence
  Description of Artificial Sequence: Synthetic oligonucleotide
acuggauaccccauucgaa

SEQ ID NO: 2090124 - RNA, 19 nt, Artificial Sequence
  Description of Artificial Sequence: Synthetic oligonucleotide
ucgccacaggagucaaaug

SEQ ID NO: 2090125 - RNA, 19 nt, Artificial Sequence
  Description of Artificial Sequence: Synthetic oligonucleotide
uacagcgcauagucauagu

SEQ ID NO: 2090126 - RNA, 19 nt, Artificial Sequence
  Description of Artificial Sequence: Synthetic oligonucleotide
ggccguucacuucuggaug

SEQ ID NO: 2090127 - RNA, 19 nt, Artificial Sequence
  Description of Artificial Sequence: Synthetic oligonucleotide
ugccauccgaagcucucau

SEQ ID NO: 2090128 - RNA, 19 nt, Artificial Sequence
  Description of Artificial Sequence: Synthetic oligonucleotide
uccuaggaggcagagccuu

SEQ ID NO: 2090129 - RNA, 19 nt, Artificial Sequence
  Description of Artificial Sequence: Synthetic oligonucleotide
accgaugguccugaugaca

SEQ ID NO: 2090130 - RNA, 19 nt, Artificial Sequence
  Description of Artificial Sequence: Synthetic oligonucleotide
gcagaggguuuaaacggcg

SEQ ID NO: 2090131 - RNA, 19 nt, Artificial Sequence
  Description of Artificial Sequence: Synthetic oligonucleotide
aguggucuugcaguaccga

SEQ ID NO: 2090132 - RNA, 19 nt, Artificial Sequence
  Description of Artificial Sequence: Synthetic oligonucleotide
cauagucauaguucugccu

SEQ ID NO: 2090133 - RNA, 19 nt, Artificial Sequence
  Description of Artificial Sequence: Synthetic oligonucleotide
gcaugguugucuaaauuca

SEQ ID NO: 2090134 - RNA, 19 nt, Artificial Sequence
  Description of Artificial Sequence: Synthetic oligonucleotide
cuggauaccccauucgaau

SEQ ID NO: 2090135 - RNA, 19 nt, Artificial Sequence
  Description of Artificial Sequence: Synthetic oligonucleotide
ggucuugcaguaccgaucu

SEQ ID NO: 2090136 - RNA, 19 nt, Artificial Sequence
  Description of Artificial Sequence: Synthetic oligonucleotide
uccguccuaggaggcagag

SEQ ID NO: 2090137 - RNA, 19 nt, Artificial Sequence
  Description of Artificial Sequence: Synthetic oligonucleotide
ggguuuaaacggcgcugcg

SEQ ID NO: 2090138 - RNA, 19 nt, Artificial Sequence
  Description of Artificial Sequence: Synthetic oligonucleotide
guugaacaaugcacuucug

SEQ ID NO: 2090139 - RNA, 19 nt, Artificial Sequence
  Description of Artificial Sequence: Synthetic oligonucleotide
guuucgaaccgaugguccu

SEQ ID NO: 2090140 - RNA, 19 nt, Artificial Sequence
  Description of Artificial Sequence: Synthetic oligonucleotide
ccaagacucaugguauagg

SEQ ID NO: 2090141 - RNA, 19 nt, Artificial Sequence
  Description of Artificial Sequence: Synthetic oligonucleotide
cuccuuugccaugggcacg

SEQ ID NO: 2090142 - RNA, 19 nt, Artificial Sequence
  Description of Artificial Sequence: Synthetic oligonucleotide
cuugcaguaccgaucuccu

SEQ ID NO: 2090143 - RNA, 19 nt, Artificial Sequence
  Description of Artificial Sequence: Synthetic oligonucleotide
acucaugguauaggacugu

SEQ ID NO: 2090144 - RNA, 19 nt, Artificial Sequence
  Description of Artificial Sequence: Synthetic oligonucleotide
gaacgcgggccgccucucg

SEQ ID NO: 2090145 - RNA, 19 nt, Artificial Sequence
  Description of Artificial Sequence: Synthetic oligonucleotide
gaugguccugaugacacau

SEQ ID NO: 2090146 - RNA, 19 nt, Artificial Sequence
  Description of Artificial Sequence: Synthetic oligonucleotide
cuaggaggcagagccuuuc

SEQ ID NO: 2090147 - RNA, 19 nt, Artificial Sequence
  Description of Artificial Sequence: Synthetic oligonucleotide
gauacagcgcauagucaua

SEQ ID NO: 2090148 - RNA, 19 nt, Artificial Sequence
  Description of Artificial Sequence: Synthetic oligonucleotide
gaugccgaacgcgggccgc

SEQ ID NO: 2090149 - RNA, 19 nt, Artificial Sequence
  Description of Artificial Sequence: Synthetic oligonucleotide
ucucgcccucauucuugag

SEQ ID NO: 2090150 - RNA, 19 nt, Artificial Sequence
  Description of Artificial Sequence: Synthetic oligonucleotide
augccgaacgcgggccgcc

SEQ ID NO: 2090151 - RNA, 19 nt, Artificial Sequence
  Description of Artificial Sequence: Synthetic oligonucleotide
gugccuuuugaucgccaca

SEQ ID NO: 2090152 - RNA, 19 nt, Artificial Sequence
  Description of Artificial Sequence: Synthetic oligonucleotide
cuucacagugccuuuugau

SEQ ID NO: 2090153 - RNA, 19 nt, Artificial Sequence
  Description of Artificial Sequence: Synthetic oligonucleotide
cugcucggugccacacugc

SEQ ID NO: 2090154 - RNA, 19 nt, Artificial Sequence
  Description of Artificial Sequence: Synthetic oligonucleotide
ucgugcuuugggguuucga

SEQ ID NO: 2090155 - RNA, 19 nt, Artificial Sequence
  Description of Artificial Sequence: Synthetic oligonucleotide
gguuuaaacggcgcugcga

SEQ ID NO: 2090156 - RNA, 19 nt, Artificial Sequence
  Description of Artificial Sequence: Synthetic oligonucleotide
agcuguuuucccauacaua

SEQ ID NO: 2090157 - RNA, 19 nt, Artificial Sequence
  Description of Artificial Sequence: Synthetic oligonucleotide
caucaguggucuugcagua

SEQ ID NO: 2090158 - RNA, 19 nt, Artificial Sequence
  Description of Artificial Sequence: Synthetic oligonucleotide
cagaggaacagcagagggu

SEQ ID NO: 2090159 - RNA, 19 nt, Artificial Sequence
  Description of Artificial Sequence: Synthetic oligonucleotide
ggagcuguuuucccauaca

SEQ ID NO: 2090160 - RNA, 19 nt, Artificial Sequence
  Description of Artificial Sequence: Synthetic oligonucleotide
ggaugccgaacgcgggccg

SEQ ID NO: 2090161 - RNA, 19 nt, Artificial Sequence
  Description of Artificial Sequence: Synthetic oligonucleotide
acucgugcuuugggguuuc

SEQ ID NO: 2090162 - RNA, 19 nt, Artificial Sequence
  Description of Artificial Sequence: Synthetic oligonucleotide
gccgcgaccgccauggcug

SEQ ID NO: 2090163 - RNA, 19 nt, Artificial Sequence
  Description of Artificial Sequence: Synthetic oligonucleotide
cgacaggguaaacacuggg

SEQ ID NO: 2090164 - RNA, 19 nt, Artificial Sequence
  Description of Artificial Sequence: Synthetic oligonucleotide
ugaucgccacaggagucaa

SEQ ID NO: 2090165 - RNA, 19 nt, Artificial Sequence
  Description of Artificial Sequence: Synthetic oligonucleotide
uugcaguaccgaucuccua

SEQ ID NO: 2090166 - RNA, 19 nt, Artificial Sequence
  Description of Artificial Sequence: Synthetic oligonucleotide
uggugauugugagcacauc

SEQ ID NO: 2090167 - RNA, 19 nt, Artificial Sequence
  Description of Artificial Sequence: Synthetic oligonucleotide
gccuuuugaucgccacagg

SEQ ID NO: 2090168 - RNA, 19 nt, Artificial Sequence
  Description of Artificial Sequence: Synthetic oligonucleotide
gcccuucuuuacuggauac

SEQ ID NO: 2090169 - RNA, 19 nt, Artificial Sequence
  Description of Artificial Sequence: Synthetic oligonucleotide
auggcuggaggaggacgag

SEQ ID NO: 2090170 - RNA, 19 nt, Artificial Sequence
  Description of Artificial Sequence: Synthetic oligonucleotide
guuuuccaagacucauggu

SEQ ID NO: 2090171 - RNA, 19 nt, Artificial Sequence
  Description of Artificial Sequence: Synthetic oligonucleotide
gccacaggagucaaaugca

SEQ ID NO: 2090172 - RNA, 19 nt, Artificial Sequence
  Description of Artificial Sequence: Synthetic oligonucleotide
gaccccgggcacaggauca

SEQ ID NO: 2090173 - RNA, 19 nt, Artificial Sequence
  Description of Artificial Sequence: Synthetic oligonucleotide
gcaguaccgaucuccuaca

SEQ ID NO: 2090174 - RNA, 19 nt, Artificial Sequence
  Description of Artificial Sequence: Synthetic oligonucleotide
ccugcucggugccacacug

SEQ ID NO: 2090175 - RNA, 19 nt, Artificial Sequence
  Description of Artificial Sequence: Synthetic oligonucleotide
aacggcgcugcgacagggu

SEQ ID NO: 2090176 - RNA, 19 nt, Artificial Sequence
  Description of Artificial Sequence: Synthetic oligonucleotide
cccgggcacaggaucagcc

SEQ ID NO: 2090177 - RNA, 19 nt, Artificial Sequence
  Description of Artificial Sequence: Synthetic oligonucleotide
acggcgcugcgacagggua

SEQ ID NO: 2090178 - RNA, 19 nt, Artificial Sequence
  Description of Artificial Sequence: Synthetic oligonucleotide
gcagacaccugguuuaaau

SEQ ID NO: 2090179 - RNA, 19 nt, Artificial Sequence
  Description of Artificial Sequence: Synthetic oligonucleotide
ggguuucgaaccgaugguc

SEQ ID NO: 2090180 - RNA, 19 nt, Artificial Sequence
  Description of Artificial Sequence: Synthetic oligonucleotide
cuccucccugcucggugcc

SEQ ID NO: 2090181 - RNA, 19 nt, Artificial Sequence
  Description of Artificial Sequence: Synthetic oligonucleotide
ugagcacaucaguggucuu

SEQ ID NO: 2090182 - RNA, 19 nt, Artificial Sequence
  Description of Artificial Sequence: Synthetic oligonucleotide
gcagccggccacucagugc

SEQ ID NO: 2090183 - RNA, 19 nt, Artificial Sequence
  Description of Artificial Sequence: Synthetic oligonucleotide
gcgacaggguaaacacugg

SEQ ID NO: 2090184 - RNA, 19 nt, Artificial Sequence
  Description of Artificial Sequence: Synthetic oligonucleotide
cagacaccugguuuaaauu

SEQ ID NO: 2090185 - RNA, 19 nt, Artificial Sequence
  Description of Artificial Sequence: Synthetic oligonucleotide
ccuacaaguuuaauaaguu

SEQ ID NO: 2090186 - RNA, 19 nt, Artificial Sequence
  Description of Artificial Sequence: Synthetic oligonucleotide
ccauccgaagcucucaucu

SEQ ID NO: 2090187 - RNA, 19 nt, Artificial Sequence
  Description of Artificial Sequence: Synthetic oligonucleotide
cuuuguacugagagagguu

SEQ ID NO: 2090188 - RNA, 19 nt, Artificial Sequence
  Description of Artificial Sequence: Synthetic oligonucleotide
ccgaucuccuacaaguuua

SEQ ID NO: 2090189 - RNA, 19 nt, Artificial Sequence
  Description of Artificial Sequence: Synthetic oligonucleotide
gcccucauucuugaguuga

SEQ ID NO: 2090190 - RNA, 19 nt, Artificial Sequence
  Description of Artificial Sequence: Synthetic oligonucleotide
gcggccgaggcgaagcugc

SEQ ID NO: 2090191 - RNA, 19 nt, Artificial Sequence
  Description of Artificial Sequence: Synthetic oligonucleotide
ccgaagcucucaucugcag

SEQ ID NO: 2090192 - RNA, 19 nt, Artificial Sequence
  Description of Artificial Sequence: Synthetic oligonucleotide
ucucgaggccgcgggccug

SEQ ID NO: 2090193 - RNA, 19 nt, Artificial Sequence
  Description of Artificial Sequence: Synthetic oligonucleotide
gggcaucugucugugguga

SEQ ID NO: 2090194 - RNA, 19 nt, Artificial Sequence
  Description of Artificial Sequence: Synthetic oligonucleotide
gccaguccuggucaacauc

SEQ ID NO: 2090195 - RNA, 19 nt, Artificial Sequence
  Description of Artificial Sequence: Synthetic oligonucleotide
ggaaaaugcuccucacauu

SEQ ID NO: 2090196 - RNA, 19 nt, Artificial Sequence
  Description of Artificial Sequence: Synthetic oligonucleotide
cucagcugcagcgccgcga

SEQ ID NO: 2090197 - RNA, 19 nt, Artificial Sequence
  Description of Artificial Sequence: Synthetic oligonucleotide
cagugacuaaauacaucau

SEQ ID NO: 2090198 - RNA, 19 nt, Artificial Sequence
  Description of Artificial Sequence: Synthetic oligonucleotide
gggguuucgaaccgauggu

SEQ ID NO: 2090199 - RNA, 19 nt, Artificial Sequence
  Description of Artificial Sequence: Synthetic oligonucleotide
cgugcuuugggguuucgaa

SEQ ID NO: 2090200 - RNA, 19 nt, Artificial Sequence
  Description of Artificial Sequence: Synthetic oligonucleotide
cugccauccgaagcucuca

SEQ ID NO: 2090201 - RNA, 19 nt, Artificial Sequence
  Description of Artificial Sequence: Synthetic oligonucleotide
ucgaaccgaugguccugau

SEQ ID NO: 2090202 - RNA, 19 nt, Artificial Sequence
  Description of Artificial Sequence: Synthetic oligonucleotide
cacucagugcagaaaucuu

SEQ ID NO: 2090203 - RNA, 19 nt, Artificial Sequence
  Description of Artificial Sequence: Synthetic oligonucleotide
cuagugcagccggccacuc

SEQ ID NO: 2090204 - RNA, 19 nt, Artificial Sequence
  Description of Artificial Sequence: Synthetic oligonucleotide
caguaccgaucuccuacaa

SEQ ID NO: 2090205 - RNA, 19 nt, Artificial Sequence
  Description of Artificial Sequence: Synthetic oligonucleotide
cucgugcuuugggguuucg

SEQ ID NO: 2090206 - RNA, 19 nt, Artificial Sequence
  Description of Artificial Sequence: Synthetic oligonucleotide
ugccaugggcacgcccuuc

SEQ ID NO: 2090207 - RNA, 19 nt, Artificial Sequence
  Description of Artificial Sequence: Synthetic oligonucleotide
agcagacaccugguuuaaa

SEQ ID NO: 2090208 - RNA, 19 nt, Artificial Sequence
  Description of Artificial Sequence: Synthetic oligonucleotide
auaggacugugaggagaua

SEQ ID NO: 2090209 - RNA, 19 nt, Artificial Sequence
  Description of Artificial Sequence: Synthetic oligonucleotide
cguucacuucuggaugccg

SEQ ID NO: 2090210 - RNA, 19 nt, Artificial Sequence
  Description of Artificial Sequence: Synthetic oligonucleotide
cgaaccgaugguccugaug

SEQ ID NO: 2090211 - RNA, 19 nt, Artificial Sequence
  Description of Artificial Sequence: Synthetic oligonucleotide
cauucucgcccucauucuu

SEQ ID NO: 2090212 - RNA, 19 nt, Artificial Sequence
  Description of Artificial Sequence: Synthetic oligonucleotide
gaucuccuacaaguuuaau

SEQ ID NO: 2090213 - RNA, 19 nt, Artificial Sequence
  Description of Artificial Sequence: Synthetic oligonucleotide
gcgaccgccauggcuggag

SEQ ID NO: 2090214 - RNA, 19 nt, Artificial Sequence
  Description of Artificial Sequence: Synthetic oligonucleotide
ccagauuuaacagucucuu

SEQ ID NO: 2090215 - RNA, 19 nt, Artificial Sequence
  Description of Artificial Sequence: Synthetic oligonucleotide
ccuuaauguuaccacucgu

SEQ ID NO: 2090216 - RNA, 19 nt, Artificial Sequence
  Description of Artificial Sequence: Synthetic oligonucleotide
gggccaguccuggucaaca

SEQ ID NO: 2090217 - RNA, 19 nt, Artificial Sequence
  Description of Artificial Sequence: Synthetic oligonucleotide
gccauccgaagcucucauc

SEQ ID NO: 2090218 - RNA, 19 nt, Artificial Sequence
  Description of Artificial Sequence: Synthetic oligonucleotide
cuccguccuaggaggcaga

SEQ ID NO: 2090219 - RNA, 19 nt, Artificial Sequence
  Description of Artificial Sequence: Synthetic oligonucleotide
gcugccauccgaagcucuc

SEQ ID NO: 2090220 - RNA, 19 nt, Artificial Sequence
  Description of Artificial Sequence: Synthetic oligonucleotide
ccauucgaaugggcagagg

SEQ ID NO: 2090221 - RNA, 19 nt, Artificial Sequence
  Description of Artificial Sequence: Synthetic oligonucleotide
gaucgccacaggagucaaa

SEQ ID NO: 2090222 - RNA, 19 nt, Artificial Sequence
  Description of Artificial Sequence: Synthetic oligonucleotide
cgaggcgaagcugcgcagg

SEQ ID NO: 2090223 - RNA, 19 nt, Artificial Sequence
  Description of Artificial Sequence: Synthetic oligonucleotide
ccacucagugcagaaaucu

SEQ ID NO: 2090224 - RNA, 19 nt, Artificial Sequence
  Description of Artificial Sequence: Synthetic oligonucleotide
ggcgcugcgacaggguaaa

SEQ ID NO: 2090225 - RNA, 19 nt, Artificial Sequence
  Description of Artificial Sequence: Synthetic oligonucleotide
gcgcauagucauaguucug

SEQ ID NO: 2090226 - RNA, 19 nt, Artificial Sequence
  Description of Artificial Sequence: Synthetic oligonucleotide
cagcugcagcgccgcgacc

SEQ ID NO: 2090227 - RNA, 19 nt, Artificial Sequence
  Description of Artificial Sequence: Synthetic oligonucleotide
cgggcacaggaucagccuc

SEQ ID NO: 2090228 - RNA, 19 nt, Artificial Sequence
  Description of Artificial Sequence: Synthetic oligonucleotide
ccguucacuucuggaugcc

SEQ ID NO: 2090229 - RNA, 19 nt, Artificial Sequence
  Description of Artificial Sequence: Synthetic oligonucleotide
ccacacugcugccauccga

SEQ ID NO: 2090230 - RNA, 19 nt, Artificial Sequence
  Description of Artificial Sequence: Synthetic oligonucleotide
gguuccccuccuuugccau

SEQ ID NO: 2090231 - RNA, 19 nt, Artificial Sequence
  Description of Artificial Sequence: Synthetic oligonucleotide
gcacaucaguggucuugca

SEQ ID NO: 2090232 - RNA, 19 nt, Artificial Sequence
  Description of Artificial Sequence: Synthetic oligonucleotide
cugggccaguccuggucaa

SEQ ID NO: 2090233 - RNA, 19 nt, Artificial Sequence
  Description of Artificial Sequence: Synthetic oligonucleotide
ccccauucgaaugggcaga

SEQ ID NO: 2090234 - RNA, 19 nt, Artificial Sequence
  Description of Artificial Sequence: Synthetic oligonucleotide
gguccugaugacacauagu

SEQ ID NO: 2090235 - RNA, 19 nt, Artificial Sequence
  Description of Artificial Sequence: Synthetic oligonucleotide
gccucucgaggccgcgggc

SEQ ID NO: 2090236 - RNA, 19 nt, Artificial Sequence
  Description of Artificial Sequence: Synthetic oligonucleotide
gagcuucacagugccuuuu

SEQ ID NO: 2090237 - RNA, 19 nt, Artificial Sequence
  Description of Artificial Sequence: Synthetic oligonucleotide
cgaucuccuacaaguuuaa

SEQ ID NO: 2090238 - RNA, 19 nt, Artificial Sequence
  Description of Artificial Sequence: Synthetic oligonucleotide
cagagccuuucuucuuaau

SEQ ID NO: 2090239 - RNA, 19 nt, Artificial Sequence
  Description of Artificial Sequence: Synthetic oligonucleotide
cucucgaggccgcgggccu

SEQ ID NO: 2090240 - RNA, 19 nt, Artificial Sequence
  Description of Artificial Sequence: Synthetic oligonucleotide
cgaccgccauggcuggagg

SEQ ID NO: 2090241 - RNA, 19 nt, Artificial Sequence
  Description of Artificial Sequence: Synthetic oligonucleotide
ccgcgaccgccauggcugg

SEQ ID NO: 2090242 - RNA, 19 nt, Artificial Sequence
  Description of Artificial Sequence: Synthetic oligonucleotide
ccguccuaggaggcagagc

SEQ ID NO: 2090243 - RNA, 19 nt, Artificial Sequence
  Description of Artificial Sequence: Synthetic oligonucleotide
guccuaggaggcagagccu

SEQ ID NO: 2090244 - RNA, 19 nt, Artificial Sequence
  Description of Artificial Sequence: Synthetic oligonucleotide
ggccgaggcgaagcugcgc

SEQ ID NO: 2090245 - RNA, 19 nt, Artificial Sequence
  Description of Artificial Sequence: Synthetic oligonucleotide
agccggccacucagugcag

SEQ ID NO: 2090246 - RNA, 19 nt, Artificial Sequence
  Description of Artificial Sequence: Synthetic oligonucleotide
gccucuugagagggcaucu

SEQ ID NO: 2090247 - RNA, 19 nt, Artificial Sequence
  Description of Artificial Sequence: Synthetic oligonucleotide
cugccucuugagagggcau

SEQ ID NO: 2090248 - RNA, 19 nt, Artificial Sequence
  Description of Artificial Sequence: Synthetic oligonucleotide
cgaugguccugaugacaca

SEQ ID NO: 2090249 - RNA, 19 nt, Artificial Sequence
  Description of Artificial Sequence: Synthetic oligonucleotide
cgcccucauucuugaguug

SEQ ID NO: 2090250 - RNA, 19 nt, Artificial Sequence
  Description of Artificial Sequence: Synthetic oligonucleotide
cgcgggccgccucucgagg

SEQ ID NO: 2090251 - RNA, 19 nt, Artificial Sequence
  Description of Artificial Sequence: Synthetic oligonucleotide
gccgccucucgaggccgcg

SEQ ID NO: 2090252 - RNA, 19 nt, Artificial Sequence
  Description of Artificial Sequence: Synthetic oligonucleotide
gcaggccgcgcgaccccgg

SEQ ID NO: 2090253 - RNA, 19 nt, Artificial Sequence
  Description of Artificial Sequence: Synthetic oligonucleotide
ccggccacucagugcagaa

SEQ ID NO: 2090254 - RNA, 19 nt, Artificial Sequence
  Description of Artificial Sequence: Synthetic oligonucleotide
cacucgugcuuugggguuu

SEQ ID NO: 2090255 - RNA, 19 nt, Artificial Sequence
  Description of Artificial Sequence: Synthetic oligonucleotide
cgcccuucuuuacuggaua

SEQ ID NO: 2090256 - RNA, 19 nt, Artificial Sequence
  Description of Artificial Sequence: Synthetic oligonucleotide
gcaucugucuguggugauu

SEQ ID NO: 2090257 - RNA, 19 nt, Artificial Sequence
  Description of Artificial Sequence: Synthetic oligonucleotide
gccggccacucagugcaga

SEQ ID NO: 2090258 - RNA, 19 nt, Artificial Sequence
  Description of Artificial Sequence: Synthetic oligonucleotide
gccgaacgcgggccgccuc

SEQ ID NO: 2090259 - RNA, 19 nt, Artificial Sequence
  Description of Artificial Sequence: Synthetic oligonucleotide
ccgggcacaggaucagccu

SEQ ID NO: 2090260 - RNA, 19 nt, Artificial Sequence
  Description of Artificial Sequence: Synthetic oligonucleotide
cagcuguaucaaccucaau

SEQ ID NO: 2090261 - RNA, 19 nt, Artificial Sequence
  Description of Artificial Sequence: Synthetic oligonucleotide
ccgccucucgaggccgcgg

SEQ ID NO: 2090262 - RNA, 19 nt, Artificial Sequence
  Description of Artificial Sequence: Synthetic oligonucleotide
ccuggcggccgaggcgaag

SEQ ID NO: 2090263 - RNA, 19 nt, Artificial Sequence
  Description of Artificial Sequence: Synthetic oligonucleotide
cgcgcgaccccgggcacag

SEQ ID NO: 2090264 - RNA, 19 nt, Artificial Sequence
  Description of Artificial Sequence: Synthetic oligonucleotide
gccgcgcgaccccgggcac

SEQ ID NO: 2090265 - RNA, 19 nt, Artificial Sequence
  Description of Artificial Sequence: Synthetic oligonucleotide
ccacucgugcuuugggguu

SEQ ID NO: 2090266 - RNA, 19 nt, Artificial Sequence
  Description of Artificial Sequence: Synthetic oligonucleotide
cggcgcugcgacaggguaa

SEQ ID NO: 2090267 - RNA, 19 nt, Artificial Sequence
  Description of Artificial Sequence: Synthetic oligonucleotide
ccuaggaggcagagccuuu

SEQ ID NO: 2090268 - RNA, 19 nt, Artificial Sequence
  Description of Artificial Sequence: Synthetic oligonucleotide
ccaugucuuccuccgucuu

SEQ ID NO: 2090269 - RNA, 19 nt, Artificial Sequence
  Description of Artificial Sequence: Synthetic oligonucleotide
ccgaacgcgggccgccucu

SEQ ID NO: 2090270 - RNA, 19 nt, Artificial Sequence
  Description of Artificial Sequence: Synthetic oligonucleotide
cgaacgcgggccgccucuc

SEQ ID NO: 2090271 - RNA, 19 nt, Artificial Sequence
  Description of Artificial Sequence: Synthetic oligonucleotide
gcgcgaccccgggcacagg

SEQ ID NO: 2090272 - RNA, 19 nt, Artificial Sequence
  Description of Artificial Sequence: Synthetic oligonucleotide
gcgcugcgacaggguaaac

SEQ ID NO: 2090273 - RNA, 19 nt, Artificial Sequence
  Description of Artificial Sequence: Synthetic oligonucleotide
cggccacucagugcagaaa

SEQ ID NO: 2090274 - RNA, 19 nt, Artificial Sequence
  Description of Artificial Sequence: Synthetic oligonucleotide
ccgcgcgaccccgggcaca

SEQ ID NO: 2090275 - RNA, 19 nt, Artificial Sequence
  Description of Artificial Sequence: Synthetic oligonucleotide
aaauaucucauaaaguuac

SEQ ID NO: 2090276 - RNA, 19 nt, Artificial Sequence
  Description of Artificial Sequence: Synthetic oligonucleotide
ugagguauagcgcagauug

SEQ ID NO: 2090277 - RNA, 19 nt, Artificial Sequence
  Description of Artificial Sequence: Synthetic oligonucleotide
ucuaguacuaaaacaaacc

SEQ ID NO: 2090278 - RNA, 19 nt, Artificial Sequence
  Description of Artificial Sequence: Synthetic oligonucleotide
aucucauaaaguuacaaag

SEQ ID NO: 2090279 - RNA, 19 nt, Artificial Sequence
  Description of Artificial Sequence: Synthetic oligonucleotide
aaugcuaauggaaaccggc

SEQ ID NO: 2090280 - RNA, 19 nt, Artificial Sequence
  Description of Artificial Sequence: Synthetic oligonucleotide
aaacggcucagacuuagcc

SEQ ID NO: 2090281 - RNA, 19 nt, Artificial Sequence
  Description of Artificial Sequence: Synthetic oligonucleotide
auugacagagguucuaggc

SEQ ID NO: 2090282 - RNA, 19 nt, Artificial Sequence
  Description of Artificial Sequence: Synthetic oligonucleotide
aguuacaaaguacucuugg

SEQ ID NO: 2090283 - RNA, 19 nt, Artificial Sequence
  Description of Artificial Sequence: Synthetic oligonucleotide
aagaauguguaaaauaucu

SEQ ID NO: 2090284 - RNA, 19 nt, Artificial Sequence
  Description of Artificial Sequence: Synthetic oligonucleotide
agaaaugcuaauggaaacc

SEQ ID NO: 2090285 - RNA, 19 nt, Artificial Sequence
  Description of Artificial Sequence: Synthetic oligonucleotide
uccagaaccgcucuucugg

SEQ ID NO: 2090286 - RNA, 19 nt, Artificial Sequence
  Description of Artificial Sequence: Synthetic oligonucleotide
accauuacuaaagaaugcc

SEQ ID NO: 2090287 - RNA, 19 nt, Artificial Sequence
  Description of Artificial Sequence: Synthetic oligonucleotide
auuacuaaagaaugccauc

SEQ ID NO: 2090288 - RNA, 19 nt, Artificial Sequence
  Description of Artificial Sequence: Synthetic oligonucleotide
agaaccaugcucuuucgcg

SEQ ID NO: 2090289 - RNA, 19 nt, Artificial Sequence
  Description of Artificial Sequence: Synthetic oligonucleotide
uggucuaaagaacaaacgu

SEQ ID NO: 2090290 - RNA, 19 nt, Artificial Sequence
  Description of Artificial Sequence: Synthetic oligonucleotide
acagucuaggcacggaugc

SEQ ID NO: 2090291 - RNA, 19 nt, Artificial Sequence
  Description of Artificial Sequence: Synthetic oligonucleotide
aguacucuuggcuuuuagc

SEQ ID NO: 2090292 - RNA, 19 nt, Artificial Sequence
  Description of Artificial Sequence: Synthetic oligonucleotide
aagccuucgaacucucccc

SEQ ID NO: 2090293 - RNA, 19 nt, Artificial Sequence
  Description of Artificial Sequence: Synthetic oligonucleotide
gaaaugcuaauggaaaccg

SEQ ID NO: 2090294 - RNA, 19 nt, Artificial Sequence
  Description of Artificial Sequence: Synthetic oligonucleotide
ucucauaaaguuacaaagu

SEQ ID NO: 2090295 - RNA, 19 nt, Artificial Sequence
  Description of Artificial Sequence: Synthetic oligonucleotide
ucauaaaguuacaaaguac

SEQ ID NO: 2090296 - RNA, 19 nt, Artificial Sequence
  Description of Artificial Sequence: Synthetic oligonucleotide
uggcuuuuagcaaacacca

SEQ ID NO: 2090297 - RNA, 19 nt, Artificial Sequence
  Description of Artificial Sequence: Synthetic oligonucleotide
aacggcucagacuuagccg

SEQ ID NO: 2090298 - RNA, 19 nt, Artificial Sequence
  Description of Artificial Sequence: Synthetic oligonucleotide
uuuagcaaacaccauuacu

SEQ ID NO: 2090299 - RNA, 19 nt, Artificial Sequence
  Description of Artificial Sequence: Synthetic oligonucleotide
ugccagaugucccugagag

SEQ ID NO: 2090300 - RNA, 19 nt, Artificial Sequence
  Description of Artificial Sequence: Synthetic oligonucleotide
uccccagaaaugcuaaugg

SEQ ID NO: 2090301 - RNA, 19 nt, Artificial Sequence
  Description of Artificial Sequence: Synthetic oligonucleotide
ucuugaaacgcaaaccuaa

SEQ ID NO: 2090302 - RNA, 19 nt, Artificial Sequence
  Description of Artificial Sequence: Synthetic oligonucleotide
cuagauucagaacacaguc

SEQ ID NO: 2090303 - RNA, 19 nt, Artificial Sequence
  Description of Artificial Sequence: Synthetic oligonucleotide
uucuaguacuaaaacaaac

SEQ ID NO: 2090304 - RNA, 19 nt, Artificial Sequence
  Description of Artificial Sequence: Synthetic oligonucleotide
uccuagauucagaacacag

SEQ ID NO: 2090305 - RNA, 19 nt, Artificial Sequence
  Description of Artificial Sequence: Synthetic oligonucleotide
aaccuucuagaacaugauc

SEQ ID NO: 2090306 - RNA, 19 nt, Artificial Sequence
  Description of Artificial Sequence: Synthetic oligonucleotide
aacaccauuacuaaagaau

SEQ ID NO: 2090307 - RNA, 19 nt, Artificial Sequence
  Description of Artificial Sequence: Synthetic oligonucleotide
aagaugggccagcagcagc

SEQ ID NO: 2090308 - RNA, 19 nt, Artificial Sequence
  Description of Artificial Sequence: Synthetic oligonucleotide
ugaaucagggcuuugcagu

SEQ ID NO: 2090309 - RNA, 19 nt, Artificial Sequence
  Description of Artificial Sequence: Synthetic oligonucleotide
aaagggcugagaaaacggc

SEQ ID NO: 2090310 - RNA, 19 nt, Artificial Sequence
  Description of Artificial Sequence: Synthetic oligonucleotide
ucuuucgcgacugaagggg

SEQ ID NO: 2090311 - RNA, 19 nt, Artificial Sequence
  Description of Artificial Sequence: Synthetic oligonucleotide
aguaagaauguguaaaaua

SEQ ID NO: 2090312 - RNA, 19 nt, Artificial Sequence
  Description of Artificial Sequence: Synthetic oligonucleotide
uuacuaaagaaugccaucu

SEQ ID NO: 2090313 - RNA, 19 nt, Artificial Sequence
  Description of Artificial Sequence: Synthetic oligonucleotide
uugcguggaguaaagaucu

SEQ ID NO: 2090314 - RNA, 19 nt, Artificial Sequence
  Description of Artificial Sequence: Synthetic oligonucleotide
acaguguccccagaaaugc

SEQ ID NO: 2090315 - RNA, 19 nt, Artificial Sequence
  Description of Artificial Sequence: Synthetic oligonucleotide
guauagcgcagauugacag

SEQ ID NO: 2090316 - RNA, 19 nt, Artificial Sequence
  Description of Artificial Sequence: Synthetic oligonucleotide
aggaauucccagugcaccc

SEQ ID NO: 2090317 - RNA, 19 nt, Artificial Sequence
  Description of Artificial Sequence: Synthetic oligonucleotide
ugaggucagaaccuucuag

SEQ ID NO: 2090318 - RNA, 19 nt, Artificial Sequence
  Description of Artificial Sequence: Synthetic oligonucleotide
uguagugcccauuuccuug

SEQ ID NO: 2090319 - RNA, 19 nt, Artificial Sequence
  Description of Artificial Sequence: Synthetic oligonucleotide
gaacucauggcuccaacug

SEQ ID NO: 2090320 - RNA, 19 nt, Artificial Sequence
  Description of Artificial Sequence: Synthetic oligonucleotide
ugguguagugcccauuucc

SEQ ID NO: 2090321 - RNA, 19 nt, Artificial Sequence
  Description of Artificial Sequence: Synthetic oligonucleotide
uuucccgacagugagauuc

SEQ ID NO: 2090322 - RNA, 19 nt, Artificial Sequence
  Description of Artificial Sequence: Synthetic oligonucleotide
gaacaaacgucuucaguug

SEQ ID NO: 2090323 - RNA, 19 nt, Artificial Sequence
  Description of Artificial Sequence: Synthetic oligonucleotide
guuacaaaguacucuuggc

SEQ ID NO: 2090324 - RNA, 19 nt, Artificial Sequence
  Description of Artificial Sequence: Synthetic oligonucleotide
aacgucuucaguugccugu

SEQ ID NO: 2090325 - RNA, 19 nt, Artificial Sequence
  Description of Artificial Sequence: Synthetic oligonucleotide
acuaacauggguuccggga

SEQ ID NO: 2090326 - RNA, 19 nt, Artificial Sequence
  Description of Artificial Sequence: Synthetic oligonucleotide
ugaagaugggccagcagca

SEQ ID NO: 2090327 - RNA, 19 nt, Artificial Sequence
  Description of Artificial Sequence: Synthetic oligonucleotide
acugggacuucuugaaacg

SEQ ID NO: 2090328 - RNA, 19 nt, Artificial Sequence
  Description of Artificial Sequence: Synthetic oligonucleotide
uucagaacacagucuaggc

SEQ ID NO: 2090329 - RNA, 19 nt, Artificial Sequence
  Description of Artificial Sequence: Synthetic oligonucleotide
uaggcaacuaacauggguu

SEQ ID NO: 2090330 - RNA, 19 nt, Artificial Sequence
  Description of Artificial Sequence: Synthetic oligonucleotide
aaccaugcucuuucgcgac

SEQ ID NO: 2090331 - RNA, 19 nt, Artificial Sequence
  Description of Artificial Sequence: Synthetic oligonucleotide
uacaguguccccagaaaug

SEQ ID NO: 2090332 - RNA, 19 nt, Artificial Sequence
  Description of Artificial Sequence: Synthetic oligonucleotide
agugcaugagguauagcgc

SEQ ID NO: 2090333 - RNA, 19 nt, Artificial Sequence
  Description of Artificial Sequence: Synthetic oligonucleotide
guacucuuggcuuuuagca

SEQ ID NO: 2090334 - RNA, 19 nt, Artificial Sequence
  Description of Artificial Sequence: Synthetic oligonucleotide
ucuuccggcuuucugaggu

SEQ ID NO: 2090335 - RNA, 19 nt, Artificial Sequence
  Description of Artificial Sequence: Synthetic oligonucleotide
agugcaccccuucagaucu

SEQ ID NO: 2090336 - RNA, 19 nt, Artificial Sequence
  Description of Artificial Sequence: Synthetic oligonucleotide
agaaauggucuaaagaaca

SEQ ID NO: 2090337 - RNA, 19 nt, Artificial Sequence
  Description of Artificial Sequence: Synthetic oligonucleotide
agauucagaacacagucua

SEQ ID NO: 2090338 - RNA, 19 nt, Artificial Sequence
  Description of Artificial Sequence: Synthetic oligonucleotide
guucuaggcaacuaacaug

SEQ ID NO: 2090339 - RNA, 19 nt, Artificial Sequence
  Description of Artificial Sequence: Synthetic oligonucleotide
cagacuuagccgaagacuc

SEQ ID NO: 2090340 - RNA, 19 nt, Artificial Sequence
  Description of Artificial Sequence: Synthetic oligonucleotide
ucaucaggcaccuggugcc

SEQ ID NO: 2090341 - RNA, 19 nt, Artificial Sequence
  Description of Artificial Sequence: Synthetic oligonucleotide
acaccauuacuaaagaaug

SEQ ID NO: 2090342 - RNA, 19 nt, Artificial Sequence
  Description of Artificial Sequence: Synthetic oligonucleotide
cuaaagaacaaacgucuuc

SEQ ID NO: 2090343 - RNA, 19 nt, Artificial Sequence
  Description of Artificial Sequence: Synthetic oligonucleotide
aacuaacauggguuccggg

SEQ ID NO: 2090344 - RNA, 19 nt, Artificial Sequence
  Description of Artificial Sequence: Synthetic oligonucleotide
aaacaggcuguagguaagc

SEQ ID NO: 2090345 - RNA, 19 nt, Artificial Sequence
  Description of Artificial Sequence: Synthetic oligonucleotide
uagauucagaacacagucu

SEQ ID NO: 2090346 - RNA, 19 nt, Artificial Sequence
  Description of Artificial Sequence: Synthetic oligonucleotide
agguauagcgcagauugac

SEQ ID NO: 2090347 - RNA, 19 nt, Artificial Sequence
  Description of Artificial Sequence: Synthetic oligonucleotide
ucugaagggcucuccagag

SEQ ID NO: 2090348 - RNA, 19 nt, Artificial Sequence
  Description of Artificial Sequence: Synthetic oligonucleotide
aacucauggcuccaacugu

SEQ ID NO: 2090349 - RNA, 19 nt, Artificial Sequence
  Description of Artificial Sequence: Synthetic oligonucleotide
aaaugcuaauggaaaccgg

SEQ ID NO: 2090350 - RNA, 19 nt, Artificial Sequence
  Description of Artificial Sequence: Synthetic oligonucleotide
ugagagcuuggucugaauc

SEQ ID NO: 2090351 - RNA, 19 nt, Artificial Sequence
  Description of Artificial Sequence: Synthetic oligonucleotide
aaacaccauuacuaaagaa

SEQ ID NO: 2090352 - RNA, 19 nt, Artificial Sequence
  Description of Artificial Sequence: Synthetic oligonucleotide
ucagacuuagccgaagacu

SEQ ID NO: 2090353 - RNA, 19 nt, Artificial Sequence
  Description of Artificial Sequence: Synthetic oligonucleotide
cagauucuaguacuaaaac

SEQ ID NO: 2090354 - RNA, 19 nt, Artificial Sequence
  Description of Artificial Sequence: Synthetic oligonucleotide
ucaguugccuguuccacug

SEQ ID NO: 2090355 - RNA, 19 nt, Artificial Sequence
  Description of Artificial Sequence: Synthetic oligonucleotide
ugcucuuucgcgacugaag

SEQ ID NO: 2090356 - RNA, 19 nt, Artificial Sequence
  Description of Artificial Sequence: Synthetic oligonucleotide
uaguggugucuucagaaac

SEQ ID NO: 2090357 - RNA, 19 nt, Artificial Sequence
  Description of Artificial Sequence: Synthetic oligonucleotide
agaaccuucuagaacauga

SEQ ID NO: 2090358 - RNA, 19 nt, Artificial Sequence
  Description of Artificial Sequence: Synthetic oligonucleotide
ucucccugggaguucaaag

SEQ ID NO: 2090359 - RNA, 19 nt, Artificial Sequence
  Description of Artificial Sequence: Synthetic oligonucleotide
gcuuucugaggucagaacc

SEQ ID NO: 2090360 - RNA, 19 nt, Artificial Sequence
  Description of Artificial Sequence: Synthetic oligonucleotide
aaguacucuuggcuuuuag

SEQ ID NO: 2090361 - RNA, 19 nt, Artificial Sequence
  Description of Artificial Sequence: Synthetic oligonucleotide
ucgaacucuccccagccgc

SEQ ID NO: 2090362 - RNA, 19 nt, Artificial Sequence
  Description of Artificial Sequence: Synthetic oligonucleotide
gaaaacggcucagacuuag

SEQ ID NO: 2090363 - RNA, 19 nt, Artificial Sequence
  Description of Artificial Sequence: Synthetic oligonucleotide
ugguguagauggaaacugc

SEQ ID NO: 2090364 - RNA, 19 nt, Artificial Sequence
  Description of Artificial Sequence: Synthetic oligonucleotide
aggcaacuaacauggguuc

SEQ ID NO: 2090365 - RNA, 19 nt, Artificial Sequence
  Description of Artificial Sequence: Synthetic oligonucleotide
acuucugaacucauggcuc

SEQ ID NO: 2090366 - RNA, 19 nt, Artificial Sequence
  Description of Artificial Sequence: Synthetic oligonucleotide
uugaaacgcaaaccuaaaa

SEQ ID NO: 2090367 - RNA, 19 nt, Artificial Sequence
  Description of Artificial Sequence: Synthetic oligonucleotide
caccauuacuaaagaaugc

SEQ ID NO: 2090368 - RNA, 19 nt, Artificial Sequence
  Description of Artificial Sequence: Synthetic oligonucleotide
gaggucagaaccuucuaga

SEQ ID NO: 2090369 - RNA, 19 nt, Artificial Sequence
  Description of Artificial Sequence: Synthetic oligonucleotide
gaaucagggcuuugcagug

SEQ ID NO: 2090370 - RNA, 19 nt, Artificial Sequence
  Description of Artificial Sequence: Synthetic oligonucleotide
uucuggguggcgucuaugc

SEQ ID NO: 2090371 - RNA, 19 nt, Artificial Sequence
  Description of Artificial Sequence: Synthetic oligonucleotide
uucgaacucuccccagccg

SEQ ID NO: 2090372 - RNA, 19 nt, Artificial Sequence
  Description of Artificial Sequence: Synthetic oligonucleotide
ugaacucauggcuccaacu

SEQ ID NO: 2090373 - RNA, 19 nt, Artificial Sequence
  Description of Artificial Sequence: Synthetic oligonucleotide
ugcuaauggaaaccggcuc

SEQ ID NO: 2090374 - RNA, 19 nt, Artificial Sequence
  Description of Artificial Sequence: Synthetic oligonucleotide
aacaguucucagauucuag

SEQ ID NO: 2090375 - RNA, 19 nt, Artificial Sequence
  Description of Artificial Sequence: Synthetic oligonucleotide
cuuuuagcaaacaccauua

SEQ ID NO: 2090376 - RNA, 19 nt, Artificial Sequence
  Description of Artificial Sequence: Synthetic oligonucleotide
aaacgucuucaguugccug

SEQ ID NO: 2090377 - RNA, 19 nt, Artificial Sequence
  Description of Artificial Sequence: Synthetic oligonucleotide
ucauggcuccaacugugag

SEQ ID NO: 2090378 - RNA, 19 nt, Artificial Sequence
  Description of Artificial Sequence: Synthetic oligonucleotide
uccgggaaaacaguggcca

SEQ ID NO: 2090379 - RNA, 19 nt, Artificial Sequence
  Description of Artificial Sequence: Synthetic oligonucleotide
agcgcagauugacagaggu

SEQ ID NO: 2090380 - RNA, 19 nt, Artificial Sequence
  Description of Artificial Sequence: Synthetic oligonucleotide
cacugggacuucuugaaac

SEQ ID NO: 2090381 - RNA, 19 nt, Artificial Sequence
  Description of Artificial Sequence: Synthetic oligonucleotide
acaaacgucuucaguugcc

SEQ ID NO: 2090382 - RNA, 19 nt, Artificial Sequence
  Description of Artificial Sequence: Synthetic oligonucleotide
cugagaaaacggcucagac

SEQ ID NO: 2090383 - RNA, 19 nt, Artificial Sequence
  Description of Artificial Sequence: Synthetic oligonucleotide
acggcucagacuuagccga

SEQ ID NO: 2090384 - RNA, 19 nt, Artificial Sequence
  Description of Artificial Sequence: Synthetic oligonucleotide
agucuaggcacggaugcac

SEQ ID NO: 2090385 - RNA, 19 nt, Artificial Sequence
  Description of Artificial Sequence: Synthetic oligonucleotide
agcucuuccggcuuucuga

SEQ ID NO: 2090386 - RNA, 19 nt, Artificial Sequence
  Description of Artificial Sequence: Synthetic oligonucleotide
ucuagaacaugauccuguc

SEQ ID NO: 2090387 - RNA, 19 nt, Artificial Sequence
  Description of Artificial Sequence: Synthetic oligonucleotide
gcucuuucgcgacugaagg

SEQ ID NO: 2090388 - RNA, 19 nt, Artificial Sequence
  Description of Artificial Sequence: Synthetic oligonucleotide
uauagcgcagauugacaga

SEQ ID NO: 2090389 - RNA, 19 nt, Artificial Sequence
  Description of Artificial Sequence: Synthetic oligonucleotide
ucuaugccgaggaccagga

SEQ ID NO: 2090390 - RNA, 19 nt, Artificial Sequence
  Description of Artificial Sequence: Synthetic oligonucleotide
agagguucuaggcaacuaa

SEQ ID NO: 2090391 - RNA, 19 nt, Artificial Sequence
  Description of Artificial Sequence: Synthetic oligonucleotide
cacggaugcacuucacugc

SEQ ID NO: 2090392 - RNA, 19 nt, Artificial Sequence
  Description of Artificial Sequence: Synthetic oligonucleotide
guagauggaaacugcugac

SEQ ID NO: 2090393 - RNA, 19 nt, Artificial Sequence
  Description of Artificial Sequence: Synthetic oligonucleotide
aaaacggcucagacuuagc

SEQ ID NO: 2090394 - RNA, 19 nt, Artificial Sequence
  Description of Artificial Sequence: Synthetic oligonucleotide
agcuuccuagauucagaac

SEQ ID NO: 2090395 - RNA, 19 nt, Artificial Sequence
  Description of Artificial Sequence: Synthetic oligonucleotide
uucuugaaacgcaaaccua

SEQ ID NO: 2090396 - RNA, 19 nt, Artificial Sequence
  Description of Artificial Sequence: Synthetic oligonucleotide
agguaagcugcccugucug

SEQ ID NO: 2090397 - RNA, 19 nt, Artificial Sequence
  Description of Artificial Sequence: Synthetic oligonucleotide
aacucuccccagccgccgc

SEQ ID NO: 2090398 - RNA, 19 nt, Artificial Sequence
  Description of Artificial Sequence: Synthetic oligonucleotide
uacucuuggcuuuuagcaa

SEQ ID NO: 2090399 - RNA, 19 nt, Artificial Sequence
  Description of Artificial Sequence: Synthetic oligonucleotide
gaaccgcucuucugggugg

SEQ ID NO: 2090400 - RNA, 19 nt, Artificial Sequence
  Description of Artificial Sequence: Synthetic oligonucleotide
aaucagggcuuugcagugg

SEQ ID NO: 2090401 - RNA, 19 nt, Artificial Sequence
  Description of Artificial Sequence: Synthetic oligonucleotide
agauugacagagguucuag

SEQ ID NO: 2090402 - RNA, 19 nt, Artificial Sequence
  Description of Artificial Sequence: Synthetic oligonucleotide
cuaggaauucccagugcac

SEQ ID NO: 2090403 - RNA, 19 nt, Artificial Sequence
  Description of Artificial Sequence: Synthetic oligonucleotide
cuucgaacucuccccagcc

SEQ ID NO: 2090404 - RNA, 19 nt, Artificial Sequence
  Description of Artificial Sequence: Synthetic oligonucleotide
gaaccaugcucuuucgcga

SEQ ID NO: 2090405 - RNA, 19 nt, Artificial Sequence
  Description of Artificial Sequence: Synthetic oligonucleotide
agagcuuggucugaaucag

SEQ ID NO: 2090406 - RNA, 19 nt, Artificial Sequence
  Description of Artificial Sequence: Synthetic oligonucleotide
cucuuucgcgacugaaggg

SEQ ID NO: 2090407 - RNA, 19 nt, Artificial Sequence
  Description of Artificial Sequence: Synthetic oligonucleotide
ugcccauuuccuuguagug

SEQ ID NO: 2090408 - RNA, 19 nt, Artificial Sequence
  Description of Artificial Sequence: Synthetic oligonucleotide
gauucagaacacagucuag

SEQ ID NO: 2090409 - RNA, 19 nt, Artificial Sequence
  Description of Artificial Sequence: Synthetic oligonucleotide
cuuagccgaagacucccgg

SEQ ID NO: 2090410 - RNA, 19 nt, Artificial Sequence
  Description of Artificial Sequence: Synthetic oligonucleotide
gaacaugauccuguccucc

SEQ ID NO: 2090411 - RNA, 19 nt, Artificial Sequence
  Description of Artificial Sequence: Synthetic oligonucleotide
caagaaccaugcucuuucg

SEQ ID NO: 2090412 - RNA, 19 nt, Artificial Sequence
  Description of Artificial Sequence: Synthetic oligonucleotide
cauagaacaguucucagau

SEQ ID NO: 2090413 - RNA, 19 nt, Artificial Sequence
  Description of Artificial Sequence: Synthetic oligonucleotide
auaucucauaaaguuacaa

SEQ ID NO: 2090414 - RNA, 19 nt, Artificial Sequence
  Description of Artificial Sequence: Synthetic oligonucleotide
uuagguugcguggaguaaa

SEQ ID NO: 2090415 - RNA, 19 nt, Artificial Sequence
  Description of Artificial Sequence: Synthetic oligonucleotide
gugcaugagguauagcgca

SEQ ID NO: 2090416 - RNA, 19 nt, Artificial Sequence
  Description of Artificial Sequence: Synthetic oligonucleotide
gacuuagccgaagacuccc

SEQ ID NO: 2090417 - RNA, 19 nt, Artificial Sequence
  Description of Artificial Sequence: Synthetic oligonucleotide
agugguguagauggaaacu

SEQ ID NO: 2090418 - RNA, 19 nt, Artificial Sequence
  Description of Artificial Sequence: Synthetic oligonucleotide
uuagccgaagacucccgga

SEQ ID NO: 2090419 - RNA, 19 nt, Artificial Sequence
  Description of Artificial Sequence: Synthetic oligonucleotide
uuguaguggugucuucaga

SEQ ID NO: 2090420 - RNA, 19 nt, Artificial Sequence
  Description of Artificial Sequence: Synthetic oligonucleotide
ccaucuuuagguugcgugg

SEQ ID NO: 2090421 - RNA, 19 nt, Artificial Sequence
  Description of Artificial Sequence: Synthetic oligonucleotide
agaugggccagcagcagcg

SEQ ID NO: 2090422 - RNA, 19 nt, Artificial Sequence
  Description of Artificial Sequence: Synthetic oligonucleotide
guugcguggaguaaagauc

SEQ ID NO: 2090423 - RNA, 19 nt, Artificial Sequence
  Description of Artificial Sequence: Synthetic oligonucleotide
cuggugccagccuacagug

SEQ ID NO: 2090424 - RNA, 19 nt, Artificial Sequence
  Description of Artificial Sequence: Synthetic oligonucleotide
uaggcacggaugcacuuca

SEQ ID NO: 2090425 - RNA, 19 nt, Artificial Sequence
  Description of Artificial Sequence: Synthetic oligonucleotide
cuucagaucugagugcaug

SEQ ID NO: 2090426 - RNA, 19 nt, Artificial Sequence
  Description of Artificial Sequence: Synthetic oligonucleotide
ugcccuaggaauucccagu

SEQ ID NO: 2090427 - RNA, 19 nt, Artificial Sequence
  Description of Artificial Sequence: Synthetic oligonucleotide
ucccggaagccuucgaacu

SEQ ID NO: 2090428 - RNA, 19 nt, Artificial Sequence
  Description of Artificial Sequence: Synthetic oligonucleotide
acggaugcacuucacugcu

SEQ ID NO: 2090429 - RNA, 19 nt, Artificial Sequence
  Description of Artificial Sequence: Synthetic oligonucleotide
agacuuagccgaagacucc

SEQ ID NO: 2090430 - RNA, 19 nt, Artificial Sequence
  Description of Artificial Sequence: Synthetic oligonucleotide
aggaccaggaaagagguuu

SEQ ID NO: 2090431 - RNA, 19 nt, Artificial Sequence
  Description of Artificial Sequence: Synthetic oligonucleotide
ggucuaaagaacaaacguc

SEQ ID NO: 2090432 - RNA, 19 nt, Artificial Sequence
  Description of Artificial Sequence: Synthetic oligonucleotide
ugggaguucaaagggcuga

SEQ ID NO: 2090433 - RNA, 19 nt, Artificial Sequence
  Description of Artificial Sequence: Synthetic oligonucleotide
aucuuuagguugcguggag

SEQ ID NO: 2090434 - RNA, 19 nt, Artificial Sequence
  Description of Artificial Sequence: Synthetic oligonucleotide
uggguggcgucuaugccga

SEQ ID NO: 2090435 - RNA, 19 nt, Artificial Sequence
  Description of Artificial Sequence: Synthetic oligonucleotide
uagccgaagacucccggaa

SEQ ID NO: 2090436 - RNA, 19 nt, Artificial Sequence
  Description of Artificial Sequence: Synthetic oligonucleotide
uucucagauucuaguacua

SEQ ID NO: 2090437 - RNA, 19 nt, Artificial Sequence
  Description of Artificial Sequence: Synthetic oligonucleotide
cucagacuuagccgaagac

SEQ ID NO: 2090438 - RNA, 19 nt, Artificial Sequence
  Description of Artificial Sequence: Synthetic oligonucleotide
ucccagugcaccccuucag

SEQ ID NO: 2090439 - RNA, 19 nt, Artificial Sequence
  Description of Artificial Sequence: Synthetic oligonucleotide
gucuaugccgaggaccagg

SEQ ID NO: 2090440 - RNA, 19 nt, Artificial Sequence
  Description of Artificial Sequence: Synthetic oligonucleotide
gcaagaaccaugcucuuuc

SEQ ID NO: 2090441 - RNA, 19 nt, Artificial Sequence
  Description of Artificial Sequence: Synthetic oligonucleotide
cacagucuaggcacggaug

SEQ ID NO: 2090442 - RNA, 19 nt, Artificial Sequence
  Description of Artificial Sequence: Synthetic oligonucleotide
uaacauggguuccgggaaa

SEQ ID NO: 2090443 - RNA, 19 nt, Artificial Sequence
  Description of Artificial Sequence: Synthetic oligonucleotide
cauuacuaaagaaugccau

SEQ ID NO: 2090444 - RNA, 19 nt, Artificial Sequence
  Description of Artificial Sequence: Synthetic oligonucleotide
aucugagugcaugagguau

SEQ ID NO: 2090445 - RNA, 19 nt, Artificial Sequence
  Description of Artificial Sequence: Synthetic oligonucleotide
uuggucugaaucagggcuu

SEQ ID NO: 2090446 - RNA, 19 nt, Artificial Sequence
  Description of Artificial Sequence: Synthetic oligonucleotide
gaacacagucuaggcacgg

SEQ ID NO: 2090447 - RNA, 19 nt, Artificial Sequence
  Description of Artificial Sequence: Synthetic oligonucleotide
gacucugaagaugggccag

SEQ ID NO: 2090448 - RNA, 19 nt, Artificial Sequence
  Description of Artificial Sequence: Synthetic oligonucleotide
ucuuuagguugcguggagu

SEQ ID NO: 2090449 - RNA, 19 nt, Artificial Sequence
  Description of Artificial Sequence: Synthetic oligonucleotide
gccaucuuuagguugcgug

SEQ ID NO: 2090450 - RNA, 19 nt, Artificial Sequence
  Description of Artificial Sequence: Synthetic oligonucleotide
uggguuccgggaaaacagu

SEQ ID NO: 2090451 - RNA, 19 nt, Artificial Sequence
  Description of Artificial Sequence: Synthetic oligonucleotide
acaguggccauagaacagu

SEQ ID NO: 2090452 - RNA, 19 nt, Artificial Sequence
  Description of Artificial Sequence: Synthetic oligonucleotide
guguagauggaaacugcug

SEQ ID NO: 2090453 - RNA, 19 nt, Artificial Sequence
  Description of Artificial Sequence: Synthetic oligonucleotide
guucucagauucuaguacu

SEQ ID NO: 2090454 - RNA, 19 nt, Artificial Sequence
  Description of Artificial Sequence: Synthetic oligonucleotide
cucagauucuaguacuaaa

SEQ ID NO: 2090455 - RNA, 19 nt, Artificial Sequence
  Description of Artificial Sequence: Synthetic oligonucleotide
gcaacuaacauggguuccg

SEQ ID NO: 2090456 - RNA, 19 nt, Artificial Sequence
  Description of Artificial Sequence: Synthetic oligonucleotide
aggauggacucugaagaug

SEQ ID NO: 2090457 - RNA, 19 nt, Artificial Sequence
  Description of Artificial Sequence: Synthetic oligonucleotide
cuaacauggguuccgggaa

SEQ ID NO: 2090458 - RNA, 19 nt, Artificial Sequence
  Description of Artificial Sequence: Synthetic oligonucleotide
aaccgcucuucuggguggc

SEQ ID NO: 2090459 - RNA, 19 nt, Artificial Sequence
  Description of Artificial Sequence: Synthetic oligonucleotide
acacagucuaggcacggau

SEQ ID NO: 2090460 - RNA, 19 nt, Artificial Sequence
  Description of Artificial Sequence: Synthetic oligonucleotide
uuuagguugcguggaguaa

SEQ ID NO: 2090461 - RNA, 19 nt, Artificial Sequence
  Description of Artificial Sequence: Synthetic oligonucleotide
cuuugcagugguguagaug

SEQ ID NO: 2090462 - RNA, 19 nt, Artificial Sequence
  Description of Artificial Sequence: Synthetic oligonucleotide
cugcccuaggaauucccag

SEQ ID NO: 2090463 - RNA, 19 nt, Artificial Sequence
  Description of Artificial Sequence: Synthetic oligonucleotide
uuguggaauggugguguag

SEQ ID NO: 2090464 - RNA, 19 nt, Artificial Sequence
  Description of Artificial Sequence: Synthetic oligonucleotide
uagcgcagauugacagagg

SEQ ID NO: 2090465 - RNA, 19 nt, Artificial Sequence
  Description of Artificial Sequence: Synthetic oligonucleotide
gauggacucugaagauggg

SEQ ID NO: 2090466 - RNA, 19 nt, Artificial Sequence
  Description of Artificial Sequence: Synthetic oligonucleotide
aaaccggcucugcccuagg

SEQ ID NO: 2090467 - RNA, 19 nt, Artificial Sequence
  Description of Artificial Sequence: Synthetic oligonucleotide
ugauccuguccuccagaac

SEQ ID NO: 2090468 - RNA, 19 nt, Artificial Sequence
  Description of Artificial Sequence: Synthetic oligonucleotide
cuaauggaaaccggcucug

SEQ ID NO: 2090469 - RNA, 19 nt, Artificial Sequence
  Description of Artificial Sequence: Synthetic oligonucleotide
gggaaaacaguggccauag

SEQ ID NO: 2090470 - RNA, 19 nt, Artificial Sequence
  Description of Artificial Sequence: Synthetic oligonucleotide
ugucccugagagcuugguc

SEQ ID NO: 2090471 - RNA, 19 nt, Artificial Sequence
  Description of Artificial Sequence: Synthetic oligonucleotide
caacuaacauggguuccgg

SEQ ID NO: 2090472 - RNA, 19 nt, Artificial Sequence
  Description of Artificial Sequence: Synthetic oligonucleotide
uucccgacagugagauuca

SEQ ID NO: 2090473 - RNA, 19 nt, Artificial Sequence
  Description of Artificial Sequence: Synthetic oligonucleotide
cuuuagguugcguggagua

SEQ ID NO: 2090474 - RNA, 19 nt, Artificial Sequence
  Description of Artificial Sequence: Synthetic oligonucleotide
augauccuguccuccagaa

SEQ ID NO: 2090475 - RNA, 19 nt, Artificial Sequence
  Description of Artificial Sequence: Synthetic oligonucleotide
ccaggguccacccugcugc

SEQ ID NO: 2090476 - RNA, 19 nt, Artificial Sequence
  Description of Artificial Sequence: Synthetic oligonucleotide
cuugaaacgcaaaccuaaa

SEQ ID NO: 2090477 - RNA, 19 nt, Artificial Sequence
  Description of Artificial Sequence: Synthetic oligonucleotide
gaaaccggcucugcccuag

SEQ ID NO: 2090478 - RNA, 19 nt, Artificial Sequence
  Description of Artificial Sequence: Synthetic oligonucleotide
cugggacuucuugaaacgc

SEQ ID NO: 2090479 - RNA, 19 nt, Artificial Sequence
  Description of Artificial Sequence: Synthetic oligonucleotide
cucuuggcuuuuagcaaac

SEQ ID NO: 2090480 - RNA, 19 nt, Artificial Sequence
  Description of Artificial Sequence: Synthetic oligonucleotide
cuuucugaggucagaaccu

SEQ ID NO: 2090481 - RNA, 19 nt, Artificial Sequence
  Description of Artificial Sequence: Synthetic oligonucleotide
agaugucccugagagcuug

SEQ ID NO: 2090482 - RNA, 19 nt, Artificial Sequence
  Description of Artificial Sequence: Synthetic oligonucleotide
cugagugcaugagguauag

SEQ ID NO: 2090483 - RNA, 19 nt, Artificial Sequence
  Description of Artificial Sequence: Synthetic oligonucleotide
uuccuagauucagaacaca

SEQ ID NO: 2090484 - RNA, 19 nt, Artificial Sequence
  Description of Artificial Sequence: Synthetic oligonucleotide
guggaauggugguguagug

SEQ ID NO: 2090485 - RNA, 19 nt, Artificial Sequence
  Description of Artificial Sequence: Synthetic oligonucleotide
aacacagucuaggcacgga

SEQ ID NO: 2090486 - RNA, 19 nt, Artificial Sequence
  Description of Artificial Sequence: Synthetic oligonucleotide
cucugcccuaggaauuccc

SEQ ID NO: 2090487 - RNA, 19 nt, Artificial Sequence
  Description of Artificial Sequence: Synthetic oligonucleotide
augcuaauggaaaccggcu

SEQ ID NO: 2090488 - RNA, 19 nt, Artificial Sequence
  Description of Artificial Sequence: Synthetic oligonucleotide
cugaacucauggcuccaac

SEQ ID NO: 2090489 - RNA, 19 nt, Artificial Sequence
  Description of Artificial Sequence: Synthetic oligonucleotide
agguucuaggcaacuaaca

SEQ ID NO: 2090490 - RNA, 19 nt, Artificial Sequence
  Description of Artificial Sequence: Synthetic oligonucleotide
aacauggguuccgggaaaa

SEQ ID NO: 2090491 - RNA, 19 nt, Artificial Sequence
  Description of Artificial Sequence: Synthetic oligonucleotide
auccuguccuccagaaccg

SEQ ID NO: 2090492 - RNA, 19 nt, Artificial Sequence
  Description of Artificial Sequence: Synthetic oligonucleotide
cuguccuccagaaccgcuc

SEQ ID NO: 2090493 - RNA, 19 nt, Artificial Sequence
  Description of Artificial Sequence: Synthetic oligonucleotide
agcagacccggugucagug

SEQ ID NO: 2090494 - RNA, 19 nt, Artificial Sequence
  Description of Artificial Sequence: Synthetic oligonucleotide
gaacucuccccagccgccg

SEQ ID NO: 2090495 - RNA, 19 nt, Artificial Sequence
  Description of Artificial Sequence: Synthetic oligonucleotide
uuuguggaaugguggugua

SEQ ID NO: 2090496 - RNA, 19 nt, Artificial Sequence
  Description of Artificial Sequence: Synthetic oligonucleotide
gaauggugguguagugccc

SEQ ID NO: 2090497 - RNA, 19 nt, Artificial Sequence
  Description of Artificial Sequence: Synthetic oligonucleotide
gagguuuucccgacaguga

SEQ ID NO: 2090498 - RNA, 19 nt, Artificial Sequence
  Description of Artificial Sequence: Synthetic oligonucleotide
ggugccagccuacaguguc

SEQ ID NO: 2090499 - RNA, 19 nt, Artificial Sequence
  Description of Artificial Sequence: Synthetic oligonucleotide
aguggccauagaacaguuc

SEQ ID NO: 2090500 - RNA, 19 nt, Artificial Sequence
  Description of Artificial Sequence: Synthetic oligonucleotide
cuaggcaacuaacaugggu

SEQ ID NO: 2090501 - RNA, 19 nt, Artificial Sequence
  Description of Artificial Sequence: Synthetic oligonucleotide
aaccggcucugcccuagga

SEQ ID NO: 2090502 - RNA, 19 nt, Artificial Sequence
  Description of Artificial Sequence: Synthetic oligonucleotide
acagugagauucacuccag

SEQ ID NO: 2090503 - RNA, 19 nt, Artificial Sequence
  Description of Artificial Sequence: Synthetic oligonucleotide
acuuagccgaagacucccg

SEQ ID NO: 2090504 - RNA, 19 nt, Artificial Sequence
  Description of Artificial Sequence: Synthetic oligonucleotide
aagcagacccggugucagu

SEQ ID NO: 2090505 - RNA, 19 nt, Artificial Sequence
  Description of Artificial Sequence: Synthetic oligonucleotide
uccuccagaaccgcucuuc

SEQ ID NO: 2090506 - RNA, 19 nt, Artificial Sequence
  Description of Artificial Sequence: Synthetic oligonucleotide
ccauuacuaaagaaugcca

SEQ ID NO: 2090507 - RNA, 19 nt, Artificial Sequence
  Description of Artificial Sequence: Synthetic oligonucleotide
gcucuuccggcuuucugag

SEQ ID NO: 2090508 - RNA, 19 nt, Artificial Sequence
  Description of Artificial Sequence: Synthetic oligonucleotide
cagugcaccccuucagauc

SEQ ID NO: 2090509 - RNA, 19 nt, Artificial Sequence
  Description of Artificial Sequence: Synthetic oligonucleotide
ucugaacucauggcuccaa

SEQ ID NO: 2090510 - RNA, 19 nt, Artificial Sequence
  Description of Artificial Sequence: Synthetic oligonucleotide
ggcgucuaugccgaggacc

SEQ ID NO: 2090511 - RNA, 19 nt, Artificial Sequence
  Description of Artificial Sequence: Synthetic oligonucleotide
guagguaagcugcccuguc

SEQ ID NO: 2090512 - RNA, 19 nt, Artificial Sequence
  Description of Artificial Sequence: Synthetic oligonucleotide
ucuccgcggcugauggucu

SEQ ID NO: 2090513 - RNA, 19 nt, Artificial Sequence
  Description of Artificial Sequence: Synthetic oligonucleotide
gaucugagugcaugaggua

SEQ ID NO: 2090514 - RNA, 19 nt, Artificial Sequence
  Description of Artificial Sequence: Synthetic oligonucleotide
caucuuuagguugcgugga

SEQ ID NO: 2090515 - RNA, 19 nt, Artificial Sequence
  Description of Artificial Sequence: Synthetic oligonucleotide
ccuaggaauucccagugca

SEQ ID NO: 2090516 - RNA, 19 nt, Artificial Sequence
  Description of Artificial Sequence: Synthetic oligonucleotide
gcuaauggaaaccggcucu

SEQ ID NO: 2090517 - RNA, 19 nt, Artificial Sequence
  Description of Artificial Sequence: Synthetic oligonucleotide
acagagguucuaggcaacu

SEQ ID NO: 2090518 - RNA, 19 nt, Artificial Sequence
  Description of Artificial Sequence: Synthetic oligonucleotide
ugagugcaugagguauagc

SEQ ID NO: 2090519 - RNA, 19 nt, Artificial Sequence
  Description of Artificial Sequence: Synthetic oligonucleotide
gguucuaggcaacuaacau

SEQ ID NO: 2090520 - RNA, 19 nt, Artificial Sequence
  Description of Artificial Sequence: Synthetic oligonucleotide
guuuucccgacagugagau

SEQ ID NO: 2090521 - RNA, 19 nt, Artificial Sequence
  Description of Artificial Sequence: Synthetic oligonucleotide
gcuuuuagcaaacaccauu

SEQ ID NO: 2090522 - RNA, 19 nt, Artificial Sequence
  Description of Artificial Sequence: Synthetic oligonucleotide
gguugcguggaguaaagau

SEQ ID NO: 2090523 - RNA, 19 nt, Artificial Sequence
  Description of Artificial Sequence: Synthetic oligonucleotide
gcccuaggaauucccagug

SEQ ID NO: 2090524 - RNA, 19 nt, Artificial Sequence
  Description of Artificial Sequence: Synthetic oligonucleotide
ccagaaccgcucuucuggg

SEQ ID NO: 2090525 - RNA, 19 nt, Artificial Sequence
  Description of Artificial Sequence: Synthetic oligonucleotide
ggcaacuaacauggguucc

SEQ ID NO: 2090526 - RNA, 19 nt, Artificial Sequence
  Description of Artificial Sequence: Synthetic oligonucleotide
gguauagcgcagauugaca

SEQ ID NO: 2090527 - RNA, 19 nt, Artificial Sequence
  Description of Artificial Sequence: Synthetic oligonucleotide
cuacaguguccccagaaau

SEQ ID NO: 2090528 - RNA, 19 nt, Artificial Sequence
  Description of Artificial Sequence: Synthetic oligonucleotide
cucauggcuccaacuguga

SEQ ID NO: 2090529 - RNA, 19 nt, Artificial Sequence
  Description of Artificial Sequence: Synthetic oligonucleotide
uccuuguaguggugucuuc

SEQ ID NO: 2090530 - RNA, 19 nt, Artificial Sequence
  Description of Artificial Sequence: Synthetic oligonucleotide
guagugcccauuuccuugu

SEQ ID NO: 2090531 - RNA, 19 nt, Artificial Sequence
  Description of Artificial Sequence: Synthetic oligonucleotide
ggcuuucugaggucagaac

SEQ ID NO: 2090532 - RNA, 19 nt, Artificial Sequence
  Description of Artificial Sequence: Synthetic oligonucleotide
gucuccgcggcugaugguc

SEQ ID NO: 2090533 - RNA, 19 nt, Artificial Sequence
  Description of Artificial Sequence: Synthetic oligonucleotide
ccagccgccgcugagcucc

SEQ ID NO: 2090534 - RNA, 19 nt, Artificial Sequence
  Description of Artificial Sequence: Synthetic oligonucleotide
guguucugaagggcucucc

SEQ ID NO: 2090535 - RNA, 19 nt, Artificial Sequence
  Description of Artificial Sequence: Synthetic oligonucleotide
gaauucccagugcaccccu

SEQ ID NO: 2090536 - RNA, 19 nt, Artificial Sequence
  Description of Artificial Sequence: Synthetic oligonucleotide
ccccuggcaagaaccaugc

SEQ ID NO: 2090537 - RNA, 19 nt, Artificial Sequence
  Description of Artificial Sequence: Synthetic oligonucleotide
uccuguccuccagaaccgc

SEQ ID NO: 2090538 - RNA, 19 nt, Artificial Sequence
  Description of Artificial Sequence: Synthetic oligonucleotide
gguggcgucuaugccgagg

SEQ ID NO: 2090539 - RNA, 19 nt, Artificial Sequence
  Description of Artificial Sequence: Synthetic oligonucleotide
cuuccggcuuucugagguc

SEQ ID NO: 2090540 - RNA, 19 nt, Artificial Sequence
  Description of Artificial Sequence: Synthetic oligonucleotide
agacccggugucaguguuc

SEQ ID NO: 2090541 - RNA, 19 nt, Artificial Sequence
  Description of Artificial Sequence: Synthetic oligonucleotide
agacucccggaagccuucg

SEQ ID NO: 2090542 - RNA, 19 nt, Artificial Sequence
  Description of Artificial Sequence: Synthetic oligonucleotide
gugguguagugcccauuuc

SEQ ID NO: 2090543 - RNA, 19 nt, Artificial Sequence
  Description of Artificial Sequence: Synthetic oligonucleotide
gggaguucaaagggcugag

SEQ ID NO: 2090544 - RNA, 19 nt, Artificial Sequence
  Description of Artificial Sequence: Synthetic oligonucleotide
cagugagauucacuccaga

SEQ ID NO: 2090545 - RNA, 19 nt, Artificial Sequence
  Description of Artificial Sequence: Synthetic oligonucleotide
uccccagccgccgcugagc

SEQ ID NO: 2090546 - RNA, 19 nt, Artificial Sequence
  Description of Artificial Sequence: Synthetic oligonucleotide
gcucagacuuagccgaaga

SEQ ID NO: 2090547 - RNA, 19 nt, Artificial Sequence
  Description of Artificial Sequence: Synthetic oligonucleotide
gugccagccuacagugucc

SEQ ID NO: 2090548 - RNA, 19 nt, Artificial Sequence
  Description of Artificial Sequence: Synthetic oligonucleotide
gggcuuugcagugguguag

SEQ ID NO: 2090549 - RNA, 19 nt, Artificial Sequence
  Description of Artificial Sequence: Synthetic oligonucleotide
uggcgucuaugccgaggac

SEQ ID NO: 2090550 - RNA, 19 nt, Artificial Sequence
  Description of Artificial Sequence: Synthetic oligonucleotide
ugcguggaguaaagaucuu

SEQ ID NO: 2090551 - RNA, 19 nt, Artificial Sequence
  Description of Artificial Sequence: Synthetic oligonucleotide
ccuagauucagaacacagu

SEQ ID NO: 2090552 - RNA, 19 nt, Artificial Sequence
  Description of Artificial Sequence: Synthetic oligonucleotide
agcgccugucacccagggu

SEQ ID NO: 2090553 - RNA, 19 nt, Artificial Sequence
  Description of Artificial Sequence: Synthetic oligonucleotide
gcgucuaugccgaggacca

SEQ ID NO: 2090554 - RNA, 19 nt, Artificial Sequence
  Description of Artificial Sequence: Synthetic oligonucleotide
agguugcguggaguaaaga

SEQ ID NO: 2090555 - RNA, 19 nt, Artificial Sequence
  Description of Artificial Sequence: Synthetic oligonucleotide
gguguagauggaaacugcu

SEQ ID NO: 2090556 - RNA, 19 nt, Artificial Sequence
  Description of Artificial Sequence: Synthetic oligonucleotide
augcucuuucgcgacugaa

SEQ ID NO: 2090557 - RNA, 19 nt, Artificial Sequence
  Description of Artificial Sequence: Synthetic oligonucleotide
ugccgaggaccaggaaaga

SEQ ID NO: 2090558 - RNA, 19 nt, Artificial Sequence
  Description of Artificial Sequence: Synthetic oligonucleotide
gccagaugucccugagagc

SEQ ID NO: 2090559 - RNA, 19 nt, Artificial Sequence
  Description of Artificial Sequence: Synthetic oligonucleotide
augucccugagagcuuggu

SEQ ID NO: 2090560 - RNA, 19 nt, Artificial Sequence
  Description of Artificial Sequence: Synthetic oligonucleotide
gacccggugucaguguucu

SEQ ID NO: 2090561 - RNA, 19 nt, Artificial Sequence
  Description of Artificial Sequence: Synthetic oligonucleotide
gagcuccccugggucgugg

SEQ ID NO: 2090562 - RNA, 19 nt, Artificial Sequence
  Description of Artificial Sequence: Synthetic oligonucleotide
cagaaacaggcuguaggua

SEQ ID NO: 2090563 - RNA, 19 nt, Artificial Sequence
  Description of Artificial Sequence: Synthetic oligonucleotide
gguguagugcccauuuccu

SEQ ID NO: 2090564 - RNA, 19 nt, Artificial Sequence
  Description of Artificial Sequence: Synthetic oligonucleotide
caaacgucuucaguugccu

SEQ ID NO: 2090565 - RNA, 19 nt, Artificial Sequence
  Description of Artificial Sequence: Synthetic oligonucleotide
uuuucccgacagugagauu

SEQ ID NO: 2090566 - RNA, 19 nt, Artificial Sequence
  Description of Artificial Sequence: Synthetic oligonucleotide
cugccccuggcaagaacca

SEQ ID NO: 2090567 - RNA, 19 nt, Artificial Sequence
  Description of Artificial Sequence: Synthetic oligonucleotide
gccgcugagcuccccuggg

SEQ ID NO: 2090568 - RNA, 19 nt, Artificial Sequence
  Description of Artificial Sequence: Synthetic oligonucleotide
acgucuucaguugccuguu

SEQ ID NO: 2090569 - RNA, 19 nt, Artificial Sequence
  Description of Artificial Sequence: Synthetic oligonucleotide
cccuaggaauucccagugc

SEQ ID NO: 2090570 - RNA, 19 nt, Artificial Sequence
  Description of Artificial Sequence: Synthetic oligonucleotide
aauucccagugcaccccuu

SEQ ID NO: 2090571 - RNA, 19 nt, Artificial Sequence
  Description of Artificial Sequence: Synthetic oligonucleotide
aggcacggaugcacuucac

SEQ ID NO: 2090572 - RNA, 19 nt, Artificial Sequence
  Description of Artificial Sequence: Synthetic oligonucleotide
caugcucuuucgcgacuga

SEQ ID NO: 2090573 - RNA, 19 nt, Artificial Sequence
  Description of Artificial Sequence: Synthetic oligonucleotide
ccgaagacucccggaagcc

SEQ ID NO: 2090574 - RNA, 19 nt, Artificial Sequence
  Description of Artificial Sequence: Synthetic oligonucleotide
caugagguauagcgcagau

SEQ ID NO: 2090575 - RNA, 19 nt, Artificial Sequence
  Description of Artificial Sequence: Synthetic oligonucleotide
ucccgacagugagauucac

SEQ ID NO: 2090576 - RNA, 19 nt, Artificial Sequence
  Description of Artificial Sequence: Synthetic oligonucleotide
gccuucgaacucuccccag

SEQ ID NO: 2090577 - RNA, 19 nt, Artificial Sequence
  Description of Artificial Sequence: Synthetic oligonucleotide
cagggcuuugcaguggugu

SEQ ID NO: 2090578 - RNA, 19 nt, Artificial Sequence
  Description of Artificial Sequence: Synthetic oligonucleotide
cagauugacagagguucua

SEQ ID NO: 2090579 - RNA, 19 nt, Artificial Sequence
  Description of Artificial Sequence: Synthetic oligonucleotide
ggcucagacuuagccgaag

SEQ ID NO: 2090580 - RNA, 19 nt, Artificial Sequence
  Description of Artificial Sequence: Synthetic oligonucleotide
gccuacaguguccccagaa

SEQ ID NO: 2090581 - RNA, 19 nt, Artificial Sequence
  Description of Artificial Sequence: Synthetic oligonucleotide
accgcucuucuggguggcg

SEQ ID NO: 2090582 - RNA, 19 nt, Artificial Sequence
  Description of Artificial Sequence: Synthetic oligonucleotide
cgaacucuccccagccgcc

SEQ ID NO: 2090583 - RNA, 19 nt, Artificial Sequence
  Description of Artificial Sequence: Synthetic oligonucleotide
cuccgcggcugauggucug

SEQ ID NO: 2090584 - RNA, 19 nt, Artificial Sequence
  Description of Artificial Sequence: Synthetic oligonucleotide
ugagcuccccugggucgug

SEQ ID NO: 2090585 - RNA, 19 nt, Artificial Sequence
  Description of Artificial Sequence: Synthetic oligonucleotide
guguagugcccauuuccuu

SEQ ID NO: 2090586 - RNA, 19 nt, Artificial Sequence
  Description of Artificial Sequence: Synthetic oligonucleotide
ggcacggaugcacuucacu

SEQ ID NO: 2090587 - RNA, 19 nt, Artificial Sequence
  Description of Artificial Sequence: Synthetic oligonucleotide
uggugguguagugcccauu

SEQ ID NO: 2090588 - RNA, 19 nt, Artificial Sequence
  Description of Artificial Sequence: Synthetic oligonucleotide
cagucuaggcacggaugca

SEQ ID NO: 2090589 - RNA, 19 nt, Artificial Sequence
  Description of Artificial Sequence: Synthetic oligonucleotide
gcaugagguauagcgcaga

SEQ ID NO: 2090590 - RNA, 19 nt, Artificial Sequence
  Description of Artificial Sequence: Synthetic oligonucleotide
cccggaagccuucgaacuc

SEQ ID NO: 2090591 - RNA, 19 nt, Artificial Sequence
  Description of Artificial Sequence: Synthetic oligonucleotide
cggugaagcagacccggug

SEQ ID NO: 2090592 - RNA, 19 nt, Artificial Sequence
  Description of Artificial Sequence: Synthetic oligonucleotide
caguguccccagaaaugcu

SEQ ID NO: 2090593 - RNA, 19 nt, Artificial Sequence
  Description of Artificial Sequence: Synthetic oligonucleotide
cuaugccgaggaccaggaa

SEQ ID NO: 2090594 - RNA, 19 nt, Artificial Sequence
  Description of Artificial Sequence: Synthetic oligonucleotide
cccagugcaccccuucaga

SEQ ID NO: 2090595 - RNA, 19 nt, Artificial Sequence
  Description of Artificial Sequence: Synthetic oligonucleotide
ggcucucccugggaguuca

SEQ ID NO: 2090596 - RNA, 19 nt, Artificial Sequence
  Description of Artificial Sequence: Synthetic oligonucleotide
cagaaccgcucuucugggu

SEQ ID NO: 2090597 - RNA, 19 nt, Artificial Sequence
  Description of Artificial Sequence: Synthetic oligonucleotide
gcucugcccuaggaauucc

SEQ ID NO: 2090598 - RNA, 19 nt, Artificial Sequence
  Description of Artificial Sequence: Synthetic oligonucleotide
gucacccaggguccacccu

SEQ ID NO: 2090599 - RNA, 19 nt, Artificial Sequence
  Description of Artificial Sequence: Synthetic oligonucleotide
gcagauugacagagguucu

SEQ ID NO: 2090600 - RNA, 19 nt, Artificial Sequence
  Description of Artificial Sequence: Synthetic oligonucleotide
cguggaguaaagaucuuuu

SEQ ID NO: 2090601 - RNA, 19 nt, Artificial Sequence
  Description of Artificial Sequence: Synthetic oligonucleotide
caguggccauagaacaguu

SEQ ID NO: 2090602 - RNA, 19 nt, Artificial Sequence
  Description of Artificial Sequence: Synthetic oligonucleotide
gcaccuggugccagccuac

SEQ ID NO: 2090603 - RNA, 19 nt, Artificial Sequence
  Description of Artificial Sequence: Synthetic oligonucleotide
ccggugucaguguucugaa

SEQ ID NO: 2090604 - RNA, 19 nt, Artificial Sequence
  Description of Artificial Sequence: Synthetic oligonucleotide
cagacccggugucaguguu

SEQ ID NO: 2090605 - RNA, 19 nt, Artificial Sequence
  Description of Artificial Sequence: Synthetic oligonucleotide
ccagugcaccccuucagau

SEQ ID NO: 2090606 - RNA, 19 nt, Artificial Sequence
  Description of Artificial Sequence: Synthetic oligonucleotide
cugagcuccccugggucgu

SEQ ID NO: 2090607 - RNA, 19 nt, Artificial Sequence
  Description of Artificial Sequence: Synthetic oligonucleotide
ccgcggcugauggucugcg

SEQ ID NO: 2090608 - RNA, 19 nt, Artificial Sequence
  Description of Artificial Sequence: Synthetic oligonucleotide
ggcaagaaccaugcucuuu

SEQ ID NO: 2090609 - RNA, 19 nt, Artificial Sequence
  Description of Artificial Sequence: Synthetic oligonucleotide
caggggucaucaggcaccu

SEQ ID NO: 2090610 - RNA, 19 nt, Artificial Sequence
  Description of Artificial Sequence: Synthetic oligonucleotide
cagaugucccugagagcuu

SEQ ID NO: 2090611 - RNA, 19 nt, Artificial Sequence
  Description of Artificial Sequence: Synthetic oligonucleotide
ggcuuuuagcaaacaccau

SEQ ID NO: 2090612 - RNA, 19 nt, Artificial Sequence
  Description of Artificial Sequence: Synthetic oligonucleotide
ccugagagcuuggucugaa

SEQ ID NO: 2090613 - RNA, 19 nt, Artificial Sequence
  Description of Artificial Sequence: Synthetic oligonucleotide
ggguggcgucuaugccgag

SEQ ID NO: 2090614 - RNA, 19 nt, Artificial Sequence
  Description of Artificial Sequence: Synthetic oligonucleotide
ccgccgcugagcuccccug

SEQ ID NO: 2090615 - RNA, 19 nt, Artificial Sequence
  Description of Artificial Sequence: Synthetic oligonucleotide
ggaccaggaaagagguuuu

SEQ ID NO: 2090616 - RNA, 19 nt, Artificial Sequence
  Description of Artificial Sequence: Synthetic oligonucleotide
cgucuucaguugccuguuc

SEQ ID NO: 2090617 - RNA, 19 nt, Artificial Sequence
  Description of Artificial Sequence: Synthetic oligonucleotide
ccggaagccuucgaacucu

SEQ ID NO: 2090618 - RNA, 19 nt, Artificial Sequence
  Description of Artificial Sequence: Synthetic oligonucleotide
ccggcuuucugaggucaga

SEQ ID NO: 2090619 - RNA, 19 nt, Artificial Sequence
  Description of Artificial Sequence: Synthetic oligonucleotide
cgucuaugccgaggaccag

SEQ ID NO: 2090620 - RNA, 19 nt, Artificial Sequence
  Description of Artificial Sequence: Synthetic oligonucleotide
cggcuuucugaggucagaa

SEQ ID NO: 2090621 - RNA, 19 nt, Artificial Sequence
  Description of Artificial Sequence: Synthetic oligonucleotide
ggucuccgcggcugauggu

SEQ ID NO: 2090622 - RNA, 19 nt, Artificial Sequence
  Description of Artificial Sequence: Synthetic oligonucleotide
cccugagagcuuggucuga

SEQ ID NO: 2090623 - RNA, 19 nt, Artificial Sequence
  Description of Artificial Sequence: Synthetic oligonucleotide
gcgcagauugacagagguu

SEQ ID NO: 2090624 - RNA, 19 nt, Artificial Sequence
  Description of Artificial Sequence: Synthetic oligonucleotide
ccgggaaaacaguggccau

SEQ ID NO: 2090625 - RNA, 19 nt, Artificial Sequence
  Description of Artificial Sequence: Synthetic oligonucleotide
cgaagacucccggaagccu

SEQ ID NO: 2090626 - RNA, 19 nt, Artificial Sequence
  Description of Artificial Sequence: Synthetic oligonucleotide
gcggcucucccugggaguu

SEQ ID NO: 2090627 - RNA, 19 nt, Artificial Sequence
  Description of Artificial Sequence: Synthetic oligonucleotide
ccccagccgccgcugagcu

SEQ ID NO: 2090628 - RNA, 19 nt, Artificial Sequence
  Description of Artificial Sequence: Synthetic oligonucleotide
cggcucagacuuagccgaa

SEQ ID NO: 2090629 - RNA, 19 nt, Artificial Sequence
  Description of Artificial Sequence: Synthetic oligonucleotide
ccgcucuucuggguggcgu

SEQ ID NO: 2090630 - RNA, 19 nt, Artificial Sequence
  Description of Artificial Sequence: Synthetic oligonucleotide
cggcucucccugggaguuc

SEQ ID NO: 2090631 - RNA, 19 nt, Artificial Sequence
  Description of Artificial Sequence: Synthetic oligonucleotide
cggaugcacuucacugcuu

SEQ ID NO: 2090632 - RNA, 19 nt, Artificial Sequence
  Description of Artificial Sequence: Synthetic oligonucleotide
aaauuauacaguuagaggc

SEQ ID NO: 2090633 - RNA, 19 nt, Artificial Sequence
  Description of Artificial Sequence: Synthetic oligonucleotide
aauuguacagcuuugcucc

SEQ ID NO: 2090634 - RNA, 19 nt, Artificial Sequence
  Description of Artificial Sequence: Synthetic oligonucleotide
aaagaaaggucacaagugc

SEQ ID NO: 2090635 - RNA, 19 nt, Artificial Sequence
  Description of Artificial Sequence: Synthetic oligonucleotide
uguaaagucaucuucaggc

SEQ ID NO: 2090636 - RNA, 19 nt, Artificial Sequence
  Description of Artificial Sequence: Synthetic oligonucleotide
aauuuuaucaacaaaccuc

SEQ ID NO: 2090637 - RNA, 19 nt, Artificial Sequence
  Description of Artificial Sequence: Synthetic oligonucleotide
aaaucuguaaacuaaacau

SEQ ID NO: 2090638 - RNA, 19 nt, Artificial Sequence
  Description of Artificial Sequence: Synthetic oligonucleotide
aagcaaauuauacaguuag

SEQ ID NO: 2090639 - RNA, 19 nt, Artificial Sequence
  Description of Artificial Sequence: Synthetic oligonucleotide
aaauguuccauugugcacc

SEQ ID NO: 2090640 - RNA, 19 nt, Artificial Sequence
  Description of Artificial Sequence: Synthetic oligonucleotide
agggauauaaacaucaucc

SEQ ID NO: 2090641 - RNA, 19 nt, Artificial Sequence
  Description of Artificial Sequence: Synthetic oligonucleotide
uguauuagagaccucuucg

SEQ ID NO: 2090642 - RNA, 19 nt, Artificial Sequence
  Description of Artificial Sequence: Synthetic oligonucleotide
guaauuuugacauuggaug

SEQ ID NO: 2090643 - RNA, 19 nt, Artificial Sequence
  Description of Artificial Sequence: Synthetic oligonucleotide
aaugcucaaacuuaaguug

SEQ ID NO: 2090644 - RNA, 19 nt, Artificial Sequence
  Description of Artificial Sequence: Synthetic oligonucleotide
uucgaagcaaauuauacag

SEQ ID NO: 2090645 - RNA, 19 nt, Artificial Sequence
  Description of Artificial Sequence: Synthetic oligonucleotide
uuaucaacaaaccucauaa

SEQ ID NO: 2090646 - RNA, 19 nt, Artificial Sequence
  Description of Artificial Sequence: Synthetic oligonucleotide
ugaggaaaagcuuuggagg

SEQ ID NO: 2090647 - RNA, 19 nt, Artificial Sequence
  Description of Artificial Sequence: Synthetic oligonucleotide
auuggaugcagcuuuaaac

SEQ ID NO: 2090648 - RNA, 19 nt, Artificial Sequence
  Description of Artificial Sequence: Synthetic oligonucleotide
uuugucauguuuuauuggg

SEQ ID NO: 2090649 - RNA, 19 nt, Artificial Sequence
  Description of Artificial Sequence: Synthetic oligonucleotide
aauuugucauguuuuauug

SEQ ID NO: 2090650 - RNA, 19 nt, Artificial Sequence
  Description of Artificial Sequence: Synthetic oligonucleotide
aauuauacaguuagaggcc

SEQ ID NO: 2090651 - RNA, 19 nt, Artificial Sequence
  Description of Artificial Sequence: Synthetic oligonucleotide
ugaaauggcucacaaaacc

SEQ ID NO: 2090652 - RNA, 19 nt, Artificial Sequence
  Description of Artificial Sequence: Synthetic oligonucleotide
aucaacaaaccucauaauc

SEQ ID NO: 2090653 - RNA, 19 nt, Artificial Sequence
  Description of Artificial Sequence: Synthetic oligonucleotide
aaacgcacaauuuaauaug

SEQ ID NO: 2090654 - RNA, 19 nt, Artificial Sequence
  Description of Artificial Sequence: Synthetic oligonucleotide
aaaacgcacaauuuaauau

SEQ ID NO: 2090655 - RNA, 19 nt, Artificial Sequence
  Description of Artificial Sequence: Synthetic oligonucleotide
gaaauguagugcuugacgc

SEQ ID NO: 2090656 - RNA, 19 nt, Artificial Sequence
  Description of Artificial Sequence: Synthetic oligonucleotide
ucuuucaggaagcaggaag

SEQ ID NO: 2090657 - RNA, 19 nt, Artificial Sequence
  Description of Artificial Sequence: Synthetic oligonucleotide
uuuuaaugaacucugucuc

SEQ ID NO: 2090658 - RNA, 19 nt, Artificial Sequence
  Description of Artificial Sequence: Synthetic oligonucleotide
uguaaacuaaacauucuga

SEQ ID NO: 2090659 - RNA, 19 nt, Artificial Sequence
  Description of Artificial Sequence: Synthetic oligonucleotide
gaguacaaaguguagagug

SEQ ID NO: 2090660 - RNA, 19 nt, Artificial Sequence
  Description of Artificial Sequence: Synthetic oligonucleotide
uuuucgaagcaaauuauac

SEQ ID NO: 2090661 - RNA, 19 nt, Artificial Sequence
  Description of Artificial Sequence: Synthetic oligonucleotide
uguucgaugaccuccaaca

SEQ ID NO: 2090662 - RNA, 19 nt, Artificial Sequence
  Description of Artificial Sequence: Synthetic oligonucleotide
uaauuuugacauuggaugc

SEQ ID NO: 2090663 - RNA, 19 nt, Artificial Sequence
  Description of Artificial Sequence: Synthetic oligonucleotide
acuagcuuugugcacagac

SEQ ID NO: 2090664 - RNA, 19 nt, Artificial Sequence
  Description of Artificial Sequence: Synthetic oligonucleotide
uauuaggucuuuucgaagc

SEQ ID NO: 2090665 - RNA, 19 nt, Artificial Sequence
  Description of Artificial Sequence: Synthetic oligonucleotide
aaagcuaggucucauaaua

SEQ ID NO: 2090666 - RNA, 19 nt, Artificial Sequence
  Description of Artificial Sequence: Synthetic oligonucleotide
uaaagguucaaauauuaaa

SEQ ID NO: 2090667 - RNA, 19 nt, Artificial Sequence
  Description of Artificial Sequence: Synthetic oligonucleotide
ucaaaaguuacccaaggua

SEQ ID NO: 2090668 - RNA, 19 nt, Artificial Sequence
  Description of Artificial Sequence: Synthetic oligonucleotide
uuagagaccucuucgaucu

SEQ ID NO: 2090669 - RNA, 19 nt, Artificial Sequence
  Description of Artificial Sequence: Synthetic oligonucleotide
aaagguucaaauauuaaau

SEQ ID NO: 2090670 - RNA, 19 nt, Artificial Sequence
  Description of Artificial Sequence: Synthetic oligonucleotide
uauuaauuucuguaaaguc

SEQ ID NO: 2090671 - RNA, 19 nt, Artificial Sequence
  Description of Artificial Sequence: Synthetic oligonucleotide
ugggaugauuaaaauaaag

SEQ ID NO: 2090672 - RNA, 19 nt, Artificial Sequence
  Description of Artificial Sequence: Synthetic oligonucleotide
augaguacaaaguguagag

SEQ ID NO: 2090673 - RNA, 19 nt, Artificial Sequence
  Description of Artificial Sequence: Synthetic oligonucleotide
uuuggaaauauuugacuug

SEQ ID NO: 2090674 - RNA, 19 nt, Artificial Sequence
  Description of Artificial Sequence: Synthetic oligonucleotide
auuagggcaguacauugac

SEQ ID NO: 2090675 - RNA, 19 nt, Artificial Sequence
  Description of Artificial Sequence: Synthetic oligonucleotide
agugauauuccccacgugu

SEQ ID NO: 2090676 - RNA, 19 nt, Artificial Sequence
  Description of Artificial Sequence: Synthetic oligonucleotide
ugacuagcaagguaaagug

SEQ ID NO: 2090677 - RNA, 19 nt, Artificial Sequence
  Description of Artificial Sequence: Synthetic oligonucleotide
auuagagaccucuucgauc

SEQ ID NO: 2090678 - RNA, 19 nt, Artificial Sequence
  Description of Artificial Sequence: Synthetic oligonucleotide
caacauuaaagaaagguca

SEQ ID NO: 2090679 - RNA, 19 nt, Artificial Sequence
  Description of Artificial Sequence: Synthetic oligonucleotide
aaauggcucacaaaaccac

SEQ ID NO: 2090680 - RNA, 19 nt, Artificial Sequence
  Description of Artificial Sequence: Synthetic oligonucleotide
aguuagaggccccaaaucu

SEQ ID NO: 2090681 - RNA, 19 nt, Artificial Sequence
  Description of Artificial Sequence: Synthetic oligonucleotide
auuugucauguuuuauugg

SEQ ID NO: 2090682 - RNA, 19 nt, Artificial Sequence
  Description of Artificial Sequence: Synthetic oligonucleotide
uugacgcugacuagcaagg

SEQ ID NO: 2090683 - RNA, 19 nt, Artificial Sequence
  Description of Artificial Sequence: Synthetic oligonucleotide
uuucuguugaccgccaagg

SEQ ID NO: 2090684 - RNA, 19 nt, Artificial Sequence
  Description of Artificial Sequence: Synthetic oligonucleotide
uuugacuugguaauuuuau

SEQ ID NO: 2090685 - RNA, 19 nt, Artificial Sequence
  Description of Artificial Sequence: Synthetic oligonucleotide
aguguggguguguaugucc

SEQ ID NO: 2090686 - RNA, 19 nt, Artificial Sequence
  Description of Artificial Sequence: Synthetic oligonucleotide
uguauuaggucuuuucgaa

SEQ ID NO: 2090687 - RNA, 19 nt, Artificial Sequence
  Description of Artificial Sequence: Synthetic oligonucleotide
ugcaccaacugccugagga

SEQ ID NO: 2090688 - RNA, 19 nt, Artificial Sequence
  Description of Artificial Sequence: Synthetic oligonucleotide
cugaggaaaagcuuuggag

SEQ ID NO: 2090689 - RNA, 19 nt, Artificial Sequence
  Description of Artificial Sequence: Synthetic oligonucleotide
uccauguuuggcaugacaa

SEQ ID NO: 2090690 - RNA, 19 nt, Artificial Sequence
  Description of Artificial Sequence: Synthetic oligonucleotide
cauucugauacaaaugcuc

SEQ ID NO: 2090691 - RNA, 19 nt, Artificial Sequence
  Description of Artificial Sequence: Synthetic oligonucleotide
caaucaugaguacaaagug

SEQ ID NO: 2090692 - RNA, 19 nt, Artificial Sequence
  Description of Artificial Sequence: Synthetic oligonucleotide
gaugaccuccaacauaccc

SEQ ID NO: 2090693 - RNA, 19 nt, Artificial Sequence
  Description of Artificial Sequence: Synthetic oligonucleotide
guuacagugauauucccca

SEQ ID NO: 2090694 - RNA, 19 nt, Artificial Sequence
  Description of Artificial Sequence: Synthetic oligonucleotide
aauaaagguucaaauauua

SEQ ID NO: 2090695 - RNA, 19 nt, Artificial Sequence
  Description of Artificial Sequence: Synthetic oligonucleotide
uccaaaacgcacaauuuaa

SEQ ID NO: 2090696 - RNA, 19 nt, Artificial Sequence
  Description of Artificial Sequence: Synthetic oligonucleotide
gggaugauuaaaauaaagg

SEQ ID NO: 2090697 - RNA, 19 nt, Artificial Sequence
  Description of Artificial Sequence: Synthetic oligonucleotide
cuacuugcuuccaaaacgc

SEQ ID NO: 2090698 - RNA, 19 nt, Artificial Sequence
  Description of Artificial Sequence: Synthetic oligonucleotide
aaagcuuuggaggagucga

SEQ ID NO: 2090699 - RNA, 19 nt, Artificial Sequence
  Description of Artificial Sequence: Synthetic oligonucleotide
gcuacuugcuuccaaaacg

SEQ ID NO: 2090700 - RNA, 19 nt, Artificial Sequence
  Description of Artificial Sequence: Synthetic oligonucleotide
uuacccaagguaauuuuga

SEQ ID NO: 2090701 - RNA, 19 nt, Artificial Sequence
  Description of Artificial Sequence: Synthetic oligonucleotide
ucauuugcugcuacaaaac

SEQ ID NO: 2090702 - RNA, 19 nt, Artificial Sequence
  Description of Artificial Sequence: Synthetic oligonucleotide
uaggucucauaauacuggg

SEQ ID NO: 2090703 - RNA, 19 nt, Artificial Sequence
  Description of Artificial Sequence: Synthetic oligonucleotide
acagacauuaaauuaucaa

SEQ ID NO: 2090704 - RNA, 19 nt, Artificial Sequence
  Description of Artificial Sequence: Synthetic oligonucleotide
cuugacgcugacuagcaag

SEQ ID NO: 2090705 - RNA, 19 nt, Artificial Sequence
  Description of Artificial Sequence: Synthetic oligonucleotide
uacaaaugcucaaacuuaa

SEQ ID NO: 2090706 - RNA, 19 nt, Artificial Sequence
  Description of Artificial Sequence: Synthetic oligonucleotide
ucuguugaccgccaaggug

SEQ ID NO: 2090707 - RNA, 19 nt, Artificial Sequence
  Description of Artificial Sequence: Synthetic oligonucleotide
aaucaugaguacaaagugu

SEQ ID NO: 2090708 - RNA, 19 nt, Artificial Sequence
  Description of Artificial Sequence: Synthetic oligonucleotide
cuguaaacuaaacauucug

SEQ ID NO: 2090709 - RNA, 19 nt, Artificial Sequence
  Description of Artificial Sequence: Synthetic oligonucleotide
uuaaagggauauaaacauc

SEQ ID NO: 2090710 - RNA, 19 nt, Artificial Sequence
  Description of Artificial Sequence: Synthetic oligonucleotide
uuaaguuggcaacauuaaa

SEQ ID NO: 2090711 - RNA, 19 nt, Artificial Sequence
  Description of Artificial Sequence: Synthetic oligonucleotide
caaaaguuacccaagguaa

SEQ ID NO: 2090712 - RNA, 19 nt, Artificial Sequence
  Description of Artificial Sequence: Synthetic oligonucleotide
aacuaaacauucugauaca

SEQ ID NO: 2090713 - RNA, 19 nt, Artificial Sequence
  Description of Artificial Sequence: Synthetic oligonucleotide
auuaaauuaucaaaaguua

SEQ ID NO: 2090714 - RNA, 19 nt, Artificial Sequence
  Description of Artificial Sequence: Synthetic oligonucleotide
ucuuacuuguucgaugacc

SEQ ID NO: 2090715 - RNA, 19 nt, Artificial Sequence
  Description of Artificial Sequence: Synthetic oligonucleotide
gcaaauuauacaguuagag

SEQ ID NO: 2090716 - RNA, 19 nt, Artificial Sequence
  Description of Artificial Sequence: Synthetic oligonucleotide
uguccuauggcuacuugcu

SEQ ID NO: 2090717 - RNA, 19 nt, Artificial Sequence
  Description of Artificial Sequence: Synthetic oligonucleotide
ugaacucugucuccguugc

SEQ ID NO: 2090718 - RNA, 19 nt, Artificial Sequence
  Description of Artificial Sequence: Synthetic oligonucleotide
ugcuacaaaaccugguaga

SEQ ID NO: 2090719 - RNA, 19 nt, Artificial Sequence
  Description of Artificial Sequence: Synthetic oligonucleotide
uuugcuccaaaugugcuca

SEQ ID NO: 2090720 - RNA, 19 nt, Artificial Sequence
  Description of Artificial Sequence: Synthetic oligonucleotide
caauuguacagcuuugcuc

SEQ ID NO: 2090721 - RNA, 19 nt, Artificial Sequence
  Description of Artificial Sequence: Synthetic oligonucleotide
cagguuacagugauauucc

SEQ ID NO: 2090722 - RNA, 19 nt, Artificial Sequence
  Description of Artificial Sequence: Synthetic oligonucleotide
uguuccauugugcaccaac

SEQ ID NO: 2090723 - RNA, 19 nt, Artificial Sequence
  Description of Artificial Sequence: Synthetic oligonucleotide
uagugcuugacgcugacua

SEQ ID NO: 2090724 - RNA, 19 nt, Artificial Sequence
  Description of Artificial Sequence: Synthetic oligonucleotide
ucaugaguacaaaguguag

SEQ ID NO: 2090725 - RNA, 19 nt, Artificial Sequence
  Description of Artificial Sequence: Synthetic oligonucleotide
ucuuuucgaagcaaauuau

SEQ ID NO: 2090726 - RNA, 19 nt, Artificial Sequence
  Description of Artificial Sequence: Synthetic oligonucleotide
ugcuaugccuaucuuuacc

SEQ ID NO: 2090727 - RNA, 19 nt, Artificial Sequence
  Description of Artificial Sequence: Synthetic oligonucleotide
uuagaggccccaaaucugu

SEQ ID NO: 2090728 - RNA, 19 nt, Artificial Sequence
  Description of Artificial Sequence: Synthetic oligonucleotide
aaccugguagaacuuaaaa

SEQ ID NO: 2090729 - RNA, 19 nt, Artificial Sequence
  Description of Artificial Sequence: Synthetic oligonucleotide
uuuuauugggaugauuaaa

SEQ ID NO: 2090730 - RNA, 19 nt, Artificial Sequence
  Description of Artificial Sequence: Synthetic oligonucleotide
acuagcaagguaaagugug

SEQ ID NO: 2090731 - RNA, 19 nt, Artificial Sequence
  Description of Artificial Sequence: Synthetic oligonucleotide
uuuucacccaucacagcug

SEQ ID NO: 2090732 - RNA, 19 nt, Artificial Sequence
  Description of Artificial Sequence: Synthetic oligonucleotide
aaacacuacuagcuuugug

SEQ ID NO: 2090733 - RNA, 19 nt, Artificial Sequence
  Description of Artificial Sequence: Synthetic oligonucleotide
aaaaguugcuaugccuauc

SEQ ID NO: 2090734 - RNA, 19 nt, Artificial Sequence
  Description of Artificial Sequence: Synthetic oligonucleotide
cauuugcugcuacaaaacc

SEQ ID NO: 2090735 - RNA, 19 nt, Artificial Sequence
  Description of Artificial Sequence: Synthetic oligonucleotide
uggcggagugcauuaaagg

SEQ ID NO: 2090736 - RNA, 19 nt, Artificial Sequence
  Description of Artificial Sequence: Synthetic oligonucleotide
cuagcaagguaaagugugg

SEQ ID NO: 2090737 - RNA, 19 nt, Artificial Sequence
  Description of Artificial Sequence: Synthetic oligonucleotide
ugucauguuuuauugggau

SEQ ID NO: 2090738 - RNA, 19 nt, Artificial Sequence
  Description of Artificial Sequence: Synthetic oligonucleotide
uugguaauuuuaucaacaa

SEQ ID NO: 2090739 - RNA, 19 nt, Artificial Sequence
  Description of Artificial Sequence: Synthetic oligonucleotide
gucagaggccuccacaggg

SEQ ID NO: 2090740 - RNA, 19 nt, Artificial Sequence
  Description of Artificial Sequence: Synthetic oligonucleotide
cuaucuuuaccaccgauga

SEQ ID NO: 2090741 - RNA, 19 nt, Artificial Sequence
  Description of Artificial Sequence: Synthetic oligonucleotide
agguuacagugauauuccc

SEQ ID NO: 2090742 - RNA, 19 nt, Artificial Sequence
  Description of Artificial Sequence: Synthetic oligonucleotide
ggaugauuaaaauaaaggu

SEQ ID NO: 2090743 - RNA, 19 nt, Artificial Sequence
  Description of Artificial Sequence: Synthetic oligonucleotide
aagcuaggucucauaauac

SEQ ID NO: 2090744 - RNA, 19 nt, Artificial Sequence
  Description of Artificial Sequence: Synthetic oligonucleotide
uauuagagaccucuucgau

SEQ ID NO: 2090745 - RNA, 19 nt, Artificial Sequence
  Description of Artificial Sequence: Synthetic oligonucleotide
uuaccaccgaugaaauggc

SEQ ID NO: 2090746 - RNA, 19 nt, Artificial Sequence
  Description of Artificial Sequence: Synthetic oligonucleotide
aucaaaaguuacccaaggu

SEQ ID NO: 2090747 - RNA, 19 nt, Artificial Sequence
  Description of Artificial Sequence: Synthetic oligonucleotide
ggcggagugcauuaaaggg

SEQ ID NO: 2090748 - RNA, 19 nt, Artificial Sequence
  Description of Artificial Sequence: Synthetic oligonucleotide
ggaugucccauuuucaccc

SEQ ID NO: 2090749 - RNA, 19 nt, Artificial Sequence
  Description of Artificial Sequence: Synthetic oligonucleotide
aaauaaagguucaaauauu

SEQ ID NO: 2090750 - RNA, 19 nt, Artificial Sequence
  Description of Artificial Sequence: Synthetic oligonucleotide
aagguaauuuugacauugg

SEQ ID NO: 2090751 - RNA, 19 nt, Artificial Sequence
  Description of Artificial Sequence: Synthetic oligonucleotide
aggaaguggagcgaggguc

SEQ ID NO: 2090752 - RNA, 19 nt, Artificial Sequence
  Description of Artificial Sequence: Synthetic oligonucleotide
aacgcacaauuuaauauga

SEQ ID NO: 2090753 - RNA, 19 nt, Artificial Sequence
  Description of Artificial Sequence: Synthetic oligonucleotide
gacuggaauggucaaauaa

SEQ ID NO: 2090754 - RNA, 19 nt, Artificial Sequence
  Description of Artificial Sequence: Synthetic oligonucleotide
gaugauuaaaauaaagguu

SEQ ID NO: 2090755 - RNA, 19 nt, Artificial Sequence
  Description of Artificial Sequence: Synthetic oligonucleotide
cuugcacuuccacaguuag

SEQ ID NO: 2090756 - RNA, 19 nt, Artificial Sequence
  Description of Artificial Sequence: Synthetic oligonucleotide
guauuaggucuuuucgaag

SEQ ID NO: 2090757 - RNA, 19 nt, Artificial Sequence
  Description of Artificial Sequence: Synthetic oligonucleotide
ucugauacaaaugcucaaa

SEQ ID NO: 2090758 - RNA, 19 nt, Artificial Sequence
  Description of Artificial Sequence: Synthetic oligonucleotide
acuugcuuccaaaacgcac

SEQ ID NO: 2090759 - RNA, 19 nt, Artificial Sequence
  Description of Artificial Sequence: Synthetic oligonucleotide
aauguuccauugugcacca

SEQ ID NO: 2090760 - RNA, 19 nt, Artificial Sequence
  Description of Artificial Sequence: Synthetic oligonucleotide
uguguauguccuauggcua

SEQ ID NO: 2090761 - RNA, 19 nt, Artificial Sequence
  Description of Artificial Sequence: Synthetic oligonucleotide
acagugauauuccccacgu

SEQ ID NO: 2090762 - RNA, 19 nt, Artificial Sequence
  Description of Artificial Sequence: Synthetic oligonucleotide
ucgaagcaaauuauacagu

SEQ ID NO: 2090763 - RNA, 19 nt, Artificial Sequence
  Description of Artificial Sequence: Synthetic oligonucleotide
acacuacuagcuuugugca

SEQ ID NO: 2090764 - RNA, 19 nt, Artificial Sequence
  Description of Artificial Sequence: Synthetic oligonucleotide
aagaaaggucacaagugca

SEQ ID NO: 2090765 - RNA, 19 nt, Artificial Sequence
  Description of Artificial Sequence: Synthetic oligonucleotide
gucuuuucgaagcaaauua

SEQ ID NO: 2090766 - RNA, 19 nt, Artificial Sequence
  Description of Artificial Sequence: Synthetic oligonucleotide
ucuccguugcuuuuggaaa

SEQ ID NO: 2090767 - RNA, 19 nt, Artificial Sequence
  Description of Artificial Sequence: Synthetic oligonucleotide
acuacuagcuuugugcaca

SEQ ID NO: 2090768 - RNA, 19 nt, Artificial Sequence
  Description of Artificial Sequence: Synthetic oligonucleotide
uuccauugugcaccaacug

SEQ ID NO: 2090769 - RNA, 19 nt, Artificial Sequence
  Description of Artificial Sequence: Synthetic oligonucleotide
agaaaggucacaagugcag

SEQ ID NO: 2090770 - RNA, 19 nt, Artificial Sequence
  Description of Artificial Sequence: Synthetic oligonucleotide
uggaauggucaaauaauuu

SEQ ID NO: 2090771 - RNA, 19 nt, Artificial Sequence
  Description of Artificial Sequence: Synthetic oligonucleotide
aauauuugacuugguaauu

SEQ ID NO: 2090772 - RNA, 19 nt, Artificial Sequence
  Description of Artificial Sequence: Synthetic oligonucleotide
aauuagggcaguacauuga

SEQ ID NO: 2090773 - RNA, 19 nt, Artificial Sequence
  Description of Artificial Sequence: Synthetic oligonucleotide
auuaggucuuuucgaagca

SEQ ID NO: 2090774 - RNA, 19 nt, Artificial Sequence
  Description of Artificial Sequence: Synthetic oligonucleotide
uugcugcuacaaaaccugg

SEQ ID NO: 2090775 - RNA, 19 nt, Artificial Sequence
  Description of Artificial Sequence: Synthetic oligonucleotide
auucugauacaaaugcuca

SEQ ID NO: 2090776 - RNA, 19 nt, Artificial Sequence
  Description of Artificial Sequence: Synthetic oligonucleotide
agcuaggucucauaauacu

SEQ ID NO: 2090777 - RNA, 19 nt, Artificial Sequence
  Description of Artificial Sequence: Synthetic oligonucleotide
acuuaaguuggcaacauua

SEQ ID NO: 2090778 - RNA, 19 nt, Artificial Sequence
  Description of Artificial Sequence: Synthetic oligonucleotide
uccaauuguacagcuuugc

SEQ ID NO: 2090779 - RNA, 19 nt, Artificial Sequence
  Description of Artificial Sequence: Synthetic oligonucleotide
ugcucaaacuuaaguuggc

SEQ ID NO: 2090780 - RNA, 19 nt, Artificial Sequence
  Description of Artificial Sequence: Synthetic oligonucleotide
uuccaauuguacagcuuug

SEQ ID NO: 2090781 - RNA, 19 nt, Artificial Sequence
  Description of Artificial Sequence: Synthetic oligonucleotide
agguaauuuugacauugga

SEQ ID NO: 2090782 - RNA, 19 nt, Artificial Sequence
  Description of Artificial Sequence: Synthetic oligonucleotide
acacagguuacagugauau

SEQ ID NO: 2090783 - RNA, 19 nt, Artificial Sequence
  Description of Artificial Sequence: Synthetic oligonucleotide
uccuauggcuacuugcuuc

SEQ ID NO: 2090784 - RNA, 19 nt, Artificial Sequence
  Description of Artificial Sequence: Synthetic oligonucleotide
ucgacacucuugcacuucc

SEQ ID NO: 2090785 - RNA, 19 nt, Artificial Sequence
  Description of Artificial Sequence: Synthetic oligonucleotide
acaguuagaggccccaaau

SEQ ID NO: 2090786 - RNA, 19 nt, Artificial Sequence
  Description of Artificial Sequence: Synthetic oligonucleotide
aauggcucacaaaaccaca

SEQ ID NO: 2090787 - RNA, 19 nt, Artificial Sequence
  Description of Artificial Sequence: Synthetic oligonucleotide
accucuucgaucuucuuuu

SEQ ID NO: 2090788 - RNA, 19 nt, Artificial Sequence
  Description of Artificial Sequence: Synthetic oligonucleotide
guauuagagaccucuucga

SEQ ID NO: 2090789 - RNA, 19 nt, Artificial Sequence
  Description of Artificial Sequence: Synthetic oligonucleotide
guaaagucaucuucaggca

SEQ ID NO: 2090790 - RNA, 19 nt, Artificial Sequence
  Description of Artificial Sequence: Synthetic oligonucleotide
aaaaguuacccaagguaau

SEQ ID NO: 2090791 - RNA, 19 nt, Artificial Sequence
  Description of Artificial Sequence: Synthetic oligonucleotide
ggagcgaggguccauggcg

SEQ ID NO: 2090792 - RNA, 19 nt, Artificial Sequence
  Description of Artificial Sequence: Synthetic oligonucleotide
uaggucuuuucgaagcaaa

SEQ ID NO: 2090793 - RNA, 19 nt, Artificial Sequence
  Description of Artificial Sequence: Synthetic oligonucleotide
caaaguguagaguggaaaa

SEQ ID NO: 2090794 - RNA, 19 nt, Artificial Sequence
  Description of Artificial Sequence: Synthetic oligonucleotide
agggcaguacauugacugg

SEQ ID NO: 2090795 - RNA, 19 nt, Artificial Sequence
  Description of Artificial Sequence: Synthetic oligonucleotide
aguugcuaugccuaucuuu

SEQ ID NO: 2090796 - RNA, 19 nt, Artificial Sequence
  Description of Artificial Sequence: Synthetic oligonucleotide
aguuggcaacauuaaagaa

SEQ ID NO: 2090797 - RNA, 19 nt, Artificial Sequence
  Description of Artificial Sequence: Synthetic oligonucleotide
acaguuagcagcaggggug

SEQ ID NO: 2090798 - RNA, 19 nt, Artificial Sequence
  Description of Artificial Sequence: Synthetic oligonucleotide
uauacaguuagaggcccca

SEQ ID NO: 2090799 - RNA, 19 nt, Artificial Sequence
  Description of Artificial Sequence: Synthetic oligonucleotide
uugacuggaauggucaaau

SEQ ID NO: 2090800 - RNA, 19 nt, Artificial Sequence
  Description of Artificial Sequence: Synthetic oligonucleotide
cauaaucuuacuuguucga

SEQ ID NO: 2090801 - RNA, 19 nt, Artificial Sequence
  Description of Artificial Sequence: Synthetic oligonucleotide
cuuaaguuggcaacauuaa

SEQ ID NO: 2090802 - RNA, 19 nt, Artificial Sequence
  Description of Artificial Sequence: Synthetic oligonucleotide
acuggaauggucaaauaau

SEQ ID NO: 2090803 - RNA, 19 nt, Artificial Sequence
  Description of Artificial Sequence: Synthetic oligonucleotide
agggguguauuagagaccu

SEQ ID NO: 2090804 - RNA, 19 nt, Artificial Sequence
  Description of Artificial Sequence: Synthetic oligonucleotide
acccaagguaauuuugaca

SEQ ID NO: 2090805 - RNA, 19 nt, Artificial Sequence
  Description of Artificial Sequence: Synthetic oligonucleotide
auggcucacaaaaccacac

SEQ ID NO: 2090806 - RNA, 19 nt, Artificial Sequence
  Description of Artificial Sequence: Synthetic oligonucleotide
cuguauuaggucuuuucga

SEQ ID NO: 2090807 - RNA, 19 nt, Artificial Sequence
  Description of Artificial Sequence: Synthetic oligonucleotide
uggaugcagcuuuaaacaa

SEQ ID NO: 2090808 - RNA, 19 nt, Artificial Sequence
  Description of Artificial Sequence: Synthetic oligonucleotide
auuccccacguguggaggg

SEQ ID NO: 2090809 - RNA, 19 nt, Artificial Sequence
  Description of Artificial Sequence: Synthetic oligonucleotide
agugcuugacgcugacuag

SEQ ID NO: 2090810 - RNA, 19 nt, Artificial Sequence
  Description of Artificial Sequence: Synthetic oligonucleotide
agugcagguggaaauguag

SEQ ID NO: 2090811 - RNA, 19 nt, Artificial Sequence
  Description of Artificial Sequence: Synthetic oligonucleotide
cuuugcuccaaaugugcuc

SEQ ID NO: 2090812 - RNA, 19 nt, Artificial Sequence
  Description of Artificial Sequence: Synthetic oligonucleotide
ugaguacaaaguguagagu

SEQ ID NO: 2090813 - RNA, 19 nt, Artificial Sequence
  Description of Artificial Sequence: Synthetic oligonucleotide
cauuaaagaaaggucacaa

SEQ ID NO: 2090814 - RNA, 19 nt, Artificial Sequence
  Description of Artificial Sequence: Synthetic oligonucleotide
guuacccaagguaauuuug

SEQ ID NO: 2090815 - RNA, 19 nt, Artificial Sequence
  Description of Artificial Sequence: Synthetic oligonucleotide
cuuacuuguucgaugaccu

SEQ ID NO: 2090816 - RNA, 19 nt, Artificial Sequence
  Description of Artificial Sequence: Synthetic oligonucleotide
aucuuacuuguucgaugac

SEQ ID NO: 2090817 - RNA, 19 nt, Artificial Sequence
  Description of Artificial Sequence: Synthetic oligonucleotide
aagguaaagugugggugug

SEQ ID NO: 2090818 - RNA, 19 nt, Artificial Sequence
  Description of Artificial Sequence: Synthetic oligonucleotide
aaaaccugguagaacuuaa

SEQ ID NO: 2090819 - RNA, 19 nt, Artificial Sequence
  Description of Artificial Sequence: Synthetic oligonucleotide
uacccaagguaauuuugac

SEQ ID NO: 2090820 - RNA, 19 nt, Artificial Sequence
  Description of Artificial Sequence: Synthetic oligonucleotide
aucaugaguacaaagugua

SEQ ID NO: 2090821 - RNA, 19 nt, Artificial Sequence
  Description of Artificial Sequence: Synthetic oligonucleotide
ugcuugacgcugacuagca

SEQ ID NO: 2090822 - RNA, 19 nt, Artificial Sequence
  Description of Artificial Sequence: Synthetic oligonucleotide
aaacuuaaguuggcaacau

SEQ ID NO: 2090823 - RNA, 19 nt, Artificial Sequence
  Description of Artificial Sequence: Synthetic oligonucleotide
gcaacauuaaagaaagguc

SEQ ID NO: 2090824 - RNA, 19 nt, Artificial Sequence
  Description of Artificial Sequence: Synthetic oligonucleotide
uaucaacaaaccucauaau

SEQ ID NO: 2090825 - RNA, 19 nt, Artificial Sequence
  Description of Artificial Sequence: Synthetic oligonucleotide
caugaguacaaaguguaga

SEQ ID NO: 2090826 - RNA, 19 nt, Artificial Sequence
  Description of Artificial Sequence: Synthetic oligonucleotide
aagcaggaaguggagcgag

SEQ ID NO: 2090827 - RNA, 19 nt, Artificial Sequence
  Description of Artificial Sequence: Synthetic oligonucleotide
uacaguuagaggccccaaa

SEQ ID NO: 2090828 - RNA, 19 nt, Artificial Sequence
  Description of Artificial Sequence: Synthetic oligonucleotide
aaguguggguguguauguc

SEQ ID NO: 2090829 - RNA, 19 nt, Artificial Sequence
  Description of Artificial Sequence: Synthetic oligonucleotide
uuagggcaguacauugacu

SEQ ID NO: 2090830 - RNA, 19 nt, Artificial Sequence
  Description of Artificial Sequence: Synthetic oligonucleotide
guguguauguccuauggcu

SEQ ID NO: 2090831 - RNA, 19 nt, Artificial Sequence
  Description of Artificial Sequence: Synthetic oligonucleotide
auauuccccacguguggag

SEQ ID NO: 2090832 - RNA, 19 nt, Artificial Sequence
  Description of Artificial Sequence: Synthetic oligonucleotide
aacuuaaguuggcaacauu

SEQ ID NO: 2090833 - RNA, 19 nt, Artificial Sequence
  Description of Artificial Sequence: Synthetic oligonucleotide
caaaacgcacaauuuaaua

SEQ ID NO: 2090834 - RNA, 19 nt, Artificial Sequence
  Description of Artificial Sequence: Synthetic oligonucleotide
agucgaggcaagggaaagc

SEQ ID NO: 2090835 - RNA, 19 nt, Artificial Sequence
  Description of Artificial Sequence: Synthetic oligonucleotide
gaggagucgaggcaaggga

SEQ ID NO: 2090836 - RNA, 19 nt, Artificial Sequence
  Description of Artificial Sequence: Synthetic oligonucleotide
aaaacacuacuagcuuugu

SEQ ID NO: 2090837 - RNA, 19 nt, Artificial Sequence
  Description of Artificial Sequence: Synthetic oligonucleotide
gucgaggcaagggaaagcc

SEQ ID NO: 2090838 - RNA, 19 nt, Artificial Sequence
  Description of Artificial Sequence: Synthetic oligonucleotide
auaaucuuacuuguucgau

SEQ ID NO: 2090839 - RNA, 19 nt, Artificial Sequence
  Description of Artificial Sequence: Synthetic oligonucleotide
uacuugcuuccaaaacgca

SEQ ID NO: 2090840 - RNA, 19 nt, Artificial Sequence
  Description of Artificial Sequence: Synthetic oligonucleotide
ugccugaggaaaagcuuug

SEQ ID NO: 2090841 - RNA, 19 nt, Artificial Sequence
  Description of Artificial Sequence: Synthetic oligonucleotide
guguauguccuauggcuac

SEQ ID NO: 2090842 - RNA, 19 nt, Artificial Sequence
  Description of Artificial Sequence: Synthetic oligonucleotide
cucaaacuuaaguuggcaa

SEQ ID NO: 2090843 - RNA, 19 nt, Artificial Sequence
  Description of Artificial Sequence: Synthetic oligonucleotide
guuagaggccccaaaucug

SEQ ID NO: 2090844 - RNA, 19 nt, Artificial Sequence
  Description of Artificial Sequence: Synthetic oligonucleotide
caaacuuaaguuggcaaca

SEQ ID NO: 2090845 - RNA, 19 nt, Artificial Sequence
  Description of Artificial Sequence: Synthetic oligonucleotide
cuaugccuaucuuuaccac

SEQ ID NO: 2090846 - RNA, 19 nt, Artificial Sequence
  Description of Artificial Sequence: Synthetic oligonucleotide
agggcugcaaucaugagua

SEQ ID NO: 2090847 - RNA, 19 nt, Artificial Sequence
  Description of Artificial Sequence: Synthetic oligonucleotide
auugugcaccaacugccug

SEQ ID NO: 2090848 - RNA, 19 nt, Artificial Sequence
  Description of Artificial Sequence: Synthetic oligonucleotide
aaguuacccaagguaauuu

SEQ ID NO: 2090849 - RNA, 19 nt, Artificial Sequence
  Description of Artificial Sequence: Synthetic oligonucleotide
uucuguugaccgccaaggu

SEQ ID NO: 2090850 - RNA, 19 nt, Artificial Sequence
  Description of Artificial Sequence: Synthetic oligonucleotide
cauuuucacccaucacagc

SEQ ID NO: 2090851 - RNA, 19 nt, Artificial Sequence
  Description of Artificial Sequence: Synthetic oligonucleotide
guugcuaugccuaucuuua

SEQ ID NO: 2090852 - RNA, 19 nt, Artificial Sequence
  Description of Artificial Sequence: Synthetic oligonucleotide
gugauauuccccacgugug

SEQ ID NO: 2090853 - RNA, 19 nt, Artificial Sequence
  Description of Artificial Sequence: Synthetic oligonucleotide
aguuacccaagguaauuuu

SEQ ID NO: 2090854 - RNA, 19 nt, Artificial Sequence
  Description of Artificial Sequence: Synthetic oligonucleotide
uuuuaucaacaaaccucau

SEQ ID NO: 2090855 - RNA, 19 nt, Artificial Sequence
  Description of Artificial Sequence: Synthetic oligonucleotide
accaccgaugaaauggcuc

SEQ ID NO: 2090856 - RNA, 19 nt, Artificial Sequence
  Description of Artificial Sequence: Synthetic oligonucleotide
auauuugacuugguaauuu

SEQ ID NO: 2090857 - RNA, 19 nt, Artificial Sequence
  Description of Artificial Sequence: Synthetic oligonucleotide
uauggcuacuugcuuccaa

SEQ ID NO: 2090858 - RNA, 19 nt, Artificial Sequence
  Description of Artificial Sequence: Synthetic oligonucleotide
cuagcuuugugcacagaca

SEQ ID NO: 2090859 - RNA, 19 nt, Artificial Sequence
  Description of Artificial Sequence: Synthetic oligonucleotide
auccauguuuggcaugaca

SEQ ID NO: 2090860 - RNA, 19 nt, Artificial Sequence
  Description of Artificial Sequence: Synthetic oligonucleotide
gaaagccuuccaauuguac

SEQ ID NO: 2090861 - RNA, 19 nt, Artificial Sequence
  Description of Artificial Sequence: Synthetic oligonucleotide
gguucaaauauuaaauucu

SEQ ID NO: 2090862 - RNA, 19 nt, Artificial Sequence
  Description of Artificial Sequence: Synthetic oligonucleotide
uugcacuuccacaguuagc

SEQ ID NO: 2090863 - RNA, 19 nt, Artificial Sequence
  Description of Artificial Sequence: Synthetic oligonucleotide
guugcuuuuggaaauauuu

SEQ ID NO: 2090864 - RNA, 19 nt, Artificial Sequence
  Description of Artificial Sequence: Synthetic oligonucleotide
ggaaauauuugacuuggua

SEQ ID NO: 2090865 - RNA, 19 nt, Artificial Sequence
  Description of Artificial Sequence: Synthetic oligonucleotide
cuuuucgaagcaaauuaua

SEQ ID NO: 2090866 - RNA, 19 nt, Artificial Sequence
  Description of Artificial Sequence: Synthetic oligonucleotide
gugcauuaaagggauauaa

SEQ ID NO: 2090867 - RNA, 19 nt, Artificial Sequence
  Description of Artificial Sequence: Synthetic oligonucleotide
guacaaaguguagagugga

SEQ ID NO: 2090868 - RNA, 19 nt, Artificial Sequence
  Description of Artificial Sequence: Synthetic oligonucleotide
gauauuccccacgugugga

SEQ ID NO: 2090869 - RNA, 19 nt, Artificial Sequence
  Description of Artificial Sequence: Synthetic oligonucleotide
ccuaucuuuaccaccgaug

SEQ ID NO: 2090870 - RNA, 19 nt, Artificial Sequence
  Description of Artificial Sequence: Synthetic oligonucleotide
gucaaauaauuugucaugu

SEQ ID NO: 2090871 - RNA, 19 nt, Artificial Sequence
  Description of Artificial Sequence: Synthetic oligonucleotide
uuacagugauauuccccac

SEQ ID NO: 2090872 - RNA, 19 nt, Artificial Sequence
  Description of Artificial Sequence: Synthetic oligonucleotide
aacucugucuccguugcuu

SEQ ID NO: 2090873 - RNA, 19 nt, Artificial Sequence
  Description of Artificial Sequence: Synthetic oligonucleotide
gguggaaauguagugcuug

SEQ ID NO: 2090874 - RNA, 19 nt, Artificial Sequence
  Description of Artificial Sequence: Synthetic oligonucleotide
gguguguauguccuauggc

SEQ ID NO: 2090875 - RNA, 19 nt, Artificial Sequence
  Description of Artificial Sequence: Synthetic oligonucleotide
acaaaugcucaaacuuaag

SEQ ID NO: 2090876 - RNA, 19 nt, Artificial Sequence
  Description of Artificial Sequence: Synthetic oligonucleotide
gguuacagugauauucccc

SEQ ID NO: 2090877 - RNA, 19 nt, Artificial Sequence
  Description of Artificial Sequence: Synthetic oligonucleotide
gcuaugccuaucuuuacca

SEQ ID NO: 2090878 - RNA, 19 nt, Artificial Sequence
  Description of Artificial Sequence: Synthetic oligonucleotide
aaaccacacuccacacagg

SEQ ID NO: 2090879 - RNA, 19 nt, Artificial Sequence
  Description of Artificial Sequence: Synthetic oligonucleotide
caguuagaggccccaaauc

SEQ ID NO: 2090880 - RNA, 19 nt, Artificial Sequence
  Description of Artificial Sequence: Synthetic oligonucleotide
uggaaauguagugcuugac

SEQ ID NO: 2090881 - RNA, 19 nt, Artificial Sequence
  Description of Artificial Sequence: Synthetic oligonucleotide
cuacuagcuuugugcacag

SEQ ID NO: 2090882 - RNA, 19 nt, Artificial Sequence
  Description of Artificial Sequence: Synthetic oligonucleotide
aggaaaagcuuuggaggag

SEQ ID NO: 2090883 - RNA, 19 nt, Artificial Sequence
  Description of Artificial Sequence: Synthetic oligonucleotide
acauucugauacaaaugcu

SEQ ID NO: 2090884 - RNA, 19 nt, Artificial Sequence
  Description of Artificial Sequence: Synthetic oligonucleotide
cccauuuucacccaucaca

SEQ ID NO: 2090885 - RNA, 19 nt, Artificial Sequence
  Description of Artificial Sequence: Synthetic oligonucleotide
ggcaacauuaaagaaaggu

SEQ ID NO: 2090886 - RNA, 19 nt, Artificial Sequence
  Description of Artificial Sequence: Synthetic oligonucleotide
uuaggucuuuucgaagcaa

SEQ ID NO: 2090887 - RNA, 19 nt, Artificial Sequence
  Description of Artificial Sequence: Synthetic oligonucleotide
agcagggguguauuagaga

SEQ ID NO: 2090888 - RNA, 19 nt, Artificial Sequence
  Description of Artificial Sequence: Synthetic oligonucleotide
gcuaggucucauaauacug

SEQ ID NO: 2090889 - RNA, 19 nt, Artificial Sequence
  Description of Artificial Sequence: Synthetic oligonucleotide
cagggguguauuagagacc

SEQ ID NO: 2090890 - RNA, 19 nt, Artificial Sequence
  Description of Artificial Sequence: Synthetic oligonucleotide
gcuuuggaggagucgaggc

SEQ ID NO: 2090891 - RNA, 19 nt, Artificial Sequence
  Description of Artificial Sequence: Synthetic oligonucleotide
aggucucauaauacugggg

SEQ ID NO: 2090892 - RNA, 19 nt, Artificial Sequence
  Description of Artificial Sequence: Synthetic oligonucleotide
gaagcaaauuauacaguua

SEQ ID NO: 2090893 - RNA, 19 nt, Artificial Sequence
  Description of Artificial Sequence: Synthetic oligonucleotide
gggaugucccauuuucacc

SEQ ID NO: 2090894 - RNA, 19 nt, Artificial Sequence
  Description of Artificial Sequence: Synthetic oligonucleotide
accgccaaggugccucgac

SEQ ID NO: 2090895 - RNA, 19 nt, Artificial Sequence
  Description of Artificial Sequence: Synthetic oligonucleotide
ggcucacaaaaccacacuc

SEQ ID NO: 2090896 - RNA, 19 nt, Artificial Sequence
  Description of Artificial Sequence: Synthetic oligonucleotide
uggagcgaggguccauggc

SEQ ID NO: 2090897 - RNA, 19 nt, Artificial Sequence
  Description of Artificial Sequence: Synthetic oligonucleotide
gagggcugcaaucaugagu

SEQ ID NO: 2090898 - RNA, 19 nt, Artificial Sequence
  Description of Artificial Sequence: Synthetic oligonucleotide
ucacaagugcagguggaaa

SEQ ID NO: 2090899 - RNA, 19 nt, Artificial Sequence
  Description of Artificial Sequence: Synthetic oligonucleotide
uugacauuggaugcagcuu

SEQ ID NO: 2090900 - RNA, 19 nt, Artificial Sequence
  Description of Artificial Sequence: Synthetic oligonucleotide
uguauguccuauggcuacu

SEQ ID NO: 2090901 - RNA, 19 nt, Artificial Sequence
  Description of Artificial Sequence: Synthetic oligonucleotide
uugcuaugccuaucuuuac

SEQ ID NO: 2090902 - RNA, 19 nt, Artificial Sequence
  Description of Artificial Sequence: Synthetic oligonucleotide
agcaaauuauacaguuaga

SEQ ID NO: 2090903 - RNA, 19 nt, Artificial Sequence
  Description of Artificial Sequence: Synthetic oligonucleotide
auuguacagcuuugcucca

SEQ ID NO: 2090904 - RNA, 19 nt, Artificial Sequence
  Description of Artificial Sequence: Synthetic oligonucleotide
gucuccguugcuuuuggaa

SEQ ID NO: 2090905 - RNA, 19 nt, Artificial Sequence
  Description of Artificial Sequence: Synthetic oligonucleotide
gugcuugacgcugacuagc

SEQ ID NO: 2090906 - RNA, 19 nt, Artificial Sequence
  Description of Artificial Sequence: Synthetic oligonucleotide
cacuacuagcuuugugcac

SEQ ID NO: 2090907 - RNA, 19 nt, Artificial Sequence
  Description of Artificial Sequence: Synthetic oligonucleotide
acgcugacuagcaagguaa

SEQ ID NO: 2090908 - RNA, 19 nt, Artificial Sequence
  Description of Artificial Sequence: Synthetic oligonucleotide
ucgaggcaagggaaagccu

SEQ ID NO: 2090909 - RNA, 19 nt, Artificial Sequence
  Description of Artificial Sequence: Synthetic oligonucleotide
uggcuacuugcuuccaaaa

SEQ ID NO: 2090910 - RNA, 19 nt, Artificial Sequence
  Description of Artificial Sequence: Synthetic oligonucleotide
ugaccgccaaggugccucg

SEQ ID NO: 2090911 - RNA, 19 nt, Artificial Sequence
  Description of Artificial Sequence: Synthetic oligonucleotide
uggguguguauguccuaug

SEQ ID NO: 2090912 - RNA, 19 nt, Artificial Sequence
  Description of Artificial Sequence: Synthetic oligonucleotide
gaggccccaaaucuguaaa

SEQ ID NO: 2090913 - RNA, 19 nt, Artificial Sequence
  Description of Artificial Sequence: Synthetic oligonucleotide
cuuccaauuguacagcuuu

SEQ ID NO: 2090914 - RNA, 19 nt, Artificial Sequence
  Description of Artificial Sequence: Synthetic oligonucleotide
cugucuccguugcuuuugg

SEQ ID NO: 2090915 - RNA, 19 nt, Artificial Sequence
  Description of Artificial Sequence: Synthetic oligonucleotide
uccauggcggagugcauua

SEQ ID NO: 2090916 - RNA, 19 nt, Artificial Sequence
  Description of Artificial Sequence: Synthetic oligonucleotide
aaguugcuaugccuaucuu

SEQ ID NO: 2090917 - RNA, 19 nt, Artificial Sequence
  Description of Artificial Sequence: Synthetic oligonucleotide
ggggaugucccauuuucac

SEQ ID NO: 2090918 - RNA, 19 nt, Artificial Sequence
  Description of Artificial Sequence: Synthetic oligonucleotide
aaaccugguagaacuuaaa

SEQ ID NO: 2090919 - RNA, 19 nt, Artificial Sequence
  Description of Artificial Sequence: Synthetic oligonucleotide
cugacuagcaagguaaagu

SEQ ID NO: 2090920 - RNA, 19 nt, Artificial Sequence
  Description of Artificial Sequence: Synthetic oligonucleotide
agaggccccaaaucuguaa

SEQ ID NO: 2090921 - RNA, 19 nt, Artificial Sequence
  Description of Artificial Sequence: Synthetic oligonucleotide
acuuguucgaugaccucca

SEQ ID NO: 2090922 - RNA, 19 nt, Artificial Sequence
  Description of Artificial Sequence: Synthetic oligonucleotide
uaccaccgaugaaauggcu

SEQ ID NO: 2090923 - RNA, 19 nt, Artificial Sequence
  Description of Artificial Sequence: Synthetic oligonucleotide
guggagcgaggguccaugg

SEQ ID NO: 2090924 - RNA, 19 nt, Artificial Sequence
  Description of Artificial Sequence: Synthetic oligonucleotide
ggaggagucgaggcaaggg

SEQ ID NO: 2090925 - RNA, 19 nt, Artificial Sequence
  Description of Artificial Sequence: Synthetic oligonucleotide
ggcuacuugcuuccaaaac

SEQ ID NO: 2090926 - RNA, 19 nt, Artificial Sequence
  Description of Artificial Sequence: Synthetic oligonucleotide
gcaaucaugaguacaaagu

SEQ ID NO: 2090927 - RNA, 19 nt, Artificial Sequence
  Description of Artificial Sequence: Synthetic oligonucleotide
gguaauuuugacauuggau

SEQ ID NO: 2090928 - RNA, 19 nt, Artificial Sequence
  Description of Artificial Sequence: Synthetic oligonucleotide
gacgcugacuagcaaggua

SEQ ID NO: 2090929 - RNA, 19 nt, Artificial Sequence
  Description of Artificial Sequence: Synthetic oligonucleotide
gaugucccauuuucaccca

SEQ ID NO: 2090930 - RNA, 19 nt, Artificial Sequence
  Description of Artificial Sequence: Synthetic oligonucleotide
auugacuggaauggucaaa

SEQ ID NO: 2090931 - RNA, 19 nt, Artificial Sequence
  Description of Artificial Sequence: Synthetic oligonucleotide
ugacuggaauggucaaaua

SEQ ID NO: 2090932 - RNA, 19 nt, Artificial Sequence
  Description of Artificial Sequence: Synthetic oligonucleotide
agugcauuaaagggauaua

SEQ ID NO: 2090933 - RNA, 19 nt, Artificial Sequence
  Description of Artificial Sequence: Synthetic oligonucleotide
cauuggaugcagcuuuaaa

SEQ ID NO: 2090934 - RNA, 19 nt, Artificial Sequence
  Description of Artificial Sequence: Synthetic oligonucleotide
ggaaguggagcgagggucc

SEQ ID NO: 2090935 - RNA, 19 nt, Artificial Sequence
  Description of Artificial Sequence: Synthetic oligonucleotide
ggcaaggugcuguuuaaaa

SEQ ID NO: 2090936 - RNA, 19 nt, Artificial Sequence
  Description of Artificial Sequence: Synthetic oligonucleotide
gcuuugugcacagacauua

SEQ ID NO: 2090937 - RNA, 19 nt, Artificial Sequence
  Description of Artificial Sequence: Synthetic oligonucleotide
gcuuccaaaacgcacaauu

SEQ ID NO: 2090938 - RNA, 19 nt, Artificial Sequence
  Description of Artificial Sequence: Synthetic oligonucleotide
ugucuccguugcuuuugga

SEQ ID NO: 2090939 - RNA, 19 nt, Artificial Sequence
  Description of Artificial Sequence: Synthetic oligonucleotide
accgaugaaauggcucaca

SEQ ID NO: 2090940 - RNA, 19 nt, Artificial Sequence
  Description of Artificial Sequence: Synthetic oligonucleotide
gacuagcaagguaaagugu

SEQ ID NO: 2090941 - RNA, 19 nt, Artificial Sequence
  Description of Artificial Sequence: Synthetic oligonucleotide
acuuucuguugaccgccaa

SEQ ID NO: 2090942 - RNA, 19 nt, Artificial Sequence
  Description of Artificial Sequence: Synthetic oligonucleotide
guguggagggcugcaauca

SEQ ID NO: 2090943 - RNA, 19 nt, Artificial Sequence
  Description of Artificial Sequence: Synthetic oligonucleotide
cacaguuagcagcaggggu

SEQ ID NO: 2090944 - RNA, 19 nt, Artificial Sequence
  Description of Artificial Sequence: Synthetic oligonucleotide
cuuccaaaacgcacaauuu

SEQ ID NO: 2090945 - RNA, 19 nt, Artificial Sequence
  Description of Artificial Sequence: Synthetic oligonucleotide
acguguggagggcugcaau

SEQ ID NO: 2090946 - RNA, 19 nt, Artificial Sequence
  Description of Artificial Sequence: Synthetic oligonucleotide
aggagucgaggcaagggaa

SEQ ID NO: 2090947 - RNA, 19 nt, Artificial Sequence
  Description of Artificial Sequence: Synthetic oligonucleotide
uagaggccccaaaucugua

SEQ ID NO: 2090948 - RNA, 19 nt, Artificial Sequence
  Description of Artificial Sequence: Synthetic oligonucleotide
uuguacagcuuugcuccaa

SEQ ID NO: 2090949 - RNA, 19 nt, Artificial Sequence
  Description of Artificial Sequence: Synthetic oligonucleotide
cuuugugcacagacauuaa

SEQ ID NO: 2090950 - RNA, 19 nt, Artificial Sequence
  Description of Artificial Sequence: Synthetic oligonucleotide
ccaccgaugaaauggcuca

SEQ ID NO: 2090951 - RNA, 19 nt, Artificial Sequence
  Description of Artificial Sequence: Synthetic oligonucleotide
aagugcagguggaaaugua

SEQ ID NO: 2090952 - RNA, 19 nt, Artificial Sequence
  Description of Artificial Sequence: Synthetic oligonucleotide
caaaaccugguagaacuua

SEQ ID NO: 2090953 - RNA, 19 nt, Artificial Sequence
  Description of Artificial Sequence: Synthetic oligonucleotide
guuccauugugcaccaacu

SEQ ID NO: 2090954 - RNA, 19 nt, Artificial Sequence
  Description of Artificial Sequence: Synthetic oligonucleotide
gcuacaaaaccugguagaa

SEQ ID NO: 2090955 - RNA, 19 nt, Artificial Sequence
  Description of Artificial Sequence: Synthetic oligonucleotide
gcugacuagcaagguaaag

SEQ ID NO: 2090956 - RNA, 19 nt, Artificial Sequence
  Description of Artificial Sequence: Synthetic oligonucleotide
aggucuuuucgaagcaaau

SEQ ID NO: 2090957 - RNA, 19 nt, Artificial Sequence
  Description of Artificial Sequence: Synthetic oligonucleotide
acaaaaccugguagaacuu

SEQ ID NO: 2090958 - RNA, 19 nt, Artificial Sequence
  Description of Artificial Sequence: Synthetic oligonucleotide
uccguugcuuuuggaaaua

SEQ ID NO: 2090959 - RNA, 19 nt, Artificial Sequence
  Description of Artificial Sequence: Synthetic oligonucleotide
gcggagugcauuaaaggga

SEQ ID NO: 2090960 - RNA, 19 nt, Artificial Sequence
  Description of Artificial Sequence: Synthetic oligonucleotide
ggguguauuagagaccucu

SEQ ID NO: 2090961 - RNA, 19 nt, Artificial Sequence
  Description of Artificial Sequence: Synthetic oligonucleotide
ccacacuccacacagguua

SEQ ID NO: 2090962 - RNA, 19 nt, Artificial Sequence
  Description of Artificial Sequence: Synthetic oligonucleotide
agguaaagugugggugugu

SEQ ID NO: 2090963 - RNA, 19 nt, Artificial Sequence
  Description of Artificial Sequence: Synthetic oligonucleotide
gggaaagccuuccaauugu

SEQ ID NO: 2090964 - RNA, 19 nt, Artificial Sequence
  Description of Artificial Sequence: Synthetic oligonucleotide
uuccccacguguggagggc

SEQ ID NO: 2090965 - RNA, 19 nt, Artificial Sequence
  Description of Artificial Sequence: Synthetic oligonucleotide
gcacagacauuaaauuauc

SEQ ID NO: 2090966 - RNA, 19 nt, Artificial Sequence
  Description of Artificial Sequence: Synthetic oligonucleotide
cauugugcaccaacugccu

SEQ ID NO: 2090967 - RNA, 19 nt, Artificial Sequence
  Description of Artificial Sequence: Synthetic oligonucleotide
acauuggaugcagcuuuaa

SEQ ID NO: 2090968 - RNA, 19 nt, Artificial Sequence
  Description of Artificial Sequence: Synthetic oligonucleotide
auguagugcuugacgcuga

SEQ ID NO: 2090969 - RNA, 19 nt, Artificial Sequence
  Description of Artificial Sequence: Synthetic oligonucleotide
cauggcggagugcauuaaa

SEQ ID NO: 2090970 - RNA, 19 nt, Artificial Sequence
  Description of Artificial Sequence: Synthetic oligonucleotide
auacaguuagaggccccaa

SEQ ID NO: 2090971 - RNA, 19 nt, Artificial Sequence
  Description of Artificial Sequence: Synthetic oligonucleotide
gcucaaacuuaaguuggca

SEQ ID NO: 2090972 - RNA, 19 nt, Artificial Sequence
  Description of Artificial Sequence: Synthetic oligonucleotide
gguaaagugugggugugua

SEQ ID NO: 2090973 - RNA, 19 nt, Artificial Sequence
  Description of Artificial Sequence: Synthetic oligonucleotide
gaaguggagcgagggucca

SEQ ID NO: 2090974 - RNA, 19 nt, Artificial Sequence
  Description of Artificial Sequence: Synthetic oligonucleotide
gggcaguacauugacugga

SEQ ID NO: 2090975 - RNA, 19 nt, Artificial Sequence
  Description of Artificial Sequence: Synthetic oligonucleotide
cucgacacucuugcacuuc

SEQ ID NO: 2090976 - RNA, 19 nt, Artificial Sequence
  Description of Artificial Sequence: Synthetic oligonucleotide
gagaccucuucgaucuucu

SEQ ID NO: 2090977 - RNA, 19 nt, Artificial Sequence
  Description of Artificial Sequence: Synthetic oligonucleotide
ggcugcaaucaugaguaca

SEQ ID NO: 2090978 - RNA, 19 nt, Artificial Sequence
  Description of Artificial Sequence: Synthetic oligonucleotide
gacauuggaugcagcuuua

SEQ ID NO: 2090979 - RNA, 19 nt, Artificial Sequence
  Description of Artificial Sequence: Synthetic oligonucleotide
guucgaugaccuccaacau

SEQ ID NO: 2090980 - RNA, 19 nt, Artificial Sequence
  Description of Artificial Sequence: Synthetic oligonucleotide
caccgaugaaauggcucac

SEQ ID NO: 2090981 - RNA, 19 nt, Artificial Sequence
  Description of Artificial Sequence: Synthetic oligonucleotide
acgcacaauuuaauaugaa

SEQ ID NO: 2090982 - RNA, 19 nt, Artificial Sequence
  Description of Artificial Sequence: Synthetic oligonucleotide
uacuagcuuugugcacaga

SEQ ID NO: 2090983 - RNA, 19 nt, Artificial Sequence
  Description of Artificial Sequence: Synthetic oligonucleotide
gucacaagugcagguggaa

SEQ ID NO: 2090984 - RNA, 19 nt, Artificial Sequence
  Description of Artificial Sequence: Synthetic oligonucleotide
uugcuccaaaugugcucau

SEQ ID NO: 2090985 - RNA, 19 nt, Artificial Sequence
  Description of Artificial Sequence: Synthetic oligonucleotide
aggcaaggugcuguuuaaa

SEQ ID NO: 2090986 - RNA, 19 nt, Artificial Sequence
  Description of Artificial Sequence: Synthetic oligonucleotide
uucaggcaaggugcuguuu

SEQ ID NO: 2090987 - RNA, 19 nt, Artificial Sequence
  Description of Artificial Sequence: Synthetic oligonucleotide
uccccacguguggagggcu

SEQ ID NO: 2090988 - RNA, 19 nt, Artificial Sequence
  Description of Artificial Sequence: Synthetic oligonucleotide
acacuccacacagguuaca

SEQ ID NO: 2090989 - RNA, 19 nt, Artificial Sequence
  Description of Artificial Sequence: Synthetic oligonucleotide
uagagaccucuucgaucuu

SEQ ID NO: 2090990 - RNA, 19 nt, Artificial Sequence
  Description of Artificial Sequence: Synthetic oligonucleotide
caagugcagguggaaaugu

SEQ ID NO: 2090991 - RNA, 19 nt, Artificial Sequence
  Description of Artificial Sequence: Synthetic oligonucleotide
aggugccucgacacucuug

SEQ ID NO: 2090992 - RNA, 19 nt, Artificial Sequence
  Description of Artificial Sequence: Synthetic oligonucleotide
agcuuugugcacagacauu

SEQ ID NO: 2090993 - RNA, 19 nt, Artificial Sequence
  Description of Artificial Sequence: Synthetic oligonucleotide
cgaagcaaauuauacaguu

SEQ ID NO: 2090994 - RNA, 19 nt, Artificial Sequence
  Description of Artificial Sequence: Synthetic oligonucleotide
ccgaugaaauggcucacaa

SEQ ID NO: 2090995 - RNA, 19 nt, Artificial Sequence
  Description of Artificial Sequence: Synthetic oligonucleotide
ggagucgaggcaagggaaa

SEQ ID NO: 2090996 - RNA, 19 nt, Artificial Sequence
  Description of Artificial Sequence: Synthetic oligonucleotide
cuuguucgaugaccuccaa

SEQ ID NO: 2090997 - RNA, 19 nt, Artificial Sequence
  Description of Artificial Sequence: Synthetic oligonucleotide
ggucuuuucgaagcaaauu

SEQ ID NO: 2090998 - RNA, 19 nt, Artificial Sequence
  Description of Artificial Sequence: Synthetic oligonucleotide
cgccaaggugccucgacac

SEQ ID NO: 2090999 - RNA, 19 nt, Artificial Sequence
  Description of Artificial Sequence: Synthetic oligonucleotide
augugcucauuugcugcua

SEQ ID NO: 2091000 - RNA, 19 nt, Artificial Sequence
  Description of Artificial Sequence: Synthetic oligonucleotide
ccaaaacgcacaauuuaau

SEQ ID NO: 2091001 - RNA, 19 nt, Artificial Sequence
  Description of Artificial Sequence: Synthetic oligonucleotide
guggguguguauguccuau

SEQ ID NO: 2091002 - RNA, 19 nt, Artificial Sequence
  Description of Artificial Sequence: Synthetic oligonucleotide
ggccccaaaucuguaaacu

SEQ ID NO: 2091003 - RNA, 19 nt, Artificial Sequence
  Description of Artificial Sequence: Synthetic oligonucleotide
ggaaagccuuccaauugua

SEQ ID NO: 2091004 - RNA, 19 nt, Artificial Sequence
  Description of Artificial Sequence: Synthetic oligonucleotide
cuauggcuacuugcuucca

SEQ ID NO: 2091005 - RNA, 19 nt, Artificial Sequence
  Description of Artificial Sequence: Synthetic oligonucleotide
guccuauggcuacuugcuu

SEQ ID NO: 2091006 - RNA, 19 nt, Artificial Sequence
  Description of Artificial Sequence: Synthetic oligonucleotide
guagugcuugacgcugacu

SEQ ID NO: 2091007 - RNA, 19 nt, Artificial Sequence
  Description of Artificial Sequence: Synthetic oligonucleotide
cgaugaaauggcucacaaa

SEQ ID NO: 2091008 - RNA, 19 nt, Artificial Sequence
  Description of Artificial Sequence: Synthetic oligonucleotide
gggcugcaaucaugaguac

SEQ ID NO: 2091009 - RNA, 19 nt, Artificial Sequence
  Description of Artificial Sequence: Synthetic oligonucleotide
guauguccuauggcuacuu

SEQ ID NO: 2091010 - RNA, 19 nt, Artificial Sequence
  Description of Artificial Sequence: Synthetic oligonucleotide
gcgaggguccauggcggag

SEQ ID NO: 2091011 - RNA, 19 nt, Artificial Sequence
  Description of Artificial Sequence: Synthetic oligonucleotide
gccuaucuuuaccaccgau

SEQ ID NO: 2091012 - RNA, 19 nt, Artificial Sequence
  Description of Artificial Sequence: Synthetic oligonucleotide
guccauggcggagugcauu

SEQ ID NO: 2091013 - RNA, 19 nt, Artificial Sequence
  Description of Artificial Sequence: Synthetic oligonucleotide
cacguguggagggcugcaa

SEQ ID NO: 2091014 - RNA, 19 nt, Artificial Sequence
  Description of Artificial Sequence: Synthetic oligonucleotide
auguuccauugugcaccaa

SEQ ID NO: 2091015 - RNA, 19 nt, Artificial Sequence
  Description of Artificial Sequence: Synthetic oligonucleotide
gccaaggugccucgacacu

SEQ ID NO: 2091016 - RNA, 19 nt, Artificial Sequence
  Description of Artificial Sequence: Synthetic oligonucleotide
ccgccaaggugccucgaca

SEQ ID NO: 2091017 - RNA, 19 nt, Artificial Sequence
  Description of Artificial Sequence: Synthetic oligonucleotide
ccccacguguggagggcug

SEQ ID NO: 2091018 - RNA, 19 nt, Artificial Sequence
  Description of Artificial Sequence: Synthetic oligonucleotide
gaccgccaaggugccucga

SEQ ID NO: 2091019 - RNA, 19 nt, Artificial Sequence
  Description of Artificial Sequence: Synthetic oligonucleotide
guugaccgccaaggugccu

SEQ ID NO: 2091020 - RNA, 19 nt, Artificial Sequence
  Description of Artificial Sequence: Synthetic oligonucleotide
gggguguauuagagaccuc

SEQ ID NO: 2091021 - RNA, 19 nt, Artificial Sequence
  Description of Artificial Sequence: Synthetic oligonucleotide
ccaagguaauuuugacauu

SEQ ID NO: 2091022 - RNA, 19 nt, Artificial Sequence
  Description of Artificial Sequence: Synthetic oligonucleotide
cgcugacuagcaagguaaa

SEQ ID NO: 2091023 - RNA, 19 nt, Artificial Sequence
  Description of Artificial Sequence: Synthetic oligonucleotide
cguugcuuuuggaaauauu

SEQ ID NO: 2091024 - RNA, 19 nt, Artificial Sequence
  Description of Artificial Sequence: Synthetic oligonucleotide
ccucgacacucuugcacuu

SEQ ID NO: 2091025 - RNA, 19 nt, Artificial Sequence
  Description of Artificial Sequence: Synthetic oligonucleotide
ccguugcuuuuggaaauau

SEQ ID NO: 2091026 - RNA, 19 nt, Artificial Sequence
  Description of Artificial Sequence: Synthetic oligonucleotide
gguccauggcggagugcau

SEQ ID NO: 2091027 - RNA, 19 nt, Artificial Sequence
  Description of Artificial Sequence: Synthetic oligonucleotide
ucaaccuugagccacagcc

SEQ ID NO: 2091028 - RNA, 19 nt, Artificial Sequence
  Description of Artificial Sequence: Synthetic oligonucleotide
uugacaaauguuuauuggg

SEQ ID NO: 2091029 - RNA, 19 nt, Artificial Sequence
  Description of Artificial Sequence: Synthetic oligonucleotide
aagauaagcucacacccac

SEQ ID NO: 2091030 - RNA, 19 nt, Artificial Sequence
  Description of Artificial Sequence: Synthetic oligonucleotide
caaagauaagcucacaccc

SEQ ID NO: 2091031 - RNA, 19 nt, Artificial Sequence
  Description of Artificial Sequence: Synthetic oligonucleotide
ucuauucaggagcaaaugc

SEQ ID NO: 2091032 - RNA, 19 nt, Artificial Sequence
  Description of Artificial Sequence: Synthetic oligonucleotide
uaaaacaaugcuccaaaga

SEQ ID NO: 2091033 - RNA, 19 nt, Artificial Sequence
  Description of Artificial Sequence: Synthetic oligonucleotide
uuacgaugcaacuucaagc

SEQ ID NO: 2091034 - RNA, 19 nt, Artificial Sequence
  Description of Artificial Sequence: Synthetic oligonucleotide
uguacuccagggcugaggg

SEQ ID NO: 2091035 - RNA, 19 nt, Artificial Sequence
  Description of Artificial Sequence: Synthetic oligonucleotide
cuugacaaauguuuauugg

SEQ ID NO: 2091036 - RNA, 19 nt, Artificial Sequence
  Description of Artificial Sequence: Synthetic oligonucleotide
uacgaugcaacuucaagcc

SEQ ID NO: 2091037 - RNA, 19 nt, Artificial Sequence
  Description of Artificial Sequence: Synthetic oligonucleotide
gaaggugucccuuuaacug

SEQ ID NO: 2091038 - RNA, 19 nt, Artificial Sequence
  Description of Artificial Sequence: Synthetic oligonucleotide
uuuugcuugacaaauguuu

SEQ ID NO: 2091039 - RNA, 19 nt, Artificial Sequence
  Description of Artificial Sequence: Synthetic oligonucleotide
aaagccaucucagggaagg

SEQ ID NO: 2091040 - RNA, 19 nt, Artificial Sequence
  Description of Artificial Sequence: Synthetic oligonucleotide
gauaagcucacacccaccc

SEQ ID NO: 2091041 - RNA, 19 nt, Artificial Sequence
  Description of Artificial Sequence: Synthetic oligonucleotide
ugcaagaaagaaagcaccc

SEQ ID NO: 2091042 - RNA, 19 nt, Artificial Sequence
  Description of Artificial Sequence: Synthetic oligonucleotide
ugagccacagccuccaucc

SEQ ID NO: 2091043 - RNA, 19 nt, Artificial Sequence
  Description of Artificial Sequence: Synthetic oligonucleotide
ugcaaagauaagcucacac

SEQ ID NO: 2091044 - RNA, 19 nt, Artificial Sequence
  Description of Artificial Sequence: Synthetic oligonucleotide
ucuucuaucggucucucuc

SEQ ID NO: 2091045 - RNA, 19 nt, Artificial Sequence
  Description of Artificial Sequence: Synthetic oligonucleotide
uauucaggagcaaaugccu

SEQ ID NO: 2091046 - RNA, 19 nt, Artificial Sequence
  Description of Artificial Sequence: Synthetic oligonucleotide
gacaaauguuuauugggug

SEQ ID NO: 2091047 - RNA, 19 nt, Artificial Sequence
  Description of Artificial Sequence: Synthetic oligonucleotide
agaaccaccucagagcuac

SEQ ID NO: 2091048 - RNA, 19 nt, Artificial Sequence
  Description of Artificial Sequence: Synthetic oligonucleotide
aaaacaagcuccagugggg

SEQ ID NO: 2091049 - RNA, 19 nt, Artificial Sequence
  Description of Artificial Sequence: Synthetic oligonucleotide
cacccgucaaccuugagcc

SEQ ID NO: 2091050 - RNA, 19 nt, Artificial Sequence
  Description of Artificial Sequence: Synthetic oligonucleotide
ugcccugccaguuaggcag

SEQ ID NO: 2091051 - RNA, 19 nt, Artificial Sequence
  Description of Artificial Sequence: Synthetic oligonucleotide
uguacgaagacuccaucgu

SEQ ID NO: 2091052 - RNA, 19 nt, Artificial Sequence
  Description of Artificial Sequence: Synthetic oligonucleotide
aaaugccuugccaggagcc

SEQ ID NO: 2091053 - RNA, 19 nt, Artificial Sequence
  Description of Artificial Sequence: Synthetic oligonucleotide
uuugcaggacucuauucag

SEQ ID NO: 2091054 - RNA, 19 nt, Artificial Sequence
  Description of Artificial Sequence: Synthetic oligonucleotide
aagccaacagugugaugcc

SEQ ID NO: 2091055 - RNA, 19 nt, Artificial Sequence
  Description of Artificial Sequence: Synthetic oligonucleotide
cuaccauugugcaugcucc

SEQ ID NO: 2091056 - RNA, 19 nt, Artificial Sequence
  Description of Artificial Sequence: Synthetic oligonucleotide
agugugaugccccauggug

SEQ ID NO: 2091057 - RNA, 19 nt, Artificial Sequence
  Description of Artificial Sequence: Synthetic oligonucleotide
agugcaaagacugcuggcg

SEQ ID NO: 2091058 - RNA, 19 nt, Artificial Sequence
  Description of Artificial Sequence: Synthetic oligonucleotide
uccuugaccaccccggugc

SEQ ID NO: 2091059 - RNA, 19 nt, Artificial Sequence
  Description of Artificial Sequence: Synthetic oligonucleotide
acuucaagccaacagugug

SEQ ID NO: 2091060 - RNA, 19 nt, Artificial Sequence
  Description of Artificial Sequence: Synthetic oligonucleotide
guagcuaccauugugcaug

SEQ ID NO: 2091061 - RNA, 19 nt, Artificial Sequence
  Description of Artificial Sequence: Synthetic oligonucleotide
cuuacgaugcaacuucaag

SEQ ID NO: 2091062 - RNA, 19 nt, Artificial Sequence
  Description of Artificial Sequence: Synthetic oligonucleotide
cagguugucaaaauagaug

SEQ ID NO: 2091063 - RNA, 19 nt, Artificial Sequence
  Description of Artificial Sequence: Synthetic oligonucleotide
auggcaagauguaauuucc

SEQ ID NO: 2091064 - RNA, 19 nt, Artificial Sequence
  Description of Artificial Sequence: Synthetic oligonucleotide
cuguacgaagacuccaucg

SEQ ID NO: 2091065 - RNA, 19 nt, Artificial Sequence
  Description of Artificial Sequence: Synthetic oligonucleotide
caggacucuauucaggagc

SEQ ID NO: 2091066 - RNA, 19 nt, Artificial Sequence
  Description of Artificial Sequence: Synthetic oligonucleotide
caucuauacccacagcugc

SEQ ID NO: 2091067 - RNA, 19 nt, Artificial Sequence
  Description of Artificial Sequence: Synthetic oligonucleotide
cauggcaagauguaauuuc

SEQ ID NO: 2091068 - RNA, 19 nt, Artificial Sequence
  Description of Artificial Sequence: Synthetic oligonucleotide
gaaucucggucacacagcc

SEQ ID NO: 2091069 - RNA, 19 nt, Artificial Sequence
  Description of Artificial Sequence: Synthetic oligonucleotide
cugcagguugucaaaauag

SEQ ID NO: 2091070 - RNA, 19 nt, Artificial Sequence
  Description of Artificial Sequence: Synthetic oligonucleotide
uuauuggguggguaaguag

SEQ ID NO: 2091071 - RNA, 19 nt, Artificial Sequence
  Description of Artificial Sequence: Synthetic oligonucleotide
acgaagacuccaucguccc

SEQ ID NO: 2091072 - RNA, 19 nt, Artificial Sequence
  Description of Artificial Sequence: Synthetic oligonucleotide
aguugcaaagauaagcuca

SEQ ID NO: 2091073 - RNA, 19 nt, Artificial Sequence
  Description of Artificial Sequence: Synthetic oligonucleotide
caacuucaagccaacagug

SEQ ID NO: 2091074 - RNA, 19 nt, Artificial Sequence
  Description of Artificial Sequence: Synthetic oligonucleotide
ugcagguugucaaaauaga

SEQ ID NO: 2091075 - RNA, 19 nt, Artificial Sequence
  Description of Artificial Sequence: Synthetic oligonucleotide
caaaaguggcuguagcuac

SEQ ID NO: 2091076 - RNA, 19 nt, Artificial Sequence
  Description of Artificial Sequence: Synthetic oligonucleotide
aagauguaauuucccauuu

SEQ ID NO: 2091077 - RNA, 19 nt, Artificial Sequence
  Description of Artificial Sequence: Synthetic oligonucleotide
uuuaacugcagguguuugu

SEQ ID NO: 2091078 - RNA, 19 nt, Artificial Sequence
  Description of Artificial Sequence: Synthetic oligonucleotide
uguugauggcuuucuuggg

SEQ ID NO: 2091079 - RNA, 19 nt, Artificial Sequence
  Description of Artificial Sequence: Synthetic oligonucleotide
uguuuauuggguggguaag

SEQ ID NO: 2091080 - RNA, 19 nt, Artificial Sequence
  Description of Artificial Sequence: Synthetic oligonucleotide
agcuacgggagcugaagac

SEQ ID NO: 2091081 - RNA, 19 nt, Artificial Sequence
  Description of Artificial Sequence: Synthetic oligonucleotide
aaagacugcuggcgacggc

SEQ ID NO: 2091082 - RNA, 19 nt, Artificial Sequence
  Description of Artificial Sequence: Synthetic oligonucleotide
gcaaagauaagcucacacc

SEQ ID NO: 2091083 - RNA, 19 nt, Artificial Sequence
  Description of Artificial Sequence: Synthetic oligonucleotide
guagacagccaucuauacc

SEQ ID NO: 2091084 - RNA, 19 nt, Artificial Sequence
  Description of Artificial Sequence: Synthetic oligonucleotide
ucccuuuaacugcaggugu

SEQ ID NO: 2091085 - RNA, 19 nt, Artificial Sequence
  Description of Artificial Sequence: Synthetic oligonucleotide
cuuugcaggacucuauuca

SEQ ID NO: 2091086 - RNA, 19 nt, Artificial Sequence
  Description of Artificial Sequence: Synthetic oligonucleotide
acuccaucgucccucuggg

SEQ ID NO: 2091087 - RNA, 19 nt, Artificial Sequence
  Description of Artificial Sequence: Synthetic oligonucleotide
aaagcacccgucaaccuug

SEQ ID NO: 2091088 - RNA, 19 nt, Artificial Sequence
  Description of Artificial Sequence: Synthetic oligonucleotide
ccuaguugcaaagauaagc

SEQ ID NO: 2091089 - RNA, 19 nt, Artificial Sequence
  Description of Artificial Sequence: Synthetic oligonucleotide
caaugcuccaaagaacagc

SEQ ID NO: 2091090 - RNA, 19 nt, Artificial Sequence
  Description of Artificial Sequence: Synthetic oligonucleotide
aucuauacccacagcugcc

SEQ ID NO: 2091091 - RNA, 19 nt, Artificial Sequence
  Description of Artificial Sequence: Synthetic oligonucleotide
aggacgcagccauaggcgg

SEQ ID NO: 2091092 - RNA, 19 nt, Artificial Sequence
  Description of Artificial Sequence: Synthetic oligonucleotide
uggcaagauguaauuuccc

SEQ ID NO: 2091093 - RNA, 19 nt, Artificial Sequence
  Description of Artificial Sequence: Synthetic oligonucleotide
gaggucgcagugcaaagac

SEQ ID NO: 2091094 - RNA, 19 nt, Artificial Sequence
  Description of Artificial Sequence: Synthetic oligonucleotide
auguuuauuggguggguaa

SEQ ID NO: 2091095 - RNA, 19 nt, Artificial Sequence
  Description of Artificial Sequence: Synthetic oligonucleotide
gacggcgagccccagucgg

SEQ ID NO: 2091096 - RNA, 19 nt, Artificial Sequence
  Description of Artificial Sequence: Synthetic oligonucleotide
uuuggcauggcaagaugua

SEQ ID NO: 2091097 - RNA, 19 nt, Artificial Sequence
  Description of Artificial Sequence: Synthetic oligonucleotide
uauucuggucauuguacuc

SEQ ID NO: 2091098 - RNA, 19 nt, Artificial Sequence
  Description of Artificial Sequence: Synthetic oligonucleotide
uacuccagggcugagggcu

SEQ ID NO: 2091099 - RNA, 19 nt, Artificial Sequence
  Description of Artificial Sequence: Synthetic oligonucleotide
ucucucucucucucuuugg

SEQ ID NO: 2091100 - RNA, 19 nt, Artificial Sequence
  Description of Artificial Sequence: Synthetic oligonucleotide
ucuggcagggcggacagug

SEQ ID NO: 2091101 - RNA, 19 nt, Artificial Sequence
  Description of Artificial Sequence: Synthetic oligonucleotide
cucaccagacugcagguug

SEQ ID NO: 2091102 - RNA, 19 nt, Artificial Sequence
  Description of Artificial Sequence: Synthetic oligonucleotide
ggucuguccaggcucaggg

SEQ ID NO: 2091103 - RNA, 19 nt, Artificial Sequence
  Description of Artificial Sequence: Synthetic oligonucleotide
ccccuugcaagaaagaaag

SEQ ID NO: 2091104 - RNA, 19 nt, Artificial Sequence
  Description of Artificial Sequence: Synthetic oligonucleotide
gcuugacaaauguuuauug

SEQ ID NO: 2091105 - RNA, 19 nt, Artificial Sequence
  Description of Artificial Sequence: Synthetic oligonucleotide
ucuuugcaggacucuauuc

SEQ ID NO: 2091106 - RNA, 19 nt, Artificial Sequence
  Description of Artificial Sequence: Synthetic oligonucleotide
guuuauucuggucauugua

SEQ ID NO: 2091107 - RNA, 19 nt, Artificial Sequence
  Description of Artificial Sequence: Synthetic oligonucleotide
aucacuuccuguacgaaga

SEQ ID NO: 2091108 - RNA, 19 nt, Artificial Sequence
  Description of Artificial Sequence: Synthetic oligonucleotide
aauguuuauugggugggua

SEQ ID NO: 2091109 - RNA, 19 nt, Artificial Sequence
  Description of Artificial Sequence: Synthetic oligonucleotide
aucggucucucucucucuc

SEQ ID NO: 2091110 - RNA, 19 nt, Artificial Sequence
  Description of Artificial Sequence: Synthetic oligonucleotide
guugcaaagauaagcucac

SEQ ID NO: 2091111 - RNA, 19 nt, Artificial Sequence
  Description of Artificial Sequence: Synthetic oligonucleotide
gucauuguacuccagggcu

SEQ ID NO: 2091112 - RNA, 19 nt, Artificial Sequence
  Description of Artificial Sequence: Synthetic oligonucleotide
aaauguuuauugggugggu

SEQ ID NO: 2091113 - RNA, 19 nt, Artificial Sequence
  Description of Artificial Sequence: Synthetic oligonucleotide
augggagccacugcccugc

SEQ ID NO: 2091114 - RNA, 19 nt, Artificial Sequence
  Description of Artificial Sequence: Synthetic oligonucleotide
auacccacagcugccacag

SEQ ID NO: 2091115 - RNA, 19 nt, Artificial Sequence
  Description of Artificial Sequence: Synthetic oligonucleotide
gaagacuccaucgucccuc

SEQ ID NO: 2091116 - RNA, 19 nt, Artificial Sequence
  Description of Artificial Sequence: Synthetic oligonucleotide
uggcauggcaagauguaau

SEQ ID NO: 2091117 - RNA, 19 nt, Artificial Sequence
  Description of Artificial Sequence: Synthetic oligonucleotide
ugggcccagaaccaccuca

SEQ ID NO: 2091118 - RNA, 19 nt, Artificial Sequence
  Description of Artificial Sequence: Synthetic oligonucleotide
ugcaaagacugcuggcgac

SEQ ID NO: 2091119 - RNA, 19 nt, Artificial Sequence
  Description of Artificial Sequence: Synthetic oligonucleotide
ucuauacccacagcugcca

SEQ ID NO: 2091120 - RNA, 19 nt, Artificial Sequence
  Description of Artificial Sequence: Synthetic oligonucleotide
acccuaguugcaaagauaa

SEQ ID NO: 2091121 - RNA, 19 nt, Artificial Sequence
  Description of Artificial Sequence: Synthetic oligonucleotide
agauaagcucacacccacc

SEQ ID NO: 2091122 - RNA, 19 nt, Artificial Sequence
  Description of Artificial Sequence: Synthetic oligonucleotide
agccugcgggcucaguccc

SEQ ID NO: 2091123 - RNA, 19 nt, Artificial Sequence
  Description of Artificial Sequence: Synthetic oligonucleotide
uuccuggccacugcuacag

SEQ ID NO: 2091124 - RNA, 19 nt, Artificial Sequence
  Description of Artificial Sequence: Synthetic oligonucleotide
cuucaagccaacaguguga

SEQ ID NO: 2091125 - RNA, 19 nt, Artificial Sequence
  Description of Artificial Sequence: Synthetic oligonucleotide
aacuucaagccaacagugu

SEQ ID NO: 2091126 - RNA, 19 nt, Artificial Sequence
  Description of Artificial Sequence: Synthetic oligonucleotide
uugcuugacaaauguuuau

SEQ ID NO: 2091127 - RNA, 19 nt, Artificial Sequence
  Description of Artificial Sequence: Synthetic oligonucleotide
agagcuacgggagcugaag

SEQ ID NO: 2091128 - RNA, 19 nt, Artificial Sequence
  Description of Artificial Sequence: Synthetic oligonucleotide
gcaagaaagaaagcacccg

SEQ ID NO: 2091129 - RNA, 19 nt, Artificial Sequence
  Description of Artificial Sequence: Synthetic oligonucleotide
cucuauucaggagcaaaug

SEQ ID NO: 2091130 - RNA, 19 nt, Artificial Sequence
  Description of Artificial Sequence: Synthetic oligonucleotide
agggcggacagugcagucc

SEQ ID NO: 2091131 - RNA, 19 nt, Artificial Sequence
  Description of Artificial Sequence: Synthetic oligonucleotide
uguagcuaccauugugcau

SEQ ID NO: 2091132 - RNA, 19 nt, Artificial Sequence
  Description of Artificial Sequence: Synthetic oligonucleotide
cuaucggucucucucucuc

SEQ ID NO: 2091133 - RNA, 19 nt, Artificial Sequence
  Description of Artificial Sequence: Synthetic oligonucleotide
gucucucucucucucuuug

SEQ ID NO: 2091134 - RNA, 19 nt, Artificial Sequence
  Description of Artificial Sequence: Synthetic oligonucleotide
aagacuccaucgucccucu

SEQ ID NO: 2091135 - RNA, 19 nt, Artificial Sequence
  Description of Artificial Sequence: Synthetic oligonucleotide
gguggcacccacaaucugg

SEQ ID NO: 2091136 - RNA, 19 nt, Artificial Sequence
  Description of Artificial Sequence: Synthetic oligonucleotide
uccuguacgaagacuccau

SEQ ID NO: 2091137 - RNA, 19 nt, Artificial Sequence
  Description of Artificial Sequence: Synthetic oligonucleotide
ucagucccaggacgcagcc

SEQ ID NO: 2091138 - RNA, 19 nt, Artificial Sequence
  Description of Artificial Sequence: Synthetic oligonucleotide
ucggucacacagccugcgg

SEQ ID NO: 2091139 - RNA, 19 nt, Artificial Sequence
  Description of Artificial Sequence: Synthetic oligonucleotide
ggucauuguacuccagggc

SEQ ID NO: 2091140 - RNA, 19 nt, Artificial Sequence
  Description of Artificial Sequence: Synthetic oligonucleotide
ucucucucucucuuuggaa

SEQ ID NO: 2091141 - RNA, 19 nt, Artificial Sequence
  Description of Artificial Sequence: Synthetic oligonucleotide
uucaagccaacagugugau

SEQ ID NO: 2091142 - RNA, 19 nt, Artificial Sequence
  Description of Artificial Sequence: Synthetic oligonucleotide
ugcuugacaaauguuuauu

SEQ ID NO: 2091143 - RNA, 19 nt, Artificial Sequence
  Description of Artificial Sequence: Synthetic oligonucleotide
cagccuccauccaaaagug

SEQ ID NO: 2091144 - RNA, 19 nt, Artificial Sequence
  Description of Artificial Sequence: Synthetic oligonucleotide
ucuaucggucucucucucu

SEQ ID NO: 2091145 - RNA, 19 nt, Artificial Sequence
  Description of Artificial Sequence: Synthetic oligonucleotide
ugcgggcucagucccagga

SEQ ID NO: 2091146 - RNA, 19 nt, Artificial Sequence
  Description of Artificial Sequence: Synthetic oligonucleotide
agaaagcacccgucaaccu

SEQ ID NO: 2091147 - RNA, 19 nt, Artificial Sequence
  Description of Artificial Sequence: Synthetic oligonucleotide
cagugcaaagacugcuggc

SEQ ID NO: 2091148 - RNA, 19 nt, Artificial Sequence
  Description of Artificial Sequence: Synthetic oligonucleotide
ggagacugaagcugccccg

SEQ ID NO: 2091149 - RNA, 19 nt, Artificial Sequence
  Description of Artificial Sequence: Synthetic oligonucleotide
ggcaagauguaauuuccca

SEQ ID NO: 2091150 - RNA, 19 nt, Artificial Sequence
  Description of Artificial Sequence: Synthetic oligonucleotide
aaaagccaucucagggaag

SEQ ID NO: 2091151 - RNA, 19 nt, Artificial Sequence
  Description of Artificial Sequence: Synthetic oligonucleotide
gguguuuguuuccuuuggc

SEQ ID NO: 2091152 - RNA, 19 nt, Artificial Sequence
  Description of Artificial Sequence: Synthetic oligonucleotide
cuuuaacugcagguguuug

SEQ ID NO: 2091153 - RNA, 19 nt, Artificial Sequence
  Description of Artificial Sequence: Synthetic oligonucleotide
ugugaugccccaugguguu

SEQ ID NO: 2091154 - RNA, 19 nt, Artificial Sequence
  Description of Artificial Sequence: Synthetic oligonucleotide
agauguaauuucccauuuu

SEQ ID NO: 2091155 - RNA, 19 nt, Artificial Sequence
  Description of Artificial Sequence: Synthetic oligonucleotide
acugcuggcgacggcgagc

SEQ ID NO: 2091156 - RNA, 19 nt, Artificial Sequence
  Description of Artificial Sequence: Synthetic oligonucleotide
ggucgcagugcaaagacug

SEQ ID NO: 2091157 - RNA, 19 nt, Artificial Sequence
  Description of Artificial Sequence: Synthetic oligonucleotide
uugagccacagccuccauc

SEQ ID NO: 2091158 - RNA, 19 nt, Artificial Sequence
  Description of Artificial Sequence: Synthetic oligonucleotide
guuuccuuuggcauggcaa

SEQ ID NO: 2091159 - RNA, 19 nt, Artificial Sequence
  Description of Artificial Sequence: Synthetic oligonucleotide
uuccuguacgaagacucca

SEQ ID NO: 2091160 - RNA, 19 nt, Artificial Sequence
  Description of Artificial Sequence: Synthetic oligonucleotide
cuucauggguccaggucug

SEQ ID NO: 2091161 - RNA, 19 nt, Artificial Sequence
  Description of Artificial Sequence: Synthetic oligonucleotide
agccaacagugugaugccc

SEQ ID NO: 2091162 - RNA, 19 nt, Artificial Sequence
  Description of Artificial Sequence: Synthetic oligonucleotide
uucuaucggucucucucuc

SEQ ID NO: 2091163 - RNA, 19 nt, Artificial Sequence
  Description of Artificial Sequence: Synthetic oligonucleotide
caagaaagaaagcacccgu

SEQ ID NO: 2091164 - RNA, 19 nt, Artificial Sequence
  Description of Artificial Sequence: Synthetic oligonucleotide
aucuuugcaggacucuauu

SEQ ID NO: 2091165 - RNA, 19 nt, Artificial Sequence
  Description of Artificial Sequence: Synthetic oligonucleotide
gacucuauucaggagcaaa

SEQ ID NO: 2091166 - RNA, 19 nt, Artificial Sequence
  Description of Artificial Sequence: Synthetic oligonucleotide
gcuaccauugugcaugcuc

SEQ ID NO: 2091167 - RNA, 19 nt, Artificial Sequence
  Description of Artificial Sequence: Synthetic oligonucleotide
auggguccaggucugucca

SEQ ID NO: 2091168 - RNA, 19 nt, Artificial Sequence
  Description of Artificial Sequence: Synthetic oligonucleotide
acgaugcaacuucaagcca

SEQ ID NO: 2091169 - RNA, 19 nt, Artificial Sequence
  Description of Artificial Sequence: Synthetic oligonucleotide
gucggggcgggucuggcag

SEQ ID NO: 2091170 - RNA, 19 nt, Artificial Sequence
  Description of Artificial Sequence: Synthetic oligonucleotide
cuuuggcauggcaagaugu

SEQ ID NO: 2091171 - RNA, 19 nt, Artificial Sequence
  Description of Artificial Sequence: Synthetic oligonucleotide
ggcuguagcuaccauugug

SEQ ID NO: 2091172 - RNA, 19 nt, Artificial Sequence
  Description of Artificial Sequence: Synthetic oligonucleotide
gcacccgucaaccuugagc

SEQ ID NO: 2091173 - RNA, 19 nt, Artificial Sequence
  Description of Artificial Sequence: Synthetic oligonucleotide
ccaucuauacccacagcug

SEQ ID NO: 2091174 - RNA, 19 nt, Artificial Sequence
  Description of Artificial Sequence: Synthetic oligonucleotide
aggacucuauucaggagca

SEQ ID NO: 2091175 - RNA, 19 nt, Artificial Sequence
  Description of Artificial Sequence: Synthetic oligonucleotide
uaucggucucucucucucu

SEQ ID NO: 2091176 - RNA, 19 nt, Artificial Sequence
  Description of Artificial Sequence: Synthetic oligonucleotide
ucagagcuacgggagcuga

SEQ ID NO: 2091177 - RNA, 19 nt, Artificial Sequence
  Description of Artificial Sequence: Synthetic oligonucleotide
cagccugcgggcucagucc

SEQ ID NO: 2091178 - RNA, 19 nt, Artificial Sequence
  Description of Artificial Sequence: Synthetic oligonucleotide
ccaguuaggcagcagcagc

SEQ ID NO: 2091179 - RNA, 19 nt, Artificial Sequence
  Description of Artificial Sequence: Synthetic oligonucleotide
cuguagcuaccauugugca

SEQ ID NO: 2091180 - RNA, 19 nt, Artificial Sequence
  Description of Artificial Sequence: Synthetic oligonucleotide
agcugccccggcuuuguug

SEQ ID NO: 2091181 - RNA, 19 nt, Artificial Sequence
  Description of Artificial Sequence: Synthetic oligonucleotide
gccaucuauacccacagcu

SEQ ID NO: 2091182 - RNA, 19 nt, Artificial Sequence
  Description of Artificial Sequence: Synthetic oligonucleotide
accucaccagacugcaggu

SEQ ID NO: 2091183 - RNA, 19 nt, Artificial Sequence
  Description of Artificial Sequence: Synthetic oligonucleotide
uccuuuggcauggcaagau

SEQ ID NO: 2091184 - RNA, 19 nt, Artificial Sequence
  Description of Artificial Sequence: Synthetic oligonucleotide
gagcuacgggagcugaaga

SEQ ID NO: 2091185 - RNA, 19 nt, Artificial Sequence
  Description of Artificial Sequence: Synthetic oligonucleotide
gaaagcacccgucaaccuu

SEQ ID NO: 2091186 - RNA, 19 nt, Artificial Sequence
  Description of Artificial Sequence: Synthetic oligonucleotide
caguccaugggagccacug

SEQ ID NO: 2091187 - RNA, 19 nt, Artificial Sequence
  Description of Artificial Sequence: Synthetic oligonucleotide
gguaaguagacagccaucu

SEQ ID NO: 2091188 - RNA, 19 nt, Artificial Sequence
  Description of Artificial Sequence: Synthetic oligonucleotide
ucaagccaacagugugaug

SEQ ID NO: 2091189 - RNA, 19 nt, Artificial Sequence
  Description of Artificial Sequence: Synthetic oligonucleotide
uaacugcagguguuuguuu

SEQ ID NO: 2091190 - RNA, 19 nt, Artificial Sequence
  Description of Artificial Sequence: Synthetic oligonucleotide
uugcaaagauaagcucaca

SEQ ID NO: 2091191 - RNA, 19 nt, Artificial Sequence
  Description of Artificial Sequence: Synthetic oligonucleotide
gugcaaagacugcuggcga

SEQ ID NO: 2091192 - RNA, 19 nt, Artificial Sequence
  Description of Artificial Sequence: Synthetic oligonucleotide
gggaaggugucccuuuaac

SEQ ID NO: 2091193 - RNA, 19 nt, Artificial Sequence
  Description of Artificial Sequence: Synthetic oligonucleotide
cauaggcggcguagggccc

SEQ ID NO: 2091194 - RNA, 19 nt, Artificial Sequence
  Description of Artificial Sequence: Synthetic oligonucleotide
ucggucucucucucucucu

SEQ ID NO: 2091195 - RNA, 19 nt, Artificial Sequence
  Description of Artificial Sequence: Synthetic oligonucleotide
auaggcggcguagggcccg

SEQ ID NO: 2091196 - RNA, 19 nt, Artificial Sequence
  Description of Artificial Sequence: Synthetic oligonucleotide
uguccaggcucaggggacc

SEQ ID NO: 2091197 - RNA, 19 nt, Artificial Sequence
  Description of Artificial Sequence: Synthetic oligonucleotide
cucggucacacagccugcg

SEQ ID NO: 2091198 - RNA, 19 nt, Artificial Sequence
  Description of Artificial Sequence: Synthetic oligonucleotide
cucucucucucucuuugga

SEQ ID NO: 2091199 - RNA, 19 nt, Artificial Sequence
  Description of Artificial Sequence: Synthetic oligonucleotide
gccccggcuuuguugaugg

SEQ ID NO: 2091200 - RNA, 19 nt, Artificial Sequence
  Description of Artificial Sequence: Synthetic oligonucleotide
cugcuggcgacggcgagcc

SEQ ID NO: 2091201 - RNA, 19 nt, Artificial Sequence
  Description of Artificial Sequence: Synthetic oligonucleotide
ggaaucucggucacacagc

SEQ ID NO: 2091202 - RNA, 19 nt, Artificial Sequence
  Description of Artificial Sequence: Synthetic oligonucleotide
auagaugguggcacccaca

SEQ ID NO: 2091203 - RNA, 19 nt, Artificial Sequence
  Description of Artificial Sequence: Synthetic oligonucleotide
uacgggagcugaagacuuc

SEQ ID NO: 2091204 - RNA, 19 nt, Artificial Sequence
  Description of Artificial Sequence: Synthetic oligonucleotide
augguggcacccacaaucu

SEQ ID NO: 2091205 - RNA, 19 nt, Artificial Sequence
  Description of Artificial Sequence: Synthetic oligonucleotide
agccacagccuccauccaa

SEQ ID NO: 2091206 - RNA, 19 nt, Artificial Sequence
  Description of Artificial Sequence: Synthetic oligonucleotide
ucgucccucugggcaaugg

SEQ ID NO: 2091207 - RNA, 19 nt, Artificial Sequence
  Description of Artificial Sequence: Synthetic oligonucleotide
gacugcuggcgacggcgag

SEQ ID NO: 2091208 - RNA, 19 nt, Artificial Sequence
  Description of Artificial Sequence: Synthetic oligonucleotide
gggguggagacugaagcug

SEQ ID NO: 2091209 - RNA, 19 nt, Artificial Sequence
  Description of Artificial Sequence: Synthetic oligonucleotide
gaugccccaugguguucag

SEQ ID NO: 2091210 - RNA, 19 nt, Artificial Sequence
  Description of Artificial Sequence: Synthetic oligonucleotide
cuucuaucggucucucucu

SEQ ID NO: 2091211 - RNA, 19 nt, Artificial Sequence
  Description of Artificial Sequence: Synthetic oligonucleotide
ggaaggugucccuuuaacu

SEQ ID NO: 2091212 - RNA, 19 nt, Artificial Sequence
  Description of Artificial Sequence: Synthetic oligonucleotide
aaucucggucacacagccu

SEQ ID NO: 2091213 - RNA, 19 nt, Artificial Sequence
  Description of Artificial Sequence: Synthetic oligonucleotide
gucaccucaccagacugca

SEQ ID NO: 2091214 - RNA, 19 nt, Artificial Sequence
  Description of Artificial Sequence: Synthetic oligonucleotide
gucgcagugcaaagacugc

SEQ ID NO: 2091215 - RNA, 19 nt, Artificial Sequence
  Description of Artificial Sequence: Synthetic oligonucleotide
acgggagcugaagacuuca

SEQ ID NO: 2091216 - RNA, 19 nt, Artificial Sequence
  Description of Artificial Sequence: Synthetic oligonucleotide
guccccgcggcagagcugc

SEQ ID NO: 2091217 - RNA, 19 nt, Artificial Sequence
  Description of Artificial Sequence: Synthetic oligonucleotide
aggucuguccaggcucagg

SEQ ID NO: 2091218 - RNA, 19 nt, Artificial Sequence
  Description of Artificial Sequence: Synthetic oligonucleotide
cauuguacuccagggcuga

SEQ ID NO: 2091219 - RNA, 19 nt, Artificial Sequence
  Description of Artificial Sequence: Synthetic oligonucleotide
cucucucucucuuuggaau

SEQ ID NO: 2091220 - RNA, 19 nt, Artificial Sequence
  Description of Artificial Sequence: Synthetic oligonucleotide
ccccuuacgaugcaacuuc

SEQ ID NO: 2091221 - RNA, 19 nt, Artificial Sequence
  Description of Artificial Sequence: Synthetic oligonucleotide
gggcggacagugcaguccc

SEQ ID NO: 2091222 - RNA, 19 nt, Artificial Sequence
  Description of Artificial Sequence: Synthetic oligonucleotide
cuccuugaccaccccggug

SEQ ID NO: 2091223 - RNA, 19 nt, Artificial Sequence
  Description of Artificial Sequence: Synthetic oligonucleotide
guacuccagggcugagggc

SEQ ID NO: 2091224 - RNA, 19 nt, Artificial Sequence
  Description of Artificial Sequence: Synthetic oligonucleotide
aagccaucucagggaaggu

SEQ ID NO: 2091225 - RNA, 19 nt, Artificial Sequence
  Description of Artificial Sequence: Synthetic oligonucleotide
ucggggcgggucuggcagg

SEQ ID NO: 2091226 - RNA, 19 nt, Artificial Sequence
  Description of Artificial Sequence: Synthetic oligonucleotide
gccaacagugugaugcccc

SEQ ID NO: 2091227 - RNA, 19 nt, Artificial Sequence
  Description of Artificial Sequence: Synthetic oligonucleotide
auuguacuccagggcugag

SEQ ID NO: 2091228 - RNA, 19 nt, Artificial Sequence
  Description of Artificial Sequence: Synthetic oligonucleotide
cagccauaggcggcguagg

SEQ ID NO: 2091229 - RNA, 19 nt, Artificial Sequence
  Description of Artificial Sequence: Synthetic oligonucleotide
gggcgggucuggcagggcg

SEQ ID NO: 2091230 - RNA, 19 nt, Artificial Sequence
  Description of Artificial Sequence: Synthetic oligonucleotide
gguguucagcagcuggguc

SEQ ID NO: 2091231 - RNA, 19 nt, Artificial Sequence
  Description of Artificial Sequence: Synthetic oligonucleotide
gcaagauguaauuucccau

SEQ ID NO: 2091232 - RNA, 19 nt, Artificial Sequence
  Description of Artificial Sequence: Synthetic oligonucleotide
cucccggguugucuccucc

SEQ ID NO: 2091233 - RNA, 19 nt, Artificial Sequence
  Description of Artificial Sequence: Synthetic oligonucleotide
cacccuaguugcaaagaua

SEQ ID NO: 2091234 - RNA, 19 nt, Artificial Sequence
  Description of Artificial Sequence: Synthetic oligonucleotide
ugcagguguuuguuuccuu

SEQ ID NO: 2091235 - RNA, 19 nt, Artificial Sequence
  Description of Artificial Sequence: Synthetic oligonucleotide
gucccucugggcaaugguc

SEQ ID NO: 2091236 - RNA, 19 nt, Artificial Sequence
  Description of Artificial Sequence: Synthetic oligonucleotide
ucccggguugucuccuccu

SEQ ID NO: 2091237 - RNA, 19 nt, Artificial Sequence
  Description of Artificial Sequence: Synthetic oligonucleotide
ggguggagacugaagcugc

SEQ ID NO: 2091238 - RNA, 19 nt, Artificial Sequence
  Description of Artificial Sequence: Synthetic oligonucleotide
agaugguggcacccacaau

SEQ ID NO: 2091239 - RNA, 19 nt, Artificial Sequence
  Description of Artificial Sequence: Synthetic oligonucleotide
uagggcccgaggucgcagu

SEQ ID NO: 2091240 - RNA, 19 nt, Artificial Sequence
  Description of Artificial Sequence: Synthetic oligonucleotide
cacugcccugccaguuagg

SEQ ID NO: 2091241 - RNA, 19 nt, Artificial Sequence
  Description of Artificial Sequence: Synthetic oligonucleotide
ugccccggcuuuguugaug

SEQ ID NO: 2091242 - RNA, 19 nt, Artificial Sequence
  Description of Artificial Sequence: Synthetic oligonucleotide
cuuccuggccacugcuaca

SEQ ID NO: 2091243 - RNA, 19 nt, Artificial Sequence
  Description of Artificial Sequence: Synthetic oligonucleotide
gugugaugccccauggugu

SEQ ID NO: 2091244 - RNA, 19 nt, Artificial Sequence
  Description of Artificial Sequence: Synthetic oligonucleotide
caaccuugagccacagccu

SEQ ID NO: 2091245 - RNA, 19 nt, Artificial Sequence
  Description of Artificial Sequence: Synthetic oligonucleotide
agacagccaucuauaccca

SEQ ID NO: 2091246 - RNA, 19 nt, Artificial Sequence
  Description of Artificial Sequence: Synthetic oligonucleotide
gucaguccaugggagccac

SEQ ID NO: 2091247 - RNA, 19 nt, Artificial Sequence
  Description of Artificial Sequence: Synthetic oligonucleotide
agucggggcgggucuggca

SEQ ID NO: 2091248 - RNA, 19 nt, Artificial Sequence
  Description of Artificial Sequence: Synthetic oligonucleotide
gcgagccccagucggggcg

SEQ ID NO: 2091249 - RNA, 19 nt, Artificial Sequence
  Description of Artificial Sequence: Synthetic oligonucleotide
ccuuuggcauggcaagaug

SEQ ID NO: 2091250 - RNA, 19 nt, Artificial Sequence
  Description of Artificial Sequence: Synthetic oligonucleotide
agcacccgucaaccuugag

SEQ ID NO: 2091251 - RNA, 19 nt, Artificial Sequence
  Description of Artificial Sequence: Synthetic oligonucleotide
cccuaguugcaaagauaag

SEQ ID NO: 2091252 - RNA, 19 nt, Artificial Sequence
  Description of Artificial Sequence: Synthetic oligonucleotide
guagggcccgaggucgcag

SEQ ID NO: 2091253 - RNA, 19 nt, Artificial Sequence
  Description of Artificial Sequence: Synthetic oligonucleotide
gcggacagugcaguccccg

SEQ ID NO: 2091254 - RNA, 19 nt, Artificial Sequence
  Description of Artificial Sequence: Synthetic oligonucleotide
gccauaggcggcguagggc

SEQ ID NO: 2091255 - RNA, 19 nt, Artificial Sequence
  Description of Artificial Sequence: Synthetic oligonucleotide
ugaccaccccggugcgggc

SEQ ID NO: 2091256 - RNA, 19 nt, Artificial Sequence
  Description of Artificial Sequence: Synthetic oligonucleotide
acccgucaaccuugagcca

SEQ ID NO: 2091257 - RNA, 19 nt, Artificial Sequence
  Description of Artificial Sequence: Synthetic oligonucleotide
aggucgcagugcaaagacu

SEQ ID NO: 2091258 - RNA, 19 nt, Artificial Sequence
  Description of Artificial Sequence: Synthetic oligonucleotide
ccuguacgaagacuccauc

SEQ ID NO: 2091259 - RNA, 19 nt, Artificial Sequence
  Description of Artificial Sequence: Synthetic oligonucleotide
gaccaccccggugcgggcc

SEQ ID NO: 2091260 - RNA, 19 nt, Artificial Sequence
  Description of Artificial Sequence: Synthetic oligonucleotide
gcccacccuaguugcaaag

SEQ ID NO: 2091261 - RNA, 19 nt, Artificial Sequence
  Description of Artificial Sequence: Synthetic oligonucleotide
cuacgggagcugaagacuu

SEQ ID NO: 2091262 - RNA, 19 nt, Artificial Sequence
  Description of Artificial Sequence: Synthetic oligonucleotide
gcgacggcgagccccaguc

SEQ ID NO: 2091263 - RNA, 19 nt, Artificial Sequence
  Description of Artificial Sequence: Synthetic oligonucleotide
cccgucaaccuugagccac

SEQ ID NO: 2091264 - RNA, 19 nt, Artificial Sequence
  Description of Artificial Sequence: Synthetic oligonucleotide
ccaaaaguggcuguagcua

SEQ ID NO: 2091265 - RNA, 19 nt, Artificial Sequence
  Description of Artificial Sequence: Synthetic oligonucleotide
ccagaaccaccucagagcu

SEQ ID NO: 2091266 - RNA, 19 nt, Artificial Sequence
  Description of Artificial Sequence: Synthetic oligonucleotide
cccgcggcagagcugcucc

SEQ ID NO: 2091267 - RNA, 19 nt, Artificial Sequence
  Description of Artificial Sequence: Synthetic oligonucleotide
ggguaaguagacagccauc

SEQ ID NO: 2091268 - RNA, 19 nt, Artificial Sequence
  Description of Artificial Sequence: Synthetic oligonucleotide
cagggcggacagugcaguc

SEQ ID NO: 2091269 - RNA, 19 nt, Artificial Sequence
  Description of Artificial Sequence: Synthetic oligonucleotide
uggcacccacaaucugguc

SEQ ID NO: 2091270 - RNA, 19 nt, Artificial Sequence
  Description of Artificial Sequence: Synthetic oligonucleotide
ggcauggcaagauguaauu

SEQ ID NO: 2091271 - RNA, 19 nt, Artificial Sequence
  Description of Artificial Sequence: Synthetic oligonucleotide
ggcuuuguugauggcuuuc

SEQ ID NO: 2091272 - RNA, 19 nt, Artificial Sequence
  Description of Artificial Sequence: Synthetic oligonucleotide
cccggugcgggccgcaggg

SEQ ID NO: 2091273 - RNA, 19 nt, Artificial Sequence
  Description of Artificial Sequence: Synthetic oligonucleotide
cacacagccugcgggcuca

SEQ ID NO: 2091274 - RNA, 19 nt, Artificial Sequence
  Description of Artificial Sequence: Synthetic oligonucleotide
ccgaggucgcagugcaaag

SEQ ID NO: 2091275 - RNA, 19 nt, Artificial Sequence
  Description of Artificial Sequence: Synthetic oligonucleotide
aagcugccccggcuuuguu

SEQ ID NO: 2091276 - RNA, 19 nt, Artificial Sequence
  Description of Artificial Sequence: Synthetic oligonucleotide
ggcgggucuggcagggcgg

SEQ ID NO: 2091277 - RNA, 19 nt, Artificial Sequence
  Description of Artificial Sequence: Synthetic oligonucleotide
ggcccgaggucgcagugca

SEQ ID NO: 2091278 - RNA, 19 nt, Artificial Sequence
  Description of Artificial Sequence: Synthetic oligonucleotide
gcuacgggagcugaagacu

SEQ ID NO: 2091279 - RNA, 19 nt, Artificial Sequence
  Description of Artificial Sequence: Synthetic oligonucleotide
gcagguugucaaaauagau

SEQ ID NO: 2091280 - RNA, 19 nt, Artificial Sequence
  Description of Artificial Sequence: Synthetic oligonucleotide
ggcagggcggacagugcag

SEQ ID NO: 2091281 - RNA, 19 nt, Artificial Sequence
  Description of Artificial Sequence: Synthetic oligonucleotide
gaagcugccccggcuuugu

SEQ ID NO: 2091282 - RNA, 19 nt, Artificial Sequence
  Description of Artificial Sequence: Synthetic oligonucleotide
caggagcccgccccgccuc

SEQ ID NO: 2091283 - RNA, 19 nt, Artificial Sequence
  Description of Artificial Sequence: Synthetic oligonucleotide
caccagacugcagguuguc

SEQ ID NO: 2091284 - RNA, 19 nt, Artificial Sequence
  Description of Artificial Sequence: Synthetic oligonucleotide
caggggaguucugcaucac

SEQ ID NO: 2091285 - RNA, 19 nt, Artificial Sequence
  Description of Artificial Sequence: Synthetic oligonucleotide
cagagcuacgggagcugaa

SEQ ID NO: 2091286 - RNA, 19 nt, Artificial Sequence
  Description of Artificial Sequence: Synthetic oligonucleotide
gggcaauggucaguccaug

SEQ ID NO: 2091287 - RNA, 19 nt, Artificial Sequence
  Description of Artificial Sequence: Synthetic oligonucleotide
ccccuccuugaccaccccg

SEQ ID NO: 2091288 - RNA, 19 nt, Artificial Sequence
  Description of Artificial Sequence: Synthetic oligonucleotide
gccgcaggggaguucugca

SEQ ID NO: 2091289 - RNA, 19 nt, Artificial Sequence
  Description of Artificial Sequence: Synthetic oligonucleotide
gcuuuguugauggcuuucu

SEQ ID NO: 2091290 - RNA, 19 nt, Artificial Sequence
  Description of Artificial Sequence: Synthetic oligonucleotide
ccaggucuguccaggcuca

SEQ ID NO: 2091291 - RNA, 19 nt, Artificial Sequence
  Description of Artificial Sequence: Synthetic oligonucleotide
cagugcaguccccgcggca

SEQ ID NO: 2091292 - RNA, 19 nt, Artificial Sequence
  Description of Artificial Sequence: Synthetic oligonucleotide
ggcgagccccagucggggc

SEQ ID NO: 2091293 - RNA, 19 nt, Artificial Sequence
  Description of Artificial Sequence: Synthetic oligonucleotide
agcuaccauugugcaugcu

SEQ ID NO: 2091294 - RNA, 19 nt, Artificial Sequence
  Description of Artificial Sequence: Synthetic oligonucleotide
ccuuacgaugcaacuucaa

SEQ ID NO: 2091295 - RNA, 19 nt, Artificial Sequence
  Description of Artificial Sequence: Synthetic oligonucleotide
cccuuacgaugcaacuuca

SEQ ID NO: 2091296 - RNA, 19 nt, Artificial Sequence
  Description of Artificial Sequence: Synthetic oligonucleotide
cgcaggggaguucugcauc

SEQ ID NO: 2091297 - RNA, 19 nt, Artificial Sequence
  Description of Artificial Sequence: Synthetic oligonucleotide
aucgucccucugggcaaug

SEQ ID NO: 2091298 - RNA, 19 nt, Artificial Sequence
  Description of Artificial Sequence: Synthetic oligonucleotide
ggggaguucugcaucacuu

SEQ ID NO: 2091299 - RNA, 19 nt, Artificial Sequence
  Description of Artificial Sequence: Synthetic oligonucleotide
cagcccacccuaguugcaa

SEQ ID NO: 2091300 - RNA, 19 nt, Artificial Sequence
  Description of Artificial Sequence: Synthetic oligonucleotide
ccaucgucccucugggcaa

SEQ ID NO: 2091301 - RNA, 19 nt, Artificial Sequence
  Description of Artificial Sequence: Synthetic oligonucleotide
gggcccgaggucgcagugc

SEQ ID NO: 2091302 - RNA, 19 nt, Artificial Sequence
  Description of Artificial Sequence: Synthetic oligonucleotide
ggcucagucccaggacgca

SEQ ID NO: 2091303 - RNA, 19 nt, Artificial Sequence
  Description of Artificial Sequence: Synthetic oligonucleotide
gcauggcaagauguaauuu

SEQ ID NO: 2091304 - RNA, 19 nt, Artificial Sequence
  Description of Artificial Sequence: Synthetic oligonucleotide
cccacccuaguugcaaaga

SEQ ID NO: 2091305 - RNA, 19 nt, Artificial Sequence
  Description of Artificial Sequence: Synthetic oligonucleotide
ccgucaaccuugagccaca

SEQ ID NO: 2091306 - RNA, 19 nt, Artificial Sequence
  Description of Artificial Sequence: Synthetic oligonucleotide
ccagucggggcgggucugg

SEQ ID NO: 2091307 - RNA, 19 nt, Artificial Sequence
  Description of Artificial Sequence: Synthetic oligonucleotide
uccccgcggcagagcugcu

SEQ ID NO: 2091308 - RNA, 19 nt, Artificial Sequence
  Description of Artificial Sequence: Synthetic oligonucleotide
cucagggaaggugucccuu

SEQ ID NO: 2091309 - RNA, 19 nt, Artificial Sequence
  Description of Artificial Sequence: Synthetic oligonucleotide
ccacccuaguugcaaagau

SEQ ID NO: 2091310 - RNA, 19 nt, Artificial Sequence
  Description of Artificial Sequence: Synthetic oligonucleotide
ccggcuuuguugauggcuu

SEQ ID NO: 2091311 - RNA, 19 nt, Artificial Sequence
  Description of Artificial Sequence: Synthetic oligonucleotide
cccugcaucugggguggag

SEQ ID NO: 2091312 - RNA, 19 nt, Artificial Sequence
  Description of Artificial Sequence: Synthetic oligonucleotide
uggcgacggcgagccccag

SEQ ID NO: 2091313 - RNA, 19 nt, Artificial Sequence
  Description of Artificial Sequence: Synthetic oligonucleotide
ugcgggccgcaggggaguu

SEQ ID NO: 2091314 - RNA, 19 nt, Artificial Sequence
  Description of Artificial Sequence: Synthetic oligonucleotide
cgacggcgagccccagucg

SEQ ID NO: 2091315 - RNA, 19 nt, Artificial Sequence
  Description of Artificial Sequence: Synthetic oligonucleotide
gcaguccccgcggcagagc

SEQ ID NO: 2091316 - RNA, 19 nt, Artificial Sequence
  Description of Artificial Sequence: Synthetic oligonucleotide
ggacucuauucaggagcaa

SEQ ID NO: 2091317 - RNA, 19 nt, Artificial Sequence
  Description of Artificial Sequence: Synthetic oligonucleotide
ggucucucucucucucuuu

SEQ ID NO: 2091318 - RNA, 19 nt, Artificial Sequence
  Description of Artificial Sequence: Synthetic oligonucleotide
ggcggacagugcagucccc

SEQ ID NO: 2091319 - RNA, 19 nt, Artificial Sequence
  Description of Artificial Sequence: Synthetic oligonucleotide
acgcagccauaggcggcgu

SEQ ID NO: 2091320 - RNA, 19 nt, Artificial Sequence
  Description of Artificial Sequence: Synthetic oligonucleotide
gcccugccaguuaggcagc

SEQ ID NO: 2091321 - RNA, 19 nt, Artificial Sequence
  Description of Artificial Sequence: Synthetic oligonucleotide
cgaggucgcagugcaaaga

SEQ ID NO: 2091322 - RNA, 19 nt, Artificial Sequence
  Description of Artificial Sequence: Synthetic oligonucleotide
cccggcuuuguugauggcu

SEQ ID NO: 2091323 - RNA, 19 nt, Artificial Sequence
  Description of Artificial Sequence: Synthetic oligonucleotide
cgagccccagucggggcgg

SEQ ID NO: 2091324 - RNA, 19 nt, Artificial Sequence
  Description of Artificial Sequence: Synthetic oligonucleotide
gcagggcggacagugcagu

SEQ ID NO: 2091325 - RNA, 19 nt, Artificial Sequence
  Description of Artificial Sequence: Synthetic oligonucleotide
ccccggcuuuguugauggc

SEQ ID NO: 2091326 - RNA, 19 nt, Artificial Sequence
  Description of Artificial Sequence: Synthetic oligonucleotide
caacagugugaugccccau

SEQ ID NO: 2091327 - RNA, 19 nt, Artificial Sequence
  Description of Artificial Sequence: Synthetic oligonucleotide
cuugagccacagccuccau

SEQ ID NO: 2091328 - RNA, 19 nt, Artificial Sequence
  Description of Artificial Sequence: Synthetic oligonucleotide
gcgggucuggcagggcgga

SEQ ID NO: 2091329 - RNA, 19 nt, Artificial Sequence
  Description of Artificial Sequence: Synthetic oligonucleotide
caucgucccucugggcaau

SEQ ID NO: 2091330 - RNA, 19 nt, Artificial Sequence
  Description of Artificial Sequence: Synthetic oligonucleotide
ccggugcgggccgcagggg

SEQ ID NO: 2091331 - RNA, 19 nt, Artificial Sequence
  Description of Artificial Sequence: Synthetic oligonucleotide
ggggcgggucuggcagggc

SEQ ID NO: 2091332 - RNA, 19 nt, Artificial Sequence
  Description of Artificial Sequence: Synthetic oligonucleotide
ccgcaggggaguucugcau

SEQ ID NO: 2091333 - RNA, 19 nt, Artificial Sequence
  Description of Artificial Sequence: Synthetic oligonucleotide
ccccgcggcagagcugcuc

SEQ ID NO: 2091334 - RNA, 19 nt, Artificial Sequence
  Description of Artificial Sequence: Synthetic oligonucleotide
ccgcggcagagcugcucca

SEQ ID NO: 2091335 - RNA, 19 nt, Artificial Sequence
  Description of Artificial Sequence: Synthetic oligonucleotide
cugccccggcuuuguugau

SEQ ID NO: 2091336 - RNA, 19 nt, Artificial Sequence
  Description of Artificial Sequence: Synthetic oligonucleotide
ccccagucggggcgggucu

SEQ ID NO: 2091337 - RNA, 19 nt, Artificial Sequence
  Description of Artificial Sequence: Synthetic oligonucleotide
gcgggccgcaggggaguuc

SEQ ID NO: 2091338 - RNA, 19 nt, Artificial Sequence
  Description of Artificial Sequence: Synthetic oligonucleotide
cggucucucucucucucuu

SEQ ID NO: 2091339 - RNA, 19 nt, Artificial Sequence
  Description of Artificial Sequence: Synthetic oligonucleotide
cgggccgcaggggaguucu

SEQ ID NO: 2091340 - RNA, 19 nt, Artificial Sequence
  Description of Artificial Sequence: Synthetic oligonucleotide
gcccgaggucgcagugcaa

SEQ ID NO: 2091341 - RNA, 19 nt, Artificial Sequence
  Description of Artificial Sequence: Synthetic oligonucleotide
cgcagccauaggcggcgua

SEQ ID NO: 2091342 - RNA, 19 nt, Artificial Sequence
  Description of Artificial Sequence: Synthetic oligonucleotide
aaauuaaggcgucagaugg

SEQ ID NO: 2091343 - RNA, 19 nt, Artificial Sequence
  Description of Artificial Sequence: Synthetic oligonucleotide
uuuccaacaaucauaaucg

SEQ ID NO: 2091344 - RNA, 19 nt, Artificial Sequence
  Description of Artificial Sequence: Synthetic oligonucleotide
auugauaacaucugcaccc

SEQ ID NO: 2091345 - RNA, 19 nt, Artificial Sequence
  Description of Artificial Sequence: Synthetic oligonucleotide
uaaaacagaacacugggcc

SEQ ID NO: 2091346 - RNA, 19 nt, Artificial Sequence
  Description of Artificial Sequence: Synthetic oligonucleotide
aaaacuuucugcccgagag

SEQ ID NO: 2091347 - RNA, 19 nt, Artificial Sequence
  Description of Artificial Sequence: Synthetic oligonucleotide
aauuauuccaaucuucacu

SEQ ID NO: 2091348 - RNA, 19 nt, Artificial Sequence
  Description of Artificial Sequence: Synthetic oligonucleotide
auauugauaacaucugcac

SEQ ID NO: 2091349 - RNA, 19 nt, Artificial Sequence
  Description of Artificial Sequence: Synthetic oligonucleotide
aacaaucauaaucgguugc

SEQ ID NO: 2091350 - RNA, 19 nt, Artificial Sequence
  Description of Artificial Sequence: Synthetic oligonucleotide
aaagacgagaaguuguaag

SEQ ID NO: 2091351 - RNA, 19 nt, Artificial Sequence
  Description of Artificial Sequence: Synthetic oligonucleotide
uuggugguaaaacagaaca

SEQ ID NO: 2091352 - RNA, 19 nt, Artificial Sequence
  Description of Artificial Sequence: Synthetic oligonucleotide
aaacgguucagccauuggg

SEQ ID NO: 2091353 - RNA, 19 nt, Artificial Sequence
  Description of Artificial Sequence: Synthetic oligonucleotide
auugggauauggcacaccc

SEQ ID NO: 2091354 - RNA, 19 nt, Artificial Sequence
  Description of Artificial Sequence: Synthetic oligonucleotide
uuuaucuuccccaaaauua

SEQ ID NO: 2091355 - RNA, 19 nt, Artificial Sequence
  Description of Artificial Sequence: Synthetic oligonucleotide
ucuuucauggucuuuaaga

SEQ ID NO: 2091356 - RNA, 19 nt, Artificial Sequence
  Description of Artificial Sequence: Synthetic oligonucleotide
aauugugacuauugucccc

SEQ ID NO: 2091357 - RNA, 19 nt, Artificial Sequence
  Description of Artificial Sequence: Synthetic oligonucleotide
aaugucuuggugguaaaac

SEQ ID NO: 2091358 - RNA, 19 nt, Artificial Sequence
  Description of Artificial Sequence: Synthetic oligonucleotide
auacaaaacuuucugcccg

SEQ ID NO: 2091359 - RNA, 19 nt, Artificial Sequence
  Description of Artificial Sequence: Synthetic oligonucleotide
uggaacuguagucauauug

SEQ ID NO: 2091360 - RNA, 19 nt, Artificial Sequence
  Description of Artificial Sequence: Synthetic oligonucleotide
aaguacggaauacaaaacu

SEQ ID NO: 2091361 - RNA, 19 nt, Artificial Sequence
  Description of Artificial Sequence: Synthetic oligonucleotide
acuuuugaaggcaugaugg

SEQ ID NO: 2091362 - RNA, 19 nt, Artificial Sequence
  Description of Artificial Sequence: Synthetic oligonucleotide
uaaggaguaagcuuuuggc

SEQ ID NO: 2091363 - RNA, 19 nt, Artificial Sequence
  Description of Artificial Sequence: Synthetic oligonucleotide
aaacuuucugcccgagagc

SEQ ID NO: 2091364 - RNA, 19 nt, Artificial Sequence
  Description of Artificial Sequence: Synthetic oligonucleotide
uaugcugucucccaugucu

SEQ ID NO: 2091365 - RNA, 19 nt, Artificial Sequence
  Description of Artificial Sequence: Synthetic oligonucleotide
ucauauugauaacaucugc

SEQ ID NO: 2091366 - RNA, 19 nt, Artificial Sequence
  Description of Artificial Sequence: Synthetic oligonucleotide
uuuaagaccccauccacug

SEQ ID NO: 2091367 - RNA, 19 nt, Artificial Sequence
  Description of Artificial Sequence: Synthetic oligonucleotide
gguaaaacagaacacuggg

SEQ ID NO: 2091368 - RNA, 19 nt, Artificial Sequence
  Description of Artificial Sequence: Synthetic oligonucleotide
aagacgagaaguuguaagu

SEQ ID NO: 2091369 - RNA, 19 nt, Artificial Sequence
  Description of Artificial Sequence: Synthetic oligonucleotide
uuccccaaaauuaaggcgu

SEQ ID NO: 2091370 - RNA, 19 nt, Artificial Sequence
  Description of Artificial Sequence: Synthetic oligonucleotide
uucacuggcgugcaggcgg

SEQ ID NO: 2091371 - RNA, 19 nt, Artificial Sequence
  Description of Artificial Sequence: Synthetic oligonucleotide
aaggaguaagcuuuuggcu

SEQ ID NO: 2091372 - RNA, 19 nt, Artificial Sequence
  Description of Artificial Sequence: Synthetic oligonucleotide
uuugaaggcaugaugguau

SEQ ID NO: 2091373 - RNA, 19 nt, Artificial Sequence
  Description of Artificial Sequence: Synthetic oligonucleotide
acaucugcaccccaaguac

SEQ ID NO: 2091374 - RNA, 19 nt, Artificial Sequence
  Description of Artificial Sequence: Synthetic oligonucleotide
acaaucauaaucgguugcc

SEQ ID NO: 2091375 - RNA, 19 nt, Artificial Sequence
  Description of Artificial Sequence: Synthetic oligonucleotide
cuuucauggucuuuaagac

SEQ ID NO: 2091376 - RNA, 19 nt, Artificial Sequence
  Description of Artificial Sequence: Synthetic oligonucleotide
ucauaaucgguugccaugg

SEQ ID NO: 2091377 - RNA, 19 nt, Artificial Sequence
  Description of Artificial Sequence: Synthetic oligonucleotide
uauuccaaucuucacuggc

SEQ ID NO: 2091378 - RNA, 19 nt, Artificial Sequence
  Description of Artificial Sequence: Synthetic oligonucleotide
uaugguaguaaggaguaag

SEQ ID NO: 2091379 - RNA, 19 nt, Artificial Sequence
  Description of Artificial Sequence: Synthetic oligonucleotide
accucucuuguuuuggggc

SEQ ID NO: 2091380 - RNA, 19 nt, Artificial Sequence
  Description of Artificial Sequence: Synthetic oligonucleotide
uuaucuuccccaaaauuaa

SEQ ID NO: 2091381 - RNA, 19 nt, Artificial Sequence
  Description of Artificial Sequence: Synthetic oligonucleotide
uguagucauauugauaaca

SEQ ID NO: 2091382 - RNA, 19 nt, Artificial Sequence
  Description of Artificial Sequence: Synthetic oligonucleotide
aauuucuggaucauccaag

SEQ ID NO: 2091383 - RNA, 19 nt, Artificial Sequence
  Description of Artificial Sequence: Synthetic oligonucleotide
auuucggaggguuucugac

SEQ ID NO: 2091384 - RNA, 19 nt, Artificial Sequence
  Description of Artificial Sequence: Synthetic oligonucleotide
gaucauccaagccuguucc

SEQ ID NO: 2091385 - RNA, 19 nt, Artificial Sequence
  Description of Artificial Sequence: Synthetic oligonucleotide
uuugcgguaugguaguaag

SEQ ID NO: 2091386 - RNA, 19 nt, Artificial Sequence
  Description of Artificial Sequence: Synthetic oligonucleotide
acuauuguccccuuggaau

SEQ ID NO: 2091387 - RNA, 19 nt, Artificial Sequence
  Description of Artificial Sequence: Synthetic oligonucleotide
guaaggaguaagcuuuugg

SEQ ID NO: 2091388 - RNA, 19 nt, Artificial Sequence
  Description of Artificial Sequence: Synthetic oligonucleotide
auuccaucgacccuauuug

SEQ ID NO: 2091389 - RNA, 19 nt, Artificial Sequence
  Description of Artificial Sequence: Synthetic oligonucleotide
aacugaucgaugaugacca

SEQ ID NO: 2091390 - RNA, 19 nt, Artificial Sequence
  Description of Artificial Sequence: Synthetic oligonucleotide
aagaccaagcuucuuggcu

SEQ ID NO: 2091391 - RNA, 19 nt, Artificial Sequence
  Description of Artificial Sequence: Synthetic oligonucleotide
cuuccccaaaauuaaggcg

SEQ ID NO: 2091392 - RNA, 19 nt, Artificial Sequence
  Description of Artificial Sequence: Synthetic oligonucleotide
aauuaaggcgucagauggc

SEQ ID NO: 2091393 - RNA, 19 nt, Artificial Sequence
  Description of Artificial Sequence: Synthetic oligonucleotide
acgaaggccguauaaaucu

SEQ ID NO: 2091394 - RNA, 19 nt, Artificial Sequence
  Description of Artificial Sequence: Synthetic oligonucleotide
cuuggaauggcaucgaaga

SEQ ID NO: 2091395 - RNA, 19 nt, Artificial Sequence
  Description of Artificial Sequence: Synthetic oligonucleotide
ucuuuaagaccccauccac

SEQ ID NO: 2091396 - RNA, 19 nt, Artificial Sequence
  Description of Artificial Sequence: Synthetic oligonucleotide
aaaacgguucagccauugg

SEQ ID NO: 2091397 - RNA, 19 nt, Artificial Sequence
  Description of Artificial Sequence: Synthetic oligonucleotide
uccaucgacccuauuugcg

SEQ ID NO: 2091398 - RNA, 19 nt, Artificial Sequence
  Description of Artificial Sequence: Synthetic oligonucleotide
cugaccauuccaucgaccc

SEQ ID NO: 2091399 - RNA, 19 nt, Artificial Sequence
  Description of Artificial Sequence: Synthetic oligonucleotide
uggaguauccacauauuuc

SEQ ID NO: 2091400 - RNA, 19 nt, Artificial Sequence
  Description of Artificial Sequence: Synthetic oligonucleotide
gacuuuugaaggcaugaug

SEQ ID NO: 2091401 - RNA, 19 nt, Artificial Sequence
  Description of Artificial Sequence: Synthetic oligonucleotide
uacggaauacaaaacuuuc

SEQ ID NO: 2091402 - RNA, 19 nt, Artificial Sequence
  Description of Artificial Sequence: Synthetic oligonucleotide
caucauagaaggucugagg

SEQ ID NO: 2091403 - RNA, 19 nt, Artificial Sequence
  Description of Artificial Sequence: Synthetic oligonucleotide
aaucauaaucgguugccau

SEQ ID NO: 2091404 - RNA, 19 nt, Artificial Sequence
  Description of Artificial Sequence: Synthetic oligonucleotide
uguccugucaaugaacuga

SEQ ID NO: 2091405 - RNA, 19 nt, Artificial Sequence
  Description of Artificial Sequence: Synthetic oligonucleotide
gugacuauuguccccuugg

SEQ ID NO: 2091406 - RNA, 19 nt, Artificial Sequence
  Description of Artificial Sequence: Synthetic oligonucleotide
ucauagaaggucugaggcc

SEQ ID NO: 2091407 - RNA, 19 nt, Artificial Sequence
  Description of Artificial Sequence: Synthetic oligonucleotide
uggaauggcaucgaagacc

SEQ ID NO: 2091408 - RNA, 19 nt, Artificial Sequence
  Description of Artificial Sequence: Synthetic oligonucleotide
aucauaaucgguugccaug

SEQ ID NO: 2091409 - RNA, 19 nt, Artificial Sequence
  Description of Artificial Sequence: Synthetic oligonucleotide
ucuuuccaagcaaaggcac

SEQ ID NO: 2091410 - RNA, 19 nt, Artificial Sequence
  Description of Artificial Sequence: Synthetic oligonucleotide
uccaacaaucauaaucggu

SEQ ID NO: 2091411 - RNA, 19 nt, Artificial Sequence
  Description of Artificial Sequence: Synthetic oligonucleotide
aucgaugaugaccauguca

SEQ ID NO: 2091412 - RNA, 19 nt, Artificial Sequence
  Description of Artificial Sequence: Synthetic oligonucleotide
guaguugacuuuugaaggc

SEQ ID NO: 2091413 - RNA, 19 nt, Artificial Sequence
  Description of Artificial Sequence: Synthetic oligonucleotide
uuucugaccauuccaucga

SEQ ID NO: 2091414 - RNA, 19 nt, Artificial Sequence
  Description of Artificial Sequence: Synthetic oligonucleotide
aaacgaggccccucaauug

SEQ ID NO: 2091415 - RNA, 19 nt, Artificial Sequence
  Description of Artificial Sequence: Synthetic oligonucleotide
agggaagucgucugcgagc

SEQ ID NO: 2091416 - RNA, 19 nt, Artificial Sequence
  Description of Artificial Sequence: Synthetic oligonucleotide
uaaggcgucagauggcuug

SEQ ID NO: 2091417 - RNA, 19 nt, Artificial Sequence
  Description of Artificial Sequence: Synthetic oligonucleotide
uuuggggcaaaacgguuca

SEQ ID NO: 2091418 - RNA, 19 nt, Artificial Sequence
  Description of Artificial Sequence: Synthetic oligonucleotide
cucucaaggacccgcaugc

SEQ ID NO: 2091419 - RNA, 19 nt, Artificial Sequence
  Description of Artificial Sequence: Synthetic oligonucleotide
ugcgguaugguaguaagga

SEQ ID NO: 2091420 - RNA, 19 nt, Artificial Sequence
  Description of Artificial Sequence: Synthetic oligonucleotide
caauugugacuauuguccc

SEQ ID NO: 2091421 - RNA, 19 nt, Artificial Sequence
  Description of Artificial Sequence: Synthetic oligonucleotide
uaucuuccccaaaauuaag

SEQ ID NO: 2091422 - RNA, 19 nt, Artificial Sequence
  Description of Artificial Sequence: Synthetic oligonucleotide
cuaggacauguguacaacc

SEQ ID NO: 2091423 - RNA, 19 nt, Artificial Sequence
  Description of Artificial Sequence: Synthetic oligonucleotide
cauagcaaauuccagccuc

SEQ ID NO: 2091424 - RNA, 19 nt, Artificial Sequence
  Description of Artificial Sequence: Synthetic oligonucleotide
uaagaccccauccacugac

SEQ ID NO: 2091425 - RNA, 19 nt, Artificial Sequence
  Description of Artificial Sequence: Synthetic oligonucleotide
cuauuguccccuuggaaug

SEQ ID NO: 2091426 - RNA, 19 nt, Artificial Sequence
  Description of Artificial Sequence: Synthetic oligonucleotide
uuauuccaaucuucacugg

SEQ ID NO: 2091427 - RNA, 19 nt, Artificial Sequence
  Description of Artificial Sequence: Synthetic oligonucleotide
gaagucgucugcgagcggg

SEQ ID NO: 2091428 - RNA, 19 nt, Artificial Sequence
  Description of Artificial Sequence: Synthetic oligonucleotide
uuccaacaaucauaaucgg

SEQ ID NO: 2091429 - RNA, 19 nt, Artificial Sequence
  Description of Artificial Sequence: Synthetic oligonucleotide
ccuauuugcgguaugguag

SEQ ID NO: 2091430 - RNA, 19 nt, Artificial Sequence
  Description of Artificial Sequence: Synthetic oligonucleotide
cagauggcuugccaaaugg

SEQ ID NO: 2091431 - RNA, 19 nt, Artificial Sequence
  Description of Artificial Sequence: Synthetic oligonucleotide
aacgaggccccucaauugu

SEQ ID NO: 2091432 - RNA, 19 nt, Artificial Sequence
  Description of Artificial Sequence: Synthetic oligonucleotide
aggccguauaaaucuuucc

SEQ ID NO: 2091433 - RNA, 19 nt, Artificial Sequence
  Description of Artificial Sequence: Synthetic oligonucleotide
agaagcacacaaucaacgu

SEQ ID NO: 2091434 - RNA, 19 nt, Artificial Sequence
  Description of Artificial Sequence: Synthetic oligonucleotide
ggcauagcaaauuccagcc

SEQ ID NO: 2091435 - RNA, 19 nt, Artificial Sequence
  Description of Artificial Sequence: Synthetic oligonucleotide
auggcaucgaagaccaagc

SEQ ID NO: 2091436 - RNA, 19 nt, Artificial Sequence
  Description of Artificial Sequence: Synthetic oligonucleotide
ucucccaugucuugcaaga

SEQ ID NO: 2091437 - RNA, 19 nt, Artificial Sequence
  Description of Artificial Sequence: Synthetic oligonucleotide
ugccaaauggaguauccac

SEQ ID NO: 2091438 - RNA, 19 nt, Artificial Sequence
  Description of Artificial Sequence: Synthetic oligonucleotide
uugacuuuugaaggcauga

SEQ ID NO: 2091439 - RNA, 19 nt, Artificial Sequence
  Description of Artificial Sequence: Synthetic oligonucleotide
auuccaaucuucacuggcg

SEQ ID NO: 2091440 - RNA, 19 nt, Artificial Sequence
  Description of Artificial Sequence: Synthetic oligonucleotide
uggugguaaaacagaacac

SEQ ID NO: 2091441 - RNA, 19 nt, Artificial Sequence
  Description of Artificial Sequence: Synthetic oligonucleotide
ucgucugcgagcgggaacg

SEQ ID NO: 2091442 - RNA, 19 nt, Artificial Sequence
  Description of Artificial Sequence: Synthetic oligonucleotide
ucugcgagcgggaacgcug

SEQ ID NO: 2091443 - RNA, 19 nt, Artificial Sequence
  Description of Artificial Sequence: Synthetic oligonucleotide
guggcuuccaucauagaag

SEQ ID NO: 2091444 - RNA, 19 nt, Artificial Sequence
  Description of Artificial Sequence: Synthetic oligonucleotide
agcuuuuggcuuuguuggc

SEQ ID NO: 2091445 - RNA, 19 nt, Artificial Sequence
  Description of Artificial Sequence: Synthetic oligonucleotide
caacaaucauaaucgguug

SEQ ID NO: 2091446 - RNA, 19 nt, Artificial Sequence
  Description of Artificial Sequence: Synthetic oligonucleotide
agacgagaaguuguaaguc

SEQ ID NO: 2091447 - RNA, 19 nt, Artificial Sequence
  Description of Artificial Sequence: Synthetic oligonucleotide
gccguauaaaucuuucccg

SEQ ID NO: 2091448 - RNA, 19 nt, Artificial Sequence
  Description of Artificial Sequence: Synthetic oligonucleotide
acaaccuucuuccuucaga

SEQ ID NO: 2091449 - RNA, 19 nt, Artificial Sequence
  Description of Artificial Sequence: Synthetic oligonucleotide
caaguacggaauacaaaac

SEQ ID NO: 2091450 - RNA, 19 nt, Artificial Sequence
  Description of Artificial Sequence: Synthetic oligonucleotide
aaggccguauaaaucuuuc

SEQ ID NO: 2091451 - RNA, 19 nt, Artificial Sequence
  Description of Artificial Sequence: Synthetic oligonucleotide
acuaggacauguguacaac

SEQ ID NO: 2091452 - RNA, 19 nt, Artificial Sequence
  Description of Artificial Sequence: Synthetic oligonucleotide
aggaguaagcuuuuggcuu

SEQ ID NO: 2091453 - RNA, 19 nt, Artificial Sequence
  Description of Artificial Sequence: Synthetic oligonucleotide
uccccuuggaauggcaucg

SEQ ID NO: 2091454 - RNA, 19 nt, Artificial Sequence
  Description of Artificial Sequence: Synthetic oligonucleotide
ugcucuuuccaacaaucau

SEQ ID NO: 2091455 - RNA, 19 nt, Artificial Sequence
  Description of Artificial Sequence: Synthetic oligonucleotide
uugcgguaugguaguaagg

SEQ ID NO: 2091456 - RNA, 19 nt, Artificial Sequence
  Description of Artificial Sequence: Synthetic oligonucleotide
aacgguucagccauuggga

SEQ ID NO: 2091457 - RNA, 19 nt, Artificial Sequence
  Description of Artificial Sequence: Synthetic oligonucleotide
agccauugggauauggcac

SEQ ID NO: 2091458 - RNA, 19 nt, Artificial Sequence
  Description of Artificial Sequence: Synthetic oligonucleotide
aaggcgucagauggcuugc

SEQ ID NO: 2091459 - RNA, 19 nt, Artificial Sequence
  Description of Artificial Sequence: Synthetic oligonucleotide
ugucaaugaacugaucgau

SEQ ID NO: 2091460 - RNA, 19 nt, Artificial Sequence
  Description of Artificial Sequence: Synthetic oligonucleotide
ucugaccauuccaucgacc

SEQ ID NO: 2091461 - RNA, 19 nt, Artificial Sequence
  Description of Artificial Sequence: Synthetic oligonucleotide
auugugacuauuguccccu

SEQ ID NO: 2091462 - RNA, 19 nt, Artificial Sequence
  Description of Artificial Sequence: Synthetic oligonucleotide
auaaucgguugccauggca

SEQ ID NO: 2091463 - RNA, 19 nt, Artificial Sequence
  Description of Artificial Sequence: Synthetic oligonucleotide
ggccguauaaaucuuuccc

SEQ ID NO: 2091464 - RNA, 19 nt, Artificial Sequence
  Description of Artificial Sequence: Synthetic oligonucleotide
guaaaacagaacacugggc

SEQ ID NO: 2091465 - RNA, 19 nt, Artificial Sequence
  Description of Artificial Sequence: Synthetic oligonucleotide
caugcuguggucacuagga

SEQ ID NO: 2091466 - RNA, 19 nt, Artificial Sequence
  Description of Artificial Sequence: Synthetic oligonucleotide
acugacaccgcuucuucgu

SEQ ID NO: 2091467 - RNA, 19 nt, Artificial Sequence
  Description of Artificial Sequence: Synthetic oligonucleotide
ucuucgugcucuuuccaac

SEQ ID NO: 2091468 - RNA, 19 nt, Artificial Sequence
  Description of Artificial Sequence: Synthetic oligonucleotide
gacccuauuugcgguaugg

SEQ ID NO: 2091469 - RNA, 19 nt, Artificial Sequence
  Description of Artificial Sequence: Synthetic oligonucleotide
uuucuaugaggaccucucu

SEQ ID NO: 2091470 - RNA, 19 nt, Artificial Sequence
  Description of Artificial Sequence: Synthetic oligonucleotide
caucugcaccccaaguacg

SEQ ID NO: 2091471 - RNA, 19 nt, Artificial Sequence
  Description of Artificial Sequence: Synthetic oligonucleotide
cauguucuucagauuucgg

SEQ ID NO: 2091472 - RNA, 19 nt, Artificial Sequence
  Description of Artificial Sequence: Synthetic oligonucleotide
gaagaccaagcuucuuggc

SEQ ID NO: 2091473 - RNA, 19 nt, Artificial Sequence
  Description of Artificial Sequence: Synthetic oligonucleotide
ugacuauuguccccuugga

SEQ ID NO: 2091474 - RNA, 19 nt, Artificial Sequence
  Description of Artificial Sequence: Synthetic oligonucleotide
ugugacuauuguccccuug

SEQ ID NO: 2091475 - RNA, 19 nt, Artificial Sequence
  Description of Artificial Sequence: Synthetic oligonucleotide
cucuuuccaacaaucauaa

SEQ ID NO: 2091476 - RNA, 19 nt, Artificial Sequence
  Description of Artificial Sequence: Synthetic oligonucleotide
auuaaggcgucagauggcu

SEQ ID NO: 2091477 - RNA, 19 nt, Artificial Sequence
  Description of Artificial Sequence: Synthetic oligonucleotide
uagucauauugauaacauc

SEQ ID NO: 2091478 - RNA, 19 nt, Artificial Sequence
  Description of Artificial Sequence: Synthetic oligonucleotide
uucuaugaggaccucucuu

SEQ ID NO: 2091479 - RNA, 19 nt, Artificial Sequence
  Description of Artificial Sequence: Synthetic oligonucleotide
gaggguuucugaccauucc

SEQ ID NO: 2091480 - RNA, 19 nt, Artificial Sequence
  Description of Artificial Sequence: Synthetic oligonucleotide
uuuugaaggcaugauggua

SEQ ID NO: 2091481 - RNA, 19 nt, Artificial Sequence
  Description of Artificial Sequence: Synthetic oligonucleotide
ucugcccgagagcugaaac

SEQ ID NO: 2091482 - RNA, 19 nt, Artificial Sequence
  Description of Artificial Sequence: Synthetic oligonucleotide
uuccaucgacccuauuugc

SEQ ID NO: 2091483 - RNA, 19 nt, Artificial Sequence
  Description of Artificial Sequence: Synthetic oligonucleotide
gaugguaugcugucuccca

SEQ ID NO: 2091484 - RNA, 19 nt, Artificial Sequence
  Description of Artificial Sequence: Synthetic oligonucleotide
ucugcaccagggaagucgu

SEQ ID NO: 2091485 - RNA, 19 nt, Artificial Sequence
  Description of Artificial Sequence: Synthetic oligonucleotide
guuaaugucuuggugguaa

SEQ ID NO: 2091486 - RNA, 19 nt, Artificial Sequence
  Description of Artificial Sequence: Synthetic oligonucleotide
cugcccgagagcugaaacg

SEQ ID NO: 2091487 - RNA, 19 nt, Artificial Sequence
  Description of Artificial Sequence: Synthetic oligonucleotide
cauccaagccuguuccacc

SEQ ID NO: 2091488 - RNA, 19 nt, Artificial Sequence
  Description of Artificial Sequence: Synthetic oligonucleotide
uugaaggcaugaugguaug

SEQ ID NO: 2091489 - RNA, 19 nt, Artificial Sequence
  Description of Artificial Sequence: Synthetic oligonucleotide
ggaguauccacauauuucu

SEQ ID NO: 2091490 - RNA, 19 nt, Artificial Sequence
  Description of Artificial Sequence: Synthetic oligonucleotide
augcuguggucacuaggac

SEQ ID NO: 2091491 - RNA, 19 nt, Artificial Sequence
  Description of Artificial Sequence: Synthetic oligonucleotide
ugaugguaugcugucuccc

SEQ ID NO: 2091492 - RNA, 19 nt, Artificial Sequence
  Description of Artificial Sequence: Synthetic oligonucleotide
uuaagaccccauccacuga

SEQ ID NO: 2091493 - RNA, 19 nt, Artificial Sequence
  Description of Artificial Sequence: Synthetic oligonucleotide
cacgaaggccguauaaauc

SEQ ID NO: 2091494 - RNA, 19 nt, Artificial Sequence
  Description of Artificial Sequence: Synthetic oligonucleotide
gauuucggaggguuucuga

SEQ ID NO: 2091495 - RNA, 19 nt, Artificial Sequence
  Description of Artificial Sequence: Synthetic oligonucleotide
gauauggcacaccccucug

SEQ ID NO: 2091496 - RNA, 19 nt, Artificial Sequence
  Description of Artificial Sequence: Synthetic oligonucleotide
augaggaccucucuuguuu

SEQ ID NO: 2091497 - RNA, 19 nt, Artificial Sequence
  Description of Artificial Sequence: Synthetic oligonucleotide
ugaaacgaggccccucaau

SEQ ID NO: 2091498 - RNA, 19 nt, Artificial Sequence
  Description of Artificial Sequence: Synthetic oligonucleotide
caugucuugcaagaagcac

SEQ ID NO: 2091499 - RNA, 19 nt, Artificial Sequence
  Description of Artificial Sequence: Synthetic oligonucleotide
gagcccagauguuugccug

SEQ ID NO: 2091500 - RNA, 19 nt, Artificial Sequence
  Description of Artificial Sequence: Synthetic oligonucleotide
ugaacugaucgaugaugac

SEQ ID NO: 2091501 - RNA, 19 nt, Artificial Sequence
  Description of Artificial Sequence: Synthetic oligonucleotide
ccaaguacggaauacaaaa

SEQ ID NO: 2091502 - RNA, 19 nt, Artificial Sequence
  Description of Artificial Sequence: Synthetic oligonucleotide
aguacggaauacaaaacuu

SEQ ID NO: 2091503 - RNA, 19 nt, Artificial Sequence
  Description of Artificial Sequence: Synthetic oligonucleotide
ugcccgagagcugaaacga

SEQ ID NO: 2091504 - RNA, 19 nt, Artificial Sequence
  Description of Artificial Sequence: Synthetic oligonucleotide
guuucuaugaggaccucuc

SEQ ID NO: 2091505 - RNA, 19 nt, Artificial Sequence
  Description of Artificial Sequence: Synthetic oligonucleotide
aagccuguuccaccaauua

SEQ ID NO: 2091506 - RNA, 19 nt, Artificial Sequence
  Description of Artificial Sequence: Synthetic oligonucleotide
gacgagaaguuguaagucu

SEQ ID NO: 2091507 - RNA, 19 nt, Artificial Sequence
  Description of Artificial Sequence: Synthetic oligonucleotide
uucuucgugcucuuuccaa

SEQ ID NO: 2091508 - RNA, 19 nt, Artificial Sequence
  Description of Artificial Sequence: Synthetic oligonucleotide
uccaucauagaaggucuga

SEQ ID NO: 2091509 - RNA, 19 nt, Artificial Sequence
  Description of Artificial Sequence: Synthetic oligonucleotide
ggaacuguagucauauuga

SEQ ID NO: 2091510 - RNA, 19 nt, Artificial Sequence
  Description of Artificial Sequence: Synthetic oligonucleotide
uacaaccuucuuccuucag

SEQ ID NO: 2091511 - RNA, 19 nt, Artificial Sequence
  Description of Artificial Sequence: Synthetic oligonucleotide
gagcgggaacgcuggaccg

SEQ ID NO: 2091512 - RNA, 19 nt, Artificial Sequence
  Description of Artificial Sequence: Synthetic oligonucleotide
aaaggcacgaaggccguau

SEQ ID NO: 2091513 - RNA, 19 nt, Artificial Sequence
  Description of Artificial Sequence: Synthetic oligonucleotide
ggggcaaaacgguucagcc

SEQ ID NO: 2091514 - RNA, 19 nt, Artificial Sequence
  Description of Artificial Sequence: Synthetic oligonucleotide
ugaccauuccaucgacccu

SEQ ID NO: 2091515 - RNA, 19 nt, Artificial Sequence
  Description of Artificial Sequence: Synthetic oligonucleotide
uggggcaaaacgguucagc

SEQ ID NO: 2091516 - RNA, 19 nt, Artificial Sequence
  Description of Artificial Sequence: Synthetic oligonucleotide
cuguuccaccaauuauucc

SEQ ID NO: 2091517 - RNA, 19 nt, Artificial Sequence
  Description of Artificial Sequence: Synthetic oligonucleotide
auuguccccuuggaauggc

SEQ ID NO: 2091518 - RNA, 19 nt, Artificial Sequence
  Description of Artificial Sequence: Synthetic oligonucleotide
ccagauguuugccugguag

SEQ ID NO: 2091519 - RNA, 19 nt, Artificial Sequence
  Description of Artificial Sequence: Synthetic oligonucleotide
guaguaaggaguaagcuuu

SEQ ID NO: 2091520 - RNA, 19 nt, Artificial Sequence
  Description of Artificial Sequence: Synthetic oligonucleotide
cacugacaccgcuucuucg

SEQ ID NO: 2091521 - RNA, 19 nt, Artificial Sequence
  Description of Artificial Sequence: Synthetic oligonucleotide
uguguacaaccuucuuccu

SEQ ID NO: 2091522 - RNA, 19 nt, Artificial Sequence
  Description of Artificial Sequence: Synthetic oligonucleotide
cagccauugggauauggca

SEQ ID NO: 2091523 - RNA, 19 nt, Artificial Sequence
  Description of Artificial Sequence: Synthetic oligonucleotide
ugacaccgcuucuucgugc

SEQ ID NO: 2091524 - RNA, 19 nt, Artificial Sequence
  Description of Artificial Sequence: Synthetic oligonucleotide
agccacgcuguguuaaugu

SEQ ID NO: 2091525 - RNA, 19 nt, Artificial Sequence
  Description of Artificial Sequence: Synthetic oligonucleotide
aggaccucucuuguuuugg

SEQ ID NO: 2091526 - RNA, 19 nt, Artificial Sequence
  Description of Artificial Sequence: Synthetic oligonucleotide
uggcaucgaagaccaagcu

SEQ ID NO: 2091527 - RNA, 19 nt, Artificial Sequence
  Description of Artificial Sequence: Synthetic oligonucleotide
acggaauacaaaacuuucu

SEQ ID NO: 2091528 - RNA, 19 nt, Artificial Sequence
  Description of Artificial Sequence: Synthetic oligonucleotide
uccucucucaaggacccgc

SEQ ID NO: 2091529 - RNA, 19 nt, Artificial Sequence
  Description of Artificial Sequence: Synthetic oligonucleotide
gacuauuguccccuuggaa

SEQ ID NO: 2091530 - RNA, 19 nt, Artificial Sequence
  Description of Artificial Sequence: Synthetic oligonucleotide
auggcacaccccucuggcg

SEQ ID NO: 2091531 - RNA, 19 nt, Artificial Sequence
  Description of Artificial Sequence: Synthetic oligonucleotide
cucaaggacccgcaugcug

SEQ ID NO: 2091532 - RNA, 19 nt, Artificial Sequence
  Description of Artificial Sequence: Synthetic oligonucleotide
uucagauuucggaggguuu

SEQ ID NO: 2091533 - RNA, 19 nt, Artificial Sequence
  Description of Artificial Sequence: Synthetic oligonucleotide
ccaucgacccuauuugcgg

SEQ ID NO: 2091534 - RNA, 19 nt, Artificial Sequence
  Description of Artificial Sequence: Synthetic oligonucleotide
gaaacgaggccccucaauu

SEQ ID NO: 2091535 - RNA, 19 nt, Artificial Sequence
  Description of Artificial Sequence: Synthetic oligonucleotide
uucgugcucuuuccaacaa

SEQ ID NO: 2091536 - RNA, 19 nt, Artificial Sequence
  Description of Artificial Sequence: Synthetic oligonucleotide
cagggaagucgucugcgag

SEQ ID NO: 2091537 - RNA, 19 nt, Artificial Sequence
  Description of Artificial Sequence: Synthetic oligonucleotide
gcaaauuccagccuccuua

SEQ ID NO: 2091538 - RNA, 19 nt, Artificial Sequence
  Description of Artificial Sequence: Synthetic oligonucleotide
uugccaaauggaguaucca

SEQ ID NO: 2091539 - RNA, 19 nt, Artificial Sequence
  Description of Artificial Sequence: Synthetic oligonucleotide
uccccaaaauuaaggcguc

SEQ ID NO: 2091540 - RNA, 19 nt, Artificial Sequence
  Description of Artificial Sequence: Synthetic oligonucleotide
cuguagucauauugauaac

SEQ ID NO: 2091541 - RNA, 19 nt, Artificial Sequence
  Description of Artificial Sequence: Synthetic oligonucleotide
aguaaggaguaagcuuuug

SEQ ID NO: 2091542 - RNA, 19 nt, Artificial Sequence
  Description of Artificial Sequence: Synthetic oligonucleotide
uguccccuuggaauggcau

SEQ ID NO: 2091543 - RNA, 19 nt, Artificial Sequence
  Description of Artificial Sequence: Synthetic oligonucleotide
auguccugucaaugaacug

SEQ ID NO: 2091544 - RNA, 19 nt, Artificial Sequence
  Description of Artificial Sequence: Synthetic oligonucleotide
agccuguuccaccaauuau

SEQ ID NO: 2091545 - RNA, 19 nt, Artificial Sequence
  Description of Artificial Sequence: Synthetic oligonucleotide
cggaauacaaaacuuucug

SEQ ID NO: 2091546 - RNA, 19 nt, Artificial Sequence
  Description of Artificial Sequence: Synthetic oligonucleotide
cuuagcaagcaccaccucu

SEQ ID NO: 2091547 - RNA, 19 nt, Artificial Sequence
  Description of Artificial Sequence: Synthetic oligonucleotide
gaggaccucucuuguuuug

SEQ ID NO: 2091548 - RNA, 19 nt, Artificial Sequence
  Description of Artificial Sequence: Synthetic oligonucleotide
ugacuuuugaaggcaugau

SEQ ID NO: 2091549 - RNA, 19 nt, Artificial Sequence
  Description of Artificial Sequence: Synthetic oligonucleotide
uaaugucuuggugguaaaa

SEQ ID NO: 2091550 - RNA, 19 nt, Artificial Sequence
  Description of Artificial Sequence: Synthetic oligonucleotide
caaaacgguucagccauug

SEQ ID NO: 2091551 - RNA, 19 nt, Artificial Sequence
  Description of Artificial Sequence: Synthetic oligonucleotide
guauaaaucuuucccguuu

SEQ ID NO: 2091552 - RNA, 19 nt, Artificial Sequence
  Description of Artificial Sequence: Synthetic oligonucleotide
uaugaggaccucucuuguu

SEQ ID NO: 2091553 - RNA, 19 nt, Artificial Sequence
  Description of Artificial Sequence: Synthetic oligonucleotide
cugcgagcgggaacgcugg

SEQ ID NO: 2091554 - RNA, 19 nt, Artificial Sequence
  Description of Artificial Sequence: Synthetic oligonucleotide
ccuuggaauggcaucgaag

SEQ ID NO: 2091555 - RNA, 19 nt, Artificial Sequence
  Description of Artificial Sequence: Synthetic oligonucleotide
gcuucuucgugcucuuucc

SEQ ID NO: 2091556 - RNA, 19 nt, Artificial Sequence
  Description of Artificial Sequence: Synthetic oligonucleotide
ggaacgcuggaccgggagg

SEQ ID NO: 2091557 - RNA, 19 nt, Artificial Sequence
  Description of Artificial Sequence: Synthetic oligonucleotide
cuuuaagaccccauccacu

SEQ ID NO: 2091558 - RNA, 19 nt, Artificial Sequence
  Description of Artificial Sequence: Synthetic oligonucleotide
guguuaaugucuugguggu

SEQ ID NO: 2091559 - RNA, 19 nt, Artificial Sequence
  Description of Artificial Sequence: Synthetic oligonucleotide
cauagaaggucugaggccu

SEQ ID NO: 2091560 - RNA, 19 nt, Artificial Sequence
  Description of Artificial Sequence: Synthetic oligonucleotide
acaaaacuuucugcccgag

SEQ ID NO: 2091561 - RNA, 19 nt, Artificial Sequence
  Description of Artificial Sequence: Synthetic oligonucleotide
ccaaucuucacuggcgugc

SEQ ID NO: 2091562 - RNA, 19 nt, Artificial Sequence
  Description of Artificial Sequence: Synthetic oligonucleotide
cuucgugcucuuuccaaca

SEQ ID NO: 2091563 - RNA, 19 nt, Artificial Sequence
  Description of Artificial Sequence: Synthetic oligonucleotide
aaggacccgcaugcugugg

SEQ ID NO: 2091564 - RNA, 19 nt, Artificial Sequence
  Description of Artificial Sequence: Synthetic oligonucleotide
acgguucagccauugggau

SEQ ID NO: 2091565 - RNA, 19 nt, Artificial Sequence
  Description of Artificial Sequence: Synthetic oligonucleotide
ggaucauccaagccuguuc

SEQ ID NO: 2091566 - RNA, 19 nt, Artificial Sequence
  Description of Artificial Sequence: Synthetic oligonucleotide
aacgcuggaccgggaggac

SEQ ID NO: 2091567 - RNA, 19 nt, Artificial Sequence
  Description of Artificial Sequence: Synthetic oligonucleotide
ugcugucucccaugucuug

SEQ ID NO: 2091568 - RNA, 19 nt, Artificial Sequence
  Description of Artificial Sequence: Synthetic oligonucleotide
agauguuugccugguaguu

SEQ ID NO: 2091569 - RNA, 19 nt, Artificial Sequence
  Description of Artificial Sequence: Synthetic oligonucleotide
augguaugcugucucccau

SEQ ID NO: 2091570 - RNA, 19 nt, Artificial Sequence
  Description of Artificial Sequence: Synthetic oligonucleotide
ugcaggcggcacccgaggc

SEQ ID NO: 2091571 - RNA, 19 nt, Artificial Sequence
  Description of Artificial Sequence: Synthetic oligonucleotide
cccucaauugugacuauug

SEQ ID NO: 2091572 - RNA, 19 nt, Artificial Sequence
  Description of Artificial Sequence: Synthetic oligonucleotide
aggcaugaugguaugcugu

SEQ ID NO: 2091573 - RNA, 19 nt, Artificial Sequence
  Description of Artificial Sequence: Synthetic oligonucleotide
ucgugcucuuuccaacaau

SEQ ID NO: 2091574 - RNA, 19 nt, Artificial Sequence
  Description of Artificial Sequence: Synthetic oligonucleotide
ucacuggcgugcaggcggc

SEQ ID NO: 2091575 - RNA, 19 nt, Artificial Sequence
  Description of Artificial Sequence: Synthetic oligonucleotide
aggacacugcgggaccggc

SEQ ID NO: 2091576 - RNA, 19 nt, Artificial Sequence
  Description of Artificial Sequence: Synthetic oligonucleotide
aggacccgcaugcuguggu

SEQ ID NO: 2091577 - RNA, 19 nt, Artificial Sequence
  Description of Artificial Sequence: Synthetic oligonucleotide
gcuggcauagcaaauucca

SEQ ID NO: 2091578 - RNA, 19 nt, Artificial Sequence
  Description of Artificial Sequence: Synthetic oligonucleotide
ccgagagcugaaacgaggc

SEQ ID NO: 2091579 - RNA, 19 nt, Artificial Sequence
  Description of Artificial Sequence: Synthetic oligonucleotide
ugucucccaugucuugcaa

SEQ ID NO: 2091580 - RNA, 19 nt, Artificial Sequence
  Description of Artificial Sequence: Synthetic oligonucleotide
ggcaaaacgguucagccau

SEQ ID NO: 2091581 - RNA, 19 nt, Artificial Sequence
  Description of Artificial Sequence: Synthetic oligonucleotide
cccgagagcugaaacgagg

SEQ ID NO: 2091582 - RNA, 19 nt, Artificial Sequence
  Description of Artificial Sequence: Synthetic oligonucleotide
ggacauguguacaaccuuc

SEQ ID NO: 2091583 - RNA, 19 nt, Artificial Sequence
  Description of Artificial Sequence: Synthetic oligonucleotide
auuugcgguaugguaguaa

SEQ ID NO: 2091584 - RNA, 19 nt, Artificial Sequence
  Description of Artificial Sequence: Synthetic oligonucleotide
ggaccgggaggacacugcg

SEQ ID NO: 2091585 - RNA, 19 nt, Artificial Sequence
  Description of Artificial Sequence: Synthetic oligonucleotide
gaucgaugaugaccauguc

SEQ ID NO: 2091586 - RNA, 19 nt, Artificial Sequence
  Description of Artificial Sequence: Synthetic oligonucleotide
gcgguaugguaguaaggag

SEQ ID NO: 2091587 - RNA, 19 nt, Artificial Sequence
  Description of Artificial Sequence: Synthetic oligonucleotide
cacuaggacauguguacaa

SEQ ID NO: 2091588 - RNA, 19 nt, Artificial Sequence
  Description of Artificial Sequence: Synthetic oligonucleotide
caaucauaaucgguugcca

SEQ ID NO: 2091589 - RNA, 19 nt, Artificial Sequence
  Description of Artificial Sequence: Synthetic oligonucleotide
uuaaggcgucagauggcuu

SEQ ID NO: 2091590 - RNA, 19 nt, Artificial Sequence
  Description of Artificial Sequence: Synthetic oligonucleotide
cuauuugcgguaugguagu

SEQ ID NO: 2091591 - RNA, 19 nt, Artificial Sequence
  Description of Artificial Sequence: Synthetic oligonucleotide
gaggccccucaauugugac

SEQ ID NO: 2091592 - RNA, 19 nt, Artificial Sequence
  Description of Artificial Sequence: Synthetic oligonucleotide
accccaaguacggaauaca

SEQ ID NO: 2091593 - RNA, 19 nt, Artificial Sequence
  Description of Artificial Sequence: Synthetic oligonucleotide
cuugcaagaagcacacaau

SEQ ID NO: 2091594 - RNA, 19 nt, Artificial Sequence
  Description of Artificial Sequence: Synthetic oligonucleotide
gguaugguaguaaggagua

SEQ ID NO: 2091595 - RNA, 19 nt, Artificial Sequence
  Description of Artificial Sequence: Synthetic oligonucleotide
cauugggauauggcacacc

SEQ ID NO: 2091596 - RNA, 19 nt, Artificial Sequence
  Description of Artificial Sequence: Synthetic oligonucleotide
ggcaugaugguaugcuguc

SEQ ID NO: 2091597 - RNA, 19 nt, Artificial Sequence
  Description of Artificial Sequence: Synthetic oligonucleotide
ucuuuccaacaaucauaau

SEQ ID NO: 2091598 - RNA, 19 nt, Artificial Sequence
  Description of Artificial Sequence: Synthetic oligonucleotide
aguugacuuuugaaggcau

SEQ ID NO: 2091599 - RNA, 19 nt, Artificial Sequence
  Description of Artificial Sequence: Synthetic oligonucleotide
acuggcgugcaggcggcac

SEQ ID NO: 2091600 - RNA, 19 nt, Artificial Sequence
  Description of Artificial Sequence: Synthetic oligonucleotide
caccagggaagucgucugc

SEQ ID NO: 2091601 - RNA, 19 nt, Artificial Sequence
  Description of Artificial Sequence: Synthetic oligonucleotide
aggccccucaauugugacu

SEQ ID NO: 2091602 - RNA, 19 nt, Artificial Sequence
  Description of Artificial Sequence: Synthetic oligonucleotide
acgagaaguuguaagucuu

SEQ ID NO: 2091603 - RNA, 19 nt, Artificial Sequence
  Description of Artificial Sequence: Synthetic oligonucleotide
aaggcacgaaggccguaua

SEQ ID NO: 2091604 - RNA, 19 nt, Artificial Sequence
  Description of Artificial Sequence: Synthetic oligonucleotide
gaguaagcuuuuggcuuug

SEQ ID NO: 2091605 - RNA, 19 nt, Artificial Sequence
  Description of Artificial Sequence: Synthetic oligonucleotide
cuucacuggcgugcaggcg

SEQ ID NO: 2091606 - RNA, 19 nt, Artificial Sequence
  Description of Artificial Sequence: Synthetic oligonucleotide
gcugaaacgaggccccuca

SEQ ID NO: 2091607 - RNA, 19 nt, Artificial Sequence
  Description of Artificial Sequence: Synthetic oligonucleotide
ucugcaccccaaguacgga

SEQ ID NO: 2091608 - RNA, 19 nt, Artificial Sequence
  Description of Artificial Sequence: Synthetic oligonucleotide
gugcaggcggcacccgagg

SEQ ID NO: 2091609 - RNA, 19 nt, Artificial Sequence
  Description of Artificial Sequence: Synthetic oligonucleotide
ugccugguaguugacuuuu

SEQ ID NO: 2091610 - RNA, 19 nt, Artificial Sequence
  Description of Artificial Sequence: Synthetic oligonucleotide
aggcacgaaggccguauaa

SEQ ID NO: 2091611 - RNA, 19 nt, Artificial Sequence
  Description of Artificial Sequence: Synthetic oligonucleotide
uguuaaugucuugguggua

SEQ ID NO: 2091612 - RNA, 19 nt, Artificial Sequence
  Description of Artificial Sequence: Synthetic oligonucleotide
guccccuuggaauggcauc

SEQ ID NO: 2091613 - RNA, 19 nt, Artificial Sequence
  Description of Artificial Sequence: Synthetic oligonucleotide
cuucuucgugcucuuucca

SEQ ID NO: 2091614 - RNA, 19 nt, Artificial Sequence
  Description of Artificial Sequence: Synthetic oligonucleotide
gggacugagcugugcgggg

SEQ ID NO: 2091615 - RNA, 19 nt, Artificial Sequence
  Description of Artificial Sequence: Synthetic oligonucleotide
gggaacgcuggaccgggag

SEQ ID NO: 2091616 - RNA, 19 nt, Artificial Sequence
  Description of Artificial Sequence: Synthetic oligonucleotide
gggcaaaacgguucagcca

SEQ ID NO: 2091617 - RNA, 19 nt, Artificial Sequence
  Description of Artificial Sequence: Synthetic oligonucleotide
ggauguccugucaaugaac

SEQ ID NO: 2091618 - RNA, 19 nt, Artificial Sequence
  Description of Artificial Sequence: Synthetic oligonucleotide
gugcucuuuccaacaauca

SEQ ID NO: 2091619 - RNA, 19 nt, Artificial Sequence
  Description of Artificial Sequence: Synthetic oligonucleotide
uccaagccuguuccaccaa

SEQ ID NO: 2091620 - RNA, 19 nt, Artificial Sequence
  Description of Artificial Sequence: Synthetic oligonucleotide
uuggggcaaaacgguucag

SEQ ID NO: 2091621 - RNA, 19 nt, Artificial Sequence
  Description of Artificial Sequence: Synthetic oligonucleotide
caccccaaguacggaauac

SEQ ID NO: 2091622 - RNA, 19 nt, Artificial Sequence
  Description of Artificial Sequence: Synthetic oligonucleotide
cacccgaggccaugucugc

SEQ ID NO: 2091623 - RNA, 19 nt, Artificial Sequence
  Description of Artificial Sequence: Synthetic oligonucleotide
guacggaauacaaaacuuu

SEQ ID NO: 2091624 - RNA, 19 nt, Artificial Sequence
  Description of Artificial Sequence: Synthetic oligonucleotide
uggaucauccaagccuguu

SEQ ID NO: 2091625 - RNA, 19 nt, Artificial Sequence
  Description of Artificial Sequence: Synthetic oligonucleotide
acaccgcuucuucgugcuc

SEQ ID NO: 2091626 - RNA, 19 nt, Artificial Sequence
  Description of Artificial Sequence: Synthetic oligonucleotide
acccuauuugcgguauggu

SEQ ID NO: 2091627 - RNA, 19 nt, Artificial Sequence
  Description of Artificial Sequence: Synthetic oligonucleotide
aucgacccuauuugcggua

SEQ ID NO: 2091628 - RNA, 19 nt, Artificial Sequence
  Description of Artificial Sequence: Synthetic oligonucleotide
ccaaaauuaaggcgucaga

SEQ ID NO: 2091629 - RNA, 19 nt, Artificial Sequence
  Description of Artificial Sequence: Synthetic oligonucleotide
uggcgugcaggcggcaccc

SEQ ID NO: 2091630 - RNA, 19 nt, Artificial Sequence
  Description of Artificial Sequence: Synthetic oligonucleotide
ucgacccuauuugcgguau

SEQ ID NO: 2091631 - RNA, 19 nt, Artificial Sequence
  Description of Artificial Sequence: Synthetic oligonucleotide
aagucgucugcgagcggga

SEQ ID NO: 2091632 - RNA, 19 nt, Artificial Sequence
  Description of Artificial Sequence: Synthetic oligonucleotide
gucgucugcgagcgggaac

SEQ ID NO: 2091633 - RNA, 19 nt, Artificial Sequence
  Description of Artificial Sequence: Synthetic oligonucleotide
cuaugaggaccucucuugu

SEQ ID NO: 2091634 - RNA, 19 nt, Artificial Sequence
  Description of Artificial Sequence: Synthetic oligonucleotide
ugcgggaccggcgcagcgc

SEQ ID NO: 2091635 - RNA, 19 nt, Artificial Sequence
  Description of Artificial Sequence: Synthetic oligonucleotide
acugaucgaugaugaccau

SEQ ID NO: 2091636 - RNA, 19 nt, Artificial Sequence
  Description of Artificial Sequence: Synthetic oligonucleotide
acagaacacugggccaugu

SEQ ID NO: 2091637 - RNA, 19 nt, Artificial Sequence
  Description of Artificial Sequence: Synthetic oligonucleotide
caaagacgagaaguuguaa

SEQ ID NO: 2091638 - RNA, 19 nt, Artificial Sequence
  Description of Artificial Sequence: Synthetic oligonucleotide
uauuugcgguaugguagua

SEQ ID NO: 2091639 - RNA, 19 nt, Artificial Sequence
  Description of Artificial Sequence: Synthetic oligonucleotide
ggaggacacugcgggaccg

SEQ ID NO: 2091640 - RNA, 19 nt, Artificial Sequence
  Description of Artificial Sequence: Synthetic oligonucleotide
gcaccagggaagucgucug

SEQ ID NO: 2091641 - RNA, 19 nt, Artificial Sequence
  Description of Artificial Sequence: Synthetic oligonucleotide
gguucagccauugggauau

SEQ ID NO: 2091642 - RNA, 19 nt, Artificial Sequence
  Description of Artificial Sequence: Synthetic oligonucleotide
uuucugcccgagagcugaa

SEQ ID NO: 2091643 - RNA, 19 nt, Artificial Sequence
  Description of Artificial Sequence: Synthetic oligonucleotide
gcgggacugagcugugcgg

SEQ ID NO: 2091644 - RNA, 19 nt, Artificial Sequence
  Description of Artificial Sequence: Synthetic oligonucleotide
cgagcgggaacgcuggacc

SEQ ID NO: 2091645 - RNA, 19 nt, Artificial Sequence
  Description of Artificial Sequence: Synthetic oligonucleotide
caaucuucacuggcgugca

SEQ ID NO: 2091646 - RNA, 19 nt, Artificial Sequence
  Description of Artificial Sequence: Synthetic oligonucleotide
aguaagcuuuuggcuuugu

SEQ ID NO: 2091647 - RNA, 19 nt, Artificial Sequence
  Description of Artificial Sequence: Synthetic oligonucleotide
acgcuguguuaaugucuug

SEQ ID NO: 2091648 - RNA, 19 nt, Artificial Sequence
  Description of Artificial Sequence: Synthetic oligonucleotide
gacccgcaugcugugguca

SEQ ID NO: 2091649 - RNA, 19 nt, Artificial Sequence
  Description of Artificial Sequence: Synthetic oligonucleotide
auggucuuuaagaccccau

SEQ ID NO: 2091650 - RNA, 19 nt, Artificial Sequence
  Description of Artificial Sequence: Synthetic oligonucleotide
gucugaggccucagggaug

SEQ ID NO: 2091651 - RNA, 19 nt, Artificial Sequence
  Description of Artificial Sequence: Synthetic oligonucleotide
guaugcugucucccauguc

SEQ ID NO: 2091652 - RNA, 19 nt, Artificial Sequence
  Description of Artificial Sequence: Synthetic oligonucleotide
cacgcuguguuaaugucuu

SEQ ID NO: 2091653 - RNA, 19 nt, Artificial Sequence
  Description of Artificial Sequence: Synthetic oligonucleotide
cccaaagacgagaaguugu

SEQ ID NO: 2091654 - RNA, 19 nt, Artificial Sequence
  Description of Artificial Sequence: Synthetic oligonucleotide
ggccccucaauugugacua

SEQ ID NO: 2091655 - RNA, 19 nt, Artificial Sequence
  Description of Artificial Sequence: Synthetic oligonucleotide
gcacccgaggccaugucug

SEQ ID NO: 2091656 - RNA, 19 nt, Artificial Sequence
  Description of Artificial Sequence: Synthetic oligonucleotide
acgaggccccucaauugug

SEQ ID NO: 2091657 - RNA, 19 nt, Artificial Sequence
  Description of Artificial Sequence: Synthetic oligonucleotide
caucgacccuauuugcggu

SEQ ID NO: 2091658 - RNA, 19 nt, Artificial Sequence
  Description of Artificial Sequence: Synthetic oligonucleotide
gcgggaccggcgcagcgcg

SEQ ID NO: 2091659 - RNA, 19 nt, Artificial Sequence
  Description of Artificial Sequence: Synthetic oligonucleotide
uugugacuauuguccccuu

SEQ ID NO: 2091660 - RNA, 19 nt, Artificial Sequence
  Description of Artificial Sequence: Synthetic oligonucleotide
ccaaagacgagaaguugua

SEQ ID NO: 2091661 - RNA, 19 nt, Artificial Sequence
  Description of Artificial Sequence: Synthetic oligonucleotide
agcacacaaucaacguuuu

SEQ ID NO: 2091662 - RNA, 19 nt, Artificial Sequence
  Description of Artificial Sequence: Synthetic oligonucleotide
guaugguaguaaggaguaa

SEQ ID NO: 2091663 - RNA, 19 nt, Artificial Sequence
  Description of Artificial Sequence: Synthetic oligonucleotide
ggucugaggccucagggau

SEQ ID NO: 2091664 - RNA, 19 nt, Artificial Sequence
  Description of Artificial Sequence: Synthetic oligonucleotide
cugcgggaccggcgcagcg

SEQ ID NO: 2091665 - RNA, 19 nt, Artificial Sequence
  Description of Artificial Sequence: Synthetic oligonucleotide
ccucucuuguuuuggggca

SEQ ID NO: 2091666 - RNA, 19 nt, Artificial Sequence
  Description of Artificial Sequence: Synthetic oligonucleotide
ggaggguuucugaccauuc

SEQ ID NO: 2091667 - RNA, 19 nt, Artificial Sequence
  Description of Artificial Sequence: Synthetic oligonucleotide
uucugcccgagagcugaaa

SEQ ID NO: 2091668 - RNA, 19 nt, Artificial Sequence
  Description of Artificial Sequence: Synthetic oligonucleotide
ggcuuuguuggcauuuucu

SEQ ID NO: 2091669 - RNA, 19 nt, Artificial Sequence
  Description of Artificial Sequence: Synthetic oligonucleotide
ggaguaagcuuuuggcuuu

SEQ ID NO: 2091670 - RNA, 19 nt, Artificial Sequence
  Description of Artificial Sequence: Synthetic oligonucleotide
guuugccugguaguugacu

SEQ ID NO: 2091671 - RNA, 19 nt, Artificial Sequence
  Description of Artificial Sequence: Synthetic oligonucleotide
ccguauaaaucuuucccgu

SEQ ID NO: 2091672 - RNA, 19 nt, Artificial Sequence
  Description of Artificial Sequence: Synthetic oligonucleotide
acacugcgggaccggcgca

SEQ ID NO: 2091673 - RNA, 19 nt, Artificial Sequence
  Description of Artificial Sequence: Synthetic oligonucleotide
gcgucagauggcuugccaa

SEQ ID NO: 2091674 - RNA, 19 nt, Artificial Sequence
  Description of Artificial Sequence: Synthetic oligonucleotide
ggaagucgucugcgagcgg

SEQ ID NO: 2091675 - RNA, 19 nt, Artificial Sequence
  Description of Artificial Sequence: Synthetic oligonucleotide
cacugcgggaccggcgcag

SEQ ID NO: 2091676 - RNA, 19 nt, Artificial Sequence
  Description of Artificial Sequence: Synthetic oligonucleotide
cccaaguacggaauacaaa

SEQ ID NO: 2091677 - RNA, 19 nt, Artificial Sequence
  Description of Artificial Sequence: Synthetic oligonucleotide
ucggaggguuucugaccau

SEQ ID NO: 2091678 - RNA, 19 nt, Artificial Sequence
  Description of Artificial Sequence: Synthetic oligonucleotide
ccaaauggaguauccacau

SEQ ID NO: 2091679 - RNA, 19 nt, Artificial Sequence
  Description of Artificial Sequence: Synthetic oligonucleotide
gcacgaaggccguauaaau

SEQ ID NO: 2091680 - RNA, 19 nt, Artificial Sequence
  Description of Artificial Sequence: Synthetic oligonucleotide
aucgaagaccaagcuucuu

SEQ ID NO: 2091681 - RNA, 19 nt, Artificial Sequence
  Description of Artificial Sequence: Synthetic oligonucleotide
acgcuggaccgggaggaca

SEQ ID NO: 2091682 - RNA, 19 nt, Artificial Sequence
  Description of Artificial Sequence: Synthetic oligonucleotide
cccuauuugcgguauggua

SEQ ID NO: 2091683 - RNA, 19 nt, Artificial Sequence
  Description of Artificial Sequence: Synthetic oligonucleotide
cgcgggacugagcugugcg

SEQ ID NO: 2091684 - RNA, 19 nt, Artificial Sequence
  Description of Artificial Sequence: Synthetic oligonucleotide
ccccaaagacgagaaguug

SEQ ID NO: 2091685 - RNA, 19 nt, Artificial Sequence
  Description of Artificial Sequence: Synthetic oligonucleotide
ggcaucgaagaccaagcuu

SEQ ID NO: 2091686 - RNA, 19 nt, Artificial Sequence
  Description of Artificial Sequence: Synthetic oligonucleotide
gccaugucugcaccaggga

SEQ ID NO: 2091687 - RNA, 19 nt, Artificial Sequence
  Description of Artificial Sequence: Synthetic oligonucleotide
ccccaaguacggaauacaa

SEQ ID NO: 2091688 - RNA, 19 nt, Artificial Sequence
  Description of Artificial Sequence: Synthetic oligonucleotide
agucgucugcgagcgggaa

SEQ ID NO: 2091689 - RNA, 19 nt, Artificial Sequence
  Description of Artificial Sequence: Synthetic oligonucleotide
cgggacugagcugugcggg

SEQ ID NO: 2091690 - RNA, 19 nt, Artificial Sequence
  Description of Artificial Sequence: Synthetic oligonucleotide
cucucuuguuuuggggcaa

SEQ ID NO: 2091691 - RNA, 19 nt, Artificial Sequence
  Description of Artificial Sequence: Synthetic oligonucleotide
caagccuguuccaccaauu

SEQ ID NO: 2091692 - RNA, 19 nt, Artificial Sequence
  Description of Artificial Sequence: Synthetic oligonucleotide
cugaaacgaggccccucaa

SEQ ID NO: 2091693 - RNA, 19 nt, Artificial Sequence
  Description of Artificial Sequence: Synthetic oligonucleotide
ccucaauugugacuauugu

SEQ ID NO: 2091694 - RNA, 19 nt, Artificial Sequence
  Description of Artificial Sequence: Synthetic oligonucleotide
gucagauggcuugccaaau

SEQ ID NO: 2091695 - RNA, 19 nt, Artificial Sequence
  Description of Artificial Sequence: Synthetic oligonucleotide
gucuugcaagaagcacaca

SEQ ID NO: 2091696 - RNA, 19 nt, Artificial Sequence
  Description of Artificial Sequence: Synthetic oligonucleotide
cgugcaggcggcacccgag

SEQ ID NO: 2091697 - RNA, 19 nt, Artificial Sequence
  Description of Artificial Sequence: Synthetic oligonucleotide
gaccggcgcagcgcgggac

SEQ ID NO: 2091698 - RNA, 19 nt, Artificial Sequence
  Description of Artificial Sequence: Synthetic oligonucleotide
ggacccgcaugcugugguc

SEQ ID NO: 2091699 - RNA, 19 nt, Artificial Sequence
  Description of Artificial Sequence: Synthetic oligonucleotide
gcccgagagcugaaacgag

SEQ ID NO: 2091700 - RNA, 19 nt, Artificial Sequence
  Description of Artificial Sequence: Synthetic oligonucleotide
cagcgcgggacugagcugu

SEQ ID NO: 2091701 - RNA, 19 nt, Artificial Sequence
  Description of Artificial Sequence: Synthetic oligonucleotide
ccuuagcaagcaccaccuc

SEQ ID NO: 2091702 - RNA, 19 nt, Artificial Sequence
  Description of Artificial Sequence: Synthetic oligonucleotide
ccucucucaaggacccgca

SEQ ID NO: 2091703 - RNA, 19 nt, Artificial Sequence
  Description of Artificial Sequence: Synthetic oligonucleotide
gcagcgcgggacugagcug

SEQ ID NO: 2091704 - RNA, 19 nt, Artificial Sequence
  Description of Artificial Sequence: Synthetic oligonucleotide
guucagccauugggauaug

SEQ ID NO: 2091705 - RNA, 19 nt, Artificial Sequence
  Description of Artificial Sequence: Synthetic oligonucleotide
cgucagauggcuugccaaa

SEQ ID NO: 2091706 - RNA, 19 nt, Artificial Sequence
  Description of Artificial Sequence: Synthetic oligonucleotide
gcgagcgggaacgcuggac

SEQ ID NO: 2091707 - RNA, 19 nt, Artificial Sequence
  Description of Artificial Sequence: Synthetic oligonucleotide
agcgcgggacugagcugug

SEQ ID NO: 2091708 - RNA, 19 nt, Artificial Sequence
  Description of Artificial Sequence: Synthetic oligonucleotide
cgcaugcuguggucacuag

SEQ ID NO: 2091709 - RNA, 19 nt, Artificial Sequence
  Description of Artificial Sequence: Synthetic oligonucleotide
gagcugaaacgaggccccu

SEQ ID NO: 2091710 - RNA, 19 nt, Artificial Sequence
  Description of Artificial Sequence: Synthetic oligonucleotide
ggcacaccccucuggcgcu

SEQ ID NO: 2091711 - RNA, 19 nt, Artificial Sequence
  Description of Artificial Sequence: Synthetic oligonucleotide
cgaggccccucaauuguga

SEQ ID NO: 2091712 - RNA, 19 nt, Artificial Sequence
  Description of Artificial Sequence: Synthetic oligonucleotide
cuggaacuguagucauauu

SEQ ID NO: 2091713 - RNA, 19 nt, Artificial Sequence
  Description of Artificial Sequence: Synthetic oligonucleotide
cguauaaaucuuucccguu

SEQ ID NO: 2091714 - RNA, 19 nt, Artificial Sequence
  Description of Artificial Sequence: Synthetic oligonucleotide
caaaggcacgaaggccgua

SEQ ID NO: 2091715 - RNA, 19 nt, Artificial Sequence
  Description of Artificial Sequence: Synthetic oligonucleotide
ggcgugcaggcggcacccg

SEQ ID NO: 2091716 - RNA, 19 nt, Artificial Sequence
  Description of Artificial Sequence: Synthetic oligonucleotide
gucugcgagcgggaacgcu

SEQ ID NO: 2091717 - RNA, 19 nt, Artificial Sequence
  Description of Artificial Sequence: Synthetic oligonucleotide
gcaaaggcacgaaggccgu

SEQ ID NO: 2091718 - RNA, 19 nt, Artificial Sequence
  Description of Artificial Sequence: Synthetic oligonucleotide
ccccauccacugacaccgc

SEQ ID NO: 2091719 - RNA, 19 nt, Artificial Sequence
  Description of Artificial Sequence: Synthetic oligonucleotide
ccccaaaauuaaggcguca

SEQ ID NO: 2091720 - RNA, 19 nt, Artificial Sequence
  Description of Artificial Sequence: Synthetic oligonucleotide
cccuuggaauggcaucgaa

SEQ ID NO: 2091721 - RNA, 19 nt, Artificial Sequence
  Description of Artificial Sequence: Synthetic oligonucleotide
cgacccuauuugcgguaug

SEQ ID NO: 2091722 - RNA, 19 nt, Artificial Sequence
  Description of Artificial Sequence: Synthetic oligonucleotide
ccauccacugacaccgcuu

SEQ ID NO: 2091723 - RNA, 19 nt, Artificial Sequence
  Description of Artificial Sequence: Synthetic oligonucleotide
ggaccggcgcagcgcggga

SEQ ID NO: 2091724 - RNA, 19 nt, Artificial Sequence
  Description of Artificial Sequence: Synthetic oligonucleotide
cgguucagccauugggaua

SEQ ID NO: 2091725 - RNA, 19 nt, Artificial Sequence
  Description of Artificial Sequence: Synthetic oligonucleotide
ggcuuccaucauagaaggu

SEQ ID NO: 2091726 - RNA, 19 nt, Artificial Sequence
  Description of Artificial Sequence: Synthetic oligonucleotide
gcacaccccucuggcgcug

SEQ ID NO: 2091727 - RNA, 19 nt, Artificial Sequence
  Description of Artificial Sequence: Synthetic oligonucleotide
gcgcgggacugagcugugc

SEQ ID NO: 2091728 - RNA, 19 nt, Artificial Sequence
  Description of Artificial Sequence: Synthetic oligonucleotide
cacuggcgugcaggcggca

SEQ ID NO: 2091729 - RNA, 19 nt, Artificial Sequence
  Description of Artificial Sequence: Synthetic oligonucleotide
ccccuuggaauggcaucga

SEQ ID NO: 2091730 - RNA, 19 nt, Artificial Sequence
  Description of Artificial Sequence: Synthetic oligonucleotide
cgucugcgagcgggaacgc

SEQ ID NO: 2091731 - RNA, 19 nt, Artificial Sequence
  Description of Artificial Sequence: Synthetic oligonucleotide
cgggaccggcgcagcgcgg

SEQ ID NO: 2091732 - RNA, 19 nt, Artificial Sequence
  Description of Artificial Sequence: Synthetic oligonucleotide
gcaaaacgguucagccauu

SEQ ID NO: 2091733 - RNA, 19 nt, Artificial Sequence
  Description of Artificial Sequence: Synthetic oligonucleotide
gccccucaauugugacuau

SEQ ID NO: 2091734 - RNA, 19 nt, Artificial Sequence
  Description of Artificial Sequence: Synthetic oligonucleotide
cggcacccgaggccauguc

SEQ ID NO: 2091735 - RNA, 19 nt, Artificial Sequence
  Description of Artificial Sequence: Synthetic oligonucleotide
ccccucaauugugacuauu

SEQ ID NO: 2091736 - RNA, 19 nt, Artificial Sequence
  Description of Artificial Sequence: Synthetic oligonucleotide
ccaugucaccaggcuggau

SEQ ID NO: 2091737 - RNA, 19 nt, Artificial Sequence
  Description of Artificial Sequence: Synthetic oligonucleotide
agaugugagagccugaccc

SEQ ID NO: 2091738 - RNA, 19 nt, Artificial Sequence
  Description of Artificial Sequence: Synthetic oligonucleotide
uuaagggaggacuggaagg

SEQ ID NO: 2091739 - RNA, 19 nt, Artificial Sequence
  Description of Artificial Sequence: Synthetic oligonucleotide
aaggacauagcgccuacgg

SEQ ID NO: 2091740 - RNA, 19 nt, Artificial Sequence
  Description of Artificial Sequence: Synthetic oligonucleotide
agagccugaguuuagcucg

SEQ ID NO: 2091741 - RNA, 19 nt, Artificial Sequence
  Description of Artificial Sequence: Synthetic oligonucleotide
auuuaauacuucuggaaug

SEQ ID NO: 2091742 - RNA, 19 nt, Artificial Sequence
  Description of Artificial Sequence: Synthetic oligonucleotide
ugugaagaccuguuguucg

SEQ ID NO: 2091743 - RNA, 19 nt, Artificial Sequence
  Description of Artificial Sequence: Synthetic oligonucleotide
gauuagaaaucugagaaca

SEQ ID NO: 2091744 - RNA, 19 nt, Artificial Sequence
  Description of Artificial Sequence: Synthetic oligonucleotide
aauacuucuggaaugauua

SEQ ID NO: 2091745 - RNA, 19 nt, Artificial Sequence
  Description of Artificial Sequence: Synthetic oligonucleotide
uuugaguccugaccaaagg

SEQ ID NO: 2091746 - RNA, 19 nt, Artificial Sequence
  Description of Artificial Sequence: Synthetic oligonucleotide
uguagcuucgagaauggca

SEQ ID NO: 2091747 - RNA, 19 nt, Artificial Sequence
  Description of Artificial Sequence: Synthetic oligonucleotide
ucgagaauggcacagcagu

SEQ ID NO: 2091748 - RNA, 19 nt, Artificial Sequence
  Description of Artificial Sequence: Synthetic oligonucleotide
aagaccuguuguucggggc

SEQ ID NO: 2091749 - RNA, 19 nt, Artificial Sequence
  Description of Artificial Sequence: Synthetic oligonucleotide
ucuauauccaccucuugcu

SEQ ID NO: 2091750 - RNA, 19 nt, Artificial Sequence
  Description of Artificial Sequence: Synthetic oligonucleotide
uuuaauacuucuggaauga

SEQ ID NO: 2091751 - RNA, 19 nt, Artificial Sequence
  Description of Artificial Sequence: Synthetic oligonucleotide
uugaugugcaucuuggcac

SEQ ID NO: 2091752 - RNA, 19 nt, Artificial Sequence
  Description of Artificial Sequence: Synthetic oligonucleotide
uucagcuccauccugccgc

SEQ ID NO: 2091753 - RNA, 19 nt, Artificial Sequence
  Description of Artificial Sequence: Synthetic oligonucleotide
aaccagugcugucagugcg

SEQ ID NO: 2091754 - RNA, 19 nt, Artificial Sequence
  Description of Artificial Sequence: Synthetic oligonucleotide
ugggccaagaagcaaagga

SEQ ID NO: 2091755 - RNA, 19 nt, Artificial Sequence
  Description of Artificial Sequence: Synthetic oligonucleotide
uagaaaucugagaacagau

SEQ ID NO: 2091756 - RNA, 19 nt, Artificial Sequence
  Description of Artificial Sequence: Synthetic oligonucleotide
cucuauauccaccucuugc

SEQ ID NO: 2091757 - RNA, 19 nt, Artificial Sequence
  Description of Artificial Sequence: Synthetic oligonucleotide
aaucugagaacagaucgug

SEQ ID NO: 2091758 - RNA, 19 nt, Artificial Sequence
  Description of Artificial Sequence: Synthetic oligonucleotide
cuuggcacgcuucaggagg

SEQ ID NO: 2091759 - RNA, 19 nt, Artificial Sequence
  Description of Artificial Sequence: Synthetic oligonucleotide
uuagaaaucugagaacaga

SEQ ID NO: 2091760 - RNA, 19 nt, Artificial Sequence
  Description of Artificial Sequence: Synthetic oligonucleotide
ucgugggugacuacgcugg

SEQ ID NO: 2091761 - RNA, 19 nt, Artificial Sequence
  Description of Artificial Sequence: Synthetic oligonucleotide
acucugcacggauaguugc

SEQ ID NO: 2091762 - RNA, 19 nt, Artificial Sequence
  Description of Artificial Sequence: Synthetic oligonucleotide
aacuccaugcccucuauau

SEQ ID NO: 2091763 - RNA, 19 nt, Artificial Sequence
  Description of Artificial Sequence: Synthetic oligonucleotide
agaccuguuguucggggcc

SEQ ID NO: 2091764 - RNA, 19 nt, Artificial Sequence
  Description of Artificial Sequence: Synthetic oligonucleotide
uacgcugggcuccagaugu

SEQ ID NO: 2091765 - RNA, 19 nt, Artificial Sequence
  Description of Artificial Sequence: Synthetic oligonucleotide
guuaagggaggacuggaag

SEQ ID NO: 2091766 - RNA, 19 nt, Artificial Sequence
  Description of Artificial Sequence: Synthetic oligonucleotide
uugugugaagaccuguugu

SEQ ID NO: 2091767 - RNA, 19 nt, Artificial Sequence
  Description of Artificial Sequence: Synthetic oligonucleotide
gagacgcuuggcuagguag

SEQ ID NO: 2091768 - RNA, 19 nt, Artificial Sequence
  Description of Artificial Sequence: Synthetic oligonucleotide
aguaggcucaugacgaggc

SEQ ID NO: 2091769 - RNA, 19 nt, Artificial Sequence
  Description of Artificial Sequence: Synthetic oligonucleotide
ucggcugccuccaacagca

SEQ ID NO: 2091770 - RNA, 19 nt, Artificial Sequence
  Description of Artificial Sequence: Synthetic oligonucleotide
uucuaguucauugugugaa

SEQ ID NO: 2091771 - RNA, 19 nt, Artificial Sequence
  Description of Artificial Sequence: Synthetic oligonucleotide
ucuaguucauugugugaag

SEQ ID NO: 2091772 - RNA, 19 nt, Artificial Sequence
  Description of Artificial Sequence: Synthetic oligonucleotide
guagcuucgagaauggcac

SEQ ID NO: 2091773 - RNA, 19 nt, Artificial Sequence
  Description of Artificial Sequence: Synthetic oligonucleotide
gaagaccuguuguucgggg

SEQ ID NO: 2091774 - RNA, 19 nt, Artificial Sequence
  Description of Artificial Sequence: Synthetic oligonucleotide
uguuguucggggccuugcg

SEQ ID NO: 2091775 - RNA, 19 nt, Artificial Sequence
  Description of Artificial Sequence: Synthetic oligonucleotide
uucuuccuagcgaagucgc

SEQ ID NO: 2091776 - RNA, 19 nt, Artificial Sequence
  Description of Artificial Sequence: Synthetic oligonucleotide
caagggugcccauagcugc

SEQ ID NO: 2091777 - RNA, 19 nt, Artificial Sequence
  Description of Artificial Sequence: Synthetic oligonucleotide
uaauacuucuggaaugauu

SEQ ID NO: 2091778 - RNA, 19 nt, Artificial Sequence
  Description of Artificial Sequence: Synthetic oligonucleotide
gaauucagcuccauccugc

SEQ ID NO: 2091779 - RNA, 19 nt, Artificial Sequence
  Description of Artificial Sequence: Synthetic oligonucleotide
cuccuugaugcucagugcc

SEQ ID NO: 2091780 - RNA, 19 nt, Artificial Sequence
  Description of Artificial Sequence: Synthetic oligonucleotide
aaaucugagaacagaucgu

SEQ ID NO: 2091781 - RNA, 19 nt, Artificial Sequence
  Description of Artificial Sequence: Synthetic oligonucleotide
cuacgcuccagguacucgg

SEQ ID NO: 2091782 - RNA, 19 nt, Artificial Sequence
  Description of Artificial Sequence: Synthetic oligonucleotide
cuacacucugcacggauag

SEQ ID NO: 2091783 - RNA, 19 nt, Artificial Sequence
  Description of Artificial Sequence: Synthetic oligonucleotide
cagcaguaggcucaugacg

SEQ ID NO: 2091784 - RNA, 19 nt, Artificial Sequence
  Description of Artificial Sequence: Synthetic oligonucleotide
uuucuaguucauuguguga

SEQ ID NO: 2091785 - RNA, 19 nt, Artificial Sequence
  Description of Artificial Sequence: Synthetic oligonucleotide
uaguucauugugugaagac

SEQ ID NO: 2091786 - RNA, 19 nt, Artificial Sequence
  Description of Artificial Sequence: Synthetic oligonucleotide
gaguuuagcucgucugugc

SEQ ID NO: 2091787 - RNA, 19 nt, Artificial Sequence
  Description of Artificial Sequence: Synthetic oligonucleotide
uucauugugugaagaccug

SEQ ID NO: 2091788 - RNA, 19 nt, Artificial Sequence
  Description of Artificial Sequence: Synthetic oligonucleotide
cuuccuagcgaagucgccg

SEQ ID NO: 2091789 - RNA, 19 nt, Artificial Sequence
  Description of Artificial Sequence: Synthetic oligonucleotide
cuugaugugcaucuuggca

SEQ ID NO: 2091790 - RNA, 19 nt, Artificial Sequence
  Description of Artificial Sequence: Synthetic oligonucleotide
aguuuagcucgucugugcu

SEQ ID NO: 2091791 - RNA, 19 nt, Artificial Sequence
  Description of Artificial Sequence: Synthetic oligonucleotide
ugcccugcgguccugcucc

SEQ ID NO: 2091792 - RNA, 19 nt, Artificial Sequence
  Description of Artificial Sequence: Synthetic oligonucleotide
uggcuagguaggcaggcag

SEQ ID NO: 2091793 - RNA, 19 nt, Artificial Sequence
  Description of Artificial Sequence: Synthetic oligonucleotide
uacuucuggaaugauuaga

SEQ ID NO: 2091794 - RNA, 19 nt, Artificial Sequence
  Description of Artificial Sequence: Synthetic oligonucleotide
ugggaucuugcccugcaga

SEQ ID NO: 2091795 - RNA, 19 nt, Artificial Sequence
  Description of Artificial Sequence: Synthetic oligonucleotide
augacauuuaauacuucug

SEQ ID NO: 2091796 - RNA, 19 nt, Artificial Sequence
  Description of Artificial Sequence: Synthetic oligonucleotide
gugaagaccuguuguucgg

SEQ ID NO: 2091797 - RNA, 19 nt, Artificial Sequence
  Description of Artificial Sequence: Synthetic oligonucleotide
uuguucggggccuugcgca

SEQ ID NO: 2091798 - RNA, 19 nt, Artificial Sequence
  Description of Artificial Sequence: Synthetic oligonucleotide
cucgucugugcuuuucuag

SEQ ID NO: 2091799 - RNA, 19 nt, Artificial Sequence
  Description of Artificial Sequence: Synthetic oligonucleotide
ugugugaagaccuguuguu

SEQ ID NO: 2091800 - RNA, 19 nt, Artificial Sequence
  Description of Artificial Sequence: Synthetic oligonucleotide
gaggaagcgaugcucccgc

SEQ ID NO: 2091801 - RNA, 19 nt, Artificial Sequence
  Description of Artificial Sequence: Synthetic oligonucleotide
ugaggaagcgaugcucccg

SEQ ID NO: 2091802 - RNA, 19 nt, Artificial Sequence
  Description of Artificial Sequence: Synthetic oligonucleotide
agcaguaggcucaugacga

SEQ ID NO: 2091803 - RNA, 19 nt, Artificial Sequence
  Description of Artificial Sequence: Synthetic oligonucleotide
ucggcaucacugcugcugc

SEQ ID NO: 2091804 - RNA, 19 nt, Artificial Sequence
  Description of Artificial Sequence: Synthetic oligonucleotide
ucgucugugcuuuucuagu

SEQ ID NO: 2091805 - RNA, 19 nt, Artificial Sequence
  Description of Artificial Sequence: Synthetic oligonucleotide
aaaggacauagcgccuacg

SEQ ID NO: 2091806 - RNA, 19 nt, Artificial Sequence
  Description of Artificial Sequence: Synthetic oligonucleotide
gucccuacgcuccagguac

SEQ ID NO: 2091807 - RNA, 19 nt, Artificial Sequence
  Description of Artificial Sequence: Synthetic oligonucleotide
gagagccugacccugcuuc

SEQ ID NO: 2091808 - RNA, 19 nt, Artificial Sequence
  Description of Artificial Sequence: Synthetic oligonucleotide
ugaagaccuguuguucggg

SEQ ID NO: 2091809 - RNA, 19 nt, Artificial Sequence
  Description of Artificial Sequence: Synthetic oligonucleotide
uggucaucggcaucacugc

SEQ ID NO: 2091810 - RNA, 19 nt, Artificial Sequence
  Description of Artificial Sequence: Synthetic oligonucleotide
uagagccugaguuuagcuc

SEQ ID NO: 2091811 - RNA, 19 nt, Artificial Sequence
  Description of Artificial Sequence: Synthetic oligonucleotide
gaggcucagagugguaugg

SEQ ID NO: 2091812 - RNA, 19 nt, Artificial Sequence
  Description of Artificial Sequence: Synthetic oligonucleotide
ucuaggcgucgcuugagga

SEQ ID NO: 2091813 - RNA, 19 nt, Artificial Sequence
  Description of Artificial Sequence: Synthetic oligonucleotide
aucuuggcacgcuucagga

SEQ ID NO: 2091814 - RNA, 19 nt, Artificial Sequence
  Description of Artificial Sequence: Synthetic oligonucleotide
gcaacuguagcuucgagaa

SEQ ID NO: 2091815 - RNA, 19 nt, Artificial Sequence
  Description of Artificial Sequence: Synthetic oligonucleotide
caugcccucuauauccacc

SEQ ID NO: 2091816 - RNA, 19 nt, Artificial Sequence
  Description of Artificial Sequence: Synthetic oligonucleotide
ggcaguuugaguccugacc

SEQ ID NO: 2091817 - RNA, 19 nt, Artificial Sequence
  Description of Artificial Sequence: Synthetic oligonucleotide
uaggcgucgcuugaggaag

SEQ ID NO: 2091818 - RNA, 19 nt, Artificial Sequence
  Description of Artificial Sequence: Synthetic oligonucleotide
cucagagugguauggcgug

SEQ ID NO: 2091819 - RNA, 19 nt, Artificial Sequence
  Description of Artificial Sequence: Synthetic oligonucleotide
agaucgugggugacuacgc

SEQ ID NO: 2091820 - RNA, 19 nt, Artificial Sequence
  Description of Artificial Sequence: Synthetic oligonucleotide
cuacggaaggccagggcag

SEQ ID NO: 2091821 - RNA, 19 nt, Artificial Sequence
  Description of Artificial Sequence: Synthetic oligonucleotide
uugcgcaccaggccagccg

SEQ ID NO: 2091822 - RNA, 19 nt, Artificial Sequence
  Description of Artificial Sequence: Synthetic oligonucleotide
gaugcucagugcccugcgg

SEQ ID NO: 2091823 - RNA, 19 nt, Artificial Sequence
  Description of Artificial Sequence: Synthetic oligonucleotide
ucuuggcacgcuucaggag

SEQ ID NO: 2091824 - RNA, 19 nt, Artificial Sequence
  Description of Artificial Sequence: Synthetic oligonucleotide
auggcgugugcugucaggg

SEQ ID NO: 2091825 - RNA, 19 nt, Artificial Sequence
  Description of Artificial Sequence: Synthetic oligonucleotide
uuuagcucgucugugcuuu

SEQ ID NO: 2091826 - RNA, 19 nt, Artificial Sequence
  Description of Artificial Sequence: Synthetic oligonucleotide
ucuacacucugcacggaua

SEQ ID NO: 2091827 - RNA, 19 nt, Artificial Sequence
  Description of Artificial Sequence: Synthetic oligonucleotide
uacucggcugccuccaaca

SEQ ID NO: 2091828 - RNA, 19 nt, Artificial Sequence
  Description of Artificial Sequence: Synthetic oligonucleotide
aucgugggugacuacgcug

SEQ ID NO: 2091829 - RNA, 19 nt, Artificial Sequence
  Description of Artificial Sequence: Synthetic oligonucleotide
cacagcagaaccagugcug

SEQ ID NO: 2091830 - RNA, 19 nt, Artificial Sequence
  Description of Artificial Sequence: Synthetic oligonucleotide
ucgcuugaggaagcgaugc

SEQ ID NO: 2091831 - RNA, 19 nt, Artificial Sequence
  Description of Artificial Sequence: Synthetic oligonucleotide
cauuuaauacuucuggaau

SEQ ID NO: 2091832 - RNA, 19 nt, Artificial Sequence
  Description of Artificial Sequence: Synthetic oligonucleotide
guuugaguccugaccaaag

SEQ ID NO: 2091833 - RNA, 19 nt, Artificial Sequence
  Description of Artificial Sequence: Synthetic oligonucleotide
ucuuccuagcgaagucgcc

SEQ ID NO: 2091834 - RNA, 19 nt, Artificial Sequence
  Description of Artificial Sequence: Synthetic oligonucleotide
gauaguugcucuaggcguc

SEQ ID NO: 2091835 - RNA, 19 nt, Artificial Sequence
  Description of Artificial Sequence: Synthetic oligonucleotide
aacagaucgugggugacua

SEQ ID NO: 2091836 - RNA, 19 nt, Artificial Sequence
  Description of Artificial Sequence: Synthetic oligonucleotide
uggaaggcugagacgcuug

SEQ ID NO: 2091837 - RNA, 19 nt, Artificial Sequence
  Description of Artificial Sequence: Synthetic oligonucleotide
gaugcucccgcuguagcug

SEQ ID NO: 2091838 - RNA, 19 nt, Artificial Sequence
  Description of Artificial Sequence: Synthetic oligonucleotide
ucauugugugaagaccugu

SEQ ID NO: 2091839 - RNA, 19 nt, Artificial Sequence
  Description of Artificial Sequence: Synthetic oligonucleotide
agaacagaucgugggugac

SEQ ID NO: 2091840 - RNA, 19 nt, Artificial Sequence
  Description of Artificial Sequence: Synthetic oligonucleotide
uugaggaagcgaugcuccc

SEQ ID NO: 2091841 - RNA, 19 nt, Artificial Sequence
  Description of Artificial Sequence: Synthetic oligonucleotide
guaguggucaucggcauca

SEQ ID NO: 2091842 - RNA, 19 nt, Artificial Sequence
  Description of Artificial Sequence: Synthetic oligonucleotide
aucugagaacagaucgugg

SEQ ID NO: 2091843 - RNA, 19 nt, Artificial Sequence
  Description of Artificial Sequence: Synthetic oligonucleotide
aucggcaucacugcugcug

SEQ ID NO: 2091844 - RNA, 19 nt, Artificial Sequence
  Description of Artificial Sequence: Synthetic oligonucleotide
aggacauagcgccuacgga

SEQ ID NO: 2091845 - RNA, 19 nt, Artificial Sequence
  Description of Artificial Sequence: Synthetic oligonucleotide
auaguugcucuaggcgucg

SEQ ID NO: 2091846 - RNA, 19 nt, Artificial Sequence
  Description of Artificial Sequence: Synthetic oligonucleotide
uguaguggucaucggcauc

SEQ ID NO: 2091847 - RNA, 19 nt, Artificial Sequence
  Description of Artificial Sequence: Synthetic oligonucleotide
guuguucggggccuugcgc

SEQ ID NO: 2091848 - RNA, 19 nt, Artificial Sequence
  Description of Artificial Sequence: Synthetic oligonucleotide
cuugcccugcagagaaggg

SEQ ID NO: 2091849 - RNA, 19 nt, Artificial Sequence
  Description of Artificial Sequence: Synthetic oligonucleotide
uugcucuaggcgucgcuug

SEQ ID NO: 2091850 - RNA, 19 nt, Artificial Sequence
  Description of Artificial Sequence: Synthetic oligonucleotide
acuacgcugggcuccagau

SEQ ID NO: 2091851 - RNA, 19 nt, Artificial Sequence
  Description of Artificial Sequence: Synthetic oligonucleotide
ugcgcacacgcucuacacu

SEQ ID NO: 2091852 - RNA, 19 nt, Artificial Sequence
  Description of Artificial Sequence: Synthetic oligonucleotide
aggcaguuugaguccugac

SEQ ID NO: 2091853 - RNA, 19 nt, Artificial Sequence
  Description of Artificial Sequence: Synthetic oligonucleotide
gguaccagcugcuugagcu

SEQ ID NO: 2091854 - RNA, 19 nt, Artificial Sequence
  Description of Artificial Sequence: Synthetic oligonucleotide
agacgcuuggcuagguagg

SEQ ID NO: 2091855 - RNA, 19 nt, Artificial Sequence
  Description of Artificial Sequence: Synthetic oligonucleotide
uuccuagcgaagucgccgu

SEQ ID NO: 2091856 - RNA, 19 nt, Artificial Sequence
  Description of Artificial Sequence: Synthetic oligonucleotide
caaggguaccagcugcuug

SEQ ID NO: 2091857 - RNA, 19 nt, Artificial Sequence
  Description of Artificial Sequence: Synthetic oligonucleotide
gugcccauagcugcugucg

SEQ ID NO: 2091858 - RNA, 19 nt, Artificial Sequence
  Description of Artificial Sequence: Synthetic oligonucleotide
gacccugcuucccugcgug

SEQ ID NO: 2091859 - RNA, 19 nt, Artificial Sequence
  Description of Artificial Sequence: Synthetic oligonucleotide
ggaggcguagccgugcucg

SEQ ID NO: 2091860 - RNA, 19 nt, Artificial Sequence
  Description of Artificial Sequence: Synthetic oligonucleotide
ucggucccuacgcuccagg

SEQ ID NO: 2091861 - RNA, 19 nt, Artificial Sequence
  Description of Artificial Sequence: Synthetic oligonucleotide
cuuggcuagguaggcaggc

SEQ ID NO: 2091862 - RNA, 19 nt, Artificial Sequence
  Description of Artificial Sequence: Synthetic oligonucleotide
gcugucagugcgcacacgc

SEQ ID NO: 2091863 - RNA, 19 nt, Artificial Sequence
  Description of Artificial Sequence: Synthetic oligonucleotide
ggacauagcgccuacggaa

SEQ ID NO: 2091864 - RNA, 19 nt, Artificial Sequence
  Description of Artificial Sequence: Synthetic oligonucleotide
ggcucagagugguauggcg

SEQ ID NO: 2091865 - RNA, 19 nt, Artificial Sequence
  Description of Artificial Sequence: Synthetic oligonucleotide
guucauugugugaagaccu

SEQ ID NO: 2091866 - RNA, 19 nt, Artificial Sequence
  Description of Artificial Sequence: Synthetic oligonucleotide
ugcucuaggcgucgcuuga

SEQ ID NO: 2091867 - RNA, 19 nt, Artificial Sequence
  Description of Artificial Sequence: Synthetic oligonucleotide
ucuguaggcuguagugguc

SEQ ID NO: 2091868 - RNA, 19 nt, Artificial Sequence
  Description of Artificial Sequence: Synthetic oligonucleotide
uacgcuccagguacucggc

SEQ ID NO: 2091869 - RNA, 19 nt, Artificial Sequence
  Description of Artificial Sequence: Synthetic oligonucleotide
ugcgcaccaggccagccgu

SEQ ID NO: 2091870 - RNA, 19 nt, Artificial Sequence
  Description of Artificial Sequence: Synthetic oligonucleotide
acagaucgugggugacuac

SEQ ID NO: 2091871 - RNA, 19 nt, Artificial Sequence
  Description of Artificial Sequence: Synthetic oligonucleotide
accagugcugucagugcgc

SEQ ID NO: 2091872 - RNA, 19 nt, Artificial Sequence
  Description of Artificial Sequence: Synthetic oligonucleotide
ggcuccagaugugagagcc

SEQ ID NO: 2091873 - RNA, 19 nt, Artificial Sequence
  Description of Artificial Sequence: Synthetic oligonucleotide
gucgaagggcagcacggag

SEQ ID NO: 2091874 - RNA, 19 nt, Artificial Sequence
  Description of Artificial Sequence: Synthetic oligonucleotide
caggccgccugcaagggug

SEQ ID NO: 2091875 - RNA, 19 nt, Artificial Sequence
  Description of Artificial Sequence: Synthetic oligonucleotide
ggaauucagcuccauccug

SEQ ID NO: 2091876 - RNA, 19 nt, Artificial Sequence
  Description of Artificial Sequence: Synthetic oligonucleotide
uuaauacuucuggaaugau

SEQ ID NO: 2091877 - RNA, 19 nt, Artificial Sequence
  Description of Artificial Sequence: Synthetic oligonucleotide
ccugaguuuagcucgucug

SEQ ID NO: 2091878 - RNA, 19 nt, Artificial Sequence
  Description of Artificial Sequence: Synthetic oligonucleotide
gaagcgaugcucccgcugu

SEQ ID NO: 2091879 - RNA, 19 nt, Artificial Sequence
  Description of Artificial Sequence: Synthetic oligonucleotide
ggauaguugcucuaggcgu

SEQ ID NO: 2091880 - RNA, 19 nt, Artificial Sequence
  Description of Artificial Sequence: Synthetic oligonucleotide
cacaccagcccgacucgcg

SEQ ID NO: 2091881 - RNA, 19 nt, Artificial Sequence
  Description of Artificial Sequence: Synthetic oligonucleotide
cuaguucauugugugaaga

SEQ ID NO: 2091882 - RNA, 19 nt, Artificial Sequence
  Description of Artificial Sequence: Synthetic oligonucleotide
ugcagccacugcucuguag

SEQ ID NO: 2091883 - RNA, 19 nt, Artificial Sequence
  Description of Artificial Sequence: Synthetic oligonucleotide
agcucgucugugcuuuucu

SEQ ID NO: 2091884 - RNA, 19 nt, Artificial Sequence
  Description of Artificial Sequence: Synthetic oligonucleotide
cagaugugagagccugacc

SEQ ID NO: 2091885 - RNA, 19 nt, Artificial Sequence
  Description of Artificial Sequence: Synthetic oligonucleotide
ggcugagacgcuuggcuag

SEQ ID NO: 2091886 - RNA, 19 nt, Artificial Sequence
  Description of Artificial Sequence: Synthetic oligonucleotide
caguaggcucaugacgagg

SEQ ID NO: 2091887 - RNA, 19 nt, Artificial Sequence
  Description of Artificial Sequence: Synthetic oligonucleotide
ggaaggcugagacgcuugg

SEQ ID NO: 2091888 - RNA, 19 nt, Artificial Sequence
  Description of Artificial Sequence: Synthetic oligonucleotide
ucugcacggauaguugcuc

SEQ ID NO: 2091889 - RNA, 19 nt, Artificial Sequence
  Description of Artificial Sequence: Synthetic oligonucleotide
gcucuguaggcuguagugg

SEQ ID NO: 2091890 - RNA, 19 nt, Artificial Sequence
  Description of Artificial Sequence: Synthetic oligonucleotide
gacgcuuggcuagguaggc

SEQ ID NO: 2091891 - RNA, 19 nt, Artificial Sequence
  Description of Artificial Sequence: Synthetic oligonucleotide
gaugugagagccugacccu

SEQ ID NO: 2091892 - RNA, 19 nt, Artificial Sequence
  Description of Artificial Sequence: Synthetic oligonucleotide
acucggcugccuccaacag

SEQ ID NO: 2091893 - RNA, 19 nt, Artificial Sequence
  Description of Artificial Sequence: Synthetic oligonucleotide
cucggcugccuccaacagc

SEQ ID NO: 2091894 - RNA, 19 nt, Artificial Sequence
  Description of Artificial Sequence: Synthetic oligonucleotide
cggauaguugcucuaggcg

SEQ ID NO: 2091895 - RNA, 19 nt, Artificial Sequence
  Description of Artificial Sequence: Synthetic oligonucleotide
gucauccguggacacagca

SEQ ID NO: 2091896 - RNA, 19 nt, Artificial Sequence
  Description of Artificial Sequence: Synthetic oligonucleotide
ggcgugugcugucagggcc

SEQ ID NO: 2091897 - RNA, 19 nt, Artificial Sequence
  Description of Artificial Sequence: Synthetic oligonucleotide
cucugcucgccgcacgccc

SEQ ID NO: 2091898 - RNA, 19 nt, Artificial Sequence
  Description of Artificial Sequence: Synthetic oligonucleotide
cuucaguuaagggaggacu

SEQ ID NO: 2091899 - RNA, 19 nt, Artificial Sequence
  Description of Artificial Sequence: Synthetic oligonucleotide
cuugaugcucagugcccug

SEQ ID NO: 2091900 - RNA, 19 nt, Artificial Sequence
  Description of Artificial Sequence: Synthetic oligonucleotide
gaggcguagccgugcucgg

SEQ ID NO: 2091901 - RNA, 19 nt, Artificial Sequence
  Description of Artificial Sequence: Synthetic oligonucleotide
gaaggcugagacgcuuggc

SEQ ID NO: 2091902 - RNA, 19 nt, Artificial Sequence
  Description of Artificial Sequence: Synthetic oligonucleotide
aguuugaguccugaccaaa

SEQ ID NO: 2091903 - RNA, 19 nt, Artificial Sequence
  Description of Artificial Sequence: Synthetic oligonucleotide
ugagacgcuuggcuaggua

SEQ ID NO: 2091904 - RNA, 19 nt, Artificial Sequence
  Description of Artificial Sequence: Synthetic oligonucleotide
aguugcucuaggcgucgcu

SEQ ID NO: 2091905 - RNA, 19 nt, Artificial Sequence
  Description of Artificial Sequence: Synthetic oligonucleotide
ugcacggauaguugcucua

SEQ ID NO: 2091906 - RNA, 19 nt, Artificial Sequence
  Description of Artificial Sequence: Synthetic oligonucleotide
uguucggggccuugcgcac

SEQ ID NO: 2091907 - RNA, 19 nt, Artificial Sequence
  Description of Artificial Sequence: Synthetic oligonucleotide
ucaugacgaggcuggcuuc

SEQ ID NO: 2091908 - RNA, 19 nt, Artificial Sequence
  Description of Artificial Sequence: Synthetic oligonucleotide
uagcgccuacggaaggcca

SEQ ID NO: 2091909 - RNA, 19 nt, Artificial Sequence
  Description of Artificial Sequence: Synthetic oligonucleotide
gugugaagaccuguuguuc

SEQ ID NO: 2091910 - RNA, 19 nt, Artificial Sequence
  Description of Artificial Sequence: Synthetic oligonucleotide
uagcuucgagaauggcaca

SEQ ID NO: 2091911 - RNA, 19 nt, Artificial Sequence
  Description of Artificial Sequence: Synthetic oligonucleotide
aagucgccgucgaagggca

SEQ ID NO: 2091912 - RNA, 19 nt, Artificial Sequence
  Description of Artificial Sequence: Synthetic oligonucleotide
uccguggacacagcagaac

SEQ ID NO: 2091913 - RNA, 19 nt, Artificial Sequence
  Description of Artificial Sequence: Synthetic oligonucleotide
ggugacuacgcugggcucc

SEQ ID NO: 2091914 - RNA, 19 nt, Artificial Sequence
  Description of Artificial Sequence: Synthetic oligonucleotide
ugcgguccugcuccuccag

SEQ ID NO: 2091915 - RNA, 19 nt, Artificial Sequence
  Description of Artificial Sequence: Synthetic oligonucleotide
guuuucuuccuagcgaagu

SEQ ID NO: 2091916 - RNA, 19 nt, Artificial Sequence
  Description of Artificial Sequence: Synthetic oligonucleotide
cacgcucuacacucugcac

SEQ ID NO: 2091917 - RNA, 19 nt, Artificial Sequence
  Description of Artificial Sequence: Synthetic oligonucleotide
cagggaauucagcuccauc

SEQ ID NO: 2091918 - RNA, 19 nt, Artificial Sequence
  Description of Artificial Sequence: Synthetic oligonucleotide
acggaaggccagggcagcc

SEQ ID NO: 2091919 - RNA, 19 nt, Artificial Sequence
  Description of Artificial Sequence: Synthetic oligonucleotide
gccgucgaagggcagcacg

SEQ ID NO: 2091920 - RNA, 19 nt, Artificial Sequence
  Description of Artificial Sequence: Synthetic oligonucleotide
uggcgugugcugucagggc

SEQ ID NO: 2091921 - RNA, 19 nt, Artificial Sequence
  Description of Artificial Sequence: Synthetic oligonucleotide
gaugugcaucuuggcacgc

SEQ ID NO: 2091922 - RNA, 19 nt, Artificial Sequence
  Description of Artificial Sequence: Synthetic oligonucleotide
ugacgaggcuggcuucagu

SEQ ID NO: 2091923 - RNA, 19 nt, Artificial Sequence
  Description of Artificial Sequence: Synthetic oligonucleotide
cuaggcgucgcuugaggaa

SEQ ID NO: 2091924 - RNA, 19 nt, Artificial Sequence
  Description of Artificial Sequence: Synthetic oligonucleotide
ucacugcugcugccaacac

SEQ ID NO: 2091925 - RNA, 19 nt, Artificial Sequence
  Description of Artificial Sequence: Synthetic oligonucleotide
cacuguccagcuccccggg

SEQ ID NO: 2091926 - RNA, 19 nt, Artificial Sequence
  Description of Artificial Sequence: Synthetic oligonucleotide
gcuguaguggucaucggca

SEQ ID NO: 2091927 - RNA, 19 nt, Artificial Sequence
  Description of Artificial Sequence: Synthetic oligonucleotide
ggccaagaagcaaaggaca

SEQ ID NO: 2091928 - RNA, 19 nt, Artificial Sequence
  Description of Artificial Sequence: Synthetic oligonucleotide
cuacgcugggcuccagaug

SEQ ID NO: 2091929 - RNA, 19 nt, Artificial Sequence
  Description of Artificial Sequence: Synthetic oligonucleotide
aguuaagggaggacuggaa

SEQ ID NO: 2091930 - RNA, 19 nt, Artificial Sequence
  Description of Artificial Sequence: Synthetic oligonucleotide
uguaggcuguaguggucau

SEQ ID NO: 2091931 - RNA, 19 nt, Artificial Sequence
  Description of Artificial Sequence: Synthetic oligonucleotide
guagagccugaguuuagcu

SEQ ID NO: 2091932 - RNA, 19 nt, Artificial Sequence
  Description of Artificial Sequence: Synthetic oligonucleotide
gguagagccugaguuuagc

SEQ ID NO: 2091933 - RNA, 19 nt, Artificial Sequence
  Description of Artificial Sequence: Synthetic oligonucleotide
ccugcgugggaucuugccc

SEQ ID NO: 2091934 - RNA, 19 nt, Artificial Sequence
  Description of Artificial Sequence: Synthetic oligonucleotide
gugcgcacacgcucuacac

SEQ ID NO: 2091935 - RNA, 19 nt, Artificial Sequence
  Description of Artificial Sequence: Synthetic oligonucleotide
agaccaggcagcaacugua

SEQ ID NO: 2091936 - RNA, 19 nt, Artificial Sequence
  Description of Artificial Sequence: Synthetic oligonucleotide
cuguaggcuguagugguca

SEQ ID NO: 2091937 - RNA, 19 nt, Artificial Sequence
  Description of Artificial Sequence: Synthetic oligonucleotide
ccaaagggugggcaggcag

SEQ ID NO: 2091938 - RNA, 19 nt, Artificial Sequence
  Description of Artificial Sequence: Synthetic oligonucleotide
gugcucggccucucggucc

SEQ ID NO: 2091939 - RNA, 19 nt, Artificial Sequence
  Description of Artificial Sequence: Synthetic oligonucleotide
ugcgugggaucuugcccug

SEQ ID NO: 2091940 - RNA, 19 nt, Artificial Sequence
  Description of Artificial Sequence: Synthetic oligonucleotide
ggaagcgaugcucccgcug

SEQ ID NO: 2091941 - RNA, 19 nt, Artificial Sequence
  Description of Artificial Sequence: Synthetic oligonucleotide
gacgaggcuggcuucaguu

SEQ ID NO: 2091942 - RNA, 19 nt, Artificial Sequence
  Description of Artificial Sequence: Synthetic oligonucleotide
gacuacgcugggcuccaga

SEQ ID NO: 2091943 - RNA, 19 nt, Artificial Sequence
  Description of Artificial Sequence: Synthetic oligonucleotide
cuagcgaagucgccgucga

SEQ ID NO: 2091944 - RNA, 19 nt, Artificial Sequence
  Description of Artificial Sequence: Synthetic oligonucleotide
ccgucgaagggcagcacgg

SEQ ID NO: 2091945 - RNA, 19 nt, Artificial Sequence
  Description of Artificial Sequence: Synthetic oligonucleotide
cuguuguucggggccuugc

SEQ ID NO: 2091946 - RNA, 19 nt, Artificial Sequence
  Description of Artificial Sequence: Synthetic oligonucleotide
aggugggccaagaagcaaa

SEQ ID NO: 2091947 - RNA, 19 nt, Artificial Sequence
  Description of Artificial Sequence: Synthetic oligonucleotide
aggcguagccgugcucggc

SEQ ID NO: 2091948 - RNA, 19 nt, Artificial Sequence
  Description of Artificial Sequence: Synthetic oligonucleotide
gugggccaagaagcaaagg

SEQ ID NO: 2091949 - RNA, 19 nt, Artificial Sequence
  Description of Artificial Sequence: Synthetic oligonucleotide
ggcguagccgugcucggcc

SEQ ID NO: 2091950 - RNA, 19 nt, Artificial Sequence
  Description of Artificial Sequence: Synthetic oligonucleotide
cugggcuccagaugugaga

SEQ ID NO: 2091951 - RNA, 19 nt, Artificial Sequence
  Description of Artificial Sequence: Synthetic oligonucleotide
ggcacaccagcccgacucg

SEQ ID NO: 2091952 - RNA, 19 nt, Artificial Sequence
  Description of Artificial Sequence: Synthetic oligonucleotide
gcgcacacgcucuacacuc

SEQ ID NO: 2091953 - RNA, 19 nt, Artificial Sequence
  Description of Artificial Sequence: Synthetic oligonucleotide
agccugacccugcuucccu

SEQ ID NO: 2091954 - RNA, 19 nt, Artificial Sequence
  Description of Artificial Sequence: Synthetic oligonucleotide
gcccaaggguaccagcugc

SEQ ID NO: 2091955 - RNA, 19 nt, Artificial Sequence
  Description of Artificial Sequence: Synthetic oligonucleotide
gcaagggugcccauagcug

SEQ ID NO: 2091956 - RNA, 19 nt, Artificial Sequence
  Description of Artificial Sequence: Synthetic oligonucleotide
guacucggcugccuccaac

SEQ ID NO: 2091957 - RNA, 19 nt, Artificial Sequence
  Description of Artificial Sequence: Synthetic oligonucleotide
acgaggcuggcuucaguua

SEQ ID NO: 2091958 - RNA, 19 nt, Artificial Sequence
  Description of Artificial Sequence: Synthetic oligonucleotide
agagaaggggcaggcaguu

SEQ ID NO: 2091959 - RNA, 19 nt, Artificial Sequence
  Description of Artificial Sequence: Synthetic oligonucleotide
agcaaaggacauagcgccu

SEQ ID NO: 2091960 - RNA, 19 nt, Artificial Sequence
  Description of Artificial Sequence: Synthetic oligonucleotide
ugcugucagugcgcacacg

SEQ ID NO: 2091961 - RNA, 19 nt, Artificial Sequence
  Description of Artificial Sequence: Synthetic oligonucleotide
cagcacggaggcguagccg

SEQ ID NO: 2091962 - RNA, 19 nt, Artificial Sequence
  Description of Artificial Sequence: Synthetic oligonucleotide
caguuaagggaggacugga

SEQ ID NO: 2091963 - RNA, 19 nt, Artificial Sequence
  Description of Artificial Sequence: Synthetic oligonucleotide
cucaugacgaggcuggcuu

SEQ ID NO: 2091964 - RNA, 19 nt, Artificial Sequence
  Description of Artificial Sequence: Synthetic oligonucleotide
ugcccucuauauccaccuc

SEQ ID NO: 2091965 - RNA, 19 nt, Artificial Sequence
  Description of Artificial Sequence: Synthetic oligonucleotide
gaucgugggugacuacgcu

SEQ ID NO: 2091966 - RNA, 19 nt, Artificial Sequence
  Description of Artificial Sequence: Synthetic oligonucleotide
ugcugccaacacuguccag

SEQ ID NO: 2091967 - RNA, 19 nt, Artificial Sequence
  Description of Artificial Sequence: Synthetic oligonucleotide
gcaguaggcucaugacgag

SEQ ID NO: 2091968 - RNA, 19 nt, Artificial Sequence
  Description of Artificial Sequence: Synthetic oligonucleotide
ucgccgucgaagggcagca

SEQ ID NO: 2091969 - RNA, 19 nt, Artificial Sequence
  Description of Artificial Sequence: Synthetic oligonucleotide
gagccugacccugcuuccc

SEQ ID NO: 2091970 - RNA, 19 nt, Artificial Sequence
  Description of Artificial Sequence: Synthetic oligonucleotide
cacgccccgcgccuggcgg

SEQ ID NO: 2091971 - RNA, 19 nt, Artificial Sequence
  Description of Artificial Sequence: Synthetic oligonucleotide
cugcgugggaucuugcccu

SEQ ID NO: 2091972 - RNA, 19 nt, Artificial Sequence
  Description of Artificial Sequence: Synthetic oligonucleotide
uccuagcgaagucgccguc

SEQ ID NO: 2091973 - RNA, 19 nt, Artificial Sequence
  Description of Artificial Sequence: Synthetic oligonucleotide
gggcaggcaguuugagucc

SEQ ID NO: 2091974 - RNA, 19 nt, Artificial Sequence
  Description of Artificial Sequence: Synthetic oligonucleotide
aagcgaugcucccgcugua

SEQ ID NO: 2091975 - RNA, 19 nt, Artificial Sequence
  Description of Artificial Sequence: Synthetic oligonucleotide
aggcgucgcuugaggaagc

SEQ ID NO: 2091976 - RNA, 19 nt, Artificial Sequence
  Description of Artificial Sequence: Synthetic oligonucleotide
cugcaagggugcccauagc

SEQ ID NO: 2091977 - RNA, 19 nt, Artificial Sequence
  Description of Artificial Sequence: Synthetic oligonucleotide
agguagagccugaguuuag

SEQ ID NO: 2091978 - RNA, 19 nt, Artificial Sequence
  Description of Artificial Sequence: Synthetic oligonucleotide
ucccuacgcuccagguacu

SEQ ID NO: 2091979 - RNA, 19 nt, Artificial Sequence
  Description of Artificial Sequence: Synthetic oligonucleotide
ccuagcgaagucgccgucg

SEQ ID NO: 2091980 - RNA, 19 nt, Artificial Sequence
  Description of Artificial Sequence: Synthetic oligonucleotide
gucgccgucgaagggcagc

SEQ ID NO: 2091981 - RNA, 19 nt, Artificial Sequence
  Description of Artificial Sequence: Synthetic oligonucleotide
cgcuuggcuagguaggcag

SEQ ID NO: 2091982 - RNA, 19 nt, Artificial Sequence
  Description of Artificial Sequence: Synthetic oligonucleotide
gucgcugcagccacugcuc

SEQ ID NO: 2091983 - RNA, 19 nt, Artificial Sequence
  Description of Artificial Sequence: Synthetic oligonucleotide
ggccuugcgcaccaggcca

SEQ ID NO: 2091984 - RNA, 19 nt, Artificial Sequence
  Description of Artificial Sequence: Synthetic oligonucleotide
uccugaccaaagggugggc

SEQ ID NO: 2091985 - RNA, 19 nt, Artificial Sequence
  Description of Artificial Sequence: Synthetic oligonucleotide
uccugccgcccgcgcacgg

SEQ ID NO: 2091986 - RNA, 19 nt, Artificial Sequence
  Description of Artificial Sequence: Synthetic oligonucleotide
cuugcgcaccaggccagcc

SEQ ID NO: 2091987 - RNA, 19 nt, Artificial Sequence
  Description of Artificial Sequence: Synthetic oligonucleotide
ucccugcgugggaucuugc

SEQ ID NO: 2091988 - RNA, 19 nt, Artificial Sequence
  Description of Artificial Sequence: Synthetic oligonucleotide
caugacgaggcuggcuuca

SEQ ID NO: 2091989 - RNA, 19 nt, Artificial Sequence
  Description of Artificial Sequence: Synthetic oligonucleotide
ccagaugugagagccugac

SEQ ID NO: 2091990 - RNA, 19 nt, Artificial Sequence
  Description of Artificial Sequence: Synthetic oligonucleotide
cacggaggcguagccgugc

SEQ ID NO: 2091991 - RNA, 19 nt, Artificial Sequence
  Description of Artificial Sequence: Synthetic oligonucleotide
uaguugcucuaggcgucgc

SEQ ID NO: 2091992 - RNA, 19 nt, Artificial Sequence
  Description of Artificial Sequence: Synthetic oligonucleotide
gaacagaucgugggugacu

SEQ ID NO: 2091993 - RNA, 19 nt, Artificial Sequence
  Description of Artificial Sequence: Synthetic oligonucleotide
gcugagacgcuuggcuagg

SEQ ID NO: 2091994 - RNA, 19 nt, Artificial Sequence
  Description of Artificial Sequence: Synthetic oligonucleotide
augugcaucuuggcacgcu

SEQ ID NO: 2091995 - RNA, 19 nt, Artificial Sequence
  Description of Artificial Sequence: Synthetic oligonucleotide
cugcccggcgcgcuccugc

SEQ ID NO: 2091996 - RNA, 19 nt, Artificial Sequence
  Description of Artificial Sequence: Synthetic oligonucleotide
ccggggccaaacuccaugc

SEQ ID NO: 2091997 - RNA, 19 nt, Artificial Sequence
  Description of Artificial Sequence: Synthetic oligonucleotide
cugccggcucugcucgccg

SEQ ID NO: 2091998 - RNA, 19 nt, Artificial Sequence
  Description of Artificial Sequence: Synthetic oligonucleotide
aggaagcgaugcucccgcu

SEQ ID NO: 2091999 - RNA, 19 nt, Artificial Sequence
  Description of Artificial Sequence: Synthetic oligonucleotide
agugcccugcgguccugcu

SEQ ID NO: 2092000 - RNA, 19 nt, Artificial Sequence
  Description of Artificial Sequence: Synthetic oligonucleotide
ccugcgguccugcuccucc

SEQ ID NO: 2092001 - RNA, 19 nt, Artificial Sequence
  Description of Artificial Sequence: Synthetic oligonucleotide
cacgggacggcggcggcag

SEQ ID NO: 2092002 - RNA, 19 nt, Artificial Sequence
  Description of Artificial Sequence: Synthetic oligonucleotide
caguuugaguccugaccaa

SEQ ID NO: 2092003 - RNA, 19 nt, Artificial Sequence
  Description of Artificial Sequence: Synthetic oligonucleotide
agcuccccggggccaaacu

SEQ ID NO: 2092004 - RNA, 19 nt, Artificial Sequence
  Description of Artificial Sequence: Synthetic oligonucleotide
ugcuucccugcgugggauc

SEQ ID NO: 2092005 - RNA, 19 nt, Artificial Sequence
  Description of Artificial Sequence: Synthetic oligonucleotide
ggcccaaggguaccagcug

SEQ ID NO: 2092006 - RNA, 19 nt, Artificial Sequence
  Description of Artificial Sequence: Synthetic oligonucleotide
ccuggcggcacaccagccc

SEQ ID NO: 2092007 - RNA, 19 nt, Artificial Sequence
  Description of Artificial Sequence: Synthetic oligonucleotide
gcacacgcucuacacucug

SEQ ID NO: 2092008 - RNA, 19 nt, Artificial Sequence
  Description of Artificial Sequence: Synthetic oligonucleotide
ucggccucucggucccuac

SEQ ID NO: 2092009 - RNA, 19 nt, Artificial Sequence
  Description of Artificial Sequence: Synthetic oligonucleotide
uuagcucgucugugcuuuu

SEQ ID NO: 2092010 - RNA, 19 nt, Artificial Sequence
  Description of Artificial Sequence: Synthetic oligonucleotide
cucugcacggauaguugcu

SEQ ID NO: 2092011 - RNA, 19 nt, Artificial Sequence
  Description of Artificial Sequence: Synthetic oligonucleotide
gcggcagcugcccggcgcg

SEQ ID NO: 2092012 - RNA, 19 nt, Artificial Sequence
  Description of Artificial Sequence: Synthetic oligonucleotide
acgggacggcggcggcagc

SEQ ID NO: 2092013 - RNA, 19 nt, Artificial Sequence
  Description of Artificial Sequence: Synthetic oligonucleotide
ccuacgcuccagguacucg

SEQ ID NO: 2092014 - RNA, 19 nt, Artificial Sequence
  Description of Artificial Sequence: Synthetic oligonucleotide
guucggggccuugcgcacc

SEQ ID NO: 2092015 - RNA, 19 nt, Artificial Sequence
  Description of Artificial Sequence: Synthetic oligonucleotide
ccucuauauccaccucuug

SEQ ID NO: 2092016 - RNA, 19 nt, Artificial Sequence
  Description of Artificial Sequence: Synthetic oligonucleotide
guuuagcucgucugugcuu

SEQ ID NO: 2092017 - RNA, 19 nt, Artificial Sequence
  Description of Artificial Sequence: Synthetic oligonucleotide
aucuugcccugcagagaag

SEQ ID NO: 2092018 - RNA, 19 nt, Artificial Sequence
  Description of Artificial Sequence: Synthetic oligonucleotide
cccugcgugggaucuugcc

SEQ ID NO: 2092019 - RNA, 19 nt, Artificial Sequence
  Description of Artificial Sequence: Synthetic oligonucleotide
acgcuuggcuagguaggca

SEQ ID NO: 2092020 - RNA, 19 nt, Artificial Sequence
  Description of Artificial Sequence: Synthetic oligonucleotide
ggcgucgcuugaggaagcg

SEQ ID NO: 2092021 - RNA, 19 nt, Artificial Sequence
  Description of Artificial Sequence: Synthetic oligonucleotide
ggguaccagcugcuugagc

SEQ ID NO: 2092022 - RNA, 19 nt, Artificial Sequence
  Description of Artificial Sequence: Synthetic oligonucleotide
gcccucuauauccaccucu

SEQ ID NO: 2092023 - RNA, 19 nt, Artificial Sequence
  Description of Artificial Sequence: Synthetic oligonucleotide
gcaaaggacauagcgccua

SEQ ID NO: 2092024 - RNA, 19 nt, Artificial Sequence
  Description of Artificial Sequence: Synthetic oligonucleotide
auccguggacacagcagaa

SEQ ID NO: 2092025 - RNA, 19 nt, Artificial Sequence
  Description of Artificial Sequence: Synthetic oligonucleotide
cagugcugucagugcgcac

SEQ ID NO: 2092026 - RNA, 19 nt, Artificial Sequence
  Description of Artificial Sequence: Synthetic oligonucleotide
cugcacggauaguugcucu

SEQ ID NO: 2092027 - RNA, 19 nt, Artificial Sequence
  Description of Artificial Sequence: Synthetic oligonucleotide
cggcacaccagcccgacuc

SEQ ID NO: 2092028 - RNA, 19 nt, Artificial Sequence
  Description of Artificial Sequence: Synthetic oligonucleotide
auccugccgcccgcgcacg

SEQ ID NO: 2092029 - RNA, 19 nt, Artificial Sequence
  Description of Artificial Sequence: Synthetic oligonucleotide
gugcccugcgguccugcuc

SEQ ID NO: 2092030 - RNA, 19 nt, Artificial Sequence
  Description of Artificial Sequence: Synthetic oligonucleotide
ggucccuacgcuccaggua

SEQ ID NO: 2092031 - RNA, 19 nt, Artificial Sequence
  Description of Artificial Sequence: Synthetic oligonucleotide
uccugccggcucugcucgc

SEQ ID NO: 2092032 - RNA, 19 nt, Artificial Sequence
  Description of Artificial Sequence: Synthetic oligonucleotide
cugucagugcgcacacgcu

SEQ ID NO: 2092033 - RNA, 19 nt, Artificial Sequence
  Description of Artificial Sequence: Synthetic oligonucleotide
ugacuacgcugggcuccag

SEQ ID NO: 2092034 - RNA, 19 nt, Artificial Sequence
  Description of Artificial Sequence: Synthetic oligonucleotide
guugcucuaggcgucgcuu

SEQ ID NO: 2092035 - RNA, 19 nt, Artificial Sequence
  Description of Artificial Sequence: Synthetic oligonucleotide
ugccgcccgcgcacgggac

SEQ ID NO: 2092036 - RNA, 19 nt, Artificial Sequence
  Description of Artificial Sequence: Synthetic oligonucleotide
gaccuguuguucggggccu

SEQ ID NO: 2092037 - RNA, 19 nt, Artificial Sequence
  Description of Artificial Sequence: Synthetic oligonucleotide
gcucagagugguauggcgu

SEQ ID NO: 2092038 - RNA, 19 nt, Artificial Sequence
  Description of Artificial Sequence: Synthetic oligonucleotide
gcgccuacggaaggccagg

SEQ ID NO: 2092039 - RNA, 19 nt, Artificial Sequence
  Description of Artificial Sequence: Synthetic oligonucleotide
ggucaucggcaucacugcu

SEQ ID NO: 2092040 - RNA, 19 nt, Artificial Sequence
  Description of Artificial Sequence: Synthetic oligonucleotide
uggcacgcuucaggaggcu

SEQ ID NO: 2092041 - RNA, 19 nt, Artificial Sequence
  Description of Artificial Sequence: Synthetic oligonucleotide
ccugaccaaagggugggca

SEQ ID NO: 2092042 - RNA, 19 nt, Artificial Sequence
  Description of Artificial Sequence: Synthetic oligonucleotide
gccgcccgcgcacgggacg

SEQ ID NO: 2092043 - RNA, 19 nt, Artificial Sequence
  Description of Artificial Sequence: Synthetic oligonucleotide
caggugggccaagaagcaa

SEQ ID NO: 2092044 - RNA, 19 nt, Artificial Sequence
  Description of Artificial Sequence: Synthetic oligonucleotide
gcucgucugugcuuuucua

SEQ ID NO: 2092045 - RNA, 19 nt, Artificial Sequence
  Description of Artificial Sequence: Synthetic oligonucleotide
gccugaguuuagcucgucu

SEQ ID NO: 2092046 - RNA, 19 nt, Artificial Sequence
  Description of Artificial Sequence: Synthetic oligonucleotide
ggcacgcuucaggaggcuc

SEQ ID NO: 2092047 - RNA, 19 nt, Artificial Sequence
  Description of Artificial Sequence: Synthetic oligonucleotide
caacuguagcuucgagaau

SEQ ID NO: 2092048 - RNA, 19 nt, Artificial Sequence
  Description of Artificial Sequence: Synthetic oligonucleotide
agucgccgucgaagggcag

SEQ ID NO: 2092049 - RNA, 19 nt, Artificial Sequence
  Description of Artificial Sequence: Synthetic oligonucleotide
gcacaccagcccgacucgc

SEQ ID NO: 2092050 - RNA, 19 nt, Artificial Sequence
  Description of Artificial Sequence: Synthetic oligonucleotide
cugccgcccgcgcacggga

SEQ ID NO: 2092051 - RNA, 19 nt, Artificial Sequence
  Description of Artificial Sequence: Synthetic oligonucleotide
cgaggcuggcuucaguuaa

SEQ ID NO: 2092052 - RNA, 19 nt, Artificial Sequence
  Description of Artificial Sequence: Synthetic oligonucleotide
ggcucaugacgaggcuggc

SEQ ID NO: 2092053 - RNA, 19 nt, Artificial Sequence
  Description of Artificial Sequence: Synthetic oligonucleotide
gcgcacgggacggcggcgg

SEQ ID NO: 2092054 - RNA, 19 nt, Artificial Sequence
  Description of Artificial Sequence: Synthetic oligonucleotide
cgugggugacuacgcuggg

SEQ ID NO: 2092055 - RNA, 19 nt, Artificial Sequence
  Description of Artificial Sequence: Synthetic oligonucleotide
gcacgccccgcgccuggcg

SEQ ID NO: 2092056 - RNA, 19 nt, Artificial Sequence
  Description of Artificial Sequence: Synthetic oligonucleotide
acgcugggcuccagaugug

SEQ ID NO: 2092057 - RNA, 19 nt, Artificial Sequence
  Description of Artificial Sequence: Synthetic oligonucleotide
cagcuccauccugccgccc

SEQ ID NO: 2092058 - RNA, 19 nt, Artificial Sequence
  Description of Artificial Sequence: Synthetic oligonucleotide
cccgcgcacgggacggcgg

SEQ ID NO: 2092059 - RNA, 19 nt, Artificial Sequence
  Description of Artificial Sequence: Synthetic oligonucleotide
ccgcuguagcugcuccuug

SEQ ID NO: 2092060 - RNA, 19 nt, Artificial Sequence
  Description of Artificial Sequence: Synthetic oligonucleotide
cgugcucggccucucgguc

SEQ ID NO: 2092061 - RNA, 19 nt, Artificial Sequence
  Description of Artificial Sequence: Synthetic oligonucleotide
cagaaccagugcugucagu

SEQ ID NO: 2092062 - RNA, 19 nt, Artificial Sequence
  Description of Artificial Sequence: Synthetic oligonucleotide
acgcuucaggaggcucaga

SEQ ID NO: 2092063 - RNA, 19 nt, Artificial Sequence
  Description of Artificial Sequence: Synthetic oligonucleotide
caggccagccgucuuuguu

SEQ ID NO: 2092064 - RNA, 19 nt, Artificial Sequence
  Description of Artificial Sequence: Synthetic oligonucleotide
ccgcgcacgggacggcggc

SEQ ID NO: 2092065 - RNA, 19 nt, Artificial Sequence
  Description of Artificial Sequence: Synthetic oligonucleotide
cggccucucggucccuacg

SEQ ID NO: 2092066 - RNA, 19 nt, Artificial Sequence
  Description of Artificial Sequence: Synthetic oligonucleotide
ggcggcacaccagcccgac

SEQ ID NO: 2092067 - RNA, 19 nt, Artificial Sequence
  Description of Artificial Sequence: Synthetic oligonucleotide
cuggaaggcugagacgcuu

SEQ ID NO: 2092068 - RNA, 19 nt, Artificial Sequence
  Description of Artificial Sequence: Synthetic oligonucleotide
gcuucccugcgugggaucu

SEQ ID NO: 2092069 - RNA, 19 nt, Artificial Sequence
  Description of Artificial Sequence: Synthetic oligonucleotide
gcccauagcugcugucgcu

SEQ ID NO: 2092070 - RNA, 19 nt, Artificial Sequence
  Description of Artificial Sequence: Synthetic oligonucleotide
gguccugcuccuccaguuu

SEQ ID NO: 2092071 - RNA, 19 nt, Artificial Sequence
  Description of Artificial Sequence: Synthetic oligonucleotide
agggcagcacggaggcgua

SEQ ID NO: 2092072 - RNA, 19 nt, Artificial Sequence
  Description of Artificial Sequence: Synthetic oligonucleotide
ccuugaugcucagugcccu

SEQ ID NO: 2092073 - RNA, 19 nt, Artificial Sequence
  Description of Artificial Sequence: Synthetic oligonucleotide
ccagccgucuuuguuuucu

SEQ ID NO: 2092074 - RNA, 19 nt, Artificial Sequence
  Description of Artificial Sequence: Synthetic oligonucleotide
cggggccuugcgcaccagg

SEQ ID NO: 2092075 - RNA, 19 nt, Artificial Sequence
  Description of Artificial Sequence: Synthetic oligonucleotide
gcccgcgcacgggacggcg

SEQ ID NO: 2092076 - RNA, 19 nt, Artificial Sequence
  Description of Artificial Sequence: Synthetic oligonucleotide
ccugccgcccgcgcacggg

SEQ ID NO: 2092077 - RNA, 19 nt, Artificial Sequence
  Description of Artificial Sequence: Synthetic oligonucleotide
cgugggaucuugcccugca

SEQ ID NO: 2092078 - RNA, 19 nt, Artificial Sequence
  Description of Artificial Sequence: Synthetic oligonucleotide
cccucuauauccaccucuu

SEQ ID NO: 2092079 - RNA, 19 nt, Artificial Sequence
  Description of Artificial Sequence: Synthetic oligonucleotide
gcuguuccagguagagccu

SEQ ID NO: 2092080 - RNA, 19 nt, Artificial Sequence
  Description of Artificial Sequence: Synthetic oligonucleotide
gcucaugacgaggcuggcu

SEQ ID NO: 2092081 - RNA, 19 nt, Artificial Sequence
  Description of Artificial Sequence: Synthetic oligonucleotide
ggccagccgucuuuguuuu

SEQ ID NO: 2092082 - RNA, 19 nt, Artificial Sequence
  Description of Artificial Sequence: Synthetic oligonucleotide
gccuggcggcacaccagcc

SEQ ID NO: 2092083 - RNA, 19 nt, Artificial Sequence
  Description of Artificial Sequence: Synthetic oligonucleotide
ggcgcgcuccugccggcuc

SEQ ID NO: 2092084 - RNA, 19 nt, Artificial Sequence
  Description of Artificial Sequence: Synthetic oligonucleotide
cccaaggguaccagcugcu

SEQ ID NO: 2092085 - RNA, 19 nt, Artificial Sequence
  Description of Artificial Sequence: Synthetic oligonucleotide
gccagccgucuuuguuuuc

SEQ ID NO: 2092086 - RNA, 19 nt, Artificial Sequence
  Description of Artificial Sequence: Synthetic oligonucleotide
gcgucgcuugaggaagcga

SEQ ID NO: 2092087 - RNA, 19 nt, Artificial Sequence
  Description of Artificial Sequence: Synthetic oligonucleotide
ccgcccgcgcacgggacgg

SEQ ID NO: 2092088 - RNA, 19 nt, Artificial Sequence
  Description of Artificial Sequence: Synthetic oligonucleotide
cccuacgcuccagguacuc

SEQ ID NO: 2092089 - RNA, 19 nt, Artificial Sequence
  Description of Artificial Sequence: Synthetic oligonucleotide
cugagacgcuuggcuaggu

SEQ ID NO: 2092090 - RNA, 19 nt, Artificial Sequence
  Description of Artificial Sequence: Synthetic oligonucleotide
cgccuacggaaggccaggg

SEQ ID NO: 2092091 - RNA, 19 nt, Artificial Sequence
  Description of Artificial Sequence: Synthetic oligonucleotide
gggugcccauagcugcugu

SEQ ID NO: 2092092 - RNA, 19 nt, Artificial Sequence
  Description of Artificial Sequence: Synthetic oligonucleotide
caucggcaucacugcugcu

SEQ ID NO: 2092093 - RNA, 19 nt, Artificial Sequence
  Description of Artificial Sequence: Synthetic oligonucleotide
cggcucugcucgccgcacg

SEQ ID NO: 2092094 - RNA, 19 nt, Artificial Sequence
  Description of Artificial Sequence: Synthetic oligonucleotide
cguagccgugcucggccuc

SEQ ID NO: 2092095 - RNA, 19 nt, Artificial Sequence
  Description of Artificial Sequence: Synthetic oligonucleotide
cgcgccuggcggcacacca

SEQ ID NO: 2092096 - RNA, 19 nt, Artificial Sequence
  Description of Artificial Sequence: Synthetic oligonucleotide
gcguagccgugcucggccu

SEQ ID NO: 2092097 - RNA, 19 nt, Artificial Sequence
  Description of Artificial Sequence: Synthetic oligonucleotide
cucggccucucggucccua

SEQ ID NO: 2092098 - RNA, 19 nt, Artificial Sequence
  Description of Artificial Sequence: Synthetic oligonucleotide
gcacgggacggcggcggca

SEQ ID NO: 2092099 - RNA, 19 nt, Artificial Sequence
  Description of Artificial Sequence: Synthetic oligonucleotide
cgucugugcuuuucuaguu

SEQ ID NO: 2092100 - RNA, 19 nt, Artificial Sequence
  Description of Artificial Sequence: Synthetic oligonucleotide
cgcacgggacggcggcggc

SEQ ID NO: 2092101 - RNA, 19 nt, Artificial Sequence
  Description of Artificial Sequence: Synthetic oligonucleotide
cgucgaagggcagcacgga

SEQ ID NO: 2092102 - RNA, 19 nt, Artificial Sequence
  Description of Artificial Sequence: Synthetic oligonucleotide
ccgugcucggccucucggu

SEQ ID NO: 2092103 - RNA, 19 nt, Artificial Sequence
  Description of Artificial Sequence: Synthetic oligonucleotide
gugugcugucagggcccaa

SEQ ID NO: 2092104 - RNA, 19 nt, Artificial Sequence
  Description of Artificial Sequence: Synthetic oligonucleotide
gcugcccggcgcgcuccug

SEQ ID NO: 2092105 - RNA, 19 nt, Artificial Sequence
  Description of Artificial Sequence: Synthetic oligonucleotide
cggaggcguagccgugcuc

SEQ ID NO: 2092106 - RNA, 19 nt, Artificial Sequence
  Description of Artificial Sequence: Synthetic oligonucleotide
cuucccugcgugggaucuu

SEQ ID NO: 2092107 - RNA, 19 nt, Artificial Sequence
  Description of Artificial Sequence: Synthetic oligonucleotide
cccgcgccuggcggcacac

SEQ ID NO: 2092108 - RNA, 19 nt, Artificial Sequence
  Description of Artificial Sequence: Synthetic oligonucleotide
cgcacacgcucuacacucu

SEQ ID NO: 2092109 - RNA, 19 nt, Artificial Sequence
  Description of Artificial Sequence: Synthetic oligonucleotide
cgugugcugucagggccca

SEQ ID NO: 2092110 - RNA, 19 nt, Artificial Sequence
  Description of Artificial Sequence: Synthetic oligonucleotide
gcgcaccaggccagccguc

SEQ ID NO: 2092111 - RNA, 19 nt, Artificial Sequence
  Description of Artificial Sequence: Synthetic oligonucleotide
cggucccuacgcuccaggu

SEQ ID NO: 2092112 - RNA, 19 nt, Artificial Sequence
  Description of Artificial Sequence: Synthetic oligonucleotide
ccaggccgccugcaagggu

SEQ ID NO: 2092113 - RNA, 19 nt, Artificial Sequence
  Description of Artificial Sequence: Synthetic oligonucleotide
cgcaccaggccagccgucu

SEQ ID NO: 2092114 - RNA, 19 nt, Artificial Sequence
  Description of Artificial Sequence: Synthetic oligonucleotide
aacagagauauauucuggc

SEQ ID NO: 2092115 - RNA, 19 nt, Artificial Sequence
  Description of Artificial Sequence: Synthetic oligonucleotide
uaugccaugaacugcaggg

SEQ ID NO: 2092116 - RNA, 19 nt, Artificial Sequence
  Description of Artificial Sequence: Synthetic oligonucleotide
auauuuuagauagugcugc

SEQ ID NO: 2092117 - RNA, 19 nt, Artificial Sequence
  Description of Artificial Sequence: Synthetic oligonucleotide
uuuacgaucacguccauca

SEQ ID NO: 2092118 - RNA, 19 nt, Artificial Sequence
  Description of Artificial Sequence: Synthetic oligonucleotide
gucuuauacgacuugaugg

SEQ ID NO: 2092119 - RNA, 19 nt, Artificial Sequence
  Description of Artificial Sequence: Synthetic oligonucleotide
uguauauuuucacaagugc

SEQ ID NO: 2092120 - RNA, 19 nt, Artificial Sequence
  Description of Artificial Sequence: Synthetic oligonucleotide
cuugauacggguauguugc

SEQ ID NO: 2092121 - RNA, 19 nt, Artificial Sequence
  Description of Artificial Sequence: Synthetic oligonucleotide
ugucuuuacgaucacgucc

SEQ ID NO: 2092122 - RNA, 19 nt, Artificial Sequence
  Description of Artificial Sequence: Synthetic oligonucleotide
ucuaaucaaauugggagcg

SEQ ID NO: 2092123 - RNA, 19 nt, Artificial Sequence
  Description of Artificial Sequence: Synthetic oligonucleotide
uuguacuccaauuucagca

SEQ ID NO: 2092124 - RNA, 19 nt, Artificial Sequence
  Description of Artificial Sequence: Synthetic oligonucleotide
uuuauacugucucugcgag

SEQ ID NO: 2092125 - RNA, 19 nt, Artificial Sequence
  Description of Artificial Sequence: Synthetic oligonucleotide
ucuuauacgacuugauggc

SEQ ID NO: 2092126 - RNA, 19 nt, Artificial Sequence
  Description of Artificial Sequence: Synthetic oligonucleotide
ugggguuacuccuugauag

SEQ ID NO: 2092127 - RNA, 19 nt, Artificial Sequence
  Description of Artificial Sequence: Synthetic oligonucleotide
uaaucuauugauguguuug

SEQ ID NO: 2092128 - RNA, 19 nt, Artificial Sequence
  Description of Artificial Sequence: Synthetic oligonucleotide
aagugcaucaaacaucccu

SEQ ID NO: 2092129 - RNA, 19 nt, Artificial Sequence
  Description of Artificial Sequence: Synthetic oligonucleotide
uuguauauuuucacaagug

SEQ ID NO: 2092130 - RNA, 19 nt, Artificial Sequence
  Description of Artificial Sequence: Synthetic oligonucleotide
aauauuuuagauagugcug

SEQ ID NO: 2092131 - RNA, 19 nt, Artificial Sequence
  Description of Artificial Sequence: Synthetic oligonucleotide
uggucuuacuuccaguccg

SEQ ID NO: 2092132 - RNA, 19 nt, Artificial Sequence
  Description of Artificial Sequence: Synthetic oligonucleotide
aacaccgugcuccacgccg

SEQ ID NO: 2092133 - RNA, 19 nt, Artificial Sequence
  Description of Artificial Sequence: Synthetic oligonucleotide
acagagauauauucuggcg

SEQ ID NO: 2092134 - RNA, 19 nt, Artificial Sequence
  Description of Artificial Sequence: Synthetic oligonucleotide
gagacauuuucauaaacca

SEQ ID NO: 2092135 - RNA, 19 nt, Artificial Sequence
  Description of Artificial Sequence: Synthetic oligonucleotide
uuuguuguacuccaauuuc

SEQ ID NO: 2092136 - RNA, 19 nt, Artificial Sequence
  Description of Artificial Sequence: Synthetic oligonucleotide
guauuuuggucuuacuucc

SEQ ID NO: 2092137 - RNA, 19 nt, Artificial Sequence
  Description of Artificial Sequence: Synthetic oligonucleotide
ugucuuauacgacuugaug

SEQ ID NO: 2092138 - RNA, 19 nt, Artificial Sequence
  Description of Artificial Sequence: Synthetic oligonucleotide
cuuacuuccaguccgucgc

SEQ ID NO: 2092139 - RNA, 19 nt, Artificial Sequence
  Description of Artificial Sequence: Synthetic oligonucleotide
ucacucuaaucaaauuggg

SEQ ID NO: 2092140 - RNA, 19 nt, Artificial Sequence
  Description of Artificial Sequence: Synthetic oligonucleotide
cucuaaucaaauugggagc

SEQ ID NO: 2092141 - RNA, 19 nt, Artificial Sequence
  Description of Artificial Sequence: Synthetic oligonucleotide
gauacggguauguugcugc

SEQ ID NO: 2092142 - RNA, 19 nt, Artificial Sequence
  Description of Artificial Sequence: Synthetic oligonucleotide
gagacgagguauucuagcg

SEQ ID NO: 2092143 - RNA, 19 nt, Artificial Sequence
  Description of Artificial Sequence: Synthetic oligonucleotide
cuugauagaguccucgcag

SEQ ID NO: 2092144 - RNA, 19 nt, Artificial Sequence
  Description of Artificial Sequence: Synthetic oligonucleotide
uuuucgucacccacagugg

SEQ ID NO: 2092145 - RNA, 19 nt, Artificial Sequence
  Description of Artificial Sequence: Synthetic oligonucleotide
gaucacguccaucacgccg

SEQ ID NO: 2092146 - RNA, 19 nt, Artificial Sequence
  Description of Artificial Sequence: Synthetic oligonucleotide
aacauaaggcgaguuuucg

SEQ ID NO: 2092147 - RNA, 19 nt, Artificial Sequence
  Description of Artificial Sequence: Synthetic oligonucleotide
uuuagauagugcugcaaca

SEQ ID NO: 2092148 - RNA, 19 nt, Artificial Sequence
  Description of Artificial Sequence: Synthetic oligonucleotide
uuagauagugcugcaacag

SEQ ID NO: 2092149 - RNA, 19 nt, Artificial Sequence
  Description of Artificial Sequence: Synthetic oligonucleotide
aaagaaaaguagagucccc

SEQ ID NO: 2092150 - RNA, 19 nt, Artificial Sequence
  Description of Artificial Sequence: Synthetic oligonucleotide
uacgaucacguccaucacg

SEQ ID NO: 2092151 - RNA, 19 nt, Artificial Sequence
  Description of Artificial Sequence: Synthetic oligonucleotide
ugauacagcaggcuggagu

SEQ ID NO: 2092152 - RNA, 19 nt, Artificial Sequence
  Description of Artificial Sequence: Synthetic oligonucleotide
agugcugcaacagagauau

SEQ ID NO: 2092153 - RNA, 19 nt, Artificial Sequence
  Description of Artificial Sequence: Synthetic oligonucleotide
uuccaaaugguagucaagc

SEQ ID NO: 2092154 - RNA, 19 nt, Artificial Sequence
  Description of Artificial Sequence: Synthetic oligonucleotide
ucuuacuuccaguccgucg

SEQ ID NO: 2092155 - RNA, 19 nt, Artificial Sequence
  Description of Artificial Sequence: Synthetic oligonucleotide
aagugugagacauuuucau

SEQ ID NO: 2092156 - RNA, 19 nt, Artificial Sequence
  Description of Artificial Sequence: Synthetic oligonucleotide
uauucuggcgugcucagcu

SEQ ID NO: 2092157 - RNA, 19 nt, Artificial Sequence
  Description of Artificial Sequence: Synthetic oligonucleotide
acuugauacggguauguug

SEQ ID NO: 2092158 - RNA, 19 nt, Artificial Sequence
  Description of Artificial Sequence: Synthetic oligonucleotide
uuucgucacccacaguggg

SEQ ID NO: 2092159 - RNA, 19 nt, Artificial Sequence
  Description of Artificial Sequence: Synthetic oligonucleotide
gacgccgccgcucacaccg

SEQ ID NO: 2092160 - RNA, 19 nt, Artificial Sequence
  Description of Artificial Sequence: Synthetic oligonucleotide
gacgagguauucuagcggc

SEQ ID NO: 2092161 - RNA, 19 nt, Artificial Sequence
  Description of Artificial Sequence: Synthetic oligonucleotide
guaagacacaugcuggucc

SEQ ID NO: 2092162 - RNA, 19 nt, Artificial Sequence
  Description of Artificial Sequence: Synthetic oligonucleotide
acggguauguugcugcuac

SEQ ID NO: 2092163 - RNA, 19 nt, Artificial Sequence
  Description of Artificial Sequence: Synthetic oligonucleotide
caacagagauauauucugg

SEQ ID NO: 2092164 - RNA, 19 nt, Artificial Sequence
  Description of Artificial Sequence: Synthetic oligonucleotide
auacgcuggaaucuucuuc

SEQ ID NO: 2092165 - RNA, 19 nt, Artificial Sequence
  Description of Artificial Sequence: Synthetic oligonucleotide
aacaucccuuuauacuguc

SEQ ID NO: 2092166 - RNA, 19 nt, Artificial Sequence
  Description of Artificial Sequence: Synthetic oligonucleotide
gaguccccaggauaaaccg

SEQ ID NO: 2092167 - RNA, 19 nt, Artificial Sequence
  Description of Artificial Sequence: Synthetic oligonucleotide
auucuagcggcucuaguug

SEQ ID NO: 2092168 - RNA, 19 nt, Artificial Sequence
  Description of Artificial Sequence: Synthetic oligonucleotide
cauaaggcgaguuuucguc

SEQ ID NO: 2092169 - RNA, 19 nt, Artificial Sequence
  Description of Artificial Sequence: Synthetic oligonucleotide
uacgcuggaaucuucuucu

SEQ ID NO: 2092170 - RNA, 19 nt, Artificial Sequence
  Description of Artificial Sequence: Synthetic oligonucleotide
uguaacauaaggcgaguuu

SEQ ID NO: 2092171 - RNA, 19 nt, Artificial Sequence
  Description of Artificial Sequence: Synthetic oligonucleotide
gauguguuuguuguacucc

SEQ ID NO: 2092172 - RNA, 19 nt, Artificial Sequence
  Description of Artificial Sequence: Synthetic oligonucleotide
agacauuuucauaaaccac

SEQ ID NO: 2092173 - RNA, 19 nt, Artificial Sequence
  Description of Artificial Sequence: Synthetic oligonucleotide
uucaacuuuccaaauggua

SEQ ID NO: 2092174 - RNA, 19 nt, Artificial Sequence
  Description of Artificial Sequence: Synthetic oligonucleotide
uauucuagcggcucuaguu

SEQ ID NO: 2092175 - RNA, 19 nt, Artificial Sequence
  Description of Artificial Sequence: Synthetic oligonucleotide
guauguugcugcuacagca

SEQ ID NO: 2092176 - RNA, 19 nt, Artificial Sequence
  Description of Artificial Sequence: Synthetic oligonucleotide
acaauccacgcacaccuuc

SEQ ID NO: 2092177 - RNA, 19 nt, Artificial Sequence
  Description of Artificial Sequence: Synthetic oligonucleotide
agacgagguauucuagcgg

SEQ ID NO: 2092178 - RNA, 19 nt, Artificial Sequence
  Description of Artificial Sequence: Synthetic oligonucleotide
agcuuacuuucuuuucucg

SEQ ID NO: 2092179 - RNA, 19 nt, Artificial Sequence
  Description of Artificial Sequence: Synthetic oligonucleotide
ucucguaccggacguggcg

SEQ ID NO: 2092180 - RNA, 19 nt, Artificial Sequence
  Description of Artificial Sequence: Synthetic oligonucleotide
gcaaauauuuuagauagug

SEQ ID NO: 2092181 - RNA, 19 nt, Artificial Sequence
  Description of Artificial Sequence: Synthetic oligonucleotide
ucugcgagggguuaacaac

SEQ ID NO: 2092182 - RNA, 19 nt, Artificial Sequence
  Description of Artificial Sequence: Synthetic oligonucleotide
uucccucugucuuauacga

SEQ ID NO: 2092183 - RNA, 19 nt, Artificial Sequence
  Description of Artificial Sequence: Synthetic oligonucleotide
gaguuuucgucacccacag

SEQ ID NO: 2092184 - RNA, 19 nt, Artificial Sequence
  Description of Artificial Sequence: Synthetic oligonucleotide
aagacgggcucgcacaacu

SEQ ID NO: 2092185 - RNA, 19 nt, Artificial Sequence
  Description of Artificial Sequence: Synthetic oligonucleotide
agagagucauggcuccagc

SEQ ID NO: 2092186 - RNA, 19 nt, Artificial Sequence
  Description of Artificial Sequence: Synthetic oligonucleotide
aucacguccaucacgccgc

SEQ ID NO: 2092187 - RNA, 19 nt, Artificial Sequence
  Description of Artificial Sequence: Synthetic oligonucleotide
uauauucuggcgugcucag

SEQ ID NO: 2092188 - RNA, 19 nt, Artificial Sequence
  Description of Artificial Sequence: Synthetic oligonucleotide
uguacuccaauuucagcaa

SEQ ID NO: 2092189 - RNA, 19 nt, Artificial Sequence
  Description of Artificial Sequence: Synthetic oligonucleotide
uagauagugcugcaacaga

SEQ ID NO: 2092190 - RNA, 19 nt, Artificial Sequence
  Description of Artificial Sequence: Synthetic oligonucleotide
uuauacugucucugcgagg

SEQ ID NO: 2092191 - RNA, 19 nt, Artificial Sequence
  Description of Artificial Sequence: Synthetic oligonucleotide
cugcaacagagauauauuc

SEQ ID NO: 2092192 - RNA, 19 nt, Artificial Sequence
  Description of Artificial Sequence: Synthetic oligonucleotide
ugcugcaacagagauauau

SEQ ID NO: 2092193 - RNA, 19 nt, Artificial Sequence
  Description of Artificial Sequence: Synthetic oligonucleotide
uuauacgacuugauggcau

SEQ ID NO: 2092194 - RNA, 19 nt, Artificial Sequence
  Description of Artificial Sequence: Synthetic oligonucleotide
ucugucuuauacgacuuga

SEQ ID NO: 2092195 - RNA, 19 nt, Artificial Sequence
  Description of Artificial Sequence: Synthetic oligonucleotide
guuugugaugcagagaguc

SEQ ID NO: 2092196 - RNA, 19 nt, Artificial Sequence
  Description of Artificial Sequence: Synthetic oligonucleotide
auagugcugcaacagagau

SEQ ID NO: 2092197 - RNA, 19 nt, Artificial Sequence
  Description of Artificial Sequence: Synthetic oligonucleotide
auaugccaugaacugcagg

SEQ ID NO: 2092198 - RNA, 19 nt, Artificial Sequence
  Description of Artificial Sequence: Synthetic oligonucleotide
uucuggcgugcucagcugg

SEQ ID NO: 2092199 - RNA, 19 nt, Artificial Sequence
  Description of Artificial Sequence: Synthetic oligonucleotide
augucuuuacgaucacguc

SEQ ID NO: 2092200 - RNA, 19 nt, Artificial Sequence
  Description of Artificial Sequence: Synthetic oligonucleotide
agcuguguugcucugcugu

SEQ ID NO: 2092201 - RNA, 19 nt, Artificial Sequence
  Description of Artificial Sequence: Synthetic oligonucleotide
caguccgucgcucacggcg

SEQ ID NO: 2092202 - RNA, 19 nt, Artificial Sequence
  Description of Artificial Sequence: Synthetic oligonucleotide
ucuagcuuacuuucuuuuc

SEQ ID NO: 2092203 - RNA, 19 nt, Artificial Sequence
  Description of Artificial Sequence: Synthetic oligonucleotide
uccaaaugguagucaagca

SEQ ID NO: 2092204 - RNA, 19 nt, Artificial Sequence
  Description of Artificial Sequence: Synthetic oligonucleotide
uaacauaaggcgaguuuuc

SEQ ID NO: 2092205 - RNA, 19 nt, Artificial Sequence
  Description of Artificial Sequence: Synthetic oligonucleotide
aaaguagaguccccaggau

SEQ ID NO: 2092206 - RNA, 19 nt, Artificial Sequence
  Description of Artificial Sequence: Synthetic oligonucleotide
uccaguccgucgcucacgg

SEQ ID NO: 2092207 - RNA, 19 nt, Artificial Sequence
  Description of Artificial Sequence: Synthetic oligonucleotide
accgaugccuucuuuccuc

SEQ ID NO: 2092208 - RNA, 19 nt, Artificial Sequence
  Description of Artificial Sequence: Synthetic oligonucleotide
ucgcacaacuugauacggg

SEQ ID NO: 2092209 - RNA, 19 nt, Artificial Sequence
  Description of Artificial Sequence: Synthetic oligonucleotide
uguuuguuguacuccaauu

SEQ ID NO: 2092210 - RNA, 19 nt, Artificial Sequence
  Description of Artificial Sequence: Synthetic oligonucleotide
guuguacuccaauuucagc

SEQ ID NO: 2092211 - RNA, 19 nt, Artificial Sequence
  Description of Artificial Sequence: Synthetic oligonucleotide
auaaggcgaguuuucguca

SEQ ID NO: 2092212 - RNA, 19 nt, Artificial Sequence
  Description of Artificial Sequence: Synthetic oligonucleotide
uugauagaguccucgcagu

SEQ ID NO: 2092213 - RNA, 19 nt, Artificial Sequence
  Description of Artificial Sequence: Synthetic oligonucleotide
cauacauuugggguuacuc

SEQ ID NO: 2092214 - RNA, 19 nt, Artificial Sequence
  Description of Artificial Sequence: Synthetic oligonucleotide
uuucagcaacucauaugcc

SEQ ID NO: 2092215 - RNA, 19 nt, Artificial Sequence
  Description of Artificial Sequence: Synthetic oligonucleotide
ugugaugcagagagucaug

SEQ ID NO: 2092216 - RNA, 19 nt, Artificial Sequence
  Description of Artificial Sequence: Synthetic oligonucleotide
ugauguguuuguuguacuc

SEQ ID NO: 2092217 - RNA, 19 nt, Artificial Sequence
  Description of Artificial Sequence: Synthetic oligonucleotide
ucccuuguacaauccacgc

SEQ ID NO: 2092218 - RNA, 19 nt, Artificial Sequence
  Description of Artificial Sequence: Synthetic oligonucleotide
uuugggguuacuccuugau

SEQ ID NO: 2092219 - RNA, 19 nt, Artificial Sequence
  Description of Artificial Sequence: Synthetic oligonucleotide
augccuuuguaaaauccac

SEQ ID NO: 2092220 - RNA, 19 nt, Artificial Sequence
  Description of Artificial Sequence: Synthetic oligonucleotide
aaucaaauugggagcgaug

SEQ ID NO: 2092221 - RNA, 19 nt, Artificial Sequence
  Description of Artificial Sequence: Synthetic oligonucleotide
guaaaauccaccgaugccu

SEQ ID NO: 2092222 - RNA, 19 nt, Artificial Sequence
  Description of Artificial Sequence: Synthetic oligonucleotide
cugguaaucuauugaugug

SEQ ID NO: 2092223 - RNA, 19 nt, Artificial Sequence
  Description of Artificial Sequence: Synthetic oligonucleotide
ccuuguacaauccacgcac

SEQ ID NO: 2092224 - RNA, 19 nt, Artificial Sequence
  Description of Artificial Sequence: Synthetic oligonucleotide
guacaauccacgcacaccu

SEQ ID NO: 2092225 - RNA, 19 nt, Artificial Sequence
  Description of Artificial Sequence: Synthetic oligonucleotide
cuauugauguguuuguugu

SEQ ID NO: 2092226 - RNA, 19 nt, Artificial Sequence
  Description of Artificial Sequence: Synthetic oligonucleotide
ugauagaguccucgcaguc

SEQ ID NO: 2092227 - RNA, 19 nt, Artificial Sequence
  Description of Artificial Sequence: Synthetic oligonucleotide
uccuugauagaguccucgc

SEQ ID NO: 2092228 - RNA, 19 nt, Artificial Sequence
  Description of Artificial Sequence: Synthetic oligonucleotide
ccaaaugguagucaagcag

SEQ ID NO: 2092229 - RNA, 19 nt, Artificial Sequence
  Description of Artificial Sequence: Synthetic oligonucleotide
uucuagcuuacuuucuuuu

SEQ ID NO: 2092230 - RNA, 19 nt, Artificial Sequence
  Description of Artificial Sequence: Synthetic oligonucleotide
uggcggaacaccgugcucc

SEQ ID NO: 2092231 - RNA, 19 nt, Artificial Sequence
  Description of Artificial Sequence: Synthetic oligonucleotide
acauaaggcgaguuuucgu

SEQ ID NO: 2092232 - RNA, 19 nt, Artificial Sequence
  Description of Artificial Sequence: Synthetic oligonucleotide
caaaugguagucaagcagu

SEQ ID NO: 2092233 - RNA, 19 nt, Artificial Sequence
  Description of Artificial Sequence: Synthetic oligonucleotide
ucuggcgugcucagcuggg

SEQ ID NO: 2092234 - RNA, 19 nt, Artificial Sequence
  Description of Artificial Sequence: Synthetic oligonucleotide
ucccuuuauacugucucug

SEQ ID NO: 2092235 - RNA, 19 nt, Artificial Sequence
  Description of Artificial Sequence: Synthetic oligonucleotide
aggauaaaccggcacccca

SEQ ID NO: 2092236 - RNA, 19 nt, Artificial Sequence
  Description of Artificial Sequence: Synthetic oligonucleotide
cuuuguaaaauccaccgau

SEQ ID NO: 2092237 - RNA, 19 nt, Artificial Sequence
  Description of Artificial Sequence: Synthetic oligonucleotide
gccgccguaagacacaugc

SEQ ID NO: 2092238 - RNA, 19 nt, Artificial Sequence
  Description of Artificial Sequence: Synthetic oligonucleotide
uccacgcacaccuucguau

SEQ ID NO: 2092239 - RNA, 19 nt, Artificial Sequence
  Description of Artificial Sequence: Synthetic oligonucleotide
aguagaguccccaggauaa

SEQ ID NO: 2092240 - RNA, 19 nt, Artificial Sequence
  Description of Artificial Sequence: Synthetic oligonucleotide
uaaucaaauugggagcgau

SEQ ID NO: 2092241 - RNA, 19 nt, Artificial Sequence
  Description of Artificial Sequence: Synthetic oligonucleotide
aggcgaguuuucgucaccc

SEQ ID NO: 2092242 - RNA, 19 nt, Artificial Sequence
  Description of Artificial Sequence: Synthetic oligonucleotide
caugucuuuacgaucacgu

SEQ ID NO: 2092243 - RNA, 19 nt, Artificial Sequence
  Description of Artificial Sequence: Synthetic oligonucleotide
ggcucgcacaacuugauac

SEQ ID NO: 2092244 - RNA, 19 nt, Artificial Sequence
  Description of Artificial Sequence: Synthetic oligonucleotide
uuuucucgaaggccacaca

SEQ ID NO: 2092245 - RNA, 19 nt, Artificial Sequence
  Description of Artificial Sequence: Synthetic oligonucleotide
acaccuucguauuuguaua

SEQ ID NO: 2092246 - RNA, 19 nt, Artificial Sequence
  Description of Artificial Sequence: Synthetic oligonucleotide
uaaggcgaguuuucgucac

SEQ ID NO: 2092247 - RNA, 19 nt, Artificial Sequence
  Description of Artificial Sequence: Synthetic oligonucleotide
agguccagcgggugcagcg

SEQ ID NO: 2092248 - RNA, 19 nt, Artificial Sequence
  Description of Artificial Sequence: Synthetic oligonucleotide
gucuuuacgaucacgucca

SEQ ID NO: 2092249 - RNA, 19 nt, Artificial Sequence
  Description of Artificial Sequence: Synthetic oligonucleotide
cagguucucguaccggacg

SEQ ID NO: 2092250 - RNA, 19 nt, Artificial Sequence
  Description of Artificial Sequence: Synthetic oligonucleotide
caccauacuguaacauaag

SEQ ID NO: 2092251 - RNA, 19 nt, Artificial Sequence
  Description of Artificial Sequence: Synthetic oligonucleotide
accggcaccccauacauuu

SEQ ID NO: 2092252 - RNA, 19 nt, Artificial Sequence
  Description of Artificial Sequence: Synthetic oligonucleotide
cucgcacaacuugauacgg

SEQ ID NO: 2092253 - RNA, 19 nt, Artificial Sequence
  Description of Artificial Sequence: Synthetic oligonucleotide
gacguggcggaacaccgug

SEQ ID NO: 2092254 - RNA, 19 nt, Artificial Sequence
  Description of Artificial Sequence: Synthetic oligonucleotide
cugagacgagguauucuag

SEQ ID NO: 2092255 - RNA, 19 nt, Artificial Sequence
  Description of Artificial Sequence: Synthetic oligonucleotide
uucuagcggcucuaguugu

SEQ ID NO: 2092256 - RNA, 19 nt, Artificial Sequence
  Description of Artificial Sequence: Synthetic oligonucleotide
agcagugcagaauuccuuu

SEQ ID NO: 2092257 - RNA, 19 nt, Artificial Sequence
  Description of Artificial Sequence: Synthetic oligonucleotide
aucccuuuauacugucucu

SEQ ID NO: 2092258 - RNA, 19 nt, Artificial Sequence
  Description of Artificial Sequence: Synthetic oligonucleotide
cacucuaaucaaauuggga

SEQ ID NO: 2092259 - RNA, 19 nt, Artificial Sequence
  Description of Artificial Sequence: Synthetic oligonucleotide
uauacgacuugauggcauu

SEQ ID NO: 2092260 - RNA, 19 nt, Artificial Sequence
  Description of Artificial Sequence: Synthetic oligonucleotide
guucucguaccggacgugg

SEQ ID NO: 2092261 - RNA, 19 nt, Artificial Sequence
  Description of Artificial Sequence: Synthetic oligonucleotide
uguguuuguuguacuccaa

SEQ ID NO: 2092262 - RNA, 19 nt, Artificial Sequence
  Description of Artificial Sequence: Synthetic oligonucleotide
aaacagcccagggacaaau

SEQ ID NO: 2092263 - RNA, 19 nt, Artificial Sequence
  Description of Artificial Sequence: Synthetic oligonucleotide
gauagugcugcaacagaga

SEQ ID NO: 2092264 - RNA, 19 nt, Artificial Sequence
  Description of Artificial Sequence: Synthetic oligonucleotide
ccuuuauacugucucugcg

SEQ ID NO: 2092265 - RNA, 19 nt, Artificial Sequence
  Description of Artificial Sequence: Synthetic oligonucleotide
uguugcugcuacagcaaau

SEQ ID NO: 2092266 - RNA, 19 nt, Artificial Sequence
  Description of Artificial Sequence: Synthetic oligonucleotide
uugggguuacuccuugaua

SEQ ID NO: 2092267 - RNA, 19 nt, Artificial Sequence
  Description of Artificial Sequence: Synthetic oligonucleotide
gcucgcacaacuugauacg

SEQ ID NO: 2092268 - RNA, 19 nt, Artificial Sequence
  Description of Artificial Sequence: Synthetic oligonucleotide
ugauacggguauguugcug

SEQ ID NO: 2092269 - RNA, 19 nt, Artificial Sequence
  Description of Artificial Sequence: Synthetic oligonucleotide
ucacgccgccguaagacac

SEQ ID NO: 2092270 - RNA, 19 nt, Artificial Sequence
  Description of Artificial Sequence: Synthetic oligonucleotide
uauugauguguuuguugua

SEQ ID NO: 2092271 - RNA, 19 nt, Artificial Sequence
  Description of Artificial Sequence: Synthetic oligonucleotide
uucgucacccacagugggu

SEQ ID NO: 2092272 - RNA, 19 nt, Artificial Sequence
  Description of Artificial Sequence: Synthetic oligonucleotide
auauucuggcgugcucagc

SEQ ID NO: 2092273 - RNA, 19 nt, Artificial Sequence
  Description of Artificial Sequence: Synthetic oligonucleotide
caucacgccgccguaagac

SEQ ID NO: 2092274 - RNA, 19 nt, Artificial Sequence
  Description of Artificial Sequence: Synthetic oligonucleotide
uuacgaucacguccaucac

SEQ ID NO: 2092275 - RNA, 19 nt, Artificial Sequence
  Description of Artificial Sequence: Synthetic oligonucleotide
uugggagcgaugccuuugu

SEQ ID NO: 2092276 - RNA, 19 nt, Artificial Sequence
  Description of Artificial Sequence: Synthetic oligonucleotide
uucucguaccggacguggc

SEQ ID NO: 2092277 - RNA, 19 nt, Artificial Sequence
  Description of Artificial Sequence: Synthetic oligonucleotide
agugcaucaaacaucccuu

SEQ ID NO: 2092278 - RNA, 19 nt, Artificial Sequence
  Description of Artificial Sequence: Synthetic oligonucleotide
cugaagacgggcucgcaca

SEQ ID NO: 2092279 - RNA, 19 nt, Artificial Sequence
  Description of Artificial Sequence: Synthetic oligonucleotide
cagagauauauucuggcgu

SEQ ID NO: 2092280 - RNA, 19 nt, Artificial Sequence
  Description of Artificial Sequence: Synthetic oligonucleotide
uacgacuugauggcauugu

SEQ ID NO: 2092281 - RNA, 19 nt, Artificial Sequence
  Description of Artificial Sequence: Synthetic oligonucleotide
ggcgaagcggaucuugacc

SEQ ID NO: 2092282 - RNA, 19 nt, Artificial Sequence
  Description of Artificial Sequence: Synthetic oligonucleotide
ggagcgaugccuuuguaaa

SEQ ID NO: 2092283 - RNA, 19 nt, Artificial Sequence
  Description of Artificial Sequence: Synthetic oligonucleotide
cugcgagggguuaacaaca

SEQ ID NO: 2092284 - RNA, 19 nt, Artificial Sequence
  Description of Artificial Sequence: Synthetic oligonucleotide
cacaccggccaccagguuc

SEQ ID NO: 2092285 - RNA, 19 nt, Artificial Sequence
  Description of Artificial Sequence: Synthetic oligonucleotide
guacuccaauuucagcaac

SEQ ID NO: 2092286 - RNA, 19 nt, Artificial Sequence
  Description of Artificial Sequence: Synthetic oligonucleotide
accccauacauuugggguu

SEQ ID NO: 2092287 - RNA, 19 nt, Artificial Sequence
  Description of Artificial Sequence: Synthetic oligonucleotide
aaauugggagcgaugccuu

SEQ ID NO: 2092288 - RNA, 19 nt, Artificial Sequence
  Description of Artificial Sequence: Synthetic oligonucleotide
agcgaugccuuuguaaaau

SEQ ID NO: 2092289 - RNA, 19 nt, Artificial Sequence
  Description of Artificial Sequence: Synthetic oligonucleotide
gccguaagacacaugcugg

SEQ ID NO: 2092290 - RNA, 19 nt, Artificial Sequence
  Description of Artificial Sequence: Synthetic oligonucleotide
aauugggagcgaugccuuu

SEQ ID NO: 2092291 - RNA, 19 nt, Artificial Sequence
  Description of Artificial Sequence: Synthetic oligonucleotide
uuccaguccgucgcucacg

SEQ ID NO: 2092292 - RNA, 19 nt, Artificial Sequence
  Description of Artificial Sequence: Synthetic oligonucleotide
agauacgcuggaaucuucu

SEQ ID NO: 2092293 - RNA, 19 nt, Artificial Sequence
  Description of Artificial Sequence: Synthetic oligonucleotide
uaccggacguggcggaaca

SEQ ID NO: 2092294 - RNA, 19 nt, Artificial Sequence
  Description of Artificial Sequence: Synthetic oligonucleotide
cucguaccggacguggcgg

SEQ ID NO: 2092295 - RNA, 19 nt, Artificial Sequence
  Description of Artificial Sequence: Synthetic oligonucleotide
uugauacggguauguugcu

SEQ ID NO: 2092296 - RNA, 19 nt, Artificial Sequence
  Description of Artificial Sequence: Synthetic oligonucleotide
auucuggcgugcucagcug

SEQ ID NO: 2092297 - RNA, 19 nt, Artificial Sequence
  Description of Artificial Sequence: Synthetic oligonucleotide
auacugucucugcgagggg

SEQ ID NO: 2092298 - RNA, 19 nt, Artificial Sequence
  Description of Artificial Sequence: Synthetic oligonucleotide
cccaggauaaaccggcacc

SEQ ID NO: 2092299 - RNA, 19 nt, Artificial Sequence
  Description of Artificial Sequence: Synthetic oligonucleotide
auuugggguuacuccuuga

SEQ ID NO: 2092300 - RNA, 19 nt, Artificial Sequence
  Description of Artificial Sequence: Synthetic oligonucleotide
guagucaagcagugcagaa

SEQ ID NO: 2092301 - RNA, 19 nt, Artificial Sequence
  Description of Artificial Sequence: Synthetic oligonucleotide
guaacauaaggcgaguuuu

SEQ ID NO: 2092302 - RNA, 19 nt, Artificial Sequence
  Description of Artificial Sequence: Synthetic oligonucleotide
ggguauguugcugcuacag

SEQ ID NO: 2092303 - RNA, 19 nt, Artificial Sequence
  Description of Artificial Sequence: Synthetic oligonucleotide
cuuguacaauccacgcaca

SEQ ID NO: 2092304 - RNA, 19 nt, Artificial Sequence
  Description of Artificial Sequence: Synthetic oligonucleotide
aacuugauacggguauguu

SEQ ID NO: 2092305 - RNA, 19 nt, Artificial Sequence
  Description of Artificial Sequence: Synthetic oligonucleotide
acaccaccauacuguaaca

SEQ ID NO: 2092306 - RNA, 19 nt, Artificial Sequence
  Description of Artificial Sequence: Synthetic oligonucleotide
acccacaguggguuuguga

SEQ ID NO: 2092307 - RNA, 19 nt, Artificial Sequence
  Description of Artificial Sequence: Synthetic oligonucleotide
aucacgccgccguaagaca

SEQ ID NO: 2092308 - RNA, 19 nt, Artificial Sequence
  Description of Artificial Sequence: Synthetic oligonucleotide
uccaugucuuuacgaucac

SEQ ID NO: 2092309 - RNA, 19 nt, Artificial Sequence
  Description of Artificial Sequence: Synthetic oligonucleotide
gcaccccauacauuugggg

SEQ ID NO: 2092310 - RNA, 19 nt, Artificial Sequence
  Description of Artificial Sequence: Synthetic oligonucleotide
agggcgccgugugaugucc

SEQ ID NO: 2092311 - RNA, 19 nt, Artificial Sequence
  Description of Artificial Sequence: Synthetic oligonucleotide
gcgaagcggaucuugacca

SEQ ID NO: 2092312 - RNA, 19 nt, Artificial Sequence
  Description of Artificial Sequence: Synthetic oligonucleotide
ggcuucugguaaucuauug

SEQ ID NO: 2092313 - RNA, 19 nt, Artificial Sequence
  Description of Artificial Sequence: Synthetic oligonucleotide
cacaccuucguauuuguau

SEQ ID NO: 2092314 - RNA, 19 nt, Artificial Sequence
  Description of Artificial Sequence: Synthetic oligonucleotide
auacggguauguugcugcu

SEQ ID NO: 2092315 - RNA, 19 nt, Artificial Sequence
  Description of Artificial Sequence: Synthetic oligonucleotide
auacgacuugauggcauug

SEQ ID NO: 2092316 - RNA, 19 nt, Artificial Sequence
  Description of Artificial Sequence: Synthetic oligonucleotide
cuuauacgacuugauggca

SEQ ID NO: 2092317 - RNA, 19 nt, Artificial Sequence
  Description of Artificial Sequence: Synthetic oligonucleotide
caaauugggagcgaugccu

SEQ ID NO: 2092318 - RNA, 19 nt, Artificial Sequence
  Description of Artificial Sequence: Synthetic oligonucleotide
gcuuacuuucuuuucucga

SEQ ID NO: 2092319 - RNA, 19 nt, Artificial Sequence
  Description of Artificial Sequence: Synthetic oligonucleotide
gcauuguaaaagaaaagua

SEQ ID NO: 2092320 - RNA, 19 nt, Artificial Sequence
  Description of Artificial Sequence: Synthetic oligonucleotide
gacaggacgccgccgcuca

SEQ ID NO: 2092321 - RNA, 19 nt, Artificial Sequence
  Description of Artificial Sequence: Synthetic oligonucleotide
ggaacaccgugcuccacgc

SEQ ID NO: 2092322 - RNA, 19 nt, Artificial Sequence
  Description of Artificial Sequence: Synthetic oligonucleotide
gauaaaccggcaccccaua

SEQ ID NO: 2092323 - RNA, 19 nt, Artificial Sequence
  Description of Artificial Sequence: Synthetic oligonucleotide
acgacuugauggcauugua

SEQ ID NO: 2092324 - RNA, 19 nt, Artificial Sequence
  Description of Artificial Sequence: Synthetic oligonucleotide
aagcagugcagaauuccuu

SEQ ID NO: 2092325 - RNA, 19 nt, Artificial Sequence
  Description of Artificial Sequence: Synthetic oligonucleotide
cagguuggacaggacgccg

SEQ ID NO: 2092326 - RNA, 19 nt, Artificial Sequence
  Description of Artificial Sequence: Synthetic oligonucleotide
cccuuuauacugucucugc

SEQ ID NO: 2092327 - RNA, 19 nt, Artificial Sequence
  Description of Artificial Sequence: Synthetic oligonucleotide
agcaaauauuuuagauagu

SEQ ID NO: 2092328 - RNA, 19 nt, Artificial Sequence
  Description of Artificial Sequence: Synthetic oligonucleotide
ccaggauaaaccggcaccc

SEQ ID NO: 2092329 - RNA, 19 nt, Artificial Sequence
  Description of Artificial Sequence: Synthetic oligonucleotide
uggcgugcucagcugggcu

SEQ ID NO: 2092330 - RNA, 19 nt, Artificial Sequence
  Description of Artificial Sequence: Synthetic oligonucleotide
ucuagcggcucuaguuguu

SEQ ID NO: 2092331 - RNA, 19 nt, Artificial Sequence
  Description of Artificial Sequence: Synthetic oligonucleotide
caagugcaucaaacauccc

SEQ ID NO: 2092332 - RNA, 19 nt, Artificial Sequence
  Description of Artificial Sequence: Synthetic oligonucleotide
uccccaggauaaaccggca

SEQ ID NO: 2092333 - RNA, 19 nt, Artificial Sequence
  Description of Artificial Sequence: Synthetic oligonucleotide
cagauacgcuggaaucuuc

SEQ ID NO: 2092334 - RNA, 19 nt, Artificial Sequence
  Description of Artificial Sequence: Synthetic oligonucleotide
cuuuacgaucacguccauc

SEQ ID NO: 2092335 - RNA, 19 nt, Artificial Sequence
  Description of Artificial Sequence: Synthetic oligonucleotide
gcugagacgagguauucua

SEQ ID NO: 2092336 - RNA, 19 nt, Artificial Sequence
  Description of Artificial Sequence: Synthetic oligonucleotide
caccccauacauuuggggu

SEQ ID NO: 2092337 - RNA, 19 nt, Artificial Sequence
  Description of Artificial Sequence: Synthetic oligonucleotide
caggauaaaccggcacccc

SEQ ID NO: 2092338 - RNA, 19 nt, Artificial Sequence
  Description of Artificial Sequence: Synthetic oligonucleotide
augucccaaacagcccagg

SEQ ID NO: 2092339 - RNA, 19 nt, Artificial Sequence
  Description of Artificial Sequence: Synthetic oligonucleotide
gaacaccgugcuccacgcc

SEQ ID NO: 2092340 - RNA, 19 nt, Artificial Sequence
  Description of Artificial Sequence: Synthetic oligonucleotide
cagcuucagcggcugagac

SEQ ID NO: 2092341 - RNA, 19 nt, Artificial Sequence
  Description of Artificial Sequence: Synthetic oligonucleotide
gguauucuagcggcucuag

SEQ ID NO: 2092342 - RNA, 19 nt, Artificial Sequence
  Description of Artificial Sequence: Synthetic oligonucleotide
gagguauucuagcggcucu

SEQ ID NO: 2092343 - RNA, 19 nt, Artificial Sequence
  Description of Artificial Sequence: Synthetic oligonucleotide
gcucuaguuguucagcucu

SEQ ID NO: 2092344 - RNA, 19 nt, Artificial Sequence
  Description of Artificial Sequence: Synthetic oligonucleotide
gcgaguuuucgucacccac

SEQ ID NO: 2092345 - RNA, 19 nt, Artificial Sequence
  Description of Artificial Sequence: Synthetic oligonucleotide
guccucgcaguccuucaac

SEQ ID NO: 2092346 - RNA, 19 nt, Artificial Sequence
  Description of Artificial Sequence: Synthetic oligonucleotide
cucugcgagggguuaacaa

SEQ ID NO: 2092347 - RNA, 19 nt, Artificial Sequence
  Description of Artificial Sequence: Synthetic oligonucleotide
ucucugcgagggguuaaca

SEQ ID NO: 2092348 - RNA, 19 nt, Artificial Sequence
  Description of Artificial Sequence: Synthetic oligonucleotide
ucuuuacgaucacguccau

SEQ ID NO: 2092349 - RNA, 19 nt, Artificial Sequence
  Description of Artificial Sequence: Synthetic oligonucleotide
aguuuucgucacccacagu

SEQ ID NO: 2092350 - RNA, 19 nt, Artificial Sequence
  Description of Artificial Sequence: Synthetic oligonucleotide
cuagcggcucuaguuguuc

SEQ ID NO: 2092351 - RNA, 19 nt, Artificial Sequence
  Description of Artificial Sequence: Synthetic oligonucleotide
ucguaccggacguggcgga

SEQ ID NO: 2092352 - RNA, 19 nt, Artificial Sequence
  Description of Artificial Sequence: Synthetic oligonucleotide
ugcagggcgccgugugaug

SEQ ID NO: 2092353 - RNA, 19 nt, Artificial Sequence
  Description of Artificial Sequence: Synthetic oligonucleotide
gguagucaagcagugcaga

SEQ ID NO: 2092354 - RNA, 19 nt, Artificial Sequence
  Description of Artificial Sequence: Synthetic oligonucleotide
cucacggcgaagcggaucu

SEQ ID NO: 2092355 - RNA, 19 nt, Artificial Sequence
  Description of Artificial Sequence: Synthetic oligonucleotide
cuaaucaaauugggagcga

SEQ ID NO: 2092356 - RNA, 19 nt, Artificial Sequence
  Description of Artificial Sequence: Synthetic oligonucleotide
cacggcgaagcggaucuug

SEQ ID NO: 2092357 - RNA, 19 nt, Artificial Sequence
  Description of Artificial Sequence: Synthetic oligonucleotide
gggagcgaugccuuuguaa

SEQ ID NO: 2092358 - RNA, 19 nt, Artificial Sequence
  Description of Artificial Sequence: Synthetic oligonucleotide
ccugaagacgggcucgcac

SEQ ID NO: 2092359 - RNA, 19 nt, Artificial Sequence
  Description of Artificial Sequence: Synthetic oligonucleotide
gauacgcuggaaucuucuu

SEQ ID NO: 2092360 - RNA, 19 nt, Artificial Sequence
  Description of Artificial Sequence: Synthetic oligonucleotide
acgggcucgcacaacuuga

SEQ ID NO: 2092361 - RNA, 19 nt, Artificial Sequence
  Description of Artificial Sequence: Synthetic oligonucleotide
cccagggacaaaucccuug

SEQ ID NO: 2092362 - RNA, 19 nt, Artificial Sequence
  Description of Artificial Sequence: Synthetic oligonucleotide
auccacgcacaccuucgua

SEQ ID NO: 2092363 - RNA, 19 nt, Artificial Sequence
  Description of Artificial Sequence: Synthetic oligonucleotide
ggcaccccauacauuuggg

SEQ ID NO: 2092364 - RNA, 19 nt, Artificial Sequence
  Description of Artificial Sequence: Synthetic oligonucleotide
aggcuggagucacucuaau

SEQ ID NO: 2092365 - RNA, 19 nt, Artificial Sequence
  Description of Artificial Sequence: Synthetic oligonucleotide
gaagacgggcucgcacaac

SEQ ID NO: 2092366 - RNA, 19 nt, Artificial Sequence
  Description of Artificial Sequence: Synthetic oligonucleotide
guaaucuauugauguguuu

SEQ ID NO: 2092367 - RNA, 19 nt, Artificial Sequence
  Description of Artificial Sequence: Synthetic oligonucleotide
ggcucuaguuguucagcuc

SEQ ID NO: 2092368 - RNA, 19 nt, Artificial Sequence
  Description of Artificial Sequence: Synthetic oligonucleotide
accuucguauuuguauauu

SEQ ID NO: 2092369 - RNA, 19 nt, Artificial Sequence
  Description of Artificial Sequence: Synthetic oligonucleotide
guauucuagcggcucuagu

SEQ ID NO: 2092370 - RNA, 19 nt, Artificial Sequence
  Description of Artificial Sequence: Synthetic oligonucleotide
gggguuacuccuugauaga

SEQ ID NO: 2092371 - RNA, 19 nt, Artificial Sequence
  Description of Artificial Sequence: Synthetic oligonucleotide
cggacguggcggaacaccg

SEQ ID NO: 2092372 - RNA, 19 nt, Artificial Sequence
  Description of Artificial Sequence: Synthetic oligonucleotide
ccuugauagaguccucgca

SEQ ID NO: 2092373 - RNA, 19 nt, Artificial Sequence
  Description of Artificial Sequence: Synthetic oligonucleotide
aguccgucgcucacggcga

SEQ ID NO: 2092374 - RNA, 19 nt, Artificial Sequence
  Description of Artificial Sequence: Synthetic oligonucleotide
ggcuggagucacucuaauc

SEQ ID NO: 2092375 - RNA, 19 nt, Artificial Sequence
  Description of Artificial Sequence: Synthetic oligonucleotide
caggcuggagucacucuaa

SEQ ID NO: 2092376 - RNA, 19 nt, Artificial Sequence
  Description of Artificial Sequence: Synthetic oligonucleotide
ccaccagguucucguaccg

SEQ ID NO: 2092377 - RNA, 19 nt, Artificial Sequence
  Description of Artificial Sequence: Synthetic oligonucleotide
uacggguauguugcugcua

SEQ ID NO: 2092378 - RNA, 19 nt, Artificial Sequence
  Description of Artificial Sequence: Synthetic oligonucleotide
ugggagcgaugccuuugua

SEQ ID NO: 2092379 - RNA, 19 nt, Artificial Sequence
  Description of Artificial Sequence: Synthetic oligonucleotide
cugucuuauacgacuugau

SEQ ID NO: 2092380 - RNA, 19 nt, Artificial Sequence
  Description of Artificial Sequence: Synthetic oligonucleotide
acgagguauucuagcggcu

SEQ ID NO: 2092381 - RNA, 19 nt, Artificial Sequence
  Description of Artificial Sequence: Synthetic oligonucleotide
agguauucuagcggcucua

SEQ ID NO: 2092382 - RNA, 19 nt, Artificial Sequence
  Description of Artificial Sequence: Synthetic oligonucleotide
gcuguguugcucugcuguc

SEQ ID NO: 2092383 - RNA, 19 nt, Artificial Sequence
  Description of Artificial Sequence: Synthetic oligonucleotide
ccagguucucguaccggac

SEQ ID NO: 2092384 - RNA, 19 nt, Artificial Sequence
  Description of Artificial Sequence: Synthetic oligonucleotide
accggacguggcggaacac

SEQ ID NO: 2092385 - RNA, 19 nt, Artificial Sequence
  Description of Artificial Sequence: Synthetic oligonucleotide
cgaguuuucgucacccaca

SEQ ID NO: 2092386 - RNA, 19 nt, Artificial Sequence
  Description of Artificial Sequence: Synthetic oligonucleotide
guaccggacguggcggaac

SEQ ID NO: 2092387 - RNA, 19 nt, Artificial Sequence
  Description of Artificial Sequence: Synthetic oligonucleotide
gucuuacuuccaguccguc

SEQ ID NO: 2092388 - RNA, 19 nt, Artificial Sequence
  Description of Artificial Sequence: Synthetic oligonucleotide
acugucucugcgagggguu

SEQ ID NO: 2092389 - RNA, 19 nt, Artificial Sequence
  Description of Artificial Sequence: Synthetic oligonucleotide
gccgugugaugucccaaac

SEQ ID NO: 2092390 - RNA, 19 nt, Artificial Sequence
  Description of Artificial Sequence: Synthetic oligonucleotide
gcggcucuaguuguucagc

SEQ ID NO: 2092391 - RNA, 19 nt, Artificial Sequence
  Description of Artificial Sequence: Synthetic oligonucleotide
acgcuggaaucuucuucua

SEQ ID NO: 2092392 - RNA, 19 nt, Artificial Sequence
  Description of Artificial Sequence: Synthetic oligonucleotide
cacgccgccguaagacaca

SEQ ID NO: 2092393 - RNA, 19 nt, Artificial Sequence
  Description of Artificial Sequence: Synthetic oligonucleotide
cggcaccccauacauuugg

SEQ ID NO: 2092394 - RNA, 19 nt, Artificial Sequence
  Description of Artificial Sequence: Synthetic oligonucleotide
caccgugcuccacgccgcc

SEQ ID NO: 2092395 - RNA, 19 nt, Artificial Sequence
  Description of Artificial Sequence: Synthetic oligonucleotide
guggcggaacaccgugcuc

SEQ ID NO: 2092396 - RNA, 19 nt, Artificial Sequence
  Description of Artificial Sequence: Synthetic oligonucleotide
caccuucguauuuguauau

SEQ ID NO: 2092397 - RNA, 19 nt, Artificial Sequence
  Description of Artificial Sequence: Synthetic oligonucleotide
guagaguccccaggauaaa

SEQ ID NO: 2092398 - RNA, 19 nt, Artificial Sequence
  Description of Artificial Sequence: Synthetic oligonucleotide
gguuacuccuugauagagu

SEQ ID NO: 2092399 - RNA, 19 nt, Artificial Sequence
  Description of Artificial Sequence: Synthetic oligonucleotide
gcaacucauaugccaugaa

SEQ ID NO: 2092400 - RNA, 19 nt, Artificial Sequence
  Description of Artificial Sequence: Synthetic oligonucleotide
ggcgaguuuucgucaccca

SEQ ID NO: 2092401 - RNA, 19 nt, Artificial Sequence
  Description of Artificial Sequence: Synthetic oligonucleotide
cagggcgccgugugauguc

SEQ ID NO: 2092402 - RNA, 19 nt, Artificial Sequence
  Description of Artificial Sequence: Synthetic oligonucleotide
cccuuguacaauccacgca

SEQ ID NO: 2092403 - RNA, 19 nt, Artificial Sequence
  Description of Artificial Sequence: Synthetic oligonucleotide
ccccaggauaaaccggcac

SEQ ID NO: 2092404 - RNA, 19 nt, Artificial Sequence
  Description of Artificial Sequence: Synthetic oligonucleotide
ucacaccggccaccagguu

SEQ ID NO: 2092405 - RNA, 19 nt, Artificial Sequence
  Description of Artificial Sequence: Synthetic oligonucleotide
ccggacguggcggaacacc

SEQ ID NO: 2092406 - RNA, 19 nt, Artificial Sequence
  Description of Artificial Sequence: Synthetic oligonucleotide
cguaagacacaugcugguc

SEQ ID NO: 2092407 - RNA, 19 nt, Artificial Sequence
  Description of Artificial Sequence: Synthetic oligonucleotide
ccuucguauuuguauauuu

SEQ ID NO: 2092408 - RNA, 19 nt, Artificial Sequence
  Description of Artificial Sequence: Synthetic oligonucleotide
aaccggcaccccauacauu

SEQ ID NO: 2092409 - RNA, 19 nt, Artificial Sequence
  Description of Artificial Sequence: Synthetic oligonucleotide
cagggacaaaucccuugua

SEQ ID NO: 2092410 - RNA, 19 nt, Artificial Sequence
  Description of Artificial Sequence: Synthetic oligonucleotide
ccgugugaugucccaaaca

SEQ ID NO: 2092411 - RNA, 19 nt, Artificial Sequence
  Description of Artificial Sequence: Synthetic oligonucleotide
cgacuugauggcauuguaa

SEQ ID NO: 2092412 - RNA, 19 nt, Artificial Sequence
  Description of Artificial Sequence: Synthetic oligonucleotide
ggcggaacaccgugcucca

SEQ ID NO: 2092413 - RNA, 19 nt, Artificial Sequence
  Description of Artificial Sequence: Synthetic oligonucleotide
ggauaaaccggcaccccau

SEQ ID NO: 2092414 - RNA, 19 nt, Artificial Sequence
  Description of Artificial Sequence: Synthetic oligonucleotide
cgagguauucuagcggcuc

SEQ ID NO: 2092415 - RNA, 19 nt, Artificial Sequence
  Description of Artificial Sequence: Synthetic oligonucleotide
ccagggacaaaucccuugu

SEQ ID NO: 2092416 - RNA, 19 nt, Artificial Sequence
  Description of Artificial Sequence: Synthetic oligonucleotide
caccgaugccuucuuuccu

SEQ ID NO: 2092417 - RNA, 19 nt, Artificial Sequence
  Description of Artificial Sequence: Synthetic oligonucleotide
caaacagcccagggacaaa

SEQ ID NO: 2092418 - RNA, 19 nt, Artificial Sequence
  Description of Artificial Sequence: Synthetic oligonucleotide
caccaccauacuguaacau

SEQ ID NO: 2092419 - RNA, 19 nt, Artificial Sequence
  Description of Artificial Sequence: Synthetic oligonucleotide
ggcgccgugugauguccca

SEQ ID NO: 2092420 - RNA, 19 nt, Artificial Sequence
  Description of Artificial Sequence: Synthetic oligonucleotide
cuguaacauaaggcgaguu

SEQ ID NO: 2092421 - RNA, 19 nt, Artificial Sequence
  Description of Artificial Sequence: Synthetic oligonucleotide
cacccacaguggguuugug

SEQ ID NO: 2092422 - RNA, 19 nt, Artificial Sequence
  Description of Artificial Sequence: Synthetic oligonucleotide
cgucgcucacggcgaagcg

SEQ ID NO: 2092423 - RNA, 19 nt, Artificial Sequence
  Description of Artificial Sequence: Synthetic oligonucleotide
ccguaagacacaugcuggu

SEQ ID NO: 2092424 - RNA, 19 nt, Artificial Sequence
  Description of Artificial Sequence: Synthetic oligonucleotide
ccggcaccccauacauuug

SEQ ID NO: 2092425 - RNA, 19 nt, Artificial Sequence
  Description of Artificial Sequence: Synthetic oligonucleotide
gaacugcagggcgccgugu

SEQ ID NO: 2092426 - RNA, 19 nt, Artificial Sequence
  Description of Artificial Sequence: Synthetic oligonucleotide
ggcugagacgagguauucu

SEQ ID NO: 2092427 - RNA, 19 nt, Artificial Sequence
  Description of Artificial Sequence: Synthetic oligonucleotide
cugucucugcgagggguua

SEQ ID NO: 2092428 - RNA, 19 nt, Artificial Sequence
  Description of Artificial Sequence: Synthetic oligonucleotide
gcagauacgcuggaaucuu

SEQ ID NO: 2092429 - RNA, 19 nt, Artificial Sequence
  Description of Artificial Sequence: Synthetic oligonucleotide
ucacggcgaagcggaucuu

SEQ ID NO: 2092430 - RNA, 19 nt, Artificial Sequence
  Description of Artificial Sequence: Synthetic oligonucleotide
ggacgccgccgcucacacc

SEQ ID NO: 2092431 - RNA, 19 nt, Artificial Sequence
  Description of Artificial Sequence: Synthetic oligonucleotide
guccgucgcucacggcgaa

SEQ ID NO: 2092432 - RNA, 19 nt, Artificial Sequence
  Description of Artificial Sequence: Synthetic oligonucleotide
ccaguccgucgcucacggc

SEQ ID NO: 2092433 - RNA, 19 nt, Artificial Sequence
  Description of Artificial Sequence: Synthetic oligonucleotide
gugcagcgccagguuggac

SEQ ID NO: 2092434 - RNA, 19 nt, Artificial Sequence
  Description of Artificial Sequence: Synthetic oligonucleotide
ggcgugcucagcugggcuu

SEQ ID NO: 2092435 - RNA, 19 nt, Artificial Sequence
  Description of Artificial Sequence: Synthetic oligonucleotide
ccaucacgccgccguaaga

SEQ ID NO: 2092436 - RNA, 19 nt, Artificial Sequence
  Description of Artificial Sequence: Synthetic oligonucleotide
cugcagggcgccgugugau

SEQ ID NO: 2092437 - RNA, 19 nt, Artificial Sequence
  Description of Artificial Sequence: Synthetic oligonucleotide
gccgccgcucacaccggcc

SEQ ID NO: 2092438 - RNA, 19 nt, Artificial Sequence
  Description of Artificial Sequence: Synthetic oligonucleotide
ccccauacauuugggguua

SEQ ID NO: 2092439 - RNA, 19 nt, Artificial Sequence
  Description of Artificial Sequence: Synthetic oligonucleotide
cccauacauuugggguuac

SEQ ID NO: 2092440 - RNA, 19 nt, Artificial Sequence
  Description of Artificial Sequence: Synthetic oligonucleotide
gcagggcgccgugugaugu

SEQ ID NO: 2092441 - RNA, 19 nt, Artificial Sequence
  Description of Artificial Sequence: Synthetic oligonucleotide
ccgccgcucacaccggcca

SEQ ID NO: 2092442 - RNA, 19 nt, Artificial Sequence
  Description of Artificial Sequence: Synthetic oligonucleotide
cguggcggaacaccgugcu

SEQ ID NO: 2092443 - RNA, 19 nt, Artificial Sequence
  Description of Artificial Sequence: Synthetic oligonucleotide
gggcuucugguaaucuauu

SEQ ID NO: 2092444 - RNA, 19 nt, Artificial Sequence
  Description of Artificial Sequence: Synthetic oligonucleotide
ggacguggcggaacaccgu

SEQ ID NO: 2092445 - RNA, 19 nt, Artificial Sequence
  Description of Artificial Sequence: Synthetic oligonucleotide
cgccgugugaugucccaaa

SEQ ID NO: 2092446 - RNA, 19 nt, Artificial Sequence
  Description of Artificial Sequence: Synthetic oligonucleotide
gcggaacaccgugcuccac

SEQ ID NO: 2092447 - RNA, 19 nt, Artificial Sequence
  Description of Artificial Sequence: Synthetic oligonucleotide
ccacgcacaccuucguauu

SEQ ID NO: 2092448 - RNA, 19 nt, Artificial Sequence
  Description of Artificial Sequence: Synthetic oligonucleotide
gcggcugagacgagguauu

SEQ ID NO: 2092449 - RNA, 19 nt, Artificial Sequence
  Description of Artificial Sequence: Synthetic oligonucleotide
ccgccguaagacacaugcu

SEQ ID NO: 2092450 - RNA, 19 nt, Artificial Sequence
  Description of Artificial Sequence: Synthetic oligonucleotide
gcgccgugugaugucccaa

SEQ ID NO: 2092451 - RNA, 19 nt, Artificial Sequence
  Description of Artificial Sequence: Synthetic oligonucleotide
ccauacauuugggguuacu

SEQ ID NO: 2092452 - RNA, 19 nt, Artificial Sequence
  Description of Artificial Sequence: Synthetic oligonucleotide
cgcucacaccggccaccag

SEQ ID NO: 2092453 - RNA, 19 nt, Artificial Sequence
  Description of Artificial Sequence: Synthetic oligonucleotide
gccgauccggccgccggcu

SEQ ID NO: 2092454 - RNA, 19 nt, Artificial Sequence
  Description of Artificial Sequence: Synthetic oligonucleotide
cguaccggacguggcggaa

SEQ ID NO: 2092455 - RNA, 19 nt, Artificial Sequence
  Description of Artificial Sequence: Synthetic oligonucleotide
cgugcuccacgccgccgau

SEQ ID NO: 2092456 - RNA, 19 nt, Artificial Sequence
  Description of Artificial Sequence: Synthetic oligonucleotide
cgcucacggcgaagcggau

SEQ ID NO: 2092457 - RNA, 19 nt, Artificial Sequence
  Description of Artificial Sequence: Synthetic oligonucleotide
aauaauacaaaaguaaucc

SEQ ID NO: 2092458 - RNA, 19 nt, Artificial Sequence
  Description of Artificial Sequence: Synthetic oligonucleotide
aaauguuuacuuuccacgc

SEQ ID NO: 2092459 - RNA, 19 nt, Artificial Sequence
  Description of Artificial Sequence: Synthetic oligonucleotide
uuauuaagaguucacaucc

SEQ ID NO: 2092460 - RNA, 19 nt, Artificial Sequence
  Description of Artificial Sequence: Synthetic oligonucleotide
agauacaugagcaaaagcc

SEQ ID NO: 2092461 - RNA, 19 nt, Artificial Sequence
  Description of Artificial Sequence: Synthetic oligonucleotide
auaaggaaggcguaaauuc

SEQ ID NO: 2092462 - RNA, 19 nt, Artificial Sequence
  Description of Artificial Sequence: Synthetic oligonucleotide
caauagaucaaauuuacac

SEQ ID NO: 2092463 - RNA, 19 nt, Artificial Sequence
  Description of Artificial Sequence: Synthetic oligonucleotide
aacaccauaaaccugugga

SEQ ID NO: 2092464 - RNA, 19 nt, Artificial Sequence
  Description of Artificial Sequence: Synthetic oligonucleotide
aacucagcgauauugaacu

SEQ ID NO: 2092465 - RNA, 19 nt, Artificial Sequence
  Description of Artificial Sequence: Synthetic oligonucleotide
gauauugaacuccuugucg

SEQ ID NO: 2092466 - RNA, 19 nt, Artificial Sequence
  Description of Artificial Sequence: Synthetic oligonucleotide
uuuaauaccuguaggaccu

SEQ ID NO: 2092467 - RNA, 19 nt, Artificial Sequence
  Description of Artificial Sequence: Synthetic oligonucleotide
caaauguuuacuuuccacg

SEQ ID NO: 2092468 - RNA, 19 nt, Artificial Sequence
  Description of Artificial Sequence: Synthetic oligonucleotide
uuuuaauaccuguaggacc

SEQ ID NO: 2092469 - RNA, 19 nt, Artificial Sequence
  Description of Artificial Sequence: Synthetic oligonucleotide
aaugcuuuauuguaucaug

SEQ ID NO: 2092470 - RNA, 19 nt, Artificial Sequence
  Description of Artificial Sequence: Synthetic oligonucleotide
ucgaaauaggcccagauaa

SEQ ID NO: 2092471 - RNA, 19 nt, Artificial Sequence
  Description of Artificial Sequence: Synthetic oligonucleotide
uucacagcgauuauuaaga

SEQ ID NO: 2092472 - RNA, 19 nt, Artificial Sequence
  Description of Artificial Sequence: Synthetic oligonucleotide
aaggcguaaauucgagucc

SEQ ID NO: 2092473 - RNA, 19 nt, Artificial Sequence
  Description of Artificial Sequence: Synthetic oligonucleotide
uaaggaaggcguaaauucg

SEQ ID NO: 2092474 - RNA, 19 nt, Artificial Sequence
  Description of Artificial Sequence: Synthetic oligonucleotide
auguuaacgaacuuccuuc

SEQ ID NO: 2092475 - RNA, 19 nt, Artificial Sequence
  Description of Artificial Sequence: Synthetic oligonucleotide
uagucagauaccaaaagca

SEQ ID NO: 2092476 - RNA, 19 nt, Artificial Sequence
  Description of Artificial Sequence: Synthetic oligonucleotide
uauuguaucaugucaauau

SEQ ID NO: 2092477 - RNA, 19 nt, Artificial Sequence
  Description of Artificial Sequence: Synthetic oligonucleotide
aguaaauggagaugucccc

SEQ ID NO: 2092478 - RNA, 19 nt, Artificial Sequence
  Description of Artificial Sequence: Synthetic oligonucleotide
uauucuaguaacuuugagu

SEQ ID NO: 2092479 - RNA, 19 nt, Artificial Sequence
  Description of Artificial Sequence: Synthetic oligonucleotide
uaguaaauggagauguccc

SEQ ID NO: 2092480 - RNA, 19 nt, Artificial Sequence
  Description of Artificial Sequence: Synthetic oligonucleotide
auaccaaaagcacaucagg

SEQ ID NO: 2092481 - RNA, 19 nt, Artificial Sequence
  Description of Artificial Sequence: Synthetic oligonucleotide
gacacaagcaacaaaauuc

SEQ ID NO: 2092482 - RNA, 19 nt, Artificial Sequence
  Description of Artificial Sequence: Synthetic oligonucleotide
guaaauucgaguccggacc

SEQ ID NO: 2092483 - RNA, 19 nt, Artificial Sequence
  Description of Artificial Sequence: Synthetic oligonucleotide
uguaucaugucaauauacu

SEQ ID NO: 2092484 - RNA, 19 nt, Artificial Sequence
  Description of Artificial Sequence: Synthetic oligonucleotide
aggaugaucauucuugucu

SEQ ID NO: 2092485 - RNA, 19 nt, Artificial Sequence
  Description of Artificial Sequence: Synthetic oligonucleotide
augucaauauacugcaagg

SEQ ID NO: 2092486 - RNA, 19 nt, Artificial Sequence
  Description of Artificial Sequence: Synthetic oligonucleotide
aaggaauauuuccaaauaa

SEQ ID NO: 2092487 - RNA, 19 nt, Artificial Sequence
  Description of Artificial Sequence: Synthetic oligonucleotide
uccaauagaucaaauuuac

SEQ ID NO: 2092488 - RNA, 19 nt, Artificial Sequence
  Description of Artificial Sequence: Synthetic oligonucleotide
ugagcaaaagccugcuucg

SEQ ID NO: 2092489 - RNA, 19 nt, Artificial Sequence
  Description of Artificial Sequence: Synthetic oligonucleotide
uccuugucgaaauaggccc

SEQ ID NO: 2092490 - RNA, 19 nt, Artificial Sequence
  Description of Artificial Sequence: Synthetic oligonucleotide
ugaccuccuauaaagaaca

SEQ ID NO: 2092491 - RNA, 19 nt, Artificial Sequence
  Description of Artificial Sequence: Synthetic oligonucleotide
aggauguuaacgaacuucc

SEQ ID NO: 2092492 - RNA, 19 nt, Artificial Sequence
  Description of Artificial Sequence: Synthetic oligonucleotide
augguuaucagacagugaa

SEQ ID NO: 2092493 - RNA, 19 nt, Artificial Sequence
  Description of Artificial Sequence: Synthetic oligonucleotide
ucagauaccaaaagcacau

SEQ ID NO: 2092494 - RNA, 19 nt, Artificial Sequence
  Description of Artificial Sequence: Synthetic oligonucleotide
aagaacaccauaaaccugu

SEQ ID NO: 2092495 - RNA, 19 nt, Artificial Sequence
  Description of Artificial Sequence: Synthetic oligonucleotide
cuagucagauaccaaaagc

SEQ ID NO: 2092496 - RNA, 19 nt, Artificial Sequence
  Description of Artificial Sequence: Synthetic oligonucleotide
aagcaaauguuuacuuucc

SEQ ID NO: 2092497 - RNA, 19 nt, Artificial Sequence
  Description of Artificial Sequence: Synthetic oligonucleotide
uuguaucaugucaauauac

SEQ ID NO: 2092498 - RNA, 19 nt, Artificial Sequence
  Description of Artificial Sequence: Synthetic oligonucleotide
aauccacagacuuaauuaa

SEQ ID NO: 2092499 - RNA, 19 nt, Artificial Sequence
  Description of Artificial Sequence: Synthetic oligonucleotide
uuauucuaguaacuuugag

SEQ ID NO: 2092500 - RNA, 19 nt, Artificial Sequence
  Description of Artificial Sequence: Synthetic oligonucleotide
cacucagagacucaguggg

SEQ ID NO: 2092501 - RNA, 19 nt, Artificial Sequence
  Description of Artificial Sequence: Synthetic oligonucleotide
aacuucaccuggaacaaac

SEQ ID NO: 2092502 - RNA, 19 nt, Artificial Sequence
  Description of Artificial Sequence: Synthetic oligonucleotide
uagacaaugucaucuaccu

SEQ ID NO: 2092503 - RNA, 19 nt, Artificial Sequence
  Description of Artificial Sequence: Synthetic oligonucleotide
auaauacaaaaguaaucca

SEQ ID NO: 2092504 - RNA, 19 nt, Artificial Sequence
  Description of Artificial Sequence: Synthetic oligonucleotide
accuggaacaaacuggcuc

SEQ ID NO: 2092505 - RNA, 19 nt, Artificial Sequence
  Description of Artificial Sequence: Synthetic oligonucleotide
uacaaguucuuccaauaga

SEQ ID NO: 2092506 - RNA, 19 nt, Artificial Sequence
  Description of Artificial Sequence: Synthetic oligonucleotide
aauguuuacuuuccacgcu

SEQ ID NO: 2092507 - RNA, 19 nt, Artificial Sequence
  Description of Artificial Sequence: Synthetic oligonucleotide
auauugaacuccuugucga

SEQ ID NO: 2092508 - RNA, 19 nt, Artificial Sequence
  Description of Artificial Sequence: Synthetic oligonucleotide
uguucaauccgugcaauag

SEQ ID NO: 2092509 - RNA, 19 nt, Artificial Sequence
  Description of Artificial Sequence: Synthetic oligonucleotide
uaaauucucucugaaauuc

SEQ ID NO: 2092510 - RNA, 19 nt, Artificial Sequence
  Description of Artificial Sequence: Synthetic oligonucleotide
uuagauacaugagcaaaag

SEQ ID NO: 2092511 - RNA, 19 nt, Artificial Sequence
  Description of Artificial Sequence: Synthetic oligonucleotide
uuuacacugugacagcaac

SEQ ID NO: 2092512 - RNA, 19 nt, Artificial Sequence
  Description of Artificial Sequence: Synthetic oligonucleotide
auguuuacuuuccacgcuc

SEQ ID NO: 2092513 - RNA, 19 nt, Artificial Sequence
  Description of Artificial Sequence: Synthetic oligonucleotide
gucggcacuagucagauac

SEQ ID NO: 2092514 - RNA, 19 nt, Artificial Sequence
  Description of Artificial Sequence: Synthetic oligonucleotide
acuagucagauaccaaaag

SEQ ID NO: 2092515 - RNA, 19 nt, Artificial Sequence
  Description of Artificial Sequence: Synthetic oligonucleotide
uggagaaccccuaggauga

SEQ ID NO: 2092516 - RNA, 19 nt, Artificial Sequence
  Description of Artificial Sequence: Synthetic oligonucleotide
uccacucagagacucagug

SEQ ID NO: 2092517 - RNA, 19 nt, Artificial Sequence
  Description of Artificial Sequence: Synthetic oligonucleotide
auuaagaguucacauccug

SEQ ID NO: 2092518 - RNA, 19 nt, Artificial Sequence
  Description of Artificial Sequence: Synthetic oligonucleotide
gauccagaaacauuucuuc

SEQ ID NO: 2092519 - RNA, 19 nt, Artificial Sequence
  Description of Artificial Sequence: Synthetic oligonucleotide
ugaaauucguagcuugcac

SEQ ID NO: 2092520 - RNA, 19 nt, Artificial Sequence
  Description of Artificial Sequence: Synthetic oligonucleotide
ucugaaauucguagcuugc

SEQ ID NO: 2092521 - RNA, 19 nt, Artificial Sequence
  Description of Artificial Sequence: Synthetic oligonucleotide
agcgauauugaacuccuug

SEQ ID NO: 2092522 - RNA, 19 nt, Artificial Sequence
  Description of Artificial Sequence: Synthetic oligonucleotide
uuccaauagaucaaauuua

SEQ ID NO: 2092523 - RNA, 19 nt, Artificial Sequence
  Description of Artificial Sequence: Synthetic oligonucleotide
agauaccaaaagcacauca

SEQ ID NO: 2092524 - RNA, 19 nt, Artificial Sequence
  Description of Artificial Sequence: Synthetic oligonucleotide
aaauucguagcuugcacua

SEQ ID NO: 2092525 - RNA, 19 nt, Artificial Sequence
  Description of Artificial Sequence: Synthetic oligonucleotide
uccacagacuuaauuaagu

SEQ ID NO: 2092526 - RNA, 19 nt, Artificial Sequence
  Description of Artificial Sequence: Synthetic oligonucleotide
uacaugagcaaaagccugc

SEQ ID NO: 2092527 - RNA, 19 nt, Artificial Sequence
  Description of Artificial Sequence: Synthetic oligonucleotide
cacugugacagcaacuuag

SEQ ID NO: 2092528 - RNA, 19 nt, Artificial Sequence
  Description of Artificial Sequence: Synthetic oligonucleotide
uugaccuccuauaaagaac

SEQ ID NO: 2092529 - RNA, 19 nt, Artificial Sequence
  Description of Artificial Sequence: Synthetic oligonucleotide
acagcgauuauuaagaguu

SEQ ID NO: 2092530 - RNA, 19 nt, Artificial Sequence
  Description of Artificial Sequence: Synthetic oligonucleotide
ucucaucauaguaaaugga

SEQ ID NO: 2092531 - RNA, 19 nt, Artificial Sequence
  Description of Artificial Sequence: Synthetic oligonucleotide
uguuaacgaacuuccuucc

SEQ ID NO: 2092532 - RNA, 19 nt, Artificial Sequence
  Description of Artificial Sequence: Synthetic oligonucleotide
agucagauaccaaaagcac

SEQ ID NO: 2092533 - RNA, 19 nt, Artificial Sequence
  Description of Artificial Sequence: Synthetic oligonucleotide
uccuauaaagaacaccaua

SEQ ID NO: 2092534 - RNA, 19 nt, Artificial Sequence
  Description of Artificial Sequence: Synthetic oligonucleotide
uucaauccgugcaauaguc

SEQ ID NO: 2092535 - RNA, 19 nt, Artificial Sequence
  Description of Artificial Sequence: Synthetic oligonucleotide
uaggcccagauaaggaagg

SEQ ID NO: 2092536 - RNA, 19 nt, Artificial Sequence
  Description of Artificial Sequence: Synthetic oligonucleotide
aagauuauucuaguaacuu

SEQ ID NO: 2092537 - RNA, 19 nt, Artificial Sequence
  Description of Artificial Sequence: Synthetic oligonucleotide
aaauucaguuggcgacagc

SEQ ID NO: 2092538 - RNA, 19 nt, Artificial Sequence
  Description of Artificial Sequence: Synthetic oligonucleotide
uaacuuugaguguucaauc

SEQ ID NO: 2092539 - RNA, 19 nt, Artificial Sequence
  Description of Artificial Sequence: Synthetic oligonucleotide
ucucucugaaauucguagc

SEQ ID NO: 2092540 - RNA, 19 nt, Artificial Sequence
  Description of Artificial Sequence: Synthetic oligonucleotide
uaagaguucacauccugau

SEQ ID NO: 2092541 - RNA, 19 nt, Artificial Sequence
  Description of Artificial Sequence: Synthetic oligonucleotide
acagacuuaauuaagugaa

SEQ ID NO: 2092542 - RNA, 19 nt, Artificial Sequence
  Description of Artificial Sequence: Synthetic oligonucleotide
aaaauucaguuggcgacag

SEQ ID NO: 2092543 - RNA, 19 nt, Artificial Sequence
  Description of Artificial Sequence: Synthetic oligonucleotide
ugcaauaguccagucaggc

SEQ ID NO: 2092544 - RNA, 19 nt, Artificial Sequence
  Description of Artificial Sequence: Synthetic oligonucleotide
ugucaauauacugcaagga

SEQ ID NO: 2092545 - RNA, 19 nt, Artificial Sequence
  Description of Artificial Sequence: Synthetic oligonucleotide
cuccuugucgaaauaggcc

SEQ ID NO: 2092546 - RNA, 19 nt, Artificial Sequence
  Description of Artificial Sequence: Synthetic oligonucleotide
aacuccuugucgaaauagg

SEQ ID NO: 2092547 - RNA, 19 nt, Artificial Sequence
  Description of Artificial Sequence: Synthetic oligonucleotide
aacgaacuuccuuccuuuc

SEQ ID NO: 2092548 - RNA, 19 nt, Artificial Sequence
  Description of Artificial Sequence: Synthetic oligonucleotide
ucuaguaacuuugaguguu

SEQ ID NO: 2092549 - RNA, 19 nt, Artificial Sequence
  Description of Artificial Sequence: Synthetic oligonucleotide
acuccuugucgaaauaggc

SEQ ID NO: 2092550 - RNA, 19 nt, Artificial Sequence
  Description of Artificial Sequence: Synthetic oligonucleotide
uuacuuugaccuccuauaa

SEQ ID NO: 2092551 - RNA, 19 nt, Artificial Sequence
  Description of Artificial Sequence: Synthetic oligonucleotide
ucuuccaauagaucaaauu

SEQ ID NO: 2092552 - RNA, 19 nt, Artificial Sequence
  Description of Artificial Sequence: Synthetic oligonucleotide
uuacuuuccacgcucugau

SEQ ID NO: 2092553 - RNA, 19 nt, Artificial Sequence
  Description of Artificial Sequence: Synthetic oligonucleotide
ucaauccgugcaauagucc

SEQ ID NO: 2092554 - RNA, 19 nt, Artificial Sequence
  Description of Artificial Sequence: Synthetic oligonucleotide
aaaugcuuuauuguaucau

SEQ ID NO: 2092555 - RNA, 19 nt, Artificial Sequence
  Description of Artificial Sequence: Synthetic oligonucleotide
uugauguguagacaauguc

SEQ ID NO: 2092556 - RNA, 19 nt, Artificial Sequence
  Description of Artificial Sequence: Synthetic oligonucleotide
aacuuagauacaugagcaa

SEQ ID NO: 2092557 - RNA, 19 nt, Artificial Sequence
  Description of Artificial Sequence: Synthetic oligonucleotide
agcacaucaggauguuaac

SEQ ID NO: 2092558 - RNA, 19 nt, Artificial Sequence
  Description of Artificial Sequence: Synthetic oligonucleotide
uuuacuuuccacgcucuga

SEQ ID NO: 2092559 - RNA, 19 nt, Artificial Sequence
  Description of Artificial Sequence: Synthetic oligonucleotide
uuaacgaacuuccuuccuu

SEQ ID NO: 2092560 - RNA, 19 nt, Artificial Sequence
  Description of Artificial Sequence: Synthetic oligonucleotide
guccggacccaguugaugg

SEQ ID NO: 2092561 - RNA, 19 nt, Artificial Sequence
  Description of Artificial Sequence: Synthetic oligonucleotide
agauuauucuaguaacuuu

SEQ ID NO: 2092562 - RNA, 19 nt, Artificial Sequence
  Description of Artificial Sequence: Synthetic oligonucleotide
auucguagcuugcacuaag

SEQ ID NO: 2092563 - RNA, 19 nt, Artificial Sequence
  Description of Artificial Sequence: Synthetic oligonucleotide
accaaaagcacaucaggau

SEQ ID NO: 2092564 - RNA, 19 nt, Artificial Sequence
  Description of Artificial Sequence: Synthetic oligonucleotide
guuaucagacagugaagug

SEQ ID NO: 2092565 - RNA, 19 nt, Artificial Sequence
  Description of Artificial Sequence: Synthetic oligonucleotide
ccuaggaugaucauucuug

SEQ ID NO: 2092566 - RNA, 19 nt, Artificial Sequence
  Description of Artificial Sequence: Synthetic oligonucleotide
cacaucaggauguuaacga

SEQ ID NO: 2092567 - RNA, 19 nt, Artificial Sequence
  Description of Artificial Sequence: Synthetic oligonucleotide
ugaagugaccuuuucuuuu

SEQ ID NO: 2092568 - RNA, 19 nt, Artificial Sequence
  Description of Artificial Sequence: Synthetic oligonucleotide
gaacuccuugucgaaauag

SEQ ID NO: 2092569 - RNA, 19 nt, Artificial Sequence
  Description of Artificial Sequence: Synthetic oligonucleotide
acugcaaggaauauuucca

SEQ ID NO: 2092570 - RNA, 19 nt, Artificial Sequence
  Description of Artificial Sequence: Synthetic oligonucleotide
gacucaguggggaugucgg

SEQ ID NO: 2092571 - RNA, 19 nt, Artificial Sequence
  Description of Artificial Sequence: Synthetic oligonucleotide
uucguagcuugcacuaagc

SEQ ID NO: 2092572 - RNA, 19 nt, Artificial Sequence
  Description of Artificial Sequence: Synthetic oligonucleotide
ucguagcuugcacuaagca

SEQ ID NO: 2092573 - RNA, 19 nt, Artificial Sequence
  Description of Artificial Sequence: Synthetic oligonucleotide
cacagacuuaauuaaguga

SEQ ID NO: 2092574 - RNA, 19 nt, Artificial Sequence
  Description of Artificial Sequence: Synthetic oligonucleotide
caucaggauguuaacgaac

SEQ ID NO: 2092575 - RNA, 19 nt, Artificial Sequence
  Description of Artificial Sequence: Synthetic oligonucleotide
accccuaggaugaucauuc

SEQ ID NO: 2092576 - RNA, 19 nt, Artificial Sequence
  Description of Artificial Sequence: Synthetic oligonucleotide
auuguaucaugucaauaua

SEQ ID NO: 2092577 - RNA, 19 nt, Artificial Sequence
  Description of Artificial Sequence: Synthetic oligonucleotide
ucuaccuccgcagcaagug

SEQ ID NO: 2092578 - RNA, 19 nt, Artificial Sequence
  Description of Artificial Sequence: Synthetic oligonucleotide
acacaagcaacaaaauuca

SEQ ID NO: 2092579 - RNA, 19 nt, Artificial Sequence
  Description of Artificial Sequence: Synthetic oligonucleotide
uggagauguccccuguuga

SEQ ID NO: 2092580 - RNA, 19 nt, Artificial Sequence
  Description of Artificial Sequence: Synthetic oligonucleotide
ucacagcgauuauuaagag

SEQ ID NO: 2092581 - RNA, 19 nt, Artificial Sequence
  Description of Artificial Sequence: Synthetic oligonucleotide
uugcacuaagcaaauguuu

SEQ ID NO: 2092582 - RNA, 19 nt, Artificial Sequence
  Description of Artificial Sequence: Synthetic oligonucleotide
cuuagauacaugagcaaaa

SEQ ID NO: 2092583 - RNA, 19 nt, Artificial Sequence
  Description of Artificial Sequence: Synthetic oligonucleotide
acaaguucuuccaauagau

SEQ ID NO: 2092584 - RNA, 19 nt, Artificial Sequence
  Description of Artificial Sequence: Synthetic oligonucleotide
uaccuguaggaccucuuug

SEQ ID NO: 2092585 - RNA, 19 nt, Artificial Sequence
  Description of Artificial Sequence: Synthetic oligonucleotide
caauauacugcaaggaaua

SEQ ID NO: 2092586 - RNA, 19 nt, Artificial Sequence
  Description of Artificial Sequence: Synthetic oligonucleotide
ucagagaacucagcgauau

SEQ ID NO: 2092587 - RNA, 19 nt, Artificial Sequence
  Description of Artificial Sequence: Synthetic oligonucleotide
auggagauguccccuguug

SEQ ID NO: 2092588 - RNA, 19 nt, Artificial Sequence
  Description of Artificial Sequence: Synthetic oligonucleotide
gauacaugagcaaaagccu

SEQ ID NO: 2092589 - RNA, 19 nt, Artificial Sequence
  Description of Artificial Sequence: Synthetic oligonucleotide
aauauacugcaaggaauau

SEQ ID NO: 2092590 - RNA, 19 nt, Artificial Sequence
  Description of Artificial Sequence: Synthetic oligonucleotide
ugucgaaauaggcccagau

SEQ ID NO: 2092591 - RNA, 19 nt, Artificial Sequence
  Description of Artificial Sequence: Synthetic oligonucleotide
gucuuuuacuuugaccucc

SEQ ID NO: 2092592 - RNA, 19 nt, Artificial Sequence
  Description of Artificial Sequence: Synthetic oligonucleotide
ucuuuuacuuugaccuccu

SEQ ID NO: 2092593 - RNA, 19 nt, Artificial Sequence
  Description of Artificial Sequence: Synthetic oligonucleotide
aggcguaaauucgaguccg

SEQ ID NO: 2092594 - RNA, 19 nt, Artificial Sequence
  Description of Artificial Sequence: Synthetic oligonucleotide
accauaaaccuguggaaaa

SEQ ID NO: 2092595 - RNA, 19 nt, Artificial Sequence
  Description of Artificial Sequence: Synthetic oligonucleotide
gaacucagcgauauugaac

SEQ ID NO: 2092596 - RNA, 19 nt, Artificial Sequence
  Description of Artificial Sequence: Synthetic oligonucleotide
gaaauucguagcuugcacu

SEQ ID NO: 2092597 - RNA, 19 nt, Artificial Sequence
  Description of Artificial Sequence: Synthetic oligonucleotide
agaguccggagucgggucg

SEQ ID NO: 2092598 - RNA, 19 nt, Artificial Sequence
  Description of Artificial Sequence: Synthetic oligonucleotide
aucaggauguuaacgaacu

SEQ ID NO: 2092599 - RNA, 19 nt, Artificial Sequence
  Description of Artificial Sequence: Synthetic oligonucleotide
uacuuugaccuccuauaaa

SEQ ID NO: 2092600 - RNA, 19 nt, Artificial Sequence
  Description of Artificial Sequence: Synthetic oligonucleotide
aauucgaguccggacccag

SEQ ID NO: 2092601 - RNA, 19 nt, Artificial Sequence
  Description of Artificial Sequence: Synthetic oligonucleotide
ccuccuauaaagaacacca

SEQ ID NO: 2092602 - RNA, 19 nt, Artificial Sequence
  Description of Artificial Sequence: Synthetic oligonucleotide
gaucaaauuuacacuguga

SEQ ID NO: 2092603 - RNA, 19 nt, Artificial Sequence
  Description of Artificial Sequence: Synthetic oligonucleotide
cuuccaauagaucaaauuu

SEQ ID NO: 2092604 - RNA, 19 nt, Artificial Sequence
  Description of Artificial Sequence: Synthetic oligonucleotide
cucgguggcaccgagaguc

SEQ ID NO: 2092605 - RNA, 19 nt, Artificial Sequence
  Description of Artificial Sequence: Synthetic oligonucleotide
auuuguuccaagaaagauu

SEQ ID NO: 2092606 - RNA, 19 nt, Artificial Sequence
  Description of Artificial Sequence: Synthetic oligonucleotide
aaggaaggcguaaauucga

SEQ ID NO: 2092607 - RNA, 19 nt, Artificial Sequence
  Description of Artificial Sequence: Synthetic oligonucleotide
aguucugccgggcggagca

SEQ ID NO: 2092608 - RNA, 19 nt, Artificial Sequence
  Description of Artificial Sequence: Synthetic oligonucleotide
agcgauuauuaagaguuca

SEQ ID NO: 2092609 - RNA, 19 nt, Artificial Sequence
  Description of Artificial Sequence: Synthetic oligonucleotide
uuauuguaucaugucaaua

SEQ ID NO: 2092610 - RNA, 19 nt, Artificial Sequence
  Description of Artificial Sequence: Synthetic oligonucleotide
uauugaacuccuugucgaa

SEQ ID NO: 2092611 - RNA, 19 nt, Artificial Sequence
  Description of Artificial Sequence: Synthetic oligonucleotide
ccuauaaagaacaccauaa

SEQ ID NO: 2092612 - RNA, 19 nt, Artificial Sequence
  Description of Artificial Sequence: Synthetic oligonucleotide
agcaaauguuuacuuucca

SEQ ID NO: 2092613 - RNA, 19 nt, Artificial Sequence
  Description of Artificial Sequence: Synthetic oligonucleotide
agauaaggaaggcguaaau

SEQ ID NO: 2092614 - RNA, 19 nt, Artificial Sequence
  Description of Artificial Sequence: Synthetic oligonucleotide
auuauucuaguaacuuuga

SEQ ID NO: 2092615 - RNA, 19 nt, Artificial Sequence
  Description of Artificial Sequence: Synthetic oligonucleotide
ugucuuuuacuuugaccuc

SEQ ID NO: 2092616 - RNA, 19 nt, Artificial Sequence
  Description of Artificial Sequence: Synthetic oligonucleotide
agaaccccuaggaugauca

SEQ ID NO: 2092617 - RNA, 19 nt, Artificial Sequence
  Description of Artificial Sequence: Synthetic oligonucleotide
agaacucagcgauauugaa

SEQ ID NO: 2092618 - RNA, 19 nt, Artificial Sequence
  Description of Artificial Sequence: Synthetic oligonucleotide
uccggagucgggucgcccg

SEQ ID NO: 2092619 - RNA, 19 nt, Artificial Sequence
  Description of Artificial Sequence: Synthetic oligonucleotide
uaacgaacuuccuuccuuu

SEQ ID NO: 2092620 - RNA, 19 nt, Artificial Sequence
  Description of Artificial Sequence: Synthetic oligonucleotide
acaucaggauguuaacgaa

SEQ ID NO: 2092621 - RNA, 19 nt, Artificial Sequence
  Description of Artificial Sequence: Synthetic oligonucleotide
gauguuaacgaacuuccuu

SEQ ID NO: 2092622 - RNA, 19 nt, Artificial Sequence
  Description of Artificial Sequence: Synthetic oligonucleotide
ccaaaagcacaucaggaug

SEQ ID NO: 2092623 - RNA, 19 nt, Artificial Sequence
  Description of Artificial Sequence: Synthetic oligonucleotide
cagcggguaaggaagcgag

SEQ ID NO: 2092624 - RNA, 19 nt, Artificial Sequence
  Description of Artificial Sequence: Synthetic oligonucleotide
uucugucuuuuacuuugac

SEQ ID NO: 2092625 - RNA, 19 nt, Artificial Sequence
  Description of Artificial Sequence: Synthetic oligonucleotide
ggagcagcggguaaggaag

SEQ ID NO: 2092626 - RNA, 19 nt, Artificial Sequence
  Description of Artificial Sequence: Synthetic oligonucleotide
agacucaguggggaugucg

SEQ ID NO: 2092627 - RNA, 19 nt, Artificial Sequence
  Description of Artificial Sequence: Synthetic oligonucleotide
gucagauaccaaaagcaca

SEQ ID NO: 2092628 - RNA, 19 nt, Artificial Sequence
  Description of Artificial Sequence: Synthetic oligonucleotide
gauguguagacaaugucau

SEQ ID NO: 2092629 - RNA, 19 nt, Artificial Sequence
  Description of Artificial Sequence: Synthetic oligonucleotide
cuaguaacuuugaguguuc

SEQ ID NO: 2092630 - RNA, 19 nt, Artificial Sequence
  Description of Artificial Sequence: Synthetic oligonucleotide
augcuuuauuguaucaugu

SEQ ID NO: 2092631 - RNA, 19 nt, Artificial Sequence
  Description of Artificial Sequence: Synthetic oligonucleotide
gauuuguuccaagaaagau

SEQ ID NO: 2092632 - RNA, 19 nt, Artificial Sequence
  Description of Artificial Sequence: Synthetic oligonucleotide
aaguucugccgggcggagc

SEQ ID NO: 2092633 - RNA, 19 nt, Artificial Sequence
  Description of Artificial Sequence: Synthetic oligonucleotide
uccggacccaguugauggg

SEQ ID NO: 2092634 - RNA, 19 nt, Artificial Sequence
  Description of Artificial Sequence: Synthetic oligonucleotide
ggaauauuuccaaauaaua

SEQ ID NO: 2092635 - RNA, 19 nt, Artificial Sequence
  Description of Artificial Sequence: Synthetic oligonucleotide
caaggaauauuuccaaaua

SEQ ID NO: 2092636 - RNA, 19 nt, Artificial Sequence
  Description of Artificial Sequence: Synthetic oligonucleotide
uaguaacuuugaguguuca

SEQ ID NO: 2092637 - RNA, 19 nt, Artificial Sequence
  Description of Artificial Sequence: Synthetic oligonucleotide
acucagcgauauugaacuc

SEQ ID NO: 2092638 - RNA, 19 nt, Artificial Sequence
  Description of Artificial Sequence: Synthetic oligonucleotide
uccccuguugauguguaga

SEQ ID NO: 2092639 - RNA, 19 nt, Artificial Sequence
  Description of Artificial Sequence: Synthetic oligonucleotide
gguuggagaaccccuagga

SEQ ID NO: 2092640 - RNA, 19 nt, Artificial Sequence
  Description of Artificial Sequence: Synthetic oligonucleotide
guaacuuugaguguucaau

SEQ ID NO: 2092641 - RNA, 19 nt, Artificial Sequence
  Description of Artificial Sequence: Synthetic oligonucleotide
ucgaguccggacccaguug

SEQ ID NO: 2092642 - RNA, 19 nt, Artificial Sequence
  Description of Artificial Sequence: Synthetic oligonucleotide
aagugaccuuuucuuuuaa

SEQ ID NO: 2092643 - RNA, 19 nt, Artificial Sequence
  Description of Artificial Sequence: Synthetic oligonucleotide
guuggcgacagccucaccu

SEQ ID NO: 2092644 - RNA, 19 nt, Artificial Sequence
  Description of Artificial Sequence: Synthetic oligonucleotide
uucgaguccggacccaguu

SEQ ID NO: 2092645 - RNA, 19 nt, Artificial Sequence
  Description of Artificial Sequence: Synthetic oligonucleotide
aguucuuccaauagaucaa

SEQ ID NO: 2092646 - RNA, 19 nt, Artificial Sequence
  Description of Artificial Sequence: Synthetic oligonucleotide
ucggcacuagucagauacc

SEQ ID NO: 2092647 - RNA, 19 nt, Artificial Sequence
  Description of Artificial Sequence: Synthetic oligonucleotide
ugaacuccuugucgaaaua

SEQ ID NO: 2092648 - RNA, 19 nt, Artificial Sequence
  Description of Artificial Sequence: Synthetic oligonucleotide
aauucguagcuugcacuaa

SEQ ID NO: 2092649 - RNA, 19 nt, Artificial Sequence
  Description of Artificial Sequence: Synthetic oligonucleotide
uaggaugaucauucuuguc

SEQ ID NO: 2092650 - RNA, 19 nt, Artificial Sequence
  Description of Artificial Sequence: Synthetic oligonucleotide
caaaauucaguuggcgaca

SEQ ID NO: 2092651 - RNA, 19 nt, Artificial Sequence
  Description of Artificial Sequence: Synthetic oligonucleotide
aacuggcuccacucagaga

SEQ ID NO: 2092652 - RNA, 19 nt, Artificial Sequence
  Description of Artificial Sequence: Synthetic oligonucleotide
gaaaguucugccgggcgga

SEQ ID NO: 2092653 - RNA, 19 nt, Artificial Sequence
  Description of Artificial Sequence: Synthetic oligonucleotide
caagaaagauuauucuagu

SEQ ID NO: 2092654 - RNA, 19 nt, Artificial Sequence
  Description of Artificial Sequence: Synthetic oligonucleotide
uuggcgacagccucaccuc

SEQ ID NO: 2092655 - RNA, 19 nt, Artificial Sequence
  Description of Artificial Sequence: Synthetic oligonucleotide
aaaguucugccgggcggag

SEQ ID NO: 2092656 - RNA, 19 nt, Artificial Sequence
  Description of Artificial Sequence: Synthetic oligonucleotide
cuaccuccgcagcaagugc

SEQ ID NO: 2092657 - RNA, 19 nt, Artificial Sequence
  Description of Artificial Sequence: Synthetic oligonucleotide
guagcugcggcugggagca

SEQ ID NO: 2092658 - RNA, 19 nt, Artificial Sequence
  Description of Artificial Sequence: Synthetic oligonucleotide
ccacagacuuaauuaagug

SEQ ID NO: 2092659 - RNA, 19 nt, Artificial Sequence
  Description of Artificial Sequence: Synthetic oligonucleotide
ggaugucggcacuagucag

SEQ ID NO: 2092660 - RNA, 19 nt, Artificial Sequence
  Description of Artificial Sequence: Synthetic oligonucleotide
ggcgacacaagcaacaaaa

SEQ ID NO: 2092661 - RNA, 19 nt, Artificial Sequence
  Description of Artificial Sequence: Synthetic oligonucleotide
gauaaggaaggcguaaauu

SEQ ID NO: 2092662 - RNA, 19 nt, Artificial Sequence
  Description of Artificial Sequence: Synthetic oligonucleotide
agucgggucgcccggccag

SEQ ID NO: 2092663 - RNA, 19 nt, Artificial Sequence
  Description of Artificial Sequence: Synthetic oligonucleotide
acccaguugaugggguugg

SEQ ID NO: 2092664 - RNA, 19 nt, Artificial Sequence
  Description of Artificial Sequence: Synthetic oligonucleotide
cuugucgaaauaggcccag

SEQ ID NO: 2092665 - RNA, 19 nt, Artificial Sequence
  Description of Artificial Sequence: Synthetic oligonucleotide
accgcgcuugcgcccaggc

SEQ ID NO: 2092666 - RNA, 19 nt, Artificial Sequence
  Description of Artificial Sequence: Synthetic oligonucleotide
auaccuguaggaccucuuu

SEQ ID NO: 2092667 - RNA, 19 nt, Artificial Sequence
  Description of Artificial Sequence: Synthetic oligonucleotide
uagcuugcacuaagcaaau

SEQ ID NO: 2092668 - RNA, 19 nt, Artificial Sequence
  Description of Artificial Sequence: Synthetic oligonucleotide
cacuagucagauaccaaaa

SEQ ID NO: 2092669 - RNA, 19 nt, Artificial Sequence
  Description of Artificial Sequence: Synthetic oligonucleotide
guaguucugucuuuuacuu

SEQ ID NO: 2092670 - RNA, 19 nt, Artificial Sequence
  Description of Artificial Sequence: Synthetic oligonucleotide
aggaaggcguaaauucgag

SEQ ID NO: 2092671 - RNA, 19 nt, Artificial Sequence
  Description of Artificial Sequence: Synthetic oligonucleotide
gaugucggcacuagucaga

SEQ ID NO: 2092672 - RNA, 19 nt, Artificial Sequence
  Description of Artificial Sequence: Synthetic oligonucleotide
aaauucgaguccggaccca

SEQ ID NO: 2092673 - RNA, 19 nt, Artificial Sequence
  Description of Artificial Sequence: Synthetic oligonucleotide
aggaacgcagcgccgggcu

SEQ ID NO: 2092674 - RNA, 19 nt, Artificial Sequence
  Description of Artificial Sequence: Synthetic oligonucleotide
gucgaaauaggcccagaua

SEQ ID NO: 2092675 - RNA, 19 nt, Artificial Sequence
  Description of Artificial Sequence: Synthetic oligonucleotide
gacccaguugaugggguug

SEQ ID NO: 2092676 - RNA, 19 nt, Artificial Sequence
  Description of Artificial Sequence: Synthetic oligonucleotide
aguucacauccugauuugu

SEQ ID NO: 2092677 - RNA, 19 nt, Artificial Sequence
  Description of Artificial Sequence: Synthetic oligonucleotide
accgagaguccggagucgg

SEQ ID NO: 2092678 - RNA, 19 nt, Artificial Sequence
  Description of Artificial Sequence: Synthetic oligonucleotide
caaaaguaauccacagacu

SEQ ID NO: 2092679 - RNA, 19 nt, Artificial Sequence
  Description of Artificial Sequence: Synthetic oligonucleotide
guugauguguagacaaugu

SEQ ID NO: 2092680 - RNA, 19 nt, Artificial Sequence
  Description of Artificial Sequence: Synthetic oligonucleotide
caaacuggcuccacucaga

SEQ ID NO: 2092681 - RNA, 19 nt, Artificial Sequence
  Description of Artificial Sequence: Synthetic oligonucleotide
agacagugaagugaccuuu

SEQ ID NO: 2092682 - RNA, 19 nt, Artificial Sequence
  Description of Artificial Sequence: Synthetic oligonucleotide
gcacuagucagauaccaaa

SEQ ID NO: 2092683 - RNA, 19 nt, Artificial Sequence
  Description of Artificial Sequence: Synthetic oligonucleotide
guucaauccgugcaauagu

SEQ ID NO: 2092684 - RNA, 19 nt, Artificial Sequence
  Description of Artificial Sequence: Synthetic oligonucleotide
caucuaccuccgcagcaag

SEQ ID NO: 2092685 - RNA, 19 nt, Artificial Sequence
  Description of Artificial Sequence: Synthetic oligonucleotide
cugaaauucguagcuugca

SEQ ID NO: 2092686 - RNA, 19 nt, Artificial Sequence
  Description of Artificial Sequence: Synthetic oligonucleotide
cguaaauucgaguccggac

SEQ ID NO: 2092687 - RNA, 19 nt, Artificial Sequence
  Description of Artificial Sequence: Synthetic oligonucleotide
gggaugucggcacuaguca

SEQ ID NO: 2092688 - RNA, 19 nt, Artificial Sequence
  Description of Artificial Sequence: Synthetic oligonucleotide
aaagcacaucaggauguua

SEQ ID NO: 2092689 - RNA, 19 nt, Artificial Sequence
  Description of Artificial Sequence: Synthetic oligonucleotide
cuaggaugaucauucuugu

SEQ ID NO: 2092690 - RNA, 19 nt, Artificial Sequence
  Description of Artificial Sequence: Synthetic oligonucleotide
cagcgauuauuaagaguuc

SEQ ID NO: 2092691 - RNA, 19 nt, Artificial Sequence
  Description of Artificial Sequence: Synthetic oligonucleotide
gagaguccggagucggguc

SEQ ID NO: 2092692 - RNA, 19 nt, Artificial Sequence
  Description of Artificial Sequence: Synthetic oligonucleotide
aguguucaauccgugcaau

SEQ ID NO: 2092693 - RNA, 19 nt, Artificial Sequence
  Description of Artificial Sequence: Synthetic oligonucleotide
cuugcacuaagcaaauguu

SEQ ID NO: 2092694 - RNA, 19 nt, Artificial Sequence
  Description of Artificial Sequence: Synthetic oligonucleotide
accuguggaaaaugcuuua

SEQ ID NO: 2092695 - RNA, 19 nt, Artificial Sequence
  Description of Artificial Sequence: Synthetic oligonucleotide
auccgugcaauaguccagu

SEQ ID NO: 2092696 - RNA, 19 nt, Artificial Sequence
  Description of Artificial Sequence: Synthetic oligonucleotide
aguuggcgacagccucacc

SEQ ID NO: 2092697 - RNA, 19 nt, Artificial Sequence
  Description of Artificial Sequence: Synthetic oligonucleotide
uucugccgggcggagcagg

SEQ ID NO: 2092698 - RNA, 19 nt, Artificial Sequence
  Description of Artificial Sequence: Synthetic oligonucleotide
ucgguggcaccgagagucc

SEQ ID NO: 2092699 - RNA, 19 nt, Artificial Sequence
  Description of Artificial Sequence: Synthetic oligonucleotide
uuguuccaagaaagauuau

SEQ ID NO: 2092700 - RNA, 19 nt, Artificial Sequence
  Description of Artificial Sequence: Synthetic oligonucleotide
uguccccuguugaugugua

SEQ ID NO: 2092701 - RNA, 19 nt, Artificial Sequence
  Description of Artificial Sequence: Synthetic oligonucleotide
gcaaggaauauuuccaaau

SEQ ID NO: 2092702 - RNA, 19 nt, Artificial Sequence
  Description of Artificial Sequence: Synthetic oligonucleotide
ggcccagauaaggaaggcg

SEQ ID NO: 2092703 - RNA, 19 nt, Artificial Sequence
  Description of Artificial Sequence: Synthetic oligonucleotide
guaggaccucuuuggcuac

SEQ ID NO: 2092704 - RNA, 19 nt, Artificial Sequence
  Description of Artificial Sequence: Synthetic oligonucleotide
ggaagcgagggcuggagaa

SEQ ID NO: 2092705 - RNA, 19 nt, Artificial Sequence
  Description of Artificial Sequence: Synthetic oligonucleotide
guuaacgaacuuccuuccu

SEQ ID NO: 2092706 - RNA, 19 nt, Artificial Sequence
  Description of Artificial Sequence: Synthetic oligonucleotide
aguccggacccaguugaug

SEQ ID NO: 2092707 - RNA, 19 nt, Artificial Sequence
  Description of Artificial Sequence: Synthetic oligonucleotide
caggcuuuacuccuugugu

SEQ ID NO: 2092708 - RNA, 19 nt, Artificial Sequence
  Description of Artificial Sequence: Synthetic oligonucleotide
gcgauauugaacuccuugu

SEQ ID NO: 2092709 - RNA, 19 nt, Artificial Sequence
  Description of Artificial Sequence: Synthetic oligonucleotide
agcggguaaggaagcgagg

SEQ ID NO: 2092710 - RNA, 19 nt, Artificial Sequence
  Description of Artificial Sequence: Synthetic oligonucleotide
gcgauuauuaagaguucac

SEQ ID NO: 2092711 - RNA, 19 nt, Artificial Sequence
  Description of Artificial Sequence: Synthetic oligonucleotide
cucggugcuguagcugcgg

SEQ ID NO: 2092712 - RNA, 19 nt, Artificial Sequence
  Description of Artificial Sequence: Synthetic oligonucleotide
acacugugacagcaacuua

SEQ ID NO: 2092713 - RNA, 19 nt, Artificial Sequence
  Description of Artificial Sequence: Synthetic oligonucleotide
cgcgcuugcgcccaggcgg

SEQ ID NO: 2092714 - RNA, 19 nt, Artificial Sequence
  Description of Artificial Sequence: Synthetic oligonucleotide
guuggagaaccccuaggau

SEQ ID NO: 2092715 - RNA, 19 nt, Artificial Sequence
  Description of Artificial Sequence: Synthetic oligonucleotide
augucggcacuagucagau

SEQ ID NO: 2092716 - RNA, 19 nt, Artificial Sequence
  Description of Artificial Sequence: Synthetic oligonucleotide
cacagcgauuauuaagagu

SEQ ID NO: 2092717 - RNA, 19 nt, Artificial Sequence
  Description of Artificial Sequence: Synthetic oligonucleotide
ccaauagaucaaauuuaca

SEQ ID NO: 2092718 - RNA, 19 nt, Artificial Sequence
  Description of Artificial Sequence: Synthetic oligonucleotide
cgauauugaacuccuuguc

SEQ ID NO: 2092719 - RNA, 19 nt, Artificial Sequence
  Description of Artificial Sequence: Synthetic oligonucleotide
gggguuggagaaccccuag

SEQ ID NO: 2092720 - RNA, 19 nt, Artificial Sequence
  Description of Artificial Sequence: Synthetic oligonucleotide
ggggaugucggcacuaguc

SEQ ID NO: 2092721 - RNA, 19 nt, Artificial Sequence
  Description of Artificial Sequence: Synthetic oligonucleotide
uccgugcaauaguccaguc

SEQ ID NO: 2092722 - RNA, 19 nt, Artificial Sequence
  Description of Artificial Sequence: Synthetic oligonucleotide
cagauaaggaaggcguaaa

SEQ ID NO: 2092723 - RNA, 19 nt, Artificial Sequence
  Description of Artificial Sequence: Synthetic oligonucleotide
ggaacaaacuggcuccacu

SEQ ID NO: 2092724 - RNA, 19 nt, Artificial Sequence
  Description of Artificial Sequence: Synthetic oligonucleotide
gaccuccuauaaagaacac

SEQ ID NO: 2092725 - RNA, 19 nt, Artificial Sequence
  Description of Artificial Sequence: Synthetic oligonucleotide
gugaagugaccuuuucuuu

SEQ ID NO: 2092726 - RNA, 19 nt, Artificial Sequence
  Description of Artificial Sequence: Synthetic oligonucleotide
cagauaccaaaagcacauc

SEQ ID NO: 2092727 - RNA, 19 nt, Artificial Sequence
  Description of Artificial Sequence: Synthetic oligonucleotide
gagaaccccuaggaugauc

SEQ ID NO: 2092728 - RNA, 19 nt, Artificial Sequence
  Description of Artificial Sequence: Synthetic oligonucleotide
cuguaggaccucuuuggcu

SEQ ID NO: 2092729 - RNA, 19 nt, Artificial Sequence
  Description of Artificial Sequence: Synthetic oligonucleotide
ccccuguugauguguagac

SEQ ID NO: 2092730 - RNA, 19 nt, Artificial Sequence
  Description of Artificial Sequence: Synthetic oligonucleotide
guucugucuuuuacuuuga

SEQ ID NO: 2092731 - RNA, 19 nt, Artificial Sequence
  Description of Artificial Sequence: Synthetic oligonucleotide
aguccggagucgggucgcc

SEQ ID NO: 2092732 - RNA, 19 nt, Artificial Sequence
  Description of Artificial Sequence: Synthetic oligonucleotide
ccaagcgcagcgaggggcc

SEQ ID NO: 2092733 - RNA, 19 nt, Artificial Sequence
  Description of Artificial Sequence: Synthetic oligonucleotide
gaguccggagucgggucgc

SEQ ID NO: 2092734 - RNA, 19 nt, Artificial Sequence
  Description of Artificial Sequence: Synthetic oligonucleotide
caccgagaguccggagucg

SEQ ID NO: 2092735 - RNA, 19 nt, Artificial Sequence
  Description of Artificial Sequence: Synthetic oligonucleotide
ggcguaaauucgaguccgg

SEQ ID NO: 2092736 - RNA, 19 nt, Artificial Sequence
  Description of Artificial Sequence: Synthetic oligonucleotide
aucuaccuccgcagcaagu

SEQ ID NO: 2092737 - RNA, 19 nt, Artificial Sequence
  Description of Artificial Sequence: Synthetic oligonucleotide
cgauuauuaagaguucaca

SEQ ID NO: 2092738 - RNA, 19 nt, Artificial Sequence
  Description of Artificial Sequence: Synthetic oligonucleotide
gccgggcuuguccaggccc

SEQ ID NO: 2092739 - RNA, 19 nt, Artificial Sequence
  Description of Artificial Sequence: Synthetic oligonucleotide
cuggcguugcuggggcugc

SEQ ID NO: 2092740 - RNA, 19 nt, Artificial Sequence
  Description of Artificial Sequence: Synthetic oligonucleotide
caggaacgcagcgccgggc

SEQ ID NO: 2092741 - RNA, 19 nt, Artificial Sequence
  Description of Artificial Sequence: Synthetic oligonucleotide
cguagcuugcacuaagcaa

SEQ ID NO: 2092742 - RNA, 19 nt, Artificial Sequence
  Description of Artificial Sequence: Synthetic oligonucleotide
gccgggaccgcgcuugcgc

SEQ ID NO: 2092743 - RNA, 19 nt, Artificial Sequence
  Description of Artificial Sequence: Synthetic oligonucleotide
ggaaggcguaaauucgagu

SEQ ID NO: 2092744 - RNA, 19 nt, Artificial Sequence
  Description of Artificial Sequence: Synthetic oligonucleotide
cuccuauaaagaacaccau

SEQ ID NO: 2092745 - RNA, 19 nt, Artificial Sequence
  Description of Artificial Sequence: Synthetic oligonucleotide
gagucgggucgcccggcca

SEQ ID NO: 2092746 - RNA, 19 nt, Artificial Sequence
  Description of Artificial Sequence: Synthetic oligonucleotide
aguggggaugucggcacua

SEQ ID NO: 2092747 - RNA, 19 nt, Artificial Sequence
  Description of Artificial Sequence: Synthetic oligonucleotide
gcccagauaaggaaggcgu

SEQ ID NO: 2092748 - RNA, 19 nt, Artificial Sequence
  Description of Artificial Sequence: Synthetic oligonucleotide
auucgaguccggacccagu

SEQ ID NO: 2092749 - RNA, 19 nt, Artificial Sequence
  Description of Artificial Sequence: Synthetic oligonucleotide
gcugcggcugggagcagcg

SEQ ID NO: 2092750 - RNA, 19 nt, Artificial Sequence
  Description of Artificial Sequence: Synthetic oligonucleotide
ggcuacaaguucuuccaau

SEQ ID NO: 2092751 - RNA, 19 nt, Artificial Sequence
  Description of Artificial Sequence: Synthetic oligonucleotide
ccuugucgaaauaggccca

SEQ ID NO: 2092752 - RNA, 19 nt, Artificial Sequence
  Description of Artificial Sequence: Synthetic oligonucleotide
ggagauguccccuguugau

SEQ ID NO: 2092753 - RNA, 19 nt, Artificial Sequence
  Description of Artificial Sequence: Synthetic oligonucleotide
guggcaccgagaguccgga

SEQ ID NO: 2092754 - RNA, 19 nt, Artificial Sequence
  Description of Artificial Sequence: Synthetic oligonucleotide
ugucggcacuagucagaua

SEQ ID NO: 2092755 - RNA, 19 nt, Artificial Sequence
  Description of Artificial Sequence: Synthetic oligonucleotide
gcagcgccgggcuugucca

SEQ ID NO: 2092756 - RNA, 19 nt, Artificial Sequence
  Description of Artificial Sequence: Synthetic oligonucleotide
cuguugauguguagacaau

SEQ ID NO: 2092757 - RNA, 19 nt, Artificial Sequence
  Description of Artificial Sequence: Synthetic oligonucleotide
gcguaaauucgaguccgga

SEQ ID NO: 2092758 - RNA, 19 nt, Artificial Sequence
  Description of Artificial Sequence: Synthetic oligonucleotide
ccggacccaguugaugggg

SEQ ID NO: 2092759 - RNA, 19 nt, Artificial Sequence
  Description of Artificial Sequence: Synthetic oligonucleotide
ggagucgggucgcccggcc

SEQ ID NO: 2092760 - RNA, 19 nt, Artificial Sequence
  Description of Artificial Sequence: Synthetic oligonucleotide
ccgugcaauaguccaguca

SEQ ID NO: 2092761 - RNA, 19 nt, Artificial Sequence
  Description of Artificial Sequence: Synthetic oligonucleotide
uugcgcccaggcggcggcg

SEQ ID NO: 2092762 - RNA, 19 nt, Artificial Sequence
  Description of Artificial Sequence: Synthetic oligonucleotide
cggguaaggaagcgagggc

SEQ ID NO: 2092763 - RNA, 19 nt, Artificial Sequence
  Description of Artificial Sequence: Synthetic oligonucleotide
agcgagggcuggagaaagu

SEQ ID NO: 2092764 - RNA, 19 nt, Artificial Sequence
  Description of Artificial Sequence: Synthetic oligonucleotide
ggcacuagucagauaccaa

SEQ ID NO: 2092765 - RNA, 19 nt, Artificial Sequence
  Description of Artificial Sequence: Synthetic oligonucleotide
ccucaccucgguggcaccg

SEQ ID NO: 2092766 - RNA, 19 nt, Artificial Sequence
  Description of Artificial Sequence: Synthetic oligonucleotide
ccagauaaggaaggcguaa

SEQ ID NO: 2092767 - RNA, 19 nt, Artificial Sequence
  Description of Artificial Sequence: Synthetic oligonucleotide
gaccgcgcuugcgcccagg

SEQ ID NO: 2092768 - RNA, 19 nt, Artificial Sequence
  Description of Artificial Sequence: Synthetic oligonucleotide
ccaacuucaccuggaacaa

SEQ ID NO: 2092769 - RNA, 19 nt, Artificial Sequence
  Description of Artificial Sequence: Synthetic oligonucleotide
gaaccccuaggaugaucau

SEQ ID NO: 2092770 - RNA, 19 nt, Artificial Sequence
  Description of Artificial Sequence: Synthetic oligonucleotide
cgaguccggacccaguuga

SEQ ID NO: 2092771 - RNA, 19 nt, Artificial Sequence
  Description of Artificial Sequence: Synthetic oligonucleotide
gcagcggguaaggaagcga

SEQ ID NO: 2092772 - RNA, 19 nt, Artificial Sequence
  Description of Artificial Sequence: Synthetic oligonucleotide
ggggccgggaccgcgcuug

SEQ ID NO: 2092773 - RNA, 19 nt, Artificial Sequence
  Description of Artificial Sequence: Synthetic oligonucleotide
gcuugcgcccaggcggcgg

SEQ ID NO: 2092774 - RNA, 19 nt, Artificial Sequence
  Description of Artificial Sequence: Synthetic oligonucleotide
caacuucaccuggaacaaa

SEQ ID NO: 2092775 - RNA, 19 nt, Artificial Sequence
  Description of Artificial Sequence: Synthetic oligonucleotide
gcccaagcgcagcgagggg

SEQ ID NO: 2092776 - RNA, 19 nt, Artificial Sequence
  Description of Artificial Sequence: Synthetic oligonucleotide
guccggagucgggucgccc

SEQ ID NO: 2092777 - RNA, 19 nt, Artificial Sequence
  Description of Artificial Sequence: Synthetic oligonucleotide
ccggagucgggucgcccgg

SEQ ID NO: 2092778 - RNA, 19 nt, Artificial Sequence
  Description of Artificial Sequence: Synthetic oligonucleotide
caccucgguggcaccgaga

SEQ ID NO: 2092779 - RNA, 19 nt, Artificial Sequence
  Description of Artificial Sequence: Synthetic oligonucleotide
ggcggcggcgacacaagca

SEQ ID NO: 2092780 - RNA, 19 nt, Artificial Sequence
  Description of Artificial Sequence: Synthetic oligonucleotide
cccagauaaggaaggcgua

SEQ ID NO: 2092781 - RNA, 19 nt, Artificial Sequence
  Description of Artificial Sequence: Synthetic oligonucleotide
caugagcaaaagccugcuu

SEQ ID NO: 2092782 - RNA, 19 nt, Artificial Sequence
  Description of Artificial Sequence: Synthetic oligonucleotide
ccgcgcuugcgcccaggcg

SEQ ID NO: 2092783 - RNA, 19 nt, Artificial Sequence
  Description of Artificial Sequence: Synthetic oligonucleotide
gcgccgggcuuguccaggc

SEQ ID NO: 2092784 - RNA, 19 nt, Artificial Sequence
  Description of Artificial Sequence: Synthetic oligonucleotide
gcuguagcugcggcuggga

SEQ ID NO: 2092785 - RNA, 19 nt, Artificial Sequence
  Description of Artificial Sequence: Synthetic oligonucleotide
cgacacaagcaacaaaauu

SEQ ID NO: 2092786 - RNA, 19 nt, Artificial Sequence
  Description of Artificial Sequence: Synthetic oligonucleotide
gcgcuugcgcccaggcggc

SEQ ID NO: 2092787 - RNA, 19 nt, Artificial Sequence
  Description of Artificial Sequence: Synthetic oligonucleotide
ccgggcuuguccaggccca

SEQ ID NO: 2092788 - RNA, 19 nt, Artificial Sequence
  Description of Artificial Sequence: Synthetic oligonucleotide
cggcacuagucagauacca

SEQ ID NO: 2092789 - RNA, 19 nt, Artificial Sequence
  Description of Artificial Sequence: Synthetic oligonucleotide
gcgacacaagcaacaaaau

SEQ ID NO: 2092790 - RNA, 19 nt, Artificial Sequence
  Description of Artificial Sequence: Synthetic oligonucleotide
gggaccgcgcuugcgccca

SEQ ID NO: 2092791 - RNA, 19 nt, Artificial Sequence
  Description of Artificial Sequence: Synthetic oligonucleotide
gcuccucggugcuguagcu

SEQ ID NO: 2092792 - RNA, 19 nt, Artificial Sequence
  Description of Artificial Sequence: Synthetic oligonucleotide
gaguccggacccaguugau

SEQ ID NO: 2092793 - RNA, 19 nt, Artificial Sequence
  Description of Artificial Sequence: Synthetic oligonucleotide
cagagaacucagcgauauu

SEQ ID NO: 2092794 - RNA, 19 nt, Artificial Sequence
  Description of Artificial Sequence: Synthetic oligonucleotide
ggcguugcuggggcugcuc

SEQ ID NO: 2092795 - RNA, 19 nt, Artificial Sequence
  Description of Artificial Sequence: Synthetic oligonucleotide
cgguggcaccgagaguccg

SEQ ID NO: 2092796 - RNA, 19 nt, Artificial Sequence
  Description of Artificial Sequence: Synthetic oligonucleotide
cgggaccgcgcuugcgccc

SEQ ID NO: 2092797 - RNA, 19 nt, Artificial Sequence
  Description of Artificial Sequence: Synthetic oligonucleotide
cagcgauauugaacuccuu

SEQ ID NO: 2092798 - RNA, 19 nt, Artificial Sequence
  Description of Artificial Sequence: Synthetic oligonucleotide
gggccgggaccgcgcuugc

SEQ ID NO: 2092799 - RNA, 19 nt, Artificial Sequence
  Description of Artificial Sequence: Synthetic oligonucleotide
ggaccgcgcuugcgcccag

SEQ ID NO: 2092800 - RNA, 19 nt, Artificial Sequence
  Description of Artificial Sequence: Synthetic oligonucleotide
acgcagcgccgggcuuguc

SEQ ID NO: 2092801 - RNA, 19 nt, Artificial Sequence
  Description of Artificial Sequence: Synthetic oligonucleotide
ggaacgcagcgccgggcuu

SEQ ID NO: 2092802 - RNA, 19 nt, Artificial Sequence
  Description of Artificial Sequence: Synthetic oligonucleotide
gcgcccaggcggcggcgac

SEQ ID NO: 2092803 - RNA, 19 nt, Artificial Sequence
  Description of Artificial Sequence: Synthetic oligonucleotide
cgagaguccggagucgggu

SEQ ID NO: 2092804 - RNA, 19 nt, Artificial Sequence
  Description of Artificial Sequence: Synthetic oligonucleotide
cgccgggcuuguccaggcc

SEQ ID NO: 2092805 - RNA, 19 nt, Artificial Sequence
  Description of Artificial Sequence: Synthetic oligonucleotide
ggagaaccccuaggaugau

SEQ ID NO: 2092806 - RNA, 19 nt, Artificial Sequence
  Description of Artificial Sequence: Synthetic oligonucleotide
cggacccaguugauggggu

SEQ ID NO: 2092807 - RNA, 19 nt, Artificial Sequence
  Description of Artificial Sequence: Synthetic oligonucleotide
cgggucgcccggccaggca

SEQ ID NO: 2092808 - RNA, 19 nt, Artificial Sequence
  Description of Artificial Sequence: Synthetic oligonucleotide
cccaggcggcggcgacaca

SEQ ID NO: 2092809 - RNA, 19 nt, Artificial Sequence
  Description of Artificial Sequence: Synthetic oligonucleotide
cgggcuuguccaggcccaa

SEQ ID NO: 2092810 - RNA, 19 nt, Artificial Sequence
  Description of Artificial Sequence: Synthetic oligonucleotide
aaucuugaggcuugggucc

SEQ ID NO: 2092811 - RNA, 19 nt, Artificial Sequence
  Description of Artificial Sequence: Synthetic oligonucleotide
aaagacaccugucugauug

SEQ ID NO: 2092812 - RNA, 19 nt, Artificial Sequence
  Description of Artificial Sequence: Synthetic oligonucleotide
uuuaaauggguucuggaag

SEQ ID NO: 2092813 - RNA, 19 nt, Artificial Sequence
  Description of Artificial Sequence: Synthetic oligonucleotide
aaaucuugaggcuuggguc

SEQ ID NO: 2092814 - RNA, 19 nt, Artificial Sequence
  Description of Artificial Sequence: Synthetic oligonucleotide
aaaauaguggugcacgauc

SEQ ID NO: 2092815 - RNA, 19 nt, Artificial Sequence
  Description of Artificial Sequence: Synthetic oligonucleotide
aaacugaucccucacaaag

SEQ ID NO: 2092816 - RNA, 19 nt, Artificial Sequence
  Description of Artificial Sequence: Synthetic oligonucleotide
ugaaccaacucaaugauug

SEQ ID NO: 2092817 - RNA, 19 nt, Artificial Sequence
  Description of Artificial Sequence: Synthetic oligonucleotide
agagacaacaaguugauug

SEQ ID NO: 2092818 - RNA, 19 nt, Artificial Sequence
  Description of Artificial Sequence: Synthetic oligonucleotide
uaggaaugaacucuguccg

SEQ ID NO: 2092819 - RNA, 19 nt, Artificial Sequence
  Description of Artificial Sequence: Synthetic oligonucleotide
aaauaaacacccucccagg

SEQ ID NO: 2092820 - RNA, 19 nt, Artificial Sequence
  Description of Artificial Sequence: Synthetic oligonucleotide
gagucuuucucacugaucc

SEQ ID NO: 2092821 - RNA, 19 nt, Artificial Sequence
  Description of Artificial Sequence: Synthetic oligonucleotide
aguugauugucucaugaac

SEQ ID NO: 2092822 - RNA, 19 nt, Artificial Sequence
  Description of Artificial Sequence: Synthetic oligonucleotide
uuuaaggucuccuugaaau

SEQ ID NO: 2092823 - RNA, 19 nt, Artificial Sequence
  Description of Artificial Sequence: Synthetic oligonucleotide
auuauggucaaaauagugg

SEQ ID NO: 2092824 - RNA, 19 nt, Artificial Sequence
  Description of Artificial Sequence: Synthetic oligonucleotide
cuaggaaugaacucugucc

SEQ ID NO: 2092825 - RNA, 19 nt, Artificial Sequence
  Description of Artificial Sequence: Synthetic oligonucleotide
ugucucaugaaccaacuca

SEQ ID NO: 2092826 - RNA, 19 nt, Artificial Sequence
  Description of Artificial Sequence: Synthetic oligonucleotide
uaucugagaauagagauca

SEQ ID NO: 2092827 - RNA, 19 nt, Artificial Sequence
  Description of Artificial Sequence: Synthetic oligonucleotide
aucuugagauucuugggcc

SEQ ID NO: 2092828 - RNA, 19 nt, Artificial Sequence
  Description of Artificial Sequence: Synthetic oligonucleotide
agaucauguucuuuuaagg

SEQ ID NO: 2092829 - RNA, 19 nt, Artificial Sequence
  Description of Artificial Sequence: Synthetic oligonucleotide
uuauggucaaaauaguggu

SEQ ID NO: 2092830 - RNA, 19 nt, Artificial Sequence
  Description of Artificial Sequence: Synthetic oligonucleotide
auggucaaaauaguggugc

SEQ ID NO: 2092831 - RNA, 19 nt, Artificial Sequence
  Description of Artificial Sequence: Synthetic oligonucleotide
ucugggagcacauuggcag

SEQ ID NO: 2092832 - RNA, 19 nt, Artificial Sequence
  Description of Artificial Sequence: Synthetic oligonucleotide
gauucuugggccuuuccgg

SEQ ID NO: 2092833 - RNA, 19 nt, Artificial Sequence
  Description of Artificial Sequence: Synthetic oligonucleotide
cuccuugaaauaaacaccc

SEQ ID NO: 2092834 - RNA, 19 nt, Artificial Sequence
  Description of Artificial Sequence: Synthetic oligonucleotide
gagaauagagaucauguuc

SEQ ID NO: 2092835 - RNA, 19 nt, Artificial Sequence
  Description of Artificial Sequence: Synthetic oligonucleotide
uaaaucuugaggcuugggu

SEQ ID NO: 2092836 - RNA, 19 nt, Artificial Sequence
  Description of Artificial Sequence: Synthetic oligonucleotide
uugaaauaaacacccuccc

SEQ ID NO: 2092837 - RNA, 19 nt, Artificial Sequence
  Description of Artificial Sequence: Synthetic oligonucleotide
gaucuuguacugcuggugg

SEQ ID NO: 2092838 - RNA, 19 nt, Artificial Sequence
  Description of Artificial Sequence: Synthetic oligonucleotide
ugauugcagaagcugaugc

SEQ ID NO: 2092839 - RNA, 19 nt, Artificial Sequence
  Description of Artificial Sequence: Synthetic oligonucleotide
aauuauggucaaaauagug

SEQ ID NO: 2092840 - RNA, 19 nt, Artificial Sequence
  Description of Artificial Sequence: Synthetic oligonucleotide
uuuagcaguagagacaaca

SEQ ID NO: 2092841 - RNA, 19 nt, Artificial Sequence
  Description of Artificial Sequence: Synthetic oligonucleotide
ugaucccucacaaagggca

SEQ ID NO: 2092842 - RNA, 19 nt, Artificial Sequence
  Description of Artificial Sequence: Synthetic oligonucleotide
uuuuaaauggguucuggaa

SEQ ID NO: 2092843 - RNA, 19 nt, Artificial Sequence
  Description of Artificial Sequence: Synthetic oligonucleotide
cuuaagcaugacaucaagg

SEQ ID NO: 2092844 - RNA, 19 nt, Artificial Sequence
  Description of Artificial Sequence: Synthetic oligonucleotide
gagaucauguucuuuuaag

SEQ ID NO: 2092845 - RNA, 19 nt, Artificial Sequence
  Description of Artificial Sequence: Synthetic oligonucleotide
cauaucugagacuggagcc

SEQ ID NO: 2092846 - RNA, 19 nt, Artificial Sequence
  Description of Artificial Sequence: Synthetic oligonucleotide
uucaccucaaacaucuucu

SEQ ID NO: 2092847 - RNA, 19 nt, Artificial Sequence
  Description of Artificial Sequence: Synthetic oligonucleotide
acaacaaguugauugucuc

SEQ ID NO: 2092848 - RNA, 19 nt, Artificial Sequence
  Description of Artificial Sequence: Synthetic oligonucleotide
uggaauuauggucaaaaua

SEQ ID NO: 2092849 - RNA, 19 nt, Artificial Sequence
  Description of Artificial Sequence: Synthetic oligonucleotide
gaagagaguccccaucugg

SEQ ID NO: 2092850 - RNA, 19 nt, Artificial Sequence
  Description of Artificial Sequence: Synthetic oligonucleotide
aaucgcagcaccacguccc

SEQ ID NO: 2092851 - RNA, 19 nt, Artificial Sequence
  Description of Artificial Sequence: Synthetic oligonucleotide
aauaaacacccucccagga

SEQ ID NO: 2092852 - RNA, 19 nt, Artificial Sequence
  Description of Artificial Sequence: Synthetic oligonucleotide
uccagcaccuuaaagaguc

SEQ ID NO: 2092853 - RNA, 19 nt, Artificial Sequence
  Description of Artificial Sequence: Synthetic oligonucleotide
ugaaauaaacacccuccca

SEQ ID NO: 2092854 - RNA, 19 nt, Artificial Sequence
  Description of Artificial Sequence: Synthetic oligonucleotide
aguagagacaacaaguuga

SEQ ID NO: 2092855 - RNA, 19 nt, Artificial Sequence
  Description of Artificial Sequence: Synthetic oligonucleotide
agaauagagaucauguucu

SEQ ID NO: 2092856 - RNA, 19 nt, Artificial Sequence
  Description of Artificial Sequence: Synthetic oligonucleotide
guugauugucucaugaacc

SEQ ID NO: 2092857 - RNA, 19 nt, Artificial Sequence
  Description of Artificial Sequence: Synthetic oligonucleotide
guuccaguuggaauuaugg

SEQ ID NO: 2092858 - RNA, 19 nt, Artificial Sequence
  Description of Artificial Sequence: Synthetic oligonucleotide
aagaaggacaccaggaacu

SEQ ID NO: 2092859 - RNA, 19 nt, Artificial Sequence
  Description of Artificial Sequence: Synthetic oligonucleotide
ucuaaacugaucccucaca

SEQ ID NO: 2092860 - RNA, 19 nt, Artificial Sequence
  Description of Artificial Sequence: Synthetic oligonucleotide
uuaggccccaaacugcucc

SEQ ID NO: 2092861 - RNA, 19 nt, Artificial Sequence
  Description of Artificial Sequence: Synthetic oligonucleotide
aguaggacaaagaaggaca

SEQ ID NO: 2092862 - RNA, 19 nt, Artificial Sequence
  Description of Artificial Sequence: Synthetic oligonucleotide
agugcuaggaaugaacucu

SEQ ID NO: 2092863 - RNA, 19 nt, Artificial Sequence
  Description of Artificial Sequence: Synthetic oligonucleotide
gggaucuugagauucuugg

SEQ ID NO: 2092864 - RNA, 19 nt, Artificial Sequence
  Description of Artificial Sequence: Synthetic oligonucleotide
aauggguucuggaagucag

SEQ ID NO: 2092865 - RNA, 19 nt, Artificial Sequence
  Description of Artificial Sequence: Synthetic oligonucleotide
uauggucaaaauaguggug

SEQ ID NO: 2092866 - RNA, 19 nt, Artificial Sequence
  Description of Artificial Sequence: Synthetic oligonucleotide
uuagcaguagagacaacaa

SEQ ID NO: 2092867 - RNA, 19 nt, Artificial Sequence
  Description of Artificial Sequence: Synthetic oligonucleotide
ucagacugggaucuugaga

SEQ ID NO: 2092868 - RNA, 19 nt, Artificial Sequence
  Description of Artificial Sequence: Synthetic oligonucleotide
agguccauaucugagacug

SEQ ID NO: 2092869 - RNA, 19 nt, Artificial Sequence
  Description of Artificial Sequence: Synthetic oligonucleotide
uaagcaugacaucaaggau

SEQ ID NO: 2092870 - RNA, 19 nt, Artificial Sequence
  Description of Artificial Sequence: Synthetic oligonucleotide
aaauaguggugcacgaucu

SEQ ID NO: 2092871 - RNA, 19 nt, Artificial Sequence
  Description of Artificial Sequence: Synthetic oligonucleotide
uggugcacgaucuuuggga

SEQ ID NO: 2092872 - RNA, 19 nt, Artificial Sequence
  Description of Artificial Sequence: Synthetic oligonucleotide
ucaccauggugcuuggugc

SEQ ID NO: 2092873 - RNA, 19 nt, Artificial Sequence
  Description of Artificial Sequence: Synthetic oligonucleotide
aacugaucccucacaaagg

SEQ ID NO: 2092874 - RNA, 19 nt, Artificial Sequence
  Description of Artificial Sequence: Synthetic oligonucleotide
auaucugagacuggagccg

SEQ ID NO: 2092875 - RNA, 19 nt, Artificial Sequence
  Description of Artificial Sequence: Synthetic oligonucleotide
uuucuaaacugaucccuca

SEQ ID NO: 2092876 - RNA, 19 nt, Artificial Sequence
  Description of Artificial Sequence: Synthetic oligonucleotide
cucacaaagggcagcagug

SEQ ID NO: 2092877 - RNA, 19 nt, Artificial Sequence
  Description of Artificial Sequence: Synthetic oligonucleotide
ugggaaucgcagcaccacg

SEQ ID NO: 2092878 - RNA, 19 nt, Artificial Sequence
  Description of Artificial Sequence: Synthetic oligonucleotide
ucuuuugggugccugugac

SEQ ID NO: 2092879 - RNA, 19 nt, Artificial Sequence
  Description of Artificial Sequence: Synthetic oligonucleotide
agucuuucucacugauccc

SEQ ID NO: 2092880 - RNA, 19 nt, Artificial Sequence
  Description of Artificial Sequence: Synthetic oligonucleotide
aucucuuaggccccaaacu

SEQ ID NO: 2092881 - RNA, 19 nt, Artificial Sequence
  Description of Artificial Sequence: Synthetic oligonucleotide
agaagguccauaucugaga

SEQ ID NO: 2092882 - RNA, 19 nt, Artificial Sequence
  Description of Artificial Sequence: Synthetic oligonucleotide
ggagaaagcauccuucagc

SEQ ID NO: 2092883 - RNA, 19 nt, Artificial Sequence
  Description of Artificial Sequence: Synthetic oligonucleotide
uguucuuuuaaggucuccu

SEQ ID NO: 2092884 - RNA, 19 nt, Artificial Sequence
  Description of Artificial Sequence: Synthetic oligonucleotide
gaucauguucuuuuaaggu

SEQ ID NO: 2092885 - RNA, 19 nt, Artificial Sequence
  Description of Artificial Sequence: Synthetic oligonucleotide
gaucucuuaggccccaaac

SEQ ID NO: 2092886 - RNA, 19 nt, Artificial Sequence
  Description of Artificial Sequence: Synthetic oligonucleotide
gaagcugaugccccaccgg

SEQ ID NO: 2092887 - RNA, 19 nt, Artificial Sequence
  Description of Artificial Sequence: Synthetic oligonucleotide
guaagggcccaucugggag

SEQ ID NO: 2092888 - RNA, 19 nt, Artificial Sequence
  Description of Artificial Sequence: Synthetic oligonucleotide
aaguugauugucucaugaa

SEQ ID NO: 2092889 - RNA, 19 nt, Artificial Sequence
  Description of Artificial Sequence: Synthetic oligonucleotide
ugucugauugcagaagcug

SEQ ID NO: 2092890 - RNA, 19 nt, Artificial Sequence
  Description of Artificial Sequence: Synthetic oligonucleotide
uuuuaaggucuccuugaaa

SEQ ID NO: 2092891 - RNA, 19 nt, Artificial Sequence
  Description of Artificial Sequence: Synthetic oligonucleotide
uucuaaacugaucccucac

SEQ ID NO: 2092892 - RNA, 19 nt, Artificial Sequence
  Description of Artificial Sequence: Synthetic oligonucleotide
ugguggaugucguucagcu

SEQ ID NO: 2092893 - RNA, 19 nt, Artificial Sequence
  Description of Artificial Sequence: Synthetic oligonucleotide
aagcugaugccccaccgga

SEQ ID NO: 2092894 - RNA, 19 nt, Artificial Sequence
  Description of Artificial Sequence: Synthetic oligonucleotide
uuugggaaucgcagcacca

SEQ ID NO: 2092895 - RNA, 19 nt, Artificial Sequence
  Description of Artificial Sequence: Synthetic oligonucleotide
ugauuguccccaguuaucu

SEQ ID NO: 2092896 - RNA, 19 nt, Artificial Sequence
  Description of Artificial Sequence: Synthetic oligonucleotide
uucuccaccacgugggaga

SEQ ID NO: 2092897 - RNA, 19 nt, Artificial Sequence
  Description of Artificial Sequence: Synthetic oligonucleotide
uaguggugcacgaucuuug

SEQ ID NO: 2092898 - RNA, 19 nt, Artificial Sequence
  Description of Artificial Sequence: Synthetic oligonucleotide
gaugucguucagcugcgcc

SEQ ID NO: 2092899 - RNA, 19 nt, Artificial Sequence
  Description of Artificial Sequence: Synthetic oligonucleotide
agccagacaauaguaggac

SEQ ID NO: 2092900 - RNA, 19 nt, Artificial Sequence
  Description of Artificial Sequence: Synthetic oligonucleotide
aguggugcacgaucuuugg

SEQ ID NO: 2092901 - RNA, 19 nt, Artificial Sequence
  Description of Artificial Sequence: Synthetic oligonucleotide
acaacucagacugggaucu

SEQ ID NO: 2092902 - RNA, 19 nt, Artificial Sequence
  Description of Artificial Sequence: Synthetic oligonucleotide
uuccaguuggaauuauggu

SEQ ID NO: 2092903 - RNA, 19 nt, Artificial Sequence
  Description of Artificial Sequence: Synthetic oligonucleotide
uguaaaucuugaggcuugg

SEQ ID NO: 2092904 - RNA, 19 nt, Artificial Sequence
  Description of Artificial Sequence: Synthetic oligonucleotide
gagaguccccaucuggaag

SEQ ID NO: 2092905 - RNA, 19 nt, Artificial Sequence
  Description of Artificial Sequence: Synthetic oligonucleotide
ugagaauagagaucauguu

SEQ ID NO: 2092906 - RNA, 19 nt, Artificial Sequence
  Description of Artificial Sequence: Synthetic oligonucleotide
gugagugaagaagagaguc

SEQ ID NO: 2092907 - RNA, 19 nt, Artificial Sequence
  Description of Artificial Sequence: Synthetic oligonucleotide
uacaacucagacugggauc

SEQ ID NO: 2092908 - RNA, 19 nt, Artificial Sequence
  Description of Artificial Sequence: Synthetic oligonucleotide
cucuuaggccccaaacugc

SEQ ID NO: 2092909 - RNA, 19 nt, Artificial Sequence
  Description of Artificial Sequence: Synthetic oligonucleotide
ucugauugcagaagcugau

SEQ ID NO: 2092910 - RNA, 19 nt, Artificial Sequence
  Description of Artificial Sequence: Synthetic oligonucleotide
cuuuccggaucucuuuccg

SEQ ID NO: 2092911 - RNA, 19 nt, Artificial Sequence
  Description of Artificial Sequence: Synthetic oligonucleotide
cuuugggaaucgcagcacc

SEQ ID NO: 2092912 - RNA, 19 nt, Artificial Sequence
  Description of Artificial Sequence: Synthetic oligonucleotide
aguuaucugagaauagaga

SEQ ID NO: 2092913 - RNA, 19 nt, Artificial Sequence
  Description of Artificial Sequence: Synthetic oligonucleotide
gaaagggucagugcuagga

SEQ ID NO: 2092914 - RNA, 19 nt, Artificial Sequence
  Description of Artificial Sequence: Synthetic oligonucleotide
gaaucgcagcaccacgucc

SEQ ID NO: 2092915 - RNA, 19 nt, Artificial Sequence
  Description of Artificial Sequence: Synthetic oligonucleotide
ggaucuugagauucuuggg

SEQ ID NO: 2092916 - RNA, 19 nt, Artificial Sequence
  Description of Artificial Sequence: Synthetic oligonucleotide
acaccugucugauugcaga

SEQ ID NO: 2092917 - RNA, 19 nt, Artificial Sequence
  Description of Artificial Sequence: Synthetic oligonucleotide
cucaccauggugcuuggug

SEQ ID NO: 2092918 - RNA, 19 nt, Artificial Sequence
  Description of Artificial Sequence: Synthetic oligonucleotide
uggaaagggucagugcuag

SEQ ID NO: 2092919 - RNA, 19 nt, Artificial Sequence
  Description of Artificial Sequence: Synthetic oligonucleotide
uggguucuggaagucagag

SEQ ID NO: 2092920 - RNA, 19 nt, Artificial Sequence
  Description of Artificial Sequence: Synthetic oligonucleotide
cugagaauagagaucaugu

SEQ ID NO: 2092921 - RNA, 19 nt, Artificial Sequence
  Description of Artificial Sequence: Synthetic oligonucleotide
cuucagugccaacaacugc

SEQ ID NO: 2092922 - RNA, 19 nt, Artificial Sequence
  Description of Artificial Sequence: Synthetic oligonucleotide
caaguugauugucucauga

SEQ ID NO: 2092923 - RNA, 19 nt, Artificial Sequence
  Description of Artificial Sequence: Synthetic oligonucleotide
cuuuuagcaguagagacaa

SEQ ID NO: 2092924 - RNA, 19 nt, Artificial Sequence
  Description of Artificial Sequence: Synthetic oligonucleotide
uuaaggucuccuugaaaua

SEQ ID NO: 2092925 - RNA, 19 nt, Artificial Sequence
  Description of Artificial Sequence: Synthetic oligonucleotide
uaaacugaucccucacaaa

SEQ ID NO: 2092926 - RNA, 19 nt, Artificial Sequence
  Description of Artificial Sequence: Synthetic oligonucleotide
ugcuacaccacagccacac

SEQ ID NO: 2092927 - RNA, 19 nt, Artificial Sequence
  Description of Artificial Sequence: Synthetic oligonucleotide
gggguaagggcccaucugg

SEQ ID NO: 2092928 - RNA, 19 nt, Artificial Sequence
  Description of Artificial Sequence: Synthetic oligonucleotide
caguagagacaacaaguug

SEQ ID NO: 2092929 - RNA, 19 nt, Artificial Sequence
  Description of Artificial Sequence: Synthetic oligonucleotide
uaagggcccaucugggagc

SEQ ID NO: 2092930 - RNA, 19 nt, Artificial Sequence
  Description of Artificial Sequence: Synthetic oligonucleotide
aaauggguucuggaaguca

SEQ ID NO: 2092931 - RNA, 19 nt, Artificial Sequence
  Description of Artificial Sequence: Synthetic oligonucleotide
uggaaguggauggugcuca

SEQ ID NO: 2092932 - RNA, 19 nt, Artificial Sequence
  Description of Artificial Sequence: Synthetic oligonucleotide
aagagaguccccaucugga

SEQ ID NO: 2092933 - RNA, 19 nt, Artificial Sequence
  Description of Artificial Sequence: Synthetic oligonucleotide
aaggacaccaggaacugaa

SEQ ID NO: 2092934 - RNA, 19 nt, Artificial Sequence
  Description of Artificial Sequence: Synthetic oligonucleotide
accuuaaagagucccuuaa

SEQ ID NO: 2092935 - RNA, 19 nt, Artificial Sequence
  Description of Artificial Sequence: Synthetic oligonucleotide
caacucaaugauugucccc

SEQ ID NO: 2092936 - RNA, 19 nt, Artificial Sequence
  Description of Artificial Sequence: Synthetic oligonucleotide
auucuugggccuuuccgga

SEQ ID NO: 2092937 - RNA, 19 nt, Artificial Sequence
  Description of Artificial Sequence: Synthetic oligonucleotide
uggucaaaauaguggugca

SEQ ID NO: 2092938 - RNA, 19 nt, Artificial Sequence
  Description of Artificial Sequence: Synthetic oligonucleotide
cacaaagggcagcagugag

SEQ ID NO: 2092939 - RNA, 19 nt, Artificial Sequence
  Description of Artificial Sequence: Synthetic oligonucleotide
ucucauccugggguaaggg

SEQ ID NO: 2092940 - RNA, 19 nt, Artificial Sequence
  Description of Artificial Sequence: Synthetic oligonucleotide
ugugacuucugagccagac

SEQ ID NO: 2092941 - RNA, 19 nt, Artificial Sequence
  Description of Artificial Sequence: Synthetic oligonucleotide
acacaguugugccucuucu

SEQ ID NO: 2092942 - RNA, 19 nt, Artificial Sequence
  Description of Artificial Sequence: Synthetic oligonucleotide
agacaacaaguugauuguc

SEQ ID NO: 2092943 - RNA, 19 nt, Artificial Sequence
  Description of Artificial Sequence: Synthetic oligonucleotide
caucugggagcacauuggc

SEQ ID NO: 2092944 - RNA, 19 nt, Artificial Sequence
  Description of Artificial Sequence: Synthetic oligonucleotide
aacucagacugggaucuug

SEQ ID NO: 2092945 - RNA, 19 nt, Artificial Sequence
  Description of Artificial Sequence: Synthetic oligonucleotide
aagguccauaucugagacu

SEQ ID NO: 2092946 - RNA, 19 nt, Artificial Sequence
  Description of Artificial Sequence: Synthetic oligonucleotide
aaacacccucccaggacac

SEQ ID NO: 2092947 - RNA, 19 nt, Artificial Sequence
  Description of Artificial Sequence: Synthetic oligonucleotide
acaaguugauugucucaug

SEQ ID NO: 2092948 - RNA, 19 nt, Artificial Sequence
  Description of Artificial Sequence: Synthetic oligonucleotide
uuccggaucucuuuccguc

SEQ ID NO: 2092949 - RNA, 19 nt, Artificial Sequence
  Description of Artificial Sequence: Synthetic oligonucleotide
ugucguucagcugcgccag

SEQ ID NO: 2092950 - RNA, 19 nt, Artificial Sequence
  Description of Artificial Sequence: Synthetic oligonucleotide
gauuguccccaguuaucug

SEQ ID NO: 2092951 - RNA, 19 nt, Artificial Sequence
  Description of Artificial Sequence: Synthetic oligonucleotide
agcagugagcacuguccgg

SEQ ID NO: 2092952 - RNA, 19 nt, Artificial Sequence
  Description of Artificial Sequence: Synthetic oligonucleotide
cagcagugagcacuguccg

SEQ ID NO: 2092953 - RNA, 19 nt, Artificial Sequence
  Description of Artificial Sequence: Synthetic oligonucleotide
ugggguaagggcccaucug

SEQ ID NO: 2092954 - RNA, 19 nt, Artificial Sequence
  Description of Artificial Sequence: Synthetic oligonucleotide
uccuugaaauaaacacccu

SEQ ID NO: 2092955 - RNA, 19 nt, Artificial Sequence
  Description of Artificial Sequence: Synthetic oligonucleotide
uucuggguccccuuucuaa

SEQ ID NO: 2092956 - RNA, 19 nt, Artificial Sequence
  Description of Artificial Sequence: Synthetic oligonucleotide
ugaacucuguccgaucuau

SEQ ID NO: 2092957 - RNA, 19 nt, Artificial Sequence
  Description of Artificial Sequence: Synthetic oligonucleotide
aucgcagcaccacgucccc

SEQ ID NO: 2092958 - RNA, 19 nt, Artificial Sequence
  Description of Artificial Sequence: Synthetic oligonucleotide
ugaagaagagaguccccau

SEQ ID NO: 2092959 - RNA, 19 nt, Artificial Sequence
  Description of Artificial Sequence: Synthetic oligonucleotide
ugucuuuugggugccugug

SEQ ID NO: 2092960 - RNA, 19 nt, Artificial Sequence
  Description of Artificial Sequence: Synthetic oligonucleotide
caccggaugaggagguucc

SEQ ID NO: 2092961 - RNA, 19 nt, Artificial Sequence
  Description of Artificial Sequence: Synthetic oligonucleotide
aggccuucuggaaaggguc

SEQ ID NO: 2092962 - RNA, 19 nt, Artificial Sequence
  Description of Artificial Sequence: Synthetic oligonucleotide
agccacacaguugugccuc

SEQ ID NO: 2092963 - RNA, 19 nt, Artificial Sequence
  Description of Artificial Sequence: Synthetic oligonucleotide
gacugggaucuugagauuc

SEQ ID NO: 2092964 - RNA, 19 nt, Artificial Sequence
  Description of Artificial Sequence: Synthetic oligonucleotide
cuggaagucagagucuuuc

SEQ ID NO: 2092965 - RNA, 19 nt, Artificial Sequence
  Description of Artificial Sequence: Synthetic oligonucleotide
ccaguuggaauuaugguca

SEQ ID NO: 2092966 - RNA, 19 nt, Artificial Sequence
  Description of Artificial Sequence: Synthetic oligonucleotide
aggagguuccaguuggaau

SEQ ID NO: 2092967 - RNA, 19 nt, Artificial Sequence
  Description of Artificial Sequence: Synthetic oligonucleotide
ugcuuggugcugcuacacc

SEQ ID NO: 2092968 - RNA, 19 nt, Artificial Sequence
  Description of Artificial Sequence: Synthetic oligonucleotide
cuauuuuaaauggguucug

SEQ ID NO: 2092969 - RNA, 19 nt, Artificial Sequence
  Description of Artificial Sequence: Synthetic oligonucleotide
uccagggcuacaacucaga

SEQ ID NO: 2092970 - RNA, 19 nt, Artificial Sequence
  Description of Artificial Sequence: Synthetic oligonucleotide
ucuguccgaucuauuuuaa

SEQ ID NO: 2092971 - RNA, 19 nt, Artificial Sequence
  Description of Artificial Sequence: Synthetic oligonucleotide
ucacugauccccagcuccu

SEQ ID NO: 2092972 - RNA, 19 nt, Artificial Sequence
  Description of Artificial Sequence: Synthetic oligonucleotide
gucagugcuaggaaugaac

SEQ ID NO: 2092973 - RNA, 19 nt, Artificial Sequence
  Description of Artificial Sequence: Synthetic oligonucleotide
gaaugaacucuguccgauc

SEQ ID NO: 2092974 - RNA, 19 nt, Artificial Sequence
  Description of Artificial Sequence: Synthetic oligonucleotide
agugagcacuguccgggag

SEQ ID NO: 2092975 - RNA, 19 nt, Artificial Sequence
  Description of Artificial Sequence: Synthetic oligonucleotide
gagauucuugggccuuucc

SEQ ID NO: 2092976 - RNA, 19 nt, Artificial Sequence
  Description of Artificial Sequence: Synthetic oligonucleotide
uagagaucauguucuuuua

SEQ ID NO: 2092977 - RNA, 19 nt, Artificial Sequence
  Description of Artificial Sequence: Synthetic oligonucleotide
cugaucccucacaaagggc

SEQ ID NO: 2092978 - RNA, 19 nt, Artificial Sequence
  Description of Artificial Sequence: Synthetic oligonucleotide
guaggacaaagaaggacac

SEQ ID NO: 2092979 - RNA, 19 nt, Artificial Sequence
  Description of Artificial Sequence: Synthetic oligonucleotide
uugucucaugaaccaacuc

SEQ ID NO: 2092980 - RNA, 19 nt, Artificial Sequence
  Description of Artificial Sequence: Synthetic oligonucleotide
guaaaucuugaggcuuggg

SEQ ID NO: 2092981 - RNA, 19 nt, Artificial Sequence
  Description of Artificial Sequence: Synthetic oligonucleotide
ucucaugaaccaacucaau

SEQ ID NO: 2092982 - RNA, 19 nt, Artificial Sequence
  Description of Artificial Sequence: Synthetic oligonucleotide
guggugcacgaucuuuggg

SEQ ID NO: 2092983 - RNA, 19 nt, Artificial Sequence
  Description of Artificial Sequence: Synthetic oligonucleotide
auugucucaugaaccaacu

SEQ ID NO: 2092984 - RNA, 19 nt, Artificial Sequence
  Description of Artificial Sequence: Synthetic oligonucleotide
gaggaugggugaguggggc

SEQ ID NO: 2092985 - RNA, 19 nt, Artificial Sequence
  Description of Artificial Sequence: Synthetic oligonucleotide
cucccaggacacuucuggg

SEQ ID NO: 2092986 - RNA, 19 nt, Artificial Sequence
  Description of Artificial Sequence: Synthetic oligonucleotide
aggaaugaacucuguccga

SEQ ID NO: 2092987 - RNA, 19 nt, Artificial Sequence
  Description of Artificial Sequence: Synthetic oligonucleotide
agagucuuucucacugauc

SEQ ID NO: 2092988 - RNA, 19 nt, Artificial Sequence
  Description of Artificial Sequence: Synthetic oligonucleotide
cucagacugggaucuugag

SEQ ID NO: 2092989 - RNA, 19 nt, Artificial Sequence
  Description of Artificial Sequence: Synthetic oligonucleotide
acucaaugauuguccccag

SEQ ID NO: 2092990 - RNA, 19 nt, Artificial Sequence
  Description of Artificial Sequence: Synthetic oligonucleotide
cacaguugugccucuucug

SEQ ID NO: 2092991 - RNA, 19 nt, Artificial Sequence
  Description of Artificial Sequence: Synthetic oligonucleotide
agcugcgccagguucuuca

SEQ ID NO: 2092992 - RNA, 19 nt, Artificial Sequence
  Description of Artificial Sequence: Synthetic oligonucleotide
ccgaucuauuuuaaauggg

SEQ ID NO: 2092993 - RNA, 19 nt, Artificial Sequence
  Description of Artificial Sequence: Synthetic oligonucleotide
aucuuguacugcuggugga

SEQ ID NO: 2092994 - RNA, 19 nt, Artificial Sequence
  Description of Artificial Sequence: Synthetic oligonucleotide
gaauuauggucaaaauagu

SEQ ID NO: 2092995 - RNA, 19 nt, Artificial Sequence
  Description of Artificial Sequence: Synthetic oligonucleotide
gugcugcuacaccacagcc

SEQ ID NO: 2092996 - RNA, 19 nt, Artificial Sequence
  Description of Artificial Sequence: Synthetic oligonucleotide
ccaacaacugcucccgccg

SEQ ID NO: 2092997 - RNA, 19 nt, Artificial Sequence
  Description of Artificial Sequence: Synthetic oligonucleotide
caacaaguugauugucuca

SEQ ID NO: 2092998 - RNA, 19 nt, Artificial Sequence
  Description of Artificial Sequence: Synthetic oligonucleotide
ccaacucaaugauuguccc

SEQ ID NO: 2092999 - RNA, 19 nt, Artificial Sequence
  Description of Artificial Sequence: Synthetic oligonucleotide
uugggugccugugacuucu

SEQ ID NO: 2093000 - RNA, 19 nt, Artificial Sequence
  Description of Artificial Sequence: Synthetic oligonucleotide
uugggaaucgcagcaccac

SEQ ID NO: 2093001 - RNA, 19 nt, Artificial Sequence
  Description of Artificial Sequence: Synthetic oligonucleotide
ucuuguacugcugguggau

SEQ ID NO: 2093002 - RNA, 19 nt, Artificial Sequence
  Description of Artificial Sequence: Synthetic oligonucleotide
ugcuaggaaugaacucugu

SEQ ID NO: 2093003 - RNA, 19 nt, Artificial Sequence
  Description of Artificial Sequence: Synthetic oligonucleotide
uccggaucucuuuccgucu

SEQ ID NO: 2093004 - RNA, 19 nt, Artificial Sequence
  Description of Artificial Sequence: Synthetic oligonucleotide
ggcuacaacucagacuggg

SEQ ID NO: 2093005 - RNA, 19 nt, Artificial Sequence
  Description of Artificial Sequence: Synthetic oligonucleotide
ugaucucuuaggccccaaa

SEQ ID NO: 2093006 - RNA, 19 nt, Artificial Sequence
  Description of Artificial Sequence: Synthetic oligonucleotide
ugauugucucaugaaccaa

SEQ ID NO: 2093007 - RNA, 19 nt, Artificial Sequence
  Description of Artificial Sequence: Synthetic oligonucleotide
gucucaugaaccaacucaa

SEQ ID NO: 2093008 - RNA, 19 nt, Artificial Sequence
  Description of Artificial Sequence: Synthetic oligonucleotide
cagugcuaggaaugaacuc

SEQ ID NO: 2093009 - RNA, 19 nt, Artificial Sequence
  Description of Artificial Sequence: Synthetic oligonucleotide
agucagagucuuucucacu

SEQ ID NO: 2093010 - RNA, 19 nt, Artificial Sequence
  Description of Artificial Sequence: Synthetic oligonucleotide
ugccccaccggaugaggag

SEQ ID NO: 2093011 - RNA, 19 nt, Artificial Sequence
  Description of Artificial Sequence: Synthetic oligonucleotide
gacaacaaguugauugucu

SEQ ID NO: 2093012 - RNA, 19 nt, Artificial Sequence
  Description of Artificial Sequence: Synthetic oligonucleotide
ccaucugggagcacauugg

SEQ ID NO: 2093013 - RNA, 19 nt, Artificial Sequence
  Description of Artificial Sequence: Synthetic oligonucleotide
uacugcugguggaugucgu

SEQ ID NO: 2093014 - RNA, 19 nt, Artificial Sequence
  Description of Artificial Sequence: Synthetic oligonucleotide
uaaauggguucuggaaguc

SEQ ID NO: 2093015 - RNA, 19 nt, Artificial Sequence
  Description of Artificial Sequence: Synthetic oligonucleotide
ggugcugcuacaccacagc

SEQ ID NO: 2093016 - RNA, 19 nt, Artificial Sequence
  Description of Artificial Sequence: Synthetic oligonucleotide
caguugugccucuucugac

SEQ ID NO: 2093017 - RNA, 19 nt, Artificial Sequence
  Description of Artificial Sequence: Synthetic oligonucleotide
cagcaccuuaaagaguccc

SEQ ID NO: 2093018 - RNA, 19 nt, Artificial Sequence
  Description of Artificial Sequence: Synthetic oligonucleotide
uccccaguuaucugagaau

SEQ ID NO: 2093019 - RNA, 19 nt, Artificial Sequence
  Description of Artificial Sequence: Synthetic oligonucleotide
agugagugaagaagagagu

SEQ ID NO: 2093020 - RNA, 19 nt, Artificial Sequence
  Description of Artificial Sequence: Synthetic oligonucleotide
aacugcuccagggcuacaa

SEQ ID NO: 2093021 - RNA, 19 nt, Artificial Sequence
  Description of Artificial Sequence: Synthetic oligonucleotide
aaagggcagcagugaguga

SEQ ID NO: 2093022 - RNA, 19 nt, Artificial Sequence
  Description of Artificial Sequence: Synthetic oligonucleotide
agcgcaaggugagggcagc

SEQ ID NO: 2093023 - RNA, 19 nt, Artificial Sequence
  Description of Artificial Sequence: Synthetic oligonucleotide
caaagaaggcuguguucuc

SEQ ID NO: 2093024 - RNA, 19 nt, Artificial Sequence
  Description of Artificial Sequence: Synthetic oligonucleotide
cugauugcagaagcugaug

SEQ ID NO: 2093025 - RNA, 19 nt, Artificial Sequence
  Description of Artificial Sequence: Synthetic oligonucleotide
ccuuaagcaugacaucaag

SEQ ID NO: 2093026 - RNA, 19 nt, Artificial Sequence
  Description of Artificial Sequence: Synthetic oligonucleotide
guccauaucugagacugga

SEQ ID NO: 2093027 - RNA, 19 nt, Artificial Sequence
  Description of Artificial Sequence: Synthetic oligonucleotide
ucccucacaaagggcagca

SEQ ID NO: 2093028 - RNA, 19 nt, Artificial Sequence
  Description of Artificial Sequence: Synthetic oligonucleotide
uuuuagcaguagagacaac

SEQ ID NO: 2093029 - RNA, 19 nt, Artificial Sequence
  Description of Artificial Sequence: Synthetic oligonucleotide
ccuuaaagagucccuuaag

SEQ ID NO: 2093030 - RNA, 19 nt, Artificial Sequence
  Description of Artificial Sequence: Synthetic oligonucleotide
gaaguggauggugcucacc

SEQ ID NO: 2093031 - RNA, 19 nt, Artificial Sequence
  Description of Artificial Sequence: Synthetic oligonucleotide
gcacauuggcagcagugag

SEQ ID NO: 2093032 - RNA, 19 nt, Artificial Sequence
  Description of Artificial Sequence: Synthetic oligonucleotide
cuuuuaaggucuccuugaa

SEQ ID NO: 2093033 - RNA, 19 nt, Artificial Sequence
  Description of Artificial Sequence: Synthetic oligonucleotide
accugucugauugcagaag

SEQ ID NO: 2093034 - RNA, 19 nt, Artificial Sequence
  Description of Artificial Sequence: Synthetic oligonucleotide
cucuguccgaucuauuuua

SEQ ID NO: 2093035 - RNA, 19 nt, Artificial Sequence
  Description of Artificial Sequence: Synthetic oligonucleotide
ucaccucaaacaucuucuu

SEQ ID NO: 2093036 - RNA, 19 nt, Artificial Sequence
  Description of Artificial Sequence: Synthetic oligonucleotide
guccccaguuaucugagaa

SEQ ID NO: 2093037 - RNA, 19 nt, Artificial Sequence
  Description of Artificial Sequence: Synthetic oligonucleotide
acgaucuuugggaaucgca

SEQ ID NO: 2093038 - RNA, 19 nt, Artificial Sequence
  Description of Artificial Sequence: Synthetic oligonucleotide
gcuaggaaugaacucuguc

SEQ ID NO: 2093039 - RNA, 19 nt, Artificial Sequence
  Description of Artificial Sequence: Synthetic oligonucleotide
ugggagcacauuggcagca

SEQ ID NO: 2093040 - RNA, 19 nt, Artificial Sequence
  Description of Artificial Sequence: Synthetic oligonucleotide
caacaacugcucccgccgc

SEQ ID NO: 2093041 - RNA, 19 nt, Artificial Sequence
  Description of Artificial Sequence: Synthetic oligonucleotide
gugcuaggaaugaacucug

SEQ ID NO: 2093042 - RNA, 19 nt, Artificial Sequence
  Description of Artificial Sequence: Synthetic oligonucleotide
gcaaggugagggcagcccc

SEQ ID NO: 2093043 - RNA, 19 nt, Artificial Sequence
  Description of Artificial Sequence: Synthetic oligonucleotide
caccacagccacacaguug

SEQ ID NO: 2093044 - RNA, 19 nt, Artificial Sequence
  Description of Artificial Sequence: Synthetic oligonucleotide
uaggccccaaacugcucca

SEQ ID NO: 2093045 - RNA, 19 nt, Artificial Sequence
  Description of Artificial Sequence: Synthetic oligonucleotide
agcaccuuaaagagucccu

SEQ ID NO: 2093046 - RNA, 19 nt, Artificial Sequence
  Description of Artificial Sequence: Synthetic oligonucleotide
gucuuuugggugccuguga

SEQ ID NO: 2093047 - RNA, 19 nt, Artificial Sequence
  Description of Artificial Sequence: Synthetic oligonucleotide
cuugaggcuuggguccagg

SEQ ID NO: 2093048 - RNA, 19 nt, Artificial Sequence
  Description of Artificial Sequence: Synthetic oligonucleotide
gaaccaacucaaugauugu

SEQ ID NO: 2093049 - RNA, 19 nt, Artificial Sequence
  Description of Artificial Sequence: Synthetic oligonucleotide
ugaugccccaccggaugag

SEQ ID NO: 2093050 - RNA, 19 nt, Artificial Sequence
  Description of Artificial Sequence: Synthetic oligonucleotide
uuugggugccugugacuuc

SEQ ID NO: 2093051 - RNA, 19 nt, Artificial Sequence
  Description of Artificial Sequence: Synthetic oligonucleotide
acguccccaaagaaggcug

SEQ ID NO: 2093052 - RNA, 19 nt, Artificial Sequence
  Description of Artificial Sequence: Synthetic oligonucleotide
cuacaacucagacugggau

SEQ ID NO: 2093053 - RNA, 19 nt, Artificial Sequence
  Description of Artificial Sequence: Synthetic oligonucleotide
ggacaaagaaggacaccag

SEQ ID NO: 2093054 - RNA, 19 nt, Artificial Sequence
  Description of Artificial Sequence: Synthetic oligonucleotide
gguugaggaugggugagug

SEQ ID NO: 2093055 - RNA, 19 nt, Artificial Sequence
  Description of Artificial Sequence: Synthetic oligonucleotide
agacaccugucugauugca

SEQ ID NO: 2093056 - RNA, 19 nt, Artificial Sequence
  Description of Artificial Sequence: Synthetic oligonucleotide
ugccaacaacugcucccgc

SEQ ID NO: 2093057 - RNA, 19 nt, Artificial Sequence
  Description of Artificial Sequence: Synthetic oligonucleotide
ggagguuccaguuggaauu

SEQ ID NO: 2093058 - RNA, 19 nt, Artificial Sequence
  Description of Artificial Sequence: Synthetic oligonucleotide
uucuugggccuuuccggau

SEQ ID NO: 2093059 - RNA, 19 nt, Artificial Sequence
  Description of Artificial Sequence: Synthetic oligonucleotide
caccacgugggagaaagca

SEQ ID NO: 2093060 - RNA, 19 nt, Artificial Sequence
  Description of Artificial Sequence: Synthetic oligonucleotide
aagggcccaucugggagca

SEQ ID NO: 2093061 - RNA, 19 nt, Artificial Sequence
  Description of Artificial Sequence: Synthetic oligonucleotide
gccaacaacugcucccgcc

SEQ ID NO: 2093062 - RNA, 19 nt, Artificial Sequence
  Description of Artificial Sequence: Synthetic oligonucleotide
gaugggugaguggggcccc

SEQ ID NO: 2093063 - RNA, 19 nt, Artificial Sequence
  Description of Artificial Sequence: Synthetic oligonucleotide
ccugugacuucugagccag

SEQ ID NO: 2093064 - RNA, 19 nt, Artificial Sequence
  Description of Artificial Sequence: Synthetic oligonucleotide
uccgggaguccuccagcac

SEQ ID NO: 2093065 - RNA, 19 nt, Artificial Sequence
  Description of Artificial Sequence: Synthetic oligonucleotide
augaacucuguccgaucua

SEQ ID NO: 2093066 - RNA, 19 nt, Artificial Sequence
  Description of Artificial Sequence: Synthetic oligonucleotide
cccaguuaucugagaauag

SEQ ID NO: 2093067 - RNA, 19 nt, Artificial Sequence
  Description of Artificial Sequence: Synthetic oligonucleotide
cuguguucuccaccacgug

SEQ ID NO: 2093068 - RNA, 19 nt, Artificial Sequence
  Description of Artificial Sequence: Synthetic oligonucleotide
ggguccccuuucuaaacug

SEQ ID NO: 2093069 - RNA, 19 nt, Artificial Sequence
  Description of Artificial Sequence: Synthetic oligonucleotide
cacgaucuuugggaaucgc

SEQ ID NO: 2093070 - RNA, 19 nt, Artificial Sequence
  Description of Artificial Sequence: Synthetic oligonucleotide
ggguaagggcccaucuggg

SEQ ID NO: 2093071 - RNA, 19 nt, Artificial Sequence
  Description of Artificial Sequence: Synthetic oligonucleotide
ggugcacgaucuuugggaa

SEQ ID NO: 2093072 - RNA, 19 nt, Artificial Sequence
  Description of Artificial Sequence: Synthetic oligonucleotide
gaauagagaucauguucuu

SEQ ID NO: 2093073 - RNA, 19 nt, Artificial Sequence
  Description of Artificial Sequence: Synthetic oligonucleotide
uccccaucuggaaguggau

SEQ ID NO: 2093074 - RNA, 19 nt, Artificial Sequence
  Description of Artificial Sequence: Synthetic oligonucleotide
guagagacaacaaguugau

SEQ ID NO: 2093075 - RNA, 19 nt, Artificial Sequence
  Description of Artificial Sequence: Synthetic oligonucleotide
gguaagggcccaucuggga

SEQ ID NO: 2093076 - RNA, 19 nt, Artificial Sequence
  Description of Artificial Sequence: Synthetic oligonucleotide
cacuguccgggaguccucc

SEQ ID NO: 2093077 - RNA, 19 nt, Artificial Sequence
  Description of Artificial Sequence: Synthetic oligonucleotide
cagcuucucauccuggggu

SEQ ID NO: 2093078 - RNA, 19 nt, Artificial Sequence
  Description of Artificial Sequence: Synthetic oligonucleotide
ucuuuccgucucuccuccu

SEQ ID NO: 2093079 - RNA, 19 nt, Artificial Sequence
  Description of Artificial Sequence: Synthetic oligonucleotide
ucuugaggcuuggguccag

SEQ ID NO: 2093080 - RNA, 19 nt, Artificial Sequence
  Description of Artificial Sequence: Synthetic oligonucleotide
ggaaucgcagcaccacguc

SEQ ID NO: 2093081 - RNA, 19 nt, Artificial Sequence
  Description of Artificial Sequence: Synthetic oligonucleotide
aucuugaggcuugggucca

SEQ ID NO: 2093082 - RNA, 19 nt, Artificial Sequence
  Description of Artificial Sequence: Synthetic oligonucleotide
cuggaaagggucagugcua

SEQ ID NO: 2093083 - RNA, 19 nt, Artificial Sequence
  Description of Artificial Sequence: Synthetic oligonucleotide
ggccccaaacugcuccagg

SEQ ID NO: 2093084 - RNA, 19 nt, Artificial Sequence
  Description of Artificial Sequence: Synthetic oligonucleotide
ccaguuaucugagaauaga

SEQ ID NO: 2093085 - RNA, 19 nt, Artificial Sequence
  Description of Artificial Sequence: Synthetic oligonucleotide
cugaugccccaccggauga

SEQ ID NO: 2093086 - RNA, 19 nt, Artificial Sequence
  Description of Artificial Sequence: Synthetic oligonucleotide
gaggagguuccaguuggaa

SEQ ID NO: 2093087 - RNA, 19 nt, Artificial Sequence
  Description of Artificial Sequence: Synthetic oligonucleotide
ggccccuggucaaagacac

SEQ ID NO: 2093088 - RNA, 19 nt, Artificial Sequence
  Description of Artificial Sequence: Synthetic oligonucleotide
caccuuaaagagucccuua

SEQ ID NO: 2093089 - RNA, 19 nt, Artificial Sequence
  Description of Artificial Sequence: Synthetic oligonucleotide
uugagauucuugggccuuu

SEQ ID NO: 2093090 - RNA, 19 nt, Artificial Sequence
  Description of Artificial Sequence: Synthetic oligonucleotide
aggacacuucugggucccc

SEQ ID NO: 2093091 - RNA, 19 nt, Artificial Sequence
  Description of Artificial Sequence: Synthetic oligonucleotide
guccgggaguccuccagca

SEQ ID NO: 2093092 - RNA, 19 nt, Artificial Sequence
  Description of Artificial Sequence: Synthetic oligonucleotide
agacugggaucuugagauu

SEQ ID NO: 2093093 - RNA, 19 nt, Artificial Sequence
  Description of Artificial Sequence: Synthetic oligonucleotide
agguugaggaugggugagu

SEQ ID NO: 2093094 - RNA, 19 nt, Artificial Sequence
  Description of Artificial Sequence: Synthetic oligonucleotide
gugcuuggugcugcuacac

SEQ ID NO: 2093095 - RNA, 19 nt, Artificial Sequence
  Description of Artificial Sequence: Synthetic oligonucleotide
caccugucugauugcagaa

SEQ ID NO: 2093096 - RNA, 19 nt, Artificial Sequence
  Description of Artificial Sequence: Synthetic oligonucleotide
gagguuccaguuggaauua

SEQ ID NO: 2093097 - RNA, 19 nt, Artificial Sequence
  Description of Artificial Sequence: Synthetic oligonucleotide
cuguccgaucuauuuuaaa

SEQ ID NO: 2093098 - RNA, 19 nt, Artificial Sequence
  Description of Artificial Sequence: Synthetic oligonucleotide
gcagugagugaagaagaga

SEQ ID NO: 2093099 - RNA, 19 nt, Artificial Sequence
  Description of Artificial Sequence: Synthetic oligonucleotide
cugucugauugcagaagcu

SEQ ID NO: 2093100 - RNA, 19 nt, Artificial Sequence
  Description of Artificial Sequence: Synthetic oligonucleotide
ggggccccuggucaaagac

SEQ ID NO: 2093101 - RNA, 19 nt, Artificial Sequence
  Description of Artificial Sequence: Synthetic oligonucleotide
cgaucuauuuuaaaugggu

SEQ ID NO: 2093102 - RNA, 19 nt, Artificial Sequence
  Description of Artificial Sequence: Synthetic oligonucleotide
ccccaaacugcuccagggc

SEQ ID NO: 2093103 - RNA, 19 nt, Artificial Sequence
  Description of Artificial Sequence: Synthetic oligonucleotide
cauuggcagcagugagcac

SEQ ID NO: 2093104 - RNA, 19 nt, Artificial Sequence
  Description of Artificial Sequence: Synthetic oligonucleotide
ugggugccugugacuucug

SEQ ID NO: 2093105 - RNA, 19 nt, Artificial Sequence
  Description of Artificial Sequence: Synthetic oligonucleotide
uggggccccuggucaaaga

SEQ ID NO: 2093106 - RNA, 19 nt, Artificial Sequence
  Description of Artificial Sequence: Synthetic oligonucleotide
acgugggagaaagcauccu

SEQ ID NO: 2093107 - RNA, 19 nt, Artificial Sequence
  Description of Artificial Sequence: Synthetic oligonucleotide
cuuuugggugccugugacu

SEQ ID NO: 2093108 - RNA, 19 nt, Artificial Sequence
  Description of Artificial Sequence: Synthetic oligonucleotide
gcacgaucuuugggaaucg

SEQ ID NO: 2093109 - RNA, 19 nt, Artificial Sequence
  Description of Artificial Sequence: Synthetic oligonucleotide
gguccaggguugucuuuug

SEQ ID NO: 2093110 - RNA, 19 nt, Artificial Sequence
  Description of Artificial Sequence: Synthetic oligonucleotide
ggaaguggauggugcucac

SEQ ID NO: 2093111 - RNA, 19 nt, Artificial Sequence
  Description of Artificial Sequence: Synthetic oligonucleotide
gccgcuucaccucaaacau

SEQ ID NO: 2093112 - RNA, 19 nt, Artificial Sequence
  Description of Artificial Sequence: Synthetic oligonucleotide
gccccaccggaugaggagg

SEQ ID NO: 2093113 - RNA, 19 nt, Artificial Sequence
  Description of Artificial Sequence: Synthetic oligonucleotide
gcugcgccagguucuucag

SEQ ID NO: 2093114 - RNA, 19 nt, Artificial Sequence
  Description of Artificial Sequence: Synthetic oligonucleotide
caaaauaguggugcacgau

SEQ ID NO: 2093115 - RNA, 19 nt, Artificial Sequence
  Description of Artificial Sequence: Synthetic oligonucleotide
cacugauccccagcuccug

SEQ ID NO: 2093116 - RNA, 19 nt, Artificial Sequence
  Description of Artificial Sequence: Synthetic oligonucleotide
ccagcaccuuaaagagucc

SEQ ID NO: 2093117 - RNA, 19 nt, Artificial Sequence
  Description of Artificial Sequence: Synthetic oligonucleotide
cucaaugauuguccccagu

SEQ ID NO: 2093118 - RNA, 19 nt, Artificial Sequence
  Description of Artificial Sequence: Synthetic oligonucleotide
gaguggggccccuggucaa

SEQ ID NO: 2093119 - RNA, 19 nt, Artificial Sequence
  Description of Artificial Sequence: Synthetic oligonucleotide
augccccaccggaugagga

SEQ ID NO: 2093120 - RNA, 19 nt, Artificial Sequence
  Description of Artificial Sequence: Synthetic oligonucleotide
cagugagcacuguccggga

SEQ ID NO: 2093121 - RNA, 19 nt, Artificial Sequence
  Description of Artificial Sequence: Synthetic oligonucleotide
ccacguccccaaagaaggc

SEQ ID NO: 2093122 - RNA, 19 nt, Artificial Sequence
  Description of Artificial Sequence: Synthetic oligonucleotide
guggggccccuggucaaag

SEQ ID NO: 2093123 - RNA, 19 nt, Artificial Sequence
  Description of Artificial Sequence: Synthetic oligonucleotide
cagagucuuucucacugau

SEQ ID NO: 2093124 - RNA, 19 nt, Artificial Sequence
  Description of Artificial Sequence: Synthetic oligonucleotide
caaggugagggcagccccu

SEQ ID NO: 2093125 - RNA, 19 nt, Artificial Sequence
  Description of Artificial Sequence: Synthetic oligonucleotide
caucagguugaggaugggu

SEQ ID NO: 2093126 - RNA, 19 nt, Artificial Sequence
  Description of Artificial Sequence: Synthetic oligonucleotide
gagcacuguccgggagucc

SEQ ID NO: 2093127 - RNA, 19 nt, Artificial Sequence
  Description of Artificial Sequence: Synthetic oligonucleotide
gcagcgcaaggugagggca

SEQ ID NO: 2093128 - RNA, 19 nt, Artificial Sequence
  Description of Artificial Sequence: Synthetic oligonucleotide
agcugaugccccaccggau

SEQ ID NO: 2093129 - RNA, 19 nt, Artificial Sequence
  Description of Artificial Sequence: Synthetic oligonucleotide
gccugugacuucugagcca

SEQ ID NO: 2093130 - RNA, 19 nt, Artificial Sequence
  Description of Artificial Sequence: Synthetic oligonucleotide
gccggcagcgcaaggugag

SEQ ID NO: 2093131 - RNA, 19 nt, Artificial Sequence
  Description of Artificial Sequence: Synthetic oligonucleotide
ucgcagcaccacgucccca

SEQ ID NO: 2093132 - RNA, 19 nt, Artificial Sequence
  Description of Artificial Sequence: Synthetic oligonucleotide
aucugagaauagagaucau

SEQ ID NO: 2093133 - RNA, 19 nt, Artificial Sequence
  Description of Artificial Sequence: Synthetic oligonucleotide
ccccaguuaucugagaaua

SEQ ID NO: 2093134 - RNA, 19 nt, Artificial Sequence
  Description of Artificial Sequence: Synthetic oligonucleotide
ccggaugaggagguuccag

SEQ ID NO: 2093135 - RNA, 19 nt, Artificial Sequence
  Description of Artificial Sequence: Synthetic oligonucleotide
cacguccccaaagaaggcu

SEQ ID NO: 2093136 - RNA, 19 nt, Artificial Sequence
  Description of Artificial Sequence: Synthetic oligonucleotide
ggaguccuccagcaccuua

SEQ ID NO: 2093137 - RNA, 19 nt, Artificial Sequence
  Description of Artificial Sequence: Synthetic oligonucleotide
cuuuccgucucuccuccuu

SEQ ID NO: 2093138 - RNA, 19 nt, Artificial Sequence
  Description of Artificial Sequence: Synthetic oligonucleotide
gacuucugagccagacaau

SEQ ID NO: 2093139 - RNA, 19 nt, Artificial Sequence
  Description of Artificial Sequence: Synthetic oligonucleotide
gcagccccucggcaugcag

SEQ ID NO: 2093140 - RNA, 19 nt, Artificial Sequence
  Description of Artificial Sequence: Synthetic oligonucleotide
gcucccgccgcuucaccuc

SEQ ID NO: 2093141 - RNA, 19 nt, Artificial Sequence
  Description of Artificial Sequence: Synthetic oligonucleotide
aguggggccccuggucaaa

SEQ ID NO: 2093142 - RNA, 19 nt, Artificial Sequence
  Description of Artificial Sequence: Synthetic oligonucleotide
cuugagauucuugggccuu

SEQ ID NO: 2093143 - RNA, 19 nt, Artificial Sequence
  Description of Artificial Sequence: Synthetic oligonucleotide
ccggaucucuuuccgucuc

SEQ ID NO: 2093144 - RNA, 19 nt, Artificial Sequence
  Description of Artificial Sequence: Synthetic oligonucleotide
gggcuacaacucagacugg

SEQ ID NO: 2093145 - RNA, 19 nt, Artificial Sequence
  Description of Artificial Sequence: Synthetic oligonucleotide
ccaccggaugaggagguuc

SEQ ID NO: 2093146 - RNA, 19 nt, Artificial Sequence
  Description of Artificial Sequence: Synthetic oligonucleotide
ccgcuucaccucaaacauc

SEQ ID NO: 2093147 - RNA, 19 nt, Artificial Sequence
  Description of Artificial Sequence: Synthetic oligonucleotide
gggccccuggucaaagaca

SEQ ID NO: 2093148 - RNA, 19 nt, Artificial Sequence
  Description of Artificial Sequence: Synthetic oligonucleotide
ccaccacgugggagaaagc

SEQ ID NO: 2093149 - RNA, 19 nt, Artificial Sequence
  Description of Artificial Sequence: Synthetic oligonucleotide
gugcacgaucuuugggaau

SEQ ID NO: 2093150 - RNA, 19 nt, Artificial Sequence
  Description of Artificial Sequence: Synthetic oligonucleotide
gggcagcagugagugaaga

SEQ ID NO: 2093151 - RNA, 19 nt, Artificial Sequence
  Description of Artificial Sequence: Synthetic oligonucleotide
auggugcuuggugcugcua

SEQ ID NO: 2093152 - RNA, 19 nt, Artificial Sequence
  Description of Artificial Sequence: Synthetic oligonucleotide
agggcccaucugggagcac

SEQ ID NO: 2093153 - RNA, 19 nt, Artificial Sequence
  Description of Artificial Sequence: Synthetic oligonucleotide
ccagguucuucagugccaa

SEQ ID NO: 2093154 - RNA, 19 nt, Artificial Sequence
  Description of Artificial Sequence: Synthetic oligonucleotide
cuucuucccucaaggccuu

SEQ ID NO: 2093155 - RNA, 19 nt, Artificial Sequence
  Description of Artificial Sequence: Synthetic oligonucleotide
gcaccuuaaagagucccuu

SEQ ID NO: 2093156 - RNA, 19 nt, Artificial Sequence
  Description of Artificial Sequence: Synthetic oligonucleotide
cugaucucuuaggccccaa

SEQ ID NO: 2093157 - RNA, 19 nt, Artificial Sequence
  Description of Artificial Sequence: Synthetic oligonucleotide
gcgcaaggugagggcagcc

SEQ ID NO: 2093158 - RNA, 19 nt, Artificial Sequence
  Description of Artificial Sequence: Synthetic oligonucleotide
ccacagccacacaguugug

SEQ ID NO: 2093159 - RNA, 19 nt, Artificial Sequence
  Description of Artificial Sequence: Synthetic oligonucleotide
cgcagcaccacguccccaa

SEQ ID NO: 2093160 - RNA, 19 nt, Artificial Sequence
  Description of Artificial Sequence: Synthetic oligonucleotide
gccccuggucaaagacacc

SEQ ID NO: 2093161 - RNA, 19 nt, Artificial Sequence
  Description of Artificial Sequence: Synthetic oligonucleotide
cagcugcgccagguucuuc

SEQ ID NO: 2093162 - RNA, 19 nt, Artificial Sequence
  Description of Artificial Sequence: Synthetic oligonucleotide
cgugggagaaagcauccuu

SEQ ID NO: 2093163 - RNA, 19 nt, Artificial Sequence
  Description of Artificial Sequence: Synthetic oligonucleotide
gccgggccggcagcgcaag

SEQ ID NO: 2093164 - RNA, 19 nt, Artificial Sequence
  Description of Artificial Sequence: Synthetic oligonucleotide
ccccaccggaugaggaggu

SEQ ID NO: 2093165 - RNA, 19 nt, Artificial Sequence
  Description of Artificial Sequence: Synthetic oligonucleotide
caacucagacugggaucuu

SEQ ID NO: 2093166 - RNA, 19 nt, Artificial Sequence
  Description of Artificial Sequence: Synthetic oligonucleotide
gcucaccauggugcuuggu

SEQ ID NO: 2093167 - RNA, 19 nt, Artificial Sequence
  Description of Artificial Sequence: Synthetic oligonucleotide
cguucagcugcgccagguu

SEQ ID NO: 2093168 - RNA, 19 nt, Artificial Sequence
  Description of Artificial Sequence: Synthetic oligonucleotide
ugaauaaucaucuuggucc

SEQ ID NO: 2093169 - RNA, 19 nt, Artificial Sequence
  Description of Artificial Sequence: Synthetic oligonucleotide
aaaccucuaaaucacaaac

SEQ ID NO: 2093170 - RNA, 19 nt, Artificial Sequence
  Description of Artificial Sequence: Synthetic oligonucleotide
aaugaauccagcaacuagc

SEQ ID NO: 2093171 - RNA, 19 nt, Artificial Sequence
  Description of Artificial Sequence: Synthetic oligonucleotide
uaugacuccaccauagugg

SEQ ID NO: 2093172 - RNA, 19 nt, Artificial Sequence
  Description of Artificial Sequence: Synthetic oligonucleotide
uguugaaagaauuugcuug

SEQ ID NO: 2093173 - RNA, 19 nt, Artificial Sequence
  Description of Artificial Sequence: Synthetic oligonucleotide
ugucauugcaccaacaaug

SEQ ID NO: 2093174 - RNA, 19 nt, Artificial Sequence
  Description of Artificial Sequence: Synthetic oligonucleotide
auugcauaaaauaugacuc

SEQ ID NO: 2093175 - RNA, 19 nt, Artificial Sequence
  Description of Artificial Sequence: Synthetic oligonucleotide
uauugcauaaaauaugacu

SEQ ID NO: 2093176 - RNA, 19 nt, Artificial Sequence
  Description of Artificial Sequence: Synthetic oligonucleotide
acugcaagcaccaagaagg

SEQ ID NO: 2093177 - RNA, 19 nt, Artificial Sequence
  Description of Artificial Sequence: Synthetic oligonucleotide
aaaugaauccagcaacuag

SEQ ID NO: 2093178 - RNA, 19 nt, Artificial Sequence
  Description of Artificial Sequence: Synthetic oligonucleotide
aacuauuuuaguugugcuc

SEQ ID NO: 2093179 - RNA, 19 nt, Artificial Sequence
  Description of Artificial Sequence: Synthetic oligonucleotide
aaugauugucaugacaagg

SEQ ID NO: 2093180 - RNA, 19 nt, Artificial Sequence
  Description of Artificial Sequence: Synthetic oligonucleotide
auagcaaauccacugaauc

SEQ ID NO: 2093181 - RNA, 19 nt, Artificial Sequence
  Description of Artificial Sequence: Synthetic oligonucleotide
aguguaauaaguaaguaag

SEQ ID NO: 2093182 - RNA, 19 nt, Artificial Sequence
  Description of Artificial Sequence: Synthetic oligonucleotide
aauauugcauaaaauauga

SEQ ID NO: 2093183 - RNA, 19 nt, Artificial Sequence
  Description of Artificial Sequence: Synthetic oligonucleotide
guaauaaguaaguaagugc

SEQ ID NO: 2093184 - RNA, 19 nt, Artificial Sequence
  Description of Artificial Sequence: Synthetic oligonucleotide
uucguuaugaauaaucauc

SEQ ID NO: 2093185 - RNA, 19 nt, Artificial Sequence
  Description of Artificial Sequence: Synthetic oligonucleotide
uuuaacacuagaaaugaau

SEQ ID NO: 2093186 - RNA, 19 nt, Artificial Sequence
  Description of Artificial Sequence: Synthetic oligonucleotide
uuaacacuagaaaugaauc

SEQ ID NO: 2093187 - RNA, 19 nt, Artificial Sequence
  Description of Artificial Sequence: Synthetic oligonucleotide
aaauauugcauaaaauaug

SEQ ID NO: 2093188 - RNA, 19 nt, Artificial Sequence
  Description of Artificial Sequence: Synthetic oligonucleotide
aaaguuacaguccagugua

SEQ ID NO: 2093189 - RNA, 19 nt, Artificial Sequence
  Description of Artificial Sequence: Synthetic oligonucleotide
uguaauaaguaaguaagug

SEQ ID NO: 2093190 - RNA, 19 nt, Artificial Sequence
  Description of Artificial Sequence: Synthetic oligonucleotide
agugguuaacauugaagcc

SEQ ID NO: 2093191 - RNA, 19 nt, Artificial Sequence
  Description of Artificial Sequence: Synthetic oligonucleotide
uagaaaugaauccagcaac

SEQ ID NO: 2093192 - RNA, 19 nt, Artificial Sequence
  Description of Artificial Sequence: Synthetic oligonucleotide
  modified_base (4)..(4): a, c, u, g, unknown or other
  modified_base (16)..(16): a, c, u, g, unknown or other
uaunuuuguugaaaanaaa

SEQ ID NO: 2093193 - RNA, 19 nt, Artificial Sequence
  Description of Artificial Sequence: Synthetic oligonucleotide
uuuucucccagccauuagg

SEQ ID NO: 2093194 - RNA, 19 nt, Artificial Sequence
  Description of Artificial Sequence: Synthetic oligonucleotide
aaaccaaaggaugaaugac

SEQ ID NO: 2093195 - RNA, 19 nt, Artificial Sequence
  Description of Artificial Sequence: Synthetic oligonucleotide
agguguaugcaucuugugc

SEQ ID NO: 2093196 - RNA, 19 nt, Artificial Sequence
  Description of Artificial Sequence: Synthetic oligonucleotide
agagauagcaaauccacug

SEQ ID NO: 2093197 - RNA, 19 nt, Artificial Sequence
  Description of Artificial Sequence: Synthetic oligonucleotide
auugcaccaacaaugaucg

SEQ ID NO: 2093198 - RNA, 19 nt, Artificial Sequence
  Description of Artificial Sequence: Synthetic oligonucleotide
acaaugaucgggcagacca

SEQ ID NO: 2093199 - RNA, 19 nt, Artificial Sequence
  Description of Artificial Sequence: Synthetic oligonucleotide
aguaagugcaguuugcaug

SEQ ID NO: 2093200 - RNA, 19 nt, Artificial Sequence
  Description of Artificial Sequence: Synthetic oligonucleotide
acugaauccuacugcaagc

SEQ ID NO: 2093201 - RNA, 19 nt, Artificial Sequence
  Description of Artificial Sequence: Synthetic oligonucleotide
gguaccauaauuuauauaa

SEQ ID NO: 2093202 - RNA, 19 nt, Artificial Sequence
  Description of Artificial Sequence: Synthetic oligonucleotide
uaacacuagaaaugaaucc

SEQ ID NO: 2093203 - RNA, 19 nt, Artificial Sequence
  Description of Artificial Sequence: Synthetic oligonucleotide
ucuaauguggugauggguc

SEQ ID NO: 2093204 - RNA, 19 nt, Artificial Sequence
  Description of Artificial Sequence: Synthetic oligonucleotide
aacacuagaaaugaaucca

SEQ ID NO: 2093205 - RNA, 19 nt, Artificial Sequence
  Description of Artificial Sequence: Synthetic oligonucleotide
gaaagaauuugcuugcuuc

SEQ ID NO: 2093206 - RNA, 19 nt, Artificial Sequence
  Description of Artificial Sequence: Synthetic oligonucleotide
aaccucuaaaucacaaacc

SEQ ID NO: 2093207 - RNA, 19 nt, Artificial Sequence
  Description of Artificial Sequence: Synthetic oligonucleotide
aguaaguaagugcaguuug

SEQ ID NO: 2093208 - RNA, 19 nt, Artificial Sequence
  Description of Artificial Sequence: Synthetic oligonucleotide
ggaugaaugaccccaaugg

SEQ ID NO: 2093209 - RNA, 19 nt, Artificial Sequence
  Description of Artificial Sequence: Synthetic oligonucleotide
aaauaugacuccaccauag

SEQ ID NO: 2093210 - RNA, 19 nt, Artificial Sequence
  Description of Artificial Sequence: Synthetic oligonucleotide
uauuucuacaguaaaccuc

SEQ ID NO: 2093211 - RNA, 19 nt, Artificial Sequence
  Description of Artificial Sequence: Synthetic oligonucleotide
guuugcaugaucaaguagc

SEQ ID NO: 2093212 - RNA, 19 nt, Artificial Sequence
  Description of Artificial Sequence: Synthetic oligonucleotide
aacgccauuugaaaugccc

SEQ ID NO: 2093213 - RNA, 19 nt, Artificial Sequence
  Description of Artificial Sequence: Synthetic oligonucleotide
aauccacugaauccuacug

SEQ ID NO: 2093214 - RNA, 19 nt, Artificial Sequence
  Description of Artificial Sequence: Synthetic oligonucleotide
uuaguugugcucucuaaug

SEQ ID NO: 2093215 - RNA, 19 nt, Artificial Sequence
  Description of Artificial Sequence: Synthetic oligonucleotide
uguaggaugacaugugcca

SEQ ID NO: 2093216 - RNA, 19 nt, Artificial Sequence
  Description of Artificial Sequence: Synthetic oligonucleotide
ugaucaaguagcuuuggcu

SEQ ID NO: 2093217 - RNA, 19 nt, Artificial Sequence
  Description of Artificial Sequence: Synthetic oligonucleotide
acuauuuuaguugugcucu

SEQ ID NO: 2093218 - RNA, 19 nt, Artificial Sequence
  Description of Artificial Sequence: Synthetic oligonucleotide
acuugaugggaaucugugc

SEQ ID NO: 2093219 - RNA, 19 nt, Artificial Sequence
  Description of Artificial Sequence: Synthetic oligonucleotide
uuauuucuacaguaaaccu
